United States Patent Application Publication US 2005/0255487 A1 - sequence listing, part 41

SEQ ID NO: 1119087 - RNA, 19 nt, Homo sapiens
  misc_RNA (1)...(19): siRNA sense strand
ugagaggaaugauuucuuu

SEQ ID NO: 1119088 - RNA, 19 nt, Homo sapiens
  misc_RNA (1)...(19): siRNA sense strand
caauaugacugugcucuuu

SEQ ID NO: 1119089 - RNA, 19 nt, Homo sapiens
  misc_RNA (1)...(19): siRNA sense strand
aaguuuggcuuccuaauaa

SEQ ID NO: 1119090 - RNA, 19 nt, Homo sapiens
  misc_RNA (1)...(19): siRNA sense strand
gaauggauguguauguauc

SEQ ID NO: 1119091 - RNA, 19 nt, Homo sapiens
  misc_RNA (1)...(19): siRNA sense strand
cauaggcuccucugaguua

SEQ ID NO: 1119092 - RNA, 19 nt, Homo sapiens
  misc_RNA (1)...(19): siRNA sense strand
uagaauggauguguaugua

SEQ ID NO: 1119093 - RNA, 19 nt, Homo sapiens
  misc_RNA (1)...(19): siRNA sense strand
caacagcaaugaagauguc

SEQ ID NO: 1119094 - RNA, 19 nt, Homo sapiens
  misc_RNA (1)...(19): siRNA sense strand
caugauuccuuauagcuuu

SEQ ID NO: 1119095 - RNA, 19 nt, Homo sapiens
  misc_RNA (1)...(19): siRNA sense strand
agacuuacuugcugguaua

SEQ ID NO: 1119096 - RNA, 19 nt, Homo sapiens
  misc_RNA (1)...(19): siRNA sense strand
gauaugcaaugccuuucaa

SEQ ID NO: 1119097 - RNA, 19 nt, Homo sapiens
  misc_RNA (1)...(19): siRNA sense strand
ggauguguauguaucgauu

SEQ ID NO: 1119098 - RNA, 19 nt, Homo sapiens
  misc_RNA (1)...(19): siRNA sense strand
uuacaagccuucuccuuau

SEQ ID NO: 1119099 - RNA, 19 nt, Homo sapiens
  misc_RNA (1)...(19): siRNA sense strand
gaucaacguucugaaagug

SEQ ID NO: 1119100 - RNA, 19 nt, Homo sapiens
  misc_RNA (1)...(19): siRNA sense strand
gaacaugaacaucaacauc

SEQ ID NO: 1119101 - RNA, 19 nt, Homo sapiens
  misc_RNA (1)...(19): siRNA sense strand
gccaagagcucacacuuuu

SEQ ID NO: 1119102 - RNA, 19 nt, Homo sapiens
  misc_RNA (1)...(19): siRNA sense strand
uugccagucuucacaauua

SEQ ID NO: 1119103 - RNA, 19 nt, Homo sapiens
  misc_RNA (1)...(19): siRNA sense strand
cgggaaaccuacucagaaa

SEQ ID NO: 1119104 - RNA, 19 nt, Homo sapiens
  misc_RNA (1)...(19): siRNA sense strand
caacaucaccaccuucaga

SEQ ID NO: 1119105 - RNA, 19 nt, Homo sapiens
  misc_RNA (1)...(19): siRNA sense strand
gcagcucaauuacauuugu

SEQ ID NO: 1119106 - RNA, 19 nt, Homo sapiens
  misc_RNA (1)...(19): siRNA sense strand
ggaggcaggaccaauauga

SEQ ID NO: 1119107 - RNA, 19 nt, Homo sapiens
  misc_RNA (1)...(19): siRNA sense strand
ggacuggacauuggacuaa

SEQ ID NO: 1119108 - RNA, 19 nt, Homo sapiens
  misc_RNA (1)...(19): siRNA sense strand
cuacaaggaggaaagauuu

SEQ ID NO: 1119109 - RNA, 19 nt, Homo sapiens
  misc_RNA (1)...(19): siRNA sense strand
ggagaccuuucaacaggaa

SEQ ID NO: 1119110 - RNA, 19 nt, Homo sapiens
  misc_RNA (1)...(19): siRNA sense strand
ggaggaagacaacaguuug

SEQ ID NO: 1119111 - RNA, 19 nt, Homo sapiens
  misc_RNA (1)...(19): siRNA sense strand
gcuauugcuaggacuauua

SEQ ID NO: 1119112 - RNA, 19 nt, Homo sapiens
  misc_RNA (1)...(19): siRNA sense strand
ccuaaagcauaagcuguua

SEQ ID NO: 1119113 - RNA, 19 nt, Homo sapiens
  misc_RNA (1)...(19): siRNA sense strand
ugacaccaaucuacaagga

SEQ ID NO: 1119114 - RNA, 19 nt, Homo sapiens
  misc_RNA (1)...(19): siRNA sense strand
ggaaaccuacucagaaaca

SEQ ID NO: 1119115 - RNA, 19 nt, Homo sapiens
  misc_RNA (1)...(19): siRNA sense strand
ccaggauucuuuacacaga

SEQ ID NO: 1119116 - RNA, 19 nt, Homo sapiens
  misc_RNA (1)...(19): siRNA sense strand
gagacuuacuugcugguau

SEQ ID NO: 1119117 - RNA, 19 nt, Homo sapiens
  misc_RNA (1)...(19): siRNA sense strand
ccaagugccauacacagua

SEQ ID NO: 1119118 - RNA, 19 nt, Homo sapiens
  misc_RNA (1)...(19): siRNA sense strand
ugguaaaggugccucuuaa

SEQ ID NO: 1119119 - RNA, 19 nt, Homo sapiens
  misc_RNA (1)...(19): siRNA sense strand
gacaacaguuugcaucucu

SEQ ID NO: 1119120 - RNA, 19 nt, Homo sapiens
  misc_RNA (1)...(19): siRNA sense strand
gcuccuuucugcucauauu

SEQ ID NO: 1119121 - RNA, 19 nt, Homo sapiens
  misc_RNA (1)...(19): siRNA sense strand
guucuucgguaaucuaugu

SEQ ID NO: 1119122 - RNA, 19 nt, Homo sapiens
  misc_RNA (1)...(19): siRNA sense strand
aaagugagcccauucaaca

SEQ ID NO: 1119123 - RNA, 19 nt, Homo sapiens
  misc_RNA (1)...(19): siRNA sense strand
cccgaagcauccuccauua

SEQ ID NO: 1119124 - RNA, 19 nt, Homo sapiens
  misc_RNA (1)...(19): siRNA sense strand
gacauucucaucuucaauu

SEQ ID NO: 1119125 - RNA, 19 nt, Homo sapiens
  misc_RNA (1)...(19): siRNA sense strand
caugggaucuuucgucaag

SEQ ID NO: 1119126 - RNA, 19 nt, Homo sapiens
  misc_RNA (1)...(19): siRNA sense strand
caacgucauucccuaccuu

SEQ ID NO: 1119127 - RNA, 19 nt, Homo sapiens
  misc_RNA (1)...(19): siRNA sense strand
uaaacuggaucccgaagca

SEQ ID NO: 1119128 - RNA, 19 nt, Homo sapiens
  misc_RNA (1)...(19): siRNA sense strand
guaaaggugccucuuaaag

SEQ ID NO: 1119129 - RNA, 19 nt, Homo sapiens
  misc_RNA (1)...(19): siRNA sense strand
ggacuaauuaucucaguag

SEQ ID NO: 1119130 - RNA, 19 nt, Homo sapiens
  misc_RNA (1)...(19): siRNA sense strand
cugauucacugcucacauu

SEQ ID NO: 1119131 - RNA, 19 nt, Homo sapiens
  misc_RNA (1)...(19): siRNA sense strand
caucaccacuguucguuca

SEQ ID NO: 1119132 - RNA, 19 nt, Homo sapiens
  misc_RNA (1)...(19): siRNA sense strand
gccagacgcuuauugacau

SEQ ID NO: 1119133 - RNA, 19 nt, Homo sapiens
  misc_RNA (1)...(19): siRNA sense strand
cagaaacagacaagaauga

SEQ ID NO: 1119134 - RNA, 19 nt, Homo sapiens
  misc_RNA (1)...(19): siRNA sense strand
uaaaagagguugauauggu

SEQ ID NO: 1119135 - RNA, 19 nt, Homo sapiens
  misc_RNA (1)...(19): siRNA sense strand
ggacauuggacuaauuauc

SEQ ID NO: 1119136 - RNA, 19 nt, Homo sapiens
  misc_RNA (1)...(19): siRNA sense strand
caggauaaaucuggaggaa

SEQ ID NO: 1119137 - RNA, 19 nt, Homo sapiens
  misc_RNA (1)...(19): siRNA sense strand
caacugauuccuccucuca

SEQ ID NO: 1119138 - RNA, 19 nt, Homo sapiens
  misc_RNA (1)...(19): siRNA sense strand
cagcguuacuggccuaugu

SEQ ID NO: 1119139 - RNA, 19 nt, Homo sapiens
  misc_RNA (1)...(19): siRNA sense strand
agacugagccugagaugga

SEQ ID NO: 1119140 - RNA, 19 nt, Homo sapiens
  misc_RNA (1)...(19): siRNA sense strand
uuuacaagccuucuccuua

SEQ ID NO: 1119141 - RNA, 19 nt, Homo sapiens
  misc_RNA (1)...(19): siRNA sense strand
ugagugcucugcugaucaa

SEQ ID NO: 1119142 - RNA, 19 nt, Homo sapiens
  misc_RNA (1)...(19): siRNA sense strand
gcugaucaacguucugaaa

SEQ ID NO: 1119143 - RNA, 19 nt, Homo sapiens
  misc_RNA (1)...(19): siRNA sense strand
aaacagacaagaaugacaa

SEQ ID NO: 1119144 - RNA, 19 nt, Homo sapiens
  misc_RNA (1)...(19): siRNA sense strand
ccuaacaccaacauuuaua

SEQ ID NO: 1119145 - RNA, 19 nt, Homo sapiens
  misc_RNA (1)...(19): siRNA sense strand
gacauuggacuaauuaucu

SEQ ID NO: 1119146 - RNA, 19 nt, Homo sapiens
  misc_RNA (1)...(19): siRNA sense strand
gaaagugagcccauucaac

SEQ ID NO: 1119147 - RNA, 19 nt, Homo sapiens
  misc_RNA (1)...(19): siRNA sense strand
gguaaaggugccucuuaaa

SEQ ID NO: 1119148 - RNA, 19 nt, Homo sapiens
  misc_RNA (1)...(19): siRNA sense strand
gucauucccuaccuugaaa

SEQ ID NO: 1119149 - RNA, 19 nt, Homo sapiens
  misc_RNA (1)...(19): siRNA sense strand
ucacacagagcuaagauuc

SEQ ID NO: 1119150 - RNA, 19 nt, Homo sapiens
  misc_RNA (1)...(19): siRNA sense strand
ggccaagagcucacacuuu

SEQ ID NO: 1119151 - RNA, 19 nt, Homo sapiens
  misc_RNA (1)...(19): siRNA sense strand
acaccaacauuuauagaag

SEQ ID NO: 1119152 - RNA, 19 nt, Homo sapiens
  misc_RNA (1)...(19): siRNA sense strand
ugugcuggcugguauuauu

SEQ ID NO: 1119153 - RNA, 19 nt, Homo sapiens
  misc_RNA (1)...(19): siRNA sense strand
guuacuggccuauguauca

SEQ ID NO: 1119154 - RNA, 19 nt, Homo sapiens
  misc_RNA (1)...(19): siRNA sense strand
aaaagagguugauauggua

SEQ ID NO: 1119155 - RNA, 19 nt, Homo sapiens
  misc_RNA (1)...(19): siRNA sense strand
ucccuaacaccaacauuua

SEQ ID NO: 1119156 - RNA, 19 nt, Homo sapiens
  misc_RNA (1)...(19): siRNA sense strand
ucaauuccaaccaggauuu

SEQ ID NO: 1119157 - RNA, 19 nt, Homo sapiens
  misc_RNA (1)...(19): siRNA sense strand
gagcagcaguuuucuagga

SEQ ID NO: 1119158 - RNA, 19 nt, Homo sapiens
  misc_RNA (1)...(19): siRNA sense strand
gaaacagacaagaaugaca

SEQ ID NO: 1119159 - RNA, 19 nt, Homo sapiens
  misc_RNA (1)...(19): siRNA sense strand
gaggaaugauuucuuugac

SEQ ID NO: 1119160 - RNA, 19 nt, Homo sapiens
  misc_RNA (1)...(19): siRNA sense strand
gggugucacucuuccauag

SEQ ID NO: 1119161 - RNA, 19 nt, Homo sapiens
  misc_RNA (1)...(19): siRNA sense strand
uaucguccgugucucagaa

SEQ ID NO: 1119162 - RNA, 19 nt, Homo sapiens
  misc_RNA (1)...(19): siRNA sense strand
ucucaguaguuucugcuuu

SEQ ID NO: 1119163 - RNA, 19 nt, Homo sapiens
  misc_RNA (1)...(19): siRNA sense strand
gauguuaagcgugaaguau

SEQ ID NO: 1119164 - RNA, 19 nt, Homo sapiens
  misc_RNA (1)...(19): siRNA sense strand
gucauaggcuccucugagu

SEQ ID NO: 1119165 - RNA, 19 nt, Homo sapiens
  misc_RNA (1)...(19): siRNA sense strand
gauguguauguaucgauua

SEQ ID NO: 1119166 - RNA, 19 nt, Homo sapiens
  misc_RNA (1)...(19): siRNA sense strand
uagaagaggagucggaguu

SEQ ID NO: 1119167 - RNA, 19 nt, Homo sapiens
  misc_RNA (1)...(19): siRNA sense strand
uaagacagauaugcaaugc

SEQ ID NO: 1119168 - RNA, 19 nt, Homo sapiens
  misc_RNA (1)...(19): siRNA sense strand
uacaaucuuucccuuccua

SEQ ID NO: 1119169 - RNA, 19 nt, Homo sapiens
  misc_RNA (1)...(19): siRNA sense strand
uaauucaagugacaccaau

SEQ ID NO: 1119170 - RNA, 19 nt, Homo sapiens
  misc_RNA (1)...(19): siRNA sense strand
guguauguaucgauuaaag

SEQ ID NO: 1119171 - RNA, 19 nt, Homo sapiens
  misc_RNA (1)...(19): siRNA sense strand
gagcuggaaucagaacaag

SEQ ID NO: 1119172 - RNA, 19 nt, Homo sapiens
  misc_RNA (1)...(19): siRNA sense strand
acagauaugcaaugccuuu

SEQ ID NO: 1119173 - RNA, 19 nt, Homo sapiens
  misc_RNA (1)...(19): siRNA sense strand
acucaucccuuacucagau

SEQ ID NO: 1119174 - RNA, 19 nt, Homo sapiens
  misc_RNA (1)...(19): siRNA sense strand
ccgaagaccaagugccaua

SEQ ID NO: 1119175 - RNA, 19 nt, Homo sapiens
  misc_RNA (1)...(19): siRNA sense strand
guccauugguuccuucuuc

SEQ ID NO: 1119176 - RNA, 19 nt, Homo sapiens
  misc_RNA (1)...(19): siRNA sense strand
guauguaucgauuaaagga

SEQ ID NO: 1119177 - RNA, 19 nt, Homo sapiens
  misc_RNA (1)...(19): siRNA sense strand
aguccaggcuucaucaaga

SEQ ID NO: 1119178 - RNA, 19 nt, Homo sapiens
  misc_RNA (1)...(19): siRNA sense strand
gaaagauuugcagguguuu

SEQ ID NO: 1119179 - RNA, 19 nt, Homo sapiens
  misc_RNA (1)...(19): siRNA sense strand
gguaggcgcaggugugaug

SEQ ID NO: 1119180 - RNA, 19 nt, Homo sapiens
  misc_RNA (1)...(19): siRNA sense strand
ggagcuggagccugaaaug

SEQ ID NO: 1119181 - RNA, 19 nt, Homo sapiens
  misc_RNA (1)...(19): siRNA sense strand
ggagaucacucaucccuua

SEQ ID NO: 1119182 - RNA, 19 nt, Homo sapiens
  misc_RNA (1)...(19): siRNA sense strand
ggauaaaucuggaggaaga

SEQ ID NO: 1119183 - RNA, 19 nt, Homo sapiens
  misc_RNA (1)...(19): siRNA sense strand
ccuaauaacucaucaagaa

SEQ ID NO: 1119184 - RNA, 19 nt, Homo sapiens
  misc_RNA (1)...(19): siRNA sense strand
ggaaagauuugcagguguu

SEQ ID NO: 1119185 - RNA, 19 nt, Homo sapiens
  misc_RNA (1)...(19): siRNA sense strand
gaaaccagccagacgcuua

SEQ ID NO: 1119186 - RNA, 19 nt, Homo sapiens
  misc_RNA (1)...(19): siRNA sense strand
uuucagaucuuguguguuu

SEQ ID NO: 1119187 - RNA, 19 nt, Homo sapiens
  misc_RNA (1)...(19): siRNA sense strand
ugagaggaaugauuucuuu

SEQ ID NO: 1119188 - RNA, 19 nt, Homo sapiens
  misc_RNA (1)...(19): siRNA sense strand
caauaugacugugcucuuu

SEQ ID NO: 1119189 - RNA, 19 nt, Homo sapiens
  misc_RNA (1)...(19): siRNA sense strand
aaguuuggcuuccuaauaa

SEQ ID NO: 1119190 - RNA, 19 nt, Homo sapiens
  misc_RNA (1)...(19): siRNA sense strand
gaauggauguguauguauc

SEQ ID NO: 1119191 - RNA, 19 nt, Homo sapiens
  misc_RNA (1)...(19): siRNA sense strand
cauaggcuccucugaguua

SEQ ID NO: 1119192 - RNA, 19 nt, Homo sapiens
  misc_RNA (1)...(19): siRNA sense strand
uagaauggauguguaugua

SEQ ID NO: 1119193 - RNA, 19 nt, Homo sapiens
  misc_RNA (1)...(19): siRNA sense strand
caacagcaaugaagauguc

SEQ ID NO: 1119194 - RNA, 19 nt, Homo sapiens
  misc_RNA (1)...(19): siRNA sense strand
caugauuccuuauagcuuu

SEQ ID NO: 1119195 - RNA, 19 nt, Homo sapiens
  misc_RNA (1)...(19): siRNA sense strand
agacuuacuugcugguaua

SEQ ID NO: 1119196 - RNA, 19 nt, Homo sapiens
  misc_RNA (1)...(19): siRNA sense strand
gauaugcaaugccuuucaa

SEQ ID NO: 1119197 - RNA, 19 nt, Homo sapiens
  misc_RNA (1)...(19): siRNA sense strand
ggauguguauguaucgauu

SEQ ID NO: 1119198 - RNA, 19 nt, Homo sapiens
  misc_RNA (1)...(19): siRNA sense strand
uuacaagccuucuccuuau

SEQ ID NO: 1119199 - RNA, 19 nt, Homo sapiens
  misc_RNA (1)...(19): siRNA sense strand
gaucaacguucugaaagug

SEQ ID NO: 1119200 - RNA, 19 nt, Homo sapiens
  misc_RNA (1)...(19): siRNA sense strand
gaacaugaacaucaacauc

SEQ ID NO: 1119201 - RNA, 19 nt, Homo sapiens
  misc_RNA (1)...(19): siRNA sense strand
gccaagagcucacacuuuu

SEQ ID NO: 1119202 - RNA, 19 nt, Homo sapiens
  misc_RNA (1)...(19): siRNA sense strand
uugccagucuucacaauua

SEQ ID NO: 1119203 - RNA, 19 nt, Homo sapiens
  misc_RNA (1)...(19): siRNA sense strand
cgggaaaccuacucagaaa

SEQ ID NO: 1119204 - RNA, 19 nt, Homo sapiens
  misc_RNA (1)...(19): siRNA sense strand
caacaucaccaccuucaga

SEQ ID NO: 1119205 - RNA, 19 nt, Homo sapiens
  misc_RNA (1)...(19): siRNA sense strand
gcagcucaauuacauuugu

SEQ ID NO: 1119206 - RNA, 19 nt, Homo sapiens
  misc_RNA (1)...(19): siRNA sense strand
ggaggcaggaccaauauga

SEQ ID NO: 1119207 - RNA, 19 nt, Homo sapiens
  misc_RNA (1)...(19): siRNA sense strand
ggacuggacauuggacuaa

SEQ ID NO: 1119208 - RNA, 19 nt, Homo sapiens
  misc_RNA (1)...(19): siRNA sense strand
cuacaaggaggaaagauuu

SEQ ID NO: 1119209 - RNA, 19 nt, Homo sapiens
  misc_RNA (1)...(19): siRNA sense strand
ggagaccuuucaacaggaa

SEQ ID NO: 1119210 - RNA, 19 nt, Homo sapiens
  misc_RNA (1)...(19): siRNA sense strand
ggaggaagacaacaguuug

SEQ ID NO: 1119211 - RNA, 19 nt, Homo sapiens
  misc_RNA (1)...(19): siRNA sense strand
gcuauugcuaggacuauua

SEQ ID NO: 1119212 - RNA, 19 nt, Homo sapiens
  misc_RNA (1)...(19): siRNA sense strand
ccuaaagcauaagcuguua

SEQ ID NO: 1119213 - RNA, 19 nt, Homo sapiens
  misc_RNA (1)...(19): siRNA sense strand
ugacaccaaucuacaagga

SEQ ID NO: 1119214 - RNA, 19 nt, Homo sapiens
  misc_RNA (1)...(19): siRNA sense strand
ggaaaccuacucagaaaca

SEQ ID NO: 1119215 - RNA, 19 nt, Homo sapiens
  misc_RNA (1)...(19): siRNA sense strand
ccaggauucuuuacacaga

SEQ ID NO: 1119216 - RNA, 19 nt, Homo sapiens
  misc_RNA (1)...(19): siRNA sense strand
gagacuuacuugcugguau

SEQ ID NO: 1119217 - RNA, 19 nt, Homo sapiens
  misc_RNA (1)...(19): siRNA sense strand
ccaagugccauacacagua

SEQ ID NO: 1119218 - RNA, 19 nt, Homo sapiens
  misc_RNA (1)...(19): siRNA sense strand
ugguaaaggugccucuuaa

SEQ ID NO: 1119219 - RNA, 19 nt, Homo sapiens
  misc_RNA (1)...(19): siRNA sense strand
gacaacaguuugcaucucu

SEQ ID NO: 1119220 - RNA, 19 nt, Homo sapiens
  misc_RNA (1)...(19): siRNA sense strand
gcuccuuucugcucauauu

SEQ ID NO: 1119221 - RNA, 19 nt, Homo sapiens
  misc_RNA (1)...(19): siRNA sense strand
guucuucgguaaucuaugu

SEQ ID NO: 1119222 - RNA, 19 nt, Homo sapiens
  misc_RNA (1)...(19): siRNA sense strand
aaagugagcccauucaaca

SEQ ID NO: 1119223 - RNA, 19 nt, Homo sapiens
  misc_RNA (1)...(19): siRNA sense strand
cccgaagcauccuccauua

SEQ ID NO: 1119224 - RNA, 19 nt, Homo sapiens
  misc_RNA (1)...(19): siRNA sense strand
gacauucucaucuucaauu

SEQ ID NO: 1119225 - RNA, 19 nt, Homo sapiens
  misc_RNA (1)...(19): siRNA sense strand
caugggaucuuucgucaag

SEQ ID NO: 1119226 - RNA, 19 nt, Homo sapiens
  misc_RNA (1)...(19): siRNA sense strand
caacgucauucccuaccuu

SEQ ID NO: 1119227 - RNA, 19 nt, Homo sapiens
  misc_RNA (1)...(19): siRNA sense strand
uaaacuggaucccgaagca

SEQ ID NO: 1119228 - RNA, 19 nt, Homo sapiens
  misc_RNA (1)...(19): siRNA sense strand
guaaaggugccucuuaaag

SEQ ID NO: 1119229 - RNA, 19 nt, Homo sapiens
  misc_RNA (1)...(19): siRNA sense strand
ggacuaauuaucucaguag

SEQ ID NO: 1119230 - RNA, 19 nt, Homo sapiens
  misc_RNA (1)...(19): siRNA sense strand
cugauucacugcucacauu

SEQ ID NO: 1119231 - RNA, 19 nt, Homo sapiens
  misc_RNA (1)...(19): siRNA sense strand
caucaccacuguucguuca

SEQ ID NO: 1119232 - RNA, 19 nt, Homo sapiens
  misc_RNA (1)...(19): siRNA sense strand
gccagacgcuuauugacau

SEQ ID NO: 1119233 - RNA, 19 nt, Homo sapiens
  misc_RNA (1)...(19): siRNA sense strand
cagaaacagacaagaauga

SEQ ID NO: 1119234 - RNA, 19 nt, Homo sapiens
  misc_RNA (1)...(19): siRNA sense strand
uaaaagagguugauauggu

SEQ ID NO: 1119235 - RNA, 19 nt, Homo sapiens
  misc_RNA (1)...(19): siRNA sense strand
ggacauuggacuaauuauc

SEQ ID NO: 1119236 - RNA, 19 nt, Homo sapiens
  misc_RNA (1)...(19): siRNA sense strand
caggauaaaucuggaggaa

SEQ ID NO: 1119237 - RNA, 19 nt, Homo sapiens
  misc_RNA (1)...(19): siRNA sense strand
caacugauuccuccucuca

SEQ ID NO: 1119238 - RNA, 19 nt, Homo sapiens
  misc_RNA (1)...(19): siRNA sense strand
cagcguuacuggccuaugu

SEQ ID NO: 1119239 - RNA, 19 nt, Homo sapiens
  misc_RNA (1)...(19): siRNA sense strand
agacugagccugagaugga

SEQ ID NO: 1119240 - RNA, 19 nt, Homo sapiens
  misc_RNA (1)...(19): siRNA sense strand
uuuacaagccuucuccuua

SEQ ID NO: 1119241 - RNA, 19 nt, Homo sapiens
  misc_RNA (1)...(19): siRNA sense strand
ugagugcucugcugaucaa

SEQ ID NO: 1119242 - RNA, 19 nt, Homo sapiens
  misc_RNA (1)...(19): siRNA sense strand
gcugaucaacguucugaaa

SEQ ID NO: 1119243 - RNA, 19 nt, Homo sapiens
  misc_RNA (1)...(19): siRNA sense strand
aaacagacaagaaugacaa

SEQ ID NO: 1119244 - RNA, 19 nt, Homo sapiens
  misc_RNA (1)...(19): siRNA sense strand
ccuaacaccaacauuuaua

SEQ ID NO: 1119245 - RNA, 19 nt, Homo sapiens
  misc_RNA (1)...(19): siRNA sense strand
gacauuggacuaauuaucu

SEQ ID NO: 1119246 - RNA, 19 nt, Homo sapiens
  misc_RNA (1)...(19): siRNA sense strand
gaaagugagcccauucaac

SEQ ID NO: 1119247 - RNA, 19 nt, Homo sapiens
  misc_RNA (1)...(19): siRNA sense strand
gguaaaggugccucuuaaa

SEQ ID NO: 1119248 - RNA, 19 nt, Homo sapiens
  misc_RNA (1)...(19): siRNA sense strand
gucauucccuaccuugaaa

SEQ ID NO: 1119249 - RNA, 19 nt, Homo sapiens
  misc_RNA (1)...(19): siRNA sense strand
ucacacagagcuaagauuc

SEQ ID NO: 1119250 - RNA, 19 nt, Homo sapiens
  misc_RNA (1)...(19): siRNA sense strand
ggccaagagcucacacuuu

SEQ ID NO: 1119251 - RNA, 19 nt, Homo sapiens
  misc_RNA (1)...(19): siRNA sense strand
acaccaacauuuauagaag

SEQ ID NO: 1119252 - RNA, 19 nt, Homo sapiens
  misc_RNA (1)...(19): siRNA sense strand
ugugcuggcugguauuauu

SEQ ID NO: 1119253 - RNA, 19 nt, Homo sapiens
  misc_RNA (1)...(19): siRNA sense strand
guuacuggccuauguauca

SEQ ID NO: 1119254 - RNA, 19 nt, Homo sapiens
  misc_RNA (1)...(19): siRNA sense strand
aaaagagguugauauggua

SEQ ID NO: 1119255 - RNA, 19 nt, Homo sapiens
  misc_RNA (1)...(19): siRNA sense strand
ucccuaacaccaacauuua

SEQ ID NO: 1119256 - RNA, 19 nt, Homo sapiens
  misc_RNA (1)...(19): siRNA sense strand
ucaauuccaaccaggauuu

SEQ ID NO: 1119257 - RNA, 19 nt, Homo sapiens
  misc_RNA (1)...(19): siRNA sense strand
gagcagcaguuuucuagga

SEQ ID NO: 1119258 - RNA, 19 nt, Homo sapiens
  misc_RNA (1)...(19): siRNA sense strand
gaaacagacaagaaugaca

SEQ ID NO: 1119259 - RNA, 19 nt, Homo sapiens
  misc_RNA (1)...(19): siRNA sense strand
gaggaaugauuucuuugac

SEQ ID NO: 1119260 - RNA, 19 nt, Homo sapiens
  misc_RNA (1)...(19): siRNA sense strand
gggugucacucuuccauag

SEQ ID NO: 1119261 - RNA, 19 nt, Homo sapiens
  misc_RNA (1)...(19): siRNA sense strand
uaucguccgugucucagaa

SEQ ID NO: 1119262 - RNA, 19 nt, Homo sapiens
  misc_RNA (1)...(19): siRNA sense strand
ucucaguaguuucugcuuu

SEQ ID NO: 1119263 - RNA, 19 nt, Homo sapiens
  misc_RNA (1)...(19): siRNA sense strand
gauguuaagcgugaaguau

SEQ ID NO: 1119264 - RNA, 19 nt, Homo sapiens
  misc_RNA (1)...(19): siRNA sense strand
gucauaggcuccucugagu

SEQ ID NO: 1119265 - RNA, 19 nt, Homo sapiens
  misc_RNA (1)...(19): siRNA sense strand
gauguguauguaucgauua

SEQ ID NO: 1119266 - RNA, 19 nt, Homo sapiens
  misc_RNA (1)...(19): siRNA sense strand
uagaagaggagucggaguu

SEQ ID NO: 1119267 - RNA, 19 nt, Homo sapiens
  misc_RNA (1)...(19): siRNA sense strand
uaagacagauaugcaaugc

SEQ ID NO: 1119268 - RNA, 19 nt, Homo sapiens
  misc_RNA (1)...(19): siRNA sense strand
uacaaucuuucccuuccua

SEQ ID NO: 1119269 - RNA, 19 nt, Homo sapiens
  misc_RNA (1)...(19): siRNA sense strand
uaauucaagugacaccaau

SEQ ID NO: 1119270 - RNA, 19 nt, Homo sapiens
  misc_RNA (1)...(19): siRNA sense strand
guguauguaucgauuaaag

SEQ ID NO: 1119271 - RNA, 19 nt, Homo sapiens
  misc_RNA (1)...(19): siRNA sense strand
gagcuggaaucagaacaag

SEQ ID NO: 1119272 - RNA, 19 nt, Homo sapiens
  misc_RNA (1)...(19): siRNA sense strand
acagauaugcaaugccuuu

SEQ ID NO: 1119273 - RNA, 19 nt, Homo sapiens
  misc_RNA (1)...(19): siRNA sense strand
acucaucccuuacucagau

SEQ ID NO: 1119274 - RNA, 19 nt, Homo sapiens
  misc_RNA (1)...(19): siRNA sense strand
ccgaagaccaagugccaua

SEQ ID NO: 1119275 - RNA, 19 nt, Homo sapiens
  misc_RNA (1)...(19): siRNA sense strand
guccauugguuccuucuuc

SEQ ID NO: 1119276 - RNA, 19 nt, Homo sapiens
  misc_RNA (1)...(19): siRNA sense strand
guauguaucgauuaaagga

SEQ ID NO: 1119277 - RNA, 19 nt, Homo sapiens
  misc_RNA (1)...(19): siRNA sense strand
aguccaggcuucaucaaga

SEQ ID NO: 1119278 - RNA, 19 nt, Homo sapiens
  misc_RNA (1)...(19): siRNA sense strand
gaaagauuugcagguguuu

SEQ ID NO: 1119279 - RNA, 19 nt, Homo sapiens
  misc_RNA (1)...(19): siRNA sense strand
gguaggcgcaggugugaug

SEQ ID NO: 1119280 - RNA, 19 nt, Homo sapiens
  misc_RNA (1)...(19): siRNA sense strand
ggagcuggagccugaaaug

SEQ ID NO: 1119281 - RNA, 19 nt, Homo sapiens
  misc_RNA (1)...(19): siRNA sense strand
ggagagcuauucaguguau

SEQ ID NO: 1119282 - RNA, 19 nt, Homo sapiens
  misc_RNA (1)...(19): siRNA sense strand
guacaccaguuccaaguaa

SEQ ID NO: 1119283 - RNA, 19 nt, Homo sapiens
  misc_RNA (1)...(19): siRNA sense strand
ccaagaaggcggugacuaa

SEQ ID NO: 1119284 - RNA, 19 nt, Homo sapiens
  misc_RNA (1)...(19): siRNA sense strand
ccaaggccgucaccaagua

SEQ ID NO: 1119285 - RNA, 19 nt, Homo sapiens
  misc_RNA (1)...(19): siRNA sense strand
gcuauucaguguaugugua

SEQ ID NO: 1119286 - RNA, 19 nt, Homo sapiens
  misc_RNA (1)...(19): siRNA sense strand
ugacuaaggcucagaagaa

SEQ ID NO: 1119287 - RNA, 19 nt, Homo sapiens
  misc_RNA (1)...(19): siRNA sense strand
gcaaggagagcuauucagu

SEQ ID NO: 1119288 - RNA, 19 nt, Homo sapiens
  misc_RNA (1)...(19): siRNA sense strand
aaggagagcuauucagugu

SEQ ID NO: 1119289 - RNA, 19 nt, Homo sapiens
  misc_RNA (1)...(19): siRNA sense strand
aacaagcgcucgaccauca

SEQ ID NO: 1119290 - RNA, 19 nt, Homo sapiens
  misc_RNA (1)...(19): siRNA sense strand
gcaccaaggccgucaccaa

SEQ ID NO: 1119291 - RNA, 19 nt, Homo sapiens
  misc_RNA (1)...(19): siRNA sense strand
gaagaaggacgggaagaag

SEQ ID NO: 1119292 - RNA, 19 nt, Homo sapiens
  misc_RNA (1)...(19): siRNA sense strand
gacuaaggcucagaagaag

SEQ ID NO: 1119293 - RNA, 19 nt, Homo sapiens
  misc_RNA (1)...(19): siRNA sense strand
caauggggaucaugaauuc

SEQ ID NO: 1119294 - RNA, 19 nt, Homo sapiens
  misc_RNA (1)...(19): siRNA sense strand
gcaauggggaucaugaauu

SEQ ID NO: 1119295 - RNA, 19 nt, Homo sapiens
  misc_RNA (1)...(19): siRNA sense strand
cuaaggcucagaagaagga

SEQ ID NO: 1119296 - RNA, 19 nt, Homo sapiens
  misc_RNA (1)...(19): siRNA sense strand
agaagaaggacgggaagaa

SEQ ID NO: 1119297 - RNA, 19 nt, Homo sapiens
  misc_RNA (1)...(19): siRNA sense strand
ccaaguacaccaguuccaa

SEQ ID NO: 1119298 - RNA, 19 nt, Homo sapiens
  misc_RNA (1)...(19): siRNA sense strand
acaccggcaucucuuccaa

SEQ ID NO: 1119299 - RNA, 19 nt, Homo sapiens
  misc_RNA (1)...(19): siRNA sense strand
caagaaggcggugacuaag

SEQ ID NO: 1119300 - RNA, 19 nt, Homo sapiens
  misc_RNA (1)...(19): siRNA sense strand
gccugaaccuaccaagucu

SEQ ID NO: 1119301 - RNA, 19 nt, Homo sapiens
  misc_RNA (1)...(19): siRNA sense strand
ucaccaaguacaccaguuc

SEQ ID NO: 1119302 - RNA, 19 nt, Homo sapiens
  misc_RNA (1)...(19): siRNA sense strand
ggagagcuauucaguguau

SEQ ID NO: 1119303 - RNA, 19 nt, Homo sapiens
  misc_RNA (1)...(19): siRNA sense strand
guacaccaguuccaaguaa

SEQ ID NO: 1119304 - RNA, 19 nt, Homo sapiens
  misc_RNA (1)...(19): siRNA sense strand
ccaagaaggcggugacuaa

SEQ ID NO: 1119305 - RNA, 19 nt, Homo sapiens
  misc_RNA (1)...(19): siRNA sense strand
ccaaggccgucaccaagua

SEQ ID NO: 1119306 - RNA, 19 nt, Homo sapiens
  misc_RNA (1)...(19): siRNA sense strand
gcuauucaguguaugugua

SEQ ID NO: 1119307 - RNA, 19 nt, Homo sapiens
  misc_RNA (1)...(19): siRNA sense strand
ugacuaaggcucagaagaa

SEQ ID NO: 1119308 - RNA, 19 nt, Homo sapiens
  misc_RNA (1)...(19): siRNA sense strand
gcaaggagagcuauucagu

SEQ ID NO: 1119309 - RNA, 19 nt, Homo sapiens
  misc_RNA (1)...(19): siRNA sense strand
aaggagagcuauucagugu

SEQ ID NO: 1119310 - RNA, 19 nt, Homo sapiens
  misc_RNA (1)...(19): siRNA sense strand
aacaagcgcucgaccauca

SEQ ID NO: 1119311 - RNA, 19 nt, Homo sapiens
  misc_RNA (1)...(19): siRNA sense strand
gcaccaaggccgucaccaa

SEQ ID NO: 1119312 - RNA, 19 nt, Homo sapiens
  misc_RNA (1)...(19): siRNA sense strand
gaagaaggacgggaagaag

SEQ ID NO: 1119313 - RNA, 19 nt, Homo sapiens
  misc_RNA (1)...(19): siRNA sense strand
gacuaaggcucagaagaag

SEQ ID NO: 1119314 - RNA, 19 nt, Homo sapiens
  misc_RNA (1)...(19): siRNA sense strand
caauggggaucaugaauuc

SEQ ID NO: 1119315 - RNA, 19 nt, Homo sapiens
  misc_RNA (1)...(19): siRNA sense strand
gcaauggggaucaugaauu

SEQ ID NO: 1119316 - RNA, 19 nt, Homo sapiens
  misc_RNA (1)...(19): siRNA sense strand
cuaaggcucagaagaagga

SEQ ID NO: 1119317 - RNA, 19 nt, Homo sapiens
  misc_RNA (1)...(19): siRNA sense strand
agaagaaggacgggaagaa

SEQ ID NO: 1119318 - RNA, 19 nt, Homo sapiens
  misc_RNA (1)...(19): siRNA sense strand
ccaaguacaccaguuccaa

SEQ ID NO: 1119319 - RNA, 19 nt, Homo sapiens
  misc_RNA (1)...(19): siRNA sense strand
acaccggcaucucuuccaa

SEQ ID NO: 1119320 - RNA, 19 nt, Homo sapiens
  misc_RNA (1)...(19): siRNA sense strand
caagaaggcggugacuaag

SEQ ID NO: 1119321 - RNA, 19 nt, Homo sapiens
  misc_RNA (1)...(19): siRNA sense strand
gccugaaccuaccaagucu

SEQ ID NO: 1119322 - RNA, 19 nt, Homo sapiens
  misc_RNA (1)...(19): siRNA sense strand
ucaccaaguacaccaguuc

SEQ ID NO: 1119323 - RNA, 19 nt, Homo sapiens
  misc_RNA (1)...(19): siRNA sense strand
gagaucaguuggaaagaaa

SEQ ID NO: 1119324 - RNA, 19 nt, Homo sapiens
  misc_RNA (1)...(19): siRNA sense strand
ccgaguagcugaaauuguu

SEQ ID NO: 1119325 - RNA, 19 nt, Homo sapiens
  misc_RNA (1)...(19): siRNA sense strand
ggagaucaguuggaaagaa

SEQ ID NO: 1119326 - RNA, 19 nt, Homo sapiens
  misc_RNA (1)...(19): siRNA sense strand
gaaauucccaauccaguga

SEQ ID NO: 1119327 - RNA, 19 nt, Homo sapiens
  misc_RNA (1)...(19): siRNA sense strand
ggugugaccuggaagaaau

SEQ ID NO: 1119328 - RNA, 19 nt, Homo sapiens
  misc_RNA (1)...(19): siRNA sense strand
uuguugagcugcugaaaua

SEQ ID NO: 1119329 - RNA, 19 nt, Homo sapiens
  misc_RNA (1)...(19): siRNA sense strand
gaaagaugaagaagaacaa

SEQ ID NO: 1119330 - RNA, 19 nt, Homo sapiens
  misc_RNA (1)...(19): siRNA sense strand
gaagaagaacaaauacuag

SEQ ID NO: 1119331 - RNA, 19 nt, Homo sapiens
  misc_RNA (1)...(19): siRNA sense strand
caccaaagcugcugagaac

SEQ ID NO: 1119332 - RNA, 19 nt, Homo sapiens
  misc_RNA (1)...(19): siRNA sense strand
ggaauuguucagcaaauga

SEQ ID NO: 1119333 - RNA, 19 nt, Homo sapiens
  misc_RNA (1)...(19): siRNA sense strand
ccacgugccuguagcuuca

SEQ ID NO: 1119334 - RNA, 19 nt, Homo sapiens
  misc_RNA (1)...(19): siRNA sense strand
caaccgaguagcugaaauu

SEQ ID NO: 1119335 - RNA, 19 nt, Homo sapiens
  misc_RNA (1)...(19): siRNA sense strand
gucaaaggacguuggaaua

SEQ ID NO: 1119336 - RNA, 19 nt, Homo sapiens
  misc_RNA (1)...(19): siRNA sense strand
gaacaaauacuagccaaaa

SEQ ID NO: 1119337 - RNA, 19 nt, Homo sapiens
  misc_RNA (1)...(19): siRNA sense strand
gaccuaaacaccauagaau

SEQ ID NO: 1119338 - RNA, 19 nt, Homo sapiens
  misc_RNA (1)...(19): siRNA sense strand
ccaaagcugcugagaacaa

SEQ ID NO: 1119339 - RNA, 19 nt, Homo sapiens
  misc_RNA (1)...(19): siRNA sense strand
ccagugagaaggccauaaa

SEQ ID NO: 1119340 - RNA, 19 nt, Homo sapiens
  misc_RNA (1)...(19): siRNA sense strand
gggaauuguucagcaaaug

SEQ ID NO: 1119341 - RNA, 19 nt, Homo sapiens
  misc_RNA (1)...(19): siRNA sense strand
uagcugaaauuguuuacuc

SEQ ID NO: 1119342 - RNA, 19 nt, Homo sapiens
  misc_RNA (1)...(19): siRNA sense strand
ggucaaaggacguuggaau

SEQ ID NO: 1119343 - RNA, 19 nt, Homo sapiens
  misc_RNA (1)...(19): siRNA sense strand
ccuagaugaugaugaccua

SEQ ID NO: 1119344 - RNA, 19 nt, Homo sapiens
  misc_RNA (1)...(19): siRNA sense strand
uaacugagggucucuccuu

SEQ ID NO: 1119345 - RNA, 19 nt, Homo sapiens
  misc_RNA (1)...(19): siRNA sense strand
ccuaaacaccauagaauuc

SEQ ID NO: 1119346 - RNA, 19 nt, Homo sapiens
  misc_RNA (1)...(19): siRNA sense strand
ucaaaauccucgccuacua

SEQ ID NO: 1119347 - RNA, 19 nt, Homo sapiens
  misc_RNA (1)...(19): siRNA sense strand
gaguagcugaaauuguuua

SEQ ID NO: 1119348 - RNA, 19 nt, Homo sapiens
  misc_RNA (1)...(19): siRNA sense strand
gucauggccuugcagaaau

SEQ ID NO: 1119349 - RNA, 19 nt, Homo sapiens
  misc_RNA (1)...(19): siRNA sense strand
gcugagaacaagaaguuug

SEQ ID NO: 1119350 - RNA, 19 nt, Homo sapiens
  misc_RNA (1)...(19): siRNA sense strand
caaagcugcugagaacaag

SEQ ID NO: 1119351 - RNA, 19 nt, Homo sapiens
  misc_RNA (1)...(19): siRNA sense strand
ccaaagucauuuccauugc

SEQ ID NO: 1119352 - RNA, 19 nt, Homo sapiens
  misc_RNA (1)...(19): siRNA sense strand
ucauggccuugcagaaauu

SEQ ID NO: 1119353 - RNA, 19 nt, Homo sapiens
  misc_RNA (1)...(19): siRNA sense strand
cuaagaaagaugaagaaga

SEQ ID NO: 1119354 - RNA, 19 nt, Homo sapiens
  misc_RNA (1)...(19): siRNA sense strand
gccuguagcuucaaguucu

SEQ ID NO: 1119355 - RNA, 19 nt, Homo sapiens
  misc_RNA (1)...(19): siRNA sense strand
guugagcugcugaaauauu

SEQ ID NO: 1119356 - RNA, 19 nt, Homo sapiens
  misc_RNA (1)...(19): siRNA sense strand
ugucauggccuugcagaaa

SEQ ID NO: 1119357 - RNA, 19 nt, Homo sapiens
  misc_RNA (1)...(19): siRNA sense strand
ugaccuaaacaccauagaa

SEQ ID NO: 1119358 - RNA, 19 nt, Homo sapiens
  misc_RNA (1)...(19): siRNA sense strand
gaaauauucaggagaucag

SEQ ID NO: 1119359 - RNA, 19 nt, Homo sapiens
  misc_RNA (1)...(19): siRNA sense strand
ucaccaaagcugcugagaa

SEQ ID NO: 1119360 - RNA, 19 nt, Homo sapiens
  misc_RNA (1)...(19): siRNA sense strand
aaaggacguuggaauacca

SEQ ID NO: 1119361 - RNA, 19 nt, Homo sapiens
  misc_RNA (1)...(19): siRNA sense strand
uagaugaugaugaccuaaa

SEQ ID NO: 1119362 - RNA, 19 nt, Homo sapiens
  misc_RNA (1)...(19): siRNA sense strand
uugagcugcugaaauauuc

SEQ ID NO: 1119363 - RNA, 19 nt, Homo sapiens
  misc_RNA (1)...(19): siRNA sense strand
cuaaacaccauagaauuca

SEQ ID NO: 1119364 - RNA, 19 nt, Homo sapiens
  misc_RNA (1)...(19): siRNA sense strand
caggagaucaguuggaaag

SEQ ID NO: 1119365 - RNA, 19 nt, Homo sapiens
  misc_RNA (1)...(19): siRNA sense strand
caaauacuagccaaaauug

SEQ ID NO: 1119366 - RNA, 19 nt, Homo sapiens
  misc_RNA (1)...(19): siRNA sense strand
gaugaagaagaacaaauac

SEQ ID NO: 1119367 - RNA, 19 nt, Homo sapiens
  misc_RNA (1)...(19): siRNA sense strand
cuucaaguccaaagagauu

SEQ ID NO: 1119368 - RNA, 19 nt, Homo sapiens
  misc_RNA (1)...(19): siRNA sense strand
cccaaagucauuuccauug

SEQ ID NO: 1119369 - RNA, 19 nt, Homo sapiens
  misc_RNA (1)...(19): siRNA sense strand
caggaggcuucaaguccaa

SEQ ID NO: 1119370 - RNA, 19 nt, Homo sapiens
  misc_RNA (1)...(19): siRNA sense strand
cugcugagaacaagaaguu

SEQ ID NO: 1119371 - RNA, 19 nt, Homo sapiens
  misc_RNA (1)...(19): siRNA sense strand
ccuguagcuucaaguucua

SEQ ID NO: 1119372 - RNA, 19 nt, Homo sapiens
  misc_RNA (1)...(19): siRNA sense strand
caaaggacguuggaauacc

SEQ ID NO: 1119373 - RNA, 19 nt, Homo sapiens
  misc_RNA (1)...(19): siRNA sense strand
ucaaaggacguuggaauac

SEQ ID NO: 1119374 - RNA, 19 nt, Homo sapiens
  misc_RNA (1)...(19): siRNA sense strand
ggcuucaaguccaaagaga

SEQ ID NO: 1119375 - RNA, 19 nt, Homo sapiens
  misc_RNA (1)...(19): siRNA sense strand
agaaagaugaagaagaaca

SEQ ID NO: 1119376 - RNA, 19 nt, Homo sapiens
  misc_RNA (1)...(19): siRNA sense strand
cagugggugugaccuggaa

SEQ ID NO: 1119377 - RNA, 19 nt, Homo sapiens
  misc_RNA (1)...(19): siRNA sense strand
uugcagaaauucccaaucc

SEQ ID NO: 1119378 - RNA, 19 nt, Homo sapiens
  misc_RNA (1)...(19): siRNA sense strand
ccugcucucuucucaccaa

SEQ ID NO: 1119379 - RNA, 19 nt, Homo sapiens
  misc_RNA (1)...(19): siRNA sense strand
gcucucuucucaccaaagc

SEQ ID NO: 1119380 - RNA, 19 nt, Homo sapiens
  misc_RNA (1)...(19): siRNA sense strand
ccaaccgaguagcugaaau

SEQ ID NO: 1119381 - RNA, 19 nt, Homo sapiens
  misc_RNA (1)...(19): siRNA sense strand
gaauuguucagcaaaugag

SEQ ID NO: 1119382 - RNA, 19 nt, Homo sapiens
  misc_RNA (1)...(19): siRNA sense strand
cgaguagcugaaauuguuu

SEQ ID NO: 1119383 - RNA, 19 nt, Homo sapiens
  misc_RNA (1)...(19): siRNA sense strand
gaguaguggagaaggaaga

SEQ ID NO: 1119384 - RNA, 19 nt, Homo sapiens
  misc_RNA (1)...(19): siRNA sense strand
gaggugucauggccuugca

SEQ ID NO: 1119385 - RNA, 19 nt, Homo sapiens
  misc_RNA (1)...(19): siRNA sense strand
gagaucaguuggaaagaaa

SEQ ID NO: 1119386 - RNA, 19 nt, Homo sapiens
  misc_RNA (1)...(19): siRNA sense strand
ccgaguagcugaaauuguu

SEQ ID NO: 1119387 - RNA, 19 nt, Homo sapiens
  misc_RNA (1)...(19): siRNA sense strand
ggagaucaguuggaaagaa

SEQ ID NO: 1119388 - RNA, 19 nt, Homo sapiens
  misc_RNA (1)...(19): siRNA sense strand
gaaauucccaauccaguga

SEQ ID NO: 1119389 - RNA, 19 nt, Homo sapiens
  misc_RNA (1)...(19): siRNA sense strand
ggugugaccuggaagaaau

SEQ ID NO: 1119390 - RNA, 19 nt, Homo sapiens
  misc_RNA (1)...(19): siRNA sense strand
uuguugagcugcugaaaua

SEQ ID NO: 1119391 - RNA, 19 nt, Homo sapiens
  misc_RNA (1)...(19): siRNA sense strand
gaaagaugaagaagaacaa

SEQ ID NO: 1119392 - RNA, 19 nt, Homo sapiens
  misc_RNA (1)...(19): siRNA sense strand
gaagaagaacaaauacuag

SEQ ID NO: 1119393 - RNA, 19 nt, Homo sapiens
  misc_RNA (1)...(19): siRNA sense strand
caccaaagcugcugagaac

SEQ ID NO: 1119394 - RNA, 19 nt, Homo sapiens
  misc_RNA (1)...(19): siRNA sense strand
ggaauuguucagcaaauga

SEQ ID NO: 1119395 - RNA, 19 nt, Homo sapiens
  misc_RNA (1)...(19): siRNA sense strand
ccacgugccuguagcuuca

SEQ ID NO: 1119396 - RNA, 19 nt, Homo sapiens
  misc_RNA (1)...(19): siRNA sense strand
caaccgaguagcugaaauu

SEQ ID NO: 1119397 - RNA, 19 nt, Homo sapiens
  misc_RNA (1)...(19): siRNA sense strand
gucaaaggacguuggaaua

SEQ ID NO: 1119398 - RNA, 19 nt, Homo sapiens
  misc_RNA (1)...(19): siRNA sense strand
gaacaaauacuagccaaaa

SEQ ID NO: 1119399 - RNA, 19 nt, Homo sapiens
  misc_RNA (1)...(19): siRNA sense strand
gaccuaaacaccauagaau

SEQ ID NO: 1119400 - RNA, 19 nt, Homo sapiens
  misc_RNA (1)...(19): siRNA sense strand
ccaaagcugcugagaacaa

SEQ ID NO: 1119401 - RNA, 19 nt, Homo sapiens
  misc_RNA (1)...(19): siRNA sense strand
ccagugagaaggccauaaa

SEQ ID NO: 1119402 - RNA, 19 nt, Homo sapiens
  misc_RNA (1)...(19): siRNA sense strand
gggaauuguucagcaaaug

SEQ ID NO: 1119403 - RNA, 19 nt, Homo sapiens
  misc_RNA (1)...(19): siRNA sense strand
uagcugaaauuguuuacuc

SEQ ID NO: 1119404 - RNA, 19 nt, Homo sapiens
  misc_RNA (1)...(19): siRNA sense strand
ggucaaaggacguuggaau

SEQ ID NO: 1119405 - RNA, 19 nt, Homo sapiens
  misc_RNA (1)...(19): siRNA sense strand
ccuagaugaugaugaccua

SEQ ID NO: 1119406 - RNA, 19 nt, Homo sapiens
  misc_RNA (1)...(19): siRNA sense strand
uaacugagggucucuccuu

SEQ ID NO: 1119407 - RNA, 19 nt, Homo sapiens
  misc_RNA (1)...(19): siRNA sense strand
ccuaaacaccauagaauuc

SEQ ID NO: 1119408 - RNA, 19 nt, Homo sapiens
  misc_RNA (1)...(19): siRNA sense strand
ucaaaauccucgccuacua

SEQ ID NO: 1119409 - RNA, 19 nt, Homo sapiens
  misc_RNA (1)...(19): siRNA sense strand
gaguagcugaaauuguuua

SEQ ID NO: 1119410 - RNA, 19 nt, Homo sapiens
  misc_RNA (1)...(19): siRNA sense strand
gucauggccuugcagaaau

SEQ ID NO: 1119411 - RNA, 19 nt, Homo sapiens
  misc_RNA (1)...(19): siRNA sense strand
gcugagaacaagaaguuug

SEQ ID NO: 1119412 - RNA, 19 nt, Homo sapiens
  misc_RNA (1)...(19): siRNA sense strand
caaagcugcugagaacaag

SEQ ID NO: 1119413 - RNA, 19 nt, Homo sapiens
  misc_RNA (1)...(19): siRNA sense strand
ccaaagucauuuccauugc

SEQ ID NO: 1119414 - RNA, 19 nt, Homo sapiens
  misc_RNA (1)...(19): siRNA sense strand
ucauggccuugcagaaauu

SEQ ID NO: 1119415 - RNA, 19 nt, Homo sapiens
  misc_RNA (1)...(19): siRNA sense strand
cuaagaaagaugaagaaga

SEQ ID NO: 1119416 - RNA, 19 nt, Homo sapiens
  misc_RNA (1)...(19): siRNA sense strand
gccuguagcuucaaguucu

SEQ ID NO: 1119417 - RNA, 19 nt, Homo sapiens
  misc_RNA (1)...(19): siRNA sense strand
guugagcugcugaaauauu

SEQ ID NO: 1119418 - RNA, 19 nt, Homo sapiens
  misc_RNA (1)...(19): siRNA sense strand
ugucauggccuugcagaaa

SEQ ID NO: 1119419 - RNA, 19 nt, Homo sapiens
  misc_RNA (1)...(19): siRNA sense strand
ugaccuaaacaccauagaa

SEQ ID NO: 1119420 - RNA, 19 nt, Homo sapiens
  misc_RNA (1)...(19): siRNA sense strand
gaaauauucaggagaucag

SEQ ID NO: 1119421 - RNA, 19 nt, Homo sapiens
  misc_RNA (1)...(19): siRNA sense strand
ucaccaaagcugcugagaa

SEQ ID NO: 1119422 - RNA, 19 nt, Homo sapiens
  misc_RNA (1)...(19): siRNA sense strand
aaaggacguuggaauacca

SEQ ID NO: 1119423 - RNA, 19 nt, Homo sapiens
  misc_RNA (1)...(19): siRNA sense strand
uagaugaugaugaccuaaa

SEQ ID NO: 1119424 - RNA, 19 nt, Homo sapiens
  misc_RNA (1)...(19): siRNA sense strand
uugagcugcugaaauauuc

SEQ ID NO: 1119425 - RNA, 19 nt, Homo sapiens
  misc_RNA (1)...(19): siRNA sense strand
cuaaacaccauagaauuca

SEQ ID NO: 1119426 - RNA, 19 nt, Homo sapiens
  misc_RNA (1)...(19): siRNA sense strand
caggagaucaguuggaaag

SEQ ID NO: 1119427 - RNA, 19 nt, Homo sapiens
  misc_RNA (1)...(19): siRNA sense strand
caaauacuagccaaaauug

SEQ ID NO: 1119428 - RNA, 19 nt, Homo sapiens
  misc_RNA (1)...(19): siRNA sense strand
gaugaagaagaacaaauac

SEQ ID NO: 1119429 - RNA, 19 nt, Homo sapiens
  misc_RNA (1)...(19): siRNA sense strand
cuucaaguccaaagagauu

SEQ ID NO: 1119430 - RNA, 19 nt, Homo sapiens
  misc_RNA (1)...(19): siRNA sense strand
cccaaagucauuuccauug

SEQ ID NO: 1119431 - RNA, 19 nt, Homo sapiens
  misc_RNA (1)...(19): siRNA sense strand
caggaggcuucaaguccaa

SEQ ID NO: 1119432 - RNA, 19 nt, Homo sapiens
  misc_RNA (1)...(19): siRNA sense strand
cugcugagaacaagaaguu

SEQ ID NO: 1119433 - RNA, 19 nt, Homo sapiens
  misc_RNA (1)...(19): siRNA sense strand
ccuguagcuucaaguucua

SEQ ID NO: 1119434 - RNA, 19 nt, Homo sapiens
  misc_RNA (1)...(19): siRNA sense strand
caaaggacguuggaauacc

SEQ ID NO: 1119435 - RNA, 19 nt, Homo sapiens
  misc_RNA (1)...(19): siRNA sense strand
ucaaaggacguuggaauac

SEQ ID NO: 1119436 - RNA, 19 nt, Homo sapiens
  misc_RNA (1)...(19): siRNA sense strand
ggcuucaaguccaaagaga

SEQ ID NO: 1119437 - RNA, 19 nt, Homo sapiens
  misc_RNA (1)...(19): siRNA sense strand
agaaagaugaagaagaaca

SEQ ID NO: 1119438 - RNA, 19 nt, Homo sapiens
  misc_RNA (1)...(19): siRNA sense strand
cagugggugugaccuggaa

SEQ ID NO: 1119439 - RNA, 19 nt, Homo sapiens
  misc_RNA (1)...(19): siRNA sense strand
uugcagaaauucccaaucc

SEQ ID NO: 1119440 - RNA, 19 nt, Homo sapiens
  misc_RNA (1)...(19): siRNA sense strand
ccugcucucuucucaccaa

SEQ ID NO: 1119441 - RNA, 19 nt, Homo sapiens
  misc_RNA (1)...(19): siRNA sense strand
gcucucuucucaccaaagc

SEQ ID NO: 1119442 - RNA, 19 nt, Homo sapiens
  misc_RNA (1)...(19): siRNA sense strand
ccaaccgaguagcugaaau

SEQ ID NO: 1119443 - RNA, 19 nt, Homo sapiens
  misc_RNA (1)...(19): siRNA sense strand
gaauuguucagcaaaugag

SEQ ID NO: 1119444 - RNA, 19 nt, Homo sapiens
  misc_RNA (1)...(19): siRNA sense strand
cgaguagcugaaauuguuu

SEQ ID NO: 1119445 - RNA, 19 nt, Homo sapiens
  misc_RNA (1)...(19): siRNA sense strand
gaguaguggagaaggaaga

SEQ ID NO: 1119446 - RNA, 19 nt, Homo sapiens
  misc_RNA (1)...(19): siRNA sense strand
gaggugucauggccuugca

SEQ ID NO: 1119447 - RNA, 19 nt, Homo sapiens
  misc_RNA (1)...(19): siRNA sense strand
gagaucaguuggaaagaaa

SEQ ID NO: 1119448 - RNA, 19 nt, Homo sapiens
  misc_RNA (1)...(19): siRNA sense strand
ccgaguagcugaaauuguu

SEQ ID NO: 1119449 - RNA, 19 nt, Homo sapiens
  misc_RNA (1)...(19): siRNA sense strand
ggagaucaguuggaaagaa

SEQ ID NO: 1119450 - RNA, 19 nt, Homo sapiens
  misc_RNA (1)...(19): siRNA sense strand
gaaauucccaauccaguga

SEQ ID NO: 1119451 - RNA, 19 nt, Homo sapiens
  misc_RNA (1)...(19): siRNA sense strand
ggugugaccuggaagaaau

SEQ ID NO: 1119452 - RNA, 19 nt, Homo sapiens
  misc_RNA (1)...(19): siRNA sense strand
uuguugagcugcugaaaua

SEQ ID NO: 1119453 - RNA, 19 nt, Homo sapiens
  misc_RNA (1)...(19): siRNA sense strand
gaaagaugaagaagaacaa

SEQ ID NO: 1119454 - RNA, 19 nt, Homo sapiens
  misc_RNA (1)...(19): siRNA sense strand
gaagaagaacaaauacuag

SEQ ID NO: 1119455 - RNA, 19 nt, Homo sapiens
  misc_RNA (1)...(19): siRNA sense strand
caccaaagcugcugagaac

SEQ ID NO: 1119456 - RNA, 19 nt, Homo sapiens
  misc_RNA (1)...(19): siRNA sense strand
ggaauuguucagcaaauga

SEQ ID NO: 1119457 - RNA, 19 nt, Homo sapiens
  misc_RNA (1)...(19): siRNA sense strand
ccacgugccuguagcuuca

SEQ ID NO: 1119458 - RNA, 19 nt, Homo sapiens
  misc_RNA (1)...(19): siRNA sense strand
caaccgaguagcugaaauu

SEQ ID NO: 1119459 - RNA, 19 nt, Homo sapiens
  misc_RNA (1)...(19): siRNA sense strand
gucaaaggacguuggaaua

SEQ ID NO: 1119460 - RNA, 19 nt, Homo sapiens
  misc_RNA (1)...(19): siRNA sense strand
gaacaaauacuagccaaaa

SEQ ID NO: 1119461 - RNA, 19 nt, Homo sapiens
  misc_RNA (1)...(19): siRNA sense strand
gaccuaaacaccauagaau

SEQ ID NO: 1119462 - RNA, 19 nt, Homo sapiens
  misc_RNA (1)...(19): siRNA sense strand
ccaaagcugcugagaacaa

SEQ ID NO: 1119463 - RNA, 19 nt, Homo sapiens
  misc_RNA (1)...(19): siRNA sense strand
ccagugagaaggccauaaa

SEQ ID NO: 1119464 - RNA, 19 nt, Homo sapiens
  misc_RNA (1)...(19): siRNA sense strand
gggaauuguucagcaaaug

SEQ ID NO: 1119465 - RNA, 19 nt, Homo sapiens
  misc_RNA (1)...(19): siRNA sense strand
uagcugaaauuguuuacuc

SEQ ID NO: 1119466 - RNA, 19 nt, Homo sapiens
  misc_RNA (1)...(19): siRNA sense strand
ggucaaaggacguuggaau

SEQ ID NO: 1119467 - RNA, 19 nt, Homo sapiens
  misc_RNA (1)...(19): siRNA sense strand
ccuagaugaugaugaccua

SEQ ID NO: 1119468 - RNA, 19 nt, Homo sapiens
  misc_RNA (1)...(19): siRNA sense strand
uaacugagggucucuccuu

SEQ ID NO: 1119469 - RNA, 19 nt, Homo sapiens
  misc_RNA (1)...(19): siRNA sense strand
ccuaaacaccauagaauuc

SEQ ID NO: 1119470 - RNA, 19 nt, Homo sapiens
  misc_RNA (1)...(19): siRNA sense strand
ucaaaauccucgccuacua

SEQ ID NO: 1119471 - RNA, 19 nt, Homo sapiens
  misc_RNA (1)...(19): siRNA sense strand
gaguagcugaaauuguuua

SEQ ID NO: 1119472 - RNA, 19 nt, Homo sapiens
  misc_RNA (1)...(19): siRNA sense strand
gucauggccuugcagaaau

SEQ ID NO: 1119473 - RNA, 19 nt, Homo sapiens
  misc_RNA (1)...(19): siRNA sense strand
gcugagaacaagaaguuug

SEQ ID NO: 1119474 - RNA, 19 nt, Homo sapiens
  misc_RNA (1)...(19): siRNA sense strand
caaagcugcugagaacaag

SEQ ID NO: 1119475 - RNA, 19 nt, Homo sapiens
  misc_RNA (1)...(19): siRNA sense strand
ccaaagucauuuccauugc

SEQ ID NO: 1119476 - RNA, 19 nt, Homo sapiens
  misc_RNA (1)...(19): siRNA sense strand
ucauggccuugcagaaauu

SEQ ID NO: 1119477 - RNA, 19 nt, Homo sapiens
  misc_RNA (1)...(19): siRNA sense strand
cuaagaaagaugaagaaga

SEQ ID NO: 1119478 - RNA, 19 nt, Homo sapiens
  misc_RNA (1)...(19): siRNA sense strand
gccuguagcuucaaguucu

SEQ ID NO: 1119479 - RNA, 19 nt, Homo sapiens
  misc_RNA (1)...(19): siRNA sense strand
guugagcugcugaaauauu

SEQ ID NO: 1119480 - RNA, 19 nt, Homo sapiens
  misc_RNA (1)...(19): siRNA sense strand
ugucauggccuugcagaaa

SEQ ID NO: 1119481 - RNA, 19 nt, Homo sapiens
  misc_RNA (1)...(19): siRNA sense strand
ugaccuaaacaccauagaa

SEQ ID NO: 1119482 - RNA, 19 nt, Homo sapiens
  misc_RNA (1)...(19): siRNA sense strand
gaaauauucaggagaucag

SEQ ID NO: 1119483 - RNA, 19 nt, Homo sapiens
  misc_RNA (1)...(19): siRNA sense strand
ucaccaaagcugcugagaa

SEQ ID NO: 1119484 - RNA, 19 nt, Homo sapiens
  misc_RNA (1)...(19): siRNA sense strand
aaaggacguuggaauacca

SEQ ID NO: 1119485 - RNA, 19 nt, Homo sapiens
  misc_RNA (1)...(19): siRNA sense strand
uagaugaugaugaccuaaa

SEQ ID NO: 1119486 - RNA, 19 nt, Homo sapiens
  misc_RNA (1)...(19): siRNA sense strand
uugagcugcugaaauauuc

SEQ ID NO: 1119487 - RNA, 19 nt, Homo sapiens
  misc_RNA (1)...(19): siRNA sense strand
cuaaacaccauagaauuca

SEQ ID NO: 1119488 - RNA, 19 nt, Homo sapiens
  misc_RNA (1)...(19): siRNA sense strand
caggagaucaguuggaaag

SEQ ID NO: 1119489 - RNA, 19 nt, Homo sapiens
  misc_RNA (1)...(19): siRNA sense strand
caaauacuagccaaaauug

SEQ ID NO: 1119490 - RNA, 19 nt, Homo sapiens
  misc_RNA (1)...(19): siRNA sense strand
gaugaagaagaacaaauac

SEQ ID NO: 1119491 - RNA, 19 nt, Homo sapiens
  misc_RNA (1)...(19): siRNA sense strand
cuucaaguccaaagagauu

SEQ ID NO: 1119492 - RNA, 19 nt, Homo sapiens
  misc_RNA (1)...(19): siRNA sense strand
cccaaagucauuuccauug

SEQ ID NO: 1119493 - RNA, 19 nt, Homo sapiens
  misc_RNA (1)...(19): siRNA sense strand
caggaggcuucaaguccaa

SEQ ID NO: 1119494 - RNA, 19 nt, Homo sapiens
  misc_RNA (1)...(19): siRNA sense strand
cugcugagaacaagaaguu

SEQ ID NO: 1119495 - RNA, 19 nt, Homo sapiens
  misc_RNA (1)...(19): siRNA sense strand
ccuguagcuucaaguucua

SEQ ID NO: 1119496 - RNA, 19 nt, Homo sapiens
  misc_RNA (1)...(19): siRNA sense strand
caaaggacguuggaauacc

SEQ ID NO: 1119497 - RNA, 19 nt, Homo sapiens
  misc_RNA (1)...(19): siRNA sense strand
ucaaaggacguuggaauac

SEQ ID NO: 1119498 - RNA, 19 nt, Homo sapiens
  misc_RNA (1)...(19): siRNA sense strand
ggcuucaaguccaaagaga

SEQ ID NO: 1119499 - RNA, 19 nt, Homo sapiens
  misc_RNA (1)...(19): siRNA sense strand
agaaagaugaagaagaaca

SEQ ID NO: 1119500 - RNA, 19 nt, Homo sapiens
  misc_RNA (1)...(19): siRNA sense strand
cagugggugugaccuggaa

SEQ ID NO: 1119501 - RNA, 19 nt, Homo sapiens
  misc_RNA (1)...(19): siRNA sense strand
uugcagaaauucccaaucc

SEQ ID NO: 1119502 - RNA, 19 nt, Homo sapiens
  misc_RNA (1)...(19): siRNA sense strand
ccugcucucuucucaccaa

SEQ ID NO: 1119503 - RNA, 19 nt, Homo sapiens
  misc_RNA (1)...(19): siRNA sense strand
gcucucuucucaccaaagc

SEQ ID NO: 1119504 - RNA, 19 nt, Homo sapiens
  misc_RNA (1)...(19): siRNA sense strand
ccaaccgaguagcugaaau

SEQ ID NO: 1119505 - RNA, 19 nt, Homo sapiens
  misc_RNA (1)...(19): siRNA sense strand
gaauuguucagcaaaugag

SEQ ID NO: 1119506 - RNA, 19 nt, Homo sapiens
  misc_RNA (1)...(19): siRNA sense strand
cgaguagcugaaauuguuu

SEQ ID NO: 1119507 - RNA, 19 nt, Homo sapiens
  misc_RNA (1)...(19): siRNA sense strand
gaguaguggagaaggaaga

SEQ ID NO: 1119508 - RNA, 19 nt, Homo sapiens
  misc_RNA (1)...(19): siRNA sense strand
gaggugucauggccuugca

SEQ ID NO: 1119509 - RNA, 19 nt, Homo sapiens
  misc_RNA (1)...(19): siRNA sense strand
gagaucaguuggaaagaaa

SEQ ID NO: 1119510 - RNA, 19 nt, Homo sapiens
  misc_RNA (1)...(19): siRNA sense strand
ccgaguagcugaaauuguu

SEQ ID NO: 1119511 - RNA, 19 nt, Homo sapiens
  misc_RNA (1)...(19): siRNA sense strand
ggagaucaguuggaaagaa

SEQ ID NO: 1119512 - RNA, 19 nt, Homo sapiens
  misc_RNA (1)...(19): siRNA sense strand
gaaauucccaauccaguga

SEQ ID NO: 1119513 - RNA, 19 nt, Homo sapiens
  misc_RNA (1)...(19): siRNA sense strand
ggugugaccuggaagaaau

SEQ ID NO: 1119514 - RNA, 19 nt, Homo sapiens
  misc_RNA (1)...(19): siRNA sense strand
uuguugagcugcugaaaua

SEQ ID NO: 1119515 - RNA, 19 nt, Homo sapiens
  misc_RNA (1)...(19): siRNA sense strand
gaaagaugaagaagaacaa

SEQ ID NO: 1119516 - RNA, 19 nt, Homo sapiens
  misc_RNA (1)...(19): siRNA sense strand
gaagaagaacaaauacuag

SEQ ID NO: 1119517 - RNA, 19 nt, Homo sapiens
  misc_RNA (1)...(19): siRNA sense strand
caccaaagcugcugagaac

SEQ ID NO: 1119518 - RNA, 19 nt, Homo sapiens
  misc_RNA (1)...(19): siRNA sense strand
ggaauuguucagcaaauga

SEQ ID NO: 1119519 - RNA, 19 nt, Homo sapiens
  misc_RNA (1)...(19): siRNA sense strand
ccacgugccuguagcuuca

SEQ ID NO: 1119520 - RNA, 19 nt, Homo sapiens
  misc_RNA (1)...(19): siRNA sense strand
caaccgaguagcugaaauu

SEQ ID NO: 1119521 - RNA, 19 nt, Homo sapiens
  misc_RNA (1)...(19): siRNA sense strand
gucaaaggacguuggaaua

SEQ ID NO: 1119522 - RNA, 19 nt, Homo sapiens
  misc_RNA (1)...(19): siRNA sense strand
gaacaaauacuagccaaaa

SEQ ID NO: 1119523 - RNA, 19 nt, Homo sapiens
  misc_RNA (1)...(19): siRNA sense strand
gaccuaaacaccauagaau

SEQ ID NO: 1119524 - RNA, 19 nt, Homo sapiens
  misc_RNA (1)...(19): siRNA sense strand
ccaaagcugcugagaacaa

SEQ ID NO: 1119525 - RNA, 19 nt, Homo sapiens
  misc_RNA (1)...(19): siRNA sense strand
ccagugagaaggccauaaa

SEQ ID NO: 1119526 - RNA, 19 nt, Homo sapiens
  misc_RNA (1)...(19): siRNA sense strand
gggaauuguucagcaaaug

SEQ ID NO: 1119527 - RNA, 19 nt, Homo sapiens
  misc_RNA (1)...(19): siRNA sense strand
uagcugaaauuguuuacuc

SEQ ID NO: 1119528 - RNA, 19 nt, Homo sapiens
  misc_RNA (1)...(19): siRNA sense strand
ggucaaaggacguuggaau

SEQ ID NO: 1119529 - RNA, 19 nt, Homo sapiens
  misc_RNA (1)...(19): siRNA sense strand
ccuagaugaugaugaccua

SEQ ID NO: 1119530 - RNA, 19 nt, Homo sapiens
  misc_RNA (1)...(19): siRNA sense strand
uaacugagggucucuccuu

SEQ ID NO: 1119531 - RNA, 19 nt, Homo sapiens
  misc_RNA (1)...(19): siRNA sense strand
ccuaaacaccauagaauuc

SEQ ID NO: 1119532 - RNA, 19 nt, Homo sapiens
  misc_RNA (1)...(19): siRNA sense strand
ucaaaauccucgccuacua

SEQ ID NO: 1119533 - RNA, 19 nt, Homo sapiens
  misc_RNA (1)...(19): siRNA sense strand
gaguagcugaaauuguuua

SEQ ID NO: 1119534 - RNA, 19 nt, Homo sapiens
  misc_RNA (1)...(19): siRNA sense strand
gucauggccuugcagaaau

SEQ ID NO: 1119535 - RNA, 19 nt, Homo sapiens
  misc_RNA (1)...(19): siRNA sense strand
gcugagaacaagaaguuug

SEQ ID NO: 1119536 - RNA, 19 nt, Homo sapiens
  misc_RNA (1)...(19): siRNA sense strand
caaagcugcugagaacaag

SEQ ID NO: 1119537 - RNA, 19 nt, Homo sapiens
  misc_RNA (1)...(19): siRNA sense strand
ccaaagucauuuccauugc

SEQ ID NO: 1119538 - RNA, 19 nt, Homo sapiens
  misc_RNA (1)...(19): siRNA sense strand
ucauggccuugcagaaauu

SEQ ID NO: 1119539 - RNA, 19 nt, Homo sapiens
  misc_RNA (1)...(19): siRNA sense strand
cuaagaaagaugaagaaga

SEQ ID NO: 1119540 - RNA, 19 nt, Homo sapiens
  misc_RNA (1)...(19): siRNA sense strand
gccuguagcuucaaguucu

SEQ ID NO: 1119541 - RNA, 19 nt, Homo sapiens
  misc_RNA (1)...(19): siRNA sense strand
guugagcugcugaaauauu

SEQ ID NO: 1119542 - RNA, 19 nt, Homo sapiens
  misc_RNA (1)...(19): siRNA sense strand
ugucauggccuugcagaaa

SEQ ID NO: 1119543 - RNA, 19 nt, Homo sapiens
  misc_RNA (1)...(19): siRNA sense strand
ugaccuaaacaccauagaa

SEQ ID NO: 1119544 - RNA, 19 nt, Homo sapiens
  misc_RNA (1)...(19): siRNA sense strand
gaaauauucaggagaucag

SEQ ID NO: 1119545 - RNA, 19 nt, Homo sapiens
  misc_RNA (1)...(19): siRNA sense strand
ucaccaaagcugcugagaa

SEQ ID NO: 1119546 - RNA, 19 nt, Homo sapiens
  misc_RNA (1)...(19): siRNA sense strand
aaaggacguuggaauacca

SEQ ID NO: 1119547 - RNA, 19 nt, Homo sapiens
  misc_RNA (1)...(19): siRNA sense strand
uagaugaugaugaccuaaa

SEQ ID NO: 1119548 - RNA, 19 nt, Homo sapiens
  misc_RNA (1)...(19): siRNA sense strand
uugagcugcugaaauauuc

SEQ ID NO: 1119549 - RNA, 19 nt, Homo sapiens
  misc_RNA (1)...(19): siRNA sense strand
cuaaacaccauagaauuca

SEQ ID NO: 1119550 - RNA, 19 nt, Homo sapiens
  misc_RNA (1)...(19): siRNA sense strand
caggagaucaguuggaaag

SEQ ID NO: 1119551 - RNA, 19 nt, Homo sapiens
  misc_RNA (1)...(19): siRNA sense strand
caaauacuagccaaaauug

SEQ ID NO: 1119552 - RNA, 19 nt, Homo sapiens
  misc_RNA (1)...(19): siRNA sense strand
gaugaagaagaacaaauac

SEQ ID NO: 1119553 - RNA, 19 nt, Homo sapiens
  misc_RNA (1)...(19): siRNA sense strand
cuucaaguccaaagagauu

SEQ ID NO: 1119554 - RNA, 19 nt, Homo sapiens
  misc_RNA (1)...(19): siRNA sense strand
cccaaagucauuuccauug

SEQ ID NO: 1119555 - RNA, 19 nt, Homo sapiens
  misc_RNA (1)...(19): siRNA sense strand
caggaggcuucaaguccaa

SEQ ID NO: 1119556 - RNA, 19 nt, Homo sapiens
  misc_RNA (1)...(19): siRNA sense strand
cugcugagaacaagaaguu

SEQ ID NO: 1119557 - RNA, 19 nt, Homo sapiens
  misc_RNA (1)...(19): siRNA sense strand
ccuguagcuucaaguucua

SEQ ID NO: 1119558 - RNA, 19 nt, Homo sapiens
  misc_RNA (1)...(19): siRNA sense strand
caaaggacguuggaauacc

SEQ ID NO: 1119559 - RNA, 19 nt, Homo sapiens
  misc_RNA (1)...(19): siRNA sense strand
ucaaaggacguuggaauac

SEQ ID NO: 1119560 - RNA, 19 nt, Homo sapiens
  misc_RNA (1)...(19): siRNA sense strand
ggcuucaaguccaaagaga

SEQ ID NO: 1119561 - RNA, 19 nt, Homo sapiens
  misc_RNA (1)...(19): siRNA sense strand
agaaagaugaagaagaaca

SEQ ID NO: 1119562 - RNA, 19 nt, Homo sapiens
  misc_RNA (1)...(19): siRNA sense strand
cagugggugugaccuggaa

SEQ ID NO: 1119563 - RNA, 19 nt, Homo sapiens
  misc_RNA (1)...(19): siRNA sense strand
uugcagaaauucccaaucc

SEQ ID NO: 1119564 - RNA, 19 nt, Homo sapiens
  misc_RNA (1)...(19): siRNA sense strand
ccugcucucuucucaccaa

SEQ ID NO: 1119565 - RNA, 19 nt, Homo sapiens
  misc_RNA (1)...(19): siRNA sense strand
gcucucuucucaccaaagc

SEQ ID NO: 1119566 - RNA, 19 nt, Homo sapiens
  misc_RNA (1)...(19): siRNA sense strand
ccaaccgaguagcugaaau

SEQ ID NO: 1119567 - RNA, 19 nt, Homo sapiens
  misc_RNA (1)...(19): siRNA sense strand
gaauuguucagcaaaugag

SEQ ID NO: 1119568 - RNA, 19 nt, Homo sapiens
  misc_RNA (1)...(19): siRNA sense strand
cgaguagcugaaauuguuu

SEQ ID NO: 1119569 - RNA, 19 nt, Homo sapiens
  misc_RNA (1)...(19): siRNA sense strand
gaguaguggagaaggaaga

SEQ ID NO: 1119570 - RNA, 19 nt, Homo sapiens
  misc_RNA (1)...(19): siRNA sense strand
gaggugucauggccuugca

SEQ ID NO: 1119571 - RNA, 19 nt, Homo sapiens
  misc_RNA (1)...(19): siRNA sense strand
gcaauuacuuucugguuaa

SEQ ID NO: 1119572 - RNA, 19 nt, Homo sapiens
  misc_RNA (1)...(19): siRNA sense strand
caaagaggauuucaacaga

SEQ ID NO: 1119573 - RNA, 19 nt, Homo sapiens
  misc_RNA (1)...(19): siRNA sense strand
gcaaguguuucuuaacuga

SEQ ID NO: 1119574 - RNA, 19 nt, Homo sapiens
  misc_RNA (1)...(19): siRNA sense strand
ggauuaacgucucgcaauu

SEQ ID NO: 1119575 - RNA, 19 nt, Homo sapiens
  misc_RNA (1)...(19): siRNA sense strand
gcaccagccucuagucuca

SEQ ID NO: 1119576 - RNA, 19 nt, Homo sapiens
  misc_RNA (1)...(19): siRNA sense strand
gagauccgguguccuuauu

SEQ ID NO: 1119577 - RNA, 19 nt, Homo sapiens
  misc_RNA (1)...(19): siRNA sense strand
gaaacugcuuuauccaaau

SEQ ID NO: 1119578 - RNA, 19 nt, Homo sapiens
  misc_RNA (1)...(19): siRNA sense strand
auacgaaacucaaagagaa

SEQ ID NO: 1119579 - RNA, 19 nt, Homo sapiens
  misc_RNA (1)...(19): siRNA sense strand
caacagaaacugcuuuauc

SEQ ID NO: 1119580 - RNA, 19 nt, Homo sapiens
  misc_RNA (1)...(19): siRNA sense strand
caucuacaaugcggauuua

SEQ ID NO: 1119581 - RNA, 19 nt, Homo sapiens
  misc_RNA (1)...(19): siRNA sense strand
gcaugaaggagucacauuu

SEQ ID NO: 1119582 - RNA, 19 nt, Homo sapiens
  misc_RNA (1)...(19): siRNA sense strand
agaaacugcuuuauccaaa

SEQ ID NO: 1119583 - RNA, 19 nt, Homo sapiens
  misc_RNA (1)...(19): siRNA sense strand
cgcaauuacuuucugguua

SEQ ID NO: 1119584 - RNA, 19 nt, Homo sapiens
  misc_RNA (1)...(19): siRNA sense strand
ggaaccagccgagaaauug

SEQ ID NO: 1119585 - RNA, 19 nt, Homo sapiens
  misc_RNA (1)...(19): siRNA sense strand
gaaaucggaucugcgaaca

SEQ ID NO: 1119586 - RNA, 19 nt, Homo sapiens
  misc_RNA (1)...(19): siRNA sense strand
gaacccaggcucaguaaca

SEQ ID NO: 1119587 - RNA, 19 nt, Homo sapiens
  misc_RNA (1)...(19): siRNA sense strand
gauuaacgucucgcaauua

SEQ ID NO: 1119588 - RNA, 19 nt, Homo sapiens
  misc_RNA (1)...(19): siRNA sense strand
gaagaacagagucguggaa

SEQ ID NO: 1119589 - RNA, 19 nt, Homo sapiens
  misc_RNA (1)...(19): siRNA sense strand
gaauuucuccuguuucauc

SEQ ID NO: 1119590 - RNA, 19 nt, Homo sapiens
  misc_RNA (1)...(19): siRNA sense strand
aaagaggauuucaacagaa

SEQ ID NO: 1119591 - RNA, 19 nt, Homo sapiens
  misc_RNA (1)...(19): siRNA sense strand
guaccgcugcucagaauuu

SEQ ID NO: 1119592 - RNA, 19 nt, Homo sapiens
  misc_RNA (1)...(19): siRNA sense strand
ccaggacgaugaauuuaag

SEQ ID NO: 1119593 - RNA, 19 nt, Homo sapiens
  misc_RNA (1)...(19): siRNA sense strand
ccaauucuuugauucacuu

SEQ ID NO: 1119594 - RNA, 19 nt, Homo sapiens
  misc_RNA (1)...(19): siRNA sense strand
ccgguguccuuauuacaua

SEQ ID NO: 1119595 - RNA, 19 nt, Homo sapiens
  misc_RNA (1)...(19): siRNA sense strand
cagcaaguguuucuuaacu

SEQ ID NO: 1119596 - RNA, 19 nt, Homo sapiens
  misc_RNA (1)...(19): siRNA sense strand
uaacggaaccagccgagaa

SEQ ID NO: 1119597 - RNA, 19 nt, Homo sapiens
  misc_RNA (1)...(19): siRNA sense strand
cuacaaugcggauuuaaug

SEQ ID NO: 1119598 - RNA, 19 nt, Homo sapiens
  misc_RNA (1)...(19): siRNA sense strand
uaacgucucgcaauuacuu

SEQ ID NO: 1119599 - RNA, 19 nt, Homo sapiens
  misc_RNA (1)...(19): siRNA sense strand
cccgugacguccaguauuu

SEQ ID NO: 1119600 - RNA, 19 nt, Homo sapiens
  misc_RNA (1)...(19): siRNA sense strand
ggcauccaauucuuugauu

SEQ ID NO: 1119601 - RNA, 19 nt, Homo sapiens
  misc_RNA (1)...(19): siRNA sense strand
gaaauuugucugcaugaag

SEQ ID NO: 1119602 - RNA, 19 nt, Homo sapiens
  misc_RNA (1)...(19): siRNA sense strand
gaaaggcuaccgcgaagag

SEQ ID NO: 1119603 - RNA, 19 nt, Homo sapiens
  misc_RNA (1)...(19): siRNA sense strand
ggguaccgcugcucagaau

SEQ ID NO: 1119604 - RNA, 19 nt, Homo sapiens
  misc_RNA (1)...(19): siRNA sense strand
ugaaauuugucugcaugaa

SEQ ID NO: 1119605 - RNA, 19 nt, Homo sapiens
  misc_RNA (1)...(19): siRNA sense strand
gcauccaauucuuugauuc

SEQ ID NO: 1119606 - RNA, 19 nt, Homo sapiens
  misc_RNA (1)...(19): siRNA sense strand
caagccuucugcucuguga

SEQ ID NO: 1119607 - RNA, 19 nt, Homo sapiens
  misc_RNA (1)...(19): siRNA sense strand
gauccgguguccuuauuac

SEQ ID NO: 1119608 - RNA, 19 nt, Homo sapiens
  misc_RNA (1)...(19): siRNA sense strand
cgugaauacuagucaaaga

SEQ ID NO: 1119609 - RNA, 19 nt, Homo sapiens
  misc_RNA (1)...(19): siRNA sense strand
cuucagcaaguguuucuua

SEQ ID NO: 1119610 - RNA, 19 nt, Homo sapiens
  misc_RNA (1)...(19): siRNA sense strand
gaugucaccuggauaaccu

SEQ ID NO: 1119611 - RNA, 19 nt, Homo sapiens
  misc_RNA (1)...(19): siRNA sense strand
caugaaggagucacauuug

SEQ ID NO: 1119612 - RNA, 19 nt, Homo sapiens
  misc_RNA (1)...(19): siRNA sense strand
ucaccuggauaaccuguca

SEQ ID NO: 1119613 - RNA, 19 nt, Homo sapiens
  misc_RNA (1)...(19): siRNA sense strand
ggagauccgguguccuuau

SEQ ID NO: 1119614 - RNA, 19 nt, Homo sapiens
  misc_RNA (1)...(19): siRNA sense strand
ucaaagaggauuucaacag

SEQ ID NO: 1119615 - RNA, 19 nt, Homo sapiens
  misc_RNA (1)...(19): siRNA sense strand
guacauacgaaacucaaag

SEQ ID NO: 1119616 - RNA, 19 nt, Homo sapiens
  misc_RNA (1)...(19): siRNA sense strand
augaaggagucacauuuga

SEQ ID NO: 1119617 - RNA, 19 nt, Homo sapiens
  misc_RNA (1)...(19): siRNA sense strand
cagaaacugcuuuauccaa

SEQ ID NO: 1119618 - RNA, 19 nt, Homo sapiens
  misc_RNA (1)...(19): siRNA sense strand
caaugcggauuuaaugaac

SEQ ID NO: 1119619 - RNA, 19 nt, Homo sapiens
  misc_RNA (1)...(19): siRNA sense strand
gaucaucugggaggaauuc

SEQ ID NO: 1119620 - RNA, 19 nt, Homo sapiens
  misc_RNA (1)...(19): siRNA sense strand
cauacgaaacucaaagaga

SEQ ID NO: 1119621 - RNA, 19 nt, Homo sapiens
  misc_RNA (1)...(19): siRNA sense strand
acaaugcggauuuaaugaa

SEQ ID NO: 1119622 - RNA, 19 nt, Homo sapiens
  misc_RNA (1)...(19): siRNA sense strand
ucacgugaauacuagucaa

SEQ ID NO: 1119623 - RNA, 19 nt, Homo sapiens
  misc_RNA (1)...(19): siRNA sense strand
caaccuucagcaaguguuu

SEQ ID NO: 1119624 - RNA, 19 nt, Homo sapiens
  misc_RNA (1)...(19): siRNA sense strand
ggaauucaccccagaggaa

SEQ ID NO: 1119625 - RNA, 19 nt, Homo sapiens
  misc_RNA (1)...(19): siRNA sense strand
aacagaaacugcuuuaucc

SEQ ID NO: 1119626 - RNA, 19 nt, Homo sapiens
  misc_RNA (1)...(19): siRNA sense strand
gacaagccuucugcucugu

SEQ ID NO: 1119627 - RNA, 19 nt, Homo sapiens
  misc_RNA (1)...(19): siRNA sense strand
gaaccagccgagaaauugg

SEQ ID NO: 1119628 - RNA, 19 nt, Homo sapiens
  misc_RNA (1)...(19): siRNA sense strand
aaucggaucugcgaacagu

SEQ ID NO: 1119629 - RNA, 19 nt, Homo sapiens
  misc_RNA (1)...(19): siRNA sense strand
guggaacccaggcucagua

SEQ ID NO: 1119630 - RNA, 19 nt, Homo sapiens
  misc_RNA (1)...(19): siRNA sense strand
acacaaccuucagcaagug

SEQ ID NO: 1119631 - RNA, 19 nt, Homo sapiens
  misc_RNA (1)...(19): siRNA sense strand
ugggaugucaccuggauaa

SEQ ID NO: 1119632 - RNA, 19 nt, Homo sapiens
  misc_RNA (1)...(19): siRNA sense strand
uaacugacaagaagaacag

SEQ ID NO: 1119633 - RNA, 19 nt, Homo sapiens
  misc_RNA (1)...(19): siRNA sense strand
aacacaaccuucagcaagu

SEQ ID NO: 1119634 - RNA, 19 nt, Homo sapiens
  misc_RNA (1)...(19): siRNA sense strand
acuccaggacgaugaauuu

SEQ ID NO: 1119635 - RNA, 19 nt, Homo sapiens
  misc_RNA (1)...(19): siRNA sense strand
aagcugggacugccaagaa

SEQ ID NO: 1119636 - RNA, 19 nt, Homo sapiens
  misc_RNA (1)...(19): siRNA sense strand
uucagcaaguguuucuuaa

SEQ ID NO: 1119637 - RNA, 19 nt, Homo sapiens
  misc_RNA (1)...(19): siRNA sense strand
cggaaccagccgagaaauu

SEQ ID NO: 1119638 - RNA, 19 nt, Homo sapiens
  misc_RNA (1)...(19): siRNA sense strand
gcucaguaacaacgaaugu

SEQ ID NO: 1119639 - RNA, 19 nt, Homo sapiens
  misc_RNA (1)...(19): siRNA sense strand
gaggguaccgcugcucaga

SEQ ID NO: 1119640 - RNA, 19 nt, Homo sapiens
  misc_RNA (1)...(19): siRNA sense strand
cauccaauucuuugauuca

SEQ ID NO: 1119641 - RNA, 19 nt, Homo sapiens
  misc_RNA (1)...(19): siRNA sense strand
caagaaaacacaaccuuca

SEQ ID NO: 1119642 - RNA, 19 nt, Homo sapiens
  misc_RNA (1)...(19): siRNA sense strand
uacaaugcggauuuaauga

SEQ ID NO: 1119643 - RNA, 19 nt, Homo sapiens
  misc_RNA (1)...(19): siRNA sense strand
ggaaaggcuaccgcgaaga

SEQ ID NO: 1119644 - RNA, 19 nt, Homo sapiens
  misc_RNA (1)...(19): siRNA sense strand
gggagauccgguguccuua

SEQ ID NO: 1119645 - RNA, 19 nt, Homo sapiens
  misc_RNA (1)...(19): siRNA sense strand
gcggauuuaaugaacugua

SEQ ID NO: 1119646 - RNA, 19 nt, Homo sapiens
  misc_RNA (1)...(19): siRNA sense strand
uccaggacgaugaauuuaa

SEQ ID NO: 1119647 - RNA, 19 nt, Homo sapiens
  misc_RNA (1)...(19): siRNA sense strand
cggauuuaaugaacuguac

SEQ ID NO: 1119648 - RNA, 19 nt, Homo sapiens
  misc_RNA (1)...(19): siRNA sense strand
ucaucuacaaugcggauuu

SEQ ID NO: 1119649 - RNA, 19 nt, Homo sapiens
  misc_RNA (1)...(19): siRNA sense strand
ugugggaugucaccuggau

SEQ ID NO: 1119650 - RNA, 19 nt, Homo sapiens
  misc_RNA (1)...(19): siRNA sense strand
gcaauuacuuucugguuaa

SEQ ID NO: 1119651 - RNA, 19 nt, Homo sapiens
  misc_RNA (1)...(19): siRNA sense strand
caaagaggauuucaacaga

SEQ ID NO: 1119652 - RNA, 19 nt, Homo sapiens
  misc_RNA (1)...(19): siRNA sense strand
gcaaguguuucuuaacuga

SEQ ID NO: 1119653 - RNA, 19 nt, Homo sapiens
  misc_RNA (1)...(19): siRNA sense strand
ggauuaacgucucgcaauu

SEQ ID NO: 1119654 - RNA, 19 nt, Homo sapiens
  misc_RNA (1)...(19): siRNA sense strand
gcaccagccucuagucuca

SEQ ID NO: 1119655 - RNA, 19 nt, Homo sapiens
  misc_RNA (1)...(19): siRNA sense strand
gagauccgguguccuuauu

SEQ ID NO: 1119656 - RNA, 19 nt, Homo sapiens
  misc_RNA (1)...(19): siRNA sense strand
gaaacugcuuuauccaaau

SEQ ID NO: 1119657 - RNA, 19 nt, Homo sapiens
  misc_RNA (1)...(19): siRNA sense strand
auacgaaacucaaagagaa

SEQ ID NO: 1119658 - RNA, 19 nt, Homo sapiens
  misc_RNA (1)...(19): siRNA sense strand
caacagaaacugcuuuauc

SEQ ID NO: 1119659 - RNA, 19 nt, Homo sapiens
  misc_RNA (1)...(19): siRNA sense strand
caucuacaaugcggauuua

SEQ ID NO: 1119660 - RNA, 19 nt, Homo sapiens
  misc_RNA (1)...(19): siRNA sense strand
gcaugaaggagucacauuu

SEQ ID NO: 1119661 - RNA, 19 nt, Homo sapiens
  misc_RNA (1)...(19): siRNA sense strand
agaaacugcuuuauccaaa

SEQ ID NO: 1119662 - RNA, 19 nt, Homo sapiens
  misc_RNA (1)...(19): siRNA sense strand
cgcaauuacuuucugguua

SEQ ID NO: 1119663 - RNA, 19 nt, Homo sapiens
  misc_RNA (1)...(19): siRNA sense strand
ggaaccagccgagaaauug

SEQ ID NO: 1119664 - RNA, 19 nt, Homo sapiens
  misc_RNA (1)...(19): siRNA sense strand
gaaaucggaucugcgaaca

SEQ ID NO: 1119665 - RNA, 19 nt, Homo sapiens
  misc_RNA (1)...(19): siRNA sense strand
gaacccaggcucaguaaca

SEQ ID NO: 1119666 - RNA, 19 nt, Homo sapiens
  misc_RNA (1)...(19): siRNA sense strand
gauuaacgucucgcaauua

SEQ ID NO: 1119667 - RNA, 19 nt, Homo sapiens
  misc_RNA (1)...(19): siRNA sense strand
gaagaacagagucguggaa

SEQ ID NO: 1119668 - RNA, 19 nt, Homo sapiens
  misc_RNA (1)...(19): siRNA sense strand
gaauuucuccuguuucauc

SEQ ID NO: 1119669 - RNA, 19 nt, Homo sapiens
  misc_RNA (1)...(19): siRNA sense strand
aaagaggauuucaacagaa

SEQ ID NO: 1119670 - RNA, 19 nt, Homo sapiens
  misc_RNA (1)...(19): siRNA sense strand
guaccgcugcucagaauuu

SEQ ID NO: 1119671 - RNA, 19 nt, Homo sapiens
  misc_RNA (1)...(19): siRNA sense strand
ccaggacgaugaauuuaag

SEQ ID NO: 1119672 - RNA, 19 nt, Homo sapiens
  misc_RNA (1)...(19): siRNA sense strand
ccaauucuuugauucacuu

SEQ ID NO: 1119673 - RNA, 19 nt, Homo sapiens
  misc_RNA (1)...(19): siRNA sense strand
ccgguguccuuauuacaua

SEQ ID NO: 1119674 - RNA, 19 nt, Homo sapiens
  misc_RNA (1)...(19): siRNA sense strand
cagcaaguguuucuuaacu

SEQ ID NO: 1119675 - RNA, 19 nt, Homo sapiens
  misc_RNA (1)...(19): siRNA sense strand
uaacggaaccagccgagaa

SEQ ID NO: 1119676 - RNA, 19 nt, Homo sapiens
  misc_RNA (1)...(19): siRNA sense strand
cuacaaugcggauuuaaug

SEQ ID NO: 1119677 - RNA, 19 nt, Homo sapiens
  misc_RNA (1)...(19): siRNA sense strand
uaacgucucgcaauuacuu

SEQ ID NO: 1119678 - RNA, 19 nt, Homo sapiens
  misc_RNA (1)...(19): siRNA sense strand
cccgugacguccaguauuu

SEQ ID NO: 1119679 - RNA, 19 nt, Homo sapiens
  misc_RNA (1)...(19): siRNA sense strand
ggcauccaauucuuugauu

SEQ ID NO: 1119680 - RNA, 19 nt, Homo sapiens
  misc_RNA (1)...(19): siRNA sense strand
gaaauuugucugcaugaag

SEQ ID NO: 1119681 - RNA, 19 nt, Homo sapiens
  misc_RNA (1)...(19): siRNA sense strand
gaaaggcuaccgcgaagag

SEQ ID NO: 1119682 - RNA, 19 nt, Homo sapiens
  misc_RNA (1)...(19): siRNA sense strand
ggguaccgcugcucagaau

SEQ ID NO: 1119683 - RNA, 19 nt, Homo sapiens
  misc_RNA (1)...(19): siRNA sense strand
ugaaauuugucugcaugaa

SEQ ID NO: 1119684 - RNA, 19 nt, Homo sapiens
  misc_RNA (1)...(19): siRNA sense strand
gcauccaauucuuugauuc

SEQ ID NO: 1119685 - RNA, 19 nt, Homo sapiens
  misc_RNA (1)...(19): siRNA sense strand
caagccuucugcucuguga

SEQ ID NO: 1119686 - RNA, 19 nt, Homo sapiens
  misc_RNA (1)...(19): siRNA sense strand
gauccgguguccuuauuac

SEQ ID NO: 1119687 - RNA, 19 nt, Homo sapiens
  misc_RNA (1)...(19): siRNA sense strand
cgugaauacuagucaaaga

SEQ ID NO: 1119688 - RNA, 19 nt, Homo sapiens
  misc_RNA (1)...(19): siRNA sense strand
cuucagcaaguguuucuua

SEQ ID NO: 1119689 - RNA, 19 nt, Homo sapiens
  misc_RNA (1)...(19): siRNA sense strand
gaugucaccuggauaaccu

SEQ ID NO: 1119690 - RNA, 19 nt, Homo sapiens
  misc_RNA (1)...(19): siRNA sense strand
caugaaggagucacauuug

SEQ ID NO: 1119691 - RNA, 19 nt, Homo sapiens
  misc_RNA (1)...(19): siRNA sense strand
ucaccuggauaaccuguca

SEQ ID NO: 1119692 - RNA, 19 nt, Homo sapiens
  misc_RNA (1)...(19): siRNA sense strand
ggagauccgguguccuuau

SEQ ID NO: 1119693 - RNA, 19 nt, Homo sapiens
  misc_RNA (1)...(19): siRNA sense strand
ucaaagaggauuucaacag

SEQ ID NO: 1119694 - RNA, 19 nt, Homo sapiens
  misc_RNA (1)...(19): siRNA sense strand
guacauacgaaacucaaag

SEQ ID NO: 1119695 - RNA, 19 nt, Homo sapiens
  misc_RNA (1)...(19): siRNA sense strand
augaaggagucacauuuga

SEQ ID NO: 1119696 - RNA, 19 nt, Homo sapiens
  misc_RNA (1)...(19): siRNA sense strand
cagaaacugcuuuauccaa

SEQ ID NO: 1119697 - RNA, 19 nt, Homo sapiens
  misc_RNA (1)...(19): siRNA sense strand
caaugcggauuuaaugaac

SEQ ID NO: 1119698 - RNA, 19 nt, Homo sapiens
  misc_RNA (1)...(19): siRNA sense strand
gaucaucugggaggaauuc

SEQ ID NO: 1119699 - RNA, 19 nt, Homo sapiens
  misc_RNA (1)...(19): siRNA sense strand
cauacgaaacucaaagaga

SEQ ID NO: 1119700 - RNA, 19 nt, Homo sapiens
  misc_RNA (1)...(19): siRNA sense strand
acaaugcggauuuaaugaa

SEQ ID NO: 1119701 - RNA, 19 nt, Homo sapiens
  misc_RNA (1)...(19): siRNA sense strand
ucacgugaauacuagucaa

SEQ ID NO: 1119702 - RNA, 19 nt, Homo sapiens
  misc_RNA (1)...(19): siRNA sense strand
caaccuucagcaaguguuu

SEQ ID NO: 1119703 - RNA, 19 nt, Homo sapiens
  misc_RNA (1)...(19): siRNA sense strand
ggaauucaccccagaggaa

SEQ ID NO: 1119704 - RNA, 19 nt, Homo sapiens
  misc_RNA (1)...(19): siRNA sense strand
aacagaaacugcuuuaucc

SEQ ID NO: 1119705 - RNA, 19 nt, Homo sapiens
  misc_RNA (1)...(19): siRNA sense strand
gacaagccuucugcucugu

SEQ ID NO: 1119706 - RNA, 19 nt, Homo sapiens
  misc_RNA (1)...(19): siRNA sense strand
gaaccagccgagaaauugg

SEQ ID NO: 1119707 - RNA, 19 nt, Homo sapiens
  misc_RNA (1)...(19): siRNA sense strand
aaucggaucugcgaacagu

SEQ ID NO: 1119708 - RNA, 19 nt, Homo sapiens
  misc_RNA (1)...(19): siRNA sense strand
guggaacccaggcucagua

SEQ ID NO: 1119709 - RNA, 19 nt, Homo sapiens
  misc_RNA (1)...(19): siRNA sense strand
acacaaccuucagcaagug

SEQ ID NO: 1119710 - RNA, 19 nt, Homo sapiens
  misc_RNA (1)...(19): siRNA sense strand
ugggaugucaccuggauaa

SEQ ID NO: 1119711 - RNA, 19 nt, Homo sapiens
  misc_RNA (1)...(19): siRNA sense strand
uaacugacaagaagaacag

SEQ ID NO: 1119712 - RNA, 19 nt, Homo sapiens
  misc_RNA (1)...(19): siRNA sense strand
aacacaaccuucagcaagu

SEQ ID NO: 1119713 - RNA, 19 nt, Homo sapiens
  misc_RNA (1)...(19): siRNA sense strand
acuccaggacgaugaauuu

SEQ ID NO: 1119714 - RNA, 19 nt, Homo sapiens
  misc_RNA (1)...(19): siRNA sense strand
aagcugggacugccaagaa

SEQ ID NO: 1119715 - RNA, 19 nt, Homo sapiens
  misc_RNA (1)...(19): siRNA sense strand
uucagcaaguguuucuuaa

SEQ ID NO: 1119716 - RNA, 19 nt, Homo sapiens
  misc_RNA (1)...(19): siRNA sense strand
cggaaccagccgagaaauu

SEQ ID NO: 1119717 - RNA, 19 nt, Homo sapiens
  misc_RNA (1)...(19): siRNA sense strand
gcucaguaacaacgaaugu

SEQ ID NO: 1119718 - RNA, 19 nt, Homo sapiens
  misc_RNA (1)...(19): siRNA sense strand
gaggguaccgcugcucaga

SEQ ID NO: 1119719 - RNA, 19 nt, Homo sapiens
  misc_RNA (1)...(19): siRNA sense strand
cauccaauucuuugauuca

SEQ ID NO: 1119720 - RNA, 19 nt, Homo sapiens
  misc_RNA (1)...(19): siRNA sense strand
caagaaaacacaaccuuca

SEQ ID NO: 1119721 - RNA, 19 nt, Homo sapiens
  misc_RNA (1)...(19): siRNA sense strand
uacaaugcggauuuaauga

SEQ ID NO: 1119722 - RNA, 19 nt, Homo sapiens
  misc_RNA (1)...(19): siRNA sense strand
ggaaaggcuaccgcgaaga

SEQ ID NO: 1119723 - RNA, 19 nt, Homo sapiens
  misc_RNA (1)...(19): siRNA sense strand
gggagauccgguguccuua

SEQ ID NO: 1119724 - RNA, 19 nt, Homo sapiens
  misc_RNA (1)...(19): siRNA sense strand
gcggauuuaaugaacugua

SEQ ID NO: 1119725 - RNA, 19 nt, Homo sapiens
  misc_RNA (1)...(19): siRNA sense strand
uccaggacgaugaauuuaa

SEQ ID NO: 1119726 - RNA, 19 nt, Homo sapiens
  misc_RNA (1)...(19): siRNA sense strand
cggauuuaaugaacuguac

SEQ ID NO: 1119727 - RNA, 19 nt, Homo sapiens
  misc_RNA (1)...(19): siRNA sense strand
ucaucuacaaugcggauuu

SEQ ID NO: 1119728 - RNA, 19 nt, Homo sapiens
  misc_RNA (1)...(19): siRNA sense strand
ugugggaugucaccuggau

SEQ ID NO: 1119729 - RNA, 19 nt, Homo sapiens
  misc_RNA (1)...(19): siRNA sense strand
gcaauuacuuucugguuaa

SEQ ID NO: 1119730 - RNA, 19 nt, Homo sapiens
  misc_RNA (1)...(19): siRNA sense strand
caaagaggauuucaacaga

SEQ ID NO: 1119731 - RNA, 19 nt, Homo sapiens
  misc_RNA (1)...(19): siRNA sense strand
gcaaguguuucuuaacuga

SEQ ID NO: 1119732 - RNA, 19 nt, Homo sapiens
  misc_RNA (1)...(19): siRNA sense strand
ggauuaacgucucgcaauu

SEQ ID NO: 1119733 - RNA, 19 nt, Homo sapiens
  misc_RNA (1)...(19): siRNA sense strand
ugaaggaaauuaccugaga

SEQ ID NO: 1119734 - RNA, 19 nt, Homo sapiens
  misc_RNA (1)...(19): siRNA sense strand
gcaccagccucuagucuca

SEQ ID NO: 1119735 - RNA, 19 nt, Homo sapiens
  misc_RNA (1)...(19): siRNA sense strand
gagauccgguguccuuauu

SEQ ID NO: 1119736 - RNA, 19 nt, Homo sapiens
  misc_RNA (1)...(19): siRNA sense strand
gaaacugcuuuauccaaau

SEQ ID NO: 1119737 - RNA, 19 nt, Homo sapiens
  misc_RNA (1)...(19): siRNA sense strand
auacgaaacucaaagagaa

SEQ ID NO: 1119738 - RNA, 19 nt, Homo sapiens
  misc_RNA (1)...(19): siRNA sense strand
caacagaaacugcuuuauc

SEQ ID NO: 1119739 - RNA, 19 nt, Homo sapiens
  misc_RNA (1)...(19): siRNA sense strand
caucuacaaugcggauuua

SEQ ID NO: 1119740 - RNA, 19 nt, Homo sapiens
  misc_RNA (1)...(19): siRNA sense strand
gcaugaaggagucacauuu

SEQ ID NO: 1119741 - RNA, 19 nt, Homo sapiens
  misc_RNA (1)...(19): siRNA sense strand
agaaacugcuuuauccaaa

SEQ ID NO: 1119742 - RNA, 19 nt, Homo sapiens
  misc_RNA (1)...(19): siRNA sense strand
cgcaauuacuuucugguua

SEQ ID NO: 1119743 - RNA, 19 nt, Homo sapiens
  misc_RNA (1)...(19): siRNA sense strand
ggaaccagccgagaaauug

SEQ ID NO: 1119744 - RNA, 19 nt, Homo sapiens
  misc_RNA (1)...(19): siRNA sense strand
gcugugaaccuuuauauca

SEQ ID NO: 1119745 - RNA, 19 nt, Homo sapiens
  misc_RNA (1)...(19): siRNA sense strand
gaaaucggaucugcgaaca

SEQ ID NO: 1119746 - RNA, 19 nt, Homo sapiens
  misc_RNA (1)...(19): siRNA sense strand
gaacccaggcucaguaaca

SEQ ID NO: 1119747 - RNA, 19 nt, Homo sapiens
  misc_RNA (1)...(19): siRNA sense strand
gauuaacgucucgcaauua

SEQ ID NO: 1119748 - RNA, 19 nt, Homo sapiens
  misc_RNA (1)...(19): siRNA sense strand
gaagaacagagucguggaa

SEQ ID NO: 1119749 - RNA, 19 nt, Homo sapiens
  misc_RNA (1)...(19): siRNA sense strand
gaauuucuccuguuucauc

SEQ ID NO: 1119750 - RNA, 19 nt, Homo sapiens
  misc_RNA (1)...(19): siRNA sense strand
aaagaggauuucaacagaa

SEQ ID NO: 1119751 - RNA, 19 nt, Homo sapiens
  misc_RNA (1)...(19): siRNA sense strand
guaccgcugcucagaauuu

SEQ ID NO: 1119752 - RNA, 19 nt, Homo sapiens
  misc_RNA (1)...(19): siRNA sense strand
ccaggacgaugaauuuaag

SEQ ID NO: 1119753 - RNA, 19 nt, Homo sapiens
  misc_RNA (1)...(19): siRNA sense strand
ccaauucuuugauucacuu

SEQ ID NO: 1119754 - RNA, 19 nt, Homo sapiens
  misc_RNA (1)...(19): siRNA sense strand
ccgguguccuuauuacaua

SEQ ID NO: 1119755 - RNA, 19 nt, Homo sapiens
  misc_RNA (1)...(19): siRNA sense strand
cagcaaguguuucuuaacu

SEQ ID NO: 1119756 - RNA, 19 nt, Homo sapiens
  misc_RNA (1)...(19): siRNA sense strand
ggaauggcauggacaucuc

SEQ ID NO: 1119757 - RNA, 19 nt, Homo sapiens
  misc_RNA (1)...(19): siRNA sense strand
uaacggaaccagccgagaa

SEQ ID NO: 1119758 - RNA, 19 nt, Homo sapiens
  misc_RNA (1)...(19): siRNA sense strand
cuacaaugcggauuuaaug

SEQ ID NO: 1119759 - RNA, 19 nt, Homo sapiens
  misc_RNA (1)...(19): siRNA sense strand
uaacgucucgcaauuacuu

SEQ ID NO: 1119760 - RNA, 19 nt, Homo sapiens
  misc_RNA (1)...(19): siRNA sense strand
cccgugacguccaguauuu

SEQ ID NO: 1119761 - RNA, 19 nt, Homo sapiens
  misc_RNA (1)...(19): siRNA sense strand
ggcauccaauucuuugauu

SEQ ID NO: 1119762 - RNA, 19 nt, Homo sapiens
  misc_RNA (1)...(19): siRNA sense strand
gaaauuugucugcaugaag

SEQ ID NO: 1119763 - RNA, 19 nt, Homo sapiens
  misc_RNA (1)...(19): siRNA sense strand
gaaaggcuaccgcgaagag

SEQ ID NO: 1119764 - RNA, 19 nt, Homo sapiens
  misc_RNA (1)...(19): siRNA sense strand
ggguaccgcugcucagaau

SEQ ID NO: 1119765 - RNA, 19 nt, Homo sapiens
  misc_RNA (1)...(19): siRNA sense strand
ugaaauuugucugcaugaa

SEQ ID NO: 1119766 - RNA, 19 nt, Homo sapiens
  misc_RNA (1)...(19): siRNA sense strand
gcauccaauucuuugauuc

SEQ ID NO: 1119767 - RNA, 19 nt, Homo sapiens
  misc_RNA (1)...(19): siRNA sense strand
caagccuucugcucuguga

SEQ ID NO: 1119768 - RNA, 19 nt, Homo sapiens
  misc_RNA (1)...(19): siRNA sense strand
gauccgguguccuuauuac

SEQ ID NO: 1119769 - RNA, 19 nt, Homo sapiens
  misc_RNA (1)...(19): siRNA sense strand
cgugaauacuagucaaaga

SEQ ID NO: 1119770 - RNA, 19 nt, Homo sapiens
  misc_RNA (1)...(19): siRNA sense strand
cuucagcaaguguuucuua

SEQ ID NO: 1119771 - RNA, 19 nt, Homo sapiens
  misc_RNA (1)...(19): siRNA sense strand
gaugucaccuggauaaccu

SEQ ID NO: 1119772 - RNA, 19 nt, Homo sapiens
  misc_RNA (1)...(19): siRNA sense strand
caugaaggagucacauuug

SEQ ID NO: 1119773 - RNA, 19 nt, Homo sapiens
  misc_RNA (1)...(19): siRNA sense strand
augaugcugugaaccuuua

SEQ ID NO: 1119774 - RNA, 19 nt, Homo sapiens
  misc_RNA (1)...(19): siRNA sense strand
ucaccuggauaaccuguca

SEQ ID NO: 1119775 - RNA, 19 nt, Homo sapiens
  misc_RNA (1)...(19): siRNA sense strand
ggagauccgguguccuuau

SEQ ID NO: 1119776 - RNA, 19 nt, Homo sapiens
  misc_RNA (1)...(19): siRNA sense strand
ucaaagaggauuucaacag

SEQ ID NO: 1119777 - RNA, 19 nt, Homo sapiens
  misc_RNA (1)...(19): siRNA sense strand
guacauacgaaacucaaag

SEQ ID NO: 1119778 - RNA, 19 nt, Homo sapiens
  misc_RNA (1)...(19): siRNA sense strand
ggaacuguuuucuugauga

SEQ ID NO: 1119779 - RNA, 19 nt, Homo sapiens
  misc_RNA (1)...(19): siRNA sense strand
augaaggagucacauuuga

SEQ ID NO: 1119780 - RNA, 19 nt, Homo sapiens
  misc_RNA (1)...(19): siRNA sense strand
gaugaugcugugaaccuuu

SEQ ID NO: 1119781 - RNA, 19 nt, Homo sapiens
  misc_RNA (1)...(19): siRNA sense strand
cagaaacugcuuuauccaa

SEQ ID NO: 1119782 - RNA, 19 nt, Homo sapiens
  misc_RNA (1)...(19): siRNA sense strand
caaugcggauuuaaugaac

SEQ ID NO: 1119783 - RNA, 19 nt, Homo sapiens
  misc_RNA (1)...(19): siRNA sense strand
gaucaucugggaggaauuc

SEQ ID NO: 1119784 - RNA, 19 nt, Homo sapiens
  misc_RNA (1)...(19): siRNA sense strand
cauacgaaacucaaagaga

SEQ ID NO: 1119785 - RNA, 19 nt, Homo sapiens
  misc_RNA (1)...(19): siRNA sense strand
acaaugcggauuuaaugaa

SEQ ID NO: 1119786 - RNA, 19 nt, Homo sapiens
  misc_RNA (1)...(19): siRNA sense strand
ucacgugaauacuagucaa

SEQ ID NO: 1119787 - RNA, 19 nt, Homo sapiens
  misc_RNA (1)...(19): siRNA sense strand
caaccuucagcaaguguuu

SEQ ID NO: 1119788 - RNA, 19 nt, Homo sapiens
  misc_RNA (1)...(19): siRNA sense strand
ggaauucaccccagaggaa

SEQ ID NO: 1119789 - RNA, 19 nt, Homo sapiens
  misc_RNA (1)...(19): siRNA sense strand
aacagaaacugcuuuaucc

SEQ ID NO: 1119790 - RNA, 19 nt, Homo sapiens
  misc_RNA (1)...(19): siRNA sense strand
gacaagccuucugcucugu

SEQ ID NO: 1119791 - RNA, 19 nt, Homo sapiens
  misc_RNA (1)...(19): siRNA sense strand
aaucggaucugcgaacagu

SEQ ID NO: 1119792 - RNA, 19 nt, Homo sapiens
  misc_RNA (1)...(19): siRNA sense strand
gaaccagccgagaaauugg

SEQ ID NO: 1119793 - RNA, 19 nt, Homo sapiens
  misc_RNA (1)...(19): siRNA sense strand
guggaacccaggcucagua

SEQ ID NO: 1119794 - RNA, 19 nt, Homo sapiens
  misc_RNA (1)...(19): siRNA sense strand
acacaaccuucagcaagug

SEQ ID NO: 1119795 - RNA, 19 nt, Homo sapiens
  misc_RNA (1)...(19): siRNA sense strand
ugggaugucaccuggauaa

SEQ ID NO: 1119796 - RNA, 19 nt, Homo sapiens
  misc_RNA (1)...(19): siRNA sense strand
uaacugacaagaagaacag

SEQ ID NO: 1119797 - RNA, 19 nt, Homo sapiens
  misc_RNA (1)...(19): siRNA sense strand
aagcugggacugccaagaa

SEQ ID NO: 1119798 - RNA, 19 nt, Homo sapiens
  misc_RNA (1)...(19): siRNA sense strand
gaugcugugaaccuuuaua

SEQ ID NO: 1119799 - RNA, 19 nt, Homo sapiens
  misc_RNA (1)...(19): siRNA sense strand
acuccaggacgaugaauuu

SEQ ID NO: 1119800 - RNA, 19 nt, Homo sapiens
  misc_RNA (1)...(19): siRNA sense strand
aacacaaccuucagcaagu

SEQ ID NO: 1119801 - RNA, 19 nt, Homo sapiens
  misc_RNA (1)...(19): siRNA sense strand
uucagcaaguguuucuuaa

SEQ ID NO: 1119802 - RNA, 19 nt, Homo sapiens
  misc_RNA (1)...(19): siRNA sense strand
gaacuguuuucuugaugau

SEQ ID NO: 1119803 - RNA, 19 nt, Homo sapiens
  misc_RNA (1)...(19): siRNA sense strand
cggaaccagccgagaaauu

SEQ ID NO: 1119804 - RNA, 19 nt, Homo sapiens
  misc_RNA (1)...(19): siRNA sense strand
gcucaguaacaacgaaugu

SEQ ID NO: 1119805 - RNA, 19 nt, Homo sapiens
  misc_RNA (1)...(19): siRNA sense strand
gaggguaccgcugcucaga

SEQ ID NO: 1119806 - RNA, 19 nt, Homo sapiens
  misc_RNA (1)...(19): siRNA sense strand
cauccaauucuuugauuca

SEQ ID NO: 1119807 - RNA, 19 nt, Homo sapiens
  misc_RNA (1)...(19): siRNA sense strand
caagaaaacacaaccuuca

SEQ ID NO: 1119808 - RNA, 19 nt, Homo sapiens
  misc_RNA (1)...(19): siRNA sense strand
uacaaugcggauuuaauga

SEQ ID NO: 1119809 - RNA, 19 nt, Homo sapiens
  misc_RNA (1)...(19): siRNA sense strand
ggaaaggcuaccgcgaaga

SEQ ID NO: 1119810 - RNA, 19 nt, Homo sapiens
  misc_RNA (1)...(19): siRNA sense strand
gggagauccgguguccuua

SEQ ID NO: 1119811 - RNA, 19 nt, Homo sapiens
  misc_RNA (1)...(19): siRNA sense strand
gcggauuuaaugaacugua

SEQ ID NO: 1119812 - RNA, 19 nt, Homo sapiens
  misc_RNA (1)...(19): siRNA sense strand
uccaggacgaugaauuuaa

SEQ ID NO: 1119813 - RNA, 19 nt, Homo sapiens
  misc_RNA (1)...(19): siRNA sense strand
cggauuuaaugaacuguac

SEQ ID NO: 1119814 - RNA, 19 nt, Homo sapiens
  misc_RNA (1)...(19): siRNA sense strand
ucaucuacaaugcggauuu

SEQ ID NO: 1119815 - RNA, 19 nt, Homo sapiens
  misc_RNA (1)...(19): siRNA sense strand
ugaugaugcugugaaccuu

SEQ ID NO: 1119816 - RNA, 19 nt, Homo sapiens
  misc_RNA (1)...(19): siRNA sense strand
cugugaaccuuuauaucau

SEQ ID NO: 1119817 - RNA, 19 nt, Homo sapiens
  misc_RNA (1)...(19): siRNA sense strand
ugugggaugucaccuggau

SEQ ID NO: 1119818 - RNA, 19 nt, Homo sapiens
  misc_RNA (1)...(19): siRNA sense strand
gcaauuacuuucugguuaa

SEQ ID NO: 1119819 - RNA, 19 nt, Homo sapiens
  misc_RNA (1)...(19): siRNA sense strand
caaagaggauuucaacaga

SEQ ID NO: 1119820 - RNA, 19 nt, Homo sapiens
  misc_RNA (1)...(19): siRNA sense strand
gcaaguguuucuuaacuga

SEQ ID NO: 1119821 - RNA, 19 nt, Homo sapiens
  misc_RNA (1)...(19): siRNA sense strand
ggauuaacgucucgcaauu

SEQ ID NO: 1119822 - RNA, 19 nt, Homo sapiens
  misc_RNA (1)...(19): siRNA sense strand
gcaccagccucuagucuca

SEQ ID NO: 1119823 - RNA, 19 nt, Homo sapiens
  misc_RNA (1)...(19): siRNA sense strand
gagauccgguguccuuauu

SEQ ID NO: 1119824 - RNA, 19 nt, Homo sapiens
  misc_RNA (1)...(19): siRNA sense strand
gaaacugcuuuauccaaau

SEQ ID NO: 1119825 - RNA, 19 nt, Homo sapiens
  misc_RNA (1)...(19): siRNA sense strand
auacgaaacucaaagagaa

SEQ ID NO: 1119826 - RNA, 19 nt, Homo sapiens
  misc_RNA (1)...(19): siRNA sense strand
caacagaaacugcuuuauc

SEQ ID NO: 1119827 - RNA, 19 nt, Homo sapiens
  misc_RNA (1)...(19): siRNA sense strand
caucuacaaugcggauuua

SEQ ID NO: 1119828 - RNA, 19 nt, Homo sapiens
  misc_RNA (1)...(19): siRNA sense strand
gcaugaaggagucacauuu

SEQ ID NO: 1119829 - RNA, 19 nt, Homo sapiens
  misc_RNA (1)...(19): siRNA sense strand
agaaacugcuuuauccaaa

SEQ ID NO: 1119830 - RNA, 19 nt, Homo sapiens
  misc_RNA (1)...(19): siRNA sense strand
cgcaauuacuuucugguua

SEQ ID NO: 1119831 - RNA, 19 nt, Homo sapiens
  misc_RNA (1)...(19): siRNA sense strand
ggaaccagccgagaaauug

SEQ ID NO: 1119832 - RNA, 19 nt, Homo sapiens
  misc_RNA (1)...(19): siRNA sense strand
gaaaucggaucugcgaaca

SEQ ID NO: 1119833 - RNA, 19 nt, Homo sapiens
  misc_RNA (1)...(19): siRNA sense strand
gaacccaggcucaguaaca

SEQ ID NO: 1119834 - RNA, 19 nt, Homo sapiens
  misc_RNA (1)...(19): siRNA sense strand
gauuaacgucucgcaauua

SEQ ID NO: 1119835 - RNA, 19 nt, Homo sapiens
  misc_RNA (1)...(19): siRNA sense strand
gaagaacagagucguggaa

SEQ ID NO: 1119836 - RNA, 19 nt, Homo sapiens
  misc_RNA (1)...(19): siRNA sense strand
gaauuucuccuguuucauc

SEQ ID NO: 1119837 - RNA, 19 nt, Homo sapiens
  misc_RNA (1)...(19): siRNA sense strand
aaagaggauuucaacagaa

SEQ ID NO: 1119838 - RNA, 19 nt, Homo sapiens
  misc_RNA (1)...(19): siRNA sense strand
guaccgcugcucagaauuu

SEQ ID NO: 1119839 - RNA, 19 nt, Homo sapiens
  misc_RNA (1)...(19): siRNA sense strand
ccaggacgaugaauuuaag

SEQ ID NO: 1119840 - RNA, 19 nt, Homo sapiens
  misc_RNA (1)...(19): siRNA sense strand
ccaauucuuugauucacuu

SEQ ID NO: 1119841 - RNA, 19 nt, Homo sapiens
  misc_RNA (1)...(19): siRNA sense strand
ccgguguccuuauuacaua

SEQ ID NO: 1119842 - RNA, 19 nt, Homo sapiens
  misc_RNA (1)...(19): siRNA sense strand
cagcaaguguuucuuaacu

SEQ ID NO: 1119843 - RNA, 19 nt, Homo sapiens
  misc_RNA (1)...(19): siRNA sense strand
uaacggaaccagccgagaa

SEQ ID NO: 1119844 - RNA, 19 nt, Homo sapiens
  misc_RNA (1)...(19): siRNA sense strand
cuacaaugcggauuuaaug

SEQ ID NO: 1119845 - RNA, 19 nt, Homo sapiens
  misc_RNA (1)...(19): siRNA sense strand
uaacgucucgcaauuacuu

SEQ ID NO: 1119846 - RNA, 19 nt, Homo sapiens
  misc_RNA (1)...(19): siRNA sense strand
cccgugacguccaguauuu

SEQ ID NO: 1119847 - RNA, 19 nt, Homo sapiens
  misc_RNA (1)...(19): siRNA sense strand
ggcauccaauucuuugauu

SEQ ID NO: 1119848 - RNA, 19 nt, Homo sapiens
  misc_RNA (1)...(19): siRNA sense strand
gaaauuugucugcaugaag

SEQ ID NO: 1119849 - RNA, 19 nt, Homo sapiens
  misc_RNA (1)...(19): siRNA sense strand
ggguaccgcugcucagaau

SEQ ID NO: 1119850 - RNA, 19 nt, Homo sapiens
  misc_RNA (1)...(19): siRNA sense strand
ugaaauuugucugcaugaa

SEQ ID NO: 1119851 - RNA, 19 nt, Homo sapiens
  misc_RNA (1)...(19): siRNA sense strand
gcauccaauucuuugauuc

SEQ ID NO: 1119852 - RNA, 19 nt, Homo sapiens
  misc_RNA (1)...(19): siRNA sense strand
caagccuucugcucuguga

SEQ ID NO: 1119853 - RNA, 19 nt, Homo sapiens
  misc_RNA (1)...(19): siRNA sense strand
gauccgguguccuuauuac

SEQ ID NO: 1119854 - RNA, 19 nt, Homo sapiens
  misc_RNA (1)...(19): siRNA sense strand
cgugaauacuagucaaaga

SEQ ID NO: 1119855 - RNA, 19 nt, Homo sapiens
  misc_RNA (1)...(19): siRNA sense strand
cuucagcaaguguuucuua

SEQ ID NO: 1119856 - RNA, 19 nt, Homo sapiens
  misc_RNA (1)...(19): siRNA sense strand
gaugucaccuggauaaccu

SEQ ID NO: 1119857 - RNA, 19 nt, Homo sapiens
  misc_RNA (1)...(19): siRNA sense strand
caugaaggagucacauuug

SEQ ID NO: 1119858 - RNA, 19 nt, Homo sapiens
  misc_RNA (1)...(19): siRNA sense strand
ucaccuggauaaccuguca

SEQ ID NO: 1119859 - RNA, 19 nt, Homo sapiens
  misc_RNA (1)...(19): siRNA sense strand
ggagauccgguguccuuau

SEQ ID NO: 1119860 - RNA, 19 nt, Homo sapiens
  misc_RNA (1)...(19): siRNA sense strand
ucaaagaggauuucaacag

SEQ ID NO: 1119861 - RNA, 19 nt, Homo sapiens
  misc_RNA (1)...(19): siRNA sense strand
guacauacgaaacucaaag

SEQ ID NO: 1119862 - RNA, 19 nt, Homo sapiens
  misc_RNA (1)...(19): siRNA sense strand
augaaggagucacauuuga

SEQ ID NO: 1119863 - RNA, 19 nt, Homo sapiens
  misc_RNA (1)...(19): siRNA sense strand
cagaaacugcuuuauccaa

SEQ ID NO: 1119864 - RNA, 19 nt, Homo sapiens
  misc_RNA (1)...(19): siRNA sense strand
caaugcggauuuaaugaac

SEQ ID NO: 1119865 - RNA, 19 nt, Homo sapiens
  misc_RNA (1)...(19): siRNA sense strand
cauacgaaacucaaagaga

SEQ ID NO: 1119866 - RNA, 19 nt, Homo sapiens
  misc_RNA (1)...(19): siRNA sense strand
acaaugcggauuuaaugaa

SEQ ID NO: 1119867 - RNA, 19 nt, Homo sapiens
  misc_RNA (1)...(19): siRNA sense strand
ucacgugaauacuagucaa

SEQ ID NO: 1119868 - RNA, 19 nt, Homo sapiens
  misc_RNA (1)...(19): siRNA sense strand
caaccuucagcaaguguuu

SEQ ID NO: 1119869 - RNA, 19 nt, Homo sapiens
  misc_RNA (1)...(19): siRNA sense strand
aacagaaacugcuuuaucc

SEQ ID NO: 1119870 - RNA, 19 nt, Homo sapiens
  misc_RNA (1)...(19): siRNA sense strand
gacaagccuucugcucugu

SEQ ID NO: 1119871 - RNA, 19 nt, Homo sapiens
  misc_RNA (1)...(19): siRNA sense strand
gaaccagccgagaaauugg

SEQ ID NO: 1119872 - RNA, 19 nt, Homo sapiens
  misc_RNA (1)...(19): siRNA sense strand
aaucggaucugcgaacagu

SEQ ID NO: 1119873 - RNA, 19 nt, Homo sapiens
  misc_RNA (1)...(19): siRNA sense strand
guggaacccaggcucagua

SEQ ID NO: 1119874 - RNA, 19 nt, Homo sapiens
  misc_RNA (1)...(19): siRNA sense strand
acacaaccuucagcaagug

SEQ ID NO: 1119875 - RNA, 19 nt, Homo sapiens
  misc_RNA (1)...(19): siRNA sense strand
ugggaugucaccuggauaa

SEQ ID NO: 1119876 - RNA, 19 nt, Homo sapiens
  misc_RNA (1)...(19): siRNA sense strand
uaacugacaagaagaacag

SEQ ID NO: 1119877 - RNA, 19 nt, Homo sapiens
  misc_RNA (1)...(19): siRNA sense strand
aacacaaccuucagcaagu

SEQ ID NO: 1119878 - RNA, 19 nt, Homo sapiens
  misc_RNA (1)...(19): siRNA sense strand
acuccaggacgaugaauuu

SEQ ID NO: 1119879 - RNA, 19 nt, Homo sapiens
  misc_RNA (1)...(19): siRNA sense strand
aagcugggacugccaagaa

SEQ ID NO: 1119880 - RNA, 19 nt, Homo sapiens
  misc_RNA (1)...(19): siRNA sense strand
uucagcaaguguuucuuaa

SEQ ID NO: 1119881 - RNA, 19 nt, Homo sapiens
  misc_RNA (1)...(19): siRNA sense strand
cggaaccagccgagaaauu

SEQ ID NO: 1119882 - RNA, 19 nt, Homo sapiens
  misc_RNA (1)...(19): siRNA sense strand
gcucaguaacaacgaaugu

SEQ ID NO: 1119883 - RNA, 19 nt, Homo sapiens
  misc_RNA (1)...(19): siRNA sense strand
gaggguaccgcugcucaga

SEQ ID NO: 1119884 - RNA, 19 nt, Homo sapiens
  misc_RNA (1)...(19): siRNA sense strand
cauccaauucuuugauuca

SEQ ID NO: 1119885 - RNA, 19 nt, Homo sapiens
  misc_RNA (1)...(19): siRNA sense strand
caagaaaacacaaccuuca

SEQ ID NO: 1119886 - RNA, 19 nt, Homo sapiens
  misc_RNA (1)...(19): siRNA sense strand
uacaaugcggauuuaauga

SEQ ID NO: 1119887 - RNA, 19 nt, Homo sapiens
  misc_RNA (1)...(19): siRNA sense strand
gggagauccgguguccuua

SEQ ID NO: 1119888 - RNA, 19 nt, Homo sapiens
  misc_RNA (1)...(19): siRNA sense strand
gcggauuuaaugaacugua

SEQ ID NO: 1119889 - RNA, 19 nt, Homo sapiens
  misc_RNA (1)...(19): siRNA sense strand
ucaucuacaaugcggauuu

SEQ ID NO: 1119890 - RNA, 19 nt, Homo sapiens
  misc_RNA (1)...(19): siRNA sense strand
uccaggacgaugaauuuaa

SEQ ID NO: 1119891 - RNA, 19 nt, Homo sapiens
  misc_RNA (1)...(19): siRNA sense strand
cggauuuaaugaacuguac

SEQ ID NO: 1119892 - RNA, 19 nt, Homo sapiens
  misc_RNA (1)...(19): siRNA sense strand
ugugggaugucaccuggau

SEQ ID NO: 1119893 - RNA, 19 nt, Homo sapiens
  misc_RNA (1)...(19): siRNA sense strand
gcaauuacuuucugguuaa

SEQ ID NO: 1119894 - RNA, 19 nt, Homo sapiens
  misc_RNA (1)...(19): siRNA sense strand
caaagaggauuucaacaga

SEQ ID NO: 1119895 - RNA, 19 nt, Homo sapiens
  misc_RNA (1)...(19): siRNA sense strand
gcaaguguuucuuaacuga

SEQ ID NO: 1119896 - RNA, 19 nt, Homo sapiens
  misc_RNA (1)...(19): siRNA sense strand
ggauuaacgucucgcaauu

SEQ ID NO: 1119897 - RNA, 19 nt, Homo sapiens
  misc_RNA (1)...(19): siRNA sense strand
gcaccagccucuagucuca

SEQ ID NO: 1119898 - RNA, 19 nt, Homo sapiens
  misc_RNA (1)...(19): siRNA sense strand
gagauccgguguccuuauu

SEQ ID NO: 1119899 - RNA, 19 nt, Homo sapiens
  misc_RNA (1)...(19): siRNA sense strand
gaaacugcuuuauccaaau

SEQ ID NO: 1119900 - RNA, 19 nt, Homo sapiens
  misc_RNA (1)...(19): siRNA sense strand
auacgaaacucaaagagaa

SEQ ID NO: 1119901 - RNA, 19 nt, Homo sapiens
  misc_RNA (1)...(19): siRNA sense strand
caacagaaacugcuuuauc

SEQ ID NO: 1119902 - RNA, 19 nt, Homo sapiens
  misc_RNA (1)...(19): siRNA sense strand
caucuacaaugcggauuua

SEQ ID NO: 1119903 - RNA, 19 nt, Homo sapiens
  misc_RNA (1)...(19): siRNA sense strand
gcaugaaggagucacauuu

SEQ ID NO: 1119904 - RNA, 19 nt, Homo sapiens
  misc_RNA (1)...(19): siRNA sense strand
agaaacugcuuuauccaaa

SEQ ID NO: 1119905 - RNA, 19 nt, Homo sapiens
  misc_RNA (1)...(19): siRNA sense strand
cgcaauuacuuucugguua

SEQ ID NO: 1119906 - RNA, 19 nt, Homo sapiens
  misc_RNA (1)...(19): siRNA sense strand
ggaaccagccgagaaauug

SEQ ID NO: 1119907 - RNA, 19 nt, Homo sapiens
  misc_RNA (1)...(19): siRNA sense strand
gaaaucggaucugcgaaca

SEQ ID NO: 1119908 - RNA, 19 nt, Homo sapiens
  misc_RNA (1)...(19): siRNA sense strand
gaacccaggcucaguaaca

SEQ ID NO: 1119909 - RNA, 19 nt, Homo sapiens
  misc_RNA (1)...(19): siRNA sense strand
gauuaacgucucgcaauua

SEQ ID NO: 1119910 - RNA, 19 nt, Homo sapiens
  misc_RNA (1)...(19): siRNA sense strand
gaagaacagagucguggaa

SEQ ID NO: 1119911 - RNA, 19 nt, Homo sapiens
  misc_RNA (1)...(19): siRNA sense strand
gaauuucuccuguuucauc

SEQ ID NO: 1119912 - RNA, 19 nt, Homo sapiens
  misc_RNA (1)...(19): siRNA sense strand
aaagaggauuucaacagaa

SEQ ID NO: 1119913 - RNA, 19 nt, Homo sapiens
  misc_RNA (1)...(19): siRNA sense strand
guaccgcugcucagaauuu

SEQ ID NO: 1119914 - RNA, 19 nt, Homo sapiens
  misc_RNA (1)...(19): siRNA sense strand
ccaggacgaugaauuuaag

SEQ ID NO: 1119915 - RNA, 19 nt, Homo sapiens
  misc_RNA (1)...(19): siRNA sense strand
ccaauucuuugauucacuu

SEQ ID NO: 1119916 - RNA, 19 nt, Homo sapiens
  misc_RNA (1)...(19): siRNA sense strand
ccgguguccuuauuacaua

SEQ ID NO: 1119917 - RNA, 19 nt, Homo sapiens
  misc_RNA (1)...(19): siRNA sense strand
cagcaaguguuucuuaacu

SEQ ID NO: 1119918 - RNA, 19 nt, Homo sapiens
  misc_RNA (1)...(19): siRNA sense strand
uaacggaaccagccgagaa

SEQ ID NO: 1119919 - RNA, 19 nt, Homo sapiens
  misc_RNA (1)...(19): siRNA sense strand
cuacaaugcggauuuaaug

SEQ ID NO: 1119920 - RNA, 19 nt, Homo sapiens
  misc_RNA (1)...(19): siRNA sense strand
uaacgucucgcaauuacuu

SEQ ID NO: 1119921 - RNA, 19 nt, Homo sapiens
  misc_RNA (1)...(19): siRNA sense strand
cccgugacguccaguauuu

SEQ ID NO: 1119922 - RNA, 19 nt, Homo sapiens
  misc_RNA (1)...(19): siRNA sense strand
ggcauccaauucuuugauu

SEQ ID NO: 1119923 - RNA, 19 nt, Homo sapiens
  misc_RNA (1)...(19): siRNA sense strand
gaaauuugucugcaugaag

SEQ ID NO: 1119924 - RNA, 19 nt, Homo sapiens
  misc_RNA (1)...(19): siRNA sense strand
ggguaccgcugcucagaau

SEQ ID NO: 1119925 - RNA, 19 nt, Homo sapiens
  misc_RNA (1)...(19): siRNA sense strand
ugaaauuugucugcaugaa

SEQ ID NO: 1119926 - RNA, 19 nt, Homo sapiens
  misc_RNA (1)...(19): siRNA sense strand
gcauccaauucuuugauuc

SEQ ID NO: 1119927 - RNA, 19 nt, Homo sapiens
  misc_RNA (1)...(19): siRNA sense strand
caagccuucugcucuguga

SEQ ID NO: 1119928 - RNA, 19 nt, Homo sapiens
  misc_RNA (1)...(19): siRNA sense strand
gauccgguguccuuauuac

SEQ ID NO: 1119929 - RNA, 19 nt, Homo sapiens
  misc_RNA (1)...(19): siRNA sense strand
cgugaauacuagucaaaga

SEQ ID NO: 1119930 - RNA, 19 nt, Homo sapiens
  misc_RNA (1)...(19): siRNA sense strand
cuucagcaaguguuucuua

SEQ ID NO: 1119931 - RNA, 19 nt, Homo sapiens
  misc_RNA (1)...(19): siRNA sense strand
gaugucaccuggauaaccu

SEQ ID NO: 1119932 - RNA, 19 nt, Homo sapiens
  misc_RNA (1)...(19): siRNA sense strand
caugaaggagucacauuug

SEQ ID NO: 1119933 - RNA, 19 nt, Homo sapiens
  misc_RNA (1)...(19): siRNA sense strand
ucaccuggauaaccuguca

SEQ ID NO: 1119934 - RNA, 19 nt, Homo sapiens
  misc_RNA (1)...(19): siRNA sense strand
ggagauccgguguccuuau

SEQ ID NO: 1119935 - RNA, 19 nt, Homo sapiens
  misc_RNA (1)...(19): siRNA sense strand
ucaaagaggauuucaacag

SEQ ID NO: 1119936 - RNA, 19 nt, Homo sapiens
  misc_RNA (1)...(19): siRNA sense strand
guacauacgaaacucaaag

SEQ ID NO: 1119937 - RNA, 19 nt, Homo sapiens
  misc_RNA (1)...(19): siRNA sense strand
augaaggagucacauuuga

SEQ ID NO: 1119938 - RNA, 19 nt, Homo sapiens
  misc_RNA (1)...(19): siRNA sense strand
cagaaacugcuuuauccaa

SEQ ID NO: 1119939 - RNA, 19 nt, Homo sapiens
  misc_RNA (1)...(19): siRNA sense strand
caaugcggauuuaaugaac

SEQ ID NO: 1119940 - RNA, 19 nt, Homo sapiens
  misc_RNA (1)...(19): siRNA sense strand
cauacgaaacucaaagaga

SEQ ID NO: 1119941 - RNA, 19 nt, Homo sapiens
  misc_RNA (1)...(19): siRNA sense strand
acaaugcggauuuaaugaa

SEQ ID NO: 1119942 - RNA, 19 nt, Homo sapiens
  misc_RNA (1)...(19): siRNA sense strand
ucacgugaauacuagucaa

SEQ ID NO: 1119943 - RNA, 19 nt, Homo sapiens
  misc_RNA (1)...(19): siRNA sense strand
caaccuucagcaaguguuu

SEQ ID NO: 1119944 - RNA, 19 nt, Homo sapiens
  misc_RNA (1)...(19): siRNA sense strand
aacagaaacugcuuuaucc

SEQ ID NO: 1119945 - RNA, 19 nt, Homo sapiens
  misc_RNA (1)...(19): siRNA sense strand
gacaagccuucugcucugu

SEQ ID NO: 1119946 - RNA, 19 nt, Homo sapiens
  misc_RNA (1)...(19): siRNA sense strand
gaaccagccgagaaauugg

SEQ ID NO: 1119947 - RNA, 19 nt, Homo sapiens
  misc_RNA (1)...(19): siRNA sense strand
aaucggaucugcgaacagu

SEQ ID NO: 1119948 - RNA, 19 nt, Homo sapiens
  misc_RNA (1)...(19): siRNA sense strand
guggaacccaggcucagua

SEQ ID NO: 1119949 - RNA, 19 nt, Homo sapiens
  misc_RNA (1)...(19): siRNA sense strand
acacaaccuucagcaagug

SEQ ID NO: 1119950 - RNA, 19 nt, Homo sapiens
  misc_RNA (1)...(19): siRNA sense strand
ugggaugucaccuggauaa

SEQ ID NO: 1119951 - RNA, 19 nt, Homo sapiens
  misc_RNA (1)...(19): siRNA sense strand
uaacugacaagaagaacag

SEQ ID NO: 1119952 - RNA, 19 nt, Homo sapiens
  misc_RNA (1)...(19): siRNA sense strand
aacacaaccuucagcaagu

SEQ ID NO: 1119953 - RNA, 19 nt, Homo sapiens
  misc_RNA (1)...(19): siRNA sense strand
acuccaggacgaugaauuu

SEQ ID NO: 1119954 - RNA, 19 nt, Homo sapiens
  misc_RNA (1)...(19): siRNA sense strand
aagcugggacugccaagaa

SEQ ID NO: 1119955 - RNA, 19 nt, Homo sapiens
  misc_RNA (1)...(19): siRNA sense strand
uucagcaaguguuucuuaa

SEQ ID NO: 1119956 - RNA, 19 nt, Homo sapiens
  misc_RNA (1)...(19): siRNA sense strand
cggaaccagccgagaaauu

SEQ ID NO: 1119957 - RNA, 19 nt, Homo sapiens
  misc_RNA (1)...(19): siRNA sense strand
gcucaguaacaacgaaugu

SEQ ID NO: 1119958 - RNA, 19 nt, Homo sapiens
  misc_RNA (1)...(19): siRNA sense strand
gaggguaccgcugcucaga

SEQ ID NO: 1119959 - RNA, 19 nt, Homo sapiens
  misc_RNA (1)...(19): siRNA sense strand
cauccaauucuuugauuca

SEQ ID NO: 1119960 - RNA, 19 nt, Homo sapiens
  misc_RNA (1)...(19): siRNA sense strand
caagaaaacacaaccuuca

SEQ ID NO: 1119961 - RNA, 19 nt, Homo sapiens
  misc_RNA (1)...(19): siRNA sense strand
uacaaugcggauuuaauga

SEQ ID NO: 1119962 - RNA, 19 nt, Homo sapiens
  misc_RNA (1)...(19): siRNA sense strand
gggagauccgguguccuua

SEQ ID NO: 1119963 - RNA, 19 nt, Homo sapiens
  misc_RNA (1)...(19): siRNA sense strand
gcggauuuaaugaacugua

SEQ ID NO: 1119964 - RNA, 19 nt, Homo sapiens
  misc_RNA (1)...(19): siRNA sense strand
ucaucuacaaugcggauuu

SEQ ID NO: 1119965 - RNA, 19 nt, Homo sapiens
  misc_RNA (1)...(19): siRNA sense strand
uccaggacgaugaauuuaa

SEQ ID NO: 1119966 - RNA, 19 nt, Homo sapiens
  misc_RNA (1)...(19): siRNA sense strand
cggauuuaaugaacuguac

SEQ ID NO: 1119967 - RNA, 19 nt, Homo sapiens
  misc_RNA (1)...(19): siRNA sense strand
ugugggaugucaccuggau

SEQ ID NO: 1119968 - RNA, 19 nt, Homo sapiens
  misc_RNA (1)...(19): siRNA sense strand
gcaauuacuuucugguuaa

SEQ ID NO: 1119969 - RNA, 19 nt, Homo sapiens
  misc_RNA (1)...(19): siRNA sense strand
caaagaggauuucaacaga

SEQ ID NO: 1119970 - RNA, 19 nt, Homo sapiens
  misc_RNA (1)...(19): siRNA sense strand
gcaaguguuucuuaacuga

SEQ ID NO: 1119971 - RNA, 19 nt, Homo sapiens
  misc_RNA (1)...(19): siRNA sense strand
ggauuaacgucucgcaauu

SEQ ID NO: 1119972 - RNA, 19 nt, Homo sapiens
  misc_RNA (1)...(19): siRNA sense strand
gcaccagccucuagucuca

SEQ ID NO: 1119973 - RNA, 19 nt, Homo sapiens
  misc_RNA (1)...(19): siRNA sense strand
gagauccgguguccuuauu

SEQ ID NO: 1119974 - RNA, 19 nt, Homo sapiens
  misc_RNA (1)...(19): siRNA sense strand
gaaacugcuuuauccaaau

SEQ ID NO: 1119975 - RNA, 19 nt, Homo sapiens
  misc_RNA (1)...(19): siRNA sense strand
auacgaaacucaaagagaa

SEQ ID NO: 1119976 - RNA, 19 nt, Homo sapiens
  misc_RNA (1)...(19): siRNA sense strand
caacagaaacugcuuuauc

SEQ ID NO: 1119977 - RNA, 19 nt, Homo sapiens
  misc_RNA (1)...(19): siRNA sense strand
caucuacaaugcggauuua

SEQ ID NO: 1119978 - RNA, 19 nt, Homo sapiens
  misc_RNA (1)...(19): siRNA sense strand
gcaugaaggagucacauuu

SEQ ID NO: 1119979 - RNA, 19 nt, Homo sapiens
  misc_RNA (1)...(19): siRNA sense strand
agaaacugcuuuauccaaa

SEQ ID NO: 1119980 - RNA, 19 nt, Homo sapiens
  misc_RNA (1)...(19): siRNA sense strand
cgcaauuacuuucugguua

SEQ ID NO: 1119981 - RNA, 19 nt, Homo sapiens
  misc_RNA (1)...(19): siRNA sense strand
ggaaccagccgagaaauug

SEQ ID NO: 1119982 - RNA, 19 nt, Homo sapiens
  misc_RNA (1)...(19): siRNA sense strand
gaaaucggaucugcgaaca

SEQ ID NO: 1119983 - RNA, 19 nt, Homo sapiens
  misc_RNA (1)...(19): siRNA sense strand
gaacccaggcucaguaaca

SEQ ID NO: 1119984 - RNA, 19 nt, Homo sapiens
  misc_RNA (1)...(19): siRNA sense strand
gauuaacgucucgcaauua

SEQ ID NO: 1119985 - RNA, 19 nt, Homo sapiens
  misc_RNA (1)...(19): siRNA sense strand
gaagaacagagucguggaa

SEQ ID NO: 1119986 - RNA, 19 nt, Homo sapiens
  misc_RNA (1)...(19): siRNA sense strand
gaauuucuccuguuucauc

SEQ ID NO: 1119987 - RNA, 19 nt, Homo sapiens
  misc_RNA (1)...(19): siRNA sense strand
aaagaggauuucaacagaa

SEQ ID NO: 1119988 - RNA, 19 nt, Homo sapiens
  misc_RNA (1)...(19): siRNA sense strand
guaccgcugcucagaauuu

SEQ ID NO: 1119989 - RNA, 19 nt, Homo sapiens
  misc_RNA (1)...(19): siRNA sense strand
ccaggacgaugaauuuaag

SEQ ID NO: 1119990 - RNA, 19 nt, Homo sapiens
  misc_RNA (1)...(19): siRNA sense strand
ccaauucuuugauucacuu

SEQ ID NO: 1119991 - RNA, 19 nt, Homo sapiens
  misc_RNA (1)...(19): siRNA sense strand
ccgguguccuuauuacaua

SEQ ID NO: 1119992 - RNA, 19 nt, Homo sapiens
  misc_RNA (1)...(19): siRNA sense strand
cagcaaguguuucuuaacu

SEQ ID NO: 1119993 - RNA, 19 nt, Homo sapiens
  misc_RNA (1)...(19): siRNA sense strand
uaacggaaccagccgagaa

SEQ ID NO: 1119994 - RNA, 19 nt, Homo sapiens
  misc_RNA (1)...(19): siRNA sense strand
cuacaaugcggauuuaaug

SEQ ID NO: 1119995 - RNA, 19 nt, Homo sapiens
  misc_RNA (1)...(19): siRNA sense strand
uaacgucucgcaauuacuu

SEQ ID NO: 1119996 - RNA, 19 nt, Homo sapiens
  misc_RNA (1)...(19): siRNA sense strand
cccgugacguccaguauuu

SEQ ID NO: 1119997 - RNA, 19 nt, Homo sapiens
  misc_RNA (1)...(19): siRNA sense strand
ggcauccaauucuuugauu

SEQ ID NO: 1119998 - RNA, 19 nt, Homo sapiens
  misc_RNA (1)...(19): siRNA sense strand
gaaauuugucugcaugaag

SEQ ID NO: 1119999 - RNA, 19 nt, Homo sapiens
  misc_RNA (1)...(19): siRNA sense strand
ggguaccgcugcucagaau

SEQ ID NO: 1120000 - RNA, 19 nt, Homo sapiens
  misc_RNA (1)...(19): siRNA sense strand
ugaaauuugucugcaugaa

SEQ ID NO: 1120001 - RNA, 19 nt, Homo sapiens
  misc_RNA (1)...(19): siRNA sense strand
gcauccaauucuuugauuc

SEQ ID NO: 1120002 - RNA, 19 nt, Homo sapiens
  misc_RNA (1)...(19): siRNA sense strand
caagccuucugcucuguga

SEQ ID NO: 1120003 - RNA, 19 nt, Homo sapiens
  misc_RNA (1)...(19): siRNA sense strand
gauccgguguccuuauuac

SEQ ID NO: 1120004 - RNA, 19 nt, Homo sapiens
  misc_RNA (1)...(19): siRNA sense strand
cgugaauacuagucaaaga

SEQ ID NO: 1120005 - RNA, 19 nt, Homo sapiens
  misc_RNA (1)...(19): siRNA sense strand
cuucagcaaguguuucuua

SEQ ID NO: 1120006 - RNA, 19 nt, Homo sapiens
  misc_RNA (1)...(19): siRNA sense strand
gaugucaccuggauaaccu

SEQ ID NO: 1120007 - RNA, 19 nt, Homo sapiens
  misc_RNA (1)...(19): siRNA sense strand
caugaaggagucacauuug

SEQ ID NO: 1120008 - RNA, 19 nt, Homo sapiens
  misc_RNA (1)...(19): siRNA sense strand
ucaccuggauaaccuguca

SEQ ID NO: 1120009 - RNA, 19 nt, Homo sapiens
  misc_RNA (1)...(19): siRNA sense strand
ggagauccgguguccuuau

SEQ ID NO: 1120010 - RNA, 19 nt, Homo sapiens
  misc_RNA (1)...(19): siRNA sense strand
ucaaagaggauuucaacag

SEQ ID NO: 1120011 - RNA, 19 nt, Homo sapiens
  misc_RNA (1)...(19): siRNA sense strand
guacauacgaaacucaaag

SEQ ID NO: 1120012 - RNA, 19 nt, Homo sapiens
  misc_RNA (1)...(19): siRNA sense strand
augaaggagucacauuuga

SEQ ID NO: 1120013 - RNA, 19 nt, Homo sapiens
  misc_RNA (1)...(19): siRNA sense strand
cagaaacugcuuuauccaa

SEQ ID NO: 1120014 - RNA, 19 nt, Homo sapiens
  misc_RNA (1)...(19): siRNA sense strand
caaugcggauuuaaugaac

SEQ ID NO: 1120015 - RNA, 19 nt, Homo sapiens
  misc_RNA (1)...(19): siRNA sense strand
cauacgaaacucaaagaga

SEQ ID NO: 1120016 - RNA, 19 nt, Homo sapiens
  misc_RNA (1)...(19): siRNA sense strand
acaaugcggauuuaaugaa

SEQ ID NO: 1120017 - RNA, 19 nt, Homo sapiens
  misc_RNA (1)...(19): siRNA sense strand
ucacgugaauacuagucaa

SEQ ID NO: 1120018 - RNA, 19 nt, Homo sapiens
  misc_RNA (1)...(19): siRNA sense strand
caaccuucagcaaguguuu

SEQ ID NO: 1120019 - RNA, 19 nt, Homo sapiens
  misc_RNA (1)...(19): siRNA sense strand
aacagaaacugcuuuaucc

SEQ ID NO: 1120020 - RNA, 19 nt, Homo sapiens
  misc_RNA (1)...(19): siRNA sense strand
gacaagccuucugcucugu

SEQ ID NO: 1120021 - RNA, 19 nt, Homo sapiens
  misc_RNA (1)...(19): siRNA sense strand
gaaccagccgagaaauugg

SEQ ID NO: 1120022 - RNA, 19 nt, Homo sapiens
  misc_RNA (1)...(19): siRNA sense strand
aaucggaucugcgaacagu

SEQ ID NO: 1120023 - RNA, 19 nt, Homo sapiens
  misc_RNA (1)...(19): siRNA sense strand
guggaacccaggcucagua

SEQ ID NO: 1120024 - RNA, 19 nt, Homo sapiens
  misc_RNA (1)...(19): siRNA sense strand
acacaaccuucagcaagug

SEQ ID NO: 1120025 - RNA, 19 nt, Homo sapiens
  misc_RNA (1)...(19): siRNA sense strand
ugggaugucaccuggauaa

SEQ ID NO: 1120026 - RNA, 19 nt, Homo sapiens
  misc_RNA (1)...(19): siRNA sense strand
uaacugacaagaagaacag

SEQ ID NO: 1120027 - RNA, 19 nt, Homo sapiens
  misc_RNA (1)...(19): siRNA sense strand
aacacaaccuucagcaagu

SEQ ID NO: 1120028 - RNA, 19 nt, Homo sapiens
  misc_RNA (1)...(19): siRNA sense strand
acuccaggacgaugaauuu

SEQ ID NO: 1120029 - RNA, 19 nt, Homo sapiens
  misc_RNA (1)...(19): siRNA sense strand
aagcugggacugccaagaa

SEQ ID NO: 1120030 - RNA, 19 nt, Homo sapiens
  misc_RNA (1)...(19): siRNA sense strand
uucagcaaguguuucuuaa

SEQ ID NO: 1120031 - RNA, 19 nt, Homo sapiens
  misc_RNA (1)...(19): siRNA sense strand
cggaaccagccgagaaauu

SEQ ID NO: 1120032 - RNA, 19 nt, Homo sapiens
  misc_RNA (1)...(19): siRNA sense strand
gcucaguaacaacgaaugu

SEQ ID NO: 1120033 - RNA, 19 nt, Homo sapiens
  misc_RNA (1)...(19): siRNA sense strand
gaggguaccgcugcucaga

SEQ ID NO: 1120034 - RNA, 19 nt, Homo sapiens
  misc_RNA (1)...(19): siRNA sense strand
cauccaauucuuugauuca

SEQ ID NO: 1120035 - RNA, 19 nt, Homo sapiens
  misc_RNA (1)...(19): siRNA sense strand
caagaaaacacaaccuuca

SEQ ID NO: 1120036 - RNA, 19 nt, Homo sapiens
  misc_RNA (1)...(19): siRNA sense strand
uacaaugcggauuuaauga

SEQ ID NO: 1120037 - RNA, 19 nt, Homo sapiens
  misc_RNA (1)...(19): siRNA sense strand
gggagauccgguguccuua

SEQ ID NO: 1120038 - RNA, 19 nt, Homo sapiens
  misc_RNA (1)...(19): siRNA sense strand
gcggauuuaaugaacugua

SEQ ID NO: 1120039 - RNA, 19 nt, Homo sapiens
  misc_RNA (1)...(19): siRNA sense strand
ucaucuacaaugcggauuu

SEQ ID NO: 1120040 - RNA, 19 nt, Homo sapiens
  misc_RNA (1)...(19): siRNA sense strand
uccaggacgaugaauuuaa

SEQ ID NO: 1120041 - RNA, 19 nt, Homo sapiens
  misc_RNA (1)...(19): siRNA sense strand
cggauuuaaugaacuguac

SEQ ID NO: 1120042 - RNA, 19 nt, Homo sapiens
  misc_RNA (1)...(19): siRNA sense strand
ugugggaugucaccuggau

SEQ ID NO: 1120043 - RNA, 19 nt, Homo sapiens
  misc_RNA (1)...(19): siRNA sense strand
ggacuuggaugagacaaua

SEQ ID NO: 1120044 - RNA, 19 nt, Homo sapiens
  misc_RNA (1)...(19): siRNA sense strand
ugaaggagauguacaauac

SEQ ID NO: 1120045 - RNA, 19 nt, Homo sapiens
  misc_RNA (1)...(19): siRNA sense strand
gagaacaucuacagugcaa

SEQ ID NO: 1120046 - RNA, 19 nt, Homo sapiens
  misc_RNA (1)...(19): siRNA sense strand
ugacaauggccaagauuua

SEQ ID NO: 1120047 - RNA, 19 nt, Homo sapiens
  misc_RNA (1)...(19): siRNA sense strand
aaacagcgauugucuggau

SEQ ID NO: 1120048 - RNA, 19 nt, Homo sapiens
  misc_RNA (1)...(19): siRNA sense strand
caccaccacucaacuaauu

SEQ ID NO: 1120049 - RNA, 19 nt, Homo sapiens
  misc_RNA (1)...(19): siRNA sense strand
ccaaaguccugcuauaugg

SEQ ID NO: 1120050 - RNA, 19 nt, Homo sapiens
  misc_RNA (1)...(19): siRNA sense strand
gacaaggcaucaccaaauc

SEQ ID NO: 1120051 - RNA, 19 nt, Homo sapiens
  misc_RNA (1)...(19): siRNA sense strand
gcauuggccuuaugaugga

SEQ ID NO: 1120052 - RNA, 19 nt, Homo sapiens
  misc_RNA (1)...(19): siRNA sense strand
ggacauuugcauccagaua

SEQ ID NO: 1120053 - RNA, 19 nt, Homo sapiens
  misc_RNA (1)...(19): siRNA sense strand
gaauacaacacacacaaug

SEQ ID NO: 1120054 - RNA, 19 nt, Homo sapiens
  misc_RNA (1)...(19): siRNA sense strand
gcacaacaggguucuauca

SEQ ID NO: 1120055 - RNA, 19 nt, Homo sapiens
  misc_RNA (1)...(19): siRNA sense strand
gcacuaaaccucaucaacu

SEQ ID NO: 1120056 - RNA, 19 nt, Homo sapiens
  misc_RNA (1)...(19): siRNA sense strand
gcugacggcuuccacaguu

SEQ ID NO: 1120057 - RNA, 19 nt, Homo sapiens
  misc_RNA (1)...(19): siRNA sense strand
acacaucuguucuucaaug

SEQ ID NO: 1120058 - RNA, 19 nt, Homo sapiens
  misc_RNA (1)...(19): siRNA sense strand
gaucggugaugguguggaa

SEQ ID NO: 1120059 - RNA, 19 nt, Homo sapiens
  misc_RNA (1)...(19): siRNA sense strand
cccuggagcuggaguauuu

SEQ ID NO: 1120060 - RNA, 19 nt, Homo sapiens
  misc_RNA (1)...(19): siRNA sense strand
gacaauggccaagauuuaa

SEQ ID NO: 1120061 - RNA, 19 nt, Homo sapiens
  misc_RNA (1)...(19): siRNA sense strand
gcgauugucuggauaaacu

SEQ ID NO: 1120062 - RNA, 19 nt, Homo sapiens
  misc_RNA (1)...(19): siRNA sense strand
auacacaucuguucuucaa

SEQ ID NO: 1120063 - RNA, 19 nt, Homo sapiens
  misc_RNA (1)...(19): siRNA sense strand
ucacccagccucacuguaa

SEQ ID NO: 1120064 - RNA, 19 nt, Homo sapiens
  misc_RNA (1)...(19): siRNA sense strand
ggucuguguuuccuauuga

SEQ ID NO: 1120065 - RNA, 19 nt, Homo sapiens
  misc_RNA (1)...(19): siRNA sense strand
gccaagauuuaagcacaua

SEQ ID NO: 1120066 - RNA, 19 nt, Homo sapiens
  misc_RNA (1)...(19): siRNA sense strand
caaccagaguuccgaguca

SEQ ID NO: 1120067 - RNA, 19 nt, Homo sapiens
  misc_RNA (1)...(19): siRNA sense strand
uacaauaccuacaagaaca

SEQ ID NO: 1120068 - RNA, 19 nt, Homo sapiens
  misc_RNA (1)...(19): siRNA sense strand
gugaaggagauguacaaua

SEQ ID NO: 1120069 - RNA, 19 nt, Homo sapiens
  misc_RNA (1)...(19): siRNA sense strand
gcacaagccuauggaaucc

SEQ ID NO: 1120070 - RNA, 19 nt, Homo sapiens
  misc_RNA (1)...(19): siRNA sense strand
cgaaagagggagacacaga

SEQ ID NO: 1120071 - RNA, 19 nt, Homo sapiens
  misc_RNA (1)...(19): siRNA sense strand
agacaaggcaucaccaaau

SEQ ID NO: 1120072 - RNA, 19 nt, Homo sapiens
  misc_RNA (1)...(19): siRNA sense strand
gccaaaguccugcuauaug

SEQ ID NO: 1120073 - RNA, 19 nt, Homo sapiens
  misc_RNA (1)...(19): siRNA sense strand
ggagugugcaccaggacua

SEQ ID NO: 1120074 - RNA, 19 nt, Homo sapiens
  misc_RNA (1)...(19): siRNA sense strand
ggagcuggaguauuuauag

SEQ ID NO: 1120075 - RNA, 19 nt, Homo sapiens
  misc_RNA (1)...(19): siRNA sense strand
uggccaaaguccugcuaua

SEQ ID NO: 1120076 - RNA, 19 nt, Homo sapiens
  misc_RNA (1)...(19): siRNA sense strand
gcccaacugugucaaugug

SEQ ID NO: 1120077 - RNA, 19 nt, Homo sapiens
  misc_RNA (1)...(19): siRNA sense strand
ggaggauugugaccagauc

SEQ ID NO: 1120078 - RNA, 19 nt, Homo sapiens
  misc_RNA (1)...(19): siRNA sense strand
ggucaccaccacucaacua

SEQ ID NO: 1120079 - RNA, 19 nt, Homo sapiens
  misc_RNA (1)...(19): siRNA sense strand
gugaccagauccacguuga

SEQ ID NO: 1120080 - RNA, 19 nt, Homo sapiens
  misc_RNA (1)...(19): siRNA sense strand
gggucuguguuuccuauug

SEQ ID NO: 1120081 - RNA, 19 nt, Homo sapiens
  misc_RNA (1)...(19): siRNA sense strand
gcugcuguguggacucuga

SEQ ID NO: 1120082 - RNA, 19 nt, Homo sapiens
  misc_RNA (1)...(19): siRNA sense strand
ggccaaaguccugcuauau

SEQ ID NO: 1120083 - RNA, 19 nt, Homo sapiens
  misc_RNA (1)...(19): siRNA sense strand
guacaauaccuacaagaac

SEQ ID NO: 1120084 - RNA, 19 nt, Homo sapiens
  misc_RNA (1)...(19): siRNA sense strand
ggucuaagaggagcaguga

SEQ ID NO: 1120085 - RNA, 19 nt, Homo sapiens
  misc_RNA (1)...(19): siRNA sense strand
gagaggauaaugcagagau

SEQ ID NO: 1120086 - RNA, 19 nt, Homo sapiens
  misc_RNA (1)...(19): siRNA sense strand
cacuaaaccucaucaacuc

SEQ ID NO: 1120087 - RNA, 19 nt, Homo sapiens
  misc_RNA (1)...(19): siRNA sense strand
gcgcauuggccuuaugaug

SEQ ID NO: 1120088 - RNA, 19 nt, Homo sapiens
  misc_RNA (1)...(19): siRNA sense strand
acaacaggguucuaucaag

SEQ ID NO: 1120089 - RNA, 19 nt, Homo sapiens
  misc_RNA (1)...(19): siRNA sense strand
agaggauaaugcagagauu

SEQ ID NO: 1120090 - RNA, 19 nt, Homo sapiens
  misc_RNA (1)...(19): siRNA sense strand
gauuuaagcacauacaacu

SEQ ID NO: 1120091 - RNA, 19 nt, Homo sapiens
  misc_RNA (1)...(19): siRNA sense strand
gacagagcccauacaccua

SEQ ID NO: 1120092 - RNA, 19 nt, Homo sapiens
  misc_RNA (1)...(19): siRNA sense strand
cacccagccucacuguaaa

SEQ ID NO: 1120093 - RNA, 19 nt, Homo sapiens
  misc_RNA (1)...(19): siRNA sense strand
gaugacaauggccaagauu

SEQ ID NO: 1120094 - RNA, 19 nt, Homo sapiens
  misc_RNA (1)...(19): siRNA sense strand
gaccagauccacguugaug

SEQ ID NO: 1120095 - RNA, 19 nt, Homo sapiens
  misc_RNA (1)...(19): siRNA sense strand
cacaucuguucuucaauga

SEQ ID NO: 1120096 - RNA, 19 nt, Homo sapiens
  misc_RNA (1)...(19): siRNA sense strand
guugauaggcacucccaaa

SEQ ID NO: 1120097 - RNA, 19 nt, Homo sapiens
  misc_RNA (1)...(19): siRNA sense strand
gugaauacaacacacacaa

SEQ ID NO: 1120098 - RNA, 19 nt, Homo sapiens
  misc_RNA (1)...(19): siRNA sense strand
ccacuggacagagcccaua

SEQ ID NO: 1120099 - RNA, 19 nt, Homo sapiens
  misc_RNA (1)...(19): siRNA sense strand
gcagagauucggcagaaaa

SEQ ID NO: 1120100 - RNA, 19 nt, Homo sapiens
  misc_RNA (1)...(19): siRNA sense strand
uuacccaccuccagcacaa

SEQ ID NO: 1120101 - RNA, 19 nt, Homo sapiens
  misc_RNA (1)...(19): siRNA sense strand
gcccauacaccuaccagau

SEQ ID NO: 1120102 - RNA, 19 nt, Homo sapiens
  misc_RNA (1)...(19): siRNA sense strand
cagcgauugucuggauaaa

SEQ ID NO: 1120103 - RNA, 19 nt, Homo sapiens
  misc_RNA (1)...(19): siRNA sense strand
ugaaggcacuaaaccucau

SEQ ID NO: 1120104 - RNA, 19 nt, Homo sapiens
  misc_RNA (1)...(19): siRNA sense strand
gauaggcacucccaaaagg

SEQ ID NO: 1120105 - RNA, 19 nt, Homo sapiens
  misc_RNA (1)...(19): siRNA sense strand
ggccaagauuuaagcacau

SEQ ID NO: 1120106 - RNA, 19 nt, Homo sapiens
  misc_RNA (1)...(19): siRNA sense strand
augcagagauucggcagaa

SEQ ID NO: 1120107 - RNA, 19 nt, Homo sapiens
  misc_RNA (1)...(19): siRNA sense strand
caaccaagacagggaagga

SEQ ID NO: 1120108 - RNA, 19 nt, Homo sapiens
  misc_RNA (1)...(19): siRNA sense strand
uauuacggcucauccuaca

SEQ ID NO: 1120109 - RNA, 19 nt, Homo sapiens
  misc_RNA (1)...(19): siRNA sense strand
gagcugcuucgagaggaua

SEQ ID NO: 1120110 - RNA, 19 nt, Homo sapiens
  misc_RNA (1)...(19): siRNA sense strand
cagcucuucuccagaucuu

SEQ ID NO: 1120111 - RNA, 19 nt, Homo sapiens
  misc_RNA (1)...(19): siRNA sense strand
cagacaaggcaucaccaaa

SEQ ID NO: 1120112 - RNA, 19 nt, Homo sapiens
  misc_RNA (1)...(19): siRNA sense strand
ucccagcucuucuccagau

SEQ ID NO: 1120113 - RNA, 19 nt, Homo sapiens
  misc_RNA (1)...(19): siRNA sense strand
gggugaaggagauguacaa

SEQ ID NO: 1120114 - RNA, 19 nt, Homo sapiens
  misc_RNA (1)...(19): siRNA sense strand
ugaauacaacacacacaau

SEQ ID NO: 1120115 - RNA, 19 nt, Homo sapiens
  misc_RNA (1)...(19): siRNA sense strand
cagcacaagccuauggaau

SEQ ID NO: 1120116 - RNA, 19 nt, Homo sapiens
  misc_RNA (1)...(19): siRNA sense strand
gacauuugcauccagauac

SEQ ID NO: 1120117 - RNA, 19 nt, Homo sapiens
  misc_RNA (1)...(19): siRNA sense strand
gaggauaaugcagagauuc

SEQ ID NO: 1120118 - RNA, 19 nt, Homo sapiens
  misc_RNA (1)...(19): siRNA sense strand
caagauuuaagcacauaca

SEQ ID NO: 1120119 - RNA, 19 nt, Homo sapiens
  misc_RNA (1)...(19): siRNA sense strand
agaugacaauggccaagau

SEQ ID NO: 1120120 - RNA, 19 nt, Homo sapiens
  misc_RNA (1)...(19): siRNA sense strand
auacaacacacacaaugga

SEQ ID NO: 1120121 - RNA, 19 nt, Homo sapiens
  misc_RNA (1)...(19): siRNA sense strand
ccagaugcacggcacaaca

SEQ ID NO: 1120122 - RNA, 19 nt, Homo sapiens
  misc_RNA (1)...(19): siRNA sense strand
cacaacaggguucuaucaa

SEQ ID NO: 1120123 - RNA, 19 nt, Homo sapiens
  misc_RNA (1)...(19): siRNA sense strand
gauacacaucuguucuuca

SEQ ID NO: 1120124 - RNA, 19 nt, Homo sapiens
  misc_RNA (1)...(19): siRNA sense strand
cuucaaccuugcagauaca

SEQ ID NO: 1120125 - RNA, 19 nt, Homo sapiens
  misc_RNA (1)...(19): siRNA sense strand
gauugucuggauaaacuga

SEQ ID NO: 1120126 - RNA, 19 nt, Homo sapiens
  misc_RNA (1)...(19): siRNA sense strand
uuuaagcacauacaacuuc

SEQ ID NO: 1120127 - RNA, 19 nt, Homo sapiens
  misc_RNA (1)...(19): siRNA sense strand
caaccuugcagauacacau

SEQ ID NO: 1120128 - RNA, 19 nt, Homo sapiens
  misc_RNA (1)...(19): siRNA sense strand
ggacuuggaugagacaaua

SEQ ID NO: 1120129 - RNA, 19 nt, Homo sapiens
  misc_RNA (1)...(19): siRNA sense strand
ugaaggagauguacaauac

SEQ ID NO: 1120130 - RNA, 19 nt, Homo sapiens
  misc_RNA (1)...(19): siRNA sense strand
gagaacaucuacagugcaa

SEQ ID NO: 1120131 - RNA, 19 nt, Homo sapiens
  misc_RNA (1)...(19): siRNA sense strand
ugacaauggccaagauuua

SEQ ID NO: 1120132 - RNA, 19 nt, Homo sapiens
  misc_RNA (1)...(19): siRNA sense strand
aaacagcgauugucuggau

SEQ ID NO: 1120133 - RNA, 19 nt, Homo sapiens
  misc_RNA (1)...(19): siRNA sense strand
caccaccacucaacuaauu

SEQ ID NO: 1120134 - RNA, 19 nt, Homo sapiens
  misc_RNA (1)...(19): siRNA sense strand
ccaaaguccugcuauaugg

SEQ ID NO: 1120135 - RNA, 19 nt, Homo sapiens
  misc_RNA (1)...(19): siRNA sense strand
gacaaggcaucaccaaauc

SEQ ID NO: 1120136 - RNA, 19 nt, Homo sapiens
  misc_RNA (1)...(19): siRNA sense strand
gcauuggccuuaugaugga

SEQ ID NO: 1120137 - RNA, 19 nt, Homo sapiens
  misc_RNA (1)...(19): siRNA sense strand
ggacauuugcauccagaua

SEQ ID NO: 1120138 - RNA, 19 nt, Homo sapiens
  misc_RNA (1)...(19): siRNA sense strand
gaauacaacacacacaaug

SEQ ID NO: 1120139 - RNA, 19 nt, Homo sapiens
  misc_RNA (1)...(19): siRNA sense strand
gcacaacaggguucuauca

SEQ ID NO: 1120140 - RNA, 19 nt, Homo sapiens
  misc_RNA (1)...(19): siRNA sense strand
gcacuaaaccucaucaacu

SEQ ID NO: 1120141 - RNA, 19 nt, Homo sapiens
  misc_RNA (1)...(19): siRNA sense strand
gcugacggcuuccacaguu

SEQ ID NO: 1120142 - RNA, 19 nt, Homo sapiens
  misc_RNA (1)...(19): siRNA sense strand
acacaucuguucuucaaug

SEQ ID NO: 1120143 - RNA, 19 nt, Homo sapiens
  misc_RNA (1)...(19): siRNA sense strand
gaucggugaugguguggaa

SEQ ID NO: 1120144 - RNA, 19 nt, Homo sapiens
  misc_RNA (1)...(19): siRNA sense strand
cccuggagcuggaguauuu

SEQ ID NO: 1120145 - RNA, 19 nt, Homo sapiens
  misc_RNA (1)...(19): siRNA sense strand
gacaauggccaagauuuaa

SEQ ID NO: 1120146 - RNA, 19 nt, Homo sapiens
  misc_RNA (1)...(19): siRNA sense strand
gcgauugucuggauaaacu

SEQ ID NO: 1120147 - RNA, 19 nt, Homo sapiens
  misc_RNA (1)...(19): siRNA sense strand
auacacaucuguucuucaa

SEQ ID NO: 1120148 - RNA, 19 nt, Homo sapiens
  misc_RNA (1)...(19): siRNA sense strand
ucacccagccucacuguaa

SEQ ID NO: 1120149 - RNA, 19 nt, Homo sapiens
  misc_RNA (1)...(19): siRNA sense strand
ggucuguguuuccuauuga

SEQ ID NO: 1120150 - RNA, 19 nt, Homo sapiens
  misc_RNA (1)...(19): siRNA sense strand
gccaagauuuaagcacaua

SEQ ID NO: 1120151 - RNA, 19 nt, Homo sapiens
  misc_RNA (1)...(19): siRNA sense strand
caaccagaguuccgaguca

SEQ ID NO: 1120152 - RNA, 19 nt, Homo sapiens
  misc_RNA (1)...(19): siRNA sense strand
uacaauaccuacaagaaca

SEQ ID NO: 1120153 - RNA, 19 nt, Homo sapiens
  misc_RNA (1)...(19): siRNA sense strand
gugaaggagauguacaaua

SEQ ID NO: 1120154 - RNA, 19 nt, Homo sapiens
  misc_RNA (1)...(19): siRNA sense strand
gcacaagccuauggaaucc

SEQ ID NO: 1120155 - RNA, 19 nt, Homo sapiens
  misc_RNA (1)...(19): siRNA sense strand
cgaaagagggagacacaga

SEQ ID NO: 1120156 - RNA, 19 nt, Homo sapiens
  misc_RNA (1)...(19): siRNA sense strand
agacaaggcaucaccaaau

SEQ ID NO: 1120157 - RNA, 19 nt, Homo sapiens
  misc_RNA (1)...(19): siRNA sense strand
gccaaaguccugcuauaug

SEQ ID NO: 1120158 - RNA, 19 nt, Homo sapiens
  misc_RNA (1)...(19): siRNA sense strand
ggagugugcaccaggacua

SEQ ID NO: 1120159 - RNA, 19 nt, Homo sapiens
  misc_RNA (1)...(19): siRNA sense strand
ggagcuggaguauuuauag

SEQ ID NO: 1120160 - RNA, 19 nt, Homo sapiens
  misc_RNA (1)...(19): siRNA sense strand
uggccaaaguccugcuaua

SEQ ID NO: 1120161 - RNA, 19 nt, Homo sapiens
  misc_RNA (1)...(19): siRNA sense strand
gcccaacugugucaaugug

SEQ ID NO: 1120162 - RNA, 19 nt, Homo sapiens
  misc_RNA (1)...(19): siRNA sense strand
ggaggauugugaccagauc

SEQ ID NO: 1120163 - RNA, 19 nt, Homo sapiens
  misc_RNA (1)...(19): siRNA sense strand
ggucaccaccacucaacua

SEQ ID NO: 1120164 - RNA, 19 nt, Homo sapiens
  misc_RNA (1)...(19): siRNA sense strand
gugaccagauccacguuga

SEQ ID NO: 1120165 - RNA, 19 nt, Homo sapiens
  misc_RNA (1)...(19): siRNA sense strand
gggucuguguuuccuauug

SEQ ID NO: 1120166 - RNA, 19 nt, Homo sapiens
  misc_RNA (1)...(19): siRNA sense strand
gcugcuguguggacucuga

SEQ ID NO: 1120167 - RNA, 19 nt, Homo sapiens
  misc_RNA (1)...(19): siRNA sense strand
ggccaaaguccugcuauau

SEQ ID NO: 1120168 - RNA, 19 nt, Homo sapiens
  misc_RNA (1)...(19): siRNA sense strand
guacaauaccuacaagaac

SEQ ID NO: 1120169 - RNA, 19 nt, Homo sapiens
  misc_RNA (1)...(19): siRNA sense strand
ggucuaagaggagcaguga

SEQ ID NO: 1120170 - RNA, 19 nt, Homo sapiens
  misc_RNA (1)...(19): siRNA sense strand
gagaggauaaugcagagau

SEQ ID NO: 1120171 - RNA, 19 nt, Homo sapiens
  misc_RNA (1)...(19): siRNA sense strand
cacuaaaccucaucaacuc

SEQ ID NO: 1120172 - RNA, 19 nt, Homo sapiens
  misc_RNA (1)...(19): siRNA sense strand
gcgcauuggccuuaugaug

SEQ ID NO: 1120173 - RNA, 19 nt, Homo sapiens
  misc_RNA (1)...(19): siRNA sense strand
acaacaggguucuaucaag

SEQ ID NO: 1120174 - RNA, 19 nt, Homo sapiens
  misc_RNA (1)...(19): siRNA sense strand
agaggauaaugcagagauu

SEQ ID NO: 1120175 - RNA, 19 nt, Homo sapiens
  misc_RNA (1)...(19): siRNA sense strand
gauuuaagcacauacaacu

SEQ ID NO: 1120176 - RNA, 19 nt, Homo sapiens
  misc_RNA (1)...(19): siRNA sense strand
gacagagcccauacaccua

SEQ ID NO: 1120177 - RNA, 19 nt, Homo sapiens
  misc_RNA (1)...(19): siRNA sense strand
cacccagccucacuguaaa

SEQ ID NO: 1120178 - RNA, 19 nt, Homo sapiens
  misc_RNA (1)...(19): siRNA sense strand
gaugacaauggccaagauu

SEQ ID NO: 1120179 - RNA, 19 nt, Homo sapiens
  misc_RNA (1)...(19): siRNA sense strand
gaccagauccacguugaug

SEQ ID NO: 1120180 - RNA, 19 nt, Homo sapiens
  misc_RNA (1)...(19): siRNA sense strand
cacaucuguucuucaauga

SEQ ID NO: 1120181 - RNA, 19 nt, Homo sapiens
  misc_RNA (1)...(19): siRNA sense strand
guugauaggcacucccaaa

SEQ ID NO: 1120182 - RNA, 19 nt, Homo sapiens
  misc_RNA (1)...(19): siRNA sense strand
gugaauacaacacacacaa

SEQ ID NO: 1120183 - RNA, 19 nt, Homo sapiens
  misc_RNA (1)...(19): siRNA sense strand
ccacuggacagagcccaua

SEQ ID NO: 1120184 - RNA, 19 nt, Homo sapiens
  misc_RNA (1)...(19): siRNA sense strand
gcagagauucggcagaaaa

SEQ ID NO: 1120185 - RNA, 19 nt, Homo sapiens
  misc_RNA (1)...(19): siRNA sense strand
uuacccaccuccagcacaa

SEQ ID NO: 1120186 - RNA, 19 nt, Homo sapiens
  misc_RNA (1)...(19): siRNA sense strand
gcccauacaccuaccagau

SEQ ID NO: 1120187 - RNA, 19 nt, Homo sapiens
  misc_RNA (1)...(19): siRNA sense strand
cagcgauugucuggauaaa

SEQ ID NO: 1120188 - RNA, 19 nt, Homo sapiens
  misc_RNA (1)...(19): siRNA sense strand
ugaaggcacuaaaccucau

SEQ ID NO: 1120189 - RNA, 19 nt, Homo sapiens
  misc_RNA (1)...(19): siRNA sense strand
gauaggcacucccaaaagg

SEQ ID NO: 1120190 - RNA, 19 nt, Homo sapiens
  misc_RNA (1)...(19): siRNA sense strand
ggccaagauuuaagcacau

SEQ ID NO: 1120191 - RNA, 19 nt, Homo sapiens
  misc_RNA (1)...(19): siRNA sense strand
augcagagauucggcagaa

SEQ ID NO: 1120192 - RNA, 19 nt, Homo sapiens
  misc_RNA (1)...(19): siRNA sense strand
caaccaagacagggaagga

SEQ ID NO: 1120193 - RNA, 19 nt, Homo sapiens
  misc_RNA (1)...(19): siRNA sense strand
uauuacggcucauccuaca

SEQ ID NO: 1120194 - RNA, 19 nt, Homo sapiens
  misc_RNA (1)...(19): siRNA sense strand
gagcugcuucgagaggaua

SEQ ID NO: 1120195 - RNA, 19 nt, Homo sapiens
  misc_RNA (1)...(19): siRNA sense strand
cagcucuucuccagaucuu

SEQ ID NO: 1120196 - RNA, 19 nt, Homo sapiens
  misc_RNA (1)...(19): siRNA sense strand
cagacaaggcaucaccaaa

SEQ ID NO: 1120197 - RNA, 19 nt, Homo sapiens
  misc_RNA (1)...(19): siRNA sense strand
ucccagcucuucuccagau

SEQ ID NO: 1120198 - RNA, 19 nt, Homo sapiens
  misc_RNA (1)...(19): siRNA sense strand
gggugaaggagauguacaa

SEQ ID NO: 1120199 - RNA, 19 nt, Homo sapiens
  misc_RNA (1)...(19): siRNA sense strand
ugaauacaacacacacaau

SEQ ID NO: 1120200 - RNA, 19 nt, Homo sapiens
  misc_RNA (1)...(19): siRNA sense strand
cagcacaagccuauggaau

SEQ ID NO: 1120201 - RNA, 19 nt, Homo sapiens
  misc_RNA (1)...(19): siRNA sense strand
gacauuugcauccagauac

SEQ ID NO: 1120202 - RNA, 19 nt, Homo sapiens
  misc_RNA (1)...(19): siRNA sense strand
gaggauaaugcagagauuc

SEQ ID NO: 1120203 - RNA, 19 nt, Homo sapiens
  misc_RNA (1)...(19): siRNA sense strand
caagauuuaagcacauaca

SEQ ID NO: 1120204 - RNA, 19 nt, Homo sapiens
  misc_RNA (1)...(19): siRNA sense strand
agaugacaauggccaagau

SEQ ID NO: 1120205 - RNA, 19 nt, Homo sapiens
  misc_RNA (1)...(19): siRNA sense strand
auacaacacacacaaugga

SEQ ID NO: 1120206 - RNA, 19 nt, Homo sapiens
  misc_RNA (1)...(19): siRNA sense strand
ccagaugcacggcacaaca

SEQ ID NO: 1120207 - RNA, 19 nt, Homo sapiens
  misc_RNA (1)...(19): siRNA sense strand
cacaacaggguucuaucaa

SEQ ID NO: 1120208 - RNA, 19 nt, Homo sapiens
  misc_RNA (1)...(19): siRNA sense strand
gauacacaucuguucuuca

SEQ ID NO: 1120209 - RNA, 19 nt, Homo sapiens
  misc_RNA (1)...(19): siRNA sense strand
cuucaaccuugcagauaca

SEQ ID NO: 1120210 - RNA, 19 nt, Homo sapiens
  misc_RNA (1)...(19): siRNA sense strand
gauugucuggauaaacuga

SEQ ID NO: 1120211 - RNA, 19 nt, Homo sapiens
  misc_RNA (1)...(19): siRNA sense strand
uuuaagcacauacaacuuc

SEQ ID NO: 1120212 - RNA, 19 nt, Homo sapiens
  misc_RNA (1)...(19): siRNA sense strand
caaccuugcagauacacau

SEQ ID NO: 1120213 - RNA, 19 nt, Homo sapiens
  misc_RNA (1)...(19): siRNA sense strand
ggacuuggaugagacaaua

SEQ ID NO: 1120214 - RNA, 19 nt, Homo sapiens
  misc_RNA (1)...(19): siRNA sense strand
ugaaggagauguacaauac

SEQ ID NO: 1120215 - RNA, 19 nt, Homo sapiens
  misc_RNA (1)...(19): siRNA sense strand
gagaacaucuacagugcaa

SEQ ID NO: 1120216 - RNA, 19 nt, Homo sapiens
  misc_RNA (1)...(19): siRNA sense strand
ugacaauggccaagauuua

SEQ ID NO: 1120217 - RNA, 19 nt, Homo sapiens
  misc_RNA (1)...(19): siRNA sense strand
aaacagcgauugucuggau

SEQ ID NO: 1120218 - RNA, 19 nt, Homo sapiens
  misc_RNA (1)...(19): siRNA sense strand
caccaccacucaacuaauu

SEQ ID NO: 1120219 - RNA, 19 nt, Homo sapiens
  misc_RNA (1)...(19): siRNA sense strand
ccaaaguccugcuauaugg

SEQ ID NO: 1120220 - RNA, 19 nt, Homo sapiens
  misc_RNA (1)...(19): siRNA sense strand
gacaaggcaucaccaaauc

SEQ ID NO: 1120221 - RNA, 19 nt, Homo sapiens
  misc_RNA (1)...(19): siRNA sense strand
gcauuggccuuaugaugga

SEQ ID NO: 1120222 - RNA, 19 nt, Homo sapiens
  misc_RNA (1)...(19): siRNA sense strand
ggacauuugcauccagaua

SEQ ID NO: 1120223 - RNA, 19 nt, Homo sapiens
  misc_RNA (1)...(19): siRNA sense strand
gaauacaacacacacaaug

SEQ ID NO: 1120224 - RNA, 19 nt, Homo sapiens
  misc_RNA (1)...(19): siRNA sense strand
gcacaacaggguucuauca

SEQ ID NO: 1120225 - RNA, 19 nt, Homo sapiens
  misc_RNA (1)...(19): siRNA sense strand
gcacuaaaccucaucaacu

SEQ ID NO: 1120226 - RNA, 19 nt, Homo sapiens
  misc_RNA (1)...(19): siRNA sense strand
gcugacggcuuccacaguu

SEQ ID NO: 1120227 - RNA, 19 nt, Homo sapiens
  misc_RNA (1)...(19): siRNA sense strand
acacaucuguucuucaaug

SEQ ID NO: 1120228 - RNA, 19 nt, Homo sapiens
  misc_RNA (1)...(19): siRNA sense strand
gaucggugaugguguggaa

SEQ ID NO: 1120229 - RNA, 19 nt, Homo sapiens
  misc_RNA (1)...(19): siRNA sense strand
cccuggagcuggaguauuu

SEQ ID NO: 1120230 - RNA, 19 nt, Homo sapiens
  misc_RNA (1)...(19): siRNA sense strand
gacaauggccaagauuuaa

SEQ ID NO: 1120231 - RNA, 19 nt, Homo sapiens
  misc_RNA (1)...(19): siRNA sense strand
gcgauugucuggauaaacu

SEQ ID NO: 1120232 - RNA, 19 nt, Homo sapiens
  misc_RNA (1)...(19): siRNA sense strand
auacacaucuguucuucaa

SEQ ID NO: 1120233 - RNA, 19 nt, Homo sapiens
  misc_RNA (1)...(19): siRNA sense strand
ucacccagccucacuguaa

SEQ ID NO: 1120234 - RNA, 19 nt, Homo sapiens
  misc_RNA (1)...(19): siRNA sense strand
ggucuguguuuccuauuga

SEQ ID NO: 1120235 - RNA, 19 nt, Homo sapiens
  misc_RNA (1)...(19): siRNA sense strand
gccaagauuuaagcacaua

SEQ ID NO: 1120236 - RNA, 19 nt, Homo sapiens
  misc_RNA (1)...(19): siRNA sense strand
caaccagaguuccgaguca

SEQ ID NO: 1120237 - RNA, 19 nt, Homo sapiens
  misc_RNA (1)...(19): siRNA sense strand
uacaauaccuacaagaaca

SEQ ID NO: 1120238 - RNA, 19 nt, Homo sapiens
  misc_RNA (1)...(19): siRNA sense strand
gugaaggagauguacaaua

SEQ ID NO: 1120239 - RNA, 19 nt, Homo sapiens
  misc_RNA (1)...(19): siRNA sense strand
gcacaagccuauggaaucc

SEQ ID NO: 1120240 - RNA, 19 nt, Homo sapiens
  misc_RNA (1)...(19): siRNA sense strand
cgaaagagggagacacaga

SEQ ID NO: 1120241 - RNA, 19 nt, Homo sapiens
  misc_RNA (1)...(19): siRNA sense strand
agacaaggcaucaccaaau

SEQ ID NO: 1120242 - RNA, 19 nt, Homo sapiens
  misc_RNA (1)...(19): siRNA sense strand
gccaaaguccugcuauaug

SEQ ID NO: 1120243 - RNA, 19 nt, Homo sapiens
  misc_RNA (1)...(19): siRNA sense strand
ggagugugcaccaggacua

SEQ ID NO: 1120244 - RNA, 19 nt, Homo sapiens
  misc_RNA (1)...(19): siRNA sense strand
ggagcuggaguauuuauag

SEQ ID NO: 1120245 - RNA, 19 nt, Homo sapiens
  misc_RNA (1)...(19): siRNA sense strand
uggccaaaguccugcuaua

SEQ ID NO: 1120246 - RNA, 19 nt, Homo sapiens
  misc_RNA (1)...(19): siRNA sense strand
gcccaacugugucaaugug

SEQ ID NO: 1120247 - RNA, 19 nt, Homo sapiens
  misc_RNA (1)...(19): siRNA sense strand
ggaggauugugaccagauc

SEQ ID NO: 1120248 - RNA, 19 nt, Homo sapiens
  misc_RNA (1)...(19): siRNA sense strand
ggucaccaccacucaacua

SEQ ID NO: 1120249 - RNA, 19 nt, Homo sapiens
  misc_RNA (1)...(19): siRNA sense strand
gugaccagauccacguuga

SEQ ID NO: 1120250 - RNA, 19 nt, Homo sapiens
  misc_RNA (1)...(19): siRNA sense strand
gggucuguguuuccuauug

SEQ ID NO: 1120251 - RNA, 19 nt, Homo sapiens
  misc_RNA (1)...(19): siRNA sense strand
gcugcuguguggacucuga

SEQ ID NO: 1120252 - RNA, 19 nt, Homo sapiens
  misc_RNA (1)...(19): siRNA sense strand
ggccaaaguccugcuauau

SEQ ID NO: 1120253 - RNA, 19 nt, Homo sapiens
  misc_RNA (1)...(19): siRNA sense strand
guacaauaccuacaagaac

SEQ ID NO: 1120254 - RNA, 19 nt, Homo sapiens
  misc_RNA (1)...(19): siRNA sense strand
ggucuaagaggagcaguga

SEQ ID NO: 1120255 - RNA, 19 nt, Homo sapiens
  misc_RNA (1)...(19): siRNA sense strand
gagaggauaaugcagagau

SEQ ID NO: 1120256 - RNA, 19 nt, Homo sapiens
  misc_RNA (1)...(19): siRNA sense strand
cacuaaaccucaucaacuc

SEQ ID NO: 1120257 - RNA, 19 nt, Homo sapiens
  misc_RNA (1)...(19): siRNA sense strand
gcgcauuggccuuaugaug

SEQ ID NO: 1120258 - RNA, 19 nt, Homo sapiens
  misc_RNA (1)...(19): siRNA sense strand
acaacaggguucuaucaag

SEQ ID NO: 1120259 - RNA, 19 nt, Homo sapiens
  misc_RNA (1)...(19): siRNA sense strand
agaggauaaugcagagauu

SEQ ID NO: 1120260 - RNA, 19 nt, Homo sapiens
  misc_RNA (1)...(19): siRNA sense strand
gauuuaagcacauacaacu

SEQ ID NO: 1120261 - RNA, 19 nt, Homo sapiens
  misc_RNA (1)...(19): siRNA sense strand
gacagagcccauacaccua

SEQ ID NO: 1120262 - RNA, 19 nt, Homo sapiens
  misc_RNA (1)...(19): siRNA sense strand
cacccagccucacuguaaa

SEQ ID NO: 1120263 - RNA, 19 nt, Homo sapiens
  misc_RNA (1)...(19): siRNA sense strand
gaugacaauggccaagauu

SEQ ID NO: 1120264 - RNA, 19 nt, Homo sapiens
  misc_RNA (1)...(19): siRNA sense strand
gaccagauccacguugaug

SEQ ID NO: 1120265 - RNA, 19 nt, Homo sapiens
  misc_RNA (1)...(19): siRNA sense strand
cacaucuguucuucaauga

SEQ ID NO: 1120266 - RNA, 19 nt, Homo sapiens
  misc_RNA (1)...(19): siRNA sense strand
guugauaggcacucccaaa

SEQ ID NO: 1120267 - RNA, 19 nt, Homo sapiens
  misc_RNA (1)...(19): siRNA sense strand
gugaauacaacacacacaa

SEQ ID NO: 1120268 - RNA, 19 nt, Homo sapiens
  misc_RNA (1)...(19): siRNA sense strand
ccacuggacagagcccaua

SEQ ID NO: 1120269 - RNA, 19 nt, Homo sapiens
  misc_RNA (1)...(19): siRNA sense strand
gcagagauucggcagaaaa

SEQ ID NO: 1120270 - RNA, 19 nt, Homo sapiens
  misc_RNA (1)...(19): siRNA sense strand
uuacccaccuccagcacaa

SEQ ID NO: 1120271 - RNA, 19 nt, Homo sapiens
  misc_RNA (1)...(19): siRNA sense strand
gcccauacaccuaccagau

SEQ ID NO: 1120272 - RNA, 19 nt, Homo sapiens
  misc_RNA (1)...(19): siRNA sense strand
cagcgauugucuggauaaa

SEQ ID NO: 1120273 - RNA, 19 nt, Homo sapiens
  misc_RNA (1)...(19): siRNA sense strand
ugaaggcacuaaaccucau

SEQ ID NO: 1120274 - RNA, 19 nt, Homo sapiens
  misc_RNA (1)...(19): siRNA sense strand
gauaggcacucccaaaagg

SEQ ID NO: 1120275 - RNA, 19 nt, Homo sapiens
  misc_RNA (1)...(19): siRNA sense strand
ggccaagauuuaagcacau

SEQ ID NO: 1120276 - RNA, 19 nt, Homo sapiens
  misc_RNA (1)...(19): siRNA sense strand
augcagagauucggcagaa

SEQ ID NO: 1120277 - RNA, 19 nt, Homo sapiens
  misc_RNA (1)...(19): siRNA sense strand
caaccaagacagggaagga

SEQ ID NO: 1120278 - RNA, 19 nt, Homo sapiens
  misc_RNA (1)...(19): siRNA sense strand
uauuacggcucauccuaca

SEQ ID NO: 1120279 - RNA, 19 nt, Homo sapiens
  misc_RNA (1)...(19): siRNA sense strand
gagcugcuucgagaggaua

SEQ ID NO: 1120280 - RNA, 19 nt, Homo sapiens
  misc_RNA (1)...(19): siRNA sense strand
cagcucuucuccagaucuu

SEQ ID NO: 1120281 - RNA, 19 nt, Homo sapiens
  misc_RNA (1)...(19): siRNA sense strand
cagacaaggcaucaccaaa

SEQ ID NO: 1120282 - RNA, 19 nt, Homo sapiens
  misc_RNA (1)...(19): siRNA sense strand
ucccagcucuucuccagau

SEQ ID NO: 1120283 - RNA, 19 nt, Homo sapiens
  misc_RNA (1)...(19): siRNA sense strand
gggugaaggagauguacaa

SEQ ID NO: 1120284 - RNA, 19 nt, Homo sapiens
  misc_RNA (1)...(19): siRNA sense strand
ugaauacaacacacacaau

SEQ ID NO: 1120285 - RNA, 19 nt, Homo sapiens
  misc_RNA (1)...(19): siRNA sense strand
cagcacaagccuauggaau

SEQ ID NO: 1120286 - RNA, 19 nt, Homo sapiens
  misc_RNA (1)...(19): siRNA sense strand
gacauuugcauccagauac

SEQ ID NO: 1120287 - RNA, 19 nt, Homo sapiens
  misc_RNA (1)...(19): siRNA sense strand
gaggauaaugcagagauuc

SEQ ID NO: 1120288 - RNA, 19 nt, Homo sapiens
  misc_RNA (1)...(19): siRNA sense strand
caagauuuaagcacauaca

SEQ ID NO: 1120289 - RNA, 19 nt, Homo sapiens
  misc_RNA (1)...(19): siRNA sense strand
agaugacaauggccaagau

SEQ ID NO: 1120290 - RNA, 19 nt, Homo sapiens
  misc_RNA (1)...(19): siRNA sense strand
auacaacacacacaaugga

SEQ ID NO: 1120291 - RNA, 19 nt, Homo sapiens
  misc_RNA (1)...(19): siRNA sense strand
ccagaugcacggcacaaca

SEQ ID NO: 1120292 - RNA, 19 nt, Homo sapiens
  misc_RNA (1)...(19): siRNA sense strand
cacaacaggguucuaucaa

SEQ ID NO: 1120293 - RNA, 19 nt, Homo sapiens
  misc_RNA (1)...(19): siRNA sense strand
gauacacaucuguucuuca

SEQ ID NO: 1120294 - RNA, 19 nt, Homo sapiens
  misc_RNA (1)...(19): siRNA sense strand
cuucaaccuugcagauaca

SEQ ID NO: 1120295 - RNA, 19 nt, Homo sapiens
  misc_RNA (1)...(19): siRNA sense strand
gauugucuggauaaacuga

SEQ ID NO: 1120296 - RNA, 19 nt, Homo sapiens
  misc_RNA (1)...(19): siRNA sense strand
uuuaagcacauacaacuuc

SEQ ID NO: 1120297 - RNA, 19 nt, Homo sapiens
  misc_RNA (1)...(19): siRNA sense strand
caaccuugcagauacacau

SEQ ID NO: 1120298 - RNA, 19 nt, Homo sapiens
  misc_RNA (1)...(19): siRNA sense strand
ggacuuggaugagacaaua

SEQ ID NO: 1120299 - RNA, 19 nt, Homo sapiens
  misc_RNA (1)...(19): siRNA sense strand
ugaaggagauguacaauac

SEQ ID NO: 1120300 - RNA, 19 nt, Homo sapiens
  misc_RNA (1)...(19): siRNA sense strand
gagaacaucuacagugcaa

SEQ ID NO: 1120301 - RNA, 19 nt, Homo sapiens
  misc_RNA (1)...(19): siRNA sense strand
ugacaauggccaagauuua

SEQ ID NO: 1120302 - RNA, 19 nt, Homo sapiens
  misc_RNA (1)...(19): siRNA sense strand
aaacagcgauugucuggau

SEQ ID NO: 1120303 - RNA, 19 nt, Homo sapiens
  misc_RNA (1)...(19): siRNA sense strand
caccaccacucaacuaauu

SEQ ID NO: 1120304 - RNA, 19 nt, Homo sapiens
  misc_RNA (1)...(19): siRNA sense strand
ccaaaguccugcuauaugg

SEQ ID NO: 1120305 - RNA, 19 nt, Homo sapiens
  misc_RNA (1)...(19): siRNA sense strand
gacaaggcaucaccaaauc

SEQ ID NO: 1120306 - RNA, 19 nt, Homo sapiens
  misc_RNA (1)...(19): siRNA sense strand
gcauuggccuuaugaugga

SEQ ID NO: 1120307 - RNA, 19 nt, Homo sapiens
  misc_RNA (1)...(19): siRNA sense strand
ggacauuugcauccagaua

SEQ ID NO: 1120308 - RNA, 19 nt, Homo sapiens
  misc_RNA (1)...(19): siRNA sense strand
gaauacaacacacacaaug

SEQ ID NO: 1120309 - RNA, 19 nt, Homo sapiens
  misc_RNA (1)...(19): siRNA sense strand
gcacaacaggguucuauca

SEQ ID NO: 1120310 - RNA, 19 nt, Homo sapiens
  misc_RNA (1)...(19): siRNA sense strand
gcacuaaaccucaucaacu

SEQ ID NO: 1120311 - RNA, 19 nt, Homo sapiens
  misc_RNA (1)...(19): siRNA sense strand
gcugacggcuuccacaguu

SEQ ID NO: 1120312 - RNA, 19 nt, Homo sapiens
  misc_RNA (1)...(19): siRNA sense strand
acacaucuguucuucaaug

SEQ ID NO: 1120313 - RNA, 19 nt, Homo sapiens
  misc_RNA (1)...(19): siRNA sense strand
gaucggugaugguguggaa

SEQ ID NO: 1120314 - RNA, 19 nt, Homo sapiens
  misc_RNA (1)...(19): siRNA sense strand
cccuggagcuggaguauuu

SEQ ID NO: 1120315 - RNA, 19 nt, Homo sapiens
  misc_RNA (1)...(19): siRNA sense strand
gacaauggccaagauuuaa

SEQ ID NO: 1120316 - RNA, 19 nt, Homo sapiens
  misc_RNA (1)...(19): siRNA sense strand
gcgauugucuggauaaacu

SEQ ID NO: 1120317 - RNA, 19 nt, Homo sapiens
  misc_RNA (1)...(19): siRNA sense strand
auacacaucuguucuucaa

SEQ ID NO: 1120318 - RNA, 19 nt, Homo sapiens
  misc_RNA (1)...(19): siRNA sense strand
ucacccagccucacuguaa

SEQ ID NO: 1120319 - RNA, 19 nt, Homo sapiens
  misc_RNA (1)...(19): siRNA sense strand
ggucuguguuuccuauuga

SEQ ID NO: 1120320 - RNA, 19 nt, Homo sapiens
  misc_RNA (1)...(19): siRNA sense strand
gccaagauuuaagcacaua

SEQ ID NO: 1120321 - RNA, 19 nt, Homo sapiens
  misc_RNA (1)...(19): siRNA sense strand
caaccagaguuccgaguca

SEQ ID NO: 1120322 - RNA, 19 nt, Homo sapiens
  misc_RNA (1)...(19): siRNA sense strand
uacaauaccuacaagaaca

SEQ ID NO: 1120323 - RNA, 19 nt, Homo sapiens
  misc_RNA (1)...(19): siRNA sense strand
gugaaggagauguacaaua

SEQ ID NO: 1120324 - RNA, 19 nt, Homo sapiens
  misc_RNA (1)...(19): siRNA sense strand
gcacaagccuauggaaucc

SEQ ID NO: 1120325 - RNA, 19 nt, Homo sapiens
  misc_RNA (1)...(19): siRNA sense strand
cgaaagagggagacacaga

SEQ ID NO: 1120326 - RNA, 19 nt, Homo sapiens
  misc_RNA (1)...(19): siRNA sense strand
agacaaggcaucaccaaau

SEQ ID NO: 1120327 - RNA, 19 nt, Homo sapiens
  misc_RNA (1)...(19): siRNA sense strand
gccaaaguccugcuauaug

SEQ ID NO: 1120328 - RNA, 19 nt, Homo sapiens
  misc_RNA (1)...(19): siRNA sense strand
ggagugugcaccaggacua

SEQ ID NO: 1120329 - RNA, 19 nt, Homo sapiens
  misc_RNA (1)...(19): siRNA sense strand
ggagcuggaguauuuauag

SEQ ID NO: 1120330 - RNA, 19 nt, Homo sapiens
  misc_RNA (1)...(19): siRNA sense strand
uggccaaaguccugcuaua

SEQ ID NO: 1120331 - RNA, 19 nt, Homo sapiens
  misc_RNA (1)...(19): siRNA sense strand
gcccaacugugucaaugug

SEQ ID NO: 1120332 - RNA, 19 nt, Homo sapiens
  misc_RNA (1)...(19): siRNA sense strand
ggaggauugugaccagauc

SEQ ID NO: 1120333 - RNA, 19 nt, Homo sapiens
  misc_RNA (1)...(19): siRNA sense strand
ggucaccaccacucaacua

SEQ ID NO: 1120334 - RNA, 19 nt, Homo sapiens
  misc_RNA (1)...(19): siRNA sense strand
gugaccagauccacguuga

SEQ ID NO: 1120335 - RNA, 19 nt, Homo sapiens
  misc_RNA (1)...(19): siRNA sense strand
gggucuguguuuccuauug

SEQ ID NO: 1120336 - RNA, 19 nt, Homo sapiens
  misc_RNA (1)...(19): siRNA sense strand
gcugcuguguggacucuga

SEQ ID NO: 1120337 - RNA, 19 nt, Homo sapiens
  misc_RNA (1)...(19): siRNA sense strand
ggccaaaguccugcuauau

SEQ ID NO: 1120338 - RNA, 19 nt, Homo sapiens
  misc_RNA (1)...(19): siRNA sense strand
guacaauaccuacaagaac

SEQ ID NO: 1120339 - RNA, 19 nt, Homo sapiens
  misc_RNA (1)...(19): siRNA sense strand
ggucuaagaggagcaguga

SEQ ID NO: 1120340 - RNA, 19 nt, Homo sapiens
  misc_RNA (1)...(19): siRNA sense strand
gagaggauaaugcagagau

SEQ ID NO: 1120341 - RNA, 19 nt, Homo sapiens
  misc_RNA (1)...(19): siRNA sense strand
cacuaaaccucaucaacuc

SEQ ID NO: 1120342 - RNA, 19 nt, Homo sapiens
  misc_RNA (1)...(19): siRNA sense strand
gcgcauuggccuuaugaug

SEQ ID NO: 1120343 - RNA, 19 nt, Homo sapiens
  misc_RNA (1)...(19): siRNA sense strand
acaacaggguucuaucaag

SEQ ID NO: 1120344 - RNA, 19 nt, Homo sapiens
  misc_RNA (1)...(19): siRNA sense strand
agaggauaaugcagagauu

SEQ ID NO: 1120345 - RNA, 19 nt, Homo sapiens
  misc_RNA (1)...(19): siRNA sense strand
gauuuaagcacauacaacu

SEQ ID NO: 1120346 - RNA, 19 nt, Homo sapiens
  misc_RNA (1)...(19): siRNA sense strand
gacagagcccauacaccua

SEQ ID NO: 1120347 - RNA, 19 nt, Homo sapiens
  misc_RNA (1)...(19): siRNA sense strand
cacccagccucacuguaaa

SEQ ID NO: 1120348 - RNA, 19 nt, Homo sapiens
  misc_RNA (1)...(19): siRNA sense strand
gaugacaauggccaagauu

SEQ ID NO: 1120349 - RNA, 19 nt, Homo sapiens
  misc_RNA (1)...(19): siRNA sense strand
gaccagauccacguugaug

SEQ ID NO: 1120350 - RNA, 19 nt, Homo sapiens
  misc_RNA (1)...(19): siRNA sense strand
cacaucuguucuucaauga

SEQ ID NO: 1120351 - RNA, 19 nt, Homo sapiens
  misc_RNA (1)...(19): siRNA sense strand
guugauaggcacucccaaa

SEQ ID NO: 1120352 - RNA, 19 nt, Homo sapiens
  misc_RNA (1)...(19): siRNA sense strand
gugaauacaacacacacaa

SEQ ID NO: 1120353 - RNA, 19 nt, Homo sapiens
  misc_RNA (1)...(19): siRNA sense strand
ccacuggacagagcccaua

SEQ ID NO: 1120354 - RNA, 19 nt, Homo sapiens
  misc_RNA (1)...(19): siRNA sense strand
gcagagauucggcagaaaa

SEQ ID NO: 1120355 - RNA, 19 nt, Homo sapiens
  misc_RNA (1)...(19): siRNA sense strand
uuacccaccuccagcacaa

SEQ ID NO: 1120356 - RNA, 19 nt, Homo sapiens
  misc_RNA (1)...(19): siRNA sense strand
gcccauacaccuaccagau

SEQ ID NO: 1120357 - RNA, 19 nt, Homo sapiens
  misc_RNA (1)...(19): siRNA sense strand
cagcgauugucuggauaaa

SEQ ID NO: 1120358 - RNA, 19 nt, Homo sapiens
  misc_RNA (1)...(19): siRNA sense strand
ugaaggcacuaaaccucau

SEQ ID NO: 1120359 - RNA, 19 nt, Homo sapiens
  misc_RNA (1)...(19): siRNA sense strand
gauaggcacucccaaaagg

SEQ ID NO: 1120360 - RNA, 19 nt, Homo sapiens
  misc_RNA (1)...(19): siRNA sense strand
ggccaagauuuaagcacau

SEQ ID NO: 1120361 - RNA, 19 nt, Homo sapiens
  misc_RNA (1)...(19): siRNA sense strand
augcagagauucggcagaa

SEQ ID NO: 1120362 - RNA, 19 nt, Homo sapiens
  misc_RNA (1)...(19): siRNA sense strand
caaccaagacagggaagga

SEQ ID NO: 1120363 - RNA, 19 nt, Homo sapiens
  misc_RNA (1)...(19): siRNA sense strand
uauuacggcucauccuaca

SEQ ID NO: 1120364 - RNA, 19 nt, Homo sapiens
  misc_RNA (1)...(19): siRNA sense strand
gagcugcuucgagaggaua

SEQ ID NO: 1120365 - RNA, 19 nt, Homo sapiens
  misc_RNA (1)...(19): siRNA sense strand
cagcucuucuccagaucuu

SEQ ID NO: 1120366 - RNA, 19 nt, Homo sapiens
  misc_RNA (1)...(19): siRNA sense strand
cagacaaggcaucaccaaa

SEQ ID NO: 1120367 - RNA, 19 nt, Homo sapiens
  misc_RNA (1)...(19): siRNA sense strand
ucccagcucuucuccagau

SEQ ID NO: 1120368 - RNA, 19 nt, Homo sapiens
  misc_RNA (1)...(19): siRNA sense strand
gggugaaggagauguacaa

SEQ ID NO: 1120369 - RNA, 19 nt, Homo sapiens
  misc_RNA (1)...(19): siRNA sense strand
ugaauacaacacacacaau

SEQ ID NO: 1120370 - RNA, 19 nt, Homo sapiens
  misc_RNA (1)...(19): siRNA sense strand
cagcacaagccuauggaau

SEQ ID NO: 1120371 - RNA, 19 nt, Homo sapiens
  misc_RNA (1)...(19): siRNA sense strand
gacauuugcauccagauac

SEQ ID NO: 1120372 - RNA, 19 nt, Homo sapiens
  misc_RNA (1)...(19): siRNA sense strand
gaggauaaugcagagauuc

SEQ ID NO: 1120373 - RNA, 19 nt, Homo sapiens
  misc_RNA (1)...(19): siRNA sense strand
caagauuuaagcacauaca

SEQ ID NO: 1120374 - RNA, 19 nt, Homo sapiens
  misc_RNA (1)...(19): siRNA sense strand
agaugacaauggccaagau

SEQ ID NO: 1120375 - RNA, 19 nt, Homo sapiens
  misc_RNA (1)...(19): siRNA sense strand
auacaacacacacaaugga

SEQ ID NO: 1120376 - RNA, 19 nt, Homo sapiens
  misc_RNA (1)...(19): siRNA sense strand
ccagaugcacggcacaaca

SEQ ID NO: 1120377 - RNA, 19 nt, Homo sapiens
  misc_RNA (1)...(19): siRNA sense strand
cacaacaggguucuaucaa

SEQ ID NO: 1120378 - RNA, 19 nt, Homo sapiens
  misc_RNA (1)...(19): siRNA sense strand
gauacacaucuguucuuca

SEQ ID NO: 1120379 - RNA, 19 nt, Homo sapiens
  misc_RNA (1)...(19): siRNA sense strand
cuucaaccuugcagauaca

SEQ ID NO: 1120380 - RNA, 19 nt, Homo sapiens
  misc_RNA (1)...(19): siRNA sense strand
gauugucuggauaaacuga

SEQ ID NO: 1120381 - RNA, 19 nt, Homo sapiens
  misc_RNA (1)...(19): siRNA sense strand
uuuaagcacauacaacuuc

SEQ ID NO: 1120382 - RNA, 19 nt, Homo sapiens
  misc_RNA (1)...(19): siRNA sense strand
caaccuugcagauacacau

SEQ ID NO: 1120383 - RNA, 19 nt, Homo sapiens
  misc_RNA (1)...(19): siRNA sense strand
ggacuuggaugagacaaua

SEQ ID NO: 1120384 - RNA, 19 nt, Homo sapiens
  misc_RNA (1)...(19): siRNA sense strand
ugaaggagauguacaauac

SEQ ID NO: 1120385 - RNA, 19 nt, Homo sapiens
  misc_RNA (1)...(19): siRNA sense strand
gagaacaucuacagugcaa

SEQ ID NO: 1120386 - RNA, 19 nt, Homo sapiens
  misc_RNA (1)...(19): siRNA sense strand
ugacaauggccaagauuua

SEQ ID NO: 1120387 - RNA, 19 nt, Homo sapiens
  misc_RNA (1)...(19): siRNA sense strand
aaacagcgauugucuggau

SEQ ID NO: 1120388 - RNA, 19 nt, Homo sapiens
  misc_RNA (1)...(19): siRNA sense strand
caccaccacucaacuaauu

SEQ ID NO: 1120389 - RNA, 19 nt, Homo sapiens
  misc_RNA (1)...(19): siRNA sense strand
ccaaaguccugcuauaugg

SEQ ID NO: 1120390 - RNA, 19 nt, Homo sapiens
  misc_RNA (1)...(19): siRNA sense strand
gacaaggcaucaccaaauc

SEQ ID NO: 1120391 - RNA, 19 nt, Homo sapiens
  misc_RNA (1)...(19): siRNA sense strand
gcauuggccuuaugaugga

SEQ ID NO: 1120392 - RNA, 19 nt, Homo sapiens
  misc_RNA (1)...(19): siRNA sense strand
ggacauuugcauccagaua

SEQ ID NO: 1120393 - RNA, 19 nt, Homo sapiens
  misc_RNA (1)...(19): siRNA sense strand
gaauacaacacacacaaug

SEQ ID NO: 1120394 - RNA, 19 nt, Homo sapiens
  misc_RNA (1)...(19): siRNA sense strand
gcacaacaggguucuauca

SEQ ID NO: 1120395 - RNA, 19 nt, Homo sapiens
  misc_RNA (1)...(19): siRNA sense strand
gcacuaaaccucaucaacu

SEQ ID NO: 1120396 - RNA, 19 nt, Homo sapiens
  misc_RNA (1)...(19): siRNA sense strand
gcugacggcuuccacaguu

SEQ ID NO: 1120397 - RNA, 19 nt, Homo sapiens
  misc_RNA (1)...(19): siRNA sense strand
acacaucuguucuucaaug

SEQ ID NO: 1120398 - RNA, 19 nt, Homo sapiens
  misc_RNA (1)...(19): siRNA sense strand
gaaaugguagaacuaguga

SEQ ID NO: 1120399 - RNA, 19 nt, Homo sapiens
  misc_RNA (1)...(19): siRNA sense strand
cccuggagcuggaguauuu

SEQ ID NO: 1120400 - RNA, 19 nt, Homo sapiens
  misc_RNA (1)...(19): siRNA sense strand
gaucggugaugguguggaa

SEQ ID NO: 1120401 - RNA, 19 nt, Homo sapiens
  misc_RNA (1)...(19): siRNA sense strand
gacaauggccaagauuuaa

SEQ ID NO: 1120402 - RNA, 19 nt, Homo sapiens
  misc_RNA (1)...(19): siRNA sense strand
gcgauugucuggauaaacu

SEQ ID NO: 1120403 - RNA, 19 nt, Homo sapiens
  misc_RNA (1)...(19): siRNA sense strand
ggaaaugguagaacuagug

SEQ ID NO: 1120404 - RNA, 19 nt, Homo sapiens
  misc_RNA (1)...(19): siRNA sense strand
auacacaucuguucuucaa

SEQ ID NO: 1120405 - RNA, 19 nt, Homo sapiens
  misc_RNA (1)...(19): siRNA sense strand
ucacccagccucacuguaa

SEQ ID NO: 1120406 - RNA, 19 nt, Homo sapiens
  misc_RNA (1)...(19): siRNA sense strand
ggucuguguuuccuauuga

SEQ ID NO: 1120407 - RNA, 19 nt, Homo sapiens
  misc_RNA (1)...(19): siRNA sense strand
gccaagauuuaagcacaua

SEQ ID NO: 1120408 - RNA, 19 nt, Homo sapiens
  misc_RNA (1)...(19): siRNA sense strand
caaccagaguuccgaguca

SEQ ID NO: 1120409 - RNA, 19 nt, Homo sapiens
  misc_RNA (1)...(19): siRNA sense strand
uacaauaccuacaagaaca

SEQ ID NO: 1120410 - RNA, 19 nt, Homo sapiens
  misc_RNA (1)...(19): siRNA sense strand
caaggaaaugguagaacua

SEQ ID NO: 1120411 - RNA, 19 nt, Homo sapiens
  misc_RNA (1)...(19): siRNA sense strand
gugaaggagauguacaaua

SEQ ID NO: 1120412 - RNA, 19 nt, Homo sapiens
  misc_RNA (1)...(19): siRNA sense strand
gcacaagccuauggaaucc

SEQ ID NO: 1120413 - RNA, 19 nt, Homo sapiens
  misc_RNA (1)...(19): siRNA sense strand
cgaaagagggagacacaga

SEQ ID NO: 1120414 - RNA, 19 nt, Homo sapiens
  misc_RNA (1)...(19): siRNA sense strand
agacaaggcaucaccaaau

SEQ ID NO: 1120415 - RNA, 19 nt, Homo sapiens
  misc_RNA (1)...(19): siRNA sense strand
gccaaaguccugcuauaug

SEQ ID NO: 1120416 - RNA, 19 nt, Homo sapiens
  misc_RNA (1)...(19): siRNA sense strand
ggagugugcaccaggacua

SEQ ID NO: 1120417 - RNA, 19 nt, Homo sapiens
  misc_RNA (1)...(19): siRNA sense strand
ggagcuggaguauuuauag

SEQ ID NO: 1120418 - RNA, 19 nt, Homo sapiens
  misc_RNA (1)...(19): siRNA sense strand
uggccaaaguccugcuaua

SEQ ID NO: 1120419 - RNA, 19 nt, Homo sapiens
  misc_RNA (1)...(19): siRNA sense strand
gcccaacugugucaaugug

SEQ ID NO: 1120420 - RNA, 19 nt, Homo sapiens
  misc_RNA (1)...(19): siRNA sense strand
ggaggauugugaccagauc

SEQ ID NO: 1120421 - RNA, 19 nt, Homo sapiens
  misc_RNA (1)...(19): siRNA sense strand
acaaggaaaugguagaacu

SEQ ID NO: 1120422 - RNA, 19 nt, Homo sapiens
  misc_RNA (1)...(19): siRNA sense strand
ggucaccaccacucaacua

SEQ ID NO: 1120423 - RNA, 19 nt, Homo sapiens
  misc_RNA (1)...(19): siRNA sense strand
gugaccagauccacguuga

SEQ ID NO: 1120424 - RNA, 19 nt, Homo sapiens
  misc_RNA (1)...(19): siRNA sense strand
guacaaggaaaugguagaa

SEQ ID NO: 1120425 - RNA, 19 nt, Homo sapiens
  misc_RNA (1)...(19): siRNA sense strand
gggucuguguuuccuauug

SEQ ID NO: 1120426 - RNA, 19 nt, Homo sapiens
  misc_RNA (1)...(19): siRNA sense strand
guacaauaccuacaagaac

SEQ ID NO: 1120427 - RNA, 19 nt, Homo sapiens
  misc_RNA (1)...(19): siRNA sense strand
ggccaaaguccugcuauau

SEQ ID NO: 1120428 - RNA, 19 nt, Homo sapiens
  misc_RNA (1)...(19): siRNA sense strand
gcugcuguguggacucuga

SEQ ID NO: 1120429 - RNA, 19 nt, Homo sapiens
  misc_RNA (1)...(19): siRNA sense strand
ggucuaagaggagcaguga

SEQ ID NO: 1120430 - RNA, 19 nt, Homo sapiens
  misc_RNA (1)...(19): siRNA sense strand
gagaggauaaugcagagau

SEQ ID NO: 1120431 - RNA, 19 nt, Homo sapiens
  misc_RNA (1)...(19): siRNA sense strand
cacuaaaccucaucaacuc

SEQ ID NO: 1120432 - RNA, 19 nt, Homo sapiens
  misc_RNA (1)...(19): siRNA sense strand
gcgcauuggccuuaugaug

SEQ ID NO: 1120433 - RNA, 19 nt, Homo sapiens
  misc_RNA (1)...(19): siRNA sense strand
acaacaggguucuaucaag

SEQ ID NO: 1120434 - RNA, 19 nt, Homo sapiens
  misc_RNA (1)...(19): siRNA sense strand
agaggauaaugcagagauu

SEQ ID NO: 1120435 - RNA, 19 nt, Homo sapiens
  misc_RNA (1)...(19): siRNA sense strand
gauuuaagcacauacaacu

SEQ ID NO: 1120436 - RNA, 19 nt, Homo sapiens
  misc_RNA (1)...(19): siRNA sense strand
gacagagcccauacaccua

SEQ ID NO: 1120437 - RNA, 19 nt, Homo sapiens
  misc_RNA (1)...(19): siRNA sense strand
cacccagccucacuguaaa

SEQ ID NO: 1120438 - RNA, 19 nt, Homo sapiens
  misc_RNA (1)...(19): siRNA sense strand
gaugacaauggccaagauu

SEQ ID NO: 1120439 - RNA, 19 nt, Homo sapiens
  misc_RNA (1)...(19): siRNA sense strand
gaccagauccacguugaug

SEQ ID NO: 1120440 - RNA, 19 nt, Homo sapiens
  misc_RNA (1)...(19): siRNA sense strand
cacaucuguucuucaauga

SEQ ID NO: 1120441 - RNA, 19 nt, Homo sapiens
  misc_RNA (1)...(19): siRNA sense strand
guugauaggcacucccaaa

SEQ ID NO: 1120442 - RNA, 19 nt, Homo sapiens
  misc_RNA (1)...(19): siRNA sense strand
gugaauacaacacacacaa

SEQ ID NO: 1120443 - RNA, 19 nt, Homo sapiens
  misc_RNA (1)...(19): siRNA sense strand
ccacuggacagagcccaua

SEQ ID NO: 1120444 - RNA, 19 nt, Homo sapiens
  misc_RNA (1)...(19): siRNA sense strand
gcagagauucggcagaaaa

SEQ ID NO: 1120445 - RNA, 19 nt, Homo sapiens
  misc_RNA (1)...(19): siRNA sense strand
uuacccaccuccagcacaa

SEQ ID NO: 1120446 - RNA, 19 nt, Homo sapiens
  misc_RNA (1)...(19): siRNA sense strand
gcccauacaccuaccagau

SEQ ID NO: 1120447 - RNA, 19 nt, Homo sapiens
  misc_RNA (1)...(19): siRNA sense strand
ugaaggcacuaaaccucau

SEQ ID NO: 1120448 - RNA, 19 nt, Homo sapiens
  misc_RNA (1)...(19): siRNA sense strand
gauaggcacucccaaaagg

SEQ ID NO: 1120449 - RNA, 19 nt, Homo sapiens
  misc_RNA (1)...(19): siRNA sense strand
cagcgauugucuggauaaa

SEQ ID NO: 1120450 - RNA, 19 nt, Homo sapiens
  misc_RNA (1)...(19): siRNA sense strand
ggccaagauuuaagcacau

SEQ ID NO: 1120451 - RNA, 19 nt, Homo sapiens
  misc_RNA (1)...(19): siRNA sense strand
augcagagauucggcagaa

SEQ ID NO: 1120452 - RNA, 19 nt, Homo sapiens
  misc_RNA (1)...(19): siRNA sense strand
caaccaagacagggaagga

SEQ ID NO: 1120453 - RNA, 19 nt, Homo sapiens
  misc_RNA (1)...(19): siRNA sense strand
cagacaaggcaucaccaaa

SEQ ID NO: 1120454 - RNA, 19 nt, Homo sapiens
  misc_RNA (1)...(19): siRNA sense strand
gagcugcuucgagaggaua

SEQ ID NO: 1120455 - RNA, 19 nt, Homo sapiens
  misc_RNA (1)...(19): siRNA sense strand
cagcucuucuccagaucuu

SEQ ID NO: 1120456 - RNA, 19 nt, Homo sapiens
  misc_RNA (1)...(19): siRNA sense strand
ucccagcucuucuccagau

SEQ ID NO: 1120457 - RNA, 19 nt, Homo sapiens
  misc_RNA (1)...(19): siRNA sense strand
uauuacggcucauccuaca

SEQ ID NO: 1120458 - RNA, 19 nt, Homo sapiens
  misc_RNA (1)...(19): siRNA sense strand
gggugaaggagauguacaa

SEQ ID NO: 1120459 - RNA, 19 nt, Homo sapiens
  misc_RNA (1)...(19): siRNA sense strand
cagcacaagccuauggaau

SEQ ID NO: 1120460 - RNA, 19 nt, Homo sapiens
  misc_RNA (1)...(19): siRNA sense strand
ugaauacaacacacacaau

SEQ ID NO: 1120461 - RNA, 19 nt, Homo sapiens
  misc_RNA (1)...(19): siRNA sense strand
gacauuugcauccagauac

SEQ ID NO: 1120462 - RNA, 19 nt, Homo sapiens
  misc_RNA (1)...(19): siRNA sense strand
gaggauaaugcagagauuc

SEQ ID NO: 1120463 - RNA, 19 nt, Homo sapiens
  misc_RNA (1)...(19): siRNA sense strand
caagauuuaagcacauaca

SEQ ID NO: 1120464 - RNA, 19 nt, Homo sapiens
  misc_RNA (1)...(19): siRNA sense strand
agaugacaauggccaagau

SEQ ID NO: 1120465 - RNA, 19 nt, Homo sapiens
  misc_RNA (1)...(19): siRNA sense strand
ccagaugcacggcacaaca

SEQ ID NO: 1120466 - RNA, 19 nt, Homo sapiens
  misc_RNA (1)...(19): siRNA sense strand
auacaacacacacaaugga

SEQ ID NO: 1120467 - RNA, 19 nt, Homo sapiens
  misc_RNA (1)...(19): siRNA sense strand
cacaacaggguucuaucaa

SEQ ID NO: 1120468 - RNA, 19 nt, Homo sapiens
  misc_RNA (1)...(19): siRNA sense strand
gguacaaggaaaugguaga

SEQ ID NO: 1120469 - RNA, 19 nt, Homo sapiens
  misc_RNA (1)...(19): siRNA sense strand
gauacacaucuguucuuca

SEQ ID NO: 1120470 - RNA, 19 nt, Homo sapiens
  misc_RNA (1)...(19): siRNA sense strand
cuucaaccuugcagauaca

SEQ ID NO: 1120471 - RNA, 19 nt, Homo sapiens
  misc_RNA (1)...(19): siRNA sense strand
gauugucuggauaaacuga

SEQ ID NO: 1120472 - RNA, 19 nt, Homo sapiens
  misc_RNA (1)...(19): siRNA sense strand
uuuaagcacauacaacuuc

SEQ ID NO: 1120473 - RNA, 19 nt, Homo sapiens
  misc_RNA (1)...(19): siRNA sense strand
caaccuugcagauacacau

SEQ ID NO: 1120474 - RNA, 19 nt, Homo sapiens
  misc_RNA (1)...(19): siRNA sense strand
gagaucaguuggaaagaaa

SEQ ID NO: 1120475 - RNA, 19 nt, Homo sapiens
  misc_RNA (1)...(19): siRNA sense strand
ccgaguagcugaaauuguu

SEQ ID NO: 1120476 - RNA, 19 nt, Homo sapiens
  misc_RNA (1)...(19): siRNA sense strand
ggagaucaguuggaaagaa

SEQ ID NO: 1120477 - RNA, 19 nt, Homo sapiens
  misc_RNA (1)...(19): siRNA sense strand
gaaauucccaauccaguga

SEQ ID NO: 1120478 - RNA, 19 nt, Homo sapiens
  misc_RNA (1)...(19): siRNA sense strand
ggugugaccuggaagaaau

SEQ ID NO: 1120479 - RNA, 19 nt, Homo sapiens
  misc_RNA (1)...(19): siRNA sense strand
uuguugagcugcugaaaua

SEQ ID NO: 1120480 - RNA, 19 nt, Homo sapiens
  misc_RNA (1)...(19): siRNA sense strand
gaaagaugaagaagaacaa

SEQ ID NO: 1120481 - RNA, 19 nt, Homo sapiens
  misc_RNA (1)...(19): siRNA sense strand
gaagaagaacaaauacuag

SEQ ID NO: 1120482 - RNA, 19 nt, Homo sapiens
  misc_RNA (1)...(19): siRNA sense strand
caccaaagcugcugagaac

SEQ ID NO: 1120483 - RNA, 19 nt, Homo sapiens
  misc_RNA (1)...(19): siRNA sense strand
ggaauuguucagcaaauga

SEQ ID NO: 1120484 - RNA, 19 nt, Homo sapiens
  misc_RNA (1)...(19): siRNA sense strand
ccacgugccuguagcuuca

SEQ ID NO: 1120485 - RNA, 19 nt, Homo sapiens
  misc_RNA (1)...(19): siRNA sense strand
caaccgaguagcugaaauu

SEQ ID NO: 1120486 - RNA, 19 nt, Homo sapiens
  misc_RNA (1)...(19): siRNA sense strand
gucaaaggacguuggaaua

SEQ ID NO: 1120487 - RNA, 19 nt, Homo sapiens
  misc_RNA (1)...(19): siRNA sense strand
gaacaaauacuagccaaaa

SEQ ID NO: 1120488 - RNA, 19 nt, Homo sapiens
  misc_RNA (1)...(19): siRNA sense strand
gaccuaaacaccauagaau

SEQ ID NO: 1120489 - RNA, 19 nt, Homo sapiens
  misc_RNA (1)...(19): siRNA sense strand
ccaaagcugcugagaacaa

SEQ ID NO: 1120490 - RNA, 19 nt, Homo sapiens
  misc_RNA (1)...(19): siRNA sense strand
ccagugagaaggccauaaa

SEQ ID NO: 1120491 - RNA, 19 nt, Homo sapiens
  misc_RNA (1)...(19): siRNA sense strand
gggaauuguucagcaaaug

SEQ ID NO: 1120492 - RNA, 19 nt, Homo sapiens
  misc_RNA (1)...(19): siRNA sense strand
uagcugaaauuguuuacuc

SEQ ID NO: 1120493 - RNA, 19 nt, Homo sapiens
  misc_RNA (1)...(19): siRNA sense strand
ggucaaaggacguuggaau

SEQ ID NO: 1120494 - RNA, 19 nt, Homo sapiens
  misc_RNA (1)...(19): siRNA sense strand
ccuagaugaugaugaccua

SEQ ID NO: 1120495 - RNA, 19 nt, Homo sapiens
  misc_RNA (1)...(19): siRNA sense strand
uaacugagggucucuccuu

SEQ ID NO: 1120496 - RNA, 19 nt, Homo sapiens
  misc_RNA (1)...(19): siRNA sense strand
ccuaaacaccauagaauuc

SEQ ID NO: 1120497 - RNA, 19 nt, Homo sapiens
  misc_RNA (1)...(19): siRNA sense strand
ucaaaauccucgccuacua

SEQ ID NO: 1120498 - RNA, 19 nt, Homo sapiens
  misc_RNA (1)...(19): siRNA sense strand
gaguagcugaaauuguuua

SEQ ID NO: 1120499 - RNA, 19 nt, Homo sapiens
  misc_RNA (1)...(19): siRNA sense strand
gucauggccuugcagaaau

SEQ ID NO: 1120500 - RNA, 19 nt, Homo sapiens
  misc_RNA (1)...(19): siRNA sense strand
gcugagaacaagaaguuug

SEQ ID NO: 1120501 - RNA, 19 nt, Homo sapiens
  misc_RNA (1)...(19): siRNA sense strand
caaagcugcugagaacaag

SEQ ID NO: 1120502 - RNA, 19 nt, Homo sapiens
  misc_RNA (1)...(19): siRNA sense strand
ccaaagucauuuccauugc

SEQ ID NO: 1120503 - RNA, 19 nt, Homo sapiens
  misc_RNA (1)...(19): siRNA sense strand
ucauggccuugcagaaauu

SEQ ID NO: 1120504 - RNA, 19 nt, Homo sapiens
  misc_RNA (1)...(19): siRNA sense strand
cuaagaaagaugaagaaga

SEQ ID NO: 1120505 - RNA, 19 nt, Homo sapiens
  misc_RNA (1)...(19): siRNA sense strand
gccuguagcuucaaguucu

SEQ ID NO: 1120506 - RNA, 19 nt, Homo sapiens
  misc_RNA (1)...(19): siRNA sense strand
guugagcugcugaaauauu

SEQ ID NO: 1120507 - RNA, 19 nt, Homo sapiens
  misc_RNA (1)...(19): siRNA sense strand
ugucauggccuugcagaaa

SEQ ID NO: 1120508 - RNA, 19 nt, Homo sapiens
  misc_RNA (1)...(19): siRNA sense strand
ugaccuaaacaccauagaa

SEQ ID NO: 1120509 - RNA, 19 nt, Homo sapiens
  misc_RNA (1)...(19): siRNA sense strand
gaaauauucaggagaucag

SEQ ID NO: 1120510 - RNA, 19 nt, Homo sapiens
  misc_RNA (1)...(19): siRNA sense strand
ucaccaaagcugcugagaa

SEQ ID NO: 1120511 - RNA, 19 nt, Homo sapiens
  misc_RNA (1)...(19): siRNA sense strand
aaaggacguuggaauacca

SEQ ID NO: 1120512 - RNA, 19 nt, Homo sapiens
  misc_RNA (1)...(19): siRNA sense strand
uagaugaugaugaccuaaa

SEQ ID NO: 1120513 - RNA, 19 nt, Homo sapiens
  misc_RNA (1)...(19): siRNA sense strand
uugagcugcugaaauauuc

SEQ ID NO: 1120514 - RNA, 19 nt, Homo sapiens
  misc_RNA (1)...(19): siRNA sense strand
cuaaacaccauagaauuca

SEQ ID NO: 1120515 - RNA, 19 nt, Homo sapiens
  misc_RNA (1)...(19): siRNA sense strand
caggagaucaguuggaaag

SEQ ID NO: 1120516 - RNA, 19 nt, Homo sapiens
  misc_RNA (1)...(19): siRNA sense strand
caaauacuagccaaaauug

SEQ ID NO: 1120517 - RNA, 19 nt, Homo sapiens
  misc_RNA (1)...(19): siRNA sense strand
gaugaagaagaacaaauac

SEQ ID NO: 1120518 - RNA, 19 nt, Homo sapiens
  misc_RNA (1)...(19): siRNA sense strand
cuucaaguccaaagagauu

SEQ ID NO: 1120519 - RNA, 19 nt, Homo sapiens
  misc_RNA (1)...(19): siRNA sense strand
cccaaagucauuuccauug

SEQ ID NO: 1120520 - RNA, 19 nt, Homo sapiens
  misc_RNA (1)...(19): siRNA sense strand
caggaggcuucaaguccaa

SEQ ID NO: 1120521 - RNA, 19 nt, Homo sapiens
  misc_RNA (1)...(19): siRNA sense strand
cugcugagaacaagaaguu

SEQ ID NO: 1120522 - RNA, 19 nt, Homo sapiens
  misc_RNA (1)...(19): siRNA sense strand
ccuguagcuucaaguucua

SEQ ID NO: 1120523 - RNA, 19 nt, Homo sapiens
  misc_RNA (1)...(19): siRNA sense strand
caaaggacguuggaauacc

SEQ ID NO: 1120524 - RNA, 19 nt, Homo sapiens
  misc_RNA (1)...(19): siRNA sense strand
ucaaaggacguuggaauac

SEQ ID NO: 1120525 - RNA, 19 nt, Homo sapiens
  misc_RNA (1)...(19): siRNA sense strand
ggcuucaaguccaaagaga

SEQ ID NO: 1120526 - RNA, 19 nt, Homo sapiens
  misc_RNA (1)...(19): siRNA sense strand
agaaagaugaagaagaaca

SEQ ID NO: 1120527 - RNA, 19 nt, Homo sapiens
  misc_RNA (1)...(19): siRNA sense strand
cagugggugugaccuggaa

SEQ ID NO: 1120528 - RNA, 19 nt, Homo sapiens
  misc_RNA (1)...(19): siRNA sense strand
uugcagaaauucccaaucc

SEQ ID NO: 1120529 - RNA, 19 nt, Homo sapiens
  misc_RNA (1)...(19): siRNA sense strand
ccugcucucuucucaccaa

SEQ ID NO: 1120530 - RNA, 19 nt, Homo sapiens
  misc_RNA (1)...(19): siRNA sense strand
gcucucuucucaccaaagc

SEQ ID NO: 1120531 - RNA, 19 nt, Homo sapiens
  misc_RNA (1)...(19): siRNA sense strand
ccaaccgaguagcugaaau

SEQ ID NO: 1120532 - RNA, 19 nt, Homo sapiens
  misc_RNA (1)...(19): siRNA sense strand
gaauuguucagcaaaugag

SEQ ID NO: 1120533 - RNA, 19 nt, Homo sapiens
  misc_RNA (1)...(19): siRNA sense strand
cgaguagcugaaauuguuu

SEQ ID NO: 1120534 - RNA, 19 nt, Homo sapiens
  misc_RNA (1)...(19): siRNA sense strand
gaguaguggagaaggaaga

SEQ ID NO: 1120535 - RNA, 19 nt, Homo sapiens
  misc_RNA (1)...(19): siRNA sense strand
gaggugucauggccuugca

SEQ ID NO: 1120536 - RNA, 19 nt, Homo sapiens
  misc_RNA (1)...(19): siRNA sense strand
gagaucaguuggaaagaaa

SEQ ID NO: 1120537 - RNA, 19 nt, Homo sapiens
  misc_RNA (1)...(19): siRNA sense strand
ccgaguagcugaaauuguu

SEQ ID NO: 1120538 - RNA, 19 nt, Homo sapiens
  misc_RNA (1)...(19): siRNA sense strand
ggagaucaguuggaaagaa

SEQ ID NO: 1120539 - RNA, 19 nt, Homo sapiens
  misc_RNA (1)...(19): siRNA sense strand
gaaauucccaauccaguga

SEQ ID NO: 1120540 - RNA, 19 nt, Homo sapiens
  misc_RNA (1)...(19): siRNA sense strand
ggugugaccuggaagaaau

SEQ ID NO: 1120541 - RNA, 19 nt, Homo sapiens
  misc_RNA (1)...(19): siRNA sense strand
uuguugagcugcugaaaua

SEQ ID NO: 1120542 - RNA, 19 nt, Homo sapiens
  misc_RNA (1)...(19): siRNA sense strand
gaaagaugaagaagaacaa

SEQ ID NO: 1120543 - RNA, 19 nt, Homo sapiens
  misc_RNA (1)...(19): siRNA sense strand
gaagaagaacaaauacuag

SEQ ID NO: 1120544 - RNA, 19 nt, Homo sapiens
  misc_RNA (1)...(19): siRNA sense strand
caccaaagcugcugagaac

SEQ ID NO: 1120545 - RNA, 19 nt, Homo sapiens
  misc_RNA (1)...(19): siRNA sense strand
ggaauuguucagcaaauga

SEQ ID NO: 1120546 - RNA, 19 nt, Homo sapiens
  misc_RNA (1)...(19): siRNA sense strand
ccacgugccuguagcuuca

SEQ ID NO: 1120547 - RNA, 19 nt, Homo sapiens
  misc_RNA (1)...(19): siRNA sense strand
caaccgaguagcugaaauu

SEQ ID NO: 1120548 - RNA, 19 nt, Homo sapiens
  misc_RNA (1)...(19): siRNA sense strand
gucaaaggacguuggaaua

SEQ ID NO: 1120549 - RNA, 19 nt, Homo sapiens
  misc_RNA (1)...(19): siRNA sense strand
gaacaaauacuagccaaaa

SEQ ID NO: 1120550 - RNA, 19 nt, Homo sapiens
  misc_RNA (1)...(19): siRNA sense strand
gaccuaaacaccauagaau

SEQ ID NO: 1120551 - RNA, 19 nt, Homo sapiens
  misc_RNA (1)...(19): siRNA sense strand
ccaaagcugcugagaacaa

SEQ ID NO: 1120552 - RNA, 19 nt, Homo sapiens
  misc_RNA (1)...(19): siRNA sense strand
ccagugagaaggccauaaa

SEQ ID NO: 1120553 - RNA, 19 nt, Homo sapiens
  misc_RNA (1)...(19): siRNA sense strand
gggaauuguucagcaaaug

SEQ ID NO: 1120554 - RNA, 19 nt, Homo sapiens
  misc_RNA (1)...(19): siRNA sense strand
uagcugaaauuguuuacuc

SEQ ID NO: 1120555 - RNA, 19 nt, Homo sapiens
  misc_RNA (1)...(19): siRNA sense strand
ggucaaaggacguuggaau

SEQ ID NO: 1120556 - RNA, 19 nt, Homo sapiens
  misc_RNA (1)...(19): siRNA sense strand
ccuagaugaugaugaccua

SEQ ID NO: 1120557 - RNA, 19 nt, Homo sapiens
  misc_RNA (1)...(19): siRNA sense strand
uaacugagggucucuccuu

SEQ ID NO: 1120558 - RNA, 19 nt, Homo sapiens
  misc_RNA (1)...(19): siRNA sense strand
ccuaaacaccauagaauuc

SEQ ID NO: 1120559 - RNA, 19 nt, Homo sapiens
  misc_RNA (1)...(19): siRNA sense strand
ucaaaauccucgccuacua

SEQ ID NO: 1120560 - RNA, 19 nt, Homo sapiens
  misc_RNA (1)...(19): siRNA sense strand
gaguagcugaaauuguuua

SEQ ID NO: 1120561 - RNA, 19 nt, Homo sapiens
  misc_RNA (1)...(19): siRNA sense strand
gucauggccuugcagaaau

SEQ ID NO: 1120562 - RNA, 19 nt, Homo sapiens
  misc_RNA (1)...(19): siRNA sense strand
gcugagaacaagaaguuug

SEQ ID NO: 1120563 - RNA, 19 nt, Homo sapiens
  misc_RNA (1)...(19): siRNA sense strand
caaagcugcugagaacaag

SEQ ID NO: 1120564 - RNA, 19 nt, Homo sapiens
  misc_RNA (1)...(19): siRNA sense strand
ccaaagucauuuccauugc

SEQ ID NO: 1120565 - RNA, 19 nt, Homo sapiens
  misc_RNA (1)...(19): siRNA sense strand
ucauggccuugcagaaauu

SEQ ID NO: 1120566 - RNA, 19 nt, Homo sapiens
  misc_RNA (1)...(19): siRNA sense strand
cuaagaaagaugaagaaga

SEQ ID NO: 1120567 - RNA, 19 nt, Homo sapiens
  misc_RNA (1)...(19): siRNA sense strand
gccuguagcuucaaguucu

SEQ ID NO: 1120568 - RNA, 19 nt, Homo sapiens
  misc_RNA (1)...(19): siRNA sense strand
guugagcugcugaaauauu

SEQ ID NO: 1120569 - RNA, 19 nt, Homo sapiens
  misc_RNA (1)...(19): siRNA sense strand
ugucauggccuugcagaaa

SEQ ID NO: 1120570 - RNA, 19 nt, Homo sapiens
  misc_RNA (1)...(19): siRNA sense strand
ugaccuaaacaccauagaa

SEQ ID NO: 1120571 - RNA, 19 nt, Homo sapiens
  misc_RNA (1)...(19): siRNA sense strand
gaaauauucaggagaucag

SEQ ID NO: 1120572 - RNA, 19 nt, Homo sapiens
  misc_RNA (1)...(19): siRNA sense strand
ucaccaaagcugcugagaa

SEQ ID NO: 1120573 - RNA, 19 nt, Homo sapiens
  misc_RNA (1)...(19): siRNA sense strand
aaaggacguuggaauacca

SEQ ID NO: 1120574 - RNA, 19 nt, Homo sapiens
  misc_RNA (1)...(19): siRNA sense strand
uagaugaugaugaccuaaa

SEQ ID NO: 1120575 - RNA, 19 nt, Homo sapiens
  misc_RNA (1)...(19): siRNA sense strand
uugagcugcugaaauauuc

SEQ ID NO: 1120576 - RNA, 19 nt, Homo sapiens
  misc_RNA (1)...(19): siRNA sense strand
cuaaacaccauagaauuca

SEQ ID NO: 1120577 - RNA, 19 nt, Homo sapiens
  misc_RNA (1)...(19): siRNA sense strand
caggagaucaguuggaaag

SEQ ID NO: 1120578 - RNA, 19 nt, Homo sapiens
  misc_RNA (1)...(19): siRNA sense strand
caaauacuagccaaaauug

SEQ ID NO: 1120579 - RNA, 19 nt, Homo sapiens
  misc_RNA (1)...(19): siRNA sense strand
gaugaagaagaacaaauac

SEQ ID NO: 1120580 - RNA, 19 nt, Homo sapiens
  misc_RNA (1)...(19): siRNA sense strand
cuucaaguccaaagagauu

SEQ ID NO: 1120581 - RNA, 19 nt, Homo sapiens
  misc_RNA (1)...(19): siRNA sense strand
cccaaagucauuuccauug

SEQ ID NO: 1120582 - RNA, 19 nt, Homo sapiens
  misc_RNA (1)...(19): siRNA sense strand
caggaggcuucaaguccaa

SEQ ID NO: 1120583 - RNA, 19 nt, Homo sapiens
  misc_RNA (1)...(19): siRNA sense strand
cugcugagaacaagaaguu

SEQ ID NO: 1120584 - RNA, 19 nt, Homo sapiens
  misc_RNA (1)...(19): siRNA sense strand
ccuguagcuucaaguucua

SEQ ID NO: 1120585 - RNA, 19 nt, Homo sapiens
  misc_RNA (1)...(19): siRNA sense strand
caaaggacguuggaauacc

SEQ ID NO: 1120586 - RNA, 19 nt, Homo sapiens
  misc_RNA (1)...(19): siRNA sense strand
ucaaaggacguuggaauac

SEQ ID NO: 1120587 - RNA, 19 nt, Homo sapiens
  misc_RNA (1)...(19): siRNA sense strand
ggcuucaaguccaaagaga

SEQ ID NO: 1120588 - RNA, 19 nt, Homo sapiens
  misc_RNA (1)...(19): siRNA sense strand
agaaagaugaagaagaaca

SEQ ID NO: 1120589 - RNA, 19 nt, Homo sapiens
  misc_RNA (1)...(19): siRNA sense strand
cagugggugugaccuggaa

SEQ ID NO: 1120590 - RNA, 19 nt, Homo sapiens
  misc_RNA (1)...(19): siRNA sense strand
uugcagaaauucccaaucc

SEQ ID NO: 1120591 - RNA, 19 nt, Homo sapiens
  misc_RNA (1)...(19): siRNA sense strand
ccugcucucuucucaccaa

SEQ ID NO: 1120592 - RNA, 19 nt, Homo sapiens
  misc_RNA (1)...(19): siRNA sense strand
gcucucuucucaccaaagc

SEQ ID NO: 1120593 - RNA, 19 nt, Homo sapiens
  misc_RNA (1)...(19): siRNA sense strand
ccaaccgaguagcugaaau

SEQ ID NO: 1120594 - RNA, 19 nt, Homo sapiens
  misc_RNA (1)...(19): siRNA sense strand
gaauuguucagcaaaugag

SEQ ID NO: 1120595 - RNA, 19 nt, Homo sapiens
  misc_RNA (1)...(19): siRNA sense strand
cgaguagcugaaauuguuu

SEQ ID NO: 1120596 - RNA, 19 nt, Homo sapiens
  misc_RNA (1)...(19): siRNA sense strand
gaguaguggagaaggaaga

SEQ ID NO: 1120597 - RNA, 19 nt, Homo sapiens
  misc_RNA (1)...(19): siRNA sense strand
gaggugucauggccuugca

SEQ ID NO: 1120598 - RNA, 19 nt, Homo sapiens
  misc_RNA (1)...(19): siRNA sense strand
gagaucaguuggaaagaaa

SEQ ID NO: 1120599 - RNA, 19 nt, Homo sapiens
  misc_RNA (1)...(19): siRNA sense strand
ccgaguagcugaaauuguu

SEQ ID NO: 1120600 - RNA, 19 nt, Homo sapiens
  misc_RNA (1)...(19): siRNA sense strand
ggagaucaguuggaaagaa

SEQ ID NO: 1120601 - RNA, 19 nt, Homo sapiens
  misc_RNA (1)...(19): siRNA sense strand
gaaauucccaauccaguga

SEQ ID NO: 1120602 - RNA, 19 nt, Homo sapiens
  misc_RNA (1)...(19): siRNA sense strand
ggugugaccuggaagaaau

SEQ ID NO: 1120603 - RNA, 19 nt, Homo sapiens
  misc_RNA (1)...(19): siRNA sense strand
uuguugagcugcugaaaua

SEQ ID NO: 1120604 - RNA, 19 nt, Homo sapiens
  misc_RNA (1)...(19): siRNA sense strand
gaaagaugaagaagaacaa

SEQ ID NO: 1120605 - RNA, 19 nt, Homo sapiens
  misc_RNA (1)...(19): siRNA sense strand
gaagaagaacaaauacuag

SEQ ID NO: 1120606 - RNA, 19 nt, Homo sapiens
  misc_RNA (1)...(19): siRNA sense strand
caccaaagcugcugagaac

SEQ ID NO: 1120607 - RNA, 19 nt, Homo sapiens
  misc_RNA (1)...(19): siRNA sense strand
ggaauuguucagcaaauga

SEQ ID NO: 1120608 - RNA, 19 nt, Homo sapiens
  misc_RNA (1)...(19): siRNA sense strand
ccacgugccuguagcuuca

SEQ ID NO: 1120609 - RNA, 19 nt, Homo sapiens
  misc_RNA (1)...(19): siRNA sense strand
caaccgaguagcugaaauu

SEQ ID NO: 1120610 - RNA, 19 nt, Homo sapiens
  misc_RNA (1)...(19): siRNA sense strand
gucaaaggacguuggaaua

SEQ ID NO: 1120611 - RNA, 19 nt, Homo sapiens
  misc_RNA (1)...(19): siRNA sense strand
gaacaaauacuagccaaaa

SEQ ID NO: 1120612 - RNA, 19 nt, Homo sapiens
  misc_RNA (1)...(19): siRNA sense strand
gaccuaaacaccauagaau

SEQ ID NO: 1120613 - RNA, 19 nt, Homo sapiens
  misc_RNA (1)...(19): siRNA sense strand
ccaaagcugcugagaacaa

SEQ ID NO: 1120614 - RNA, 19 nt, Homo sapiens
  misc_RNA (1)...(19): siRNA sense strand
ccagugagaaggccauaaa

SEQ ID NO: 1120615 - RNA, 19 nt, Homo sapiens
  misc_RNA (1)...(19): siRNA sense strand
gggaauuguucagcaaaug

SEQ ID NO: 1120616 - RNA, 19 nt, Homo sapiens
  misc_RNA (1)...(19): siRNA sense strand
uagcugaaauuguuuacuc

SEQ ID NO: 1120617 - RNA, 19 nt, Homo sapiens
  misc_RNA (1)...(19): siRNA sense strand
ggucaaaggacguuggaau

SEQ ID NO: 1120618 - RNA, 19 nt, Homo sapiens
  misc_RNA (1)...(19): siRNA sense strand
ccuagaugaugaugaccua

SEQ ID NO: 1120619 - RNA, 19 nt, Homo sapiens
  misc_RNA (1)...(19): siRNA sense strand
uaacugagggucucuccuu

SEQ ID NO: 1120620 - RNA, 19 nt, Homo sapiens
  misc_RNA (1)...(19): siRNA sense strand
ccuaaacaccauagaauuc

SEQ ID NO: 1120621 - RNA, 19 nt, Homo sapiens
  misc_RNA (1)...(19): siRNA sense strand
ucaaaauccucgccuacua

SEQ ID NO: 1120622 - RNA, 19 nt, Homo sapiens
  misc_RNA (1)...(19): siRNA sense strand
gaguagcugaaauuguuua

SEQ ID NO: 1120623 - RNA, 19 nt, Homo sapiens
  misc_RNA (1)...(19): siRNA sense strand
gucauggccuugcagaaau

SEQ ID NO: 1120624 - RNA, 19 nt, Homo sapiens
  misc_RNA (1)...(19): siRNA sense strand
gcugagaacaagaaguuug

SEQ ID NO: 1120625 - RNA, 19 nt, Homo sapiens
  misc_RNA (1)...(19): siRNA sense strand
caaagcugcugagaacaag

SEQ ID NO: 1120626 - RNA, 19 nt, Homo sapiens
  misc_RNA (1)...(19): siRNA sense strand
ccaaagucauuuccauugc

SEQ ID NO: 1120627 - RNA, 19 nt, Homo sapiens
  misc_RNA (1)...(19): siRNA sense strand
ucauggccuugcagaaauu

SEQ ID NO: 1120628 - RNA, 19 nt, Homo sapiens
  misc_RNA (1)...(19): siRNA sense strand
cuaagaaagaugaagaaga

SEQ ID NO: 1120629 - RNA, 19 nt, Homo sapiens
  misc_RNA (1)...(19): siRNA sense strand
gccuguagcuucaaguucu

SEQ ID NO: 1120630 - RNA, 19 nt, Homo sapiens
  misc_RNA (1)...(19): siRNA sense strand
guugagcugcugaaauauu

SEQ ID NO: 1120631 - RNA, 19 nt, Homo sapiens
  misc_RNA (1)...(19): siRNA sense strand
ugucauggccuugcagaaa

SEQ ID NO: 1120632 - RNA, 19 nt, Homo sapiens
  misc_RNA (1)...(19): siRNA sense strand
ugaccuaaacaccauagaa

SEQ ID NO: 1120633 - RNA, 19 nt, Homo sapiens
  misc_RNA (1)...(19): siRNA sense strand
gaaauauucaggagaucag

SEQ ID NO: 1120634 - RNA, 19 nt, Homo sapiens
  misc_RNA (1)...(19): siRNA sense strand
ucaccaaagcugcugagaa

SEQ ID NO: 1120635 - RNA, 19 nt, Homo sapiens
  misc_RNA (1)...(19): siRNA sense strand
aaaggacguuggaauacca

SEQ ID NO: 1120636 - RNA, 19 nt, Homo sapiens
  misc_RNA (1)...(19): siRNA sense strand
uagaugaugaugaccuaaa

SEQ ID NO: 1120637 - RNA, 19 nt, Homo sapiens
  misc_RNA (1)...(19): siRNA sense strand
uugagcugcugaaauauuc

SEQ ID NO: 1120638 - RNA, 19 nt, Homo sapiens
  misc_RNA (1)...(19): siRNA sense strand
cuaaacaccauagaauuca

SEQ ID NO: 1120639 - RNA, 19 nt, Homo sapiens
  misc_RNA (1)...(19): siRNA sense strand
caggagaucaguuggaaag

SEQ ID NO: 1120640 - RNA, 19 nt, Homo sapiens
  misc_RNA (1)...(19): siRNA sense strand
caaauacuagccaaaauug

SEQ ID NO: 1120641 - RNA, 19 nt, Homo sapiens
  misc_RNA (1)...(19): siRNA sense strand
gaugaagaagaacaaauac

SEQ ID NO: 1120642 - RNA, 19 nt, Homo sapiens
  misc_RNA (1)...(19): siRNA sense strand
cuucaaguccaaagagauu

SEQ ID NO: 1120643 - RNA, 19 nt, Homo sapiens
  misc_RNA (1)...(19): siRNA sense strand
cccaaagucauuuccauug

SEQ ID NO: 1120644 - RNA, 19 nt, Homo sapiens
  misc_RNA (1)...(19): siRNA sense strand
caggaggcuucaaguccaa

SEQ ID NO: 1120645 - RNA, 19 nt, Homo sapiens
  misc_RNA (1)...(19): siRNA sense strand
cugcugagaacaagaaguu

SEQ ID NO: 1120646 - RNA, 19 nt, Homo sapiens
  misc_RNA (1)...(19): siRNA sense strand
ccuguagcuucaaguucua

SEQ ID NO: 1120647 - RNA, 19 nt, Homo sapiens
  misc_RNA (1)...(19): siRNA sense strand
caaaggacguuggaauacc

SEQ ID NO: 1120648 - RNA, 19 nt, Homo sapiens
  misc_RNA (1)...(19): siRNA sense strand
ucaaaggacguuggaauac

SEQ ID NO: 1120649 - RNA, 19 nt, Homo sapiens
  misc_RNA (1)...(19): siRNA sense strand
ggcuucaaguccaaagaga

SEQ ID NO: 1120650 - RNA, 19 nt, Homo sapiens
  misc_RNA (1)...(19): siRNA sense strand
agaaagaugaagaagaaca

SEQ ID NO: 1120651 - RNA, 19 nt, Homo sapiens
  misc_RNA (1)...(19): siRNA sense strand
cagugggugugaccuggaa

SEQ ID NO: 1120652 - RNA, 19 nt, Homo sapiens
  misc_RNA (1)...(19): siRNA sense strand
uugcagaaauucccaaucc

SEQ ID NO: 1120653 - RNA, 19 nt, Homo sapiens
  misc_RNA (1)...(19): siRNA sense strand
ccugcucucuucucaccaa

SEQ ID NO: 1120654 - RNA, 19 nt, Homo sapiens
  misc_RNA (1)...(19): siRNA sense strand
gcucucuucucaccaaagc

SEQ ID NO: 1120655 - RNA, 19 nt, Homo sapiens
  misc_RNA (1)...(19): siRNA sense strand
ccaaccgaguagcugaaau

SEQ ID NO: 1120656 - RNA, 19 nt, Homo sapiens
  misc_RNA (1)...(19): siRNA sense strand
gaauuguucagcaaaugag

SEQ ID NO: 1120657 - RNA, 19 nt, Homo sapiens
  misc_RNA (1)...(19): siRNA sense strand
cgaguagcugaaauuguuu

SEQ ID NO: 1120658 - RNA, 19 nt, Homo sapiens
  misc_RNA (1)...(19): siRNA sense strand
gaguaguggagaaggaaga

SEQ ID NO: 1120659 - RNA, 19 nt, Homo sapiens
  misc_RNA (1)...(19): siRNA sense strand
gaggugucauggccuugca

SEQ ID NO: 1120660 - RNA, 19 nt, Homo sapiens
  misc_RNA (1)...(19): siRNA sense strand
gagaucaguuggaaagaaa

SEQ ID NO: 1120661 - RNA, 19 nt, Homo sapiens
  misc_RNA (1)...(19): siRNA sense strand
ccgaguagcugaaauuguu

SEQ ID NO: 1120662 - RNA, 19 nt, Homo sapiens
  misc_RNA (1)...(19): siRNA sense strand
ggagaucaguuggaaagaa

SEQ ID NO: 1120663 - RNA, 19 nt, Homo sapiens
  misc_RNA (1)...(19): siRNA sense strand
gaaauucccaauccaguga

SEQ ID NO: 1120664 - RNA, 19 nt, Homo sapiens
  misc_RNA (1)...(19): siRNA sense strand
ggugugaccuggaagaaau

SEQ ID NO: 1120665 - RNA, 19 nt, Homo sapiens
  misc_RNA (1)...(19): siRNA sense strand
uuguugagcugcugaaaua

SEQ ID NO: 1120666 - RNA, 19 nt, Homo sapiens
  misc_RNA (1)...(19): siRNA sense strand
gaaagaugaagaagaacaa

SEQ ID NO: 1120667 - RNA, 19 nt, Homo sapiens
  misc_RNA (1)...(19): siRNA sense strand
gaagaagaacaaauacuag

SEQ ID NO: 1120668 - RNA, 19 nt, Homo sapiens
  misc_RNA (1)...(19): siRNA sense strand
caccaaagcugcugagaac

SEQ ID NO: 1120669 - RNA, 19 nt, Homo sapiens
  misc_RNA (1)...(19): siRNA sense strand
ggaauuguucagcaaauga

SEQ ID NO: 1120670 - RNA, 19 nt, Homo sapiens
  misc_RNA (1)...(19): siRNA sense strand
ccacgugccuguagcuuca

SEQ ID NO: 1120671 - RNA, 19 nt, Homo sapiens
  misc_RNA (1)...(19): siRNA sense strand
caaccgaguagcugaaauu

SEQ ID NO: 1120672 - RNA, 19 nt, Homo sapiens
  misc_RNA (1)...(19): siRNA sense strand
gucaaaggacguuggaaua

SEQ ID NO: 1120673 - RNA, 19 nt, Homo sapiens
  misc_RNA (1)...(19): siRNA sense strand
gaacaaauacuagccaaaa

SEQ ID NO: 1120674 - RNA, 19 nt, Homo sapiens
  misc_RNA (1)...(19): siRNA sense strand
gaccuaaacaccauagaau

SEQ ID NO: 1120675 - RNA, 19 nt, Homo sapiens
  misc_RNA (1)...(19): siRNA sense strand
ccaaagcugcugagaacaa

SEQ ID NO: 1120676 - RNA, 19 nt, Homo sapiens
  misc_RNA (1)...(19): siRNA sense strand
ccagugagaaggccauaaa

SEQ ID NO: 1120677 - RNA, 19 nt, Homo sapiens
  misc_RNA (1)...(19): siRNA sense strand
gggaauuguucagcaaaug

SEQ ID NO: 1120678 - RNA, 19 nt, Homo sapiens
  misc_RNA (1)...(19): siRNA sense strand
uagcugaaauuguuuacuc

SEQ ID NO: 1120679 - RNA, 19 nt, Homo sapiens
  misc_RNA (1)...(19): siRNA sense strand
ggucaaaggacguuggaau

SEQ ID NO: 1120680 - RNA, 19 nt, Homo sapiens
  misc_RNA (1)...(19): siRNA sense strand
ccuagaugaugaugaccua

SEQ ID NO: 1120681 - RNA, 19 nt, Homo sapiens
  misc_RNA (1)...(19): siRNA sense strand
uaacugagggucucuccuu

SEQ ID NO: 1120682 - RNA, 19 nt, Homo sapiens
  misc_RNA (1)...(19): siRNA sense strand
ccuaaacaccauagaauuc

SEQ ID NO: 1120683 - RNA, 19 nt, Homo sapiens
  misc_RNA (1)...(19): siRNA sense strand
ucaaaauccucgccuacua

SEQ ID NO: 1120684 - RNA, 19 nt, Homo sapiens
  misc_RNA (1)...(19): siRNA sense strand
gaguagcugaaauuguuua

SEQ ID NO: 1120685 - RNA, 19 nt, Homo sapiens
  misc_RNA (1)...(19): siRNA sense strand
gucauggccuugcagaaau

SEQ ID NO: 1120686 - RNA, 19 nt, Homo sapiens
  misc_RNA (1)...(19): siRNA sense strand
gcugagaacaagaaguuug

SEQ ID NO: 1120687 - RNA, 19 nt, Homo sapiens
  misc_RNA (1)...(19): siRNA sense strand
caaagcugcugagaacaag

SEQ ID NO: 1120688 - RNA, 19 nt, Homo sapiens
  misc_RNA (1)...(19): siRNA sense strand
ccaaagucauuuccauugc

SEQ ID NO: 1120689 - RNA, 19 nt, Homo sapiens
  misc_RNA (1)...(19): siRNA sense strand
ucauggccuugcagaaauu

SEQ ID NO: 1120690 - RNA, 19 nt, Homo sapiens
  misc_RNA (1)...(19): siRNA sense strand
cuaagaaagaugaagaaga

SEQ ID NO: 1120691 - RNA, 19 nt, Homo sapiens
  misc_RNA (1)...(19): siRNA sense strand
gccuguagcuucaaguucu

SEQ ID NO: 1120692 - RNA, 19 nt, Homo sapiens
  misc_RNA (1)...(19): siRNA sense strand
guugagcugcugaaauauu

SEQ ID NO: 1120693 - RNA, 19 nt, Homo sapiens
  misc_RNA (1)...(19): siRNA sense strand
ugucauggccuugcagaaa

SEQ ID NO: 1120694 - RNA, 19 nt, Homo sapiens
  misc_RNA (1)...(19): siRNA sense strand
ugaccuaaacaccauagaa

SEQ ID NO: 1120695 - RNA, 19 nt, Homo sapiens
  misc_RNA (1)...(19): siRNA sense strand
gaaauauucaggagaucag

SEQ ID NO: 1120696 - RNA, 19 nt, Homo sapiens
  misc_RNA (1)...(19): siRNA sense strand
ucaccaaagcugcugagaa

SEQ ID NO: 1120697 - RNA, 19 nt, Homo sapiens
  misc_RNA (1)...(19): siRNA sense strand
aaaggacguuggaauacca

SEQ ID NO: 1120698 - RNA, 19 nt, Homo sapiens
  misc_RNA (1)...(19): siRNA sense strand
uagaugaugaugaccuaaa

SEQ ID NO: 1120699 - RNA, 19 nt, Homo sapiens
  misc_RNA (1)...(19): siRNA sense strand
uugagcugcugaaauauuc

SEQ ID NO: 1120700 - RNA, 19 nt, Homo sapiens
  misc_RNA (1)...(19): siRNA sense strand
cuaaacaccauagaauuca

SEQ ID NO: 1120701 - RNA, 19 nt, Homo sapiens
  misc_RNA (1)...(19): siRNA sense strand
caggagaucaguuggaaag

SEQ ID NO: 1120702 - RNA, 19 nt, Homo sapiens
  misc_RNA (1)...(19): siRNA sense strand
caaauacuagccaaaauug

SEQ ID NO: 1120703 - RNA, 19 nt, Homo sapiens
  misc_RNA (1)...(19): siRNA sense strand
gaugaagaagaacaaauac

SEQ ID NO: 1120704 - RNA, 19 nt, Homo sapiens
  misc_RNA (1)...(19): siRNA sense strand
cuucaaguccaaagagauu

SEQ ID NO: 1120705 - RNA, 19 nt, Homo sapiens
  misc_RNA (1)...(19): siRNA sense strand
cccaaagucauuuccauug

SEQ ID NO: 1120706 - RNA, 19 nt, Homo sapiens
  misc_RNA (1)...(19): siRNA sense strand
caggaggcuucaaguccaa

SEQ ID NO: 1120707 - RNA, 19 nt, Homo sapiens
  misc_RNA (1)...(19): siRNA sense strand
cugcugagaacaagaaguu

SEQ ID NO: 1120708 - RNA, 19 nt, Homo sapiens
  misc_RNA (1)...(19): siRNA sense strand
ccuguagcuucaaguucua

SEQ ID NO: 1120709 - RNA, 19 nt, Homo sapiens
  misc_RNA (1)...(19): siRNA sense strand
caaaggacguuggaauacc

SEQ ID NO: 1120710 - RNA, 19 nt, Homo sapiens
  misc_RNA (1)...(19): siRNA sense strand
ucaaaggacguuggaauac

SEQ ID NO: 1120711 - RNA, 19 nt, Homo sapiens
  misc_RNA (1)...(19): siRNA sense strand
ggcuucaaguccaaagaga

SEQ ID NO: 1120712 - RNA, 19 nt, Homo sapiens
  misc_RNA (1)...(19): siRNA sense strand
agaaagaugaagaagaaca

SEQ ID NO: 1120713 - RNA, 19 nt, Homo sapiens
  misc_RNA (1)...(19): siRNA sense strand
cagugggugugaccuggaa

SEQ ID NO: 1120714 - RNA, 19 nt, Homo sapiens
  misc_RNA (1)...(19): siRNA sense strand
uugcagaaauucccaaucc

SEQ ID NO: 1120715 - RNA, 19 nt, Homo sapiens
  misc_RNA (1)...(19): siRNA sense strand
ccugcucucuucucaccaa

SEQ ID NO: 1120716 - RNA, 19 nt, Homo sapiens
  misc_RNA (1)...(19): siRNA sense strand
gcucucuucucaccaaagc

SEQ ID NO: 1120717 - RNA, 19 nt, Homo sapiens
  misc_RNA (1)...(19): siRNA sense strand
ccaaccgaguagcugaaau

SEQ ID NO: 1120718 - RNA, 19 nt, Homo sapiens
  misc_RNA (1)...(19): siRNA sense strand
gaauuguucagcaaaugag

SEQ ID NO: 1120719 - RNA, 19 nt, Homo sapiens
  misc_RNA (1)...(19): siRNA sense strand
cgaguagcugaaauuguuu

SEQ ID NO: 1120720 - RNA, 19 nt, Homo sapiens
  misc_RNA (1)...(19): siRNA sense strand
gaguaguggagaaggaaga

SEQ ID NO: 1120721 - RNA, 19 nt, Homo sapiens
  misc_RNA (1)...(19): siRNA sense strand
gaggugucauggccuugca

SEQ ID NO: 1120722 - RNA, 19 nt, Homo sapiens
  misc_RNA (1)...(19): siRNA sense strand
gagaucaguuggaaagaaa

SEQ ID NO: 1120723 - RNA, 19 nt, Homo sapiens
  misc_RNA (1)...(19): siRNA sense strand
ccgaguagcugaaauuguu

SEQ ID NO: 1120724 - RNA, 19 nt, Homo sapiens
  misc_RNA (1)...(19): siRNA sense strand
ggagaucaguuggaaagaa

SEQ ID NO: 1120725 - RNA, 19 nt, Homo sapiens
  misc_RNA (1)...(19): siRNA sense strand
gaaauucccaauccaguga

SEQ ID NO: 1120726 - RNA, 19 nt, Homo sapiens
  misc_RNA (1)...(19): siRNA sense strand
ggugugaccuggaagaaau

SEQ ID NO: 1120727 - RNA, 19 nt, Homo sapiens
  misc_RNA (1)...(19): siRNA sense strand
uuguugagcugcugaaaua

SEQ ID NO: 1120728 - RNA, 19 nt, Homo sapiens
  misc_RNA (1)...(19): siRNA sense strand
gaaagaugaagaagaacaa

SEQ ID NO: 1120729 - RNA, 19 nt, Homo sapiens
  misc_RNA (1)...(19): siRNA sense strand
gaagaagaacaaauacuag

SEQ ID NO: 1120730 - RNA, 19 nt, Homo sapiens
  misc_RNA (1)...(19): siRNA sense strand
caccaaagcugcugagaac

SEQ ID NO: 1120731 - RNA, 19 nt, Homo sapiens
  misc_RNA (1)...(19): siRNA sense strand
ggaauuguucagcaaauga

SEQ ID NO: 1120732 - RNA, 19 nt, Homo sapiens
  misc_RNA (1)...(19): siRNA sense strand
ccacgugccuguagcuuca

SEQ ID NO: 1120733 - RNA, 19 nt, Homo sapiens
  misc_RNA (1)...(19): siRNA sense strand
caaccgaguagcugaaauu

SEQ ID NO: 1120734 - RNA, 19 nt, Homo sapiens
  misc_RNA (1)...(19): siRNA sense strand
gucaaaggacguuggaaua

SEQ ID NO: 1120735 - RNA, 19 nt, Homo sapiens
  misc_RNA (1)...(19): siRNA sense strand
gaacaaauacuagccaaaa

SEQ ID NO: 1120736 - RNA, 19 nt, Homo sapiens
  misc_RNA (1)...(19): siRNA sense strand
gaccuaaacaccauagaau

SEQ ID NO: 1120737 - RNA, 19 nt, Homo sapiens
  misc_RNA (1)...(19): siRNA sense strand
ccaaagcugcugagaacaa

SEQ ID NO: 1120738 - RNA, 19 nt, Homo sapiens
  misc_RNA (1)...(19): siRNA sense strand
ccagugagaaggccauaaa

SEQ ID NO: 1120739 - RNA, 19 nt, Homo sapiens
  misc_RNA (1)...(19): siRNA sense strand
gggaauuguucagcaaaug

SEQ ID NO: 1120740 - RNA, 19 nt, Homo sapiens
  misc_RNA (1)...(19): siRNA sense strand
uagcugaaauuguuuacuc

SEQ ID NO: 1120741 - RNA, 19 nt, Homo sapiens
  misc_RNA (1)...(19): siRNA sense strand
ggucaaaggacguuggaau

SEQ ID NO: 1120742 - RNA, 19 nt, Homo sapiens
  misc_RNA (1)...(19): siRNA sense strand
ccuagaugaugaugaccua

SEQ ID NO: 1120743 - RNA, 19 nt, Homo sapiens
  misc_RNA (1)...(19): siRNA sense strand
uaacugagggucucuccuu

SEQ ID NO: 1120744 - RNA, 19 nt, Homo sapiens
  misc_RNA (1)...(19): siRNA sense strand
ccuaaacaccauagaauuc

SEQ ID NO: 1120745 - RNA, 19 nt, Homo sapiens
  misc_RNA (1)...(19): siRNA sense strand
ucaaaauccucgccuacua

SEQ ID NO: 1120746 - RNA, 19 nt, Homo sapiens
  misc_RNA (1)...(19): siRNA sense strand
gaguagcugaaauuguuua

SEQ ID NO: 1120747 - RNA, 19 nt, Homo sapiens
  misc_RNA (1)...(19): siRNA sense strand
gucauggccuugcagaaau

SEQ ID NO: 1120748 - RNA, 19 nt, Homo sapiens
  misc_RNA (1)...(19): siRNA sense strand
gcugagaacaagaaguuug

SEQ ID NO: 1120749 - RNA, 19 nt, Homo sapiens
  misc_RNA (1)...(19): siRNA sense strand
caaagcugcugagaacaag

SEQ ID NO: 1120750 - RNA, 19 nt, Homo sapiens
  misc_RNA (1)...(19): siRNA sense strand
ccaaagucauuuccauugc

SEQ ID NO: 1120751 - RNA, 19 nt, Homo sapiens
  misc_RNA (1)...(19): siRNA sense strand
ucauggccuugcagaaauu

SEQ ID NO: 1120752 - RNA, 19 nt, Homo sapiens
  misc_RNA (1)...(19): siRNA sense strand
cuaagaaagaugaagaaga

SEQ ID NO: 1120753 - RNA, 19 nt, Homo sapiens
  misc_RNA (1)...(19): siRNA sense strand
gccuguagcuucaaguucu

SEQ ID NO: 1120754 - RNA, 19 nt, Homo sapiens
  misc_RNA (1)...(19): siRNA sense strand
guugagcugcugaaauauu

SEQ ID NO: 1120755 - RNA, 19 nt, Homo sapiens
  misc_RNA (1)...(19): siRNA sense strand
ugucauggccuugcagaaa

SEQ ID NO: 1120756 - RNA, 19 nt, Homo sapiens
  misc_RNA (1)...(19): siRNA sense strand
ugaccuaaacaccauagaa

SEQ ID NO: 1120757 - RNA, 19 nt, Homo sapiens
  misc_RNA (1)...(19): siRNA sense strand
gaaauauucaggagaucag

SEQ ID NO: 1120758 - RNA, 19 nt, Homo sapiens
  misc_RNA (1)...(19): siRNA sense strand
ucaccaaagcugcugagaa

SEQ ID NO: 1120759 - RNA, 19 nt, Homo sapiens
  misc_RNA (1)...(19): siRNA sense strand
aaaggacguuggaauacca

SEQ ID NO: 1120760 - RNA, 19 nt, Homo sapiens
  misc_RNA (1)...(19): siRNA sense strand
uagaugaugaugaccuaaa

SEQ ID NO: 1120761 - RNA, 19 nt, Homo sapiens
  misc_RNA (1)...(19): siRNA sense strand
uugagcugcugaaauauuc

SEQ ID NO: 1120762 - RNA, 19 nt, Homo sapiens
  misc_RNA (1)...(19): siRNA sense strand
cuaaacaccauagaauuca

SEQ ID NO: 1120763 - RNA, 19 nt, Homo sapiens
  misc_RNA (1)...(19): siRNA sense strand
caggagaucaguuggaaag

SEQ ID NO: 1120764 - RNA, 19 nt, Homo sapiens
  misc_RNA (1)...(19): siRNA sense strand
caaauacuagccaaaauug

SEQ ID NO: 1120765 - RNA, 19 nt, Homo sapiens
  misc_RNA (1)...(19): siRNA sense strand
gaugaagaagaacaaauac

SEQ ID NO: 1120766 - RNA, 19 nt, Homo sapiens
  misc_RNA (1)...(19): siRNA sense strand
cuucaaguccaaagagauu

SEQ ID NO: 1120767 - RNA, 19 nt, Homo sapiens
  misc_RNA (1)...(19): siRNA sense strand
cccaaagucauuuccauug

SEQ ID NO: 1120768 - RNA, 19 nt, Homo sapiens
  misc_RNA (1)...(19): siRNA sense strand
caggaggcuucaaguccaa

SEQ ID NO: 1120769 - RNA, 19 nt, Homo sapiens
  misc_RNA (1)...(19): siRNA sense strand
cugcugagaacaagaaguu

SEQ ID NO: 1120770 - RNA, 19 nt, Homo sapiens
  misc_RNA (1)...(19): siRNA sense strand
ccuguagcuucaaguucua

SEQ ID NO: 1120771 - RNA, 19 nt, Homo sapiens
  misc_RNA (1)...(19): siRNA sense strand
caaaggacguuggaauacc

SEQ ID NO: 1120772 - RNA, 19 nt, Homo sapiens
  misc_RNA (1)...(19): siRNA sense strand
ucaaaggacguuggaauac

SEQ ID NO: 1120773 - RNA, 19 nt, Homo sapiens
  misc_RNA (1)...(19): siRNA sense strand
ggcuucaaguccaaagaga

SEQ ID NO: 1120774 - RNA, 19 nt, Homo sapiens
  misc_RNA (1)...(19): siRNA sense strand
agaaagaugaagaagaaca

SEQ ID NO: 1120775 - RNA, 19 nt, Homo sapiens
  misc_RNA (1)...(19): siRNA sense strand
cagugggugugaccuggaa

SEQ ID NO: 1120776 - RNA, 19 nt, Homo sapiens
  misc_RNA (1)...(19): siRNA sense strand
uugcagaaauucccaaucc

SEQ ID NO: 1120777 - RNA, 19 nt, Homo sapiens
  misc_RNA (1)...(19): siRNA sense strand
ccugcucucuucucaccaa

SEQ ID NO: 1120778 - RNA, 19 nt, Homo sapiens
  misc_RNA (1)...(19): siRNA sense strand
gcucucuucucaccaaagc

SEQ ID NO: 1120779 - RNA, 19 nt, Homo sapiens
  misc_RNA (1)...(19): siRNA sense strand
ccaaccgaguagcugaaau

SEQ ID NO: 1120780 - RNA, 19 nt, Homo sapiens
  misc_RNA (1)...(19): siRNA sense strand
gaauuguucagcaaaugag

SEQ ID NO: 1120781 - RNA, 19 nt, Homo sapiens
  misc_RNA (1)...(19): siRNA sense strand
cgaguagcugaaauuguuu

SEQ ID NO: 1120782 - RNA, 19 nt, Homo sapiens
  misc_RNA (1)...(19): siRNA sense strand
gaguaguggagaaggaaga

SEQ ID NO: 1120783 - RNA, 19 nt, Homo sapiens
  misc_RNA (1)...(19): siRNA sense strand
gaggugucauggccuugca

SEQ ID NO: 1120784 - RNA, 19 nt, Homo sapiens
  misc_RNA (1)...(19): siRNA sense strand
gagaucaguuggaaagaaa

SEQ ID NO: 1120785 - RNA, 19 nt, Homo sapiens
  misc_RNA (1)...(19): siRNA sense strand
ccgaguagcugaaauuguu

SEQ ID NO: 1120786 - RNA, 19 nt, Homo sapiens
  misc_RNA (1)...(19): siRNA sense strand
ggagaucaguuggaaagaa

SEQ ID NO: 1120787 - RNA, 19 nt, Homo sapiens
  misc_RNA (1)...(19): siRNA sense strand
gaaauucccaauccaguga

SEQ ID NO: 1120788 - RNA, 19 nt, Homo sapiens
  misc_RNA (1)...(19): siRNA sense strand
ggugugaccuggaagaaau

SEQ ID NO: 1120789 - RNA, 19 nt, Homo sapiens
  misc_RNA (1)...(19): siRNA sense strand
uuguugagcugcugaaaua

SEQ ID NO: 1120790 - RNA, 19 nt, Homo sapiens
  misc_RNA (1)...(19): siRNA sense strand
gaaagaugaagaagaacaa

SEQ ID NO: 1120791 - RNA, 19 nt, Homo sapiens
  misc_RNA (1)...(19): siRNA sense strand
gaagaagaacaaauacuag

SEQ ID NO: 1120792 - RNA, 19 nt, Homo sapiens
  misc_RNA (1)...(19): siRNA sense strand
caccaaagcugcugagaac

SEQ ID NO: 1120793 - RNA, 19 nt, Homo sapiens
  misc_RNA (1)...(19): siRNA sense strand
ggaauuguucagcaaauga

SEQ ID NO: 1120794 - RNA, 19 nt, Homo sapiens
  misc_RNA (1)...(19): siRNA sense strand
ccacgugccuguagcuuca

SEQ ID NO: 1120795 - RNA, 19 nt, Homo sapiens
  misc_RNA (1)...(19): siRNA sense strand
caaccgaguagcugaaauu

SEQ ID NO: 1120796 - RNA, 19 nt, Homo sapiens
  misc_RNA (1)...(19): siRNA sense strand
gucaaaggacguuggaaua

SEQ ID NO: 1120797 - RNA, 19 nt, Homo sapiens
  misc_RNA (1)...(19): siRNA sense strand
gaacaaauacuagccaaaa

SEQ ID NO: 1120798 - RNA, 19 nt, Homo sapiens
  misc_RNA (1)...(19): siRNA sense strand
gaccuaaacaccauagaau

SEQ ID NO: 1120799 - RNA, 19 nt, Homo sapiens
  misc_RNA (1)...(19): siRNA sense strand
ccaaagcugcugagaacaa

SEQ ID NO: 1120800 - RNA, 19 nt, Homo sapiens
  misc_RNA (1)...(19): siRNA sense strand
ccagugagaaggccauaaa

SEQ ID NO: 1120801 - RNA, 19 nt, Homo sapiens
  misc_RNA (1)...(19): siRNA sense strand
gggaauuguucagcaaaug

SEQ ID NO: 1120802 - RNA, 19 nt, Homo sapiens
  misc_RNA (1)...(19): siRNA sense strand
uagcugaaauuguuuacuc

SEQ ID NO: 1120803 - RNA, 19 nt, Homo sapiens
  misc_RNA (1)...(19): siRNA sense strand
ggucaaaggacguuggaau

SEQ ID NO: 1120804 - RNA, 19 nt, Homo sapiens
  misc_RNA (1)...(19): siRNA sense strand
ccuagaugaugaugaccua

SEQ ID NO: 1120805 - RNA, 19 nt, Homo sapiens
  misc_RNA (1)...(19): siRNA sense strand
uaacugagggucucuccuu

SEQ ID NO: 1120806 - RNA, 19 nt, Homo sapiens
  misc_RNA (1)...(19): siRNA sense strand
ccuaaacaccauagaauuc

SEQ ID NO: 1120807 - RNA, 19 nt, Homo sapiens
  misc_RNA (1)...(19): siRNA sense strand
ucaaaauccucgccuacua

SEQ ID NO: 1120808 - RNA, 19 nt, Homo sapiens
  misc_RNA (1)...(19): siRNA sense strand
gaguagcugaaauuguuua

SEQ ID NO: 1120809 - RNA, 19 nt, Homo sapiens
  misc_RNA (1)...(19): siRNA sense strand
gucauggccuugcagaaau

SEQ ID NO: 1120810 - RNA, 19 nt, Homo sapiens
  misc_RNA (1)...(19): siRNA sense strand
gcugagaacaagaaguuug

SEQ ID NO: 1120811 - RNA, 19 nt, Homo sapiens
  misc_RNA (1)...(19): siRNA sense strand
caaagcugcugagaacaag

SEQ ID NO: 1120812 - RNA, 19 nt, Homo sapiens
  misc_RNA (1)...(19): siRNA sense strand
ccaaagucauuuccauugc

SEQ ID NO: 1120813 - RNA, 19 nt, Homo sapiens
  misc_RNA (1)...(19): siRNA sense strand
ucauggccuugcagaaauu

SEQ ID NO: 1120814 - RNA, 19 nt, Homo sapiens
  misc_RNA (1)...(19): siRNA sense strand
cuaagaaagaugaagaaga

SEQ ID NO: 1120815 - RNA, 19 nt, Homo sapiens
  misc_RNA (1)...(19): siRNA sense strand
gccuguagcuucaaguucu

SEQ ID NO: 1120816 - RNA, 19 nt, Homo sapiens
  misc_RNA (1)...(19): siRNA sense strand
guugagcugcugaaauauu

SEQ ID NO: 1120817 - RNA, 19 nt, Homo sapiens
  misc_RNA (1)...(19): siRNA sense strand
ugucauggccuugcagaaa

SEQ ID NO: 1120818 - RNA, 19 nt, Homo sapiens
  misc_RNA (1)...(19): siRNA sense strand
ugaccuaaacaccauagaa

SEQ ID NO: 1120819 - RNA, 19 nt, Homo sapiens
  misc_RNA (1)...(19): siRNA sense strand
gaaauauucaggagaucag

SEQ ID NO: 1120820 - RNA, 19 nt, Homo sapiens
  misc_RNA (1)...(19): siRNA sense strand
ucaccaaagcugcugagaa

SEQ ID NO: 1120821 - RNA, 19 nt, Homo sapiens
  misc_RNA (1)...(19): siRNA sense strand
aaaggacguuggaauacca

SEQ ID NO: 1120822 - RNA, 19 nt, Homo sapiens
  misc_RNA (1)...(19): siRNA sense strand
uagaugaugaugaccuaaa

SEQ ID NO: 1120823 - RNA, 19 nt, Homo sapiens
  misc_RNA (1)...(19): siRNA sense strand
uugagcugcugaaauauuc

SEQ ID NO: 1120824 - RNA, 19 nt, Homo sapiens
  misc_RNA (1)...(19): siRNA sense strand
cuaaacaccauagaauuca

SEQ ID NO: 1120825 - RNA, 19 nt, Homo sapiens
  misc_RNA (1)...(19): siRNA sense strand
caggagaucaguuggaaag

SEQ ID NO: 1120826 - RNA, 19 nt, Homo sapiens
  misc_RNA (1)...(19): siRNA sense strand
caaauacuagccaaaauug

SEQ ID NO: 1120827 - RNA, 19 nt, Homo sapiens
  misc_RNA (1)...(19): siRNA sense strand
gaugaagaagaacaaauac

SEQ ID NO: 1120828 - RNA, 19 nt, Homo sapiens
  misc_RNA (1)...(19): siRNA sense strand
cuucaaguccaaagagauu

SEQ ID NO: 1120829 - RNA, 19 nt, Homo sapiens
  misc_RNA (1)...(19): siRNA sense strand
cccaaagucauuuccauug

SEQ ID NO: 1120830 - RNA, 19 nt, Homo sapiens
  misc_RNA (1)...(19): siRNA sense strand
caggaggcuucaaguccaa

SEQ ID NO: 1120831 - RNA, 19 nt, Homo sapiens
  misc_RNA (1)...(19): siRNA sense strand
cugcugagaacaagaaguu

SEQ ID NO: 1120832 - RNA, 19 nt, Homo sapiens
  misc_RNA (1)...(19): siRNA sense strand
ccuguagcuucaaguucua

SEQ ID NO: 1120833 - RNA, 19 nt, Homo sapiens
  misc_RNA (1)...(19): siRNA sense strand
caaaggacguuggaauacc

SEQ ID NO: 1120834 - RNA, 19 nt, Homo sapiens
  misc_RNA (1)...(19): siRNA sense strand
ucaaaggacguuggaauac

SEQ ID NO: 1120835 - RNA, 19 nt, Homo sapiens
  misc_RNA (1)...(19): siRNA sense strand
ggcuucaaguccaaagaga

SEQ ID NO: 1120836 - RNA, 19 nt, Homo sapiens
  misc_RNA (1)...(19): siRNA sense strand
agaaagaugaagaagaaca

SEQ ID NO: 1120837 - RNA, 19 nt, Homo sapiens
  misc_RNA (1)...(19): siRNA sense strand
cagugggugugaccuggaa

SEQ ID NO: 1120838 - RNA, 19 nt, Homo sapiens
  misc_RNA (1)...(19): siRNA sense strand
uugcagaaauucccaaucc

SEQ ID NO: 1120839 - RNA, 19 nt, Homo sapiens
  misc_RNA (1)...(19): siRNA sense strand
ccugcucucuucucaccaa

SEQ ID NO: 1120840 - RNA, 19 nt, Homo sapiens
  misc_RNA (1)...(19): siRNA sense strand
gcucucuucucaccaaagc

SEQ ID NO: 1120841 - RNA, 19 nt, Homo sapiens
  misc_RNA (1)...(19): siRNA sense strand
ccaaccgaguagcugaaau

SEQ ID NO: 1120842 - RNA, 19 nt, Homo sapiens
  misc_RNA (1)...(19): siRNA sense strand
gaauuguucagcaaaugag

SEQ ID NO: 1120843 - RNA, 19 nt, Homo sapiens
  misc_RNA (1)...(19): siRNA sense strand
cgaguagcugaaauuguuu

SEQ ID NO: 1120844 - RNA, 19 nt, Homo sapiens
  misc_RNA (1)...(19): siRNA sense strand
gaguaguggagaaggaaga

SEQ ID NO: 1120845 - RNA, 19 nt, Homo sapiens
  misc_RNA (1)...(19): siRNA sense strand
gaggugucauggccuugca

SEQ ID NO: 1120846 - RNA, 19 nt, Homo sapiens
  misc_RNA (1)...(19): siRNA sense strand
gagaucaguuggaaagaaa

SEQ ID NO: 1120847 - RNA, 19 nt, Homo sapiens
  misc_RNA (1)...(19): siRNA sense strand
ccgaguagcugaaauuguu

SEQ ID NO: 1120848 - RNA, 19 nt, Homo sapiens
  misc_RNA (1)...(19): siRNA sense strand
ggagaucaguuggaaagaa

SEQ ID NO: 1120849 - RNA, 19 nt, Homo sapiens
  misc_RNA (1)...(19): siRNA sense strand
gaaauucccaauccaguga

SEQ ID NO: 1120850 - RNA, 19 nt, Homo sapiens
  misc_RNA (1)...(19): siRNA sense strand
ggugugaccuggaagaaau

SEQ ID NO: 1120851 - RNA, 19 nt, Homo sapiens
  misc_RNA (1)...(19): siRNA sense strand
uuguugagcugcugaaaua

SEQ ID NO: 1120852 - RNA, 19 nt, Homo sapiens
  misc_RNA (1)...(19): siRNA sense strand
gaaagaugaagaagaacaa

SEQ ID NO: 1120853 - RNA, 19 nt, Homo sapiens
  misc_RNA (1)...(19): siRNA sense strand
gaagaagaacaaauacuag

SEQ ID NO: 1120854 - RNA, 19 nt, Homo sapiens
  misc_RNA (1)...(19): siRNA sense strand
caccaaagcugcugagaac

SEQ ID NO: 1120855 - RNA, 19 nt, Homo sapiens
  misc_RNA (1)...(19): siRNA sense strand
ggaauuguucagcaaauga

SEQ ID NO: 1120856 - RNA, 19 nt, Homo sapiens
  misc_RNA (1)...(19): siRNA sense strand
ccacgugccuguagcuuca

SEQ ID NO: 1120857 - RNA, 19 nt, Homo sapiens
  misc_RNA (1)...(19): siRNA sense strand
caaccgaguagcugaaauu

SEQ ID NO: 1120858 - RNA, 19 nt, Homo sapiens
  misc_RNA (1)...(19): siRNA sense strand
gucaaaggacguuggaaua

SEQ ID NO: 1120859 - RNA, 19 nt, Homo sapiens
  misc_RNA (1)...(19): siRNA sense strand
gaacaaauacuagccaaaa

SEQ ID NO: 1120860 - RNA, 19 nt, Homo sapiens
  misc_RNA (1)...(19): siRNA sense strand
gaccuaaacaccauagaau

SEQ ID NO: 1120861 - RNA, 19 nt, Homo sapiens
  misc_RNA (1)...(19): siRNA sense strand
ccaaagcugcugagaacaa

SEQ ID NO: 1120862 - RNA, 19 nt, Homo sapiens
  misc_RNA (1)...(19): siRNA sense strand
ccagugagaaggccauaaa

SEQ ID NO: 1120863 - RNA, 19 nt, Homo sapiens
  misc_RNA (1)...(19): siRNA sense strand
gggaauuguucagcaaaug

SEQ ID NO: 1120864 - RNA, 19 nt, Homo sapiens
  misc_RNA (1)...(19): siRNA sense strand
uagcugaaauuguuuacuc

SEQ ID NO: 1120865 - RNA, 19 nt, Homo sapiens
  misc_RNA (1)...(19): siRNA sense strand
ggucaaaggacguuggaau

SEQ ID NO: 1120866 - RNA, 19 nt, Homo sapiens
  misc_RNA (1)...(19): siRNA sense strand
ccuagaugaugaugaccua

SEQ ID NO: 1120867 - RNA, 19 nt, Homo sapiens
  misc_RNA (1)...(19): siRNA sense strand
uaacugagggucucuccuu

SEQ ID NO: 1120868 - RNA, 19 nt, Homo sapiens
  misc_RNA (1)...(19): siRNA sense strand
ccuaaacaccauagaauuc

SEQ ID NO: 1120869 - RNA, 19 nt, Homo sapiens
  misc_RNA (1)...(19): siRNA sense strand
ucaaaauccucgccuacua

SEQ ID NO: 1120870 - RNA, 19 nt, Homo sapiens
  misc_RNA (1)...(19): siRNA sense strand
gaguagcugaaauuguuua

SEQ ID NO: 1120871 - RNA, 19 nt, Homo sapiens
  misc_RNA (1)...(19): siRNA sense strand
gucauggccuugcagaaau

SEQ ID NO: 1120872 - RNA, 19 nt, Homo sapiens
  misc_RNA (1)...(19): siRNA sense strand
gcugagaacaagaaguuug

SEQ ID NO: 1120873 - RNA, 19 nt, Homo sapiens
  misc_RNA (1)...(19): siRNA sense strand
caaagcugcugagaacaag

SEQ ID NO: 1120874 - RNA, 19 nt, Homo sapiens
  misc_RNA (1)...(19): siRNA sense strand
ccaaagucauuuccauugc

SEQ ID NO: 1120875 - RNA, 19 nt, Homo sapiens
  misc_RNA (1)...(19): siRNA sense strand
ucauggccuugcagaaauu

SEQ ID NO: 1120876 - RNA, 19 nt, Homo sapiens
  misc_RNA (1)...(19): siRNA sense strand
cuaagaaagaugaagaaga

SEQ ID NO: 1120877 - RNA, 19 nt, Homo sapiens
  misc_RNA (1)...(19): siRNA sense strand
gccuguagcuucaaguucu

SEQ ID NO: 1120878 - RNA, 19 nt, Homo sapiens
  misc_RNA (1)...(19): siRNA sense strand
guugagcugcugaaauauu

SEQ ID NO: 1120879 - RNA, 19 nt, Homo sapiens
  misc_RNA (1)...(19): siRNA sense strand
ugucauggccuugcagaaa

SEQ ID NO: 1120880 - RNA, 19 nt, Homo sapiens
  misc_RNA (1)...(19): siRNA sense strand
ugaccuaaacaccauagaa

SEQ ID NO: 1120881 - RNA, 19 nt, Homo sapiens
  misc_RNA (1)...(19): siRNA sense strand
gaaauauucaggagaucag

SEQ ID NO: 1120882 - RNA, 19 nt, Homo sapiens
  misc_RNA (1)...(19): siRNA sense strand
ucaccaaagcugcugagaa

SEQ ID NO: 1120883 - RNA, 19 nt, Homo sapiens
  misc_RNA (1)...(19): siRNA sense strand
aaaggacguuggaauacca

SEQ ID NO: 1120884 - RNA, 19 nt, Homo sapiens
  misc_RNA (1)...(19): siRNA sense strand
uagaugaugaugaccuaaa

SEQ ID NO: 1120885 - RNA, 19 nt, Homo sapiens
  misc_RNA (1)...(19): siRNA sense strand
uugagcugcugaaauauuc

SEQ ID NO: 1120886 - RNA, 19 nt, Homo sapiens
  misc_RNA (1)...(19): siRNA sense strand
cuaaacaccauagaauuca

SEQ ID NO: 1120887 - RNA, 19 nt, Homo sapiens
  misc_RNA (1)...(19): siRNA sense strand
caggagaucaguuggaaag

SEQ ID NO: 1120888 - RNA, 19 nt, Homo sapiens
  misc_RNA (1)...(19): siRNA sense strand
caaauacuagccaaaauug

SEQ ID NO: 1120889 - RNA, 19 nt, Homo sapiens
  misc_RNA (1)...(19): siRNA sense strand
gaugaagaagaacaaauac

SEQ ID NO: 1120890 - RNA, 19 nt, Homo sapiens
  misc_RNA (1)...(19): siRNA sense strand
cuucaaguccaaagagauu

SEQ ID NO: 1120891 - RNA, 19 nt, Homo sapiens
  misc_RNA (1)...(19): siRNA sense strand
cccaaagucauuuccauug

SEQ ID NO: 1120892 - RNA, 19 nt, Homo sapiens
  misc_RNA (1)...(19): siRNA sense strand
caggaggcuucaaguccaa

SEQ ID NO: 1120893 - RNA, 19 nt, Homo sapiens
  misc_RNA (1)...(19): siRNA sense strand
cugcugagaacaagaaguu

SEQ ID NO: 1120894 - RNA, 19 nt, Homo sapiens
  misc_RNA (1)...(19): siRNA sense strand
ccuguagcuucaaguucua

SEQ ID NO: 1120895 - RNA, 19 nt, Homo sapiens
  misc_RNA (1)...(19): siRNA sense strand
caaaggacguuggaauacc

SEQ ID NO: 1120896 - RNA, 19 nt, Homo sapiens
  misc_RNA (1)...(19): siRNA sense strand
ucaaaggacguuggaauac

SEQ ID NO: 1120897 - RNA, 19 nt, Homo sapiens
  misc_RNA (1)...(19): siRNA sense strand
ggcuucaaguccaaagaga

SEQ ID NO: 1120898 - RNA, 19 nt, Homo sapiens
  misc_RNA (1)...(19): siRNA sense strand
agaaagaugaagaagaaca

SEQ ID NO: 1120899 - RNA, 19 nt, Homo sapiens
  misc_RNA (1)...(19): siRNA sense strand
cagugggugugaccuggaa

SEQ ID NO: 1120900 - RNA, 19 nt, Homo sapiens
  misc_RNA (1)...(19): siRNA sense strand
uugcagaaauucccaaucc

SEQ ID NO: 1120901 - RNA, 19 nt, Homo sapiens
  misc_RNA (1)...(19): siRNA sense strand
ccugcucucuucucaccaa

SEQ ID NO: 1120902 - RNA, 19 nt, Homo sapiens
  misc_RNA (1)...(19): siRNA sense strand
gcucucuucucaccaaagc

SEQ ID NO: 1120903 - RNA, 19 nt, Homo sapiens
  misc_RNA (1)...(19): siRNA sense strand
ccaaccgaguagcugaaau

SEQ ID NO: 1120904 - RNA, 19 nt, Homo sapiens
  misc_RNA (1)...(19): siRNA sense strand
gaauuguucagcaaaugag

SEQ ID NO: 1120905 - RNA, 19 nt, Homo sapiens
  misc_RNA (1)...(19): siRNA sense strand
cgaguagcugaaauuguuu

SEQ ID NO: 1120906 - RNA, 19 nt, Homo sapiens
  misc_RNA (1)...(19): siRNA sense strand
gaguaguggagaaggaaga

SEQ ID NO: 1120907 - RNA, 19 nt, Homo sapiens
  misc_RNA (1)...(19): siRNA sense strand
gaggugucauggccuugca

SEQ ID NO: 1120908 - RNA, 19 nt, Homo sapiens
  misc_RNA (1)...(19): siRNA sense strand
gagaucaguuggaaagaaa

SEQ ID NO: 1120909 - RNA, 19 nt, Homo sapiens
  misc_RNA (1)...(19): siRNA sense strand
ccgaguagcugaaauuguu

SEQ ID NO: 1120910 - RNA, 19 nt, Homo sapiens
  misc_RNA (1)...(19): siRNA sense strand
ggagaucaguuggaaagaa

SEQ ID NO: 1120911 - RNA, 19 nt, Homo sapiens
  misc_RNA (1)...(19): siRNA sense strand
gaaauucccaauccaguga

SEQ ID NO: 1120912 - RNA, 19 nt, Homo sapiens
  misc_RNA (1)...(19): siRNA sense strand
ggugugaccuggaagaaau

SEQ ID NO: 1120913 - RNA, 19 nt, Homo sapiens
  misc_RNA (1)...(19): siRNA sense strand
uuguugagcugcugaaaua

SEQ ID NO: 1120914 - RNA, 19 nt, Homo sapiens
  misc_RNA (1)...(19): siRNA sense strand
gaaagaugaagaagaacaa

SEQ ID NO: 1120915 - RNA, 19 nt, Homo sapiens
  misc_RNA (1)...(19): siRNA sense strand
gaagaagaacaaauacuag

SEQ ID NO: 1120916 - RNA, 19 nt, Homo sapiens
  misc_RNA (1)...(19): siRNA sense strand
caccaaagcugcugagaac

SEQ ID NO: 1120917 - RNA, 19 nt, Homo sapiens
  misc_RNA (1)...(19): siRNA sense strand
ggaauuguucagcaaauga

SEQ ID NO: 1120918 - RNA, 19 nt, Homo sapiens
  misc_RNA (1)...(19): siRNA sense strand
ccacgugccuguagcuuca

SEQ ID NO: 1120919 - RNA, 19 nt, Homo sapiens
  misc_RNA (1)...(19): siRNA sense strand
caaccgaguagcugaaauu

SEQ ID NO: 1120920 - RNA, 19 nt, Homo sapiens
  misc_RNA (1)...(19): siRNA sense strand
gucaaaggacguuggaaua

SEQ ID NO: 1120921 - RNA, 19 nt, Homo sapiens
  misc_RNA (1)...(19): siRNA sense strand
gaacaaauacuagccaaaa

SEQ ID NO: 1120922 - RNA, 19 nt, Homo sapiens
  misc_RNA (1)...(19): siRNA sense strand
gaccuaaacaccauagaau

SEQ ID NO: 1120923 - RNA, 19 nt, Homo sapiens
  misc_RNA (1)...(19): siRNA sense strand
ccaaagcugcugagaacaa

SEQ ID NO: 1120924 - RNA, 19 nt, Homo sapiens
  misc_RNA (1)...(19): siRNA sense strand
ccagugagaaggccauaaa

SEQ ID NO: 1120925 - RNA, 19 nt, Homo sapiens
  misc_RNA (1)...(19): siRNA sense strand
gggaauuguucagcaaaug

SEQ ID NO: 1120926 - RNA, 19 nt, Homo sapiens
  misc_RNA (1)...(19): siRNA sense strand
uagcugaaauuguuuacuc

SEQ ID NO: 1120927 - RNA, 19 nt, Homo sapiens
  misc_RNA (1)...(19): siRNA sense strand
ggucaaaggacguuggaau

SEQ ID NO: 1120928 - RNA, 19 nt, Homo sapiens
  misc_RNA (1)...(19): siRNA sense strand
ccuagaugaugaugaccua

SEQ ID NO: 1120929 - RNA, 19 nt, Homo sapiens
  misc_RNA (1)...(19): siRNA sense strand
uaacugagggucucuccuu

SEQ ID NO: 1120930 - RNA, 19 nt, Homo sapiens
  misc_RNA (1)...(19): siRNA sense strand
ccuaaacaccauagaauuc

SEQ ID NO: 1120931 - RNA, 19 nt, Homo sapiens
  misc_RNA (1)...(19): siRNA sense strand
ucaaaauccucgccuacua

SEQ ID NO: 1120932 - RNA, 19 nt, Homo sapiens
  misc_RNA (1)...(19): siRNA sense strand
gaguagcugaaauuguuua

SEQ ID NO: 1120933 - RNA, 19 nt, Homo sapiens
  misc_RNA (1)...(19): siRNA sense strand
gucauggccuugcagaaau

SEQ ID NO: 1120934 - RNA, 19 nt, Homo sapiens
  misc_RNA (1)...(19): siRNA sense strand
gcugagaacaagaaguuug

SEQ ID NO: 1120935 - RNA, 19 nt, Homo sapiens
  misc_RNA (1)...(19): siRNA sense strand
caaagcugcugagaacaag

SEQ ID NO: 1120936 - RNA, 19 nt, Homo sapiens
  misc_RNA (1)...(19): siRNA sense strand
ccaaagucauuuccauugc

SEQ ID NO: 1120937 - RNA, 19 nt, Homo sapiens
  misc_RNA (1)...(19): siRNA sense strand
ucauggccuugcagaaauu

SEQ ID NO: 1120938 - RNA, 19 nt, Homo sapiens
  misc_RNA (1)...(19): siRNA sense strand
cuaagaaagaugaagaaga

SEQ ID NO: 1120939 - RNA, 19 nt, Homo sapiens
  misc_RNA (1)...(19): siRNA sense strand
gccuguagcuucaaguucu

SEQ ID NO: 1120940 - RNA, 19 nt, Homo sapiens
  misc_RNA (1)...(19): siRNA sense strand
guugagcugcugaaauauu

SEQ ID NO: 1120941 - RNA, 19 nt, Homo sapiens
  misc_RNA (1)...(19): siRNA sense strand
ugucauggccuugcagaaa

SEQ ID NO: 1120942 - RNA, 19 nt, Homo sapiens
  misc_RNA (1)...(19): siRNA sense strand
ugaccuaaacaccauagaa

SEQ ID NO: 1120943 - RNA, 19 nt, Homo sapiens
  misc_RNA (1)...(19): siRNA sense strand
gaaauauucaggagaucag

SEQ ID NO: 1120944 - RNA, 19 nt, Homo sapiens
  misc_RNA (1)...(19): siRNA sense strand
ucaccaaagcugcugagaa

SEQ ID NO: 1120945 - RNA, 19 nt, Homo sapiens
  misc_RNA (1)...(19): siRNA sense strand
aaaggacguuggaauacca

SEQ ID NO: 1120946 - RNA, 19 nt, Homo sapiens
  misc_RNA (1)...(19): siRNA sense strand
uagaugaugaugaccuaaa

SEQ ID NO: 1120947 - RNA, 19 nt, Homo sapiens
  misc_RNA (1)...(19): siRNA sense strand
uugagcugcugaaauauuc

SEQ ID NO: 1120948 - RNA, 19 nt, Homo sapiens
  misc_RNA (1)...(19): siRNA sense strand
cuaaacaccauagaauuca

SEQ ID NO: 1120949 - RNA, 19 nt, Homo sapiens
  misc_RNA (1)...(19): siRNA sense strand
caggagaucaguuggaaag

SEQ ID NO: 1120950 - RNA, 19 nt, Homo sapiens
  misc_RNA (1)...(19): siRNA sense strand
caaauacuagccaaaauug

SEQ ID NO: 1120951 - RNA, 19 nt, Homo sapiens
  misc_RNA (1)...(19): siRNA sense strand
gaugaagaagaacaaauac

SEQ ID NO: 1120952 - RNA, 19 nt, Homo sapiens
  misc_RNA (1)...(19): siRNA sense strand
cuucaaguccaaagagauu

SEQ ID NO: 1120953 - RNA, 19 nt, Homo sapiens
  misc_RNA (1)...(19): siRNA sense strand
cccaaagucauuuccauug

SEQ ID NO: 1120954 - RNA, 19 nt, Homo sapiens
  misc_RNA (1)...(19): siRNA sense strand
caggaggcuucaaguccaa

SEQ ID NO: 1120955 - RNA, 19 nt, Homo sapiens
  misc_RNA (1)...(19): siRNA sense strand
cugcugagaacaagaaguu

SEQ ID NO: 1120956 - RNA, 19 nt, Homo sapiens
  misc_RNA (1)...(19): siRNA sense strand
ccuguagcuucaaguucua

SEQ ID NO: 1120957 - RNA, 19 nt, Homo sapiens
  misc_RNA (1)...(19): siRNA sense strand
caaaggacguuggaauacc

SEQ ID NO: 1120958 - RNA, 19 nt, Homo sapiens
  misc_RNA (1)...(19): siRNA sense strand
ucaaaggacguuggaauac

SEQ ID NO: 1120959 - RNA, 19 nt, Homo sapiens
  misc_RNA (1)...(19): siRNA sense strand
ggcuucaaguccaaagaga

SEQ ID NO: 1120960 - RNA, 19 nt, Homo sapiens
  misc_RNA (1)...(19): siRNA sense strand
agaaagaugaagaagaaca

SEQ ID NO: 1120961 - RNA, 19 nt, Homo sapiens
  misc_RNA (1)...(19): siRNA sense strand
cagugggugugaccuggaa

SEQ ID NO: 1120962 - RNA, 19 nt, Homo sapiens
  misc_RNA (1)...(19): siRNA sense strand
uugcagaaauucccaaucc

SEQ ID NO: 1120963 - RNA, 19 nt, Homo sapiens
  misc_RNA (1)...(19): siRNA sense strand
ccugcucucuucucaccaa

SEQ ID NO: 1120964 - RNA, 19 nt, Homo sapiens
  misc_RNA (1)...(19): siRNA sense strand
gcucucuucucaccaaagc

SEQ ID NO: 1120965 - RNA, 19 nt, Homo sapiens
  misc_RNA (1)...(19): siRNA sense strand
ccaaccgaguagcugaaau

SEQ ID NO: 1120966 - RNA, 19 nt, Homo sapiens
  misc_RNA (1)...(19): siRNA sense strand
gaauuguucagcaaaugag

SEQ ID NO: 1120967 - RNA, 19 nt, Homo sapiens
  misc_RNA (1)...(19): siRNA sense strand
cgaguagcugaaauuguuu

SEQ ID NO: 1120968 - RNA, 19 nt, Homo sapiens
  misc_RNA (1)...(19): siRNA sense strand
gaguaguggagaaggaaga

SEQ ID NO: 1120969 - RNA, 19 nt, Homo sapiens
  misc_RNA (1)...(19): siRNA sense strand
gaggugucauggccuugca

SEQ ID NO: 1120970 - RNA, 19 nt, Homo sapiens
  misc_RNA (1)...(19): siRNA sense strand
gaaaccaucucuacucuau

SEQ ID NO: 1120971 - RNA, 19 nt, Homo sapiens
  misc_RNA (1)...(19): siRNA sense strand
gaaaggaaguuuuaaggaa

SEQ ID NO: 1120972 - RNA, 19 nt, Homo sapiens
  misc_RNA (1)...(19): siRNA sense strand
gaacuaaaggaaagugauu

SEQ ID NO: 1120973 - RNA, 19 nt, Homo sapiens
  misc_RNA (1)...(19): siRNA sense strand
caaguugccuuauucaaag

SEQ ID NO: 1120974 - RNA, 19 nt, Homo sapiens
  misc_RNA (1)...(19): siRNA sense strand
uauaagagaccuuuggaaa

SEQ ID NO: 1120975 - RNA, 19 nt, Homo sapiens
  misc_RNA (1)...(19): siRNA sense strand
gauucaaguugccuuauuc

SEQ ID NO: 1120976 - RNA, 19 nt, Homo sapiens
  misc_RNA (1)...(19): siRNA sense strand
ucaaguugccuuauucaaa

SEQ ID NO: 1120977 - RNA, 19 nt, Homo sapiens
  misc_RNA (1)...(19): siRNA sense strand
gcacauaucaagaaaccau

SEQ ID NO: 1120978 - RNA, 19 nt, Homo sapiens
  misc_RNA (1)...(19): siRNA sense strand
caagaaaccaucucuacuc

SEQ ID NO: 1120979 - RNA, 19 nt, Homo sapiens
  misc_RNA (1)...(19): siRNA sense strand
uaaagaggcacauaucaag

SEQ ID NO: 1120980 - RNA, 19 nt, Homo sapiens
  misc_RNA (1)...(19): siRNA sense strand
ugauucaaguugccuuauu

SEQ ID NO: 1120981 - RNA, 19 nt, Homo sapiens
  misc_RNA (1)...(19): siRNA sense strand
caucucuacucuaugcauu

SEQ ID NO: 1120982 - RNA, 19 nt, Homo sapiens
  misc_RNA (1)...(19): siRNA sense strand
ggaacaccuuuaaauccau

SEQ ID NO: 1120983 - RNA, 19 nt, Homo sapiens
  misc_RNA (1)...(19): siRNA sense strand
agaggcacauaucaagaaa

SEQ ID NO: 1120984 - RNA, 19 nt, Homo sapiens
  misc_RNA (1)...(19): siRNA sense strand
guuauaaagaggcacauau

SEQ ID NO: 1120985 - RNA, 19 nt, Homo sapiens
  misc_RNA (1)...(19): siRNA sense strand
aagaaaccaucucuacucu

SEQ ID NO: 1120986 - RNA, 19 nt, Homo sapiens
  misc_RNA (1)...(19): siRNA sense strand
uauaaagaggcacauauca

SEQ ID NO: 1120987 - RNA, 19 nt, Homo sapiens
  misc_RNA (1)...(19): siRNA sense strand
caauggagaaaggaaguuu

SEQ ID NO: 1120988 - RNA, 19 nt, Homo sapiens
  misc_RNA (1)...(19): siRNA sense strand
gauauuuuguccuucacua

SEQ ID NO: 1120989 - RNA, 19 nt, Homo sapiens
  misc_RNA (1)...(19): siRNA sense strand
gcauuguggaacaccuuua

SEQ ID NO: 1120990 - RNA, 19 nt, Homo sapiens
  misc_RNA (1)...(19): siRNA sense strand
gcuauaagagaccuuugga

SEQ ID NO: 1120991 - RNA, 19 nt, Homo sapiens
  misc_RNA (1)...(19): siRNA sense strand
auaaagaggcacauaucaa

SEQ ID NO: 1120992 - RNA, 19 nt, Homo sapiens
  misc_RNA (1)...(19): siRNA sense strand
gcacugcgugucccaucuu

SEQ ID NO: 1120993 - RNA, 19 nt, Homo sapiens
  misc_RNA (1)...(19): siRNA sense strand
aaagaggcacauaucaaga

SEQ ID NO: 1120994 - RNA, 19 nt, Homo sapiens
  misc_RNA (1)...(19): siRNA sense strand
ucacuagcccacucauaau

SEQ ID NO: 1120995 - RNA, 19 nt, Homo sapiens
  misc_RNA (1)...(19): siRNA sense strand
aagaggcacauaucaagaa

SEQ ID NO: 1120996 - RNA, 19 nt, Homo sapiens
  misc_RNA (1)...(19): siRNA sense strand
cauuguggaacaccuuuaa

SEQ ID NO: 1120997 - RNA, 19 nt, Homo sapiens
  misc_RNA (1)...(19): siRNA sense strand
uucacuagcccacucauaa

SEQ ID NO: 1120998 - RNA, 19 nt, Homo sapiens
  misc_RNA (1)...(19): siRNA sense strand
uaucaagaaaccaucucua

SEQ ID NO: 1120999 - RNA, 19 nt, Homo sapiens
  misc_RNA (1)...(19): siRNA sense strand
gcgugucccaucuuugaaa

SEQ ID NO: 1121000 - RNA, 19 nt, Homo sapiens
  misc_RNA (1)...(19): siRNA sense strand
aaccaucucuacucuaugc

SEQ ID NO: 1121001 - RNA, 19 nt, Homo sapiens
  misc_RNA (1)...(19): siRNA sense strand
cugcgugucccaucuuuga

SEQ ID NO: 1121002 - RNA, 19 nt, Homo sapiens
  misc_RNA (1)...(19): siRNA sense strand
gcugauauuuuguccuuca

SEQ ID NO: 1121003 - RNA, 19 nt, Homo sapiens
  misc_RNA (1)...(19): siRNA sense strand
uuauaaagaggcacauauc

SEQ ID NO: 1121004 - RNA, 19 nt, Homo sapiens
  misc_RNA (1)...(19): siRNA sense strand
ucaagaaaccaucucuacu

SEQ ID NO: 1121005 - RNA, 19 nt, Homo sapiens
  misc_RNA (1)...(19): siRNA sense strand
uacuuuaggcuauaagaga

SEQ ID NO: 1121006 - RNA, 19 nt, Homo sapiens
  misc_RNA (1)...(19): siRNA sense strand
ucucuacucuaugcauugu

SEQ ID NO: 1121007 - RNA, 19 nt, Homo sapiens
  misc_RNA (1)...(19): siRNA sense strand
gaaaccaucucuacucuau

SEQ ID NO: 1121008 - RNA, 19 nt, Homo sapiens
  misc_RNA (1)...(19): siRNA sense strand
gaaaggaaguuuuaaggaa

SEQ ID NO: 1121009 - RNA, 19 nt, Homo sapiens
  misc_RNA (1)...(19): siRNA sense strand
gaacuaaaggaaagugauu

SEQ ID NO: 1121010 - RNA, 19 nt, Homo sapiens
  misc_RNA (1)...(19): siRNA sense strand
caaguugccuuauucaaag

SEQ ID NO: 1121011 - RNA, 19 nt, Homo sapiens
  misc_RNA (1)...(19): siRNA sense strand
uauaagagaccuuuggaaa

SEQ ID NO: 1121012 - RNA, 19 nt, Homo sapiens
  misc_RNA (1)...(19): siRNA sense strand
gauucaaguugccuuauuc

SEQ ID NO: 1121013 - RNA, 19 nt, Homo sapiens
  misc_RNA (1)...(19): siRNA sense strand
ucaaguugccuuauucaaa

SEQ ID NO: 1121014 - RNA, 19 nt, Homo sapiens
  misc_RNA (1)...(19): siRNA sense strand
gcacauaucaagaaaccau

SEQ ID NO: 1121015 - RNA, 19 nt, Homo sapiens
  misc_RNA (1)...(19): siRNA sense strand
caagaaaccaucucuacuc

SEQ ID NO: 1121016 - RNA, 19 nt, Homo sapiens
  misc_RNA (1)...(19): siRNA sense strand
uaaagaggcacauaucaag

SEQ ID NO: 1121017 - RNA, 19 nt, Homo sapiens
  misc_RNA (1)...(19): siRNA sense strand
ugauucaaguugccuuauu

SEQ ID NO: 1121018 - RNA, 19 nt, Homo sapiens
  misc_RNA (1)...(19): siRNA sense strand
caucucuacucuaugcauu

SEQ ID NO: 1121019 - RNA, 19 nt, Homo sapiens
  misc_RNA (1)...(19): siRNA sense strand
ggaacaccuuuaaauccau

SEQ ID NO: 1121020 - RNA, 19 nt, Homo sapiens
  misc_RNA (1)...(19): siRNA sense strand
agaggcacauaucaagaaa

SEQ ID NO: 1121021 - RNA, 19 nt, Homo sapiens
  misc_RNA (1)...(19): siRNA sense strand
guuauaaagaggcacauau

SEQ ID NO: 1121022 - RNA, 19 nt, Homo sapiens
  misc_RNA (1)...(19): siRNA sense strand
aagaaaccaucucuacucu

SEQ ID NO: 1121023 - RNA, 19 nt, Homo sapiens
  misc_RNA (1)...(19): siRNA sense strand
uauaaagaggcacauauca

SEQ ID NO: 1121024 - RNA, 19 nt, Homo sapiens
  misc_RNA (1)...(19): siRNA sense strand
caauggagaaaggaaguuu

SEQ ID NO: 1121025 - RNA, 19 nt, Homo sapiens
  misc_RNA (1)...(19): siRNA sense strand
gauauuuuguccuucacua

SEQ ID NO: 1121026 - RNA, 19 nt, Homo sapiens
  misc_RNA (1)...(19): siRNA sense strand
gcauuguggaacaccuuua

SEQ ID NO: 1121027 - RNA, 19 nt, Homo sapiens
  misc_RNA (1)...(19): siRNA sense strand
gcuauaagagaccuuugga

SEQ ID NO: 1121028 - RNA, 19 nt, Homo sapiens
  misc_RNA (1)...(19): siRNA sense strand
auaaagaggcacauaucaa

SEQ ID NO: 1121029 - RNA, 19 nt, Homo sapiens
  misc_RNA (1)...(19): siRNA sense strand
gcacugcgugucccaucuu

SEQ ID NO: 1121030 - RNA, 19 nt, Homo sapiens
  misc_RNA (1)...(19): siRNA sense strand
aaagaggcacauaucaaga

SEQ ID NO: 1121031 - RNA, 19 nt, Homo sapiens
  misc_RNA (1)...(19): siRNA sense strand
ucacuagcccacucauaau

SEQ ID NO: 1121032 - RNA, 19 nt, Homo sapiens
  misc_RNA (1)...(19): siRNA sense strand
aagaggcacauaucaagaa

SEQ ID NO: 1121033 - RNA, 19 nt, Homo sapiens
  misc_RNA (1)...(19): siRNA sense strand
cauuguggaacaccuuuaa

SEQ ID NO: 1121034 - RNA, 19 nt, Homo sapiens
  misc_RNA (1)...(19): siRNA sense strand
uucacuagcccacucauaa

SEQ ID NO: 1121035 - RNA, 19 nt, Homo sapiens
  misc_RNA (1)...(19): siRNA sense strand
uaucaagaaaccaucucua

SEQ ID NO: 1121036 - RNA, 19 nt, Homo sapiens
  misc_RNA (1)...(19): siRNA sense strand
gcgugucccaucuuugaaa

SEQ ID NO: 1121037 - RNA, 19 nt, Homo sapiens
  misc_RNA (1)...(19): siRNA sense strand
aaccaucucuacucuaugc

SEQ ID NO: 1121038 - RNA, 19 nt, Homo sapiens
  misc_RNA (1)...(19): siRNA sense strand
cugcgugucccaucuuuga

SEQ ID NO: 1121039 - RNA, 19 nt, Homo sapiens
  misc_RNA (1)...(19): siRNA sense strand
gcugauauuuuguccuuca

SEQ ID NO: 1121040 - RNA, 19 nt, Homo sapiens
  misc_RNA (1)...(19): siRNA sense strand
uuauaaagaggcacauauc

SEQ ID NO: 1121041 - RNA, 19 nt, Homo sapiens
  misc_RNA (1)...(19): siRNA sense strand
ucaagaaaccaucucuacu

SEQ ID NO: 1121042 - RNA, 19 nt, Homo sapiens
  misc_RNA (1)...(19): siRNA sense strand
uacuuuaggcuauaagaga

SEQ ID NO: 1121043 - RNA, 19 nt, Homo sapiens
  misc_RNA (1)...(19): siRNA sense strand
ucucuacucuaugcauugu

SEQ ID NO: 1121044 - RNA, 19 nt, Homo sapiens
  misc_RNA (1)...(19): siRNA sense strand
gaaaccaucucuacucuau

SEQ ID NO: 1121045 - RNA, 19 nt, Homo sapiens
  misc_RNA (1)...(19): siRNA sense strand
gaaaggaaguuuuaaggaa

SEQ ID NO: 1121046 - RNA, 19 nt, Homo sapiens
  misc_RNA (1)...(19): siRNA sense strand
gaacuaaaggaaagugauu

SEQ ID NO: 1121047 - RNA, 19 nt, Homo sapiens
  misc_RNA (1)...(19): siRNA sense strand
caaguugccuuauucaaag

SEQ ID NO: 1121048 - RNA, 19 nt, Homo sapiens
  misc_RNA (1)...(19): siRNA sense strand
uauaagagaccuuuggaaa

SEQ ID NO: 1121049 - RNA, 19 nt, Homo sapiens
  misc_RNA (1)...(19): siRNA sense strand
gauucaaguugccuuauuc

SEQ ID NO: 1121050 - RNA, 19 nt, Homo sapiens
  misc_RNA (1)...(19): siRNA sense strand
ucaaguugccuuauucaaa

SEQ ID NO: 1121051 - RNA, 19 nt, Homo sapiens
  misc_RNA (1)...(19): siRNA sense strand
gcacauaucaagaaaccau

SEQ ID NO: 1121052 - RNA, 19 nt, Homo sapiens
  misc_RNA (1)...(19): siRNA sense strand
caagaaaccaucucuacuc

SEQ ID NO: 1121053 - RNA, 19 nt, Homo sapiens
  misc_RNA (1)...(19): siRNA sense strand
uaaagaggcacauaucaag

SEQ ID NO: 1121054 - RNA, 19 nt, Homo sapiens
  misc_RNA (1)...(19): siRNA sense strand
ugauucaaguugccuuauu

SEQ ID NO: 1121055 - RNA, 19 nt, Homo sapiens
  misc_RNA (1)...(19): siRNA sense strand
caucucuacucuaugcauu

SEQ ID NO: 1121056 - RNA, 19 nt, Homo sapiens
  misc_RNA (1)...(19): siRNA sense strand
ggaacaccuuuaaauccau

SEQ ID NO: 1121057 - RNA, 19 nt, Homo sapiens
  misc_RNA (1)...(19): siRNA sense strand
agaggcacauaucaagaaa

SEQ ID NO: 1121058 - RNA, 19 nt, Homo sapiens
  misc_RNA (1)...(19): siRNA sense strand
guuauaaagaggcacauau

SEQ ID NO: 1121059 - RNA, 19 nt, Homo sapiens
  misc_RNA (1)...(19): siRNA sense strand
aagaaaccaucucuacucu

SEQ ID NO: 1121060 - RNA, 19 nt, Homo sapiens
  misc_RNA (1)...(19): siRNA sense strand
uauaaagaggcacauauca

SEQ ID NO: 1121061 - RNA, 19 nt, Homo sapiens
  misc_RNA (1)...(19): siRNA sense strand
caauggagaaaggaaguuu

SEQ ID NO: 1121062 - RNA, 19 nt, Homo sapiens
  misc_RNA (1)...(19): siRNA sense strand
gauauuuuguccuucacua

SEQ ID NO: 1121063 - RNA, 19 nt, Homo sapiens
  misc_RNA (1)...(19): siRNA sense strand
gcauuguggaacaccuuua

SEQ ID NO: 1121064 - RNA, 19 nt, Homo sapiens
  misc_RNA (1)...(19): siRNA sense strand
gcuauaagagaccuuugga

SEQ ID NO: 1121065 - RNA, 19 nt, Homo sapiens
  misc_RNA (1)...(19): siRNA sense strand
auaaagaggcacauaucaa

SEQ ID NO: 1121066 - RNA, 19 nt, Homo sapiens
  misc_RNA (1)...(19): siRNA sense strand
gcacugcgugucccaucuu

SEQ ID NO: 1121067 - RNA, 19 nt, Homo sapiens
  misc_RNA (1)...(19): siRNA sense strand
aaagaggcacauaucaaga

SEQ ID NO: 1121068 - RNA, 19 nt, Homo sapiens
  misc_RNA (1)...(19): siRNA sense strand
ucacuagcccacucauaau

SEQ ID NO: 1121069 - RNA, 19 nt, Homo sapiens
  misc_RNA (1)...(19): siRNA sense strand
aagaggcacauaucaagaa

SEQ ID NO: 1121070 - RNA, 19 nt, Homo sapiens
  misc_RNA (1)...(19): siRNA sense strand
cauuguggaacaccuuuaa

SEQ ID NO: 1121071 - RNA, 19 nt, Homo sapiens
  misc_RNA (1)...(19): siRNA sense strand
uucacuagcccacucauaa

SEQ ID NO: 1121072 - RNA, 19 nt, Homo sapiens
  misc_RNA (1)...(19): siRNA sense strand
uaucaagaaaccaucucua

SEQ ID NO: 1121073 - RNA, 19 nt, Homo sapiens
  misc_RNA (1)...(19): siRNA sense strand
gcgugucccaucuuugaaa

SEQ ID NO: 1121074 - RNA, 19 nt, Homo sapiens
  misc_RNA (1)...(19): siRNA sense strand
aaccaucucuacucuaugc

SEQ ID NO: 1121075 - RNA, 19 nt, Homo sapiens
  misc_RNA (1)...(19): siRNA sense strand
cugcgugucccaucuuuga

SEQ ID NO: 1121076 - RNA, 19 nt, Homo sapiens
  misc_RNA (1)...(19): siRNA sense strand
gcugauauuuuguccuuca

SEQ ID NO: 1121077 - RNA, 19 nt, Homo sapiens
  misc_RNA (1)...(19): siRNA sense strand
uuauaaagaggcacauauc

SEQ ID NO: 1121078 - RNA, 19 nt, Homo sapiens
  misc_RNA (1)...(19): siRNA sense strand
ucaagaaaccaucucuacu

SEQ ID NO: 1121079 - RNA, 19 nt, Homo sapiens
  misc_RNA (1)...(19): siRNA sense strand
uacuuuaggcuauaagaga

SEQ ID NO: 1121080 - RNA, 19 nt, Homo sapiens
  misc_RNA (1)...(19): siRNA sense strand
ucucuacucuaugcauugu

SEQ ID NO: 1121081 - RNA, 19 nt, Homo sapiens
  misc_RNA (1)...(19): siRNA sense strand
gaaaccaucucuacucuau

SEQ ID NO: 1121082 - RNA, 19 nt, Homo sapiens
  misc_RNA (1)...(19): siRNA sense strand
gaaaggaaguuuuaaggaa

SEQ ID NO: 1121083 - RNA, 19 nt, Homo sapiens
  misc_RNA (1)...(19): siRNA sense strand
gaacuaaaggaaagugauu

SEQ ID NO: 1121084 - RNA, 19 nt, Homo sapiens
  misc_RNA (1)...(19): siRNA sense strand
caaguugccuuauucaaag

SEQ ID NO: 1121085 - RNA, 19 nt, Homo sapiens
  misc_RNA (1)...(19): siRNA sense strand
uauaagagaccuuuggaaa

SEQ ID NO: 1121086 - RNA, 19 nt, Homo sapiens
  misc_RNA (1)...(19): siRNA sense strand
gauucaaguugccuuauuc

SEQ ID NO: 1121087 - RNA, 19 nt, Homo sapiens
  misc_RNA (1)...(19): siRNA sense strand
ucaaguugccuuauucaaa

SEQ ID NO: 1121088 - RNA, 19 nt, Homo sapiens
  misc_RNA (1)...(19): siRNA sense strand
gcacauaucaagaaaccau

SEQ ID NO: 1121089 - RNA, 19 nt, Homo sapiens
  misc_RNA (1)...(19): siRNA sense strand
caagaaaccaucucuacuc

SEQ ID NO: 1121090 - RNA, 19 nt, Homo sapiens
  misc_RNA (1)...(19): siRNA sense strand
uaaagaggcacauaucaag

SEQ ID NO: 1121091 - RNA, 19 nt, Homo sapiens
  misc_RNA (1)...(19): siRNA sense strand
ugauucaaguugccuuauu

SEQ ID NO: 1121092 - RNA, 19 nt, Homo sapiens
  misc_RNA (1)...(19): siRNA sense strand
caucucuacucuaugcauu

SEQ ID NO: 1121093 - RNA, 19 nt, Homo sapiens
  misc_RNA (1)...(19): siRNA sense strand
ggaacaccuuuaaauccau

SEQ ID NO: 1121094 - RNA, 19 nt, Homo sapiens
  misc_RNA (1)...(19): siRNA sense strand
agaggcacauaucaagaaa

SEQ ID NO: 1121095 - RNA, 19 nt, Homo sapiens
  misc_RNA (1)...(19): siRNA sense strand
guuauaaagaggcacauau

SEQ ID NO: 1121096 - RNA, 19 nt, Homo sapiens
  misc_RNA (1)...(19): siRNA sense strand
aagaaaccaucucuacucu

SEQ ID NO: 1121097 - RNA, 19 nt, Homo sapiens
  misc_RNA (1)...(19): siRNA sense strand
uauaaagaggcacauauca

SEQ ID NO: 1121098 - RNA, 19 nt, Homo sapiens
  misc_RNA (1)...(19): siRNA sense strand
caauggagaaaggaaguuu

SEQ ID NO: 1121099 - RNA, 19 nt, Homo sapiens
  misc_RNA (1)...(19): siRNA sense strand
gauauuuuguccuucacua

SEQ ID NO: 1121100 - RNA, 19 nt, Homo sapiens
  misc_RNA (1)...(19): siRNA sense strand
gcauuguggaacaccuuua

SEQ ID NO: 1121101 - RNA, 19 nt, Homo sapiens
  misc_RNA (1)...(19): siRNA sense strand
gcuauaagagaccuuugga

SEQ ID NO: 1121102 - RNA, 19 nt, Homo sapiens
  misc_RNA (1)...(19): siRNA sense strand
auaaagaggcacauaucaa

SEQ ID NO: 1121103 - RNA, 19 nt, Homo sapiens
  misc_RNA (1)...(19): siRNA sense strand
gcacugcgugucccaucuu

SEQ ID NO: 1121104 - RNA, 19 nt, Homo sapiens
  misc_RNA (1)...(19): siRNA sense strand
aaagaggcacauaucaaga

SEQ ID NO: 1121105 - RNA, 19 nt, Homo sapiens
  misc_RNA (1)...(19): siRNA sense strand
ucacuagcccacucauaau

SEQ ID NO: 1121106 - RNA, 19 nt, Homo sapiens
  misc_RNA (1)...(19): siRNA sense strand
aagaggcacauaucaagaa

SEQ ID NO: 1121107 - RNA, 19 nt, Homo sapiens
  misc_RNA (1)...(19): siRNA sense strand
cauuguggaacaccuuuaa

SEQ ID NO: 1121108 - RNA, 19 nt, Homo sapiens
  misc_RNA (1)...(19): siRNA sense strand
uucacuagcccacucauaa

SEQ ID NO: 1121109 - RNA, 19 nt, Homo sapiens
  misc_RNA (1)...(19): siRNA sense strand
uaucaagaaaccaucucua

SEQ ID NO: 1121110 - RNA, 19 nt, Homo sapiens
  misc_RNA (1)...(19): siRNA sense strand
gcgugucccaucuuugaaa

SEQ ID NO: 1121111 - RNA, 19 nt, Homo sapiens
  misc_RNA (1)...(19): siRNA sense strand
aaccaucucuacucuaugc

SEQ ID NO: 1121112 - RNA, 19 nt, Homo sapiens
  misc_RNA (1)...(19): siRNA sense strand
cugcgugucccaucuuuga

SEQ ID NO: 1121113 - RNA, 19 nt, Homo sapiens
  misc_RNA (1)...(19): siRNA sense strand
gcugauauuuuguccuuca

SEQ ID NO: 1121114 - RNA, 19 nt, Homo sapiens
  misc_RNA (1)...(19): siRNA sense strand
uuauaaagaggcacauauc

SEQ ID NO: 1121115 - RNA, 19 nt, Homo sapiens
  misc_RNA (1)...(19): siRNA sense strand
ucaagaaaccaucucuacu

SEQ ID NO: 1121116 - RNA, 19 nt, Homo sapiens
  misc_RNA (1)...(19): siRNA sense strand
uacuuuaggcuauaagaga

SEQ ID NO: 1121117 - RNA, 19 nt, Homo sapiens
  misc_RNA (1)...(19): siRNA sense strand
ucucuacucuaugcauugu

SEQ ID NO: 1121118 - RNA, 19 nt, Homo sapiens
  misc_RNA (1)...(19): siRNA sense strand
gaggagagauaccaaugua

SEQ ID NO: 1121119 - RNA, 19 nt, Homo sapiens
  misc_RNA (1)...(19): siRNA sense strand
ucauagagcuguggaauuu

SEQ ID NO: 1121120 - RNA, 19 nt, Homo sapiens
  misc_RNA (1)...(19): siRNA sense strand
gagaaacccucuaaaucuu

SEQ ID NO: 1121121 - RNA, 19 nt, Homo sapiens
  misc_RNA (1)...(19): siRNA sense strand
gauauaagccuuccaaagu

SEQ ID NO: 1121122 - RNA, 19 nt, Homo sapiens
  misc_RNA (1)...(19): siRNA sense strand
gacaaggacuguuucagaa

SEQ ID NO: 1121123 - RNA, 19 nt, Homo sapiens
  misc_RNA (1)...(19): siRNA sense strand
ccaauguacugguauauau

SEQ ID NO: 1121124 - RNA, 19 nt, Homo sapiens
  misc_RNA (1)...(19): siRNA sense strand
gaaaccagcagacagaauu

SEQ ID NO: 1121125 - RNA, 19 nt, Homo sapiens
  misc_RNA (1)...(19): siRNA sense strand
gcugaaagguuauuuaaac

SEQ ID NO: 1121126 - RNA, 19 nt, Homo sapiens
  misc_RNA (1)...(19): siRNA sense strand
gaagaagcaacaacuauug

SEQ ID NO: 1121127 - RNA, 19 nt, Homo sapiens
  misc_RNA (1)...(19): siRNA sense strand
ggagaaacccucuaaaucu

SEQ ID NO: 1121128 - RNA, 19 nt, Homo sapiens
  misc_RNA (1)...(19): siRNA sense strand
ggaagaagcaacaacuauu

SEQ ID NO: 1121129 - RNA, 19 nt, Homo sapiens
  misc_RNA (1)...(19): siRNA sense strand
gaaacagccuccagaagag

SEQ ID NO: 1121130 - RNA, 19 nt, Homo sapiens
  misc_RNA (1)...(19): siRNA sense strand
ggaauuuaauccucauguu

SEQ ID NO: 1121131 - RNA, 19 nt, Homo sapiens
  misc_RNA (1)...(19): siRNA sense strand
ugagagauuugaugaaaga

SEQ ID NO: 1121132 - RNA, 19 nt, Homo sapiens
  misc_RNA (1)...(19): siRNA sense strand
gaauagaaggugcucuuaa

SEQ ID NO: 1121133 - RNA, 19 nt, Homo sapiens
  misc_RNA (1)...(19): siRNA sense strand
gaacagagagcagcauuuc

SEQ ID NO: 1121134 - RNA, 19 nt, Homo sapiens
  misc_RNA (1)...(19): siRNA sense strand
uguagaugcugaaagguua

SEQ ID NO: 1121135 - RNA, 19 nt, Homo sapiens
  misc_RNA (1)...(19): siRNA sense strand
gaauauaggagauacacuu

SEQ ID NO: 1121136 - RNA, 19 nt, Homo sapiens
  misc_RNA (1)...(19): siRNA sense strand
acacuugggugacugguaa

SEQ ID NO: 1121137 - RNA, 19 nt, Homo sapiens
  misc_RNA (1)...(19): siRNA sense strand
gcaggagaaacaauuuaua

SEQ ID NO: 1121138 - RNA, 19 nt, Homo sapiens
  misc_RNA (1)...(19): siRNA sense strand
aauagaaggugcucuuaau

SEQ ID NO: 1121139 - RNA, 19 nt, Homo sapiens
  misc_RNA (1)...(19): siRNA sense strand
auagagcuguggaauuuaa

SEQ ID NO: 1121140 - RNA, 19 nt, Homo sapiens
  misc_RNA (1)...(19): siRNA sense strand
gcaagaaaauuaggaagaa

SEQ ID NO: 1121141 - RNA, 19 nt, Homo sapiens
  misc_RNA (1)...(19): siRNA sense strand
gcacuggaaacgaauagaa

SEQ ID NO: 1121142 - RNA, 19 nt, Homo sapiens
  misc_RNA (1)...(19): siRNA sense strand
agaaacagccuccagaaga

SEQ ID NO: 1121143 - RNA, 19 nt, Homo sapiens
  misc_RNA (1)...(19): siRNA sense strand
gaauuuaauccucauguuc

SEQ ID NO: 1121144 - RNA, 19 nt, Homo sapiens
  misc_RNA (1)...(19): siRNA sense strand
gaauguaagguauggagaa

SEQ ID NO: 1121145 - RNA, 19 nt, Homo sapiens
  misc_RNA (1)...(19): siRNA sense strand
ggauuaagcacagcagaaa

SEQ ID NO: 1121146 - RNA, 19 nt, Homo sapiens
  misc_RNA (1)...(19): siRNA sense strand
gcaccaaaguccucagcau

SEQ ID NO: 1121147 - RNA, 19 nt, Homo sapiens
  misc_RNA (1)...(19): siRNA sense strand
gagcagaauauaggagaua

SEQ ID NO: 1121148 - RNA, 19 nt, Homo sapiens
  misc_RNA (1)...(19): siRNA sense strand
ucauugauaucaggacuaa

SEQ ID NO: 1121149 - RNA, 19 nt, Homo sapiens
  misc_RNA (1)...(19): siRNA sense strand
aagagccacuuacauacua

SEQ ID NO: 1121150 - RNA, 19 nt, Homo sapiens
  misc_RNA (1)...(19): siRNA sense strand
ccaaaguccucagcaugaa

SEQ ID NO: 1121151 - RNA, 19 nt, Homo sapiens
  misc_RNA (1)...(19): siRNA sense strand
gcaauugccuaugcuuucu

SEQ ID NO: 1121152 - RNA, 19 nt, Homo sapiens
  misc_RNA (1)...(19): siRNA sense strand
cagaauuugucagaaugua

SEQ ID NO: 1121153 - RNA, 19 nt, Homo sapiens
  misc_RNA (1)...(19): siRNA sense strand
cuucagcacuggaaacgaa

SEQ ID NO: 1121154 - RNA, 19 nt, Homo sapiens
  misc_RNA (1)...(19): siRNA sense strand
gcagcacuguugaagacaa

SEQ ID NO: 1121155 - RNA, 19 nt, Homo sapiens
  misc_RNA (1)...(19): siRNA sense strand
uuacaggccuauccagaug

SEQ ID NO: 1121156 - RNA, 19 nt, Homo sapiens
  misc_RNA (1)...(19): siRNA sense strand
gaugcugaaagguuauuua

SEQ ID NO: 1121157 - RNA, 19 nt, Homo sapiens
  misc_RNA (1)...(19): siRNA sense strand
gaggaagaagcaacaacua

SEQ ID NO: 1121158 - RNA, 19 nt, Homo sapiens
  misc_RNA (1)...(19): siRNA sense strand
ggaacagagagcagcauuu

SEQ ID NO: 1121159 - RNA, 19 nt, Homo sapiens
  misc_RNA (1)...(19): siRNA sense strand
agaaauuaaugccguggaa

SEQ ID NO: 1121160 - RNA, 19 nt, Homo sapiens
  misc_RNA (1)...(19): siRNA sense strand
caaggcaggagaaacaauu

SEQ ID NO: 1121161 - RNA, 19 nt, Homo sapiens
  misc_RNA (1)...(19): siRNA sense strand
caaagcagccuaucaagcu

SEQ ID NO: 1121162 - RNA, 19 nt, Homo sapiens
  misc_RNA (1)...(19): siRNA sense strand
gagcagcauuucagaacca

SEQ ID NO: 1121163 - RNA, 19 nt, Homo sapiens
  misc_RNA (1)...(19): siRNA sense strand
cauucucacucaccaguuu

SEQ ID NO: 1121164 - RNA, 19 nt, Homo sapiens
  misc_RNA (1)...(19): siRNA sense strand
agacaaggacuguuucaga

SEQ ID NO: 1121165 - RNA, 19 nt, Homo sapiens
  misc_RNA (1)...(19): siRNA sense strand
cagcagcacuguugaagac

SEQ ID NO: 1121166 - RNA, 19 nt, Homo sapiens
  misc_RNA (1)...(19): siRNA sense strand
gaaacccucuaaaucuuuu

SEQ ID NO: 1121167 - RNA, 19 nt, Homo sapiens
  misc_RNA (1)...(19): siRNA sense strand
gagcgucuccugcaucugu

SEQ ID NO: 1121168 - RNA, 19 nt, Homo sapiens
  misc_RNA (1)...(19): siRNA sense strand
cagaaggcuuggagggaaa

SEQ ID NO: 1121169 - RNA, 19 nt, Homo sapiens
  misc_RNA (1)...(19): siRNA sense strand
gaaggugcucuuaaucugu

SEQ ID NO: 1121170 - RNA, 19 nt, Homo sapiens
  misc_RNA (1)...(19): siRNA sense strand
gaagacaaggacuguuuca

SEQ ID NO: 1121171 - RNA, 19 nt, Homo sapiens
  misc_RNA (1)...(19): siRNA sense strand
uauaagccuuccaaaguca

SEQ ID NO: 1121172 - RNA, 19 nt, Homo sapiens
  misc_RNA (1)...(19): siRNA sense strand
gaugauauaagccuuccaa

SEQ ID NO: 1121173 - RNA, 19 nt, Homo sapiens
  misc_RNA (1)...(19): siRNA sense strand
aagaauaagagaagcagua

SEQ ID NO: 1121174 - RNA, 19 nt, Homo sapiens
  misc_RNA (1)...(19): siRNA sense strand
aaucaaagcagccuaucaa

SEQ ID NO: 1121175 - RNA, 19 nt, Homo sapiens
  misc_RNA (1)...(19): siRNA sense strand
cgaauagaaggugcucuua

SEQ ID NO: 1121176 - RNA, 19 nt, Homo sapiens
  misc_RNA (1)...(19): siRNA sense strand
gaaacggggugauagugaa

SEQ ID NO: 1121177 - RNA, 19 nt, Homo sapiens
  misc_RNA (1)...(19): siRNA sense strand
gaacauccaugaaaaucuc

SEQ ID NO: 1121178 - RNA, 19 nt, Homo sapiens
  misc_RNA (1)...(19): siRNA sense strand
gaaauccuccagcucgaau

SEQ ID NO: 1121179 - RNA, 19 nt, Homo sapiens
  misc_RNA (1)...(19): siRNA sense strand
ugauagccauucucacuca

SEQ ID NO: 1121180 - RNA, 19 nt, Homo sapiens
  misc_RNA (1)...(19): siRNA sense strand
guauggagaaacccucuaa

SEQ ID NO: 1121181 - RNA, 19 nt, Homo sapiens
  misc_RNA (1)...(19): siRNA sense strand
agaaggugcucuuaaucug

SEQ ID NO: 1121182 - RNA, 19 nt, Homo sapiens
  misc_RNA (1)...(19): siRNA sense strand
gugaagcaauugccuaugc

SEQ ID NO: 1121183 - RNA, 19 nt, Homo sapiens
  misc_RNA (1)...(19): siRNA sense strand
gaauaagagaagcaguaaa

SEQ ID NO: 1121184 - RNA, 19 nt, Homo sapiens
  misc_RNA (1)...(19): siRNA sense strand
gaaucaaagcagccuauca

SEQ ID NO: 1121185 - RNA, 19 nt, Homo sapiens
  misc_RNA (1)...(19): siRNA sense strand
cagacacaguuaugcagaa

SEQ ID NO: 1121186 - RNA, 19 nt, Homo sapiens
  misc_RNA (1)...(19): siRNA sense strand
gagauacacuugggugacu

SEQ ID NO: 1121187 - RNA, 19 nt, Homo sapiens
  misc_RNA (1)...(19): siRNA sense strand
ggagagauaccaauguacu

SEQ ID NO: 1121188 - RNA, 19 nt, Homo sapiens
  misc_RNA (1)...(19): siRNA sense strand
caggagaaacaauuuauag

SEQ ID NO: 1121189 - RNA, 19 nt, Homo sapiens
  misc_RNA (1)...(19): siRNA sense strand
ggugguacuuccauaagca

SEQ ID NO: 1121190 - RNA, 19 nt, Homo sapiens
  misc_RNA (1)...(19): siRNA sense strand
ccagaaacagccuccagaa

SEQ ID NO: 1121191 - RNA, 19 nt, Homo sapiens
  misc_RNA (1)...(19): siRNA sense strand
ccauuucacagcaggauuu

SEQ ID NO: 1121192 - RNA, 19 nt, Homo sapiens
  misc_RNA (1)...(19): siRNA sense strand
aagcacagcagaaauuaau

SEQ ID NO: 1121193 - RNA, 19 nt, Homo sapiens
  misc_RNA (1)...(19): siRNA sense strand
gaauuugucagaauguaag

SEQ ID NO: 1121194 - RNA, 19 nt, Homo sapiens
  misc_RNA (1)...(19): siRNA sense strand
uuaagcacagcagaaauua

SEQ ID NO: 1121195 - RNA, 19 nt, Homo sapiens
  misc_RNA (1)...(19): siRNA sense strand
uauuguagaugcugaaagg

SEQ ID NO: 1121196 - RNA, 19 nt, Homo sapiens
  misc_RNA (1)...(19): siRNA sense strand
uaaagagccacuuacauac

SEQ ID NO: 1121197 - RNA, 19 nt, Homo sapiens
  misc_RNA (1)...(19): siRNA sense strand
ggagcagaauauaggagau

SEQ ID NO: 1121198 - RNA, 19 nt, Homo sapiens
  misc_RNA (1)...(19): siRNA sense strand
aauguaagguauggagaaa

SEQ ID NO: 1121199 - RNA, 19 nt, Homo sapiens
  misc_RNA (1)...(19): siRNA sense strand
gagagcagcauuucagaac

SEQ ID NO: 1121200 - RNA, 19 nt, Homo sapiens
  misc_RNA (1)...(19): siRNA sense strand
uggagaaacccucuaaauc

SEQ ID NO: 1121201 - RNA, 19 nt, Homo sapiens
  misc_RNA (1)...(19): siRNA sense strand
aaggugcucuuaaucuguu

SEQ ID NO: 1121202 - RNA, 19 nt, Homo sapiens
  misc_RNA (1)...(19): siRNA sense strand
gaggcugugugagaauuug

SEQ ID NO: 1121203 - RNA, 19 nt, Homo sapiens
  misc_RNA (1)...(19): siRNA sense strand
aaagucagcagcaaucugu

SEQ ID NO: 1121204 - RNA, 19 nt, Homo sapiens
  misc_RNA (1)...(19): siRNA sense strand
gcccugaggaucccuuuga

SEQ ID NO: 1121205 - RNA, 19 nt, Homo sapiens
  misc_RNA (1)...(19): siRNA sense strand
cagcaugaagcucaacuga

SEQ ID NO: 1121206 - RNA, 19 nt, Homo sapiens
  misc_RNA (1)...(19): siRNA sense strand
agaaacccucuaaaucuuu

SEQ ID NO: 1121207 - RNA, 19 nt, Homo sapiens
  misc_RNA (1)...(19): siRNA sense strand
uuucagaggagcagaauau

SEQ ID NO: 1121208 - RNA, 19 nt, Homo sapiens
  misc_RNA (1)...(19): siRNA sense strand
gcacagcagaaauuaaugc

SEQ ID NO: 1121209 - RNA, 19 nt, Homo sapiens
  misc_RNA (1)...(19): siRNA sense strand
ccaugaaaaucucuuagaa

SEQ ID NO: 1121210 - RNA, 19 nt, Homo sapiens
  misc_RNA (1)...(19): siRNA sense strand
agaauaagagaagcaguaa

SEQ ID NO: 1121211 - RNA, 19 nt, Homo sapiens
  misc_RNA (1)...(19): siRNA sense strand
gcacucaaggcaggagaaa

SEQ ID NO: 1121212 - RNA, 19 nt, Homo sapiens
  misc_RNA (1)...(19): siRNA sense strand
ucuacuggcugaggaagaa

SEQ ID NO: 1121213 - RNA, 19 nt, Homo sapiens
  misc_RNA (1)...(19): siRNA sense strand
ccuaucaagcuuuagaauu

SEQ ID NO: 1121214 - RNA, 19 nt, Homo sapiens
  misc_RNA (1)...(19): siRNA sense strand
ucaggaccaucagaccuuu

SEQ ID NO: 1121215 - RNA, 19 nt, Homo sapiens
  misc_RNA (1)...(19): siRNA sense strand
auauaagccuuccaaaguc

SEQ ID NO: 1121216 - RNA, 19 nt, Homo sapiens
  misc_RNA (1)...(19): siRNA sense strand
gggugauagugaagcaauu

SEQ ID NO: 1121217 - RNA, 19 nt, Homo sapiens
  misc_RNA (1)...(19): siRNA sense strand
uaagcacagcagaaauuaa

SEQ ID NO: 1121218 - RNA, 19 nt, Homo sapiens
  misc_RNA (1)...(19): siRNA sense strand
gaggagagauaccaaugua

SEQ ID NO: 1121219 - RNA, 19 nt, Homo sapiens
  misc_RNA (1)...(19): siRNA sense strand
ucauagagcuguggaauuu

SEQ ID NO: 1121220 - RNA, 19 nt, Homo sapiens
  misc_RNA (1)...(19): siRNA sense strand
gagaaacccucuaaaucuu

SEQ ID NO: 1121221 - RNA, 19 nt, Homo sapiens
  misc_RNA (1)...(19): siRNA sense strand
gauauaagccuuccaaagu

SEQ ID NO: 1121222 - RNA, 19 nt, Homo sapiens
  misc_RNA (1)...(19): siRNA sense strand
gacaaggacuguuucagaa

SEQ ID NO: 1121223 - RNA, 19 nt, Homo sapiens
  misc_RNA (1)...(19): siRNA sense strand
ccaauguacugguauauau

SEQ ID NO: 1121224 - RNA, 19 nt, Homo sapiens
  misc_RNA (1)...(19): siRNA sense strand
gaaaccagcagacagaauu

SEQ ID NO: 1121225 - RNA, 19 nt, Homo sapiens
  misc_RNA (1)...(19): siRNA sense strand
gcugaaagguuauuuaaac

SEQ ID NO: 1121226 - RNA, 19 nt, Homo sapiens
  misc_RNA (1)...(19): siRNA sense strand
gaagaagcaacaacuauug

SEQ ID NO: 1121227 - RNA, 19 nt, Homo sapiens
  misc_RNA (1)...(19): siRNA sense strand
ggagaaacccucuaaaucu

SEQ ID NO: 1121228 - RNA, 19 nt, Homo sapiens
  misc_RNA (1)...(19): siRNA sense strand
ggaagaagcaacaacuauu

SEQ ID NO: 1121229 - RNA, 19 nt, Homo sapiens
  misc_RNA (1)...(19): siRNA sense strand
gaaacagccuccagaagag

SEQ ID NO: 1121230 - RNA, 19 nt, Homo sapiens
  misc_RNA (1)...(19): siRNA sense strand
ggaauuuaauccucauguu

SEQ ID NO: 1121231 - RNA, 19 nt, Homo sapiens
  misc_RNA (1)...(19): siRNA sense strand
ugagagauuugaugaaaga

SEQ ID NO: 1121232 - RNA, 19 nt, Homo sapiens
  misc_RNA (1)...(19): siRNA sense strand
gaauagaaggugcucuuaa

SEQ ID NO: 1121233 - RNA, 19 nt, Homo sapiens
  misc_RNA (1)...(19): siRNA sense strand
gaacagagagcagcauuuc

SEQ ID NO: 1121234 - RNA, 19 nt, Homo sapiens
  misc_RNA (1)...(19): siRNA sense strand
uguagaugcugaaagguua

SEQ ID NO: 1121235 - RNA, 19 nt, Homo sapiens
  misc_RNA (1)...(19): siRNA sense strand
gaauauaggagauacacuu

SEQ ID NO: 1121236 - RNA, 19 nt, Homo sapiens
  misc_RNA (1)...(19): siRNA sense strand
acacuugggugacugguaa

SEQ ID NO: 1121237 - RNA, 19 nt, Homo sapiens
  misc_RNA (1)...(19): siRNA sense strand
gcaggagaaacaauuuaua

SEQ ID NO: 1121238 - RNA, 19 nt, Homo sapiens
  misc_RNA (1)...(19): siRNA sense strand
aauagaaggugcucuuaau

SEQ ID NO: 1121239 - RNA, 19 nt, Homo sapiens
  misc_RNA (1)...(19): siRNA sense strand
auagagcuguggaauuuaa

SEQ ID NO: 1121240 - RNA, 19 nt, Homo sapiens
  misc_RNA (1)...(19): siRNA sense strand
gcaagaaaauuaggaagaa

SEQ ID NO: 1121241 - RNA, 19 nt, Homo sapiens
  misc_RNA (1)...(19): siRNA sense strand
gcacuggaaacgaauagaa

SEQ ID NO: 1121242 - RNA, 19 nt, Homo sapiens
  misc_RNA (1)...(19): siRNA sense strand
agaaacagccuccagaaga

SEQ ID NO: 1121243 - RNA, 19 nt, Homo sapiens
  misc_RNA (1)...(19): siRNA sense strand
gaauuuaauccucauguuc

SEQ ID NO: 1121244 - RNA, 19 nt, Homo sapiens
  misc_RNA (1)...(19): siRNA sense strand
gaauguaagguauggagaa

SEQ ID NO: 1121245 - RNA, 19 nt, Homo sapiens
  misc_RNA (1)...(19): siRNA sense strand
ggauuaagcacagcagaaa

SEQ ID NO: 1121246 - RNA, 19 nt, Homo sapiens
  misc_RNA (1)...(19): siRNA sense strand
gcaccaaaguccucagcau

SEQ ID NO: 1121247 - RNA, 19 nt, Homo sapiens
  misc_RNA (1)...(19): siRNA sense strand
gagcagaauauaggagaua

SEQ ID NO: 1121248 - RNA, 19 nt, Homo sapiens
  misc_RNA (1)...(19): siRNA sense strand
ucauugauaucaggacuaa

SEQ ID NO: 1121249 - RNA, 19 nt, Homo sapiens
  misc_RNA (1)...(19): siRNA sense strand
aagagccacuuacauacua

SEQ ID NO: 1121250 - RNA, 19 nt, Homo sapiens
  misc_RNA (1)...(19): siRNA sense strand
ccaaaguccucagcaugaa

SEQ ID NO: 1121251 - RNA, 19 nt, Homo sapiens
  misc_RNA (1)...(19): siRNA sense strand
gcaauugccuaugcuuucu

SEQ ID NO: 1121252 - RNA, 19 nt, Homo sapiens
  misc_RNA (1)...(19): siRNA sense strand
cagaauuugucagaaugua

SEQ ID NO: 1121253 - RNA, 19 nt, Homo sapiens
  misc_RNA (1)...(19): siRNA sense strand
cuucagcacuggaaacgaa

SEQ ID NO: 1121254 - RNA, 19 nt, Homo sapiens
  misc_RNA (1)...(19): siRNA sense strand
gcagcacuguugaagacaa

SEQ ID NO: 1121255 - RNA, 19 nt, Homo sapiens
  misc_RNA (1)...(19): siRNA sense strand
uuacaggccuauccagaug

SEQ ID NO: 1121256 - RNA, 19 nt, Homo sapiens
  misc_RNA (1)...(19): siRNA sense strand
gaugcugaaagguuauuua

SEQ ID NO: 1121257 - RNA, 19 nt, Homo sapiens
  misc_RNA (1)...(19): siRNA sense strand
gaggaagaagcaacaacua

SEQ ID NO: 1121258 - RNA, 19 nt, Homo sapiens
  misc_RNA (1)...(19): siRNA sense strand
ggaacagagagcagcauuu

SEQ ID NO: 1121259 - RNA, 19 nt, Homo sapiens
  misc_RNA (1)...(19): siRNA sense strand
agaaauuaaugccguggaa

SEQ ID NO: 1121260 - RNA, 19 nt, Homo sapiens
  misc_RNA (1)...(19): siRNA sense strand
caaggcaggagaaacaauu

SEQ ID NO: 1121261 - RNA, 19 nt, Homo sapiens
  misc_RNA (1)...(19): siRNA sense strand
caaagcagccuaucaagcu

SEQ ID NO: 1121262 - RNA, 19 nt, Homo sapiens
  misc_RNA (1)...(19): siRNA sense strand
gagcagcauuucagaacca

SEQ ID NO: 1121263 - RNA, 19 nt, Homo sapiens
  misc_RNA (1)...(19): siRNA sense strand
cauucucacucaccaguuu

SEQ ID NO: 1121264 - RNA, 19 nt, Homo sapiens
  misc_RNA (1)...(19): siRNA sense strand
agacaaggacuguuucaga

SEQ ID NO: 1121265 - RNA, 19 nt, Homo sapiens
  misc_RNA (1)...(19): siRNA sense strand
cagcagcacuguugaagac

SEQ ID NO: 1121266 - RNA, 19 nt, Homo sapiens
  misc_RNA (1)...(19): siRNA sense strand
gaaacccucuaaaucuuuu

SEQ ID NO: 1121267 - RNA, 19 nt, Homo sapiens
  misc_RNA (1)...(19): siRNA sense strand
gagcgucuccugcaucugu

SEQ ID NO: 1121268 - RNA, 19 nt, Homo sapiens
  misc_RNA (1)...(19): siRNA sense strand
cagaaggcuuggagggaaa

SEQ ID NO: 1121269 - RNA, 19 nt, Homo sapiens
  misc_RNA (1)...(19): siRNA sense strand
gaaggugcucuuaaucugu

SEQ ID NO: 1121270 - RNA, 19 nt, Homo sapiens
  misc_RNA (1)...(19): siRNA sense strand
gaagacaaggacuguuuca

SEQ ID NO: 1121271 - RNA, 19 nt, Homo sapiens
  misc_RNA (1)...(19): siRNA sense strand
uauaagccuuccaaaguca

SEQ ID NO: 1121272 - RNA, 19 nt, Homo sapiens
  misc_RNA (1)...(19): siRNA sense strand
gaugauauaagccuuccaa

SEQ ID NO: 1121273 - RNA, 19 nt, Homo sapiens
  misc_RNA (1)...(19): siRNA sense strand
aagaauaagagaagcagua

SEQ ID NO: 1121274 - RNA, 19 nt, Homo sapiens
  misc_RNA (1)...(19): siRNA sense strand
aaucaaagcagccuaucaa

SEQ ID NO: 1121275 - RNA, 19 nt, Homo sapiens
  misc_RNA (1)...(19): siRNA sense strand
cgaauagaaggugcucuua

SEQ ID NO: 1121276 - RNA, 19 nt, Homo sapiens
  misc_RNA (1)...(19): siRNA sense strand
gaaacggggugauagugaa

SEQ ID NO: 1121277 - RNA, 19 nt, Homo sapiens
  misc_RNA (1)...(19): siRNA sense strand
gaacauccaugaaaaucuc

SEQ ID NO: 1121278 - RNA, 19 nt, Homo sapiens
  misc_RNA (1)...(19): siRNA sense strand
gaaauccuccagcucgaau

SEQ ID NO: 1121279 - RNA, 19 nt, Homo sapiens
  misc_RNA (1)...(19): siRNA sense strand
ugauagccauucucacuca

SEQ ID NO: 1121280 - RNA, 19 nt, Homo sapiens
  misc_RNA (1)...(19): siRNA sense strand
guauggagaaacccucuaa

SEQ ID NO: 1121281 - RNA, 19 nt, Homo sapiens
  misc_RNA (1)...(19): siRNA sense strand
agaaggugcucuuaaucug

SEQ ID NO: 1121282 - RNA, 19 nt, Homo sapiens
  misc_RNA (1)...(19): siRNA sense strand
gugaagcaauugccuaugc

SEQ ID NO: 1121283 - RNA, 19 nt, Homo sapiens
  misc_RNA (1)...(19): siRNA sense strand
gaauaagagaagcaguaaa

SEQ ID NO: 1121284 - RNA, 19 nt, Homo sapiens
  misc_RNA (1)...(19): siRNA sense strand
gaaucaaagcagccuauca

SEQ ID NO: 1121285 - RNA, 19 nt, Homo sapiens
  misc_RNA (1)...(19): siRNA sense strand
cagacacaguuaugcagaa

SEQ ID NO: 1121286 - RNA, 19 nt, Homo sapiens
  misc_RNA (1)...(19): siRNA sense strand
gagauacacuugggugacu

SEQ ID NO: 1121287 - RNA, 19 nt, Homo sapiens
  misc_RNA (1)...(19): siRNA sense strand
ggagagauaccaauguacu

SEQ ID NO: 1121288 - RNA, 19 nt, Homo sapiens
  misc_RNA (1)...(19): siRNA sense strand
caggagaaacaauuuauag

SEQ ID NO: 1121289 - RNA, 19 nt, Homo sapiens
  misc_RNA (1)...(19): siRNA sense strand
ggugguacuuccauaagca

SEQ ID NO: 1121290 - RNA, 19 nt, Homo sapiens
  misc_RNA (1)...(19): siRNA sense strand
ccagaaacagccuccagaa

SEQ ID NO: 1121291 - RNA, 19 nt, Homo sapiens
  misc_RNA (1)...(19): siRNA sense strand
ccauuucacagcaggauuu

SEQ ID NO: 1121292 - RNA, 19 nt, Homo sapiens
  misc_RNA (1)...(19): siRNA sense strand
aagcacagcagaaauuaau

SEQ ID NO: 1121293 - RNA, 19 nt, Homo sapiens
  misc_RNA (1)...(19): siRNA sense strand
gaauuugucagaauguaag

SEQ ID NO: 1121294 - RNA, 19 nt, Homo sapiens
  misc_RNA (1)...(19): siRNA sense strand
uuaagcacagcagaaauua

SEQ ID NO: 1121295 - RNA, 19 nt, Homo sapiens
  misc_RNA (1)...(19): siRNA sense strand
uauuguagaugcugaaagg

SEQ ID NO: 1121296 - RNA, 19 nt, Homo sapiens
  misc_RNA (1)...(19): siRNA sense strand
uaaagagccacuuacauac

SEQ ID NO: 1121297 - RNA, 19 nt, Homo sapiens
  misc_RNA (1)...(19): siRNA sense strand
ggagcagaauauaggagau

SEQ ID NO: 1121298 - RNA, 19 nt, Homo sapiens
  misc_RNA (1)...(19): siRNA sense strand
aauguaagguauggagaaa

SEQ ID NO: 1121299 - RNA, 19 nt, Homo sapiens
  misc_RNA (1)...(19): siRNA sense strand
gagagcagcauuucagaac

SEQ ID NO: 1121300 - RNA, 19 nt, Homo sapiens
  misc_RNA (1)...(19): siRNA sense strand
uggagaaacccucuaaauc

SEQ ID NO: 1121301 - RNA, 19 nt, Homo sapiens
  misc_RNA (1)...(19): siRNA sense strand
aaggugcucuuaaucuguu

SEQ ID NO: 1121302 - RNA, 19 nt, Homo sapiens
  misc_RNA (1)...(19): siRNA sense strand
gaggcugugugagaauuug

SEQ ID NO: 1121303 - RNA, 19 nt, Homo sapiens
  misc_RNA (1)...(19): siRNA sense strand
aaagucagcagcaaucugu

SEQ ID NO: 1121304 - RNA, 19 nt, Homo sapiens
  misc_RNA (1)...(19): siRNA sense strand
gcccugaggaucccuuuga

SEQ ID NO: 1121305 - RNA, 19 nt, Homo sapiens
  misc_RNA (1)...(19): siRNA sense strand
cagcaugaagcucaacuga

SEQ ID NO: 1121306 - RNA, 19 nt, Homo sapiens
  misc_RNA (1)...(19): siRNA sense strand
agaaacccucuaaaucuuu

SEQ ID NO: 1121307 - RNA, 19 nt, Homo sapiens
  misc_RNA (1)...(19): siRNA sense strand
uuucagaggagcagaauau

SEQ ID NO: 1121308 - RNA, 19 nt, Homo sapiens
  misc_RNA (1)...(19): siRNA sense strand
gcacagcagaaauuaaugc

SEQ ID NO: 1121309 - RNA, 19 nt, Homo sapiens
  misc_RNA (1)...(19): siRNA sense strand
ccaugaaaaucucuuagaa

SEQ ID NO: 1121310 - RNA, 19 nt, Homo sapiens
  misc_RNA (1)...(19): siRNA sense strand
agaauaagagaagcaguaa

SEQ ID NO: 1121311 - RNA, 19 nt, Homo sapiens
  misc_RNA (1)...(19): siRNA sense strand
gcacucaaggcaggagaaa

SEQ ID NO: 1121312 - RNA, 19 nt, Homo sapiens
  misc_RNA (1)...(19): siRNA sense strand
ucuacuggcugaggaagaa

SEQ ID NO: 1121313 - RNA, 19 nt, Homo sapiens
  misc_RNA (1)...(19): siRNA sense strand
ccuaucaagcuuuagaauu

SEQ ID NO: 1121314 - RNA, 19 nt, Homo sapiens
  misc_RNA (1)...(19): siRNA sense strand
ucaggaccaucagaccuuu

SEQ ID NO: 1121315 - RNA, 19 nt, Homo sapiens
  misc_RNA (1)...(19): siRNA sense strand
auauaagccuuccaaaguc

SEQ ID NO: 1121316 - RNA, 19 nt, Homo sapiens
  misc_RNA (1)...(19): siRNA sense strand
gggugauagugaagcaauu

SEQ ID NO: 1121317 - RNA, 19 nt, Homo sapiens
  misc_RNA (1)...(19): siRNA sense strand
uaagcacagcagaaauuaa

SEQ ID NO: 1121318 - RNA, 19 nt, Homo sapiens
  misc_RNA (1)...(19): siRNA sense strand
gaggagagauaccaaugua

SEQ ID NO: 1121319 - RNA, 19 nt, Homo sapiens
  misc_RNA (1)...(19): siRNA sense strand
ucauagagcuguggaauuu

SEQ ID NO: 1121320 - RNA, 19 nt, Homo sapiens
  misc_RNA (1)...(19): siRNA sense strand
gagaaacccucuaaaucuu

SEQ ID NO: 1121321 - RNA, 19 nt, Homo sapiens
  misc_RNA (1)...(19): siRNA sense strand
gauauaagccuuccaaagu

SEQ ID NO: 1121322 - RNA, 19 nt, Homo sapiens
  misc_RNA (1)...(19): siRNA sense strand
gacaaggacuguuucagaa

SEQ ID NO: 1121323 - RNA, 19 nt, Homo sapiens
  misc_RNA (1)...(19): siRNA sense strand
ccaauguacugguauauau

SEQ ID NO: 1121324 - RNA, 19 nt, Homo sapiens
  misc_RNA (1)...(19): siRNA sense strand
gaaaccagcagacagaauu

SEQ ID NO: 1121325 - RNA, 19 nt, Homo sapiens
  misc_RNA (1)...(19): siRNA sense strand
gcugaaagguuauuuaaac

SEQ ID NO: 1121326 - RNA, 19 nt, Homo sapiens
  misc_RNA (1)...(19): siRNA sense strand
gaagaagcaacaacuauug

SEQ ID NO: 1121327 - RNA, 19 nt, Homo sapiens
  misc_RNA (1)...(19): siRNA sense strand
ggagaaacccucuaaaucu

SEQ ID NO: 1121328 - RNA, 19 nt, Homo sapiens
  misc_RNA (1)...(19): siRNA sense strand
ggaagaagcaacaacuauu

SEQ ID NO: 1121329 - RNA, 19 nt, Homo sapiens
  misc_RNA (1)...(19): siRNA sense strand
gaaacagccuccagaagag

SEQ ID NO: 1121330 - RNA, 19 nt, Homo sapiens
  misc_RNA (1)...(19): siRNA sense strand
ggaauuuaauccucauguu

SEQ ID NO: 1121331 - RNA, 19 nt, Homo sapiens
  misc_RNA (1)...(19): siRNA sense strand
ugagagauuugaugaaaga

SEQ ID NO: 1121332 - RNA, 19 nt, Homo sapiens
  misc_RNA (1)...(19): siRNA sense strand
gaauagaaggugcucuuaa

SEQ ID NO: 1121333 - RNA, 19 nt, Homo sapiens
  misc_RNA (1)...(19): siRNA sense strand
gaacagagagcagcauuuc

SEQ ID NO: 1121334 - RNA, 19 nt, Homo sapiens
  misc_RNA (1)...(19): siRNA sense strand
uguagaugcugaaagguua

SEQ ID NO: 1121335 - RNA, 19 nt, Homo sapiens
  misc_RNA (1)...(19): siRNA sense strand
gaauauaggagauacacuu

SEQ ID NO: 1121336 - RNA, 19 nt, Homo sapiens
  misc_RNA (1)...(19): siRNA sense strand
acacuugggugacugguaa

SEQ ID NO: 1121337 - RNA, 19 nt, Homo sapiens
  misc_RNA (1)...(19): siRNA sense strand
gcaggagaaacaauuuaua

SEQ ID NO: 1121338 - RNA, 19 nt, Homo sapiens
  misc_RNA (1)...(19): siRNA sense strand
aauagaaggugcucuuaau

SEQ ID NO: 1121339 - RNA, 19 nt, Homo sapiens
  misc_RNA (1)...(19): siRNA sense strand
auagagcuguggaauuuaa

SEQ ID NO: 1121340 - RNA, 19 nt, Homo sapiens
  misc_RNA (1)...(19): siRNA sense strand
gcaagaaaauuaggaagaa

SEQ ID NO: 1121341 - RNA, 19 nt, Homo sapiens
  misc_RNA (1)...(19): siRNA sense strand
gcacuggaaacgaauagaa

SEQ ID NO: 1121342 - RNA, 19 nt, Homo sapiens
  misc_RNA (1)...(19): siRNA sense strand
agaaacagccuccagaaga

SEQ ID NO: 1121343 - RNA, 19 nt, Homo sapiens
  misc_RNA (1)...(19): siRNA sense strand
gaauuuaauccucauguuc

SEQ ID NO: 1121344 - RNA, 19 nt, Homo sapiens
  misc_RNA (1)...(19): siRNA sense strand
gaauguaagguauggagaa

SEQ ID NO: 1121345 - RNA, 19 nt, Homo sapiens
  misc_RNA (1)...(19): siRNA sense strand
ggauuaagcacagcagaaa

SEQ ID NO: 1121346 - RNA, 19 nt, Homo sapiens
  misc_RNA (1)...(19): siRNA sense strand
gcaccaaaguccucagcau

SEQ ID NO: 1121347 - RNA, 19 nt, Homo sapiens
  misc_RNA (1)...(19): siRNA sense strand
gagcagaauauaggagaua

SEQ ID NO: 1121348 - RNA, 19 nt, Homo sapiens
  misc_RNA (1)...(19): siRNA sense strand
ucauugauaucaggacuaa

SEQ ID NO: 1121349 - RNA, 19 nt, Homo sapiens
  misc_RNA (1)...(19): siRNA sense strand
aagagccacuuacauacua

SEQ ID NO: 1121350 - RNA, 19 nt, Homo sapiens
  misc_RNA (1)...(19): siRNA sense strand
ccaaaguccucagcaugaa

SEQ ID NO: 1121351 - RNA, 19 nt, Homo sapiens
  misc_RNA (1)...(19): siRNA sense strand
gcaauugccuaugcuuucu

SEQ ID NO: 1121352 - RNA, 19 nt, Homo sapiens
  misc_RNA (1)...(19): siRNA sense strand
cagaauuugucagaaugua

SEQ ID NO: 1121353 - RNA, 19 nt, Homo sapiens
  misc_RNA (1)...(19): siRNA sense strand
cuucagcacuggaaacgaa

SEQ ID NO: 1121354 - RNA, 19 nt, Homo sapiens
  misc_RNA (1)...(19): siRNA sense strand
gcagcacuguugaagacaa

SEQ ID NO: 1121355 - RNA, 19 nt, Homo sapiens
  misc_RNA (1)...(19): siRNA sense strand
uuacaggccuauccagaug

SEQ ID NO: 1121356 - RNA, 19 nt, Homo sapiens
  misc_RNA (1)...(19): siRNA sense strand
gaugcugaaagguuauuua

SEQ ID NO: 1121357 - RNA, 19 nt, Homo sapiens
  misc_RNA (1)...(19): siRNA sense strand
gaggaagaagcaacaacua

SEQ ID NO: 1121358 - RNA, 19 nt, Homo sapiens
  misc_RNA (1)...(19): siRNA sense strand
ggaacagagagcagcauuu

SEQ ID NO: 1121359 - RNA, 19 nt, Homo sapiens
  misc_RNA (1)...(19): siRNA sense strand
agaaauuaaugccguggaa

SEQ ID NO: 1121360 - RNA, 19 nt, Homo sapiens
  misc_RNA (1)...(19): siRNA sense strand
caaggcaggagaaacaauu

SEQ ID NO: 1121361 - RNA, 19 nt, Homo sapiens
  misc_RNA (1)...(19): siRNA sense strand
caaagcagccuaucaagcu

SEQ ID NO: 1121362 - RNA, 19 nt, Homo sapiens
  misc_RNA (1)...(19): siRNA sense strand
gagcagcauuucagaacca

SEQ ID NO: 1121363 - RNA, 19 nt, Homo sapiens
  misc_RNA (1)...(19): siRNA sense strand
cauucucacucaccaguuu

SEQ ID NO: 1121364 - RNA, 19 nt, Homo sapiens
  misc_RNA (1)...(19): siRNA sense strand
agacaaggacuguuucaga

SEQ ID NO: 1121365 - RNA, 19 nt, Homo sapiens
  misc_RNA (1)...(19): siRNA sense strand
cagcagcacuguugaagac

SEQ ID NO: 1121366 - RNA, 19 nt, Homo sapiens
  misc_RNA (1)...(19): siRNA sense strand
gaaacccucuaaaucuuuu

SEQ ID NO: 1121367 - RNA, 19 nt, Homo sapiens
  misc_RNA (1)...(19): siRNA sense strand
gagcgucuccugcaucugu

SEQ ID NO: 1121368 - RNA, 19 nt, Homo sapiens
  misc_RNA (1)...(19): siRNA sense strand
cagaaggcuuggagggaaa

SEQ ID NO: 1121369 - RNA, 19 nt, Homo sapiens
  misc_RNA (1)...(19): siRNA sense strand
gaaggugcucuuaaucugu

SEQ ID NO: 1121370 - RNA, 19 nt, Homo sapiens
  misc_RNA (1)...(19): siRNA sense strand
gaagacaaggacuguuuca

SEQ ID NO: 1121371 - RNA, 19 nt, Homo sapiens
  misc_RNA (1)...(19): siRNA sense strand
uauaagccuuccaaaguca

SEQ ID NO: 1121372 - RNA, 19 nt, Homo sapiens
  misc_RNA (1)...(19): siRNA sense strand
gaugauauaagccuuccaa

SEQ ID NO: 1121373 - RNA, 19 nt, Homo sapiens
  misc_RNA (1)...(19): siRNA sense strand
aagaauaagagaagcagua

SEQ ID NO: 1121374 - RNA, 19 nt, Homo sapiens
  misc_RNA (1)...(19): siRNA sense strand
aaucaaagcagccuaucaa

SEQ ID NO: 1121375 - RNA, 19 nt, Homo sapiens
  misc_RNA (1)...(19): siRNA sense strand
cgaauagaaggugcucuua

SEQ ID NO: 1121376 - RNA, 19 nt, Homo sapiens
  misc_RNA (1)...(19): siRNA sense strand
gaaacggggugauagugaa

SEQ ID NO: 1121377 - RNA, 19 nt, Homo sapiens
  misc_RNA (1)...(19): siRNA sense strand
gaacauccaugaaaaucuc

SEQ ID NO: 1121378 - RNA, 19 nt, Homo sapiens
  misc_RNA (1)...(19): siRNA sense strand
gaaauccuccagcucgaau

SEQ ID NO: 1121379 - RNA, 19 nt, Homo sapiens
  misc_RNA (1)...(19): siRNA sense strand
ugauagccauucucacuca

SEQ ID NO: 1121380 - RNA, 19 nt, Homo sapiens
  misc_RNA (1)...(19): siRNA sense strand
guauggagaaacccucuaa

SEQ ID NO: 1121381 - RNA, 19 nt, Homo sapiens
  misc_RNA (1)...(19): siRNA sense strand
agaaggugcucuuaaucug

SEQ ID NO: 1121382 - RNA, 19 nt, Homo sapiens
  misc_RNA (1)...(19): siRNA sense strand
gugaagcaauugccuaugc

SEQ ID NO: 1121383 - RNA, 19 nt, Homo sapiens
  misc_RNA (1)...(19): siRNA sense strand
gaauaagagaagcaguaaa

SEQ ID NO: 1121384 - RNA, 19 nt, Homo sapiens
  misc_RNA (1)...(19): siRNA sense strand
gaaucaaagcagccuauca

SEQ ID NO: 1121385 - RNA, 19 nt, Homo sapiens
  misc_RNA (1)...(19): siRNA sense strand
cagacacaguuaugcagaa

SEQ ID NO: 1121386 - RNA, 19 nt, Homo sapiens
  misc_RNA (1)...(19): siRNA sense strand
gagauacacuugggugacu

SEQ ID NO: 1121387 - RNA, 19 nt, Homo sapiens
  misc_RNA (1)...(19): siRNA sense strand
ggagagauaccaauguacu

SEQ ID NO: 1121388 - RNA, 19 nt, Homo sapiens
  misc_RNA (1)...(19): siRNA sense strand
caggagaaacaauuuauag

SEQ ID NO: 1121389 - RNA, 19 nt, Homo sapiens
  misc_RNA (1)...(19): siRNA sense strand
ggugguacuuccauaagca

SEQ ID NO: 1121390 - RNA, 19 nt, Homo sapiens
  misc_RNA (1)...(19): siRNA sense strand
ccagaaacagccuccagaa

SEQ ID NO: 1121391 - RNA, 19 nt, Homo sapiens
  misc_RNA (1)...(19): siRNA sense strand
ccauuucacagcaggauuu

SEQ ID NO: 1121392 - RNA, 19 nt, Homo sapiens
  misc_RNA (1)...(19): siRNA sense strand
aagcacagcagaaauuaau

SEQ ID NO: 1121393 - RNA, 19 nt, Homo sapiens
  misc_RNA (1)...(19): siRNA sense strand
gaauuugucagaauguaag

SEQ ID NO: 1121394 - RNA, 19 nt, Homo sapiens
  misc_RNA (1)...(19): siRNA sense strand
uuaagcacagcagaaauua

SEQ ID NO: 1121395 - RNA, 19 nt, Homo sapiens
  misc_RNA (1)...(19): siRNA sense strand
uauuguagaugcugaaagg

SEQ ID NO: 1121396 - RNA, 19 nt, Homo sapiens
  misc_RNA (1)...(19): siRNA sense strand
uaaagagccacuuacauac

SEQ ID NO: 1121397 - RNA, 19 nt, Homo sapiens
  misc_RNA (1)...(19): siRNA sense strand
ggagcagaauauaggagau

SEQ ID NO: 1121398 - RNA, 19 nt, Homo sapiens
  misc_RNA (1)...(19): siRNA sense strand
aauguaagguauggagaaa

SEQ ID NO: 1121399 - RNA, 19 nt, Homo sapiens
  misc_RNA (1)...(19): siRNA sense strand
gagagcagcauuucagaac

SEQ ID NO: 1121400 - RNA, 19 nt, Homo sapiens
  misc_RNA (1)...(19): siRNA sense strand
uggagaaacccucuaaauc

SEQ ID NO: 1121401 - RNA, 19 nt, Homo sapiens
  misc_RNA (1)...(19): siRNA sense strand
aaggugcucuuaaucuguu

SEQ ID NO: 1121402 - RNA, 19 nt, Homo sapiens
  misc_RNA (1)...(19): siRNA sense strand
gaggcugugugagaauuug

SEQ ID NO: 1121403 - RNA, 19 nt, Homo sapiens
  misc_RNA (1)...(19): siRNA sense strand
aaagucagcagcaaucugu

SEQ ID NO: 1121404 - RNA, 19 nt, Homo sapiens
  misc_RNA (1)...(19): siRNA sense strand
gcccugaggaucccuuuga

SEQ ID NO: 1121405 - RNA, 19 nt, Homo sapiens
  misc_RNA (1)...(19): siRNA sense strand
cagcaugaagcucaacuga

SEQ ID NO: 1121406 - RNA, 19 nt, Homo sapiens
  misc_RNA (1)...(19): siRNA sense strand
agaaacccucuaaaucuuu

SEQ ID NO: 1121407 - RNA, 19 nt, Homo sapiens
  misc_RNA (1)...(19): siRNA sense strand
uuucagaggagcagaauau

SEQ ID NO: 1121408 - RNA, 19 nt, Homo sapiens
  misc_RNA (1)...(19): siRNA sense strand
gcacagcagaaauuaaugc

SEQ ID NO: 1121409 - RNA, 19 nt, Homo sapiens
  misc_RNA (1)...(19): siRNA sense strand
ccaugaaaaucucuuagaa

SEQ ID NO: 1121410 - RNA, 19 nt, Homo sapiens
  misc_RNA (1)...(19): siRNA sense strand
agaauaagagaagcaguaa

SEQ ID NO: 1121411 - RNA, 19 nt, Homo sapiens
  misc_RNA (1)...(19): siRNA sense strand
gcacucaaggcaggagaaa

SEQ ID NO: 1121412 - RNA, 19 nt, Homo sapiens
  misc_RNA (1)...(19): siRNA sense strand
ucuacuggcugaggaagaa

SEQ ID NO: 1121413 - RNA, 19 nt, Homo sapiens
  misc_RNA (1)...(19): siRNA sense strand
ccuaucaagcuuuagaauu

SEQ ID NO: 1121414 - RNA, 19 nt, Homo sapiens
  misc_RNA (1)...(19): siRNA sense strand
ucaggaccaucagaccuuu

SEQ ID NO: 1121415 - RNA, 19 nt, Homo sapiens
  misc_RNA (1)...(19): siRNA sense strand
auauaagccuuccaaaguc

SEQ ID NO: 1121416 - RNA, 19 nt, Homo sapiens
  misc_RNA (1)...(19): siRNA sense strand
gggugauagugaagcaauu

SEQ ID NO: 1121417 - RNA, 19 nt, Homo sapiens
  misc_RNA (1)...(19): siRNA sense strand
uaagcacagcagaaauuaa

SEQ ID NO: 1121418 - RNA, 19 nt, Homo sapiens
  misc_RNA (1)...(19): siRNA sense strand
gaggagagauaccaaugua

SEQ ID NO: 1121419 - RNA, 19 nt, Homo sapiens
  misc_RNA (1)...(19): siRNA sense strand
ucauagagcuguggaauuu

SEQ ID NO: 1121420 - RNA, 19 nt, Homo sapiens
  misc_RNA (1)...(19): siRNA sense strand
gagaaacccucuaaaucuu

SEQ ID NO: 1121421 - RNA, 19 nt, Homo sapiens
  misc_RNA (1)...(19): siRNA sense strand
gauauaagccuuccaaagu

SEQ ID NO: 1121422 - RNA, 19 nt, Homo sapiens
  misc_RNA (1)...(19): siRNA sense strand
gacaaggacuguuucagaa

SEQ ID NO: 1121423 - RNA, 19 nt, Homo sapiens
  misc_RNA (1)...(19): siRNA sense strand
ccaauguacugguauauau

SEQ ID NO: 1121424 - RNA, 19 nt, Homo sapiens
  misc_RNA (1)...(19): siRNA sense strand
gaaaccagcagacagaauu

SEQ ID NO: 1121425 - RNA, 19 nt, Homo sapiens
  misc_RNA (1)...(19): siRNA sense strand
gcugaaagguuauuuaaac

SEQ ID NO: 1121426 - RNA, 19 nt, Homo sapiens
  misc_RNA (1)...(19): siRNA sense strand
gaagaagcaacaacuauug

SEQ ID NO: 1121427 - RNA, 19 nt, Homo sapiens
  misc_RNA (1)...(19): siRNA sense strand
ggagaaacccucuaaaucu

SEQ ID NO: 1121428 - RNA, 19 nt, Homo sapiens
  misc_RNA (1)...(19): siRNA sense strand
ggaagaagcaacaacuauu

SEQ ID NO: 1121429 - RNA, 19 nt, Homo sapiens
  misc_RNA (1)...(19): siRNA sense strand
gaaacagccuccagaagag

SEQ ID NO: 1121430 - RNA, 19 nt, Homo sapiens
  misc_RNA (1)...(19): siRNA sense strand
ggaauuuaauccucauguu

SEQ ID NO: 1121431 - RNA, 19 nt, Homo sapiens
  misc_RNA (1)...(19): siRNA sense strand
ugagagauuugaugaaaga

SEQ ID NO: 1121432 - RNA, 19 nt, Homo sapiens
  misc_RNA (1)...(19): siRNA sense strand
gaauagaaggugcucuuaa

SEQ ID NO: 1121433 - RNA, 19 nt, Homo sapiens
  misc_RNA (1)...(19): siRNA sense strand
gaacagagagcagcauuuc

SEQ ID NO: 1121434 - RNA, 19 nt, Homo sapiens
  misc_RNA (1)...(19): siRNA sense strand
uguagaugcugaaagguua

SEQ ID NO: 1121435 - RNA, 19 nt, Homo sapiens
  misc_RNA (1)...(19): siRNA sense strand
gaauauaggagauacacuu

SEQ ID NO: 1121436 - RNA, 19 nt, Homo sapiens
  misc_RNA (1)...(19): siRNA sense strand
acacuugggugacugguaa

SEQ ID NO: 1121437 - RNA, 19 nt, Homo sapiens
  misc_RNA (1)...(19): siRNA sense strand
gcaggagaaacaauuuaua

SEQ ID NO: 1121438 - RNA, 19 nt, Homo sapiens
  misc_RNA (1)...(19): siRNA sense strand
aauagaaggugcucuuaau

SEQ ID NO: 1121439 - RNA, 19 nt, Homo sapiens
  misc_RNA (1)...(19): siRNA sense strand
auagagcuguggaauuuaa

SEQ ID NO: 1121440 - RNA, 19 nt, Homo sapiens
  misc_RNA (1)...(19): siRNA sense strand
gcaagaaaauuaggaagaa

SEQ ID NO: 1121441 - RNA, 19 nt, Homo sapiens
  misc_RNA (1)...(19): siRNA sense strand
gcacuggaaacgaauagaa

SEQ ID NO: 1121442 - RNA, 19 nt, Homo sapiens
  misc_RNA (1)...(19): siRNA sense strand
agaaacagccuccagaaga

SEQ ID NO: 1121443 - RNA, 19 nt, Homo sapiens
  misc_RNA (1)...(19): siRNA sense strand
gaauuuaauccucauguuc

SEQ ID NO: 1121444 - RNA, 19 nt, Homo sapiens
  misc_RNA (1)...(19): siRNA sense strand
gaauguaagguauggagaa

SEQ ID NO: 1121445 - RNA, 19 nt, Homo sapiens
  misc_RNA (1)...(19): siRNA sense strand
ggauuaagcacagcagaaa

SEQ ID NO: 1121446 - RNA, 19 nt, Homo sapiens
  misc_RNA (1)...(19): siRNA sense strand
gcaccaaaguccucagcau

SEQ ID NO: 1121447 - RNA, 19 nt, Homo sapiens
  misc_RNA (1)...(19): siRNA sense strand
gagcagaauauaggagaua

SEQ ID NO: 1121448 - RNA, 19 nt, Homo sapiens
  misc_RNA (1)...(19): siRNA sense strand
ucauugauaucaggacuaa

SEQ ID NO: 1121449 - RNA, 19 nt, Homo sapiens
  misc_RNA (1)...(19): siRNA sense strand
aagagccacuuacauacua

SEQ ID NO: 1121450 - RNA, 19 nt, Homo sapiens
  misc_RNA (1)...(19): siRNA sense strand
ccaaaguccucagcaugaa

SEQ ID NO: 1121451 - RNA, 19 nt, Homo sapiens
  misc_RNA (1)...(19): siRNA sense strand
gcaauugccuaugcuuucu

SEQ ID NO: 1121452 - RNA, 19 nt, Homo sapiens
  misc_RNA (1)...(19): siRNA sense strand
cagaauuugucagaaugua

SEQ ID NO: 1121453 - RNA, 19 nt, Homo sapiens
  misc_RNA (1)...(19): siRNA sense strand
cuucagcacuggaaacgaa

SEQ ID NO: 1121454 - RNA, 19 nt, Homo sapiens
  misc_RNA (1)...(19): siRNA sense strand
gcagcacuguugaagacaa

SEQ ID NO: 1121455 - RNA, 19 nt, Homo sapiens
  misc_RNA (1)...(19): siRNA sense strand
uuacaggccuauccagaug

SEQ ID NO: 1121456 - RNA, 19 nt, Homo sapiens
  misc_RNA (1)...(19): siRNA sense strand
gaugcugaaagguuauuua

SEQ ID NO: 1121457 - RNA, 19 nt, Homo sapiens
  misc_RNA (1)...(19): siRNA sense strand
gaggaagaagcaacaacua

SEQ ID NO: 1121458 - RNA, 19 nt, Homo sapiens
  misc_RNA (1)...(19): siRNA sense strand
ggaacagagagcagcauuu

SEQ ID NO: 1121459 - RNA, 19 nt, Homo sapiens
  misc_RNA (1)...(19): siRNA sense strand
agaaauuaaugccguggaa

SEQ ID NO: 1121460 - RNA, 19 nt, Homo sapiens
  misc_RNA (1)...(19): siRNA sense strand
caaggcaggagaaacaauu

SEQ ID NO: 1121461 - RNA, 19 nt, Homo sapiens
  misc_RNA (1)...(19): siRNA sense strand
caaagcagccuaucaagcu

SEQ ID NO: 1121462 - RNA, 19 nt, Homo sapiens
  misc_RNA (1)...(19): siRNA sense strand
gagcagcauuucagaacca

SEQ ID NO: 1121463 - RNA, 19 nt, Homo sapiens
  misc_RNA (1)...(19): siRNA sense strand
cauucucacucaccaguuu

SEQ ID NO: 1121464 - RNA, 19 nt, Homo sapiens
  misc_RNA (1)...(19): siRNA sense strand
agacaaggacuguuucaga

SEQ ID NO: 1121465 - RNA, 19 nt, Homo sapiens
  misc_RNA (1)...(19): siRNA sense strand
cagcagcacuguugaagac

SEQ ID NO: 1121466 - RNA, 19 nt, Homo sapiens
  misc_RNA (1)...(19): siRNA sense strand
gaaacccucuaaaucuuuu

SEQ ID NO: 1121467 - RNA, 19 nt, Homo sapiens
  misc_RNA (1)...(19): siRNA sense strand
gagcgucuccugcaucugu

SEQ ID NO: 1121468 - RNA, 19 nt, Homo sapiens
  misc_RNA (1)...(19): siRNA sense strand
cagaaggcuuggagggaaa

SEQ ID NO: 1121469 - RNA, 19 nt, Homo sapiens
  misc_RNA (1)...(19): siRNA sense strand
gaaggugcucuuaaucugu

SEQ ID NO: 1121470 - RNA, 19 nt, Homo sapiens
  misc_RNA (1)...(19): siRNA sense strand
gaagacaaggacuguuuca

SEQ ID NO: 1121471 - RNA, 19 nt, Homo sapiens
  misc_RNA (1)...(19): siRNA sense strand
uauaagccuuccaaaguca

SEQ ID NO: 1121472 - RNA, 19 nt, Homo sapiens
  misc_RNA (1)...(19): siRNA sense strand
gaugauauaagccuuccaa

SEQ ID NO: 1121473 - RNA, 19 nt, Homo sapiens
  misc_RNA (1)...(19): siRNA sense strand
aagaauaagagaagcagua

SEQ ID NO: 1121474 - RNA, 19 nt, Homo sapiens
  misc_RNA (1)...(19): siRNA sense strand
aaucaaagcagccuaucaa

SEQ ID NO: 1121475 - RNA, 19 nt, Homo sapiens
  misc_RNA (1)...(19): siRNA sense strand
cgaauagaaggugcucuua

SEQ ID NO: 1121476 - RNA, 19 nt, Homo sapiens
  misc_RNA (1)...(19): siRNA sense strand
gaaacggggugauagugaa

SEQ ID NO: 1121477 - RNA, 19 nt, Homo sapiens
  misc_RNA (1)...(19): siRNA sense strand
gaacauccaugaaaaucuc

SEQ ID NO: 1121478 - RNA, 19 nt, Homo sapiens
  misc_RNA (1)...(19): siRNA sense strand
gaaauccuccagcucgaau

SEQ ID NO: 1121479 - RNA, 19 nt, Homo sapiens
  misc_RNA (1)...(19): siRNA sense strand
ugauagccauucucacuca

SEQ ID NO: 1121480 - RNA, 19 nt, Homo sapiens
  misc_RNA (1)...(19): siRNA sense strand
guauggagaaacccucuaa

SEQ ID NO: 1121481 - RNA, 19 nt, Homo sapiens
  misc_RNA (1)...(19): siRNA sense strand
agaaggugcucuuaaucug

SEQ ID NO: 1121482 - RNA, 19 nt, Homo sapiens
  misc_RNA (1)...(19): siRNA sense strand
gugaagcaauugccuaugc

SEQ ID NO: 1121483 - RNA, 19 nt, Homo sapiens
  misc_RNA (1)...(19): siRNA sense strand
gaauaagagaagcaguaaa

SEQ ID NO: 1121484 - RNA, 19 nt, Homo sapiens
  misc_RNA (1)...(19): siRNA sense strand
gaaucaaagcagccuauca

SEQ ID NO: 1121485 - RNA, 19 nt, Homo sapiens
  misc_RNA (1)...(19): siRNA sense strand
cagacacaguuaugcagaa

SEQ ID NO: 1121486 - RNA, 19 nt, Homo sapiens
  misc_RNA (1)...(19): siRNA sense strand
gagauacacuugggugacu

SEQ ID NO: 1121487 - RNA, 19 nt, Homo sapiens
  misc_RNA (1)...(19): siRNA sense strand
ggagagauaccaauguacu

SEQ ID NO: 1121488 - RNA, 19 nt, Homo sapiens
  misc_RNA (1)...(19): siRNA sense strand
caggagaaacaauuuauag

SEQ ID NO: 1121489 - RNA, 19 nt, Homo sapiens
  misc_RNA (1)...(19): siRNA sense strand
ggugguacuuccauaagca

SEQ ID NO: 1121490 - RNA, 19 nt, Homo sapiens
  misc_RNA (1)...(19): siRNA sense strand
ccagaaacagccuccagaa

SEQ ID NO: 1121491 - RNA, 19 nt, Homo sapiens
  misc_RNA (1)...(19): siRNA sense strand
ccauuucacagcaggauuu

SEQ ID NO: 1121492 - RNA, 19 nt, Homo sapiens
  misc_RNA (1)...(19): siRNA sense strand
aagcacagcagaaauuaau

SEQ ID NO: 1121493 - RNA, 19 nt, Homo sapiens
  misc_RNA (1)...(19): siRNA sense strand
gaauuugucagaauguaag

SEQ ID NO: 1121494 - RNA, 19 nt, Homo sapiens
  misc_RNA (1)...(19): siRNA sense strand
uuaagcacagcagaaauua

SEQ ID NO: 1121495 - RNA, 19 nt, Homo sapiens
  misc_RNA (1)...(19): siRNA sense strand
uauuguagaugcugaaagg

SEQ ID NO: 1121496 - RNA, 19 nt, Homo sapiens
  misc_RNA (1)...(19): siRNA sense strand
uaaagagccacuuacauac

SEQ ID NO: 1121497 - RNA, 19 nt, Homo sapiens
  misc_RNA (1)...(19): siRNA sense strand
ggagcagaauauaggagau

SEQ ID NO: 1121498 - RNA, 19 nt, Homo sapiens
  misc_RNA (1)...(19): siRNA sense strand
aauguaagguauggagaaa

SEQ ID NO: 1121499 - RNA, 19 nt, Homo sapiens
  misc_RNA (1)...(19): siRNA sense strand
gagagcagcauuucagaac

SEQ ID NO: 1121500 - RNA, 19 nt, Homo sapiens
  misc_RNA (1)...(19): siRNA sense strand
uggagaaacccucuaaauc

SEQ ID NO: 1121501 - RNA, 19 nt, Homo sapiens
  misc_RNA (1)...(19): siRNA sense strand
aaggugcucuuaaucuguu

SEQ ID NO: 1121502 - RNA, 19 nt, Homo sapiens
  misc_RNA (1)...(19): siRNA sense strand
gaggcugugugagaauuug

SEQ ID NO: 1121503 - RNA, 19 nt, Homo sapiens
  misc_RNA (1)...(19): siRNA sense strand
aaagucagcagcaaucugu

SEQ ID NO: 1121504 - RNA, 19 nt, Homo sapiens
  misc_RNA (1)...(19): siRNA sense strand
gcccugaggaucccuuuga

SEQ ID NO: 1121505 - RNA, 19 nt, Homo sapiens
  misc_RNA (1)...(19): siRNA sense strand
cagcaugaagcucaacuga

SEQ ID NO: 1121506 - RNA, 19 nt, Homo sapiens
  misc_RNA (1)...(19): siRNA sense strand
agaaacccucuaaaucuuu

SEQ ID NO: 1121507 - RNA, 19 nt, Homo sapiens
  misc_RNA (1)...(19): siRNA sense strand
uuucagaggagcagaauau

SEQ ID NO: 1121508 - RNA, 19 nt, Homo sapiens
  misc_RNA (1)...(19): siRNA sense strand
gcacagcagaaauuaaugc

SEQ ID NO: 1121509 - RNA, 19 nt, Homo sapiens
  misc_RNA (1)...(19): siRNA sense strand
ccaugaaaaucucuuagaa

SEQ ID NO: 1121510 - RNA, 19 nt, Homo sapiens
  misc_RNA (1)...(19): siRNA sense strand
agaauaagagaagcaguaa

SEQ ID NO: 1121511 - RNA, 19 nt, Homo sapiens
  misc_RNA (1)...(19): siRNA sense strand
gcacucaaggcaggagaaa

SEQ ID NO: 1121512 - RNA, 19 nt, Homo sapiens
  misc_RNA (1)...(19): siRNA sense strand
ucuacuggcugaggaagaa

SEQ ID NO: 1121513 - RNA, 19 nt, Homo sapiens
  misc_RNA (1)...(19): siRNA sense strand
ccuaucaagcuuuagaauu

SEQ ID NO: 1121514 - RNA, 19 nt, Homo sapiens
  misc_RNA (1)...(19): siRNA sense strand
ucaggaccaucagaccuuu

SEQ ID NO: 1121515 - RNA, 19 nt, Homo sapiens
  misc_RNA (1)...(19): siRNA sense strand
auauaagccuuccaaaguc

SEQ ID NO: 1121516 - RNA, 19 nt, Homo sapiens
  misc_RNA (1)...(19): siRNA sense strand
gggugauagugaagcaauu

SEQ ID NO: 1121517 - RNA, 19 nt, Homo sapiens
  misc_RNA (1)...(19): siRNA sense strand
uaagcacagcagaaauuaa

SEQ ID NO: 1121518 - RNA, 19 nt, Homo sapiens
  misc_RNA (1)...(19): siRNA sense strand
gaggagagauaccaaugua

SEQ ID NO: 1121519 - RNA, 19 nt, Homo sapiens
  misc_RNA (1)...(19): siRNA sense strand
ucauagagcuguggaauuu

SEQ ID NO: 1121520 - RNA, 19 nt, Homo sapiens
  misc_RNA (1)...(19): siRNA sense strand
gagaaacccucuaaaucuu

SEQ ID NO: 1121521 - RNA, 19 nt, Homo sapiens
  misc_RNA (1)...(19): siRNA sense strand
gauauaagccuuccaaagu

SEQ ID NO: 1121522 - RNA, 19 nt, Homo sapiens
  misc_RNA (1)...(19): siRNA sense strand
gacaaggacuguuucagaa

SEQ ID NO: 1121523 - RNA, 19 nt, Homo sapiens
  misc_RNA (1)...(19): siRNA sense strand
ccaauguacugguauauau

SEQ ID NO: 1121524 - RNA, 19 nt, Homo sapiens
  misc_RNA (1)...(19): siRNA sense strand
gaaaccagcagacagaauu

SEQ ID NO: 1121525 - RNA, 19 nt, Homo sapiens
  misc_RNA (1)...(19): siRNA sense strand
gcugaaagguuauuuaaac

SEQ ID NO: 1121526 - RNA, 19 nt, Homo sapiens
  misc_RNA (1)...(19): siRNA sense strand
gaagaagcaacaacuauug

SEQ ID NO: 1121527 - RNA, 19 nt, Homo sapiens
  misc_RNA (1)...(19): siRNA sense strand
ggagaaacccucuaaaucu

SEQ ID NO: 1121528 - RNA, 19 nt, Homo sapiens
  misc_RNA (1)...(19): siRNA sense strand
ggaagaagcaacaacuauu

SEQ ID NO: 1121529 - RNA, 19 nt, Homo sapiens
  misc_RNA (1)...(19): siRNA sense strand
gaaacagccuccagaagag

SEQ ID NO: 1121530 - RNA, 19 nt, Homo sapiens
  misc_RNA (1)...(19): siRNA sense strand
ggaauuuaauccucauguu

SEQ ID NO: 1121531 - RNA, 19 nt, Homo sapiens
  misc_RNA (1)...(19): siRNA sense strand
ugagagauuugaugaaaga

SEQ ID NO: 1121532 - RNA, 19 nt, Homo sapiens
  misc_RNA (1)...(19): siRNA sense strand
gaauagaaggugcucuuaa

SEQ ID NO: 1121533 - RNA, 19 nt, Homo sapiens
  misc_RNA (1)...(19): siRNA sense strand
gaacagagagcagcauuuc

SEQ ID NO: 1121534 - RNA, 19 nt, Homo sapiens
  misc_RNA (1)...(19): siRNA sense strand
uguagaugcugaaagguua

SEQ ID NO: 1121535 - RNA, 19 nt, Homo sapiens
  misc_RNA (1)...(19): siRNA sense strand
gaauauaggagauacacuu

SEQ ID NO: 1121536 - RNA, 19 nt, Homo sapiens
  misc_RNA (1)...(19): siRNA sense strand
acacuugggugacugguaa

SEQ ID NO: 1121537 - RNA, 19 nt, Homo sapiens
  misc_RNA (1)...(19): siRNA sense strand
gcaggagaaacaauuuaua

SEQ ID NO: 1121538 - RNA, 19 nt, Homo sapiens
  misc_RNA (1)...(19): siRNA sense strand
aauagaaggugcucuuaau

SEQ ID NO: 1121539 - RNA, 19 nt, Homo sapiens
  misc_RNA (1)...(19): siRNA sense strand
auagagcuguggaauuuaa

SEQ ID NO: 1121540 - RNA, 19 nt, Homo sapiens
  misc_RNA (1)...(19): siRNA sense strand
gcaagaaaauuaggaagaa

SEQ ID NO: 1121541 - RNA, 19 nt, Homo sapiens
  misc_RNA (1)...(19): siRNA sense strand
gcacuggaaacgaauagaa

SEQ ID NO: 1121542 - RNA, 19 nt, Homo sapiens
  misc_RNA (1)...(19): siRNA sense strand
agaaacagccuccagaaga

SEQ ID NO: 1121543 - RNA, 19 nt, Homo sapiens
  misc_RNA (1)...(19): siRNA sense strand
gaauuuaauccucauguuc

SEQ ID NO: 1121544 - RNA, 19 nt, Homo sapiens
  misc_RNA (1)...(19): siRNA sense strand
gaauguaagguauggagaa

SEQ ID NO: 1121545 - RNA, 19 nt, Homo sapiens
  misc_RNA (1)...(19): siRNA sense strand
ggauuaagcacagcagaaa

SEQ ID NO: 1121546 - RNA, 19 nt, Homo sapiens
  misc_RNA (1)...(19): siRNA sense strand
gcaccaaaguccucagcau

SEQ ID NO: 1121547 - RNA, 19 nt, Homo sapiens
  misc_RNA (1)...(19): siRNA sense strand
gagcagaauauaggagaua

SEQ ID NO: 1121548 - RNA, 19 nt, Homo sapiens
  misc_RNA (1)...(19): siRNA sense strand
ucauugauaucaggacuaa

SEQ ID NO: 1121549 - RNA, 19 nt, Homo sapiens
  misc_RNA (1)...(19): siRNA sense strand
aagagccacuuacauacua

SEQ ID NO: 1121550 - RNA, 19 nt, Homo sapiens
  misc_RNA (1)...(19): siRNA sense strand
ccaaaguccucagcaugaa

SEQ ID NO: 1121551 - RNA, 19 nt, Homo sapiens
  misc_RNA (1)...(19): siRNA sense strand
gcaauugccuaugcuuucu

SEQ ID NO: 1121552 - RNA, 19 nt, Homo sapiens
  misc_RNA (1)...(19): siRNA sense strand
cagaauuugucagaaugua

SEQ ID NO: 1121553 - RNA, 19 nt, Homo sapiens
  misc_RNA (1)...(19): siRNA sense strand
cuucagcacuggaaacgaa

SEQ ID NO: 1121554 - RNA, 19 nt, Homo sapiens
  misc_RNA (1)...(19): siRNA sense strand
gcagcacuguugaagacaa

SEQ ID NO: 1121555 - RNA, 19 nt, Homo sapiens
  misc_RNA (1)...(19): siRNA sense strand
uuacaggccuauccagaug

SEQ ID NO: 1121556 - RNA, 19 nt, Homo sapiens
  misc_RNA (1)...(19): siRNA sense strand
gaugcugaaagguuauuua

SEQ ID NO: 1121557 - RNA, 19 nt, Homo sapiens
  misc_RNA (1)...(19): siRNA sense strand
gaggaagaagcaacaacua

SEQ ID NO: 1121558 - RNA, 19 nt, Homo sapiens
  misc_RNA (1)...(19): siRNA sense strand
ggaacagagagcagcauuu

SEQ ID NO: 1121559 - RNA, 19 nt, Homo sapiens
  misc_RNA (1)...(19): siRNA sense strand
agaaauuaaugccguggaa

SEQ ID NO: 1121560 - RNA, 19 nt, Homo sapiens
  misc_RNA (1)...(19): siRNA sense strand
caaggcaggagaaacaauu

SEQ ID NO: 1121561 - RNA, 19 nt, Homo sapiens
  misc_RNA (1)...(19): siRNA sense strand
caaagcagccuaucaagcu

SEQ ID NO: 1121562 - RNA, 19 nt, Homo sapiens
  misc_RNA (1)...(19): siRNA sense strand
gagcagcauuucagaacca

SEQ ID NO: 1121563 - RNA, 19 nt, Homo sapiens
  misc_RNA (1)...(19): siRNA sense strand
cauucucacucaccaguuu

SEQ ID NO: 1121564 - RNA, 19 nt, Homo sapiens
  misc_RNA (1)...(19): siRNA sense strand
agacaaggacuguuucaga

SEQ ID NO: 1121565 - RNA, 19 nt, Homo sapiens
  misc_RNA (1)...(19): siRNA sense strand
cagcagcacuguugaagac

SEQ ID NO: 1121566 - RNA, 19 nt, Homo sapiens
  misc_RNA (1)...(19): siRNA sense strand
gaaacccucuaaaucuuuu

SEQ ID NO: 1121567 - RNA, 19 nt, Homo sapiens
  misc_RNA (1)...(19): siRNA sense strand
gagcgucuccugcaucugu

SEQ ID NO: 1121568 - RNA, 19 nt, Homo sapiens
  misc_RNA (1)...(19): siRNA sense strand
cagaaggcuuggagggaaa

SEQ ID NO: 1121569 - RNA, 19 nt, Homo sapiens
  misc_RNA (1)...(19): siRNA sense strand
gaaggugcucuuaaucugu

SEQ ID NO: 1121570 - RNA, 19 nt, Homo sapiens
  misc_RNA (1)...(19): siRNA sense strand
gaagacaaggacuguuuca

SEQ ID NO: 1121571 - RNA, 19 nt, Homo sapiens
  misc_RNA (1)...(19): siRNA sense strand
uauaagccuuccaaaguca

SEQ ID NO: 1121572 - RNA, 19 nt, Homo sapiens
  misc_RNA (1)...(19): siRNA sense strand
gaugauauaagccuuccaa

SEQ ID NO: 1121573 - RNA, 19 nt, Homo sapiens
  misc_RNA (1)...(19): siRNA sense strand
aagaauaagagaagcagua

SEQ ID NO: 1121574 - RNA, 19 nt, Homo sapiens
  misc_RNA (1)...(19): siRNA sense strand
aaucaaagcagccuaucaa

SEQ ID NO: 1121575 - RNA, 19 nt, Homo sapiens
  misc_RNA (1)...(19): siRNA sense strand
cgaauagaaggugcucuua

SEQ ID NO: 1121576 - RNA, 19 nt, Homo sapiens
  misc_RNA (1)...(19): siRNA sense strand
gaaacggggugauagugaa

SEQ ID NO: 1121577 - RNA, 19 nt, Homo sapiens
  misc_RNA (1)...(19): siRNA sense strand
gaacauccaugaaaaucuc

SEQ ID NO: 1121578 - RNA, 19 nt, Homo sapiens
  misc_RNA (1)...(19): siRNA sense strand
gaaauccuccagcucgaau

SEQ ID NO: 1121579 - RNA, 19 nt, Homo sapiens
  misc_RNA (1)...(19): siRNA sense strand
ugauagccauucucacuca

SEQ ID NO: 1121580 - RNA, 19 nt, Homo sapiens
  misc_RNA (1)...(19): siRNA sense strand
guauggagaaacccucuaa

SEQ ID NO: 1121581 - RNA, 19 nt, Homo sapiens
  misc_RNA (1)...(19): siRNA sense strand
agaaggugcucuuaaucug

SEQ ID NO: 1121582 - RNA, 19 nt, Homo sapiens
  misc_RNA (1)...(19): siRNA sense strand
gugaagcaauugccuaugc

SEQ ID NO: 1121583 - RNA, 19 nt, Homo sapiens
  misc_RNA (1)...(19): siRNA sense strand
gaauaagagaagcaguaaa

SEQ ID NO: 1121584 - RNA, 19 nt, Homo sapiens
  misc_RNA (1)...(19): siRNA sense strand
gaaucaaagcagccuauca

SEQ ID NO: 1121585 - RNA, 19 nt, Homo sapiens
  misc_RNA (1)...(19): siRNA sense strand
cagacacaguuaugcagaa

SEQ ID NO: 1121586 - RNA, 19 nt, Homo sapiens
  misc_RNA (1)...(19): siRNA sense strand
gagauacacuugggugacu

SEQ ID NO: 1121587 - RNA, 19 nt, Homo sapiens
  misc_RNA (1)...(19): siRNA sense strand
ggagagauaccaauguacu

SEQ ID NO: 1121588 - RNA, 19 nt, Homo sapiens
  misc_RNA (1)...(19): siRNA sense strand
caggagaaacaauuuauag

SEQ ID NO: 1121589 - RNA, 19 nt, Homo sapiens
  misc_RNA (1)...(19): siRNA sense strand
ggugguacuuccauaagca

SEQ ID NO: 1121590 - RNA, 19 nt, Homo sapiens
  misc_RNA (1)...(19): siRNA sense strand
ccagaaacagccuccagaa

SEQ ID NO: 1121591 - RNA, 19 nt, Homo sapiens
  misc_RNA (1)...(19): siRNA sense strand
ccauuucacagcaggauuu

SEQ ID NO: 1121592 - RNA, 19 nt, Homo sapiens
  misc_RNA (1)...(19): siRNA sense strand
aagcacagcagaaauuaau

SEQ ID NO: 1121593 - RNA, 19 nt, Homo sapiens
  misc_RNA (1)...(19): siRNA sense strand
gaauuugucagaauguaag

SEQ ID NO: 1121594 - RNA, 19 nt, Homo sapiens
  misc_RNA (1)...(19): siRNA sense strand
uuaagcacagcagaaauua

SEQ ID NO: 1121595 - RNA, 19 nt, Homo sapiens
  misc_RNA (1)...(19): siRNA sense strand
uauuguagaugcugaaagg

SEQ ID NO: 1121596 - RNA, 19 nt, Homo sapiens
  misc_RNA (1)...(19): siRNA sense strand
uaaagagccacuuacauac

SEQ ID NO: 1121597 - RNA, 19 nt, Homo sapiens
  misc_RNA (1)...(19): siRNA sense strand
ggagcagaauauaggagau

SEQ ID NO: 1121598 - RNA, 19 nt, Homo sapiens
  misc_RNA (1)...(19): siRNA sense strand
aauguaagguauggagaaa

SEQ ID NO: 1121599 - RNA, 19 nt, Homo sapiens
  misc_RNA (1)...(19): siRNA sense strand
gagagcagcauuucagaac

SEQ ID NO: 1121600 - RNA, 19 nt, Homo sapiens
  misc_RNA (1)...(19): siRNA sense strand
uggagaaacccucuaaauc

SEQ ID NO: 1121601 - RNA, 19 nt, Homo sapiens
  misc_RNA (1)...(19): siRNA sense strand
aaggugcucuuaaucuguu

SEQ ID NO: 1121602 - RNA, 19 nt, Homo sapiens
  misc_RNA (1)...(19): siRNA sense strand
gaggcugugugagaauuug

SEQ ID NO: 1121603 - RNA, 19 nt, Homo sapiens
  misc_RNA (1)...(19): siRNA sense strand
aaagucagcagcaaucugu

SEQ ID NO: 1121604 - RNA, 19 nt, Homo sapiens
  misc_RNA (1)...(19): siRNA sense strand
gcccugaggaucccuuuga

SEQ ID NO: 1121605 - RNA, 19 nt, Homo sapiens
  misc_RNA (1)...(19): siRNA sense strand
cagcaugaagcucaacuga

SEQ ID NO: 1121606 - RNA, 19 nt, Homo sapiens
  misc_RNA (1)...(19): siRNA sense strand
agaaacccucuaaaucuuu

SEQ ID NO: 1121607 - RNA, 19 nt, Homo sapiens
  misc_RNA (1)...(19): siRNA sense strand
uuucagaggagcagaauau

SEQ ID NO: 1121608 - RNA, 19 nt, Homo sapiens
  misc_RNA (1)...(19): siRNA sense strand
gcacagcagaaauuaaugc

SEQ ID NO: 1121609 - RNA, 19 nt, Homo sapiens
  misc_RNA (1)...(19): siRNA sense strand
ccaugaaaaucucuuagaa

SEQ ID NO: 1121610 - RNA, 19 nt, Homo sapiens
  misc_RNA (1)...(19): siRNA sense strand
agaauaagagaagcaguaa

SEQ ID NO: 1121611 - RNA, 19 nt, Homo sapiens
  misc_RNA (1)...(19): siRNA sense strand
gcacucaaggcaggagaaa

SEQ ID NO: 1121612 - RNA, 19 nt, Homo sapiens
  misc_RNA (1)...(19): siRNA sense strand
ucuacuggcugaggaagaa

SEQ ID NO: 1121613 - RNA, 19 nt, Homo sapiens
  misc_RNA (1)...(19): siRNA sense strand
ccuaucaagcuuuagaauu

SEQ ID NO: 1121614 - RNA, 19 nt, Homo sapiens
  misc_RNA (1)...(19): siRNA sense strand
ucaggaccaucagaccuuu

SEQ ID NO: 1121615 - RNA, 19 nt, Homo sapiens
  misc_RNA (1)...(19): siRNA sense strand
auauaagccuuccaaaguc

SEQ ID NO: 1121616 - RNA, 19 nt, Homo sapiens
  misc_RNA (1)...(19): siRNA sense strand
gggugauagugaagcaauu

SEQ ID NO: 1121617 - RNA, 19 nt, Homo sapiens
  misc_RNA (1)...(19): siRNA sense strand
uaagcacagcagaaauuaa

SEQ ID NO: 1121618 - RNA, 19 nt, Homo sapiens
  misc_RNA (1)...(19): siRNA sense strand
gaggagagauaccaaugua

SEQ ID NO: 1121619 - RNA, 19 nt, Homo sapiens
  misc_RNA (1)...(19): siRNA sense strand
ucauagagcuguggaauuu

SEQ ID NO: 1121620 - RNA, 19 nt, Homo sapiens
  misc_RNA (1)...(19): siRNA sense strand
gagaaacccucuaaaucuu

SEQ ID NO: 1121621 - RNA, 19 nt, Homo sapiens
  misc_RNA (1)...(19): siRNA sense strand
gauauaagccuuccaaagu

SEQ ID NO: 1121622 - RNA, 19 nt, Homo sapiens
  misc_RNA (1)...(19): siRNA sense strand
gacaaggacuguuucagaa

SEQ ID NO: 1121623 - RNA, 19 nt, Homo sapiens
  misc_RNA (1)...(19): siRNA sense strand
ccaauguacugguauauau

SEQ ID NO: 1121624 - RNA, 19 nt, Homo sapiens
  misc_RNA (1)...(19): siRNA sense strand
gaaaccagcagacagaauu

SEQ ID NO: 1121625 - RNA, 19 nt, Homo sapiens
  misc_RNA (1)...(19): siRNA sense strand
gcugaaagguuauuuaaac

SEQ ID NO: 1121626 - RNA, 19 nt, Homo sapiens
  misc_RNA (1)...(19): siRNA sense strand
gaagaagcaacaacuauug

SEQ ID NO: 1121627 - RNA, 19 nt, Homo sapiens
  misc_RNA (1)...(19): siRNA sense strand
ggagaaacccucuaaaucu

SEQ ID NO: 1121628 - RNA, 19 nt, Homo sapiens
  misc_RNA (1)...(19): siRNA sense strand
ggaagaagcaacaacuauu

SEQ ID NO: 1121629 - RNA, 19 nt, Homo sapiens
  misc_RNA (1)...(19): siRNA sense strand
gaaacagccuccagaagag

SEQ ID NO: 1121630 - RNA, 19 nt, Homo sapiens
  misc_RNA (1)...(19): siRNA sense strand
ggaauuuaauccucauguu

SEQ ID NO: 1121631 - RNA, 19 nt, Homo sapiens
  misc_RNA (1)...(19): siRNA sense strand
ugagagauuugaugaaaga

SEQ ID NO: 1121632 - RNA, 19 nt, Homo sapiens
  misc_RNA (1)...(19): siRNA sense strand
gaauagaaggugcucuuaa

SEQ ID NO: 1121633 - RNA, 19 nt, Homo sapiens
  misc_RNA (1)...(19): siRNA sense strand
gaacagagagcagcauuuc

SEQ ID NO: 1121634 - RNA, 19 nt, Homo sapiens
  misc_RNA (1)...(19): siRNA sense strand
uguagaugcugaaagguua

SEQ ID NO: 1121635 - RNA, 19 nt, Homo sapiens
  misc_RNA (1)...(19): siRNA sense strand
gaauauaggagauacacuu

SEQ ID NO: 1121636 - RNA, 19 nt, Homo sapiens
  misc_RNA (1)...(19): siRNA sense strand
acacuugggugacugguaa

SEQ ID NO: 1121637 - RNA, 19 nt, Homo sapiens
  misc_RNA (1)...(19): siRNA sense strand
gcaggagaaacaauuuaua

SEQ ID NO: 1121638 - RNA, 19 nt, Homo sapiens
  misc_RNA (1)...(19): siRNA sense strand
aauagaaggugcucuuaau

SEQ ID NO: 1121639 - RNA, 19 nt, Homo sapiens
  misc_RNA (1)...(19): siRNA sense strand
auagagcuguggaauuuaa

SEQ ID NO: 1121640 - RNA, 19 nt, Homo sapiens
  misc_RNA (1)...(19): siRNA sense strand
gcaagaaaauuaggaagaa

SEQ ID NO: 1121641 - RNA, 19 nt, Homo sapiens
  misc_RNA (1)...(19): siRNA sense strand
gcacuggaaacgaauagaa

SEQ ID NO: 1121642 - RNA, 19 nt, Homo sapiens
  misc_RNA (1)...(19): siRNA sense strand
agaaacagccuccagaaga

SEQ ID NO: 1121643 - RNA, 19 nt, Homo sapiens
  misc_RNA (1)...(19): siRNA sense strand
gaauuuaauccucauguuc

SEQ ID NO: 1121644 - RNA, 19 nt, Homo sapiens
  misc_RNA (1)...(19): siRNA sense strand
gaauguaagguauggagaa

SEQ ID NO: 1121645 - RNA, 19 nt, Homo sapiens
  misc_RNA (1)...(19): siRNA sense strand
ggauuaagcacagcagaaa

SEQ ID NO: 1121646 - RNA, 19 nt, Homo sapiens
  misc_RNA (1)...(19): siRNA sense strand
gcaccaaaguccucagcau

SEQ ID NO: 1121647 - RNA, 19 nt, Homo sapiens
  misc_RNA (1)...(19): siRNA sense strand
gagcagaauauaggagaua

SEQ ID NO: 1121648 - RNA, 19 nt, Homo sapiens
  misc_RNA (1)...(19): siRNA sense strand
ucauugauaucaggacuaa

SEQ ID NO: 1121649 - RNA, 19 nt, Homo sapiens
  misc_RNA (1)...(19): siRNA sense strand
aagagccacuuacauacua

SEQ ID NO: 1121650 - RNA, 19 nt, Homo sapiens
  misc_RNA (1)...(19): siRNA sense strand
ccaaaguccucagcaugaa

SEQ ID NO: 1121651 - RNA, 19 nt, Homo sapiens
  misc_RNA (1)...(19): siRNA sense strand
gcaauugccuaugcuuucu

SEQ ID NO: 1121652 - RNA, 19 nt, Homo sapiens
  misc_RNA (1)...(19): siRNA sense strand
cagaauuugucagaaugua

SEQ ID NO: 1121653 - RNA, 19 nt, Homo sapiens
  misc_RNA (1)...(19): siRNA sense strand
cuucagcacuggaaacgaa

SEQ ID NO: 1121654 - RNA, 19 nt, Homo sapiens
  misc_RNA (1)...(19): siRNA sense strand
gcagcacuguugaagacaa

SEQ ID NO: 1121655 - RNA, 19 nt, Homo sapiens
  misc_RNA (1)...(19): siRNA sense strand
uuacaggccuauccagaug

SEQ ID NO: 1121656 - RNA, 19 nt, Homo sapiens
  misc_RNA (1)...(19): siRNA sense strand
gaugcugaaagguuauuua

SEQ ID NO: 1121657 - RNA, 19 nt, Homo sapiens
  misc_RNA (1)...(19): siRNA sense strand
gaggaagaagcaacaacua

SEQ ID NO: 1121658 - RNA, 19 nt, Homo sapiens
  misc_RNA (1)...(19): siRNA sense strand
ggaacagagagcagcauuu

SEQ ID NO: 1121659 - RNA, 19 nt, Homo sapiens
  misc_RNA (1)...(19): siRNA sense strand
agaaauuaaugccguggaa

SEQ ID NO: 1121660 - RNA, 19 nt, Homo sapiens
  misc_RNA (1)...(19): siRNA sense strand
caaggcaggagaaacaauu

SEQ ID NO: 1121661 - RNA, 19 nt, Homo sapiens
  misc_RNA (1)...(19): siRNA sense strand
caaagcagccuaucaagcu

SEQ ID NO: 1121662 - RNA, 19 nt, Homo sapiens
  misc_RNA (1)...(19): siRNA sense strand
gagcagcauuucagaacca

SEQ ID NO: 1121663 - RNA, 19 nt, Homo sapiens
  misc_RNA (1)...(19): siRNA sense strand
cauucucacucaccaguuu

SEQ ID NO: 1121664 - RNA, 19 nt, Homo sapiens
  misc_RNA (1)...(19): siRNA sense strand
agacaaggacuguuucaga

SEQ ID NO: 1121665 - RNA, 19 nt, Homo sapiens
  misc_RNA (1)...(19): siRNA sense strand
cagcagcacuguugaagac

SEQ ID NO: 1121666 - RNA, 19 nt, Homo sapiens
  misc_RNA (1)...(19): siRNA sense strand
gaaacccucuaaaucuuuu

SEQ ID NO: 1121667 - RNA, 19 nt, Homo sapiens
  misc_RNA (1)...(19): siRNA sense strand
gagcgucuccugcaucugu

SEQ ID NO: 1121668 - RNA, 19 nt, Homo sapiens
  misc_RNA (1)...(19): siRNA sense strand
cagaaggcuuggagggaaa

SEQ ID NO: 1121669 - RNA, 19 nt, Homo sapiens
  misc_RNA (1)...(19): siRNA sense strand
gaaggugcucuuaaucugu

SEQ ID NO: 1121670 - RNA, 19 nt, Homo sapiens
  misc_RNA (1)...(19): siRNA sense strand
gaagacaaggacuguuuca

SEQ ID NO: 1121671 - RNA, 19 nt, Homo sapiens
  misc_RNA (1)...(19): siRNA sense strand
uauaagccuuccaaaguca

SEQ ID NO: 1121672 - RNA, 19 nt, Homo sapiens
  misc_RNA (1)...(19): siRNA sense strand
gaugauauaagccuuccaa

SEQ ID NO: 1121673 - RNA, 19 nt, Homo sapiens
  misc_RNA (1)...(19): siRNA sense strand
aagaauaagagaagcagua

SEQ ID NO: 1121674 - RNA, 19 nt, Homo sapiens
  misc_RNA (1)...(19): siRNA sense strand
aaucaaagcagccuaucaa

SEQ ID NO: 1121675 - RNA, 19 nt, Homo sapiens
  misc_RNA (1)...(19): siRNA sense strand
cgaauagaaggugcucuua

SEQ ID NO: 1121676 - RNA, 19 nt, Homo sapiens
  misc_RNA (1)...(19): siRNA sense strand
gaaacggggugauagugaa

SEQ ID NO: 1121677 - RNA, 19 nt, Homo sapiens
  misc_RNA (1)...(19): siRNA sense strand
gaacauccaugaaaaucuc

SEQ ID NO: 1121678 - RNA, 19 nt, Homo sapiens
  misc_RNA (1)...(19): siRNA sense strand
gaaauccuccagcucgaau

SEQ ID NO: 1121679 - RNA, 19 nt, Homo sapiens
  misc_RNA (1)...(19): siRNA sense strand
ugauagccauucucacuca

SEQ ID NO: 1121680 - RNA, 19 nt, Homo sapiens
  misc_RNA (1)...(19): siRNA sense strand
guauggagaaacccucuaa

SEQ ID NO: 1121681 - RNA, 19 nt, Homo sapiens
  misc_RNA (1)...(19): siRNA sense strand
agaaggugcucuuaaucug

SEQ ID NO: 1121682 - RNA, 19 nt, Homo sapiens
  misc_RNA (1)...(19): siRNA sense strand
gugaagcaauugccuaugc

SEQ ID NO: 1121683 - RNA, 19 nt, Homo sapiens
  misc_RNA (1)...(19): siRNA sense strand
gaauaagagaagcaguaaa

SEQ ID NO: 1121684 - RNA, 19 nt, Homo sapiens
  misc_RNA (1)...(19): siRNA sense strand
gaaucaaagcagccuauca

SEQ ID NO: 1121685 - RNA, 19 nt, Homo sapiens
  misc_RNA (1)...(19): siRNA sense strand
cagacacaguuaugcagaa

SEQ ID NO: 1121686 - RNA, 19 nt, Homo sapiens
  misc_RNA (1)...(19): siRNA sense strand
gagauacacuugggugacu

SEQ ID NO: 1121687 - RNA, 19 nt, Homo sapiens
  misc_RNA (1)...(19): siRNA sense strand
ggagagauaccaauguacu

SEQ ID NO: 1121688 - RNA, 19 nt, Homo sapiens
  misc_RNA (1)...(19): siRNA sense strand
caggagaaacaauuuauag

SEQ ID NO: 1121689 - RNA, 19 nt, Homo sapiens
  misc_RNA (1)...(19): siRNA sense strand
ggugguacuuccauaagca

SEQ ID NO: 1121690 - RNA, 19 nt, Homo sapiens
  misc_RNA (1)...(19): siRNA sense strand
ccagaaacagccuccagaa

SEQ ID NO: 1121691 - RNA, 19 nt, Homo sapiens
  misc_RNA (1)...(19): siRNA sense strand
ccauuucacagcaggauuu

SEQ ID NO: 1121692 - RNA, 19 nt, Homo sapiens
  misc_RNA (1)...(19): siRNA sense strand
aagcacagcagaaauuaau

SEQ ID NO: 1121693 - RNA, 19 nt, Homo sapiens
  misc_RNA (1)...(19): siRNA sense strand
gaauuugucagaauguaag

SEQ ID NO: 1121694 - RNA, 19 nt, Homo sapiens
  misc_RNA (1)...(19): siRNA sense strand
uuaagcacagcagaaauua

SEQ ID NO: 1121695 - RNA, 19 nt, Homo sapiens
  misc_RNA (1)...(19): siRNA sense strand
uauuguagaugcugaaagg

SEQ ID NO: 1121696 - RNA, 19 nt, Homo sapiens
  misc_RNA (1)...(19): siRNA sense strand
uaaagagccacuuacauac

SEQ ID NO: 1121697 - RNA, 19 nt, Homo sapiens
  misc_RNA (1)...(19): siRNA sense strand
ggagcagaauauaggagau

SEQ ID NO: 1121698 - RNA, 19 nt, Homo sapiens
  misc_RNA (1)...(19): siRNA sense strand
aauguaagguauggagaaa

SEQ ID NO: 1121699 - RNA, 19 nt, Homo sapiens
  misc_RNA (1)...(19): siRNA sense strand
gagagcagcauuucagaac

SEQ ID NO: 1121700 - RNA, 19 nt, Homo sapiens
  misc_RNA (1)...(19): siRNA sense strand
uggagaaacccucuaaauc

SEQ ID NO: 1121701 - RNA, 19 nt, Homo sapiens
  misc_RNA (1)...(19): siRNA sense strand
aaggugcucuuaaucuguu

SEQ ID NO: 1121702 - RNA, 19 nt, Homo sapiens
  misc_RNA (1)...(19): siRNA sense strand
gaggcugugugagaauuug

SEQ ID NO: 1121703 - RNA, 19 nt, Homo sapiens
  misc_RNA (1)...(19): siRNA sense strand
aaagucagcagcaaucugu

SEQ ID NO: 1121704 - RNA, 19 nt, Homo sapiens
  misc_RNA (1)...(19): siRNA sense strand
gcccugaggaucccuuuga

SEQ ID NO: 1121705 - RNA, 19 nt, Homo sapiens
  misc_RNA (1)...(19): siRNA sense strand
cagcaugaagcucaacuga

SEQ ID NO: 1121706 - RNA, 19 nt, Homo sapiens
  misc_RNA (1)...(19): siRNA sense strand
agaaacccucuaaaucuuu

SEQ ID NO: 1121707 - RNA, 19 nt, Homo sapiens
  misc_RNA (1)...(19): siRNA sense strand
uuucagaggagcagaauau

SEQ ID NO: 1121708 - RNA, 19 nt, Homo sapiens
  misc_RNA (1)...(19): siRNA sense strand
gcacagcagaaauuaaugc

SEQ ID NO: 1121709 - RNA, 19 nt, Homo sapiens
  misc_RNA (1)...(19): siRNA sense strand
ccaugaaaaucucuuagaa

SEQ ID NO: 1121710 - RNA, 19 nt, Homo sapiens
  misc_RNA (1)...(19): siRNA sense strand
agaauaagagaagcaguaa

SEQ ID NO: 1121711 - RNA, 19 nt, Homo sapiens
  misc_RNA (1)...(19): siRNA sense strand
gcacucaaggcaggagaaa

SEQ ID NO: 1121712 - RNA, 19 nt, Homo sapiens
  misc_RNA (1)...(19): siRNA sense strand
ucuacuggcugaggaagaa

SEQ ID NO: 1121713 - RNA, 19 nt, Homo sapiens
  misc_RNA (1)...(19): siRNA sense strand
ccuaucaagcuuuagaauu

SEQ ID NO: 1121714 - RNA, 19 nt, Homo sapiens
  misc_RNA (1)...(19): siRNA sense strand
ucaggaccaucagaccuuu

SEQ ID NO: 1121715 - RNA, 19 nt, Homo sapiens
  misc_RNA (1)...(19): siRNA sense strand
auauaagccuuccaaaguc

SEQ ID NO: 1121716 - RNA, 19 nt, Homo sapiens
  misc_RNA (1)...(19): siRNA sense strand
gggugauagugaagcaauu

SEQ ID NO: 1121717 - RNA, 19 nt, Homo sapiens
  misc_RNA (1)...(19): siRNA sense strand
uaagcacagcagaaauuaa

SEQ ID NO: 1121718 - RNA, 19 nt, Homo sapiens
  misc_RNA (1)...(19): siRNA sense strand
gaggagagauaccaaugua

SEQ ID NO: 1121719 - RNA, 19 nt, Homo sapiens
  misc_RNA (1)...(19): siRNA sense strand
ucauagagcuguggaauuu

SEQ ID NO: 1121720 - RNA, 19 nt, Homo sapiens
  misc_RNA (1)...(19): siRNA sense strand
gagaaacccucuaaaucuu

SEQ ID NO: 1121721 - RNA, 19 nt, Homo sapiens
  misc_RNA (1)...(19): siRNA sense strand
gauauaagccuuccaaagu

SEQ ID NO: 1121722 - RNA, 19 nt, Homo sapiens
  misc_RNA (1)...(19): siRNA sense strand
gacaaggacuguuucagaa

SEQ ID NO: 1121723 - RNA, 19 nt, Homo sapiens
  misc_RNA (1)...(19): siRNA sense strand
ccaauguacugguauauau

SEQ ID NO: 1121724 - RNA, 19 nt, Homo sapiens
  misc_RNA (1)...(19): siRNA sense strand
gaaaccagcagacagaauu

SEQ ID NO: 1121725 - RNA, 19 nt, Homo sapiens
  misc_RNA (1)...(19): siRNA sense strand
gcugaaagguuauuuaaac

SEQ ID NO: 1121726 - RNA, 19 nt, Homo sapiens
  misc_RNA (1)...(19): siRNA sense strand
gaagaagcaacaacuauug

SEQ ID NO: 1121727 - RNA, 19 nt, Homo sapiens
  misc_RNA (1)...(19): siRNA sense strand
ggagaaacccucuaaaucu

SEQ ID NO: 1121728 - RNA, 19 nt, Homo sapiens
  misc_RNA (1)...(19): siRNA sense strand
ggaagaagcaacaacuauu

SEQ ID NO: 1121729 - RNA, 19 nt, Homo sapiens
  misc_RNA (1)...(19): siRNA sense strand
gaaacagccuccagaagag

SEQ ID NO: 1121730 - RNA, 19 nt, Homo sapiens
  misc_RNA (1)...(19): siRNA sense strand
ggaauuuaauccucauguu

SEQ ID NO: 1121731 - RNA, 19 nt, Homo sapiens
  misc_RNA (1)...(19): siRNA sense strand
ugagagauuugaugaaaga

SEQ ID NO: 1121732 - RNA, 19 nt, Homo sapiens
  misc_RNA (1)...(19): siRNA sense strand
gaauagaaggugcucuuaa

SEQ ID NO: 1121733 - RNA, 19 nt, Homo sapiens
  misc_RNA (1)...(19): siRNA sense strand
gaacagagagcagcauuuc

SEQ ID NO: 1121734 - RNA, 19 nt, Homo sapiens
  misc_RNA (1)...(19): siRNA sense strand
uguagaugcugaaagguua

SEQ ID NO: 1121735 - RNA, 19 nt, Homo sapiens
  misc_RNA (1)...(19): siRNA sense strand
gaauauaggagauacacuu

SEQ ID NO: 1121736 - RNA, 19 nt, Homo sapiens
  misc_RNA (1)...(19): siRNA sense strand
acacuugggugacugguaa

SEQ ID NO: 1121737 - RNA, 19 nt, Homo sapiens
  misc_RNA (1)...(19): siRNA sense strand
gcaggagaaacaauuuaua

SEQ ID NO: 1121738 - RNA, 19 nt, Homo sapiens
  misc_RNA (1)...(19): siRNA sense strand
aauagaaggugcucuuaau

SEQ ID NO: 1121739 - RNA, 19 nt, Homo sapiens
  misc_RNA (1)...(19): siRNA sense strand
auagagcuguggaauuuaa

SEQ ID NO: 1121740 - RNA, 19 nt, Homo sapiens
  misc_RNA (1)...(19): siRNA sense strand
gcaagaaaauuaggaagaa

SEQ ID NO: 1121741 - RNA, 19 nt, Homo sapiens
  misc_RNA (1)...(19): siRNA sense strand
gcacuggaaacgaauagaa

SEQ ID NO: 1121742 - RNA, 19 nt, Homo sapiens
  misc_RNA (1)...(19): siRNA sense strand
agaaacagccuccagaaga

SEQ ID NO: 1121743 - RNA, 19 nt, Homo sapiens
  misc_RNA (1)...(19): siRNA sense strand
gaauuuaauccucauguuc

SEQ ID NO: 1121744 - RNA, 19 nt, Homo sapiens
  misc_RNA (1)...(19): siRNA sense strand
gaauguaagguauggagaa

SEQ ID NO: 1121745 - RNA, 19 nt, Homo sapiens
  misc_RNA (1)...(19): siRNA sense strand
ggauuaagcacagcagaaa

SEQ ID NO: 1121746 - RNA, 19 nt, Homo sapiens
  misc_RNA (1)...(19): siRNA sense strand
gcaccaaaguccucagcau

SEQ ID NO: 1121747 - RNA, 19 nt, Homo sapiens
  misc_RNA (1)...(19): siRNA sense strand
gagcagaauauaggagaua

SEQ ID NO: 1121748 - RNA, 19 nt, Homo sapiens
  misc_RNA (1)...(19): siRNA sense strand
ucauugauaucaggacuaa

SEQ ID NO: 1121749 - RNA, 19 nt, Homo sapiens
  misc_RNA (1)...(19): siRNA sense strand
aagagccacuuacauacua

SEQ ID NO: 1121750 - RNA, 19 nt, Homo sapiens
  misc_RNA (1)...(19): siRNA sense strand
ccaaaguccucagcaugaa

SEQ ID NO: 1121751 - RNA, 19 nt, Homo sapiens
  misc_RNA (1)...(19): siRNA sense strand
gcaauugccuaugcuuucu

SEQ ID NO: 1121752 - RNA, 19 nt, Homo sapiens
  misc_RNA (1)...(19): siRNA sense strand
cagaauuugucagaaugua

SEQ ID NO: 1121753 - RNA, 19 nt, Homo sapiens
  misc_RNA (1)...(19): siRNA sense strand
cuucagcacuggaaacgaa

SEQ ID NO: 1121754 - RNA, 19 nt, Homo sapiens
  misc_RNA (1)...(19): siRNA sense strand
gcagcacuguugaagacaa

SEQ ID NO: 1121755 - RNA, 19 nt, Homo sapiens
  misc_RNA (1)...(19): siRNA sense strand
uuacaggccuauccagaug

SEQ ID NO: 1121756 - RNA, 19 nt, Homo sapiens
  misc_RNA (1)...(19): siRNA sense strand
gaugcugaaagguuauuua

SEQ ID NO: 1121757 - RNA, 19 nt, Homo sapiens
  misc_RNA (1)...(19): siRNA sense strand
gaggaagaagcaacaacua

SEQ ID NO: 1121758 - RNA, 19 nt, Homo sapiens
  misc_RNA (1)...(19): siRNA sense strand
ggaacagagagcagcauuu

SEQ ID NO: 1121759 - RNA, 19 nt, Homo sapiens
  misc_RNA (1)...(19): siRNA sense strand
agaaauuaaugccguggaa

SEQ ID NO: 1121760 - RNA, 19 nt, Homo sapiens
  misc_RNA (1)...(19): siRNA sense strand
caaggcaggagaaacaauu

SEQ ID NO: 1121761 - RNA, 19 nt, Homo sapiens
  misc_RNA (1)...(19): siRNA sense strand
caaagcagccuaucaagcu

SEQ ID NO: 1121762 - RNA, 19 nt, Homo sapiens
  misc_RNA (1)...(19): siRNA sense strand
gagcagcauuucagaacca

SEQ ID NO: 1121763 - RNA, 19 nt, Homo sapiens
  misc_RNA (1)...(19): siRNA sense strand
cauucucacucaccaguuu

SEQ ID NO: 1121764 - RNA, 19 nt, Homo sapiens
  misc_RNA (1)...(19): siRNA sense strand
agacaaggacuguuucaga

SEQ ID NO: 1121765 - RNA, 19 nt, Homo sapiens
  misc_RNA (1)...(19): siRNA sense strand
cagcagcacuguugaagac

SEQ ID NO: 1121766 - RNA, 19 nt, Homo sapiens
  misc_RNA (1)...(19): siRNA sense strand
gaaacccucuaaaucuuuu

SEQ ID NO: 1121767 - RNA, 19 nt, Homo sapiens
  misc_RNA (1)...(19): siRNA sense strand
gagcgucuccugcaucugu

SEQ ID NO: 1121768 - RNA, 19 nt, Homo sapiens
  misc_RNA (1)...(19): siRNA sense strand
cagaaggcuuggagggaaa

SEQ ID NO: 1121769 - RNA, 19 nt, Homo sapiens
  misc_RNA (1)...(19): siRNA sense strand
gaaggugcucuuaaucugu

SEQ ID NO: 1121770 - RNA, 19 nt, Homo sapiens
  misc_RNA (1)...(19): siRNA sense strand
gaagacaaggacuguuuca

SEQ ID NO: 1121771 - RNA, 19 nt, Homo sapiens
  misc_RNA (1)...(19): siRNA sense strand
uauaagccuuccaaaguca

SEQ ID NO: 1121772 - RNA, 19 nt, Homo sapiens
  misc_RNA (1)...(19): siRNA sense strand
gaugauauaagccuuccaa

SEQ ID NO: 1121773 - RNA, 19 nt, Homo sapiens
  misc_RNA (1)...(19): siRNA sense strand
aagaauaagagaagcagua

SEQ ID NO: 1121774 - RNA, 19 nt, Homo sapiens
  misc_RNA (1)...(19): siRNA sense strand
aaucaaagcagccuaucaa

SEQ ID NO: 1121775 - RNA, 19 nt, Homo sapiens
  misc_RNA (1)...(19): siRNA sense strand
cgaauagaaggugcucuua

SEQ ID NO: 1121776 - RNA, 19 nt, Homo sapiens
  misc_RNA (1)...(19): siRNA sense strand
gaaacggggugauagugaa

SEQ ID NO: 1121777 - RNA, 19 nt, Homo sapiens
  misc_RNA (1)...(19): siRNA sense strand
gaacauccaugaaaaucuc

SEQ ID NO: 1121778 - RNA, 19 nt, Homo sapiens
  misc_RNA (1)...(19): siRNA sense strand
gaaauccuccagcucgaau

SEQ ID NO: 1121779 - RNA, 19 nt, Homo sapiens
  misc_RNA (1)...(19): siRNA sense strand
ugauagccauucucacuca

SEQ ID NO: 1121780 - RNA, 19 nt, Homo sapiens
  misc_RNA (1)...(19): siRNA sense strand
guauggagaaacccucuaa

SEQ ID NO: 1121781 - RNA, 19 nt, Homo sapiens
  misc_RNA (1)...(19): siRNA sense strand
agaaggugcucuuaaucug

SEQ ID NO: 1121782 - RNA, 19 nt, Homo sapiens
  misc_RNA (1)...(19): siRNA sense strand
gugaagcaauugccuaugc

SEQ ID NO: 1121783 - RNA, 19 nt, Homo sapiens
  misc_RNA (1)...(19): siRNA sense strand
gaauaagagaagcaguaaa

SEQ ID NO: 1121784 - RNA, 19 nt, Homo sapiens
  misc_RNA (1)...(19): siRNA sense strand
gaaucaaagcagccuauca

SEQ ID NO: 1121785 - RNA, 19 nt, Homo sapiens
  misc_RNA (1)...(19): siRNA sense strand
cagacacaguuaugcagaa

SEQ ID NO: 1121786 - RNA, 19 nt, Homo sapiens
  misc_RNA (1)...(19): siRNA sense strand
gagauacacuugggugacu

SEQ ID NO: 1121787 - RNA, 19 nt, Homo sapiens
  misc_RNA (1)...(19): siRNA sense strand
ggagagauaccaauguacu

SEQ ID NO: 1121788 - RNA, 19 nt, Homo sapiens
  misc_RNA (1)...(19): siRNA sense strand
caggagaaacaauuuauag

SEQ ID NO: 1121789 - RNA, 19 nt, Homo sapiens
  misc_RNA (1)...(19): siRNA sense strand
ggugguacuuccauaagca

SEQ ID NO: 1121790 - RNA, 19 nt, Homo sapiens
  misc_RNA (1)...(19): siRNA sense strand
ccagaaacagccuccagaa

SEQ ID NO: 1121791 - RNA, 19 nt, Homo sapiens
  misc_RNA (1)...(19): siRNA sense strand
ccauuucacagcaggauuu

SEQ ID NO: 1121792 - RNA, 19 nt, Homo sapiens
  misc_RNA (1)...(19): siRNA sense strand
aagcacagcagaaauuaau

SEQ ID NO: 1121793 - RNA, 19 nt, Homo sapiens
  misc_RNA (1)...(19): siRNA sense strand
gaauuugucagaauguaag

SEQ ID NO: 1121794 - RNA, 19 nt, Homo sapiens
  misc_RNA (1)...(19): siRNA sense strand
uuaagcacagcagaaauua

SEQ ID NO: 1121795 - RNA, 19 nt, Homo sapiens
  misc_RNA (1)...(19): siRNA sense strand
uauuguagaugcugaaagg

SEQ ID NO: 1121796 - RNA, 19 nt, Homo sapiens
  misc_RNA (1)...(19): siRNA sense strand
uaaagagccacuuacauac

SEQ ID NO: 1121797 - RNA, 19 nt, Homo sapiens
  misc_RNA (1)...(19): siRNA sense strand
ggagcagaauauaggagau

SEQ ID NO: 1121798 - RNA, 19 nt, Homo sapiens
  misc_RNA (1)...(19): siRNA sense strand
aauguaagguauggagaaa

SEQ ID NO: 1121799 - RNA, 19 nt, Homo sapiens
  misc_RNA (1)...(19): siRNA sense strand
gagagcagcauuucagaac

SEQ ID NO: 1121800 - RNA, 19 nt, Homo sapiens
  misc_RNA (1)...(19): siRNA sense strand
uggagaaacccucuaaauc

SEQ ID NO: 1121801 - RNA, 19 nt, Homo sapiens
  misc_RNA (1)...(19): siRNA sense strand
aaggugcucuuaaucuguu

SEQ ID NO: 1121802 - RNA, 19 nt, Homo sapiens
  misc_RNA (1)...(19): siRNA sense strand
gaggcugugugagaauuug

SEQ ID NO: 1121803 - RNA, 19 nt, Homo sapiens
  misc_RNA (1)...(19): siRNA sense strand
aaagucagcagcaaucugu

SEQ ID NO: 1121804 - RNA, 19 nt, Homo sapiens
  misc_RNA (1)...(19): siRNA sense strand
gcccugaggaucccuuuga

SEQ ID NO: 1121805 - RNA, 19 nt, Homo sapiens
  misc_RNA (1)...(19): siRNA sense strand
cagcaugaagcucaacuga

SEQ ID NO: 1121806 - RNA, 19 nt, Homo sapiens
  misc_RNA (1)...(19): siRNA sense strand
agaaacccucuaaaucuuu

SEQ ID NO: 1121807 - RNA, 19 nt, Homo sapiens
  misc_RNA (1)...(19): siRNA sense strand
uuucagaggagcagaauau

SEQ ID NO: 1121808 - RNA, 19 nt, Homo sapiens
  misc_RNA (1)...(19): siRNA sense strand
gcacagcagaaauuaaugc

SEQ ID NO: 1121809 - RNA, 19 nt, Homo sapiens
  misc_RNA (1)...(19): siRNA sense strand
ccaugaaaaucucuuagaa

SEQ ID NO: 1121810 - RNA, 19 nt, Homo sapiens
  misc_RNA (1)...(19): siRNA sense strand
agaauaagagaagcaguaa

SEQ ID NO: 1121811 - RNA, 19 nt, Homo sapiens
  misc_RNA (1)...(19): siRNA sense strand
gcacucaaggcaggagaaa

SEQ ID NO: 1121812 - RNA, 19 nt, Homo sapiens
  misc_RNA (1)...(19): siRNA sense strand
ucuacuggcugaggaagaa

SEQ ID NO: 1121813 - RNA, 19 nt, Homo sapiens
  misc_RNA (1)...(19): siRNA sense strand
ccuaucaagcuuuagaauu

SEQ ID NO: 1121814 - RNA, 19 nt, Homo sapiens
  misc_RNA (1)...(19): siRNA sense strand
ucaggaccaucagaccuuu

SEQ ID NO: 1121815 - RNA, 19 nt, Homo sapiens
  misc_RNA (1)...(19): siRNA sense strand
auauaagccuuccaaaguc

SEQ ID NO: 1121816 - RNA, 19 nt, Homo sapiens
  misc_RNA (1)...(19): siRNA sense strand
gggugauagugaagcaauu

SEQ ID NO: 1121817 - RNA, 19 nt, Homo sapiens
  misc_RNA (1)...(19): siRNA sense strand
uaagcacagcagaaauuaa

SEQ ID NO: 1121818 - RNA, 19 nt, Homo sapiens
  misc_RNA (1)...(19): siRNA sense strand
gaggagagauaccaaugua

SEQ ID NO: 1121819 - RNA, 19 nt, Homo sapiens
  misc_RNA (1)...(19): siRNA sense strand
ucauagagcuguggaauuu

SEQ ID NO: 1121820 - RNA, 19 nt, Homo sapiens
  misc_RNA (1)...(19): siRNA sense strand
gagaaacccucuaaaucuu

SEQ ID NO: 1121821 - RNA, 19 nt, Homo sapiens
  misc_RNA (1)...(19): siRNA sense strand
gauauaagccuuccaaagu

SEQ ID NO: 1121822 - RNA, 19 nt, Homo sapiens
  misc_RNA (1)...(19): siRNA sense strand
gacaaggacuguuucagaa

SEQ ID NO: 1121823 - RNA, 19 nt, Homo sapiens
  misc_RNA (1)...(19): siRNA sense strand
ccaauguacugguauauau

SEQ ID NO: 1121824 - RNA, 19 nt, Homo sapiens
  misc_RNA (1)...(19): siRNA sense strand
gaaaccagcagacagaauu

SEQ ID NO: 1121825 - RNA, 19 nt, Homo sapiens
  misc_RNA (1)...(19): siRNA sense strand
gcugaaagguuauuuaaac

SEQ ID NO: 1121826 - RNA, 19 nt, Homo sapiens
  misc_RNA (1)...(19): siRNA sense strand
gaagaagcaacaacuauug

SEQ ID NO: 1121827 - RNA, 19 nt, Homo sapiens
  misc_RNA (1)...(19): siRNA sense strand
ggagaaacccucuaaaucu

SEQ ID NO: 1121828 - RNA, 19 nt, Homo sapiens
  misc_RNA (1)...(19): siRNA sense strand
ggaagaagcaacaacuauu

SEQ ID NO: 1121829 - RNA, 19 nt, Homo sapiens
  misc_RNA (1)...(19): siRNA sense strand
gaaacagccuccagaagag

SEQ ID NO: 1121830 - RNA, 19 nt, Homo sapiens
  misc_RNA (1)...(19): siRNA sense strand
ggaauuuaauccucauguu

SEQ ID NO: 1121831 - RNA, 19 nt, Homo sapiens
  misc_RNA (1)...(19): siRNA sense strand
ugagagauuugaugaaaga

SEQ ID NO: 1121832 - RNA, 19 nt, Homo sapiens
  misc_RNA (1)...(19): siRNA sense strand
gaauagaaggugcucuuaa

SEQ ID NO: 1121833 - RNA, 19 nt, Homo sapiens
  misc_RNA (1)...(19): siRNA sense strand
gaacagagagcagcauuuc

SEQ ID NO: 1121834 - RNA, 19 nt, Homo sapiens
  misc_RNA (1)...(19): siRNA sense strand
uguagaugcugaaagguua

SEQ ID NO: 1121835 - RNA, 19 nt, Homo sapiens
  misc_RNA (1)...(19): siRNA sense strand
gaauauaggagauacacuu

SEQ ID NO: 1121836 - RNA, 19 nt, Homo sapiens
  misc_RNA (1)...(19): siRNA sense strand
acacuugggugacugguaa

SEQ ID NO: 1121837 - RNA, 19 nt, Homo sapiens
  misc_RNA (1)...(19): siRNA sense strand
gcaggagaaacaauuuaua

SEQ ID NO: 1121838 - RNA, 19 nt, Homo sapiens
  misc_RNA (1)...(19): siRNA sense strand
aauagaaggugcucuuaau

SEQ ID NO: 1121839 - RNA, 19 nt, Homo sapiens
  misc_RNA (1)...(19): siRNA sense strand
auagagcuguggaauuuaa

SEQ ID NO: 1121840 - RNA, 19 nt, Homo sapiens
  misc_RNA (1)...(19): siRNA sense strand
gcaagaaaauuaggaagaa

SEQ ID NO: 1121841 - RNA, 19 nt, Homo sapiens
  misc_RNA (1)...(19): siRNA sense strand
gcacuggaaacgaauagaa

SEQ ID NO: 1121842 - RNA, 19 nt, Homo sapiens
  misc_RNA (1)...(19): siRNA sense strand
agaaacagccuccagaaga

SEQ ID NO: 1121843 - RNA, 19 nt, Homo sapiens
  misc_RNA (1)...(19): siRNA sense strand
gaauuuaauccucauguuc

SEQ ID NO: 1121844 - RNA, 19 nt, Homo sapiens
  misc_RNA (1)...(19): siRNA sense strand
gaauguaagguauggagaa

SEQ ID NO: 1121845 - RNA, 19 nt, Homo sapiens
  misc_RNA (1)...(19): siRNA sense strand
ggauuaagcacagcagaaa

SEQ ID NO: 1121846 - RNA, 19 nt, Homo sapiens
  misc_RNA (1)...(19): siRNA sense strand
gcaccaaaguccucagcau

SEQ ID NO: 1121847 - RNA, 19 nt, Homo sapiens
  misc_RNA (1)...(19): siRNA sense strand
gagcagaauauaggagaua

SEQ ID NO: 1121848 - RNA, 19 nt, Homo sapiens
  misc_RNA (1)...(19): siRNA sense strand
ucauugauaucaggacuaa

SEQ ID NO: 1121849 - RNA, 19 nt, Homo sapiens
  misc_RNA (1)...(19): siRNA sense strand
aagagccacuuacauacua

SEQ ID NO: 1121850 - RNA, 19 nt, Homo sapiens
  misc_RNA (1)...(19): siRNA sense strand
ccaaaguccucagcaugaa

SEQ ID NO: 1121851 - RNA, 19 nt, Homo sapiens
  misc_RNA (1)...(19): siRNA sense strand
gcaauugccuaugcuuucu

SEQ ID NO: 1121852 - RNA, 19 nt, Homo sapiens
  misc_RNA (1)...(19): siRNA sense strand
cagaauuugucagaaugua

SEQ ID NO: 1121853 - RNA, 19 nt, Homo sapiens
  misc_RNA (1)...(19): siRNA sense strand
cuucagcacuggaaacgaa

SEQ ID NO: 1121854 - RNA, 19 nt, Homo sapiens
  misc_RNA (1)...(19): siRNA sense strand
gcagcacuguugaagacaa

SEQ ID NO: 1121855 - RNA, 19 nt, Homo sapiens
  misc_RNA (1)...(19): siRNA sense strand
uuacaggccuauccagaug

SEQ ID NO: 1121856 - RNA, 19 nt, Homo sapiens
  misc_RNA (1)...(19): siRNA sense strand
gaugcugaaagguuauuua

SEQ ID NO: 1121857 - RNA, 19 nt, Homo sapiens
  misc_RNA (1)...(19): siRNA sense strand
gaggaagaagcaacaacua

SEQ ID NO: 1121858 - RNA, 19 nt, Homo sapiens
  misc_RNA (1)...(19): siRNA sense strand
ggaacagagagcagcauuu

SEQ ID NO: 1121859 - RNA, 19 nt, Homo sapiens
  misc_RNA (1)...(19): siRNA sense strand
agaaauuaaugccguggaa

SEQ ID NO: 1121860 - RNA, 19 nt, Homo sapiens
  misc_RNA (1)...(19): siRNA sense strand
caaggcaggagaaacaauu

SEQ ID NO: 1121861 - RNA, 19 nt, Homo sapiens
  misc_RNA (1)...(19): siRNA sense strand
caaagcagccuaucaagcu

SEQ ID NO: 1121862 - RNA, 19 nt, Homo sapiens
  misc_RNA (1)...(19): siRNA sense strand
gagcagcauuucagaacca

SEQ ID NO: 1121863 - RNA, 19 nt, Homo sapiens
  misc_RNA (1)...(19): siRNA sense strand
cauucucacucaccaguuu

SEQ ID NO: 1121864 - RNA, 19 nt, Homo sapiens
  misc_RNA (1)...(19): siRNA sense strand
agacaaggacuguuucaga

SEQ ID NO: 1121865 - RNA, 19 nt, Homo sapiens
  misc_RNA (1)...(19): siRNA sense strand
cagcagcacuguugaagac

SEQ ID NO: 1121866 - RNA, 19 nt, Homo sapiens
  misc_RNA (1)...(19): siRNA sense strand
gaaacccucuaaaucuuuu

SEQ ID NO: 1121867 - RNA, 19 nt, Homo sapiens
  misc_RNA (1)...(19): siRNA sense strand
gagcgucuccugcaucugu

SEQ ID NO: 1121868 - RNA, 19 nt, Homo sapiens
  misc_RNA (1)...(19): siRNA sense strand
cagaaggcuuggagggaaa

SEQ ID NO: 1121869 - RNA, 19 nt, Homo sapiens
  misc_RNA (1)...(19): siRNA sense strand
gaaggugcucuuaaucugu

SEQ ID NO: 1121870 - RNA, 19 nt, Homo sapiens
  misc_RNA (1)...(19): siRNA sense strand
gaagacaaggacuguuuca

SEQ ID NO: 1121871 - RNA, 19 nt, Homo sapiens
  misc_RNA (1)...(19): siRNA sense strand
uauaagccuuccaaaguca

SEQ ID NO: 1121872 - RNA, 19 nt, Homo sapiens
  misc_RNA (1)...(19): siRNA sense strand
gaugauauaagccuuccaa

SEQ ID NO: 1121873 - RNA, 19 nt, Homo sapiens
  misc_RNA (1)...(19): siRNA sense strand
aagaauaagagaagcagua

SEQ ID NO: 1121874 - RNA, 19 nt, Homo sapiens
  misc_RNA (1)...(19): siRNA sense strand
aaucaaagcagccuaucaa

SEQ ID NO: 1121875 - RNA, 19 nt, Homo sapiens
  misc_RNA (1)...(19): siRNA sense strand
cgaauagaaggugcucuua

SEQ ID NO: 1121876 - RNA, 19 nt, Homo sapiens
  misc_RNA (1)...(19): siRNA sense strand
gaaacggggugauagugaa

SEQ ID NO: 1121877 - RNA, 19 nt, Homo sapiens
  misc_RNA (1)...(19): siRNA sense strand
gaacauccaugaaaaucuc

SEQ ID NO: 1121878 - RNA, 19 nt, Homo sapiens
  misc_RNA (1)...(19): siRNA sense strand
gaaauccuccagcucgaau

SEQ ID NO: 1121879 - RNA, 19 nt, Homo sapiens
  misc_RNA (1)...(19): siRNA sense strand
ugauagccauucucacuca

SEQ ID NO: 1121880 - RNA, 19 nt, Homo sapiens
  misc_RNA (1)...(19): siRNA sense strand
guauggagaaacccucuaa

SEQ ID NO: 1121881 - RNA, 19 nt, Homo sapiens
  misc_RNA (1)...(19): siRNA sense strand
agaaggugcucuuaaucug

SEQ ID NO: 1121882 - RNA, 19 nt, Homo sapiens
  misc_RNA (1)...(19): siRNA sense strand
gugaagcaauugccuaugc

SEQ ID NO: 1121883 - RNA, 19 nt, Homo sapiens
  misc_RNA (1)...(19): siRNA sense strand
gaauaagagaagcaguaaa

SEQ ID NO: 1121884 - RNA, 19 nt, Homo sapiens
  misc_RNA (1)...(19): siRNA sense strand
gaaucaaagcagccuauca

SEQ ID NO: 1121885 - RNA, 19 nt, Homo sapiens
  misc_RNA (1)...(19): siRNA sense strand
cagacacaguuaugcagaa

SEQ ID NO: 1121886 - RNA, 19 nt, Homo sapiens
  misc_RNA (1)...(19): siRNA sense strand
gagauacacuugggugacu

SEQ ID NO: 1121887 - RNA, 19 nt, Homo sapiens
  misc_RNA (1)...(19): siRNA sense strand
ggagagauaccaauguacu

SEQ ID NO: 1121888 - RNA, 19 nt, Homo sapiens
  misc_RNA (1)...(19): siRNA sense strand
caggagaaacaauuuauag

SEQ ID NO: 1121889 - RNA, 19 nt, Homo sapiens
  misc_RNA (1)...(19): siRNA sense strand
ggugguacuuccauaagca

SEQ ID NO: 1121890 - RNA, 19 nt, Homo sapiens
  misc_RNA (1)...(19): siRNA sense strand
ccagaaacagccuccagaa

SEQ ID NO: 1121891 - RNA, 19 nt, Homo sapiens
  misc_RNA (1)...(19): siRNA sense strand
ccauuucacagcaggauuu

SEQ ID NO: 1121892 - RNA, 19 nt, Homo sapiens
  misc_RNA (1)...(19): siRNA sense strand
aagcacagcagaaauuaau

SEQ ID NO: 1121893 - RNA, 19 nt, Homo sapiens
  misc_RNA (1)...(19): siRNA sense strand
gaauuugucagaauguaag

SEQ ID NO: 1121894 - RNA, 19 nt, Homo sapiens
  misc_RNA (1)...(19): siRNA sense strand
uuaagcacagcagaaauua

SEQ ID NO: 1121895 - RNA, 19 nt, Homo sapiens
  misc_RNA (1)...(19): siRNA sense strand
uauuguagaugcugaaagg

SEQ ID NO: 1121896 - RNA, 19 nt, Homo sapiens
  misc_RNA (1)...(19): siRNA sense strand
uaaagagccacuuacauac

SEQ ID NO: 1121897 - RNA, 19 nt, Homo sapiens
  misc_RNA (1)...(19): siRNA sense strand
ggagcagaauauaggagau

SEQ ID NO: 1121898 - RNA, 19 nt, Homo sapiens
  misc_RNA (1)...(19): siRNA sense strand
aauguaagguauggagaaa

SEQ ID NO: 1121899 - RNA, 19 nt, Homo sapiens
  misc_RNA (1)...(19): siRNA sense strand
gagagcagcauuucagaac

SEQ ID NO: 1121900 - RNA, 19 nt, Homo sapiens
  misc_RNA (1)...(19): siRNA sense strand
uggagaaacccucuaaauc

SEQ ID NO: 1121901 - RNA, 19 nt, Homo sapiens
  misc_RNA (1)...(19): siRNA sense strand
aaggugcucuuaaucuguu

SEQ ID NO: 1121902 - RNA, 19 nt, Homo sapiens
  misc_RNA (1)...(19): siRNA sense strand
gaggcugugugagaauuug

SEQ ID NO: 1121903 - RNA, 19 nt, Homo sapiens
  misc_RNA (1)...(19): siRNA sense strand
aaagucagcagcaaucugu

SEQ ID NO: 1121904 - RNA, 19 nt, Homo sapiens
  misc_RNA (1)...(19): siRNA sense strand
gcccugaggaucccuuuga

SEQ ID NO: 1121905 - RNA, 19 nt, Homo sapiens
  misc_RNA (1)...(19): siRNA sense strand
cagcaugaagcucaacuga

SEQ ID NO: 1121906 - RNA, 19 nt, Homo sapiens
  misc_RNA (1)...(19): siRNA sense strand
agaaacccucuaaaucuuu

SEQ ID NO: 1121907 - RNA, 19 nt, Homo sapiens
  misc_RNA (1)...(19): siRNA sense strand
uuucagaggagcagaauau

SEQ ID NO: 1121908 - RNA, 19 nt, Homo sapiens
  misc_RNA (1)...(19): siRNA sense strand
gcacagcagaaauuaaugc

SEQ ID NO: 1121909 - RNA, 19 nt, Homo sapiens
  misc_RNA (1)...(19): siRNA sense strand
ccaugaaaaucucuuagaa

SEQ ID NO: 1121910 - RNA, 19 nt, Homo sapiens
  misc_RNA (1)...(19): siRNA sense strand
agaauaagagaagcaguaa

SEQ ID NO: 1121911 - RNA, 19 nt, Homo sapiens
  misc_RNA (1)...(19): siRNA sense strand
gcacucaaggcaggagaaa

SEQ ID NO: 1121912 - RNA, 19 nt, Homo sapiens
  misc_RNA (1)...(19): siRNA sense strand
ucuacuggcugaggaagaa

SEQ ID NO: 1121913 - RNA, 19 nt, Homo sapiens
  misc_RNA (1)...(19): siRNA sense strand
ccuaucaagcuuuagaauu

SEQ ID NO: 1121914 - RNA, 19 nt, Homo sapiens
  misc_RNA (1)...(19): siRNA sense strand
ucaggaccaucagaccuuu

SEQ ID NO: 1121915 - RNA, 19 nt, Homo sapiens
  misc_RNA (1)...(19): siRNA sense strand
auauaagccuuccaaaguc

SEQ ID NO: 1121916 - RNA, 19 nt, Homo sapiens
  misc_RNA (1)...(19): siRNA sense strand
gggugauagugaagcaauu

SEQ ID NO: 1121917 - RNA, 19 nt, Homo sapiens
  misc_RNA (1)...(19): siRNA sense strand
uaagcacagcagaaauuaa

SEQ ID NO: 1121918 - RNA, 19 nt, Homo sapiens
  misc_RNA (1)...(19): siRNA sense strand
gaggagagauaccaaugua

SEQ ID NO: 1121919 - RNA, 19 nt, Homo sapiens
  misc_RNA (1)...(19): siRNA sense strand
ucauagagcuguggaauuu

SEQ ID NO: 1121920 - RNA, 19 nt, Homo sapiens
  misc_RNA (1)...(19): siRNA sense strand
gagaaacccucuaaaucuu

SEQ ID NO: 1121921 - RNA, 19 nt, Homo sapiens
  misc_RNA (1)...(19): siRNA sense strand
gauauaagccuuccaaagu

SEQ ID NO: 1121922 - RNA, 19 nt, Homo sapiens
  misc_RNA (1)...(19): siRNA sense strand
gacaaggacuguuucagaa

SEQ ID NO: 1121923 - RNA, 19 nt, Homo sapiens
  misc_RNA (1)...(19): siRNA sense strand
ccaauguacugguauauau

SEQ ID NO: 1121924 - RNA, 19 nt, Homo sapiens
  misc_RNA (1)...(19): siRNA sense strand
gaaaccagcagacagaauu

SEQ ID NO: 1121925 - RNA, 19 nt, Homo sapiens
  misc_RNA (1)...(19): siRNA sense strand
gcugaaagguuauuuaaac

SEQ ID NO: 1121926 - RNA, 19 nt, Homo sapiens
  misc_RNA (1)...(19): siRNA sense strand
gaagaagcaacaacuauug

SEQ ID NO: 1121927 - RNA, 19 nt, Homo sapiens
  misc_RNA (1)...(19): siRNA sense strand
ggagaaacccucuaaaucu

SEQ ID NO: 1121928 - RNA, 19 nt, Homo sapiens
  misc_RNA (1)...(19): siRNA sense strand
ggaagaagcaacaacuauu

SEQ ID NO: 1121929 - RNA, 19 nt, Homo sapiens
  misc_RNA (1)...(19): siRNA sense strand
gaaacagccuccagaagag

SEQ ID NO: 1121930 - RNA, 19 nt, Homo sapiens
  misc_RNA (1)...(19): siRNA sense strand
ggaauuuaauccucauguu

SEQ ID NO: 1121931 - RNA, 19 nt, Homo sapiens
  misc_RNA (1)...(19): siRNA sense strand
ugagagauuugaugaaaga

SEQ ID NO: 1121932 - RNA, 19 nt, Homo sapiens
  misc_RNA (1)...(19): siRNA sense strand
gaauagaaggugcucuuaa

SEQ ID NO: 1121933 - RNA, 19 nt, Homo sapiens
  misc_RNA (1)...(19): siRNA sense strand
gaacagagagcagcauuuc

SEQ ID NO: 1121934 - RNA, 19 nt, Homo sapiens
  misc_RNA (1)...(19): siRNA sense strand
uguagaugcugaaagguua

SEQ ID NO: 1121935 - RNA, 19 nt, Homo sapiens
  misc_RNA (1)...(19): siRNA sense strand
gaauauaggagauacacuu

SEQ ID NO: 1121936 - RNA, 19 nt, Homo sapiens
  misc_RNA (1)...(19): siRNA sense strand
acacuugggugacugguaa

SEQ ID NO: 1121937 - RNA, 19 nt, Homo sapiens
  misc_RNA (1)...(19): siRNA sense strand
gcaggagaaacaauuuaua

SEQ ID NO: 1121938 - RNA, 19 nt, Homo sapiens
  misc_RNA (1)...(19): siRNA sense strand
aauagaaggugcucuuaau

SEQ ID NO: 1121939 - RNA, 19 nt, Homo sapiens
  misc_RNA (1)...(19): siRNA sense strand
auagagcuguggaauuuaa

SEQ ID NO: 1121940 - RNA, 19 nt, Homo sapiens
  misc_RNA (1)...(19): siRNA sense strand
gcaagaaaauuaggaagaa

SEQ ID NO: 1121941 - RNA, 19 nt, Homo sapiens
  misc_RNA (1)...(19): siRNA sense strand
gcacuggaaacgaauagaa

SEQ ID NO: 1121942 - RNA, 19 nt, Homo sapiens
  misc_RNA (1)...(19): siRNA sense strand
agaaacagccuccagaaga

SEQ ID NO: 1121943 - RNA, 19 nt, Homo sapiens
  misc_RNA (1)...(19): siRNA sense strand
gaauuuaauccucauguuc

SEQ ID NO: 1121944 - RNA, 19 nt, Homo sapiens
  misc_RNA (1)...(19): siRNA sense strand
gaauguaagguauggagaa

SEQ ID NO: 1121945 - RNA, 19 nt, Homo sapiens
  misc_RNA (1)...(19): siRNA sense strand
ggauuaagcacagcagaaa

SEQ ID NO: 1121946 - RNA, 19 nt, Homo sapiens
  misc_RNA (1)...(19): siRNA sense strand
gcaccaaaguccucagcau

SEQ ID NO: 1121947 - RNA, 19 nt, Homo sapiens
  misc_RNA (1)...(19): siRNA sense strand
gagcagaauauaggagaua

SEQ ID NO: 1121948 - RNA, 19 nt, Homo sapiens
  misc_RNA (1)...(19): siRNA sense strand
ucauugauaucaggacuaa

SEQ ID NO: 1121949 - RNA, 19 nt, Homo sapiens
  misc_RNA (1)...(19): siRNA sense strand
aagagccacuuacauacua

SEQ ID NO: 1121950 - RNA, 19 nt, Homo sapiens
  misc_RNA (1)...(19): siRNA sense strand
ccaaaguccucagcaugaa

SEQ ID NO: 1121951 - RNA, 19 nt, Homo sapiens
  misc_RNA (1)...(19): siRNA sense strand
gcaauugccuaugcuuucu

SEQ ID NO: 1121952 - RNA, 19 nt, Homo sapiens
  misc_RNA (1)...(19): siRNA sense strand
cagaauuugucagaaugua

SEQ ID NO: 1121953 - RNA, 19 nt, Homo sapiens
  misc_RNA (1)...(19): siRNA sense strand
cuucagcacuggaaacgaa

SEQ ID NO: 1121954 - RNA, 19 nt, Homo sapiens
  misc_RNA (1)...(19): siRNA sense strand
gcagcacuguugaagacaa

SEQ ID NO: 1121955 - RNA, 19 nt, Homo sapiens
  misc_RNA (1)...(19): siRNA sense strand
uuacaggccuauccagaug

SEQ ID NO: 1121956 - RNA, 19 nt, Homo sapiens
  misc_RNA (1)...(19): siRNA sense strand
gaugcugaaagguuauuua

SEQ ID NO: 1121957 - RNA, 19 nt, Homo sapiens
  misc_RNA (1)...(19): siRNA sense strand
gaggaagaagcaacaacua

SEQ ID NO: 1121958 - RNA, 19 nt, Homo sapiens
  misc_RNA (1)...(19): siRNA sense strand
ggaacagagagcagcauuu

SEQ ID NO: 1121959 - RNA, 19 nt, Homo sapiens
  misc_RNA (1)...(19): siRNA sense strand
agaaauuaaugccguggaa

SEQ ID NO: 1121960 - RNA, 19 nt, Homo sapiens
  misc_RNA (1)...(19): siRNA sense strand
caaggcaggagaaacaauu

SEQ ID NO: 1121961 - RNA, 19 nt, Homo sapiens
  misc_RNA (1)...(19): siRNA sense strand
caaagcagccuaucaagcu

SEQ ID NO: 1121962 - RNA, 19 nt, Homo sapiens
  misc_RNA (1)...(19): siRNA sense strand
gagcagcauuucagaacca

SEQ ID NO: 1121963 - RNA, 19 nt, Homo sapiens
  misc_RNA (1)...(19): siRNA sense strand
cauucucacucaccaguuu

SEQ ID NO: 1121964 - RNA, 19 nt, Homo sapiens
  misc_RNA (1)...(19): siRNA sense strand
agacaaggacuguuucaga

SEQ ID NO: 1121965 - RNA, 19 nt, Homo sapiens
  misc_RNA (1)...(19): siRNA sense strand
cagcagcacuguugaagac

SEQ ID NO: 1121966 - RNA, 19 nt, Homo sapiens
  misc_RNA (1)...(19): siRNA sense strand
gaaacccucuaaaucuuuu

SEQ ID NO: 1121967 - RNA, 19 nt, Homo sapiens
  misc_RNA (1)...(19): siRNA sense strand
gagcgucuccugcaucugu

SEQ ID NO: 1121968 - RNA, 19 nt, Homo sapiens
  misc_RNA (1)...(19): siRNA sense strand
cagaaggcuuggagggaaa

SEQ ID NO: 1121969 - RNA, 19 nt, Homo sapiens
  misc_RNA (1)...(19): siRNA sense strand
gaaggugcucuuaaucugu

SEQ ID NO: 1121970 - RNA, 19 nt, Homo sapiens
  misc_RNA (1)...(19): siRNA sense strand
gaagacaaggacuguuuca

SEQ ID NO: 1121971 - RNA, 19 nt, Homo sapiens
  misc_RNA (1)...(19): siRNA sense strand
uauaagccuuccaaaguca

SEQ ID NO: 1121972 - RNA, 19 nt, Homo sapiens
  misc_RNA (1)...(19): siRNA sense strand
gaugauauaagccuuccaa

SEQ ID NO: 1121973 - RNA, 19 nt, Homo sapiens
  misc_RNA (1)...(19): siRNA sense strand
aagaauaagagaagcagua

SEQ ID NO: 1121974 - RNA, 19 nt, Homo sapiens
  misc_RNA (1)...(19): siRNA sense strand
aaucaaagcagccuaucaa

SEQ ID NO: 1121975 - RNA, 19 nt, Homo sapiens
  misc_RNA (1)...(19): siRNA sense strand
cgaauagaaggugcucuua

SEQ ID NO: 1121976 - RNA, 19 nt, Homo sapiens
  misc_RNA (1)...(19): siRNA sense strand
gaaacggggugauagugaa

SEQ ID NO: 1121977 - RNA, 19 nt, Homo sapiens
  misc_RNA (1)...(19): siRNA sense strand
gaacauccaugaaaaucuc

SEQ ID NO: 1121978 - RNA, 19 nt, Homo sapiens
  misc_RNA (1)...(19): siRNA sense strand
gaaauccuccagcucgaau

SEQ ID NO: 1121979 - RNA, 19 nt, Homo sapiens
  misc_RNA (1)...(19): siRNA sense strand
ugauagccauucucacuca

SEQ ID NO: 1121980 - RNA, 19 nt, Homo sapiens
  misc_RNA (1)...(19): siRNA sense strand
guauggagaaacccucuaa

SEQ ID NO: 1121981 - RNA, 19 nt, Homo sapiens
  misc_RNA (1)...(19): siRNA sense strand
agaaggugcucuuaaucug

SEQ ID NO: 1121982 - RNA, 19 nt, Homo sapiens
  misc_RNA (1)...(19): siRNA sense strand
gugaagcaauugccuaugc

SEQ ID NO: 1121983 - RNA, 19 nt, Homo sapiens
  misc_RNA (1)...(19): siRNA sense strand
gaauaagagaagcaguaaa

SEQ ID NO: 1121984 - RNA, 19 nt, Homo sapiens
  misc_RNA (1)...(19): siRNA sense strand
gaaucaaagcagccuauca

SEQ ID NO: 1121985 - RNA, 19 nt, Homo sapiens
  misc_RNA (1)...(19): siRNA sense strand
cagacacaguuaugcagaa

SEQ ID NO: 1121986 - RNA, 19 nt, Homo sapiens
  misc_RNA (1)...(19): siRNA sense strand
gagauacacuugggugacu

SEQ ID NO: 1121987 - RNA, 19 nt, Homo sapiens
  misc_RNA (1)...(19): siRNA sense strand
ggagagauaccaauguacu

SEQ ID NO: 1121988 - RNA, 19 nt, Homo sapiens
  misc_RNA (1)...(19): siRNA sense strand
caggagaaacaauuuauag

SEQ ID NO: 1121989 - RNA, 19 nt, Homo sapiens
  misc_RNA (1)...(19): siRNA sense strand
ggugguacuuccauaagca

SEQ ID NO: 1121990 - RNA, 19 nt, Homo sapiens
  misc_RNA (1)...(19): siRNA sense strand
ccagaaacagccuccagaa

SEQ ID NO: 1121991 - RNA, 19 nt, Homo sapiens
  misc_RNA (1)...(19): siRNA sense strand
ccauuucacagcaggauuu

SEQ ID NO: 1121992 - RNA, 19 nt, Homo sapiens
  misc_RNA (1)...(19): siRNA sense strand
aagcacagcagaaauuaau

SEQ ID NO: 1121993 - RNA, 19 nt, Homo sapiens
  misc_RNA (1)...(19): siRNA sense strand
gaauuugucagaauguaag

SEQ ID NO: 1121994 - RNA, 19 nt, Homo sapiens
  misc_RNA (1)...(19): siRNA sense strand
uuaagcacagcagaaauua

SEQ ID NO: 1121995 - RNA, 19 nt, Homo sapiens
  misc_RNA (1)...(19): siRNA sense strand
uauuguagaugcugaaagg

SEQ ID NO: 1121996 - RNA, 19 nt, Homo sapiens
  misc_RNA (1)...(19): siRNA sense strand
uaaagagccacuuacauac

SEQ ID NO: 1121997 - RNA, 19 nt, Homo sapiens
  misc_RNA (1)...(19): siRNA sense strand
ggagcagaauauaggagau

SEQ ID NO: 1121998 - RNA, 19 nt, Homo sapiens
  misc_RNA (1)...(19): siRNA sense strand
aauguaagguauggagaaa

SEQ ID NO: 1121999 - RNA, 19 nt, Homo sapiens
  misc_RNA (1)...(19): siRNA sense strand
gagagcagcauuucagaac

SEQ ID NO: 1122000 - RNA, 19 nt, Homo sapiens
  misc_RNA (1)...(19): siRNA sense strand
uggagaaacccucuaaauc

SEQ ID NO: 1122001 - RNA, 19 nt, Homo sapiens
  misc_RNA (1)...(19): siRNA sense strand
aaggugcucuuaaucuguu

SEQ ID NO: 1122002 - RNA, 19 nt, Homo sapiens
  misc_RNA (1)...(19): siRNA sense strand
gaggcugugugagaauuug

SEQ ID NO: 1122003 - RNA, 19 nt, Homo sapiens
  misc_RNA (1)...(19): siRNA sense strand
aaagucagcagcaaucugu

SEQ ID NO: 1122004 - RNA, 19 nt, Homo sapiens
  misc_RNA (1)...(19): siRNA sense strand
gcccugaggaucccuuuga

SEQ ID NO: 1122005 - RNA, 19 nt, Homo sapiens
  misc_RNA (1)...(19): siRNA sense strand
cagcaugaagcucaacuga

SEQ ID NO: 1122006 - RNA, 19 nt, Homo sapiens
  misc_RNA (1)...(19): siRNA sense strand
agaaacccucuaaaucuuu

SEQ ID NO: 1122007 - RNA, 19 nt, Homo sapiens
  misc_RNA (1)...(19): siRNA sense strand
uuucagaggagcagaauau

SEQ ID NO: 1122008 - RNA, 19 nt, Homo sapiens
  misc_RNA (1)...(19): siRNA sense strand
gcacagcagaaauuaaugc

SEQ ID NO: 1122009 - RNA, 19 nt, Homo sapiens
  misc_RNA (1)...(19): siRNA sense strand
ccaugaaaaucucuuagaa

SEQ ID NO: 1122010 - RNA, 19 nt, Homo sapiens
  misc_RNA (1)...(19): siRNA sense strand
agaauaagagaagcaguaa

SEQ ID NO: 1122011 - RNA, 19 nt, Homo sapiens
  misc_RNA (1)...(19): siRNA sense strand
gcacucaaggcaggagaaa

SEQ ID NO: 1122012 - RNA, 19 nt, Homo sapiens
  misc_RNA (1)...(19): siRNA sense strand
ucuacuggcugaggaagaa

SEQ ID NO: 1122013 - RNA, 19 nt, Homo sapiens
  misc_RNA (1)...(19): siRNA sense strand
ccuaucaagcuuuagaauu

SEQ ID NO: 1122014 - RNA, 19 nt, Homo sapiens
  misc_RNA (1)...(19): siRNA sense strand
ucaggaccaucagaccuuu

SEQ ID NO: 1122015 - RNA, 19 nt, Homo sapiens
  misc_RNA (1)...(19): siRNA sense strand
auauaagccuuccaaaguc

SEQ ID NO: 1122016 - RNA, 19 nt, Homo sapiens
  misc_RNA (1)...(19): siRNA sense strand
gggugauagugaagcaauu

SEQ ID NO: 1122017 - RNA, 19 nt, Homo sapiens
  misc_RNA (1)...(19): siRNA sense strand
uaagcacagcagaaauuaa

SEQ ID NO: 1122018 - RNA, 19 nt, Homo sapiens
  misc_RNA (1)...(19): siRNA sense strand
gaggagagauaccaaugua

SEQ ID NO: 1122019 - RNA, 19 nt, Homo sapiens
  misc_RNA (1)...(19): siRNA sense strand
ucauagagcuguggaauuu

SEQ ID NO: 1122020 - RNA, 19 nt, Homo sapiens
  misc_RNA (1)...(19): siRNA sense strand
gagaaacccucuaaaucuu

SEQ ID NO: 1122021 - RNA, 19 nt, Homo sapiens
  misc_RNA (1)...(19): siRNA sense strand
gauauaagccuuccaaagu

SEQ ID NO: 1122022 - RNA, 19 nt, Homo sapiens
  misc_RNA (1)...(19): siRNA sense strand
gacaaggacuguuucagaa

SEQ ID NO: 1122023 - RNA, 19 nt, Homo sapiens
  misc_RNA (1)...(19): siRNA sense strand
ccaauguacugguauauau

SEQ ID NO: 1122024 - RNA, 19 nt, Homo sapiens
  misc_RNA (1)...(19): siRNA sense strand
gaaaccagcagacagaauu

SEQ ID NO: 1122025 - RNA, 19 nt, Homo sapiens
  misc_RNA (1)...(19): siRNA sense strand
gcugaaagguuauuuaaac

SEQ ID NO: 1122026 - RNA, 19 nt, Homo sapiens
  misc_RNA (1)...(19): siRNA sense strand
gaagaagcaacaacuauug

SEQ ID NO: 1122027 - RNA, 19 nt, Homo sapiens
  misc_RNA (1)...(19): siRNA sense strand
ggagaaacccucuaaaucu

SEQ ID NO: 1122028 - RNA, 19 nt, Homo sapiens
  misc_RNA (1)...(19): siRNA sense strand
ggaagaagcaacaacuauu

SEQ ID NO: 1122029 - RNA, 19 nt, Homo sapiens
  misc_RNA (1)...(19): siRNA sense strand
gaaacagccuccagaagag

SEQ ID NO: 1122030 - RNA, 19 nt, Homo sapiens
  misc_RNA (1)...(19): siRNA sense strand
ggaauuuaauccucauguu

SEQ ID NO: 1122031 - RNA, 19 nt, Homo sapiens
  misc_RNA (1)...(19): siRNA sense strand
ugagagauuugaugaaaga

SEQ ID NO: 1122032 - RNA, 19 nt, Homo sapiens
  misc_RNA (1)...(19): siRNA sense strand
gaauagaaggugcucuuaa

SEQ ID NO: 1122033 - RNA, 19 nt, Homo sapiens
  misc_RNA (1)...(19): siRNA sense strand
gaacagagagcagcauuuc

SEQ ID NO: 1122034 - RNA, 19 nt, Homo sapiens
  misc_RNA (1)...(19): siRNA sense strand
uguagaugcugaaagguua

SEQ ID NO: 1122035 - RNA, 19 nt, Homo sapiens
  misc_RNA (1)...(19): siRNA sense strand
gaauauaggagauacacuu

SEQ ID NO: 1122036 - RNA, 19 nt, Homo sapiens
  misc_RNA (1)...(19): siRNA sense strand
acacuugggugacugguaa

SEQ ID NO: 1122037 - RNA, 19 nt, Homo sapiens
  misc_RNA (1)...(19): siRNA sense strand
gcaggagaaacaauuuaua

SEQ ID NO: 1122038 - RNA, 19 nt, Homo sapiens
  misc_RNA (1)...(19): siRNA sense strand
aauagaaggugcucuuaau

SEQ ID NO: 1122039 - RNA, 19 nt, Homo sapiens
  misc_RNA (1)...(19): siRNA sense strand
auagagcuguggaauuuaa

SEQ ID NO: 1122040 - RNA, 19 nt, Homo sapiens
  misc_RNA (1)...(19): siRNA sense strand
gcaagaaaauuaggaagaa

SEQ ID NO: 1122041 - RNA, 19 nt, Homo sapiens
  misc_RNA (1)...(19): siRNA sense strand
gcacuggaaacgaauagaa

SEQ ID NO: 1122042 - RNA, 19 nt, Homo sapiens
  misc_RNA (1)...(19): siRNA sense strand
agaaacagccuccagaaga

SEQ ID NO: 1122043 - RNA, 19 nt, Homo sapiens
  misc_RNA (1)...(19): siRNA sense strand
gaauuuaauccucauguuc

SEQ ID NO: 1122044 - RNA, 19 nt, Homo sapiens
  misc_RNA (1)...(19): siRNA sense strand
gaauguaagguauggagaa

SEQ ID NO: 1122045 - RNA, 19 nt, Homo sapiens
  misc_RNA (1)...(19): siRNA sense strand
ggauuaagcacagcagaaa

SEQ ID NO: 1122046 - RNA, 19 nt, Homo sapiens
  misc_RNA (1)...(19): siRNA sense strand
gcaccaaaguccucagcau

SEQ ID NO: 1122047 - RNA, 19 nt, Homo sapiens
  misc_RNA (1)...(19): siRNA sense strand
gagcagaauauaggagaua

SEQ ID NO: 1122048 - RNA, 19 nt, Homo sapiens
  misc_RNA (1)...(19): siRNA sense strand
ucauugauaucaggacuaa

SEQ ID NO: 1122049 - RNA, 19 nt, Homo sapiens
  misc_RNA (1)...(19): siRNA sense strand
aagagccacuuacauacua

SEQ ID NO: 1122050 - RNA, 19 nt, Homo sapiens
  misc_RNA (1)...(19): siRNA sense strand
ccaaaguccucagcaugaa

SEQ ID NO: 1122051 - RNA, 19 nt, Homo sapiens
  misc_RNA (1)...(19): siRNA sense strand
gcaauugccuaugcuuucu

SEQ ID NO: 1122052 - RNA, 19 nt, Homo sapiens
  misc_RNA (1)...(19): siRNA sense strand
cagaauuugucagaaugua

SEQ ID NO: 1122053 - RNA, 19 nt, Homo sapiens
  misc_RNA (1)...(19): siRNA sense strand
cuucagcacuggaaacgaa

SEQ ID NO: 1122054 - RNA, 19 nt, Homo sapiens
  misc_RNA (1)...(19): siRNA sense strand
gcagcacuguugaagacaa

SEQ ID NO: 1122055 - RNA, 19 nt, Homo sapiens
  misc_RNA (1)...(19): siRNA sense strand
uuacaggccuauccagaug

SEQ ID NO: 1122056 - RNA, 19 nt, Homo sapiens
  misc_RNA (1)...(19): siRNA sense strand
gaugcugaaagguuauuua

SEQ ID NO: 1122057 - RNA, 19 nt, Homo sapiens
  misc_RNA (1)...(19): siRNA sense strand
gaggaagaagcaacaacua

SEQ ID NO: 1122058 - RNA, 19 nt, Homo sapiens
  misc_RNA (1)...(19): siRNA sense strand
ggaacagagagcagcauuu

SEQ ID NO: 1122059 - RNA, 19 nt, Homo sapiens
  misc_RNA (1)...(19): siRNA sense strand
agaaauuaaugccguggaa

SEQ ID NO: 1122060 - RNA, 19 nt, Homo sapiens
  misc_RNA (1)...(19): siRNA sense strand
caaggcaggagaaacaauu

SEQ ID NO: 1122061 - RNA, 19 nt, Homo sapiens
  misc_RNA (1)...(19): siRNA sense strand
caaagcagccuaucaagcu

SEQ ID NO: 1122062 - RNA, 19 nt, Homo sapiens
  misc_RNA (1)...(19): siRNA sense strand
gagcagcauuucagaacca

SEQ ID NO: 1122063 - RNA, 19 nt, Homo sapiens
  misc_RNA (1)...(19): siRNA sense strand
cauucucacucaccaguuu

SEQ ID NO: 1122064 - RNA, 19 nt, Homo sapiens
  misc_RNA (1)...(19): siRNA sense strand
agacaaggacuguuucaga

SEQ ID NO: 1122065 - RNA, 19 nt, Homo sapiens
  misc_RNA (1)...(19): siRNA sense strand
cagcagcacuguugaagac

SEQ ID NO: 1122066 - RNA, 19 nt, Homo sapiens
  misc_RNA (1)...(19): siRNA sense strand
gaaacccucuaaaucuuuu

SEQ ID NO: 1122067 - RNA, 19 nt, Homo sapiens
  misc_RNA (1)...(19): siRNA sense strand
gagcgucuccugcaucugu

SEQ ID NO: 1122068 - RNA, 19 nt, Homo sapiens
  misc_RNA (1)...(19): siRNA sense strand
cagaaggcuuggagggaaa

SEQ ID NO: 1122069 - RNA, 19 nt, Homo sapiens
  misc_RNA (1)...(19): siRNA sense strand
gaaggugcucuuaaucugu

SEQ ID NO: 1122070 - RNA, 19 nt, Homo sapiens
  misc_RNA (1)...(19): siRNA sense strand
gaagacaaggacuguuuca

SEQ ID NO: 1122071 - RNA, 19 nt, Homo sapiens
  misc_RNA (1)...(19): siRNA sense strand
uauaagccuuccaaaguca

SEQ ID NO: 1122072 - RNA, 19 nt, Homo sapiens
  misc_RNA (1)...(19): siRNA sense strand
gaugauauaagccuuccaa

SEQ ID NO: 1122073 - RNA, 19 nt, Homo sapiens
  misc_RNA (1)...(19): siRNA sense strand
aagaauaagagaagcagua

SEQ ID NO: 1122074 - RNA, 19 nt, Homo sapiens
  misc_RNA (1)...(19): siRNA sense strand
aaucaaagcagccuaucaa

SEQ ID NO: 1122075 - RNA, 19 nt, Homo sapiens
  misc_RNA (1)...(19): siRNA sense strand
cgaauagaaggugcucuua

SEQ ID NO: 1122076 - RNA, 19 nt, Homo sapiens
  misc_RNA (1)...(19): siRNA sense strand
gaaacggggugauagugaa

SEQ ID NO: 1122077 - RNA, 19 nt, Homo sapiens
  misc_RNA (1)...(19): siRNA sense strand
gaacauccaugaaaaucuc

SEQ ID NO: 1122078 - RNA, 19 nt, Homo sapiens
  misc_RNA (1)...(19): siRNA sense strand
gaaauccuccagcucgaau

SEQ ID NO: 1122079 - RNA, 19 nt, Homo sapiens
  misc_RNA (1)...(19): siRNA sense strand
ugauagccauucucacuca

SEQ ID NO: 1122080 - RNA, 19 nt, Homo sapiens
  misc_RNA (1)...(19): siRNA sense strand
guauggagaaacccucuaa

SEQ ID NO: 1122081 - RNA, 19 nt, Homo sapiens
  misc_RNA (1)...(19): siRNA sense strand
agaaggugcucuuaaucug

SEQ ID NO: 1122082 - RNA, 19 nt, Homo sapiens
  misc_RNA (1)...(19): siRNA sense strand
gugaagcaauugccuaugc

SEQ ID NO: 1122083 - RNA, 19 nt, Homo sapiens
  misc_RNA (1)...(19): siRNA sense strand
gaauaagagaagcaguaaa

SEQ ID NO: 1122084 - RNA, 19 nt, Homo sapiens
  misc_RNA (1)...(19): siRNA sense strand
gaaucaaagcagccuauca

SEQ ID NO: 1122085 - RNA, 19 nt, Homo sapiens
  misc_RNA (1)...(19): siRNA sense strand
cagacacaguuaugcagaa

SEQ ID NO: 1122086 - RNA, 19 nt, Homo sapiens
  misc_RNA (1)...(19): siRNA sense strand
gagauacacuugggugacu

SEQ ID NO: 1122087 - RNA, 19 nt, Homo sapiens
  misc_RNA (1)...(19): siRNA sense strand
ggagagauaccaauguacu

SEQ ID NO: 1122088 - RNA, 19 nt, Homo sapiens
  misc_RNA (1)...(19): siRNA sense strand
caggagaaacaauuuauag

SEQ ID NO: 1122089 - RNA, 19 nt, Homo sapiens
  misc_RNA (1)...(19): siRNA sense strand
ggugguacuuccauaagca

SEQ ID NO: 1122090 - RNA, 19 nt, Homo sapiens
  misc_RNA (1)...(19): siRNA sense strand
ccagaaacagccuccagaa

SEQ ID NO: 1122091 - RNA, 19 nt, Homo sapiens
  misc_RNA (1)...(19): siRNA sense strand
ccauuucacagcaggauuu

SEQ ID NO: 1122092 - RNA, 19 nt, Homo sapiens
  misc_RNA (1)...(19): siRNA sense strand
aagcacagcagaaauuaau

SEQ ID NO: 1122093 - RNA, 19 nt, Homo sapiens
  misc_RNA (1)...(19): siRNA sense strand
gaauuugucagaauguaag

SEQ ID NO: 1122094 - RNA, 19 nt, Homo sapiens
  misc_RNA (1)...(19): siRNA sense strand
uuaagcacagcagaaauua

SEQ ID NO: 1122095 - RNA, 19 nt, Homo sapiens
  misc_RNA (1)...(19): siRNA sense strand
uauuguagaugcugaaagg

SEQ ID NO: 1122096 - RNA, 19 nt, Homo sapiens
  misc_RNA (1)...(19): siRNA sense strand
uaaagagccacuuacauac

SEQ ID NO: 1122097 - RNA, 19 nt, Homo sapiens
  misc_RNA (1)...(19): siRNA sense strand
ggagcagaauauaggagau

SEQ ID NO: 1122098 - RNA, 19 nt, Homo sapiens
  misc_RNA (1)...(19): siRNA sense strand
aauguaagguauggagaaa

SEQ ID NO: 1122099 - RNA, 19 nt, Homo sapiens
  misc_RNA (1)...(19): siRNA sense strand
gagagcagcauuucagaac

SEQ ID NO: 1122100 - RNA, 19 nt, Homo sapiens
  misc_RNA (1)...(19): siRNA sense strand
uggagaaacccucuaaauc

SEQ ID NO: 1122101 - RNA, 19 nt, Homo sapiens
  misc_RNA (1)...(19): siRNA sense strand
aaggugcucuuaaucuguu

SEQ ID NO: 1122102 - RNA, 19 nt, Homo sapiens
  misc_RNA (1)...(19): siRNA sense strand
gaggcugugugagaauuug

SEQ ID NO: 1122103 - RNA, 19 nt, Homo sapiens
  misc_RNA (1)...(19): siRNA sense strand
aaagucagcagcaaucugu

SEQ ID NO: 1122104 - RNA, 19 nt, Homo sapiens
  misc_RNA (1)...(19): siRNA sense strand
gcccugaggaucccuuuga

SEQ ID NO: 1122105 - RNA, 19 nt, Homo sapiens
  misc_RNA (1)...(19): siRNA sense strand
cagcaugaagcucaacuga

SEQ ID NO: 1122106 - RNA, 19 nt, Homo sapiens
  misc_RNA (1)...(19): siRNA sense strand
agaaacccucuaaaucuuu

SEQ ID NO: 1122107 - RNA, 19 nt, Homo sapiens
  misc_RNA (1)...(19): siRNA sense strand
uuucagaggagcagaauau

SEQ ID NO: 1122108 - RNA, 19 nt, Homo sapiens
  misc_RNA (1)...(19): siRNA sense strand
gcacagcagaaauuaaugc

SEQ ID NO: 1122109 - RNA, 19 nt, Homo sapiens
  misc_RNA (1)...(19): siRNA sense strand
ccaugaaaaucucuuagaa

SEQ ID NO: 1122110 - RNA, 19 nt, Homo sapiens
  misc_RNA (1)...(19): siRNA sense strand
agaauaagagaagcaguaa

SEQ ID NO: 1122111 - RNA, 19 nt, Homo sapiens
  misc_RNA (1)...(19): siRNA sense strand
gcacucaaggcaggagaaa

SEQ ID NO: 1122112 - RNA, 19 nt, Homo sapiens
  misc_RNA (1)...(19): siRNA sense strand
ucuacuggcugaggaagaa

SEQ ID NO: 1122113 - RNA, 19 nt, Homo sapiens
  misc_RNA (1)...(19): siRNA sense strand
ccuaucaagcuuuagaauu

SEQ ID NO: 1122114 - RNA, 19 nt, Homo sapiens
  misc_RNA (1)...(19): siRNA sense strand
ucaggaccaucagaccuuu

SEQ ID NO: 1122115 - RNA, 19 nt, Homo sapiens
  misc_RNA (1)...(19): siRNA sense strand
auauaagccuuccaaaguc

SEQ ID NO: 1122116 - RNA, 19 nt, Homo sapiens
  misc_RNA (1)...(19): siRNA sense strand
gggugauagugaagcaauu

SEQ ID NO: 1122117 - RNA, 19 nt, Homo sapiens
  misc_RNA (1)...(19): siRNA sense strand
uaagcacagcagaaauuaa

SEQ ID NO: 1122118 - RNA, 19 nt, Homo sapiens
  misc_RNA (1)...(19): siRNA sense strand
gaggagagauaccaaugua

SEQ ID NO: 1122119 - RNA, 19 nt, Homo sapiens
  misc_RNA (1)...(19): siRNA sense strand
ucauagagcuguggaauuu

SEQ ID NO: 1122120 - RNA, 19 nt, Homo sapiens
  misc_RNA (1)...(19): siRNA sense strand
gagaaacccucuaaaucuu

SEQ ID NO: 1122121 - RNA, 19 nt, Homo sapiens
  misc_RNA (1)...(19): siRNA sense strand
gauauaagccuuccaaagu

SEQ ID NO: 1122122 - RNA, 19 nt, Homo sapiens
  misc_RNA (1)...(19): siRNA sense strand
gacaaggacuguuucagaa

SEQ ID NO: 1122123 - RNA, 19 nt, Homo sapiens
  misc_RNA (1)...(19): siRNA sense strand
ccaauguacugguauauau

SEQ ID NO: 1122124 - RNA, 19 nt, Homo sapiens
  misc_RNA (1)...(19): siRNA sense strand
gaaaccagcagacagaauu

SEQ ID NO: 1122125 - RNA, 19 nt, Homo sapiens
  misc_RNA (1)...(19): siRNA sense strand
gcugaaagguuauuuaaac

SEQ ID NO: 1122126 - RNA, 19 nt, Homo sapiens
  misc_RNA (1)...(19): siRNA sense strand
gaagaagcaacaacuauug

SEQ ID NO: 1122127 - RNA, 19 nt, Homo sapiens
  misc_RNA (1)...(19): siRNA sense strand
ggagaaacccucuaaaucu

SEQ ID NO: 1122128 - RNA, 19 nt, Homo sapiens
  misc_RNA (1)...(19): siRNA sense strand
ggaagaagcaacaacuauu

SEQ ID NO: 1122129 - RNA, 19 nt, Homo sapiens
  misc_RNA (1)...(19): siRNA sense strand
gaaacagccuccagaagag

SEQ ID NO: 1122130 - RNA, 19 nt, Homo sapiens
  misc_RNA (1)...(19): siRNA sense strand
ggaauuuaauccucauguu

SEQ ID NO: 1122131 - RNA, 19 nt, Homo sapiens
  misc_RNA (1)...(19): siRNA sense strand
ugagagauuugaugaaaga

SEQ ID NO: 1122132 - RNA, 19 nt, Homo sapiens
  misc_RNA (1)...(19): siRNA sense strand
gaauagaaggugcucuuaa

SEQ ID NO: 1122133 - RNA, 19 nt, Homo sapiens
  misc_RNA (1)...(19): siRNA sense strand
gaacagagagcagcauuuc

SEQ ID NO: 1122134 - RNA, 19 nt, Homo sapiens
  misc_RNA (1)...(19): siRNA sense strand
uguagaugcugaaagguua

SEQ ID NO: 1122135 - RNA, 19 nt, Homo sapiens
  misc_RNA (1)...(19): siRNA sense strand
gaauauaggagauacacuu

SEQ ID NO: 1122136 - RNA, 19 nt, Homo sapiens
  misc_RNA (1)...(19): siRNA sense strand
acacuugggugacugguaa

SEQ ID NO: 1122137 - RNA, 19 nt, Homo sapiens
  misc_RNA (1)...(19): siRNA sense strand
gcaggagaaacaauuuaua

SEQ ID NO: 1122138 - RNA, 19 nt, Homo sapiens
  misc_RNA (1)...(19): siRNA sense strand
aauagaaggugcucuuaau

SEQ ID NO: 1122139 - RNA, 19 nt, Homo sapiens
  misc_RNA (1)...(19): siRNA sense strand
auagagcuguggaauuuaa

SEQ ID NO: 1122140 - RNA, 19 nt, Homo sapiens
  misc_RNA (1)...(19): siRNA sense strand
gcaagaaaauuaggaagaa

SEQ ID NO: 1122141 - RNA, 19 nt, Homo sapiens
  misc_RNA (1)...(19): siRNA sense strand
gcacuggaaacgaauagaa

SEQ ID NO: 1122142 - RNA, 19 nt, Homo sapiens
  misc_RNA (1)...(19): siRNA sense strand
agaaacagccuccagaaga

SEQ ID NO: 1122143 - RNA, 19 nt, Homo sapiens
  misc_RNA (1)...(19): siRNA sense strand
gaauuuaauccucauguuc

SEQ ID NO: 1122144 - RNA, 19 nt, Homo sapiens
  misc_RNA (1)...(19): siRNA sense strand
gaauguaagguauggagaa

SEQ ID NO: 1122145 - RNA, 19 nt, Homo sapiens
  misc_RNA (1)...(19): siRNA sense strand
ggauuaagcacagcagaaa

SEQ ID NO: 1122146 - RNA, 19 nt, Homo sapiens
  misc_RNA (1)...(19): siRNA sense strand
gcaccaaaguccucagcau

SEQ ID NO: 1122147 - RNA, 19 nt, Homo sapiens
  misc_RNA (1)...(19): siRNA sense strand
gagcagaauauaggagaua

SEQ ID NO: 1122148 - RNA, 19 nt, Homo sapiens
  misc_RNA (1)...(19): siRNA sense strand
ucauugauaucaggacuaa

SEQ ID NO: 1122149 - RNA, 19 nt, Homo sapiens
  misc_RNA (1)...(19): siRNA sense strand
aagagccacuuacauacua

SEQ ID NO: 1122150 - RNA, 19 nt, Homo sapiens
  misc_RNA (1)...(19): siRNA sense strand
ccaaaguccucagcaugaa

SEQ ID NO: 1122151 - RNA, 19 nt, Homo sapiens
  misc_RNA (1)...(19): siRNA sense strand
gcaauugccuaugcuuucu

SEQ ID NO: 1122152 - RNA, 19 nt, Homo sapiens
  misc_RNA (1)...(19): siRNA sense strand
cagaauuugucagaaugua

SEQ ID NO: 1122153 - RNA, 19 nt, Homo sapiens
  misc_RNA (1)...(19): siRNA sense strand
cuucagcacuggaaacgaa

SEQ ID NO: 1122154 - RNA, 19 nt, Homo sapiens
  misc_RNA (1)...(19): siRNA sense strand
gcagcacuguugaagacaa

SEQ ID NO: 1122155 - RNA, 19 nt, Homo sapiens
  misc_RNA (1)...(19): siRNA sense strand
uuacaggccuauccagaug

SEQ ID NO: 1122156 - RNA, 19 nt, Homo sapiens
  misc_RNA (1)...(19): siRNA sense strand
gaugcugaaagguuauuua

SEQ ID NO: 1122157 - RNA, 19 nt, Homo sapiens
  misc_RNA (1)...(19): siRNA sense strand
gaggaagaagcaacaacua

SEQ ID NO: 1122158 - RNA, 19 nt, Homo sapiens
  misc_RNA (1)...(19): siRNA sense strand
ggaacagagagcagcauuu

SEQ ID NO: 1122159 - RNA, 19 nt, Homo sapiens
  misc_RNA (1)...(19): siRNA sense strand
agaaauuaaugccguggaa

SEQ ID NO: 1122160 - RNA, 19 nt, Homo sapiens
  misc_RNA (1)...(19): siRNA sense strand
caaggcaggagaaacaauu

SEQ ID NO: 1122161 - RNA, 19 nt, Homo sapiens
  misc_RNA (1)...(19): siRNA sense strand
caaagcagccuaucaagcu

SEQ ID NO: 1122162 - RNA, 19 nt, Homo sapiens
  misc_RNA (1)...(19): siRNA sense strand
gagcagcauuucagaacca

SEQ ID NO: 1122163 - RNA, 19 nt, Homo sapiens
  misc_RNA (1)...(19): siRNA sense strand
cauucucacucaccaguuu

SEQ ID NO: 1122164 - RNA, 19 nt, Homo sapiens
  misc_RNA (1)...(19): siRNA sense strand
agacaaggacuguuucaga

SEQ ID NO: 1122165 - RNA, 19 nt, Homo sapiens
  misc_RNA (1)...(19): siRNA sense strand
cagcagcacuguugaagac

SEQ ID NO: 1122166 - RNA, 19 nt, Homo sapiens
  misc_RNA (1)...(19): siRNA sense strand
gaaacccucuaaaucuuuu

SEQ ID NO: 1122167 - RNA, 19 nt, Homo sapiens
  misc_RNA (1)...(19): siRNA sense strand
gagcgucuccugcaucugu

SEQ ID NO: 1122168 - RNA, 19 nt, Homo sapiens
  misc_RNA (1)...(19): siRNA sense strand
cagaaggcuuggagggaaa

SEQ ID NO: 1122169 - RNA, 19 nt, Homo sapiens
  misc_RNA (1)...(19): siRNA sense strand
gaaggugcucuuaaucugu

SEQ ID NO: 1122170 - RNA, 19 nt, Homo sapiens
  misc_RNA (1)...(19): siRNA sense strand
gaagacaaggacuguuuca

SEQ ID NO: 1122171 - RNA, 19 nt, Homo sapiens
  misc_RNA (1)...(19): siRNA sense strand
uauaagccuuccaaaguca

SEQ ID NO: 1122172 - RNA, 19 nt, Homo sapiens
  misc_RNA (1)...(19): siRNA sense strand
gaugauauaagccuuccaa

SEQ ID NO: 1122173 - RNA, 19 nt, Homo sapiens
  misc_RNA (1)...(19): siRNA sense strand
aagaauaagagaagcagua

SEQ ID NO: 1122174 - RNA, 19 nt, Homo sapiens
  misc_RNA (1)...(19): siRNA sense strand
aaucaaagcagccuaucaa

SEQ ID NO: 1122175 - RNA, 19 nt, Homo sapiens
  misc_RNA (1)...(19): siRNA sense strand
cgaauagaaggugcucuua

SEQ ID NO: 1122176 - RNA, 19 nt, Homo sapiens
  misc_RNA (1)...(19): siRNA sense strand
gaaacggggugauagugaa

SEQ ID NO: 1122177 - RNA, 19 nt, Homo sapiens
  misc_RNA (1)...(19): siRNA sense strand
gaacauccaugaaaaucuc

SEQ ID NO: 1122178 - RNA, 19 nt, Homo sapiens
  misc_RNA (1)...(19): siRNA sense strand
gaaauccuccagcucgaau

SEQ ID NO: 1122179 - RNA, 19 nt, Homo sapiens
  misc_RNA (1)...(19): siRNA sense strand
ugauagccauucucacuca

SEQ ID NO: 1122180 - RNA, 19 nt, Homo sapiens
  misc_RNA (1)...(19): siRNA sense strand
guauggagaaacccucuaa

SEQ ID NO: 1122181 - RNA, 19 nt, Homo sapiens
  misc_RNA (1)...(19): siRNA sense strand
agaaggugcucuuaaucug

SEQ ID NO: 1122182 - RNA, 19 nt, Homo sapiens
  misc_RNA (1)...(19): siRNA sense strand
gugaagcaauugccuaugc

SEQ ID NO: 1122183 - RNA, 19 nt, Homo sapiens
  misc_RNA (1)...(19): siRNA sense strand
gaauaagagaagcaguaaa

SEQ ID NO: 1122184 - RNA, 19 nt, Homo sapiens
  misc_RNA (1)...(19): siRNA sense strand
gaaucaaagcagccuauca

SEQ ID NO: 1122185 - RNA, 19 nt, Homo sapiens
  misc_RNA (1)...(19): siRNA sense strand
cagacacaguuaugcagaa

SEQ ID NO: 1122186 - RNA, 19 nt, Homo sapiens
  misc_RNA (1)...(19): siRNA sense strand
gagauacacuugggugacu

SEQ ID NO: 1122187 - RNA, 19 nt, Homo sapiens
  misc_RNA (1)...(19): siRNA sense strand
ggagagauaccaauguacu

SEQ ID NO: 1122188 - RNA, 19 nt, Homo sapiens
  misc_RNA (1)...(19): siRNA sense strand
caggagaaacaauuuauag

SEQ ID NO: 1122189 - RNA, 19 nt, Homo sapiens
  misc_RNA (1)...(19): siRNA sense strand
ggugguacuuccauaagca

SEQ ID NO: 1122190 - RNA, 19 nt, Homo sapiens
  misc_RNA (1)...(19): siRNA sense strand
ccagaaacagccuccagaa

SEQ ID NO: 1122191 - RNA, 19 nt, Homo sapiens
  misc_RNA (1)...(19): siRNA sense strand
ccauuucacagcaggauuu

SEQ ID NO: 1122192 - RNA, 19 nt, Homo sapiens
  misc_RNA (1)...(19): siRNA sense strand
aagcacagcagaaauuaau

SEQ ID NO: 1122193 - RNA, 19 nt, Homo sapiens
  misc_RNA (1)...(19): siRNA sense strand
gaauuugucagaauguaag

SEQ ID NO: 1122194 - RNA, 19 nt, Homo sapiens
  misc_RNA (1)...(19): siRNA sense strand
uuaagcacagcagaaauua

SEQ ID NO: 1122195 - RNA, 19 nt, Homo sapiens
  misc_RNA (1)...(19): siRNA sense strand
uauuguagaugcugaaagg

SEQ ID NO: 1122196 - RNA, 19 nt, Homo sapiens
  misc_RNA (1)...(19): siRNA sense strand
uaaagagccacuuacauac

SEQ ID NO: 1122197 - RNA, 19 nt, Homo sapiens
  misc_RNA (1)...(19): siRNA sense strand
ggagcagaauauaggagau

SEQ ID NO: 1122198 - RNA, 19 nt, Homo sapiens
  misc_RNA (1)...(19): siRNA sense strand
aauguaagguauggagaaa

SEQ ID NO: 1122199 - RNA, 19 nt, Homo sapiens
  misc_RNA (1)...(19): siRNA sense strand
gagagcagcauuucagaac

SEQ ID NO: 1122200 - RNA, 19 nt, Homo sapiens
  misc_RNA (1)...(19): siRNA sense strand
uggagaaacccucuaaauc

SEQ ID NO: 1122201 - RNA, 19 nt, Homo sapiens
  misc_RNA (1)...(19): siRNA sense strand
aaggugcucuuaaucuguu

SEQ ID NO: 1122202 - RNA, 19 nt, Homo sapiens
  misc_RNA (1)...(19): siRNA sense strand
gaggcugugugagaauuug

SEQ ID NO: 1122203 - RNA, 19 nt, Homo sapiens
  misc_RNA (1)...(19): siRNA sense strand
aaagucagcagcaaucugu

SEQ ID NO: 1122204 - RNA, 19 nt, Homo sapiens
  misc_RNA (1)...(19): siRNA sense strand
gcccugaggaucccuuuga

SEQ ID NO: 1122205 - RNA, 19 nt, Homo sapiens
  misc_RNA (1)...(19): siRNA sense strand
cagcaugaagcucaacuga

SEQ ID NO: 1122206 - RNA, 19 nt, Homo sapiens
  misc_RNA (1)...(19): siRNA sense strand
agaaacccucuaaaucuuu

SEQ ID NO: 1122207 - RNA, 19 nt, Homo sapiens
  misc_RNA (1)...(19): siRNA sense strand
uuucagaggagcagaauau

SEQ ID NO: 1122208 - RNA, 19 nt, Homo sapiens
  misc_RNA (1)...(19): siRNA sense strand
gcacagcagaaauuaaugc

SEQ ID NO: 1122209 - RNA, 19 nt, Homo sapiens
  misc_RNA (1)...(19): siRNA sense strand
ccaugaaaaucucuuagaa

SEQ ID NO: 1122210 - RNA, 19 nt, Homo sapiens
  misc_RNA (1)...(19): siRNA sense strand
agaauaagagaagcaguaa

SEQ ID NO: 1122211 - RNA, 19 nt, Homo sapiens
  misc_RNA (1)...(19): siRNA sense strand
gcacucaaggcaggagaaa

SEQ ID NO: 1122212 - RNA, 19 nt, Homo sapiens
  misc_RNA (1)...(19): siRNA sense strand
ucuacuggcugaggaagaa

SEQ ID NO: 1122213 - RNA, 19 nt, Homo sapiens
  misc_RNA (1)...(19): siRNA sense strand
ccuaucaagcuuuagaauu

SEQ ID NO: 1122214 - RNA, 19 nt, Homo sapiens
  misc_RNA (1)...(19): siRNA sense strand
ucaggaccaucagaccuuu

SEQ ID NO: 1122215 - RNA, 19 nt, Homo sapiens
  misc_RNA (1)...(19): siRNA sense strand
auauaagccuuccaaaguc

SEQ ID NO: 1122216 - RNA, 19 nt, Homo sapiens
  misc_RNA (1)...(19): siRNA sense strand
gggugauagugaagcaauu

SEQ ID NO: 1122217 - RNA, 19 nt, Homo sapiens
  misc_RNA (1)...(19): siRNA sense strand
uaagcacagcagaaauuaa

SEQ ID NO: 1122218 - RNA, 19 nt, Homo sapiens
  misc_RNA (1)...(19): siRNA sense strand
gaggagagauaccaaugua

SEQ ID NO: 1122219 - RNA, 19 nt, Homo sapiens
  misc_RNA (1)...(19): siRNA sense strand
ucauagagcuguggaauuu

SEQ ID NO: 1122220 - RNA, 19 nt, Homo sapiens
  misc_RNA (1)...(19): siRNA sense strand
gagaaacccucuaaaucuu

SEQ ID NO: 1122221 - RNA, 19 nt, Homo sapiens
  misc_RNA (1)...(19): siRNA sense strand
gauauaagccuuccaaagu

SEQ ID NO: 1122222 - RNA, 19 nt, Homo sapiens
  misc_RNA (1)...(19): siRNA sense strand
gacaaggacuguuucagaa

SEQ ID NO: 1122223 - RNA, 19 nt, Homo sapiens
  misc_RNA (1)...(19): siRNA sense strand
ccaauguacugguauauau

SEQ ID NO: 1122224 - RNA, 19 nt, Homo sapiens
  misc_RNA (1)...(19): siRNA sense strand
gaaaccagcagacagaauu

SEQ ID NO: 1122225 - RNA, 19 nt, Homo sapiens
  misc_RNA (1)...(19): siRNA sense strand
gcugaaagguuauuuaaac

SEQ ID NO: 1122226 - RNA, 19 nt, Homo sapiens
  misc_RNA (1)...(19): siRNA sense strand
gaagaagcaacaacuauug

SEQ ID NO: 1122227 - RNA, 19 nt, Homo sapiens
  misc_RNA (1)...(19): siRNA sense strand
ggagaaacccucuaaaucu

SEQ ID NO: 1122228 - RNA, 19 nt, Homo sapiens
  misc_RNA (1)...(19): siRNA sense strand
ggaagaagcaacaacuauu

SEQ ID NO: 1122229 - RNA, 19 nt, Homo sapiens
  misc_RNA (1)...(19): siRNA sense strand
gaaacagccuccagaagag

SEQ ID NO: 1122230 - RNA, 19 nt, Homo sapiens
  misc_RNA (1)...(19): siRNA sense strand
ggaauuuaauccucauguu

SEQ ID NO: 1122231 - RNA, 19 nt, Homo sapiens
  misc_RNA (1)...(19): siRNA sense strand
ugagagauuugaugaaaga

SEQ ID NO: 1122232 - RNA, 19 nt, Homo sapiens
  misc_RNA (1)...(19): siRNA sense strand
gaauagaaggugcucuuaa

SEQ ID NO: 1122233 - RNA, 19 nt, Homo sapiens
  misc_RNA (1)...(19): siRNA sense strand
gaacagagagcagcauuuc

SEQ ID NO: 1122234 - RNA, 19 nt, Homo sapiens
  misc_RNA (1)...(19): siRNA sense strand
uguagaugcugaaagguua

SEQ ID NO: 1122235 - RNA, 19 nt, Homo sapiens
  misc_RNA (1)...(19): siRNA sense strand
gaauauaggagauacacuu

SEQ ID NO: 1122236 - RNA, 19 nt, Homo sapiens
  misc_RNA (1)...(19): siRNA sense strand
acacuugggugacugguaa

SEQ ID NO: 1122237 - RNA, 19 nt, Homo sapiens
  misc_RNA (1)...(19): siRNA sense strand
gcaggagaaacaauuuaua

SEQ ID NO: 1122238 - RNA, 19 nt, Homo sapiens
  misc_RNA (1)...(19): siRNA sense strand
aauagaaggugcucuuaau

SEQ ID NO: 1122239 - RNA, 19 nt, Homo sapiens
  misc_RNA (1)...(19): siRNA sense strand
auagagcuguggaauuuaa

SEQ ID NO: 1122240 - RNA, 19 nt, Homo sapiens
  misc_RNA (1)...(19): siRNA sense strand
gcaagaaaauuaggaagaa

SEQ ID NO: 1122241 - RNA, 19 nt, Homo sapiens
  misc_RNA (1)...(19): siRNA sense strand
gcacuggaaacgaauagaa

SEQ ID NO: 1122242 - RNA, 19 nt, Homo sapiens
  misc_RNA (1)...(19): siRNA sense strand
agaaacagccuccagaaga

SEQ ID NO: 1122243 - RNA, 19 nt, Homo sapiens
  misc_RNA (1)...(19): siRNA sense strand
gaauuuaauccucauguuc

SEQ ID NO: 1122244 - RNA, 19 nt, Homo sapiens
  misc_RNA (1)...(19): siRNA sense strand
gaauguaagguauggagaa

SEQ ID NO: 1122245 - RNA, 19 nt, Homo sapiens
  misc_RNA (1)...(19): siRNA sense strand
ggauuaagcacagcagaaa

SEQ ID NO: 1122246 - RNA, 19 nt, Homo sapiens
  misc_RNA (1)...(19): siRNA sense strand
gcaccaaaguccucagcau

SEQ ID NO: 1122247 - RNA, 19 nt, Homo sapiens
  misc_RNA (1)...(19): siRNA sense strand
gagcagaauauaggagaua

SEQ ID NO: 1122248 - RNA, 19 nt, Homo sapiens
  misc_RNA (1)...(19): siRNA sense strand
ucauugauaucaggacuaa

SEQ ID NO: 1122249 - RNA, 19 nt, Homo sapiens
  misc_RNA (1)...(19): siRNA sense strand
aagagccacuuacauacua

SEQ ID NO: 1122250 - RNA, 19 nt, Homo sapiens
  misc_RNA (1)...(19): siRNA sense strand
ccaaaguccucagcaugaa

SEQ ID NO: 1122251 - RNA, 19 nt, Homo sapiens
  misc_RNA (1)...(19): siRNA sense strand
gcaauugccuaugcuuucu

SEQ ID NO: 1122252 - RNA, 19 nt, Homo sapiens
  misc_RNA (1)...(19): siRNA sense strand
cagaauuugucagaaugua

SEQ ID NO: 1122253 - RNA, 19 nt, Homo sapiens
  misc_RNA (1)...(19): siRNA sense strand
cuucagcacuggaaacgaa

SEQ ID NO: 1122254 - RNA, 19 nt, Homo sapiens
  misc_RNA (1)...(19): siRNA sense strand
gcagcacuguugaagacaa

SEQ ID NO: 1122255 - RNA, 19 nt, Homo sapiens
  misc_RNA (1)...(19): siRNA sense strand
uuacaggccuauccagaug

SEQ ID NO: 1122256 - RNA, 19 nt, Homo sapiens
  misc_RNA (1)...(19): siRNA sense strand
gaugcugaaagguuauuua

SEQ ID NO: 1122257 - RNA, 19 nt, Homo sapiens
  misc_RNA (1)...(19): siRNA sense strand
gaggaagaagcaacaacua

SEQ ID NO: 1122258 - RNA, 19 nt, Homo sapiens
  misc_RNA (1)...(19): siRNA sense strand
ggaacagagagcagcauuu

SEQ ID NO: 1122259 - RNA, 19 nt, Homo sapiens
  misc_RNA (1)...(19): siRNA sense strand
agaaauuaaugccguggaa

SEQ ID NO: 1122260 - RNA, 19 nt, Homo sapiens
  misc_RNA (1)...(19): siRNA sense strand
caaggcaggagaaacaauu

SEQ ID NO: 1122261 - RNA, 19 nt, Homo sapiens
  misc_RNA (1)...(19): siRNA sense strand
caaagcagccuaucaagcu

SEQ ID NO: 1122262 - RNA, 19 nt, Homo sapiens
  misc_RNA (1)...(19): siRNA sense strand
gagcagcauuucagaacca

SEQ ID NO: 1122263 - RNA, 19 nt, Homo sapiens
  misc_RNA (1)...(19): siRNA sense strand
cauucucacucaccaguuu

SEQ ID NO: 1122264 - RNA, 19 nt, Homo sapiens
  misc_RNA (1)...(19): siRNA sense strand
agacaaggacuguuucaga

SEQ ID NO: 1122265 - RNA, 19 nt, Homo sapiens
  misc_RNA (1)...(19): siRNA sense strand
cagcagcacuguugaagac

SEQ ID NO: 1122266 - RNA, 19 nt, Homo sapiens
  misc_RNA (1)...(19): siRNA sense strand
gaaacccucuaaaucuuuu

SEQ ID NO: 1122267 - RNA, 19 nt, Homo sapiens
  misc_RNA (1)...(19): siRNA sense strand
gagcgucuccugcaucugu

SEQ ID NO: 1122268 - RNA, 19 nt, Homo sapiens
  misc_RNA (1)...(19): siRNA sense strand
cagaaggcuuggagggaaa

SEQ ID NO: 1122269 - RNA, 19 nt, Homo sapiens
  misc_RNA (1)...(19): siRNA sense strand
gaaggugcucuuaaucugu

SEQ ID NO: 1122270 - RNA, 19 nt, Homo sapiens
  misc_RNA (1)...(19): siRNA sense strand
gaagacaaggacuguuuca

SEQ ID NO: 1122271 - RNA, 19 nt, Homo sapiens
  misc_RNA (1)...(19): siRNA sense strand
uauaagccuuccaaaguca

SEQ ID NO: 1122272 - RNA, 19 nt, Homo sapiens
  misc_RNA (1)...(19): siRNA sense strand
gaugauauaagccuuccaa

SEQ ID NO: 1122273 - RNA, 19 nt, Homo sapiens
  misc_RNA (1)...(19): siRNA sense strand
aagaauaagagaagcagua

SEQ ID NO: 1122274 - RNA, 19 nt, Homo sapiens
  misc_RNA (1)...(19): siRNA sense strand
aaucaaagcagccuaucaa

SEQ ID NO: 1122275 - RNA, 19 nt, Homo sapiens
  misc_RNA (1)...(19): siRNA sense strand
cgaauagaaggugcucuua

SEQ ID NO: 1122276 - RNA, 19 nt, Homo sapiens
  misc_RNA (1)...(19): siRNA sense strand
gaaacggggugauagugaa

SEQ ID NO: 1122277 - RNA, 19 nt, Homo sapiens
  misc_RNA (1)...(19): siRNA sense strand
gaacauccaugaaaaucuc

SEQ ID NO: 1122278 - RNA, 19 nt, Homo sapiens
  misc_RNA (1)...(19): siRNA sense strand
gaaauccuccagcucgaau

SEQ ID NO: 1122279 - RNA, 19 nt, Homo sapiens
  misc_RNA (1)...(19): siRNA sense strand
ugauagccauucucacuca

SEQ ID NO: 1122280 - RNA, 19 nt, Homo sapiens
  misc_RNA (1)...(19): siRNA sense strand
guauggagaaacccucuaa

SEQ ID NO: 1122281 - RNA, 19 nt, Homo sapiens
  misc_RNA (1)...(19): siRNA sense strand
agaaggugcucuuaaucug

SEQ ID NO: 1122282 - RNA, 19 nt, Homo sapiens
  misc_RNA (1)...(19): siRNA sense strand
gugaagcaauugccuaugc

SEQ ID NO: 1122283 - RNA, 19 nt, Homo sapiens
  misc_RNA (1)...(19): siRNA sense strand
gaauaagagaagcaguaaa

SEQ ID NO: 1122284 - RNA, 19 nt, Homo sapiens
  misc_RNA (1)...(19): siRNA sense strand
gaaucaaagcagccuauca

SEQ ID NO: 1122285 - RNA, 19 nt, Homo sapiens
  misc_RNA (1)...(19): siRNA sense strand
cagacacaguuaugcagaa

SEQ ID NO: 1122286 - RNA, 19 nt, Homo sapiens
  misc_RNA (1)...(19): siRNA sense strand
gagauacacuugggugacu

SEQ ID NO: 1122287 - RNA, 19 nt, Homo sapiens
  misc_RNA (1)...(19): siRNA sense strand
ggagagauaccaauguacu

SEQ ID NO: 1122288 - RNA, 19 nt, Homo sapiens
  misc_RNA (1)...(19): siRNA sense strand
caggagaaacaauuuauag

SEQ ID NO: 1122289 - RNA, 19 nt, Homo sapiens
  misc_RNA (1)...(19): siRNA sense strand
ggugguacuuccauaagca

SEQ ID NO: 1122290 - RNA, 19 nt, Homo sapiens
  misc_RNA (1)...(19): siRNA sense strand
ccagaaacagccuccagaa

SEQ ID NO: 1122291 - RNA, 19 nt, Homo sapiens
  misc_RNA (1)...(19): siRNA sense strand
ccauuucacagcaggauuu

SEQ ID NO: 1122292 - RNA, 19 nt, Homo sapiens
  misc_RNA (1)...(19): siRNA sense strand
aagcacagcagaaauuaau

SEQ ID NO: 1122293 - RNA, 19 nt, Homo sapiens
  misc_RNA (1)...(19): siRNA sense strand
gaauuugucagaauguaag

SEQ ID NO: 1122294 - RNA, 19 nt, Homo sapiens
  misc_RNA (1)...(19): siRNA sense strand
uuaagcacagcagaaauua

SEQ ID NO: 1122295 - RNA, 19 nt, Homo sapiens
  misc_RNA (1)...(19): siRNA sense strand
uauuguagaugcugaaagg

SEQ ID NO: 1122296 - RNA, 19 nt, Homo sapiens
  misc_RNA (1)...(19): siRNA sense strand
uaaagagccacuuacauac

SEQ ID NO: 1122297 - RNA, 19 nt, Homo sapiens
  misc_RNA (1)...(19): siRNA sense strand
ggagcagaauauaggagau

SEQ ID NO: 1122298 - RNA, 19 nt, Homo sapiens
  misc_RNA (1)...(19): siRNA sense strand
aauguaagguauggagaaa

SEQ ID NO: 1122299 - RNA, 19 nt, Homo sapiens
  misc_RNA (1)...(19): siRNA sense strand
gagagcagcauuucagaac

SEQ ID NO: 1122300 - RNA, 19 nt, Homo sapiens
  misc_RNA (1)...(19): siRNA sense strand
uggagaaacccucuaaauc

SEQ ID NO: 1122301 - RNA, 19 nt, Homo sapiens
  misc_RNA (1)...(19): siRNA sense strand
aaggugcucuuaaucuguu

SEQ ID NO: 1122302 - RNA, 19 nt, Homo sapiens
  misc_RNA (1)...(19): siRNA sense strand
gaggcugugugagaauuug

SEQ ID NO: 1122303 - RNA, 19 nt, Homo sapiens
  misc_RNA (1)...(19): siRNA sense strand
aaagucagcagcaaucugu

SEQ ID NO: 1122304 - RNA, 19 nt, Homo sapiens
  misc_RNA (1)...(19): siRNA sense strand
gcccugaggaucccuuuga

SEQ ID NO: 1122305 - RNA, 19 nt, Homo sapiens
  misc_RNA (1)...(19): siRNA sense strand
cagcaugaagcucaacuga

SEQ ID NO: 1122306 - RNA, 19 nt, Homo sapiens
  misc_RNA (1)...(19): siRNA sense strand
agaaacccucuaaaucuuu

SEQ ID NO: 1122307 - RNA, 19 nt, Homo sapiens
  misc_RNA (1)...(19): siRNA sense strand
uuucagaggagcagaauau

SEQ ID NO: 1122308 - RNA, 19 nt, Homo sapiens
  misc_RNA (1)...(19): siRNA sense strand
gcacagcagaaauuaaugc

SEQ ID NO: 1122309 - RNA, 19 nt, Homo sapiens
  misc_RNA (1)...(19): siRNA sense strand
ccaugaaaaucucuuagaa

SEQ ID NO: 1122310 - RNA, 19 nt, Homo sapiens
  misc_RNA (1)...(19): siRNA sense strand
agaauaagagaagcaguaa

SEQ ID NO: 1122311 - RNA, 19 nt, Homo sapiens
  misc_RNA (1)...(19): siRNA sense strand
gcacucaaggcaggagaaa

SEQ ID NO: 1122312 - RNA, 19 nt, Homo sapiens
  misc_RNA (1)...(19): siRNA sense strand
ucuacuggcugaggaagaa

SEQ ID NO: 1122313 - RNA, 19 nt, Homo sapiens
  misc_RNA (1)...(19): siRNA sense strand
ccuaucaagcuuuagaauu

SEQ ID NO: 1122314 - RNA, 19 nt, Homo sapiens
  misc_RNA (1)...(19): siRNA sense strand
ucaggaccaucagaccuuu

SEQ ID NO: 1122315 - RNA, 19 nt, Homo sapiens
  misc_RNA (1)...(19): siRNA sense strand
auauaagccuuccaaaguc

SEQ ID NO: 1122316 - RNA, 19 nt, Homo sapiens
  misc_RNA (1)...(19): siRNA sense strand
gggugauagugaagcaauu

SEQ ID NO: 1122317 - RNA, 19 nt, Homo sapiens
  misc_RNA (1)...(19): siRNA sense strand
uaagcacagcagaaauuaa

SEQ ID NO: 1122318 - RNA, 19 nt, Homo sapiens
  misc_RNA (1)...(19): siRNA sense strand
gaggagagauaccaaugua

SEQ ID NO: 1122319 - RNA, 19 nt, Homo sapiens
  misc_RNA (1)...(19): siRNA sense strand
ucauagagcuguggaauuu

SEQ ID NO: 1122320 - RNA, 19 nt, Homo sapiens
  misc_RNA (1)...(19): siRNA sense strand
gagaaacccucuaaaucuu

SEQ ID NO: 1122321 - RNA, 19 nt, Homo sapiens
  misc_RNA (1)...(19): siRNA sense strand
gauauaagccuuccaaagu

SEQ ID NO: 1122322 - RNA, 19 nt, Homo sapiens
  misc_RNA (1)...(19): siRNA sense strand
gacaaggacuguuucagaa

SEQ ID NO: 1122323 - RNA, 19 nt, Homo sapiens
  misc_RNA (1)...(19): siRNA sense strand
ccaauguacugguauauau

SEQ ID NO: 1122324 - RNA, 19 nt, Homo sapiens
  misc_RNA (1)...(19): siRNA sense strand
gaaaccagcagacagaauu

SEQ ID NO: 1122325 - RNA, 19 nt, Homo sapiens
  misc_RNA (1)...(19): siRNA sense strand
gcugaaagguuauuuaaac

SEQ ID NO: 1122326 - RNA, 19 nt, Homo sapiens
  misc_RNA (1)...(19): siRNA sense strand
gaagaagcaacaacuauug

SEQ ID NO: 1122327 - RNA, 19 nt, Homo sapiens
  misc_RNA (1)...(19): siRNA sense strand
ggagaaacccucuaaaucu

SEQ ID NO: 1122328 - RNA, 19 nt, Homo sapiens
  misc_RNA (1)...(19): siRNA sense strand
ggaagaagcaacaacuauu

SEQ ID NO: 1122329 - RNA, 19 nt, Homo sapiens
  misc_RNA (1)...(19): siRNA sense strand
gaaacagccuccagaagag

SEQ ID NO: 1122330 - RNA, 19 nt, Homo sapiens
  misc_RNA (1)...(19): siRNA sense strand
ggaauuuaauccucauguu

SEQ ID NO: 1122331 - RNA, 19 nt, Homo sapiens
  misc_RNA (1)...(19): siRNA sense strand
ugagagauuugaugaaaga

SEQ ID NO: 1122332 - RNA, 19 nt, Homo sapiens
  misc_RNA (1)...(19): siRNA sense strand
gaauagaaggugcucuuaa

SEQ ID NO: 1122333 - RNA, 19 nt, Homo sapiens
  misc_RNA (1)...(19): siRNA sense strand
gaacagagagcagcauuuc

SEQ ID NO: 1122334 - RNA, 19 nt, Homo sapiens
  misc_RNA (1)...(19): siRNA sense strand
uguagaugcugaaagguua

SEQ ID NO: 1122335 - RNA, 19 nt, Homo sapiens
  misc_RNA (1)...(19): siRNA sense strand
gaauauaggagauacacuu

SEQ ID NO: 1122336 - RNA, 19 nt, Homo sapiens
  misc_RNA (1)...(19): siRNA sense strand
acacuugggugacugguaa

SEQ ID NO: 1122337 - RNA, 19 nt, Homo sapiens
  misc_RNA (1)...(19): siRNA sense strand
gcaggagaaacaauuuaua

SEQ ID NO: 1122338 - RNA, 19 nt, Homo sapiens
  misc_RNA (1)...(19): siRNA sense strand
aauagaaggugcucuuaau

SEQ ID NO: 1122339 - RNA, 19 nt, Homo sapiens
  misc_RNA (1)...(19): siRNA sense strand
auagagcuguggaauuuaa

SEQ ID NO: 1122340 - RNA, 19 nt, Homo sapiens
  misc_RNA (1)...(19): siRNA sense strand
gcaagaaaauuaggaagaa

SEQ ID NO: 1122341 - RNA, 19 nt, Homo sapiens
  misc_RNA (1)...(19): siRNA sense strand
gcacuggaaacgaauagaa

SEQ ID NO: 1122342 - RNA, 19 nt, Homo sapiens
  misc_RNA (1)...(19): siRNA sense strand
agaaacagccuccagaaga

SEQ ID NO: 1122343 - RNA, 19 nt, Homo sapiens
  misc_RNA (1)...(19): siRNA sense strand
gaauuuaauccucauguuc

SEQ ID NO: 1122344 - RNA, 19 nt, Homo sapiens
  misc_RNA (1)...(19): siRNA sense strand
gaauguaagguauggagaa

SEQ ID NO: 1122345 - RNA, 19 nt, Homo sapiens
  misc_RNA (1)...(19): siRNA sense strand
ggauuaagcacagcagaaa

SEQ ID NO: 1122346 - RNA, 19 nt, Homo sapiens
  misc_RNA (1)...(19): siRNA sense strand
gcaccaaaguccucagcau

SEQ ID NO: 1122347 - RNA, 19 nt, Homo sapiens
  misc_RNA (1)...(19): siRNA sense strand
gagcagaauauaggagaua

SEQ ID NO: 1122348 - RNA, 19 nt, Homo sapiens
  misc_RNA (1)...(19): siRNA sense strand
ucauugauaucaggacuaa

SEQ ID NO: 1122349 - RNA, 19 nt, Homo sapiens
  misc_RNA (1)...(19): siRNA sense strand
aagagccacuuacauacua

SEQ ID NO: 1122350 - RNA, 19 nt, Homo sapiens
  misc_RNA (1)...(19): siRNA sense strand
ccaaaguccucagcaugaa

SEQ ID NO: 1122351 - RNA, 19 nt, Homo sapiens
  misc_RNA (1)...(19): siRNA sense strand
gcaauugccuaugcuuucu

SEQ ID NO: 1122352 - RNA, 19 nt, Homo sapiens
  misc_RNA (1)...(19): siRNA sense strand
cagaauuugucagaaugua

SEQ ID NO: 1122353 - RNA, 19 nt, Homo sapiens
  misc_RNA (1)...(19): siRNA sense strand
cuucagcacuggaaacgaa

SEQ ID NO: 1122354 - RNA, 19 nt, Homo sapiens
  misc_RNA (1)...(19): siRNA sense strand
gcagcacuguugaagacaa

SEQ ID NO: 1122355 - RNA, 19 nt, Homo sapiens
  misc_RNA (1)...(19): siRNA sense strand
uuacaggccuauccagaug

SEQ ID NO: 1122356 - RNA, 19 nt, Homo sapiens
  misc_RNA (1)...(19): siRNA sense strand
gaugcugaaagguuauuua

SEQ ID NO: 1122357 - RNA, 19 nt, Homo sapiens
  misc_RNA (1)...(19): siRNA sense strand
gaggaagaagcaacaacua

SEQ ID NO: 1122358 - RNA, 19 nt, Homo sapiens
  misc_RNA (1)...(19): siRNA sense strand
ggaacagagagcagcauuu

SEQ ID NO: 1122359 - RNA, 19 nt, Homo sapiens
  misc_RNA (1)...(19): siRNA sense strand
agaaauuaaugccguggaa

SEQ ID NO: 1122360 - RNA, 19 nt, Homo sapiens
  misc_RNA (1)...(19): siRNA sense strand
caaggcaggagaaacaauu

SEQ ID NO: 1122361 - RNA, 19 nt, Homo sapiens
  misc_RNA (1)...(19): siRNA sense strand
caaagcagccuaucaagcu

SEQ ID NO: 1122362 - RNA, 19 nt, Homo sapiens
  misc_RNA (1)...(19): siRNA sense strand
gagcagcauuucagaacca

SEQ ID NO: 1122363 - RNA, 19 nt, Homo sapiens
  misc_RNA (1)...(19): siRNA sense strand
cauucucacucaccaguuu

SEQ ID NO: 1122364 - RNA, 19 nt, Homo sapiens
  misc_RNA (1)...(19): siRNA sense strand
agacaaggacuguuucaga

SEQ ID NO: 1122365 - RNA, 19 nt, Homo sapiens
  misc_RNA (1)...(19): siRNA sense strand
cagcagcacuguugaagac

SEQ ID NO: 1122366 - RNA, 19 nt, Homo sapiens
  misc_RNA (1)...(19): siRNA sense strand
gaaacccucuaaaucuuuu

SEQ ID NO: 1122367 - RNA, 19 nt, Homo sapiens
  misc_RNA (1)...(19): siRNA sense strand
gagcgucuccugcaucugu

SEQ ID NO: 1122368 - RNA, 19 nt, Homo sapiens
  misc_RNA (1)...(19): siRNA sense strand
cagaaggcuuggagggaaa

SEQ ID NO: 1122369 - RNA, 19 nt, Homo sapiens
  misc_RNA (1)...(19): siRNA sense strand
gaaggugcucuuaaucugu

SEQ ID NO: 1122370 - RNA, 19 nt, Homo sapiens
  misc_RNA (1)...(19): siRNA sense strand
gaagacaaggacuguuuca

SEQ ID NO: 1122371 - RNA, 19 nt, Homo sapiens
  misc_RNA (1)...(19): siRNA sense strand
uauaagccuuccaaaguca

SEQ ID NO: 1122372 - RNA, 19 nt, Homo sapiens
  misc_RNA (1)...(19): siRNA sense strand
gaugauauaagccuuccaa

SEQ ID NO: 1122373 - RNA, 19 nt, Homo sapiens
  misc_RNA (1)...(19): siRNA sense strand
aagaauaagagaagcagua

SEQ ID NO: 1122374 - RNA, 19 nt, Homo sapiens
  misc_RNA (1)...(19): siRNA sense strand
aaucaaagcagccuaucaa

SEQ ID NO: 1122375 - RNA, 19 nt, Homo sapiens
  misc_RNA (1)...(19): siRNA sense strand
cgaauagaaggugcucuua

SEQ ID NO: 1122376 - RNA, 19 nt, Homo sapiens
  misc_RNA (1)...(19): siRNA sense strand
gaaacggggugauagugaa

SEQ ID NO: 1122377 - RNA, 19 nt, Homo sapiens
  misc_RNA (1)...(19): siRNA sense strand
gaacauccaugaaaaucuc

SEQ ID NO: 1122378 - RNA, 19 nt, Homo sapiens
  misc_RNA (1)...(19): siRNA sense strand
gaaauccuccagcucgaau

SEQ ID NO: 1122379 - RNA, 19 nt, Homo sapiens
  misc_RNA (1)...(19): siRNA sense strand
ugauagccauucucacuca

SEQ ID NO: 1122380 - RNA, 19 nt, Homo sapiens
  misc_RNA (1)...(19): siRNA sense strand
guauggagaaacccucuaa

SEQ ID NO: 1122381 - RNA, 19 nt, Homo sapiens
  misc_RNA (1)...(19): siRNA sense strand
agaaggugcucuuaaucug

SEQ ID NO: 1122382 - RNA, 19 nt, Homo sapiens
  misc_RNA (1)...(19): siRNA sense strand
gugaagcaauugccuaugc

SEQ ID NO: 1122383 - RNA, 19 nt, Homo sapiens
  misc_RNA (1)...(19): siRNA sense strand
gaauaagagaagcaguaaa

SEQ ID NO: 1122384 - RNA, 19 nt, Homo sapiens
  misc_RNA (1)...(19): siRNA sense strand
gaaucaaagcagccuauca

SEQ ID NO: 1122385 - RNA, 19 nt, Homo sapiens
  misc_RNA (1)...(19): siRNA sense strand
cagacacaguuaugcagaa

SEQ ID NO: 1122386 - RNA, 19 nt, Homo sapiens
  misc_RNA (1)...(19): siRNA sense strand
gagauacacuugggugacu

SEQ ID NO: 1122387 - RNA, 19 nt, Homo sapiens
  misc_RNA (1)...(19): siRNA sense strand
ggagagauaccaauguacu

SEQ ID NO: 1122388 - RNA, 19 nt, Homo sapiens
  misc_RNA (1)...(19): siRNA sense strand
caggagaaacaauuuauag

SEQ ID NO: 1122389 - RNA, 19 nt, Homo sapiens
  misc_RNA (1)...(19): siRNA sense strand
ggugguacuuccauaagca

SEQ ID NO: 1122390 - RNA, 19 nt, Homo sapiens
  misc_RNA (1)...(19): siRNA sense strand
ccagaaacagccuccagaa

SEQ ID NO: 1122391 - RNA, 19 nt, Homo sapiens
  misc_RNA (1)...(19): siRNA sense strand
ccauuucacagcaggauuu

SEQ ID NO: 1122392 - RNA, 19 nt, Homo sapiens
  misc_RNA (1)...(19): siRNA sense strand
aagcacagcagaaauuaau

SEQ ID NO: 1122393 - RNA, 19 nt, Homo sapiens
  misc_RNA (1)...(19): siRNA sense strand
gaauuugucagaauguaag

SEQ ID NO: 1122394 - RNA, 19 nt, Homo sapiens
  misc_RNA (1)...(19): siRNA sense strand
uuaagcacagcagaaauua

SEQ ID NO: 1122395 - RNA, 19 nt, Homo sapiens
  misc_RNA (1)...(19): siRNA sense strand
uauuguagaugcugaaagg

SEQ ID NO: 1122396 - RNA, 19 nt, Homo sapiens
  misc_RNA (1)...(19): siRNA sense strand
uaaagagccacuuacauac

SEQ ID NO: 1122397 - RNA, 19 nt, Homo sapiens
  misc_RNA (1)...(19): siRNA sense strand
ggagcagaauauaggagau

SEQ ID NO: 1122398 - RNA, 19 nt, Homo sapiens
  misc_RNA (1)...(19): siRNA sense strand
aauguaagguauggagaaa

SEQ ID NO: 1122399 - RNA, 19 nt, Homo sapiens
  misc_RNA (1)...(19): siRNA sense strand
gagagcagcauuucagaac

SEQ ID NO: 1122400 - RNA, 19 nt, Homo sapiens
  misc_RNA (1)...(19): siRNA sense strand
uggagaaacccucuaaauc

SEQ ID NO: 1122401 - RNA, 19 nt, Homo sapiens
  misc_RNA (1)...(19): siRNA sense strand
aaggugcucuuaaucuguu

SEQ ID NO: 1122402 - RNA, 19 nt, Homo sapiens
  misc_RNA (1)...(19): siRNA sense strand
gaggcugugugagaauuug

SEQ ID NO: 1122403 - RNA, 19 nt, Homo sapiens
  misc_RNA (1)...(19): siRNA sense strand
aaagucagcagcaaucugu

SEQ ID NO: 1122404 - RNA, 19 nt, Homo sapiens
  misc_RNA (1)...(19): siRNA sense strand
gcccugaggaucccuuuga

SEQ ID NO: 1122405 - RNA, 19 nt, Homo sapiens
  misc_RNA (1)...(19): siRNA sense strand
cagcaugaagcucaacuga

SEQ ID NO: 1122406 - RNA, 19 nt, Homo sapiens
  misc_RNA (1)...(19): siRNA sense strand
agaaacccucuaaaucuuu

SEQ ID NO: 1122407 - RNA, 19 nt, Homo sapiens
  misc_RNA (1)...(19): siRNA sense strand
uuucagaggagcagaauau

SEQ ID NO: 1122408 - RNA, 19 nt, Homo sapiens
  misc_RNA (1)...(19): siRNA sense strand
gcacagcagaaauuaaugc

SEQ ID NO: 1122409 - RNA, 19 nt, Homo sapiens
  misc_RNA (1)...(19): siRNA sense strand
ccaugaaaaucucuuagaa

SEQ ID NO: 1122410 - RNA, 19 nt, Homo sapiens
  misc_RNA (1)...(19): siRNA sense strand
agaauaagagaagcaguaa

SEQ ID NO: 1122411 - RNA, 19 nt, Homo sapiens
  misc_RNA (1)...(19): siRNA sense strand
gcacucaaggcaggagaaa

SEQ ID NO: 1122412 - RNA, 19 nt, Homo sapiens
  misc_RNA (1)...(19): siRNA sense strand
ucuacuggcugaggaagaa

SEQ ID NO: 1122413 - RNA, 19 nt, Homo sapiens
  misc_RNA (1)...(19): siRNA sense strand
ccuaucaagcuuuagaauu

SEQ ID NO: 1122414 - RNA, 19 nt, Homo sapiens
  misc_RNA (1)...(19): siRNA sense strand
ucaggaccaucagaccuuu

SEQ ID NO: 1122415 - RNA, 19 nt, Homo sapiens
  misc_RNA (1)...(19): siRNA sense strand
auauaagccuuccaaaguc

SEQ ID NO: 1122416 - RNA, 19 nt, Homo sapiens
  misc_RNA (1)...(19): siRNA sense strand
gggugauagugaagcaauu

SEQ ID NO: 1122417 - RNA, 19 nt, Homo sapiens
  misc_RNA (1)...(19): siRNA sense strand
uaagcacagcagaaauuaa

SEQ ID NO: 1122418 - RNA, 19 nt, Homo sapiens
  misc_RNA (1)...(19): siRNA sense strand
gaggagagauaccaaugua

SEQ ID NO: 1122419 - RNA, 19 nt, Homo sapiens
  misc_RNA (1)...(19): siRNA sense strand
ucauagagcuguggaauuu

SEQ ID NO: 1122420 - RNA, 19 nt, Homo sapiens
  misc_RNA (1)...(19): siRNA sense strand
gagaaacccucuaaaucuu

SEQ ID NO: 1122421 - RNA, 19 nt, Homo sapiens
  misc_RNA (1)...(19): siRNA sense strand
gauauaagccuuccaaagu

SEQ ID NO: 1122422 - RNA, 19 nt, Homo sapiens
  misc_RNA (1)...(19): siRNA sense strand
gacaaggacuguuucagaa

SEQ ID NO: 1122423 - RNA, 19 nt, Homo sapiens
  misc_RNA (1)...(19): siRNA sense strand
ccaauguacugguauauau

SEQ ID NO: 1122424 - RNA, 19 nt, Homo sapiens
  misc_RNA (1)...(19): siRNA sense strand
gaaaccagcagacagaauu

SEQ ID NO: 1122425 - RNA, 19 nt, Homo sapiens
  misc_RNA (1)...(19): siRNA sense strand
gcugaaagguuauuuaaac

SEQ ID NO: 1122426 - RNA, 19 nt, Homo sapiens
  misc_RNA (1)...(19): siRNA sense strand
gaagaagcaacaacuauug

SEQ ID NO: 1122427 - RNA, 19 nt, Homo sapiens
  misc_RNA (1)...(19): siRNA sense strand
ggagaaacccucuaaaucu

SEQ ID NO: 1122428 - RNA, 19 nt, Homo sapiens
  misc_RNA (1)...(19): siRNA sense strand
ggaagaagcaacaacuauu

SEQ ID NO: 1122429 - RNA, 19 nt, Homo sapiens
  misc_RNA (1)...(19): siRNA sense strand
gaaacagccuccagaagag

SEQ ID NO: 1122430 - RNA, 19 nt, Homo sapiens
  misc_RNA (1)...(19): siRNA sense strand
ggaauuuaauccucauguu

SEQ ID NO: 1122431 - RNA, 19 nt, Homo sapiens
  misc_RNA (1)...(19): siRNA sense strand
ugagagauuugaugaaaga

SEQ ID NO: 1122432 - RNA, 19 nt, Homo sapiens
  misc_RNA (1)...(19): siRNA sense strand
gaauagaaggugcucuuaa

SEQ ID NO: 1122433 - RNA, 19 nt, Homo sapiens
  misc_RNA (1)...(19): siRNA sense strand
gaacagagagcagcauuuc

SEQ ID NO: 1122434 - RNA, 19 nt, Homo sapiens
  misc_RNA (1)...(19): siRNA sense strand
uguagaugcugaaagguua

SEQ ID NO: 1122435 - RNA, 19 nt, Homo sapiens
  misc_RNA (1)...(19): siRNA sense strand
gaauauaggagauacacuu

SEQ ID NO: 1122436 - RNA, 19 nt, Homo sapiens
  misc_RNA (1)...(19): siRNA sense strand
acacuugggugacugguaa

SEQ ID NO: 1122437 - RNA, 19 nt, Homo sapiens
  misc_RNA (1)...(19): siRNA sense strand
gcaggagaaacaauuuaua

SEQ ID NO: 1122438 - RNA, 19 nt, Homo sapiens
  misc_RNA (1)...(19): siRNA sense strand
aauagaaggugcucuuaau

SEQ ID NO: 1122439 - RNA, 19 nt, Homo sapiens
  misc_RNA (1)...(19): siRNA sense strand
auagagcuguggaauuuaa

SEQ ID NO: 1122440 - RNA, 19 nt, Homo sapiens
  misc_RNA (1)...(19): siRNA sense strand
gcaagaaaauuaggaagaa

SEQ ID NO: 1122441 - RNA, 19 nt, Homo sapiens
  misc_RNA (1)...(19): siRNA sense strand
gcacuggaaacgaauagaa

SEQ ID NO: 1122442 - RNA, 19 nt, Homo sapiens
  misc_RNA (1)...(19): siRNA sense strand
agaaacagccuccagaaga

SEQ ID NO: 1122443 - RNA, 19 nt, Homo sapiens
  misc_RNA (1)...(19): siRNA sense strand
gaauuuaauccucauguuc

SEQ ID NO: 1122444 - RNA, 19 nt, Homo sapiens
  misc_RNA (1)...(19): siRNA sense strand
gaauguaagguauggagaa

SEQ ID NO: 1122445 - RNA, 19 nt, Homo sapiens
  misc_RNA (1)...(19): siRNA sense strand
ggauuaagcacagcagaaa

SEQ ID NO: 1122446 - RNA, 19 nt, Homo sapiens
  misc_RNA (1)...(19): siRNA sense strand
gcaccaaaguccucagcau

SEQ ID NO: 1122447 - RNA, 19 nt, Homo sapiens
  misc_RNA (1)...(19): siRNA sense strand
gagcagaauauaggagaua

SEQ ID NO: 1122448 - RNA, 19 nt, Homo sapiens
  misc_RNA (1)...(19): siRNA sense strand
ucauugauaucaggacuaa

SEQ ID NO: 1122449 - RNA, 19 nt, Homo sapiens
  misc_RNA (1)...(19): siRNA sense strand
aagagccacuuacauacua

SEQ ID NO: 1122450 - RNA, 19 nt, Homo sapiens
  misc_RNA (1)...(19): siRNA sense strand
ccaaaguccucagcaugaa

SEQ ID NO: 1122451 - RNA, 19 nt, Homo sapiens
  misc_RNA (1)...(19): siRNA sense strand
gcaauugccuaugcuuucu

SEQ ID NO: 1122452 - RNA, 19 nt, Homo sapiens
  misc_RNA (1)...(19): siRNA sense strand
cagaauuugucagaaugua

SEQ ID NO: 1122453 - RNA, 19 nt, Homo sapiens
  misc_RNA (1)...(19): siRNA sense strand
cuucagcacuggaaacgaa

SEQ ID NO: 1122454 - RNA, 19 nt, Homo sapiens
  misc_RNA (1)...(19): siRNA sense strand
gcagcacuguugaagacaa

SEQ ID NO: 1122455 - RNA, 19 nt, Homo sapiens
  misc_RNA (1)...(19): siRNA sense strand
uuacaggccuauccagaug

SEQ ID NO: 1122456 - RNA, 19 nt, Homo sapiens
  misc_RNA (1)...(19): siRNA sense strand
gaugcugaaagguuauuua

SEQ ID NO: 1122457 - RNA, 19 nt, Homo sapiens
  misc_RNA (1)...(19): siRNA sense strand
gaggaagaagcaacaacua

SEQ ID NO: 1122458 - RNA, 19 nt, Homo sapiens
  misc_RNA (1)...(19): siRNA sense strand
ggaacagagagcagcauuu

SEQ ID NO: 1122459 - RNA, 19 nt, Homo sapiens
  misc_RNA (1)...(19): siRNA sense strand
agaaauuaaugccguggaa

SEQ ID NO: 1122460 - RNA, 19 nt, Homo sapiens
  misc_RNA (1)...(19): siRNA sense strand
caaggcaggagaaacaauu

SEQ ID NO: 1122461 - RNA, 19 nt, Homo sapiens
  misc_RNA (1)...(19): siRNA sense strand
caaagcagccuaucaagcu

SEQ ID NO: 1122462 - RNA, 19 nt, Homo sapiens
  misc_RNA (1)...(19): siRNA sense strand
gagcagcauuucagaacca

SEQ ID NO: 1122463 - RNA, 19 nt, Homo sapiens
  misc_RNA (1)...(19): siRNA sense strand
cauucucacucaccaguuu

SEQ ID NO: 1122464 - RNA, 19 nt, Homo sapiens
  misc_RNA (1)...(19): siRNA sense strand
agacaaggacuguuucaga

SEQ ID NO: 1122465 - RNA, 19 nt, Homo sapiens
  misc_RNA (1)...(19): siRNA sense strand
cagcagcacuguugaagac

SEQ ID NO: 1122466 - RNA, 19 nt, Homo sapiens
  misc_RNA (1)...(19): siRNA sense strand
gaaacccucuaaaucuuuu

SEQ ID NO: 1122467 - RNA, 19 nt, Homo sapiens
  misc_RNA (1)...(19): siRNA sense strand
gagcgucuccugcaucugu

SEQ ID NO: 1122468 - RNA, 19 nt, Homo sapiens
  misc_RNA (1)...(19): siRNA sense strand
cagaaggcuuggagggaaa

SEQ ID NO: 1122469 - RNA, 19 nt, Homo sapiens
  misc_RNA (1)...(19): siRNA sense strand
gaaggugcucuuaaucugu

SEQ ID NO: 1122470 - RNA, 19 nt, Homo sapiens
  misc_RNA (1)...(19): siRNA sense strand
gaagacaaggacuguuuca

SEQ ID NO: 1122471 - RNA, 19 nt, Homo sapiens
  misc_RNA (1)...(19): siRNA sense strand
uauaagccuuccaaaguca

SEQ ID NO: 1122472 - RNA, 19 nt, Homo sapiens
  misc_RNA (1)...(19): siRNA sense strand
gaugauauaagccuuccaa

SEQ ID NO: 1122473 - RNA, 19 nt, Homo sapiens
  misc_RNA (1)...(19): siRNA sense strand
aagaauaagagaagcagua

SEQ ID NO: 1122474 - RNA, 19 nt, Homo sapiens
  misc_RNA (1)...(19): siRNA sense strand
aaucaaagcagccuaucaa

SEQ ID NO: 1122475 - RNA, 19 nt, Homo sapiens
  misc_RNA (1)...(19): siRNA sense strand
cgaauagaaggugcucuua

SEQ ID NO: 1122476 - RNA, 19 nt, Homo sapiens
  misc_RNA (1)...(19): siRNA sense strand
gaaacggggugauagugaa

SEQ ID NO: 1122477 - RNA, 19 nt, Homo sapiens
  misc_RNA (1)...(19): siRNA sense strand
gaacauccaugaaaaucuc

SEQ ID NO: 1122478 - RNA, 19 nt, Homo sapiens
  misc_RNA (1)...(19): siRNA sense strand
gaaauccuccagcucgaau

SEQ ID NO: 1122479 - RNA, 19 nt, Homo sapiens
  misc_RNA (1)...(19): siRNA sense strand
ugauagccauucucacuca

SEQ ID NO: 1122480 - RNA, 19 nt, Homo sapiens
  misc_RNA (1)...(19): siRNA sense strand
guauggagaaacccucuaa

SEQ ID NO: 1122481 - RNA, 19 nt, Homo sapiens
  misc_RNA (1)...(19): siRNA sense strand
agaaggugcucuuaaucug

SEQ ID NO: 1122482 - RNA, 19 nt, Homo sapiens
  misc_RNA (1)...(19): siRNA sense strand
gugaagcaauugccuaugc

SEQ ID NO: 1122483 - RNA, 19 nt, Homo sapiens
  misc_RNA (1)...(19): siRNA sense strand
gaauaagagaagcaguaaa

SEQ ID NO: 1122484 - RNA, 19 nt, Homo sapiens
  misc_RNA (1)...(19): siRNA sense strand
gaaucaaagcagccuauca

SEQ ID NO: 1122485 - RNA, 19 nt, Homo sapiens
  misc_RNA (1)...(19): siRNA sense strand
cagacacaguuaugcagaa

SEQ ID NO: 1122486 - RNA, 19 nt, Homo sapiens
  misc_RNA (1)...(19): siRNA sense strand
gagauacacuugggugacu

SEQ ID NO: 1122487 - RNA, 19 nt, Homo sapiens
  misc_RNA (1)...(19): siRNA sense strand
ggagagauaccaauguacu

SEQ ID NO: 1122488 - RNA, 19 nt, Homo sapiens
  misc_RNA (1)...(19): siRNA sense strand
caggagaaacaauuuauag

SEQ ID NO: 1122489 - RNA, 19 nt, Homo sapiens
  misc_RNA (1)...(19): siRNA sense strand
ggugguacuuccauaagca

SEQ ID NO: 1122490 - RNA, 19 nt, Homo sapiens
  misc_RNA (1)...(19): siRNA sense strand
ccagaaacagccuccagaa

SEQ ID NO: 1122491 - RNA, 19 nt, Homo sapiens
  misc_RNA (1)...(19): siRNA sense strand
ccauuucacagcaggauuu

SEQ ID NO: 1122492 - RNA, 19 nt, Homo sapiens
  misc_RNA (1)...(19): siRNA sense strand
aagcacagcagaaauuaau

SEQ ID NO: 1122493 - RNA, 19 nt, Homo sapiens
  misc_RNA (1)...(19): siRNA sense strand
gaauuugucagaauguaag

SEQ ID NO: 1122494 - RNA, 19 nt, Homo sapiens
  misc_RNA (1)...(19): siRNA sense strand
uuaagcacagcagaaauua

SEQ ID NO: 1122495 - RNA, 19 nt, Homo sapiens
  misc_RNA (1)...(19): siRNA sense strand
uauuguagaugcugaaagg

SEQ ID NO: 1122496 - RNA, 19 nt, Homo sapiens
  misc_RNA (1)...(19): siRNA sense strand
uaaagagccacuuacauac

SEQ ID NO: 1122497 - RNA, 19 nt, Homo sapiens
  misc_RNA (1)...(19): siRNA sense strand
ggagcagaauauaggagau

SEQ ID NO: 1122498 - RNA, 19 nt, Homo sapiens
  misc_RNA (1)...(19): siRNA sense strand
aauguaagguauggagaaa

SEQ ID NO: 1122499 - RNA, 19 nt, Homo sapiens
  misc_RNA (1)...(19): siRNA sense strand
gagagcagcauuucagaac

SEQ ID NO: 1122500 - RNA, 19 nt, Homo sapiens
  misc_RNA (1)...(19): siRNA sense strand
uggagaaacccucuaaauc

SEQ ID NO: 1122501 - RNA, 19 nt, Homo sapiens
  misc_RNA (1)...(19): siRNA sense strand
aaggugcucuuaaucuguu

SEQ ID NO: 1122502 - RNA, 19 nt, Homo sapiens
  misc_RNA (1)...(19): siRNA sense strand
gaggcugugugagaauuug

SEQ ID NO: 1122503 - RNA, 19 nt, Homo sapiens
  misc_RNA (1)...(19): siRNA sense strand
aaagucagcagcaaucugu

SEQ ID NO: 1122504 - RNA, 19 nt, Homo sapiens
  misc_RNA (1)...(19): siRNA sense strand
gcccugaggaucccuuuga

SEQ ID NO: 1122505 - RNA, 19 nt, Homo sapiens
  misc_RNA (1)...(19): siRNA sense strand
cagcaugaagcucaacuga

SEQ ID NO: 1122506 - RNA, 19 nt, Homo sapiens
  misc_RNA (1)...(19): siRNA sense strand
agaaacccucuaaaucuuu

SEQ ID NO: 1122507 - RNA, 19 nt, Homo sapiens
  misc_RNA (1)...(19): siRNA sense strand
uuucagaggagcagaauau

SEQ ID NO: 1122508 - RNA, 19 nt, Homo sapiens
  misc_RNA (1)...(19): siRNA sense strand
gcacagcagaaauuaaugc

SEQ ID NO: 1122509 - RNA, 19 nt, Homo sapiens
  misc_RNA (1)...(19): siRNA sense strand
ccaugaaaaucucuuagaa

SEQ ID NO: 1122510 - RNA, 19 nt, Homo sapiens
  misc_RNA (1)...(19): siRNA sense strand
agaauaagagaagcaguaa

SEQ ID NO: 1122511 - RNA, 19 nt, Homo sapiens
  misc_RNA (1)...(19): siRNA sense strand
gcacucaaggcaggagaaa

SEQ ID NO: 1122512 - RNA, 19 nt, Homo sapiens
  misc_RNA (1)...(19): siRNA sense strand
ucuacuggcugaggaagaa

SEQ ID NO: 1122513 - RNA, 19 nt, Homo sapiens
  misc_RNA (1)...(19): siRNA sense strand
ccuaucaagcuuuagaauu

SEQ ID NO: 1122514 - RNA, 19 nt, Homo sapiens
  misc_RNA (1)...(19): siRNA sense strand
ucaggaccaucagaccuuu

SEQ ID NO: 1122515 - RNA, 19 nt, Homo sapiens
  misc_RNA (1)...(19): siRNA sense strand
auauaagccuuccaaaguc

SEQ ID NO: 1122516 - RNA, 19 nt, Homo sapiens
  misc_RNA (1)...(19): siRNA sense strand
gggugauagugaagcaauu

SEQ ID NO: 1122517 - RNA, 19 nt, Homo sapiens
  misc_RNA (1)...(19): siRNA sense strand
uaagcacagcagaaauuaa

SEQ ID NO: 1122518 - RNA, 19 nt, Homo sapiens
  misc_RNA (1)...(19): siRNA sense strand
gaggagagauaccaaugua

SEQ ID NO: 1122519 - RNA, 19 nt, Homo sapiens
  misc_RNA (1)...(19): siRNA sense strand
ucauagagcuguggaauuu

SEQ ID NO: 1122520 - RNA, 19 nt, Homo sapiens
  misc_RNA (1)...(19): siRNA sense strand
gagaaacccucuaaaucuu

SEQ ID NO: 1122521 - RNA, 19 nt, Homo sapiens
  misc_RNA (1)...(19): siRNA sense strand
gauauaagccuuccaaagu

SEQ ID NO: 1122522 - RNA, 19 nt, Homo sapiens
  misc_RNA (1)...(19): siRNA sense strand
gacaaggacuguuucagaa

SEQ ID NO: 1122523 - RNA, 19 nt, Homo sapiens
  misc_RNA (1)...(19): siRNA sense strand
ccaauguacugguauauau

SEQ ID NO: 1122524 - RNA, 19 nt, Homo sapiens
  misc_RNA (1)...(19): siRNA sense strand
gaaaccagcagacagaauu

SEQ ID NO: 1122525 - RNA, 19 nt, Homo sapiens
  misc_RNA (1)...(19): siRNA sense strand
gcugaaagguuauuuaaac

SEQ ID NO: 1122526 - RNA, 19 nt, Homo sapiens
  misc_RNA (1)...(19): siRNA sense strand
gaagaagcaacaacuauug

SEQ ID NO: 1122527 - RNA, 19 nt, Homo sapiens
  misc_RNA (1)...(19): siRNA sense strand
ggagaaacccucuaaaucu

SEQ ID NO: 1122528 - RNA, 19 nt, Homo sapiens
  misc_RNA (1)...(19): siRNA sense strand
ggaagaagcaacaacuauu

SEQ ID NO: 1122529 - RNA, 19 nt, Homo sapiens
  misc_RNA (1)...(19): siRNA sense strand
gaaacagccuccagaagag

SEQ ID NO: 1122530 - RNA, 19 nt, Homo sapiens
  misc_RNA (1)...(19): siRNA sense strand
ggaauuuaauccucauguu

SEQ ID NO: 1122531 - RNA, 19 nt, Homo sapiens
  misc_RNA (1)...(19): siRNA sense strand
ugagagauuugaugaaaga

SEQ ID NO: 1122532 - RNA, 19 nt, Homo sapiens
  misc_RNA (1)...(19): siRNA sense strand
gaauagaaggugcucuuaa

SEQ ID NO: 1122533 - RNA, 19 nt, Homo sapiens
  misc_RNA (1)...(19): siRNA sense strand
gaacagagagcagcauuuc

SEQ ID NO: 1122534 - RNA, 19 nt, Homo sapiens
  misc_RNA (1)...(19): siRNA sense strand
uguagaugcugaaagguua

SEQ ID NO: 1122535 - RNA, 19 nt, Homo sapiens
  misc_RNA (1)...(19): siRNA sense strand
gaauauaggagauacacuu

SEQ ID NO: 1122536 - RNA, 19 nt, Homo sapiens
  misc_RNA (1)...(19): siRNA sense strand
acacuugggugacugguaa

SEQ ID NO: 1122537 - RNA, 19 nt, Homo sapiens
  misc_RNA (1)...(19): siRNA sense strand
gcaggagaaacaauuuaua

SEQ ID NO: 1122538 - RNA, 19 nt, Homo sapiens
  misc_RNA (1)...(19): siRNA sense strand
aauagaaggugcucuuaau

SEQ ID NO: 1122539 - RNA, 19 nt, Homo sapiens
  misc_RNA (1)...(19): siRNA sense strand
auagagcuguggaauuuaa

SEQ ID NO: 1122540 - RNA, 19 nt, Homo sapiens
  misc_RNA (1)...(19): siRNA sense strand
gcaagaaaauuaggaagaa

SEQ ID NO: 1122541 - RNA, 19 nt, Homo sapiens
  misc_RNA (1)...(19): siRNA sense strand
gcacuggaaacgaauagaa

SEQ ID NO: 1122542 - RNA, 19 nt, Homo sapiens
  misc_RNA (1)...(19): siRNA sense strand
agaaacagccuccagaaga

SEQ ID NO: 1122543 - RNA, 19 nt, Homo sapiens
  misc_RNA (1)...(19): siRNA sense strand
gaauuuaauccucauguuc

SEQ ID NO: 1122544 - RNA, 19 nt, Homo sapiens
  misc_RNA (1)...(19): siRNA sense strand
gaauguaagguauggagaa

SEQ ID NO: 1122545 - RNA, 19 nt, Homo sapiens
  misc_RNA (1)...(19): siRNA sense strand
ggauuaagcacagcagaaa

SEQ ID NO: 1122546 - RNA, 19 nt, Homo sapiens
  misc_RNA (1)...(19): siRNA sense strand
gcaccaaaguccucagcau

SEQ ID NO: 1122547 - RNA, 19 nt, Homo sapiens
  misc_RNA (1)...(19): siRNA sense strand
gagcagaauauaggagaua

SEQ ID NO: 1122548 - RNA, 19 nt, Homo sapiens
  misc_RNA (1)...(19): siRNA sense strand
ucauugauaucaggacuaa

SEQ ID NO: 1122549 - RNA, 19 nt, Homo sapiens
  misc_RNA (1)...(19): siRNA sense strand
aagagccacuuacauacua

SEQ ID NO: 1122550 - RNA, 19 nt, Homo sapiens
  misc_RNA (1)...(19): siRNA sense strand
ccaaaguccucagcaugaa

SEQ ID NO: 1122551 - RNA, 19 nt, Homo sapiens
  misc_RNA (1)...(19): siRNA sense strand
gcaauugccuaugcuuucu

SEQ ID NO: 1122552 - RNA, 19 nt, Homo sapiens
  misc_RNA (1)...(19): siRNA sense strand
cagaauuugucagaaugua

SEQ ID NO: 1122553 - RNA, 19 nt, Homo sapiens
  misc_RNA (1)...(19): siRNA sense strand
cuucagcacuggaaacgaa

SEQ ID NO: 1122554 - RNA, 19 nt, Homo sapiens
  misc_RNA (1)...(19): siRNA sense strand
gcagcacuguugaagacaa

SEQ ID NO: 1122555 - RNA, 19 nt, Homo sapiens
  misc_RNA (1)...(19): siRNA sense strand
uuacaggccuauccagaug

SEQ ID NO: 1122556 - RNA, 19 nt, Homo sapiens
  misc_RNA (1)...(19): siRNA sense strand
gaugcugaaagguuauuua

SEQ ID NO: 1122557 - RNA, 19 nt, Homo sapiens
  misc_RNA (1)...(19): siRNA sense strand
gaggaagaagcaacaacua

SEQ ID NO: 1122558 - RNA, 19 nt, Homo sapiens
  misc_RNA (1)...(19): siRNA sense strand
ggaacagagagcagcauuu

SEQ ID NO: 1122559 - RNA, 19 nt, Homo sapiens
  misc_RNA (1)...(19): siRNA sense strand
agaaauuaaugccguggaa

SEQ ID NO: 1122560 - RNA, 19 nt, Homo sapiens
  misc_RNA (1)...(19): siRNA sense strand
caaggcaggagaaacaauu

SEQ ID NO: 1122561 - RNA, 19 nt, Homo sapiens
  misc_RNA (1)...(19): siRNA sense strand
caaagcagccuaucaagcu

SEQ ID NO: 1122562 - RNA, 19 nt, Homo sapiens
  misc_RNA (1)...(19): siRNA sense strand
gagcagcauuucagaacca

SEQ ID NO: 1122563 - RNA, 19 nt, Homo sapiens
  misc_RNA (1)...(19): siRNA sense strand
cauucucacucaccaguuu

SEQ ID NO: 1122564 - RNA, 19 nt, Homo sapiens
  misc_RNA (1)...(19): siRNA sense strand
agacaaggacuguuucaga

SEQ ID NO: 1122565 - RNA, 19 nt, Homo sapiens
  misc_RNA (1)...(19): siRNA sense strand
cagcagcacuguugaagac

SEQ ID NO: 1122566 - RNA, 19 nt, Homo sapiens
  misc_RNA (1)...(19): siRNA sense strand
gaaacccucuaaaucuuuu

SEQ ID NO: 1122567 - RNA, 19 nt, Homo sapiens
  misc_RNA (1)...(19): siRNA sense strand
gagcgucuccugcaucugu

SEQ ID NO: 1122568 - RNA, 19 nt, Homo sapiens
  misc_RNA (1)...(19): siRNA sense strand
cagaaggcuuggagggaaa

SEQ ID NO: 1122569 - RNA, 19 nt, Homo sapiens
  misc_RNA (1)...(19): siRNA sense strand
gaaggugcucuuaaucugu

SEQ ID NO: 1122570 - RNA, 19 nt, Homo sapiens
  misc_RNA (1)...(19): siRNA sense strand
gaagacaaggacuguuuca

SEQ ID NO: 1122571 - RNA, 19 nt, Homo sapiens
  misc_RNA (1)...(19): siRNA sense strand
uauaagccuuccaaaguca

SEQ ID NO: 1122572 - RNA, 19 nt, Homo sapiens
  misc_RNA (1)...(19): siRNA sense strand
gaugauauaagccuuccaa

SEQ ID NO: 1122573 - RNA, 19 nt, Homo sapiens
  misc_RNA (1)...(19): siRNA sense strand
aagaauaagagaagcagua

SEQ ID NO: 1122574 - RNA, 19 nt, Homo sapiens
  misc_RNA (1)...(19): siRNA sense strand
aaucaaagcagccuaucaa

SEQ ID NO: 1122575 - RNA, 19 nt, Homo sapiens
  misc_RNA (1)...(19): siRNA sense strand
cgaauagaaggugcucuua

SEQ ID NO: 1122576 - RNA, 19 nt, Homo sapiens
  misc_RNA (1)...(19): siRNA sense strand
gaaacggggugauagugaa

SEQ ID NO: 1122577 - RNA, 19 nt, Homo sapiens
  misc_RNA (1)...(19): siRNA sense strand
gaacauccaugaaaaucuc

SEQ ID NO: 1122578 - RNA, 19 nt, Homo sapiens
  misc_RNA (1)...(19): siRNA sense strand
gaaauccuccagcucgaau

SEQ ID NO: 1122579 - RNA, 19 nt, Homo sapiens
  misc_RNA (1)...(19): siRNA sense strand
ugauagccauucucacuca

SEQ ID NO: 1122580 - RNA, 19 nt, Homo sapiens
  misc_RNA (1)...(19): siRNA sense strand
guauggagaaacccucuaa

SEQ ID NO: 1122581 - RNA, 19 nt, Homo sapiens
  misc_RNA (1)...(19): siRNA sense strand
agaaggugcucuuaaucug

SEQ ID NO: 1122582 - RNA, 19 nt, Homo sapiens
  misc_RNA (1)...(19): siRNA sense strand
gugaagcaauugccuaugc

SEQ ID NO: 1122583 - RNA, 19 nt, Homo sapiens
  misc_RNA (1)...(19): siRNA sense strand
gaauaagagaagcaguaaa

SEQ ID NO: 1122584 - RNA, 19 nt, Homo sapiens
  misc_RNA (1)...(19): siRNA sense strand
gaaucaaagcagccuauca

SEQ ID NO: 1122585 - RNA, 19 nt, Homo sapiens
  misc_RNA (1)...(19): siRNA sense strand
cagacacaguuaugcagaa

SEQ ID NO: 1122586 - RNA, 19 nt, Homo sapiens
  misc_RNA (1)...(19): siRNA sense strand
gagauacacuugggugacu

SEQ ID NO: 1122587 - RNA, 19 nt, Homo sapiens
  misc_RNA (1)...(19): siRNA sense strand
ggagagauaccaauguacu

SEQ ID NO: 1122588 - RNA, 19 nt, Homo sapiens
  misc_RNA (1)...(19): siRNA sense strand
caggagaaacaauuuauag

SEQ ID NO: 1122589 - RNA, 19 nt, Homo sapiens
  misc_RNA (1)...(19): siRNA sense strand
ggugguacuuccauaagca

SEQ ID NO: 1122590 - RNA, 19 nt, Homo sapiens
  misc_RNA (1)...(19): siRNA sense strand
ccagaaacagccuccagaa

SEQ ID NO: 1122591 - RNA, 19 nt, Homo sapiens
  misc_RNA (1)...(19): siRNA sense strand
ccauuucacagcaggauuu

SEQ ID NO: 1122592 - RNA, 19 nt, Homo sapiens
  misc_RNA (1)...(19): siRNA sense strand
aagcacagcagaaauuaau

SEQ ID NO: 1122593 - RNA, 19 nt, Homo sapiens
  misc_RNA (1)...(19): siRNA sense strand
gaauuugucagaauguaag

SEQ ID NO: 1122594 - RNA, 19 nt, Homo sapiens
  misc_RNA (1)...(19): siRNA sense strand
uuaagcacagcagaaauua

SEQ ID NO: 1122595 - RNA, 19 nt, Homo sapiens
  misc_RNA (1)...(19): siRNA sense strand
uauuguagaugcugaaagg

SEQ ID NO: 1122596 - RNA, 19 nt, Homo sapiens
  misc_RNA (1)...(19): siRNA sense strand
uaaagagccacuuacauac

SEQ ID NO: 1122597 - RNA, 19 nt, Homo sapiens
  misc_RNA (1)...(19): siRNA sense strand
ggagcagaauauaggagau

SEQ ID NO: 1122598 - RNA, 19 nt, Homo sapiens
  misc_RNA (1)...(19): siRNA sense strand
aauguaagguauggagaaa

SEQ ID NO: 1122599 - RNA, 19 nt, Homo sapiens
  misc_RNA (1)...(19): siRNA sense strand
gagagcagcauuucagaac

SEQ ID NO: 1122600 - RNA, 19 nt, Homo sapiens
  misc_RNA (1)...(19): siRNA sense strand
uggagaaacccucuaaauc

SEQ ID NO: 1122601 - RNA, 19 nt, Homo sapiens
  misc_RNA (1)...(19): siRNA sense strand
aaggugcucuuaaucuguu

SEQ ID NO: 1122602 - RNA, 19 nt, Homo sapiens
  misc_RNA (1)...(19): siRNA sense strand
gaggcugugugagaauuug

SEQ ID NO: 1122603 - RNA, 19 nt, Homo sapiens
  misc_RNA (1)...(19): siRNA sense strand
aaagucagcagcaaucugu

SEQ ID NO: 1122604 - RNA, 19 nt, Homo sapiens
  misc_RNA (1)...(19): siRNA sense strand
gcccugaggaucccuuuga

SEQ ID NO: 1122605 - RNA, 19 nt, Homo sapiens
  misc_RNA (1)...(19): siRNA sense strand
cagcaugaagcucaacuga

SEQ ID NO: 1122606 - RNA, 19 nt, Homo sapiens
  misc_RNA (1)...(19): siRNA sense strand
agaaacccucuaaaucuuu

SEQ ID NO: 1122607 - RNA, 19 nt, Homo sapiens
  misc_RNA (1)...(19): siRNA sense strand
uuucagaggagcagaauau

SEQ ID NO: 1122608 - RNA, 19 nt, Homo sapiens
  misc_RNA (1)...(19): siRNA sense strand
gcacagcagaaauuaaugc

SEQ ID NO: 1122609 - RNA, 19 nt, Homo sapiens
  misc_RNA (1)...(19): siRNA sense strand
ccaugaaaaucucuuagaa

SEQ ID NO: 1122610 - RNA, 19 nt, Homo sapiens
  misc_RNA (1)...(19): siRNA sense strand
agaauaagagaagcaguaa

SEQ ID NO: 1122611 - RNA, 19 nt, Homo sapiens
  misc_RNA (1)...(19): siRNA sense strand
gcacucaaggcaggagaaa

SEQ ID NO: 1122612 - RNA, 19 nt, Homo sapiens
  misc_RNA (1)...(19): siRNA sense strand
ucuacuggcugaggaagaa

SEQ ID NO: 1122613 - RNA, 19 nt, Homo sapiens
  misc_RNA (1)...(19): siRNA sense strand
ccuaucaagcuuuagaauu

SEQ ID NO: 1122614 - RNA, 19 nt, Homo sapiens
  misc_RNA (1)...(19): siRNA sense strand
ucaggaccaucagaccuuu

SEQ ID NO: 1122615 - RNA, 19 nt, Homo sapiens
  misc_RNA (1)...(19): siRNA sense strand
auauaagccuuccaaaguc

SEQ ID NO: 1122616 - RNA, 19 nt, Homo sapiens
  misc_RNA (1)...(19): siRNA sense strand
gggugauagugaagcaauu

SEQ ID NO: 1122617 - RNA, 19 nt, Homo sapiens
  misc_RNA (1)...(19): siRNA sense strand
uaagcacagcagaaauuaa

SEQ ID NO: 1122618 - RNA, 19 nt, Homo sapiens
  misc_RNA (1)...(19): siRNA sense strand
gaggagagauaccaaugua

SEQ ID NO: 1122619 - RNA, 19 nt, Homo sapiens
  misc_RNA (1)...(19): siRNA sense strand
ucauagagcuguggaauuu

SEQ ID NO: 1122620 - RNA, 19 nt, Homo sapiens
  misc_RNA (1)...(19): siRNA sense strand
gagaaacccucuaaaucuu

SEQ ID NO: 1122621 - RNA, 19 nt, Homo sapiens
  misc_RNA (1)...(19): siRNA sense strand
gauauaagccuuccaaagu

SEQ ID NO: 1122622 - RNA, 19 nt, Homo sapiens
  misc_RNA (1)...(19): siRNA sense strand
gacaaggacuguuucagaa

SEQ ID NO: 1122623 - RNA, 19 nt, Homo sapiens
  misc_RNA (1)...(19): siRNA sense strand
ccaauguacugguauauau

SEQ ID NO: 1122624 - RNA, 19 nt, Homo sapiens
  misc_RNA (1)...(19): siRNA sense strand
gaaaccagcagacagaauu

SEQ ID NO: 1122625 - RNA, 19 nt, Homo sapiens
  misc_RNA (1)...(19): siRNA sense strand
gcugaaagguuauuuaaac

SEQ ID NO: 1122626 - RNA, 19 nt, Homo sapiens
  misc_RNA (1)...(19): siRNA sense strand
gaagaagcaacaacuauug

SEQ ID NO: 1122627 - RNA, 19 nt, Homo sapiens
  misc_RNA (1)...(19): siRNA sense strand
ggagaaacccucuaaaucu

SEQ ID NO: 1122628 - RNA, 19 nt, Homo sapiens
  misc_RNA (1)...(19): siRNA sense strand
ggaagaagcaacaacuauu

SEQ ID NO: 1122629 - RNA, 19 nt, Homo sapiens
  misc_RNA (1)...(19): siRNA sense strand
gaaacagccuccagaagag

SEQ ID NO: 1122630 - RNA, 19 nt, Homo sapiens
  misc_RNA (1)...(19): siRNA sense strand
ggaauuuaauccucauguu

SEQ ID NO: 1122631 - RNA, 19 nt, Homo sapiens
  misc_RNA (1)...(19): siRNA sense strand
ugagagauuugaugaaaga

SEQ ID NO: 1122632 - RNA, 19 nt, Homo sapiens
  misc_RNA (1)...(19): siRNA sense strand
gaauagaaggugcucuuaa

SEQ ID NO: 1122633 - RNA, 19 nt, Homo sapiens
  misc_RNA (1)...(19): siRNA sense strand
gaacagagagcagcauuuc

SEQ ID NO: 1122634 - RNA, 19 nt, Homo sapiens
  misc_RNA (1)...(19): siRNA sense strand
uguagaugcugaaagguua

SEQ ID NO: 1122635 - RNA, 19 nt, Homo sapiens
  misc_RNA (1)...(19): siRNA sense strand
gaauauaggagauacacuu

SEQ ID NO: 1122636 - RNA, 19 nt, Homo sapiens
  misc_RNA (1)...(19): siRNA sense strand
acacuugggugacugguaa

SEQ ID NO: 1122637 - RNA, 19 nt, Homo sapiens
  misc_RNA (1)...(19): siRNA sense strand
gcaggagaaacaauuuaua

SEQ ID NO: 1122638 - RNA, 19 nt, Homo sapiens
  misc_RNA (1)...(19): siRNA sense strand
aauagaaggugcucuuaau

SEQ ID NO: 1122639 - RNA, 19 nt, Homo sapiens
  misc_RNA (1)...(19): siRNA sense strand
auagagcuguggaauuuaa

SEQ ID NO: 1122640 - RNA, 19 nt, Homo sapiens
  misc_RNA (1)...(19): siRNA sense strand
gcaagaaaauuaggaagaa

SEQ ID NO: 1122641 - RNA, 19 nt, Homo sapiens
  misc_RNA (1)...(19): siRNA sense strand
gcacuggaaacgaauagaa

SEQ ID NO: 1122642 - RNA, 19 nt, Homo sapiens
  misc_RNA (1)...(19): siRNA sense strand
agaaacagccuccagaaga

SEQ ID NO: 1122643 - RNA, 19 nt, Homo sapiens
  misc_RNA (1)...(19): siRNA sense strand
gaauuuaauccucauguuc

SEQ ID NO: 1122644 - RNA, 19 nt, Homo sapiens
  misc_RNA (1)...(19): siRNA sense strand
gaauguaagguauggagaa

SEQ ID NO: 1122645 - RNA, 19 nt, Homo sapiens
  misc_RNA (1)...(19): siRNA sense strand
ggauuaagcacagcagaaa

SEQ ID NO: 1122646 - RNA, 19 nt, Homo sapiens
  misc_RNA (1)...(19): siRNA sense strand
gcaccaaaguccucagcau

SEQ ID NO: 1122647 - RNA, 19 nt, Homo sapiens
  misc_RNA (1)...(19): siRNA sense strand
gagcagaauauaggagaua

SEQ ID NO: 1122648 - RNA, 19 nt, Homo sapiens
  misc_RNA (1)...(19): siRNA sense strand
ucauugauaucaggacuaa

SEQ ID NO: 1122649 - RNA, 19 nt, Homo sapiens
  misc_RNA (1)...(19): siRNA sense strand
aagagccacuuacauacua

SEQ ID NO: 1122650 - RNA, 19 nt, Homo sapiens
  misc_RNA (1)...(19): siRNA sense strand
ccaaaguccucagcaugaa

SEQ ID NO: 1122651 - RNA, 19 nt, Homo sapiens
  misc_RNA (1)...(19): siRNA sense strand
gcaauugccuaugcuuucu

SEQ ID NO: 1122652 - RNA, 19 nt, Homo sapiens
  misc_RNA (1)...(19): siRNA sense strand
cagaauuugucagaaugua

SEQ ID NO: 1122653 - RNA, 19 nt, Homo sapiens
  misc_RNA (1)...(19): siRNA sense strand
cuucagcacuggaaacgaa

SEQ ID NO: 1122654 - RNA, 19 nt, Homo sapiens
  misc_RNA (1)...(19): siRNA sense strand
gcagcacuguugaagacaa

SEQ ID NO: 1122655 - RNA, 19 nt, Homo sapiens
  misc_RNA (1)...(19): siRNA sense strand
uuacaggccuauccagaug

SEQ ID NO: 1122656 - RNA, 19 nt, Homo sapiens
  misc_RNA (1)...(19): siRNA sense strand
gaugcugaaagguuauuua

SEQ ID NO: 1122657 - RNA, 19 nt, Homo sapiens
  misc_RNA (1)...(19): siRNA sense strand
gaggaagaagcaacaacua

SEQ ID NO: 1122658 - RNA, 19 nt, Homo sapiens
  misc_RNA (1)...(19): siRNA sense strand
ggaacagagagcagcauuu

SEQ ID NO: 1122659 - RNA, 19 nt, Homo sapiens
  misc_RNA (1)...(19): siRNA sense strand
agaaauuaaugccguggaa

SEQ ID NO: 1122660 - RNA, 19 nt, Homo sapiens
  misc_RNA (1)...(19): siRNA sense strand
caaggcaggagaaacaauu

SEQ ID NO: 1122661 - RNA, 19 nt, Homo sapiens
  misc_RNA (1)...(19): siRNA sense strand
caaagcagccuaucaagcu

SEQ ID NO: 1122662 - RNA, 19 nt, Homo sapiens
  misc_RNA (1)...(19): siRNA sense strand
gagcagcauuucagaacca

SEQ ID NO: 1122663 - RNA, 19 nt, Homo sapiens
  misc_RNA (1)...(19): siRNA sense strand
cauucucacucaccaguuu

SEQ ID NO: 1122664 - RNA, 19 nt, Homo sapiens
  misc_RNA (1)...(19): siRNA sense strand
agacaaggacuguuucaga

SEQ ID NO: 1122665 - RNA, 19 nt, Homo sapiens
  misc_RNA (1)...(19): siRNA sense strand
cagcagcacuguugaagac

SEQ ID NO: 1122666 - RNA, 19 nt, Homo sapiens
  misc_RNA (1)...(19): siRNA sense strand
gaaacccucuaaaucuuuu

SEQ ID NO: 1122667 - RNA, 19 nt, Homo sapiens
  misc_RNA (1)...(19): siRNA sense strand
gagcgucuccugcaucugu

SEQ ID NO: 1122668 - RNA, 19 nt, Homo sapiens
  misc_RNA (1)...(19): siRNA sense strand
cagaaggcuuggagggaaa

SEQ ID NO: 1122669 - RNA, 19 nt, Homo sapiens
  misc_RNA (1)...(19): siRNA sense strand
gaaggugcucuuaaucugu

SEQ ID NO: 1122670 - RNA, 19 nt, Homo sapiens
  misc_RNA (1)...(19): siRNA sense strand
gaagacaaggacuguuuca

SEQ ID NO: 1122671 - RNA, 19 nt, Homo sapiens
  misc_RNA (1)...(19): siRNA sense strand
uauaagccuuccaaaguca

SEQ ID NO: 1122672 - RNA, 19 nt, Homo sapiens
  misc_RNA (1)...(19): siRNA sense strand
gaugauauaagccuuccaa

SEQ ID NO: 1122673 - RNA, 19 nt, Homo sapiens
  misc_RNA (1)...(19): siRNA sense strand
aagaauaagagaagcagua

SEQ ID NO: 1122674 - RNA, 19 nt, Homo sapiens
  misc_RNA (1)...(19): siRNA sense strand
aaucaaagcagccuaucaa

SEQ ID NO: 1122675 - RNA, 19 nt, Homo sapiens
  misc_RNA (1)...(19): siRNA sense strand
cgaauagaaggugcucuua

SEQ ID NO: 1122676 - RNA, 19 nt, Homo sapiens
  misc_RNA (1)...(19): siRNA sense strand
gaaacggggugauagugaa

SEQ ID NO: 1122677 - RNA, 19 nt, Homo sapiens
  misc_RNA (1)...(19): siRNA sense strand
gaacauccaugaaaaucuc

SEQ ID NO: 1122678 - RNA, 19 nt, Homo sapiens
  misc_RNA (1)...(19): siRNA sense strand
gaaauccuccagcucgaau

SEQ ID NO: 1122679 - RNA, 19 nt, Homo sapiens
  misc_RNA (1)...(19): siRNA sense strand
ugauagccauucucacuca

SEQ ID NO: 1122680 - RNA, 19 nt, Homo sapiens
  misc_RNA (1)...(19): siRNA sense strand
guauggagaaacccucuaa

SEQ ID NO: 1122681 - RNA, 19 nt, Homo sapiens
  misc_RNA (1)...(19): siRNA sense strand
agaaggugcucuuaaucug

SEQ ID NO: 1122682 - RNA, 19 nt, Homo sapiens
  misc_RNA (1)...(19): siRNA sense strand
gugaagcaauugccuaugc

SEQ ID NO: 1122683 - RNA, 19 nt, Homo sapiens
  misc_RNA (1)...(19): siRNA sense strand
gaauaagagaagcaguaaa

SEQ ID NO: 1122684 - RNA, 19 nt, Homo sapiens
  misc_RNA (1)...(19): siRNA sense strand
gaaucaaagcagccuauca

SEQ ID NO: 1122685 - RNA, 19 nt, Homo sapiens
  misc_RNA (1)...(19): siRNA sense strand
cagacacaguuaugcagaa

SEQ ID NO: 1122686 - RNA, 19 nt, Homo sapiens
  misc_RNA (1)...(19): siRNA sense strand
gagauacacuugggugacu

SEQ ID NO: 1122687 - RNA, 19 nt, Homo sapiens
  misc_RNA (1)...(19): siRNA sense strand
ggagagauaccaauguacu

SEQ ID NO: 1122688 - RNA, 19 nt, Homo sapiens
  misc_RNA (1)...(19): siRNA sense strand
caggagaaacaauuuauag

SEQ ID NO: 1122689 - RNA, 19 nt, Homo sapiens
  misc_RNA (1)...(19): siRNA sense strand
ggugguacuuccauaagca

SEQ ID NO: 1122690 - RNA, 19 nt, Homo sapiens
  misc_RNA (1)...(19): siRNA sense strand
ccagaaacagccuccagaa

SEQ ID NO: 1122691 - RNA, 19 nt, Homo sapiens
  misc_RNA (1)...(19): siRNA sense strand
ccauuucacagcaggauuu

SEQ ID NO: 1122692 - RNA, 19 nt, Homo sapiens
  misc_RNA (1)...(19): siRNA sense strand
aagcacagcagaaauuaau

SEQ ID NO: 1122693 - RNA, 19 nt, Homo sapiens
  misc_RNA (1)...(19): siRNA sense strand
gaauuugucagaauguaag

SEQ ID NO: 1122694 - RNA, 19 nt, Homo sapiens
  misc_RNA (1)...(19): siRNA sense strand
uuaagcacagcagaaauua

SEQ ID NO: 1122695 - RNA, 19 nt, Homo sapiens
  misc_RNA (1)...(19): siRNA sense strand
uauuguagaugcugaaagg

SEQ ID NO: 1122696 - RNA, 19 nt, Homo sapiens
  misc_RNA (1)...(19): siRNA sense strand
uaaagagccacuuacauac

SEQ ID NO: 1122697 - RNA, 19 nt, Homo sapiens
  misc_RNA (1)...(19): siRNA sense strand
ggagcagaauauaggagau

SEQ ID NO: 1122698 - RNA, 19 nt, Homo sapiens
  misc_RNA (1)...(19): siRNA sense strand
aauguaagguauggagaaa

SEQ ID NO: 1122699 - RNA, 19 nt, Homo sapiens
  misc_RNA (1)...(19): siRNA sense strand
gagagcagcauuucagaac

SEQ ID NO: 1122700 - RNA, 19 nt, Homo sapiens
  misc_RNA (1)...(19): siRNA sense strand
uggagaaacccucuaaauc

SEQ ID NO: 1122701 - RNA, 19 nt, Homo sapiens
  misc_RNA (1)...(19): siRNA sense strand
aaggugcucuuaaucuguu

SEQ ID NO: 1122702 - RNA, 19 nt, Homo sapiens
  misc_RNA (1)...(19): siRNA sense strand
gaggcugugugagaauuug

SEQ ID NO: 1122703 - RNA, 19 nt, Homo sapiens
  misc_RNA (1)...(19): siRNA sense strand
aaagucagcagcaaucugu

SEQ ID NO: 1122704 - RNA, 19 nt, Homo sapiens
  misc_RNA (1)...(19): siRNA sense strand
gcccugaggaucccuuuga

SEQ ID NO: 1122705 - RNA, 19 nt, Homo sapiens
  misc_RNA (1)...(19): siRNA sense strand
cagcaugaagcucaacuga

SEQ ID NO: 1122706 - RNA, 19 nt, Homo sapiens
  misc_RNA (1)...(19): siRNA sense strand
agaaacccucuaaaucuuu

SEQ ID NO: 1122707 - RNA, 19 nt, Homo sapiens
  misc_RNA (1)...(19): siRNA sense strand
uuucagaggagcagaauau

SEQ ID NO: 1122708 - RNA, 19 nt, Homo sapiens
  misc_RNA (1)...(19): siRNA sense strand
gcacagcagaaauuaaugc

SEQ ID NO: 1122709 - RNA, 19 nt, Homo sapiens
  misc_RNA (1)...(19): siRNA sense strand
ccaugaaaaucucuuagaa

SEQ ID NO: 1122710 - RNA, 19 nt, Homo sapiens
  misc_RNA (1)...(19): siRNA sense strand
agaauaagagaagcaguaa

SEQ ID NO: 1122711 - RNA, 19 nt, Homo sapiens
  misc_RNA (1)...(19): siRNA sense strand
gcacucaaggcaggagaaa

SEQ ID NO: 1122712 - RNA, 19 nt, Homo sapiens
  misc_RNA (1)...(19): siRNA sense strand
ucuacuggcugaggaagaa

SEQ ID NO: 1122713 - RNA, 19 nt, Homo sapiens
  misc_RNA (1)...(19): siRNA sense strand
ccuaucaagcuuuagaauu

SEQ ID NO: 1122714 - RNA, 19 nt, Homo sapiens
  misc_RNA (1)...(19): siRNA sense strand
ucaggaccaucagaccuuu

SEQ ID NO: 1122715 - RNA, 19 nt, Homo sapiens
  misc_RNA (1)...(19): siRNA sense strand
auauaagccuuccaaaguc

SEQ ID NO: 1122716 - RNA, 19 nt, Homo sapiens
  misc_RNA (1)...(19): siRNA sense strand
gggugauagugaagcaauu

SEQ ID NO: 1122717 - RNA, 19 nt, Homo sapiens
  misc_RNA (1)...(19): siRNA sense strand
uaagcacagcagaaauuaa

SEQ ID NO: 1122718 - RNA, 19 nt, Homo sapiens
  misc_RNA (1)...(19): siRNA sense strand
gaggagagauaccaaugua

SEQ ID NO: 1122719 - RNA, 19 nt, Homo sapiens
  misc_RNA (1)...(19): siRNA sense strand
ucauagagcuguggaauuu

SEQ ID NO: 1122720 - RNA, 19 nt, Homo sapiens
  misc_RNA (1)...(19): siRNA sense strand
gagaaacccucuaaaucuu

SEQ ID NO: 1122721 - RNA, 19 nt, Homo sapiens
  misc_RNA (1)...(19): siRNA sense strand
gauauaagccuuccaaagu

SEQ ID NO: 1122722 - RNA, 19 nt, Homo sapiens
  misc_RNA (1)...(19): siRNA sense strand
gacaaggacuguuucagaa

SEQ ID NO: 1122723 - RNA, 19 nt, Homo sapiens
  misc_RNA (1)...(19): siRNA sense strand
ccaauguacugguauauau

SEQ ID NO: 1122724 - RNA, 19 nt, Homo sapiens
  misc_RNA (1)...(19): siRNA sense strand
gaaaccagcagacagaauu

SEQ ID NO: 1122725 - RNA, 19 nt, Homo sapiens
  misc_RNA (1)...(19): siRNA sense strand
gcugaaagguuauuuaaac

SEQ ID NO: 1122726 - RNA, 19 nt, Homo sapiens
  misc_RNA (1)...(19): siRNA sense strand
gaagaagcaacaacuauug

SEQ ID NO: 1122727 - RNA, 19 nt, Homo sapiens
  misc_RNA (1)...(19): siRNA sense strand
ggagaaacccucuaaaucu

SEQ ID NO: 1122728 - RNA, 19 nt, Homo sapiens
  misc_RNA (1)...(19): siRNA sense strand
ggaagaagcaacaacuauu

SEQ ID NO: 1122729 - RNA, 19 nt, Homo sapiens
  misc_RNA (1)...(19): siRNA sense strand
gaaacagccuccagaagag

SEQ ID NO: 1122730 - RNA, 19 nt, Homo sapiens
  misc_RNA (1)...(19): siRNA sense strand
ggaauuuaauccucauguu

SEQ ID NO: 1122731 - RNA, 19 nt, Homo sapiens
  misc_RNA (1)...(19): siRNA sense strand
ugagagauuugaugaaaga

SEQ ID NO: 1122732 - RNA, 19 nt, Homo sapiens
  misc_RNA (1)...(19): siRNA sense strand
gaauagaaggugcucuuaa

SEQ ID NO: 1122733 - RNA, 19 nt, Homo sapiens
  misc_RNA (1)...(19): siRNA sense strand
gaacagagagcagcauuuc

SEQ ID NO: 1122734 - RNA, 19 nt, Homo sapiens
  misc_RNA (1)...(19): siRNA sense strand
uguagaugcugaaagguua

SEQ ID NO: 1122735 - RNA, 19 nt, Homo sapiens
  misc_RNA (1)...(19): siRNA sense strand
gaauauaggagauacacuu

SEQ ID NO: 1122736 - RNA, 19 nt, Homo sapiens
  misc_RNA (1)...(19): siRNA sense strand
acacuugggugacugguaa

SEQ ID NO: 1122737 - RNA, 19 nt, Homo sapiens
  misc_RNA (1)...(19): siRNA sense strand
gcaggagaaacaauuuaua

SEQ ID NO: 1122738 - RNA, 19 nt, Homo sapiens
  misc_RNA (1)...(19): siRNA sense strand
aauagaaggugcucuuaau

SEQ ID NO: 1122739 - RNA, 19 nt, Homo sapiens
  misc_RNA (1)...(19): siRNA sense strand
auagagcuguggaauuuaa

SEQ ID NO: 1122740 - RNA, 19 nt, Homo sapiens
  misc_RNA (1)...(19): siRNA sense strand
gcaagaaaauuaggaagaa

SEQ ID NO: 1122741 - RNA, 19 nt, Homo sapiens
  misc_RNA (1)...(19): siRNA sense strand
gcacuggaaacgaauagaa

SEQ ID NO: 1122742 - RNA, 19 nt, Homo sapiens
  misc_RNA (1)...(19): siRNA sense strand
agaaacagccuccagaaga

SEQ ID NO: 1122743 - RNA, 19 nt, Homo sapiens
  misc_RNA (1)...(19): siRNA sense strand
gaauuuaauccucauguuc

SEQ ID NO: 1122744 - RNA, 19 nt, Homo sapiens
  misc_RNA (1)...(19): siRNA sense strand
gaauguaagguauggagaa

SEQ ID NO: 1122745 - RNA, 19 nt, Homo sapiens
  misc_RNA (1)...(19): siRNA sense strand
ggauuaagcacagcagaaa

SEQ ID NO: 1122746 - RNA, 19 nt, Homo sapiens
  misc_RNA (1)...(19): siRNA sense strand
gcaccaaaguccucagcau

SEQ ID NO: 1122747 - RNA, 19 nt, Homo sapiens
  misc_RNA (1)...(19): siRNA sense strand
gagcagaauauaggagaua

SEQ ID NO: 1122748 - RNA, 19 nt, Homo sapiens
  misc_RNA (1)...(19): siRNA sense strand
ucauugauaucaggacuaa

SEQ ID NO: 1122749 - RNA, 19 nt, Homo sapiens
  misc_RNA (1)...(19): siRNA sense strand
aagagccacuuacauacua

SEQ ID NO: 1122750 - RNA, 19 nt, Homo sapiens
  misc_RNA (1)...(19): siRNA sense strand
ccaaaguccucagcaugaa

SEQ ID NO: 1122751 - RNA, 19 nt, Homo sapiens
  misc_RNA (1)...(19): siRNA sense strand
gcaauugccuaugcuuucu

SEQ ID NO: 1122752 - RNA, 19 nt, Homo sapiens
  misc_RNA (1)...(19): siRNA sense strand
cagaauuugucagaaugua

SEQ ID NO: 1122753 - RNA, 19 nt, Homo sapiens
  misc_RNA (1)...(19): siRNA sense strand
cuucagcacuggaaacgaa

SEQ ID NO: 1122754 - RNA, 19 nt, Homo sapiens
  misc_RNA (1)...(19): siRNA sense strand
gcagcacuguugaagacaa

SEQ ID NO: 1122755 - RNA, 19 nt, Homo sapiens
  misc_RNA (1)...(19): siRNA sense strand
uuacaggccuauccagaug

SEQ ID NO: 1122756 - RNA, 19 nt, Homo sapiens
  misc_RNA (1)...(19): siRNA sense strand
gaugcugaaagguuauuua

SEQ ID NO: 1122757 - RNA, 19 nt, Homo sapiens
  misc_RNA (1)...(19): siRNA sense strand
gaggaagaagcaacaacua

SEQ ID NO: 1122758 - RNA, 19 nt, Homo sapiens
  misc_RNA (1)...(19): siRNA sense strand
ggaacagagagcagcauuu

SEQ ID NO: 1122759 - RNA, 19 nt, Homo sapiens
  misc_RNA (1)...(19): siRNA sense strand
agaaauuaaugccguggaa

SEQ ID NO: 1122760 - RNA, 19 nt, Homo sapiens
  misc_RNA (1)...(19): siRNA sense strand
caaggcaggagaaacaauu

SEQ ID NO: 1122761 - RNA, 19 nt, Homo sapiens
  misc_RNA (1)...(19): siRNA sense strand
caaagcagccuaucaagcu

SEQ ID NO: 1122762 - RNA, 19 nt, Homo sapiens
  misc_RNA (1)...(19): siRNA sense strand
gagcagcauuucagaacca

SEQ ID NO: 1122763 - RNA, 19 nt, Homo sapiens
  misc_RNA (1)...(19): siRNA sense strand
cauucucacucaccaguuu

SEQ ID NO: 1122764 - RNA, 19 nt, Homo sapiens
  misc_RNA (1)...(19): siRNA sense strand
agacaaggacuguuucaga

SEQ ID NO: 1122765 - RNA, 19 nt, Homo sapiens
  misc_RNA (1)...(19): siRNA sense strand
cagcagcacuguugaagac

SEQ ID NO: 1122766 - RNA, 19 nt, Homo sapiens
  misc_RNA (1)...(19): siRNA sense strand
gaaacccucuaaaucuuuu

SEQ ID NO: 1122767 - RNA, 19 nt, Homo sapiens
  misc_RNA (1)...(19): siRNA sense strand
gagcgucuccugcaucugu

SEQ ID NO: 1122768 - RNA, 19 nt, Homo sapiens
  misc_RNA (1)...(19): siRNA sense strand
cagaaggcuuggagggaaa

SEQ ID NO: 1122769 - RNA, 19 nt, Homo sapiens
  misc_RNA (1)...(19): siRNA sense strand
gaaggugcucuuaaucugu

SEQ ID NO: 1122770 - RNA, 19 nt, Homo sapiens
  misc_RNA (1)...(19): siRNA sense strand
gaagacaaggacuguuuca

SEQ ID NO: 1122771 - RNA, 19 nt, Homo sapiens
  misc_RNA (1)...(19): siRNA sense strand
uauaagccuuccaaaguca

SEQ ID NO: 1122772 - RNA, 19 nt, Homo sapiens
  misc_RNA (1)...(19): siRNA sense strand
gaugauauaagccuuccaa

SEQ ID NO: 1122773 - RNA, 19 nt, Homo sapiens
  misc_RNA (1)...(19): siRNA sense strand
aagaauaagagaagcagua

SEQ ID NO: 1122774 - RNA, 19 nt, Homo sapiens
  misc_RNA (1)...(19): siRNA sense strand
aaucaaagcagccuaucaa

SEQ ID NO: 1122775 - RNA, 19 nt, Homo sapiens
  misc_RNA (1)...(19): siRNA sense strand
cgaauagaaggugcucuua

SEQ ID NO: 1122776 - RNA, 19 nt, Homo sapiens
  misc_RNA (1)...(19): siRNA sense strand
gaaacggggugauagugaa

SEQ ID NO: 1122777 - RNA, 19 nt, Homo sapiens
  misc_RNA (1)...(19): siRNA sense strand
gaacauccaugaaaaucuc

SEQ ID NO: 1122778 - RNA, 19 nt, Homo sapiens
  misc_RNA (1)...(19): siRNA sense strand
gaaauccuccagcucgaau

SEQ ID NO: 1122779 - RNA, 19 nt, Homo sapiens
  misc_RNA (1)...(19): siRNA sense strand
ugauagccauucucacuca

SEQ ID NO: 1122780 - RNA, 19 nt, Homo sapiens
  misc_RNA (1)...(19): siRNA sense strand
guauggagaaacccucuaa

SEQ ID NO: 1122781 - RNA, 19 nt, Homo sapiens
  misc_RNA (1)...(19): siRNA sense strand
agaaggugcucuuaaucug

SEQ ID NO: 1122782 - RNA, 19 nt, Homo sapiens
  misc_RNA (1)...(19): siRNA sense strand
gugaagcaauugccuaugc

SEQ ID NO: 1122783 - RNA, 19 nt, Homo sapiens
  misc_RNA (1)...(19): siRNA sense strand
gaauaagagaagcaguaaa

SEQ ID NO: 1122784 - RNA, 19 nt, Homo sapiens
  misc_RNA (1)...(19): siRNA sense strand
gaaucaaagcagccuauca

SEQ ID NO: 1122785 - RNA, 19 nt, Homo sapiens
  misc_RNA (1)...(19): siRNA sense strand
cagacacaguuaugcagaa

SEQ ID NO: 1122786 - RNA, 19 nt, Homo sapiens
  misc_RNA (1)...(19): siRNA sense strand
gagauacacuugggugacu

SEQ ID NO: 1122787 - RNA, 19 nt, Homo sapiens
  misc_RNA (1)...(19): siRNA sense strand
ggagagauaccaauguacu

SEQ ID NO: 1122788 - RNA, 19 nt, Homo sapiens
  misc_RNA (1)...(19): siRNA sense strand
caggagaaacaauuuauag

SEQ ID NO: 1122789 - RNA, 19 nt, Homo sapiens
  misc_RNA (1)...(19): siRNA sense strand
ggugguacuuccauaagca

SEQ ID NO: 1122790 - RNA, 19 nt, Homo sapiens
  misc_RNA (1)...(19): siRNA sense strand
ccagaaacagccuccagaa

SEQ ID NO: 1122791 - RNA, 19 nt, Homo sapiens
  misc_RNA (1)...(19): siRNA sense strand
ccauuucacagcaggauuu

SEQ ID NO: 1122792 - RNA, 19 nt, Homo sapiens
  misc_RNA (1)...(19): siRNA sense strand
aagcacagcagaaauuaau

SEQ ID NO: 1122793 - RNA, 19 nt, Homo sapiens
  misc_RNA (1)...(19): siRNA sense strand
gaauuugucagaauguaag

SEQ ID NO: 1122794 - RNA, 19 nt, Homo sapiens
  misc_RNA (1)...(19): siRNA sense strand
uuaagcacagcagaaauua

SEQ ID NO: 1122795 - RNA, 19 nt, Homo sapiens
  misc_RNA (1)...(19): siRNA sense strand
uauuguagaugcugaaagg

SEQ ID NO: 1122796 - RNA, 19 nt, Homo sapiens
  misc_RNA (1)...(19): siRNA sense strand
uaaagagccacuuacauac

SEQ ID NO: 1122797 - RNA, 19 nt, Homo sapiens
  misc_RNA (1)...(19): siRNA sense strand
ggagcagaauauaggagau

SEQ ID NO: 1122798 - RNA, 19 nt, Homo sapiens
  misc_RNA (1)...(19): siRNA sense strand
aauguaagguauggagaaa

SEQ ID NO: 1122799 - RNA, 19 nt, Homo sapiens
  misc_RNA (1)...(19): siRNA sense strand
gagagcagcauuucagaac

SEQ ID NO: 1122800 - RNA, 19 nt, Homo sapiens
  misc_RNA (1)...(19): siRNA sense strand
uggagaaacccucuaaauc

SEQ ID NO: 1122801 - RNA, 19 nt, Homo sapiens
  misc_RNA (1)...(19): siRNA sense strand
aaggugcucuuaaucuguu

SEQ ID NO: 1122802 - RNA, 19 nt, Homo sapiens
  misc_RNA (1)...(19): siRNA sense strand
gaggcugugugagaauuug

SEQ ID NO: 1122803 - RNA, 19 nt, Homo sapiens
  misc_RNA (1)...(19): siRNA sense strand
aaagucagcagcaaucugu

SEQ ID NO: 1122804 - RNA, 19 nt, Homo sapiens
  misc_RNA (1)...(19): siRNA sense strand
gcccugaggaucccuuuga

SEQ ID NO: 1122805 - RNA, 19 nt, Homo sapiens
  misc_RNA (1)...(19): siRNA sense strand
cagcaugaagcucaacuga

SEQ ID NO: 1122806 - RNA, 19 nt, Homo sapiens
  misc_RNA (1)...(19): siRNA sense strand
agaaacccucuaaaucuuu

SEQ ID NO: 1122807 - RNA, 19 nt, Homo sapiens
  misc_RNA (1)...(19): siRNA sense strand
uuucagaggagcagaauau

SEQ ID NO: 1122808 - RNA, 19 nt, Homo sapiens
  misc_RNA (1)...(19): siRNA sense strand
gcacagcagaaauuaaugc

SEQ ID NO: 1122809 - RNA, 19 nt, Homo sapiens
  misc_RNA (1)...(19): siRNA sense strand
ccaugaaaaucucuuagaa

SEQ ID NO: 1122810 - RNA, 19 nt, Homo sapiens
  misc_RNA (1)...(19): siRNA sense strand
agaauaagagaagcaguaa

SEQ ID NO: 1122811 - RNA, 19 nt, Homo sapiens
  misc_RNA (1)...(19): siRNA sense strand
gcacucaaggcaggagaaa

SEQ ID NO: 1122812 - RNA, 19 nt, Homo sapiens
  misc_RNA (1)...(19): siRNA sense strand
ucuacuggcugaggaagaa

SEQ ID NO: 1122813 - RNA, 19 nt, Homo sapiens
  misc_RNA (1)...(19): siRNA sense strand
ccuaucaagcuuuagaauu

SEQ ID NO: 1122814 - RNA, 19 nt, Homo sapiens
  misc_RNA (1)...(19): siRNA sense strand
ucaggaccaucagaccuuu

SEQ ID NO: 1122815 - RNA, 19 nt, Homo sapiens
  misc_RNA (1)...(19): siRNA sense strand
auauaagccuuccaaaguc

SEQ ID NO: 1122816 - RNA, 19 nt, Homo sapiens
  misc_RNA (1)...(19): siRNA sense strand
gggugauagugaagcaauu

SEQ ID NO: 1122817 - RNA, 19 nt, Homo sapiens
  misc_RNA (1)...(19): siRNA sense strand
uaagcacagcagaaauuaa

SEQ ID NO: 1122818 - RNA, 19 nt, Homo sapiens
  misc_RNA (1)...(19): siRNA sense strand
gaggagagauaccaaugua

SEQ ID NO: 1122819 - RNA, 19 nt, Homo sapiens
  misc_RNA (1)...(19): siRNA sense strand
ucauagagcuguggaauuu

SEQ ID NO: 1122820 - RNA, 19 nt, Homo sapiens
  misc_RNA (1)...(19): siRNA sense strand
gagaaacccucuaaaucuu

SEQ ID NO: 1122821 - RNA, 19 nt, Homo sapiens
  misc_RNA (1)...(19): siRNA sense strand
gauauaagccuuccaaagu

SEQ ID NO: 1122822 - RNA, 19 nt, Homo sapiens
  misc_RNA (1)...(19): siRNA sense strand
gacaaggacuguuucagaa

SEQ ID NO: 1122823 - RNA, 19 nt, Homo sapiens
  misc_RNA (1)...(19): siRNA sense strand
ccaauguacugguauauau

SEQ ID NO: 1122824 - RNA, 19 nt, Homo sapiens
  misc_RNA (1)...(19): siRNA sense strand
gaaaccagcagacagaauu

SEQ ID NO: 1122825 - RNA, 19 nt, Homo sapiens
  misc_RNA (1)...(19): siRNA sense strand
gcugaaagguuauuuaaac

SEQ ID NO: 1122826 - RNA, 19 nt, Homo sapiens
  misc_RNA (1)...(19): siRNA sense strand
gaagaagcaacaacuauug

SEQ ID NO: 1122827 - RNA, 19 nt, Homo sapiens
  misc_RNA (1)...(19): siRNA sense strand
ggagaaacccucuaaaucu

SEQ ID NO: 1122828 - RNA, 19 nt, Homo sapiens
  misc_RNA (1)...(19): siRNA sense strand
ggaagaagcaacaacuauu

SEQ ID NO: 1122829 - RNA, 19 nt, Homo sapiens
  misc_RNA (1)...(19): siRNA sense strand
gaaacagccuccagaagag

SEQ ID NO: 1122830 - RNA, 19 nt, Homo sapiens
  misc_RNA (1)...(19): siRNA sense strand
ggaauuuaauccucauguu

SEQ ID NO: 1122831 - RNA, 19 nt, Homo sapiens
  misc_RNA (1)...(19): siRNA sense strand
ugagagauuugaugaaaga

SEQ ID NO: 1122832 - RNA, 19 nt, Homo sapiens
  misc_RNA (1)...(19): siRNA sense strand
gaauagaaggugcucuuaa

SEQ ID NO: 1122833 - RNA, 19 nt, Homo sapiens
  misc_RNA (1)...(19): siRNA sense strand
gaacagagagcagcauuuc

SEQ ID NO: 1122834 - RNA, 19 nt, Homo sapiens
  misc_RNA (1)...(19): siRNA sense strand
uguagaugcugaaagguua

SEQ ID NO: 1122835 - RNA, 19 nt, Homo sapiens
  misc_RNA (1)...(19): siRNA sense strand
gaauauaggagauacacuu

SEQ ID NO: 1122836 - RNA, 19 nt, Homo sapiens
  misc_RNA (1)...(19): siRNA sense strand
acacuugggugacugguaa

SEQ ID NO: 1122837 - RNA, 19 nt, Homo sapiens
  misc_RNA (1)...(19): siRNA sense strand
gcaggagaaacaauuuaua

SEQ ID NO: 1122838 - RNA, 19 nt, Homo sapiens
  misc_RNA (1)...(19): siRNA sense strand
aauagaaggugcucuuaau

SEQ ID NO: 1122839 - RNA, 19 nt, Homo sapiens
  misc_RNA (1)...(19): siRNA sense strand
auagagcuguggaauuuaa

SEQ ID NO: 1122840 - RNA, 19 nt, Homo sapiens
  misc_RNA (1)...(19): siRNA sense strand
gcaagaaaauuaggaagaa

SEQ ID NO: 1122841 - RNA, 19 nt, Homo sapiens
  misc_RNA (1)...(19): siRNA sense strand
gcacuggaaacgaauagaa

SEQ ID NO: 1122842 - RNA, 19 nt, Homo sapiens
  misc_RNA (1)...(19): siRNA sense strand
agaaacagccuccagaaga

SEQ ID NO: 1122843 - RNA, 19 nt, Homo sapiens
  misc_RNA (1)...(19): siRNA sense strand
gaauuuaauccucauguuc

SEQ ID NO: 1122844 - RNA, 19 nt, Homo sapiens
  misc_RNA (1)...(19): siRNA sense strand
gaauguaagguauggagaa

SEQ ID NO: 1122845 - RNA, 19 nt, Homo sapiens
  misc_RNA (1)...(19): siRNA sense strand
ggauuaagcacagcagaaa

SEQ ID NO: 1122846 - RNA, 19 nt, Homo sapiens
  misc_RNA (1)...(19): siRNA sense strand
gcaccaaaguccucagcau

SEQ ID NO: 1122847 - RNA, 19 nt, Homo sapiens
  misc_RNA (1)...(19): siRNA sense strand
gagcagaauauaggagaua

SEQ ID NO: 1122848 - RNA, 19 nt, Homo sapiens
  misc_RNA (1)...(19): siRNA sense strand
ucauugauaucaggacuaa

SEQ ID NO: 1122849 - RNA, 19 nt, Homo sapiens
  misc_RNA (1)...(19): siRNA sense strand
aagagccacuuacauacua

SEQ ID NO: 1122850 - RNA, 19 nt, Homo sapiens
  misc_RNA (1)...(19): siRNA sense strand
ccaaaguccucagcaugaa

SEQ ID NO: 1122851 - RNA, 19 nt, Homo sapiens
  misc_RNA (1)...(19): siRNA sense strand
gcaauugccuaugcuuucu

SEQ ID NO: 1122852 - RNA, 19 nt, Homo sapiens
  misc_RNA (1)...(19): siRNA sense strand
cagaauuugucagaaugua

SEQ ID NO: 1122853 - RNA, 19 nt, Homo sapiens
  misc_RNA (1)...(19): siRNA sense strand
cuucagcacuggaaacgaa

SEQ ID NO: 1122854 - RNA, 19 nt, Homo sapiens
  misc_RNA (1)...(19): siRNA sense strand
gcagcacuguugaagacaa

SEQ ID NO: 1122855 - RNA, 19 nt, Homo sapiens
  misc_RNA (1)...(19): siRNA sense strand
uuacaggccuauccagaug

SEQ ID NO: 1122856 - RNA, 19 nt, Homo sapiens
  misc_RNA (1)...(19): siRNA sense strand
gaugcugaaagguuauuua

SEQ ID NO: 1122857 - RNA, 19 nt, Homo sapiens
  misc_RNA (1)...(19): siRNA sense strand
gaggaagaagcaacaacua

SEQ ID NO: 1122858 - RNA, 19 nt, Homo sapiens
  misc_RNA (1)...(19): siRNA sense strand
ggaacagagagcagcauuu

SEQ ID NO: 1122859 - RNA, 19 nt, Homo sapiens
  misc_RNA (1)...(19): siRNA sense strand
agaaauuaaugccguggaa

SEQ ID NO: 1122860 - RNA, 19 nt, Homo sapiens
  misc_RNA (1)...(19): siRNA sense strand
caaggcaggagaaacaauu

SEQ ID NO: 1122861 - RNA, 19 nt, Homo sapiens
  misc_RNA (1)...(19): siRNA sense strand
caaagcagccuaucaagcu

SEQ ID NO: 1122862 - RNA, 19 nt, Homo sapiens
  misc_RNA (1)...(19): siRNA sense strand
gagcagcauuucagaacca

SEQ ID NO: 1122863 - RNA, 19 nt, Homo sapiens
  misc_RNA (1)...(19): siRNA sense strand
cauucucacucaccaguuu

SEQ ID NO: 1122864 - RNA, 19 nt, Homo sapiens
  misc_RNA (1)...(19): siRNA sense strand
agacaaggacuguuucaga

SEQ ID NO: 1122865 - RNA, 19 nt, Homo sapiens
  misc_RNA (1)...(19): siRNA sense strand
cagcagcacuguugaagac

SEQ ID NO: 1122866 - RNA, 19 nt, Homo sapiens
  misc_RNA (1)...(19): siRNA sense strand
gaaacccucuaaaucuuuu

SEQ ID NO: 1122867 - RNA, 19 nt, Homo sapiens
  misc_RNA (1)...(19): siRNA sense strand
gagcgucuccugcaucugu

SEQ ID NO: 1122868 - RNA, 19 nt, Homo sapiens
  misc_RNA (1)...(19): siRNA sense strand
cagaaggcuuggagggaaa

SEQ ID NO: 1122869 - RNA, 19 nt, Homo sapiens
  misc_RNA (1)...(19): siRNA sense strand
gaaggugcucuuaaucugu

SEQ ID NO: 1122870 - RNA, 19 nt, Homo sapiens
  misc_RNA (1)...(19): siRNA sense strand
gaagacaaggacuguuuca

SEQ ID NO: 1122871 - RNA, 19 nt, Homo sapiens
  misc_RNA (1)...(19): siRNA sense strand
uauaagccuuccaaaguca

SEQ ID NO: 1122872 - RNA, 19 nt, Homo sapiens
  misc_RNA (1)...(19): siRNA sense strand
gaugauauaagccuuccaa

SEQ ID NO: 1122873 - RNA, 19 nt, Homo sapiens
  misc_RNA (1)...(19): siRNA sense strand
aagaauaagagaagcagua

SEQ ID NO: 1122874 - RNA, 19 nt, Homo sapiens
  misc_RNA (1)...(19): siRNA sense strand
aaucaaagcagccuaucaa

SEQ ID NO: 1122875 - RNA, 19 nt, Homo sapiens
  misc_RNA (1)...(19): siRNA sense strand
cgaauagaaggugcucuua

SEQ ID NO: 1122876 - RNA, 19 nt, Homo sapiens
  misc_RNA (1)...(19): siRNA sense strand
gaaacggggugauagugaa

SEQ ID NO: 1122877 - RNA, 19 nt, Homo sapiens
  misc_RNA (1)...(19): siRNA sense strand
gaacauccaugaaaaucuc

SEQ ID NO: 1122878 - RNA, 19 nt, Homo sapiens
  misc_RNA (1)...(19): siRNA sense strand
gaaauccuccagcucgaau

SEQ ID NO: 1122879 - RNA, 19 nt, Homo sapiens
  misc_RNA (1)...(19): siRNA sense strand
ugauagccauucucacuca

SEQ ID NO: 1122880 - RNA, 19 nt, Homo sapiens
  misc_RNA (1)...(19): siRNA sense strand
guauggagaaacccucuaa

SEQ ID NO: 1122881 - RNA, 19 nt, Homo sapiens
  misc_RNA (1)...(19): siRNA sense strand
agaaggugcucuuaaucug

SEQ ID NO: 1122882 - RNA, 19 nt, Homo sapiens
  misc_RNA (1)...(19): siRNA sense strand
gugaagcaauugccuaugc

SEQ ID NO: 1122883 - RNA, 19 nt, Homo sapiens
  misc_RNA (1)...(19): siRNA sense strand
gaauaagagaagcaguaaa

SEQ ID NO: 1122884 - RNA, 19 nt, Homo sapiens
  misc_RNA (1)...(19): siRNA sense strand
gaaucaaagcagccuauca

SEQ ID NO: 1122885 - RNA, 19 nt, Homo sapiens
  misc_RNA (1)...(19): siRNA sense strand
cagacacaguuaugcagaa

SEQ ID NO: 1122886 - RNA, 19 nt, Homo sapiens
  misc_RNA (1)...(19): siRNA sense strand
gagauacacuugggugacu

SEQ ID NO: 1122887 - RNA, 19 nt, Homo sapiens
  misc_RNA (1)...(19): siRNA sense strand
ggagagauaccaauguacu

SEQ ID NO: 1122888 - RNA, 19 nt, Homo sapiens
  misc_RNA (1)...(19): siRNA sense strand
caggagaaacaauuuauag

SEQ ID NO: 1122889 - RNA, 19 nt, Homo sapiens
  misc_RNA (1)...(19): siRNA sense strand
ggugguacuuccauaagca

SEQ ID NO: 1122890 - RNA, 19 nt, Homo sapiens
  misc_RNA (1)...(19): siRNA sense strand
ccagaaacagccuccagaa

SEQ ID NO: 1122891 - RNA, 19 nt, Homo sapiens
  misc_RNA (1)...(19): siRNA sense strand
ccauuucacagcaggauuu

SEQ ID NO: 1122892 - RNA, 19 nt, Homo sapiens
  misc_RNA (1)...(19): siRNA sense strand
aagcacagcagaaauuaau

SEQ ID NO: 1122893 - RNA, 19 nt, Homo sapiens
  misc_RNA (1)...(19): siRNA sense strand
gaauuugucagaauguaag

SEQ ID NO: 1122894 - RNA, 19 nt, Homo sapiens
  misc_RNA (1)...(19): siRNA sense strand
uuaagcacagcagaaauua

SEQ ID NO: 1122895 - RNA, 19 nt, Homo sapiens
  misc_RNA (1)...(19): siRNA sense strand
uauuguagaugcugaaagg

SEQ ID NO: 1122896 - RNA, 19 nt, Homo sapiens
  misc_RNA (1)...(19): siRNA sense strand
uaaagagccacuuacauac

SEQ ID NO: 1122897 - RNA, 19 nt, Homo sapiens
  misc_RNA (1)...(19): siRNA sense strand
ggagcagaauauaggagau

SEQ ID NO: 1122898 - RNA, 19 nt, Homo sapiens
  misc_RNA (1)...(19): siRNA sense strand
aauguaagguauggagaaa

SEQ ID NO: 1122899 - RNA, 19 nt, Homo sapiens
  misc_RNA (1)...(19): siRNA sense strand
gagagcagcauuucagaac

SEQ ID NO: 1122900 - RNA, 19 nt, Homo sapiens
  misc_RNA (1)...(19): siRNA sense strand
uggagaaacccucuaaauc

SEQ ID NO: 1122901 - RNA, 19 nt, Homo sapiens
  misc_RNA (1)...(19): siRNA sense strand
aaggugcucuuaaucuguu

SEQ ID NO: 1122902 - RNA, 19 nt, Homo sapiens
  misc_RNA (1)...(19): siRNA sense strand
gaggcugugugagaauuug

SEQ ID NO: 1122903 - RNA, 19 nt, Homo sapiens
  misc_RNA (1)...(19): siRNA sense strand
aaagucagcagcaaucugu

SEQ ID NO: 1122904 - RNA, 19 nt, Homo sapiens
  misc_RNA (1)...(19): siRNA sense strand
gcccugaggaucccuuuga

SEQ ID NO: 1122905 - RNA, 19 nt, Homo sapiens
  misc_RNA (1)...(19): siRNA sense strand
cagcaugaagcucaacuga

SEQ ID NO: 1122906 - RNA, 19 nt, Homo sapiens
  misc_RNA (1)...(19): siRNA sense strand
agaaacccucuaaaucuuu

SEQ ID NO: 1122907 - RNA, 19 nt, Homo sapiens
  misc_RNA (1)...(19): siRNA sense strand
uuucagaggagcagaauau

SEQ ID NO: 1122908 - RNA, 19 nt, Homo sapiens
  misc_RNA (1)...(19): siRNA sense strand
gcacagcagaaauuaaugc

SEQ ID NO: 1122909 - RNA, 19 nt, Homo sapiens
  misc_RNA (1)...(19): siRNA sense strand
ccaugaaaaucucuuagaa

SEQ ID NO: 1122910 - RNA, 19 nt, Homo sapiens
  misc_RNA (1)...(19): siRNA sense strand
agaauaagagaagcaguaa

SEQ ID NO: 1122911 - RNA, 19 nt, Homo sapiens
  misc_RNA (1)...(19): siRNA sense strand
gcacucaaggcaggagaaa

SEQ ID NO: 1122912 - RNA, 19 nt, Homo sapiens
  misc_RNA (1)...(19): siRNA sense strand
ucuacuggcugaggaagaa

SEQ ID NO: 1122913 - RNA, 19 nt, Homo sapiens
  misc_RNA (1)...(19): siRNA sense strand
ccuaucaagcuuuagaauu

SEQ ID NO: 1122914 - RNA, 19 nt, Homo sapiens
  misc_RNA (1)...(19): siRNA sense strand
ucaggaccaucagaccuuu

SEQ ID NO: 1122915 - RNA, 19 nt, Homo sapiens
  misc_RNA (1)...(19): siRNA sense strand
auauaagccuuccaaaguc

SEQ ID NO: 1122916 - RNA, 19 nt, Homo sapiens
  misc_RNA (1)...(19): siRNA sense strand
gggugauagugaagcaauu

SEQ ID NO: 1122917 - RNA, 19 nt, Homo sapiens
  misc_RNA (1)...(19): siRNA sense strand
uaagcacagcagaaauuaa

SEQ ID NO: 1122918 - RNA, 19 nt, Homo sapiens
  misc_RNA (1)...(19): siRNA sense strand
gaggagagauaccaaugua

SEQ ID NO: 1122919 - RNA, 19 nt, Homo sapiens
  misc_RNA (1)...(19): siRNA sense strand
ucauagagcuguggaauuu

SEQ ID NO: 1122920 - RNA, 19 nt, Homo sapiens
  misc_RNA (1)...(19): siRNA sense strand
gagaaacccucuaaaucuu

SEQ ID NO: 1122921 - RNA, 19 nt, Homo sapiens
  misc_RNA (1)...(19): siRNA sense strand
gauauaagccuuccaaagu

SEQ ID NO: 1122922 - RNA, 19 nt, Homo sapiens
  misc_RNA (1)...(19): siRNA sense strand
gacaaggacuguuucagaa

SEQ ID NO: 1122923 - RNA, 19 nt, Homo sapiens
  misc_RNA (1)...(19): siRNA sense strand
ccaauguacugguauauau

SEQ ID NO: 1122924 - RNA, 19 nt, Homo sapiens
  misc_RNA (1)...(19): siRNA sense strand
gaaaccagcagacagaauu

SEQ ID NO: 1122925 - RNA, 19 nt, Homo sapiens
  misc_RNA (1)...(19): siRNA sense strand
gcugaaagguuauuuaaac

SEQ ID NO: 1122926 - RNA, 19 nt, Homo sapiens
  misc_RNA (1)...(19): siRNA sense strand
gaagaagcaacaacuauug

SEQ ID NO: 1122927 - RNA, 19 nt, Homo sapiens
  misc_RNA (1)...(19): siRNA sense strand
ggagaaacccucuaaaucu

SEQ ID NO: 1122928 - RNA, 19 nt, Homo sapiens
  misc_RNA (1)...(19): siRNA sense strand
ggaagaagcaacaacuauu

SEQ ID NO: 1122929 - RNA, 19 nt, Homo sapiens
  misc_RNA (1)...(19): siRNA sense strand
gaaacagccuccagaagag

SEQ ID NO: 1122930 - RNA, 19 nt, Homo sapiens
  misc_RNA (1)...(19): siRNA sense strand
ggaauuuaauccucauguu

SEQ ID NO: 1122931 - RNA, 19 nt, Homo sapiens
  misc_RNA (1)...(19): siRNA sense strand
ugagagauuugaugaaaga

SEQ ID NO: 1122932 - RNA, 19 nt, Homo sapiens
  misc_RNA (1)...(19): siRNA sense strand
gaauagaaggugcucuuaa

SEQ ID NO: 1122933 - RNA, 19 nt, Homo sapiens
  misc_RNA (1)...(19): siRNA sense strand
gaacagagagcagcauuuc

SEQ ID NO: 1122934 - RNA, 19 nt, Homo sapiens
  misc_RNA (1)...(19): siRNA sense strand
uguagaugcugaaagguua

SEQ ID NO: 1122935 - RNA, 19 nt, Homo sapiens
  misc_RNA (1)...(19): siRNA sense strand
gaauauaggagauacacuu

SEQ ID NO: 1122936 - RNA, 19 nt, Homo sapiens
  misc_RNA (1)...(19): siRNA sense strand
acacuugggugacugguaa

SEQ ID NO: 1122937 - RNA, 19 nt, Homo sapiens
  misc_RNA (1)...(19): siRNA sense strand
gcaggagaaacaauuuaua

SEQ ID NO: 1122938 - RNA, 19 nt, Homo sapiens
  misc_RNA (1)...(19): siRNA sense strand
aauagaaggugcucuuaau

SEQ ID NO: 1122939 - RNA, 19 nt, Homo sapiens
  misc_RNA (1)...(19): siRNA sense strand
auagagcuguggaauuuaa

SEQ ID NO: 1122940 - RNA, 19 nt, Homo sapiens
  misc_RNA (1)...(19): siRNA sense strand
gcaagaaaauuaggaagaa

SEQ ID NO: 1122941 - RNA, 19 nt, Homo sapiens
  misc_RNA (1)...(19): siRNA sense strand
gcacuggaaacgaauagaa

SEQ ID NO: 1122942 - RNA, 19 nt, Homo sapiens
  misc_RNA (1)...(19): siRNA sense strand
agaaacagccuccagaaga

SEQ ID NO: 1122943 - RNA, 19 nt, Homo sapiens
  misc_RNA (1)...(19): siRNA sense strand
gaauuuaauccucauguuc

SEQ ID NO: 1122944 - RNA, 19 nt, Homo sapiens
  misc_RNA (1)...(19): siRNA sense strand
gaauguaagguauggagaa

SEQ ID NO: 1122945 - RNA, 19 nt, Homo sapiens
  misc_RNA (1)...(19): siRNA sense strand
ggauuaagcacagcagaaa

SEQ ID NO: 1122946 - RNA, 19 nt, Homo sapiens
  misc_RNA (1)...(19): siRNA sense strand
gcaccaaaguccucagcau

SEQ ID NO: 1122947 - RNA, 19 nt, Homo sapiens
  misc_RNA (1)...(19): siRNA sense strand
gagcagaauauaggagaua

SEQ ID NO: 1122948 - RNA, 19 nt, Homo sapiens
  misc_RNA (1)...(19): siRNA sense strand
ucauugauaucaggacuaa

SEQ ID NO: 1122949 - RNA, 19 nt, Homo sapiens
  misc_RNA (1)...(19): siRNA sense strand
aagagccacuuacauacua

SEQ ID NO: 1122950 - RNA, 19 nt, Homo sapiens
  misc_RNA (1)...(19): siRNA sense strand
ccaaaguccucagcaugaa

SEQ ID NO: 1122951 - RNA, 19 nt, Homo sapiens
  misc_RNA (1)...(19): siRNA sense strand
gcaauugccuaugcuuucu

SEQ ID NO: 1122952 - RNA, 19 nt, Homo sapiens
  misc_RNA (1)...(19): siRNA sense strand
cagaauuugucagaaugua

SEQ ID NO: 1122953 - RNA, 19 nt, Homo sapiens
  misc_RNA (1)...(19): siRNA sense strand
cuucagcacuggaaacgaa

SEQ ID NO: 1122954 - RNA, 19 nt, Homo sapiens
  misc_RNA (1)...(19): siRNA sense strand
gcagcacuguugaagacaa

SEQ ID NO: 1122955 - RNA, 19 nt, Homo sapiens
  misc_RNA (1)...(19): siRNA sense strand
uuacaggccuauccagaug

SEQ ID NO: 1122956 - RNA, 19 nt, Homo sapiens
  misc_RNA (1)...(19): siRNA sense strand
gaugcugaaagguuauuua

SEQ ID NO: 1122957 - RNA, 19 nt, Homo sapiens
  misc_RNA (1)...(19): siRNA sense strand
gaggaagaagcaacaacua

SEQ ID NO: 1122958 - RNA, 19 nt, Homo sapiens
  misc_RNA (1)...(19): siRNA sense strand
ggaacagagagcagcauuu

SEQ ID NO: 1122959 - RNA, 19 nt, Homo sapiens
  misc_RNA (1)...(19): siRNA sense strand
agaaauuaaugccguggaa

SEQ ID NO: 1122960 - RNA, 19 nt, Homo sapiens
  misc_RNA (1)...(19): siRNA sense strand
caaggcaggagaaacaauu

SEQ ID NO: 1122961 - RNA, 19 nt, Homo sapiens
  misc_RNA (1)...(19): siRNA sense strand
caaagcagccuaucaagcu

SEQ ID NO: 1122962 - RNA, 19 nt, Homo sapiens
  misc_RNA (1)...(19): siRNA sense strand
gagcagcauuucagaacca

SEQ ID NO: 1122963 - RNA, 19 nt, Homo sapiens
  misc_RNA (1)...(19): siRNA sense strand
cauucucacucaccaguuu

SEQ ID NO: 1122964 - RNA, 19 nt, Homo sapiens
  misc_RNA (1)...(19): siRNA sense strand
agacaaggacuguuucaga

SEQ ID NO: 1122965 - RNA, 19 nt, Homo sapiens
  misc_RNA (1)...(19): siRNA sense strand
cagcagcacuguugaagac

SEQ ID NO: 1122966 - RNA, 19 nt, Homo sapiens
  misc_RNA (1)...(19): siRNA sense strand
gaaacccucuaaaucuuuu

SEQ ID NO: 1122967 - RNA, 19 nt, Homo sapiens
  misc_RNA (1)...(19): siRNA sense strand
gagcgucuccugcaucugu

SEQ ID NO: 1122968 - RNA, 19 nt, Homo sapiens
  misc_RNA (1)...(19): siRNA sense strand
cagaaggcuuggagggaaa

SEQ ID NO: 1122969 - RNA, 19 nt, Homo sapiens
  misc_RNA (1)...(19): siRNA sense strand
gaaggugcucuuaaucugu

SEQ ID NO: 1122970 - RNA, 19 nt, Homo sapiens
  misc_RNA (1)...(19): siRNA sense strand
gaagacaaggacuguuuca

SEQ ID NO: 1122971 - RNA, 19 nt, Homo sapiens
  misc_RNA (1)...(19): siRNA sense strand
uauaagccuuccaaaguca

SEQ ID NO: 1122972 - RNA, 19 nt, Homo sapiens
  misc_RNA (1)...(19): siRNA sense strand
gaugauauaagccuuccaa

SEQ ID NO: 1122973 - RNA, 19 nt, Homo sapiens
  misc_RNA (1)...(19): siRNA sense strand
aagaauaagagaagcagua

SEQ ID NO: 1122974 - RNA, 19 nt, Homo sapiens
  misc_RNA (1)...(19): siRNA sense strand
aaucaaagcagccuaucaa

SEQ ID NO: 1122975 - RNA, 19 nt, Homo sapiens
  misc_RNA (1)...(19): siRNA sense strand
cgaauagaaggugcucuua

SEQ ID NO: 1122976 - RNA, 19 nt, Homo sapiens
  misc_RNA (1)...(19): siRNA sense strand
gaaacggggugauagugaa

SEQ ID NO: 1122977 - RNA, 19 nt, Homo sapiens
  misc_RNA (1)...(19): siRNA sense strand
gaacauccaugaaaaucuc

SEQ ID NO: 1122978 - RNA, 19 nt, Homo sapiens
  misc_RNA (1)...(19): siRNA sense strand
gaaauccuccagcucgaau

SEQ ID NO: 1122979 - RNA, 19 nt, Homo sapiens
  misc_RNA (1)...(19): siRNA sense strand
ugauagccauucucacuca

SEQ ID NO: 1122980 - RNA, 19 nt, Homo sapiens
  misc_RNA (1)...(19): siRNA sense strand
guauggagaaacccucuaa

SEQ ID NO: 1122981 - RNA, 19 nt, Homo sapiens
  misc_RNA (1)...(19): siRNA sense strand
agaaggugcucuuaaucug

SEQ ID NO: 1122982 - RNA, 19 nt, Homo sapiens
  misc_RNA (1)...(19): siRNA sense strand
gugaagcaauugccuaugc

SEQ ID NO: 1122983 - RNA, 19 nt, Homo sapiens
  misc_RNA (1)...(19): siRNA sense strand
gaauaagagaagcaguaaa

SEQ ID NO: 1122984 - RNA, 19 nt, Homo sapiens
  misc_RNA (1)...(19): siRNA sense strand
gaaucaaagcagccuauca

SEQ ID NO: 1122985 - RNA, 19 nt, Homo sapiens
  misc_RNA (1)...(19): siRNA sense strand
cagacacaguuaugcagaa

SEQ ID NO: 1122986 - RNA, 19 nt, Homo sapiens
  misc_RNA (1)...(19): siRNA sense strand
gagauacacuugggugacu

SEQ ID NO: 1122987 - RNA, 19 nt, Homo sapiens
  misc_RNA (1)...(19): siRNA sense strand
ggagagauaccaauguacu

SEQ ID NO: 1122988 - RNA, 19 nt, Homo sapiens
  misc_RNA (1)...(19): siRNA sense strand
caggagaaacaauuuauag

SEQ ID NO: 1122989 - RNA, 19 nt, Homo sapiens
  misc_RNA (1)...(19): siRNA sense strand
ggugguacuuccauaagca

SEQ ID NO: 1122990 - RNA, 19 nt, Homo sapiens
  misc_RNA (1)...(19): siRNA sense strand
ccagaaacagccuccagaa

SEQ ID NO: 1122991 - RNA, 19 nt, Homo sapiens
  misc_RNA (1)...(19): siRNA sense strand
ccauuucacagcaggauuu

SEQ ID NO: 1122992 - RNA, 19 nt, Homo sapiens
  misc_RNA (1)...(19): siRNA sense strand
aagcacagcagaaauuaau

SEQ ID NO: 1122993 - RNA, 19 nt, Homo sapiens
  misc_RNA (1)...(19): siRNA sense strand
gaauuugucagaauguaag

SEQ ID NO: 1122994 - RNA, 19 nt, Homo sapiens
  misc_RNA (1)...(19): siRNA sense strand
uuaagcacagcagaaauua

SEQ ID NO: 1122995 - RNA, 19 nt, Homo sapiens
  misc_RNA (1)...(19): siRNA sense strand
uauuguagaugcugaaagg

SEQ ID NO: 1122996 - RNA, 19 nt, Homo sapiens
  misc_RNA (1)...(19): siRNA sense strand
uaaagagccacuuacauac

SEQ ID NO: 1122997 - RNA, 19 nt, Homo sapiens
  misc_RNA (1)...(19): siRNA sense strand
ggagcagaauauaggagau

SEQ ID NO: 1122998 - RNA, 19 nt, Homo sapiens
  misc_RNA (1)...(19): siRNA sense strand
aauguaagguauggagaaa

SEQ ID NO: 1122999 - RNA, 19 nt, Homo sapiens
  misc_RNA (1)...(19): siRNA sense strand
gagagcagcauuucagaac

SEQ ID NO: 1123000 - RNA, 19 nt, Homo sapiens
  misc_RNA (1)...(19): siRNA sense strand
uggagaaacccucuaaauc

SEQ ID NO: 1123001 - RNA, 19 nt, Homo sapiens
  misc_RNA (1)...(19): siRNA sense strand
aaggugcucuuaaucuguu

SEQ ID NO: 1123002 - RNA, 19 nt, Homo sapiens
  misc_RNA (1)...(19): siRNA sense strand
gaggcugugugagaauuug

SEQ ID NO: 1123003 - RNA, 19 nt, Homo sapiens
  misc_RNA (1)...(19): siRNA sense strand
aaagucagcagcaaucugu

SEQ ID NO: 1123004 - RNA, 19 nt, Homo sapiens
  misc_RNA (1)...(19): siRNA sense strand
gcccugaggaucccuuuga

SEQ ID NO: 1123005 - RNA, 19 nt, Homo sapiens
  misc_RNA (1)...(19): siRNA sense strand
cagcaugaagcucaacuga

SEQ ID NO: 1123006 - RNA, 19 nt, Homo sapiens
  misc_RNA (1)...(19): siRNA sense strand
agaaacccucuaaaucuuu

SEQ ID NO: 1123007 - RNA, 19 nt, Homo sapiens
  misc_RNA (1)...(19): siRNA sense strand
uuucagaggagcagaauau

SEQ ID NO: 1123008 - RNA, 19 nt, Homo sapiens
  misc_RNA (1)...(19): siRNA sense strand
gcacagcagaaauuaaugc

SEQ ID NO: 1123009 - RNA, 19 nt, Homo sapiens
  misc_RNA (1)...(19): siRNA sense strand
ccaugaaaaucucuuagaa

SEQ ID NO: 1123010 - RNA, 19 nt, Homo sapiens
  misc_RNA (1)...(19): siRNA sense strand
agaauaagagaagcaguaa

SEQ ID NO: 1123011 - RNA, 19 nt, Homo sapiens
  misc_RNA (1)...(19): siRNA sense strand
gcacucaaggcaggagaaa

SEQ ID NO: 1123012 - RNA, 19 nt, Homo sapiens
  misc_RNA (1)...(19): siRNA sense strand
ucuacuggcugaggaagaa

SEQ ID NO: 1123013 - RNA, 19 nt, Homo sapiens
  misc_RNA (1)...(19): siRNA sense strand
ccuaucaagcuuuagaauu

SEQ ID NO: 1123014 - RNA, 19 nt, Homo sapiens
  misc_RNA (1)...(19): siRNA sense strand
ucaggaccaucagaccuuu

SEQ ID NO: 1123015 - RNA, 19 nt, Homo sapiens
  misc_RNA (1)...(19): siRNA sense strand
auauaagccuuccaaaguc

SEQ ID NO: 1123016 - RNA, 19 nt, Homo sapiens
  misc_RNA (1)...(19): siRNA sense strand
gggugauagugaagcaauu

SEQ ID NO: 1123017 - RNA, 19 nt, Homo sapiens
  misc_RNA (1)...(19): siRNA sense strand
uaagcacagcagaaauuaa

SEQ ID NO: 1123018 - RNA, 19 nt, Homo sapiens
  misc_RNA (1)...(19): siRNA sense strand
gaggagagauaccaaugua

SEQ ID NO: 1123019 - RNA, 19 nt, Homo sapiens
  misc_RNA (1)...(19): siRNA sense strand
ucauagagcuguggaauuu

SEQ ID NO: 1123020 - RNA, 19 nt, Homo sapiens
  misc_RNA (1)...(19): siRNA sense strand
gagaaacccucuaaaucuu

SEQ ID NO: 1123021 - RNA, 19 nt, Homo sapiens
  misc_RNA (1)...(19): siRNA sense strand
gauauaagccuuccaaagu

SEQ ID NO: 1123022 - RNA, 19 nt, Homo sapiens
  misc_RNA (1)...(19): siRNA sense strand
gacaaggacuguuucagaa

SEQ ID NO: 1123023 - RNA, 19 nt, Homo sapiens
  misc_RNA (1)...(19): siRNA sense strand
ccaauguacugguauauau

SEQ ID NO: 1123024 - RNA, 19 nt, Homo sapiens
  misc_RNA (1)...(19): siRNA sense strand
gaaaccagcagacagaauu

SEQ ID NO: 1123025 - RNA, 19 nt, Homo sapiens
  misc_RNA (1)...(19): siRNA sense strand
gcugaaagguuauuuaaac

SEQ ID NO: 1123026 - RNA, 19 nt, Homo sapiens
  misc_RNA (1)...(19): siRNA sense strand
gaagaagcaacaacuauug

SEQ ID NO: 1123027 - RNA, 19 nt, Homo sapiens
  misc_RNA (1)...(19): siRNA sense strand
ggagaaacccucuaaaucu

SEQ ID NO: 1123028 - RNA, 19 nt, Homo sapiens
  misc_RNA (1)...(19): siRNA sense strand
ggaagaagcaacaacuauu

SEQ ID NO: 1123029 - RNA, 19 nt, Homo sapiens
  misc_RNA (1)...(19): siRNA sense strand
gaaacagccuccagaagag

SEQ ID NO: 1123030 - RNA, 19 nt, Homo sapiens
  misc_RNA (1)...(19): siRNA sense strand
ggaauuuaauccucauguu

SEQ ID NO: 1123031 - RNA, 19 nt, Homo sapiens
  misc_RNA (1)...(19): siRNA sense strand
ugagagauuugaugaaaga

SEQ ID NO: 1123032 - RNA, 19 nt, Homo sapiens
  misc_RNA (1)...(19): siRNA sense strand
gaauagaaggugcucuuaa

SEQ ID NO: 1123033 - RNA, 19 nt, Homo sapiens
  misc_RNA (1)...(19): siRNA sense strand
gaacagagagcagcauuuc

SEQ ID NO: 1123034 - RNA, 19 nt, Homo sapiens
  misc_RNA (1)...(19): siRNA sense strand
uguagaugcugaaagguua

SEQ ID NO: 1123035 - RNA, 19 nt, Homo sapiens
  misc_RNA (1)...(19): siRNA sense strand
gaauauaggagauacacuu

SEQ ID NO: 1123036 - RNA, 19 nt, Homo sapiens
  misc_RNA (1)...(19): siRNA sense strand
acacuugggugacugguaa

SEQ ID NO: 1123037 - RNA, 19 nt, Homo sapiens
  misc_RNA (1)...(19): siRNA sense strand
gcaggagaaacaauuuaua

SEQ ID NO: 1123038 - RNA, 19 nt, Homo sapiens
  misc_RNA (1)...(19): siRNA sense strand
aauagaaggugcucuuaau

SEQ ID NO: 1123039 - RNA, 19 nt, Homo sapiens
  misc_RNA (1)...(19): siRNA sense strand
auagagcuguggaauuuaa

SEQ ID NO: 1123040 - RNA, 19 nt, Homo sapiens
  misc_RNA (1)...(19): siRNA sense strand
gcaagaaaauuaggaagaa

SEQ ID NO: 1123041 - RNA, 19 nt, Homo sapiens
  misc_RNA (1)...(19): siRNA sense strand
gcacuggaaacgaauagaa

SEQ ID NO: 1123042 - RNA, 19 nt, Homo sapiens
  misc_RNA (1)...(19): siRNA sense strand
agaaacagccuccagaaga

SEQ ID NO: 1123043 - RNA, 19 nt, Homo sapiens
  misc_RNA (1)...(19): siRNA sense strand
gaauuuaauccucauguuc

SEQ ID NO: 1123044 - RNA, 19 nt, Homo sapiens
  misc_RNA (1)...(19): siRNA sense strand
gaauguaagguauggagaa

SEQ ID NO: 1123045 - RNA, 19 nt, Homo sapiens
  misc_RNA (1)...(19): siRNA sense strand
ggauuaagcacagcagaaa

SEQ ID NO: 1123046 - RNA, 19 nt, Homo sapiens
  misc_RNA (1)...(19): siRNA sense strand
gcaccaaaguccucagcau

SEQ ID NO: 1123047 - RNA, 19 nt, Homo sapiens
  misc_RNA (1)...(19): siRNA sense strand
gagcagaauauaggagaua

SEQ ID NO: 1123048 - RNA, 19 nt, Homo sapiens
  misc_RNA (1)...(19): siRNA sense strand
ucauugauaucaggacuaa

SEQ ID NO: 1123049 - RNA, 19 nt, Homo sapiens
  misc_RNA (1)...(19): siRNA sense strand
aagagccacuuacauacua

SEQ ID NO: 1123050 - RNA, 19 nt, Homo sapiens
  misc_RNA (1)...(19): siRNA sense strand
ccaaaguccucagcaugaa

SEQ ID NO: 1123051 - RNA, 19 nt, Homo sapiens
  misc_RNA (1)...(19): siRNA sense strand
gcaauugccuaugcuuucu

SEQ ID NO: 1123052 - RNA, 19 nt, Homo sapiens
  misc_RNA (1)...(19): siRNA sense strand
cagaauuugucagaaugua

SEQ ID NO: 1123053 - RNA, 19 nt, Homo sapiens
  misc_RNA (1)...(19): siRNA sense strand
cuucagcacuggaaacgaa

SEQ ID NO: 1123054 - RNA, 19 nt, Homo sapiens
  misc_RNA (1)...(19): siRNA sense strand
gcagcacuguugaagacaa

SEQ ID NO: 1123055 - RNA, 19 nt, Homo sapiens
  misc_RNA (1)...(19): siRNA sense strand
uuacaggccuauccagaug

SEQ ID NO: 1123056 - RNA, 19 nt, Homo sapiens
  misc_RNA (1)...(19): siRNA sense strand
gaugcugaaagguuauuua

SEQ ID NO: 1123057 - RNA, 19 nt, Homo sapiens
  misc_RNA (1)...(19): siRNA sense strand
gaggaagaagcaacaacua

SEQ ID NO: 1123058 - RNA, 19 nt, Homo sapiens
  misc_RNA (1)...(19): siRNA sense strand
ggaacagagagcagcauuu

SEQ ID NO: 1123059 - RNA, 19 nt, Homo sapiens
  misc_RNA (1)...(19): siRNA sense strand
agaaauuaaugccguggaa

SEQ ID NO: 1123060 - RNA, 19 nt, Homo sapiens
  misc_RNA (1)...(19): siRNA sense strand
caaggcaggagaaacaauu

SEQ ID NO: 1123061 - RNA, 19 nt, Homo sapiens
  misc_RNA (1)...(19): siRNA sense strand
caaagcagccuaucaagcu

SEQ ID NO: 1123062 - RNA, 19 nt, Homo sapiens
  misc_RNA (1)...(19): siRNA sense strand
gagcagcauuucagaacca

SEQ ID NO: 1123063 - RNA, 19 nt, Homo sapiens
  misc_RNA (1)...(19): siRNA sense strand
cauucucacucaccaguuu

SEQ ID NO: 1123064 - RNA, 19 nt, Homo sapiens
  misc_RNA (1)...(19): siRNA sense strand
agacaaggacuguuucaga

SEQ ID NO: 1123065 - RNA, 19 nt, Homo sapiens
  misc_RNA (1)...(19): siRNA sense strand
cagcagcacuguugaagac

SEQ ID NO: 1123066 - RNA, 19 nt, Homo sapiens
  misc_RNA (1)...(19): siRNA sense strand
gaaacccucuaaaucuuuu

SEQ ID NO: 1123067 - RNA, 19 nt, Homo sapiens
  misc_RNA (1)...(19): siRNA sense strand
gagcgucuccugcaucugu

SEQ ID NO: 1123068 - RNA, 19 nt, Homo sapiens
  misc_RNA (1)...(19): siRNA sense strand
cagaaggcuuggagggaaa

SEQ ID NO: 1123069 - RNA, 19 nt, Homo sapiens
  misc_RNA (1)...(19): siRNA sense strand
gaaggugcucuuaaucugu

SEQ ID NO: 1123070 - RNA, 19 nt, Homo sapiens
  misc_RNA (1)...(19): siRNA sense strand
gaagacaaggacuguuuca

SEQ ID NO: 1123071 - RNA, 19 nt, Homo sapiens
  misc_RNA (1)...(19): siRNA sense strand
uauaagccuuccaaaguca

SEQ ID NO: 1123072 - RNA, 19 nt, Homo sapiens
  misc_RNA (1)...(19): siRNA sense strand
gaugauauaagccuuccaa

SEQ ID NO: 1123073 - RNA, 19 nt, Homo sapiens
  misc_RNA (1)...(19): siRNA sense strand
aagaauaagagaagcagua

SEQ ID NO: 1123074 - RNA, 19 nt, Homo sapiens
  misc_RNA (1)...(19): siRNA sense strand
aaucaaagcagccuaucaa

SEQ ID NO: 1123075 - RNA, 19 nt, Homo sapiens
  misc_RNA (1)...(19): siRNA sense strand
cgaauagaaggugcucuua

SEQ ID NO: 1123076 - RNA, 19 nt, Homo sapiens
  misc_RNA (1)...(19): siRNA sense strand
gaaacggggugauagugaa

SEQ ID NO: 1123077 - RNA, 19 nt, Homo sapiens
  misc_RNA (1)...(19): siRNA sense strand
gaacauccaugaaaaucuc

SEQ ID NO: 1123078 - RNA, 19 nt, Homo sapiens
  misc_RNA (1)...(19): siRNA sense strand
gaaauccuccagcucgaau

SEQ ID NO: 1123079 - RNA, 19 nt, Homo sapiens
  misc_RNA (1)...(19): siRNA sense strand
ugauagccauucucacuca

SEQ ID NO: 1123080 - RNA, 19 nt, Homo sapiens
  misc_RNA (1)...(19): siRNA sense strand
guauggagaaacccucuaa

SEQ ID NO: 1123081 - RNA, 19 nt, Homo sapiens
  misc_RNA (1)...(19): siRNA sense strand
agaaggugcucuuaaucug

SEQ ID NO: 1123082 - RNA, 19 nt, Homo sapiens
  misc_RNA (1)...(19): siRNA sense strand
gugaagcaauugccuaugc

SEQ ID NO: 1123083 - RNA, 19 nt, Homo sapiens
  misc_RNA (1)...(19): siRNA sense strand
gaauaagagaagcaguaaa

SEQ ID NO: 1123084 - RNA, 19 nt, Homo sapiens
  misc_RNA (1)...(19): siRNA sense strand
gaaucaaagcagccuauca

SEQ ID NO: 1123085 - RNA, 19 nt, Homo sapiens
  misc_RNA (1)...(19): siRNA sense strand
cagacacaguuaugcagaa

SEQ ID NO: 1123086 - RNA, 19 nt, Homo sapiens
  misc_RNA (1)...(19): siRNA sense strand
gagauacacuugggugacu

SEQ ID NO: 1123087 - RNA, 19 nt, Homo sapiens
  misc_RNA (1)...(19): siRNA sense strand
ggagagauaccaauguacu

SEQ ID NO: 1123088 - RNA, 19 nt, Homo sapiens
  misc_RNA (1)...(19): siRNA sense strand
caggagaaacaauuuauag

SEQ ID NO: 1123089 - RNA, 19 nt, Homo sapiens
  misc_RNA (1)...(19): siRNA sense strand
ggugguacuuccauaagca

SEQ ID NO: 1123090 - RNA, 19 nt, Homo sapiens
  misc_RNA (1)...(19): siRNA sense strand
ccagaaacagccuccagaa

SEQ ID NO: 1123091 - RNA, 19 nt, Homo sapiens
  misc_RNA (1)...(19): siRNA sense strand
ccauuucacagcaggauuu

SEQ ID NO: 1123092 - RNA, 19 nt, Homo sapiens
  misc_RNA (1)...(19): siRNA sense strand
aagcacagcagaaauuaau

SEQ ID NO: 1123093 - RNA, 19 nt, Homo sapiens
  misc_RNA (1)...(19): siRNA sense strand
gaauuugucagaauguaag

SEQ ID NO: 1123094 - RNA, 19 nt, Homo sapiens
  misc_RNA (1)...(19): siRNA sense strand
uuaagcacagcagaaauua

SEQ ID NO: 1123095 - RNA, 19 nt, Homo sapiens
  misc_RNA (1)...(19): siRNA sense strand
uauuguagaugcugaaagg

SEQ ID NO: 1123096 - RNA, 19 nt, Homo sapiens
  misc_RNA (1)...(19): siRNA sense strand
uaaagagccacuuacauac

SEQ ID NO: 1123097 - RNA, 19 nt, Homo sapiens
  misc_RNA (1)...(19): siRNA sense strand
ggagcagaauauaggagau

SEQ ID NO: 1123098 - RNA, 19 nt, Homo sapiens
  misc_RNA (1)...(19): siRNA sense strand
aauguaagguauggagaaa

SEQ ID NO: 1123099 - RNA, 19 nt, Homo sapiens
  misc_RNA (1)...(19): siRNA sense strand
gagagcagcauuucagaac

SEQ ID NO: 1123100 - RNA, 19 nt, Homo sapiens
  misc_RNA (1)...(19): siRNA sense strand
uggagaaacccucuaaauc

SEQ ID NO: 1123101 - RNA, 19 nt, Homo sapiens
  misc_RNA (1)...(19): siRNA sense strand
aaggugcucuuaaucuguu

SEQ ID NO: 1123102 - RNA, 19 nt, Homo sapiens
  misc_RNA (1)...(19): siRNA sense strand
gaggcugugugagaauuug

SEQ ID NO: 1123103 - RNA, 19 nt, Homo sapiens
  misc_RNA (1)...(19): siRNA sense strand
aaagucagcagcaaucugu

SEQ ID NO: 1123104 - RNA, 19 nt, Homo sapiens
  misc_RNA (1)...(19): siRNA sense strand
gcccugaggaucccuuuga

SEQ ID NO: 1123105 - RNA, 19 nt, Homo sapiens
  misc_RNA (1)...(19): siRNA sense strand
cagcaugaagcucaacuga

SEQ ID NO: 1123106 - RNA, 19 nt, Homo sapiens
  misc_RNA (1)...(19): siRNA sense strand
agaaacccucuaaaucuuu

SEQ ID NO: 1123107 - RNA, 19 nt, Homo sapiens
  misc_RNA (1)...(19): siRNA sense strand
uuucagaggagcagaauau

SEQ ID NO: 1123108 - RNA, 19 nt, Homo sapiens
  misc_RNA (1)...(19): siRNA sense strand
gcacagcagaaauuaaugc

SEQ ID NO: 1123109 - RNA, 19 nt, Homo sapiens
  misc_RNA (1)...(19): siRNA sense strand
ccaugaaaaucucuuagaa

SEQ ID NO: 1123110 - RNA, 19 nt, Homo sapiens
  misc_RNA (1)...(19): siRNA sense strand
agaauaagagaagcaguaa

SEQ ID NO: 1123111 - RNA, 19 nt, Homo sapiens
  misc_RNA (1)...(19): siRNA sense strand
gcacucaaggcaggagaaa

SEQ ID NO: 1123112 - RNA, 19 nt, Homo sapiens
  misc_RNA (1)...(19): siRNA sense strand
ucuacuggcugaggaagaa

SEQ ID NO: 1123113 - RNA, 19 nt, Homo sapiens
  misc_RNA (1)...(19): siRNA sense strand
ccuaucaagcuuuagaauu

SEQ ID NO: 1123114 - RNA, 19 nt, Homo sapiens
  misc_RNA (1)...(19): siRNA sense strand
ucaggaccaucagaccuuu

SEQ ID NO: 1123115 - RNA, 19 nt, Homo sapiens
  misc_RNA (1)...(19): siRNA sense strand
auauaagccuuccaaaguc

SEQ ID NO: 1123116 - RNA, 19 nt, Homo sapiens
  misc_RNA (1)...(19): siRNA sense strand
gggugauagugaagcaauu

SEQ ID NO: 1123117 - RNA, 19 nt, Homo sapiens
  misc_RNA (1)...(19): siRNA sense strand
uaagcacagcagaaauuaa

SEQ ID NO: 1123118 - RNA, 19 nt, Homo sapiens
  misc_RNA (1)...(19): siRNA sense strand
gaggagagauaccaaugua

SEQ ID NO: 1123119 - RNA, 19 nt, Homo sapiens
  misc_RNA (1)...(19): siRNA sense strand
ucauagagcuguggaauuu

SEQ ID NO: 1123120 - RNA, 19 nt, Homo sapiens
  misc_RNA (1)...(19): siRNA sense strand
gagaaacccucuaaaucuu

SEQ ID NO: 1123121 - RNA, 19 nt, Homo sapiens
  misc_RNA (1)...(19): siRNA sense strand
gauauaagccuuccaaagu

SEQ ID NO: 1123122 - RNA, 19 nt, Homo sapiens
  misc_RNA (1)...(19): siRNA sense strand
gacaaggacuguuucagaa

SEQ ID NO: 1123123 - RNA, 19 nt, Homo sapiens
  misc_RNA (1)...(19): siRNA sense strand
ccaauguacugguauauau

SEQ ID NO: 1123124 - RNA, 19 nt, Homo sapiens
  misc_RNA (1)...(19): siRNA sense strand
gaaaccagcagacagaauu

SEQ ID NO: 1123125 - RNA, 19 nt, Homo sapiens
  misc_RNA (1)...(19): siRNA sense strand
gcugaaagguuauuuaaac

SEQ ID NO: 1123126 - RNA, 19 nt, Homo sapiens
  misc_RNA (1)...(19): siRNA sense strand
gaagaagcaacaacuauug

SEQ ID NO: 1123127 - RNA, 19 nt, Homo sapiens
  misc_RNA (1)...(19): siRNA sense strand
ggagaaacccucuaaaucu

SEQ ID NO: 1123128 - RNA, 19 nt, Homo sapiens
  misc_RNA (1)...(19): siRNA sense strand
ggaagaagcaacaacuauu

SEQ ID NO: 1123129 - RNA, 19 nt, Homo sapiens
  misc_RNA (1)...(19): siRNA sense strand
gaaacagccuccagaagag

SEQ ID NO: 1123130 - RNA, 19 nt, Homo sapiens
  misc_RNA (1)...(19): siRNA sense strand
ggaauuuaauccucauguu

SEQ ID NO: 1123131 - RNA, 19 nt, Homo sapiens
  misc_RNA (1)...(19): siRNA sense strand
ugagagauuugaugaaaga

SEQ ID NO: 1123132 - RNA, 19 nt, Homo sapiens
  misc_RNA (1)...(19): siRNA sense strand
gaauagaaggugcucuuaa

SEQ ID NO: 1123133 - RNA, 19 nt, Homo sapiens
  misc_RNA (1)...(19): siRNA sense strand
gaacagagagcagcauuuc

SEQ ID NO: 1123134 - RNA, 19 nt, Homo sapiens
  misc_RNA (1)...(19): siRNA sense strand
uguagaugcugaaagguua

SEQ ID NO: 1123135 - RNA, 19 nt, Homo sapiens
  misc_RNA (1)...(19): siRNA sense strand
gaauauaggagauacacuu

SEQ ID NO: 1123136 - RNA, 19 nt, Homo sapiens
  misc_RNA (1)...(19): siRNA sense strand
acacuugggugacugguaa

SEQ ID NO: 1123137 - RNA, 19 nt, Homo sapiens
  misc_RNA (1)...(19): siRNA sense strand
gcaggagaaacaauuuaua

SEQ ID NO: 1123138 - RNA, 19 nt, Homo sapiens
  misc_RNA (1)...(19): siRNA sense strand
aauagaaggugcucuuaau

SEQ ID NO: 1123139 - RNA, 19 nt, Homo sapiens
  misc_RNA (1)...(19): siRNA sense strand
auagagcuguggaauuuaa

SEQ ID NO: 1123140 - RNA, 19 nt, Homo sapiens
  misc_RNA (1)...(19): siRNA sense strand
gcaagaaaauuaggaagaa

SEQ ID NO: 1123141 - RNA, 19 nt, Homo sapiens
  misc_RNA (1)...(19): siRNA sense strand
gcacuggaaacgaauagaa

SEQ ID NO: 1123142 - RNA, 19 nt, Homo sapiens
  misc_RNA (1)...(19): siRNA sense strand
agaaacagccuccagaaga

SEQ ID NO: 1123143 - RNA, 19 nt, Homo sapiens
  misc_RNA (1)...(19): siRNA sense strand
gaauuuaauccucauguuc

SEQ ID NO: 1123144 - RNA, 19 nt, Homo sapiens
  misc_RNA (1)...(19): siRNA sense strand
gaauguaagguauggagaa

SEQ ID NO: 1123145 - RNA, 19 nt, Homo sapiens
  misc_RNA (1)...(19): siRNA sense strand
ggauuaagcacagcagaaa

SEQ ID NO: 1123146 - RNA, 19 nt, Homo sapiens
  misc_RNA (1)...(19): siRNA sense strand
gcaccaaaguccucagcau

SEQ ID NO: 1123147 - RNA, 19 nt, Homo sapiens
  misc_RNA (1)...(19): siRNA sense strand
gagcagaauauaggagaua

SEQ ID NO: 1123148 - RNA, 19 nt, Homo sapiens
  misc_RNA (1)...(19): siRNA sense strand
ucauugauaucaggacuaa

SEQ ID NO: 1123149 - RNA, 19 nt, Homo sapiens
  misc_RNA (1)...(19): siRNA sense strand
aagagccacuuacauacua

SEQ ID NO: 1123150 - RNA, 19 nt, Homo sapiens
  misc_RNA (1)...(19): siRNA sense strand
ccaaaguccucagcaugaa

SEQ ID NO: 1123151 - RNA, 19 nt, Homo sapiens
  misc_RNA (1)...(19): siRNA sense strand
gcaauugccuaugcuuucu

SEQ ID NO: 1123152 - RNA, 19 nt, Homo sapiens
  misc_RNA (1)...(19): siRNA sense strand
cagaauuugucagaaugua

SEQ ID NO: 1123153 - RNA, 19 nt, Homo sapiens
  misc_RNA (1)...(19): siRNA sense strand
cuucagcacuggaaacgaa

SEQ ID NO: 1123154 - RNA, 19 nt, Homo sapiens
  misc_RNA (1)...(19): siRNA sense strand
gcagcacuguugaagacaa

SEQ ID NO: 1123155 - RNA, 19 nt, Homo sapiens
  misc_RNA (1)...(19): siRNA sense strand
uuacaggccuauccagaug

SEQ ID NO: 1123156 - RNA, 19 nt, Homo sapiens
  misc_RNA (1)...(19): siRNA sense strand
gaugcugaaagguuauuua

SEQ ID NO: 1123157 - RNA, 19 nt, Homo sapiens
  misc_RNA (1)...(19): siRNA sense strand
gaggaagaagcaacaacua

SEQ ID NO: 1123158 - RNA, 19 nt, Homo sapiens
  misc_RNA (1)...(19): siRNA sense strand
ggaacagagagcagcauuu

SEQ ID NO: 1123159 - RNA, 19 nt, Homo sapiens
  misc_RNA (1)...(19): siRNA sense strand
agaaauuaaugccguggaa

SEQ ID NO: 1123160 - RNA, 19 nt, Homo sapiens
  misc_RNA (1)...(19): siRNA sense strand
caaggcaggagaaacaauu

SEQ ID NO: 1123161 - RNA, 19 nt, Homo sapiens
  misc_RNA (1)...(19): siRNA sense strand
caaagcagccuaucaagcu

SEQ ID NO: 1123162 - RNA, 19 nt, Homo sapiens
  misc_RNA (1)...(19): siRNA sense strand
gagcagcauuucagaacca

SEQ ID NO: 1123163 - RNA, 19 nt, Homo sapiens
  misc_RNA (1)...(19): siRNA sense strand
cauucucacucaccaguuu

SEQ ID NO: 1123164 - RNA, 19 nt, Homo sapiens
  misc_RNA (1)...(19): siRNA sense strand
agacaaggacuguuucaga

SEQ ID NO: 1123165 - RNA, 19 nt, Homo sapiens
  misc_RNA (1)...(19): siRNA sense strand
cagcagcacuguugaagac

SEQ ID NO: 1123166 - RNA, 19 nt, Homo sapiens
  misc_RNA (1)...(19): siRNA sense strand
gaaacccucuaaaucuuuu

SEQ ID NO: 1123167 - RNA, 19 nt, Homo sapiens
  misc_RNA (1)...(19): siRNA sense strand
gagcgucuccugcaucugu

SEQ ID NO: 1123168 - RNA, 19 nt, Homo sapiens
  misc_RNA (1)...(19): siRNA sense strand
cagaaggcuuggagggaaa

SEQ ID NO: 1123169 - RNA, 19 nt, Homo sapiens
  misc_RNA (1)...(19): siRNA sense strand
gaaggugcucuuaaucugu

SEQ ID NO: 1123170 - RNA, 19 nt, Homo sapiens
  misc_RNA (1)...(19): siRNA sense strand
gaagacaaggacuguuuca

SEQ ID NO: 1123171 - RNA, 19 nt, Homo sapiens
  misc_RNA (1)...(19): siRNA sense strand
uauaagccuuccaaaguca

SEQ ID NO: 1123172 - RNA, 19 nt, Homo sapiens
  misc_RNA (1)...(19): siRNA sense strand
gaugauauaagccuuccaa

SEQ ID NO: 1123173 - RNA, 19 nt, Homo sapiens
  misc_RNA (1)...(19): siRNA sense strand
aagaauaagagaagcagua

SEQ ID NO: 1123174 - RNA, 19 nt, Homo sapiens
  misc_RNA (1)...(19): siRNA sense strand
aaucaaagcagccuaucaa

SEQ ID NO: 1123175 - RNA, 19 nt, Homo sapiens
  misc_RNA (1)...(19): siRNA sense strand
cgaauagaaggugcucuua

SEQ ID NO: 1123176 - RNA, 19 nt, Homo sapiens
  misc_RNA (1)...(19): siRNA sense strand
gaaacggggugauagugaa

SEQ ID NO: 1123177 - RNA, 19 nt, Homo sapiens
  misc_RNA (1)...(19): siRNA sense strand
gaacauccaugaaaaucuc

SEQ ID NO: 1123178 - RNA, 19 nt, Homo sapiens
  misc_RNA (1)...(19): siRNA sense strand
gaaauccuccagcucgaau

SEQ ID NO: 1123179 - RNA, 19 nt, Homo sapiens
  misc_RNA (1)...(19): siRNA sense strand
ugauagccauucucacuca

SEQ ID NO: 1123180 - RNA, 19 nt, Homo sapiens
  misc_RNA (1)...(19): siRNA sense strand
guauggagaaacccucuaa

SEQ ID NO: 1123181 - RNA, 19 nt, Homo sapiens
  misc_RNA (1)...(19): siRNA sense strand
agaaggugcucuuaaucug

SEQ ID NO: 1123182 - RNA, 19 nt, Homo sapiens
  misc_RNA (1)...(19): siRNA sense strand
gugaagcaauugccuaugc

SEQ ID NO: 1123183 - RNA, 19 nt, Homo sapiens
  misc_RNA (1)...(19): siRNA sense strand
gaauaagagaagcaguaaa

SEQ ID NO: 1123184 - RNA, 19 nt, Homo sapiens
  misc_RNA (1)...(19): siRNA sense strand
gaaucaaagcagccuauca

SEQ ID NO: 1123185 - RNA, 19 nt, Homo sapiens
  misc_RNA (1)...(19): siRNA sense strand
cagacacaguuaugcagaa

SEQ ID NO: 1123186 - RNA, 19 nt, Homo sapiens
  misc_RNA (1)...(19): siRNA sense strand
gagauacacuugggugacu

SEQ ID NO: 1123187 - RNA, 19 nt, Homo sapiens
  misc_RNA (1)...(19): siRNA sense strand
ggagagauaccaauguacu

SEQ ID NO: 1123188 - RNA, 19 nt, Homo sapiens
  misc_RNA (1)...(19): siRNA sense strand
caggagaaacaauuuauag

SEQ ID NO: 1123189 - RNA, 19 nt, Homo sapiens
  misc_RNA (1)...(19): siRNA sense strand
ggugguacuuccauaagca

SEQ ID NO: 1123190 - RNA, 19 nt, Homo sapiens
  misc_RNA (1)...(19): siRNA sense strand
ccagaaacagccuccagaa

SEQ ID NO: 1123191 - RNA, 19 nt, Homo sapiens
  misc_RNA (1)...(19): siRNA sense strand
ccauuucacagcaggauuu

SEQ ID NO: 1123192 - RNA, 19 nt, Homo sapiens
  misc_RNA (1)...(19): siRNA sense strand
aagcacagcagaaauuaau

SEQ ID NO: 1123193 - RNA, 19 nt, Homo sapiens
  misc_RNA (1)...(19): siRNA sense strand
gaauuugucagaauguaag

SEQ ID NO: 1123194 - RNA, 19 nt, Homo sapiens
  misc_RNA (1)...(19): siRNA sense strand
uuaagcacagcagaaauua

SEQ ID NO: 1123195 - RNA, 19 nt, Homo sapiens
  misc_RNA (1)...(19): siRNA sense strand
uauuguagaugcugaaagg

SEQ ID NO: 1123196 - RNA, 19 nt, Homo sapiens
  misc_RNA (1)...(19): siRNA sense strand
uaaagagccacuuacauac

SEQ ID NO: 1123197 - RNA, 19 nt, Homo sapiens
  misc_RNA (1)...(19): siRNA sense strand
ggagcagaauauaggagau

SEQ ID NO: 1123198 - RNA, 19 nt, Homo sapiens
  misc_RNA (1)...(19): siRNA sense strand
aauguaagguauggagaaa

SEQ ID NO: 1123199 - RNA, 19 nt, Homo sapiens
  misc_RNA (1)...(19): siRNA sense strand
gagagcagcauuucagaac

SEQ ID NO: 1123200 - RNA, 19 nt, Homo sapiens
  misc_RNA (1)...(19): siRNA sense strand
uggagaaacccucuaaauc

SEQ ID NO: 1123201 - RNA, 19 nt, Homo sapiens
  misc_RNA (1)...(19): siRNA sense strand
aaggugcucuuaaucuguu

SEQ ID NO: 1123202 - RNA, 19 nt, Homo sapiens
  misc_RNA (1)...(19): siRNA sense strand
gaggcugugugagaauuug

SEQ ID NO: 1123203 - RNA, 19 nt, Homo sapiens
  misc_RNA (1)...(19): siRNA sense strand
aaagucagcagcaaucugu

SEQ ID NO: 1123204 - RNA, 19 nt, Homo sapiens
  misc_RNA (1)...(19): siRNA sense strand
gcccugaggaucccuuuga

SEQ ID NO: 1123205 - RNA, 19 nt, Homo sapiens
  misc_RNA (1)...(19): siRNA sense strand
cagcaugaagcucaacuga

SEQ ID NO: 1123206 - RNA, 19 nt, Homo sapiens
  misc_RNA (1)...(19): siRNA sense strand
agaaacccucuaaaucuuu

SEQ ID NO: 1123207 - RNA, 19 nt, Homo sapiens
  misc_RNA (1)...(19): siRNA sense strand
uuucagaggagcagaauau

SEQ ID NO: 1123208 - RNA, 19 nt, Homo sapiens
  misc_RNA (1)...(19): siRNA sense strand
gcacagcagaaauuaaugc

SEQ ID NO: 1123209 - RNA, 19 nt, Homo sapiens
  misc_RNA (1)...(19): siRNA sense strand
ccaugaaaaucucuuagaa

SEQ ID NO: 1123210 - RNA, 19 nt, Homo sapiens
  misc_RNA (1)...(19): siRNA sense strand
agaauaagagaagcaguaa

SEQ ID NO: 1123211 - RNA, 19 nt, Homo sapiens
  misc_RNA (1)...(19): siRNA sense strand
gcacucaaggcaggagaaa

SEQ ID NO: 1123212 - RNA, 19 nt, Homo sapiens
  misc_RNA (1)...(19): siRNA sense strand
ucuacuggcugaggaagaa

SEQ ID NO: 1123213 - RNA, 19 nt, Homo sapiens
  misc_RNA (1)...(19): siRNA sense strand
ccuaucaagcuuuagaauu

SEQ ID NO: 1123214 - RNA, 19 nt, Homo sapiens
  misc_RNA (1)...(19): siRNA sense strand
ucaggaccaucagaccuuu

SEQ ID NO: 1123215 - RNA, 19 nt, Homo sapiens
  misc_RNA (1)...(19): siRNA sense strand
auauaagccuuccaaaguc

SEQ ID NO: 1123216 - RNA, 19 nt, Homo sapiens
  misc_RNA (1)...(19): siRNA sense strand
gggugauagugaagcaauu

SEQ ID NO: 1123217 - RNA, 19 nt, Homo sapiens
  misc_RNA (1)...(19): siRNA sense strand
uaagcacagcagaaauuaa

SEQ ID NO: 1123218 - RNA, 19 nt, Homo sapiens
  misc_RNA (1)...(19): siRNA sense strand
gaggagagauaccaaugua

SEQ ID NO: 1123219 - RNA, 19 nt, Homo sapiens
  misc_RNA (1)...(19): siRNA sense strand
ucauagagcuguggaauuu

SEQ ID NO: 1123220 - RNA, 19 nt, Homo sapiens
  misc_RNA (1)...(19): siRNA sense strand
gagaaacccucuaaaucuu

SEQ ID NO: 1123221 - RNA, 19 nt, Homo sapiens
  misc_RNA (1)...(19): siRNA sense strand
gauauaagccuuccaaagu

SEQ ID NO: 1123222 - RNA, 19 nt, Homo sapiens
  misc_RNA (1)...(19): siRNA sense strand
gacaaggacuguuucagaa

SEQ ID NO: 1123223 - RNA, 19 nt, Homo sapiens
  misc_RNA (1)...(19): siRNA sense strand
ccaauguacugguauauau

SEQ ID NO: 1123224 - RNA, 19 nt, Homo sapiens
  misc_RNA (1)...(19): siRNA sense strand
gaaaccagcagacagaauu

SEQ ID NO: 1123225 - RNA, 19 nt, Homo sapiens
  misc_RNA (1)...(19): siRNA sense strand
gcugaaagguuauuuaaac

SEQ ID NO: 1123226 - RNA, 19 nt, Homo sapiens
  misc_RNA (1)...(19): siRNA sense strand
gaagaagcaacaacuauug

SEQ ID NO: 1123227 - RNA, 19 nt, Homo sapiens
  misc_RNA (1)...(19): siRNA sense strand
ggagaaacccucuaaaucu

SEQ ID NO: 1123228 - RNA, 19 nt, Homo sapiens
  misc_RNA (1)...(19): siRNA sense strand
ggaagaagcaacaacuauu

SEQ ID NO: 1123229 - RNA, 19 nt, Homo sapiens
  misc_RNA (1)...(19): siRNA sense strand
gaaacagccuccagaagag

SEQ ID NO: 1123230 - RNA, 19 nt, Homo sapiens
  misc_RNA (1)...(19): siRNA sense strand
ggaauuuaauccucauguu

SEQ ID NO: 1123231 - RNA, 19 nt, Homo sapiens
  misc_RNA (1)...(19): siRNA sense strand
ugagagauuugaugaaaga

SEQ ID NO: 1123232 - RNA, 19 nt, Homo sapiens
  misc_RNA (1)...(19): siRNA sense strand
gaauagaaggugcucuuaa

SEQ ID NO: 1123233 - RNA, 19 nt, Homo sapiens
  misc_RNA (1)...(19): siRNA sense strand
gaacagagagcagcauuuc

SEQ ID NO: 1123234 - RNA, 19 nt, Homo sapiens
  misc_RNA (1)...(19): siRNA sense strand
uguagaugcugaaagguua

SEQ ID NO: 1123235 - RNA, 19 nt, Homo sapiens
  misc_RNA (1)...(19): siRNA sense strand
gaauauaggagauacacuu

SEQ ID NO: 1123236 - RNA, 19 nt, Homo sapiens
  misc_RNA (1)...(19): siRNA sense strand
acacuugggugacugguaa

SEQ ID NO: 1123237 - RNA, 19 nt, Homo sapiens
  misc_RNA (1)...(19): siRNA sense strand
gcaggagaaacaauuuaua

SEQ ID NO: 1123238 - RNA, 19 nt, Homo sapiens
  misc_RNA (1)...(19): siRNA sense strand
aauagaaggugcucuuaau

SEQ ID NO: 1123239 - RNA, 19 nt, Homo sapiens
  misc_RNA (1)...(19): siRNA sense strand
auagagcuguggaauuuaa

SEQ ID NO: 1123240 - RNA, 19 nt, Homo sapiens
  misc_RNA (1)...(19): siRNA sense strand
gcaagaaaauuaggaagaa

SEQ ID NO: 1123241 - RNA, 19 nt, Homo sapiens
  misc_RNA (1)...(19): siRNA sense strand
gcacuggaaacgaauagaa

SEQ ID NO: 1123242 - RNA, 19 nt, Homo sapiens
  misc_RNA (1)...(19): siRNA sense strand
agaaacagccuccagaaga

SEQ ID NO: 1123243 - RNA, 19 nt, Homo sapiens
  misc_RNA (1)...(19): siRNA sense strand
gaauuuaauccucauguuc

SEQ ID NO: 1123244 - RNA, 19 nt, Homo sapiens
  misc_RNA (1)...(19): siRNA sense strand
gaauguaagguauggagaa

SEQ ID NO: 1123245 - RNA, 19 nt, Homo sapiens
  misc_RNA (1)...(19): siRNA sense strand
ggauuaagcacagcagaaa

SEQ ID NO: 1123246 - RNA, 19 nt, Homo sapiens
  misc_RNA (1)...(19): siRNA sense strand
gcaccaaaguccucagcau

SEQ ID NO: 1123247 - RNA, 19 nt, Homo sapiens
  misc_RNA (1)...(19): siRNA sense strand
gagcagaauauaggagaua

SEQ ID NO: 1123248 - RNA, 19 nt, Homo sapiens
  misc_RNA (1)...(19): siRNA sense strand
ucauugauaucaggacuaa

SEQ ID NO: 1123249 - RNA, 19 nt, Homo sapiens
  misc_RNA (1)...(19): siRNA sense strand
aagagccacuuacauacua

SEQ ID NO: 1123250 - RNA, 19 nt, Homo sapiens
  misc_RNA (1)...(19): siRNA sense strand
ccaaaguccucagcaugaa

SEQ ID NO: 1123251 - RNA, 19 nt, Homo sapiens
  misc_RNA (1)...(19): siRNA sense strand
gcaauugccuaugcuuucu

SEQ ID NO: 1123252 - RNA, 19 nt, Homo sapiens
  misc_RNA (1)...(19): siRNA sense strand
cagaauuugucagaaugua

SEQ ID NO: 1123253 - RNA, 19 nt, Homo sapiens
  misc_RNA (1)...(19): siRNA sense strand
cuucagcacuggaaacgaa

SEQ ID NO: 1123254 - RNA, 19 nt, Homo sapiens
  misc_RNA (1)...(19): siRNA sense strand
gcagcacuguugaagacaa

SEQ ID NO: 1123255 - RNA, 19 nt, Homo sapiens
  misc_RNA (1)...(19): siRNA sense strand
uuacaggccuauccagaug

SEQ ID NO: 1123256 - RNA, 19 nt, Homo sapiens
  misc_RNA (1)...(19): siRNA sense strand
gaugcugaaagguuauuua

SEQ ID NO: 1123257 - RNA, 19 nt, Homo sapiens
  misc_RNA (1)...(19): siRNA sense strand
gaggaagaagcaacaacua

SEQ ID NO: 1123258 - RNA, 19 nt, Homo sapiens
  misc_RNA (1)...(19): siRNA sense strand
ggaacagagagcagcauuu

SEQ ID NO: 1123259 - RNA, 19 nt, Homo sapiens
  misc_RNA (1)...(19): siRNA sense strand
agaaauuaaugccguggaa

SEQ ID NO: 1123260 - RNA, 19 nt, Homo sapiens
  misc_RNA (1)...(19): siRNA sense strand
caaggcaggagaaacaauu

SEQ ID NO: 1123261 - RNA, 19 nt, Homo sapiens
  misc_RNA (1)...(19): siRNA sense strand
caaagcagccuaucaagcu

SEQ ID NO: 1123262 - RNA, 19 nt, Homo sapiens
  misc_RNA (1)...(19): siRNA sense strand
gagcagcauuucagaacca

SEQ ID NO: 1123263 - RNA, 19 nt, Homo sapiens
  misc_RNA (1)...(19): siRNA sense strand
cauucucacucaccaguuu

SEQ ID NO: 1123264 - RNA, 19 nt, Homo sapiens
  misc_RNA (1)...(19): siRNA sense strand
agacaaggacuguuucaga

SEQ ID NO: 1123265 - RNA, 19 nt, Homo sapiens
  misc_RNA (1)...(19): siRNA sense strand
cagcagcacuguugaagac

SEQ ID NO: 1123266 - RNA, 19 nt, Homo sapiens
  misc_RNA (1)...(19): siRNA sense strand
gaaacccucuaaaucuuuu

SEQ ID NO: 1123267 - RNA, 19 nt, Homo sapiens
  misc_RNA (1)...(19): siRNA sense strand
gagcgucuccugcaucugu

SEQ ID NO: 1123268 - RNA, 19 nt, Homo sapiens
  misc_RNA (1)...(19): siRNA sense strand
cagaaggcuuggagggaaa

SEQ ID NO: 1123269 - RNA, 19 nt, Homo sapiens
  misc_RNA (1)...(19): siRNA sense strand
gaaggugcucuuaaucugu

SEQ ID NO: 1123270 - RNA, 19 nt, Homo sapiens
  misc_RNA (1)...(19): siRNA sense strand
gaagacaaggacuguuuca

SEQ ID NO: 1123271 - RNA, 19 nt, Homo sapiens
  misc_RNA (1)...(19): siRNA sense strand
uauaagccuuccaaaguca

SEQ ID NO: 1123272 - RNA, 19 nt, Homo sapiens
  misc_RNA (1)...(19): siRNA sense strand
gaugauauaagccuuccaa

SEQ ID NO: 1123273 - RNA, 19 nt, Homo sapiens
  misc_RNA (1)...(19): siRNA sense strand
aagaauaagagaagcagua

SEQ ID NO: 1123274 - RNA, 19 nt, Homo sapiens
  misc_RNA (1)...(19): siRNA sense strand
aaucaaagcagccuaucaa

SEQ ID NO: 1123275 - RNA, 19 nt, Homo sapiens
  misc_RNA (1)...(19): siRNA sense strand
cgaauagaaggugcucuua

SEQ ID NO: 1123276 - RNA, 19 nt, Homo sapiens
  misc_RNA (1)...(19): siRNA sense strand
gaaacggggugauagugaa

SEQ ID NO: 1123277 - RNA, 19 nt, Homo sapiens
  misc_RNA (1)...(19): siRNA sense strand
gaacauccaugaaaaucuc

SEQ ID NO: 1123278 - RNA, 19 nt, Homo sapiens
  misc_RNA (1)...(19): siRNA sense strand
gaaauccuccagcucgaau

SEQ ID NO: 1123279 - RNA, 19 nt, Homo sapiens
  misc_RNA (1)...(19): siRNA sense strand
ugauagccauucucacuca

SEQ ID NO: 1123280 - RNA, 19 nt, Homo sapiens
  misc_RNA (1)...(19): siRNA sense strand
guauggagaaacccucuaa

SEQ ID NO: 1123281 - RNA, 19 nt, Homo sapiens
  misc_RNA (1)...(19): siRNA sense strand
agaaggugcucuuaaucug

SEQ ID NO: 1123282 - RNA, 19 nt, Homo sapiens
  misc_RNA (1)...(19): siRNA sense strand
gugaagcaauugccuaugc

SEQ ID NO: 1123283 - RNA, 19 nt, Homo sapiens
  misc_RNA (1)...(19): siRNA sense strand
gaauaagagaagcaguaaa

SEQ ID NO: 1123284 - RNA, 19 nt, Homo sapiens
  misc_RNA (1)...(19): siRNA sense strand
gaaucaaagcagccuauca

SEQ ID NO: 1123285 - RNA, 19 nt, Homo sapiens
  misc_RNA (1)...(19): siRNA sense strand
cagacacaguuaugcagaa

SEQ ID NO: 1123286 - RNA, 19 nt, Homo sapiens
  misc_RNA (1)...(19): siRNA sense strand
gagauacacuugggugacu

SEQ ID NO: 1123287 - RNA, 19 nt, Homo sapiens
  misc_RNA (1)...(19): siRNA sense strand
ggagagauaccaauguacu

SEQ ID NO: 1123288 - RNA, 19 nt, Homo sapiens
  misc_RNA (1)...(19): siRNA sense strand
caggagaaacaauuuauag

SEQ ID NO: 1123289 - RNA, 19 nt, Homo sapiens
  misc_RNA (1)...(19): siRNA sense strand
ggugguacuuccauaagca

SEQ ID NO: 1123290 - RNA, 19 nt, Homo sapiens
  misc_RNA (1)...(19): siRNA sense strand
ccagaaacagccuccagaa

SEQ ID NO: 1123291 - RNA, 19 nt, Homo sapiens
  misc_RNA (1)...(19): siRNA sense strand
ccauuucacagcaggauuu

SEQ ID NO: 1123292 - RNA, 19 nt, Homo sapiens
  misc_RNA (1)...(19): siRNA sense strand
aagcacagcagaaauuaau

SEQ ID NO: 1123293 - RNA, 19 nt, Homo sapiens
  misc_RNA (1)...(19): siRNA sense strand
gaauuugucagaauguaag

SEQ ID NO: 1123294 - RNA, 19 nt, Homo sapiens
  misc_RNA (1)...(19): siRNA sense strand
uuaagcacagcagaaauua

SEQ ID NO: 1123295 - RNA, 19 nt, Homo sapiens
  misc_RNA (1)...(19): siRNA sense strand
uauuguagaugcugaaagg

SEQ ID NO: 1123296 - RNA, 19 nt, Homo sapiens
  misc_RNA (1)...(19): siRNA sense strand
uaaagagccacuuacauac

SEQ ID NO: 1123297 - RNA, 19 nt, Homo sapiens
  misc_RNA (1)...(19): siRNA sense strand
ggagcagaauauaggagau

SEQ ID NO: 1123298 - RNA, 19 nt, Homo sapiens
  misc_RNA (1)...(19): siRNA sense strand
aauguaagguauggagaaa

SEQ ID NO: 1123299 - RNA, 19 nt, Homo sapiens
  misc_RNA (1)...(19): siRNA sense strand
gagagcagcauuucagaac

SEQ ID NO: 1123300 - RNA, 19 nt, Homo sapiens
  misc_RNA (1)...(19): siRNA sense strand
uggagaaacccucuaaauc

SEQ ID NO: 1123301 - RNA, 19 nt, Homo sapiens
  misc_RNA (1)...(19): siRNA sense strand
aaggugcucuuaaucuguu

SEQ ID NO: 1123302 - RNA, 19 nt, Homo sapiens
  misc_RNA (1)...(19): siRNA sense strand
gaggcugugugagaauuug

SEQ ID NO: 1123303 - RNA, 19 nt, Homo sapiens
  misc_RNA (1)...(19): siRNA sense strand
aaagucagcagcaaucugu

SEQ ID NO: 1123304 - RNA, 19 nt, Homo sapiens
  misc_RNA (1)...(19): siRNA sense strand
gcccugaggaucccuuuga

SEQ ID NO: 1123305 - RNA, 19 nt, Homo sapiens
  misc_RNA (1)...(19): siRNA sense strand
cagcaugaagcucaacuga

SEQ ID NO: 1123306 - RNA, 19 nt, Homo sapiens
  misc_RNA (1)...(19): siRNA sense strand
agaaacccucuaaaucuuu

SEQ ID NO: 1123307 - RNA, 19 nt, Homo sapiens
  misc_RNA (1)...(19): siRNA sense strand
uuucagaggagcagaauau

SEQ ID NO: 1123308 - RNA, 19 nt, Homo sapiens
  misc_RNA (1)...(19): siRNA sense strand
gcacagcagaaauuaaugc

SEQ ID NO: 1123309 - RNA, 19 nt, Homo sapiens
  misc_RNA (1)...(19): siRNA sense strand
ccaugaaaaucucuuagaa

SEQ ID NO: 1123310 - RNA, 19 nt, Homo sapiens
  misc_RNA (1)...(19): siRNA sense strand
agaauaagagaagcaguaa

SEQ ID NO: 1123311 - RNA, 19 nt, Homo sapiens
  misc_RNA (1)...(19): siRNA sense strand
gcacucaaggcaggagaaa

SEQ ID NO: 1123312 - RNA, 19 nt, Homo sapiens
  misc_RNA (1)...(19): siRNA sense strand
ucuacuggcugaggaagaa

SEQ ID NO: 1123313 - RNA, 19 nt, Homo sapiens
  misc_RNA (1)...(19): siRNA sense strand
ccuaucaagcuuuagaauu

SEQ ID NO: 1123314 - RNA, 19 nt, Homo sapiens
  misc_RNA (1)...(19): siRNA sense strand
ucaggaccaucagaccuuu

SEQ ID NO: 1123315 - RNA, 19 nt, Homo sapiens
  misc_RNA (1)...(19): siRNA sense strand
auauaagccuuccaaaguc

SEQ ID NO: 1123316 - RNA, 19 nt, Homo sapiens
  misc_RNA (1)...(19): siRNA sense strand
gggugauagugaagcaauu

SEQ ID NO: 1123317 - RNA, 19 nt, Homo sapiens
  misc_RNA (1)...(19): siRNA sense strand
uaagcacagcagaaauuaa

SEQ ID NO: 1123318 - RNA, 19 nt, Homo sapiens
  misc_RNA (1)...(19): siRNA sense strand
gaggagagauaccaaugua

SEQ ID NO: 1123319 - RNA, 19 nt, Homo sapiens
  misc_RNA (1)...(19): siRNA sense strand
ucauagagcuguggaauuu

SEQ ID NO: 1123320 - RNA, 19 nt, Homo sapiens
  misc_RNA (1)...(19): siRNA sense strand
gagaaacccucuaaaucuu

SEQ ID NO: 1123321 - RNA, 19 nt, Homo sapiens
  misc_RNA (1)...(19): siRNA sense strand
gauauaagccuuccaaagu

SEQ ID NO: 1123322 - RNA, 19 nt, Homo sapiens
  misc_RNA (1)...(19): siRNA sense strand
gacaaggacuguuucagaa

SEQ ID NO: 1123323 - RNA, 19 nt, Homo sapiens
  misc_RNA (1)...(19): siRNA sense strand
ccaauguacugguauauau

SEQ ID NO: 1123324 - RNA, 19 nt, Homo sapiens
  misc_RNA (1)...(19): siRNA sense strand
gaaaccagcagacagaauu

SEQ ID NO: 1123325 - RNA, 19 nt, Homo sapiens
  misc_RNA (1)...(19): siRNA sense strand
gcugaaagguuauuuaaac

SEQ ID NO: 1123326 - RNA, 19 nt, Homo sapiens
  misc_RNA (1)...(19): siRNA sense strand
gaagaagcaacaacuauug

SEQ ID NO: 1123327 - RNA, 19 nt, Homo sapiens
  misc_RNA (1)...(19): siRNA sense strand
ggagaaacccucuaaaucu

SEQ ID NO: 1123328 - RNA, 19 nt, Homo sapiens
  misc_RNA (1)...(19): siRNA sense strand
ggaagaagcaacaacuauu

SEQ ID NO: 1123329 - RNA, 19 nt, Homo sapiens
  misc_RNA (1)...(19): siRNA sense strand
gaaacagccuccagaagag

SEQ ID NO: 1123330 - RNA, 19 nt, Homo sapiens
  misc_RNA (1)...(19): siRNA sense strand
ggaauuuaauccucauguu

SEQ ID NO: 1123331 - RNA, 19 nt, Homo sapiens
  misc_RNA (1)...(19): siRNA sense strand
ugagagauuugaugaaaga

SEQ ID NO: 1123332 - RNA, 19 nt, Homo sapiens
  misc_RNA (1)...(19): siRNA sense strand
gaauagaaggugcucuuaa

SEQ ID NO: 1123333 - RNA, 19 nt, Homo sapiens
  misc_RNA (1)...(19): siRNA sense strand
gaacagagagcagcauuuc

SEQ ID NO: 1123334 - RNA, 19 nt, Homo sapiens
  misc_RNA (1)...(19): siRNA sense strand
uguagaugcugaaagguua

SEQ ID NO: 1123335 - RNA, 19 nt, Homo sapiens
  misc_RNA (1)...(19): siRNA sense strand
gaauauaggagauacacuu

SEQ ID NO: 1123336 - RNA, 19 nt, Homo sapiens
  misc_RNA (1)...(19): siRNA sense strand
acacuugggugacugguaa

SEQ ID NO: 1123337 - RNA, 19 nt, Homo sapiens
  misc_RNA (1)...(19): siRNA sense strand
gcaggagaaacaauuuaua

SEQ ID NO: 1123338 - RNA, 19 nt, Homo sapiens
  misc_RNA (1)...(19): siRNA sense strand
aauagaaggugcucuuaau

SEQ ID NO: 1123339 - RNA, 19 nt, Homo sapiens
  misc_RNA (1)...(19): siRNA sense strand
auagagcuguggaauuuaa

SEQ ID NO: 1123340 - RNA, 19 nt, Homo sapiens
  misc_RNA (1)...(19): siRNA sense strand
gcaagaaaauuaggaagaa

SEQ ID NO: 1123341 - RNA, 19 nt, Homo sapiens
  misc_RNA (1)...(19): siRNA sense strand
gcacuggaaacgaauagaa

SEQ ID NO: 1123342 - RNA, 19 nt, Homo sapiens
  misc_RNA (1)...(19): siRNA sense strand
agaaacagccuccagaaga

SEQ ID NO: 1123343 - RNA, 19 nt, Homo sapiens
  misc_RNA (1)...(19): siRNA sense strand
gaauuuaauccucauguuc

SEQ ID NO: 1123344 - RNA, 19 nt, Homo sapiens
  misc_RNA (1)...(19): siRNA sense strand
gaauguaagguauggagaa

SEQ ID NO: 1123345 - RNA, 19 nt, Homo sapiens
  misc_RNA (1)...(19): siRNA sense strand
ggauuaagcacagcagaaa

SEQ ID NO: 1123346 - RNA, 19 nt, Homo sapiens
  misc_RNA (1)...(19): siRNA sense strand
gcaccaaaguccucagcau

SEQ ID NO: 1123347 - RNA, 19 nt, Homo sapiens
  misc_RNA (1)...(19): siRNA sense strand
gagcagaauauaggagaua

SEQ ID NO: 1123348 - RNA, 19 nt, Homo sapiens
  misc_RNA (1)...(19): siRNA sense strand
ucauugauaucaggacuaa

SEQ ID NO: 1123349 - RNA, 19 nt, Homo sapiens
  misc_RNA (1)...(19): siRNA sense strand
aagagccacuuacauacua

SEQ ID NO: 1123350 - RNA, 19 nt, Homo sapiens
  misc_RNA (1)...(19): siRNA sense strand
ccaaaguccucagcaugaa

SEQ ID NO: 1123351 - RNA, 19 nt, Homo sapiens
  misc_RNA (1)...(19): siRNA sense strand
gcaauugccuaugcuuucu

SEQ ID NO: 1123352 - RNA, 19 nt, Homo sapiens
  misc_RNA (1)...(19): siRNA sense strand
cagaauuugucagaaugua

SEQ ID NO: 1123353 - RNA, 19 nt, Homo sapiens
  misc_RNA (1)...(19): siRNA sense strand
cuucagcacuggaaacgaa

SEQ ID NO: 1123354 - RNA, 19 nt, Homo sapiens
  misc_RNA (1)...(19): siRNA sense strand
gcagcacuguugaagacaa

SEQ ID NO: 1123355 - RNA, 19 nt, Homo sapiens
  misc_RNA (1)...(19): siRNA sense strand
uuacaggccuauccagaug

SEQ ID NO: 1123356 - RNA, 19 nt, Homo sapiens
  misc_RNA (1)...(19): siRNA sense strand
gaugcugaaagguuauuua

SEQ ID NO: 1123357 - RNA, 19 nt, Homo sapiens
  misc_RNA (1)...(19): siRNA sense strand
gaggaagaagcaacaacua

SEQ ID NO: 1123358 - RNA, 19 nt, Homo sapiens
  misc_RNA (1)...(19): siRNA sense strand
ggaacagagagcagcauuu

SEQ ID NO: 1123359 - RNA, 19 nt, Homo sapiens
  misc_RNA (1)...(19): siRNA sense strand
agaaauuaaugccguggaa

SEQ ID NO: 1123360 - RNA, 19 nt, Homo sapiens
  misc_RNA (1)...(19): siRNA sense strand
caaggcaggagaaacaauu

SEQ ID NO: 1123361 - RNA, 19 nt, Homo sapiens
  misc_RNA (1)...(19): siRNA sense strand
caaagcagccuaucaagcu

SEQ ID NO: 1123362 - RNA, 19 nt, Homo sapiens
  misc_RNA (1)...(19): siRNA sense strand
gagcagcauuucagaacca

SEQ ID NO: 1123363 - RNA, 19 nt, Homo sapiens
  misc_RNA (1)...(19): siRNA sense strand
cauucucacucaccaguuu

SEQ ID NO: 1123364 - RNA, 19 nt, Homo sapiens
  misc_RNA (1)...(19): siRNA sense strand
agacaaggacuguuucaga

SEQ ID NO: 1123365 - RNA, 19 nt, Homo sapiens
  misc_RNA (1)...(19): siRNA sense strand
cagcagcacuguugaagac

SEQ ID NO: 1123366 - RNA, 19 nt, Homo sapiens
  misc_RNA (1)...(19): siRNA sense strand
gaaacccucuaaaucuuuu

SEQ ID NO: 1123367 - RNA, 19 nt, Homo sapiens
  misc_RNA (1)...(19): siRNA sense strand
gagcgucuccugcaucugu

SEQ ID NO: 1123368 - RNA, 19 nt, Homo sapiens
  misc_RNA (1)...(19): siRNA sense strand
cagaaggcuuggagggaaa

SEQ ID NO: 1123369 - RNA, 19 nt, Homo sapiens
  misc_RNA (1)...(19): siRNA sense strand
gaaggugcucuuaaucugu

SEQ ID NO: 1123370 - RNA, 19 nt, Homo sapiens
  misc_RNA (1)...(19): siRNA sense strand
gaagacaaggacuguuuca

SEQ ID NO: 1123371 - RNA, 19 nt, Homo sapiens
  misc_RNA (1)...(19): siRNA sense strand
uauaagccuuccaaaguca

SEQ ID NO: 1123372 - RNA, 19 nt, Homo sapiens
  misc_RNA (1)...(19): siRNA sense strand
gaugauauaagccuuccaa

SEQ ID NO: 1123373 - RNA, 19 nt, Homo sapiens
  misc_RNA (1)...(19): siRNA sense strand
aagaauaagagaagcagua

SEQ ID NO: 1123374 - RNA, 19 nt, Homo sapiens
  misc_RNA (1)...(19): siRNA sense strand
aaucaaagcagccuaucaa

SEQ ID NO: 1123375 - RNA, 19 nt, Homo sapiens
  misc_RNA (1)...(19): siRNA sense strand
cgaauagaaggugcucuua

SEQ ID NO: 1123376 - RNA, 19 nt, Homo sapiens
  misc_RNA (1)...(19): siRNA sense strand
gaaacggggugauagugaa

SEQ ID NO: 1123377 - RNA, 19 nt, Homo sapiens
  misc_RNA (1)...(19): siRNA sense strand
gaacauccaugaaaaucuc

SEQ ID NO: 1123378 - RNA, 19 nt, Homo sapiens
  misc_RNA (1)...(19): siRNA sense strand
gaaauccuccagcucgaau

SEQ ID NO: 1123379 - RNA, 19 nt, Homo sapiens
  misc_RNA (1)...(19): siRNA sense strand
ugauagccauucucacuca

SEQ ID NO: 1123380 - RNA, 19 nt, Homo sapiens
  misc_RNA (1)...(19): siRNA sense strand
guauggagaaacccucuaa

SEQ ID NO: 1123381 - RNA, 19 nt, Homo sapiens
  misc_RNA (1)...(19): siRNA sense strand
agaaggugcucuuaaucug

SEQ ID NO: 1123382 - RNA, 19 nt, Homo sapiens
  misc_RNA (1)...(19): siRNA sense strand
gugaagcaauugccuaugc

SEQ ID NO: 1123383 - RNA, 19 nt, Homo sapiens
  misc_RNA (1)...(19): siRNA sense strand
gaauaagagaagcaguaaa

SEQ ID NO: 1123384 - RNA, 19 nt, Homo sapiens
  misc_RNA (1)...(19): siRNA sense strand
gaaucaaagcagccuauca

SEQ ID NO: 1123385 - RNA, 19 nt, Homo sapiens
  misc_RNA (1)...(19): siRNA sense strand
cagacacaguuaugcagaa

SEQ ID NO: 1123386 - RNA, 19 nt, Homo sapiens
  misc_RNA (1)...(19): siRNA sense strand
gagauacacuugggugacu

SEQ ID NO: 1123387 - RNA, 19 nt, Homo sapiens
  misc_RNA (1)...(19): siRNA sense strand
ggagagauaccaauguacu

SEQ ID NO: 1123388 - RNA, 19 nt, Homo sapiens
  misc_RNA (1)...(19): siRNA sense strand
caggagaaacaauuuauag

SEQ ID NO: 1123389 - RNA, 19 nt, Homo sapiens
  misc_RNA (1)...(19): siRNA sense strand
ggugguacuuccauaagca

SEQ ID NO: 1123390 - RNA, 19 nt, Homo sapiens
  misc_RNA (1)...(19): siRNA sense strand
ccagaaacagccuccagaa

SEQ ID NO: 1123391 - RNA, 19 nt, Homo sapiens
  misc_RNA (1)...(19): siRNA sense strand
ccauuucacagcaggauuu

SEQ ID NO: 1123392 - RNA, 19 nt, Homo sapiens
  misc_RNA (1)...(19): siRNA sense strand
aagcacagcagaaauuaau

SEQ ID NO: 1123393 - RNA, 19 nt, Homo sapiens
  misc_RNA (1)...(19): siRNA sense strand
gaauuugucagaauguaag

SEQ ID NO: 1123394 - RNA, 19 nt, Homo sapiens
  misc_RNA (1)...(19): siRNA sense strand
uuaagcacagcagaaauua

SEQ ID NO: 1123395 - RNA, 19 nt, Homo sapiens
  misc_RNA (1)...(19): siRNA sense strand
uauuguagaugcugaaagg

SEQ ID NO: 1123396 - RNA, 19 nt, Homo sapiens
  misc_RNA (1)...(19): siRNA sense strand
uaaagagccacuuacauac

SEQ ID NO: 1123397 - RNA, 19 nt, Homo sapiens
  misc_RNA (1)...(19): siRNA sense strand
ggagcagaauauaggagau

SEQ ID NO: 1123398 - RNA, 19 nt, Homo sapiens
  misc_RNA (1)...(19): siRNA sense strand
aauguaagguauggagaaa

SEQ ID NO: 1123399 - RNA, 19 nt, Homo sapiens
  misc_RNA (1)...(19): siRNA sense strand
gagagcagcauuucagaac

SEQ ID NO: 1123400 - RNA, 19 nt, Homo sapiens
  misc_RNA (1)...(19): siRNA sense strand
uggagaaacccucuaaauc

SEQ ID NO: 1123401 - RNA, 19 nt, Homo sapiens
  misc_RNA (1)...(19): siRNA sense strand
aaggugcucuuaaucuguu

SEQ ID NO: 1123402 - RNA, 19 nt, Homo sapiens
  misc_RNA (1)...(19): siRNA sense strand
gaggcugugugagaauuug

SEQ ID NO: 1123403 - RNA, 19 nt, Homo sapiens
  misc_RNA (1)...(19): siRNA sense strand
aaagucagcagcaaucugu

SEQ ID NO: 1123404 - RNA, 19 nt, Homo sapiens
  misc_RNA (1)...(19): siRNA sense strand
gcccugaggaucccuuuga

SEQ ID NO: 1123405 - RNA, 19 nt, Homo sapiens
  misc_RNA (1)...(19): siRNA sense strand
cagcaugaagcucaacuga

SEQ ID NO: 1123406 - RNA, 19 nt, Homo sapiens
  misc_RNA (1)...(19): siRNA sense strand
agaaacccucuaaaucuuu

SEQ ID NO: 1123407 - RNA, 19 nt, Homo sapiens
  misc_RNA (1)...(19): siRNA sense strand
uuucagaggagcagaauau

SEQ ID NO: 1123408 - RNA, 19 nt, Homo sapiens
  misc_RNA (1)...(19): siRNA sense strand
gcacagcagaaauuaaugc

SEQ ID NO: 1123409 - RNA, 19 nt, Homo sapiens
  misc_RNA (1)...(19): siRNA sense strand
ccaugaaaaucucuuagaa

SEQ ID NO: 1123410 - RNA, 19 nt, Homo sapiens
  misc_RNA (1)...(19): siRNA sense strand
agaauaagagaagcaguaa

SEQ ID NO: 1123411 - RNA, 19 nt, Homo sapiens
  misc_RNA (1)...(19): siRNA sense strand
gcacucaaggcaggagaaa

SEQ ID NO: 1123412 - RNA, 19 nt, Homo sapiens
  misc_RNA (1)...(19): siRNA sense strand
ucuacuggcugaggaagaa

SEQ ID NO: 1123413 - RNA, 19 nt, Homo sapiens
  misc_RNA (1)...(19): siRNA sense strand
ccuaucaagcuuuagaauu

SEQ ID NO: 1123414 - RNA, 19 nt, Homo sapiens
  misc_RNA (1)...(19): siRNA sense strand
ucaggaccaucagaccuuu

SEQ ID NO: 1123415 - RNA, 19 nt, Homo sapiens
  misc_RNA (1)...(19): siRNA sense strand
auauaagccuuccaaaguc

SEQ ID NO: 1123416 - RNA, 19 nt, Homo sapiens
  misc_RNA (1)...(19): siRNA sense strand
gggugauagugaagcaauu

SEQ ID NO: 1123417 - RNA, 19 nt, Homo sapiens
  misc_RNA (1)...(19): siRNA sense strand
uaagcacagcagaaauuaa

SEQ ID NO: 1123418 - RNA, 19 nt, Homo sapiens
  misc_RNA (1)...(19): siRNA sense strand
gaggagagauaccaaugua

SEQ ID NO: 1123419 - RNA, 19 nt, Homo sapiens
  misc_RNA (1)...(19): siRNA sense strand
ucauagagcuguggaauuu

SEQ ID NO: 1123420 - RNA, 19 nt, Homo sapiens
  misc_RNA (1)...(19): siRNA sense strand
gagaaacccucuaaaucuu

SEQ ID NO: 1123421 - RNA, 19 nt, Homo sapiens
  misc_RNA (1)...(19): siRNA sense strand
gauauaagccuuccaaagu

SEQ ID NO: 1123422 - RNA, 19 nt, Homo sapiens
  misc_RNA (1)...(19): siRNA sense strand
gacaaggacuguuucagaa

SEQ ID NO: 1123423 - RNA, 19 nt, Homo sapiens
  misc_RNA (1)...(19): siRNA sense strand
ccaauguacugguauauau

SEQ ID NO: 1123424 - RNA, 19 nt, Homo sapiens
  misc_RNA (1)...(19): siRNA sense strand
gaaaccagcagacagaauu

SEQ ID NO: 1123425 - RNA, 19 nt, Homo sapiens
  misc_RNA (1)...(19): siRNA sense strand
gcugaaagguuauuuaaac

SEQ ID NO: 1123426 - RNA, 19 nt, Homo sapiens
  misc_RNA (1)...(19): siRNA sense strand
gaagaagcaacaacuauug

SEQ ID NO: 1123427 - RNA, 19 nt, Homo sapiens
  misc_RNA (1)...(19): siRNA sense strand
ggagaaacccucuaaaucu

SEQ ID NO: 1123428 - RNA, 19 nt, Homo sapiens
  misc_RNA (1)...(19): siRNA sense strand
ggaagaagcaacaacuauu

SEQ ID NO: 1123429 - RNA, 19 nt, Homo sapiens
  misc_RNA (1)...(19): siRNA sense strand
gaaacagccuccagaagag

SEQ ID NO: 1123430 - RNA, 19 nt, Homo sapiens
  misc_RNA (1)...(19): siRNA sense strand
ggaauuuaauccucauguu

SEQ ID NO: 1123431 - RNA, 19 nt, Homo sapiens
  misc_RNA (1)...(19): siRNA sense strand
ugagagauuugaugaaaga

SEQ ID NO: 1123432 - RNA, 19 nt, Homo sapiens
  misc_RNA (1)...(19): siRNA sense strand
gaauagaaggugcucuuaa

SEQ ID NO: 1123433 - RNA, 19 nt, Homo sapiens
  misc_RNA (1)...(19): siRNA sense strand
gaacagagagcagcauuuc

SEQ ID NO: 1123434 - RNA, 19 nt, Homo sapiens
  misc_RNA (1)...(19): siRNA sense strand
uguagaugcugaaagguua

SEQ ID NO: 1123435 - RNA, 19 nt, Homo sapiens
  misc_RNA (1)...(19): siRNA sense strand
gaauauaggagauacacuu

SEQ ID NO: 1123436 - RNA, 19 nt, Homo sapiens
  misc_RNA (1)...(19): siRNA sense strand
acacuugggugacugguaa

SEQ ID NO: 1123437 - RNA, 19 nt, Homo sapiens
  misc_RNA (1)...(19): siRNA sense strand
gcaggagaaacaauuuaua

SEQ ID NO: 1123438 - RNA, 19 nt, Homo sapiens
  misc_RNA (1)...(19): siRNA sense strand
aauagaaggugcucuuaau

SEQ ID NO: 1123439 - RNA, 19 nt, Homo sapiens
  misc_RNA (1)...(19): siRNA sense strand
auagagcuguggaauuuaa

SEQ ID NO: 1123440 - RNA, 19 nt, Homo sapiens
  misc_RNA (1)...(19): siRNA sense strand
gcaagaaaauuaggaagaa

SEQ ID NO: 1123441 - RNA, 19 nt, Homo sapiens
  misc_RNA (1)...(19): siRNA sense strand
gcacuggaaacgaauagaa

SEQ ID NO: 1123442 - RNA, 19 nt, Homo sapiens
  misc_RNA (1)...(19): siRNA sense strand
agaaacagccuccagaaga

SEQ ID NO: 1123443 - RNA, 19 nt, Homo sapiens
  misc_RNA (1)...(19): siRNA sense strand
gaauuuaauccucauguuc

SEQ ID NO: 1123444 - RNA, 19 nt, Homo sapiens
  misc_RNA (1)...(19): siRNA sense strand
gaauguaagguauggagaa

SEQ ID NO: 1123445 - RNA, 19 nt, Homo sapiens
  misc_RNA (1)...(19): siRNA sense strand
ggauuaagcacagcagaaa

SEQ ID NO: 1123446 - RNA, 19 nt, Homo sapiens
  misc_RNA (1)...(19): siRNA sense strand
gcaccaaaguccucagcau

SEQ ID NO: 1123447 - RNA, 19 nt, Homo sapiens
  misc_RNA (1)...(19): siRNA sense strand
gagcagaauauaggagaua

SEQ ID NO: 1123448 - RNA, 19 nt, Homo sapiens
  misc_RNA (1)...(19): siRNA sense strand
ucauugauaucaggacuaa

SEQ ID NO: 1123449 - RNA, 19 nt, Homo sapiens
  misc_RNA (1)...(19): siRNA sense strand
aagagccacuuacauacua

SEQ ID NO: 1123450 - RNA, 19 nt, Homo sapiens
  misc_RNA (1)...(19): siRNA sense strand
ccaaaguccucagcaugaa

SEQ ID NO: 1123451 - RNA, 19 nt, Homo sapiens
  misc_RNA (1)...(19): siRNA sense strand
gcaauugccuaugcuuucu

SEQ ID NO: 1123452 - RNA, 19 nt, Homo sapiens
  misc_RNA (1)...(19): siRNA sense strand
cagaauuugucagaaugua

SEQ ID NO: 1123453 - RNA, 19 nt, Homo sapiens
  misc_RNA (1)...(19): siRNA sense strand
cuucagcacuggaaacgaa

SEQ ID NO: 1123454 - RNA, 19 nt, Homo sapiens
  misc_RNA (1)...(19): siRNA sense strand
gcagcacuguugaagacaa

SEQ ID NO: 1123455 - RNA, 19 nt, Homo sapiens
  misc_RNA (1)...(19): siRNA sense strand
uuacaggccuauccagaug

SEQ ID NO: 1123456 - RNA, 19 nt, Homo sapiens
  misc_RNA (1)...(19): siRNA sense strand
gaugcugaaagguuauuua

SEQ ID NO: 1123457 - RNA, 19 nt, Homo sapiens
  misc_RNA (1)...(19): siRNA sense strand
gaggaagaagcaacaacua

SEQ ID NO: 1123458 - RNA, 19 nt, Homo sapiens
  misc_RNA (1)...(19): siRNA sense strand
ggaacagagagcagcauuu

SEQ ID NO: 1123459 - RNA, 19 nt, Homo sapiens
  misc_RNA (1)...(19): siRNA sense strand
agaaauuaaugccguggaa

SEQ ID NO: 1123460 - RNA, 19 nt, Homo sapiens
  misc_RNA (1)...(19): siRNA sense strand
caaggcaggagaaacaauu

SEQ ID NO: 1123461 - RNA, 19 nt, Homo sapiens
  misc_RNA (1)...(19): siRNA sense strand
caaagcagccuaucaagcu

SEQ ID NO: 1123462 - RNA, 19 nt, Homo sapiens
  misc_RNA (1)...(19): siRNA sense strand
gagcagcauuucagaacca

SEQ ID NO: 1123463 - RNA, 19 nt, Homo sapiens
  misc_RNA (1)...(19): siRNA sense strand
cauucucacucaccaguuu

SEQ ID NO: 1123464 - RNA, 19 nt, Homo sapiens
  misc_RNA (1)...(19): siRNA sense strand
agacaaggacuguuucaga

SEQ ID NO: 1123465 - RNA, 19 nt, Homo sapiens
  misc_RNA (1)...(19): siRNA sense strand
cagcagcacuguugaagac

SEQ ID NO: 1123466 - RNA, 19 nt, Homo sapiens
  misc_RNA (1)...(19): siRNA sense strand
gaaacccucuaaaucuuuu

SEQ ID NO: 1123467 - RNA, 19 nt, Homo sapiens
  misc_RNA (1)...(19): siRNA sense strand
gagcgucuccugcaucugu

SEQ ID NO: 1123468 - RNA, 19 nt, Homo sapiens
  misc_RNA (1)...(19): siRNA sense strand
cagaaggcuuggagggaaa

SEQ ID NO: 1123469 - RNA, 19 nt, Homo sapiens
  misc_RNA (1)...(19): siRNA sense strand
gaaggugcucuuaaucugu

SEQ ID NO: 1123470 - RNA, 19 nt, Homo sapiens
  misc_RNA (1)...(19): siRNA sense strand
gaagacaaggacuguuuca

SEQ ID NO: 1123471 - RNA, 19 nt, Homo sapiens
  misc_RNA (1)...(19): siRNA sense strand
uauaagccuuccaaaguca

SEQ ID NO: 1123472 - RNA, 19 nt, Homo sapiens
  misc_RNA (1)...(19): siRNA sense strand
gaugauauaagccuuccaa

SEQ ID NO: 1123473 - RNA, 19 nt, Homo sapiens
  misc_RNA (1)...(19): siRNA sense strand
aagaauaagagaagcagua

SEQ ID NO: 1123474 - RNA, 19 nt, Homo sapiens
  misc_RNA (1)...(19): siRNA sense strand
aaucaaagcagccuaucaa

SEQ ID NO: 1123475 - RNA, 19 nt, Homo sapiens
  misc_RNA (1)...(19): siRNA sense strand
cgaauagaaggugcucuua

SEQ ID NO: 1123476 - RNA, 19 nt, Homo sapiens
  misc_RNA (1)...(19): siRNA sense strand
gaaacggggugauagugaa

SEQ ID NO: 1123477 - RNA, 19 nt, Homo sapiens
  misc_RNA (1)...(19): siRNA sense strand
gaacauccaugaaaaucuc

SEQ ID NO: 1123478 - RNA, 19 nt, Homo sapiens
  misc_RNA (1)...(19): siRNA sense strand
gaaauccuccagcucgaau

SEQ ID NO: 1123479 - RNA, 19 nt, Homo sapiens
  misc_RNA (1)...(19): siRNA sense strand
ugauagccauucucacuca

SEQ ID NO: 1123480 - RNA, 19 nt, Homo sapiens
  misc_RNA (1)...(19): siRNA sense strand
guauggagaaacccucuaa

SEQ ID NO: 1123481 - RNA, 19 nt, Homo sapiens
  misc_RNA (1)...(19): siRNA sense strand
agaaggugcucuuaaucug

SEQ ID NO: 1123482 - RNA, 19 nt, Homo sapiens
  misc_RNA (1)...(19): siRNA sense strand
gugaagcaauugccuaugc

SEQ ID NO: 1123483 - RNA, 19 nt, Homo sapiens
  misc_RNA (1)...(19): siRNA sense strand
gaauaagagaagcaguaaa

SEQ ID NO: 1123484 - RNA, 19 nt, Homo sapiens
  misc_RNA (1)...(19): siRNA sense strand
gaaucaaagcagccuauca

SEQ ID NO: 1123485 - RNA, 19 nt, Homo sapiens
  misc_RNA (1)...(19): siRNA sense strand
cagacacaguuaugcagaa

SEQ ID NO: 1123486 - RNA, 19 nt, Homo sapiens
  misc_RNA (1)...(19): siRNA sense strand
gagauacacuugggugacu

SEQ ID NO: 1123487 - RNA, 19 nt, Homo sapiens
  misc_RNA (1)...(19): siRNA sense strand
ggagagauaccaauguacu

SEQ ID NO: 1123488 - RNA, 19 nt, Homo sapiens
  misc_RNA (1)...(19): siRNA sense strand
caggagaaacaauuuauag

SEQ ID NO: 1123489 - RNA, 19 nt, Homo sapiens
  misc_RNA (1)...(19): siRNA sense strand
ggugguacuuccauaagca

SEQ ID NO: 1123490 - RNA, 19 nt, Homo sapiens
  misc_RNA (1)...(19): siRNA sense strand
ccagaaacagccuccagaa

SEQ ID NO: 1123491 - RNA, 19 nt, Homo sapiens
  misc_RNA (1)...(19): siRNA sense strand
ccauuucacagcaggauuu

SEQ ID NO: 1123492 - RNA, 19 nt, Homo sapiens
  misc_RNA (1)...(19): siRNA sense strand
aagcacagcagaaauuaau

SEQ ID NO: 1123493 - RNA, 19 nt, Homo sapiens
  misc_RNA (1)...(19): siRNA sense strand
gaauuugucagaauguaag

SEQ ID NO: 1123494 - RNA, 19 nt, Homo sapiens
  misc_RNA (1)...(19): siRNA sense strand
uuaagcacagcagaaauua

SEQ ID NO: 1123495 - RNA, 19 nt, Homo sapiens
  misc_RNA (1)...(19): siRNA sense strand
uauuguagaugcugaaagg

SEQ ID NO: 1123496 - RNA, 19 nt, Homo sapiens
  misc_RNA (1)...(19): siRNA sense strand
uaaagagccacuuacauac

SEQ ID NO: 1123497 - RNA, 19 nt, Homo sapiens
  misc_RNA (1)...(19): siRNA sense strand
ggagcagaauauaggagau

SEQ ID NO: 1123498 - RNA, 19 nt, Homo sapiens
  misc_RNA (1)...(19): siRNA sense strand
aauguaagguauggagaaa

SEQ ID NO: 1123499 - RNA, 19 nt, Homo sapiens
  misc_RNA (1)...(19): siRNA sense strand
gagagcagcauuucagaac

SEQ ID NO: 1123500 - RNA, 19 nt, Homo sapiens
  misc_RNA (1)...(19): siRNA sense strand
uggagaaacccucuaaauc

SEQ ID NO: 1123501 - RNA, 19 nt, Homo sapiens
  misc_RNA (1)...(19): siRNA sense strand
aaggugcucuuaaucuguu

SEQ ID NO: 1123502 - RNA, 19 nt, Homo sapiens
  misc_RNA (1)...(19): siRNA sense strand
gaggcugugugagaauuug

SEQ ID NO: 1123503 - RNA, 19 nt, Homo sapiens
  misc_RNA (1)...(19): siRNA sense strand
aaagucagcagcaaucugu

SEQ ID NO: 1123504 - RNA, 19 nt, Homo sapiens
  misc_RNA (1)...(19): siRNA sense strand
gcccugaggaucccuuuga

SEQ ID NO: 1123505 - RNA, 19 nt, Homo sapiens
  misc_RNA (1)...(19): siRNA sense strand
cagcaugaagcucaacuga

SEQ ID NO: 1123506 - RNA, 19 nt, Homo sapiens
  misc_RNA (1)...(19): siRNA sense strand
agaaacccucuaaaucuuu

SEQ ID NO: 1123507 - RNA, 19 nt, Homo sapiens
  misc_RNA (1)...(19): siRNA sense strand
uuucagaggagcagaauau

SEQ ID NO: 1123508 - RNA, 19 nt, Homo sapiens
  misc_RNA (1)...(19): siRNA sense strand
gcacagcagaaauuaaugc

SEQ ID NO: 1123509 - RNA, 19 nt, Homo sapiens
  misc_RNA (1)...(19): siRNA sense strand
ccaugaaaaucucuuagaa

SEQ ID NO: 1123510 - RNA, 19 nt, Homo sapiens
  misc_RNA (1)...(19): siRNA sense strand
agaauaagagaagcaguaa

SEQ ID NO: 1123511 - RNA, 19 nt, Homo sapiens
  misc_RNA (1)...(19): siRNA sense strand
gcacucaaggcaggagaaa

SEQ ID NO: 1123512 - RNA, 19 nt, Homo sapiens
  misc_RNA (1)...(19): siRNA sense strand
ucuacuggcugaggaagaa

SEQ ID NO: 1123513 - RNA, 19 nt, Homo sapiens
  misc_RNA (1)...(19): siRNA sense strand
ccuaucaagcuuuagaauu

SEQ ID NO: 1123514 - RNA, 19 nt, Homo sapiens
  misc_RNA (1)...(19): siRNA sense strand
ucaggaccaucagaccuuu

SEQ ID NO: 1123515 - RNA, 19 nt, Homo sapiens
  misc_RNA (1)...(19): siRNA sense strand
auauaagccuuccaaaguc

SEQ ID NO: 1123516 - RNA, 19 nt, Homo sapiens
  misc_RNA (1)...(19): siRNA sense strand
gggugauagugaagcaauu

SEQ ID NO: 1123517 - RNA, 19 nt, Homo sapiens
  misc_RNA (1)...(19): siRNA sense strand
uaagcacagcagaaauuaa

SEQ ID NO: 1123518 - RNA, 19 nt, Homo sapiens
  misc_RNA (1)...(19): siRNA sense strand
gcaggaagcuggaaaggaa

SEQ ID NO: 1123519 - RNA, 19 nt, Homo sapiens
  misc_RNA (1)...(19): siRNA sense strand
gaaagaaccuggagcaaag

SEQ ID NO: 1123520 - RNA, 19 nt, Homo sapiens
  misc_RNA (1)...(19): siRNA sense strand
aaagauggauccaaaguaa

SEQ ID NO: 1123521 - RNA, 19 nt, Homo sapiens
  misc_RNA (1)...(19): siRNA sense strand
gggcaaagauggauccaaa

SEQ ID NO: 1123522 - RNA, 19 nt, Homo sapiens
  misc_RNA (1)...(19): siRNA sense strand
gaaccuggagcaaagauua

SEQ ID NO: 1123523 - RNA, 19 nt, Homo sapiens
  misc_RNA (1)...(19): siRNA sense strand
gauccaaaguaacuaaaca

SEQ ID NO: 1123524 - RNA, 19 nt, Homo sapiens
  misc_RNA (1)...(19): siRNA sense strand
caaagauggauccaaagua

SEQ ID NO: 1123525 - RNA, 19 nt, Homo sapiens
  misc_RNA (1)...(19): siRNA sense strand
aaacaucugcuaagaaaga

SEQ ID NO: 1123526 - RNA, 19 nt, Homo sapiens
  misc_RNA (1)...(19): siRNA sense strand
gcaaagauggauccaaagu

SEQ ID NO: 1123527 - RNA, 19 nt, Homo sapiens
  misc_RNA (1)...(19): siRNA sense strand
gaauacagagggcaaagau

SEQ ID NO: 1123528 - RNA, 19 nt, Homo sapiens
  misc_RNA (1)...(19): siRNA sense strand
gaaaccugcuccaccaaaa

SEQ ID NO: 1123529 - RNA, 19 nt, Homo sapiens
  misc_RNA (1)...(19): siRNA sense strand
agaaagaaccuggagcaaa

SEQ ID NO: 1123530 - RNA, 19 nt, Homo sapiens
  misc_RNA (1)...(19): siRNA sense strand
cgaaaccugcuccaccaaa

SEQ ID NO: 1123531 - RNA, 19 nt, Homo sapiens
  misc_RNA (1)...(19): siRNA sense strand
agauaacgagggagaauga

SEQ ID NO: 1123532 - RNA, 19 nt, Homo sapiens
  misc_RNA (1)...(19): siRNA sense strand
uaaacaggagcccacaaga

SEQ ID NO: 1123533 - RNA, 19 nt, Homo sapiens
  misc_RNA (1)...(19): siRNA sense strand
guagauaacgagggagaau

SEQ ID NO: 1123534 - RNA, 19 nt, Homo sapiens
  misc_RNA (1)...(19): siRNA sense strand
gugcuaaagggaagaagga

SEQ ID NO: 1123535 - RNA, 19 nt, Homo sapiens
  misc_RNA (1)...(19): siRNA sense strand
ggaagaaggaggaaaagca

SEQ ID NO: 1123536 - RNA, 19 nt, Homo sapiens
  misc_RNA (1)...(19): siRNA sense strand
cuaaacaggagcccacaag

SEQ ID NO: 1123537 - RNA, 19 nt, Homo sapiens
  misc_RNA (1)...(19): siRNA sense strand
aaacaggagcccacaagac

SEQ ID NO: 1123538 - RNA, 19 nt, Homo sapiens
  misc_RNA (1)...(19): siRNA sense strand
gcaggaagcuggaaaggaa

SEQ ID NO: 1123539 - RNA, 19 nt, Homo sapiens
  misc_RNA (1)...(19): siRNA sense strand
gaaagaaccuggagcaaag

SEQ ID NO: 1123540 - RNA, 19 nt, Homo sapiens
  misc_RNA (1)...(19): siRNA sense strand
aaagauggauccaaaguaa

SEQ ID NO: 1123541 - RNA, 19 nt, Homo sapiens
  misc_RNA (1)...(19): siRNA sense strand
gggcaaagauggauccaaa

SEQ ID NO: 1123542 - RNA, 19 nt, Homo sapiens
  misc_RNA (1)...(19): siRNA sense strand
gaaccuggagcaaagauua

SEQ ID NO: 1123543 - RNA, 19 nt, Homo sapiens
  misc_RNA (1)...(19): siRNA sense strand
gauccaaaguaacuaaaca

SEQ ID NO: 1123544 - RNA, 19 nt, Homo sapiens
  misc_RNA (1)...(19): siRNA sense strand
caaagauggauccaaagua

SEQ ID NO: 1123545 - RNA, 19 nt, Homo sapiens
  misc_RNA (1)...(19): siRNA sense strand
aaacaucugcuaagaaaga

SEQ ID NO: 1123546 - RNA, 19 nt, Homo sapiens
  misc_RNA (1)...(19): siRNA sense strand
gcaaagauggauccaaagu

SEQ ID NO: 1123547 - RNA, 19 nt, Homo sapiens
  misc_RNA (1)...(19): siRNA sense strand
gaauacagagggcaaagau

SEQ ID NO: 1123548 - RNA, 19 nt, Homo sapiens
  misc_RNA (1)...(19): siRNA sense strand
gaaaccugcuccaccaaaa

SEQ ID NO: 1123549 - RNA, 19 nt, Homo sapiens
  misc_RNA (1)...(19): siRNA sense strand
agaaagaaccuggagcaaa

SEQ ID NO: 1123550 - RNA, 19 nt, Homo sapiens
  misc_RNA (1)...(19): siRNA sense strand
cgaaaccugcuccaccaaa

SEQ ID NO: 1123551 - RNA, 19 nt, Homo sapiens
  misc_RNA (1)...(19): siRNA sense strand
uaaacaggagcccacaaga

SEQ ID NO: 1123552 - RNA, 19 nt, Homo sapiens
  misc_RNA (1)...(19): siRNA sense strand
gugcuaaagggaagaagga

SEQ ID NO: 1123553 - RNA, 19 nt, Homo sapiens
  misc_RNA (1)...(19): siRNA sense strand
ggaagaaggaggaaaagca

SEQ ID NO: 1123554 - RNA, 19 nt, Homo sapiens
  misc_RNA (1)...(19): siRNA sense strand
cuaaacaggagcccacaag

SEQ ID NO: 1123555 - RNA, 19 nt, Homo sapiens
  misc_RNA (1)...(19): siRNA sense strand
aaacaggagcccacaagac

SEQ ID NO: 1123556 - RNA, 19 nt, Homo sapiens
  misc_RNA (1)...(19): siRNA sense strand
gauaauaaguguucugugu

SEQ ID NO: 1123557 - RNA, 19 nt, Homo sapiens
  misc_RNA (1)...(19): siRNA sense strand
gagccaagcugcacgaugu

SEQ ID NO: 1123558 - RNA, 19 nt, Homo sapiens
  misc_RNA (1)...(19): siRNA sense strand
aaagaagucuguugcuaug

SEQ ID NO: 1123559 - RNA, 19 nt, Homo sapiens
  misc_RNA (1)...(19): siRNA sense strand
ccaaagaaagcaucauauu

SEQ ID NO: 1123560 - RNA, 19 nt, Homo sapiens
  misc_RNA (1)...(19): siRNA sense strand
gaucauacccucagagucu

SEQ ID NO: 1123561 - RNA, 19 nt, Homo sapiens
  misc_RNA (1)...(19): siRNA sense strand
gagcggcgauggcacaugu

SEQ ID NO: 1123562 - RNA, 19 nt, Homo sapiens
  misc_RNA (1)...(19): siRNA sense strand
ggaacaaaguccugugcau

SEQ ID NO: 1123563 - RNA, 19 nt, Homo sapiens
  misc_RNA (1)...(19): siRNA sense strand
cgucugggauguucucaaa

SEQ ID NO: 1123564 - RNA, 19 nt, Homo sapiens
  misc_RNA (1)...(19): siRNA sense strand
gcuguuugcuggauacaau

SEQ ID NO: 1123565 - RNA, 19 nt, Homo sapiens
  misc_RNA (1)...(19): siRNA sense strand
gggauuccuucaccacaaa

SEQ ID NO: 1123566 - RNA, 19 nt, Homo sapiens
  misc_RNA (1)...(19): siRNA sense strand
guggugguuuggauaauaa

SEQ ID NO: 1123567 - RNA, 19 nt, Homo sapiens
  misc_RNA (1)...(19): siRNA sense strand
gggcugacguccucugcuu

SEQ ID NO: 1123568 - RNA, 19 nt, Homo sapiens
  misc_RNA (1)...(19): siRNA sense strand
uaauaaguguucuguguac

SEQ ID NO: 1123569 - RNA, 19 nt, Homo sapiens
  misc_RNA (1)...(19): siRNA sense strand
auagggagguugccaucua

SEQ ID NO: 1123570 - RNA, 19 nt, Homo sapiens
  misc_RNA (1)...(19): siRNA sense strand
ugccaucuauuccaaagaa

SEQ ID NO: 1123571 - RNA, 19 nt, Homo sapiens
  misc_RNA (1)...(19): siRNA sense strand
ggugauggcaugugcuuau

SEQ ID NO: 1123572 - RNA, 19 nt, Homo sapiens
  misc_RNA (1)...(19): siRNA sense strand
ggagaugccuuugcuucag

SEQ ID NO: 1123573 - RNA, 19 nt, Homo sapiens
  misc_RNA (1)...(19): siRNA sense strand
gcaaagauaagaggaggau

SEQ ID NO: 1123574 - RNA, 19 nt, Homo sapiens
  misc_RNA (1)...(19): siRNA sense strand
aagaaagcaucauauuugg

SEQ ID NO: 1123575 - RNA, 19 nt, Homo sapiens
  misc_RNA (1)...(19): siRNA sense strand
cuacgugucgccucuauga

SEQ ID NO: 1123576 - RNA, 19 nt, Homo sapiens
  misc_RNA (1)...(19): siRNA sense strand
uguggugguuuggauaaua

SEQ ID NO: 1123577 - RNA, 19 nt, Homo sapiens
  misc_RNA (1)...(19): siRNA sense strand
gaccagaaggacccucaaa

SEQ ID NO: 1123578 - RNA, 19 nt, Homo sapiens
  misc_RNA (1)...(19): siRNA sense strand
caaaggccacgggaacaaa

SEQ ID NO: 1123579 - RNA, 19 nt, Homo sapiens
  misc_RNA (1)...(19): siRNA sense strand
ucaacaguguccgguacua

SEQ ID NO: 1123580 - RNA, 19 nt, Homo sapiens
  misc_RNA (1)...(19): siRNA sense strand
uagggagguugccaucuau

SEQ ID NO: 1123581 - RNA, 19 nt, Homo sapiens
  misc_RNA (1)...(19): siRNA sense strand
ggacuggugcaaagauaag

SEQ ID NO: 1123582 - RNA, 19 nt, Homo sapiens
  misc_RNA (1)...(19): siRNA sense strand
agaagucuguugcuaugca

SEQ ID NO: 1123583 - RNA, 19 nt, Homo sapiens
  misc_RNA (1)...(19): siRNA sense strand
ccagaaggacccucaaagg

SEQ ID NO: 1123584 - RNA, 19 nt, Homo sapiens
  misc_RNA (1)...(19): siRNA sense strand
cauccuguuuggacaugaa

SEQ ID NO: 1123585 - RNA, 19 nt, Homo sapiens
  misc_RNA (1)...(19): siRNA sense strand
acaaaguccugugcaugga

SEQ ID NO: 1123586 - RNA, 19 nt, Homo sapiens
  misc_RNA (1)...(19): siRNA sense strand
ggacaugaaaaccgcguua

SEQ ID NO: 1123587 - RNA, 19 nt, Homo sapiens
  misc_RNA (1)...(19): siRNA sense strand
ggauacaaugauuacacua

SEQ ID NO: 1123588 - RNA, 19 nt, Homo sapiens
  misc_RNA (1)...(19): siRNA sense strand
aaaccgcguuagcacucua

SEQ ID NO: 1123589 - RNA, 19 nt, Homo sapiens
  misc_RNA (1)...(19): siRNA sense strand
gugauggcaugugcuuaug

SEQ ID NO: 1123590 - RNA, 19 nt, Homo sapiens
  misc_RNA (1)...(19): siRNA sense strand
gcaggccuuugaaacacau

SEQ ID NO: 1123591 - RNA, 19 nt, Homo sapiens
  misc_RNA (1)...(19): siRNA sense strand
gcagcuucaccaacucuga

SEQ ID NO: 1123592 - RNA, 19 nt, Homo sapiens
  misc_RNA (1)...(19): siRNA sense strand
gggagguugccaucuauuc

SEQ ID NO: 1123593 - RNA, 19 nt, Homo sapiens
  misc_RNA (1)...(19): siRNA sense strand
uuccaaagaaagcaucaua

SEQ ID NO: 1123594 - RNA, 19 nt, Homo sapiens
  misc_RNA (1)...(19): siRNA sense strand
gccaucuauuccaaagaaa

SEQ ID NO: 1123595 - RNA, 19 nt, Homo sapiens
  misc_RNA (1)...(19): siRNA sense strand
ugggauuccuucaccacaa

SEQ ID NO: 1123596 - RNA, 19 nt, Homo sapiens
  misc_RNA (1)...(19): siRNA sense strand
ucaaaggccacgggaacaa

SEQ ID NO: 1123597 - RNA, 19 nt, Homo sapiens
  misc_RNA (1)...(19): siRNA sense strand
ucugggauguucucaaagg

SEQ ID NO: 1123598 - RNA, 19 nt, Homo sapiens
  misc_RNA (1)...(19): siRNA sense strand
gcgggcagauagggagguu

SEQ ID NO: 1123599 - RNA, 19 nt, Homo sapiens
  misc_RNA (1)...(19): siRNA sense strand
gggaucauacccucagagu

SEQ ID NO: 1123600 - RNA, 19 nt, Homo sapiens
  misc_RNA (1)...(19): siRNA sense strand
auggacuggugcaaagaua

SEQ ID NO: 1123601 - RNA, 19 nt, Homo sapiens
  misc_RNA (1)...(19): siRNA sense strand
uggauacaaugauuacacu

SEQ ID NO: 1123602 - RNA, 19 nt, Homo sapiens
  misc_RNA (1)...(19): siRNA sense strand
gccugcagcuucaccaacu

SEQ ID NO: 1123603 - RNA, 19 nt, Homo sapiens
  misc_RNA (1)...(19): siRNA sense strand
gugcaggccuuugaaacac

SEQ ID NO: 1123604 - RNA, 19 nt, Homo sapiens
  misc_RNA (1)...(19): siRNA sense strand
gcagagcuuccacggacau

SEQ ID NO: 1123605 - RNA, 19 nt, Homo sapiens
  misc_RNA (1)...(19): siRNA sense strand
gauaauaaguguucugugu

SEQ ID NO: 1123606 - RNA, 19 nt, Homo sapiens
  misc_RNA (1)...(19): siRNA sense strand
gagccaagcugcacgaugu

SEQ ID NO: 1123607 - RNA, 19 nt, Homo sapiens
  misc_RNA (1)...(19): siRNA sense strand
aaagaagucuguugcuaug

SEQ ID NO: 1123608 - RNA, 19 nt, Homo sapiens
  misc_RNA (1)...(19): siRNA sense strand
ccaaagaaagcaucauauu

SEQ ID NO: 1123609 - RNA, 19 nt, Homo sapiens
  misc_RNA (1)...(19): siRNA sense strand
gaucauacccucagagucu

SEQ ID NO: 1123610 - RNA, 19 nt, Homo sapiens
  misc_RNA (1)...(19): siRNA sense strand
gagcggcgauggcacaugu

SEQ ID NO: 1123611 - RNA, 19 nt, Homo sapiens
  misc_RNA (1)...(19): siRNA sense strand
ggaacaaaguccugugcau

SEQ ID NO: 1123612 - RNA, 19 nt, Homo sapiens
  misc_RNA (1)...(19): siRNA sense strand
cgucugggauguucucaaa

SEQ ID NO: 1123613 - RNA, 19 nt, Homo sapiens
  misc_RNA (1)...(19): siRNA sense strand
gcuguuugcuggauacaau

SEQ ID NO: 1123614 - RNA, 19 nt, Homo sapiens
  misc_RNA (1)...(19): siRNA sense strand
gggauuccuucaccacaaa

SEQ ID NO: 1123615 - RNA, 19 nt, Homo sapiens
  misc_RNA (1)...(19): siRNA sense strand
guggugguuuggauaauaa

SEQ ID NO: 1123616 - RNA, 19 nt, Homo sapiens
  misc_RNA (1)...(19): siRNA sense strand
gggcugacguccucugcuu

SEQ ID NO: 1123617 - RNA, 19 nt, Homo sapiens
  misc_RNA (1)...(19): siRNA sense strand
uaauaaguguucuguguac

SEQ ID NO: 1123618 - RNA, 19 nt, Homo sapiens
  misc_RNA (1)...(19): siRNA sense strand
auagggagguugccaucua

SEQ ID NO: 1123619 - RNA, 19 nt, Homo sapiens
  misc_RNA (1)...(19): siRNA sense strand
ugccaucuauuccaaagaa

SEQ ID NO: 1123620 - RNA, 19 nt, Homo sapiens
  misc_RNA (1)...(19): siRNA sense strand
ggugauggcaugugcuuau

SEQ ID NO: 1123621 - RNA, 19 nt, Homo sapiens
  misc_RNA (1)...(19): siRNA sense strand
ggagaugccuuugcuucag

SEQ ID NO: 1123622 - RNA, 19 nt, Homo sapiens
  misc_RNA (1)...(19): siRNA sense strand
gcaaagauaagaggaggau

SEQ ID NO: 1123623 - RNA, 19 nt, Homo sapiens
  misc_RNA (1)...(19): siRNA sense strand
aagaaagcaucauauuugg

SEQ ID NO: 1123624 - RNA, 19 nt, Homo sapiens
  misc_RNA (1)...(19): siRNA sense strand
cuacgugucgccucuauga

SEQ ID NO: 1123625 - RNA, 19 nt, Homo sapiens
  misc_RNA (1)...(19): siRNA sense strand
uguggugguuuggauaaua

SEQ ID NO: 1123626 - RNA, 19 nt, Homo sapiens
  misc_RNA (1)...(19): siRNA sense strand
gaccagaaggacccucaaa

SEQ ID NO: 1123627 - RNA, 19 nt, Homo sapiens
  misc_RNA (1)...(19): siRNA sense strand
caaaggccacgggaacaaa

SEQ ID NO: 1123628 - RNA, 19 nt, Homo sapiens
  misc_RNA (1)...(19): siRNA sense strand
ucaacaguguccgguacua

SEQ ID NO: 1123629 - RNA, 19 nt, Homo sapiens
  misc_RNA (1)...(19): siRNA sense strand
uagggagguugccaucuau

SEQ ID NO: 1123630 - RNA, 19 nt, Homo sapiens
  misc_RNA (1)...(19): siRNA sense strand
ggacuggugcaaagauaag

SEQ ID NO: 1123631 - RNA, 19 nt, Homo sapiens
  misc_RNA (1)...(19): siRNA sense strand
agaagucuguugcuaugca

SEQ ID NO: 1123632 - RNA, 19 nt, Homo sapiens
  misc_RNA (1)...(19): siRNA sense strand
ccagaaggacccucaaagg

SEQ ID NO: 1123633 - RNA, 19 nt, Homo sapiens
  misc_RNA (1)...(19): siRNA sense strand
cauccuguuuggacaugaa

SEQ ID NO: 1123634 - RNA, 19 nt, Homo sapiens
  misc_RNA (1)...(19): siRNA sense strand
acaaaguccugugcaugga

SEQ ID NO: 1123635 - RNA, 19 nt, Homo sapiens
  misc_RNA (1)...(19): siRNA sense strand
ggacaugaaaaccgcguua

SEQ ID NO: 1123636 - RNA, 19 nt, Homo sapiens
  misc_RNA (1)...(19): siRNA sense strand
ggauacaaugauuacacua

SEQ ID NO: 1123637 - RNA, 19 nt, Homo sapiens
  misc_RNA (1)...(19): siRNA sense strand
aaaccgcguuagcacucua

SEQ ID NO: 1123638 - RNA, 19 nt, Homo sapiens
  misc_RNA (1)...(19): siRNA sense strand
gugauggcaugugcuuaug

SEQ ID NO: 1123639 - RNA, 19 nt, Homo sapiens
  misc_RNA (1)...(19): siRNA sense strand
gcaggccuuugaaacacau

SEQ ID NO: 1123640 - RNA, 19 nt, Homo sapiens
  misc_RNA (1)...(19): siRNA sense strand
gcagcuucaccaacucuga

SEQ ID NO: 1123641 - RNA, 19 nt, Homo sapiens
  misc_RNA (1)...(19): siRNA sense strand
gggagguugccaucuauuc

SEQ ID NO: 1123642 - RNA, 19 nt, Homo sapiens
  misc_RNA (1)...(19): siRNA sense strand
uuccaaagaaagcaucaua

SEQ ID NO: 1123643 - RNA, 19 nt, Homo sapiens
  misc_RNA (1)...(19): siRNA sense strand
gccaucuauuccaaagaaa

SEQ ID NO: 1123644 - RNA, 19 nt, Homo sapiens
  misc_RNA (1)...(19): siRNA sense strand
ugggauuccuucaccacaa

SEQ ID NO: 1123645 - RNA, 19 nt, Homo sapiens
  misc_RNA (1)...(19): siRNA sense strand
ucaaaggccacgggaacaa

SEQ ID NO: 1123646 - RNA, 19 nt, Homo sapiens
  misc_RNA (1)...(19): siRNA sense strand
ucugggauguucucaaagg

SEQ ID NO: 1123647 - RNA, 19 nt, Homo sapiens
  misc_RNA (1)...(19): siRNA sense strand
gcgggcagauagggagguu

SEQ ID NO: 1123648 - RNA, 19 nt, Homo sapiens
  misc_RNA (1)...(19): siRNA sense strand
gggaucauacccucagagu

SEQ ID NO: 1123649 - RNA, 19 nt, Homo sapiens
  misc_RNA (1)...(19): siRNA sense strand
auggacuggugcaaagaua

SEQ ID NO: 1123650 - RNA, 19 nt, Homo sapiens
  misc_RNA (1)...(19): siRNA sense strand
uggauacaaugauuacacu

SEQ ID NO: 1123651 - RNA, 19 nt, Homo sapiens
  misc_RNA (1)...(19): siRNA sense strand
gccugcagcuucaccaacu

SEQ ID NO: 1123652 - RNA, 19 nt, Homo sapiens
  misc_RNA (1)...(19): siRNA sense strand
gugcaggccuuugaaacac

SEQ ID NO: 1123653 - RNA, 19 nt, Homo sapiens
  misc_RNA (1)...(19): siRNA sense strand
gcagagcuuccacggacau

SEQ ID NO: 1123654 - RNA, 19 nt, Homo sapiens
  misc_RNA (1)...(19): siRNA sense strand
gauaauaaguguucugugu

SEQ ID NO: 1123655 - RNA, 19 nt, Homo sapiens
  misc_RNA (1)...(19): siRNA sense strand
gagccaagcugcacgaugu

SEQ ID NO: 1123656 - RNA, 19 nt, Homo sapiens
  misc_RNA (1)...(19): siRNA sense strand
aaagaagucuguugcuaug

SEQ ID NO: 1123657 - RNA, 19 nt, Homo sapiens
  misc_RNA (1)...(19): siRNA sense strand
ccaaagaaagcaucauauu

SEQ ID NO: 1123658 - RNA, 19 nt, Homo sapiens
  misc_RNA (1)...(19): siRNA sense strand
gaucauacccucagagucu

SEQ ID NO: 1123659 - RNA, 19 nt, Homo sapiens
  misc_RNA (1)...(19): siRNA sense strand
gagcggcgauggcacaugu

SEQ ID NO: 1123660 - RNA, 19 nt, Homo sapiens
  misc_RNA (1)...(19): siRNA sense strand
ggaacaaaguccugugcau

SEQ ID NO: 1123661 - RNA, 19 nt, Homo sapiens
  misc_RNA (1)...(19): siRNA sense strand
cgucugggauguucucaaa

SEQ ID NO: 1123662 - RNA, 19 nt, Homo sapiens
  misc_RNA (1)...(19): siRNA sense strand
gcuguuugcuggauacaau

SEQ ID NO: 1123663 - RNA, 19 nt, Homo sapiens
  misc_RNA (1)...(19): siRNA sense strand
gggauuccuucaccacaaa

SEQ ID NO: 1123664 - RNA, 19 nt, Homo sapiens
  misc_RNA (1)...(19): siRNA sense strand
guggugguuuggauaauaa

SEQ ID NO: 1123665 - RNA, 19 nt, Homo sapiens
  misc_RNA (1)...(19): siRNA sense strand
gggcugacguccucugcuu

SEQ ID NO: 1123666 - RNA, 19 nt, Homo sapiens
  misc_RNA (1)...(19): siRNA sense strand
uaauaaguguucuguguac

SEQ ID NO: 1123667 - RNA, 19 nt, Homo sapiens
  misc_RNA (1)...(19): siRNA sense strand
auagggagguugccaucua

SEQ ID NO: 1123668 - RNA, 19 nt, Homo sapiens
  misc_RNA (1)...(19): siRNA sense strand
ugccaucuauuccaaagaa

SEQ ID NO: 1123669 - RNA, 19 nt, Homo sapiens
  misc_RNA (1)...(19): siRNA sense strand
ggugauggcaugugcuuau

SEQ ID NO: 1123670 - RNA, 19 nt, Homo sapiens
  misc_RNA (1)...(19): siRNA sense strand
ggagaugccuuugcuucag

SEQ ID NO: 1123671 - RNA, 19 nt, Homo sapiens
  misc_RNA (1)...(19): siRNA sense strand
gcaaagauaagaggaggau

SEQ ID NO: 1123672 - RNA, 19 nt, Homo sapiens
  misc_RNA (1)...(19): siRNA sense strand
aagaaagcaucauauuugg

SEQ ID NO: 1123673 - RNA, 19 nt, Homo sapiens
  misc_RNA (1)...(19): siRNA sense strand
cuacgugucgccucuauga

SEQ ID NO: 1123674 - RNA, 19 nt, Homo sapiens
  misc_RNA (1)...(19): siRNA sense strand
uguggugguuuggauaaua

SEQ ID NO: 1123675 - RNA, 19 nt, Homo sapiens
  misc_RNA (1)...(19): siRNA sense strand
gaccagaaggacccucaaa

SEQ ID NO: 1123676 - RNA, 19 nt, Homo sapiens
  misc_RNA (1)...(19): siRNA sense strand
caaaggccacgggaacaaa

SEQ ID NO: 1123677 - RNA, 19 nt, Homo sapiens
  misc_RNA (1)...(19): siRNA sense strand
ucaacaguguccgguacua

SEQ ID NO: 1123678 - RNA, 19 nt, Homo sapiens
  misc_RNA (1)...(19): siRNA sense strand
uagggagguugccaucuau

SEQ ID NO: 1123679 - RNA, 19 nt, Homo sapiens
  misc_RNA (1)...(19): siRNA sense strand
ggacuggugcaaagauaag

SEQ ID NO: 1123680 - RNA, 19 nt, Homo sapiens
  misc_RNA (1)...(19): siRNA sense strand
agaagucuguugcuaugca

SEQ ID NO: 1123681 - RNA, 19 nt, Homo sapiens
  misc_RNA (1)...(19): siRNA sense strand
ccagaaggacccucaaagg

SEQ ID NO: 1123682 - RNA, 19 nt, Homo sapiens
  misc_RNA (1)...(19): siRNA sense strand
cauccuguuuggacaugaa

SEQ ID NO: 1123683 - RNA, 19 nt, Homo sapiens
  misc_RNA (1)...(19): siRNA sense strand
acaaaguccugugcaugga

SEQ ID NO: 1123684 - RNA, 19 nt, Homo sapiens
  misc_RNA (1)...(19): siRNA sense strand
ggacaugaaaaccgcguua

SEQ ID NO: 1123685 - RNA, 19 nt, Homo sapiens
  misc_RNA (1)...(19): siRNA sense strand
ggauacaaugauuacacua

SEQ ID NO: 1123686 - RNA, 19 nt, Homo sapiens
  misc_RNA (1)...(19): siRNA sense strand
aaaccgcguuagcacucua

SEQ ID NO: 1123687 - RNA, 19 nt, Homo sapiens
  misc_RNA (1)...(19): siRNA sense strand
gugauggcaugugcuuaug

SEQ ID NO: 1123688 - RNA, 19 nt, Homo sapiens
  misc_RNA (1)...(19): siRNA sense strand
gcaggccuuugaaacacau

SEQ ID NO: 1123689 - RNA, 19 nt, Homo sapiens
  misc_RNA (1)...(19): siRNA sense strand
gcagcuucaccaacucuga

SEQ ID NO: 1123690 - RNA, 19 nt, Homo sapiens
  misc_RNA (1)...(19): siRNA sense strand
gggagguugccaucuauuc

SEQ ID NO: 1123691 - RNA, 19 nt, Homo sapiens
  misc_RNA (1)...(19): siRNA sense strand
uuccaaagaaagcaucaua

SEQ ID NO: 1123692 - RNA, 19 nt, Homo sapiens
  misc_RNA (1)...(19): siRNA sense strand
gccaucuauuccaaagaaa

SEQ ID NO: 1123693 - RNA, 19 nt, Homo sapiens
  misc_RNA (1)...(19): siRNA sense strand
ugggauuccuucaccacaa

SEQ ID NO: 1123694 - RNA, 19 nt, Homo sapiens
  misc_RNA (1)...(19): siRNA sense strand
ucaaaggccacgggaacaa

SEQ ID NO: 1123695 - RNA, 19 nt, Homo sapiens
  misc_RNA (1)...(19): siRNA sense strand
ucugggauguucucaaagg

SEQ ID NO: 1123696 - RNA, 19 nt, Homo sapiens
  misc_RNA (1)...(19): siRNA sense strand
gcgggcagauagggagguu

SEQ ID NO: 1123697 - RNA, 19 nt, Homo sapiens
  misc_RNA (1)...(19): siRNA sense strand
gggaucauacccucagagu

SEQ ID NO: 1123698 - RNA, 19 nt, Homo sapiens
  misc_RNA (1)...(19): siRNA sense strand
auggacuggugcaaagaua

SEQ ID NO: 1123699 - RNA, 19 nt, Homo sapiens
  misc_RNA (1)...(19): siRNA sense strand
uggauacaaugauuacacu

SEQ ID NO: 1123700 - RNA, 19 nt, Homo sapiens
  misc_RNA (1)...(19): siRNA sense strand
gccugcagcuucaccaacu

SEQ ID NO: 1123701 - RNA, 19 nt, Homo sapiens
  misc_RNA (1)...(19): siRNA sense strand
gugcaggccuuugaaacac

SEQ ID NO: 1123702 - RNA, 19 nt, Homo sapiens
  misc_RNA (1)...(19): siRNA sense strand
gcagagcuuccacggacau

SEQ ID NO: 1123703 - RNA, 19 nt, Homo sapiens
  misc_RNA (1)...(19): siRNA sense strand
gauaauaaguguucugugu

SEQ ID NO: 1123704 - RNA, 19 nt, Homo sapiens
  misc_RNA (1)...(19): siRNA sense strand
gagccaagcugcacgaugu

SEQ ID NO: 1123705 - RNA, 19 nt, Homo sapiens
  misc_RNA (1)...(19): siRNA sense strand
aaagaagucuguugcuaug

SEQ ID NO: 1123706 - RNA, 19 nt, Homo sapiens
  misc_RNA (1)...(19): siRNA sense strand
ccaaagaaagcaucauauu

SEQ ID NO: 1123707 - RNA, 19 nt, Homo sapiens
  misc_RNA (1)...(19): siRNA sense strand
gaucauacccucagagucu

SEQ ID NO: 1123708 - RNA, 19 nt, Homo sapiens
  misc_RNA (1)...(19): siRNA sense strand
gagcggcgauggcacaugu

SEQ ID NO: 1123709 - RNA, 19 nt, Homo sapiens
  misc_RNA (1)...(19): siRNA sense strand
ggaacaaaguccugugcau

SEQ ID NO: 1123710 - RNA, 19 nt, Homo sapiens
  misc_RNA (1)...(19): siRNA sense strand
cgucugggauguucucaaa

SEQ ID NO: 1123711 - RNA, 19 nt, Homo sapiens
  misc_RNA (1)...(19): siRNA sense strand
gcuguuugcuggauacaau

SEQ ID NO: 1123712 - RNA, 19 nt, Homo sapiens
  misc_RNA (1)...(19): siRNA sense strand
gggauuccuucaccacaaa

SEQ ID NO: 1123713 - RNA, 19 nt, Homo sapiens
  misc_RNA (1)...(19): siRNA sense strand
guggugguuuggauaauaa

SEQ ID NO: 1123714 - RNA, 19 nt, Homo sapiens
  misc_RNA (1)...(19): siRNA sense strand
gggcugacguccucugcuu

SEQ ID NO: 1123715 - RNA, 19 nt, Homo sapiens
  misc_RNA (1)...(19): siRNA sense strand
uaauaaguguucuguguac

SEQ ID NO: 1123716 - RNA, 19 nt, Homo sapiens
  misc_RNA (1)...(19): siRNA sense strand
auagggagguugccaucua

SEQ ID NO: 1123717 - RNA, 19 nt, Homo sapiens
  misc_RNA (1)...(19): siRNA sense strand
ugccaucuauuccaaagaa

SEQ ID NO: 1123718 - RNA, 19 nt, Homo sapiens
  misc_RNA (1)...(19): siRNA sense strand
ggugauggcaugugcuuau

SEQ ID NO: 1123719 - RNA, 19 nt, Homo sapiens
  misc_RNA (1)...(19): siRNA sense strand
ggagaugccuuugcuucag

SEQ ID NO: 1123720 - RNA, 19 nt, Homo sapiens
  misc_RNA (1)...(19): siRNA sense strand
gcaaagauaagaggaggau

SEQ ID NO: 1123721 - RNA, 19 nt, Homo sapiens
  misc_RNA (1)...(19): siRNA sense strand
aagaaagcaucauauuugg

SEQ ID NO: 1123722 - RNA, 19 nt, Homo sapiens
  misc_RNA (1)...(19): siRNA sense strand
cuacgugucgccucuauga

SEQ ID NO: 1123723 - RNA, 19 nt, Homo sapiens
  misc_RNA (1)...(19): siRNA sense strand
uguggugguuuggauaaua

SEQ ID NO: 1123724 - RNA, 19 nt, Homo sapiens
  misc_RNA (1)...(19): siRNA sense strand
gaccagaaggacccucaaa

SEQ ID NO: 1123725 - RNA, 19 nt, Homo sapiens
  misc_RNA (1)...(19): siRNA sense strand
caaaggccacgggaacaaa

SEQ ID NO: 1123726 - RNA, 19 nt, Homo sapiens
  misc_RNA (1)...(19): siRNA sense strand
ucaacaguguccgguacua

SEQ ID NO: 1123727 - RNA, 19 nt, Homo sapiens
  misc_RNA (1)...(19): siRNA sense strand
uagggagguugccaucuau

SEQ ID NO: 1123728 - RNA, 19 nt, Homo sapiens
  misc_RNA (1)...(19): siRNA sense strand
ggacuggugcaaagauaag

SEQ ID NO: 1123729 - RNA, 19 nt, Homo sapiens
  misc_RNA (1)...(19): siRNA sense strand
agaagucuguugcuaugca

SEQ ID NO: 1123730 - RNA, 19 nt, Homo sapiens
  misc_RNA (1)...(19): siRNA sense strand
ccagaaggacccucaaagg

SEQ ID NO: 1123731 - RNA, 19 nt, Homo sapiens
  misc_RNA (1)...(19): siRNA sense strand
cauccuguuuggacaugaa

SEQ ID NO: 1123732 - RNA, 19 nt, Homo sapiens
  misc_RNA (1)...(19): siRNA sense strand
acaaaguccugugcaugga

SEQ ID NO: 1123733 - RNA, 19 nt, Homo sapiens
  misc_RNA (1)...(19): siRNA sense strand
ggacaugaaaaccgcguua

SEQ ID NO: 1123734 - RNA, 19 nt, Homo sapiens
  misc_RNA (1)...(19): siRNA sense strand
ggauacaaugauuacacua

SEQ ID NO: 1123735 - RNA, 19 nt, Homo sapiens
  misc_RNA (1)...(19): siRNA sense strand
aaaccgcguuagcacucua

SEQ ID NO: 1123736 - RNA, 19 nt, Homo sapiens
  misc_RNA (1)...(19): siRNA sense strand
gugauggcaugugcuuaug

SEQ ID NO: 1123737 - RNA, 19 nt, Homo sapiens
  misc_RNA (1)...(19): siRNA sense strand
gcaggccuuugaaacacau

SEQ ID NO: 1123738 - RNA, 19 nt, Homo sapiens
  misc_RNA (1)...(19): siRNA sense strand
gcagcuucaccaacucuga

SEQ ID NO: 1123739 - RNA, 19 nt, Homo sapiens
  misc_RNA (1)...(19): siRNA sense strand
gggagguugccaucuauuc

SEQ ID NO: 1123740 - RNA, 19 nt, Homo sapiens
  misc_RNA (1)...(19): siRNA sense strand
uuccaaagaaagcaucaua

SEQ ID NO: 1123741 - RNA, 19 nt, Homo sapiens
  misc_RNA (1)...(19): siRNA sense strand
gccaucuauuccaaagaaa

SEQ ID NO: 1123742 - RNA, 19 nt, Homo sapiens
  misc_RNA (1)...(19): siRNA sense strand
ugggauuccuucaccacaa

SEQ ID NO: 1123743 - RNA, 19 nt, Homo sapiens
  misc_RNA (1)...(19): siRNA sense strand
ucaaaggccacgggaacaa

SEQ ID NO: 1123744 - RNA, 19 nt, Homo sapiens
  misc_RNA (1)...(19): siRNA sense strand
ucugggauguucucaaagg

SEQ ID NO: 1123745 - RNA, 19 nt, Homo sapiens
  misc_RNA (1)...(19): siRNA sense strand
gcgggcagauagggagguu

SEQ ID NO: 1123746 - RNA, 19 nt, Homo sapiens
  misc_RNA (1)...(19): siRNA sense strand
gggaucauacccucagagu

SEQ ID NO: 1123747 - RNA, 19 nt, Homo sapiens
  misc_RNA (1)...(19): siRNA sense strand
auggacuggugcaaagaua

SEQ ID NO: 1123748 - RNA, 19 nt, Homo sapiens
  misc_RNA (1)...(19): siRNA sense strand
uggauacaaugauuacacu

SEQ ID NO: 1123749 - RNA, 19 nt, Homo sapiens
  misc_RNA (1)...(19): siRNA sense strand
gccugcagcuucaccaacu

SEQ ID NO: 1123750 - RNA, 19 nt, Homo sapiens
  misc_RNA (1)...(19): siRNA sense strand
gugcaggccuuugaaacac

SEQ ID NO: 1123751 - RNA, 19 nt, Homo sapiens
  misc_RNA (1)...(19): siRNA sense strand
gcagagcuuccacggacau

SEQ ID NO: 1123752 - RNA, 19 nt, Homo sapiens
  misc_RNA (1)...(19): siRNA sense strand
ugaaaggccugaaauauau

SEQ ID NO: 1123753 - RNA, 19 nt, Homo sapiens
  misc_RNA (1)...(19): siRNA sense strand
gugaaaggccugaaauaua

SEQ ID NO: 1123754 - RNA, 19 nt, Homo sapiens
  misc_RNA (1)...(19): siRNA sense strand
gaacucugcuggccuucug

SEQ ID NO: 1123755 - RNA, 19 nt, Homo sapiens
  misc_RNA (1)...(19): siRNA sense strand
gcagccagauacaguguug

SEQ ID NO: 1123756 - RNA, 19 nt, Homo sapiens
  misc_RNA (1)...(19): siRNA sense strand
gaaauuggcagaacuaccu

SEQ ID NO: 1123757 - RNA, 19 nt, Homo sapiens
  misc_RNA (1)...(19): siRNA sense strand
ggaugacugugacuuccaa

SEQ ID NO: 1123758 - RNA, 19 nt, Homo sapiens
  misc_RNA (1)...(19): siRNA sense strand
caagggcccuaguucagau

SEQ ID NO: 1123759 - RNA, 19 nt, Homo sapiens
  misc_RNA (1)...(19): siRNA sense strand
gauagugaaaggccugaaa

SEQ ID NO: 1123760 - RNA, 19 nt, Homo sapiens
  misc_RNA (1)...(19): siRNA sense strand
gaaaggccugaaauauaug

SEQ ID NO: 1123761 - RNA, 19 nt, Homo sapiens
  misc_RNA (1)...(19): siRNA sense strand
agaacuaccugcaagaaaa

SEQ ID NO: 1123762 - RNA, 19 nt, Homo sapiens
  misc_RNA (1)...(19): siRNA sense strand
aaaccaaccacaccuugaa

SEQ ID NO: 1123763 - RNA, 19 nt, Homo sapiens
  misc_RNA (1)...(19): siRNA sense strand
caaaccaaccacaccuuga

SEQ ID NO: 1123764 - RNA, 19 nt, Homo sapiens
  misc_RNA (1)...(19): siRNA sense strand
gauacaguguugaaaaguu

SEQ ID NO: 1123765 - RNA, 19 nt, Homo sapiens
  misc_RNA (1)...(19): siRNA sense strand
ucacaagggcccuaguuca

SEQ ID NO: 1123766 - RNA, 19 nt, Homo sapiens
  misc_RNA (1)...(19): siRNA sense strand
caacugcacgaacgacaug

SEQ ID NO: 1123767 - RNA, 19 nt, Homo sapiens
  misc_RNA (1)...(19): siRNA sense strand
ccaagcagccagauacagu

SEQ ID NO: 1123768 - RNA, 19 nt, Homo sapiens
  misc_RNA (1)...(19): siRNA sense strand
cagaacuaccugcaagaaa

SEQ ID NO: 1123769 - RNA, 19 nt, Homo sapiens
  misc_RNA (1)...(19): siRNA sense strand
caaggagucccgcaucaca

SEQ ID NO: 1123770 - RNA, 19 nt, Homo sapiens
  misc_RNA (1)...(19): siRNA sense strand
uagugaaaggccugaaaua

SEQ ID NO: 1123771 - RNA, 19 nt, Homo sapiens
  misc_RNA (1)...(19): siRNA sense strand
gagcugcuacucugaaguc

SEQ ID NO: 1123772 - RNA, 19 nt, Homo sapiens
  misc_RNA (1)...(19): siRNA sense strand
caucacaagggcccuaguu

SEQ ID NO: 1123773 - RNA, 19 nt, Homo sapiens
  misc_RNA (1)...(19): siRNA sense strand
guggaaauuggcagaacua

SEQ ID NO: 1123774 - RNA, 19 nt, Homo sapiens
  misc_RNA (1)...(19): siRNA sense strand
gacugugacuuccaaacca

SEQ ID NO: 1123775 - RNA, 19 nt, Homo sapiens
  misc_RNA (1)...(19): siRNA sense strand
gguggaaauuggcagaacu

SEQ ID NO: 1123776 - RNA, 19 nt, Homo sapiens
  misc_RNA (1)...(19): siRNA sense strand
ggcccuaguucagauagug

SEQ ID NO: 1123777 - RNA, 19 nt, Homo sapiens
  misc_RNA (1)...(19): siRNA sense strand
agugaaaggccugaaauau

SEQ ID NO: 1123778 - RNA, 19 nt, Homo sapiens
  misc_RNA (1)...(19): siRNA sense strand
ccagauacaguguugaaaa

SEQ ID NO: 1123779 - RNA, 19 nt, Homo sapiens
  misc_RNA (1)...(19): siRNA sense strand
aacgacauguucuuguuca

SEQ ID NO: 1123780 - RNA, 19 nt, Homo sapiens
  misc_RNA (1)...(19): siRNA sense strand
gaacaaagacaaggaguau

SEQ ID NO: 1123781 - RNA, 19 nt, Homo sapiens
  misc_RNA (1)...(19): siRNA sense strand
acaaagacaaggaguauua

SEQ ID NO: 1123782 - RNA, 19 nt, Homo sapiens
  misc_RNA (1)...(19): siRNA sense strand
caaggaguauuaugucuga

SEQ ID NO: 1123783 - RNA, 19 nt, Homo sapiens
  misc_RNA (1)...(19): siRNA sense strand
gaaacuacaucaguaacuc

SEQ ID NO: 1123784 - RNA, 19 nt, Homo sapiens
  misc_RNA (1)...(19): siRNA sense strand
gaccagagccgaaacuaca

SEQ ID NO: 1123785 - RNA, 19 nt, Homo sapiens
  misc_RNA (1)...(19): siRNA sense strand
guggugcgcuucacucgaa

SEQ ID NO: 1123786 - RNA, 19 nt, Homo sapiens
  misc_RNA (1)...(19): siRNA sense strand
ggaggagaguuaauauugc

SEQ ID NO: 1123787 - RNA, 19 nt, Homo sapiens
  misc_RNA (1)...(19): siRNA sense strand
ccaagaagaacaaagacaa

SEQ ID NO: 1123788 - RNA, 19 nt, Homo sapiens
  misc_RNA (1)...(19): siRNA sense strand
gagcccaacgccauaguaa

SEQ ID NO: 1123789 - RNA, 19 nt, Homo sapiens
  misc_RNA (1)...(19): siRNA sense strand
gggcgguggugaaagagaa

SEQ ID NO: 1123790 - RNA, 19 nt, Homo sapiens
  misc_RNA (1)...(19): siRNA sense strand
ucuacgccauguauaagua

SEQ ID NO: 1123791 - RNA, 19 nt, Homo sapiens
  misc_RNA (1)...(19): siRNA sense strand
gcaaggccaagaagaacaa

SEQ ID NO: 1123792 - RNA, 19 nt, Homo sapiens
  misc_RNA (1)...(19): siRNA sense strand
uggaggagaguuaauauug

SEQ ID NO: 1123793 - RNA, 19 nt, Homo sapiens
  misc_RNA (1)...(19): siRNA sense strand
ccagcaaggccaagaagaa

SEQ ID NO: 1123794 - RNA, 19 nt, Homo sapiens
  misc_RNA (1)...(19): siRNA sense strand
cgacgagcccaacgccaua

SEQ ID NO: 1123795 - RNA, 19 nt, Homo sapiens
  misc_RNA (1)...(19): siRNA sense strand
agccgaaacuacaucagua

SEQ ID NO: 1123796 - RNA, 19 nt, Homo sapiens
  misc_RNA (1)...(19): siRNA sense strand
gcaccacccagaacacaga

SEQ ID NO: 1123797 - RNA, 19 nt, Homo sapiens
  misc_RNA (1)...(19): siRNA sense strand
cauaguaagcgacggcaaa

SEQ ID NO: 1123798 - RNA, 19 nt, Homo sapiens
  misc_RNA (1)...(19): siRNA sense strand
ggggagcgcucaucaccua

SEQ ID NO: 1123799 - RNA, 19 nt, Homo sapiens
  misc_RNA (1)...(19): siRNA sense strand
ggacagcaccacccagaac

SEQ ID NO: 1123800 - RNA, 19 nt, Homo sapiens
  misc_RNA (1)...(19): siRNA sense strand
gguggccucugcugagugu

SEQ ID NO: 1123801 - RNA, 19 nt, Homo sapiens
  misc_RNA (1)...(19): siRNA sense strand
caaagacaaggaguauuau

SEQ ID NO: 1123802 - RNA, 19 nt, Homo sapiens
  misc_RNA (1)...(19): siRNA sense strand
gcacggacgacauuaccau

SEQ ID NO: 1123803 - RNA, 19 nt, Homo sapiens
  misc_RNA (1)...(19): siRNA sense strand
gggaccacauacaucuuug

SEQ ID NO: 1123804 - RNA, 19 nt, Homo sapiens
  misc_RNA (1)...(19): siRNA sense strand
gccgaaacuacaucaguaa

SEQ ID NO: 1123805 - RNA, 19 nt, Homo sapiens
  misc_RNA (1)...(19): siRNA sense strand
ccacccagaacacagauga

SEQ ID NO: 1123806 - RNA, 19 nt, Homo sapiens
  misc_RNA (1)...(19): siRNA sense strand
agaacaaagacaaggagua

SEQ ID NO: 1123807 - RNA, 19 nt, Homo sapiens
  misc_RNA (1)...(19): siRNA sense strand
gagccgaaacuacaucagu

SEQ ID NO: 1123808 - RNA, 19 nt, Homo sapiens
  misc_RNA (1)...(19): siRNA sense strand
ggcccaaccucaggacaga

SEQ ID NO: 1123809 - RNA, 19 nt, Homo sapiens
  misc_RNA (1)...(19): siRNA sense strand
cagcugaccaucuucaaca

SEQ ID NO: 1123810 - RNA, 19 nt, Homo sapiens
  misc_RNA (1)...(19): siRNA sense strand
caagaagaacaaagacaag

SEQ ID NO: 1123811 - RNA, 19 nt, Homo sapiens
  misc_RNA (1)...(19): siRNA sense strand
guaccgcaaucgugaugag

SEQ ID NO: 1123812 - RNA, 19 nt, Homo sapiens
  misc_RNA (1)...(19): siRNA sense strand
uguccggccucuacuacaa

SEQ ID NO: 1123813 - RNA, 19 nt, Homo sapiens
  misc_RNA (1)...(19): siRNA sense strand
gccgccagcugaccaucuu

SEQ ID NO: 1123814 - RNA, 19 nt, Homo sapiens
  misc_RNA (1)...(19): siRNA sense strand
guaacucggcccagagcaa

SEQ ID NO: 1123815 - RNA, 19 nt, Homo sapiens
  misc_RNA (1)...(19): siRNA sense strand
ccaccaccauggccacuac

SEQ ID NO: 1123816 - RNA, 19 nt, Homo sapiens
  misc_RNA (1)...(19): siRNA sense strand
gcaugguggugggcauugu

SEQ ID NO: 1123817 - RNA, 19 nt, Homo sapiens
  misc_RNA (1)...(19): siRNA sense strand
aagacaaggaguauuaugu

SEQ ID NO: 1123818 - RNA, 19 nt, Homo sapiens
  misc_RNA (1)...(19): siRNA sense strand
ggaccagagccgaaacuac

SEQ ID NO: 1123819 - RNA, 19 nt, Homo sapiens
  misc_RNA (1)...(19): siRNA sense strand
cgggaccacauacaucuuu

SEQ ID NO: 1123820 - RNA, 19 nt, Homo sapiens
  misc_RNA (1)...(19): siRNA sense strand
cggacgacauuaccaucga

SEQ ID NO: 1123821 - RNA, 19 nt, Homo sapiens
  misc_RNA (1)...(19): siRNA sense strand
aaagacaaggaguauuaug

SEQ ID NO: 1123822 - RNA, 19 nt, Homo sapiens
  misc_RNA (1)...(19): siRNA sense strand
agaagaacaaagacaagga

SEQ ID NO: 1123823 - RNA, 19 nt, Homo sapiens
  misc_RNA (1)...(19): siRNA sense strand
ccacggacgacgaggacuu

SEQ ID NO: 1123824 - RNA, 19 nt, Homo sapiens
  misc_RNA (1)...(19): siRNA sense strand
cuacuacaaugggcucaag

SEQ ID NO: 1123825 - RNA, 19 nt, Homo sapiens
  misc_RNA (1)...(19): siRNA sense strand
uaacucggcccagagcaau

SEQ ID NO: 1123826 - RNA, 19 nt, Homo sapiens
  misc_RNA (1)...(19): siRNA sense strand
guacuggaggagaguuaau

SEQ ID NO: 1123827 - RNA, 19 nt, Homo sapiens
  misc_RNA (1)...(19): siRNA sense strand
cgagcccaacgccauagua

SEQ ID NO: 1123828 - RNA, 19 nt, Homo sapiens
  misc_RNA (1)...(19): siRNA sense strand
gacagcaccacccagaaca

SEQ ID NO: 1123829 - RNA, 19 nt, Homo sapiens
  misc_RNA (1)...(19): siRNA sense strand
gaacaaagacaaggaguau

SEQ ID NO: 1123830 - RNA, 19 nt, Homo sapiens
  misc_RNA (1)...(19): siRNA sense strand
acaaagacaaggaguauua

SEQ ID NO: 1123831 - RNA, 19 nt, Homo sapiens
  misc_RNA (1)...(19): siRNA sense strand
caaggaguauuaugucuga

SEQ ID NO: 1123832 - RNA, 19 nt, Homo sapiens
  misc_RNA (1)...(19): siRNA sense strand
gaaacuacaucaguaacuc

SEQ ID NO: 1123833 - RNA, 19 nt, Homo sapiens
  misc_RNA (1)...(19): siRNA sense strand
gaccagagccgaaacuaca

SEQ ID NO: 1123834 - RNA, 19 nt, Homo sapiens
  misc_RNA (1)...(19): siRNA sense strand
guggugcgcuucacucgaa

SEQ ID NO: 1123835 - RNA, 19 nt, Homo sapiens
  misc_RNA (1)...(19): siRNA sense strand
ggaggagaguuaauauugc

SEQ ID NO: 1123836 - RNA, 19 nt, Homo sapiens
  misc_RNA (1)...(19): siRNA sense strand
ccaagaagaacaaagacaa

SEQ ID NO: 1123837 - RNA, 19 nt, Homo sapiens
  misc_RNA (1)...(19): siRNA sense strand
gagcccaacgccauaguaa

SEQ ID NO: 1123838 - RNA, 19 nt, Homo sapiens
  misc_RNA (1)...(19): siRNA sense strand
gggcgguggugaaagagaa

SEQ ID NO: 1123839 - RNA, 19 nt, Homo sapiens
  misc_RNA (1)...(19): siRNA sense strand
ucuacgccauguauaagua

SEQ ID NO: 1123840 - RNA, 19 nt, Homo sapiens
  misc_RNA (1)...(19): siRNA sense strand
gcaaggccaagaagaacaa

SEQ ID NO: 1123841 - RNA, 19 nt, Homo sapiens
  misc_RNA (1)...(19): siRNA sense strand
uggaggagaguuaauauug

SEQ ID NO: 1123842 - RNA, 19 nt, Homo sapiens
  misc_RNA (1)...(19): siRNA sense strand
ccagcaaggccaagaagaa

SEQ ID NO: 1123843 - RNA, 19 nt, Homo sapiens
  misc_RNA (1)...(19): siRNA sense strand
cgacgagcccaacgccaua

SEQ ID NO: 1123844 - RNA, 19 nt, Homo sapiens
  misc_RNA (1)...(19): siRNA sense strand
agccgaaacuacaucagua

SEQ ID NO: 1123845 - RNA, 19 nt, Homo sapiens
  misc_RNA (1)...(19): siRNA sense strand
gcaccacccagaacacaga

SEQ ID NO: 1123846 - RNA, 19 nt, Homo sapiens
  misc_RNA (1)...(19): siRNA sense strand
cauaguaagcgacggcaaa

SEQ ID NO: 1123847 - RNA, 19 nt, Homo sapiens
  misc_RNA (1)...(19): siRNA sense strand
ggggagcgcucaucaccua

SEQ ID NO: 1123848 - RNA, 19 nt, Homo sapiens
  misc_RNA (1)...(19): siRNA sense strand
ggacagcaccacccagaac

SEQ ID NO: 1123849 - RNA, 19 nt, Homo sapiens
  misc_RNA (1)...(19): siRNA sense strand
gguggccucugcugagugu

SEQ ID NO: 1123850 - RNA, 19 nt, Homo sapiens
  misc_RNA (1)...(19): siRNA sense strand
caaagacaaggaguauuau

SEQ ID NO: 1123851 - RNA, 19 nt, Homo sapiens
  misc_RNA (1)...(19): siRNA sense strand
gcacggacgacauuaccau

SEQ ID NO: 1123852 - RNA, 19 nt, Homo sapiens
  misc_RNA (1)...(19): siRNA sense strand
gggaccacauacaucuuug

SEQ ID NO: 1123853 - RNA, 19 nt, Homo sapiens
  misc_RNA (1)...(19): siRNA sense strand
gccgaaacuacaucaguaa

SEQ ID NO: 1123854 - RNA, 19 nt, Homo sapiens
  misc_RNA (1)...(19): siRNA sense strand
ccacccagaacacagauga

SEQ ID NO: 1123855 - RNA, 19 nt, Homo sapiens
  misc_RNA (1)...(19): siRNA sense strand
agaacaaagacaaggagua

SEQ ID NO: 1123856 - RNA, 19 nt, Homo sapiens
  misc_RNA (1)...(19): siRNA sense strand
gagccgaaacuacaucagu

SEQ ID NO: 1123857 - RNA, 19 nt, Homo sapiens
  misc_RNA (1)...(19): siRNA sense strand
ggcccaaccucaggacaga

SEQ ID NO: 1123858 - RNA, 19 nt, Homo sapiens
  misc_RNA (1)...(19): siRNA sense strand
cagcugaccaucuucaaca

SEQ ID NO: 1123859 - RNA, 19 nt, Homo sapiens
  misc_RNA (1)...(19): siRNA sense strand
caagaagaacaaagacaag

SEQ ID NO: 1123860 - RNA, 19 nt, Homo sapiens
  misc_RNA (1)...(19): siRNA sense strand
guaccgcaaucgugaugag

SEQ ID NO: 1123861 - RNA, 19 nt, Homo sapiens
  misc_RNA (1)...(19): siRNA sense strand
uguccggccucuacuacaa

SEQ ID NO: 1123862 - RNA, 19 nt, Homo sapiens
  misc_RNA (1)...(19): siRNA sense strand
gccgccagcugaccaucuu

SEQ ID NO: 1123863 - RNA, 19 nt, Homo sapiens
  misc_RNA (1)...(19): siRNA sense strand
guaacucggcccagagcaa

SEQ ID NO: 1123864 - RNA, 19 nt, Homo sapiens
  misc_RNA (1)...(19): siRNA sense strand
ccaccaccauggccacuac

SEQ ID NO: 1123865 - RNA, 19 nt, Homo sapiens
  misc_RNA (1)...(19): siRNA sense strand
gcaugguggugggcauugu

SEQ ID NO: 1123866 - RNA, 19 nt, Homo sapiens
  misc_RNA (1)...(19): siRNA sense strand
aagacaaggaguauuaugu

SEQ ID NO: 1123867 - RNA, 19 nt, Homo sapiens
  misc_RNA (1)...(19): siRNA sense strand
ggaccagagccgaaacuac

SEQ ID NO: 1123868 - RNA, 19 nt, Homo sapiens
  misc_RNA (1)...(19): siRNA sense strand
cgggaccacauacaucuuu

SEQ ID NO: 1123869 - RNA, 19 nt, Homo sapiens
  misc_RNA (1)...(19): siRNA sense strand
cggacgacauuaccaucga

SEQ ID NO: 1123870 - RNA, 19 nt, Homo sapiens
  misc_RNA (1)...(19): siRNA sense strand
aaagacaaggaguauuaug

SEQ ID NO: 1123871 - RNA, 19 nt, Homo sapiens
  misc_RNA (1)...(19): siRNA sense strand
agaagaacaaagacaagga

SEQ ID NO: 1123872 - RNA, 19 nt, Homo sapiens
  misc_RNA (1)...(19): siRNA sense strand
ccacggacgacgaggacuu

SEQ ID NO: 1123873 - RNA, 19 nt, Homo sapiens
  misc_RNA (1)...(19): siRNA sense strand
cuacuacaaugggcucaag

SEQ ID NO: 1123874 - RNA, 19 nt, Homo sapiens
  misc_RNA (1)...(19): siRNA sense strand
uaacucggcccagagcaau

SEQ ID NO: 1123875 - RNA, 19 nt, Homo sapiens
  misc_RNA (1)...(19): siRNA sense strand
guacuggaggagaguuaau

SEQ ID NO: 1123876 - RNA, 19 nt, Homo sapiens
  misc_RNA (1)...(19): siRNA sense strand
cgagcccaacgccauagua

SEQ ID NO: 1123877 - RNA, 19 nt, Homo sapiens
  misc_RNA (1)...(19): siRNA sense strand
gacagcaccacccagaaca

SEQ ID NO: 1123878 - RNA, 19 nt, Homo sapiens
  misc_RNA (1)...(19): siRNA sense strand
gaacaaagacaaggaguau

SEQ ID NO: 1123879 - RNA, 19 nt, Homo sapiens
  misc_RNA (1)...(19): siRNA sense strand
acaaagacaaggaguauua

SEQ ID NO: 1123880 - RNA, 19 nt, Homo sapiens
  misc_RNA (1)...(19): siRNA sense strand
caaggaguauuaugucuga

SEQ ID NO: 1123881 - RNA, 19 nt, Homo sapiens
  misc_RNA (1)...(19): siRNA sense strand
gaaacuacaucaguaacuc

SEQ ID NO: 1123882 - RNA, 19 nt, Homo sapiens
  misc_RNA (1)...(19): siRNA sense strand
gaccagagccgaaacuaca

SEQ ID NO: 1123883 - RNA, 19 nt, Homo sapiens
  misc_RNA (1)...(19): siRNA sense strand
guggugcgcuucacucgaa

SEQ ID NO: 1123884 - RNA, 19 nt, Homo sapiens
  misc_RNA (1)...(19): siRNA sense strand
ggaggagaguuaauauugc

SEQ ID NO: 1123885 - RNA, 19 nt, Homo sapiens
  misc_RNA (1)...(19): siRNA sense strand
ccaagaagaacaaagacaa

SEQ ID NO: 1123886 - RNA, 19 nt, Homo sapiens
  misc_RNA (1)...(19): siRNA sense strand
gagcccaacgccauaguaa

SEQ ID NO: 1123887 - RNA, 19 nt, Homo sapiens
  misc_RNA (1)...(19): siRNA sense strand
gggcgguggugaaagagaa

SEQ ID NO: 1123888 - RNA, 19 nt, Homo sapiens
  misc_RNA (1)...(19): siRNA sense strand
ucuacgccauguauaagua

SEQ ID NO: 1123889 - RNA, 19 nt, Homo sapiens
  misc_RNA (1)...(19): siRNA sense strand
gcaaggccaagaagaacaa

SEQ ID NO: 1123890 - RNA, 19 nt, Homo sapiens
  misc_RNA (1)...(19): siRNA sense strand
uggaggagaguuaauauug

SEQ ID NO: 1123891 - RNA, 19 nt, Homo sapiens
  misc_RNA (1)...(19): siRNA sense strand
ccagcaaggccaagaagaa

SEQ ID NO: 1123892 - RNA, 19 nt, Homo sapiens
  misc_RNA (1)...(19): siRNA sense strand
cgacgagcccaacgccaua

SEQ ID NO: 1123893 - RNA, 19 nt, Homo sapiens
  misc_RNA (1)...(19): siRNA sense strand
agccgaaacuacaucagua

SEQ ID NO: 1123894 - RNA, 19 nt, Homo sapiens
  misc_RNA (1)...(19): siRNA sense strand
gcaccacccagaacacaga

SEQ ID NO: 1123895 - RNA, 19 nt, Homo sapiens
  misc_RNA (1)...(19): siRNA sense strand
cauaguaagcgacggcaaa

SEQ ID NO: 1123896 - RNA, 19 nt, Homo sapiens
  misc_RNA (1)...(19): siRNA sense strand
ggggagcgcucaucaccua

SEQ ID NO: 1123897 - RNA, 19 nt, Homo sapiens
  misc_RNA (1)...(19): siRNA sense strand
ggacagcaccacccagaac

SEQ ID NO: 1123898 - RNA, 19 nt, Homo sapiens
  misc_RNA (1)...(19): siRNA sense strand
gguggccucugcugagugu

SEQ ID NO: 1123899 - RNA, 19 nt, Homo sapiens
  misc_RNA (1)...(19): siRNA sense strand
caaagacaaggaguauuau

SEQ ID NO: 1123900 - RNA, 19 nt, Homo sapiens
  misc_RNA (1)...(19): siRNA sense strand
gcacggacgacauuaccau

SEQ ID NO: 1123901 - RNA, 19 nt, Homo sapiens
  misc_RNA (1)...(19): siRNA sense strand
gggaccacauacaucuuug

SEQ ID NO: 1123902 - RNA, 19 nt, Homo sapiens
  misc_RNA (1)...(19): siRNA sense strand
gccgaaacuacaucaguaa

SEQ ID NO: 1123903 - RNA, 19 nt, Homo sapiens
  misc_RNA (1)...(19): siRNA sense strand
ccacccagaacacagauga

SEQ ID NO: 1123904 - RNA, 19 nt, Homo sapiens
  misc_RNA (1)...(19): siRNA sense strand
agaacaaagacaaggagua

SEQ ID NO: 1123905 - RNA, 19 nt, Homo sapiens
  misc_RNA (1)...(19): siRNA sense strand
gagccgaaacuacaucagu

SEQ ID NO: 1123906 - RNA, 19 nt, Homo sapiens
  misc_RNA (1)...(19): siRNA sense strand
ggcccaaccucaggacaga

SEQ ID NO: 1123907 - RNA, 19 nt, Homo sapiens
  misc_RNA (1)...(19): siRNA sense strand
cagcugaccaucuucaaca

SEQ ID NO: 1123908 - RNA, 19 nt, Homo sapiens
  misc_RNA (1)...(19): siRNA sense strand
caagaagaacaaagacaag

SEQ ID NO: 1123909 - RNA, 19 nt, Homo sapiens
  misc_RNA (1)...(19): siRNA sense strand
guaccgcaaucgugaugag

SEQ ID NO: 1123910 - RNA, 19 nt, Homo sapiens
  misc_RNA (1)...(19): siRNA sense strand
uguccggccucuacuacaa

SEQ ID NO: 1123911 - RNA, 19 nt, Homo sapiens
  misc_RNA (1)...(19): siRNA sense strand
gccgccagcugaccaucuu

SEQ ID NO: 1123912 - RNA, 19 nt, Homo sapiens
  misc_RNA (1)...(19): siRNA sense strand
guaacucggcccagagcaa

SEQ ID NO: 1123913 - RNA, 19 nt, Homo sapiens
  misc_RNA (1)...(19): siRNA sense strand
ccaccaccauggccacuac

SEQ ID NO: 1123914 - RNA, 19 nt, Homo sapiens
  misc_RNA (1)...(19): siRNA sense strand
gcaugguggugggcauugu

SEQ ID NO: 1123915 - RNA, 19 nt, Homo sapiens
  misc_RNA (1)...(19): siRNA sense strand
aagacaaggaguauuaugu

SEQ ID NO: 1123916 - RNA, 19 nt, Homo sapiens
  misc_RNA (1)...(19): siRNA sense strand
ggaccagagccgaaacuac

SEQ ID NO: 1123917 - RNA, 19 nt, Homo sapiens
  misc_RNA (1)...(19): siRNA sense strand
cgggaccacauacaucuuu

SEQ ID NO: 1123918 - RNA, 19 nt, Homo sapiens
  misc_RNA (1)...(19): siRNA sense strand
cggacgacauuaccaucga

SEQ ID NO: 1123919 - RNA, 19 nt, Homo sapiens
  misc_RNA (1)...(19): siRNA sense strand
aaagacaaggaguauuaug

SEQ ID NO: 1123920 - RNA, 19 nt, Homo sapiens
  misc_RNA (1)...(19): siRNA sense strand
agaagaacaaagacaagga

SEQ ID NO: 1123921 - RNA, 19 nt, Homo sapiens
  misc_RNA (1)...(19): siRNA sense strand
ccacggacgacgaggacuu

SEQ ID NO: 1123922 - RNA, 19 nt, Homo sapiens
  misc_RNA (1)...(19): siRNA sense strand
cuacuacaaugggcucaag

SEQ ID NO: 1123923 - RNA, 19 nt, Homo sapiens
  misc_RNA (1)...(19): siRNA sense strand
uaacucggcccagagcaau

SEQ ID NO: 1123924 - RNA, 19 nt, Homo sapiens
  misc_RNA (1)...(19): siRNA sense strand
guacuggaggagaguuaau

SEQ ID NO: 1123925 - RNA, 19 nt, Homo sapiens
  misc_RNA (1)...(19): siRNA sense strand
cgagcccaacgccauagua

SEQ ID NO: 1123926 - RNA, 19 nt, Homo sapiens
  misc_RNA (1)...(19): siRNA sense strand
gacagcaccacccagaaca

SEQ ID NO: 1123927 - RNA, 19 nt, Homo sapiens
  misc_RNA (1)...(19): siRNA sense strand
gaacaaagacaaggaguau

SEQ ID NO: 1123928 - RNA, 19 nt, Homo sapiens
  misc_RNA (1)...(19): siRNA sense strand
acaaagacaaggaguauua

SEQ ID NO: 1123929 - RNA, 19 nt, Homo sapiens
  misc_RNA (1)...(19): siRNA sense strand
caaggaguauuaugucuga

SEQ ID NO: 1123930 - RNA, 19 nt, Homo sapiens
  misc_RNA (1)...(19): siRNA sense strand
gaaacuacaucaguaacuc

SEQ ID NO: 1123931 - RNA, 19 nt, Homo sapiens
  misc_RNA (1)...(19): siRNA sense strand
gaccagagccgaaacuaca

SEQ ID NO: 1123932 - RNA, 19 nt, Homo sapiens
  misc_RNA (1)...(19): siRNA sense strand
guggugcgcuucacucgaa

SEQ ID NO: 1123933 - RNA, 19 nt, Homo sapiens
  misc_RNA (1)...(19): siRNA sense strand
ggaggagaguuaauauugc

SEQ ID NO: 1123934 - RNA, 19 nt, Homo sapiens
  misc_RNA (1)...(19): siRNA sense strand
ccaagaagaacaaagacaa

SEQ ID NO: 1123935 - RNA, 19 nt, Homo sapiens
  misc_RNA (1)...(19): siRNA sense strand
gagcccaacgccauaguaa

SEQ ID NO: 1123936 - RNA, 19 nt, Homo sapiens
  misc_RNA (1)...(19): siRNA sense strand
gggcgguggugaaagagaa

SEQ ID NO: 1123937 - RNA, 19 nt, Homo sapiens
  misc_RNA (1)...(19): siRNA sense strand
ucuacgccauguauaagua

SEQ ID NO: 1123938 - RNA, 19 nt, Homo sapiens
  misc_RNA (1)...(19): siRNA sense strand
gcaaggccaagaagaacaa

SEQ ID NO: 1123939 - RNA, 19 nt, Homo sapiens
  misc_RNA (1)...(19): siRNA sense strand
uggaggagaguuaauauug

SEQ ID NO: 1123940 - RNA, 19 nt, Homo sapiens
  misc_RNA (1)...(19): siRNA sense strand
ccagcaaggccaagaagaa

SEQ ID NO: 1123941 - RNA, 19 nt, Homo sapiens
  misc_RNA (1)...(19): siRNA sense strand
cgacgagcccaacgccaua

SEQ ID NO: 1123942 - RNA, 19 nt, Homo sapiens
  misc_RNA (1)...(19): siRNA sense strand
agccgaaacuacaucagua

SEQ ID NO: 1123943 - RNA, 19 nt, Homo sapiens
  misc_RNA (1)...(19): siRNA sense strand
gcaccacccagaacacaga

SEQ ID NO: 1123944 - RNA, 19 nt, Homo sapiens
  misc_RNA (1)...(19): siRNA sense strand
cauaguaagcgacggcaaa

SEQ ID NO: 1123945 - RNA, 19 nt, Homo sapiens
  misc_RNA (1)...(19): siRNA sense strand
ggggagcgcucaucaccua

SEQ ID NO: 1123946 - RNA, 19 nt, Homo sapiens
  misc_RNA (1)...(19): siRNA sense strand
ggacagcaccacccagaac

SEQ ID NO: 1123947 - RNA, 19 nt, Homo sapiens
  misc_RNA (1)...(19): siRNA sense strand
gguggccucugcugagugu

SEQ ID NO: 1123948 - RNA, 19 nt, Homo sapiens
  misc_RNA (1)...(19): siRNA sense strand
caaagacaaggaguauuau

SEQ ID NO: 1123949 - RNA, 19 nt, Homo sapiens
  misc_RNA (1)...(19): siRNA sense strand
gcacggacgacauuaccau

SEQ ID NO: 1123950 - RNA, 19 nt, Homo sapiens
  misc_RNA (1)...(19): siRNA sense strand
gggaccacauacaucuuug

SEQ ID NO: 1123951 - RNA, 19 nt, Homo sapiens
  misc_RNA (1)...(19): siRNA sense strand
gccgaaacuacaucaguaa

SEQ ID NO: 1123952 - RNA, 19 nt, Homo sapiens
  misc_RNA (1)...(19): siRNA sense strand
ccacccagaacacagauga

SEQ ID NO: 1123953 - RNA, 19 nt, Homo sapiens
  misc_RNA (1)...(19): siRNA sense strand
agaacaaagacaaggagua

SEQ ID NO: 1123954 - RNA, 19 nt, Homo sapiens
  misc_RNA (1)...(19): siRNA sense strand
gagccgaaacuacaucagu

SEQ ID NO: 1123955 - RNA, 19 nt, Homo sapiens
  misc_RNA (1)...(19): siRNA sense strand
ggcccaaccucaggacaga

SEQ ID NO: 1123956 - RNA, 19 nt, Homo sapiens
  misc_RNA (1)...(19): siRNA sense strand
cagcugaccaucuucaaca

SEQ ID NO: 1123957 - RNA, 19 nt, Homo sapiens
  misc_RNA (1)...(19): siRNA sense strand
caagaagaacaaagacaag

SEQ ID NO: 1123958 - RNA, 19 nt, Homo sapiens
  misc_RNA (1)...(19): siRNA sense strand
guaccgcaaucgugaugag

SEQ ID NO: 1123959 - RNA, 19 nt, Homo sapiens
  misc_RNA (1)...(19): siRNA sense strand
uguccggccucuacuacaa

SEQ ID NO: 1123960 - RNA, 19 nt, Homo sapiens
  misc_RNA (1)...(19): siRNA sense strand
gccgccagcugaccaucuu

SEQ ID NO: 1123961 - RNA, 19 nt, Homo sapiens
  misc_RNA (1)...(19): siRNA sense strand
guaacucggcccagagcaa

SEQ ID NO: 1123962 - RNA, 19 nt, Homo sapiens
  misc_RNA (1)...(19): siRNA sense strand
ccaccaccauggccacuac

SEQ ID NO: 1123963 - RNA, 19 nt, Homo sapiens
  misc_RNA (1)...(19): siRNA sense strand
gcaugguggugggcauugu

SEQ ID NO: 1123964 - RNA, 19 nt, Homo sapiens
  misc_RNA (1)...(19): siRNA sense strand
aagacaaggaguauuaugu

SEQ ID NO: 1123965 - RNA, 19 nt, Homo sapiens
  misc_RNA (1)...(19): siRNA sense strand
ggaccagagccgaaacuac

SEQ ID NO: 1123966 - RNA, 19 nt, Homo sapiens
  misc_RNA (1)...(19): siRNA sense strand
cgggaccacauacaucuuu

SEQ ID NO: 1123967 - RNA, 19 nt, Homo sapiens
  misc_RNA (1)...(19): siRNA sense strand
cggacgacauuaccaucga

SEQ ID NO: 1123968 - RNA, 19 nt, Homo sapiens
  misc_RNA (1)...(19): siRNA sense strand
aaagacaaggaguauuaug

SEQ ID NO: 1123969 - RNA, 19 nt, Homo sapiens
  misc_RNA (1)...(19): siRNA sense strand
agaagaacaaagacaagga

SEQ ID NO: 1123970 - RNA, 19 nt, Homo sapiens
  misc_RNA (1)...(19): siRNA sense strand
ccacggacgacgaggacuu

SEQ ID NO: 1123971 - RNA, 19 nt, Homo sapiens
  misc_RNA (1)...(19): siRNA sense strand
cuacuacaaugggcucaag

SEQ ID NO: 1123972 - RNA, 19 nt, Homo sapiens
  misc_RNA (1)...(19): siRNA sense strand
uaacucggcccagagcaau

SEQ ID NO: 1123973 - RNA, 19 nt, Homo sapiens
  misc_RNA (1)...(19): siRNA sense strand
guacuggaggagaguuaau

SEQ ID NO: 1123974 - RNA, 19 nt, Homo sapiens
  misc_RNA (1)...(19): siRNA sense strand
cgagcccaacgccauagua

SEQ ID NO: 1123975 - RNA, 19 nt, Homo sapiens
  misc_RNA (1)...(19): siRNA sense strand
gacagcaccacccagaaca

SEQ ID NO: 1123976 - RNA, 19 nt, Homo sapiens
  misc_RNA (1)...(19): siRNA sense strand
gaacaaagacaaggaguau

SEQ ID NO: 1123977 - RNA, 19 nt, Homo sapiens
  misc_RNA (1)...(19): siRNA sense strand
acaaagacaaggaguauua

SEQ ID NO: 1123978 - RNA, 19 nt, Homo sapiens
  misc_RNA (1)...(19): siRNA sense strand
caaggaguauuaugucuga

SEQ ID NO: 1123979 - RNA, 19 nt, Homo sapiens
  misc_RNA (1)...(19): siRNA sense strand
gaaacuacaucaguaacuc

SEQ ID NO: 1123980 - RNA, 19 nt, Homo sapiens
  misc_RNA (1)...(19): siRNA sense strand
gaccagagccgaaacuaca

SEQ ID NO: 1123981 - RNA, 19 nt, Homo sapiens
  misc_RNA (1)...(19): siRNA sense strand
guggugcgcuucacucgaa

SEQ ID NO: 1123982 - RNA, 19 nt, Homo sapiens
  misc_RNA (1)...(19): siRNA sense strand
ggaggagaguuaauauugc

SEQ ID NO: 1123983 - RNA, 19 nt, Homo sapiens
  misc_RNA (1)...(19): siRNA sense strand
ccaagaagaacaaagacaa

SEQ ID NO: 1123984 - RNA, 19 nt, Homo sapiens
  misc_RNA (1)...(19): siRNA sense strand
gagcccaacgccauaguaa

SEQ ID NO: 1123985 - RNA, 19 nt, Homo sapiens
  misc_RNA (1)...(19): siRNA sense strand
gggcgguggugaaagagaa

SEQ ID NO: 1123986 - RNA, 19 nt, Homo sapiens
  misc_RNA (1)...(19): siRNA sense strand
ucuacgccauguauaagua

SEQ ID NO: 1123987 - RNA, 19 nt, Homo sapiens
  misc_RNA (1)...(19): siRNA sense strand
gcaaggccaagaagaacaa

SEQ ID NO: 1123988 - RNA, 19 nt, Homo sapiens
  misc_RNA (1)...(19): siRNA sense strand
uggaggagaguuaauauug

SEQ ID NO: 1123989 - RNA, 19 nt, Homo sapiens
  misc_RNA (1)...(19): siRNA sense strand
ccagcaaggccaagaagaa

SEQ ID NO: 1123990 - RNA, 19 nt, Homo sapiens
  misc_RNA (1)...(19): siRNA sense strand
cgacgagcccaacgccaua

SEQ ID NO: 1123991 - RNA, 19 nt, Homo sapiens
  misc_RNA (1)...(19): siRNA sense strand
agccgaaacuacaucagua

SEQ ID NO: 1123992 - RNA, 19 nt, Homo sapiens
  misc_RNA (1)...(19): siRNA sense strand
gcaccacccagaacacaga

SEQ ID NO: 1123993 - RNA, 19 nt, Homo sapiens
  misc_RNA (1)...(19): siRNA sense strand
cauaguaagcgacggcaaa

SEQ ID NO: 1123994 - RNA, 19 nt, Homo sapiens
  misc_RNA (1)...(19): siRNA sense strand
ggggagcgcucaucaccua

SEQ ID NO: 1123995 - RNA, 19 nt, Homo sapiens
  misc_RNA (1)...(19): siRNA sense strand
ggacagcaccacccagaac

SEQ ID NO: 1123996 - RNA, 19 nt, Homo sapiens
  misc_RNA (1)...(19): siRNA sense strand
gguggccucugcugagugu

SEQ ID NO: 1123997 - RNA, 19 nt, Homo sapiens
  misc_RNA (1)...(19): siRNA sense strand
caaagacaaggaguauuau

SEQ ID NO: 1123998 - RNA, 19 nt, Homo sapiens
  misc_RNA (1)...(19): siRNA sense strand
gcacggacgacauuaccau

SEQ ID NO: 1123999 - RNA, 19 nt, Homo sapiens
  misc_RNA (1)...(19): siRNA sense strand
gggaccacauacaucuuug

SEQ ID NO: 1124000 - RNA, 19 nt, Homo sapiens
  misc_RNA (1)...(19): siRNA sense strand
gccgaaacuacaucaguaa

SEQ ID NO: 1124001 - RNA, 19 nt, Homo sapiens
  misc_RNA (1)...(19): siRNA sense strand
ccacccagaacacagauga

SEQ ID NO: 1124002 - RNA, 19 nt, Homo sapiens
  misc_RNA (1)...(19): siRNA sense strand
agaacaaagacaaggagua

SEQ ID NO: 1124003 - RNA, 19 nt, Homo sapiens
  misc_RNA (1)...(19): siRNA sense strand
gagccgaaacuacaucagu

SEQ ID NO: 1124004 - RNA, 19 nt, Homo sapiens
  misc_RNA (1)...(19): siRNA sense strand
ggcccaaccucaggacaga

SEQ ID NO: 1124005 - RNA, 19 nt, Homo sapiens
  misc_RNA (1)...(19): siRNA sense strand
cagcugaccaucuucaaca

SEQ ID NO: 1124006 - RNA, 19 nt, Homo sapiens
  misc_RNA (1)...(19): siRNA sense strand
caagaagaacaaagacaag

SEQ ID NO: 1124007 - RNA, 19 nt, Homo sapiens
  misc_RNA (1)...(19): siRNA sense strand
guaccgcaaucgugaugag

SEQ ID NO: 1124008 - RNA, 19 nt, Homo sapiens
  misc_RNA (1)...(19): siRNA sense strand
uguccggccucuacuacaa

SEQ ID NO: 1124009 - RNA, 19 nt, Homo sapiens
  misc_RNA (1)...(19): siRNA sense strand
gccgccagcugaccaucuu

SEQ ID NO: 1124010 - RNA, 19 nt, Homo sapiens
  misc_RNA (1)...(19): siRNA sense strand
guaacucggcccagagcaa

SEQ ID NO: 1124011 - RNA, 19 nt, Homo sapiens
  misc_RNA (1)...(19): siRNA sense strand
ccaccaccauggccacuac

SEQ ID NO: 1124012 - RNA, 19 nt, Homo sapiens
  misc_RNA (1)...(19): siRNA sense strand
gcaugguggugggcauugu

SEQ ID NO: 1124013 - RNA, 19 nt, Homo sapiens
  misc_RNA (1)...(19): siRNA sense strand
aagacaaggaguauuaugu

SEQ ID NO: 1124014 - RNA, 19 nt, Homo sapiens
  misc_RNA (1)...(19): siRNA sense strand
ggaccagagccgaaacuac

SEQ ID NO: 1124015 - RNA, 19 nt, Homo sapiens
  misc_RNA (1)...(19): siRNA sense strand
cgggaccacauacaucuuu

SEQ ID NO: 1124016 - RNA, 19 nt, Homo sapiens
  misc_RNA (1)...(19): siRNA sense strand
cggacgacauuaccaucga

SEQ ID NO: 1124017 - RNA, 19 nt, Homo sapiens
  misc_RNA (1)...(19): siRNA sense strand
aaagacaaggaguauuaug

SEQ ID NO: 1124018 - RNA, 19 nt, Homo sapiens
  misc_RNA (1)...(19): siRNA sense strand
agaagaacaaagacaagga

SEQ ID NO: 1124019 - RNA, 19 nt, Homo sapiens
  misc_RNA (1)...(19): siRNA sense strand
ccacggacgacgaggacuu

SEQ ID NO: 1124020 - RNA, 19 nt, Homo sapiens
  misc_RNA (1)...(19): siRNA sense strand
cuacuacaaugggcucaag

SEQ ID NO: 1124021 - RNA, 19 nt, Homo sapiens
  misc_RNA (1)...(19): siRNA sense strand
uaacucggcccagagcaau

SEQ ID NO: 1124022 - RNA, 19 nt, Homo sapiens
  misc_RNA (1)...(19): siRNA sense strand
guacuggaggagaguuaau

SEQ ID NO: 1124023 - RNA, 19 nt, Homo sapiens
  misc_RNA (1)...(19): siRNA sense strand
cgagcccaacgccauagua

SEQ ID NO: 1124024 - RNA, 19 nt, Homo sapiens
  misc_RNA (1)...(19): siRNA sense strand
gacagcaccacccagaaca

SEQ ID NO: 1124025 - RNA, 19 nt, Homo sapiens
  misc_RNA (1)...(19): siRNA sense strand
gaacaaagacaaggaguau

SEQ ID NO: 1124026 - RNA, 19 nt, Homo sapiens
  misc_RNA (1)...(19): siRNA sense strand
acaaagacaaggaguauua

SEQ ID NO: 1124027 - RNA, 19 nt, Homo sapiens
  misc_RNA (1)...(19): siRNA sense strand
caaggaguauuaugucuga

SEQ ID NO: 1124028 - RNA, 19 nt, Homo sapiens
  misc_RNA (1)...(19): siRNA sense strand
gaaacuacaucaguaacuc

SEQ ID NO: 1124029 - RNA, 19 nt, Homo sapiens
  misc_RNA (1)...(19): siRNA sense strand
gaccagagccgaaacuaca

SEQ ID NO: 1124030 - RNA, 19 nt, Homo sapiens
  misc_RNA (1)...(19): siRNA sense strand
guggugcgcuucacucgaa

SEQ ID NO: 1124031 - RNA, 19 nt, Homo sapiens
  misc_RNA (1)...(19): siRNA sense strand
ggaggagaguuaauauugc

SEQ ID NO: 1124032 - RNA, 19 nt, Homo sapiens
  misc_RNA (1)...(19): siRNA sense strand
ccaagaagaacaaagacaa

SEQ ID NO: 1124033 - RNA, 19 nt, Homo sapiens
  misc_RNA (1)...(19): siRNA sense strand
gagcccaacgccauaguaa

SEQ ID NO: 1124034 - RNA, 19 nt, Homo sapiens
  misc_RNA (1)...(19): siRNA sense strand
gggcgguggugaaagagaa

SEQ ID NO: 1124035 - RNA, 19 nt, Homo sapiens
  misc_RNA (1)...(19): siRNA sense strand
ucuacgccauguauaagua

SEQ ID NO: 1124036 - RNA, 19 nt, Homo sapiens
  misc_RNA (1)...(19): siRNA sense strand
gcaaggccaagaagaacaa

SEQ ID NO: 1124037 - RNA, 19 nt, Homo sapiens
  misc_RNA (1)...(19): siRNA sense strand
uggaggagaguuaauauug

SEQ ID NO: 1124038 - RNA, 19 nt, Homo sapiens
  misc_RNA (1)...(19): siRNA sense strand
ccagcaaggccaagaagaa

SEQ ID NO: 1124039 - RNA, 19 nt, Homo sapiens
  misc_RNA (1)...(19): siRNA sense strand
cgacgagcccaacgccaua

SEQ ID NO: 1124040 - RNA, 19 nt, Homo sapiens
  misc_RNA (1)...(19): siRNA sense strand
agccgaaacuacaucagua

SEQ ID NO: 1124041 - RNA, 19 nt, Homo sapiens
  misc_RNA (1)...(19): siRNA sense strand
gcaccacccagaacacaga

SEQ ID NO: 1124042 - RNA, 19 nt, Homo sapiens
  misc_RNA (1)...(19): siRNA sense strand
cauaguaagcgacggcaaa

SEQ ID NO: 1124043 - RNA, 19 nt, Homo sapiens
  misc_RNA (1)...(19): siRNA sense strand
ggggagcgcucaucaccua

SEQ ID NO: 1124044 - RNA, 19 nt, Homo sapiens
  misc_RNA (1)...(19): siRNA sense strand
ggacagcaccacccagaac

SEQ ID NO: 1124045 - RNA, 19 nt, Homo sapiens
  misc_RNA (1)...(19): siRNA sense strand
gguggccucugcugagugu

SEQ ID NO: 1124046 - RNA, 19 nt, Homo sapiens
  misc_RNA (1)...(19): siRNA sense strand
caaagacaaggaguauuau

SEQ ID NO: 1124047 - RNA, 19 nt, Homo sapiens
  misc_RNA (1)...(19): siRNA sense strand
gcacggacgacauuaccau

SEQ ID NO: 1124048 - RNA, 19 nt, Homo sapiens
  misc_RNA (1)...(19): siRNA sense strand
gggaccacauacaucuuug

SEQ ID NO: 1124049 - RNA, 19 nt, Homo sapiens
  misc_RNA (1)...(19): siRNA sense strand
gccgaaacuacaucaguaa

SEQ ID NO: 1124050 - RNA, 19 nt, Homo sapiens
  misc_RNA (1)...(19): siRNA sense strand
ccacccagaacacagauga

SEQ ID NO: 1124051 - RNA, 19 nt, Homo sapiens
  misc_RNA (1)...(19): siRNA sense strand
agaacaaagacaaggagua

SEQ ID NO: 1124052 - RNA, 19 nt, Homo sapiens
  misc_RNA (1)...(19): siRNA sense strand
gagccgaaacuacaucagu

SEQ ID NO: 1124053 - RNA, 19 nt, Homo sapiens
  misc_RNA (1)...(19): siRNA sense strand
ggcccaaccucaggacaga

SEQ ID NO: 1124054 - RNA, 19 nt, Homo sapiens
  misc_RNA (1)...(19): siRNA sense strand
cagcugaccaucuucaaca

SEQ ID NO: 1124055 - RNA, 19 nt, Homo sapiens
  misc_RNA (1)...(19): siRNA sense strand
caagaagaacaaagacaag

SEQ ID NO: 1124056 - RNA, 19 nt, Homo sapiens
  misc_RNA (1)...(19): siRNA sense strand
guaccgcaaucgugaugag

SEQ ID NO: 1124057 - RNA, 19 nt, Homo sapiens
  misc_RNA (1)...(19): siRNA sense strand
uguccggccucuacuacaa

SEQ ID NO: 1124058 - RNA, 19 nt, Homo sapiens
  misc_RNA (1)...(19): siRNA sense strand
gccgccagcugaccaucuu

SEQ ID NO: 1124059 - RNA, 19 nt, Homo sapiens
  misc_RNA (1)...(19): siRNA sense strand
guaacucggcccagagcaa

SEQ ID NO: 1124060 - RNA, 19 nt, Homo sapiens
  misc_RNA (1)...(19): siRNA sense strand
ccaccaccauggccacuac

SEQ ID NO: 1124061 - RNA, 19 nt, Homo sapiens
  misc_RNA (1)...(19): siRNA sense strand
gcaugguggugggcauugu

SEQ ID NO: 1124062 - RNA, 19 nt, Homo sapiens
  misc_RNA (1)...(19): siRNA sense strand
aagacaaggaguauuaugu

SEQ ID NO: 1124063 - RNA, 19 nt, Homo sapiens
  misc_RNA (1)...(19): siRNA sense strand
ggaccagagccgaaacuac

SEQ ID NO: 1124064 - RNA, 19 nt, Homo sapiens
  misc_RNA (1)...(19): siRNA sense strand
cgggaccacauacaucuuu

SEQ ID NO: 1124065 - RNA, 19 nt, Homo sapiens
  misc_RNA (1)...(19): siRNA sense strand
cggacgacauuaccaucga

SEQ ID NO: 1124066 - RNA, 19 nt, Homo sapiens
  misc_RNA (1)...(19): siRNA sense strand
aaagacaaggaguauuaug

SEQ ID NO: 1124067 - RNA, 19 nt, Homo sapiens
  misc_RNA (1)...(19): siRNA sense strand
agaagaacaaagacaagga

SEQ ID NO: 1124068 - RNA, 19 nt, Homo sapiens
  misc_RNA (1)...(19): siRNA sense strand
ccacggacgacgaggacuu

SEQ ID NO: 1124069 - RNA, 19 nt, Homo sapiens
  misc_RNA (1)...(19): siRNA sense strand
cuacuacaaugggcucaag

SEQ ID NO: 1124070 - RNA, 19 nt, Homo sapiens
  misc_RNA (1)...(19): siRNA sense strand
uaacucggcccagagcaau

SEQ ID NO: 1124071 - RNA, 19 nt, Homo sapiens
  misc_RNA (1)...(19): siRNA sense strand
guacuggaggagaguuaau

SEQ ID NO: 1124072 - RNA, 19 nt, Homo sapiens
  misc_RNA (1)...(19): siRNA sense strand
cgagcccaacgccauagua

SEQ ID NO: 1124073 - RNA, 19 nt, Homo sapiens
  misc_RNA (1)...(19): siRNA sense strand
gacagcaccacccagaaca

SEQ ID NO: 1124074 - RNA, 19 nt, Homo sapiens
  misc_RNA (1)...(19): siRNA sense strand
cgacauauaucuuuagcaa

SEQ ID NO: 1124075 - RNA, 19 nt, Homo sapiens
  misc_RNA (1)...(19): siRNA sense strand
ggacaaaucacguauaagu

SEQ ID NO: 1124076 - RNA, 19 nt, Homo sapiens
  misc_RNA (1)...(19): siRNA sense strand
guacuacaauggcuugaaa

SEQ ID NO: 1124077 - RNA, 19 nt, Homo sapiens
  misc_RNA (1)...(19): siRNA sense strand
gcgaaaagcuccaacaaaa

SEQ ID NO: 1124078 - RNA, 19 nt, Homo sapiens
  misc_RNA (1)...(19): siRNA sense strand
guggacaaaucacguauaa

SEQ ID NO: 1124079 - RNA, 19 nt, Homo sapiens
  misc_RNA (1)...(19): siRNA sense strand
gggacgacauauaucuuua

SEQ ID NO: 1124080 - RNA, 19 nt, Homo sapiens
  misc_RNA (1)...(19): siRNA sense strand
uacaauggcuugaaaguuc

SEQ ID NO: 1124081 - RNA, 19 nt, Homo sapiens
  misc_RNA (1)...(19): siRNA sense strand
gcuugaaaguucugaauau

SEQ ID NO: 1124082 - RNA, 19 nt, Homo sapiens
  misc_RNA (1)...(19): siRNA sense strand
cauaauaauuggcgggaaa

SEQ ID NO: 1124083 - RNA, 19 nt, Homo sapiens
  misc_RNA (1)...(19): siRNA sense strand
gaaauaccauguaguucgu

SEQ ID NO: 1124084 - RNA, 19 nt, Homo sapiens
  misc_RNA (1)...(19): siRNA sense strand
caagcaaccauaauaauug

SEQ ID NO: 1124085 - RNA, 19 nt, Homo sapiens
  misc_RNA (1)...(19): siRNA sense strand
guggacagcuggccaguga

SEQ ID NO: 1124086 - RNA, 19 nt, Homo sapiens
  misc_RNA (1)...(19): siRNA sense strand
caaaggugguggacaaauc

SEQ ID NO: 1124087 - RNA, 19 nt, Homo sapiens
  misc_RNA (1)...(19): siRNA sense strand
uagcaaaggugguggacaa

SEQ ID NO: 1124088 - RNA, 19 nt, Homo sapiens
  misc_RNA (1)...(19): siRNA sense strand
ccaagcaaccauaauaauu

SEQ ID NO: 1124089 - RNA, 19 nt, Homo sapiens
  misc_RNA (1)...(19): siRNA sense strand
ugacaucgccauugaagaa

SEQ ID NO: 1124090 - RNA, 19 nt, Homo sapiens
  misc_RNA (1)...(19): siRNA sense strand
ggacgagagucgaaacuac

SEQ ID NO: 1124091 - RNA, 19 nt, Homo sapiens
  misc_RNA (1)...(19): siRNA sense strand
gaaacuacaucaguaacuc

SEQ ID NO: 1124092 - RNA, 19 nt, Homo sapiens
  misc_RNA (1)...(19): siRNA sense strand
ccacgacccuggcuacuag

SEQ ID NO: 1124093 - RNA, 19 nt, Homo sapiens
  misc_RNA (1)...(19): siRNA sense strand
ccacugccaugcaaucaga

SEQ ID NO: 1124094 - RNA, 19 nt, Homo sapiens
  misc_RNA (1)...(19): siRNA sense strand
ucuaugccauguacaagua

SEQ ID NO: 1124095 - RNA, 19 nt, Homo sapiens
  misc_RNA (1)...(19): siRNA sense strand
agucgaaacuacaucagua

SEQ ID NO: 1124096 - RNA, 19 nt, Homo sapiens
  misc_RNA (1)...(19): siRNA sense strand
auaaguggccuccuaauga

SEQ ID NO: 1124097 - RNA, 19 nt, Homo sapiens
  misc_RNA (1)...(19): siRNA sense strand
uagccaagcaaccauaaua

SEQ ID NO: 1124098 - RNA, 19 nt, Homo sapiens
  misc_RNA (1)...(19): siRNA sense strand
gagacugguuggugaagug

SEQ ID NO: 1124099 - RNA, 19 nt, Homo sapiens
  misc_RNA (1)...(19): siRNA sense strand
ccuaaugaccgacccagua

SEQ ID NO: 1124100 - RNA, 19 nt, Homo sapiens
  misc_RNA (1)...(19): siRNA sense strand
guacagaaaccgggaugaa

SEQ ID NO: 1124101 - RNA, 19 nt, Homo sapiens
  misc_RNA (1)...(19): siRNA sense strand
ggcgucagcucacaaucuu

SEQ ID NO: 1124102 - RNA, 19 nt, Homo sapiens
  misc_RNA (1)...(19): siRNA sense strand
gcgaugaugaggacauuga

SEQ ID NO: 1124103 - RNA, 19 nt, Homo sapiens
  misc_RNA (1)...(19): siRNA sense strand
cagcucacaaucuucaaua

SEQ ID NO: 1124104 - RNA, 19 nt, Homo sapiens
  misc_RNA (1)...(19): siRNA sense strand
ugaagaauccaaugcaauc

SEQ ID NO: 1124105 - RNA, 19 nt, Homo sapiens
  misc_RNA (1)...(19): siRNA sense strand
caauagccaagcaaccaua

SEQ ID NO: 1124106 - RNA, 19 nt, Homo sapiens
  misc_RNA (1)...(19): siRNA sense strand
gcagacagacuggccauag

SEQ ID NO: 1124107 - RNA, 19 nt, Homo sapiens
  misc_RNA (1)...(19): siRNA sense strand
caucaauuauggagacuac

SEQ ID NO: 1124108 - RNA, 19 nt, Homo sapiens
  misc_RNA (1)...(19): siRNA sense strand
gaagaauccaaugcaauca

SEQ ID NO: 1124109 - RNA, 19 nt, Homo sapiens
  misc_RNA (1)...(19): siRNA sense strand
uauggucguugggauagua

SEQ ID NO: 1124110 - RNA, 19 nt, Homo sapiens
  misc_RNA (1)...(19): siRNA sense strand
ggacagcuggccagugauc

SEQ ID NO: 1124111 - RNA, 19 nt, Homo sapiens
  misc_RNA (1)...(19): siRNA sense strand
ggacgacauauaucuuuag

SEQ ID NO: 1124112 - RNA, 19 nt, Homo sapiens
  misc_RNA (1)...(19): siRNA sense strand
uaaguggccuccuaaugac

SEQ ID NO: 1124113 - RNA, 19 nt, Homo sapiens
  misc_RNA (1)...(19): siRNA sense strand
aggcuugggugacuaccua

SEQ ID NO: 1124114 - RNA, 19 nt, Homo sapiens
  misc_RNA (1)...(19): siRNA sense strand
gccgagcucagguggguua

SEQ ID NO: 1124115 - RNA, 19 nt, Homo sapiens
  misc_RNA (1)...(19): siRNA sense strand
cagcgaugaugaggacauu

SEQ ID NO: 1124116 - RNA, 19 nt, Homo sapiens
  misc_RNA (1)...(19): siRNA sense strand
cuaccuagaacugcauaua

SEQ ID NO: 1124117 - RNA, 19 nt, Homo sapiens
  misc_RNA (1)...(19): siRNA sense strand
gagagucgaaacuacauca

SEQ ID NO: 1124118 - RNA, 19 nt, Homo sapiens
  misc_RNA (1)...(19): siRNA sense strand
gacaaaucacguauaagug

SEQ ID NO: 1124119 - RNA, 19 nt, Homo sapiens
  misc_RNA (1)...(19): siRNA sense strand
uauaaguggccuccuaaug

SEQ ID NO: 1124120 - RNA, 19 nt, Homo sapiens
  misc_RNA (1)...(19): siRNA sense strand
gcaaaggugguggacaaau

SEQ ID NO: 1124121 - RNA, 19 nt, Homo sapiens
  misc_RNA (1)...(19): siRNA sense strand
ugggaaauaccauguaguu

SEQ ID NO: 1124122 - RNA, 19 nt, Homo sapiens
  misc_RNA (1)...(19): siRNA sense strand
uuagcacuguucagaaaga

SEQ ID NO: 1124123 - RNA, 19 nt, Homo sapiens
  misc_RNA (1)...(19): siRNA sense strand
gccaagcaaccauaauaau

SEQ ID NO: 1124124 - RNA, 19 nt, Homo sapiens
  misc_RNA (1)...(19): siRNA sense strand
caacagccacugccaugca

SEQ ID NO: 1124125 - RNA, 19 nt, Homo sapiens
  misc_RNA (1)...(19): siRNA sense strand
gggcuguuguaaaggagaa

SEQ ID NO: 1124126 - RNA, 19 nt, Homo sapiens
  misc_RNA (1)...(19): siRNA sense strand
caauggggcuguuguaaag

SEQ ID NO: 1124127 - RNA, 19 nt, Homo sapiens
  misc_RNA (1)...(19): siRNA sense strand
ggguauggucguugggaua

SEQ ID NO: 1124128 - RNA, 19 nt, Homo sapiens
  misc_RNA (1)...(19): siRNA sense strand
ggcuugaaaguucugaaua

SEQ ID NO: 1124129 - RNA, 19 nt, Homo sapiens
  misc_RNA (1)...(19): siRNA sense strand
cuugaaaguucugaauaug

SEQ ID NO: 1124130 - RNA, 19 nt, Homo sapiens
  misc_RNA (1)...(19): siRNA sense strand
aagcaaccauaauaauugg

SEQ ID NO: 1124131 - RNA, 19 nt, Homo sapiens
  misc_RNA (1)...(19): siRNA sense strand
gguggacaaaucacguaua

SEQ ID NO: 1124132 - RNA, 19 nt, Homo sapiens
  misc_RNA (1)...(19): siRNA sense strand
aauaccauguaguucguuu

SEQ ID NO: 1124133 - RNA, 19 nt, Homo sapiens
  misc_RNA (1)...(19): siRNA sense strand
cguauaaguggccuccuaa

SEQ ID NO: 1124134 - RNA, 19 nt, Homo sapiens
  misc_RNA (1)...(19): siRNA sense strand
acguauaaguggccuccua

SEQ ID NO: 1124135 - RNA, 19 nt, Homo sapiens
  misc_RNA (1)...(19): siRNA sense strand
cuacaauggcuugaaaguu

SEQ ID NO: 1124136 - RNA, 19 nt, Homo sapiens
  misc_RNA (1)...(19): siRNA sense strand
cuuccucuaugacaacuga

SEQ ID NO: 1124137 - RNA, 19 nt, Homo sapiens
  misc_RNA (1)...(19): siRNA sense strand
uaacucagcacaguccaau

SEQ ID NO: 1124138 - RNA, 19 nt, Homo sapiens
  misc_RNA (1)...(19): siRNA sense strand
gacgagagucgaaacuaca

SEQ ID NO: 1124139 - RNA, 19 nt, Homo sapiens
  misc_RNA (1)...(19): siRNA sense strand
gccaugcaaucagagaugu

SEQ ID NO: 1124140 - RNA, 19 nt, Homo sapiens
  misc_RNA (1)...(19): siRNA sense strand
cagagugucccagcgauga

SEQ ID NO: 1124141 - RNA, 19 nt, Homo sapiens
  misc_RNA (1)...(19): siRNA sense strand
gcacagccagaagaggaaa

SEQ ID NO: 1124142 - RNA, 19 nt, Homo sapiens
  misc_RNA (1)...(19): siRNA sense strand
gugccuuccucuaugacaa

SEQ ID NO: 1124143 - RNA, 19 nt, Homo sapiens
  misc_RNA (1)...(19): siRNA sense strand
gucgaaacuacaucaguaa

SEQ ID NO: 1124144 - RNA, 19 nt, Homo sapiens
  misc_RNA (1)...(19): siRNA sense strand
ugaaggcucauaccaugug

SEQ ID NO: 1124145 - RNA, 19 nt, Homo sapiens
  misc_RNA (1)...(19): siRNA sense strand
cauuaaugaugggaaauac

SEQ ID NO: 1124146 - RNA, 19 nt, Homo sapiens
  misc_RNA (1)...(19): siRNA sense strand
gccauagugggaaauguga

SEQ ID NO: 1124147 - RNA, 19 nt, Homo sapiens
  misc_RNA (1)...(19): siRNA sense strand
uagcacuguucagaaagaa

SEQ ID NO: 1124148 - RNA, 19 nt, Homo sapiens
  misc_RNA (1)...(19): siRNA sense strand
cagacagacuggccauagg

SEQ ID NO: 1124149 - RNA, 19 nt, Homo sapiens
  misc_RNA (1)...(19): siRNA sense strand
aaaggugguggacaaauca

SEQ ID NO: 1124150 - RNA, 19 nt, Homo sapiens
  misc_RNA (1)...(19): siRNA sense strand
gacgacauauaucuuuagc

SEQ ID NO: 1124151 - RNA, 19 nt, Homo sapiens
  misc_RNA (1)...(19): siRNA sense strand
ugggacgacauauaucuuu

SEQ ID NO: 1124152 - RNA, 19 nt, Homo sapiens
  misc_RNA (1)...(19): siRNA sense strand
accuagaacugcauauaca

SEQ ID NO: 1124153 - RNA, 19 nt, Homo sapiens
  misc_RNA (1)...(19): siRNA sense strand
gggcgucagcucacaaucu

SEQ ID NO: 1124154 - RNA, 19 nt, Homo sapiens
  misc_RNA (1)...(19): siRNA sense strand
uauccaggcucagcagaag

SEQ ID NO: 1124155 - RNA, 19 nt, Homo sapiens
  misc_RNA (1)...(19): siRNA sense strand
gcgaguggacaguucuuca

SEQ ID NO: 1124156 - RNA, 19 nt, Homo sapiens
  misc_RNA (1)...(19): siRNA sense strand
cgucagcucacaaucuuca

SEQ ID NO: 1124157 - RNA, 19 nt, Homo sapiens
  misc_RNA (1)...(19): siRNA sense strand
aaacuacaucaguaacuca

SEQ ID NO: 1124158 - RNA, 19 nt, Homo sapiens
  misc_RNA (1)...(19): siRNA sense strand
gacagacuggccauagguu

SEQ ID NO: 1124159 - RNA, 19 nt, Homo sapiens
  misc_RNA (1)...(19): siRNA sense strand
cauagugggaaaugugaga

SEQ ID NO: 1124160 - RNA, 19 nt, Homo sapiens
  misc_RNA (1)...(19): siRNA sense strand
acaauggcuugaaaguucu

SEQ ID NO: 1124161 - RNA, 19 nt, Homo sapiens
  misc_RNA (1)...(19): siRNA sense strand
agccaagcaaccauaauaa

SEQ ID NO: 1124162 - RNA, 19 nt, Homo sapiens
  misc_RNA (1)...(19): siRNA sense strand
aaucuucaauagccaagca

SEQ ID NO: 1124163 - RNA, 19 nt, Homo sapiens
  misc_RNA (1)...(19): siRNA sense strand
gggaaauaccauguaguuc

SEQ ID NO: 1124164 - RNA, 19 nt, Homo sapiens
  misc_RNA (1)...(19): siRNA sense strand
guauccaggcucagcagaa

SEQ ID NO: 1124165 - RNA, 19 nt, Homo sapiens
  misc_RNA (1)...(19): siRNA sense strand
gaauauggcagccgaaaac

SEQ ID NO: 1124166 - RNA, 19 nt, Homo sapiens
  misc_RNA (1)...(19): siRNA sense strand
cacgaggagugguggcaau

SEQ ID NO: 1124167 - RNA, 19 nt, Homo sapiens
  misc_RNA (1)...(19): siRNA sense strand
cgacauauaucuuuagcaa

SEQ ID NO: 1124168 - RNA, 19 nt, Homo sapiens
  misc_RNA (1)...(19): siRNA sense strand
ggacaaaucacguauaagu

SEQ ID NO: 1124169 - RNA, 19 nt, Homo sapiens
  misc_RNA (1)...(19): siRNA sense strand
guacuacaauggcuugaaa

SEQ ID NO: 1124170 - RNA, 19 nt, Homo sapiens
  misc_RNA (1)...(19): siRNA sense strand
gcgaaaagcuccaacaaaa

SEQ ID NO: 1124171 - RNA, 19 nt, Homo sapiens
  misc_RNA (1)...(19): siRNA sense strand
guggacaaaucacguauaa

SEQ ID NO: 1124172 - RNA, 19 nt, Homo sapiens
  misc_RNA (1)...(19): siRNA sense strand
gggacgacauauaucuuua

SEQ ID NO: 1124173 - RNA, 19 nt, Homo sapiens
  misc_RNA (1)...(19): siRNA sense strand
uacaauggcuugaaaguuc

SEQ ID NO: 1124174 - RNA, 19 nt, Homo sapiens
  misc_RNA (1)...(19): siRNA sense strand
gcuugaaaguucugaauau

SEQ ID NO: 1124175 - RNA, 19 nt, Homo sapiens
  misc_RNA (1)...(19): siRNA sense strand
cauaauaauuggcgggaaa

SEQ ID NO: 1124176 - RNA, 19 nt, Homo sapiens
  misc_RNA (1)...(19): siRNA sense strand
gaaauaccauguaguucgu

SEQ ID NO: 1124177 - RNA, 19 nt, Homo sapiens
  misc_RNA (1)...(19): siRNA sense strand
caagcaaccauaauaauug

SEQ ID NO: 1124178 - RNA, 19 nt, Homo sapiens
  misc_RNA (1)...(19): siRNA sense strand
guggacagcuggccaguga

SEQ ID NO: 1124179 - RNA, 19 nt, Homo sapiens
  misc_RNA (1)...(19): siRNA sense strand
caaaggugguggacaaauc

SEQ ID NO: 1124180 - RNA, 19 nt, Homo sapiens
  misc_RNA (1)...(19): siRNA sense strand
uagcaaaggugguggacaa

SEQ ID NO: 1124181 - RNA, 19 nt, Homo sapiens
  misc_RNA (1)...(19): siRNA sense strand
ccaagcaaccauaauaauu

SEQ ID NO: 1124182 - RNA, 19 nt, Homo sapiens
  misc_RNA (1)...(19): siRNA sense strand
ugacaucgccauugaagaa

SEQ ID NO: 1124183 - RNA, 19 nt, Homo sapiens
  misc_RNA (1)...(19): siRNA sense strand
ggacgagagucgaaacuac

SEQ ID NO: 1124184 - RNA, 19 nt, Homo sapiens
  misc_RNA (1)...(19): siRNA sense strand
gaaacuacaucaguaacuc

SEQ ID NO: 1124185 - RNA, 19 nt, Homo sapiens
  misc_RNA (1)...(19): siRNA sense strand
ccacgacccuggcuacuag

SEQ ID NO: 1124186 - RNA, 19 nt, Homo sapiens
  misc_RNA (1)...(19): siRNA sense strand
ccacugccaugcaaucaga

SEQ ID NO: 1124187 - RNA, 19 nt, Homo sapiens
  misc_RNA (1)...(19): siRNA sense strand
ucuaugccauguacaagua

SEQ ID NO: 1124188 - RNA, 19 nt, Homo sapiens
  misc_RNA (1)...(19): siRNA sense strand
agucgaaacuacaucagua

SEQ ID NO: 1124189 - RNA, 19 nt, Homo sapiens
  misc_RNA (1)...(19): siRNA sense strand
auaaguggccuccuaauga

SEQ ID NO: 1124190 - RNA, 19 nt, Homo sapiens
  misc_RNA (1)...(19): siRNA sense strand
uagccaagcaaccauaaua

SEQ ID NO: 1124191 - RNA, 19 nt, Homo sapiens
  misc_RNA (1)...(19): siRNA sense strand
gagacugguuggugaagug

SEQ ID NO: 1124192 - RNA, 19 nt, Homo sapiens
  misc_RNA (1)...(19): siRNA sense strand
ccuaaugaccgacccagua

SEQ ID NO: 1124193 - RNA, 19 nt, Homo sapiens
  misc_RNA (1)...(19): siRNA sense strand
guacagaaaccgggaugaa

SEQ ID NO: 1124194 - RNA, 19 nt, Homo sapiens
  misc_RNA (1)...(19): siRNA sense strand
ggcgucagcucacaaucuu

SEQ ID NO: 1124195 - RNA, 19 nt, Homo sapiens
  misc_RNA (1)...(19): siRNA sense strand
gcgaugaugaggacauuga

SEQ ID NO: 1124196 - RNA, 19 nt, Homo sapiens
  misc_RNA (1)...(19): siRNA sense strand
cagcucacaaucuucaaua

SEQ ID NO: 1124197 - RNA, 19 nt, Homo sapiens
  misc_RNA (1)...(19): siRNA sense strand
ugaagaauccaaugcaauc

SEQ ID NO: 1124198 - RNA, 19 nt, Homo sapiens
  misc_RNA (1)...(19): siRNA sense strand
caauagccaagcaaccaua

SEQ ID NO: 1124199 - RNA, 19 nt, Homo sapiens
  misc_RNA (1)...(19): siRNA sense strand
gcagacagacuggccauag

SEQ ID NO: 1124200 - RNA, 19 nt, Homo sapiens
  misc_RNA (1)...(19): siRNA sense strand
caucaauuauggagacuac

SEQ ID NO: 1124201 - RNA, 19 nt, Homo sapiens
  misc_RNA (1)...(19): siRNA sense strand
gaagaauccaaugcaauca

SEQ ID NO: 1124202 - RNA, 19 nt, Homo sapiens
  misc_RNA (1)...(19): siRNA sense strand
uauggucguugggauagua

SEQ ID NO: 1124203 - RNA, 19 nt, Homo sapiens
  misc_RNA (1)...(19): siRNA sense strand
ggacagcuggccagugauc

SEQ ID NO: 1124204 - RNA, 19 nt, Homo sapiens
  misc_RNA (1)...(19): siRNA sense strand
ggacgacauauaucuuuag

SEQ ID NO: 1124205 - RNA, 19 nt, Homo sapiens
  misc_RNA (1)...(19): siRNA sense strand
uaaguggccuccuaaugac

SEQ ID NO: 1124206 - RNA, 19 nt, Homo sapiens
  misc_RNA (1)...(19): siRNA sense strand
aggcuugggugacuaccua

SEQ ID NO: 1124207 - RNA, 19 nt, Homo sapiens
  misc_RNA (1)...(19): siRNA sense strand
gccgagcucagguggguua

SEQ ID NO: 1124208 - RNA, 19 nt, Homo sapiens
  misc_RNA (1)...(19): siRNA sense strand
cagcgaugaugaggacauu

SEQ ID NO: 1124209 - RNA, 19 nt, Homo sapiens
  misc_RNA (1)...(19): siRNA sense strand
cuaccuagaacugcauaua

SEQ ID NO: 1124210 - RNA, 19 nt, Homo sapiens
  misc_RNA (1)...(19): siRNA sense strand
gagagucgaaacuacauca

SEQ ID NO: 1124211 - RNA, 19 nt, Homo sapiens
  misc_RNA (1)...(19): siRNA sense strand
gacaaaucacguauaagug

SEQ ID NO: 1124212 - RNA, 19 nt, Homo sapiens
  misc_RNA (1)...(19): siRNA sense strand
uauaaguggccuccuaaug

SEQ ID NO: 1124213 - RNA, 19 nt, Homo sapiens
  misc_RNA (1)...(19): siRNA sense strand
gcaaaggugguggacaaau

SEQ ID NO: 1124214 - RNA, 19 nt, Homo sapiens
  misc_RNA (1)...(19): siRNA sense strand
ugggaaauaccauguaguu

SEQ ID NO: 1124215 - RNA, 19 nt, Homo sapiens
  misc_RNA (1)...(19): siRNA sense strand
uuagcacuguucagaaaga

SEQ ID NO: 1124216 - RNA, 19 nt, Homo sapiens
  misc_RNA (1)...(19): siRNA sense strand
gccaagcaaccauaauaau

SEQ ID NO: 1124217 - RNA, 19 nt, Homo sapiens
  misc_RNA (1)...(19): siRNA sense strand
caacagccacugccaugca

SEQ ID NO: 1124218 - RNA, 19 nt, Homo sapiens
  misc_RNA (1)...(19): siRNA sense strand
gggcuguuguaaaggagaa

SEQ ID NO: 1124219 - RNA, 19 nt, Homo sapiens
  misc_RNA (1)...(19): siRNA sense strand
caauggggcuguuguaaag

SEQ ID NO: 1124220 - RNA, 19 nt, Homo sapiens
  misc_RNA (1)...(19): siRNA sense strand
ggguauggucguugggaua

SEQ ID NO: 1124221 - RNA, 19 nt, Homo sapiens
  misc_RNA (1)...(19): siRNA sense strand
ggcuugaaaguucugaaua

SEQ ID NO: 1124222 - RNA, 19 nt, Homo sapiens
  misc_RNA (1)...(19): siRNA sense strand
cuugaaaguucugaauaug

SEQ ID NO: 1124223 - RNA, 19 nt, Homo sapiens
  misc_RNA (1)...(19): siRNA sense strand
aagcaaccauaauaauugg

SEQ ID NO: 1124224 - RNA, 19 nt, Homo sapiens
  misc_RNA (1)...(19): siRNA sense strand
gguggacaaaucacguaua

SEQ ID NO: 1124225 - RNA, 19 nt, Homo sapiens
  misc_RNA (1)...(19): siRNA sense strand
aauaccauguaguucguuu

SEQ ID NO: 1124226 - RNA, 19 nt, Homo sapiens
  misc_RNA (1)...(19): siRNA sense strand
cguauaaguggccuccuaa

SEQ ID NO: 1124227 - RNA, 19 nt, Homo sapiens
  misc_RNA (1)...(19): siRNA sense strand
acguauaaguggccuccua

SEQ ID NO: 1124228 - RNA, 19 nt, Homo sapiens
  misc_RNA (1)...(19): siRNA sense strand
cuacaauggcuugaaaguu

SEQ ID NO: 1124229 - RNA, 19 nt, Homo sapiens
  misc_RNA (1)...(19): siRNA sense strand
cuuccucuaugacaacuga

SEQ ID NO: 1124230 - RNA, 19 nt, Homo sapiens
  misc_RNA (1)...(19): siRNA sense strand
uaacucagcacaguccaau

SEQ ID NO: 1124231 - RNA, 19 nt, Homo sapiens
  misc_RNA (1)...(19): siRNA sense strand
gacgagagucgaaacuaca

SEQ ID NO: 1124232 - RNA, 19 nt, Homo sapiens
  misc_RNA (1)...(19): siRNA sense strand
gccaugcaaucagagaugu

SEQ ID NO: 1124233 - RNA, 19 nt, Homo sapiens
  misc_RNA (1)...(19): siRNA sense strand
cagagugucccagcgauga

SEQ ID NO: 1124234 - RNA, 19 nt, Homo sapiens
  misc_RNA (1)...(19): siRNA sense strand
gcacagccagaagaggaaa

SEQ ID NO: 1124235 - RNA, 19 nt, Homo sapiens
  misc_RNA (1)...(19): siRNA sense strand
gugccuuccucuaugacaa

SEQ ID NO: 1124236 - RNA, 19 nt, Homo sapiens
  misc_RNA (1)...(19): siRNA sense strand
gucgaaacuacaucaguaa

SEQ ID NO: 1124237 - RNA, 19 nt, Homo sapiens
  misc_RNA (1)...(19): siRNA sense strand
ugaaggcucauaccaugug

SEQ ID NO: 1124238 - RNA, 19 nt, Homo sapiens
  misc_RNA (1)...(19): siRNA sense strand
cauuaaugaugggaaauac

SEQ ID NO: 1124239 - RNA, 19 nt, Homo sapiens
  misc_RNA (1)...(19): siRNA sense strand
gccauagugggaaauguga

SEQ ID NO: 1124240 - RNA, 19 nt, Homo sapiens
  misc_RNA (1)...(19): siRNA sense strand
uagcacuguucagaaagaa

SEQ ID NO: 1124241 - RNA, 19 nt, Homo sapiens
  misc_RNA (1)...(19): siRNA sense strand
cagacagacuggccauagg

SEQ ID NO: 1124242 - RNA, 19 nt, Homo sapiens
  misc_RNA (1)...(19): siRNA sense strand
aaaggugguggacaaauca

SEQ ID NO: 1124243 - RNA, 19 nt, Homo sapiens
  misc_RNA (1)...(19): siRNA sense strand
gacgacauauaucuuuagc

SEQ ID NO: 1124244 - RNA, 19 nt, Homo sapiens
  misc_RNA (1)...(19): siRNA sense strand
ugggacgacauauaucuuu

SEQ ID NO: 1124245 - RNA, 19 nt, Homo sapiens
  misc_RNA (1)...(19): siRNA sense strand
accuagaacugcauauaca

SEQ ID NO: 1124246 - RNA, 19 nt, Homo sapiens
  misc_RNA (1)...(19): siRNA sense strand
gggcgucagcucacaaucu

SEQ ID NO: 1124247 - RNA, 19 nt, Homo sapiens
  misc_RNA (1)...(19): siRNA sense strand
uauccaggcucagcagaag

SEQ ID NO: 1124248 - RNA, 19 nt, Homo sapiens
  misc_RNA (1)...(19): siRNA sense strand
gcgaguggacaguucuuca

SEQ ID NO: 1124249 - RNA, 19 nt, Homo sapiens
  misc_RNA (1)...(19): siRNA sense strand
cgucagcucacaaucuuca

SEQ ID NO: 1124250 - RNA, 19 nt, Homo sapiens
  misc_RNA (1)...(19): siRNA sense strand
aaacuacaucaguaacuca

SEQ ID NO: 1124251 - RNA, 19 nt, Homo sapiens
  misc_RNA (1)...(19): siRNA sense strand
gacagacuggccauagguu

SEQ ID NO: 1124252 - RNA, 19 nt, Homo sapiens
  misc_RNA (1)...(19): siRNA sense strand
cauagugggaaaugugaga

SEQ ID NO: 1124253 - RNA, 19 nt, Homo sapiens
  misc_RNA (1)...(19): siRNA sense strand
acaauggcuugaaaguucu

SEQ ID NO: 1124254 - RNA, 19 nt, Homo sapiens
  misc_RNA (1)...(19): siRNA sense strand
agccaagcaaccauaauaa

SEQ ID NO: 1124255 - RNA, 19 nt, Homo sapiens
  misc_RNA (1)...(19): siRNA sense strand
aaucuucaauagccaagca

SEQ ID NO: 1124256 - RNA, 19 nt, Homo sapiens
  misc_RNA (1)...(19): siRNA sense strand
gggaaauaccauguaguuc

SEQ ID NO: 1124257 - RNA, 19 nt, Homo sapiens
  misc_RNA (1)...(19): siRNA sense strand
guauccaggcucagcagaa

SEQ ID NO: 1124258 - RNA, 19 nt, Homo sapiens
  misc_RNA (1)...(19): siRNA sense strand
gaauauggcagccgaaaac

SEQ ID NO: 1124259 - RNA, 19 nt, Homo sapiens
  misc_RNA (1)...(19): siRNA sense strand
cacgaggagugguggcaau

SEQ ID NO: 1124260 - RNA, 19 nt, Homo sapiens
  misc_RNA (1)...(19): siRNA sense strand
cacaugagcuccuacagaa

SEQ ID NO: 1124261 - RNA, 19 nt, Homo sapiens
  misc_RNA (1)...(19): siRNA sense strand
ccacaggcauccagcguaa

SEQ ID NO: 1124262 - RNA, 19 nt, Homo sapiens
  misc_RNA (1)...(19): siRNA sense strand
ggugguggcugcugccuuu

SEQ ID NO: 1124263 - RNA, 19 nt, Homo sapiens
  misc_RNA (1)...(19): siRNA sense strand
cugaacaucugugucauua

SEQ ID NO: 1124264 - RNA, 19 nt, Homo sapiens
  misc_RNA (1)...(19): siRNA sense strand
ggugaucacuggcccuuug

SEQ ID NO: 1124265 - RNA, 19 nt, Homo sapiens
  misc_RNA (1)...(19): siRNA sense strand
gaacaucugugucauuacc

SEQ ID NO: 1124266 - RNA, 19 nt, Homo sapiens
  misc_RNA (1)...(19): siRNA sense strand
uaaccgcacugucugcuau

SEQ ID NO: 1124267 - RNA, 19 nt, Homo sapiens
  misc_RNA (1)...(19): siRNA sense strand
gaaacucacagccaaaugg

SEQ ID NO: 1124268 - RNA, 19 nt, Homo sapiens
  misc_RNA (1)...(19): siRNA sense strand
cuacaacuaugcccaaggu

SEQ ID NO: 1124269 - RNA, 19 nt, Homo sapiens
  misc_RNA (1)...(19): siRNA sense strand
ccacaugagcuccuacaga

SEQ ID NO: 1124270 - RNA, 19 nt, Homo sapiens
  misc_RNA (1)...(19): siRNA sense strand
uggcugaccugcuauaugc

SEQ ID NO: 1124271 - RNA, 19 nt, Homo sapiens
  misc_RNA (1)...(19): siRNA sense strand
gcauggcucucacugucau

SEQ ID NO: 1124272 - RNA, 19 nt, Homo sapiens
  misc_RNA (1)...(19): siRNA sense strand
caacuaugcccaaggugau

SEQ ID NO: 1124273 - RNA, 19 nt, Homo sapiens
  misc_RNA (1)...(19): siRNA sense strand
gcgagaacuucaagcaacu

SEQ ID NO: 1124274 - RNA, 19 nt, Homo sapiens
  misc_RNA (1)...(19): siRNA sense strand
gcugaacaucugugucauu

SEQ ID NO: 1124275 - RNA, 19 nt, Homo sapiens
  misc_RNA (1)...(19): siRNA sense strand
gcacggcagcauccucuuc

SEQ ID NO: 1124276 - RNA, 19 nt, Homo sapiens
  misc_RNA (1)...(19): siRNA sense strand
cagcguaaccgcacugucu

SEQ ID NO: 1124277 - RNA, 19 nt, Homo sapiens
  misc_RNA (1)...(19): siRNA sense strand
ccgcugaacaucuguguca

SEQ ID NO: 1124278 - RNA, 19 nt, Homo sapiens
  misc_RNA (1)...(19): siRNA sense strand
gcgaccacaugagcuccua

SEQ ID NO: 1124279 - RNA, 19 nt, Homo sapiens
  misc_RNA (1)...(19): siRNA sense strand
gcccuggccacccacuaua

SEQ ID NO: 1124280 - RNA, 19 nt, Homo sapiens
  misc_RNA (1)...(19): siRNA sense strand
gcugcugccuuugccauca

SEQ ID NO: 1124281 - RNA, 19 nt, Homo sapiens
  misc_RNA (1)...(19): siRNA sense strand
cugcucaucuacaacuaug

SEQ ID NO: 1124282 - RNA, 19 nt, Homo sapiens
  misc_RNA (1)...(19): siRNA sense strand
ccaucagcuuccugccuuu

SEQ ID NO: 1124283 - RNA, 19 nt, Homo sapiens
  misc_RNA (1)...(19): siRNA sense strand
guaaccgcacugucugcua

SEQ ID NO: 1124284 - RNA, 19 nt, Homo sapiens
  misc_RNA (1)...(19): siRNA sense strand
cagaaacucacagccaaau

SEQ ID NO: 1124285 - RNA, 19 nt, Homo sapiens
  misc_RNA (1)...(19): siRNA sense strand
cccacuauaugcccuaugg

SEQ ID NO: 1124286 - RNA, 19 nt, Homo sapiens
  misc_RNA (1)...(19): siRNA sense strand
cccauccucuucuacuuca

SEQ ID NO: 1124287 - RNA, 19 nt, Homo sapiens
  misc_RNA (1)...(19): siRNA sense strand
gagcuccuacagaaacuca

SEQ ID NO: 1124288 - RNA, 19 nt, Homo sapiens
  misc_RNA (1)...(19): siRNA sense strand
caugagcuccuacagaaac

SEQ ID NO: 1124289 - RNA, 19 nt, Homo sapiens
  misc_RNA (1)...(19): siRNA sense strand
cacaugagcuccuacagaa

SEQ ID NO: 1124290 - RNA, 19 nt, Homo sapiens
  misc_RNA (1)...(19): siRNA sense strand
ccacaggcauccagcguaa

SEQ ID NO: 1124291 - RNA, 19 nt, Homo sapiens
  misc_RNA (1)...(19): siRNA sense strand
ggugguggcugcugccuuu

SEQ ID NO: 1124292 - RNA, 19 nt, Homo sapiens
  misc_RNA (1)...(19): siRNA sense strand
cugaacaucugugucauua

SEQ ID NO: 1124293 - RNA, 19 nt, Homo sapiens
  misc_RNA (1)...(19): siRNA sense strand
ggugaucacuggcccuuug

SEQ ID NO: 1124294 - RNA, 19 nt, Homo sapiens
  misc_RNA (1)...(19): siRNA sense strand
gaacaucugugucauuacc

SEQ ID NO: 1124295 - RNA, 19 nt, Homo sapiens
  misc_RNA (1)...(19): siRNA sense strand
uaaccgcacugucugcuau

SEQ ID NO: 1124296 - RNA, 19 nt, Homo sapiens
  misc_RNA (1)...(19): siRNA sense strand
gaaacucacagccaaaugg

SEQ ID NO: 1124297 - RNA, 19 nt, Homo sapiens
  misc_RNA (1)...(19): siRNA sense strand
cuacaacuaugcccaaggu

SEQ ID NO: 1124298 - RNA, 19 nt, Homo sapiens
  misc_RNA (1)...(19): siRNA sense strand
ccacaugagcuccuacaga

SEQ ID NO: 1124299 - RNA, 19 nt, Homo sapiens
  misc_RNA (1)...(19): siRNA sense strand
uggcugaccugcuauaugc

SEQ ID NO: 1124300 - RNA, 19 nt, Homo sapiens
  misc_RNA (1)...(19): siRNA sense strand
gcauggcucucacugucau

SEQ ID NO: 1124301 - RNA, 19 nt, Homo sapiens
  misc_RNA (1)...(19): siRNA sense strand
caacuaugcccaaggugau

SEQ ID NO: 1124302 - RNA, 19 nt, Homo sapiens
  misc_RNA (1)...(19): siRNA sense strand
gcgagaacuucaagcaacu

SEQ ID NO: 1124303 - RNA, 19 nt, Homo sapiens
  misc_RNA (1)...(19): siRNA sense strand
gcugaacaucugugucauu

SEQ ID NO: 1124304 - RNA, 19 nt, Homo sapiens
  misc_RNA (1)...(19): siRNA sense strand
gcacggcagcauccucuuc

SEQ ID NO: 1124305 - RNA, 19 nt, Homo sapiens
  misc_RNA (1)...(19): siRNA sense strand
cagcguaaccgcacugucu

SEQ ID NO: 1124306 - RNA, 19 nt, Homo sapiens
  misc_RNA (1)...(19): siRNA sense strand
ccgcugaacaucuguguca

SEQ ID NO: 1124307 - RNA, 19 nt, Homo sapiens
  misc_RNA (1)...(19): siRNA sense strand
gcgaccacaugagcuccua

SEQ ID NO: 1124308 - RNA, 19 nt, Homo sapiens
  misc_RNA (1)...(19): siRNA sense strand
gcccuggccacccacuaua

SEQ ID NO: 1124309 - RNA, 19 nt, Homo sapiens
  misc_RNA (1)...(19): siRNA sense strand
gcugcugccuuugccauca

SEQ ID NO: 1124310 - RNA, 19 nt, Homo sapiens
  misc_RNA (1)...(19): siRNA sense strand
cugcucaucuacaacuaug

SEQ ID NO: 1124311 - RNA, 19 nt, Homo sapiens
  misc_RNA (1)...(19): siRNA sense strand
ccaucagcuuccugccuuu

SEQ ID NO: 1124312 - RNA, 19 nt, Homo sapiens
  misc_RNA (1)...(19): siRNA sense strand
guaaccgcacugucugcua

SEQ ID NO: 1124313 - RNA, 19 nt, Homo sapiens
  misc_RNA (1)...(19): siRNA sense strand
cagaaacucacagccaaau

SEQ ID NO: 1124314 - RNA, 19 nt, Homo sapiens
  misc_RNA (1)...(19): siRNA sense strand
cccacuauaugcccuaugg

SEQ ID NO: 1124315 - RNA, 19 nt, Homo sapiens
  misc_RNA (1)...(19): siRNA sense strand
cccauccucuucuacuuca

SEQ ID NO: 1124316 - RNA, 19 nt, Homo sapiens
  misc_RNA (1)...(19): siRNA sense strand
gagcuccuacagaaacuca

SEQ ID NO: 1124317 - RNA, 19 nt, Homo sapiens
  misc_RNA (1)...(19): siRNA sense strand
caugagcuccuacagaaac

SEQ ID NO: 1124318 - RNA, 19 nt, Homo sapiens
  misc_RNA (1)...(19): siRNA sense strand
cacaugagcuccuacagaa

SEQ ID NO: 1124319 - RNA, 19 nt, Homo sapiens
  misc_RNA (1)...(19): siRNA sense strand
ccacaggcauccagcguaa

SEQ ID NO: 1124320 - RNA, 19 nt, Homo sapiens
  misc_RNA (1)...(19): siRNA sense strand
ggugguggcugcugccuuu

SEQ ID NO: 1124321 - RNA, 19 nt, Homo sapiens
  misc_RNA (1)...(19): siRNA sense strand
cugaacaucugugucauua

SEQ ID NO: 1124322 - RNA, 19 nt, Homo sapiens
  misc_RNA (1)...(19): siRNA sense strand
ggugaucacuggcccuuug

SEQ ID NO: 1124323 - RNA, 19 nt, Homo sapiens
  misc_RNA (1)...(19): siRNA sense strand
gaacaucugugucauuacc

SEQ ID NO: 1124324 - RNA, 19 nt, Homo sapiens
  misc_RNA (1)...(19): siRNA sense strand
uaaccgcacugucugcuau

SEQ ID NO: 1124325 - RNA, 19 nt, Homo sapiens
  misc_RNA (1)...(19): siRNA sense strand
gaaacucacagccaaaugg

SEQ ID NO: 1124326 - RNA, 19 nt, Homo sapiens
  misc_RNA (1)...(19): siRNA sense strand
cuacaacuaugcccaaggu

SEQ ID NO: 1124327 - RNA, 19 nt, Homo sapiens
  misc_RNA (1)...(19): siRNA sense strand
ccacaugagcuccuacaga

SEQ ID NO: 1124328 - RNA, 19 nt, Homo sapiens
  misc_RNA (1)...(19): siRNA sense strand
uggcugaccugcuauaugc

SEQ ID NO: 1124329 - RNA, 19 nt, Homo sapiens
  misc_RNA (1)...(19): siRNA sense strand
gcauggcucucacugucau

SEQ ID NO: 1124330 - RNA, 19 nt, Homo sapiens
  misc_RNA (1)...(19): siRNA sense strand
caacuaugcccaaggugau

SEQ ID NO: 1124331 - RNA, 19 nt, Homo sapiens
  misc_RNA (1)...(19): siRNA sense strand
gcgagaacuucaagcaacu

SEQ ID NO: 1124332 - RNA, 19 nt, Homo sapiens
  misc_RNA (1)...(19): siRNA sense strand
gcugaacaucugugucauu

SEQ ID NO: 1124333 - RNA, 19 nt, Homo sapiens
  misc_RNA (1)...(19): siRNA sense strand
gcacggcagcauccucuuc

SEQ ID NO: 1124334 - RNA, 19 nt, Homo sapiens
  misc_RNA (1)...(19): siRNA sense strand
cagcguaaccgcacugucu

SEQ ID NO: 1124335 - RNA, 19 nt, Homo sapiens
  misc_RNA (1)...(19): siRNA sense strand
ccgcugaacaucuguguca

SEQ ID NO: 1124336 - RNA, 19 nt, Homo sapiens
  misc_RNA (1)...(19): siRNA sense strand
gcgaccacaugagcuccua

SEQ ID NO: 1124337 - RNA, 19 nt, Homo sapiens
  misc_RNA (1)...(19): siRNA sense strand
gcccuggccacccacuaua

SEQ ID NO: 1124338 - RNA, 19 nt, Homo sapiens
  misc_RNA (1)...(19): siRNA sense strand
gcugcugccuuugccauca

SEQ ID NO: 1124339 - RNA, 19 nt, Homo sapiens
  misc_RNA (1)...(19): siRNA sense strand
cugcucaucuacaacuaug

SEQ ID NO: 1124340 - RNA, 19 nt, Homo sapiens
  misc_RNA (1)...(19): siRNA sense strand
ccaucagcuuccugccuuu

SEQ ID NO: 1124341 - RNA, 19 nt, Homo sapiens
  misc_RNA (1)...(19): siRNA sense strand
guaaccgcacugucugcua

SEQ ID NO: 1124342 - RNA, 19 nt, Homo sapiens
  misc_RNA (1)...(19): siRNA sense strand
cagaaacucacagccaaau

SEQ ID NO: 1124343 - RNA, 19 nt, Homo sapiens
  misc_RNA (1)...(19): siRNA sense strand
cccacuauaugcccuaugg

SEQ ID NO: 1124344 - RNA, 19 nt, Homo sapiens
  misc_RNA (1)...(19): siRNA sense strand
cccauccucuucuacuuca

SEQ ID NO: 1124345 - RNA, 19 nt, Homo sapiens
  misc_RNA (1)...(19): siRNA sense strand
gagcuccuacagaaacuca

SEQ ID NO: 1124346 - RNA, 19 nt, Homo sapiens
  misc_RNA (1)...(19): siRNA sense strand
caugagcuccuacagaaac

SEQ ID NO: 1124347 - RNA, 19 nt, Homo sapiens
  misc_RNA (1)...(19): siRNA sense strand
cacaugagcuccuacagaa

SEQ ID NO: 1124348 - RNA, 19 nt, Homo sapiens
  misc_RNA (1)...(19): siRNA sense strand
ccacaggcauccagcguaa

SEQ ID NO: 1124349 - RNA, 19 nt, Homo sapiens
  misc_RNA (1)...(19): siRNA sense strand
ggugguggcugcugccuuu

SEQ ID NO: 1124350 - RNA, 19 nt, Homo sapiens
  misc_RNA (1)...(19): siRNA sense strand
cugaacaucugugucauua

SEQ ID NO: 1124351 - RNA, 19 nt, Homo sapiens
  misc_RNA (1)...(19): siRNA sense strand
ggugaucacuggcccuuug

SEQ ID NO: 1124352 - RNA, 19 nt, Homo sapiens
  misc_RNA (1)...(19): siRNA sense strand
gaacaucugugucauuacc

SEQ ID NO: 1124353 - RNA, 19 nt, Homo sapiens
  misc_RNA (1)...(19): siRNA sense strand
uaaccgcacugucugcuau

SEQ ID NO: 1124354 - RNA, 19 nt, Homo sapiens
  misc_RNA (1)...(19): siRNA sense strand
gaaacucacagccaaaugg

SEQ ID NO: 1124355 - RNA, 19 nt, Homo sapiens
  misc_RNA (1)...(19): siRNA sense strand
cuacaacuaugcccaaggu

SEQ ID NO: 1124356 - RNA, 19 nt, Homo sapiens
  misc_RNA (1)...(19): siRNA sense strand
ccacaugagcuccuacaga

SEQ ID NO: 1124357 - RNA, 19 nt, Homo sapiens
  misc_RNA (1)...(19): siRNA sense strand
uggcugaccugcuauaugc

SEQ ID NO: 1124358 - RNA, 19 nt, Homo sapiens
  misc_RNA (1)...(19): siRNA sense strand
gcauggcucucacugucau

SEQ ID NO: 1124359 - RNA, 19 nt, Homo sapiens
  misc_RNA (1)...(19): siRNA sense strand
caacuaugcccaaggugau

SEQ ID NO: 1124360 - RNA, 19 nt, Homo sapiens
  misc_RNA (1)...(19): siRNA sense strand
gcgagaacuucaagcaacu

SEQ ID NO: 1124361 - RNA, 19 nt, Homo sapiens
  misc_RNA (1)...(19): siRNA sense strand
gcugaacaucugugucauu

SEQ ID NO: 1124362 - RNA, 19 nt, Homo sapiens
  misc_RNA (1)...(19): siRNA sense strand
gcacggcagcauccucuuc

SEQ ID NO: 1124363 - RNA, 19 nt, Homo sapiens
  misc_RNA (1)...(19): siRNA sense strand
cagcguaaccgcacugucu

SEQ ID NO: 1124364 - RNA, 19 nt, Homo sapiens
  misc_RNA (1)...(19): siRNA sense strand
ccgcugaacaucuguguca

SEQ ID NO: 1124365 - RNA, 19 nt, Homo sapiens
  misc_RNA (1)...(19): siRNA sense strand
gcgaccacaugagcuccua

SEQ ID NO: 1124366 - RNA, 19 nt, Homo sapiens
  misc_RNA (1)...(19): siRNA sense strand
gcccuggccacccacuaua

SEQ ID NO: 1124367 - RNA, 19 nt, Homo sapiens
  misc_RNA (1)...(19): siRNA sense strand
gcugcugccuuugccauca

SEQ ID NO: 1124368 - RNA, 19 nt, Homo sapiens
  misc_RNA (1)...(19): siRNA sense strand
cugcucaucuacaacuaug

SEQ ID NO: 1124369 - RNA, 19 nt, Homo sapiens
  misc_RNA (1)...(19): siRNA sense strand
ccaucagcuuccugccuuu

SEQ ID NO: 1124370 - RNA, 19 nt, Homo sapiens
  misc_RNA (1)...(19): siRNA sense strand
guaaccgcacugucugcua

SEQ ID NO: 1124371 - RNA, 19 nt, Homo sapiens
  misc_RNA (1)...(19): siRNA sense strand
cagaaacucacagccaaau

SEQ ID NO: 1124372 - RNA, 19 nt, Homo sapiens
  misc_RNA (1)...(19): siRNA sense strand
cccacuauaugcccuaugg

SEQ ID NO: 1124373 - RNA, 19 nt, Homo sapiens
  misc_RNA (1)...(19): siRNA sense strand
cccauccucuucuacuuca

SEQ ID NO: 1124374 - RNA, 19 nt, Homo sapiens
  misc_RNA (1)...(19): siRNA sense strand
gagcuccuacagaaacuca

SEQ ID NO: 1124375 - RNA, 19 nt, Homo sapiens
  misc_RNA (1)...(19): siRNA sense strand
caugagcuccuacagaaac

SEQ ID NO: 1124376 - RNA, 19 nt, Homo sapiens
  misc_RNA (1)...(19): siRNA sense strand
ggacugcccuuucucaaug

SEQ ID NO: 1124377 - RNA, 19 nt, Homo sapiens
  misc_RNA (1)...(19): siRNA sense strand
ggaagaaggagccaaauug

SEQ ID NO: 1124378 - RNA, 19 nt, Homo sapiens
  misc_RNA (1)...(19): siRNA sense strand
ggaagguacucaucuugaa

SEQ ID NO: 1124379 - RNA, 19 nt, Homo sapiens
  misc_RNA (1)...(19): siRNA sense strand
gaagaaggagccaaauuga

SEQ ID NO: 1124380 - RNA, 19 nt, Homo sapiens
  misc_RNA (1)...(19): siRNA sense strand
ggagucagcaucuaccuaa

SEQ ID NO: 1124381 - RNA, 19 nt, Homo sapiens
  misc_RNA (1)...(19): siRNA sense strand
ggaacuguaucccacaaug

SEQ ID NO: 1124382 - RNA, 19 nt, Homo sapiens
  misc_RNA (1)...(19): siRNA sense strand
ccacuagcuuugcauacua

SEQ ID NO: 1124383 - RNA, 19 nt, Homo sapiens
  misc_RNA (1)...(19): siRNA sense strand
caagagcaccagaaguaua

SEQ ID NO: 1124384 - RNA, 19 nt, Homo sapiens
  misc_RNA (1)...(19): siRNA sense strand
gaaggagccaaauugagua

SEQ ID NO: 1124385 - RNA, 19 nt, Homo sapiens
  misc_RNA (1)...(19): siRNA sense strand
caaauugaguauggaggua

SEQ ID NO: 1124386 - RNA, 19 nt, Homo sapiens
  misc_RNA (1)...(19): siRNA sense strand
ggaccugccugccaagcuu

SEQ ID NO: 1124387 - RNA, 19 nt, Homo sapiens
  misc_RNA (1)...(19): siRNA sense strand
gaacuguaucccacaauga

SEQ ID NO: 1124388 - RNA, 19 nt, Homo sapiens
  misc_RNA (1)...(19): siRNA sense strand
caucuaccaucgugacuga

SEQ ID NO: 1124389 - RNA, 19 nt, Homo sapiens
  misc_RNA (1)...(19): siRNA sense strand
aacaagagcaccagaagua

SEQ ID NO: 1124390 - RNA, 19 nt, Homo sapiens
  misc_RNA (1)...(19): siRNA sense strand
ggagccaaauugaguaugg

SEQ ID NO: 1124391 - RNA, 19 nt, Homo sapiens
  misc_RNA (1)...(19): siRNA sense strand
caacagcaccuucccaucu

SEQ ID NO: 1124392 - RNA, 19 nt, Homo sapiens
  misc_RNA (1)...(19): siRNA sense strand
gcaccuugauuggcuaugu

SEQ ID NO: 1124393 - RNA, 19 nt, Homo sapiens
  misc_RNA (1)...(19): siRNA sense strand
gggaagaaggagccaaauu

SEQ ID NO: 1124394 - RNA, 19 nt, Homo sapiens
  misc_RNA (1)...(19): siRNA sense strand
ucaacugcaucuuccugua

SEQ ID NO: 1124395 - RNA, 19 nt, Homo sapiens
  misc_RNA (1)...(19): siRNA sense strand
gggccagucugcagaagga

SEQ ID NO: 1124396 - RNA, 19 nt, Homo sapiens
  misc_RNA (1)...(19): siRNA sense strand
gaaacagacgcgacagcaa

SEQ ID NO: 1124397 - RNA, 19 nt, Homo sapiens
  misc_RNA (1)...(19): siRNA sense strand
acaacacccugcagaacuu

SEQ ID NO: 1124398 - RNA, 19 nt, Homo sapiens
  misc_RNA (1)...(19): siRNA sense strand
caacugcaucuuccuguau

SEQ ID NO: 1124399 - RNA, 19 nt, Homo sapiens
  misc_RNA (1)...(19): siRNA sense strand
gcaacaagagcaccagaag

SEQ ID NO: 1124400 - RNA, 19 nt, Homo sapiens
  misc_RNA (1)...(19): siRNA sense strand
ccugauggcuucucacaac

SEQ ID NO: 1124401 - RNA, 19 nt, Homo sapiens
  misc_RNA (1)...(19): siRNA sense strand
aacagcaccuucccaucua

SEQ ID NO: 1124402 - RNA, 19 nt, Homo sapiens
  misc_RNA (1)...(19): siRNA sense strand
agaaggagccaaauugagu

SEQ ID NO: 1124403 - RNA, 19 nt, Homo sapiens
  misc_RNA (1)...(19): siRNA sense strand
ucaacugcaugacacugaa

SEQ ID NO: 1124404 - RNA, 19 nt, Homo sapiens
  misc_RNA (1)...(19): siRNA sense strand
acuaugggcuggucaugga

SEQ ID NO: 1124405 - RNA, 19 nt, Homo sapiens
  misc_RNA (1)...(19): siRNA sense strand
uggaguggaugcccauuca

SEQ ID NO: 1124406 - RNA, 19 nt, Homo sapiens
  misc_RNA (1)...(19): siRNA sense strand
cuugugggcuuccuuguca

SEQ ID NO: 1124407 - RNA, 19 nt, Homo sapiens
  misc_RNA (1)...(19): siRNA sense strand
gagccaaauugaguaugga

SEQ ID NO: 1124408 - RNA, 19 nt, Homo sapiens
  misc_RNA (1)...(19): siRNA sense strand
gcaucucccucaacugcau

SEQ ID NO: 1124409 - RNA, 19 nt, Homo sapiens
  misc_RNA (1)...(19): siRNA sense strand
cugcagggcuuuggaguca

SEQ ID NO: 1124410 - RNA, 19 nt, Homo sapiens
  misc_RNA (1)...(19): siRNA sense strand
gccggaagguacucaucuu

SEQ ID NO: 1124411 - RNA, 19 nt, Homo sapiens
  misc_RNA (1)...(19): siRNA sense strand
caacaagagcaccagaagu

SEQ ID NO: 1124412 - RNA, 19 nt, Homo sapiens
  misc_RNA (1)...(19): siRNA sense strand
gaugccaaccucagcaaga

SEQ ID NO: 1124413 - RNA, 19 nt, Homo sapiens
  misc_RNA (1)...(19): siRNA sense strand
ugagggcccugcagagagu

SEQ ID NO: 1124414 - RNA, 19 nt, Homo sapiens
  misc_RNA (1)...(19): siRNA sense strand
aacugcaucuuccuguaua

SEQ ID NO: 1124415 - RNA, 19 nt, Homo sapiens
  misc_RNA (1)...(19): siRNA sense strand
gcuggcaucucccucaacu

SEQ ID NO: 1124416 - RNA, 19 nt, Homo sapiens
  misc_RNA (1)...(19): siRNA sense strand
aagagcaccagaaguauau

SEQ ID NO: 1124417 - RNA, 19 nt, Homo sapiens
  misc_RNA (1)...(19): siRNA sense strand
uaauccaggugaucuuugg

SEQ ID NO: 1124418 - RNA, 19 nt, Homo sapiens
  misc_RNA (1)...(19): siRNA sense strand
gcgggaagaaggagccaaa

SEQ ID NO: 1124419 - RNA, 19 nt, Homo sapiens
  misc_RNA (1)...(19): siRNA sense strand
gaagguacucaucuugaac

SEQ ID NO: 1124420 - RNA, 19 nt, Homo sapiens
  misc_RNA (1)...(19): siRNA sense strand
gccacuagcuuugcauacu

SEQ ID NO: 1124421 - RNA, 19 nt, Homo sapiens
  misc_RNA (1)...(19): siRNA sense strand
cggaagguacucaucuuga

SEQ ID NO: 1124422 - RNA, 19 nt, Homo sapiens
  misc_RNA (1)...(19): siRNA sense strand
gggacugcccuuucucaau

SEQ ID NO: 1124423 - RNA, 19 nt, Homo sapiens
  misc_RNA (1)...(19): siRNA sense strand
gcaccgauggcuggaucua

SEQ ID NO: 1124424 - RNA, 19 nt, Homo sapiens
  misc_RNA (1)...(19): siRNA sense strand
gcaucugcauccugcucaa

SEQ ID NO: 1124425 - RNA, 19 nt, Homo sapiens
  misc_RNA (1)...(19): siRNA sense strand
cacuagcuuugcauacuau

SEQ ID NO: 1124426 - RNA, 19 nt, Homo sapiens
  misc_RNA (1)...(19): siRNA sense strand
ccucagcacaagagaagaa

SEQ ID NO: 1124427 - RNA, 19 nt, Homo sapiens
  misc_RNA (1)...(19): siRNA sense strand
acuccugguucuucauuga

SEQ ID NO: 1124428 - RNA, 19 nt, Homo sapiens
  misc_RNA (1)...(19): siRNA sense strand
accgauggcuggaucuaug

SEQ ID NO: 1124429 - RNA, 19 nt, Homo sapiens
  misc_RNA (1)...(19): siRNA sense strand
gagucagcaucuaccuaau

SEQ ID NO: 1124430 - RNA, 19 nt, Homo sapiens
  misc_RNA (1)...(19): siRNA sense strand
gcacccaacuuccccaucu

SEQ ID NO: 1124431 - RNA, 19 nt, Homo sapiens
  misc_RNA (1)...(19): siRNA sense strand
gggcuuccuugucaucaac

SEQ ID NO: 1124432 - RNA, 19 nt, Homo sapiens
  misc_RNA (1)...(19): siRNA sense strand
gcuuuggagucagcaucua

SEQ ID NO: 1124433 - RNA, 19 nt, Homo sapiens
  misc_RNA (1)...(19): siRNA sense strand
gagcugaccaugggcaaag

SEQ ID NO: 1124434 - RNA, 19 nt, Homo sapiens
  misc_RNA (1)...(19): siRNA sense strand
caucuacuccugguucuuc

SEQ ID NO: 1124435 - RNA, 19 nt, Homo sapiens
  misc_RNA (1)...(19): siRNA sense strand
gaguggaugcccauucaca

SEQ ID NO: 1124436 - RNA, 19 nt, Homo sapiens
  misc_RNA (1)...(19): siRNA sense strand
cagcacaagagaagaaugg

SEQ ID NO: 1124437 - RNA, 19 nt, Homo sapiens
  misc_RNA (1)...(19): siRNA sense strand
ccuaauccaggugaucuuu

SEQ ID NO: 1124438 - RNA, 19 nt, Homo sapiens
  misc_RNA (1)...(19): siRNA sense strand
ggacugcccuuucucaaug

SEQ ID NO: 1124439 - RNA, 19 nt, Homo sapiens
  misc_RNA (1)...(19): siRNA sense strand
ggaagaaggagccaaauug

SEQ ID NO: 1124440 - RNA, 19 nt, Homo sapiens
  misc_RNA (1)...(19): siRNA sense strand
ggaagguacucaucuugaa

SEQ ID NO: 1124441 - RNA, 19 nt, Homo sapiens
  misc_RNA (1)...(19): siRNA sense strand
gaagaaggagccaaauuga

SEQ ID NO: 1124442 - RNA, 19 nt, Homo sapiens
  misc_RNA (1)...(19): siRNA sense strand
ggagucagcaucuaccuaa

SEQ ID NO: 1124443 - RNA, 19 nt, Homo sapiens
  misc_RNA (1)...(19): siRNA sense strand
ggaacuguaucccacaaug

SEQ ID NO: 1124444 - RNA, 19 nt, Homo sapiens
  misc_RNA (1)...(19): siRNA sense strand
ccacuagcuuugcauacua

SEQ ID NO: 1124445 - RNA, 19 nt, Homo sapiens
  misc_RNA (1)...(19): siRNA sense strand
caagagcaccagaaguaua

SEQ ID NO: 1124446 - RNA, 19 nt, Homo sapiens
  misc_RNA (1)...(19): siRNA sense strand
gaaggagccaaauugagua

SEQ ID NO: 1124447 - RNA, 19 nt, Homo sapiens
  misc_RNA (1)...(19): siRNA sense strand
caaauugaguauggaggua

SEQ ID NO: 1124448 - RNA, 19 nt, Homo sapiens
  misc_RNA (1)...(19): siRNA sense strand
ggaccugccugccaagcuu

SEQ ID NO: 1124449 - RNA, 19 nt, Homo sapiens
  misc_RNA (1)...(19): siRNA sense strand
gaacuguaucccacaauga

SEQ ID NO: 1124450 - RNA, 19 nt, Homo sapiens
  misc_RNA (1)...(19): siRNA sense strand
caucuaccaucgugacuga

SEQ ID NO: 1124451 - RNA, 19 nt, Homo sapiens
  misc_RNA (1)...(19): siRNA sense strand
aacaagagcaccagaagua

SEQ ID NO: 1124452 - RNA, 19 nt, Homo sapiens
  misc_RNA (1)...(19): siRNA sense strand
ggagccaaauugaguaugg

SEQ ID NO: 1124453 - RNA, 19 nt, Homo sapiens
  misc_RNA (1)...(19): siRNA sense strand
caacagcaccuucccaucu

SEQ ID NO: 1124454 - RNA, 19 nt, Homo sapiens
  misc_RNA (1)...(19): siRNA sense strand
gcaccuugauuggcuaugu

SEQ ID NO: 1124455 - RNA, 19 nt, Homo sapiens
  misc_RNA (1)...(19): siRNA sense strand
gggaagaaggagccaaauu

SEQ ID NO: 1124456 - RNA, 19 nt, Homo sapiens
  misc_RNA (1)...(19): siRNA sense strand
ucaacugcaucuuccugua

SEQ ID NO: 1124457 - RNA, 19 nt, Homo sapiens
  misc_RNA (1)...(19): siRNA sense strand
gggccagucugcagaagga

SEQ ID NO: 1124458 - RNA, 19 nt, Homo sapiens
  misc_RNA (1)...(19): siRNA sense strand
gaaacagacgcgacagcaa

SEQ ID NO: 1124459 - RNA, 19 nt, Homo sapiens
  misc_RNA (1)...(19): siRNA sense strand
acaacacccugcagaacuu

SEQ ID NO: 1124460 - RNA, 19 nt, Homo sapiens
  misc_RNA (1)...(19): siRNA sense strand
caacugcaucuuccuguau

SEQ ID NO: 1124461 - RNA, 19 nt, Homo sapiens
  misc_RNA (1)...(19): siRNA sense strand
gcaacaagagcaccagaag

SEQ ID NO: 1124462 - RNA, 19 nt, Homo sapiens
  misc_RNA (1)...(19): siRNA sense strand
ccugauggcuucucacaac

SEQ ID NO: 1124463 - RNA, 19 nt, Homo sapiens
  misc_RNA (1)...(19): siRNA sense strand
aacagcaccuucccaucua

SEQ ID NO: 1124464 - RNA, 19 nt, Homo sapiens
  misc_RNA (1)...(19): siRNA sense strand
agaaggagccaaauugagu

SEQ ID NO: 1124465 - RNA, 19 nt, Homo sapiens
  misc_RNA (1)...(19): siRNA sense strand
ucaacugcaugacacugaa

SEQ ID NO: 1124466 - RNA, 19 nt, Homo sapiens
  misc_RNA (1)...(19): siRNA sense strand
acuaugggcuggucaugga

SEQ ID NO: 1124467 - RNA, 19 nt, Homo sapiens
  misc_RNA (1)...(19): siRNA sense strand
uggaguggaugcccauuca

SEQ ID NO: 1124468 - RNA, 19 nt, Homo sapiens
  misc_RNA (1)...(19): siRNA sense strand
cuugugggcuuccuuguca

SEQ ID NO: 1124469 - RNA, 19 nt, Homo sapiens
  misc_RNA (1)...(19): siRNA sense strand
gagccaaauugaguaugga

SEQ ID NO: 1124470 - RNA, 19 nt, Homo sapiens
  misc_RNA (1)...(19): siRNA sense strand
gcaucucccucaacugcau

SEQ ID NO: 1124471 - RNA, 19 nt, Homo sapiens
  misc_RNA (1)...(19): siRNA sense strand
cugcagggcuuuggaguca

SEQ ID NO: 1124472 - RNA, 19 nt, Homo sapiens
  misc_RNA (1)...(19): siRNA sense strand
gccggaagguacucaucuu

SEQ ID NO: 1124473 - RNA, 19 nt, Homo sapiens
  misc_RNA (1)...(19): siRNA sense strand
caacaagagcaccagaagu

SEQ ID NO: 1124474 - RNA, 19 nt, Homo sapiens
  misc_RNA (1)...(19): siRNA sense strand
gaugccaaccucagcaaga

SEQ ID NO: 1124475 - RNA, 19 nt, Homo sapiens
  misc_RNA (1)...(19): siRNA sense strand
ugagggcccugcagagagu

SEQ ID NO: 1124476 - RNA, 19 nt, Homo sapiens
  misc_RNA (1)...(19): siRNA sense strand
aacugcaucuuccuguaua

SEQ ID NO: 1124477 - RNA, 19 nt, Homo sapiens
  misc_RNA (1)...(19): siRNA sense strand
gcuggcaucucccucaacu

SEQ ID NO: 1124478 - RNA, 19 nt, Homo sapiens
  misc_RNA (1)...(19): siRNA sense strand
aagagcaccagaaguauau

SEQ ID NO: 1124479 - RNA, 19 nt, Homo sapiens
  misc_RNA (1)...(19): siRNA sense strand
uaauccaggugaucuuugg

SEQ ID NO: 1124480 - RNA, 19 nt, Homo sapiens
  misc_RNA (1)...(19): siRNA sense strand
gcgggaagaaggagccaaa

SEQ ID NO: 1124481 - RNA, 19 nt, Homo sapiens
  misc_RNA (1)...(19): siRNA sense strand
gaagguacucaucuugaac

SEQ ID NO: 1124482 - RNA, 19 nt, Homo sapiens
  misc_RNA (1)...(19): siRNA sense strand
gccacuagcuuugcauacu

SEQ ID NO: 1124483 - RNA, 19 nt, Homo sapiens
  misc_RNA (1)...(19): siRNA sense strand
cggaagguacucaucuuga

SEQ ID NO: 1124484 - RNA, 19 nt, Homo sapiens
  misc_RNA (1)...(19): siRNA sense strand
gggacugcccuuucucaau

SEQ ID NO: 1124485 - RNA, 19 nt, Homo sapiens
  misc_RNA (1)...(19): siRNA sense strand
gcaccgauggcuggaucua

SEQ ID NO: 1124486 - RNA, 19 nt, Homo sapiens
  misc_RNA (1)...(19): siRNA sense strand
gcaucugcauccugcucaa

SEQ ID NO: 1124487 - RNA, 19 nt, Homo sapiens
  misc_RNA (1)...(19): siRNA sense strand
cacuagcuuugcauacuau

SEQ ID NO: 1124488 - RNA, 19 nt, Homo sapiens
  misc_RNA (1)...(19): siRNA sense strand
ccucagcacaagagaagaa

SEQ ID NO: 1124489 - RNA, 19 nt, Homo sapiens
  misc_RNA (1)...(19): siRNA sense strand
acuccugguucuucauuga

SEQ ID NO: 1124490 - RNA, 19 nt, Homo sapiens
  misc_RNA (1)...(19): siRNA sense strand
accgauggcuggaucuaug

SEQ ID NO: 1124491 - RNA, 19 nt, Homo sapiens
  misc_RNA (1)...(19): siRNA sense strand
gagucagcaucuaccuaau

SEQ ID NO: 1124492 - RNA, 19 nt, Homo sapiens
  misc_RNA (1)...(19): siRNA sense strand
gcacccaacuuccccaucu

SEQ ID NO: 1124493 - RNA, 19 nt, Homo sapiens
  misc_RNA (1)...(19): siRNA sense strand
gggcuuccuugucaucaac

SEQ ID NO: 1124494 - RNA, 19 nt, Homo sapiens
  misc_RNA (1)...(19): siRNA sense strand
gcuuuggagucagcaucua

SEQ ID NO: 1124495 - RNA, 19 nt, Homo sapiens
  misc_RNA (1)...(19): siRNA sense strand
gagcugaccaugggcaaag

SEQ ID NO: 1124496 - RNA, 19 nt, Homo sapiens
  misc_RNA (1)...(19): siRNA sense strand
caucuacuccugguucuuc

SEQ ID NO: 1124497 - RNA, 19 nt, Homo sapiens
  misc_RNA (1)...(19): siRNA sense strand
gaguggaugcccauucaca

SEQ ID NO: 1124498 - RNA, 19 nt, Homo sapiens
  misc_RNA (1)...(19): siRNA sense strand
cagcacaagagaagaaugg

SEQ ID NO: 1124499 - RNA, 19 nt, Homo sapiens
  misc_RNA (1)...(19): siRNA sense strand
ccuaauccaggugaucuuu

SEQ ID NO: 1124500 - RNA, 19 nt, Homo sapiens
  misc_RNA (1)...(19): siRNA sense strand
ggacugcccuuucucaaug

SEQ ID NO: 1124501 - RNA, 19 nt, Homo sapiens
  misc_RNA (1)...(19): siRNA sense strand
ggaagaaggagccaaauug

SEQ ID NO: 1124502 - RNA, 19 nt, Homo sapiens
  misc_RNA (1)...(19): siRNA sense strand
ggaagguacucaucuugaa

SEQ ID NO: 1124503 - RNA, 19 nt, Homo sapiens
  misc_RNA (1)...(19): siRNA sense strand
gaagaaggagccaaauuga

SEQ ID NO: 1124504 - RNA, 19 nt, Homo sapiens
  misc_RNA (1)...(19): siRNA sense strand
ggagucagcaucuaccuaa

SEQ ID NO: 1124505 - RNA, 19 nt, Homo sapiens
  misc_RNA (1)...(19): siRNA sense strand
ggaacuguaucccacaaug

SEQ ID NO: 1124506 - RNA, 19 nt, Homo sapiens
  misc_RNA (1)...(19): siRNA sense strand
ccacuagcuuugcauacua

SEQ ID NO: 1124507 - RNA, 19 nt, Homo sapiens
  misc_RNA (1)...(19): siRNA sense strand
caagagcaccagaaguaua

SEQ ID NO: 1124508 - RNA, 19 nt, Homo sapiens
  misc_RNA (1)...(19): siRNA sense strand
gaaggagccaaauugagua

SEQ ID NO: 1124509 - RNA, 19 nt, Homo sapiens
  misc_RNA (1)...(19): siRNA sense strand
caaauugaguauggaggua

SEQ ID NO: 1124510 - RNA, 19 nt, Homo sapiens
  misc_RNA (1)...(19): siRNA sense strand
ggaccugccugccaagcuu

SEQ ID NO: 1124511 - RNA, 19 nt, Homo sapiens
  misc_RNA (1)...(19): siRNA sense strand
gaacuguaucccacaauga

SEQ ID NO: 1124512 - RNA, 19 nt, Homo sapiens
  misc_RNA (1)...(19): siRNA sense strand
caucuaccaucgugacuga

SEQ ID NO: 1124513 - RNA, 19 nt, Homo sapiens
  misc_RNA (1)...(19): siRNA sense strand
aacaagagcaccagaagua

SEQ ID NO: 1124514 - RNA, 19 nt, Homo sapiens
  misc_RNA (1)...(19): siRNA sense strand
ggagccaaauugaguaugg

SEQ ID NO: 1124515 - RNA, 19 nt, Homo sapiens
  misc_RNA (1)...(19): siRNA sense strand
caacagcaccuucccaucu

SEQ ID NO: 1124516 - RNA, 19 nt, Homo sapiens
  misc_RNA (1)...(19): siRNA sense strand
gcaccuugauuggcuaugu

SEQ ID NO: 1124517 - RNA, 19 nt, Homo sapiens
  misc_RNA (1)...(19): siRNA sense strand
gggaagaaggagccaaauu

SEQ ID NO: 1124518 - RNA, 19 nt, Homo sapiens
  misc_RNA (1)...(19): siRNA sense strand
ucaacugcaucuuccugua

SEQ ID NO: 1124519 - RNA, 19 nt, Homo sapiens
  misc_RNA (1)...(19): siRNA sense strand
gggccagucugcagaagga

SEQ ID NO: 1124520 - RNA, 19 nt, Homo sapiens
  misc_RNA (1)...(19): siRNA sense strand
gaaacagacgcgacagcaa

SEQ ID NO: 1124521 - RNA, 19 nt, Homo sapiens
  misc_RNA (1)...(19): siRNA sense strand
acaacacccugcagaacuu

SEQ ID NO: 1124522 - RNA, 19 nt, Homo sapiens
  misc_RNA (1)...(19): siRNA sense strand
caacugcaucuuccuguau

SEQ ID NO: 1124523 - RNA, 19 nt, Homo sapiens
  misc_RNA (1)...(19): siRNA sense strand
gcaacaagagcaccagaag

SEQ ID NO: 1124524 - RNA, 19 nt, Homo sapiens
  misc_RNA (1)...(19): siRNA sense strand
ccugauggcuucucacaac

SEQ ID NO: 1124525 - RNA, 19 nt, Homo sapiens
  misc_RNA (1)...(19): siRNA sense strand
aacagcaccuucccaucua

SEQ ID NO: 1124526 - RNA, 19 nt, Homo sapiens
  misc_RNA (1)...(19): siRNA sense strand
agaaggagccaaauugagu

SEQ ID NO: 1124527 - RNA, 19 nt, Homo sapiens
  misc_RNA (1)...(19): siRNA sense strand
ucaacugcaugacacugaa

SEQ ID NO: 1124528 - RNA, 19 nt, Homo sapiens
  misc_RNA (1)...(19): siRNA sense strand
acuaugggcuggucaugga

SEQ ID NO: 1124529 - RNA, 19 nt, Homo sapiens
  misc_RNA (1)...(19): siRNA sense strand
uggaguggaugcccauuca

SEQ ID NO: 1124530 - RNA, 19 nt, Homo sapiens
  misc_RNA (1)...(19): siRNA sense strand
cuugugggcuuccuuguca

SEQ ID NO: 1124531 - RNA, 19 nt, Homo sapiens
  misc_RNA (1)...(19): siRNA sense strand
gagccaaauugaguaugga

SEQ ID NO: 1124532 - RNA, 19 nt, Homo sapiens
  misc_RNA (1)...(19): siRNA sense strand
gcaucucccucaacugcau

SEQ ID NO: 1124533 - RNA, 19 nt, Homo sapiens
  misc_RNA (1)...(19): siRNA sense strand
cugcagggcuuuggaguca

SEQ ID NO: 1124534 - RNA, 19 nt, Homo sapiens
  misc_RNA (1)...(19): siRNA sense strand
gccggaagguacucaucuu

SEQ ID NO: 1124535 - RNA, 19 nt, Homo sapiens
  misc_RNA (1)...(19): siRNA sense strand
caacaagagcaccagaagu

SEQ ID NO: 1124536 - RNA, 19 nt, Homo sapiens
  misc_RNA (1)...(19): siRNA sense strand
gaugccaaccucagcaaga

SEQ ID NO: 1124537 - RNA, 19 nt, Homo sapiens
  misc_RNA (1)...(19): siRNA sense strand
ugagggcccugcagagagu

SEQ ID NO: 1124538 - RNA, 19 nt, Homo sapiens
  misc_RNA (1)...(19): siRNA sense strand
aacugcaucuuccuguaua

SEQ ID NO: 1124539 - RNA, 19 nt, Homo sapiens
  misc_RNA (1)...(19): siRNA sense strand
gcuggcaucucccucaacu

SEQ ID NO: 1124540 - RNA, 19 nt, Homo sapiens
  misc_RNA (1)...(19): siRNA sense strand
aagagcaccagaaguauau

SEQ ID NO: 1124541 - RNA, 19 nt, Homo sapiens
  misc_RNA (1)...(19): siRNA sense strand
uaauccaggugaucuuugg

SEQ ID NO: 1124542 - RNA, 19 nt, Homo sapiens
  misc_RNA (1)...(19): siRNA sense strand
gcgggaagaaggagccaaa

SEQ ID NO: 1124543 - RNA, 19 nt, Homo sapiens
  misc_RNA (1)...(19): siRNA sense strand
gaagguacucaucuugaac

SEQ ID NO: 1124544 - RNA, 19 nt, Homo sapiens
  misc_RNA (1)...(19): siRNA sense strand
gccacuagcuuugcauacu

SEQ ID NO: 1124545 - RNA, 19 nt, Homo sapiens
  misc_RNA (1)...(19): siRNA sense strand
cggaagguacucaucuuga

SEQ ID NO: 1124546 - RNA, 19 nt, Homo sapiens
  misc_RNA (1)...(19): siRNA sense strand
gggacugcccuuucucaau

SEQ ID NO: 1124547 - RNA, 19 nt, Homo sapiens
  misc_RNA (1)...(19): siRNA sense strand
gcaccgauggcuggaucua

SEQ ID NO: 1124548 - RNA, 19 nt, Homo sapiens
  misc_RNA (1)...(19): siRNA sense strand
gcaucugcauccugcucaa

SEQ ID NO: 1124549 - RNA, 19 nt, Homo sapiens
  misc_RNA (1)...(19): siRNA sense strand
cacuagcuuugcauacuau

SEQ ID NO: 1124550 - RNA, 19 nt, Homo sapiens
  misc_RNA (1)...(19): siRNA sense strand
ccucagcacaagagaagaa

SEQ ID NO: 1124551 - RNA, 19 nt, Homo sapiens
  misc_RNA (1)...(19): siRNA sense strand
acuccugguucuucauuga

SEQ ID NO: 1124552 - RNA, 19 nt, Homo sapiens
  misc_RNA (1)...(19): siRNA sense strand
accgauggcuggaucuaug

SEQ ID NO: 1124553 - RNA, 19 nt, Homo sapiens
  misc_RNA (1)...(19): siRNA sense strand
gagucagcaucuaccuaau

SEQ ID NO: 1124554 - RNA, 19 nt, Homo sapiens
  misc_RNA (1)...(19): siRNA sense strand
gcacccaacuuccccaucu

SEQ ID NO: 1124555 - RNA, 19 nt, Homo sapiens
  misc_RNA (1)...(19): siRNA sense strand
gggcuuccuugucaucaac

SEQ ID NO: 1124556 - RNA, 19 nt, Homo sapiens
  misc_RNA (1)...(19): siRNA sense strand
gcuuuggagucagcaucua

SEQ ID NO: 1124557 - RNA, 19 nt, Homo sapiens
  misc_RNA (1)...(19): siRNA sense strand
gagcugaccaugggcaaag

SEQ ID NO: 1124558 - RNA, 19 nt, Homo sapiens
  misc_RNA (1)...(19): siRNA sense strand
caucuacuccugguucuuc

SEQ ID NO: 1124559 - RNA, 19 nt, Homo sapiens
  misc_RNA (1)...(19): siRNA sense strand
gaguggaugcccauucaca

SEQ ID NO: 1124560 - RNA, 19 nt, Homo sapiens
  misc_RNA (1)...(19): siRNA sense strand
cagcacaagagaagaaugg

SEQ ID NO: 1124561 - RNA, 19 nt, Homo sapiens
  misc_RNA (1)...(19): siRNA sense strand
ccuaauccaggugaucuuu

SEQ ID NO: 1124562 - RNA, 19 nt, Homo sapiens
  misc_RNA (1)...(19): siRNA sense strand
ggacugcccuuucucaaug

SEQ ID NO: 1124563 - RNA, 19 nt, Homo sapiens
  misc_RNA (1)...(19): siRNA sense strand
ggaagaaggagccaaauug

SEQ ID NO: 1124564 - RNA, 19 nt, Homo sapiens
  misc_RNA (1)...(19): siRNA sense strand
ggaagguacucaucuugaa

SEQ ID NO: 1124565 - RNA, 19 nt, Homo sapiens
  misc_RNA (1)...(19): siRNA sense strand
gaagaaggagccaaauuga

SEQ ID NO: 1124566 - RNA, 19 nt, Homo sapiens
  misc_RNA (1)...(19): siRNA sense strand
ggagucagcaucuaccuaa

SEQ ID NO: 1124567 - RNA, 19 nt, Homo sapiens
  misc_RNA (1)...(19): siRNA sense strand
ggaacuguaucccacaaug

SEQ ID NO: 1124568 - RNA, 19 nt, Homo sapiens
  misc_RNA (1)...(19): siRNA sense strand
ccacuagcuuugcauacua

SEQ ID NO: 1124569 - RNA, 19 nt, Homo sapiens
  misc_RNA (1)...(19): siRNA sense strand
caagagcaccagaaguaua

SEQ ID NO: 1124570 - RNA, 19 nt, Homo sapiens
  misc_RNA (1)...(19): siRNA sense strand
gaaggagccaaauugagua

SEQ ID NO: 1124571 - RNA, 19 nt, Homo sapiens
  misc_RNA (1)...(19): siRNA sense strand
caaauugaguauggaggua

SEQ ID NO: 1124572 - RNA, 19 nt, Homo sapiens
  misc_RNA (1)...(19): siRNA sense strand
ggaccugccugccaagcuu

SEQ ID NO: 1124573 - RNA, 19 nt, Homo sapiens
  misc_RNA (1)...(19): siRNA sense strand
gaacuguaucccacaauga

SEQ ID NO: 1124574 - RNA, 19 nt, Homo sapiens
  misc_RNA (1)...(19): siRNA sense strand
caucuaccaucgugacuga

SEQ ID NO: 1124575 - RNA, 19 nt, Homo sapiens
  misc_RNA (1)...(19): siRNA sense strand
aacaagagcaccagaagua

SEQ ID NO: 1124576 - RNA, 19 nt, Homo sapiens
  misc_RNA (1)...(19): siRNA sense strand
ggagccaaauugaguaugg

SEQ ID NO: 1124577 - RNA, 19 nt, Homo sapiens
  misc_RNA (1)...(19): siRNA sense strand
caacagcaccuucccaucu

SEQ ID NO: 1124578 - RNA, 19 nt, Homo sapiens
  misc_RNA (1)...(19): siRNA sense strand
gcaccuugauuggcuaugu

SEQ ID NO: 1124579 - RNA, 19 nt, Homo sapiens
  misc_RNA (1)...(19): siRNA sense strand
gggaagaaggagccaaauu

SEQ ID NO: 1124580 - RNA, 19 nt, Homo sapiens
  misc_RNA (1)...(19): siRNA sense strand
ucaacugcaucuuccugua

SEQ ID NO: 1124581 - RNA, 19 nt, Homo sapiens
  misc_RNA (1)...(19): siRNA sense strand
gggccagucugcagaagga

SEQ ID NO: 1124582 - RNA, 19 nt, Homo sapiens
  misc_RNA (1)...(19): siRNA sense strand
gaaacagacgcgacagcaa

SEQ ID NO: 1124583 - RNA, 19 nt, Homo sapiens
  misc_RNA (1)...(19): siRNA sense strand
acaacacccugcagaacuu

SEQ ID NO: 1124584 - RNA, 19 nt, Homo sapiens
  misc_RNA (1)...(19): siRNA sense strand
caacugcaucuuccuguau

SEQ ID NO: 1124585 - RNA, 19 nt, Homo sapiens
  misc_RNA (1)...(19): siRNA sense strand
gcaacaagagcaccagaag

SEQ ID NO: 1124586 - RNA, 19 nt, Homo sapiens
  misc_RNA (1)...(19): siRNA sense strand
ccugauggcuucucacaac

SEQ ID NO: 1124587 - RNA, 19 nt, Homo sapiens
  misc_RNA (1)...(19): siRNA sense strand
aacagcaccuucccaucua

SEQ ID NO: 1124588 - RNA, 19 nt, Homo sapiens
  misc_RNA (1)...(19): siRNA sense strand
agaaggagccaaauugagu

SEQ ID NO: 1124589 - RNA, 19 nt, Homo sapiens
  misc_RNA (1)...(19): siRNA sense strand
ucaacugcaugacacugaa

SEQ ID NO: 1124590 - RNA, 19 nt, Homo sapiens
  misc_RNA (1)...(19): siRNA sense strand
acuaugggcuggucaugga

SEQ ID NO: 1124591 - RNA, 19 nt, Homo sapiens
  misc_RNA (1)...(19): siRNA sense strand
uggaguggaugcccauuca

SEQ ID NO: 1124592 - RNA, 19 nt, Homo sapiens
  misc_RNA (1)...(19): siRNA sense strand
cuugugggcuuccuuguca

SEQ ID NO: 1124593 - RNA, 19 nt, Homo sapiens
  misc_RNA (1)...(19): siRNA sense strand
gagccaaauugaguaugga

SEQ ID NO: 1124594 - RNA, 19 nt, Homo sapiens
  misc_RNA (1)...(19): siRNA sense strand
gcaucucccucaacugcau

SEQ ID NO: 1124595 - RNA, 19 nt, Homo sapiens
  misc_RNA (1)...(19): siRNA sense strand
cugcagggcuuuggaguca

SEQ ID NO: 1124596 - RNA, 19 nt, Homo sapiens
  misc_RNA (1)...(19): siRNA sense strand
gccggaagguacucaucuu

SEQ ID NO: 1124597 - RNA, 19 nt, Homo sapiens
  misc_RNA (1)...(19): siRNA sense strand
caacaagagcaccagaagu

SEQ ID NO: 1124598 - RNA, 19 nt, Homo sapiens
  misc_RNA (1)...(19): siRNA sense strand
gaugccaaccucagcaaga

SEQ ID NO: 1124599 - RNA, 19 nt, Homo sapiens
  misc_RNA (1)...(19): siRNA sense strand
ugagggcccugcagagagu

SEQ ID NO: 1124600 - RNA, 19 nt, Homo sapiens
  misc_RNA (1)...(19): siRNA sense strand
aacugcaucuuccuguaua

SEQ ID NO: 1124601 - RNA, 19 nt, Homo sapiens
  misc_RNA (1)...(19): siRNA sense strand
gcuggcaucucccucaacu

SEQ ID NO: 1124602 - RNA, 19 nt, Homo sapiens
  misc_RNA (1)...(19): siRNA sense strand
aagagcaccagaaguauau

SEQ ID NO: 1124603 - RNA, 19 nt, Homo sapiens
  misc_RNA (1)...(19): siRNA sense strand
uaauccaggugaucuuugg

SEQ ID NO: 1124604 - RNA, 19 nt, Homo sapiens
  misc_RNA (1)...(19): siRNA sense strand
gcgggaagaaggagccaaa

SEQ ID NO: 1124605 - RNA, 19 nt, Homo sapiens
  misc_RNA (1)...(19): siRNA sense strand
gaagguacucaucuugaac

SEQ ID NO: 1124606 - RNA, 19 nt, Homo sapiens
  misc_RNA (1)...(19): siRNA sense strand
gccacuagcuuugcauacu

SEQ ID NO: 1124607 - RNA, 19 nt, Homo sapiens
  misc_RNA (1)...(19): siRNA sense strand
cggaagguacucaucuuga

SEQ ID NO: 1124608 - RNA, 19 nt, Homo sapiens
  misc_RNA (1)...(19): siRNA sense strand
gggacugcccuuucucaau

SEQ ID NO: 1124609 - RNA, 19 nt, Homo sapiens
  misc_RNA (1)...(19): siRNA sense strand
gcaccgauggcuggaucua

SEQ ID NO: 1124610 - RNA, 19 nt, Homo sapiens
  misc_RNA (1)...(19): siRNA sense strand
gcaucugcauccugcucaa

SEQ ID NO: 1124611 - RNA, 19 nt, Homo sapiens
  misc_RNA (1)...(19): siRNA sense strand
cacuagcuuugcauacuau

SEQ ID NO: 1124612 - RNA, 19 nt, Homo sapiens
  misc_RNA (1)...(19): siRNA sense strand
ccucagcacaagagaagaa

SEQ ID NO: 1124613 - RNA, 19 nt, Homo sapiens
  misc_RNA (1)...(19): siRNA sense strand
acuccugguucuucauuga

SEQ ID NO: 1124614 - RNA, 19 nt, Homo sapiens
  misc_RNA (1)...(19): siRNA sense strand
accgauggcuggaucuaug

SEQ ID NO: 1124615 - RNA, 19 nt, Homo sapiens
  misc_RNA (1)...(19): siRNA sense strand
gagucagcaucuaccuaau

SEQ ID NO: 1124616 - RNA, 19 nt, Homo sapiens
  misc_RNA (1)...(19): siRNA sense strand
gcacccaacuuccccaucu

SEQ ID NO: 1124617 - RNA, 19 nt, Homo sapiens
  misc_RNA (1)...(19): siRNA sense strand
gggcuuccuugucaucaac

SEQ ID NO: 1124618 - RNA, 19 nt, Homo sapiens
  misc_RNA (1)...(19): siRNA sense strand
gcuuuggagucagcaucua

SEQ ID NO: 1124619 - RNA, 19 nt, Homo sapiens
  misc_RNA (1)...(19): siRNA sense strand
gagcugaccaugggcaaag

SEQ ID NO: 1124620 - RNA, 19 nt, Homo sapiens
  misc_RNA (1)...(19): siRNA sense strand
caucuacuccugguucuuc

SEQ ID NO: 1124621 - RNA, 19 nt, Homo sapiens
  misc_RNA (1)...(19): siRNA sense strand
gaguggaugcccauucaca

SEQ ID NO: 1124622 - RNA, 19 nt, Homo sapiens
  misc_RNA (1)...(19): siRNA sense strand
cagcacaagagaagaaugg

SEQ ID NO: 1124623 - RNA, 19 nt, Homo sapiens
  misc_RNA (1)...(19): siRNA sense strand
ccuaauccaggugaucuuu

SEQ ID NO: 1124624 - RNA, 19 nt, Homo sapiens
  misc_RNA (1)...(19): siRNA sense strand
ggacugcccuuucucaaug

SEQ ID NO: 1124625 - RNA, 19 nt, Homo sapiens
  misc_RNA (1)...(19): siRNA sense strand
ggaagaaggagccaaauug

SEQ ID NO: 1124626 - RNA, 19 nt, Homo sapiens
  misc_RNA (1)...(19): siRNA sense strand
ggaagguacucaucuugaa

SEQ ID NO: 1124627 - RNA, 19 nt, Homo sapiens
  misc_RNA (1)...(19): siRNA sense strand
gaagaaggagccaaauuga

SEQ ID NO: 1124628 - RNA, 19 nt, Homo sapiens
  misc_RNA (1)...(19): siRNA sense strand
ggagucagcaucuaccuaa

SEQ ID NO: 1124629 - RNA, 19 nt, Homo sapiens
  misc_RNA (1)...(19): siRNA sense strand
ggaacuguaucccacaaug

SEQ ID NO: 1124630 - RNA, 19 nt, Homo sapiens
  misc_RNA (1)...(19): siRNA sense strand
ccacuagcuuugcauacua

SEQ ID NO: 1124631 - RNA, 19 nt, Homo sapiens
  misc_RNA (1)...(19): siRNA sense strand
caagagcaccagaaguaua

SEQ ID NO: 1124632 - RNA, 19 nt, Homo sapiens
  misc_RNA (1)...(19): siRNA sense strand
gaaggagccaaauugagua

SEQ ID NO: 1124633 - RNA, 19 nt, Homo sapiens
  misc_RNA (1)...(19): siRNA sense strand
caaauugaguauggaggua

SEQ ID NO: 1124634 - RNA, 19 nt, Homo sapiens
  misc_RNA (1)...(19): siRNA sense strand
ggaccugccugccaagcuu

SEQ ID NO: 1124635 - RNA, 19 nt, Homo sapiens
  misc_RNA (1)...(19): siRNA sense strand
gaacuguaucccacaauga

SEQ ID NO: 1124636 - RNA, 19 nt, Homo sapiens
  misc_RNA (1)...(19): siRNA sense strand
caucuaccaucgugacuga

SEQ ID NO: 1124637 - RNA, 19 nt, Homo sapiens
  misc_RNA (1)...(19): siRNA sense strand
aacaagagcaccagaagua

SEQ ID NO: 1124638 - RNA, 19 nt, Homo sapiens
  misc_RNA (1)...(19): siRNA sense strand
ggagccaaauugaguaugg

SEQ ID NO: 1124639 - RNA, 19 nt, Homo sapiens
  misc_RNA (1)...(19): siRNA sense strand
caacagcaccuucccaucu

SEQ ID NO: 1124640 - RNA, 19 nt, Homo sapiens
  misc_RNA (1)...(19): siRNA sense strand
gcaccuugauuggcuaugu

SEQ ID NO: 1124641 - RNA, 19 nt, Homo sapiens
  misc_RNA (1)...(19): siRNA sense strand
gggaagaaggagccaaauu

SEQ ID NO: 1124642 - RNA, 19 nt, Homo sapiens
  misc_RNA (1)...(19): siRNA sense strand
ucaacugcaucuuccugua

SEQ ID NO: 1124643 - RNA, 19 nt, Homo sapiens
  misc_RNA (1)...(19): siRNA sense strand
gggccagucugcagaagga

SEQ ID NO: 1124644 - RNA, 19 nt, Homo sapiens
  misc_RNA (1)...(19): siRNA sense strand
gaaacagacgcgacagcaa

SEQ ID NO: 1124645 - RNA, 19 nt, Homo sapiens
  misc_RNA (1)...(19): siRNA sense strand
acaacacccugcagaacuu

SEQ ID NO: 1124646 - RNA, 19 nt, Homo sapiens
  misc_RNA (1)...(19): siRNA sense strand
caacugcaucuuccuguau

SEQ ID NO: 1124647 - RNA, 19 nt, Homo sapiens
  misc_RNA (1)...(19): siRNA sense strand
gcaacaagagcaccagaag

SEQ ID NO: 1124648 - RNA, 19 nt, Homo sapiens
  misc_RNA (1)...(19): siRNA sense strand
ccugauggcuucucacaac

SEQ ID NO: 1124649 - RNA, 19 nt, Homo sapiens
  misc_RNA (1)...(19): siRNA sense strand
aacagcaccuucccaucua

SEQ ID NO: 1124650 - RNA, 19 nt, Homo sapiens
  misc_RNA (1)...(19): siRNA sense strand
agaaggagccaaauugagu

SEQ ID NO: 1124651 - RNA, 19 nt, Homo sapiens
  misc_RNA (1)...(19): siRNA sense strand
ucaacugcaugacacugaa

SEQ ID NO: 1124652 - RNA, 19 nt, Homo sapiens
  misc_RNA (1)...(19): siRNA sense strand
acuaugggcuggucaugga

SEQ ID NO: 1124653 - RNA, 19 nt, Homo sapiens
  misc_RNA (1)...(19): siRNA sense strand
uggaguggaugcccauuca

SEQ ID NO: 1124654 - RNA, 19 nt, Homo sapiens
  misc_RNA (1)...(19): siRNA sense strand
cuugugggcuuccuuguca

SEQ ID NO: 1124655 - RNA, 19 nt, Homo sapiens
  misc_RNA (1)...(19): siRNA sense strand
gagccaaauugaguaugga

SEQ ID NO: 1124656 - RNA, 19 nt, Homo sapiens
  misc_RNA (1)...(19): siRNA sense strand
gcaucucccucaacugcau

SEQ ID NO: 1124657 - RNA, 19 nt, Homo sapiens
  misc_RNA (1)...(19): siRNA sense strand
cugcagggcuuuggaguca

SEQ ID NO: 1124658 - RNA, 19 nt, Homo sapiens
  misc_RNA (1)...(19): siRNA sense strand
gccggaagguacucaucuu

SEQ ID NO: 1124659 - RNA, 19 nt, Homo sapiens
  misc_RNA (1)...(19): siRNA sense strand
caacaagagcaccagaagu

SEQ ID NO: 1124660 - RNA, 19 nt, Homo sapiens
  misc_RNA (1)...(19): siRNA sense strand
gaugccaaccucagcaaga

SEQ ID NO: 1124661 - RNA, 19 nt, Homo sapiens
  misc_RNA (1)...(19): siRNA sense strand
ugagggcccugcagagagu

SEQ ID NO: 1124662 - RNA, 19 nt, Homo sapiens
  misc_RNA (1)...(19): siRNA sense strand
aacugcaucuuccuguaua

SEQ ID NO: 1124663 - RNA, 19 nt, Homo sapiens
  misc_RNA (1)...(19): siRNA sense strand
gcuggcaucucccucaacu

SEQ ID NO: 1124664 - RNA, 19 nt, Homo sapiens
  misc_RNA (1)...(19): siRNA sense strand
aagagcaccagaaguauau

SEQ ID NO: 1124665 - RNA, 19 nt, Homo sapiens
  misc_RNA (1)...(19): siRNA sense strand
uaauccaggugaucuuugg

SEQ ID NO: 1124666 - RNA, 19 nt, Homo sapiens
  misc_RNA (1)...(19): siRNA sense strand
gcgggaagaaggagccaaa

SEQ ID NO: 1124667 - RNA, 19 nt, Homo sapiens
  misc_RNA (1)...(19): siRNA sense strand
gaagguacucaucuugaac

SEQ ID NO: 1124668 - RNA, 19 nt, Homo sapiens
  misc_RNA (1)...(19): siRNA sense strand
gccacuagcuuugcauacu

SEQ ID NO: 1124669 - RNA, 19 nt, Homo sapiens
  misc_RNA (1)...(19): siRNA sense strand
cggaagguacucaucuuga

SEQ ID NO: 1124670 - RNA, 19 nt, Homo sapiens
  misc_RNA (1)...(19): siRNA sense strand
gggacugcccuuucucaau

SEQ ID NO: 1124671 - RNA, 19 nt, Homo sapiens
  misc_RNA (1)...(19): siRNA sense strand
gcaccgauggcuggaucua

SEQ ID NO: 1124672 - RNA, 19 nt, Homo sapiens
  misc_RNA (1)...(19): siRNA sense strand
gcaucugcauccugcucaa

SEQ ID NO: 1124673 - RNA, 19 nt, Homo sapiens
  misc_RNA (1)...(19): siRNA sense strand
cacuagcuuugcauacuau

SEQ ID NO: 1124674 - RNA, 19 nt, Homo sapiens
  misc_RNA (1)...(19): siRNA sense strand
ccucagcacaagagaagaa

SEQ ID NO: 1124675 - RNA, 19 nt, Homo sapiens
  misc_RNA (1)...(19): siRNA sense strand
acuccugguucuucauuga

SEQ ID NO: 1124676 - RNA, 19 nt, Homo sapiens
  misc_RNA (1)...(19): siRNA sense strand
accgauggcuggaucuaug

SEQ ID NO: 1124677 - RNA, 19 nt, Homo sapiens
  misc_RNA (1)...(19): siRNA sense strand
gagucagcaucuaccuaau

SEQ ID NO: 1124678 - RNA, 19 nt, Homo sapiens
  misc_RNA (1)...(19): siRNA sense strand
gcacccaacuuccccaucu

SEQ ID NO: 1124679 - RNA, 19 nt, Homo sapiens
  misc_RNA (1)...(19): siRNA sense strand
gggcuuccuugucaucaac

SEQ ID NO: 1124680 - RNA, 19 nt, Homo sapiens
  misc_RNA (1)...(19): siRNA sense strand
gcuuuggagucagcaucua

SEQ ID NO: 1124681 - RNA, 19 nt, Homo sapiens
  misc_RNA (1)...(19): siRNA sense strand
gagcugaccaugggcaaag

SEQ ID NO: 1124682 - RNA, 19 nt, Homo sapiens
  misc_RNA (1)...(19): siRNA sense strand
caucuacuccugguucuuc

SEQ ID NO: 1124683 - RNA, 19 nt, Homo sapiens
  misc_RNA (1)...(19): siRNA sense strand
gaguggaugcccauucaca

SEQ ID NO: 1124684 - RNA, 19 nt, Homo sapiens
  misc_RNA (1)...(19): siRNA sense strand
cagcacaagagaagaaugg

SEQ ID NO: 1124685 - RNA, 19 nt, Homo sapiens
  misc_RNA (1)...(19): siRNA sense strand
ccuaauccaggugaucuuu

SEQ ID NO: 1124686 - RNA, 19 nt, Homo sapiens
  misc_RNA (1)...(19): siRNA sense strand
ggacaggacucuccaguuu

SEQ ID NO: 1124687 - RNA, 19 nt, Homo sapiens
  misc_RNA (1)...(19): siRNA sense strand
caacagcacugcacuagaa

SEQ ID NO: 1124688 - RNA, 19 nt, Homo sapiens
  misc_RNA (1)...(19): siRNA sense strand
gcaaguauguggaccucaa

SEQ ID NO: 1124689 - RNA, 19 nt, Homo sapiens
  misc_RNA (1)...(19): siRNA sense strand
guuaugaacugcacucaga

SEQ ID NO: 1124690 - RNA, 19 nt, Homo sapiens
  misc_RNA (1)...(19): siRNA sense strand
gcaaggcgauccagguguu

SEQ ID NO: 1124691 - RNA, 19 nt, Homo sapiens
  misc_RNA (1)...(19): siRNA sense strand
gagcuacacugccugaugu

SEQ ID NO: 1124692 - RNA, 19 nt, Homo sapiens
  misc_RNA (1)...(19): siRNA sense strand
gaggaucgcuuugugaugu

SEQ ID NO: 1124693 - RNA, 19 nt, Homo sapiens
  misc_RNA (1)...(19): siRNA sense strand
gcagauccgugcccucuuc

SEQ ID NO: 1124694 - RNA, 19 nt, Homo sapiens
  misc_RNA (1)...(19): siRNA sense strand
gagaacgucuacagcuuug

SEQ ID NO: 1124695 - RNA, 19 nt, Homo sapiens
  misc_RNA (1)...(19): siRNA sense strand
gcgaggagcucaugauggu

SEQ ID NO: 1124696 - RNA, 19 nt, Homo sapiens
  misc_RNA (1)...(19): siRNA sense strand
cugcaaggauggcuucuuu

SEQ ID NO: 1124697 - RNA, 19 nt, Homo sapiens
  misc_RNA (1)...(19): siRNA sense strand
acacugcccucaaguucua

SEQ ID NO: 1124698 - RNA, 19 nt, Homo sapiens
  misc_RNA (1)...(19): siRNA sense strand
ccugaggacugaagugaaa

SEQ ID NO: 1124699 - RNA, 19 nt, Homo sapiens
  misc_RNA (1)...(19): siRNA sense strand
gcacggagccugccuucau

SEQ ID NO: 1124700 - RNA, 19 nt, Homo sapiens
  misc_RNA (1)...(19): siRNA sense strand
ggacccagcuccgagaugu

SEQ ID NO: 1124701 - RNA, 19 nt, Homo sapiens
  misc_RNA (1)...(19): siRNA sense strand
gcaacugcguggcaucaau

SEQ ID NO: 1124702 - RNA, 19 nt, Homo sapiens
  misc_RNA (1)...(19): siRNA sense strand
ggucacacccugcaucuug

SEQ ID NO: 1124703 - RNA, 19 nt, Homo sapiens
  misc_RNA (1)...(19): siRNA sense strand
gccaggaguucguggauau

SEQ ID NO: 1124704 - RNA, 19 nt, Homo sapiens
  misc_RNA (1)...(19): siRNA sense strand
ccacuucguugcacagaug

SEQ ID NO: 1124705 - RNA, 19 nt, Homo sapiens
  misc_RNA (1)...(19): siRNA sense strand
ggacugaagugaaaacuca

SEQ ID NO: 1124706 - RNA, 19 nt, Homo sapiens
  misc_RNA (1)...(19): siRNA sense strand
acagugcccugcucuacua

SEQ ID NO: 1124707 - RNA, 19 nt, Homo sapiens
  misc_RNA (1)...(19): siRNA sense strand
gagccuggauggcaccuau

SEQ ID NO: 1124708 - RNA, 19 nt, Homo sapiens
  misc_RNA (1)...(19): siRNA sense strand
ccgaggaccuuuacugcaa

SEQ ID NO: 1124709 - RNA, 19 nt, Homo sapiens
  misc_RNA (1)...(19): siRNA sense strand
ugacugaggccugcacaua

SEQ ID NO: 1124710 - RNA, 19 nt, Homo sapiens
  misc_RNA (1)...(19): siRNA sense strand
gaggaagcccugcaaagga

SEQ ID NO: 1124711 - RNA, 19 nt, Homo sapiens
  misc_RNA (1)...(19): siRNA sense strand
gcuccuggaugaccuggaa

SEQ ID NO: 1124712 - RNA, 19 nt, Homo sapiens
  misc_RNA (1)...(19): siRNA sense strand
ccacagcgcguauuugauc

SEQ ID NO: 1124713 - RNA, 19 nt, Homo sapiens
  misc_RNA (1)...(19): siRNA sense strand
ugaggaggcuggcggugaa

SEQ ID NO: 1124714 - RNA, 19 nt, Homo sapiens
  misc_RNA (1)...(19): siRNA sense strand
ccaccggcgucaacuguga

SEQ ID NO: 1124715 - RNA, 19 nt, Homo sapiens
  misc_RNA (1)...(19): siRNA sense strand
gcccacagcgcguauuuga

SEQ ID NO: 1124716 - RNA, 19 nt, Homo sapiens
  misc_RNA (1)...(19): siRNA sense strand
gcguggagcaggacaauga

SEQ ID NO: 1124717 - RNA, 19 nt, Homo sapiens
  misc_RNA (1)...(19): siRNA sense strand
aagcaucgaugaggacauu

SEQ ID NO: 1124718 - RNA, 19 nt, Homo sapiens
  misc_RNA (1)...(19): siRNA sense strand
gauaaauccuaugacuuca

SEQ ID NO: 1124719 - RNA, 19 nt, Homo sapiens
  misc_RNA (1)...(19): siRNA sense strand
ucaaggugcccaugaaguu

SEQ ID NO: 1124720 - RNA, 19 nt, Homo sapiens
  misc_RNA (1)...(19): siRNA sense strand
gagcaauggccacuucguu

SEQ ID NO: 1124721 - RNA, 19 nt, Homo sapiens
  misc_RNA (1)...(19): siRNA sense strand
gaccagcuccagcagauga

SEQ ID NO: 1124722 - RNA, 19 nt, Homo sapiens
  misc_RNA (1)...(19): siRNA sense strand
gccaugccaccgacuguua

SEQ ID NO: 1124723 - RNA, 19 nt, Homo sapiens
  misc_RNA (1)...(19): siRNA sense strand
aggaagcccugcaaaggaa

SEQ ID NO: 1124724 - RNA, 19 nt, Homo sapiens
  misc_RNA (1)...(19): siRNA sense strand
gccagauugugaauuguga

SEQ ID NO: 1124725 - RNA, 19 nt, Homo sapiens
  misc_RNA (1)...(19): siRNA sense strand
uauuacagcaucaaggaua

SEQ ID NO: 1124726 - RNA, 19 nt, Homo sapiens
  misc_RNA (1)...(19): siRNA sense strand
gagauggacacgcugaaug

SEQ ID NO: 1124727 - RNA, 19 nt, Homo sapiens
  misc_RNA (1)...(19): siRNA sense strand
ggaggaagcccugcaaagg

SEQ ID NO: 1124728 - RNA, 19 nt, Homo sapiens
  misc_RNA (1)...(19): siRNA sense strand
ggaguacgccaaugaggau

SEQ ID NO: 1124729 - RNA, 19 nt, Homo sapiens
  misc_RNA (1)...(19): siRNA sense strand
gcaaggauggcuucuuugg

SEQ ID NO: 1124730 - RNA, 19 nt, Homo sapiens
  misc_RNA (1)...(19): siRNA sense strand
ggagcggugugacgugugu

SEQ ID NO: 1124731 - RNA, 19 nt, Homo sapiens
  misc_RNA (1)...(19): siRNA sense strand
ucacucuggugcccauuga

SEQ ID NO: 1124732 - RNA, 19 nt, Homo sapiens
  misc_RNA (1)...(19): siRNA sense strand
agccacagcuccaaacuuc

SEQ ID NO: 1124733 - RNA, 19 nt, Homo sapiens
  misc_RNA (1)...(19): siRNA sense strand
ccgagacuccuaccaguuu

SEQ ID NO: 1124734 - RNA, 19 nt, Homo sapiens
  misc_RNA (1)...(19): siRNA sense strand
ggacgucaaaggucucuuc

SEQ ID NO: 1124735 - RNA, 19 nt, Homo sapiens
  misc_RNA (1)...(19): siRNA sense strand
ugagaacgucuacagcuuu

SEQ ID NO: 1124736 - RNA, 19 nt, Homo sapiens
  misc_RNA (1)...(19): siRNA sense strand
ucaaucagcagccguggaa

SEQ ID NO: 1124737 - RNA, 19 nt, Homo sapiens
  misc_RNA (1)...(19): siRNA sense strand
gaaccugggcagcgucaau

SEQ ID NO: 1124738 - RNA, 19 nt, Homo sapiens
  misc_RNA (1)...(19): siRNA sense strand
gugggacccuccguuauga

SEQ ID NO: 1124739 - RNA, 19 nt, Homo sapiens
  misc_RNA (1)...(19): siRNA sense strand
gggaggagccccuggauaa

SEQ ID NO: 1124740 - RNA, 19 nt, Homo sapiens
  misc_RNA (1)...(19): siRNA sense strand
ccggccagauugugaauug

SEQ ID NO: 1124741 - RNA, 19 nt, Homo sapiens
  misc_RNA (1)...(19): siRNA sense strand
ggacguccagcuucaagug

SEQ ID NO: 1124742 - RNA, 19 nt, Homo sapiens
  misc_RNA (1)...(19): siRNA sense strand
ggagcuacacugccugaug

SEQ ID NO: 1124743 - RNA, 19 nt, Homo sapiens
  misc_RNA (1)...(19): siRNA sense strand
cccauuacgucgccuucua

SEQ ID NO: 1124744 - RNA, 19 nt, Homo sapiens
  misc_RNA (1)...(19): siRNA sense strand
gaaggugcacuggguguau

SEQ ID NO: 1124745 - RNA, 19 nt, Homo sapiens
  misc_RNA (1)...(19): siRNA sense strand
ggacucaugccaggaaugu

SEQ ID NO: 1124746 - RNA, 19 nt, Homo sapiens
  misc_RNA (1)...(19): siRNA sense strand
gggaccgggugucauccua

SEQ ID NO: 1124747 - RNA, 19 nt, Homo sapiens
  misc_RNA (1)...(19): siRNA sense strand
ccacgggagucuggcugua

SEQ ID NO: 1124748 - RNA, 19 nt, Homo sapiens
  misc_RNA (1)...(19): siRNA sense strand
agacagaugauccaggaaa

SEQ ID NO: 1124749 - RNA, 19 nt, Homo sapiens
  misc_RNA (1)...(19): siRNA sense strand
ggugggacccuccguuaug

SEQ ID NO: 1124750 - RNA, 19 nt, Homo sapiens
  misc_RNA (1)...(19): siRNA sense strand
gugcaaacccaacuuccaa

SEQ ID NO: 1124751 - RNA, 19 nt, Homo sapiens
  misc_RNA (1)...(19): siRNA sense strand
ggagggacauuuugguuuc

SEQ ID NO: 1124752 - RNA, 19 nt, Homo sapiens
  misc_RNA (1)...(19): siRNA sense strand
gccgaugugucccuuguca

SEQ ID NO: 1124753 - RNA, 19 nt, Homo sapiens
  misc_RNA (1)...(19): siRNA sense strand
ggcucuggcuggauuaugu

SEQ ID NO: 1124754 - RNA, 19 nt, Homo sapiens
  misc_RNA (1)...(19): siRNA sense strand
ggacagugcccugcucuac

SEQ ID NO: 1124755 - RNA, 19 nt, Homo sapiens
  misc_RNA (1)...(19): siRNA sense strand
gagcugugaccgcugcaaa

SEQ ID NO: 1124756 - RNA, 19 nt, Homo sapiens
  misc_RNA (1)...(19): siRNA sense strand
gccucgugcuguuguauga

SEQ ID NO: 1124757 - RNA, 19 nt, Homo sapiens
  misc_RNA (1)...(19): siRNA sense strand
gacgagacaagcaagaaga

SEQ ID NO: 1124758 - RNA, 19 nt, Homo sapiens
  misc_RNA (1)...(19): siRNA sense strand
caacugcguggcaucaaug

SEQ ID NO: 1124759 - RNA, 19 nt, Homo sapiens
  misc_RNA (1)...(19): siRNA sense strand
gggccgaugugucccuugu

SEQ ID NO: 1124760 - RNA, 19 nt, Homo sapiens
  misc_RNA (1)...(19): siRNA sense strand
caacugcacagcacagagu

SEQ ID NO: 1124761 - RNA, 19 nt, Homo sapiens
  misc_RNA (1)...(19): siRNA sense strand
gagagcccuuugugcugaa

SEQ ID NO: 1124762 - RNA, 19 nt, Homo sapiens
  misc_RNA (1)...(19): siRNA sense strand
ccuacguccucaucaaguu

SEQ ID NO: 1124763 - RNA, 19 nt, Homo sapiens
  misc_RNA (1)...(19): siRNA sense strand
acaggacucuccaguuugg

SEQ ID NO: 1124764 - RNA, 19 nt, Homo sapiens
  misc_RNA (1)...(19): siRNA sense strand
ggccagcgucuucagauug

SEQ ID NO: 1124765 - RNA, 19 nt, Homo sapiens
  misc_RNA (1)...(19): siRNA sense strand
gauccgugcccucuucuca

SEQ ID NO: 1124766 - RNA, 19 nt, Homo sapiens
  misc_RNA (1)...(19): siRNA sense strand
cgaacaggcacgcuucuuc

SEQ ID NO: 1124767 - RNA, 19 nt, Homo sapiens
  misc_RNA (1)...(19): siRNA sense strand
ccugagcaauggccacuuc

SEQ ID NO: 1124768 - RNA, 19 nt, Homo sapiens
  misc_RNA (1)...(19): siRNA sense strand
cgagacuccuaccaguuug

SEQ ID NO: 1124769 - RNA, 19 nt, Homo sapiens
  misc_RNA (1)...(19): siRNA sense strand
cagcagcucaucccuguuc

SEQ ID NO: 1124770 - RNA, 19 nt, Homo sapiens
  misc_RNA (1)...(19): siRNA sense strand
gacagaugauccaggaaac

SEQ ID NO: 1124771 - RNA, 19 nt, Homo sapiens
  misc_RNA (1)...(19): siRNA sense strand
gacccuccguuaugaacug

SEQ ID NO: 1124772 - RNA, 19 nt, Homo sapiens
  misc_RNA (1)...(19): siRNA sense strand
cccucucccucuucuauaa

SEQ ID NO: 1124773 - RNA, 19 nt, Homo sapiens
  misc_RNA (1)...(19): siRNA sense strand
cugagaacgucuacagcuu

SEQ ID NO: 1124774 - RNA, 19 nt, Homo sapiens
  misc_RNA (1)...(19): siRNA sense strand
ggaccacccgagacuccua

SEQ ID NO: 1124775 - RNA, 19 nt, Homo sapiens
  misc_RNA (1)...(19): siRNA sense strand
gccugagucuggcaccauu

SEQ ID NO: 1124776 - RNA, 19 nt, Homo sapiens
  misc_RNA (1)...(19): siRNA sense strand
gcaucagcuucgacaguca

SEQ ID NO: 1124777 - RNA, 19 nt, Homo sapiens
  misc_RNA (1)...(19): siRNA sense strand
ggucagccucuacaacuuc

SEQ ID NO: 1124778 - RNA, 19 nt, Homo sapiens
  misc_RNA (1)...(19): siRNA sense strand
agauggacacgcugaauga

SEQ ID NO: 1124779 - RNA, 19 nt, Homo sapiens
  misc_RNA (1)...(19): siRNA sense strand
gacaggacucuccaguuug

SEQ ID NO: 1124780 - RNA, 19 nt, Homo sapiens
  misc_RNA (1)...(19): siRNA sense strand
gaucuccucggcugucuuc

SEQ ID NO: 1124781 - RNA, 19 nt, Homo sapiens
  misc_RNA (1)...(19): siRNA sense strand
gcaggugaccgagaagcaa

SEQ ID NO: 1124782 - RNA, 19 nt, Homo sapiens
  misc_RNA (1)...(19): siRNA sense strand
gaacguggcaccgcucacu

SEQ ID NO: 1124783 - RNA, 19 nt, Homo sapiens
  misc_RNA (1)...(19): siRNA sense strand
cuacacugcccucaaguuc

SEQ ID NO: 1124784 - RNA, 19 nt, Homo sapiens
  misc_RNA (1)...(19): siRNA sense strand
cgaccuugcugccuacacu

SEQ ID NO: 1124785 - RNA, 19 nt, Homo sapiens
  misc_RNA (1)...(19): siRNA sense strand
gagcaacugcguggcauca

SEQ ID NO: 1124786 - RNA, 19 nt, Homo sapiens
  misc_RNA (1)...(19): siRNA sense strand
gcaagaaucuacuauauca

SEQ ID NO: 1124787 - RNA, 19 nt, Homo sapiens
  misc_RNA (1)...(19): siRNA sense strand
ccugguaccugguuaauua

SEQ ID NO: 1124788 - RNA, 19 nt, Homo sapiens
  misc_RNA (1)...(19): siRNA sense strand
uuaauuagcugccaaguga

SEQ ID NO: 1124789 - RNA, 19 nt, Homo sapiens
  misc_RNA (1)...(19): siRNA sense strand
ggacaguuaugguuacauu

SEQ ID NO: 1124790 - RNA, 19 nt, Homo sapiens
  misc_RNA (1)...(19): siRNA sense strand
gaugagacauuccaagaga

SEQ ID NO: 1124791 - RNA, 19 nt, Homo sapiens
  misc_RNA (1)...(19): siRNA sense strand
ugacauggaucgggaauuu

SEQ ID NO: 1124792 - RNA, 19 nt, Homo sapiens
  misc_RNA (1)...(19): siRNA sense strand
gaagaacacuugggaaucu

SEQ ID NO: 1124793 - RNA, 19 nt, Homo sapiens
  misc_RNA (1)...(19): siRNA sense strand
ggaauacacugaugguaca

SEQ ID NO: 1124794 - RNA, 19 nt, Homo sapiens
  misc_RNA (1)...(19): siRNA sense strand
gaagaugcauuuggaggaa

SEQ ID NO: 1124795 - RNA, 19 nt, Homo sapiens
  misc_RNA (1)...(19): siRNA sense strand
guauuaaccuacaggauga

SEQ ID NO: 1124796 - RNA, 19 nt, Homo sapiens
  misc_RNA (1)...(19): siRNA sense strand
gaaacucuaugccaaccuu

SEQ ID NO: 1124797 - RNA, 19 nt, Homo sapiens
  misc_RNA (1)...(19): siRNA sense strand
gagacccucuucacuguuu

SEQ ID NO: 1124798 - RNA, 19 nt, Homo sapiens
  misc_RNA (1)...(19): siRNA sense strand
gaagagcuccagccgaauu

SEQ ID NO: 1124799 - RNA, 19 nt, Homo sapiens
  misc_RNA (1)...(19): siRNA sense strand
gagaacgaguggccuggua

SEQ ID NO: 1124800 - RNA, 19 nt, Homo sapiens
  misc_RNA (1)...(19): siRNA sense strand
guacagcaaugccaaucaa

SEQ ID NO: 1124801 - RNA, 19 nt, Homo sapiens
  misc_RNA (1)...(19): siRNA sense strand
gcauuguuguucuugauuu

SEQ ID NO: 1124802 - RNA, 19 nt, Homo sapiens
  misc_RNA (1)...(19): siRNA sense strand
cauaaagaauguugagaug

SEQ ID NO: 1124803 - RNA, 19 nt, Homo sapiens
  misc_RNA (1)...(19): siRNA sense strand
cagcugcuauguuggauuu

SEQ ID NO: 1124804 - RNA, 19 nt, Homo sapiens
  misc_RNA (1)...(19): siRNA sense strand
uaucauggcagaagaagua

SEQ ID NO: 1124805 - RNA, 19 nt, Homo sapiens
  misc_RNA (1)...(19): siRNA sense strand
gcucuuuccucauaccuuu

SEQ ID NO: 1124806 - RNA, 19 nt, Homo sapiens
  misc_RNA (1)...(19): siRNA sense strand
ggacauuugagauuuauug

SEQ ID NO: 1124807 - RNA, 19 nt, Homo sapiens
  misc_RNA (1)...(19): siRNA sense strand
guaccaacaucgacagaga

SEQ ID NO: 1124808 - RNA, 19 nt, Homo sapiens
  misc_RNA (1)...(19): siRNA sense strand
gaaguagagugggacuauu

SEQ ID NO: 1124809 - RNA, 19 nt, Homo sapiens
  misc_RNA (1)...(19): siRNA sense strand
ggaguacugggaagaauuu

SEQ ID NO: 1124810 - RNA, 19 nt, Homo sapiens
  misc_RNA (1)...(19): siRNA sense strand
cuaccaagcugcaagaauc

SEQ ID NO: 1124811 - RNA, 19 nt, Homo sapiens
  misc_RNA (1)...(19): siRNA sense strand
gaggaagggugcagcuaug

SEQ ID NO: 1124812 - RNA, 19 nt, Homo sapiens
  misc_RNA (1)...(19): siRNA sense strand
gaaggacaguuaugguuac

SEQ ID NO: 1124813 - RNA, 19 nt, Homo sapiens
  misc_RNA (1)...(19): siRNA sense strand
ggaugagggcaaucuauaa

SEQ ID NO: 1124814 - RNA, 19 nt, Homo sapiens
  misc_RNA (1)...(19): siRNA sense strand
gggaugagggcaaucuaua

SEQ ID NO: 1124815 - RNA, 19 nt, Homo sapiens
  misc_RNA (1)...(19): siRNA sense strand
uaucaaaggugaaguuggu

SEQ ID NO: 1124816 - RNA, 19 nt, Homo sapiens
  misc_RNA (1)...(19): siRNA sense strand
gagaaggacaguuaugguu

SEQ ID NO: 1124817 - RNA, 19 nt, Homo sapiens
  misc_RNA (1)...(19): siRNA sense strand
gcaaucaauggcuuuguuu

SEQ ID NO: 1124818 - RNA, 19 nt, Homo sapiens
  misc_RNA (1)...(19): siRNA sense strand
gaauuuaccugagcugaac

SEQ ID NO: 1124819 - RNA, 19 nt, Homo sapiens
  misc_RNA (1)...(19): siRNA sense strand
cugcaagaaucuacuauau

SEQ ID NO: 1124820 - RNA, 19 nt, Homo sapiens
  misc_RNA (1)...(19): siRNA sense strand
caaugacucugcuuguguu

SEQ ID NO: 1124821 - RNA, 19 nt, Homo sapiens
  misc_RNA (1)...(19): siRNA sense strand
aagagaagaugcauuugga

SEQ ID NO: 1124822 - RNA, 19 nt, Homo sapiens
  misc_RNA (1)...(19): siRNA sense strand
agaaagcuacgacgcaaua

SEQ ID NO: 1124823 - RNA, 19 nt, Homo sapiens
  misc_RNA (1)...(19): siRNA sense strand
uaccugagcugaacaugug

SEQ ID NO: 1124824 - RNA, 19 nt, Homo sapiens
  misc_RNA (1)...(19): siRNA sense strand
ugaaauugauguccacaca

SEQ ID NO: 1124825 - RNA, 19 nt, Homo sapiens
  misc_RNA (1)...(19): siRNA sense strand
gaauuugcauuguuguucu

SEQ ID NO: 1124826 - RNA, 19 nt, Homo sapiens
  misc_RNA (1)...(19): siRNA sense strand
gaagaaggcaaugugaaga

SEQ ID NO: 1124827 - RNA, 19 nt, Homo sapiens
  misc_RNA (1)...(19): siRNA sense strand
ccauucagguggucuucua

SEQ ID NO: 1124828 - RNA, 19 nt, Homo sapiens
  misc_RNA (1)...(19): siRNA sense strand
uaaagaauguugagaugcu

SEQ ID NO: 1124829 - RNA, 19 nt, Homo sapiens
  misc_RNA (1)...(19): siRNA sense strand
gcaauaaaaugcaugcaau

SEQ ID NO: 1124830 - RNA, 19 nt, Homo sapiens
  misc_RNA (1)...(19): siRNA sense strand
agaaggacaguuaugguua

SEQ ID NO: 1124831 - RNA, 19 nt, Homo sapiens
  misc_RNA (1)...(19): siRNA sense strand
ugagggcaaucuauaaugu

SEQ ID NO: 1124832 - RNA, 19 nt, Homo sapiens
  misc_RNA (1)...(19): siRNA sense strand
ugacaaccuugggacauuu

SEQ ID NO: 1124833 - RNA, 19 nt, Homo sapiens
  misc_RNA (1)...(19): siRNA sense strand
gcaacacugugcagcuuca

SEQ ID NO: 1124834 - RNA, 19 nt, Homo sapiens
  misc_RNA (1)...(19): siRNA sense strand
gaacagucacuuucgagau

SEQ ID NO: 1124835 - RNA, 19 nt, Homo sapiens
  misc_RNA (1)...(19): siRNA sense strand
caggauccaggcaguauua

SEQ ID NO: 1124836 - RNA, 19 nt, Homo sapiens
  misc_RNA (1)...(19): siRNA sense strand
ugacugugguauucaagaa

SEQ ID NO: 1124837 - RNA, 19 nt, Homo sapiens
  misc_RNA (1)...(19): siRNA sense strand
ggaauuuaccugagcugaa

SEQ ID NO: 1124838 - RNA, 19 nt, Homo sapiens
  misc_RNA (1)...(19): siRNA sense strand
gcagaucccauaagagaca

SEQ ID NO: 1124839 - RNA, 19 nt, Homo sapiens
  misc_RNA (1)...(19): siRNA sense strand
gaucgggaauuugcauugu

SEQ ID NO: 1124840 - RNA, 19 nt, Homo sapiens
  misc_RNA (1)...(19): siRNA sense strand
ggaaucuuggguccacuua

SEQ ID NO: 1124841 - RNA, 19 nt, Homo sapiens
  misc_RNA (1)...(19): siRNA sense strand
ugaaggcacuguguacaau

SEQ ID NO: 1124842 - RNA, 19 nt, Homo sapiens
  misc_RNA (1)...(19): siRNA sense strand
gggcaacacugugcagcuu

SEQ ID NO: 1124843 - RNA, 19 nt, Homo sapiens
  misc_RNA (1)...(19): siRNA sense strand
cgacugcuuucagaggaua

SEQ ID NO: 1124844 - RNA, 19 nt, Homo sapiens
  misc_RNA (1)...(19): siRNA sense strand
gagaugcuggccucuguuu

SEQ ID NO: 1124845 - RNA, 19 nt, Homo sapiens
  misc_RNA (1)...(19): siRNA sense strand
gaugagggcaaucuauaau

SEQ ID NO: 1124846 - RNA, 19 nt, Homo sapiens
  misc_RNA (1)...(19): siRNA sense strand
gagauucaaugggacuaug

SEQ ID NO: 1124847 - RNA, 19 nt, Homo sapiens
  misc_RNA (1)...(19): siRNA sense strand
cugaugcacugccauguga

SEQ ID NO: 1124848 - RNA, 19 nt, Homo sapiens
  misc_RNA (1)...(19): siRNA sense strand
ggaauuugcauuguuguuc

SEQ ID NO: 1124849 - RNA, 19 nt, Homo sapiens
  misc_RNA (1)...(19): siRNA sense strand
agucugagaaggacaguua

SEQ ID NO: 1124850 - RNA, 19 nt, Homo sapiens
  misc_RNA (1)...(19): siRNA sense strand
guucgacaguacuucauug

SEQ ID NO: 1124851 - RNA, 19 nt, Homo sapiens
  misc_RNA (1)...(19): siRNA sense strand
gcugcaagaaucuacuaua

SEQ ID NO: 1124852 - RNA, 19 nt, Homo sapiens
  misc_RNA (1)...(19): siRNA sense strand
ucacuguguuggaugagaa

SEQ ID NO: 1124853 - RNA, 19 nt, Homo sapiens
  misc_RNA (1)...(19): siRNA sense strand
gggugcagcuaugcucuuu

SEQ ID NO: 1124854 - RNA, 19 nt, Homo sapiens
  misc_RNA (1)...(19): siRNA sense strand
ucacuuggauguacuucuc

SEQ ID NO: 1124855 - RNA, 19 nt, Homo sapiens
  misc_RNA (1)...(19): siRNA sense strand
cagaagaacacuugggaau

SEQ ID NO: 1124856 - RNA, 19 nt, Homo sapiens
  misc_RNA (1)...(19): siRNA sense strand
agaaagggguggauaaaga

SEQ ID NO: 1124857 - RNA, 19 nt, Homo sapiens
  misc_RNA (1)...(19): siRNA sense strand
gcagauggcaagcagaaag

SEQ ID NO: 1124858 - RNA, 19 nt, Homo sapiens
  misc_RNA (1)...(19): siRNA sense strand
cauaagagacacaaauucu

SEQ ID NO: 1124859 - RNA, 19 nt, Homo sapiens
  misc_RNA (1)...(19): siRNA sense strand
uccaagagaagaugcauuu

SEQ ID NO: 1124860 - RNA, 19 nt, Homo sapiens
  misc_RNA (1)...(19): siRNA sense strand
gaacuaccgggcagaugug

SEQ ID NO: 1124861 - RNA, 19 nt, Homo sapiens
  misc_RNA (1)...(19): siRNA sense strand
gcucauggagugcuagaau

SEQ ID NO: 1124862 - RNA, 19 nt, Homo sapiens
  misc_RNA (1)...(19): siRNA sense strand
gcacaaccagucugagaag

SEQ ID NO: 1124863 - RNA, 19 nt, Homo sapiens
  misc_RNA (1)...(19): siRNA sense strand
caagagaagaugcauuugg

SEQ ID NO: 1124864 - RNA, 19 nt, Homo sapiens
  misc_RNA (1)...(19): siRNA sense strand
cugcagaucccauaagaga

SEQ ID NO: 1124865 - RNA, 19 nt, Homo sapiens
  misc_RNA (1)...(19): siRNA sense strand
gcaugcagauccccauaaa

SEQ ID NO: 1124866 - RNA, 19 nt, Homo sapiens
  misc_RNA (1)...(19): siRNA sense strand
aacagucacuuucgagaug

SEQ ID NO: 1124867 - RNA, 19 nt, Homo sapiens
  misc_RNA (1)...(19): siRNA sense strand
ucaagcuucugucuuucaa

SEQ ID NO: 1124868 - RNA, 19 nt, Homo sapiens
  misc_RNA (1)...(19): siRNA sense strand
aaucuuggguccacuuauc

SEQ ID NO: 1124869 - RNA, 19 nt, Homo sapiens
  misc_RNA (1)...(19): siRNA sense strand
ugagagagccaggcaguau

SEQ ID NO: 1124870 - RNA, 19 nt, Homo sapiens
  misc_RNA (1)...(19): siRNA sense strand
ccauaaagaauguugagau

SEQ ID NO: 1124871 - RNA, 19 nt, Homo sapiens
  misc_RNA (1)...(19): siRNA sense strand
gaacacuuaagcccucuca

SEQ ID NO: 1124872 - RNA, 19 nt, Homo sapiens
  misc_RNA (1)...(19): siRNA sense strand
uggagacccucuucacugu

SEQ ID NO: 1124873 - RNA, 19 nt, Homo sapiens
  misc_RNA (1)...(19): siRNA sense strand
gaaggcacuguguacaaug

SEQ ID NO: 1124874 - RNA, 19 nt, Homo sapiens
  misc_RNA (1)...(19): siRNA sense strand
caacaucgacagagaaagc

SEQ ID NO: 1124875 - RNA, 19 nt, Homo sapiens
  misc_RNA (1)...(19): siRNA sense strand
caggcaaaguucgacagua

SEQ ID NO: 1124876 - RNA, 19 nt, Homo sapiens
  misc_RNA (1)...(19): siRNA sense strand
ccaaugacucugcuugugu

SEQ ID NO: 1124877 - RNA, 19 nt, Homo sapiens
  misc_RNA (1)...(19): siRNA sense strand
uauccugacugugguauuc

SEQ ID NO: 1124878 - RNA, 19 nt, Homo sapiens
  misc_RNA (1)...(19): siRNA sense strand
gcaggcagccaucgagaag

SEQ ID NO: 1124879 - RNA, 19 nt, Homo sapiens
  misc_RNA (1)...(19): siRNA sense strand
uugggacauuugagauuua

SEQ ID NO: 1124880 - RNA, 19 nt, Homo sapiens
  misc_RNA (1)...(19): siRNA sense strand
cauugaggcccaugagauu

SEQ ID NO: 1124881 - RNA, 19 nt, Homo sapiens
  misc_RNA (1)...(19): siRNA sense strand
gauccugcuugucucacuu

SEQ ID NO: 1124882 - RNA, 19 nt, Homo sapiens
  misc_RNA (1)...(19): siRNA sense strand
uaacauaccgcuggacagu

SEQ ID NO: 1124883 - RNA, 19 nt, Homo sapiens
  misc_RNA (1)...(19): siRNA sense strand
uuuccuggaucuauuauuc

SEQ ID NO: 1124884 - RNA, 19 nt, Homo sapiens
  misc_RNA (1)...(19): siRNA sense strand
ucaccgucaucaccaaaga

SEQ ID NO: 1124885 - RNA, 19 nt, Homo sapiens
  misc_RNA (1)...(19): siRNA sense strand
ucgggaauuugcauuguug

SEQ ID NO: 1124886 - RNA, 19 nt, Homo sapiens
  misc_RNA (1)...(19): siRNA sense strand
gcaagaaucuacuauauca

SEQ ID NO: 1124887 - RNA, 19 nt, Homo sapiens
  misc_RNA (1)...(19): siRNA sense strand
caaagaagaugagacauuu

SEQ ID NO: 1124888 - RNA, 19 nt, Homo sapiens
  misc_RNA (1)...(19): siRNA sense strand
ccugguaccugguuaauua

SEQ ID NO: 1124889 - RNA, 19 nt, Homo sapiens
  misc_RNA (1)...(19): siRNA sense strand
uuaauuagcugccaaguga

SEQ ID NO: 1124890 - RNA, 19 nt, Homo sapiens
  misc_RNA (1)...(19): siRNA sense strand
ggacaguuaugguuacauu

SEQ ID NO: 1124891 - RNA, 19 nt, Homo sapiens
  misc_RNA (1)...(19): siRNA sense strand
gaucuaccauucucaugua

SEQ ID NO: 1124892 - RNA, 19 nt, Homo sapiens
  misc_RNA (1)...(19): siRNA sense strand
gaugagacauuccaagaga

SEQ ID NO: 1124893 - RNA, 19 nt, Homo sapiens
  misc_RNA (1)...(19): siRNA sense strand
ugacauggaucgggaauuu

SEQ ID NO: 1124894 - RNA, 19 nt, Homo sapiens
  misc_RNA (1)...(19): siRNA sense strand
gcaauaggaugcaugcaau

SEQ ID NO: 1124895 - RNA, 19 nt, Homo sapiens
  misc_RNA (1)...(19): siRNA sense strand
gaagaacacuugggaaucu

SEQ ID NO: 1124896 - RNA, 19 nt, Homo sapiens
  misc_RNA (1)...(19): siRNA sense strand
acaagaagaccaucuauaa

SEQ ID NO: 1124897 - RNA, 19 nt, Homo sapiens
  misc_RNA (1)...(19): siRNA sense strand
ggaauacacugaugguaca

SEQ ID NO: 1124898 - RNA, 19 nt, Homo sapiens
  misc_RNA (1)...(19): siRNA sense strand
gaagaugcauuuggaggaa

SEQ ID NO: 1124899 - RNA, 19 nt, Homo sapiens
  misc_RNA (1)...(19): siRNA sense strand
guauuaaccuacaggauga

SEQ ID NO: 1124900 - RNA, 19 nt, Homo sapiens
  misc_RNA (1)...(19): siRNA sense strand
gagaaggacucugaagguu

SEQ ID NO: 1124901 - RNA, 19 nt, Homo sapiens
  misc_RNA (1)...(19): siRNA sense strand
ggacaaagaagaugagaca

SEQ ID NO: 1124902 - RNA, 19 nt, Homo sapiens
  misc_RNA (1)...(19): siRNA sense strand
gagacccucuucacuguuu

SEQ ID NO: 1124903 - RNA, 19 nt, Homo sapiens
  misc_RNA (1)...(19): siRNA sense strand
gaaacucuaugccaaccuu

SEQ ID NO: 1124904 - RNA, 19 nt, Homo sapiens
  misc_RNA (1)...(19): siRNA sense strand
gaagagcuccagccgaauu

SEQ ID NO: 1124905 - RNA, 19 nt, Homo sapiens
  misc_RNA (1)...(19): siRNA sense strand
gagaacgaguggccuggua

SEQ ID NO: 1124906 - RNA, 19 nt, Homo sapiens
  misc_RNA (1)...(19): siRNA sense strand
guacagcaaugccaaucaa

SEQ ID NO: 1124907 - RNA, 19 nt, Homo sapiens
  misc_RNA (1)...(19): siRNA sense strand
gcauuguuguucuugauuu

SEQ ID NO: 1124908 - RNA, 19 nt, Homo sapiens
  misc_RNA (1)...(19): siRNA sense strand
cauaaagaauguugagaug

SEQ ID NO: 1124909 - RNA, 19 nt, Homo sapiens
  misc_RNA (1)...(19): siRNA sense strand
gaaagcugaugacucuguu

SEQ ID NO: 1124910 - RNA, 19 nt, Homo sapiens
  misc_RNA (1)...(19): siRNA sense strand
uaucauggcagaagaagua

SEQ ID NO: 1124911 - RNA, 19 nt, Homo sapiens
  misc_RNA (1)...(19): siRNA sense strand
gcucuuuccucauaccuuu

SEQ ID NO: 1124912 - RNA, 19 nt, Homo sapiens
  misc_RNA (1)...(19): siRNA sense strand
cagcugcuauguuggauuu

SEQ ID NO: 1124913 - RNA, 19 nt, Homo sapiens
  misc_RNA (1)...(19): siRNA sense strand
ggacauuugagauuuauug

SEQ ID NO: 1124914 - RNA, 19 nt, Homo sapiens
  misc_RNA (1)...(19): siRNA sense strand
guaccaacaucgacagaga

SEQ ID NO: 1124915 - RNA, 19 nt, Homo sapiens
  misc_RNA (1)...(19): siRNA sense strand
caagaagaccaucuauaaa

SEQ ID NO: 1124916 - RNA, 19 nt, Homo sapiens
  misc_RNA (1)...(19): siRNA sense strand
agaagaccaucuauaaaga

SEQ ID NO: 1124917 - RNA, 19 nt, Homo sapiens
  misc_RNA (1)...(19): siRNA sense strand
gaaguagagugggacuauu

SEQ ID NO: 1124918 - RNA, 19 nt, Homo sapiens
  misc_RNA (1)...(19): siRNA sense strand
ggaguacugggaagaauuu

SEQ ID NO: 1124919 - RNA, 19 nt, Homo sapiens
  misc_RNA (1)...(19): siRNA sense strand
cuaccaagcugcaagaauc

SEQ ID NO: 1124920 - RNA, 19 nt, Homo sapiens
  misc_RNA (1)...(19): siRNA sense strand
gaagaccaucuauaaagaa

SEQ ID NO: 1124921 - RNA, 19 nt, Homo sapiens
  misc_RNA (1)...(19): siRNA sense strand
gaaggacaguuaugguuac

SEQ ID NO: 1124922 - RNA, 19 nt, Homo sapiens
  misc_RNA (1)...(19): siRNA sense strand
gaggaagggugcagcuaug

SEQ ID NO: 1124923 - RNA, 19 nt, Homo sapiens
  misc_RNA (1)...(19): siRNA sense strand
ggaugagggcaaucuauaa

SEQ ID NO: 1124924 - RNA, 19 nt, Homo sapiens
  misc_RNA (1)...(19): siRNA sense strand
ggauguagaccaugauuuc

SEQ ID NO: 1124925 - RNA, 19 nt, Homo sapiens
  misc_RNA (1)...(19): siRNA sense strand
uaucaaaggugaaguuggu

SEQ ID NO: 1124926 - RNA, 19 nt, Homo sapiens
  misc_RNA (1)...(19): siRNA sense strand
gagaaggacaguuaugguu

SEQ ID NO: 1124927 - RNA, 19 nt, Homo sapiens
  misc_RNA (1)...(19): siRNA sense strand
gggaugagggcaaucuaua

SEQ ID NO: 1124928 - RNA, 19 nt, Homo sapiens
  misc_RNA (1)...(19): siRNA sense strand
gaccaucuauaaagaauac

SEQ ID NO: 1124929 - RNA, 19 nt, Homo sapiens
  misc_RNA (1)...(19): siRNA sense strand
gaauuuaccugagcugaac

SEQ ID NO: 1124930 - RNA, 19 nt, Homo sapiens
  misc_RNA (1)...(19): siRNA sense strand
gcaaucaauggcuuuguuu

SEQ ID NO: 1124931 - RNA, 19 nt, Homo sapiens
  misc_RNA (1)...(19): siRNA sense strand
augagaacauugccacuua

SEQ ID NO: 1124932 - RNA, 19 nt, Homo sapiens
  misc_RNA (1)...(19): siRNA sense strand
cauugcaacuggccuaauu

SEQ ID NO: 1124933 - RNA, 19 nt, Homo sapiens
  misc_RNA (1)...(19): siRNA sense strand
cugcaagaaucuacuauau

SEQ ID NO: 1124934 - RNA, 19 nt, Homo sapiens
  misc_RNA (1)...(19): siRNA sense strand
caaugacucugcuuguguu

SEQ ID NO: 1124935 - RNA, 19 nt, Homo sapiens
  misc_RNA (1)...(19): siRNA sense strand
uaccugagcugaacaugug

SEQ ID NO: 1124936 - RNA, 19 nt, Homo sapiens
  misc_RNA (1)...(19): siRNA sense strand
agaaagcuacgacgcaaua

SEQ ID NO: 1124937 - RNA, 19 nt, Homo sapiens
  misc_RNA (1)...(19): siRNA sense strand
aagagaagaugcauuugga

SEQ ID NO: 1124938 - RNA, 19 nt, Homo sapiens
  misc_RNA (1)...(19): siRNA sense strand
ugaaauugauguccacaca

SEQ ID NO: 1124939 - RNA, 19 nt, Homo sapiens
  misc_RNA (1)...(19): siRNA sense strand
gaauuugcauuguuguucu

SEQ ID NO: 1124940 - RNA, 19 nt, Homo sapiens
  misc_RNA (1)...(19): siRNA sense strand
gaagaaggcaaugugaaga

SEQ ID NO: 1124941 - RNA, 19 nt, Homo sapiens
  misc_RNA (1)...(19): siRNA sense strand
gcucagauccugcuucagu

SEQ ID NO: 1124942 - RNA, 19 nt, Homo sapiens
  misc_RNA (1)...(19): siRNA sense strand
uaaagaauguugagaugcu

SEQ ID NO: 1124943 - RNA, 19 nt, Homo sapiens
  misc_RNA (1)...(19): siRNA sense strand
gcaauaaaaugcaugcaau

SEQ ID NO: 1124944 - RNA, 19 nt, Homo sapiens
  misc_RNA (1)...(19): siRNA sense strand
agaaggacaguuaugguua

SEQ ID NO: 1124945 - RNA, 19 nt, Homo sapiens
  misc_RNA (1)...(19): siRNA sense strand
ugagggcaaucuauaaugu

SEQ ID NO: 1124946 - RNA, 19 nt, Homo sapiens
  misc_RNA (1)...(19): siRNA sense strand
ugacaaccuugggacauuu

SEQ ID NO: 1124947 - RNA, 19 nt, Homo sapiens
  misc_RNA (1)...(19): siRNA sense strand
gcaacacugugcagcuuca

SEQ ID NO: 1124948 - RNA, 19 nt, Homo sapiens
  misc_RNA (1)...(19): siRNA sense strand
ccauucagguggucuucua

SEQ ID NO: 1124949 - RNA, 19 nt, Homo sapiens
  misc_RNA (1)...(19): siRNA sense strand
gaacagucacuuucgagau

SEQ ID NO: 1124950 - RNA, 19 nt, Homo sapiens
  misc_RNA (1)...(19): siRNA sense strand
caggauccaggcaguauua

SEQ ID NO: 1124951 - RNA, 19 nt, Homo sapiens
  misc_RNA (1)...(19): siRNA sense strand
ugacugugguauucaagaa

SEQ ID NO: 1124952 - RNA, 19 nt, Homo sapiens
  misc_RNA (1)...(19): siRNA sense strand
ucaccuggaucuaccauuc

SEQ ID NO: 1124953 - RNA, 19 nt, Homo sapiens
  misc_RNA (1)...(19): siRNA sense strand
ggaauuuaccugagcugaa

SEQ ID NO: 1124954 - RNA, 19 nt, Homo sapiens
  misc_RNA (1)...(19): siRNA sense strand
acaaagaagaugagacauu

SEQ ID NO: 1124955 - RNA, 19 nt, Homo sapiens
  misc_RNA (1)...(19): siRNA sense strand
gccaggauguagaccauga

SEQ ID NO: 1124956 - RNA, 19 nt, Homo sapiens
  misc_RNA (1)...(19): siRNA sense strand
gcagccauaucuacaacug

SEQ ID NO: 1124957 - RNA, 19 nt, Homo sapiens
  misc_RNA (1)...(19): siRNA sense strand
gaucgggaauuugcauugu

SEQ ID NO: 1124958 - RNA, 19 nt, Homo sapiens
  misc_RNA (1)...(19): siRNA sense strand
ggaaucuuggguccacuua

SEQ ID NO: 1124959 - RNA, 19 nt, Homo sapiens
  misc_RNA (1)...(19): siRNA sense strand
acugaaagcugaugacucu

SEQ ID NO: 1124960 - RNA, 19 nt, Homo sapiens
  misc_RNA (1)...(19): siRNA sense strand
gcagaucccauaagagaca

SEQ ID NO: 1124961 - RNA, 19 nt, Homo sapiens
  misc_RNA (1)...(19): siRNA sense strand
ugaaggcacuguguacaau

SEQ ID NO: 1124962 - RNA, 19 nt, Homo sapiens
  misc_RNA (1)...(19): siRNA sense strand
gggcaacacugugcagcuu

SEQ ID NO: 1124963 - RNA, 19 nt, Homo sapiens
  misc_RNA (1)...(19): siRNA sense strand
gggaugucauucuuauuca

SEQ ID NO: 1124964 - RNA, 19 nt, Homo sapiens
  misc_RNA (1)...(19): siRNA sense strand
cgacugcuuucagaggaua

SEQ ID NO: 1124965 - RNA, 19 nt, Homo sapiens
  misc_RNA (1)...(19): siRNA sense strand
gagaugcuggccucuguuu

SEQ ID NO: 1124966 - RNA, 19 nt, Homo sapiens
  misc_RNA (1)...(19): siRNA sense strand
gcuuccagcuucuuaaagu

SEQ ID NO: 1124967 - RNA, 19 nt, Homo sapiens
  misc_RNA (1)...(19): siRNA sense strand
gaugagggcaaucuauaau

SEQ ID NO: 1124968 - RNA, 19 nt, Homo sapiens
  misc_RNA (1)...(19): siRNA sense strand
gagauucaaugggacuaug

SEQ ID NO: 1124969 - RNA, 19 nt, Homo sapiens
  misc_RNA (1)...(19): siRNA sense strand
cugaugcacugccauguga

SEQ ID NO: 1124970 - RNA, 19 nt, Homo sapiens
  misc_RNA (1)...(19): siRNA sense strand
ggaauuugcauuguuguuc

SEQ ID NO: 1124971 - RNA, 19 nt, Homo sapiens
  misc_RNA (1)...(19): siRNA sense strand
agucugagaaggacaguua

SEQ ID NO: 1124972 - RNA, 19 nt, Homo sapiens
  misc_RNA (1)...(19): siRNA sense strand
guucgacaguacuucauug

SEQ ID NO: 1124973 - RNA, 19 nt, Homo sapiens
  misc_RNA (1)...(19): siRNA sense strand
gcugcaagaaucuacuaua

SEQ ID NO: 1124974 - RNA, 19 nt, Homo sapiens
  misc_RNA (1)...(19): siRNA sense strand
uaggaugcaugcaaucaau

SEQ ID NO: 1124975 - RNA, 19 nt, Homo sapiens
  misc_RNA (1)...(19): siRNA sense strand
gggugcagcuaugcucuuu

SEQ ID NO: 1124976 - RNA, 19 nt, Homo sapiens
  misc_RNA (1)...(19): siRNA sense strand
ucacuguguuggaugagaa

SEQ ID NO: 1124977 - RNA, 19 nt, Homo sapiens
  misc_RNA (1)...(19): siRNA sense strand
ucacuuggauguacuucuc

SEQ ID NO: 1124978 - RNA, 19 nt, Homo sapiens
  misc_RNA (1)...(19): siRNA sense strand
cagaagaacacuugggaau

SEQ ID NO: 1124979 - RNA, 19 nt, Homo sapiens
  misc_RNA (1)...(19): siRNA sense strand
agaaagggguggauaaaga

SEQ ID NO: 1124980 - RNA, 19 nt, Homo sapiens
  misc_RNA (1)...(19): siRNA sense strand
gcagauggcaagcagaaag

SEQ ID NO: 1124981 - RNA, 19 nt, Homo sapiens
  misc_RNA (1)...(19): siRNA sense strand
cauaagagacacaaauucu

SEQ ID NO: 1124982 - RNA, 19 nt, Homo sapiens
  misc_RNA (1)...(19): siRNA sense strand
aagaagaccaucuauaaag

SEQ ID NO: 1124983 - RNA, 19 nt, Homo sapiens
  misc_RNA (1)...(19): siRNA sense strand
gaacuaccgggcagaugug

SEQ ID NO: 1124984 - RNA, 19 nt, Homo sapiens
  misc_RNA (1)...(19): siRNA sense strand
gcucauggagugcuagaau

SEQ ID NO: 1124985 - RNA, 19 nt, Homo sapiens
  misc_RNA (1)...(19): siRNA sense strand
gcacaaccagucugagaag

SEQ ID NO: 1124986 - RNA, 19 nt, Homo sapiens
  misc_RNA (1)...(19): siRNA sense strand
gagaagauguccugaaaga

SEQ ID NO: 1124987 - RNA, 19 nt, Homo sapiens
  misc_RNA (1)...(19): siRNA sense strand
gaaguggugucuacuauga

SEQ ID NO: 1124988 - RNA, 19 nt, Homo sapiens
  misc_RNA (1)...(19): siRNA sense strand
gaucagaaaugucaauaug

SEQ ID NO: 1124989 - RNA, 19 nt, Homo sapiens
  misc_RNA (1)...(19): siRNA sense strand
gaaagaagcuguggccaau

SEQ ID NO: 1124990 - RNA, 19 nt, Homo sapiens
  misc_RNA (1)...(19): siRNA sense strand
gaagugaaauaucaagguu

SEQ ID NO: 1124991 - RNA, 19 nt, Homo sapiens
  misc_RNA (1)...(19): siRNA sense strand
gaaaggguguguuacugaa

SEQ ID NO: 1124992 - RNA, 19 nt, Homo sapiens
  misc_RNA (1)...(19): siRNA sense strand
gaaugugaaucauggugua

SEQ ID NO: 1124993 - RNA, 19 nt, Homo sapiens
  misc_RNA (1)...(19): siRNA sense strand
gaaccauccuguacucaga

SEQ ID NO: 1124994 - RNA, 19 nt, Homo sapiens
  misc_RNA (1)...(19): siRNA sense strand
caaugggaaugcacucaua

SEQ ID NO: 1124995 - RNA, 19 nt, Homo sapiens
  misc_RNA (1)...(19): siRNA sense strand
ccacaacuuuggugaagaa

SEQ ID NO: 1124996 - RNA, 19 nt, Homo sapiens
  misc_RNA (1)...(19): siRNA sense strand
caacuuuggugaagaagga

SEQ ID NO: 1124997 - RNA, 19 nt, Homo sapiens
  misc_RNA (1)...(19): siRNA sense strand
acacugaacuuccuuaugg

SEQ ID NO: 1124998 - RNA, 19 nt, Homo sapiens
  misc_RNA (1)...(19): siRNA sense strand
aaagaauacuggcuuguga

SEQ ID NO: 1124999 - RNA, 19 nt, Homo sapiens
  misc_RNA (1)...(19): siRNA sense strand
aagaagcuguggccaauaa

SEQ ID NO: 1125000 - RNA, 19 nt, Homo sapiens
  misc_RNA (1)...(19): siRNA sense strand
gaagauguccugaaagaag

SEQ ID NO: 1125001 - RNA, 19 nt, Homo sapiens
  misc_RNA (1)...(19): siRNA sense strand
guggauugcucaacugaaa

SEQ ID NO: 1125002 - RNA, 19 nt, Homo sapiens
  misc_RNA (1)...(19): siRNA sense strand
gaagaaaaccuauggcaaa

SEQ ID NO: 1125003 - RNA, 19 nt, Homo sapiens
  misc_RNA (1)...(19): siRNA sense strand
ugacaacggcuuuccagua

SEQ ID NO: 1125004 - RNA, 19 nt, Homo sapiens
  misc_RNA (1)...(19): siRNA sense strand
gagaaaggguguguuacug

SEQ ID NO: 1125005 - RNA, 19 nt, Homo sapiens
  misc_RNA (1)...(19): siRNA sense strand
cagaaguggugucuacuau

SEQ ID NO: 1125006 - RNA, 19 nt, Homo sapiens
  misc_RNA (1)...(19): siRNA sense strand
gacaacggcuuuccaguac

SEQ ID NO: 1125007 - RNA, 19 nt, Homo sapiens
  misc_RNA (1)...(19): siRNA sense strand
ggcaagaaauaaaggaaau

SEQ ID NO: 1125008 - RNA, 19 nt, Homo sapiens
  misc_RNA (1)...(19): siRNA sense strand
gaucaccacuggcaucucu

SEQ ID NO: 1125009 - RNA, 19 nt, Homo sapiens
  misc_RNA (1)...(19): siRNA sense strand
acaaagccauggaucagaa

SEQ ID NO: 1125010 - RNA, 19 nt, Homo sapiens
  misc_RNA (1)...(19): siRNA sense strand
gaaaaccuauggcaaacaa

SEQ ID NO: 1125011 - RNA, 19 nt, Homo sapiens
  misc_RNA (1)...(19): siRNA sense strand
cuacagaaguggugucuac

SEQ ID NO: 1125012 - RNA, 19 nt, Homo sapiens
  misc_RNA (1)...(19): siRNA sense strand
agagagaaaggguguguua

SEQ ID NO: 1125013 - RNA, 19 nt, Homo sapiens
  misc_RNA (1)...(19): siRNA sense strand
ggaaacaaaggcugcaaug

SEQ ID NO: 1125014 - RNA, 19 nt, Homo sapiens
  misc_RNA (1)...(19): siRNA sense strand
gaaagaauacuggcuugug

SEQ ID NO: 1125015 - RNA, 19 nt, Homo sapiens
  misc_RNA (1)...(19): siRNA sense strand
guacucagaaugugaauca

SEQ ID NO: 1125016 - RNA, 19 nt, Homo sapiens
  misc_RNA (1)...(19): siRNA sense strand
aaaccuauggcaaacaaua

SEQ ID NO: 1125017 - RNA, 19 nt, Homo sapiens
  misc_RNA (1)...(19): siRNA sense strand
ggauauugccugauucugu

SEQ ID NO: 1125018 - RNA, 19 nt, Homo sapiens
  misc_RNA (1)...(19): siRNA sense strand
gaaugaagaagcaguacga

SEQ ID NO: 1125019 - RNA, 19 nt, Homo sapiens
  misc_RNA (1)...(19): siRNA sense strand
uggcacaguugcauaaaga

SEQ ID NO: 1125020 - RNA, 19 nt, Homo sapiens
  misc_RNA (1)...(19): siRNA sense strand
ggcaaacaauacaaggaaa

SEQ ID NO: 1125021 - RNA, 19 nt, Homo sapiens
  misc_RNA (1)...(19): siRNA sense strand
ggaaaagaaugaagaagca

SEQ ID NO: 1125022 - RNA, 19 nt, Homo sapiens
  misc_RNA (1)...(19): siRNA sense strand
uaaaguuugugaugcuuca

SEQ ID NO: 1125023 - RNA, 19 nt, Homo sapiens
  misc_RNA (1)...(19): siRNA sense strand
ugggagacaugaccaguga

SEQ ID NO: 1125024 - RNA, 19 nt, Homo sapiens
  misc_RNA (1)...(19): siRNA sense strand
aaacaaaggcugcaauggu

SEQ ID NO: 1125025 - RNA, 19 nt, Homo sapiens
  misc_RNA (1)...(19): siRNA sense strand
cauauaagucaaacccuaa

SEQ ID NO: 1125026 - RNA, 19 nt, Homo sapiens
  misc_RNA (1)...(19): siRNA sense strand
gaaucaugguguacuugug

SEQ ID NO: 1125027 - RNA, 19 nt, Homo sapiens
  misc_RNA (1)...(19): siRNA sense strand
uaacaagggcaucgacuca

SEQ ID NO: 1125028 - RNA, 19 nt, Homo sapiens
  misc_RNA (1)...(19): siRNA sense strand
caacggcuuuccaguacau

SEQ ID NO: 1125029 - RNA, 19 nt, Homo sapiens
  misc_RNA (1)...(19): siRNA sense strand
gaaucuaaaguuugugaug

SEQ ID NO: 1125030 - RNA, 19 nt, Homo sapiens
  misc_RNA (1)...(19): siRNA sense strand
agacaugaccagugaagaa

SEQ ID NO: 1125031 - RNA, 19 nt, Homo sapiens
  misc_RNA (1)...(19): siRNA sense strand
cauacgaucugggcaugaa

SEQ ID NO: 1125032 - RNA, 19 nt, Homo sapiens
  misc_RNA (1)...(19): siRNA sense strand
aaugguggcuucaugacaa

SEQ ID NO: 1125033 - RNA, 19 nt, Homo sapiens
  misc_RNA (1)...(19): siRNA sense strand
gcaguggcacaguugcaua

SEQ ID NO: 1125034 - RNA, 19 nt, Homo sapiens
  misc_RNA (1)...(19): siRNA sense strand
caauaaaggcccagugucu

SEQ ID NO: 1125035 - RNA, 19 nt, Homo sapiens
  misc_RNA (1)...(19): siRNA sense strand
acaagggcaucgacucaga

SEQ ID NO: 1125036 - RNA, 19 nt, Homo sapiens
  misc_RNA (1)...(19): siRNA sense strand
aaagaaugaagaagcagua

SEQ ID NO: 1125037 - RNA, 19 nt, Homo sapiens
  misc_RNA (1)...(19): siRNA sense strand
cccagugucuguuggugua

SEQ ID NO: 1125038 - RNA, 19 nt, Homo sapiens
  misc_RNA (1)...(19): siRNA sense strand
cgacucagacgcuuccuau

SEQ ID NO: 1125039 - RNA, 19 nt, Homo sapiens
  misc_RNA (1)...(19): siRNA sense strand
gcaguacgacgucucaucu

SEQ ID NO: 1125040 - RNA, 19 nt, Homo sapiens
  misc_RNA (1)...(19): siRNA sense strand
uugcuagcuuucccucuua

SEQ ID NO: 1125041 - RNA, 19 nt, Homo sapiens
  misc_RNA (1)...(19): siRNA sense strand
ggugaagaaggauauauuc

SEQ ID NO: 1125042 - RNA, 19 nt, Homo sapiens
  misc_RNA (1)...(19): siRNA sense strand
gaagcaguacgacgucuca

SEQ ID NO: 1125043 - RNA, 19 nt, Homo sapiens
  misc_RNA (1)...(19): siRNA sense strand
ggcagagaaauaucacaua

SEQ ID NO: 1125044 - RNA, 19 nt, Homo sapiens
  misc_RNA (1)...(19): siRNA sense strand
cgacgucucaucugggaaa

SEQ ID NO: 1125045 - RNA, 19 nt, Homo sapiens
  misc_RNA (1)...(19): siRNA sense strand
gggaaaagaaucuaaaguu

SEQ ID NO: 1125046 - RNA, 19 nt, Homo sapiens
  misc_RNA (1)...(19): siRNA sense strand
caugaccagugaagaagug

SEQ ID NO: 1125047 - RNA, 19 nt, Homo sapiens
  misc_RNA (1)...(19): siRNA sense strand
ccucuuacccagaaaucua

SEQ ID NO: 1125048 - RNA, 19 nt, Homo sapiens
  misc_RNA (1)...(19): siRNA sense strand
guguguuacugaagugaaa

SEQ ID NO: 1125049 - RNA, 19 nt, Homo sapiens
  misc_RNA (1)...(19): siRNA sense strand
agaaaggguguguuacuga

SEQ ID NO: 1125050 - RNA, 19 nt, Homo sapiens
  misc_RNA (1)...(19): siRNA sense strand
ggccacaacuuuggugaag

SEQ ID NO: 1125051 - RNA, 19 nt, Homo sapiens
  misc_RNA (1)...(19): siRNA sense strand
gaaacaaaggcugcaaugg

SEQ ID NO: 1125052 - RNA, 19 nt, Homo sapiens
  misc_RNA (1)...(19): siRNA sense strand
gcacaguugcauaaagauc

SEQ ID NO: 1125053 - RNA, 19 nt, Homo sapiens
  misc_RNA (1)...(19): siRNA sense strand
ccauggaucagaaauguca

SEQ ID NO: 1125054 - RNA, 19 nt, Homo sapiens
  misc_RNA (1)...(19): siRNA sense strand
ggaucagaaaugucaauau

SEQ ID NO: 1125055 - RNA, 19 nt, Homo sapiens
  misc_RNA (1)...(19): siRNA sense strand
gggaaugcacucauacgau

SEQ ID NO: 1125056 - RNA, 19 nt, Homo sapiens
  misc_RNA (1)...(19): siRNA sense strand
ccucugcaguggcacaguu

SEQ ID NO: 1125057 - RNA, 19 nt, Homo sapiens
  misc_RNA (1)...(19): siRNA sense strand
ggagagagaaagggugugu

SEQ ID NO: 1125058 - RNA, 19 nt, Homo sapiens
  misc_RNA (1)...(19): siRNA sense strand
ucuguggacuggagagaga

SEQ ID NO: 1125059 - RNA, 19 nt, Homo sapiens
  misc_RNA (1)...(19): siRNA sense strand
gcugccacauguucaaagu

SEQ ID NO: 1125060 - RNA, 19 nt, Homo sapiens
  misc_RNA (1)...(19): siRNA sense strand
ggaaagaauacuggcuugu

SEQ ID NO: 1125061 - RNA, 19 nt, Homo sapiens
  misc_RNA (1)...(19): siRNA sense strand
ggagacaugaccagugaag

SEQ ID NO: 1125062 - RNA, 19 nt, Homo sapiens
  misc_RNA (1)...(19): siRNA sense strand
gaagcuguggccaauaaag

SEQ ID NO: 1125063 - RNA, 19 nt, Homo sapiens
  misc_RNA (1)...(19): siRNA sense strand
uggcaucucuggaagaaaa

SEQ ID NO: 1125064 - RNA, 19 nt, Homo sapiens
  misc_RNA (1)...(19): siRNA sense strand
cugcaaugguggcuucaug

SEQ ID NO: 1125065 - RNA, 19 nt, Homo sapiens
  misc_RNA (1)...(19): siRNA sense strand
agaauacuggcuugugaaa

SEQ ID NO: 1125066 - RNA, 19 nt, Homo sapiens
  misc_RNA (1)...(19): siRNA sense strand
uggcuauggugaucuuaau

SEQ ID NO: 1125067 - RNA, 19 nt, Homo sapiens
  misc_RNA (1)...(19): siRNA sense strand
acagaaguggugucuacua

SEQ ID NO: 1125068 - RNA, 19 nt, Homo sapiens
  misc_RNA (1)...(19): siRNA sense strand
guacacugaacuuccuuau

SEQ ID NO: 1125069 - RNA, 19 nt, Homo sapiens
  misc_RNA (1)...(19): siRNA sense strand
gcaaacaauacaaggaaaa

SEQ ID NO: 1125070 - RNA, 19 nt, Homo sapiens
  misc_RNA (1)...(19): siRNA sense strand
gcaagaaauaaaggaaauc

SEQ ID NO: 1125071 - RNA, 19 nt, Homo sapiens
  misc_RNA (1)...(19): siRNA sense strand
uaugaaccauccuguacuc

SEQ ID NO: 1125072 - RNA, 19 nt, Homo sapiens
  misc_RNA (1)...(19): siRNA sense strand
gccaauaaaggcccagugu

SEQ ID NO: 1125073 - RNA, 19 nt, Homo sapiens
  misc_RNA (1)...(19): siRNA sense strand
caaagccauggaucagaaa

SEQ ID NO: 1125074 - RNA, 19 nt, Homo sapiens
  misc_RNA (1)...(19): siRNA sense strand
uggcaaacaauacaaggaa

SEQ ID NO: 1125075 - RNA, 19 nt, Homo sapiens
  misc_RNA (1)...(19): siRNA sense strand
gaccagugaagaagugaug

SEQ ID NO: 1125076 - RNA, 19 nt, Homo sapiens
  misc_RNA (1)...(19): siRNA sense strand
gaaccaccugggagacaug

SEQ ID NO: 1125077 - RNA, 19 nt, Homo sapiens
  misc_RNA (1)...(19): siRNA sense strand
gguuggcuauggugaucuu

SEQ ID NO: 1125078 - RNA, 19 nt, Homo sapiens
  misc_RNA (1)...(19): siRNA sense strand
auauucggauggcaagaaa

SEQ ID NO: 1125079 - RNA, 19 nt, Homo sapiens
  misc_RNA (1)...(19): siRNA sense strand
auucggauggcaagaaaua

SEQ ID NO: 1125080 - RNA, 19 nt, Homo sapiens
  misc_RNA (1)...(19): siRNA sense strand
agugaaauaucaagguucu

SEQ ID NO: 1125081 - RNA, 19 nt, Homo sapiens
  misc_RNA (1)...(19): siRNA sense strand
ucggauggcaagaaauaaa

SEQ ID NO: 1125082 - RNA, 19 nt, Homo sapiens
  misc_RNA (1)...(19): siRNA sense strand
gcuauggugaucuuaaugg

SEQ ID NO: 1125083 - RNA, 19 nt, Homo sapiens
  misc_RNA (1)...(19): siRNA sense strand
caguggcacaguugcauaa

SEQ ID NO: 1125084 - RNA, 19 nt, Homo sapiens
  misc_RNA (1)...(19): siRNA sense strand
gcuuuccaguacaucauug

SEQ ID NO: 1125085 - RNA, 19 nt, Homo sapiens
  misc_RNA (1)...(19): siRNA sense strand
ugugaaucaugguguacuu

SEQ ID NO: 1125086 - RNA, 19 nt, Homo sapiens
  misc_RNA (1)...(19): siRNA sense strand
caacgacuguuuccugaag

SEQ ID NO: 1125087 - RNA, 19 nt, Homo sapiens
  misc_RNA (1)...(19): siRNA sense strand
gaacaccacuacgccuuca

SEQ ID NO: 1125088 - RNA, 19 nt, Homo sapiens
  misc_RNA (1)...(19): siRNA sense strand
ugaacggcaugaacacgua

SEQ ID NO: 1125089 - RNA, 19 nt, Homo sapiens
  misc_RNA (1)...(19): siRNA sense strand
acgaacaggugaugcacua

SEQ ID NO: 1125090 - RNA, 19 nt, Homo sapiens
  misc_RNA (1)...(19): siRNA sense strand
ccgcagauaccuccuacua

SEQ ID NO: 1125091 - RNA, 19 nt, Homo sapiens
  misc_RNA (1)...(19): siRNA sense strand
gccacucgcucuccuucaa

SEQ ID NO: 1125092 - RNA, 19 nt, Homo sapiens
  misc_RNA (1)...(19): siRNA sense strand
gcagcuacacgcacgcaaa

SEQ ID NO: 1125093 - RNA, 19 nt, Homo sapiens
  misc_RNA (1)...(19): siRNA sense strand
ccauuaugaacuccucuua

SEQ ID NO: 1125094 - RNA, 19 nt, Homo sapiens
  misc_RNA (1)...(19): siRNA sense strand
gggaugaacggcaugaaca

SEQ ID NO: 1125095 - RNA, 19 nt, Homo sapiens
  misc_RNA (1)...(19): siRNA sense strand
cauuaugaacuccucuuaa

SEQ ID NO: 1125096 - RNA, 19 nt, Homo sapiens
  misc_RNA (1)...(19): siRNA sense strand
ucguacaucucgcucauca

SEQ ID NO: 1125097 - RNA, 19 nt, Homo sapiens
  misc_RNA (1)...(19): siRNA sense strand
cagcagagccccaacaaga

SEQ ID NO: 1125098 - RNA, 19 nt, Homo sapiens
  misc_RNA (1)...(19): siRNA sense strand
ggaccucaaggccuacgaa

SEQ ID NO: 1125099 - RNA, 19 nt, Homo sapiens
  misc_RNA (1)...(19): siRNA sense strand
cgggcaacauguucgagaa

SEQ ID NO: 1125100 - RNA, 19 nt, Homo sapiens
  misc_RNA (1)...(19): siRNA sense strand
ugggagcggugaagaugga

SEQ ID NO: 1125101 - RNA, 19 nt, Homo sapiens
  misc_RNA (1)...(19): siRNA sense strand
cgacuggagcagcuacuau

SEQ ID NO: 1125102 - RNA, 19 nt, Homo sapiens
  misc_RNA (1)...(19): siRNA sense strand
gcugggagcggugaagaug

SEQ ID NO: 1125103 - RNA, 19 nt, Homo sapiens
  misc_RNA (1)...(19): siRNA sense strand
gacuggagcagcuacuaug

SEQ ID NO: 1125104 - RNA, 19 nt, Homo sapiens
  misc_RNA (1)...(19): siRNA sense strand
ccucaaggccuacgaacag

SEQ ID NO: 1125105 - RNA, 19 nt, Homo sapiens
  misc_RNA (1)...(19): siRNA sense strand
ccaccaaccccacaaaaug

SEQ ID NO: 1125106 - RNA, 19 nt, Homo sapiens
  misc_RNA (1)...(19): siRNA sense strand
caacgacuguuuccugaag

SEQ ID NO: 1125107 - RNA, 19 nt, Homo sapiens
  misc_RNA (1)...(19): siRNA sense strand
gaacaccacuacgccuuca

SEQ ID NO: 1125108 - RNA, 19 nt, Homo sapiens
  misc_RNA (1)...(19): siRNA sense strand
ugaacggcaugaacacgua

SEQ ID NO: 1125109 - RNA, 19 nt, Homo sapiens
  misc_RNA (1)...(19): siRNA sense strand
acgaacaggugaugcacua

SEQ ID NO: 1125110 - RNA, 19 nt, Homo sapiens
  misc_RNA (1)...(19): siRNA sense strand
ccgcagauaccuccuacua

SEQ ID NO: 1125111 - RNA, 19 nt, Homo sapiens
  misc_RNA (1)...(19): siRNA sense strand
gccacucgcucuccuucaa

SEQ ID NO: 1125112 - RNA, 19 nt, Homo sapiens
  misc_RNA (1)...(19): siRNA sense strand
gcagcuacacgcacgcaaa

SEQ ID NO: 1125113 - RNA, 19 nt, Homo sapiens
  misc_RNA (1)...(19): siRNA sense strand
ccauuaugaacuccucuua

SEQ ID NO: 1125114 - RNA, 19 nt, Homo sapiens
  misc_RNA (1)...(19): siRNA sense strand
gggaugaacggcaugaaca

SEQ ID NO: 1125115 - RNA, 19 nt, Homo sapiens
  misc_RNA (1)...(19): siRNA sense strand
cauuaugaacuccucuuaa

SEQ ID NO: 1125116 - RNA, 19 nt, Homo sapiens
  misc_RNA (1)...(19): siRNA sense strand
ucguacaucucgcucauca

SEQ ID NO: 1125117 - RNA, 19 nt, Homo sapiens
  misc_RNA (1)...(19): siRNA sense strand
cagcagagccccaacaaga

SEQ ID NO: 1125118 - RNA, 19 nt, Homo sapiens
  misc_RNA (1)...(19): siRNA sense strand
ggaccucaaggccuacgaa

SEQ ID NO: 1125119 - RNA, 19 nt, Homo sapiens
  misc_RNA (1)...(19): siRNA sense strand
cgggcaacauguucgagaa

SEQ ID NO: 1125120 - RNA, 19 nt, Homo sapiens
  misc_RNA (1)...(19): siRNA sense strand
ugggagcggugaagaugga

SEQ ID NO: 1125121 - RNA, 19 nt, Homo sapiens
  misc_RNA (1)...(19): siRNA sense strand
cgacuggagcagcuacuau

SEQ ID NO: 1125122 - RNA, 19 nt, Homo sapiens
  misc_RNA (1)...(19): siRNA sense strand
gcugggagcggugaagaug

SEQ ID NO: 1125123 - RNA, 19 nt, Homo sapiens
  misc_RNA (1)...(19): siRNA sense strand
gacuggagcagcuacuaug

SEQ ID NO: 1125124 - RNA, 19 nt, Homo sapiens
  misc_RNA (1)...(19): siRNA sense strand
ccucaaggccuacgaacag

SEQ ID NO: 1125125 - RNA, 19 nt, Homo sapiens
  misc_RNA (1)...(19): siRNA sense strand
ccaccaaccccacaaaaug

SEQ ID NO: 1125126 - RNA, 19 nt, Homo sapiens
  misc_RNA (1)...(19): siRNA sense strand
caaauaagaugcaugcuau

SEQ ID NO: 1125127 - RNA, 19 nt, Homo sapiens
  misc_RNA (1)...(19): siRNA sense strand
gacaacaucugcucuauau

SEQ ID NO: 1125128 - RNA, 19 nt, Homo sapiens
  misc_RNA (1)...(19): siRNA sense strand
ggacaugucucagauauca

SEQ ID NO: 1125129 - RNA, 19 nt, Homo sapiens
  misc_RNA (1)...(19): siRNA sense strand
gaugacagccaaauuguua

SEQ ID NO: 1125130 - RNA, 19 nt, Homo sapiens
  misc_RNA (1)...(19): siRNA sense strand
caacaucugcucuauauau

SEQ ID NO: 1125131 - RNA, 19 nt, Homo sapiens
  misc_RNA (1)...(19): siRNA sense strand
gaacaacugcggaaucaga

SEQ ID NO: 1125132 - RNA, 19 nt, Homo sapiens
  misc_RNA (1)...(19): siRNA sense strand
ugaugccucuuccaaauua

SEQ ID NO: 1125133 - RNA, 19 nt, Homo sapiens
  misc_RNA (1)...(19): siRNA sense strand
caucaaauauggacucugu

SEQ ID NO: 1125134 - RNA, 19 nt, Homo sapiens
  misc_RNA (1)...(19): siRNA sense strand
gcaagaagcagaacaacug

SEQ ID NO: 1125135 - RNA, 19 nt, Homo sapiens
  misc_RNA (1)...(19): siRNA sense strand
ggacaacaucugcucuaua

SEQ ID NO: 1125136 - RNA, 19 nt, Homo sapiens
  misc_RNA (1)...(19): siRNA sense strand
cagauuacaucaaauaugg

SEQ ID NO: 1125137 - RNA, 19 nt, Homo sapiens
  misc_RNA (1)...(19): siRNA sense strand
caaaugcgaacaagacgua

SEQ ID NO: 1125138 - RNA, 19 nt, Homo sapiens
  misc_RNA (1)...(19): siRNA sense strand
gacaauaucaucuguggaa

SEQ ID NO: 1125139 - RNA, 19 nt, Homo sapiens
  misc_RNA (1)...(19): siRNA sense strand
ggagaugugaugagucuuu

SEQ ID NO: 1125140 - RNA, 19 nt, Homo sapiens
  misc_RNA (1)...(19): siRNA sense strand
ugggauagcuauacaacaa

SEQ ID NO: 1125141 - RNA, 19 nt, Homo sapiens
  misc_RNA (1)...(19): siRNA sense strand
ggauagcuauacaacaaau

SEQ ID NO: 1125142 - RNA, 19 nt, Homo sapiens
  misc_RNA (1)...(19): siRNA sense strand
cagaacaacugcggaauca

SEQ ID NO: 1125143 - RNA, 19 nt, Homo sapiens
  misc_RNA (1)...(19): siRNA sense strand
gauggaauguguagacagu

SEQ ID NO: 1125144 - RNA, 19 nt, Homo sapiens
  misc_RNA (1)...(19): siRNA sense strand
gagaguaagccgagaguug

SEQ ID NO: 1125145 - RNA, 19 nt, Homo sapiens
  misc_RNA (1)...(19): siRNA sense strand
cgaacaagacguacacuga

SEQ ID NO: 1125146 - RNA, 19 nt, Homo sapiens
  misc_RNA (1)...(19): siRNA sense strand
gcaacgcuuguucagauua

SEQ ID NO: 1125147 - RNA, 19 nt, Homo sapiens
  misc_RNA (1)...(19): siRNA sense strand
gaauacaaaugcgaacaag

SEQ ID NO: 1125148 - RNA, 19 nt, Homo sapiens
  misc_RNA (1)...(19): siRNA sense strand
guuacaaguucaggagaua

SEQ ID NO: 1125149 - RNA, 19 nt, Homo sapiens
  misc_RNA (1)...(19): siRNA sense strand
cggaaagcauguaaugaug

SEQ ID NO: 1125150 - RNA, 19 nt, Homo sapiens
  misc_RNA (1)...(19): siRNA sense strand
ucgugcagaucaagaguua

SEQ ID NO: 1125151 - RNA, 19 nt, Homo sapiens
  misc_RNA (1)...(19): siRNA sense strand
gugaugaccugugcuuaug

SEQ ID NO: 1125152 - RNA, 19 nt, Homo sapiens
  misc_RNA (1)...(19): siRNA sense strand
acaaauaagaugcaugcua

SEQ ID NO: 1125153 - RNA, 19 nt, Homo sapiens
  misc_RNA (1)...(19): siRNA sense strand
gugaugagucuuucuuuga

SEQ ID NO: 1125154 - RNA, 19 nt, Homo sapiens
  misc_RNA (1)...(19): siRNA sense strand
ccaccuagcuaaaaucuau

SEQ ID NO: 1125155 - RNA, 19 nt, Homo sapiens
  misc_RNA (1)...(19): siRNA sense strand
gcagaucaagaguuauuau

SEQ ID NO: 1125156 - RNA, 19 nt, Homo sapiens
  misc_RNA (1)...(19): siRNA sense strand
agagggaaaugugagagua

SEQ ID NO: 1125157 - RNA, 19 nt, Homo sapiens
  misc_RNA (1)...(19): siRNA sense strand
gaugcaugcuauuccuuug

SEQ ID NO: 1125158 - RNA, 19 nt, Homo sapiens
  misc_RNA (1)...(19): siRNA sense strand
gcuuagguguaacugauga

SEQ ID NO: 1125159 - RNA, 19 nt, Homo sapiens
  misc_RNA (1)...(19): siRNA sense strand
aauaucaucuguggaauca

SEQ ID NO: 1125160 - RNA, 19 nt, Homo sapiens
  misc_RNA (1)...(19): siRNA sense strand
gugcagaucaagaguuauu

SEQ ID NO: 1125161 - RNA, 19 nt, Homo sapiens
  misc_RNA (1)...(19): siRNA sense strand
gagggaaaugugagaguaa

SEQ ID NO: 1125162 - RNA, 19 nt, Homo sapiens
  misc_RNA (1)...(19): siRNA sense strand
caaauuaugggauauucga

SEQ ID NO: 1125163 - RNA, 19 nt, Homo sapiens
  misc_RNA (1)...(19): siRNA sense strand
gauucaggaugcucggaaa

SEQ ID NO: 1125164 - RNA, 19 nt, Homo sapiens
  misc_RNA (1)...(19): siRNA sense strand
gcucggaaagcauguaaug

SEQ ID NO: 1125165 - RNA, 19 nt, Homo sapiens
  misc_RNA (1)...(19): siRNA sense strand
gagauggaauguguagaca

SEQ ID NO: 1125166 - RNA, 19 nt, Homo sapiens
  misc_RNA (1)...(19): siRNA sense strand
cagcagaccaccacauuca

SEQ ID NO: 1125167 - RNA, 19 nt, Homo sapiens
  misc_RNA (1)...(19): siRNA sense strand
ggugaugaccugugcuuau

SEQ ID NO: 1125168 - RNA, 19 nt, Homo sapiens
  misc_RNA (1)...(19): siRNA sense strand
ccacuugccggcucuuuga

SEQ ID NO: 1125169 - RNA, 19 nt, Homo sapiens
  misc_RNA (1)...(19): siRNA sense strand
cgggacaugucucagauau

SEQ ID NO: 1125170 - RNA, 19 nt, Homo sapiens
  misc_RNA (1)...(19): siRNA sense strand
ugugaugccucuuccaaau

SEQ ID NO: 1125171 - RNA, 19 nt, Homo sapiens
  misc_RNA (1)...(19): siRNA sense strand
gaccagagagggaaaugug

SEQ ID NO: 1125172 - RNA, 19 nt, Homo sapiens
  misc_RNA (1)...(19): siRNA sense strand
gcuagucagugcuucucaa

SEQ ID NO: 1125173 - RNA, 19 nt, Homo sapiens
  misc_RNA (1)...(19): siRNA sense strand
gugagcugcuuagguguaa

SEQ ID NO: 1125174 - RNA, 19 nt, Homo sapiens
  misc_RNA (1)...(19): siRNA sense strand
uaucaaugcugucaguuuu

SEQ ID NO: 1125175 - RNA, 19 nt, Homo sapiens
  misc_RNA (1)...(19): siRNA sense strand
gagaugugaugagucuuuc

SEQ ID NO: 1125176 - RNA, 19 nt, Homo sapiens
  misc_RNA (1)...(19): siRNA sense strand
uuagaugacagccaaauug

SEQ ID NO: 1125177 - RNA, 19 nt, Homo sapiens
  misc_RNA (1)...(19): siRNA sense strand
agucagugcuucucaagau

SEQ ID NO: 1125178 - RNA, 19 nt, Homo sapiens
  misc_RNA (1)...(19): siRNA sense strand
gcucugaugaugccacuug

SEQ ID NO: 1125179 - RNA, 19 nt, Homo sapiens
  misc_RNA (1)...(19): siRNA sense strand
ggucaugacaaccguguga

SEQ ID NO: 1125180 - RNA, 19 nt, Homo sapiens
  misc_RNA (1)...(19): siRNA sense strand
caucugcucuauauauaac

SEQ ID NO: 1125181 - RNA, 19 nt, Homo sapiens
  misc_RNA (1)...(19): siRNA sense strand
ugugaugagucuuucuuug

SEQ ID NO: 1125182 - RNA, 19 nt, Homo sapiens
  misc_RNA (1)...(19): siRNA sense strand
gaacaguugaggcaagaag

SEQ ID NO: 1125183 - RNA, 19 nt, Homo sapiens
  misc_RNA (1)...(19): siRNA sense strand
gaugagucuuucuuugagu

SEQ ID NO: 1125184 - RNA, 19 nt, Homo sapiens
  misc_RNA (1)...(19): siRNA sense strand
guuacgaugacuuuaauug

SEQ ID NO: 1125185 - RNA, 19 nt, Homo sapiens
  misc_RNA (1)...(19): siRNA sense strand
ggacucugugggucgaaua

SEQ ID NO: 1125186 - RNA, 19 nt, Homo sapiens
  misc_RNA (1)...(19): siRNA sense strand
augcaacgcuuguucagau

SEQ ID NO: 1125187 - RNA, 19 nt, Homo sapiens
  misc_RNA (1)...(19): siRNA sense strand
aaagugggcgucucuuguu

SEQ ID NO: 1125188 - RNA, 19 nt, Homo sapiens
  misc_RNA (1)...(19): siRNA sense strand
cgaauacaaaugcgaacaa

SEQ ID NO: 1125189 - RNA, 19 nt, Homo sapiens
  misc_RNA (1)...(19): siRNA sense strand
caacgcuuguucagauuac

SEQ ID NO: 1125190 - RNA, 19 nt, Homo sapiens
  misc_RNA (1)...(19): siRNA sense strand
guaaugaugcaacgcuugu

SEQ ID NO: 1125191 - RNA, 19 nt, Homo sapiens
  misc_RNA (1)...(19): siRNA sense strand
uaucaucuguggaaucacu

SEQ ID NO: 1125192 - RNA, 19 nt, Homo sapiens
  misc_RNA (1)...(19): siRNA sense strand
gaggcaagaagcagaacaa

SEQ ID NO: 1125193 - RNA, 19 nt, Homo sapiens
  misc_RNA (1)...(19): siRNA sense strand
uaugcucccucugguaauu

SEQ ID NO: 1125194 - RNA, 19 nt, Homo sapiens
  misc_RNA (1)...(19): siRNA sense strand
gaugugaugagucuuucuu

SEQ ID NO: 1125195 - RNA, 19 nt, Homo sapiens
  misc_RNA (1)...(19): siRNA sense strand
guucaggagauacaacuug

SEQ ID NO: 1125196 - RNA, 19 nt, Homo sapiens
  misc_RNA (1)...(19): siRNA sense strand
cugcuuagguguaacugau

SEQ ID NO: 1125197 - RNA, 19 nt, Homo sapiens
  misc_RNA (1)...(19): siRNA sense strand
ugaugagucuuucuuugag

SEQ ID NO: 1125198 - RNA, 19 nt, Homo sapiens
  misc_RNA (1)...(19): siRNA sense strand
uggcauggcuguggcaaca

SEQ ID NO: 1125199 - RNA, 19 nt, Homo sapiens
  misc_RNA (1)...(19): siRNA sense strand
gacaugaggacuuuuguuu

SEQ ID NO: 1125200 - RNA, 19 nt, Homo sapiens
  misc_RNA (1)...(19): siRNA sense strand
uaagaugcaugcuauuccu

SEQ ID NO: 1125201 - RNA, 19 nt, Homo sapiens
  misc_RNA (1)...(19): siRNA sense strand
ucacgggacaugucucaga

SEQ ID NO: 1125202 - RNA, 19 nt, Homo sapiens
  misc_RNA (1)...(19): siRNA sense strand
gggauagcuauacaacaaa

SEQ ID NO: 1125203 - RNA, 19 nt, Homo sapiens
  misc_RNA (1)...(19): siRNA sense strand
cuuguuggcugguuacgau

SEQ ID NO: 1125204 - RNA, 19 nt, Homo sapiens
  misc_RNA (1)...(19): siRNA sense strand
agauaucaaugcugucagu

SEQ ID NO: 1125205 - RNA, 19 nt, Homo sapiens
  misc_RNA (1)...(19): siRNA sense strand
gugaugccucuuccaaauu

SEQ ID NO: 1125206 - RNA, 19 nt, Homo sapiens
  misc_RNA (1)...(19): siRNA sense strand
ucggaaagcauguaaugau

SEQ ID NO: 1125207 - RNA, 19 nt, Homo sapiens
  misc_RNA (1)...(19): siRNA sense strand
cuuaugcucccucugguaa

SEQ ID NO: 1125208 - RNA, 19 nt, Homo sapiens
  misc_RNA (1)...(19): siRNA sense strand
uggaacaguugaggcaaga

SEQ ID NO: 1125209 - RNA, 19 nt, Homo sapiens
  misc_RNA (1)...(19): siRNA sense strand
ugguuacgaugacuuuaau

SEQ ID NO: 1125210 - RNA, 19 nt, Homo sapiens
  misc_RNA (1)...(19): siRNA sense strand
gaugaccugugcuuaugcu

SEQ ID NO: 1125211 - RNA, 19 nt, Homo sapiens
  misc_RNA (1)...(19): siRNA sense strand
caauaucaucuguggaauc

SEQ ID NO: 1125212 - RNA, 19 nt, Homo sapiens
  misc_RNA (1)...(19): siRNA sense strand
cacgggacaugucucagau

SEQ ID NO: 1125213 - RNA, 19 nt, Homo sapiens
  misc_RNA (1)...(19): siRNA sense strand
cuggagaugugaugagucu

SEQ ID NO: 1125214 - RNA, 19 nt, Homo sapiens
  misc_RNA (1)...(19): siRNA sense strand
gcuaaaaucuaugcuaugc

SEQ ID NO: 1125215 - RNA, 19 nt, Homo sapiens
  misc_RNA (1)...(19): siRNA sense strand
uagaugacagccaaauugu

SEQ ID NO: 1125216 - RNA, 19 nt, Homo sapiens
  misc_RNA (1)...(19): siRNA sense strand
uaaagaccagagagggaaa

SEQ ID NO: 1125217 - RNA, 19 nt, Homo sapiens
  misc_RNA (1)...(19): siRNA sense strand
gucagugcuucucaagaug

SEQ ID NO: 1125218 - RNA, 19 nt, Homo sapiens
  misc_RNA (1)...(19): siRNA sense strand
ucuguggaaucacuucugu

SEQ ID NO: 1125219 - RNA, 19 nt, Homo sapiens
  misc_RNA (1)...(19): siRNA sense strand
ucagauaucaaugcuguca

SEQ ID NO: 1125220 - RNA, 19 nt, Homo sapiens
  misc_RNA (1)...(19): siRNA sense strand
ucuuccaaauuaugggaua

SEQ ID NO: 1125221 - RNA, 19 nt, Homo sapiens
  misc_RNA (1)...(19): siRNA sense strand
gagagggaaaugugagagu

SEQ ID NO: 1125222 - RNA, 19 nt, Homo sapiens
  misc_RNA (1)...(19): siRNA sense strand
uggacaacaucugcucuau

SEQ ID NO: 1125223 - RNA, 19 nt, Homo sapiens
  misc_RNA (1)...(19): siRNA sense strand
gcuuaugcucccucuggua

SEQ ID NO: 1125224 - RNA, 19 nt, Homo sapiens
  misc_RNA (1)...(19): siRNA sense strand
ggucacacaggguacuugu

SEQ ID NO: 1125225 - RNA, 19 nt, Homo sapiens
  misc_RNA (1)...(19): siRNA sense strand
gcagaccaccacauucacu

SEQ ID NO: 1125226 - RNA, 19 nt, Homo sapiens
  misc_RNA (1)...(19): siRNA sense strand
gaaggaaccuguacagaua

SEQ ID NO: 1125227 - RNA, 19 nt, Homo sapiens
  misc_RNA (1)...(19): siRNA sense strand
gaauguagcuccagauaug

SEQ ID NO: 1125228 - RNA, 19 nt, Homo sapiens
  misc_RNA (1)...(19): siRNA sense strand
uaaagaaggcccuguauua

SEQ ID NO: 1125229 - RNA, 19 nt, Homo sapiens
  misc_RNA (1)...(19): siRNA sense strand
ccacauggcuugaguauag

SEQ ID NO: 1125230 - RNA, 19 nt, Homo sapiens
  misc_RNA (1)...(19): siRNA sense strand
gaaagaggaugauggaagu

SEQ ID NO: 1125231 - RNA, 19 nt, Homo sapiens
  misc_RNA (1)...(19): siRNA sense strand
guaaguggauacagaguaa

SEQ ID NO: 1125232 - RNA, 19 nt, Homo sapiens
  misc_RNA (1)...(19): siRNA sense strand
ccaagaaccuguacaagga

SEQ ID NO: 1125233 - RNA, 19 nt, Homo sapiens
  misc_RNA (1)...(19): siRNA sense strand
gcuuaaaccuugguaauuu

SEQ ID NO: 1125234 - RNA, 19 nt, Homo sapiens
  misc_RNA (1)...(19): siRNA sense strand
gaugaaaugugcaacuuau

SEQ ID NO: 1125235 - RNA, 19 nt, Homo sapiens
  misc_RNA (1)...(19): siRNA sense strand
ugagagagauuaagcauuc

SEQ ID NO: 1125236 - RNA, 19 nt, Homo sapiens
  misc_RNA (1)...(19): siRNA sense strand
gaacaucgaucaguuaaaa

SEQ ID NO: 1125237 - RNA, 19 nt, Homo sapiens
  misc_RNA (1)...(19): siRNA sense strand
aaagggaaguggaggcuua

SEQ ID NO: 1125238 - RNA, 19 nt, Homo sapiens
  misc_RNA (1)...(19): siRNA sense strand
gcauugagguccaggaaau

SEQ ID NO: 1125239 - RNA, 19 nt, Homo sapiens
  misc_RNA (1)...(19): siRNA sense strand
gguaguaaguggauacaga

SEQ ID NO: 1125240 - RNA, 19 nt, Homo sapiens
  misc_RNA (1)...(19): siRNA sense strand
agaagaagaagaaguguua

SEQ ID NO: 1125241 - RNA, 19 nt, Homo sapiens
  misc_RNA (1)...(19): siRNA sense strand
caaacuggauccaaacaau

SEQ ID NO: 1125242 - RNA, 19 nt, Homo sapiens
  misc_RNA (1)...(19): siRNA sense strand
gaaauuggaacaucgauca

SEQ ID NO: 1125243 - RNA, 19 nt, Homo sapiens
  misc_RNA (1)...(19): siRNA sense strand
gacauuucaugccauuaua

SEQ ID NO: 1125244 - RNA, 19 nt, Homo sapiens
  misc_RNA (1)...(19): siRNA sense strand
gcauguaccuuaugauguc

SEQ ID NO: 1125245 - RNA, 19 nt, Homo sapiens
  misc_RNA (1)...(19): siRNA sense strand
ccacagaggugaccauguc

SEQ ID NO: 1125246 - RNA, 19 nt, Homo sapiens
  misc_RNA (1)...(19): siRNA sense strand
gguguuggauucagaguug

SEQ ID NO: 1125247 - RNA, 19 nt, Homo sapiens
  misc_RNA (1)...(19): siRNA sense strand
gaggagagacuggaaguaa

SEQ ID NO: 1125248 - RNA, 19 nt, Homo sapiens
  misc_RNA (1)...(19): siRNA sense strand
guacagauaaagccaauau

SEQ ID NO: 1125249 - RNA, 19 nt, Homo sapiens
  misc_RNA (1)...(19): siRNA sense strand
gacagaagccacacacauu

SEQ ID NO: 1125250 - RNA, 19 nt, Homo sapiens
  misc_RNA (1)...(19): siRNA sense strand
cuaaacaguccgauacaua

SEQ ID NO: 1125251 - RNA, 19 nt, Homo sapiens
  misc_RNA (1)...(19): siRNA sense strand
aaacugacaccaaagaauu

SEQ ID NO: 1125252 - RNA, 19 nt, Homo sapiens
  misc_RNA (1)...(19): siRNA sense strand
aaagaaggcccuguauuaa

SEQ ID NO: 1125253 - RNA, 19 nt, Homo sapiens
  misc_RNA (1)...(19): siRNA sense strand
ggauuggccuggaguauac

SEQ ID NO: 1125254 - RNA, 19 nt, Homo sapiens
  misc_RNA (1)...(19): siRNA sense strand
caaagguguuggauucaga

SEQ ID NO: 1125255 - RNA, 19 nt, Homo sapiens
  misc_RNA (1)...(19): siRNA sense strand
agaaggcccuguauuaauc

SEQ ID NO: 1125256 - RNA, 19 nt, Homo sapiens
  misc_RNA (1)...(19): siRNA sense strand
ccauuuagguaagguagua

SEQ ID NO: 1125257 - RNA, 19 nt, Homo sapiens
  misc_RNA (1)...(19): siRNA sense strand
ggauacagaguaagaaaug

SEQ ID NO: 1125258 - RNA, 19 nt, Homo sapiens
  misc_RNA (1)...(19): siRNA sense strand
gcacuggagccauuuaugu

SEQ ID NO: 1125259 - RNA, 19 nt, Homo sapiens
  misc_RNA (1)...(19): siRNA sense strand
agaauaaccuggugauuuu

SEQ ID NO: 1125260 - RNA, 19 nt, Homo sapiens
  misc_RNA (1)...(19): siRNA sense strand
cguaagggcuacagucgaa

SEQ ID NO: 1125261 - RNA, 19 nt, Homo sapiens
  misc_RNA (1)...(19): siRNA sense strand
ccucacagcuuggcucuug

SEQ ID NO: 1125262 - RNA, 19 nt, Homo sapiens
  misc_RNA (1)...(19): siRNA sense strand
gcagugaccaagagaaaga

SEQ ID NO: 1125263 - RNA, 19 nt, Homo sapiens
  misc_RNA (1)...(19): siRNA sense strand
cgugaagucugauaugguu

SEQ ID NO: 1125264 - RNA, 19 nt, Homo sapiens
  misc_RNA (1)...(19): siRNA sense strand
ggaccaagaaccuguacaa

SEQ ID NO: 1125265 - RNA, 19 nt, Homo sapiens
  misc_RNA (1)...(19): siRNA sense strand
gaauuugugagagagauua

SEQ ID NO: 1125266 - RNA, 19 nt, Homo sapiens
  misc_RNA (1)...(19): siRNA sense strand
caauaaagaaggcccugua

SEQ ID NO: 1125267 - RNA, 19 nt, Homo sapiens
  misc_RNA (1)...(19): siRNA sense strand
aagaauaaccuggugauuu

SEQ ID NO: 1125268 - RNA, 19 nt, Homo sapiens
  misc_RNA (1)...(19): siRNA sense strand
ggagagacuggaaguaaau

SEQ ID NO: 1125269 - RNA, 19 nt, Homo sapiens
  misc_RNA (1)...(19): siRNA sense strand
gauaagauuccuuuacuac

SEQ ID NO: 1125270 - RNA, 19 nt, Homo sapiens
  misc_RNA (1)...(19): siRNA sense strand
ggacagaagccacacacau

SEQ ID NO: 1125271 - RNA, 19 nt, Homo sapiens
  misc_RNA (1)...(19): siRNA sense strand
gaaacuaccagaccauuuu

SEQ ID NO: 1125272 - RNA, 19 nt, Homo sapiens
  misc_RNA (1)...(19): siRNA sense strand
gcuggcauguaccuuauga

SEQ ID NO: 1125273 - RNA, 19 nt, Homo sapiens
  misc_RNA (1)...(19): siRNA sense strand
caccuugacugagaaauug

SEQ ID NO: 1125274 - RNA, 19 nt, Homo sapiens
  misc_RNA (1)...(19): siRNA sense strand
aaacuggauccaaacaaua

SEQ ID NO: 1125275 - RNA, 19 nt, Homo sapiens
  misc_RNA (1)...(19): siRNA sense strand
ggaauuauugggucacaga

SEQ ID NO: 1125276 - RNA, 19 nt, Homo sapiens
  misc_RNA (1)...(19): siRNA sense strand
gaaaugugcaacuuauaca

SEQ ID NO: 1125277 - RNA, 19 nt, Homo sapiens
  misc_RNA (1)...(19): siRNA sense strand
gauaaagccaauauucugu

SEQ ID NO: 1125278 - RNA, 19 nt, Homo sapiens
  misc_RNA (1)...(19): siRNA sense strand
gaagcccacuuucugucuu

SEQ ID NO: 1125279 - RNA, 19 nt, Homo sapiens
  misc_RNA (1)...(19): siRNA sense strand
ggaaguucaccuugacuga

SEQ ID NO: 1125280 - RNA, 19 nt, Homo sapiens
  misc_RNA (1)...(19): siRNA sense strand
uaagauuccuuuacuacag

SEQ ID NO: 1125281 - RNA, 19 nt, Homo sapiens
  misc_RNA (1)...(19): siRNA sense strand
gcaugucuuugccuauaga

SEQ ID NO: 1125282 - RNA, 19 nt, Homo sapiens
  misc_RNA (1)...(19): siRNA sense strand
guggaaaguucaucacaca

SEQ ID NO: 1125283 - RNA, 19 nt, Homo sapiens
  misc_RNA (1)...(19): siRNA sense strand
cagaauguagcuccagaua

SEQ ID NO: 1125284 - RNA, 19 nt, Homo sapiens
  misc_RNA (1)...(19): siRNA sense strand
gagccagcauggauacugu

SEQ ID NO: 1125285 - RNA, 19 nt, Homo sapiens
  misc_RNA (1)...(19): siRNA sense strand
ugaaggaaccuguacagau

SEQ ID NO: 1125286 - RNA, 19 nt, Homo sapiens
  misc_RNA (1)...(19): siRNA sense strand
cagcaggauugugcaguuu

SEQ ID NO: 1125287 - RNA, 19 nt, Homo sapiens
  misc_RNA (1)...(19): siRNA sense strand
caaguuuguuuaccagcaa

SEQ ID NO: 1125288 - RNA, 19 nt, Homo sapiens
  misc_RNA (1)...(19): siRNA sense strand
caauucccgugaagucuga

SEQ ID NO: 1125289 - RNA, 19 nt, Homo sapiens
  misc_RNA (1)...(19): siRNA sense strand
gcacgucuagugaugaaau

SEQ ID NO: 1125290 - RNA, 19 nt, Homo sapiens
  misc_RNA (1)...(19): siRNA sense strand
gggcagugaccaagagaaa

SEQ ID NO: 1125291 - RNA, 19 nt, Homo sapiens
  misc_RNA (1)...(19): siRNA sense strand
gcauucaucauuuggaaga

SEQ ID NO: 1125292 - RNA, 19 nt, Homo sapiens
  misc_RNA (1)...(19): siRNA sense strand
ggaaaguucaucacacagu

SEQ ID NO: 1125293 - RNA, 19 nt, Homo sapiens
  misc_RNA (1)...(19): siRNA sense strand
ccaagcaugcaguuucuuu

SEQ ID NO: 1125294 - RNA, 19 nt, Homo sapiens
  misc_RNA (1)...(19): siRNA sense strand
gugaugaaaugugcaacuu

SEQ ID NO: 1125295 - RNA, 19 nt, Homo sapiens
  misc_RNA (1)...(19): siRNA sense strand
guccaucacauguuacuuu

SEQ ID NO: 1125296 - RNA, 19 nt, Homo sapiens
  misc_RNA (1)...(19): siRNA sense strand
auaccaggcuugcucuuug

SEQ ID NO: 1125297 - RNA, 19 nt, Homo sapiens
  misc_RNA (1)...(19): siRNA sense strand
ccuacuggcugcaagaugu

SEQ ID NO: 1125298 - RNA, 19 nt, Homo sapiens
  misc_RNA (1)...(19): siRNA sense strand
uacuguccaucacauguua

SEQ ID NO: 1125299 - RNA, 19 nt, Homo sapiens
  misc_RNA (1)...(19): siRNA sense strand
gcgcaagcacuuugauaug

SEQ ID NO: 1125300 - RNA, 19 nt, Homo sapiens
  misc_RNA (1)...(19): siRNA sense strand
gcuugaguauagauaaaga

SEQ ID NO: 1125301 - RNA, 19 nt, Homo sapiens
  misc_RNA (1)...(19): siRNA sense strand
aaauaaugcugcaguacuc

SEQ ID NO: 1125302 - RNA, 19 nt, Homo sapiens
  misc_RNA (1)...(19): siRNA sense strand
gcugcaagauguguauuca

SEQ ID NO: 1125303 - RNA, 19 nt, Homo sapiens
  misc_RNA (1)...(19): siRNA sense strand
guaagguaguaaguggaua

SEQ ID NO: 1125304 - RNA, 19 nt, Homo sapiens
  misc_RNA (1)...(19): siRNA sense strand
acagauaaagccaauauuc

SEQ ID NO: 1125305 - RNA, 19 nt, Homo sapiens
  misc_RNA (1)...(19): siRNA sense strand
guggugaauucugacauuu

SEQ ID NO: 1125306 - RNA, 19 nt, Homo sapiens
  misc_RNA (1)...(19): siRNA sense strand
gagaagaagaagaaguguu

SEQ ID NO: 1125307 - RNA, 19 nt, Homo sapiens
  misc_RNA (1)...(19): siRNA sense strand
acacucaccauuuagguaa

SEQ ID NO: 1125308 - RNA, 19 nt, Homo sapiens
  misc_RNA (1)...(19): siRNA sense strand
aggagagacuggaaguaaa

SEQ ID NO: 1125309 - RNA, 19 nt, Homo sapiens
  misc_RNA (1)...(19): siRNA sense strand
gugaugaacuuuuccaaug

SEQ ID NO: 1125310 - RNA, 19 nt, Homo sapiens
  misc_RNA (1)...(19): siRNA sense strand
aagcauucaucauuuggaa

SEQ ID NO: 1125311 - RNA, 19 nt, Homo sapiens
  misc_RNA (1)...(19): siRNA sense strand
gaagucugauaugguuaug

SEQ ID NO: 1125312 - RNA, 19 nt, Homo sapiens
  misc_RNA (1)...(19): siRNA sense strand
gguggcacgucuagugaug

SEQ ID NO: 1125313 - RNA, 19 nt, Homo sapiens
  misc_RNA (1)...(19): siRNA sense strand
ugacauuucaugccauuau

SEQ ID NO: 1125314 - RNA, 19 nt, Homo sapiens
  misc_RNA (1)...(19): siRNA sense strand
gagagacuggaaguaaaua

SEQ ID NO: 1125315 - RNA, 19 nt, Homo sapiens
  misc_RNA (1)...(19): siRNA sense strand
cacuggaaguuacugguuu

SEQ ID NO: 1125316 - RNA, 19 nt, Homo sapiens
  misc_RNA (1)...(19): siRNA sense strand
ggucggauccaguguuuua

SEQ ID NO: 1125317 - RNA, 19 nt, Homo sapiens
  misc_RNA (1)...(19): siRNA sense strand
ggacucggaccaauugaag

SEQ ID NO: 1125318 - RNA, 19 nt, Homo sapiens
  misc_RNA (1)...(19): siRNA sense strand
ugaugaaaugugcaacuua

SEQ ID NO: 1125319 - RNA, 19 nt, Homo sapiens
  misc_RNA (1)...(19): siRNA sense strand
aguucacacucaccauuua

SEQ ID NO: 1125320 - RNA, 19 nt, Homo sapiens
  misc_RNA (1)...(19): siRNA sense strand
uuugauaugccucaugaua

SEQ ID NO: 1125321 - RNA, 19 nt, Homo sapiens
  misc_RNA (1)...(19): siRNA sense strand
ggaaguuacugguuuugug

SEQ ID NO: 1125322 - RNA, 19 nt, Homo sapiens
  misc_RNA (1)...(19): siRNA sense strand
uggcuugaguauagauaaa

SEQ ID NO: 1125323 - RNA, 19 nt, Homo sapiens
  misc_RNA (1)...(19): siRNA sense strand
guguggaaguucaccuuga

SEQ ID NO: 1125324 - RNA, 19 nt, Homo sapiens
  misc_RNA (1)...(19): siRNA sense strand
aaucagaagaggaguauuc

SEQ ID NO: 1125325 - RNA, 19 nt, Homo sapiens
  misc_RNA (1)...(19): siRNA sense strand
ucaccuugacugagaaauu

SEQ ID NO: 1125326 - RNA, 19 nt, Homo sapiens
  misc_RNA (1)...(19): siRNA sense strand
gaaggaaccuguacagaua

SEQ ID NO: 1125327 - RNA, 19 nt, Homo sapiens
  misc_RNA (1)...(19): siRNA sense strand
gaauguagcuccagauaug

SEQ ID NO: 1125328 - RNA, 19 nt, Homo sapiens
  misc_RNA (1)...(19): siRNA sense strand
uaaagaaggcccuguauua

SEQ ID NO: 1125329 - RNA, 19 nt, Homo sapiens
  misc_RNA (1)...(19): siRNA sense strand
ccacauggcuugaguauag

SEQ ID NO: 1125330 - RNA, 19 nt, Homo sapiens
  misc_RNA (1)...(19): siRNA sense strand
gaaagaggaugauggaagu

SEQ ID NO: 1125331 - RNA, 19 nt, Homo sapiens
  misc_RNA (1)...(19): siRNA sense strand
guaaguggauacagaguaa

SEQ ID NO: 1125332 - RNA, 19 nt, Homo sapiens
  misc_RNA (1)...(19): siRNA sense strand
ccaagaaccuguacaagga

SEQ ID NO: 1125333 - RNA, 19 nt, Homo sapiens
  misc_RNA (1)...(19): siRNA sense strand
gcuuaaaccuugguaauuu

SEQ ID NO: 1125334 - RNA, 19 nt, Homo sapiens
  misc_RNA (1)...(19): siRNA sense strand
gaugaaaugugcaacuuau

SEQ ID NO: 1125335 - RNA, 19 nt, Homo sapiens
  misc_RNA (1)...(19): siRNA sense strand
ugagagagauuaagcauuc

SEQ ID NO: 1125336 - RNA, 19 nt, Homo sapiens
  misc_RNA (1)...(19): siRNA sense strand
gaacaucgaucaguuaaaa

SEQ ID NO: 1125337 - RNA, 19 nt, Homo sapiens
  misc_RNA (1)...(19): siRNA sense strand
aaagggaaguggaggcuua

SEQ ID NO: 1125338 - RNA, 19 nt, Homo sapiens
  misc_RNA (1)...(19): siRNA sense strand
gcauugagguccaggaaau

SEQ ID NO: 1125339 - RNA, 19 nt, Homo sapiens
  misc_RNA (1)...(19): siRNA sense strand
gguaguaaguggauacaga

SEQ ID NO: 1125340 - RNA, 19 nt, Homo sapiens
  misc_RNA (1)...(19): siRNA sense strand
agaagaagaagaaguguua

SEQ ID NO: 1125341 - RNA, 19 nt, Homo sapiens
  misc_RNA (1)...(19): siRNA sense strand
caaacuggauccaaacaau

SEQ ID NO: 1125342 - RNA, 19 nt, Homo sapiens
  misc_RNA (1)...(19): siRNA sense strand
gaaauuggaacaucgauca

SEQ ID NO: 1125343 - RNA, 19 nt, Homo sapiens
  misc_RNA (1)...(19): siRNA sense strand
gacauuucaugccauuaua

SEQ ID NO: 1125344 - RNA, 19 nt, Homo sapiens
  misc_RNA (1)...(19): siRNA sense strand
gcauguaccuuaugauguc

SEQ ID NO: 1125345 - RNA, 19 nt, Homo sapiens
  misc_RNA (1)...(19): siRNA sense strand
ccacagaggugaccauguc

SEQ ID NO: 1125346 - RNA, 19 nt, Homo sapiens
  misc_RNA (1)...(19): siRNA sense strand
gguguuggauucagaguug

SEQ ID NO: 1125347 - RNA, 19 nt, Homo sapiens
  misc_RNA (1)...(19): siRNA sense strand
gaggagagacuggaaguaa

SEQ ID NO: 1125348 - RNA, 19 nt, Homo sapiens
  misc_RNA (1)...(19): siRNA sense strand
guacagauaaagccaauau

SEQ ID NO: 1125349 - RNA, 19 nt, Homo sapiens
  misc_RNA (1)...(19): siRNA sense strand
gacagaagccacacacauu

SEQ ID NO: 1125350 - RNA, 19 nt, Homo sapiens
  misc_RNA (1)...(19): siRNA sense strand
cuaaacaguccgauacaua

SEQ ID NO: 1125351 - RNA, 19 nt, Homo sapiens
  misc_RNA (1)...(19): siRNA sense strand
aaacugacaccaaagaauu

SEQ ID NO: 1125352 - RNA, 19 nt, Homo sapiens
  misc_RNA (1)...(19): siRNA sense strand
aaagaaggcccuguauuaa

SEQ ID NO: 1125353 - RNA, 19 nt, Homo sapiens
  misc_RNA (1)...(19): siRNA sense strand
ggauuggccuggaguauac

SEQ ID NO: 1125354 - RNA, 19 nt, Homo sapiens
  misc_RNA (1)...(19): siRNA sense strand
caaagguguuggauucaga

SEQ ID NO: 1125355 - RNA, 19 nt, Homo sapiens
  misc_RNA (1)...(19): siRNA sense strand
agaaggcccuguauuaauc

SEQ ID NO: 1125356 - RNA, 19 nt, Homo sapiens
  misc_RNA (1)...(19): siRNA sense strand
ccauuuagguaagguagua

SEQ ID NO: 1125357 - RNA, 19 nt, Homo sapiens
  misc_RNA (1)...(19): siRNA sense strand
ggauacagaguaagaaaug

SEQ ID NO: 1125358 - RNA, 19 nt, Homo sapiens
  misc_RNA (1)...(19): siRNA sense strand
gcacuggagccauuuaugu

SEQ ID NO: 1125359 - RNA, 19 nt, Homo sapiens
  misc_RNA (1)...(19): siRNA sense strand
agaauaaccuggugauuuu

SEQ ID NO: 1125360 - RNA, 19 nt, Homo sapiens
  misc_RNA (1)...(19): siRNA sense strand
cguaagggcuacagucgaa

SEQ ID NO: 1125361 - RNA, 19 nt, Homo sapiens
  misc_RNA (1)...(19): siRNA sense strand
ccucacagcuuggcucuug

SEQ ID NO: 1125362 - RNA, 19 nt, Homo sapiens
  misc_RNA (1)...(19): siRNA sense strand
gcagugaccaagagaaaga

SEQ ID NO: 1125363 - RNA, 19 nt, Homo sapiens
  misc_RNA (1)...(19): siRNA sense strand
cgugaagucugauaugguu

SEQ ID NO: 1125364 - RNA, 19 nt, Homo sapiens
  misc_RNA (1)...(19): siRNA sense strand
ggaccaagaaccuguacaa

SEQ ID NO: 1125365 - RNA, 19 nt, Homo sapiens
  misc_RNA (1)...(19): siRNA sense strand
gaauuugugagagagauua

SEQ ID NO: 1125366 - RNA, 19 nt, Homo sapiens
  misc_RNA (1)...(19): siRNA sense strand
caauaaagaaggcccugua

SEQ ID NO: 1125367 - RNA, 19 nt, Homo sapiens
  misc_RNA (1)...(19): siRNA sense strand
aagaauaaccuggugauuu

SEQ ID NO: 1125368 - RNA, 19 nt, Homo sapiens
  misc_RNA (1)...(19): siRNA sense strand
ggagagacuggaaguaaau

SEQ ID NO: 1125369 - RNA, 19 nt, Homo sapiens
  misc_RNA (1)...(19): siRNA sense strand
gauaagauuccuuuacuac

SEQ ID NO: 1125370 - RNA, 19 nt, Homo sapiens
  misc_RNA (1)...(19): siRNA sense strand
ggacagaagccacacacau

SEQ ID NO: 1125371 - RNA, 19 nt, Homo sapiens
  misc_RNA (1)...(19): siRNA sense strand
gaaacuaccagaccauuuu

SEQ ID NO: 1125372 - RNA, 19 nt, Homo sapiens
  misc_RNA (1)...(19): siRNA sense strand
gcuggcauguaccuuauga

SEQ ID NO: 1125373 - RNA, 19 nt, Homo sapiens
  misc_RNA (1)...(19): siRNA sense strand
caccuugacugagaaauug

SEQ ID NO: 1125374 - RNA, 19 nt, Homo sapiens
  misc_RNA (1)...(19): siRNA sense strand
aaacuggauccaaacaaua

SEQ ID NO: 1125375 - RNA, 19 nt, Homo sapiens
  misc_RNA (1)...(19): siRNA sense strand
ggaauuauugggucacaga

SEQ ID NO: 1125376 - RNA, 19 nt, Homo sapiens
  misc_RNA (1)...(19): siRNA sense strand
gaaaugugcaacuuauaca

SEQ ID NO: 1125377 - RNA, 19 nt, Homo sapiens
  misc_RNA (1)...(19): siRNA sense strand
gauaaagccaauauucugu

SEQ ID NO: 1125378 - RNA, 19 nt, Homo sapiens
  misc_RNA (1)...(19): siRNA sense strand
gaagcccacuuucugucuu

SEQ ID NO: 1125379 - RNA, 19 nt, Homo sapiens
  misc_RNA (1)...(19): siRNA sense strand
ggaaguucaccuugacuga

SEQ ID NO: 1125380 - RNA, 19 nt, Homo sapiens
  misc_RNA (1)...(19): siRNA sense strand
uaagauuccuuuacuacag

SEQ ID NO: 1125381 - RNA, 19 nt, Homo sapiens
  misc_RNA (1)...(19): siRNA sense strand
gcaugucuuugccuauaga

SEQ ID NO: 1125382 - RNA, 19 nt, Homo sapiens
  misc_RNA (1)...(19): siRNA sense strand
guggaaaguucaucacaca

SEQ ID NO: 1125383 - RNA, 19 nt, Homo sapiens
  misc_RNA (1)...(19): siRNA sense strand
cagaauguagcuccagaua

SEQ ID NO: 1125384 - RNA, 19 nt, Homo sapiens
  misc_RNA (1)...(19): siRNA sense strand
gagccagcauggauacugu

SEQ ID NO: 1125385 - RNA, 19 nt, Homo sapiens
  misc_RNA (1)...(19): siRNA sense strand
ugaaggaaccuguacagau

SEQ ID NO: 1125386 - RNA, 19 nt, Homo sapiens
  misc_RNA (1)...(19): siRNA sense strand
cagcaggauugugcaguuu

SEQ ID NO: 1125387 - RNA, 19 nt, Homo sapiens
  misc_RNA (1)...(19): siRNA sense strand
caaguuuguuuaccagcaa

SEQ ID NO: 1125388 - RNA, 19 nt, Homo sapiens
  misc_RNA (1)...(19): siRNA sense strand
caauucccgugaagucuga

SEQ ID NO: 1125389 - RNA, 19 nt, Homo sapiens
  misc_RNA (1)...(19): siRNA sense strand
gcacgucuagugaugaaau

SEQ ID NO: 1125390 - RNA, 19 nt, Homo sapiens
  misc_RNA (1)...(19): siRNA sense strand
gggcagugaccaagagaaa

SEQ ID NO: 1125391 - RNA, 19 nt, Homo sapiens
  misc_RNA (1)...(19): siRNA sense strand
gcauucaucauuuggaaga

SEQ ID NO: 1125392 - RNA, 19 nt, Homo sapiens
  misc_RNA (1)...(19): siRNA sense strand
ggaaaguucaucacacagu

SEQ ID NO: 1125393 - RNA, 19 nt, Homo sapiens
  misc_RNA (1)...(19): siRNA sense strand
ccaagcaugcaguuucuuu

SEQ ID NO: 1125394 - RNA, 19 nt, Homo sapiens
  misc_RNA (1)...(19): siRNA sense strand
gugaugaaaugugcaacuu

SEQ ID NO: 1125395 - RNA, 19 nt, Homo sapiens
  misc_RNA (1)...(19): siRNA sense strand
guccaucacauguuacuuu

SEQ ID NO: 1125396 - RNA, 19 nt, Homo sapiens
  misc_RNA (1)...(19): siRNA sense strand
auaccaggcuugcucuuug

SEQ ID NO: 1125397 - RNA, 19 nt, Homo sapiens
  misc_RNA (1)...(19): siRNA sense strand
ccuacuggcugcaagaugu

SEQ ID NO: 1125398 - RNA, 19 nt, Homo sapiens
  misc_RNA (1)...(19): siRNA sense strand
uacuguccaucacauguua

SEQ ID NO: 1125399 - RNA, 19 nt, Homo sapiens
  misc_RNA (1)...(19): siRNA sense strand
gcgcaagcacuuugauaug

SEQ ID NO: 1125400 - RNA, 19 nt, Homo sapiens
  misc_RNA (1)...(19): siRNA sense strand
gcuugaguauagauaaaga

SEQ ID NO: 1125401 - RNA, 19 nt, Homo sapiens
  misc_RNA (1)...(19): siRNA sense strand
aaauaaugcugcaguacuc

SEQ ID NO: 1125402 - RNA, 19 nt, Homo sapiens
  misc_RNA (1)...(19): siRNA sense strand
gcugcaagauguguauuca

SEQ ID NO: 1125403 - RNA, 19 nt, Homo sapiens
  misc_RNA (1)...(19): siRNA sense strand
guaagguaguaaguggaua

SEQ ID NO: 1125404 - RNA, 19 nt, Homo sapiens
  misc_RNA (1)...(19): siRNA sense strand
acagauaaagccaauauuc

SEQ ID NO: 1125405 - RNA, 19 nt, Homo sapiens
  misc_RNA (1)...(19): siRNA sense strand
guggugaauucugacauuu

SEQ ID NO: 1125406 - RNA, 19 nt, Homo sapiens
  misc_RNA (1)...(19): siRNA sense strand
gagaagaagaagaaguguu

SEQ ID NO: 1125407 - RNA, 19 nt, Homo sapiens
  misc_RNA (1)...(19): siRNA sense strand
acacucaccauuuagguaa

SEQ ID NO: 1125408 - RNA, 19 nt, Homo sapiens
  misc_RNA (1)...(19): siRNA sense strand
aggagagacuggaaguaaa

SEQ ID NO: 1125409 - RNA, 19 nt, Homo sapiens
  misc_RNA (1)...(19): siRNA sense strand
gugaugaacuuuuccaaug

SEQ ID NO: 1125410 - RNA, 19 nt, Homo sapiens
  misc_RNA (1)...(19): siRNA sense strand
aagcauucaucauuuggaa

SEQ ID NO: 1125411 - RNA, 19 nt, Homo sapiens
  misc_RNA (1)...(19): siRNA sense strand
gaagucugauaugguuaug

SEQ ID NO: 1125412 - RNA, 19 nt, Homo sapiens
  misc_RNA (1)...(19): siRNA sense strand
gguggcacgucuagugaug

SEQ ID NO: 1125413 - RNA, 19 nt, Homo sapiens
  misc_RNA (1)...(19): siRNA sense strand
ugacauuucaugccauuau

SEQ ID NO: 1125414 - RNA, 19 nt, Homo sapiens
  misc_RNA (1)...(19): siRNA sense strand
gagagacuggaaguaaaua

SEQ ID NO: 1125415 - RNA, 19 nt, Homo sapiens
  misc_RNA (1)...(19): siRNA sense strand
cacuggaaguuacugguuu

SEQ ID NO: 1125416 - RNA, 19 nt, Homo sapiens
  misc_RNA (1)...(19): siRNA sense strand
ggucggauccaguguuuua

SEQ ID NO: 1125417 - RNA, 19 nt, Homo sapiens
  misc_RNA (1)...(19): siRNA sense strand
ggacucggaccaauugaag

SEQ ID NO: 1125418 - RNA, 19 nt, Homo sapiens
  misc_RNA (1)...(19): siRNA sense strand
ugaugaaaugugcaacuua

SEQ ID NO: 1125419 - RNA, 19 nt, Homo sapiens
  misc_RNA (1)...(19): siRNA sense strand
aguucacacucaccauuua

SEQ ID NO: 1125420 - RNA, 19 nt, Homo sapiens
  misc_RNA (1)...(19): siRNA sense strand
uuugauaugccucaugaua

SEQ ID NO: 1125421 - RNA, 19 nt, Homo sapiens
  misc_RNA (1)...(19): siRNA sense strand
ggaaguuacugguuuugug

SEQ ID NO: 1125422 - RNA, 19 nt, Homo sapiens
  misc_RNA (1)...(19): siRNA sense strand
uggcuugaguauagauaaa

SEQ ID NO: 1125423 - RNA, 19 nt, Homo sapiens
  misc_RNA (1)...(19): siRNA sense strand
guguggaaguucaccuuga

SEQ ID NO: 1125424 - RNA, 19 nt, Homo sapiens
  misc_RNA (1)...(19): siRNA sense strand
aaucagaagaggaguauuc

SEQ ID NO: 1125425 - RNA, 19 nt, Homo sapiens
  misc_RNA (1)...(19): siRNA sense strand
ucaccuugacugagaaauu

SEQ ID NO: 1125426 - RNA, 19 nt, Homo sapiens
  misc_RNA (1)...(19): siRNA sense strand
gaaggaaccuguacagaua

SEQ ID NO: 1125427 - RNA, 19 nt, Homo sapiens
  misc_RNA (1)...(19): siRNA sense strand
gaauguagcuccagauaug

SEQ ID NO: 1125428 - RNA, 19 nt, Homo sapiens
  misc_RNA (1)...(19): siRNA sense strand
uaaagaaggcccuguauua

SEQ ID NO: 1125429 - RNA, 19 nt, Homo sapiens
  misc_RNA (1)...(19): siRNA sense strand
ccacauggcuugaguauag

SEQ ID NO: 1125430 - RNA, 19 nt, Homo sapiens
  misc_RNA (1)...(19): siRNA sense strand
gaaagaggaugauggaagu

SEQ ID NO: 1125431 - RNA, 19 nt, Homo sapiens
  misc_RNA (1)...(19): siRNA sense strand
guaaguggauacagaguaa

SEQ ID NO: 1125432 - RNA, 19 nt, Homo sapiens
  misc_RNA (1)...(19): siRNA sense strand
ccaagaaccuguacaagga

SEQ ID NO: 1125433 - RNA, 19 nt, Homo sapiens
  misc_RNA (1)...(19): siRNA sense strand
gcuuaaaccuugguaauuu

SEQ ID NO: 1125434 - RNA, 19 nt, Homo sapiens
  misc_RNA (1)...(19): siRNA sense strand
gaugaaaugugcaacuuau

SEQ ID NO: 1125435 - RNA, 19 nt, Homo sapiens
  misc_RNA (1)...(19): siRNA sense strand
ugagagagauuaagcauuc

SEQ ID NO: 1125436 - RNA, 19 nt, Homo sapiens
  misc_RNA (1)...(19): siRNA sense strand
gaacaucgaucaguuaaaa

SEQ ID NO: 1125437 - RNA, 19 nt, Homo sapiens
  misc_RNA (1)...(19): siRNA sense strand
aaagggaaguggaggcuua

SEQ ID NO: 1125438 - RNA, 19 nt, Homo sapiens
  misc_RNA (1)...(19): siRNA sense strand
gcauugagguccaggaaau

SEQ ID NO: 1125439 - RNA, 19 nt, Homo sapiens
  misc_RNA (1)...(19): siRNA sense strand
gguaguaaguggauacaga

SEQ ID NO: 1125440 - RNA, 19 nt, Homo sapiens
  misc_RNA (1)...(19): siRNA sense strand
agaagaagaagaaguguua

SEQ ID NO: 1125441 - RNA, 19 nt, Homo sapiens
  misc_RNA (1)...(19): siRNA sense strand
caaacuggauccaaacaau

SEQ ID NO: 1125442 - RNA, 19 nt, Homo sapiens
  misc_RNA (1)...(19): siRNA sense strand
gaaauuggaacaucgauca

SEQ ID NO: 1125443 - RNA, 19 nt, Homo sapiens
  misc_RNA (1)...(19): siRNA sense strand
gacauuucaugccauuaua

SEQ ID NO: 1125444 - RNA, 19 nt, Homo sapiens
  misc_RNA (1)...(19): siRNA sense strand
gcauguaccuuaugauguc

SEQ ID NO: 1125445 - RNA, 19 nt, Homo sapiens
  misc_RNA (1)...(19): siRNA sense strand
ccacagaggugaccauguc

SEQ ID NO: 1125446 - RNA, 19 nt, Homo sapiens
  misc_RNA (1)...(19): siRNA sense strand
gguguuggauucagaguug

SEQ ID NO: 1125447 - RNA, 19 nt, Homo sapiens
  misc_RNA (1)...(19): siRNA sense strand
gaggagagacuggaaguaa

SEQ ID NO: 1125448 - RNA, 19 nt, Homo sapiens
  misc_RNA (1)...(19): siRNA sense strand
guacagauaaagccaauau

SEQ ID NO: 1125449 - RNA, 19 nt, Homo sapiens
  misc_RNA (1)...(19): siRNA sense strand
gacagaagccacacacauu

SEQ ID NO: 1125450 - RNA, 19 nt, Homo sapiens
  misc_RNA (1)...(19): siRNA sense strand
cuaaacaguccgauacaua

SEQ ID NO: 1125451 - RNA, 19 nt, Homo sapiens
  misc_RNA (1)...(19): siRNA sense strand
aaacugacaccaaagaauu

SEQ ID NO: 1125452 - RNA, 19 nt, Homo sapiens
  misc_RNA (1)...(19): siRNA sense strand
aaagaaggcccuguauuaa

SEQ ID NO: 1125453 - RNA, 19 nt, Homo sapiens
  misc_RNA (1)...(19): siRNA sense strand
ggauuggccuggaguauac

SEQ ID NO: 1125454 - RNA, 19 nt, Homo sapiens
  misc_RNA (1)...(19): siRNA sense strand
caaagguguuggauucaga

SEQ ID NO: 1125455 - RNA, 19 nt, Homo sapiens
  misc_RNA (1)...(19): siRNA sense strand
agaaggcccuguauuaauc

SEQ ID NO: 1125456 - RNA, 19 nt, Homo sapiens
  misc_RNA (1)...(19): siRNA sense strand
ccauuuagguaagguagua

SEQ ID NO: 1125457 - RNA, 19 nt, Homo sapiens
  misc_RNA (1)...(19): siRNA sense strand
ggauacagaguaagaaaug

SEQ ID NO: 1125458 - RNA, 19 nt, Homo sapiens
  misc_RNA (1)...(19): siRNA sense strand
gcacuggagccauuuaugu

SEQ ID NO: 1125459 - RNA, 19 nt, Homo sapiens
  misc_RNA (1)...(19): siRNA sense strand
agaauaaccuggugauuuu

SEQ ID NO: 1125460 - RNA, 19 nt, Homo sapiens
  misc_RNA (1)...(19): siRNA sense strand
cguaagggcuacagucgaa

SEQ ID NO: 1125461 - RNA, 19 nt, Homo sapiens
  misc_RNA (1)...(19): siRNA sense strand
ccucacagcuuggcucuug

SEQ ID NO: 1125462 - RNA, 19 nt, Homo sapiens
  misc_RNA (1)...(19): siRNA sense strand
gcagugaccaagagaaaga

SEQ ID NO: 1125463 - RNA, 19 nt, Homo sapiens
  misc_RNA (1)...(19): siRNA sense strand
cgugaagucugauaugguu

SEQ ID NO: 1125464 - RNA, 19 nt, Homo sapiens
  misc_RNA (1)...(19): siRNA sense strand
ggaccaagaaccuguacaa

SEQ ID NO: 1125465 - RNA, 19 nt, Homo sapiens
  misc_RNA (1)...(19): siRNA sense strand
gaauuugugagagagauua

SEQ ID NO: 1125466 - RNA, 19 nt, Homo sapiens
  misc_RNA (1)...(19): siRNA sense strand
caauaaagaaggcccugua

SEQ ID NO: 1125467 - RNA, 19 nt, Homo sapiens
  misc_RNA (1)...(19): siRNA sense strand
aagaauaaccuggugauuu

SEQ ID NO: 1125468 - RNA, 19 nt, Homo sapiens
  misc_RNA (1)...(19): siRNA sense strand
ggagagacuggaaguaaau

SEQ ID NO: 1125469 - RNA, 19 nt, Homo sapiens
  misc_RNA (1)...(19): siRNA sense strand
gauaagauuccuuuacuac

SEQ ID NO: 1125470 - RNA, 19 nt, Homo sapiens
  misc_RNA (1)...(19): siRNA sense strand
ggacagaagccacacacau

SEQ ID NO: 1125471 - RNA, 19 nt, Homo sapiens
  misc_RNA (1)...(19): siRNA sense strand
gaaacuaccagaccauuuu

SEQ ID NO: 1125472 - RNA, 19 nt, Homo sapiens
  misc_RNA (1)...(19): siRNA sense strand
gcuggcauguaccuuauga

SEQ ID NO: 1125473 - RNA, 19 nt, Homo sapiens
  misc_RNA (1)...(19): siRNA sense strand
caccuugacugagaaauug

SEQ ID NO: 1125474 - RNA, 19 nt, Homo sapiens
  misc_RNA (1)...(19): siRNA sense strand
aaacuggauccaaacaaua

SEQ ID NO: 1125475 - RNA, 19 nt, Homo sapiens
  misc_RNA (1)...(19): siRNA sense strand
ggaauuauugggucacaga

SEQ ID NO: 1125476 - RNA, 19 nt, Homo sapiens
  misc_RNA (1)...(19): siRNA sense strand
gaaaugugcaacuuauaca

SEQ ID NO: 1125477 - RNA, 19 nt, Homo sapiens
  misc_RNA (1)...(19): siRNA sense strand
gauaaagccaauauucugu

SEQ ID NO: 1125478 - RNA, 19 nt, Homo sapiens
  misc_RNA (1)...(19): siRNA sense strand
gaagcccacuuucugucuu

SEQ ID NO: 1125479 - RNA, 19 nt, Homo sapiens
  misc_RNA (1)...(19): siRNA sense strand
ggaaguucaccuugacuga

SEQ ID NO: 1125480 - RNA, 19 nt, Homo sapiens
  misc_RNA (1)...(19): siRNA sense strand
uaagauuccuuuacuacag

SEQ ID NO: 1125481 - RNA, 19 nt, Homo sapiens
  misc_RNA (1)...(19): siRNA sense strand
gcaugucuuugccuauaga

SEQ ID NO: 1125482 - RNA, 19 nt, Homo sapiens
  misc_RNA (1)...(19): siRNA sense strand
guggaaaguucaucacaca

SEQ ID NO: 1125483 - RNA, 19 nt, Homo sapiens
  misc_RNA (1)...(19): siRNA sense strand
cagaauguagcuccagaua

SEQ ID NO: 1125484 - RNA, 19 nt, Homo sapiens
  misc_RNA (1)...(19): siRNA sense strand
gagccagcauggauacugu

SEQ ID NO: 1125485 - RNA, 19 nt, Homo sapiens
  misc_RNA (1)...(19): siRNA sense strand
ugaaggaaccuguacagau

SEQ ID NO: 1125486 - RNA, 19 nt, Homo sapiens
  misc_RNA (1)...(19): siRNA sense strand
cagcaggauugugcaguuu

SEQ ID NO: 1125487 - RNA, 19 nt, Homo sapiens
  misc_RNA (1)...(19): siRNA sense strand
caaguuuguuuaccagcaa

SEQ ID NO: 1125488 - RNA, 19 nt, Homo sapiens
  misc_RNA (1)...(19): siRNA sense strand
caauucccgugaagucuga

SEQ ID NO: 1125489 - RNA, 19 nt, Homo sapiens
  misc_RNA (1)...(19): siRNA sense strand
gcacgucuagugaugaaau

SEQ ID NO: 1125490 - RNA, 19 nt, Homo sapiens
  misc_RNA (1)...(19): siRNA sense strand
gggcagugaccaagagaaa

SEQ ID NO: 1125491 - RNA, 19 nt, Homo sapiens
  misc_RNA (1)...(19): siRNA sense strand
gcauucaucauuuggaaga

SEQ ID NO: 1125492 - RNA, 19 nt, Homo sapiens
  misc_RNA (1)...(19): siRNA sense strand
ggaaaguucaucacacagu

SEQ ID NO: 1125493 - RNA, 19 nt, Homo sapiens
  misc_RNA (1)...(19): siRNA sense strand
ccaagcaugcaguuucuuu

SEQ ID NO: 1125494 - RNA, 19 nt, Homo sapiens
  misc_RNA (1)...(19): siRNA sense strand
gugaugaaaugugcaacuu

SEQ ID NO: 1125495 - RNA, 19 nt, Homo sapiens
  misc_RNA (1)...(19): siRNA sense strand
guccaucacauguuacuuu

SEQ ID NO: 1125496 - RNA, 19 nt, Homo sapiens
  misc_RNA (1)...(19): siRNA sense strand
auaccaggcuugcucuuug

SEQ ID NO: 1125497 - RNA, 19 nt, Homo sapiens
  misc_RNA (1)...(19): siRNA sense strand
ccuacuggcugcaagaugu

SEQ ID NO: 1125498 - RNA, 19 nt, Homo sapiens
  misc_RNA (1)...(19): siRNA sense strand
uacuguccaucacauguua

SEQ ID NO: 1125499 - RNA, 19 nt, Homo sapiens
  misc_RNA (1)...(19): siRNA sense strand
gcgcaagcacuuugauaug

SEQ ID NO: 1125500 - RNA, 19 nt, Homo sapiens
  misc_RNA (1)...(19): siRNA sense strand
gcuugaguauagauaaaga

SEQ ID NO: 1125501 - RNA, 19 nt, Homo sapiens
  misc_RNA (1)...(19): siRNA sense strand
aaauaaugcugcaguacuc

SEQ ID NO: 1125502 - RNA, 19 nt, Homo sapiens
  misc_RNA (1)...(19): siRNA sense strand
gcugcaagauguguauuca

SEQ ID NO: 1125503 - RNA, 19 nt, Homo sapiens
  misc_RNA (1)...(19): siRNA sense strand
guaagguaguaaguggaua

SEQ ID NO: 1125504 - RNA, 19 nt, Homo sapiens
  misc_RNA (1)...(19): siRNA sense strand
acagauaaagccaauauuc

SEQ ID NO: 1125505 - RNA, 19 nt, Homo sapiens
  misc_RNA (1)...(19): siRNA sense strand
guggugaauucugacauuu

SEQ ID NO: 1125506 - RNA, 19 nt, Homo sapiens
  misc_RNA (1)...(19): siRNA sense strand
gagaagaagaagaaguguu

SEQ ID NO: 1125507 - RNA, 19 nt, Homo sapiens
  misc_RNA (1)...(19): siRNA sense strand
acacucaccauuuagguaa

SEQ ID NO: 1125508 - RNA, 19 nt, Homo sapiens
  misc_RNA (1)...(19): siRNA sense strand
aggagagacuggaaguaaa

SEQ ID NO: 1125509 - RNA, 19 nt, Homo sapiens
  misc_RNA (1)...(19): siRNA sense strand
gugaugaacuuuuccaaug

SEQ ID NO: 1125510 - RNA, 19 nt, Homo sapiens
  misc_RNA (1)...(19): siRNA sense strand
aagcauucaucauuuggaa

SEQ ID NO: 1125511 - RNA, 19 nt, Homo sapiens
  misc_RNA (1)...(19): siRNA sense strand
gaagucugauaugguuaug

SEQ ID NO: 1125512 - RNA, 19 nt, Homo sapiens
  misc_RNA (1)...(19): siRNA sense strand
gguggcacgucuagugaug

SEQ ID NO: 1125513 - RNA, 19 nt, Homo sapiens
  misc_RNA (1)...(19): siRNA sense strand
ugacauuucaugccauuau

SEQ ID NO: 1125514 - RNA, 19 nt, Homo sapiens
  misc_RNA (1)...(19): siRNA sense strand
gagagacuggaaguaaaua

SEQ ID NO: 1125515 - RNA, 19 nt, Homo sapiens
  misc_RNA (1)...(19): siRNA sense strand
cacuggaaguuacugguuu

SEQ ID NO: 1125516 - RNA, 19 nt, Homo sapiens
  misc_RNA (1)...(19): siRNA sense strand
ggucggauccaguguuuua

SEQ ID NO: 1125517 - RNA, 19 nt, Homo sapiens
  misc_RNA (1)...(19): siRNA sense strand
ggacucggaccaauugaag

SEQ ID NO: 1125518 - RNA, 19 nt, Homo sapiens
  misc_RNA (1)...(19): siRNA sense strand
ugaugaaaugugcaacuua

SEQ ID NO: 1125519 - RNA, 19 nt, Homo sapiens
  misc_RNA (1)...(19): siRNA sense strand
aguucacacucaccauuua

SEQ ID NO: 1125520 - RNA, 19 nt, Homo sapiens
  misc_RNA (1)...(19): siRNA sense strand
uuugauaugccucaugaua

SEQ ID NO: 1125521 - RNA, 19 nt, Homo sapiens
  misc_RNA (1)...(19): siRNA sense strand
ggaaguuacugguuuugug

SEQ ID NO: 1125522 - RNA, 19 nt, Homo sapiens
  misc_RNA (1)...(19): siRNA sense strand
uggcuugaguauagauaaa

SEQ ID NO: 1125523 - RNA, 19 nt, Homo sapiens
  misc_RNA (1)...(19): siRNA sense strand
guguggaaguucaccuuga

SEQ ID NO: 1125524 - RNA, 19 nt, Homo sapiens
  misc_RNA (1)...(19): siRNA sense strand
aaucagaagaggaguauuc

SEQ ID NO: 1125525 - RNA, 19 nt, Homo sapiens
  misc_RNA (1)...(19): siRNA sense strand
ucaccuugacugagaaauu

SEQ ID NO: 1125526 - RNA, 19 nt, Homo sapiens
  misc_RNA (1)...(19): siRNA sense strand
gaaggaaccuguacagaua

SEQ ID NO: 1125527 - RNA, 19 nt, Homo sapiens
  misc_RNA (1)...(19): siRNA sense strand
gaauguagcuccagauaug

SEQ ID NO: 1125528 - RNA, 19 nt, Homo sapiens
  misc_RNA (1)...(19): siRNA sense strand
uaaagaaggcccuguauua

SEQ ID NO: 1125529 - RNA, 19 nt, Homo sapiens
  misc_RNA (1)...(19): siRNA sense strand
ccacauggcuugaguauag

SEQ ID NO: 1125530 - RNA, 19 nt, Homo sapiens
  misc_RNA (1)...(19): siRNA sense strand
gaaagaggaugauggaagu

SEQ ID NO: 1125531 - RNA, 19 nt, Homo sapiens
  misc_RNA (1)...(19): siRNA sense strand
guaaguggauacagaguaa

SEQ ID NO: 1125532 - RNA, 19 nt, Homo sapiens
  misc_RNA (1)...(19): siRNA sense strand
ccaagaaccuguacaagga

SEQ ID NO: 1125533 - RNA, 19 nt, Homo sapiens
  misc_RNA (1)...(19): siRNA sense strand
gcuuaaaccuugguaauuu

SEQ ID NO: 1125534 - RNA, 19 nt, Homo sapiens
  misc_RNA (1)...(19): siRNA sense strand
gaugaaaugugcaacuuau

SEQ ID NO: 1125535 - RNA, 19 nt, Homo sapiens
  misc_RNA (1)...(19): siRNA sense strand
ugagagagauuaagcauuc

SEQ ID NO: 1125536 - RNA, 19 nt, Homo sapiens
  misc_RNA (1)...(19): siRNA sense strand
gaacaucgaucaguuaaaa

SEQ ID NO: 1125537 - RNA, 19 nt, Homo sapiens
  misc_RNA (1)...(19): siRNA sense strand
aaagggaaguggaggcuua

SEQ ID NO: 1125538 - RNA, 19 nt, Homo sapiens
  misc_RNA (1)...(19): siRNA sense strand
gcauugagguccaggaaau

SEQ ID NO: 1125539 - RNA, 19 nt, Homo sapiens
  misc_RNA (1)...(19): siRNA sense strand
gguaguaaguggauacaga

SEQ ID NO: 1125540 - RNA, 19 nt, Homo sapiens
  misc_RNA (1)...(19): siRNA sense strand
agaagaagaagaaguguua

SEQ ID NO: 1125541 - RNA, 19 nt, Homo sapiens
  misc_RNA (1)...(19): siRNA sense strand
caaacuggauccaaacaau

SEQ ID NO: 1125542 - RNA, 19 nt, Homo sapiens
  misc_RNA (1)...(19): siRNA sense strand
gaaauuggaacaucgauca

SEQ ID NO: 1125543 - RNA, 19 nt, Homo sapiens
  misc_RNA (1)...(19): siRNA sense strand
gacauuucaugccauuaua

SEQ ID NO: 1125544 - RNA, 19 nt, Homo sapiens
  misc_RNA (1)...(19): siRNA sense strand
gcauguaccuuaugauguc

SEQ ID NO: 1125545 - RNA, 19 nt, Homo sapiens
  misc_RNA (1)...(19): siRNA sense strand
ccacagaggugaccauguc

SEQ ID NO: 1125546 - RNA, 19 nt, Homo sapiens
  misc_RNA (1)...(19): siRNA sense strand
gguguuggauucagaguug

SEQ ID NO: 1125547 - RNA, 19 nt, Homo sapiens
  misc_RNA (1)...(19): siRNA sense strand
gaggagagacuggaaguaa

SEQ ID NO: 1125548 - RNA, 19 nt, Homo sapiens
  misc_RNA (1)...(19): siRNA sense strand
guacagauaaagccaauau

SEQ ID NO: 1125549 - RNA, 19 nt, Homo sapiens
  misc_RNA (1)...(19): siRNA sense strand
gacagaagccacacacauu

SEQ ID NO: 1125550 - RNA, 19 nt, Homo sapiens
  misc_RNA (1)...(19): siRNA sense strand
cuaaacaguccgauacaua

SEQ ID NO: 1125551 - RNA, 19 nt, Homo sapiens
  misc_RNA (1)...(19): siRNA sense strand
aaacugacaccaaagaauu

SEQ ID NO: 1125552 - RNA, 19 nt, Homo sapiens
  misc_RNA (1)...(19): siRNA sense strand
aaagaaggcccuguauuaa

SEQ ID NO: 1125553 - RNA, 19 nt, Homo sapiens
  misc_RNA (1)...(19): siRNA sense strand
ggauuggccuggaguauac

SEQ ID NO: 1125554 - RNA, 19 nt, Homo sapiens
  misc_RNA (1)...(19): siRNA sense strand
caaagguguuggauucaga

SEQ ID NO: 1125555 - RNA, 19 nt, Homo sapiens
  misc_RNA (1)...(19): siRNA sense strand
agaaggcccuguauuaauc

SEQ ID NO: 1125556 - RNA, 19 nt, Homo sapiens
  misc_RNA (1)...(19): siRNA sense strand
ccauuuagguaagguagua

SEQ ID NO: 1125557 - RNA, 19 nt, Homo sapiens
  misc_RNA (1)...(19): siRNA sense strand
ggauacagaguaagaaaug

SEQ ID NO: 1125558 - RNA, 19 nt, Homo sapiens
  misc_RNA (1)...(19): siRNA sense strand
gcacuggagccauuuaugu

SEQ ID NO: 1125559 - RNA, 19 nt, Homo sapiens
  misc_RNA (1)...(19): siRNA sense strand
agaauaaccuggugauuuu

SEQ ID NO: 1125560 - RNA, 19 nt, Homo sapiens
  misc_RNA (1)...(19): siRNA sense strand
cguaagggcuacagucgaa

SEQ ID NO: 1125561 - RNA, 19 nt, Homo sapiens
  misc_RNA (1)...(19): siRNA sense strand
ccucacagcuuggcucuug

SEQ ID NO: 1125562 - RNA, 19 nt, Homo sapiens
  misc_RNA (1)...(19): siRNA sense strand
gcagugaccaagagaaaga

SEQ ID NO: 1125563 - RNA, 19 nt, Homo sapiens
  misc_RNA (1)...(19): siRNA sense strand
cgugaagucugauaugguu

SEQ ID NO: 1125564 - RNA, 19 nt, Homo sapiens
  misc_RNA (1)...(19): siRNA sense strand
ggaccaagaaccuguacaa

SEQ ID NO: 1125565 - RNA, 19 nt, Homo sapiens
  misc_RNA (1)...(19): siRNA sense strand
gaauuugugagagagauua

SEQ ID NO: 1125566 - RNA, 19 nt, Homo sapiens
  misc_RNA (1)...(19): siRNA sense strand
caauaaagaaggcccugua

SEQ ID NO: 1125567 - RNA, 19 nt, Homo sapiens
  misc_RNA (1)...(19): siRNA sense strand
aagaauaaccuggugauuu

SEQ ID NO: 1125568 - RNA, 19 nt, Homo sapiens
  misc_RNA (1)...(19): siRNA sense strand
ggagagacuggaaguaaau

SEQ ID NO: 1125569 - RNA, 19 nt, Homo sapiens
  misc_RNA (1)...(19): siRNA sense strand
gauaagauuccuuuacuac

SEQ ID NO: 1125570 - RNA, 19 nt, Homo sapiens
  misc_RNA (1)...(19): siRNA sense strand
ggacagaagccacacacau

SEQ ID NO: 1125571 - RNA, 19 nt, Homo sapiens
  misc_RNA (1)...(19): siRNA sense strand
gaaacuaccagaccauuuu

SEQ ID NO: 1125572 - RNA, 19 nt, Homo sapiens
  misc_RNA (1)...(19): siRNA sense strand
gcuggcauguaccuuauga

SEQ ID NO: 1125573 - RNA, 19 nt, Homo sapiens
  misc_RNA (1)...(19): siRNA sense strand
caccuugacugagaaauug

SEQ ID NO: 1125574 - RNA, 19 nt, Homo sapiens
  misc_RNA (1)...(19): siRNA sense strand
aaacuggauccaaacaaua

SEQ ID NO: 1125575 - RNA, 19 nt, Homo sapiens
  misc_RNA (1)...(19): siRNA sense strand
ggaauuauugggucacaga

SEQ ID NO: 1125576 - RNA, 19 nt, Homo sapiens
  misc_RNA (1)...(19): siRNA sense strand
gaaaugugcaacuuauaca

SEQ ID NO: 1125577 - RNA, 19 nt, Homo sapiens
  misc_RNA (1)...(19): siRNA sense strand
gauaaagccaauauucugu

SEQ ID NO: 1125578 - RNA, 19 nt, Homo sapiens
  misc_RNA (1)...(19): siRNA sense strand
gaagcccacuuucugucuu

SEQ ID NO: 1125579 - RNA, 19 nt, Homo sapiens
  misc_RNA (1)...(19): siRNA sense strand
ggaaguucaccuugacuga

SEQ ID NO: 1125580 - RNA, 19 nt, Homo sapiens
  misc_RNA (1)...(19): siRNA sense strand
uaagauuccuuuacuacag

SEQ ID NO: 1125581 - RNA, 19 nt, Homo sapiens
  misc_RNA (1)...(19): siRNA sense strand
gcaugucuuugccuauaga

SEQ ID NO: 1125582 - RNA, 19 nt, Homo sapiens
  misc_RNA (1)...(19): siRNA sense strand
guggaaaguucaucacaca

SEQ ID NO: 1125583 - RNA, 19 nt, Homo sapiens
  misc_RNA (1)...(19): siRNA sense strand
cagaauguagcuccagaua

SEQ ID NO: 1125584 - RNA, 19 nt, Homo sapiens
  misc_RNA (1)...(19): siRNA sense strand
gagccagcauggauacugu

SEQ ID NO: 1125585 - RNA, 19 nt, Homo sapiens
  misc_RNA (1)...(19): siRNA sense strand
ugaaggaaccuguacagau

SEQ ID NO: 1125586 - RNA, 19 nt, Homo sapiens
  misc_RNA (1)...(19): siRNA sense strand
cagcaggauugugcaguuu

SEQ ID NO: 1125587 - RNA, 19 nt, Homo sapiens
  misc_RNA (1)...(19): siRNA sense strand
caaguuuguuuaccagcaa

SEQ ID NO: 1125588 - RNA, 19 nt, Homo sapiens
  misc_RNA (1)...(19): siRNA sense strand
caauucccgugaagucuga

SEQ ID NO: 1125589 - RNA, 19 nt, Homo sapiens
  misc_RNA (1)...(19): siRNA sense strand
gcacgucuagugaugaaau

SEQ ID NO: 1125590 - RNA, 19 nt, Homo sapiens
  misc_RNA (1)...(19): siRNA sense strand
gggcagugaccaagagaaa

SEQ ID NO: 1125591 - RNA, 19 nt, Homo sapiens
  misc_RNA (1)...(19): siRNA sense strand
gcauucaucauuuggaaga

SEQ ID NO: 1125592 - RNA, 19 nt, Homo sapiens
  misc_RNA (1)...(19): siRNA sense strand
ggaaaguucaucacacagu

SEQ ID NO: 1125593 - RNA, 19 nt, Homo sapiens
  misc_RNA (1)...(19): siRNA sense strand
ccaagcaugcaguuucuuu

SEQ ID NO: 1125594 - RNA, 19 nt, Homo sapiens
  misc_RNA (1)...(19): siRNA sense strand
gugaugaaaugugcaacuu

SEQ ID NO: 1125595 - RNA, 19 nt, Homo sapiens
  misc_RNA (1)...(19): siRNA sense strand
guccaucacauguuacuuu

SEQ ID NO: 1125596 - RNA, 19 nt, Homo sapiens
  misc_RNA (1)...(19): siRNA sense strand
auaccaggcuugcucuuug

SEQ ID NO: 1125597 - RNA, 19 nt, Homo sapiens
  misc_RNA (1)...(19): siRNA sense strand
ccuacuggcugcaagaugu

SEQ ID NO: 1125598 - RNA, 19 nt, Homo sapiens
  misc_RNA (1)...(19): siRNA sense strand
uacuguccaucacauguua

SEQ ID NO: 1125599 - RNA, 19 nt, Homo sapiens
  misc_RNA (1)...(19): siRNA sense strand
gcgcaagcacuuugauaug

SEQ ID NO: 1125600 - RNA, 19 nt, Homo sapiens
  misc_RNA (1)...(19): siRNA sense strand
gcuugaguauagauaaaga

SEQ ID NO: 1125601 - RNA, 19 nt, Homo sapiens
  misc_RNA (1)...(19): siRNA sense strand
aaauaaugcugcaguacuc

SEQ ID NO: 1125602 - RNA, 19 nt, Homo sapiens
  misc_RNA (1)...(19): siRNA sense strand
gcugcaagauguguauuca

SEQ ID NO: 1125603 - RNA, 19 nt, Homo sapiens
  misc_RNA (1)...(19): siRNA sense strand
guaagguaguaaguggaua

SEQ ID NO: 1125604 - RNA, 19 nt, Homo sapiens
  misc_RNA (1)...(19): siRNA sense strand
acagauaaagccaauauuc

SEQ ID NO: 1125605 - RNA, 19 nt, Homo sapiens
  misc_RNA (1)...(19): siRNA sense strand
guggugaauucugacauuu

SEQ ID NO: 1125606 - RNA, 19 nt, Homo sapiens
  misc_RNA (1)...(19): siRNA sense strand
gagaagaagaagaaguguu

SEQ ID NO: 1125607 - RNA, 19 nt, Homo sapiens
  misc_RNA (1)...(19): siRNA sense strand
acacucaccauuuagguaa

SEQ ID NO: 1125608 - RNA, 19 nt, Homo sapiens
  misc_RNA (1)...(19): siRNA sense strand
aggagagacuggaaguaaa

SEQ ID NO: 1125609 - RNA, 19 nt, Homo sapiens
  misc_RNA (1)...(19): siRNA sense strand
gugaugaacuuuuccaaug

SEQ ID NO: 1125610 - RNA, 19 nt, Homo sapiens
  misc_RNA (1)...(19): siRNA sense strand
aagcauucaucauuuggaa

SEQ ID NO: 1125611 - RNA, 19 nt, Homo sapiens
  misc_RNA (1)...(19): siRNA sense strand
gaagucugauaugguuaug

SEQ ID NO: 1125612 - RNA, 19 nt, Homo sapiens
  misc_RNA (1)...(19): siRNA sense strand
gguggcacgucuagugaug

SEQ ID NO: 1125613 - RNA, 19 nt, Homo sapiens
  misc_RNA (1)...(19): siRNA sense strand
ugacauuucaugccauuau

SEQ ID NO: 1125614 - RNA, 19 nt, Homo sapiens
  misc_RNA (1)...(19): siRNA sense strand
gagagacuggaaguaaaua

SEQ ID NO: 1125615 - RNA, 19 nt, Homo sapiens
  misc_RNA (1)...(19): siRNA sense strand
cacuggaaguuacugguuu

SEQ ID NO: 1125616 - RNA, 19 nt, Homo sapiens
  misc_RNA (1)...(19): siRNA sense strand
ggucggauccaguguuuua

SEQ ID NO: 1125617 - RNA, 19 nt, Homo sapiens
  misc_RNA (1)...(19): siRNA sense strand
ggacucggaccaauugaag

SEQ ID NO: 1125618 - RNA, 19 nt, Homo sapiens
  misc_RNA (1)...(19): siRNA sense strand
ugaugaaaugugcaacuua

SEQ ID NO: 1125619 - RNA, 19 nt, Homo sapiens
  misc_RNA (1)...(19): siRNA sense strand
aguucacacucaccauuua

SEQ ID NO: 1125620 - RNA, 19 nt, Homo sapiens
  misc_RNA (1)...(19): siRNA sense strand
uuugauaugccucaugaua

SEQ ID NO: 1125621 - RNA, 19 nt, Homo sapiens
  misc_RNA (1)...(19): siRNA sense strand
ggaaguuacugguuuugug

SEQ ID NO: 1125622 - RNA, 19 nt, Homo sapiens
  misc_RNA (1)...(19): siRNA sense strand
uggcuugaguauagauaaa

SEQ ID NO: 1125623 - RNA, 19 nt, Homo sapiens
  misc_RNA (1)...(19): siRNA sense strand
guguggaaguucaccuuga

SEQ ID NO: 1125624 - RNA, 19 nt, Homo sapiens
  misc_RNA (1)...(19): siRNA sense strand
aaucagaagaggaguauuc

SEQ ID NO: 1125625 - RNA, 19 nt, Homo sapiens
  misc_RNA (1)...(19): siRNA sense strand
ucaccuugacugagaaauu

SEQ ID NO: 1125626 - RNA, 19 nt, Homo sapiens
  misc_RNA (1)...(19): siRNA sense strand
gaaaccaacuguacugaug

SEQ ID NO: 1125627 - RNA, 19 nt, Homo sapiens
  misc_RNA (1)...(19): siRNA sense strand
gaauagaacugcaguaugc

SEQ ID NO: 1125628 - RNA, 19 nt, Homo sapiens
  misc_RNA (1)...(19): siRNA sense strand
gaagugacccuguuucaaa

SEQ ID NO: 1125629 - RNA, 19 nt, Homo sapiens
  misc_RNA (1)...(19): siRNA sense strand
gaaaguacucgcagaaguu

SEQ ID NO: 1125630 - RNA, 19 nt, Homo sapiens
  misc_RNA (1)...(19): siRNA sense strand
gauaucaccuccaaguguu

SEQ ID NO: 1125631 - RNA, 19 nt, Homo sapiens
  misc_RNA (1)...(19): siRNA sense strand
caacuguacugaugagaga

SEQ ID NO: 1125632 - RNA, 19 nt, Homo sapiens
  misc_RNA (1)...(19): siRNA sense strand
caagaauacuggagcaaug

SEQ ID NO: 1125633 - RNA, 19 nt, Homo sapiens
  misc_RNA (1)...(19): siRNA sense strand
guaaagauggcuacaaaug

SEQ ID NO: 1125634 - RNA, 19 nt, Homo sapiens
  misc_RNA (1)...(19): siRNA sense strand
gguaacaccugaugggaau

SEQ ID NO: 1125635 - RNA, 19 nt, Homo sapiens
  misc_RNA (1)...(19): siRNA sense strand
acacagaacuacucgaaag

SEQ ID NO: 1125636 - RNA, 19 nt, Homo sapiens
  misc_RNA (1)...(19): siRNA sense strand
cgaaaguacucgcagaagu

SEQ ID NO: 1125637 - RNA, 19 nt, Homo sapiens
  misc_RNA (1)...(19): siRNA sense strand
gaagccagcugcgcauauc

SEQ ID NO: 1125638 - RNA, 19 nt, Homo sapiens
  misc_RNA (1)...(19): siRNA sense strand
ucaagcaguuuauguaugg

SEQ ID NO: 1125639 - RNA, 19 nt, Homo sapiens
  misc_RNA (1)...(19): siRNA sense strand
gcacaaaagccuacaagaa

SEQ ID NO: 1125640 - RNA, 19 nt, Homo sapiens
  misc_RNA (1)...(19): siRNA sense strand
ggauaucaccuccaagugu

SEQ ID NO: 1125641 - RNA, 19 nt, Homo sapiens
  misc_RNA (1)...(19): siRNA sense strand
gaauucggaccuucagauu

SEQ ID NO: 1125642 - RNA, 19 nt, Homo sapiens
  misc_RNA (1)...(19): siRNA sense strand
caaaugagaccaaggaaac

SEQ ID NO: 1125643 - RNA, 19 nt, Homo sapiens
  misc_RNA (1)...(19): siRNA sense strand
ccuaucgcauuaagaaauu

SEQ ID NO: 1125644 - RNA, 19 nt, Homo sapiens
  misc_RNA (1)...(19): siRNA sense strand
uuggagaacugcuaaccua

SEQ ID NO: 1125645 - RNA, 19 nt, Homo sapiens
  misc_RNA (1)...(19): siRNA sense strand
ggaauagaacugcaguaug

SEQ ID NO: 1125646 - RNA, 19 nt, Homo sapiens
  misc_RNA (1)...(19): siRNA sense strand
aaacaaaugagaccaagga

SEQ ID NO: 1125647 - RNA, 19 nt, Homo sapiens
  misc_RNA (1)...(19): siRNA sense strand
uuacagaugcauaauggua

SEQ ID NO: 1125648 - RNA, 19 nt, Homo sapiens
  misc_RNA (1)...(19): siRNA sense strand
uaaccuagggcuacuguug

SEQ ID NO: 1125649 - RNA, 19 nt, Homo sapiens
  misc_RNA (1)...(19): siRNA sense strand
ccacuaagcaagaauacug

SEQ ID NO: 1125650 - RNA, 19 nt, Homo sapiens
  misc_RNA (1)...(19): siRNA sense strand
aaaguacucgcagaaguua

SEQ ID NO: 1125651 - RNA, 19 nt, Homo sapiens
  misc_RNA (1)...(19): siRNA sense strand
cuccagaccugaucagaau

SEQ ID NO: 1125652 - RNA, 19 nt, Homo sapiens
  misc_RNA (1)...(19): siRNA sense strand
aaagauggcuacaaaugcu

SEQ ID NO: 1125653 - RNA, 19 nt, Homo sapiens
  misc_RNA (1)...(19): siRNA sense strand
gcaagaauacuggagcaau

SEQ ID NO: 1125654 - RNA, 19 nt, Homo sapiens
  misc_RNA (1)...(19): siRNA sense strand
ucacucaugacggguauua

SEQ ID NO: 1125655 - RNA, 19 nt, Homo sapiens
  misc_RNA (1)...(19): siRNA sense strand
ggaagccagcugcgcauau

SEQ ID NO: 1125656 - RNA, 19 nt, Homo sapiens
  misc_RNA (1)...(19): siRNA sense strand
cacaaaagccuacaagaaa

SEQ ID NO: 1125657 - RNA, 19 nt, Homo sapiens
  misc_RNA (1)...(19): siRNA sense strand
uaacaccugaugggaauuu

SEQ ID NO: 1125658 - RNA, 19 nt, Homo sapiens
  misc_RNA (1)...(19): siRNA sense strand
caagaaagaaacaaaugag

SEQ ID NO: 1125659 - RNA, 19 nt, Homo sapiens
  misc_RNA (1)...(19): siRNA sense strand
ccaaggaaaccaacuguac

SEQ ID NO: 1125660 - RNA, 19 nt, Homo sapiens
  misc_RNA (1)...(19): siRNA sense strand
ggaaaccaacuguacugau

SEQ ID NO: 1125661 - RNA, 19 nt, Homo sapiens
  misc_RNA (1)...(19): siRNA sense strand
caccugaagugacccuguu

SEQ ID NO: 1125662 - RNA, 19 nt, Homo sapiens
  misc_RNA (1)...(19): siRNA sense strand
cuucauggccuguaaagau

SEQ ID NO: 1125663 - RNA, 19 nt, Homo sapiens
  misc_RNA (1)...(19): siRNA sense strand
uuacacagaacuacucgaa

SEQ ID NO: 1125664 - RNA, 19 nt, Homo sapiens
  misc_RNA (1)...(19): siRNA sense strand
ggguauuacagaugcauaa

SEQ ID NO: 1125665 - RNA, 19 nt, Homo sapiens
  misc_RNA (1)...(19): siRNA sense strand
cuagggcuacuguugauuu

SEQ ID NO: 1125666 - RNA, 19 nt, Homo sapiens
  misc_RNA (1)...(19): siRNA sense strand
gggcuacuguugauuuuga

SEQ ID NO: 1125667 - RNA, 19 nt, Homo sapiens
  misc_RNA (1)...(19): siRNA sense strand
ccuccuaucgcauuaagaa

SEQ ID NO: 1125668 - RNA, 19 nt, Homo sapiens
  misc_RNA (1)...(19): siRNA sense strand
uaaagauggcuacaaaugc

SEQ ID NO: 1125669 - RNA, 19 nt, Homo sapiens
  misc_RNA (1)...(19): siRNA sense strand
gugcuuuguugcccuccua

SEQ ID NO: 1125670 - RNA, 19 nt, Homo sapiens
  misc_RNA (1)...(19): siRNA sense strand
acaaaugagaccaaggaaa

SEQ ID NO: 1125671 - RNA, 19 nt, Homo sapiens
  misc_RNA (1)...(19): siRNA sense strand
gcaguuuauguauggauga

SEQ ID NO: 1125672 - RNA, 19 nt, Homo sapiens
  misc_RNA (1)...(19): siRNA sense strand
caucacucaugacggguau

SEQ ID NO: 1125673 - RNA, 19 nt, Homo sapiens
  misc_RNA (1)...(19): siRNA sense strand
aaaccaacuguacugauga

SEQ ID NO: 1125674 - RNA, 19 nt, Homo sapiens
  misc_RNA (1)...(19): siRNA sense strand
caugacggguauuacagau

SEQ ID NO: 1125675 - RNA, 19 nt, Homo sapiens
  misc_RNA (1)...(19): siRNA sense strand
ggccagccuuccugcacaa

SEQ ID NO: 1125676 - RNA, 19 nt, Homo sapiens
  misc_RNA (1)...(19): siRNA sense strand
gaccaaggaaaccaacugu

SEQ ID NO: 1125677 - RNA, 19 nt, Homo sapiens
  misc_RNA (1)...(19): siRNA sense strand
ggcuacaaaugcugugcuu

SEQ ID NO: 1125678 - RNA, 19 nt, Homo sapiens
  misc_RNA (1)...(19): siRNA sense strand
uacagaugcauaaugguaa

SEQ ID NO: 1125679 - RNA, 19 nt, Homo sapiens
  misc_RNA (1)...(19): siRNA sense strand
ccuacaagaaagaaacaaa

SEQ ID NO: 1125680 - RNA, 19 nt, Homo sapiens
  misc_RNA (1)...(19): siRNA sense strand
gcucugcccuuggagaacu

SEQ ID NO: 1125681 - RNA, 19 nt, Homo sapiens
  misc_RNA (1)...(19): siRNA sense strand
caaggaaaccaacuguacu

SEQ ID NO: 1125682 - RNA, 19 nt, Homo sapiens
  misc_RNA (1)...(19): siRNA sense strand
uucauggccuguaaagaug

SEQ ID NO: 1125683 - RNA, 19 nt, Homo sapiens
  misc_RNA (1)...(19): siRNA sense strand
gugccacuaagcaagaaua

SEQ ID NO: 1125684 - RNA, 19 nt, Homo sapiens
  misc_RNA (1)...(19): siRNA sense strand
ccagaccugaucagaauuc

SEQ ID NO: 1125685 - RNA, 19 nt, Homo sapiens
  misc_RNA (1)...(19): siRNA sense strand
caguuuauguauggaugaa

SEQ ID NO: 1125686 - RNA, 19 nt, Homo sapiens
  misc_RNA (1)...(19): siRNA sense strand
gcgauugugccacuaagca

SEQ ID NO: 1125687 - RNA, 19 nt, Homo sapiens
  misc_RNA (1)...(19): siRNA sense strand
gaucccagagggcgauugu

SEQ ID NO: 1125688 - RNA, 19 nt, Homo sapiens
  misc_RNA (1)...(19): siRNA sense strand
gcaguaugcaaggcaguug

SEQ ID NO: 1125689 - RNA, 19 nt, Homo sapiens
  misc_RNA (1)...(19): siRNA sense strand
ccguggccaucacucauga

SEQ ID NO: 1125690 - RNA, 19 nt, Homo sapiens
  misc_RNA (1)...(19): siRNA sense strand
gggaagccagcugcgcaua

SEQ ID NO: 1125691 - RNA, 19 nt, Homo sapiens
  misc_RNA (1)...(19): siRNA sense strand
aaacagauuacacagaacu

SEQ ID NO: 1125692 - RNA, 19 nt, Homo sapiens
  misc_RNA (1)...(19): siRNA sense strand
guaccguggccaucacuca

SEQ ID NO: 1125693 - RNA, 19 nt, Homo sapiens
  misc_RNA (1)...(19): siRNA sense strand
uucaagcaguuuauguaug

SEQ ID NO: 1125694 - RNA, 19 nt, Homo sapiens
  misc_RNA (1)...(19): siRNA sense strand
cuucaagcaguuuauguau

SEQ ID NO: 1125695 - RNA, 19 nt, Homo sapiens
  misc_RNA (1)...(19): siRNA sense strand
gcccuuggagaacugcuaa

SEQ ID NO: 1125696 - RNA, 19 nt, Homo sapiens
  misc_RNA (1)...(19): siRNA sense strand
gaaaccaacuguacugaug

SEQ ID NO: 1125697 - RNA, 19 nt, Homo sapiens
  misc_RNA (1)...(19): siRNA sense strand
gaaaguacucgcagaaguu

SEQ ID NO: 1125698 - RNA, 19 nt, Homo sapiens
  misc_RNA (1)...(19): siRNA sense strand
gauaucaccuccaaguguu

SEQ ID NO: 1125699 - RNA, 19 nt, Homo sapiens
  misc_RNA (1)...(19): siRNA sense strand
caacuguacugaugagaga

SEQ ID NO: 1125700 - RNA, 19 nt, Homo sapiens
  misc_RNA (1)...(19): siRNA sense strand
guaaagauggcuacaaaug

SEQ ID NO: 1125701 - RNA, 19 nt, Homo sapiens
  misc_RNA (1)...(19): siRNA sense strand
gguaacaccugaugggaau

SEQ ID NO: 1125702 - RNA, 19 nt, Homo sapiens
  misc_RNA (1)...(19): siRNA sense strand
acacagaacuacucgaaag

SEQ ID NO: 1125703 - RNA, 19 nt, Homo sapiens
  misc_RNA (1)...(19): siRNA sense strand
cgaaaguacucgcagaagu

SEQ ID NO: 1125704 - RNA, 19 nt, Homo sapiens
  misc_RNA (1)...(19): siRNA sense strand
ucaagcaguuuauguaugg

SEQ ID NO: 1125705 - RNA, 19 nt, Homo sapiens
  misc_RNA (1)...(19): siRNA sense strand
gcacaaaagccuacaagaa

SEQ ID NO: 1125706 - RNA, 19 nt, Homo sapiens
  misc_RNA (1)...(19): siRNA sense strand
ggauaucaccuccaagugu

SEQ ID NO: 1125707 - RNA, 19 nt, Homo sapiens
  misc_RNA (1)...(19): siRNA sense strand
gaauucggaccuucagauu

SEQ ID NO: 1125708 - RNA, 19 nt, Homo sapiens
  misc_RNA (1)...(19): siRNA sense strand
caaaugagaccaaggaaac

SEQ ID NO: 1125709 - RNA, 19 nt, Homo sapiens
  misc_RNA (1)...(19): siRNA sense strand
ccuaucgcauuaagaaauu

SEQ ID NO: 1125710 - RNA, 19 nt, Homo sapiens
  misc_RNA (1)...(19): siRNA sense strand
uuggagaacugcuaaccua

SEQ ID NO: 1125711 - RNA, 19 nt, Homo sapiens
  misc_RNA (1)...(19): siRNA sense strand
aaacaaaugagaccaagga

SEQ ID NO: 1125712 - RNA, 19 nt, Homo sapiens
  misc_RNA (1)...(19): siRNA sense strand
uuacagaugcauaauggua

SEQ ID NO: 1125713 - RNA, 19 nt, Homo sapiens
  misc_RNA (1)...(19): siRNA sense strand
uaaccuagggcuacuguug

SEQ ID NO: 1125714 - RNA, 19 nt, Homo sapiens
  misc_RNA (1)...(19): siRNA sense strand
aaaguacucgcagaaguua

SEQ ID NO: 1125715 - RNA, 19 nt, Homo sapiens
  misc_RNA (1)...(19): siRNA sense strand
cuccagaccugaucagaau

SEQ ID NO: 1125716 - RNA, 19 nt, Homo sapiens
  misc_RNA (1)...(19): siRNA sense strand
aaagauggcuacaaaugcu

SEQ ID NO: 1125717 - RNA, 19 nt, Homo sapiens
  misc_RNA (1)...(19): siRNA sense strand
ucacucaugacggguauua

SEQ ID NO: 1125718 - RNA, 19 nt, Homo sapiens
  misc_RNA (1)...(19): siRNA sense strand
cacaaaagccuacaagaaa

SEQ ID NO: 1125719 - RNA, 19 nt, Homo sapiens
  misc_RNA (1)...(19): siRNA sense strand
uaacaccugaugggaauuu

SEQ ID NO: 1125720 - RNA, 19 nt, Homo sapiens
  misc_RNA (1)...(19): siRNA sense strand
caagaaagaaacaaaugag

SEQ ID NO: 1125721 - RNA, 19 nt, Homo sapiens
  misc_RNA (1)...(19): siRNA sense strand
ccaaggaaaccaacuguac

SEQ ID NO: 1125722 - RNA, 19 nt, Homo sapiens
  misc_RNA (1)...(19): siRNA sense strand
ggaaaccaacuguacugau

SEQ ID NO: 1125723 - RNA, 19 nt, Homo sapiens
  misc_RNA (1)...(19): siRNA sense strand
cuucauggccuguaaagau

SEQ ID NO: 1125724 - RNA, 19 nt, Homo sapiens
  misc_RNA (1)...(19): siRNA sense strand
uuacacagaacuacucgaa

SEQ ID NO: 1125725 - RNA, 19 nt, Homo sapiens
  misc_RNA (1)...(19): siRNA sense strand
cuagggcuacuguugauuu

SEQ ID NO: 1125726 - RNA, 19 nt, Homo sapiens
  misc_RNA (1)...(19): siRNA sense strand
ggguauuacagaugcauaa

SEQ ID NO: 1125727 - RNA, 19 nt, Homo sapiens
  misc_RNA (1)...(19): siRNA sense strand
gggcuacuguugauuuuga

SEQ ID NO: 1125728 - RNA, 19 nt, Homo sapiens
  misc_RNA (1)...(19): siRNA sense strand
ccuccuaucgcauuaagaa

SEQ ID NO: 1125729 - RNA, 19 nt, Homo sapiens
  misc_RNA (1)...(19): siRNA sense strand
uaaagauggcuacaaaugc

SEQ ID NO: 1125730 - RNA, 19 nt, Homo sapiens
  misc_RNA (1)...(19): siRNA sense strand
gugcuuuguugcccuccua

SEQ ID NO: 1125731 - RNA, 19 nt, Homo sapiens
  misc_RNA (1)...(19): siRNA sense strand
acaaaugagaccaaggaaa

SEQ ID NO: 1125732 - RNA, 19 nt, Homo sapiens
  misc_RNA (1)...(19): siRNA sense strand
aaaccaacuguacugauga

SEQ ID NO: 1125733 - RNA, 19 nt, Homo sapiens
  misc_RNA (1)...(19): siRNA sense strand
caucacucaugacggguau

SEQ ID NO: 1125734 - RNA, 19 nt, Homo sapiens
  misc_RNA (1)...(19): siRNA sense strand
gcaguuuauguauggauga

SEQ ID NO: 1125735 - RNA, 19 nt, Homo sapiens
  misc_RNA (1)...(19): siRNA sense strand
caugacggguauuacagau

SEQ ID NO: 1125736 - RNA, 19 nt, Homo sapiens
  misc_RNA (1)...(19): siRNA sense strand
ggccagccuuccugcacaa

SEQ ID NO: 1125737 - RNA, 19 nt, Homo sapiens
  misc_RNA (1)...(19): siRNA sense strand
gaccaaggaaaccaacugu

SEQ ID NO: 1125738 - RNA, 19 nt, Homo sapiens
  misc_RNA (1)...(19): siRNA sense strand
ggcuacaaaugcugugcuu

SEQ ID NO: 1125739 - RNA, 19 nt, Homo sapiens
  misc_RNA (1)...(19): siRNA sense strand
uacagaugcauaaugguaa

SEQ ID NO: 1125740 - RNA, 19 nt, Homo sapiens
  misc_RNA (1)...(19): siRNA sense strand
ccuacaagaaagaaacaaa

SEQ ID NO: 1125741 - RNA, 19 nt, Homo sapiens
  misc_RNA (1)...(19): siRNA sense strand
gcucugcccuuggagaacu

SEQ ID NO: 1125742 - RNA, 19 nt, Homo sapiens
  misc_RNA (1)...(19): siRNA sense strand
caaggaaaccaacuguacu

SEQ ID NO: 1125743 - RNA, 19 nt, Homo sapiens
  misc_RNA (1)...(19): siRNA sense strand
uucauggccuguaaagaug

SEQ ID NO: 1125744 - RNA, 19 nt, Homo sapiens
  misc_RNA (1)...(19): siRNA sense strand
ccagaccugaucagaauuc

SEQ ID NO: 1125745 - RNA, 19 nt, Homo sapiens
  misc_RNA (1)...(19): siRNA sense strand
caguuuauguauggaugaa

SEQ ID NO: 1125746 - RNA, 19 nt, Homo sapiens
  misc_RNA (1)...(19): siRNA sense strand
aaacagauuacacagaacu

SEQ ID NO: 1125747 - RNA, 19 nt, Homo sapiens
  misc_RNA (1)...(19): siRNA sense strand
ccguggccaucacucauga

SEQ ID NO: 1125748 - RNA, 19 nt, Homo sapiens
  misc_RNA (1)...(19): siRNA sense strand
guaccguggccaucacuca

SEQ ID NO: 1125749 - RNA, 19 nt, Homo sapiens
  misc_RNA (1)...(19): siRNA sense strand
uucaagcaguuuauguaug

SEQ ID NO: 1125750 - RNA, 19 nt, Homo sapiens
  misc_RNA (1)...(19): siRNA sense strand
gcccuuggagaacugcuaa

SEQ ID NO: 1125751 - RNA, 19 nt, Homo sapiens
  misc_RNA (1)...(19): siRNA sense strand
cuucaagcaguuuauguau

SEQ ID NO: 1125752 - RNA, 19 nt, Homo sapiens
  misc_RNA (1)...(19): siRNA sense strand
gaaaccaacuguacugaug

SEQ ID NO: 1125753 - RNA, 19 nt, Homo sapiens
  misc_RNA (1)...(19): siRNA sense strand
gaaaguacucgcagaaguu

SEQ ID NO: 1125754 - RNA, 19 nt, Homo sapiens
  misc_RNA (1)...(19): siRNA sense strand
gauaucaccuccaaguguu

SEQ ID NO: 1125755 - RNA, 19 nt, Homo sapiens
  misc_RNA (1)...(19): siRNA sense strand
caacuguacugaugagaga

SEQ ID NO: 1125756 - RNA, 19 nt, Homo sapiens
  misc_RNA (1)...(19): siRNA sense strand
guaaagauggcuacaaaug

SEQ ID NO: 1125757 - RNA, 19 nt, Homo sapiens
  misc_RNA (1)...(19): siRNA sense strand
gguaacaccugaugggaau

SEQ ID NO: 1125758 - RNA, 19 nt, Homo sapiens
  misc_RNA (1)...(19): siRNA sense strand
acacagaacuacucgaaag

SEQ ID NO: 1125759 - RNA, 19 nt, Homo sapiens
  misc_RNA (1)...(19): siRNA sense strand
cgaaaguacucgcagaagu

SEQ ID NO: 1125760 - RNA, 19 nt, Homo sapiens
  misc_RNA (1)...(19): siRNA sense strand
ucaagcaguuuauguaugg

SEQ ID NO: 1125761 - RNA, 19 nt, Homo sapiens
  misc_RNA (1)...(19): siRNA sense strand
gcacaaaagccuacaagaa

SEQ ID NO: 1125762 - RNA, 19 nt, Homo sapiens
  misc_RNA (1)...(19): siRNA sense strand
ggauaucaccuccaagugu

SEQ ID NO: 1125763 - RNA, 19 nt, Homo sapiens
  misc_RNA (1)...(19): siRNA sense strand
gaauucggaccuucagauu

SEQ ID NO: 1125764 - RNA, 19 nt, Homo sapiens
  misc_RNA (1)...(19): siRNA sense strand
caaaugagaccaaggaaac

SEQ ID NO: 1125765 - RNA, 19 nt, Homo sapiens
  misc_RNA (1)...(19): siRNA sense strand
ccuaucgcauuaagaaauu

SEQ ID NO: 1125766 - RNA, 19 nt, Homo sapiens
  misc_RNA (1)...(19): siRNA sense strand
uuggagaacugcuaaccua

SEQ ID NO: 1125767 - RNA, 19 nt, Homo sapiens
  misc_RNA (1)...(19): siRNA sense strand
aaacaaaugagaccaagga

SEQ ID NO: 1125768 - RNA, 19 nt, Homo sapiens
  misc_RNA (1)...(19): siRNA sense strand
uuacagaugcauaauggua

SEQ ID NO: 1125769 - RNA, 19 nt, Homo sapiens
  misc_RNA (1)...(19): siRNA sense strand
uaaccuagggcuacuguug

SEQ ID NO: 1125770 - RNA, 19 nt, Homo sapiens
  misc_RNA (1)...(19): siRNA sense strand
aaaguacucgcagaaguua

SEQ ID NO: 1125771 - RNA, 19 nt, Homo sapiens
  misc_RNA (1)...(19): siRNA sense strand
cuccagaccugaucagaau

SEQ ID NO: 1125772 - RNA, 19 nt, Homo sapiens
  misc_RNA (1)...(19): siRNA sense strand
aaagauggcuacaaaugcu

SEQ ID NO: 1125773 - RNA, 19 nt, Homo sapiens
  misc_RNA (1)...(19): siRNA sense strand
ucacucaugacggguauua

SEQ ID NO: 1125774 - RNA, 19 nt, Homo sapiens
  misc_RNA (1)...(19): siRNA sense strand
cacaaaagccuacaagaaa

SEQ ID NO: 1125775 - RNA, 19 nt, Homo sapiens
  misc_RNA (1)...(19): siRNA sense strand
uaacaccugaugggaauuu

SEQ ID NO: 1125776 - RNA, 19 nt, Homo sapiens
  misc_RNA (1)...(19): siRNA sense strand
caagaaagaaacaaaugag

SEQ ID NO: 1125777 - RNA, 19 nt, Homo sapiens
  misc_RNA (1)...(19): siRNA sense strand
ccaaggaaaccaacuguac

SEQ ID NO: 1125778 - RNA, 19 nt, Homo sapiens
  misc_RNA (1)...(19): siRNA sense strand
ggaaaccaacuguacugau

SEQ ID NO: 1125779 - RNA, 19 nt, Homo sapiens
  misc_RNA (1)...(19): siRNA sense strand
cuucauggccuguaaagau

SEQ ID NO: 1125780 - RNA, 19 nt, Homo sapiens
  misc_RNA (1)...(19): siRNA sense strand
uuacacagaacuacucgaa

SEQ ID NO: 1125781 - RNA, 19 nt, Homo sapiens
  misc_RNA (1)...(19): siRNA sense strand
cuagggcuacuguugauuu

SEQ ID NO: 1125782 - RNA, 19 nt, Homo sapiens
  misc_RNA (1)...(19): siRNA sense strand
ggguauuacagaugcauaa

SEQ ID NO: 1125783 - RNA, 19 nt, Homo sapiens
  misc_RNA (1)...(19): siRNA sense strand
gggcuacuguugauuuuga

SEQ ID NO: 1125784 - RNA, 19 nt, Homo sapiens
  misc_RNA (1)...(19): siRNA sense strand
ccuccuaucgcauuaagaa

SEQ ID NO: 1125785 - RNA, 19 nt, Homo sapiens
  misc_RNA (1)...(19): siRNA sense strand
uaaagauggcuacaaaugc

SEQ ID NO: 1125786 - RNA, 19 nt, Homo sapiens
  misc_RNA (1)...(19): siRNA sense strand
gugcuuuguugcccuccua

SEQ ID NO: 1125787 - RNA, 19 nt, Homo sapiens
  misc_RNA (1)...(19): siRNA sense strand
acaaaugagaccaaggaaa

SEQ ID NO: 1125788 - RNA, 19 nt, Homo sapiens
  misc_RNA (1)...(19): siRNA sense strand
aaaccaacuguacugauga

SEQ ID NO: 1125789 - RNA, 19 nt, Homo sapiens
  misc_RNA (1)...(19): siRNA sense strand
caucacucaugacggguau

SEQ ID NO: 1125790 - RNA, 19 nt, Homo sapiens
  misc_RNA (1)...(19): siRNA sense strand
gcaguuuauguauggauga

SEQ ID NO: 1125791 - RNA, 19 nt, Homo sapiens
  misc_RNA (1)...(19): siRNA sense strand
caugacggguauuacagau

SEQ ID NO: 1125792 - RNA, 19 nt, Homo sapiens
  misc_RNA (1)...(19): siRNA sense strand
ggccagccuuccugcacaa

SEQ ID NO: 1125793 - RNA, 19 nt, Homo sapiens
  misc_RNA (1)...(19): siRNA sense strand
gaccaaggaaaccaacugu

SEQ ID NO: 1125794 - RNA, 19 nt, Homo sapiens
  misc_RNA (1)...(19): siRNA sense strand
ggcuacaaaugcugugcuu

SEQ ID NO: 1125795 - RNA, 19 nt, Homo sapiens
  misc_RNA (1)...(19): siRNA sense strand
uacagaugcauaaugguaa

SEQ ID NO: 1125796 - RNA, 19 nt, Homo sapiens
  misc_RNA (1)...(19): siRNA sense strand
ccuacaagaaagaaacaaa

SEQ ID NO: 1125797 - RNA, 19 nt, Homo sapiens
  misc_RNA (1)...(19): siRNA sense strand
gcucugcccuuggagaacu

SEQ ID NO: 1125798 - RNA, 19 nt, Homo sapiens
  misc_RNA (1)...(19): siRNA sense strand
caaggaaaccaacuguacu

SEQ ID NO: 1125799 - RNA, 19 nt, Homo sapiens
  misc_RNA (1)...(19): siRNA sense strand
uucauggccuguaaagaug

SEQ ID NO: 1125800 - RNA, 19 nt, Homo sapiens
  misc_RNA (1)...(19): siRNA sense strand
ccagaccugaucagaauuc

SEQ ID NO: 1125801 - RNA, 19 nt, Homo sapiens
  misc_RNA (1)...(19): siRNA sense strand
caguuuauguauggaugaa

SEQ ID NO: 1125802 - RNA, 19 nt, Homo sapiens
  misc_RNA (1)...(19): siRNA sense strand
aaacagauuacacagaacu

SEQ ID NO: 1125803 - RNA, 19 nt, Homo sapiens
  misc_RNA (1)...(19): siRNA sense strand
ccguggccaucacucauga

SEQ ID NO: 1125804 - RNA, 19 nt, Homo sapiens
  misc_RNA (1)...(19): siRNA sense strand
guaccguggccaucacuca

SEQ ID NO: 1125805 - RNA, 19 nt, Homo sapiens
  misc_RNA (1)...(19): siRNA sense strand
uucaagcaguuuauguaug

SEQ ID NO: 1125806 - RNA, 19 nt, Homo sapiens
  misc_RNA (1)...(19): siRNA sense strand
gcccuuggagaacugcuaa

SEQ ID NO: 1125807 - RNA, 19 nt, Homo sapiens
  misc_RNA (1)...(19): siRNA sense strand
cuucaagcaguuuauguau

SEQ ID NO: 1125808 - RNA, 19 nt, Homo sapiens
  misc_RNA (1)...(19): siRNA sense strand
gaaaccaacuguacugaug

SEQ ID NO: 1125809 - RNA, 19 nt, Homo sapiens
  misc_RNA (1)...(19): siRNA sense strand
gaauagaacugcaguaugc

SEQ ID NO: 1125810 - RNA, 19 nt, Homo sapiens
  misc_RNA (1)...(19): siRNA sense strand
gaagugacccuguuucaaa

SEQ ID NO: 1125811 - RNA, 19 nt, Homo sapiens
  misc_RNA (1)...(19): siRNA sense strand
gaaaguacucgcagaaguu

SEQ ID NO: 1125812 - RNA, 19 nt, Homo sapiens
  misc_RNA (1)...(19): siRNA sense strand
gauaucaccuccaaguguu

SEQ ID NO: 1125813 - RNA, 19 nt, Homo sapiens
  misc_RNA (1)...(19): siRNA sense strand
caacuguacugaugagaga

SEQ ID NO: 1125814 - RNA, 19 nt, Homo sapiens
  misc_RNA (1)...(19): siRNA sense strand
caagaauacuggagcaaug

SEQ ID NO: 1125815 - RNA, 19 nt, Homo sapiens
  misc_RNA (1)...(19): siRNA sense strand
guaaagauggcuacaaaug

SEQ ID NO: 1125816 - RNA, 19 nt, Homo sapiens
  misc_RNA (1)...(19): siRNA sense strand
gguaacaccugaugggaau

SEQ ID NO: 1125817 - RNA, 19 nt, Homo sapiens
  misc_RNA (1)...(19): siRNA sense strand
acacagaacuacucgaaag

SEQ ID NO: 1125818 - RNA, 19 nt, Homo sapiens
  misc_RNA (1)...(19): siRNA sense strand
cgaaaguacucgcagaagu

SEQ ID NO: 1125819 - RNA, 19 nt, Homo sapiens
  misc_RNA (1)...(19): siRNA sense strand
gaagccagcugcgcauauc

SEQ ID NO: 1125820 - RNA, 19 nt, Homo sapiens
  misc_RNA (1)...(19): siRNA sense strand
ucaagcaguuuauguaugg

SEQ ID NO: 1125821 - RNA, 19 nt, Homo sapiens
  misc_RNA (1)...(19): siRNA sense strand
gcacaaaagccuacaagaa

SEQ ID NO: 1125822 - RNA, 19 nt, Homo sapiens
  misc_RNA (1)...(19): siRNA sense strand
ggauaucaccuccaagugu

SEQ ID NO: 1125823 - RNA, 19 nt, Homo sapiens
  misc_RNA (1)...(19): siRNA sense strand
gaauucggaccuucagauu

SEQ ID NO: 1125824 - RNA, 19 nt, Homo sapiens
  misc_RNA (1)...(19): siRNA sense strand
caaaugagaccaaggaaac

SEQ ID NO: 1125825 - RNA, 19 nt, Homo sapiens
  misc_RNA (1)...(19): siRNA sense strand
ccuaucgcauuaagaaauu

SEQ ID NO: 1125826 - RNA, 19 nt, Homo sapiens
  misc_RNA (1)...(19): siRNA sense strand
uuggagaacugcuaaccua

SEQ ID NO: 1125827 - RNA, 19 nt, Homo sapiens
  misc_RNA (1)...(19): siRNA sense strand
ggaauagaacugcaguaug

SEQ ID NO: 1125828 - RNA, 19 nt, Homo sapiens
  misc_RNA (1)...(19): siRNA sense strand
aaacaaaugagaccaagga

SEQ ID NO: 1125829 - RNA, 19 nt, Homo sapiens
  misc_RNA (1)...(19): siRNA sense strand
uuacagaugcauaauggua

SEQ ID NO: 1125830 - RNA, 19 nt, Homo sapiens
  misc_RNA (1)...(19): siRNA sense strand
uaaccuagggcuacuguug

SEQ ID NO: 1125831 - RNA, 19 nt, Homo sapiens
  misc_RNA (1)...(19): siRNA sense strand
ccacuaagcaagaauacug

SEQ ID NO: 1125832 - RNA, 19 nt, Homo sapiens
  misc_RNA (1)...(19): siRNA sense strand
aaaguacucgcagaaguua

SEQ ID NO: 1125833 - RNA, 19 nt, Homo sapiens
  misc_RNA (1)...(19): siRNA sense strand
cuccagaccugaucagaau

SEQ ID NO: 1125834 - RNA, 19 nt, Homo sapiens
  misc_RNA (1)...(19): siRNA sense strand
aaagauggcuacaaaugcu

SEQ ID NO: 1125835 - RNA, 19 nt, Homo sapiens
  misc_RNA (1)...(19): siRNA sense strand
gcaagaauacuggagcaau

SEQ ID NO: 1125836 - RNA, 19 nt, Homo sapiens
  misc_RNA (1)...(19): siRNA sense strand
ucacucaugacggguauua

SEQ ID NO: 1125837 - RNA, 19 nt, Homo sapiens
  misc_RNA (1)...(19): siRNA sense strand
ggaagccagcugcgcauau

SEQ ID NO: 1125838 - RNA, 19 nt, Homo sapiens
  misc_RNA (1)...(19): siRNA sense strand
cacaaaagccuacaagaaa

SEQ ID NO: 1125839 - RNA, 19 nt, Homo sapiens
  misc_RNA (1)...(19): siRNA sense strand
uaacaccugaugggaauuu

SEQ ID NO: 1125840 - RNA, 19 nt, Homo sapiens
  misc_RNA (1)...(19): siRNA sense strand
caagaaagaaacaaaugag

SEQ ID NO: 1125841 - RNA, 19 nt, Homo sapiens
  misc_RNA (1)...(19): siRNA sense strand
ccaaggaaaccaacuguac

SEQ ID NO: 1125842 - RNA, 19 nt, Homo sapiens
  misc_RNA (1)...(19): siRNA sense strand
ggaaaccaacuguacugau

SEQ ID NO: 1125843 - RNA, 19 nt, Homo sapiens
  misc_RNA (1)...(19): siRNA sense strand
caccugaagugacccuguu

SEQ ID NO: 1125844 - RNA, 19 nt, Homo sapiens
  misc_RNA (1)...(19): siRNA sense strand
cuucauggccuguaaagau

SEQ ID NO: 1125845 - RNA, 19 nt, Homo sapiens
  misc_RNA (1)...(19): siRNA sense strand
uuacacagaacuacucgaa

SEQ ID NO: 1125846 - RNA, 19 nt, Homo sapiens
  misc_RNA (1)...(19): siRNA sense strand
ggguauuacagaugcauaa

SEQ ID NO: 1125847 - RNA, 19 nt, Homo sapiens
  misc_RNA (1)...(19): siRNA sense strand
cuagggcuacuguugauuu

SEQ ID NO: 1125848 - RNA, 19 nt, Homo sapiens
  misc_RNA (1)...(19): siRNA sense strand
gggcuacuguugauuuuga

SEQ ID NO: 1125849 - RNA, 19 nt, Homo sapiens
  misc_RNA (1)...(19): siRNA sense strand
ccuccuaucgcauuaagaa

SEQ ID NO: 1125850 - RNA, 19 nt, Homo sapiens
  misc_RNA (1)...(19): siRNA sense strand
uaaagauggcuacaaaugc

SEQ ID NO: 1125851 - RNA, 19 nt, Homo sapiens
  misc_RNA (1)...(19): siRNA sense strand
gugcuuuguugcccuccua

SEQ ID NO: 1125852 - RNA, 19 nt, Homo sapiens
  misc_RNA (1)...(19): siRNA sense strand
acaaaugagaccaaggaaa

SEQ ID NO: 1125853 - RNA, 19 nt, Homo sapiens
  misc_RNA (1)...(19): siRNA sense strand
gcaguuuauguauggauga

SEQ ID NO: 1125854 - RNA, 19 nt, Homo sapiens
  misc_RNA (1)...(19): siRNA sense strand
caucacucaugacggguau

SEQ ID NO: 1125855 - RNA, 19 nt, Homo sapiens
  misc_RNA (1)...(19): siRNA sense strand
aaaccaacuguacugauga

SEQ ID NO: 1125856 - RNA, 19 nt, Homo sapiens
  misc_RNA (1)...(19): siRNA sense strand
caugacggguauuacagau

SEQ ID NO: 1125857 - RNA, 19 nt, Homo sapiens
  misc_RNA (1)...(19): siRNA sense strand
ggccagccuuccugcacaa

SEQ ID NO: 1125858 - RNA, 19 nt, Homo sapiens
  misc_RNA (1)...(19): siRNA sense strand
gaccaaggaaaccaacugu

SEQ ID NO: 1125859 - RNA, 19 nt, Homo sapiens
  misc_RNA (1)...(19): siRNA sense strand
ggcuacaaaugcugugcuu

SEQ ID NO: 1125860 - RNA, 19 nt, Homo sapiens
  misc_RNA (1)...(19): siRNA sense strand
uacagaugcauaaugguaa

SEQ ID NO: 1125861 - RNA, 19 nt, Homo sapiens
  misc_RNA (1)...(19): siRNA sense strand
ccuacaagaaagaaacaaa

SEQ ID NO: 1125862 - RNA, 19 nt, Homo sapiens
  misc_RNA (1)...(19): siRNA sense strand
gcucugcccuuggagaacu

SEQ ID NO: 1125863 - RNA, 19 nt, Homo sapiens
  misc_RNA (1)...(19): siRNA sense strand
caaggaaaccaacuguacu

SEQ ID NO: 1125864 - RNA, 19 nt, Homo sapiens
  misc_RNA (1)...(19): siRNA sense strand
uucauggccuguaaagaug

SEQ ID NO: 1125865 - RNA, 19 nt, Homo sapiens
  misc_RNA (1)...(19): siRNA sense strand
gugccacuaagcaagaaua

SEQ ID NO: 1125866 - RNA, 19 nt, Homo sapiens
  misc_RNA (1)...(19): siRNA sense strand
ccagaccugaucagaauuc

SEQ ID NO: 1125867 - RNA, 19 nt, Homo sapiens
  misc_RNA (1)...(19): siRNA sense strand
caguuuauguauggaugaa

SEQ ID NO: 1125868 - RNA, 19 nt, Homo sapiens
  misc_RNA (1)...(19): siRNA sense strand
gcgauugugccacuaagca

SEQ ID NO: 1125869 - RNA, 19 nt, Homo sapiens
  misc_RNA (1)...(19): siRNA sense strand
gaucccagagggcgauugu

SEQ ID NO: 1125870 - RNA, 19 nt, Homo sapiens
  misc_RNA (1)...(19): siRNA sense strand
gcaguaugcaaggcaguug

SEQ ID NO: 1125871 - RNA, 19 nt, Homo sapiens
  misc_RNA (1)...(19): siRNA sense strand
ccguggccaucacucauga

SEQ ID NO: 1125872 - RNA, 19 nt, Homo sapiens
  misc_RNA (1)...(19): siRNA sense strand
gggaagccagcugcgcaua

SEQ ID NO: 1125873 - RNA, 19 nt, Homo sapiens
  misc_RNA (1)...(19): siRNA sense strand
aaacagauuacacagaacu

SEQ ID NO: 1125874 - RNA, 19 nt, Homo sapiens
  misc_RNA (1)...(19): siRNA sense strand
guaccguggccaucacuca

SEQ ID NO: 1125875 - RNA, 19 nt, Homo sapiens
  misc_RNA (1)...(19): siRNA sense strand
uucaagcaguuuauguaug

SEQ ID NO: 1125876 - RNA, 19 nt, Homo sapiens
  misc_RNA (1)...(19): siRNA sense strand
cuucaagcaguuuauguau

SEQ ID NO: 1125877 - RNA, 19 nt, Homo sapiens
  misc_RNA (1)...(19): siRNA sense strand
gcccuuggagaacugcuaa

SEQ ID NO: 1125878 - RNA, 19 nt, Homo sapiens
  misc_RNA (1)...(19): siRNA sense strand
ugaaacagguugcagauaa

SEQ ID NO: 1125879 - RNA, 19 nt, Homo sapiens
  misc_RNA (1)...(19): siRNA sense strand
gaccagagccugucauuug

SEQ ID NO: 1125880 - RNA, 19 nt, Homo sapiens
  misc_RNA (1)...(19): siRNA sense strand
acacuaaacgccaauaaua

SEQ ID NO: 1125881 - RNA, 19 nt, Homo sapiens
  misc_RNA (1)...(19): siRNA sense strand
agaaggaccugaacaacaa

SEQ ID NO: 1125882 - RNA, 19 nt, Homo sapiens
  misc_RNA (1)...(19): siRNA sense strand
gaaacagguugcagauaag

SEQ ID NO: 1125883 - RNA, 19 nt, Homo sapiens
  misc_RNA (1)...(19): siRNA sense strand
gagagcagccaacgagaaa

SEQ ID NO: 1125884 - RNA, 19 nt, Homo sapiens
  misc_RNA (1)...(19): siRNA sense strand
ccaauaauauggagacacu

SEQ ID NO: 1125885 - RNA, 19 nt, Homo sapiens
  misc_RNA (1)...(19): siRNA sense strand
gagagugaagacaguauuu

SEQ ID NO: 1125886 - RNA, 19 nt, Homo sapiens
  misc_RNA (1)...(19): siRNA sense strand
ggagagcagccaacgagaa

SEQ ID NO: 1125887 - RNA, 19 nt, Homo sapiens
  misc_RNA (1)...(19): siRNA sense strand
gcaagaacucugaggugaa

SEQ ID NO: 1125888 - RNA, 19 nt, Homo sapiens
  misc_RNA (1)...(19): siRNA sense strand
gacauucucacuauucuau

SEQ ID NO: 1125889 - RNA, 19 nt, Homo sapiens
  misc_RNA (1)...(19): siRNA sense strand
gaaucgaggcccugaaaca

SEQ ID NO: 1125890 - RNA, 19 nt, Homo sapiens
  misc_RNA (1)...(19): siRNA sense strand
caagaacucugaggugaac

SEQ ID NO: 1125891 - RNA, 19 nt, Homo sapiens
  misc_RNA (1)...(19): siRNA sense strand
ccuccucgcuguggucuuu

SEQ ID NO: 1125892 - RNA, 19 nt, Homo sapiens
  misc_RNA (1)...(19): siRNA sense strand
gaugggugcucuggagaug

SEQ ID NO: 1125893 - RNA, 19 nt, Homo sapiens
  misc_RNA (1)...(19): siRNA sense strand
ucacuauucuaugccuuaa

SEQ ID NO: 1125894 - RNA, 19 nt, Homo sapiens
  misc_RNA (1)...(19): siRNA sense strand
cagaaucgaggcccugaaa

SEQ ID NO: 1125895 - RNA, 19 nt, Homo sapiens
  misc_RNA (1)...(19): siRNA sense strand
ggacgaggaggacagaauc

SEQ ID NO: 1125896 - RNA, 19 nt, Homo sapiens
  misc_RNA (1)...(19): siRNA sense strand
ggacauucucacuauucua

SEQ ID NO: 1125897 - RNA, 19 nt, Homo sapiens
  misc_RNA (1)...(19): siRNA sense strand
cagaaggaccugaacaaca

SEQ ID NO: 1125898 - RNA, 19 nt, Homo sapiens
  misc_RNA (1)...(19): siRNA sense strand
gaaggaggagcucaacucu

SEQ ID NO: 1125899 - RNA, 19 nt, Homo sapiens
  misc_RNA (1)...(19): siRNA sense strand
aaacacuaaacgccaauaa

SEQ ID NO: 1125900 - RNA, 19 nt, Homo sapiens
  misc_RNA (1)...(19): siRNA sense strand
uggagacacuaaucgaaug

SEQ ID NO: 1125901 - RNA, 19 nt, Homo sapiens
  misc_RNA (1)...(19): siRNA sense strand
cacuaaacgccaauaauau

SEQ ID NO: 1125902 - RNA, 19 nt, Homo sapiens
  misc_RNA (1)...(19): siRNA sense strand
acucugaggugaacaggau

SEQ ID NO: 1125903 - RNA, 19 nt, Homo sapiens
  misc_RNA (1)...(19): siRNA sense strand
accagagccugucauuuga

SEQ ID NO: 1125904 - RNA, 19 nt, Homo sapiens
  misc_RNA (1)...(19): siRNA sense strand
gcagccacaaugcuucaaa

SEQ ID NO: 1125905 - RNA, 19 nt, Homo sapiens
  misc_RNA (1)...(19): siRNA sense strand
acacuaaucgaaugucaau

SEQ ID NO: 1125906 - RNA, 19 nt, Homo sapiens
  misc_RNA (1)...(19): siRNA sense strand
ccaacgagaaagcccguaa

SEQ ID NO: 1125907 - RNA, 19 nt, Homo sapiens
  misc_RNA (1)...(19): siRNA sense strand
acuaaacgccaauaauaug

SEQ ID NO: 1125908 - RNA, 19 nt, Homo sapiens
  misc_RNA (1)...(19): siRNA sense strand
ggagacacuaaucgaaugu

SEQ ID NO: 1125909 - RNA, 19 nt, Homo sapiens
  misc_RNA (1)...(19): siRNA sense strand
acuauucuaugccuuaaag

SEQ ID NO: 1125910 - RNA, 19 nt, Homo sapiens
  misc_RNA (1)...(19): siRNA sense strand
ucgcuguggucuuuaagga

SEQ ID NO: 1125911 - RNA, 19 nt, Homo sapiens
  misc_RNA (1)...(19): siRNA sense strand
acuaaucgaaugucaauca

SEQ ID NO: 1125912 - RNA, 19 nt, Homo sapiens
  misc_RNA (1)...(19): siRNA sense strand
cccggaagcuacuuucaag

SEQ ID NO: 1125913 - RNA, 19 nt, Homo sapiens
  misc_RNA (1)...(19): siRNA sense strand
caaucuggccaucugcauu

SEQ ID NO: 1125914 - RNA, 19 nt, Homo sapiens
  misc_RNA (1)...(19): siRNA sense strand
uaauauggagacacuaauc

SEQ ID NO: 1125915 - RNA, 19 nt, Homo sapiens
  misc_RNA (1)...(19): siRNA sense strand
agagggugauaucaaggaa

SEQ ID NO: 1125916 - RNA, 19 nt, Homo sapiens
  misc_RNA (1)...(19): siRNA sense strand
cagagccugucauuugaag

SEQ ID NO: 1125917 - RNA, 19 nt, Homo sapiens
  misc_RNA (1)...(19): siRNA sense strand
cugagaagcagccacaaug

SEQ ID NO: 1125918 - RNA, 19 nt, Homo sapiens
  misc_RNA (1)...(19): siRNA sense strand
ugagagugaagacaguauu

SEQ ID NO: 1125919 - RNA, 19 nt, Homo sapiens
  misc_RNA (1)...(19): siRNA sense strand
aaucuggccaucugcauug

SEQ ID NO: 1125920 - RNA, 19 nt, Homo sapiens
  misc_RNA (1)...(19): siRNA sense strand
gcaggacgaggaggacaga

SEQ ID NO: 1125921 - RNA, 19 nt, Homo sapiens
  misc_RNA (1)...(19): siRNA sense strand
ggcaucaugugagagugaa

SEQ ID NO: 1125922 - RNA, 19 nt, Homo sapiens
  misc_RNA (1)...(19): siRNA sense strand
ugaaggaggagcucaacuc

SEQ ID NO: 1125923 - RNA, 19 nt, Homo sapiens
  misc_RNA (1)...(19): siRNA sense strand
caacggaagggauauucag

SEQ ID NO: 1125924 - RNA, 19 nt, Homo sapiens
  misc_RNA (1)...(19): siRNA sense strand
agggugauaucaaggaaca

SEQ ID NO: 1125925 - RNA, 19 nt, Homo sapiens
  misc_RNA (1)...(19): siRNA sense strand
uaaacgccaauaauaugga

SEQ ID NO: 1125926 - RNA, 19 nt, Homo sapiens
  misc_RNA (1)...(19): siRNA sense strand
uauggagacacuaaucgaa

SEQ ID NO: 1125927 - RNA, 19 nt, Homo sapiens
  misc_RNA (1)...(19): siRNA sense strand
ccagagccugucauuugaa

SEQ ID NO: 1125928 - RNA, 19 nt, Homo sapiens
  misc_RNA (1)...(19): siRNA sense strand
cauuugaagcccagaagga

SEQ ID NO: 1125929 - RNA, 19 nt, Homo sapiens
  misc_RNA (1)...(19): siRNA sense strand
ugaaacagguugcagauaa

SEQ ID NO: 1125930 - RNA, 19 nt, Homo sapiens
  misc_RNA (1)...(19): siRNA sense strand
gaccagagccugucauuug

SEQ ID NO: 1125931 - RNA, 19 nt, Homo sapiens
  misc_RNA (1)...(19): siRNA sense strand
acacuaaacgccaauaaua

SEQ ID NO: 1125932 - RNA, 19 nt, Homo sapiens
  misc_RNA (1)...(19): siRNA sense strand
agaaggaccugaacaacaa

SEQ ID NO: 1125933 - RNA, 19 nt, Homo sapiens
  misc_RNA (1)...(19): siRNA sense strand
gaaacagguugcagauaag

SEQ ID NO: 1125934 - RNA, 19 nt, Homo sapiens
  misc_RNA (1)...(19): siRNA sense strand
gagagcagccaacgagaaa

SEQ ID NO: 1125935 - RNA, 19 nt, Homo sapiens
  misc_RNA (1)...(19): siRNA sense strand
ccaauaauauggagacacu

SEQ ID NO: 1125936 - RNA, 19 nt, Homo sapiens
  misc_RNA (1)...(19): siRNA sense strand
gagagugaagacaguauuu

SEQ ID NO: 1125937 - RNA, 19 nt, Homo sapiens
  misc_RNA (1)...(19): siRNA sense strand
ggagagcagccaacgagaa

SEQ ID NO: 1125938 - RNA, 19 nt, Homo sapiens
  misc_RNA (1)...(19): siRNA sense strand
gcaagaacucugaggugaa

SEQ ID NO: 1125939 - RNA, 19 nt, Homo sapiens
  misc_RNA (1)...(19): siRNA sense strand
gacauucucacuauucuau

SEQ ID NO: 1125940 - RNA, 19 nt, Homo sapiens
  misc_RNA (1)...(19): siRNA sense strand
gaaucgaggcccugaaaca

SEQ ID NO: 1125941 - RNA, 19 nt, Homo sapiens
  misc_RNA (1)...(19): siRNA sense strand
caagaacucugaggugaac

SEQ ID NO: 1125942 - RNA, 19 nt, Homo sapiens
  misc_RNA (1)...(19): siRNA sense strand
ccuccucgcuguggucuuu

SEQ ID NO: 1125943 - RNA, 19 nt, Homo sapiens
  misc_RNA (1)...(19): siRNA sense strand
gaugggugcucuggagaug

SEQ ID NO: 1125944 - RNA, 19 nt, Homo sapiens
  misc_RNA (1)...(19): siRNA sense strand
ucacuauucuaugccuuaa

SEQ ID NO: 1125945 - RNA, 19 nt, Homo sapiens
  misc_RNA (1)...(19): siRNA sense strand
cagaaucgaggcccugaaa

SEQ ID NO: 1125946 - RNA, 19 nt, Homo sapiens
  misc_RNA (1)...(19): siRNA sense strand
ggacgaggaggacagaauc

SEQ ID NO: 1125947 - RNA, 19 nt, Homo sapiens
  misc_RNA (1)...(19): siRNA sense strand
ggacauucucacuauucua

SEQ ID NO: 1125948 - RNA, 19 nt, Homo sapiens
  misc_RNA (1)...(19): siRNA sense strand
cagaaggaccugaacaaca

SEQ ID NO: 1125949 - RNA, 19 nt, Homo sapiens
  misc_RNA (1)...(19): siRNA sense strand
gaaggaggagcucaacucu

SEQ ID NO: 1125950 - RNA, 19 nt, Homo sapiens
  misc_RNA (1)...(19): siRNA sense strand
aaacacuaaacgccaauaa

SEQ ID NO: 1125951 - RNA, 19 nt, Homo sapiens
  misc_RNA (1)...(19): siRNA sense strand
uggagacacuaaucgaaug

SEQ ID NO: 1125952 - RNA, 19 nt, Homo sapiens
  misc_RNA (1)...(19): siRNA sense strand
cacuaaacgccaauaauau

SEQ ID NO: 1125953 - RNA, 19 nt, Homo sapiens
  misc_RNA (1)...(19): siRNA sense strand
acucugaggugaacaggau

SEQ ID NO: 1125954 - RNA, 19 nt, Homo sapiens
  misc_RNA (1)...(19): siRNA sense strand
accagagccugucauuuga

SEQ ID NO: 1125955 - RNA, 19 nt, Homo sapiens
  misc_RNA (1)...(19): siRNA sense strand
gcagccacaaugcuucaaa

SEQ ID NO: 1125956 - RNA, 19 nt, Homo sapiens
  misc_RNA (1)...(19): siRNA sense strand
acacuaaucgaaugucaau

SEQ ID NO: 1125957 - RNA, 19 nt, Homo sapiens
  misc_RNA (1)...(19): siRNA sense strand
ccaacgagaaagcccguaa

SEQ ID NO: 1125958 - RNA, 19 nt, Homo sapiens
  misc_RNA (1)...(19): siRNA sense strand
acuaaacgccaauaauaug

SEQ ID NO: 1125959 - RNA, 19 nt, Homo sapiens
  misc_RNA (1)...(19): siRNA sense strand
ggagacacuaaucgaaugu

SEQ ID NO: 1125960 - RNA, 19 nt, Homo sapiens
  misc_RNA (1)...(19): siRNA sense strand
acuauucuaugccuuaaag

SEQ ID NO: 1125961 - RNA, 19 nt, Homo sapiens
  misc_RNA (1)...(19): siRNA sense strand
ucgcuguggucuuuaagga

SEQ ID NO: 1125962 - RNA, 19 nt, Homo sapiens
  misc_RNA (1)...(19): siRNA sense strand
acuaaucgaaugucaauca

SEQ ID NO: 1125963 - RNA, 19 nt, Homo sapiens
  misc_RNA (1)...(19): siRNA sense strand
cccggaagcuacuuucaag

SEQ ID NO: 1125964 - RNA, 19 nt, Homo sapiens
  misc_RNA (1)...(19): siRNA sense strand
caaucuggccaucugcauu

SEQ ID NO: 1125965 - RNA, 19 nt, Homo sapiens
  misc_RNA (1)...(19): siRNA sense strand
uaauauggagacacuaauc

SEQ ID NO: 1125966 - RNA, 19 nt, Homo sapiens
  misc_RNA (1)...(19): siRNA sense strand
agagggugauaucaaggaa

SEQ ID NO: 1125967 - RNA, 19 nt, Homo sapiens
  misc_RNA (1)...(19): siRNA sense strand
cagagccugucauuugaag

SEQ ID NO: 1125968 - RNA, 19 nt, Homo sapiens
  misc_RNA (1)...(19): siRNA sense strand
cugagaagcagccacaaug

SEQ ID NO: 1125969 - RNA, 19 nt, Homo sapiens
  misc_RNA (1)...(19): siRNA sense strand
ugagagugaagacaguauu

SEQ ID NO: 1125970 - RNA, 19 nt, Homo sapiens
  misc_RNA (1)...(19): siRNA sense strand
aaucuggccaucugcauug

SEQ ID NO: 1125971 - RNA, 19 nt, Homo sapiens
  misc_RNA (1)...(19): siRNA sense strand
gcaggacgaggaggacaga

SEQ ID NO: 1125972 - RNA, 19 nt, Homo sapiens
  misc_RNA (1)...(19): siRNA sense strand
ggcaucaugugagagugaa

SEQ ID NO: 1125973 - RNA, 19 nt, Homo sapiens
  misc_RNA (1)...(19): siRNA sense strand
ugaaggaggagcucaacuc

SEQ ID NO: 1125974 - RNA, 19 nt, Homo sapiens
  misc_RNA (1)...(19): siRNA sense strand
caacggaagggauauucag

SEQ ID NO: 1125975 - RNA, 19 nt, Homo sapiens
  misc_RNA (1)...(19): siRNA sense strand
agggugauaucaaggaaca

SEQ ID NO: 1125976 - RNA, 19 nt, Homo sapiens
  misc_RNA (1)...(19): siRNA sense strand
uaaacgccaauaauaugga

SEQ ID NO: 1125977 - RNA, 19 nt, Homo sapiens
  misc_RNA (1)...(19): siRNA sense strand
uauggagacacuaaucgaa

SEQ ID NO: 1125978 - RNA, 19 nt, Homo sapiens
  misc_RNA (1)...(19): siRNA sense strand
ccagagccugucauuugaa

SEQ ID NO: 1125979 - RNA, 19 nt, Homo sapiens
  misc_RNA (1)...(19): siRNA sense strand
cauuugaagcccagaagga

SEQ ID NO: 1125980 - RNA, 19 nt, Homo sapiens
  misc_RNA (1)...(19): siRNA sense strand
ugaaacagguugcagauaa

SEQ ID NO: 1125981 - RNA, 19 nt, Homo sapiens
  misc_RNA (1)...(19): siRNA sense strand
gaccagagccugucauuug

SEQ ID NO: 1125982 - RNA, 19 nt, Homo sapiens
  misc_RNA (1)...(19): siRNA sense strand
agaaggaccugaacaacaa

SEQ ID NO: 1125983 - RNA, 19 nt, Homo sapiens
  misc_RNA (1)...(19): siRNA sense strand
gaaacagguugcagauaag

SEQ ID NO: 1125984 - RNA, 19 nt, Homo sapiens
  misc_RNA (1)...(19): siRNA sense strand
gcaagaacucugaggugaa

SEQ ID NO: 1125985 - RNA, 19 nt, Homo sapiens
  misc_RNA (1)...(19): siRNA sense strand
gaaucgaggcccugaaaca

SEQ ID NO: 1125986 - RNA, 19 nt, Homo sapiens
  misc_RNA (1)...(19): siRNA sense strand
caagaacucugaggugaac

SEQ ID NO: 1125987 - RNA, 19 nt, Homo sapiens
  misc_RNA (1)...(19): siRNA sense strand
cagaaucgaggcccugaaa

SEQ ID NO: 1125988 - RNA, 19 nt, Homo sapiens
  misc_RNA (1)...(19): siRNA sense strand
ggacgaggaggacagaauc

SEQ ID NO: 1125989 - RNA, 19 nt, Homo sapiens
  misc_RNA (1)...(19): siRNA sense strand
cagaaggaccugaacaaca

SEQ ID NO: 1125990 - RNA, 19 nt, Homo sapiens
  misc_RNA (1)...(19): siRNA sense strand
acucugaggugaacaggau

SEQ ID NO: 1125991 - RNA, 19 nt, Homo sapiens
  misc_RNA (1)...(19): siRNA sense strand
accagagccugucauuuga

SEQ ID NO: 1125992 - RNA, 19 nt, Homo sapiens
  misc_RNA (1)...(19): siRNA sense strand
caaucuggccaucugcauu

SEQ ID NO: 1125993 - RNA, 19 nt, Homo sapiens
  misc_RNA (1)...(19): siRNA sense strand
cagagccugucauuugaag

SEQ ID NO: 1125994 - RNA, 19 nt, Homo sapiens
  misc_RNA (1)...(19): siRNA sense strand
gcaggacgaggaggacaga

SEQ ID NO: 1125995 - RNA, 19 nt, Homo sapiens
  misc_RNA (1)...(19): siRNA sense strand
aaucuggccaucugcauug

SEQ ID NO: 1125996 - RNA, 19 nt, Homo sapiens
  misc_RNA (1)...(19): siRNA sense strand
ccagagccugucauuugaa

SEQ ID NO: 1125997 - RNA, 19 nt, Homo sapiens
  misc_RNA (1)...(19): siRNA sense strand
cauuugaagcccagaagga

SEQ ID NO: 1125998 - RNA, 19 nt, Homo sapiens
  misc_RNA (1)...(19): siRNA sense strand
augaugagcugaccuauuu

SEQ ID NO: 1125999 - RNA, 19 nt, Homo sapiens
  misc_RNA (1)...(19): siRNA sense strand
ggucccagcuugaagagaa

SEQ ID NO: 1126000 - RNA, 19 nt, Homo sapiens
  misc_RNA (1)...(19): siRNA sense strand
gaaguucccuguguuuaag

SEQ ID NO: 1126001 - RNA, 19 nt, Homo sapiens
  misc_RNA (1)...(19): siRNA sense strand
gggacaaacuacuucauca

SEQ ID NO: 1126002 - RNA, 19 nt, Homo sapiens
  misc_RNA (1)...(19): siRNA sense strand
caagaaguucccuguguuu

SEQ ID NO: 1126003 - RNA, 19 nt, Homo sapiens
  misc_RNA (1)...(19): siRNA sense strand
ggacaaacuacuucaucaa

SEQ ID NO: 1126004 - RNA, 19 nt, Homo sapiens
  misc_RNA (1)...(19): siRNA sense strand
caacaaagccaagcaugau

SEQ ID NO: 1126005 - RNA, 19 nt, Homo sapiens
  misc_RNA (1)...(19): siRNA sense strand
caaacuacuucaucaaggu

SEQ ID NO: 1126006 - RNA, 19 nt, Homo sapiens
  misc_RNA (1)...(19): siRNA sense strand
acaagaaguucccuguguu

SEQ ID NO: 1126007 - RNA, 19 nt, Homo sapiens
  misc_RNA (1)...(19): siRNA sense strand
uccaaucucucccucauga

SEQ ID NO: 1126008 - RNA, 19 nt, Homo sapiens
  misc_RNA (1)...(19): siRNA sense strand
ccaacaaagccaagcauga

SEQ ID NO: 1126009 - RNA, 19 nt, Homo sapiens
  misc_RNA (1)...(19): siRNA sense strand
agaaguucccuguguuuaa

SEQ ID NO: 1126010 - RNA, 19 nt, Homo sapiens
  misc_RNA (1)...(19): siRNA sense strand
aacaagaaguucccugugu

SEQ ID NO: 1126011 - RNA, 19 nt, Homo sapiens
  misc_RNA (1)...(19): siRNA sense strand
caaucucucccucaugaaa

SEQ ID NO: 1126012 - RNA, 19 nt, Homo sapiens
  misc_RNA (1)...(19): siRNA sense strand
gacaaacuacuucaucaag

SEQ ID NO: 1126013 - RNA, 19 nt, Homo sapiens
  misc_RNA (1)...(19): siRNA sense strand
uuaaggccgugucauucaa

SEQ ID NO: 1126014 - RNA, 19 nt, Homo sapiens
  misc_RNA (1)...(19): siRNA sense strand
ugagcugaccuauuucuga

SEQ ID NO: 1126015 - RNA, 19 nt, Homo sapiens
  misc_RNA (1)...(19): siRNA sense strand
acaaagccaagcaugauga

SEQ ID NO: 1126016 - RNA, 19 nt, Homo sapiens
  misc_RNA (1)...(19): siRNA sense strand
uaacuaccagaccaacaaa

SEQ ID NO: 1126017 - RNA, 19 nt, Homo sapiens
  misc_RNA (1)...(19): siRNA sense strand
gaagagaaagaaaacaaga

SEQ ID NO: 1126018 - RNA, 19 nt, Homo sapiens
  misc_RNA (1)...(19): siRNA sense strand
cuaacuaccagaccaacaa

SEQ ID NO: 1126019 - RNA, 19 nt, Homo sapiens
  misc_RNA (1)...(19): siRNA sense strand
aagaaguucccuguguuua

SEQ ID NO: 1126020 - RNA, 19 nt, Homo sapiens
  misc_RNA (1)...(19): siRNA sense strand
guuccaaucucucccucau

SEQ ID NO: 1126021 - RNA, 19 nt, Homo sapiens
  misc_RNA (1)...(19): siRNA sense strand
caugaugagcugaccuauu

SEQ ID NO: 1126022 - RNA, 19 nt, Homo sapiens
  misc_RNA (1)...(19): siRNA sense strand
ggugaggucccagcuugaa

SEQ ID NO: 1126023 - RNA, 19 nt, Homo sapiens
  misc_RNA (1)...(19): siRNA sense strand
gaaagaaaacaagaaguuc

SEQ ID NO: 1126024 - RNA, 19 nt, Homo sapiens
  misc_RNA (1)...(19): siRNA sense strand
gaugagcugaccuauuucu

SEQ ID NO: 1126025 - RNA, 19 nt, Homo sapiens
  misc_RNA (1)...(19): siRNA sense strand
uguuuaaggccgugucauu

SEQ ID NO: 1126026 - RNA, 19 nt, Homo sapiens
  misc_RNA (1)...(19): siRNA sense strand
cagcuugaagagaaagaaa

SEQ ID NO: 1126027 - RNA, 19 nt, Homo sapiens
  misc_RNA (1)...(19): siRNA sense strand
ugaggucccagcuugaaga

SEQ ID NO: 1126028 - RNA, 19 nt, Homo sapiens
  misc_RNA (1)...(19): siRNA sense strand
cccuugaccuuaucuaacu

SEQ ID NO: 1126029 - RNA, 19 nt, Homo sapiens
  misc_RNA (1)...(19): siRNA sense strand
gucccagcuugaagagaaa

SEQ ID NO: 1126030 - RNA, 19 nt, Homo sapiens
  misc_RNA (1)...(19): siRNA sense strand
gaaggaaccuguacagaua

SEQ ID NO: 1126031 - RNA, 19 nt, Homo sapiens
  misc_RNA (1)...(19): siRNA sense strand
gaauguagcuccagauaug

SEQ ID NO: 1126032 - RNA, 19 nt, Homo sapiens
  misc_RNA (1)...(19): siRNA sense strand
uaaagaaggcccuguauua

SEQ ID NO: 1126033 - RNA, 19 nt, Homo sapiens
  misc_RNA (1)...(19): siRNA sense strand
ccacauggcuugaguauag

SEQ ID NO: 1126034 - RNA, 19 nt, Homo sapiens
  misc_RNA (1)...(19): siRNA sense strand
gaaagaggaugauggaagu

SEQ ID NO: 1126035 - RNA, 19 nt, Homo sapiens
  misc_RNA (1)...(19): siRNA sense strand
guaaguggauacagaguaa

SEQ ID NO: 1126036 - RNA, 19 nt, Homo sapiens
  misc_RNA (1)...(19): siRNA sense strand
ccaagaaccuguacaagga

SEQ ID NO: 1126037 - RNA, 19 nt, Homo sapiens
  misc_RNA (1)...(19): siRNA sense strand
gcuuaaaccuugguaauuu

SEQ ID NO: 1126038 - RNA, 19 nt, Homo sapiens
  misc_RNA (1)...(19): siRNA sense strand
gaugaaaugugcaacuuau

SEQ ID NO: 1126039 - RNA, 19 nt, Homo sapiens
  misc_RNA (1)...(19): siRNA sense strand
ugagagagauuaagcauuc

SEQ ID NO: 1126040 - RNA, 19 nt, Homo sapiens
  misc_RNA (1)...(19): siRNA sense strand
gaacaucgaucaguuaaaa

SEQ ID NO: 1126041 - RNA, 19 nt, Homo sapiens
  misc_RNA (1)...(19): siRNA sense strand
aaagggaaguggaggcuua

SEQ ID NO: 1126042 - RNA, 19 nt, Homo sapiens
  misc_RNA (1)...(19): siRNA sense strand
gcauugagguccaggaaau

SEQ ID NO: 1126043 - RNA, 19 nt, Homo sapiens
  misc_RNA (1)...(19): siRNA sense strand
gguaguaaguggauacaga

SEQ ID NO: 1126044 - RNA, 19 nt, Homo sapiens
  misc_RNA (1)...(19): siRNA sense strand
agaagaagaagaaguguua

SEQ ID NO: 1126045 - RNA, 19 nt, Homo sapiens
  misc_RNA (1)...(19): siRNA sense strand
caaacuggauccaaacaau

SEQ ID NO: 1126046 - RNA, 19 nt, Homo sapiens
  misc_RNA (1)...(19): siRNA sense strand
gaaauuggaacaucgauca

SEQ ID NO: 1126047 - RNA, 19 nt, Homo sapiens
  misc_RNA (1)...(19): siRNA sense strand
gacauuucaugccauuaua

SEQ ID NO: 1126048 - RNA, 19 nt, Homo sapiens
  misc_RNA (1)...(19): siRNA sense strand
gcauguaccuuaugauguc

SEQ ID NO: 1126049 - RNA, 19 nt, Homo sapiens
  misc_RNA (1)...(19): siRNA sense strand
ccacagaggugaccauguc

SEQ ID NO: 1126050 - RNA, 19 nt, Homo sapiens
  misc_RNA (1)...(19): siRNA sense strand
gguguuggauucagaguug

SEQ ID NO: 1126051 - RNA, 19 nt, Homo sapiens
  misc_RNA (1)...(19): siRNA sense strand
gaggagagacuggaaguaa

SEQ ID NO: 1126052 - RNA, 19 nt, Homo sapiens
  misc_RNA (1)...(19): siRNA sense strand
guacagauaaagccaauau

SEQ ID NO: 1126053 - RNA, 19 nt, Homo sapiens
  misc_RNA (1)...(19): siRNA sense strand
gacagaagccacacacauu

SEQ ID NO: 1126054 - RNA, 19 nt, Homo sapiens
  misc_RNA (1)...(19): siRNA sense strand
cuaaacaguccgauacaua

SEQ ID NO: 1126055 - RNA, 19 nt, Homo sapiens
  misc_RNA (1)...(19): siRNA sense strand
aaacugacaccaaagaauu

SEQ ID NO: 1126056 - RNA, 19 nt, Homo sapiens
  misc_RNA (1)...(19): siRNA sense strand
aaagaaggcccuguauuaa

SEQ ID NO: 1126057 - RNA, 19 nt, Homo sapiens
  misc_RNA (1)...(19): siRNA sense strand
ggauuggccuggaguauac

SEQ ID NO: 1126058 - RNA, 19 nt, Homo sapiens
  misc_RNA (1)...(19): siRNA sense strand
caaagguguuggauucaga

SEQ ID NO: 1126059 - RNA, 19 nt, Homo sapiens
  misc_RNA (1)...(19): siRNA sense strand
agaaggcccuguauuaauc

SEQ ID NO: 1126060 - RNA, 19 nt, Homo sapiens
  misc_RNA (1)...(19): siRNA sense strand
ccauuuagguaagguagua

SEQ ID NO: 1126061 - RNA, 19 nt, Homo sapiens
  misc_RNA (1)...(19): siRNA sense strand
ggauacagaguaagaaaug

SEQ ID NO: 1126062 - RNA, 19 nt, Homo sapiens
  misc_RNA (1)...(19): siRNA sense strand
gcacuggagccauuuaugu

SEQ ID NO: 1126063 - RNA, 19 nt, Homo sapiens
  misc_RNA (1)...(19): siRNA sense strand
agaauaaccuggugauuuu

SEQ ID NO: 1126064 - RNA, 19 nt, Homo sapiens
  misc_RNA (1)...(19): siRNA sense strand
cguaagggcuacagucgaa

SEQ ID NO: 1126065 - RNA, 19 nt, Homo sapiens
  misc_RNA (1)...(19): siRNA sense strand
ccucacagcuuggcucuug

SEQ ID NO: 1126066 - RNA, 19 nt, Homo sapiens
  misc_RNA (1)...(19): siRNA sense strand
gcagugaccaagagaaaga

SEQ ID NO: 1126067 - RNA, 19 nt, Homo sapiens
  misc_RNA (1)...(19): siRNA sense strand
cgugaagucugauaugguu

SEQ ID NO: 1126068 - RNA, 19 nt, Homo sapiens
  misc_RNA (1)...(19): siRNA sense strand
ggaccaagaaccuguacaa

SEQ ID NO: 1126069 - RNA, 19 nt, Homo sapiens
  misc_RNA (1)...(19): siRNA sense strand
gaauuugugagagagauua

SEQ ID NO: 1126070 - RNA, 19 nt, Homo sapiens
  misc_RNA (1)...(19): siRNA sense strand
caauaaagaaggcccugua

SEQ ID NO: 1126071 - RNA, 19 nt, Homo sapiens
  misc_RNA (1)...(19): siRNA sense strand
aagaauaaccuggugauuu

SEQ ID NO: 1126072 - RNA, 19 nt, Homo sapiens
  misc_RNA (1)...(19): siRNA sense strand
ggagagacuggaaguaaau

SEQ ID NO: 1126073 - RNA, 19 nt, Homo sapiens
  misc_RNA (1)...(19): siRNA sense strand
gauaagauuccuuuacuac

SEQ ID NO: 1126074 - RNA, 19 nt, Homo sapiens
  misc_RNA (1)...(19): siRNA sense strand
ggacagaagccacacacau

SEQ ID NO: 1126075 - RNA, 19 nt, Homo sapiens
  misc_RNA (1)...(19): siRNA sense strand
gaaacuaccagaccauuuu

SEQ ID NO: 1126076 - RNA, 19 nt, Homo sapiens
  misc_RNA (1)...(19): siRNA sense strand
gcuggcauguaccuuauga

SEQ ID NO: 1126077 - RNA, 19 nt, Homo sapiens
  misc_RNA (1)...(19): siRNA sense strand
caccuugacugagaaauug

SEQ ID NO: 1126078 - RNA, 19 nt, Homo sapiens
  misc_RNA (1)...(19): siRNA sense strand
aaacuggauccaaacaaua

SEQ ID NO: 1126079 - RNA, 19 nt, Homo sapiens
  misc_RNA (1)...(19): siRNA sense strand
ggaauuauugggucacaga

SEQ ID NO: 1126080 - RNA, 19 nt, Homo sapiens
  misc_RNA (1)...(19): siRNA sense strand
gaaaugugcaacuuauaca

SEQ ID NO: 1126081 - RNA, 19 nt, Homo sapiens
  misc_RNA (1)...(19): siRNA sense strand
gauaaagccaauauucugu

SEQ ID NO: 1126082 - RNA, 19 nt, Homo sapiens
  misc_RNA (1)...(19): siRNA sense strand
gaagcccacuuucugucuu

SEQ ID NO: 1126083 - RNA, 19 nt, Homo sapiens
  misc_RNA (1)...(19): siRNA sense strand
ggaaguucaccuugacuga

SEQ ID NO: 1126084 - RNA, 19 nt, Homo sapiens
  misc_RNA (1)...(19): siRNA sense strand
uaagauuccuuuacuacag

SEQ ID NO: 1126085 - RNA, 19 nt, Homo sapiens
  misc_RNA (1)...(19): siRNA sense strand
gcaugucuuugccuauaga

SEQ ID NO: 1126086 - RNA, 19 nt, Homo sapiens
  misc_RNA (1)...(19): siRNA sense strand
guggaaaguucaucacaca

SEQ ID NO: 1126087 - RNA, 19 nt, Homo sapiens
  misc_RNA (1)...(19): siRNA sense strand
cagaauguagcuccagaua

SEQ ID NO: 1126088 - RNA, 19 nt, Homo sapiens
  misc_RNA (1)...(19): siRNA sense strand
gagccagcauggauacugu

SEQ ID NO: 1126089 - RNA, 19 nt, Homo sapiens
  misc_RNA (1)...(19): siRNA sense strand
ugaaggaaccuguacagau

SEQ ID NO: 1126090 - RNA, 19 nt, Homo sapiens
  misc_RNA (1)...(19): siRNA sense strand
cagcaggauugugcaguuu

SEQ ID NO: 1126091 - RNA, 19 nt, Homo sapiens
  misc_RNA (1)...(19): siRNA sense strand
caaguuuguuuaccagcaa

SEQ ID NO: 1126092 - RNA, 19 nt, Homo sapiens
  misc_RNA (1)...(19): siRNA sense strand
caauucccgugaagucuga

SEQ ID NO: 1126093 - RNA, 19 nt, Homo sapiens
  misc_RNA (1)...(19): siRNA sense strand
gcacgucuagugaugaaau

SEQ ID NO: 1126094 - RNA, 19 nt, Homo sapiens
  misc_RNA (1)...(19): siRNA sense strand
gggcagugaccaagagaaa

SEQ ID NO: 1126095 - RNA, 19 nt, Homo sapiens
  misc_RNA (1)...(19): siRNA sense strand
gcauucaucauuuggaaga

SEQ ID NO: 1126096 - RNA, 19 nt, Homo sapiens
  misc_RNA (1)...(19): siRNA sense strand
ggaaaguucaucacacagu

SEQ ID NO: 1126097 - RNA, 19 nt, Homo sapiens
  misc_RNA (1)...(19): siRNA sense strand
ccaagcaugcaguuucuuu

SEQ ID NO: 1126098 - RNA, 19 nt, Homo sapiens
  misc_RNA (1)...(19): siRNA sense strand
gugaugaaaugugcaacuu

SEQ ID NO: 1126099 - RNA, 19 nt, Homo sapiens
  misc_RNA (1)...(19): siRNA sense strand
guccaucacauguuacuuu

SEQ ID NO: 1126100 - RNA, 19 nt, Homo sapiens
  misc_RNA (1)...(19): siRNA sense strand
auaccaggcuugcucuuug

SEQ ID NO: 1126101 - RNA, 19 nt, Homo sapiens
  misc_RNA (1)...(19): siRNA sense strand
ccuacuggcugcaagaugu

SEQ ID NO: 1126102 - RNA, 19 nt, Homo sapiens
  misc_RNA (1)...(19): siRNA sense strand
uacuguccaucacauguua

SEQ ID NO: 1126103 - RNA, 19 nt, Homo sapiens
  misc_RNA (1)...(19): siRNA sense strand
gcgcaagcacuuugauaug

SEQ ID NO: 1126104 - RNA, 19 nt, Homo sapiens
  misc_RNA (1)...(19): siRNA sense strand
gcuugaguauagauaaaga

SEQ ID NO: 1126105 - RNA, 19 nt, Homo sapiens
  misc_RNA (1)...(19): siRNA sense strand
aaauaaugcugcaguacuc

SEQ ID NO: 1126106 - RNA, 19 nt, Homo sapiens
  misc_RNA (1)...(19): siRNA sense strand
gcugcaagauguguauuca

SEQ ID NO: 1126107 - RNA, 19 nt, Homo sapiens
  misc_RNA (1)...(19): siRNA sense strand
guaagguaguaaguggaua

SEQ ID NO: 1126108 - RNA, 19 nt, Homo sapiens
  misc_RNA (1)...(19): siRNA sense strand
acagauaaagccaauauuc

SEQ ID NO: 1126109 - RNA, 19 nt, Homo sapiens
  misc_RNA (1)...(19): siRNA sense strand
guggugaauucugacauuu

SEQ ID NO: 1126110 - RNA, 19 nt, Homo sapiens
  misc_RNA (1)...(19): siRNA sense strand
gagaagaagaagaaguguu

SEQ ID NO: 1126111 - RNA, 19 nt, Homo sapiens
  misc_RNA (1)...(19): siRNA sense strand
acacucaccauuuagguaa

SEQ ID NO: 1126112 - RNA, 19 nt, Homo sapiens
  misc_RNA (1)...(19): siRNA sense strand
aggagagacuggaaguaaa

SEQ ID NO: 1126113 - RNA, 19 nt, Homo sapiens
  misc_RNA (1)...(19): siRNA sense strand
gugaugaacuuuuccaaug

SEQ ID NO: 1126114 - RNA, 19 nt, Homo sapiens
  misc_RNA (1)...(19): siRNA sense strand
aagcauucaucauuuggaa

SEQ ID NO: 1126115 - RNA, 19 nt, Homo sapiens
  misc_RNA (1)...(19): siRNA sense strand
gaagucugauaugguuaug

SEQ ID NO: 1126116 - RNA, 19 nt, Homo sapiens
  misc_RNA (1)...(19): siRNA sense strand
gguggcacgucuagugaug

SEQ ID NO: 1126117 - RNA, 19 nt, Homo sapiens
  misc_RNA (1)...(19): siRNA sense strand
ugacauuucaugccauuau

SEQ ID NO: 1126118 - RNA, 19 nt, Homo sapiens
  misc_RNA (1)...(19): siRNA sense strand
gagagacuggaaguaaaua

SEQ ID NO: 1126119 - RNA, 19 nt, Homo sapiens
  misc_RNA (1)...(19): siRNA sense strand
cacuggaaguuacugguuu

SEQ ID NO: 1126120 - RNA, 19 nt, Homo sapiens
  misc_RNA (1)...(19): siRNA sense strand
ggucggauccaguguuuua

SEQ ID NO: 1126121 - RNA, 19 nt, Homo sapiens
  misc_RNA (1)...(19): siRNA sense strand
ggacucggaccaauugaag

SEQ ID NO: 1126122 - RNA, 19 nt, Homo sapiens
  misc_RNA (1)...(19): siRNA sense strand
ugaugaaaugugcaacuua

SEQ ID NO: 1126123 - RNA, 19 nt, Homo sapiens
  misc_RNA (1)...(19): siRNA sense strand
aguucacacucaccauuua

SEQ ID NO: 1126124 - RNA, 19 nt, Homo sapiens
  misc_RNA (1)...(19): siRNA sense strand
uuugauaugccucaugaua

SEQ ID NO: 1126125 - RNA, 19 nt, Homo sapiens
  misc_RNA (1)...(19): siRNA sense strand
ggaaguuacugguuuugug

SEQ ID NO: 1126126 - RNA, 19 nt, Homo sapiens
  misc_RNA (1)...(19): siRNA sense strand
uggcuugaguauagauaaa

SEQ ID NO: 1126127 - RNA, 19 nt, Homo sapiens
  misc_RNA (1)...(19): siRNA sense strand
guguggaaguucaccuuga

SEQ ID NO: 1126128 - RNA, 19 nt, Homo sapiens
  misc_RNA (1)...(19): siRNA sense strand
aaucagaagaggaguauuc

SEQ ID NO: 1126129 - RNA, 19 nt, Homo sapiens
  misc_RNA (1)...(19): siRNA sense strand
ucaccuugacugagaaauu

SEQ ID NO: 1126130 - RNA, 19 nt, Homo sapiens
  misc_RNA (1)...(19): siRNA sense strand
gaaggaaccuguacagaua

SEQ ID NO: 1126131 - RNA, 19 nt, Homo sapiens
  misc_RNA (1)...(19): siRNA sense strand
gaauguagcuccagauaug

SEQ ID NO: 1126132 - RNA, 19 nt, Homo sapiens
  misc_RNA (1)...(19): siRNA sense strand
uaaagaaggcccuguauua

SEQ ID NO: 1126133 - RNA, 19 nt, Homo sapiens
  misc_RNA (1)...(19): siRNA sense strand
ccacauggcuugaguauag

SEQ ID NO: 1126134 - RNA, 19 nt, Homo sapiens
  misc_RNA (1)...(19): siRNA sense strand
gaaagaggaugauggaagu

SEQ ID NO: 1126135 - RNA, 19 nt, Homo sapiens
  misc_RNA (1)...(19): siRNA sense strand
guaaguggauacagaguaa

SEQ ID NO: 1126136 - RNA, 19 nt, Homo sapiens
  misc_RNA (1)...(19): siRNA sense strand
ccaagaaccuguacaagga

SEQ ID NO: 1126137 - RNA, 19 nt, Homo sapiens
  misc_RNA (1)...(19): siRNA sense strand
gcuuaaaccuugguaauuu

SEQ ID NO: 1126138 - RNA, 19 nt, Homo sapiens
  misc_RNA (1)...(19): siRNA sense strand
gaugaaaugugcaacuuau

SEQ ID NO: 1126139 - RNA, 19 nt, Homo sapiens
  misc_RNA (1)...(19): siRNA sense strand
ugagagagauuaagcauuc

SEQ ID NO: 1126140 - RNA, 19 nt, Homo sapiens
  misc_RNA (1)...(19): siRNA sense strand
gaacaucgaucaguuaaaa

SEQ ID NO: 1126141 - RNA, 19 nt, Homo sapiens
  misc_RNA (1)...(19): siRNA sense strand
aaagggaaguggaggcuua

SEQ ID NO: 1126142 - RNA, 19 nt, Homo sapiens
  misc_RNA (1)...(19): siRNA sense strand
gcauugagguccaggaaau

SEQ ID NO: 1126143 - RNA, 19 nt, Homo sapiens
  misc_RNA (1)...(19): siRNA sense strand
gguaguaaguggauacaga

SEQ ID NO: 1126144 - RNA, 19 nt, Homo sapiens
  misc_RNA (1)...(19): siRNA sense strand
agaagaagaagaaguguua

SEQ ID NO: 1126145 - RNA, 19 nt, Homo sapiens
  misc_RNA (1)...(19): siRNA sense strand
caaacuggauccaaacaau

SEQ ID NO: 1126146 - RNA, 19 nt, Homo sapiens
  misc_RNA (1)...(19): siRNA sense strand
gaaauuggaacaucgauca

SEQ ID NO: 1126147 - RNA, 19 nt, Homo sapiens
  misc_RNA (1)...(19): siRNA sense strand
gacauuucaugccauuaua

SEQ ID NO: 1126148 - RNA, 19 nt, Homo sapiens
  misc_RNA (1)...(19): siRNA sense strand
gcauguaccuuaugauguc

SEQ ID NO: 1126149 - RNA, 19 nt, Homo sapiens
  misc_RNA (1)...(19): siRNA sense strand
ccacagaggugaccauguc

SEQ ID NO: 1126150 - RNA, 19 nt, Homo sapiens
  misc_RNA (1)...(19): siRNA sense strand
gguguuggauucagaguug

SEQ ID NO: 1126151 - RNA, 19 nt, Homo sapiens
  misc_RNA (1)...(19): siRNA sense strand
gaggagagacuggaaguaa

SEQ ID NO: 1126152 - RNA, 19 nt, Homo sapiens
  misc_RNA (1)...(19): siRNA sense strand
guacagauaaagccaauau

SEQ ID NO: 1126153 - RNA, 19 nt, Homo sapiens
  misc_RNA (1)...(19): siRNA sense strand
gacagaagccacacacauu

SEQ ID NO: 1126154 - RNA, 19 nt, Homo sapiens
  misc_RNA (1)...(19): siRNA sense strand
cuaaacaguccgauacaua

SEQ ID NO: 1126155 - RNA, 19 nt, Homo sapiens
  misc_RNA (1)...(19): siRNA sense strand
aaacugacaccaaagaauu

SEQ ID NO: 1126156 - RNA, 19 nt, Homo sapiens
  misc_RNA (1)...(19): siRNA sense strand
aaagaaggcccuguauuaa

SEQ ID NO: 1126157 - RNA, 19 nt, Homo sapiens
  misc_RNA (1)...(19): siRNA sense strand
ggauuggccuggaguauac

SEQ ID NO: 1126158 - RNA, 19 nt, Homo sapiens
  misc_RNA (1)...(19): siRNA sense strand
caaagguguuggauucaga

SEQ ID NO: 1126159 - RNA, 19 nt, Homo sapiens
  misc_RNA (1)...(19): siRNA sense strand
agaaggcccuguauuaauc

SEQ ID NO: 1126160 - RNA, 19 nt, Homo sapiens
  misc_RNA (1)...(19): siRNA sense strand
ccauuuagguaagguagua

SEQ ID NO: 1126161 - RNA, 19 nt, Homo sapiens
  misc_RNA (1)...(19): siRNA sense strand
ggauacagaguaagaaaug

SEQ ID NO: 1126162 - RNA, 19 nt, Homo sapiens
  misc_RNA (1)...(19): siRNA sense strand
gcacuggagccauuuaugu

SEQ ID NO: 1126163 - RNA, 19 nt, Homo sapiens
  misc_RNA (1)...(19): siRNA sense strand
agaauaaccuggugauuuu

SEQ ID NO: 1126164 - RNA, 19 nt, Homo sapiens
  misc_RNA (1)...(19): siRNA sense strand
cguaagggcuacagucgaa

SEQ ID NO: 1126165 - RNA, 19 nt, Homo sapiens
  misc_RNA (1)...(19): siRNA sense strand
ccucacagcuuggcucuug

SEQ ID NO: 1126166 - RNA, 19 nt, Homo sapiens
  misc_RNA (1)...(19): siRNA sense strand
gcagugaccaagagaaaga

SEQ ID NO: 1126167 - RNA, 19 nt, Homo sapiens
  misc_RNA (1)...(19): siRNA sense strand
cgugaagucugauaugguu

SEQ ID NO: 1126168 - RNA, 19 nt, Homo sapiens
  misc_RNA (1)...(19): siRNA sense strand
ggaccaagaaccuguacaa

SEQ ID NO: 1126169 - RNA, 19 nt, Homo sapiens
  misc_RNA (1)...(19): siRNA sense strand
gaauuugugagagagauua

SEQ ID NO: 1126170 - RNA, 19 nt, Homo sapiens
  misc_RNA (1)...(19): siRNA sense strand
caauaaagaaggcccugua

SEQ ID NO: 1126171 - RNA, 19 nt, Homo sapiens
  misc_RNA (1)...(19): siRNA sense strand
aagaauaaccuggugauuu

SEQ ID NO: 1126172 - RNA, 19 nt, Homo sapiens
  misc_RNA (1)...(19): siRNA sense strand
ggagagacuggaaguaaau

SEQ ID NO: 1126173 - RNA, 19 nt, Homo sapiens
  misc_RNA (1)...(19): siRNA sense strand
gauaagauuccuuuacuac

SEQ ID NO: 1126174 - RNA, 19 nt, Homo sapiens
  misc_RNA (1)...(19): siRNA sense strand
ggacagaagccacacacau

SEQ ID NO: 1126175 - RNA, 19 nt, Homo sapiens
  misc_RNA (1)...(19): siRNA sense strand
gaaacuaccagaccauuuu

SEQ ID NO: 1126176 - RNA, 19 nt, Homo sapiens
  misc_RNA (1)...(19): siRNA sense strand
gcuggcauguaccuuauga

SEQ ID NO: 1126177 - RNA, 19 nt, Homo sapiens
  misc_RNA (1)...(19): siRNA sense strand
caccuugacugagaaauug

SEQ ID NO: 1126178 - RNA, 19 nt, Homo sapiens
  misc_RNA (1)...(19): siRNA sense strand
aaacuggauccaaacaaua

SEQ ID NO: 1126179 - RNA, 19 nt, Homo sapiens
  misc_RNA (1)...(19): siRNA sense strand
ggaauuauugggucacaga

SEQ ID NO: 1126180 - RNA, 19 nt, Homo sapiens
  misc_RNA (1)...(19): siRNA sense strand
gaaaugugcaacuuauaca

SEQ ID NO: 1126181 - RNA, 19 nt, Homo sapiens
  misc_RNA (1)...(19): siRNA sense strand
gauaaagccaauauucugu

SEQ ID NO: 1126182 - RNA, 19 nt, Homo sapiens
  misc_RNA (1)...(19): siRNA sense strand
gaagcccacuuucugucuu

SEQ ID NO: 1126183 - RNA, 19 nt, Homo sapiens
  misc_RNA (1)...(19): siRNA sense strand
ggaaguucaccuugacuga

SEQ ID NO: 1126184 - RNA, 19 nt, Homo sapiens
  misc_RNA (1)...(19): siRNA sense strand
uaagauuccuuuacuacag

SEQ ID NO: 1126185 - RNA, 19 nt, Homo sapiens
  misc_RNA (1)...(19): siRNA sense strand
gcaugucuuugccuauaga

SEQ ID NO: 1126186 - RNA, 19 nt, Homo sapiens
  misc_RNA (1)...(19): siRNA sense strand
guggaaaguucaucacaca

SEQ ID NO: 1126187 - RNA, 19 nt, Homo sapiens
  misc_RNA (1)...(19): siRNA sense strand
cagaauguagcuccagaua

SEQ ID NO: 1126188 - RNA, 19 nt, Homo sapiens
  misc_RNA (1)...(19): siRNA sense strand
gagccagcauggauacugu

SEQ ID NO: 1126189 - RNA, 19 nt, Homo sapiens
  misc_RNA (1)...(19): siRNA sense strand
ugaaggaaccuguacagau

SEQ ID NO: 1126190 - RNA, 19 nt, Homo sapiens
  misc_RNA (1)...(19): siRNA sense strand
cagcaggauugugcaguuu

SEQ ID NO: 1126191 - RNA, 19 nt, Homo sapiens
  misc_RNA (1)...(19): siRNA sense strand
caaguuuguuuaccagcaa

SEQ ID NO: 1126192 - RNA, 19 nt, Homo sapiens
  misc_RNA (1)...(19): siRNA sense strand
caauucccgugaagucuga

SEQ ID NO: 1126193 - RNA, 19 nt, Homo sapiens
  misc_RNA (1)...(19): siRNA sense strand
gcacgucuagugaugaaau

SEQ ID NO: 1126194 - RNA, 19 nt, Homo sapiens
  misc_RNA (1)...(19): siRNA sense strand
gggcagugaccaagagaaa

SEQ ID NO: 1126195 - RNA, 19 nt, Homo sapiens
  misc_RNA (1)...(19): siRNA sense strand
gcauucaucauuuggaaga

SEQ ID NO: 1126196 - RNA, 19 nt, Homo sapiens
  misc_RNA (1)...(19): siRNA sense strand
ggaaaguucaucacacagu

SEQ ID NO: 1126197 - RNA, 19 nt, Homo sapiens
  misc_RNA (1)...(19): siRNA sense strand
ccaagcaugcaguuucuuu

SEQ ID NO: 1126198 - RNA, 19 nt, Homo sapiens
  misc_RNA (1)...(19): siRNA sense strand
gugaugaaaugugcaacuu

SEQ ID NO: 1126199 - RNA, 19 nt, Homo sapiens
  misc_RNA (1)...(19): siRNA sense strand
guccaucacauguuacuuu

SEQ ID NO: 1126200 - RNA, 19 nt, Homo sapiens
  misc_RNA (1)...(19): siRNA sense strand
auaccaggcuugcucuuug

SEQ ID NO: 1126201 - RNA, 19 nt, Homo sapiens
  misc_RNA (1)...(19): siRNA sense strand
ccuacuggcugcaagaugu

SEQ ID NO: 1126202 - RNA, 19 nt, Homo sapiens
  misc_RNA (1)...(19): siRNA sense strand
uacuguccaucacauguua

SEQ ID NO: 1126203 - RNA, 19 nt, Homo sapiens
  misc_RNA (1)...(19): siRNA sense strand
gcgcaagcacuuugauaug

SEQ ID NO: 1126204 - RNA, 19 nt, Homo sapiens
  misc_RNA (1)...(19): siRNA sense strand
gcuugaguauagauaaaga

SEQ ID NO: 1126205 - RNA, 19 nt, Homo sapiens
  misc_RNA (1)...(19): siRNA sense strand
aaauaaugcugcaguacuc

SEQ ID NO: 1126206 - RNA, 19 nt, Homo sapiens
  misc_RNA (1)...(19): siRNA sense strand
gcugcaagauguguauuca

SEQ ID NO: 1126207 - RNA, 19 nt, Homo sapiens
  misc_RNA (1)...(19): siRNA sense strand
guaagguaguaaguggaua

SEQ ID NO: 1126208 - RNA, 19 nt, Homo sapiens
  misc_RNA (1)...(19): siRNA sense strand
acagauaaagccaauauuc

SEQ ID NO: 1126209 - RNA, 19 nt, Homo sapiens
  misc_RNA (1)...(19): siRNA sense strand
guggugaauucugacauuu

SEQ ID NO: 1126210 - RNA, 19 nt, Homo sapiens
  misc_RNA (1)...(19): siRNA sense strand
gagaagaagaagaaguguu

SEQ ID NO: 1126211 - RNA, 19 nt, Homo sapiens
  misc_RNA (1)...(19): siRNA sense strand
acacucaccauuuagguaa

SEQ ID NO: 1126212 - RNA, 19 nt, Homo sapiens
  misc_RNA (1)...(19): siRNA sense strand
aggagagacuggaaguaaa

SEQ ID NO: 1126213 - RNA, 19 nt, Homo sapiens
  misc_RNA (1)...(19): siRNA sense strand
gugaugaacuuuuccaaug

SEQ ID NO: 1126214 - RNA, 19 nt, Homo sapiens
  misc_RNA (1)...(19): siRNA sense strand
aagcauucaucauuuggaa

SEQ ID NO: 1126215 - RNA, 19 nt, Homo sapiens
  misc_RNA (1)...(19): siRNA sense strand
gaagucugauaugguuaug

SEQ ID NO: 1126216 - RNA, 19 nt, Homo sapiens
  misc_RNA (1)...(19): siRNA sense strand
gguggcacgucuagugaug

SEQ ID NO: 1126217 - RNA, 19 nt, Homo sapiens
  misc_RNA (1)...(19): siRNA sense strand
ugacauuucaugccauuau

SEQ ID NO: 1126218 - RNA, 19 nt, Homo sapiens
  misc_RNA (1)...(19): siRNA sense strand
gagagacuggaaguaaaua

SEQ ID NO: 1126219 - RNA, 19 nt, Homo sapiens
  misc_RNA (1)...(19): siRNA sense strand
cacuggaaguuacugguuu

SEQ ID NO: 1126220 - RNA, 19 nt, Homo sapiens
  misc_RNA (1)...(19): siRNA sense strand
ggucggauccaguguuuua

SEQ ID NO: 1126221 - RNA, 19 nt, Homo sapiens
  misc_RNA (1)...(19): siRNA sense strand
ggacucggaccaauugaag

SEQ ID NO: 1126222 - RNA, 19 nt, Homo sapiens
  misc_RNA (1)...(19): siRNA sense strand
ugaugaaaugugcaacuua

SEQ ID NO: 1126223 - RNA, 19 nt, Homo sapiens
  misc_RNA (1)...(19): siRNA sense strand
aguucacacucaccauuua

SEQ ID NO: 1126224 - RNA, 19 nt, Homo sapiens
  misc_RNA (1)...(19): siRNA sense strand
uuugauaugccucaugaua

SEQ ID NO: 1126225 - RNA, 19 nt, Homo sapiens
  misc_RNA (1)...(19): siRNA sense strand
ggaaguuacugguuuugug

SEQ ID NO: 1126226 - RNA, 19 nt, Homo sapiens
  misc_RNA (1)...(19): siRNA sense strand
uggcuugaguauagauaaa

SEQ ID NO: 1126227 - RNA, 19 nt, Homo sapiens
  misc_RNA (1)...(19): siRNA sense strand
guguggaaguucaccuuga

SEQ ID NO: 1126228 - RNA, 19 nt, Homo sapiens
  misc_RNA (1)...(19): siRNA sense strand
aaucagaagaggaguauuc

SEQ ID NO: 1126229 - RNA, 19 nt, Homo sapiens
  misc_RNA (1)...(19): siRNA sense strand
ucaccuugacugagaaauu

SEQ ID NO: 1126230 - RNA, 19 nt, Homo sapiens
  misc_RNA (1)...(19): siRNA sense strand
gaaggaaccuguacagaua

SEQ ID NO: 1126231 - RNA, 19 nt, Homo sapiens
  misc_RNA (1)...(19): siRNA sense strand
gaauguagcuccagauaug

SEQ ID NO: 1126232 - RNA, 19 nt, Homo sapiens
  misc_RNA (1)...(19): siRNA sense strand
uaaagaaggcccuguauua

SEQ ID NO: 1126233 - RNA, 19 nt, Homo sapiens
  misc_RNA (1)...(19): siRNA sense strand
ccacauggcuugaguauag

SEQ ID NO: 1126234 - RNA, 19 nt, Homo sapiens
  misc_RNA (1)...(19): siRNA sense strand
gaaagaggaugauggaagu

SEQ ID NO: 1126235 - RNA, 19 nt, Homo sapiens
  misc_RNA (1)...(19): siRNA sense strand
guaaguggauacagaguaa

SEQ ID NO: 1126236 - RNA, 19 nt, Homo sapiens
  misc_RNA (1)...(19): siRNA sense strand
ccaagaaccuguacaagga

SEQ ID NO: 1126237 - RNA, 19 nt, Homo sapiens
  misc_RNA (1)...(19): siRNA sense strand
gcuuaaaccuugguaauuu

SEQ ID NO: 1126238 - RNA, 19 nt, Homo sapiens
  misc_RNA (1)...(19): siRNA sense strand
gaugaaaugugcaacuuau

SEQ ID NO: 1126239 - RNA, 19 nt, Homo sapiens
  misc_RNA (1)...(19): siRNA sense strand
ugagagagauuaagcauuc

SEQ ID NO: 1126240 - RNA, 19 nt, Homo sapiens
  misc_RNA (1)...(19): siRNA sense strand
gaacaucgaucaguuaaaa

SEQ ID NO: 1126241 - RNA, 19 nt, Homo sapiens
  misc_RNA (1)...(19): siRNA sense strand
aaagggaaguggaggcuua

SEQ ID NO: 1126242 - RNA, 19 nt, Homo sapiens
  misc_RNA (1)...(19): siRNA sense strand
gcauugagguccaggaaau

SEQ ID NO: 1126243 - RNA, 19 nt, Homo sapiens
  misc_RNA (1)...(19): siRNA sense strand
gguaguaaguggauacaga

SEQ ID NO: 1126244 - RNA, 19 nt, Homo sapiens
  misc_RNA (1)...(19): siRNA sense strand
agaagaagaagaaguguua

SEQ ID NO: 1126245 - RNA, 19 nt, Homo sapiens
  misc_RNA (1)...(19): siRNA sense strand
caaacuggauccaaacaau

SEQ ID NO: 1126246 - RNA, 19 nt, Homo sapiens
  misc_RNA (1)...(19): siRNA sense strand
gaaauuggaacaucgauca

SEQ ID NO: 1126247 - RNA, 19 nt, Homo sapiens
  misc_RNA (1)...(19): siRNA sense strand
gacauuucaugccauuaua

SEQ ID NO: 1126248 - RNA, 19 nt, Homo sapiens
  misc_RNA (1)...(19): siRNA sense strand
gcauguaccuuaugauguc

SEQ ID NO: 1126249 - RNA, 19 nt, Homo sapiens
  misc_RNA (1)...(19): siRNA sense strand
ccacagaggugaccauguc

SEQ ID NO: 1126250 - RNA, 19 nt, Homo sapiens
  misc_RNA (1)...(19): siRNA sense strand
gguguuggauucagaguug

SEQ ID NO: 1126251 - RNA, 19 nt, Homo sapiens
  misc_RNA (1)...(19): siRNA sense strand
gaggagagacuggaaguaa

SEQ ID NO: 1126252 - RNA, 19 nt, Homo sapiens
  misc_RNA (1)...(19): siRNA sense strand
guacagauaaagccaauau

SEQ ID NO: 1126253 - RNA, 19 nt, Homo sapiens
  misc_RNA (1)...(19): siRNA sense strand
gacagaagccacacacauu

SEQ ID NO: 1126254 - RNA, 19 nt, Homo sapiens
  misc_RNA (1)...(19): siRNA sense strand
cuaaacaguccgauacaua

SEQ ID NO: 1126255 - RNA, 19 nt, Homo sapiens
  misc_RNA (1)...(19): siRNA sense strand
aaacugacaccaaagaauu

SEQ ID NO: 1126256 - RNA, 19 nt, Homo sapiens
  misc_RNA (1)...(19): siRNA sense strand
aaagaaggcccuguauuaa

SEQ ID NO: 1126257 - RNA, 19 nt, Homo sapiens
  misc_RNA (1)...(19): siRNA sense strand
ggauuggccuggaguauac

SEQ ID NO: 1126258 - RNA, 19 nt, Homo sapiens
  misc_RNA (1)...(19): siRNA sense strand
caaagguguuggauucaga

SEQ ID NO: 1126259 - RNA, 19 nt, Homo sapiens
  misc_RNA (1)...(19): siRNA sense strand
agaaggcccuguauuaauc

SEQ ID NO: 1126260 - RNA, 19 nt, Homo sapiens
  misc_RNA (1)...(19): siRNA sense strand
ccauuuagguaagguagua

SEQ ID NO: 1126261 - RNA, 19 nt, Homo sapiens
  misc_RNA (1)...(19): siRNA sense strand
ggauacagaguaagaaaug

SEQ ID NO: 1126262 - RNA, 19 nt, Homo sapiens
  misc_RNA (1)...(19): siRNA sense strand
gcacuggagccauuuaugu

SEQ ID NO: 1126263 - RNA, 19 nt, Homo sapiens
  misc_RNA (1)...(19): siRNA sense strand
agaauaaccuggugauuuu

SEQ ID NO: 1126264 - RNA, 19 nt, Homo sapiens
  misc_RNA (1)...(19): siRNA sense strand
cguaagggcuacagucgaa

SEQ ID NO: 1126265 - RNA, 19 nt, Homo sapiens
  misc_RNA (1)...(19): siRNA sense strand
ccucacagcuuggcucuug

SEQ ID NO: 1126266 - RNA, 19 nt, Homo sapiens
  misc_RNA (1)...(19): siRNA sense strand
gcagugaccaagagaaaga

SEQ ID NO: 1126267 - RNA, 19 nt, Homo sapiens
  misc_RNA (1)...(19): siRNA sense strand
cgugaagucugauaugguu

SEQ ID NO: 1126268 - RNA, 19 nt, Homo sapiens
  misc_RNA (1)...(19): siRNA sense strand
ggaccaagaaccuguacaa

SEQ ID NO: 1126269 - RNA, 19 nt, Homo sapiens
  misc_RNA (1)...(19): siRNA sense strand
gaauuugugagagagauua

SEQ ID NO: 1126270 - RNA, 19 nt, Homo sapiens
  misc_RNA (1)...(19): siRNA sense strand
caauaaagaaggcccugua

SEQ ID NO: 1126271 - RNA, 19 nt, Homo sapiens
  misc_RNA (1)...(19): siRNA sense strand
aagaauaaccuggugauuu

SEQ ID NO: 1126272 - RNA, 19 nt, Homo sapiens
  misc_RNA (1)...(19): siRNA sense strand
ggagagacuggaaguaaau

SEQ ID NO: 1126273 - RNA, 19 nt, Homo sapiens
  misc_RNA (1)...(19): siRNA sense strand
gauaagauuccuuuacuac

SEQ ID NO: 1126274 - RNA, 19 nt, Homo sapiens
  misc_RNA (1)...(19): siRNA sense strand
ggacagaagccacacacau

SEQ ID NO: 1126275 - RNA, 19 nt, Homo sapiens
  misc_RNA (1)...(19): siRNA sense strand
gaaacuaccagaccauuuu

SEQ ID NO: 1126276 - RNA, 19 nt, Homo sapiens
  misc_RNA (1)...(19): siRNA sense strand
gcuggcauguaccuuauga

SEQ ID NO: 1126277 - RNA, 19 nt, Homo sapiens
  misc_RNA (1)...(19): siRNA sense strand
caccuugacugagaaauug

SEQ ID NO: 1126278 - RNA, 19 nt, Homo sapiens
  misc_RNA (1)...(19): siRNA sense strand
aaacuggauccaaacaaua

SEQ ID NO: 1126279 - RNA, 19 nt, Homo sapiens
  misc_RNA (1)...(19): siRNA sense strand
ggaauuauugggucacaga

SEQ ID NO: 1126280 - RNA, 19 nt, Homo sapiens
  misc_RNA (1)...(19): siRNA sense strand
gaaaugugcaacuuauaca

SEQ ID NO: 1126281 - RNA, 19 nt, Homo sapiens
  misc_RNA (1)...(19): siRNA sense strand
gauaaagccaauauucugu

SEQ ID NO: 1126282 - RNA, 19 nt, Homo sapiens
  misc_RNA (1)...(19): siRNA sense strand
gaagcccacuuucugucuu

SEQ ID NO: 1126283 - RNA, 19 nt, Homo sapiens
  misc_RNA (1)...(19): siRNA sense strand
ggaaguucaccuugacuga

SEQ ID NO: 1126284 - RNA, 19 nt, Homo sapiens
  misc_RNA (1)...(19): siRNA sense strand
uaagauuccuuuacuacag

SEQ ID NO: 1126285 - RNA, 19 nt, Homo sapiens
  misc_RNA (1)...(19): siRNA sense strand
gcaugucuuugccuauaga

SEQ ID NO: 1126286 - RNA, 19 nt, Homo sapiens
  misc_RNA (1)...(19): siRNA sense strand
guggaaaguucaucacaca

SEQ ID NO: 1126287 - RNA, 19 nt, Homo sapiens
  misc_RNA (1)...(19): siRNA sense strand
cagaauguagcuccagaua

SEQ ID NO: 1126288 - RNA, 19 nt, Homo sapiens
  misc_RNA (1)...(19): siRNA sense strand
gagccagcauggauacugu

SEQ ID NO: 1126289 - RNA, 19 nt, Homo sapiens
  misc_RNA (1)...(19): siRNA sense strand
ugaaggaaccuguacagau

SEQ ID NO: 1126290 - RNA, 19 nt, Homo sapiens
  misc_RNA (1)...(19): siRNA sense strand
cagcaggauugugcaguuu

SEQ ID NO: 1126291 - RNA, 19 nt, Homo sapiens
  misc_RNA (1)...(19): siRNA sense strand
caaguuuguuuaccagcaa

SEQ ID NO: 1126292 - RNA, 19 nt, Homo sapiens
  misc_RNA (1)...(19): siRNA sense strand
caauucccgugaagucuga

SEQ ID NO: 1126293 - RNA, 19 nt, Homo sapiens
  misc_RNA (1)...(19): siRNA sense strand
gcacgucuagugaugaaau

SEQ ID NO: 1126294 - RNA, 19 nt, Homo sapiens
  misc_RNA (1)...(19): siRNA sense strand
gggcagugaccaagagaaa

SEQ ID NO: 1126295 - RNA, 19 nt, Homo sapiens
  misc_RNA (1)...(19): siRNA sense strand
gcauucaucauuuggaaga

SEQ ID NO: 1126296 - RNA, 19 nt, Homo sapiens
  misc_RNA (1)...(19): siRNA sense strand
ggaaaguucaucacacagu

SEQ ID NO: 1126297 - RNA, 19 nt, Homo sapiens
  misc_RNA (1)...(19): siRNA sense strand
ccaagcaugcaguuucuuu

SEQ ID NO: 1126298 - RNA, 19 nt, Homo sapiens
  misc_RNA (1)...(19): siRNA sense strand
gugaugaaaugugcaacuu

SEQ ID NO: 1126299 - RNA, 19 nt, Homo sapiens
  misc_RNA (1)...(19): siRNA sense strand
guccaucacauguuacuuu

SEQ ID NO: 1126300 - RNA, 19 nt, Homo sapiens
  misc_RNA (1)...(19): siRNA sense strand
auaccaggcuugcucuuug

SEQ ID NO: 1126301 - RNA, 19 nt, Homo sapiens
  misc_RNA (1)...(19): siRNA sense strand
ccuacuggcugcaagaugu

SEQ ID NO: 1126302 - RNA, 19 nt, Homo sapiens
  misc_RNA (1)...(19): siRNA sense strand
uacuguccaucacauguua

SEQ ID NO: 1126303 - RNA, 19 nt, Homo sapiens
  misc_RNA (1)...(19): siRNA sense strand
gcgcaagcacuuugauaug

SEQ ID NO: 1126304 - RNA, 19 nt, Homo sapiens
  misc_RNA (1)...(19): siRNA sense strand
gcuugaguauagauaaaga

SEQ ID NO: 1126305 - RNA, 19 nt, Homo sapiens
  misc_RNA (1)...(19): siRNA sense strand
aaauaaugcugcaguacuc

SEQ ID NO: 1126306 - RNA, 19 nt, Homo sapiens
  misc_RNA (1)...(19): siRNA sense strand
gcugcaagauguguauuca

SEQ ID NO: 1126307 - RNA, 19 nt, Homo sapiens
  misc_RNA (1)...(19): siRNA sense strand
guaagguaguaaguggaua

SEQ ID NO: 1126308 - RNA, 19 nt, Homo sapiens
  misc_RNA (1)...(19): siRNA sense strand
acagauaaagccaauauuc

SEQ ID NO: 1126309 - RNA, 19 nt, Homo sapiens
  misc_RNA (1)...(19): siRNA sense strand
guggugaauucugacauuu

SEQ ID NO: 1126310 - RNA, 19 nt, Homo sapiens
  misc_RNA (1)...(19): siRNA sense strand
gagaagaagaagaaguguu

SEQ ID NO: 1126311 - RNA, 19 nt, Homo sapiens
  misc_RNA (1)...(19): siRNA sense strand
acacucaccauuuagguaa

SEQ ID NO: 1126312 - RNA, 19 nt, Homo sapiens
  misc_RNA (1)...(19): siRNA sense strand
aggagagacuggaaguaaa

SEQ ID NO: 1126313 - RNA, 19 nt, Homo sapiens
  misc_RNA (1)...(19): siRNA sense strand
gugaugaacuuuuccaaug

SEQ ID NO: 1126314 - RNA, 19 nt, Homo sapiens
  misc_RNA (1)...(19): siRNA sense strand
aagcauucaucauuuggaa

SEQ ID NO: 1126315 - RNA, 19 nt, Homo sapiens
  misc_RNA (1)...(19): siRNA sense strand
gaagucugauaugguuaug

SEQ ID NO: 1126316 - RNA, 19 nt, Homo sapiens
  misc_RNA (1)...(19): siRNA sense strand
gguggcacgucuagugaug

SEQ ID NO: 1126317 - RNA, 19 nt, Homo sapiens
  misc_RNA (1)...(19): siRNA sense strand
ugacauuucaugccauuau

SEQ ID NO: 1126318 - RNA, 19 nt, Homo sapiens
  misc_RNA (1)...(19): siRNA sense strand
gagagacuggaaguaaaua

SEQ ID NO: 1126319 - RNA, 19 nt, Homo sapiens
  misc_RNA (1)...(19): siRNA sense strand
cacuggaaguuacugguuu

SEQ ID NO: 1126320 - RNA, 19 nt, Homo sapiens
  misc_RNA (1)...(19): siRNA sense strand
ggucggauccaguguuuua

SEQ ID NO: 1126321 - RNA, 19 nt, Homo sapiens
  misc_RNA (1)...(19): siRNA sense strand
ggacucggaccaauugaag

SEQ ID NO: 1126322 - RNA, 19 nt, Homo sapiens
  misc_RNA (1)...(19): siRNA sense strand
ugaugaaaugugcaacuua

SEQ ID NO: 1126323 - RNA, 19 nt, Homo sapiens
  misc_RNA (1)...(19): siRNA sense strand
aguucacacucaccauuua

SEQ ID NO: 1126324 - RNA, 19 nt, Homo sapiens
  misc_RNA (1)...(19): siRNA sense strand
uuugauaugccucaugaua

SEQ ID NO: 1126325 - RNA, 19 nt, Homo sapiens
  misc_RNA (1)...(19): siRNA sense strand
ggaaguuacugguuuugug

SEQ ID NO: 1126326 - RNA, 19 nt, Homo sapiens
  misc_RNA (1)...(19): siRNA sense strand
uggcuugaguauagauaaa

SEQ ID NO: 1126327 - RNA, 19 nt, Homo sapiens
  misc_RNA (1)...(19): siRNA sense strand
guguggaaguucaccuuga

SEQ ID NO: 1126328 - RNA, 19 nt, Homo sapiens
  misc_RNA (1)...(19): siRNA sense strand
aaucagaagaggaguauuc

SEQ ID NO: 1126329 - RNA, 19 nt, Homo sapiens
  misc_RNA (1)...(19): siRNA sense strand
ucaccuugacugagaaauu

SEQ ID NO: 1126330 - RNA, 19 nt, Homo sapiens
  misc_RNA (1)...(19): siRNA sense strand
gaaggaaccuguacagaua

SEQ ID NO: 1126331 - RNA, 19 nt, Homo sapiens
  misc_RNA (1)...(19): siRNA sense strand
gaauguagcuccagauaug

SEQ ID NO: 1126332 - RNA, 19 nt, Homo sapiens
  misc_RNA (1)...(19): siRNA sense strand
uaaagaaggcccuguauua

SEQ ID NO: 1126333 - RNA, 19 nt, Homo sapiens
  misc_RNA (1)...(19): siRNA sense strand
ccacauggcuugaguauag

SEQ ID NO: 1126334 - RNA, 19 nt, Homo sapiens
  misc_RNA (1)...(19): siRNA sense strand
gaaagaggaugauggaagu

SEQ ID NO: 1126335 - RNA, 19 nt, Homo sapiens
  misc_RNA (1)...(19): siRNA sense strand
guaaguggauacagaguaa

SEQ ID NO: 1126336 - RNA, 19 nt, Homo sapiens
  misc_RNA (1)...(19): siRNA sense strand
ccaagaaccuguacaagga

SEQ ID NO: 1126337 - RNA, 19 nt, Homo sapiens
  misc_RNA (1)...(19): siRNA sense strand
gcuuaaaccuugguaauuu

SEQ ID NO: 1126338 - RNA, 19 nt, Homo sapiens
  misc_RNA (1)...(19): siRNA sense strand
gaugaaaugugcaacuuau

SEQ ID NO: 1126339 - RNA, 19 nt, Homo sapiens
  misc_RNA (1)...(19): siRNA sense strand
ugagagagauuaagcauuc

SEQ ID NO: 1126340 - RNA, 19 nt, Homo sapiens
  misc_RNA (1)...(19): siRNA sense strand
gaacaucgaucaguuaaaa

SEQ ID NO: 1126341 - RNA, 19 nt, Homo sapiens
  misc_RNA (1)...(19): siRNA sense strand
aaagggaaguggaggcuua

SEQ ID NO: 1126342 - RNA, 19 nt, Homo sapiens
  misc_RNA (1)...(19): siRNA sense strand
gcauugagguccaggaaau

SEQ ID NO: 1126343 - RNA, 19 nt, Homo sapiens
  misc_RNA (1)...(19): siRNA sense strand
gguaguaaguggauacaga

SEQ ID NO: 1126344 - RNA, 19 nt, Homo sapiens
  misc_RNA (1)...(19): siRNA sense strand
agaagaagaagaaguguua

SEQ ID NO: 1126345 - RNA, 19 nt, Homo sapiens
  misc_RNA (1)...(19): siRNA sense strand
caaacuggauccaaacaau

SEQ ID NO: 1126346 - RNA, 19 nt, Homo sapiens
  misc_RNA (1)...(19): siRNA sense strand
gaaauuggaacaucgauca

SEQ ID NO: 1126347 - RNA, 19 nt, Homo sapiens
  misc_RNA (1)...(19): siRNA sense strand
gacauuucaugccauuaua

SEQ ID NO: 1126348 - RNA, 19 nt, Homo sapiens
  misc_RNA (1)...(19): siRNA sense strand
gcauguaccuuaugauguc

SEQ ID NO: 1126349 - RNA, 19 nt, Homo sapiens
  misc_RNA (1)...(19): siRNA sense strand
ccacagaggugaccauguc

SEQ ID NO: 1126350 - RNA, 19 nt, Homo sapiens
  misc_RNA (1)...(19): siRNA sense strand
gguguuggauucagaguug

SEQ ID NO: 1126351 - RNA, 19 nt, Homo sapiens
  misc_RNA (1)...(19): siRNA sense strand
gaggagagacuggaaguaa

SEQ ID NO: 1126352 - RNA, 19 nt, Homo sapiens
  misc_RNA (1)...(19): siRNA sense strand
guacagauaaagccaauau

SEQ ID NO: 1126353 - RNA, 19 nt, Homo sapiens
  misc_RNA (1)...(19): siRNA sense strand
gacagaagccacacacauu

SEQ ID NO: 1126354 - RNA, 19 nt, Homo sapiens
  misc_RNA (1)...(19): siRNA sense strand
cuaaacaguccgauacaua

SEQ ID NO: 1126355 - RNA, 19 nt, Homo sapiens
  misc_RNA (1)...(19): siRNA sense strand
aaacugacaccaaagaauu

SEQ ID NO: 1126356 - RNA, 19 nt, Homo sapiens
  misc_RNA (1)...(19): siRNA sense strand
aaagaaggcccuguauuaa

SEQ ID NO: 1126357 - RNA, 19 nt, Homo sapiens
  misc_RNA (1)...(19): siRNA sense strand
ggauuggccuggaguauac

SEQ ID NO: 1126358 - RNA, 19 nt, Homo sapiens
  misc_RNA (1)...(19): siRNA sense strand
caaagguguuggauucaga

SEQ ID NO: 1126359 - RNA, 19 nt, Homo sapiens
  misc_RNA (1)...(19): siRNA sense strand
agaaggcccuguauuaauc

SEQ ID NO: 1126360 - RNA, 19 nt, Homo sapiens
  misc_RNA (1)...(19): siRNA sense strand
ccauuuagguaagguagua

SEQ ID NO: 1126361 - RNA, 19 nt, Homo sapiens
  misc_RNA (1)...(19): siRNA sense strand
ggauacagaguaagaaaug

SEQ ID NO: 1126362 - RNA, 19 nt, Homo sapiens
  misc_RNA (1)...(19): siRNA sense strand
gcacuggagccauuuaugu

SEQ ID NO: 1126363 - RNA, 19 nt, Homo sapiens
  misc_RNA (1)...(19): siRNA sense strand
agaauaaccuggugauuuu

SEQ ID NO: 1126364 - RNA, 19 nt, Homo sapiens
  misc_RNA (1)...(19): siRNA sense strand
cguaagggcuacagucgaa

SEQ ID NO: 1126365 - RNA, 19 nt, Homo sapiens
  misc_RNA (1)...(19): siRNA sense strand
ccucacagcuuggcucuug

SEQ ID NO: 1126366 - RNA, 19 nt, Homo sapiens
  misc_RNA (1)...(19): siRNA sense strand
gcagugaccaagagaaaga

SEQ ID NO: 1126367 - RNA, 19 nt, Homo sapiens
  misc_RNA (1)...(19): siRNA sense strand
cgugaagucugauaugguu

SEQ ID NO: 1126368 - RNA, 19 nt, Homo sapiens
  misc_RNA (1)...(19): siRNA sense strand
ggaccaagaaccuguacaa

SEQ ID NO: 1126369 - RNA, 19 nt, Homo sapiens
  misc_RNA (1)...(19): siRNA sense strand
gaauuugugagagagauua

SEQ ID NO: 1126370 - RNA, 19 nt, Homo sapiens
  misc_RNA (1)...(19): siRNA sense strand
caauaaagaaggcccugua

SEQ ID NO: 1126371 - RNA, 19 nt, Homo sapiens
  misc_RNA (1)...(19): siRNA sense strand
aagaauaaccuggugauuu

SEQ ID NO: 1126372 - RNA, 19 nt, Homo sapiens
  misc_RNA (1)...(19): siRNA sense strand
ggagagacuggaaguaaau

SEQ ID NO: 1126373 - RNA, 19 nt, Homo sapiens
  misc_RNA (1)...(19): siRNA sense strand
gauaagauuccuuuacuac

SEQ ID NO: 1126374 - RNA, 19 nt, Homo sapiens
  misc_RNA (1)...(19): siRNA sense strand
ggacagaagccacacacau

SEQ ID NO: 1126375 - RNA, 19 nt, Homo sapiens
  misc_RNA (1)...(19): siRNA sense strand
gaaacuaccagaccauuuu

SEQ ID NO: 1126376 - RNA, 19 nt, Homo sapiens
  misc_RNA (1)...(19): siRNA sense strand
gcuggcauguaccuuauga

SEQ ID NO: 1126377 - RNA, 19 nt, Homo sapiens
  misc_RNA (1)...(19): siRNA sense strand
caccuugacugagaaauug

SEQ ID NO: 1126378 - RNA, 19 nt, Homo sapiens
  misc_RNA (1)...(19): siRNA sense strand
aaacuggauccaaacaaua

SEQ ID NO: 1126379 - RNA, 19 nt, Homo sapiens
  misc_RNA (1)...(19): siRNA sense strand
ggaauuauugggucacaga

SEQ ID NO: 1126380 - RNA, 19 nt, Homo sapiens
  misc_RNA (1)...(19): siRNA sense strand
gaaaugugcaacuuauaca

SEQ ID NO: 1126381 - RNA, 19 nt, Homo sapiens
  misc_RNA (1)...(19): siRNA sense strand
gauaaagccaauauucugu

SEQ ID NO: 1126382 - RNA, 19 nt, Homo sapiens
  misc_RNA (1)...(19): siRNA sense strand
gaagcccacuuucugucuu

SEQ ID NO: 1126383 - RNA, 19 nt, Homo sapiens
  misc_RNA (1)...(19): siRNA sense strand
ggaaguucaccuugacuga

SEQ ID NO: 1126384 - RNA, 19 nt, Homo sapiens
  misc_RNA (1)...(19): siRNA sense strand
uaagauuccuuuacuacag

SEQ ID NO: 1126385 - RNA, 19 nt, Homo sapiens
  misc_RNA (1)...(19): siRNA sense strand
gcaugucuuugccuauaga

SEQ ID NO: 1126386 - RNA, 19 nt, Homo sapiens
  misc_RNA (1)...(19): siRNA sense strand
guggaaaguucaucacaca

SEQ ID NO: 1126387 - RNA, 19 nt, Homo sapiens
  misc_RNA (1)...(19): siRNA sense strand
cagaauguagcuccagaua

SEQ ID NO: 1126388 - RNA, 19 nt, Homo sapiens
  misc_RNA (1)...(19): siRNA sense strand
gagccagcauggauacugu

SEQ ID NO: 1126389 - RNA, 19 nt, Homo sapiens
  misc_RNA (1)...(19): siRNA sense strand
ugaaggaaccuguacagau

SEQ ID NO: 1126390 - RNA, 19 nt, Homo sapiens
  misc_RNA (1)...(19): siRNA sense strand
cagcaggauugugcaguuu

SEQ ID NO: 1126391 - RNA, 19 nt, Homo sapiens
  misc_RNA (1)...(19): siRNA sense strand
caaguuuguuuaccagcaa

SEQ ID NO: 1126392 - RNA, 19 nt, Homo sapiens
  misc_RNA (1)...(19): siRNA sense strand
caauucccgugaagucuga

SEQ ID NO: 1126393 - RNA, 19 nt, Homo sapiens
  misc_RNA (1)...(19): siRNA sense strand
gcacgucuagugaugaaau

SEQ ID NO: 1126394 - RNA, 19 nt, Homo sapiens
  misc_RNA (1)...(19): siRNA sense strand
gggcagugaccaagagaaa

SEQ ID NO: 1126395 - RNA, 19 nt, Homo sapiens
  misc_RNA (1)...(19): siRNA sense strand
gcauucaucauuuggaaga

SEQ ID NO: 1126396 - RNA, 19 nt, Homo sapiens
  misc_RNA (1)...(19): siRNA sense strand
ggaaaguucaucacacagu

SEQ ID NO: 1126397 - RNA, 19 nt, Homo sapiens
  misc_RNA (1)...(19): siRNA sense strand
ccaagcaugcaguuucuuu

SEQ ID NO: 1126398 - RNA, 19 nt, Homo sapiens
  misc_RNA (1)...(19): siRNA sense strand
gugaugaaaugugcaacuu

SEQ ID NO: 1126399 - RNA, 19 nt, Homo sapiens
  misc_RNA (1)...(19): siRNA sense strand
guccaucacauguuacuuu

SEQ ID NO: 1126400 - RNA, 19 nt, Homo sapiens
  misc_RNA (1)...(19): siRNA sense strand
auaccaggcuugcucuuug

SEQ ID NO: 1126401 - RNA, 19 nt, Homo sapiens
  misc_RNA (1)...(19): siRNA sense strand
ccuacuggcugcaagaugu

SEQ ID NO: 1126402 - RNA, 19 nt, Homo sapiens
  misc_RNA (1)...(19): siRNA sense strand
uacuguccaucacauguua

SEQ ID NO: 1126403 - RNA, 19 nt, Homo sapiens
  misc_RNA (1)...(19): siRNA sense strand
gcgcaagcacuuugauaug

SEQ ID NO: 1126404 - RNA, 19 nt, Homo sapiens
  misc_RNA (1)...(19): siRNA sense strand
gcuugaguauagauaaaga

SEQ ID NO: 1126405 - RNA, 19 nt, Homo sapiens
  misc_RNA (1)...(19): siRNA sense strand
aaauaaugcugcaguacuc

SEQ ID NO: 1126406 - RNA, 19 nt, Homo sapiens
  misc_RNA (1)...(19): siRNA sense strand
gcugcaagauguguauuca

SEQ ID NO: 1126407 - RNA, 19 nt, Homo sapiens
  misc_RNA (1)...(19): siRNA sense strand
guaagguaguaaguggaua

SEQ ID NO: 1126408 - RNA, 19 nt, Homo sapiens
  misc_RNA (1)...(19): siRNA sense strand
acagauaaagccaauauuc

SEQ ID NO: 1126409 - RNA, 19 nt, Homo sapiens
  misc_RNA (1)...(19): siRNA sense strand
guggugaauucugacauuu

SEQ ID NO: 1126410 - RNA, 19 nt, Homo sapiens
  misc_RNA (1)...(19): siRNA sense strand
gagaagaagaagaaguguu

SEQ ID NO: 1126411 - RNA, 19 nt, Homo sapiens
  misc_RNA (1)...(19): siRNA sense strand
acacucaccauuuagguaa

SEQ ID NO: 1126412 - RNA, 19 nt, Homo sapiens
  misc_RNA (1)...(19): siRNA sense strand
aggagagacuggaaguaaa

SEQ ID NO: 1126413 - RNA, 19 nt, Homo sapiens
  misc_RNA (1)...(19): siRNA sense strand
gugaugaacuuuuccaaug

SEQ ID NO: 1126414 - RNA, 19 nt, Homo sapiens
  misc_RNA (1)...(19): siRNA sense strand
aagcauucaucauuuggaa

SEQ ID NO: 1126415 - RNA, 19 nt, Homo sapiens
  misc_RNA (1)...(19): siRNA sense strand
gaagucugauaugguuaug

SEQ ID NO: 1126416 - RNA, 19 nt, Homo sapiens
  misc_RNA (1)...(19): siRNA sense strand
gguggcacgucuagugaug

SEQ ID NO: 1126417 - RNA, 19 nt, Homo sapiens
  misc_RNA (1)...(19): siRNA sense strand
ugacauuucaugccauuau

SEQ ID NO: 1126418 - RNA, 19 nt, Homo sapiens
  misc_RNA (1)...(19): siRNA sense strand
gagagacuggaaguaaaua

SEQ ID NO: 1126419 - RNA, 19 nt, Homo sapiens
  misc_RNA (1)...(19): siRNA sense strand
cacuggaaguuacugguuu

SEQ ID NO: 1126420 - RNA, 19 nt, Homo sapiens
  misc_RNA (1)...(19): siRNA sense strand
ggucggauccaguguuuua

SEQ ID NO: 1126421 - RNA, 19 nt, Homo sapiens
  misc_RNA (1)...(19): siRNA sense strand
ggacucggaccaauugaag

SEQ ID NO: 1126422 - RNA, 19 nt, Homo sapiens
  misc_RNA (1)...(19): siRNA sense strand
ugaugaaaugugcaacuua

SEQ ID NO: 1126423 - RNA, 19 nt, Homo sapiens
  misc_RNA (1)...(19): siRNA sense strand
aguucacacucaccauuua

SEQ ID NO: 1126424 - RNA, 19 nt, Homo sapiens
  misc_RNA (1)...(19): siRNA sense strand
uuugauaugccucaugaua

SEQ ID NO: 1126425 - RNA, 19 nt, Homo sapiens
  misc_RNA (1)...(19): siRNA sense strand
ggaaguuacugguuuugug

SEQ ID NO: 1126426 - RNA, 19 nt, Homo sapiens
  misc_RNA (1)...(19): siRNA sense strand
uggcuugaguauagauaaa

SEQ ID NO: 1126427 - RNA, 19 nt, Homo sapiens
  misc_RNA (1)...(19): siRNA sense strand
guguggaaguucaccuuga

SEQ ID NO: 1126428 - RNA, 19 nt, Homo sapiens
  misc_RNA (1)...(19): siRNA sense strand
aaucagaagaggaguauuc

SEQ ID NO: 1126429 - RNA, 19 nt, Homo sapiens
  misc_RNA (1)...(19): siRNA sense strand
ucaccuugacugagaaauu

SEQ ID NO: 1126430 - RNA, 19 nt, Homo sapiens
  misc_RNA (1)...(19): siRNA sense strand
gaaggaaccuguacagaua

SEQ ID NO: 1126431 - RNA, 19 nt, Homo sapiens
  misc_RNA (1)...(19): siRNA sense strand
gaauguagcuccagauaug

SEQ ID NO: 1126432 - RNA, 19 nt, Homo sapiens
  misc_RNA (1)...(19): siRNA sense strand
uaaagaaggcccuguauua

SEQ ID NO: 1126433 - RNA, 19 nt, Homo sapiens
  misc_RNA (1)...(19): siRNA sense strand
ccacauggcuugaguauag

SEQ ID NO: 1126434 - RNA, 19 nt, Homo sapiens
  misc_RNA (1)...(19): siRNA sense strand
gaaagaggaugauggaagu

SEQ ID NO: 1126435 - RNA, 19 nt, Homo sapiens
  misc_RNA (1)...(19): siRNA sense strand
guaaguggauacagaguaa

SEQ ID NO: 1126436 - RNA, 19 nt, Homo sapiens
  misc_RNA (1)...(19): siRNA sense strand
ccaagaaccuguacaagga

SEQ ID NO: 1126437 - RNA, 19 nt, Homo sapiens
  misc_RNA (1)...(19): siRNA sense strand
gcuuaaaccuugguaauuu

SEQ ID NO: 1126438 - RNA, 19 nt, Homo sapiens
  misc_RNA (1)...(19): siRNA sense strand
gaugaaaugugcaacuuau

SEQ ID NO: 1126439 - RNA, 19 nt, Homo sapiens
  misc_RNA (1)...(19): siRNA sense strand
ugagagagauuaagcauuc

SEQ ID NO: 1126440 - RNA, 19 nt, Homo sapiens
  misc_RNA (1)...(19): siRNA sense strand
gaacaucgaucaguuaaaa

SEQ ID NO: 1126441 - RNA, 19 nt, Homo sapiens
  misc_RNA (1)...(19): siRNA sense strand
aaagggaaguggaggcuua

SEQ ID NO: 1126442 - RNA, 19 nt, Homo sapiens
  misc_RNA (1)...(19): siRNA sense strand
gcauugagguccaggaaau

SEQ ID NO: 1126443 - RNA, 19 nt, Homo sapiens
  misc_RNA (1)...(19): siRNA sense strand
gguaguaaguggauacaga

SEQ ID NO: 1126444 - RNA, 19 nt, Homo sapiens
  misc_RNA (1)...(19): siRNA sense strand
agaagaagaagaaguguua

SEQ ID NO: 1126445 - RNA, 19 nt, Homo sapiens
  misc_RNA (1)...(19): siRNA sense strand
caaacuggauccaaacaau

SEQ ID NO: 1126446 - RNA, 19 nt, Homo sapiens
  misc_RNA (1)...(19): siRNA sense strand
gaaauuggaacaucgauca

SEQ ID NO: 1126447 - RNA, 19 nt, Homo sapiens
  misc_RNA (1)...(19): siRNA sense strand
gacauuucaugccauuaua

SEQ ID NO: 1126448 - RNA, 19 nt, Homo sapiens
  misc_RNA (1)...(19): siRNA sense strand
gcauguaccuuaugauguc

SEQ ID NO: 1126449 - RNA, 19 nt, Homo sapiens
  misc_RNA (1)...(19): siRNA sense strand
ccacagaggugaccauguc

SEQ ID NO: 1126450 - RNA, 19 nt, Homo sapiens
  misc_RNA (1)...(19): siRNA sense strand
gguguuggauucagaguug

SEQ ID NO: 1126451 - RNA, 19 nt, Homo sapiens
  misc_RNA (1)...(19): siRNA sense strand
gaggagagacuggaaguaa

SEQ ID NO: 1126452 - RNA, 19 nt, Homo sapiens
  misc_RNA (1)...(19): siRNA sense strand
guacagauaaagccaauau

SEQ ID NO: 1126453 - RNA, 19 nt, Homo sapiens
  misc_RNA (1)...(19): siRNA sense strand
gacagaagccacacacauu

SEQ ID NO: 1126454 - RNA, 19 nt, Homo sapiens
  misc_RNA (1)...(19): siRNA sense strand
cuaaacaguccgauacaua

SEQ ID NO: 1126455 - RNA, 19 nt, Homo sapiens
  misc_RNA (1)...(19): siRNA sense strand
aaacugacaccaaagaauu

SEQ ID NO: 1126456 - RNA, 19 nt, Homo sapiens
  misc_RNA (1)...(19): siRNA sense strand
aaagaaggcccuguauuaa

SEQ ID NO: 1126457 - RNA, 19 nt, Homo sapiens
  misc_RNA (1)...(19): siRNA sense strand
ggauuggccuggaguauac

SEQ ID NO: 1126458 - RNA, 19 nt, Homo sapiens
  misc_RNA (1)...(19): siRNA sense strand
caaagguguuggauucaga

SEQ ID NO: 1126459 - RNA, 19 nt, Homo sapiens
  misc_RNA (1)...(19): siRNA sense strand
agaaggcccuguauuaauc

SEQ ID NO: 1126460 - RNA, 19 nt, Homo sapiens
  misc_RNA (1)...(19): siRNA sense strand
ccauuuagguaagguagua

SEQ ID NO: 1126461 - RNA, 19 nt, Homo sapiens
  misc_RNA (1)...(19): siRNA sense strand
ggauacagaguaagaaaug

SEQ ID NO: 1126462 - RNA, 19 nt, Homo sapiens
  misc_RNA (1)...(19): siRNA sense strand
gcacuggagccauuuaugu

SEQ ID NO: 1126463 - RNA, 19 nt, Homo sapiens
  misc_RNA (1)...(19): siRNA sense strand
agaauaaccuggugauuuu

SEQ ID NO: 1126464 - RNA, 19 nt, Homo sapiens
  misc_RNA (1)...(19): siRNA sense strand
cguaagggcuacagucgaa

SEQ ID NO: 1126465 - RNA, 19 nt, Homo sapiens
  misc_RNA (1)...(19): siRNA sense strand
ccucacagcuuggcucuug

SEQ ID NO: 1126466 - RNA, 19 nt, Homo sapiens
  misc_RNA (1)...(19): siRNA sense strand
gcagugaccaagagaaaga

SEQ ID NO: 1126467 - RNA, 19 nt, Homo sapiens
  misc_RNA (1)...(19): siRNA sense strand
cgugaagucugauaugguu

SEQ ID NO: 1126468 - RNA, 19 nt, Homo sapiens
  misc_RNA (1)...(19): siRNA sense strand
ggaccaagaaccuguacaa

SEQ ID NO: 1126469 - RNA, 19 nt, Homo sapiens
  misc_RNA (1)...(19): siRNA sense strand
gaauuugugagagagauua

SEQ ID NO: 1126470 - RNA, 19 nt, Homo sapiens
  misc_RNA (1)...(19): siRNA sense strand
caauaaagaaggcccugua

SEQ ID NO: 1126471 - RNA, 19 nt, Homo sapiens
  misc_RNA (1)...(19): siRNA sense strand
aagaauaaccuggugauuu

SEQ ID NO: 1126472 - RNA, 19 nt, Homo sapiens
  misc_RNA (1)...(19): siRNA sense strand
ggagagacuggaaguaaau

SEQ ID NO: 1126473 - RNA, 19 nt, Homo sapiens
  misc_RNA (1)...(19): siRNA sense strand
gauaagauuccuuuacuac

SEQ ID NO: 1126474 - RNA, 19 nt, Homo sapiens
  misc_RNA (1)...(19): siRNA sense strand
ggacagaagccacacacau

SEQ ID NO: 1126475 - RNA, 19 nt, Homo sapiens
  misc_RNA (1)...(19): siRNA sense strand
gaaacuaccagaccauuuu

SEQ ID NO: 1126476 - RNA, 19 nt, Homo sapiens
  misc_RNA (1)...(19): siRNA sense strand
gcuggcauguaccuuauga

SEQ ID NO: 1126477 - RNA, 19 nt, Homo sapiens
  misc_RNA (1)...(19): siRNA sense strand
caccuugacugagaaauug

SEQ ID NO: 1126478 - RNA, 19 nt, Homo sapiens
  misc_RNA (1)...(19): siRNA sense strand
aaacuggauccaaacaaua

SEQ ID NO: 1126479 - RNA, 19 nt, Homo sapiens
  misc_RNA (1)...(19): siRNA sense strand
ggaauuauugggucacaga

SEQ ID NO: 1126480 - RNA, 19 nt, Homo sapiens
  misc_RNA (1)...(19): siRNA sense strand
gaaaugugcaacuuauaca

SEQ ID NO: 1126481 - RNA, 19 nt, Homo sapiens
  misc_RNA (1)...(19): siRNA sense strand
gauaaagccaauauucugu

SEQ ID NO: 1126482 - RNA, 19 nt, Homo sapiens
  misc_RNA (1)...(19): siRNA sense strand
gaagcccacuuucugucuu

SEQ ID NO: 1126483 - RNA, 19 nt, Homo sapiens
  misc_RNA (1)...(19): siRNA sense strand
ggaaguucaccuugacuga

SEQ ID NO: 1126484 - RNA, 19 nt, Homo sapiens
  misc_RNA (1)...(19): siRNA sense strand
uaagauuccuuuacuacag

SEQ ID NO: 1126485 - RNA, 19 nt, Homo sapiens
  misc_RNA (1)...(19): siRNA sense strand
gcaugucuuugccuauaga

SEQ ID NO: 1126486 - RNA, 19 nt, Homo sapiens
  misc_RNA (1)...(19): siRNA sense strand
guggaaaguucaucacaca

SEQ ID NO: 1126487 - RNA, 19 nt, Homo sapiens
  misc_RNA (1)...(19): siRNA sense strand
cagaauguagcuccagaua

SEQ ID NO: 1126488 - RNA, 19 nt, Homo sapiens
  misc_RNA (1)...(19): siRNA sense strand
gagccagcauggauacugu

SEQ ID NO: 1126489 - RNA, 19 nt, Homo sapiens
  misc_RNA (1)...(19): siRNA sense strand
ugaaggaaccuguacagau

SEQ ID NO: 1126490 - RNA, 19 nt, Homo sapiens
  misc_RNA (1)...(19): siRNA sense strand
cagcaggauugugcaguuu

SEQ ID NO: 1126491 - RNA, 19 nt, Homo sapiens
  misc_RNA (1)...(19): siRNA sense strand
caaguuuguuuaccagcaa

SEQ ID NO: 1126492 - RNA, 19 nt, Homo sapiens
  misc_RNA (1)...(19): siRNA sense strand
caauucccgugaagucuga

SEQ ID NO: 1126493 - RNA, 19 nt, Homo sapiens
  misc_RNA (1)...(19): siRNA sense strand
gcacgucuagugaugaaau

SEQ ID NO: 1126494 - RNA, 19 nt, Homo sapiens
  misc_RNA (1)...(19): siRNA sense strand
gggcagugaccaagagaaa

SEQ ID NO: 1126495 - RNA, 19 nt, Homo sapiens
  misc_RNA (1)...(19): siRNA sense strand
gcauucaucauuuggaaga

SEQ ID NO: 1126496 - RNA, 19 nt, Homo sapiens
  misc_RNA (1)...(19): siRNA sense strand
ggaaaguucaucacacagu

SEQ ID NO: 1126497 - RNA, 19 nt, Homo sapiens
  misc_RNA (1)...(19): siRNA sense strand
ccaagcaugcaguuucuuu

SEQ ID NO: 1126498 - RNA, 19 nt, Homo sapiens
  misc_RNA (1)...(19): siRNA sense strand
gugaugaaaugugcaacuu

SEQ ID NO: 1126499 - RNA, 19 nt, Homo sapiens
  misc_RNA (1)...(19): siRNA sense strand
guccaucacauguuacuuu

SEQ ID NO: 1126500 - RNA, 19 nt, Homo sapiens
  misc_RNA (1)...(19): siRNA sense strand
auaccaggcuugcucuuug

SEQ ID NO: 1126501 - RNA, 19 nt, Homo sapiens
  misc_RNA (1)...(19): siRNA sense strand
ccuacuggcugcaagaugu

SEQ ID NO: 1126502 - RNA, 19 nt, Homo sapiens
  misc_RNA (1)...(19): siRNA sense strand
uacuguccaucacauguua

SEQ ID NO: 1126503 - RNA, 19 nt, Homo sapiens
  misc_RNA (1)...(19): siRNA sense strand
gcgcaagcacuuugauaug

SEQ ID NO: 1126504 - RNA, 19 nt, Homo sapiens
  misc_RNA (1)...(19): siRNA sense strand
gcuugaguauagauaaaga

SEQ ID NO: 1126505 - RNA, 19 nt, Homo sapiens
  misc_RNA (1)...(19): siRNA sense strand
aaauaaugcugcaguacuc

SEQ ID NO: 1126506 - RNA, 19 nt, Homo sapiens
  misc_RNA (1)...(19): siRNA sense strand
gcugcaagauguguauuca

SEQ ID NO: 1126507 - RNA, 19 nt, Homo sapiens
  misc_RNA (1)...(19): siRNA sense strand
guaagguaguaaguggaua

SEQ ID NO: 1126508 - RNA, 19 nt, Homo sapiens
  misc_RNA (1)...(19): siRNA sense strand
acagauaaagccaauauuc

SEQ ID NO: 1126509 - RNA, 19 nt, Homo sapiens
  misc_RNA (1)...(19): siRNA sense strand
guggugaauucugacauuu

SEQ ID NO: 1126510 - RNA, 19 nt, Homo sapiens
  misc_RNA (1)...(19): siRNA sense strand
gagaagaagaagaaguguu

SEQ ID NO: 1126511 - RNA, 19 nt, Homo sapiens
  misc_RNA (1)...(19): siRNA sense strand
acacucaccauuuagguaa

SEQ ID NO: 1126512 - RNA, 19 nt, Homo sapiens
  misc_RNA (1)...(19): siRNA sense strand
aggagagacuggaaguaaa

SEQ ID NO: 1126513 - RNA, 19 nt, Homo sapiens
  misc_RNA (1)...(19): siRNA sense strand
gugaugaacuuuuccaaug

SEQ ID NO: 1126514 - RNA, 19 nt, Homo sapiens
  misc_RNA (1)...(19): siRNA sense strand
aagcauucaucauuuggaa

SEQ ID NO: 1126515 - RNA, 19 nt, Homo sapiens
  misc_RNA (1)...(19): siRNA sense strand
gaagucugauaugguuaug

SEQ ID NO: 1126516 - RNA, 19 nt, Homo sapiens
  misc_RNA (1)...(19): siRNA sense strand
gguggcacgucuagugaug

SEQ ID NO: 1126517 - RNA, 19 nt, Homo sapiens
  misc_RNA (1)...(19): siRNA sense strand
ugacauuucaugccauuau

SEQ ID NO: 1126518 - RNA, 19 nt, Homo sapiens
  misc_RNA (1)...(19): siRNA sense strand
gagagacuggaaguaaaua

SEQ ID NO: 1126519 - RNA, 19 nt, Homo sapiens
  misc_RNA (1)...(19): siRNA sense strand
cacuggaaguuacugguuu

SEQ ID NO: 1126520 - RNA, 19 nt, Homo sapiens
  misc_RNA (1)...(19): siRNA sense strand
ggucggauccaguguuuua

SEQ ID NO: 1126521 - RNA, 19 nt, Homo sapiens
  misc_RNA (1)...(19): siRNA sense strand
ggacucggaccaauugaag

SEQ ID NO: 1126522 - RNA, 19 nt, Homo sapiens
  misc_RNA (1)...(19): siRNA sense strand
ugaugaaaugugcaacuua

SEQ ID NO: 1126523 - RNA, 19 nt, Homo sapiens
  misc_RNA (1)...(19): siRNA sense strand
aguucacacucaccauuua

SEQ ID NO: 1126524 - RNA, 19 nt, Homo sapiens
  misc_RNA (1)...(19): siRNA sense strand
uuugauaugccucaugaua

SEQ ID NO: 1126525 - RNA, 19 nt, Homo sapiens
  misc_RNA (1)...(19): siRNA sense strand
ggaaguuacugguuuugug

SEQ ID NO: 1126526 - RNA, 19 nt, Homo sapiens
  misc_RNA (1)...(19): siRNA sense strand
uggcuugaguauagauaaa

SEQ ID NO: 1126527 - RNA, 19 nt, Homo sapiens
  misc_RNA (1)...(19): siRNA sense strand
guguggaaguucaccuuga

SEQ ID NO: 1126528 - RNA, 19 nt, Homo sapiens
  misc_RNA (1)...(19): siRNA sense strand
aaucagaagaggaguauuc

SEQ ID NO: 1126529 - RNA, 19 nt, Homo sapiens
  misc_RNA (1)...(19): siRNA sense strand
ucaccuugacugagaaauu

SEQ ID NO: 1126530 - RNA, 19 nt, Homo sapiens
  misc_RNA (1)...(19): siRNA sense strand
gaaggaaccuguacagaua

SEQ ID NO: 1126531 - RNA, 19 nt, Homo sapiens
  misc_RNA (1)...(19): siRNA sense strand
gaauguagcuccagauaug

SEQ ID NO: 1126532 - RNA, 19 nt, Homo sapiens
  misc_RNA (1)...(19): siRNA sense strand
uaaagaaggcccuguauua

SEQ ID NO: 1126533 - RNA, 19 nt, Homo sapiens
  misc_RNA (1)...(19): siRNA sense strand
ccacauggcuugaguauag

SEQ ID NO: 1126534 - RNA, 19 nt, Homo sapiens
  misc_RNA (1)...(19): siRNA sense strand
gaaagaggaugauggaagu

SEQ ID NO: 1126535 - RNA, 19 nt, Homo sapiens
  misc_RNA (1)...(19): siRNA sense strand
guaaguggauacagaguaa

SEQ ID NO: 1126536 - RNA, 19 nt, Homo sapiens
  misc_RNA (1)...(19): siRNA sense strand
ccaagaaccuguacaagga

SEQ ID NO: 1126537 - RNA, 19 nt, Homo sapiens
  misc_RNA (1)...(19): siRNA sense strand
gcuuaaaccuugguaauuu

SEQ ID NO: 1126538 - RNA, 19 nt, Homo sapiens
  misc_RNA (1)...(19): siRNA sense strand
gaugaaaugugcaacuuau

SEQ ID NO: 1126539 - RNA, 19 nt, Homo sapiens
  misc_RNA (1)...(19): siRNA sense strand
ugagagagauuaagcauuc

SEQ ID NO: 1126540 - RNA, 19 nt, Homo sapiens
  misc_RNA (1)...(19): siRNA sense strand
gaacaucgaucaguuaaaa

SEQ ID NO: 1126541 - RNA, 19 nt, Homo sapiens
  misc_RNA (1)...(19): siRNA sense strand
aaagggaaguggaggcuua

SEQ ID NO: 1126542 - RNA, 19 nt, Homo sapiens
  misc_RNA (1)...(19): siRNA sense strand
gcauugagguccaggaaau

SEQ ID NO: 1126543 - RNA, 19 nt, Homo sapiens
  misc_RNA (1)...(19): siRNA sense strand
gguaguaaguggauacaga

SEQ ID NO: 1126544 - RNA, 19 nt, Homo sapiens
  misc_RNA (1)...(19): siRNA sense strand
agaagaagaagaaguguua

SEQ ID NO: 1126545 - RNA, 19 nt, Homo sapiens
  misc_RNA (1)...(19): siRNA sense strand
caaacuggauccaaacaau

SEQ ID NO: 1126546 - RNA, 19 nt, Homo sapiens
  misc_RNA (1)...(19): siRNA sense strand
gaaauuggaacaucgauca

SEQ ID NO: 1126547 - RNA, 19 nt, Homo sapiens
  misc_RNA (1)...(19): siRNA sense strand
gacauuucaugccauuaua

SEQ ID NO: 1126548 - RNA, 19 nt, Homo sapiens
  misc_RNA (1)...(19): siRNA sense strand
gcauguaccuuaugauguc

SEQ ID NO: 1126549 - RNA, 19 nt, Homo sapiens
  misc_RNA (1)...(19): siRNA sense strand
ccacagaggugaccauguc

SEQ ID NO: 1126550 - RNA, 19 nt, Homo sapiens
  misc_RNA (1)...(19): siRNA sense strand
gguguuggauucagaguug

SEQ ID NO: 1126551 - RNA, 19 nt, Homo sapiens
  misc_RNA (1)...(19): siRNA sense strand
gaggagagacuggaaguaa

SEQ ID NO: 1126552 - RNA, 19 nt, Homo sapiens
  misc_RNA (1)...(19): siRNA sense strand
guacagauaaagccaauau

SEQ ID NO: 1126553 - RNA, 19 nt, Homo sapiens
  misc_RNA (1)...(19): siRNA sense strand
gacagaagccacacacauu

SEQ ID NO: 1126554 - RNA, 19 nt, Homo sapiens
  misc_RNA (1)...(19): siRNA sense strand
cuaaacaguccgauacaua

SEQ ID NO: 1126555 - RNA, 19 nt, Homo sapiens
  misc_RNA (1)...(19): siRNA sense strand
aaacugacaccaaagaauu

SEQ ID NO: 1126556 - RNA, 19 nt, Homo sapiens
  misc_RNA (1)...(19): siRNA sense strand
aaagaaggcccuguauuaa

SEQ ID NO: 1126557 - RNA, 19 nt, Homo sapiens
  misc_RNA (1)...(19): siRNA sense strand
ggauuggccuggaguauac

SEQ ID NO: 1126558 - RNA, 19 nt, Homo sapiens
  misc_RNA (1)...(19): siRNA sense strand
caaagguguuggauucaga

SEQ ID NO: 1126559 - RNA, 19 nt, Homo sapiens
  misc_RNA (1)...(19): siRNA sense strand
agaaggcccuguauuaauc

SEQ ID NO: 1126560 - RNA, 19 nt, Homo sapiens
  misc_RNA (1)...(19): siRNA sense strand
ccauuuagguaagguagua

SEQ ID NO: 1126561 - RNA, 19 nt, Homo sapiens
  misc_RNA (1)...(19): siRNA sense strand
ggauacagaguaagaaaug

SEQ ID NO: 1126562 - RNA, 19 nt, Homo sapiens
  misc_RNA (1)...(19): siRNA sense strand
gcacuggagccauuuaugu

SEQ ID NO: 1126563 - RNA, 19 nt, Homo sapiens
  misc_RNA (1)...(19): siRNA sense strand
agaauaaccuggugauuuu

SEQ ID NO: 1126564 - RNA, 19 nt, Homo sapiens
  misc_RNA (1)...(19): siRNA sense strand
cguaagggcuacagucgaa

SEQ ID NO: 1126565 - RNA, 19 nt, Homo sapiens
  misc_RNA (1)...(19): siRNA sense strand
ccucacagcuuggcucuug

SEQ ID NO: 1126566 - RNA, 19 nt, Homo sapiens
  misc_RNA (1)...(19): siRNA sense strand
gcagugaccaagagaaaga

SEQ ID NO: 1126567 - RNA, 19 nt, Homo sapiens
  misc_RNA (1)...(19): siRNA sense strand
cgugaagucugauaugguu

SEQ ID NO: 1126568 - RNA, 19 nt, Homo sapiens
  misc_RNA (1)...(19): siRNA sense strand
ggaccaagaaccuguacaa

SEQ ID NO: 1126569 - RNA, 19 nt, Homo sapiens
  misc_RNA (1)...(19): siRNA sense strand
gaauuugugagagagauua

SEQ ID NO: 1126570 - RNA, 19 nt, Homo sapiens
  misc_RNA (1)...(19): siRNA sense strand
caauaaagaaggcccugua

SEQ ID NO: 1126571 - RNA, 19 nt, Homo sapiens
  misc_RNA (1)...(19): siRNA sense strand
aagaauaaccuggugauuu

SEQ ID NO: 1126572 - RNA, 19 nt, Homo sapiens
  misc_RNA (1)...(19): siRNA sense strand
ggagagacuggaaguaaau

SEQ ID NO: 1126573 - RNA, 19 nt, Homo sapiens
  misc_RNA (1)...(19): siRNA sense strand
gauaagauuccuuuacuac

SEQ ID NO: 1126574 - RNA, 19 nt, Homo sapiens
  misc_RNA (1)...(19): siRNA sense strand
ggacagaagccacacacau

SEQ ID NO: 1126575 - RNA, 19 nt, Homo sapiens
  misc_RNA (1)...(19): siRNA sense strand
gaaacuaccagaccauuuu

SEQ ID NO: 1126576 - RNA, 19 nt, Homo sapiens
  misc_RNA (1)...(19): siRNA sense strand
gcuggcauguaccuuauga

SEQ ID NO: 1126577 - RNA, 19 nt, Homo sapiens
  misc_RNA (1)...(19): siRNA sense strand
caccuugacugagaaauug

SEQ ID NO: 1126578 - RNA, 19 nt, Homo sapiens
  misc_RNA (1)...(19): siRNA sense strand
aaacuggauccaaacaaua

SEQ ID NO: 1126579 - RNA, 19 nt, Homo sapiens
  misc_RNA (1)...(19): siRNA sense strand
ggaauuauugggucacaga

SEQ ID NO: 1126580 - RNA, 19 nt, Homo sapiens
  misc_RNA (1)...(19): siRNA sense strand
gaaaugugcaacuuauaca

SEQ ID NO: 1126581 - RNA, 19 nt, Homo sapiens
  misc_RNA (1)...(19): siRNA sense strand
gauaaagccaauauucugu

SEQ ID NO: 1126582 - RNA, 19 nt, Homo sapiens
  misc_RNA (1)...(19): siRNA sense strand
gaagcccacuuucugucuu

SEQ ID NO: 1126583 - RNA, 19 nt, Homo sapiens
  misc_RNA (1)...(19): siRNA sense strand
ggaaguucaccuugacuga

SEQ ID NO: 1126584 - RNA, 19 nt, Homo sapiens
  misc_RNA (1)...(19): siRNA sense strand
uaagauuccuuuacuacag

SEQ ID NO: 1126585 - RNA, 19 nt, Homo sapiens
  misc_RNA (1)...(19): siRNA sense strand
gcaugucuuugccuauaga

SEQ ID NO: 1126586 - RNA, 19 nt, Homo sapiens
  misc_RNA (1)...(19): siRNA sense strand
guggaaaguucaucacaca

SEQ ID NO: 1126587 - RNA, 19 nt, Homo sapiens
  misc_RNA (1)...(19): siRNA sense strand
cagaauguagcuccagaua

SEQ ID NO: 1126588 - RNA, 19 nt, Homo sapiens
  misc_RNA (1)...(19): siRNA sense strand
gagccagcauggauacugu

SEQ ID NO: 1126589 - RNA, 19 nt, Homo sapiens
  misc_RNA (1)...(19): siRNA sense strand
ugaaggaaccuguacagau

SEQ ID NO: 1126590 - RNA, 19 nt, Homo sapiens
  misc_RNA (1)...(19): siRNA sense strand
cagcaggauugugcaguuu

SEQ ID NO: 1126591 - RNA, 19 nt, Homo sapiens
  misc_RNA (1)...(19): siRNA sense strand
caaguuuguuuaccagcaa

SEQ ID NO: 1126592 - RNA, 19 nt, Homo sapiens
  misc_RNA (1)...(19): siRNA sense strand
caauucccgugaagucuga

SEQ ID NO: 1126593 - RNA, 19 nt, Homo sapiens
  misc_RNA (1)...(19): siRNA sense strand
gcacgucuagugaugaaau

SEQ ID NO: 1126594 - RNA, 19 nt, Homo sapiens
  misc_RNA (1)...(19): siRNA sense strand
gggcagugaccaagagaaa

SEQ ID NO: 1126595 - RNA, 19 nt, Homo sapiens
  misc_RNA (1)...(19): siRNA sense strand
gcauucaucauuuggaaga

SEQ ID NO: 1126596 - RNA, 19 nt, Homo sapiens
  misc_RNA (1)...(19): siRNA sense strand
ggaaaguucaucacacagu

SEQ ID NO: 1126597 - RNA, 19 nt, Homo sapiens
  misc_RNA (1)...(19): siRNA sense strand
ccaagcaugcaguuucuuu

SEQ ID NO: 1126598 - RNA, 19 nt, Homo sapiens
  misc_RNA (1)...(19): siRNA sense strand
gugaugaaaugugcaacuu

SEQ ID NO: 1126599 - RNA, 19 nt, Homo sapiens
  misc_RNA (1)...(19): siRNA sense strand
guccaucacauguuacuuu

SEQ ID NO: 1126600 - RNA, 19 nt, Homo sapiens
  misc_RNA (1)...(19): siRNA sense strand
auaccaggcuugcucuuug

SEQ ID NO: 1126601 - RNA, 19 nt, Homo sapiens
  misc_RNA (1)...(19): siRNA sense strand
ccuacuggcugcaagaugu

SEQ ID NO: 1126602 - RNA, 19 nt, Homo sapiens
  misc_RNA (1)...(19): siRNA sense strand
uacuguccaucacauguua

SEQ ID NO: 1126603 - RNA, 19 nt, Homo sapiens
  misc_RNA (1)...(19): siRNA sense strand
gcgcaagcacuuugauaug

SEQ ID NO: 1126604 - RNA, 19 nt, Homo sapiens
  misc_RNA (1)...(19): siRNA sense strand
gcuugaguauagauaaaga

SEQ ID NO: 1126605 - RNA, 19 nt, Homo sapiens
  misc_RNA (1)...(19): siRNA sense strand
aaauaaugcugcaguacuc

SEQ ID NO: 1126606 - RNA, 19 nt, Homo sapiens
  misc_RNA (1)...(19): siRNA sense strand
gcugcaagauguguauuca

SEQ ID NO: 1126607 - RNA, 19 nt, Homo sapiens
  misc_RNA (1)...(19): siRNA sense strand
guaagguaguaaguggaua

SEQ ID NO: 1126608 - RNA, 19 nt, Homo sapiens
  misc_RNA (1)...(19): siRNA sense strand
acagauaaagccaauauuc

SEQ ID NO: 1126609 - RNA, 19 nt, Homo sapiens
  misc_RNA (1)...(19): siRNA sense strand
guggugaauucugacauuu

SEQ ID NO: 1126610 - RNA, 19 nt, Homo sapiens
  misc_RNA (1)...(19): siRNA sense strand
gagaagaagaagaaguguu

SEQ ID NO: 1126611 - RNA, 19 nt, Homo sapiens
  misc_RNA (1)...(19): siRNA sense strand
acacucaccauuuagguaa

SEQ ID NO: 1126612 - RNA, 19 nt, Homo sapiens
  misc_RNA (1)...(19): siRNA sense strand
aggagagacuggaaguaaa

SEQ ID NO: 1126613 - RNA, 19 nt, Homo sapiens
  misc_RNA (1)...(19): siRNA sense strand
gugaugaacuuuuccaaug

SEQ ID NO: 1126614 - RNA, 19 nt, Homo sapiens
  misc_RNA (1)...(19): siRNA sense strand
aagcauucaucauuuggaa

SEQ ID NO: 1126615 - RNA, 19 nt, Homo sapiens
  misc_RNA (1)...(19): siRNA sense strand
gaagucugauaugguuaug

SEQ ID NO: 1126616 - RNA, 19 nt, Homo sapiens
  misc_RNA (1)...(19): siRNA sense strand
gguggcacgucuagugaug

SEQ ID NO: 1126617 - RNA, 19 nt, Homo sapiens
  misc_RNA (1)...(19): siRNA sense strand
ugacauuucaugccauuau

SEQ ID NO: 1126618 - RNA, 19 nt, Homo sapiens
  misc_RNA (1)...(19): siRNA sense strand
gagagacuggaaguaaaua

SEQ ID NO: 1126619 - RNA, 19 nt, Homo sapiens
  misc_RNA (1)...(19): siRNA sense strand
cacuggaaguuacugguuu

SEQ ID NO: 1126620 - RNA, 19 nt, Homo sapiens
  misc_RNA (1)...(19): siRNA sense strand
ggucggauccaguguuuua

SEQ ID NO: 1126621 - RNA, 19 nt, Homo sapiens
  misc_RNA (1)...(19): siRNA sense strand
ggacucggaccaauugaag

SEQ ID NO: 1126622 - RNA, 19 nt, Homo sapiens
  misc_RNA (1)...(19): siRNA sense strand
ugaugaaaugugcaacuua

SEQ ID NO: 1126623 - RNA, 19 nt, Homo sapiens
  misc_RNA (1)...(19): siRNA sense strand
aguucacacucaccauuua

SEQ ID NO: 1126624 - RNA, 19 nt, Homo sapiens
  misc_RNA (1)...(19): siRNA sense strand
uuugauaugccucaugaua

SEQ ID NO: 1126625 - RNA, 19 nt, Homo sapiens
  misc_RNA (1)...(19): siRNA sense strand
ggaaguuacugguuuugug

SEQ ID NO: 1126626 - RNA, 19 nt, Homo sapiens
  misc_RNA (1)...(19): siRNA sense strand
uggcuugaguauagauaaa

SEQ ID NO: 1126627 - RNA, 19 nt, Homo sapiens
  misc_RNA (1)...(19): siRNA sense strand
guguggaaguucaccuuga

SEQ ID NO: 1126628 - RNA, 19 nt, Homo sapiens
  misc_RNA (1)...(19): siRNA sense strand
aaucagaagaggaguauuc

SEQ ID NO: 1126629 - RNA, 19 nt, Homo sapiens
  misc_RNA (1)...(19): siRNA sense strand
ucaccuugacugagaaauu

SEQ ID NO: 1126630 - RNA, 19 nt, Homo sapiens
  misc_RNA (1)...(19): siRNA sense strand
gaaggaaccuguacagaua

SEQ ID NO: 1126631 - RNA, 19 nt, Homo sapiens
  misc_RNA (1)...(19): siRNA sense strand
gaauguagcuccagauaug

SEQ ID NO: 1126632 - RNA, 19 nt, Homo sapiens
  misc_RNA (1)...(19): siRNA sense strand
uaaagaaggcccuguauua

SEQ ID NO: 1126633 - RNA, 19 nt, Homo sapiens
  misc_RNA (1)...(19): siRNA sense strand
ccacauggcuugaguauag

SEQ ID NO: 1126634 - RNA, 19 nt, Homo sapiens
  misc_RNA (1)...(19): siRNA sense strand
gaaagaggaugauggaagu

SEQ ID NO: 1126635 - RNA, 19 nt, Homo sapiens
  misc_RNA (1)...(19): siRNA sense strand
guaaguggauacagaguaa

SEQ ID NO: 1126636 - RNA, 19 nt, Homo sapiens
  misc_RNA (1)...(19): siRNA sense strand
ccaagaaccuguacaagga

SEQ ID NO: 1126637 - RNA, 19 nt, Homo sapiens
  misc_RNA (1)...(19): siRNA sense strand
gcuuaaaccuugguaauuu

SEQ ID NO: 1126638 - RNA, 19 nt, Homo sapiens
  misc_RNA (1)...(19): siRNA sense strand
gaugaaaugugcaacuuau

SEQ ID NO: 1126639 - RNA, 19 nt, Homo sapiens
  misc_RNA (1)...(19): siRNA sense strand
ugagagagauuaagcauuc

SEQ ID NO: 1126640 - RNA, 19 nt, Homo sapiens
  misc_RNA (1)...(19): siRNA sense strand
gaacaucgaucaguuaaaa

SEQ ID NO: 1126641 - RNA, 19 nt, Homo sapiens
  misc_RNA (1)...(19): siRNA sense strand
aaagggaaguggaggcuua

SEQ ID NO: 1126642 - RNA, 19 nt, Homo sapiens
  misc_RNA (1)...(19): siRNA sense strand
gcauugagguccaggaaau

SEQ ID NO: 1126643 - RNA, 19 nt, Homo sapiens
  misc_RNA (1)...(19): siRNA sense strand
gguaguaaguggauacaga

SEQ ID NO: 1126644 - RNA, 19 nt, Homo sapiens
  misc_RNA (1)...(19): siRNA sense strand
agaagaagaagaaguguua

SEQ ID NO: 1126645 - RNA, 19 nt, Homo sapiens
  misc_RNA (1)...(19): siRNA sense strand
caaacuggauccaaacaau

SEQ ID NO: 1126646 - RNA, 19 nt, Homo sapiens
  misc_RNA (1)...(19): siRNA sense strand
gaaauuggaacaucgauca

SEQ ID NO: 1126647 - RNA, 19 nt, Homo sapiens
  misc_RNA (1)...(19): siRNA sense strand
gacauuucaugccauuaua

SEQ ID NO: 1126648 - RNA, 19 nt, Homo sapiens
  misc_RNA (1)...(19): siRNA sense strand
gcauguaccuuaugauguc

SEQ ID NO: 1126649 - RNA, 19 nt, Homo sapiens
  misc_RNA (1)...(19): siRNA sense strand
ccacagaggugaccauguc

SEQ ID NO: 1126650 - RNA, 19 nt, Homo sapiens
  misc_RNA (1)...(19): siRNA sense strand
gguguuggauucagaguug

SEQ ID NO: 1126651 - RNA, 19 nt, Homo sapiens
  misc_RNA (1)...(19): siRNA sense strand
gaggagagacuggaaguaa

SEQ ID NO: 1126652 - RNA, 19 nt, Homo sapiens
  misc_RNA (1)...(19): siRNA sense strand
guacagauaaagccaauau

SEQ ID NO: 1126653 - RNA, 19 nt, Homo sapiens
  misc_RNA (1)...(19): siRNA sense strand
gacagaagccacacacauu

SEQ ID NO: 1126654 - RNA, 19 nt, Homo sapiens
  misc_RNA (1)...(19): siRNA sense strand
cuaaacaguccgauacaua

SEQ ID NO: 1126655 - RNA, 19 nt, Homo sapiens
  misc_RNA (1)...(19): siRNA sense strand
aaacugacaccaaagaauu

SEQ ID NO: 1126656 - RNA, 19 nt, Homo sapiens
  misc_RNA (1)...(19): siRNA sense strand
aaagaaggcccuguauuaa

SEQ ID NO: 1126657 - RNA, 19 nt, Homo sapiens
  misc_RNA (1)...(19): siRNA sense strand
ggauuggccuggaguauac

SEQ ID NO: 1126658 - RNA, 19 nt, Homo sapiens
  misc_RNA (1)...(19): siRNA sense strand
caaagguguuggauucaga

SEQ ID NO: 1126659 - RNA, 19 nt, Homo sapiens
  misc_RNA (1)...(19): siRNA sense strand
agaaggcccuguauuaauc

SEQ ID NO: 1126660 - RNA, 19 nt, Homo sapiens
  misc_RNA (1)...(19): siRNA sense strand
ccauuuagguaagguagua

SEQ ID NO: 1126661 - RNA, 19 nt, Homo sapiens
  misc_RNA (1)...(19): siRNA sense strand
ggauacagaguaagaaaug

SEQ ID NO: 1126662 - RNA, 19 nt, Homo sapiens
  misc_RNA (1)...(19): siRNA sense strand
gcacuggagccauuuaugu

SEQ ID NO: 1126663 - RNA, 19 nt, Homo sapiens
  misc_RNA (1)...(19): siRNA sense strand
agaauaaccuggugauuuu

SEQ ID NO: 1126664 - RNA, 19 nt, Homo sapiens
  misc_RNA (1)...(19): siRNA sense strand
cguaagggcuacagucgaa

SEQ ID NO: 1126665 - RNA, 19 nt, Homo sapiens
  misc_RNA (1)...(19): siRNA sense strand
ccucacagcuuggcucuug

SEQ ID NO: 1126666 - RNA, 19 nt, Homo sapiens
  misc_RNA (1)...(19): siRNA sense strand
gcagugaccaagagaaaga

SEQ ID NO: 1126667 - RNA, 19 nt, Homo sapiens
  misc_RNA (1)...(19): siRNA sense strand
cgugaagucugauaugguu

SEQ ID NO: 1126668 - RNA, 19 nt, Homo sapiens
  misc_RNA (1)...(19): siRNA sense strand
ggaccaagaaccuguacaa

SEQ ID NO: 1126669 - RNA, 19 nt, Homo sapiens
  misc_RNA (1)...(19): siRNA sense strand
gaauuugugagagagauua

SEQ ID NO: 1126670 - RNA, 19 nt, Homo sapiens
  misc_RNA (1)...(19): siRNA sense strand
caauaaagaaggcccugua

SEQ ID NO: 1126671 - RNA, 19 nt, Homo sapiens
  misc_RNA (1)...(19): siRNA sense strand
aagaauaaccuggugauuu

SEQ ID NO: 1126672 - RNA, 19 nt, Homo sapiens
  misc_RNA (1)...(19): siRNA sense strand
ggagagacuggaaguaaau

SEQ ID NO: 1126673 - RNA, 19 nt, Homo sapiens
  misc_RNA (1)...(19): siRNA sense strand
gauaagauuccuuuacuac

SEQ ID NO: 1126674 - RNA, 19 nt, Homo sapiens
  misc_RNA (1)...(19): siRNA sense strand
ggacagaagccacacacau

SEQ ID NO: 1126675 - RNA, 19 nt, Homo sapiens
  misc_RNA (1)...(19): siRNA sense strand
gaaacuaccagaccauuuu

SEQ ID NO: 1126676 - RNA, 19 nt, Homo sapiens
  misc_RNA (1)...(19): siRNA sense strand
gcuggcauguaccuuauga

SEQ ID NO: 1126677 - RNA, 19 nt, Homo sapiens
  misc_RNA (1)...(19): siRNA sense strand
caccuugacugagaaauug

SEQ ID NO: 1126678 - RNA, 19 nt, Homo sapiens
  misc_RNA (1)...(19): siRNA sense strand
aaacuggauccaaacaaua

SEQ ID NO: 1126679 - RNA, 19 nt, Homo sapiens
  misc_RNA (1)...(19): siRNA sense strand
ggaauuauugggucacaga

SEQ ID NO: 1126680 - RNA, 19 nt, Homo sapiens
  misc_RNA (1)...(19): siRNA sense strand
gaaaugugcaacuuauaca

SEQ ID NO: 1126681 - RNA, 19 nt, Homo sapiens
  misc_RNA (1)...(19): siRNA sense strand
gauaaagccaauauucugu

SEQ ID NO: 1126682 - RNA, 19 nt, Homo sapiens
  misc_RNA (1)...(19): siRNA sense strand
gaagcccacuuucugucuu

SEQ ID NO: 1126683 - RNA, 19 nt, Homo sapiens
  misc_RNA (1)...(19): siRNA sense strand
ggaaguucaccuugacuga

SEQ ID NO: 1126684 - RNA, 19 nt, Homo sapiens
  misc_RNA (1)...(19): siRNA sense strand
uaagauuccuuuacuacag

SEQ ID NO: 1126685 - RNA, 19 nt, Homo sapiens
  misc_RNA (1)...(19): siRNA sense strand
gcaugucuuugccuauaga

SEQ ID NO: 1126686 - RNA, 19 nt, Homo sapiens
  misc_RNA (1)...(19): siRNA sense strand
guggaaaguucaucacaca

SEQ ID NO: 1126687 - RNA, 19 nt, Homo sapiens
  misc_RNA (1)...(19): siRNA sense strand
cagaauguagcuccagaua

SEQ ID NO: 1126688 - RNA, 19 nt, Homo sapiens
  misc_RNA (1)...(19): siRNA sense strand
gagccagcauggauacugu

SEQ ID NO: 1126689 - RNA, 19 nt, Homo sapiens
  misc_RNA (1)...(19): siRNA sense strand
ugaaggaaccuguacagau

SEQ ID NO: 1126690 - RNA, 19 nt, Homo sapiens
  misc_RNA (1)...(19): siRNA sense strand
cagcaggauugugcaguuu

SEQ ID NO: 1126691 - RNA, 19 nt, Homo sapiens
  misc_RNA (1)...(19): siRNA sense strand
caaguuuguuuaccagcaa

SEQ ID NO: 1126692 - RNA, 19 nt, Homo sapiens
  misc_RNA (1)...(19): siRNA sense strand
caauucccgugaagucuga

SEQ ID NO: 1126693 - RNA, 19 nt, Homo sapiens
  misc_RNA (1)...(19): siRNA sense strand
gcacgucuagugaugaaau

SEQ ID NO: 1126694 - RNA, 19 nt, Homo sapiens
  misc_RNA (1)...(19): siRNA sense strand
gggcagugaccaagagaaa

SEQ ID NO: 1126695 - RNA, 19 nt, Homo sapiens
  misc_RNA (1)...(19): siRNA sense strand
gcauucaucauuuggaaga

SEQ ID NO: 1126696 - RNA, 19 nt, Homo sapiens
  misc_RNA (1)...(19): siRNA sense strand
ggaaaguucaucacacagu

SEQ ID NO: 1126697 - RNA, 19 nt, Homo sapiens
  misc_RNA (1)...(19): siRNA sense strand
ccaagcaugcaguuucuuu

SEQ ID NO: 1126698 - RNA, 19 nt, Homo sapiens
  misc_RNA (1)...(19): siRNA sense strand
gugaugaaaugugcaacuu

SEQ ID NO: 1126699 - RNA, 19 nt, Homo sapiens
  misc_RNA (1)...(19): siRNA sense strand
guccaucacauguuacuuu

SEQ ID NO: 1126700 - RNA, 19 nt, Homo sapiens
  misc_RNA (1)...(19): siRNA sense strand
auaccaggcuugcucuuug

SEQ ID NO: 1126701 - RNA, 19 nt, Homo sapiens
  misc_RNA (1)...(19): siRNA sense strand
ccuacuggcugcaagaugu

SEQ ID NO: 1126702 - RNA, 19 nt, Homo sapiens
  misc_RNA (1)...(19): siRNA sense strand
uacuguccaucacauguua

SEQ ID NO: 1126703 - RNA, 19 nt, Homo sapiens
  misc_RNA (1)...(19): siRNA sense strand
gcgcaagcacuuugauaug

SEQ ID NO: 1126704 - RNA, 19 nt, Homo sapiens
  misc_RNA (1)...(19): siRNA sense strand
gcuugaguauagauaaaga

SEQ ID NO: 1126705 - RNA, 19 nt, Homo sapiens
  misc_RNA (1)...(19): siRNA sense strand
aaauaaugcugcaguacuc

SEQ ID NO: 1126706 - RNA, 19 nt, Homo sapiens
  misc_RNA (1)...(19): siRNA sense strand
gcugcaagauguguauuca

SEQ ID NO: 1126707 - RNA, 19 nt, Homo sapiens
  misc_RNA (1)...(19): siRNA sense strand
guaagguaguaaguggaua

SEQ ID NO: 1126708 - RNA, 19 nt, Homo sapiens
  misc_RNA (1)...(19): siRNA sense strand
acagauaaagccaauauuc

SEQ ID NO: 1126709 - RNA, 19 nt, Homo sapiens
  misc_RNA (1)...(19): siRNA sense strand
guggugaauucugacauuu

SEQ ID NO: 1126710 - RNA, 19 nt, Homo sapiens
  misc_RNA (1)...(19): siRNA sense strand
gagaagaagaagaaguguu

SEQ ID NO: 1126711 - RNA, 19 nt, Homo sapiens
  misc_RNA (1)...(19): siRNA sense strand
acacucaccauuuagguaa

SEQ ID NO: 1126712 - RNA, 19 nt, Homo sapiens
  misc_RNA (1)...(19): siRNA sense strand
aggagagacuggaaguaaa

SEQ ID NO: 1126713 - RNA, 19 nt, Homo sapiens
  misc_RNA (1)...(19): siRNA sense strand
gugaugaacuuuuccaaug

SEQ ID NO: 1126714 - RNA, 19 nt, Homo sapiens
  misc_RNA (1)...(19): siRNA sense strand
aagcauucaucauuuggaa

SEQ ID NO: 1126715 - RNA, 19 nt, Homo sapiens
  misc_RNA (1)...(19): siRNA sense strand
gaagucugauaugguuaug

SEQ ID NO: 1126716 - RNA, 19 nt, Homo sapiens
  misc_RNA (1)...(19): siRNA sense strand
gguggcacgucuagugaug

SEQ ID NO: 1126717 - RNA, 19 nt, Homo sapiens
  misc_RNA (1)...(19): siRNA sense strand
ugacauuucaugccauuau

SEQ ID NO: 1126718 - RNA, 19 nt, Homo sapiens
  misc_RNA (1)...(19): siRNA sense strand
gagagacuggaaguaaaua

SEQ ID NO: 1126719 - RNA, 19 nt, Homo sapiens
  misc_RNA (1)...(19): siRNA sense strand
cacuggaaguuacugguuu

SEQ ID NO: 1126720 - RNA, 19 nt, Homo sapiens
  misc_RNA (1)...(19): siRNA sense strand
ggucggauccaguguuuua

SEQ ID NO: 1126721 - RNA, 19 nt, Homo sapiens
  misc_RNA (1)...(19): siRNA sense strand
ggacucggaccaauugaag

SEQ ID NO: 1126722 - RNA, 19 nt, Homo sapiens
  misc_RNA (1)...(19): siRNA sense strand
ugaugaaaugugcaacuua

SEQ ID NO: 1126723 - RNA, 19 nt, Homo sapiens
  misc_RNA (1)...(19): siRNA sense strand
aguucacacucaccauuua

SEQ ID NO: 1126724 - RNA, 19 nt, Homo sapiens
  misc_RNA (1)...(19): siRNA sense strand
uuugauaugccucaugaua

SEQ ID NO: 1126725 - RNA, 19 nt, Homo sapiens
  misc_RNA (1)...(19): siRNA sense strand
ggaaguuacugguuuugug

SEQ ID NO: 1126726 - RNA, 19 nt, Homo sapiens
  misc_RNA (1)...(19): siRNA sense strand
uggcuugaguauagauaaa

SEQ ID NO: 1126727 - RNA, 19 nt, Homo sapiens
  misc_RNA (1)...(19): siRNA sense strand
guguggaaguucaccuuga

SEQ ID NO: 1126728 - RNA, 19 nt, Homo sapiens
  misc_RNA (1)...(19): siRNA sense strand
aaucagaagaggaguauuc

SEQ ID NO: 1126729 - RNA, 19 nt, Homo sapiens
  misc_RNA (1)...(19): siRNA sense strand
ucaccuugacugagaaauu

SEQ ID NO: 1126730 - RNA, 19 nt, Homo sapiens
  misc_RNA (1)...(19): siRNA sense strand
gaaggaaccuguacagaua

SEQ ID NO: 1126731 - RNA, 19 nt, Homo sapiens
  misc_RNA (1)...(19): siRNA sense strand
gaauguagcuccagauaug

SEQ ID NO: 1126732 - RNA, 19 nt, Homo sapiens
  misc_RNA (1)...(19): siRNA sense strand
uaaagaaggcccuguauua

SEQ ID NO: 1126733 - RNA, 19 nt, Homo sapiens
  misc_RNA (1)...(19): siRNA sense strand
ccacauggcuugaguauag

SEQ ID NO: 1126734 - RNA, 19 nt, Homo sapiens
  misc_RNA (1)...(19): siRNA sense strand
gaaagaggaugauggaagu

SEQ ID NO: 1126735 - RNA, 19 nt, Homo sapiens
  misc_RNA (1)...(19): siRNA sense strand
guaaguggauacagaguaa

SEQ ID NO: 1126736 - RNA, 19 nt, Homo sapiens
  misc_RNA (1)...(19): siRNA sense strand
ccaagaaccuguacaagga

SEQ ID NO: 1126737 - RNA, 19 nt, Homo sapiens
  misc_RNA (1)...(19): siRNA sense strand
gcuuaaaccuugguaauuu

SEQ ID NO: 1126738 - RNA, 19 nt, Homo sapiens
  misc_RNA (1)...(19): siRNA sense strand
gaugaaaugugcaacuuau

SEQ ID NO: 1126739 - RNA, 19 nt, Homo sapiens
  misc_RNA (1)...(19): siRNA sense strand
ugagagagauuaagcauuc

SEQ ID NO: 1126740 - RNA, 19 nt, Homo sapiens
  misc_RNA (1)...(19): siRNA sense strand
gaacaucgaucaguuaaaa

SEQ ID NO: 1126741 - RNA, 19 nt, Homo sapiens
  misc_RNA (1)...(19): siRNA sense strand
aaagggaaguggaggcuua

SEQ ID NO: 1126742 - RNA, 19 nt, Homo sapiens
  misc_RNA (1)...(19): siRNA sense strand
gcauugagguccaggaaau

SEQ ID NO: 1126743 - RNA, 19 nt, Homo sapiens
  misc_RNA (1)...(19): siRNA sense strand
gguaguaaguggauacaga

SEQ ID NO: 1126744 - RNA, 19 nt, Homo sapiens
  misc_RNA (1)...(19): siRNA sense strand
agaagaagaagaaguguua

SEQ ID NO: 1126745 - RNA, 19 nt, Homo sapiens
  misc_RNA (1)...(19): siRNA sense strand
caaacuggauccaaacaau

SEQ ID NO: 1126746 - RNA, 19 nt, Homo sapiens
  misc_RNA (1)...(19): siRNA sense strand
gaaauuggaacaucgauca

SEQ ID NO: 1126747 - RNA, 19 nt, Homo sapiens
  misc_RNA (1)...(19): siRNA sense strand
gacauuucaugccauuaua

SEQ ID NO: 1126748 - RNA, 19 nt, Homo sapiens
  misc_RNA (1)...(19): siRNA sense strand
gcauguaccuuaugauguc

SEQ ID NO: 1126749 - RNA, 19 nt, Homo sapiens
  misc_RNA (1)...(19): siRNA sense strand
ccacagaggugaccauguc

SEQ ID NO: 1126750 - RNA, 19 nt, Homo sapiens
  misc_RNA (1)...(19): siRNA sense strand
gguguuggauucagaguug

SEQ ID NO: 1126751 - RNA, 19 nt, Homo sapiens
  misc_RNA (1)...(19): siRNA sense strand
gaggagagacuggaaguaa

SEQ ID NO: 1126752 - RNA, 19 nt, Homo sapiens
  misc_RNA (1)...(19): siRNA sense strand
guacagauaaagccaauau

SEQ ID NO: 1126753 - RNA, 19 nt, Homo sapiens
  misc_RNA (1)...(19): siRNA sense strand
gacagaagccacacacauu

SEQ ID NO: 1126754 - RNA, 19 nt, Homo sapiens
  misc_RNA (1)...(19): siRNA sense strand
cuaaacaguccgauacaua

SEQ ID NO: 1126755 - RNA, 19 nt, Homo sapiens
  misc_RNA (1)...(19): siRNA sense strand
aaacugacaccaaagaauu

SEQ ID NO: 1126756 - RNA, 19 nt, Homo sapiens
  misc_RNA (1)...(19): siRNA sense strand
aaagaaggcccuguauuaa

SEQ ID NO: 1126757 - RNA, 19 nt, Homo sapiens
  misc_RNA (1)...(19): siRNA sense strand
ggauuggccuggaguauac

SEQ ID NO: 1126758 - RNA, 19 nt, Homo sapiens
  misc_RNA (1)...(19): siRNA sense strand
caaagguguuggauucaga

SEQ ID NO: 1126759 - RNA, 19 nt, Homo sapiens
  misc_RNA (1)...(19): siRNA sense strand
agaaggcccuguauuaauc

SEQ ID NO: 1126760 - RNA, 19 nt, Homo sapiens
  misc_RNA (1)...(19): siRNA sense strand
ccauuuagguaagguagua

SEQ ID NO: 1126761 - RNA, 19 nt, Homo sapiens
  misc_RNA (1)...(19): siRNA sense strand
ggauacagaguaagaaaug

SEQ ID NO: 1126762 - RNA, 19 nt, Homo sapiens
  misc_RNA (1)...(19): siRNA sense strand
gcacuggagccauuuaugu

SEQ ID NO: 1126763 - RNA, 19 nt, Homo sapiens
  misc_RNA (1)...(19): siRNA sense strand
agaauaaccuggugauuuu

SEQ ID NO: 1126764 - RNA, 19 nt, Homo sapiens
  misc_RNA (1)...(19): siRNA sense strand
cguaagggcuacagucgaa

SEQ ID NO: 1126765 - RNA, 19 nt, Homo sapiens
  misc_RNA (1)...(19): siRNA sense strand
ccucacagcuuggcucuug

SEQ ID NO: 1126766 - RNA, 19 nt, Homo sapiens
  misc_RNA (1)...(19): siRNA sense strand
gcagugaccaagagaaaga

SEQ ID NO: 1126767 - RNA, 19 nt, Homo sapiens
  misc_RNA (1)...(19): siRNA sense strand
cgugaagucugauaugguu

SEQ ID NO: 1126768 - RNA, 19 nt, Homo sapiens
  misc_RNA (1)...(19): siRNA sense strand
ggaccaagaaccuguacaa

SEQ ID NO: 1126769 - RNA, 19 nt, Homo sapiens
  misc_RNA (1)...(19): siRNA sense strand
gaauuugugagagagauua

SEQ ID NO: 1126770 - RNA, 19 nt, Homo sapiens
  misc_RNA (1)...(19): siRNA sense strand
caauaaagaaggcccugua

SEQ ID NO: 1126771 - RNA, 19 nt, Homo sapiens
  misc_RNA (1)...(19): siRNA sense strand
aagaauaaccuggugauuu

SEQ ID NO: 1126772 - RNA, 19 nt, Homo sapiens
  misc_RNA (1)...(19): siRNA sense strand
ggagagacuggaaguaaau

SEQ ID NO: 1126773 - RNA, 19 nt, Homo sapiens
  misc_RNA (1)...(19): siRNA sense strand
gauaagauuccuuuacuac

SEQ ID NO: 1126774 - RNA, 19 nt, Homo sapiens
  misc_RNA (1)...(19): siRNA sense strand
ggacagaagccacacacau

SEQ ID NO: 1126775 - RNA, 19 nt, Homo sapiens
  misc_RNA (1)...(19): siRNA sense strand
gaaacuaccagaccauuuu

SEQ ID NO: 1126776 - RNA, 19 nt, Homo sapiens
  misc_RNA (1)...(19): siRNA sense strand
gcuggcauguaccuuauga

SEQ ID NO: 1126777 - RNA, 19 nt, Homo sapiens
  misc_RNA (1)...(19): siRNA sense strand
caccuugacugagaaauug

SEQ ID NO: 1126778 - RNA, 19 nt, Homo sapiens
  misc_RNA (1)...(19): siRNA sense strand
aaacuggauccaaacaaua

SEQ ID NO: 1126779 - RNA, 19 nt, Homo sapiens
  misc_RNA (1)...(19): siRNA sense strand
ggaauuauugggucacaga

SEQ ID NO: 1126780 - RNA, 19 nt, Homo sapiens
  misc_RNA (1)...(19): siRNA sense strand
gaaaugugcaacuuauaca

SEQ ID NO: 1126781 - RNA, 19 nt, Homo sapiens
  misc_RNA (1)...(19): siRNA sense strand
gauaaagccaauauucugu

SEQ ID NO: 1126782 - RNA, 19 nt, Homo sapiens
  misc_RNA (1)...(19): siRNA sense strand
gaagcccacuuucugucuu

SEQ ID NO: 1126783 - RNA, 19 nt, Homo sapiens
  misc_RNA (1)...(19): siRNA sense strand
ggaaguucaccuugacuga

SEQ ID NO: 1126784 - RNA, 19 nt, Homo sapiens
  misc_RNA (1)...(19): siRNA sense strand
uaagauuccuuuacuacag

SEQ ID NO: 1126785 - RNA, 19 nt, Homo sapiens
  misc_RNA (1)...(19): siRNA sense strand
gcaugucuuugccuauaga

SEQ ID NO: 1126786 - RNA, 19 nt, Homo sapiens
  misc_RNA (1)...(19): siRNA sense strand
guggaaaguucaucacaca

SEQ ID NO: 1126787 - RNA, 19 nt, Homo sapiens
  misc_RNA (1)...(19): siRNA sense strand
cagaauguagcuccagaua

SEQ ID NO: 1126788 - RNA, 19 nt, Homo sapiens
  misc_RNA (1)...(19): siRNA sense strand
gagccagcauggauacugu

SEQ ID NO: 1126789 - RNA, 19 nt, Homo sapiens
  misc_RNA (1)...(19): siRNA sense strand
ugaaggaaccuguacagau

SEQ ID NO: 1126790 - RNA, 19 nt, Homo sapiens
  misc_RNA (1)...(19): siRNA sense strand
cagcaggauugugcaguuu

SEQ ID NO: 1126791 - RNA, 19 nt, Homo sapiens
  misc_RNA (1)...(19): siRNA sense strand
caaguuuguuuaccagcaa

SEQ ID NO: 1126792 - RNA, 19 nt, Homo sapiens
  misc_RNA (1)...(19): siRNA sense strand
caauucccgugaagucuga

SEQ ID NO: 1126793 - RNA, 19 nt, Homo sapiens
  misc_RNA (1)...(19): siRNA sense strand
gcacgucuagugaugaaau

SEQ ID NO: 1126794 - RNA, 19 nt, Homo sapiens
  misc_RNA (1)...(19): siRNA sense strand
gggcagugaccaagagaaa

SEQ ID NO: 1126795 - RNA, 19 nt, Homo sapiens
  misc_RNA (1)...(19): siRNA sense strand
gcauucaucauuuggaaga

SEQ ID NO: 1126796 - RNA, 19 nt, Homo sapiens
  misc_RNA (1)...(19): siRNA sense strand
ggaaaguucaucacacagu

SEQ ID NO: 1126797 - RNA, 19 nt, Homo sapiens
  misc_RNA (1)...(19): siRNA sense strand
ccaagcaugcaguuucuuu

SEQ ID NO: 1126798 - RNA, 19 nt, Homo sapiens
  misc_RNA (1)...(19): siRNA sense strand
gugaugaaaugugcaacuu

SEQ ID NO: 1126799 - RNA, 19 nt, Homo sapiens
  misc_RNA (1)...(19): siRNA sense strand
guccaucacauguuacuuu

SEQ ID NO: 1126800 - RNA, 19 nt, Homo sapiens
  misc_RNA (1)...(19): siRNA sense strand
auaccaggcuugcucuuug

SEQ ID NO: 1126801 - RNA, 19 nt, Homo sapiens
  misc_RNA (1)...(19): siRNA sense strand
ccuacuggcugcaagaugu

SEQ ID NO: 1126802 - RNA, 19 nt, Homo sapiens
  misc_RNA (1)...(19): siRNA sense strand
uacuguccaucacauguua

SEQ ID NO: 1126803 - RNA, 19 nt, Homo sapiens
  misc_RNA (1)...(19): siRNA sense strand
gcgcaagcacuuugauaug

SEQ ID NO: 1126804 - RNA, 19 nt, Homo sapiens
  misc_RNA (1)...(19): siRNA sense strand
gcuugaguauagauaaaga

SEQ ID NO: 1126805 - RNA, 19 nt, Homo sapiens
  misc_RNA (1)...(19): siRNA sense strand
aaauaaugcugcaguacuc

SEQ ID NO: 1126806 - RNA, 19 nt, Homo sapiens
  misc_RNA (1)...(19): siRNA sense strand
gcugcaagauguguauuca

SEQ ID NO: 1126807 - RNA, 19 nt, Homo sapiens
  misc_RNA (1)...(19): siRNA sense strand
guaagguaguaaguggaua

SEQ ID NO: 1126808 - RNA, 19 nt, Homo sapiens
  misc_RNA (1)...(19): siRNA sense strand
acagauaaagccaauauuc

SEQ ID NO: 1126809 - RNA, 19 nt, Homo sapiens
  misc_RNA (1)...(19): siRNA sense strand
guggugaauucugacauuu

SEQ ID NO: 1126810 - RNA, 19 nt, Homo sapiens
  misc_RNA (1)...(19): siRNA sense strand
gagaagaagaagaaguguu

SEQ ID NO: 1126811 - RNA, 19 nt, Homo sapiens
  misc_RNA (1)...(19): siRNA sense strand
acacucaccauuuagguaa

SEQ ID NO: 1126812 - RNA, 19 nt, Homo sapiens
  misc_RNA (1)...(19): siRNA sense strand
aggagagacuggaaguaaa

SEQ ID NO: 1126813 - RNA, 19 nt, Homo sapiens
  misc_RNA (1)...(19): siRNA sense strand
gugaugaacuuuuccaaug

SEQ ID NO: 1126814 - RNA, 19 nt, Homo sapiens
  misc_RNA (1)...(19): siRNA sense strand
aagcauucaucauuuggaa

SEQ ID NO: 1126815 - RNA, 19 nt, Homo sapiens
  misc_RNA (1)...(19): siRNA sense strand
gaagucugauaugguuaug

SEQ ID NO: 1126816 - RNA, 19 nt, Homo sapiens
  misc_RNA (1)...(19): siRNA sense strand
gguggcacgucuagugaug

SEQ ID NO: 1126817 - RNA, 19 nt, Homo sapiens
  misc_RNA (1)...(19): siRNA sense strand
ugacauuucaugccauuau

SEQ ID NO: 1126818 - RNA, 19 nt, Homo sapiens
  misc_RNA (1)...(19): siRNA sense strand
gagagacuggaaguaaaua

SEQ ID NO: 1126819 - RNA, 19 nt, Homo sapiens
  misc_RNA (1)...(19): siRNA sense strand
cacuggaaguuacugguuu

SEQ ID NO: 1126820 - RNA, 19 nt, Homo sapiens
  misc_RNA (1)...(19): siRNA sense strand
ggucggauccaguguuuua

SEQ ID NO: 1126821 - RNA, 19 nt, Homo sapiens
  misc_RNA (1)...(19): siRNA sense strand
ggacucggaccaauugaag

SEQ ID NO: 1126822 - RNA, 19 nt, Homo sapiens
  misc_RNA (1)...(19): siRNA sense strand
ugaugaaaugugcaacuua

SEQ ID NO: 1126823 - RNA, 19 nt, Homo sapiens
  misc_RNA (1)...(19): siRNA sense strand
aguucacacucaccauuua

SEQ ID NO: 1126824 - RNA, 19 nt, Homo sapiens
  misc_RNA (1)...(19): siRNA sense strand
uuugauaugccucaugaua

SEQ ID NO: 1126825 - RNA, 19 nt, Homo sapiens
  misc_RNA (1)...(19): siRNA sense strand
ggaaguuacugguuuugug

SEQ ID NO: 1126826 - RNA, 19 nt, Homo sapiens
  misc_RNA (1)...(19): siRNA sense strand
uggcuugaguauagauaaa

SEQ ID NO: 1126827 - RNA, 19 nt, Homo sapiens
  misc_RNA (1)...(19): siRNA sense strand
guguggaaguucaccuuga

SEQ ID NO: 1126828 - RNA, 19 nt, Homo sapiens
  misc_RNA (1)...(19): siRNA sense strand
aaucagaagaggaguauuc

SEQ ID NO: 1126829 - RNA, 19 nt, Homo sapiens
  misc_RNA (1)...(19): siRNA sense strand
ucaccuugacugagaaauu

SEQ ID NO: 1126830 - RNA, 19 nt, Homo sapiens
  misc_RNA (1)...(19): siRNA sense strand
gcagaaggaugauaaagaa

SEQ ID NO: 1126831 - RNA, 19 nt, Homo sapiens
  misc_RNA (1)...(19): siRNA sense strand
gcacagggauggacucaaa

SEQ ID NO: 1126832 - RNA, 19 nt, Homo sapiens
  misc_RNA (1)...(19): siRNA sense strand
gaagauugaugaugaaguu

SEQ ID NO: 1126833 - RNA, 19 nt, Homo sapiens
  misc_RNA (1)...(19): siRNA sense strand
ccaaucaacuggagauaua

SEQ ID NO: 1126834 - RNA, 19 nt, Homo sapiens
  misc_RNA (1)...(19): siRNA sense strand
gaaagaacauugagaacau

SEQ ID NO: 1126835 - RNA, 19 nt, Homo sapiens
  misc_RNA (1)...(19): siRNA sense strand
caaauuagcucgcuuagag

SEQ ID NO: 1126836 - RNA, 19 nt, Homo sapiens
  misc_RNA (1)...(19): siRNA sense strand
gaacaugucucagccagaa

SEQ ID NO: 1126837 - RNA, 19 nt, Homo sapiens
  misc_RNA (1)...(19): siRNA sense strand
caaccaagauaaagaacua

SEQ ID NO: 1126838 - RNA, 19 nt, Homo sapiens
  misc_RNA (1)...(19): siRNA sense strand
ggaaugcgauggcuuacaa

SEQ ID NO: 1126839 - RNA, 19 nt, Homo sapiens
  misc_RNA (1)...(19): siRNA sense strand
ggaagaaugucccaucugu

SEQ ID NO: 1126840 - RNA, 19 nt, Homo sapiens
  misc_RNA (1)...(19): siRNA sense strand
ccaagcaacuucuacguaa

SEQ ID NO: 1126841 - RNA, 19 nt, Homo sapiens
  misc_RNA (1)...(19): siRNA sense strand
gcucugcgcugacuucaaa

SEQ ID NO: 1126842 - RNA, 19 nt, Homo sapiens
  misc_RNA (1)...(19): siRNA sense strand
ggaggaagcagaauuagaa

SEQ ID NO: 1126843 - RNA, 19 nt, Homo sapiens
  misc_RNA (1)...(19): siRNA sense strand
gaacaugaaccugugauaa

SEQ ID NO: 1126844 - RNA, 19 nt, Homo sapiens
  misc_RNA (1)...(19): siRNA sense strand
gauagugacuuugaagaaa

SEQ ID NO: 1126845 - RNA, 19 nt, Homo sapiens
  misc_RNA (1)...(19): siRNA sense strand
gaucagagcuaugguguca

SEQ ID NO: 1126846 - RNA, 19 nt, Homo sapiens
  misc_RNA (1)...(19): siRNA sense strand
ggagaaagaggaagaagaa

SEQ ID NO: 1126847 - RNA, 19 nt, Homo sapiens
  misc_RNA (1)...(19): siRNA sense strand
gucaucaacugaagucuua

SEQ ID NO: 1126848 - RNA, 19 nt, Homo sapiens
  misc_RNA (1)...(19): siRNA sense strand
gacuauggcuucaaacuga

SEQ ID NO: 1126849 - RNA, 19 nt, Homo sapiens
  misc_RNA (1)...(19): siRNA sense strand
ugagagaucuuccaaauac

SEQ ID NO: 1126850 - RNA, 19 nt, Homo sapiens
  misc_RNA (1)...(19): siRNA sense strand
ggaaggaacuacagcgaau

SEQ ID NO: 1126851 - RNA, 19 nt, Homo sapiens
  misc_RNA (1)...(19): siRNA sense strand
caacacagcagaaggauga

SEQ ID NO: 1126852 - RNA, 19 nt, Homo sapiens
  misc_RNA (1)...(19): siRNA sense strand
ucacugaacucacggcaaa

SEQ ID NO: 1126853 - RNA, 19 nt, Homo sapiens
  misc_RNA (1)...(19): siRNA sense strand
ucacagagaugaugacaca

SEQ ID NO: 1126854 - RNA, 19 nt, Homo sapiens
  misc_RNA (1)...(19): siRNA sense strand
ccacucagauuaugaugaa

SEQ ID NO: 1126855 - RNA, 19 nt, Homo sapiens
  misc_RNA (1)...(19): siRNA sense strand
caugauagcugcagagcaa

SEQ ID NO: 1126856 - RNA, 19 nt, Homo sapiens
  misc_RNA (1)...(19): siRNA sense strand
gacgcugucucaagauuua

SEQ ID NO: 1126857 - RNA, 19 nt, Homo sapiens
  misc_RNA (1)...(19): siRNA sense strand
ucaaugagguggcagaaga

SEQ ID NO: 1126858 - RNA, 19 nt, Homo sapiens
  misc_RNA (1)...(19): siRNA sense strand
gaaagcagcauccggaaga

SEQ ID NO: 1126859 - RNA, 19 nt, Homo sapiens
  misc_RNA (1)...(19): siRNA sense strand
gcagugcugugcuuauuau

SEQ ID NO: 1126860 - RNA, 19 nt, Homo sapiens
  misc_RNA (1)...(19): siRNA sense strand
caacugaggcggcuuaaga

SEQ ID NO: 1126861 - RNA, 19 nt, Homo sapiens
  misc_RNA (1)...(19): siRNA sense strand
gaaaauggacccuuaauga

SEQ ID NO: 1126862 - RNA, 19 nt, Homo sapiens
  misc_RNA (1)...(19): siRNA sense strand
caugagagaucuuccaaau

SEQ ID NO: 1126863 - RNA, 19 nt, Homo sapiens
  misc_RNA (1)...(19): siRNA sense strand
gggaaagcgucuuggauga

SEQ ID NO: 1126864 - RNA, 19 nt, Homo sapiens
  misc_RNA (1)...(19): siRNA sense strand
gaaaagacagucauucaua

SEQ ID NO: 1126865 - RNA, 19 nt, Homo sapiens
  misc_RNA (1)...(19): siRNA sense strand
gaaagcgucuuggaugaug

SEQ ID NO: 1126866 - RNA, 19 nt, Homo sapiens
  misc_RNA (1)...(19): siRNA sense strand
caagauuuaucgcacguuu

SEQ ID NO: 1126867 - RNA, 19 nt, Homo sapiens
  misc_RNA (1)...(19): siRNA sense strand
guaagaacaucuccaagca

SEQ ID NO: 1126868 - RNA, 19 nt, Homo sapiens
  misc_RNA (1)...(19): siRNA sense strand
gagagucaguauacuaaga

SEQ ID NO: 1126869 - RNA, 19 nt, Homo sapiens
  misc_RNA (1)...(19): siRNA sense strand
aaacaggagucaucaagga

SEQ ID NO: 1126870 - RNA, 19 nt, Homo sapiens
  misc_RNA (1)...(19): siRNA sense strand
ugacuagccuuaacucuuc

SEQ ID NO: 1126871 - RNA, 19 nt, Homo sapiens
  misc_RNA (1)...(19): siRNA sense strand
caacugaagucuuaucaac

SEQ ID NO: 1126872 - RNA, 19 nt, Homo sapiens
  misc_RNA (1)...(19): siRNA sense strand
gaagauaccagcagacgau

SEQ ID NO: 1126873 - RNA, 19 nt, Homo sapiens
  misc_RNA (1)...(19): siRNA sense strand
gaaacaaucacagagauga

SEQ ID NO: 1126874 - RNA, 19 nt, Homo sapiens
  misc_RNA (1)...(19): siRNA sense strand
agacauugauugcaaguug

SEQ ID NO: 1126875 - RNA, 19 nt, Homo sapiens
  misc_RNA (1)...(19): siRNA sense strand
ugugggaucugguggaaua

SEQ ID NO: 1126876 - RNA, 19 nt, Homo sapiens
  misc_RNA (1)...(19): siRNA sense strand
caauaugucugucuuggau

SEQ ID NO: 1126877 - RNA, 19 nt, Homo sapiens
  misc_RNA (1)...(19): siRNA sense strand
gagagcaucuggagcuaau

SEQ ID NO: 1126878 - RNA, 19 nt, Homo sapiens
  misc_RNA (1)...(19): siRNA sense strand
gaaaaucucugguucucaa

SEQ ID NO: 1126879 - RNA, 19 nt, Homo sapiens
  misc_RNA (1)...(19): siRNA sense strand
gaugaagauugaugaugaa

SEQ ID NO: 1126880 - RNA, 19 nt, Homo sapiens
  misc_RNA (1)...(19): siRNA sense strand
agaugaagauugaugauga

SEQ ID NO: 1126881 - RNA, 19 nt, Homo sapiens
  misc_RNA (1)...(19): siRNA sense strand
caagacaggguuacuauau

SEQ ID NO: 1126882 - RNA, 19 nt, Homo sapiens
  misc_RNA (1)...(19): siRNA sense strand
ggaaucaucucugaagaag

SEQ ID NO: 1126883 - RNA, 19 nt, Homo sapiens
  misc_RNA (1)...(19): siRNA sense strand
ggagauauagauaaaguga

SEQ ID NO: 1126884 - RNA, 19 nt, Homo sapiens
  misc_RNA (1)...(19): siRNA sense strand
gaagcaccgugagcugaua

SEQ ID NO: 1126885 - RNA, 19 nt, Homo sapiens
  misc_RNA (1)...(19): siRNA sense strand
gugaagacauugauugcaa

SEQ ID NO: 1126886 - RNA, 19 nt, Homo sapiens
  misc_RNA (1)...(19): siRNA sense strand
gaagaaaugggaaagaaca

SEQ ID NO: 1126887 - RNA, 19 nt, Homo sapiens
  misc_RNA (1)...(19): siRNA sense strand
caacuucuacguaaauuug

SEQ ID NO: 1126888 - RNA, 19 nt, Homo sapiens
  misc_RNA (1)...(19): siRNA sense strand
ggauacgaauggaagauau

SEQ ID NO: 1126889 - RNA, 19 nt, Homo sapiens
  misc_RNA (1)...(19): siRNA sense strand
gcuccaauuuaucuucaua

SEQ ID NO: 1126890 - RNA, 19 nt, Homo sapiens
  misc_RNA (1)...(19): siRNA sense strand
caacuggagauauagauaa

SEQ ID NO: 1126891 - RNA, 19 nt, Homo sapiens
  misc_RNA (1)...(19): siRNA sense strand
gaaagaagacaaauuagcu

SEQ ID NO: 1126892 - RNA, 19 nt, Homo sapiens
  misc_RNA (1)...(19): siRNA sense strand
caugaggacuaacaaauuc

SEQ ID NO: 1126893 - RNA, 19 nt, Homo sapiens
  misc_RNA (1)...(19): siRNA sense strand
gaaggaugcuggcuauggu

SEQ ID NO: 1126894 - RNA, 19 nt, Homo sapiens
  misc_RNA (1)...(19): siRNA sense strand
gagaaagacagaacaugaa

SEQ ID NO: 1126895 - RNA, 19 nt, Homo sapiens
  misc_RNA (1)...(19): siRNA sense strand
gcuuaugucugaaggagaa

SEQ ID NO: 1126896 - RNA, 19 nt, Homo sapiens
  misc_RNA (1)...(19): siRNA sense strand
gaagaagagaucagagcua

SEQ ID NO: 1126897 - RNA, 19 nt, Homo sapiens
  misc_RNA (1)...(19): siRNA sense strand
ggugggugcuuaagucuga

SEQ ID NO: 1126898 - RNA, 19 nt, Homo sapiens
  misc_RNA (1)...(19): siRNA sense strand
ggacaagacaggguuacua

SEQ ID NO: 1126899 - RNA, 19 nt, Homo sapiens
  misc_RNA (1)...(19): siRNA sense strand
gcccgacugugguaugaua

SEQ ID NO: 1126900 - RNA, 19 nt, Homo sapiens
  misc_RNA (1)...(19): siRNA sense strand
ggaauaagacccaaacaac

SEQ ID NO: 1126901 - RNA, 19 nt, Homo sapiens
  misc_RNA (1)...(19): siRNA sense strand
gacaauccuuucucugcua

SEQ ID NO: 1126902 - RNA, 19 nt, Homo sapiens
  misc_RNA (1)...(19): siRNA sense strand
caacacaucccucaguaug

SEQ ID NO: 1126903 - RNA, 19 nt, Homo sapiens
  misc_RNA (1)...(19): siRNA sense strand
gcaccagauuguaaauaug

SEQ ID NO: 1126904 - RNA, 19 nt, Homo sapiens
  misc_RNA (1)...(19): siRNA sense strand
gaaggaaucaucucugaag

SEQ ID NO: 1126905 - RNA, 19 nt, Homo sapiens
  misc_RNA (1)...(19): siRNA sense strand
gggaggaugucaaacacaa

SEQ ID NO: 1126906 - RNA, 19 nt, Homo sapiens
  misc_RNA (1)...(19): siRNA sense strand
gcaguggguuugacuaugg

SEQ ID NO: 1126907 - RNA, 19 nt, Homo sapiens
  misc_RNA (1)...(19): siRNA sense strand
cuggaaagguguuacguuu

SEQ ID NO: 1126908 - RNA, 19 nt, Homo sapiens
  misc_RNA (1)...(19): siRNA sense strand
gaggauagcaacaucaguu

SEQ ID NO: 1126909 - RNA, 19 nt, Homo sapiens
  misc_RNA (1)...(19): siRNA sense strand
ggaaagaacauugagaaca

SEQ ID NO: 1126910 - RNA, 19 nt, Homo sapiens
  misc_RNA (1)...(19): siRNA sense strand
gaagauuuccagaugaaga

SEQ ID NO: 1126911 - RNA, 19 nt, Homo sapiens
  misc_RNA (1)...(19): siRNA sense strand
caaugaggaucugguauau

SEQ ID NO: 1126912 - RNA, 19 nt, Homo sapiens
  misc_RNA (1)...(19): siRNA sense strand
gaaagaggaagaagaagca

SEQ ID NO: 1126913 - RNA, 19 nt, Homo sapiens
  misc_RNA (1)...(19): siRNA sense strand
gagaagaugaugaggaaga

SEQ ID NO: 1126914 - RNA, 19 nt, Homo sapiens
  misc_RNA (1)...(19): siRNA sense strand
guaaaggacuacuacaaaa

SEQ ID NO: 1126915 - RNA, 19 nt, Homo sapiens
  misc_RNA (1)...(19): siRNA sense strand
ugacacagcuuccgugacu

SEQ ID NO: 1126916 - RNA, 19 nt, Homo sapiens
  misc_RNA (1)...(19): siRNA sense strand
gaagagaucagagcuaugg

SEQ ID NO: 1126917 - RNA, 19 nt, Homo sapiens
  misc_RNA (1)...(19): siRNA sense strand
aagaaggaaucaucucuga

SEQ ID NO: 1126918 - RNA, 19 nt, Homo sapiens
  misc_RNA (1)...(19): siRNA sense strand
cagccacucuugaugauga

SEQ ID NO: 1126919 - RNA, 19 nt, Homo sapiens
  misc_RNA (1)...(19): siRNA sense strand
gaugaaggguggguuagga

SEQ ID NO: 1126920 - RNA, 19 nt, Homo sapiens
  misc_RNA (1)...(19): siRNA sense strand
acacaaggauggacaugga

SEQ ID NO: 1126921 - RNA, 19 nt, Homo sapiens
  misc_RNA (1)...(19): siRNA sense strand
ugacucagaucucucaauc

SEQ ID NO: 1126922 - RNA, 19 nt, Homo sapiens
  misc_RNA (1)...(19): siRNA sense strand
gaagauggcaguggguuug

SEQ ID NO: 1126923 - RNA, 19 nt, Homo sapiens
  misc_RNA (1)...(19): siRNA sense strand
ggaccaggauucuauuacu

SEQ ID NO: 1126924 - RNA, 19 nt, Homo sapiens
  misc_RNA (1)...(19): siRNA sense strand
ugaguaugaugaacauuug

SEQ ID NO: 1126925 - RNA, 19 nt, Homo sapiens
  misc_RNA (1)...(19): siRNA sense strand
gaagaaacggcgaguugga

SEQ ID NO: 1126926 - RNA, 19 nt, Homo sapiens
  misc_RNA (1)...(19): siRNA sense strand
gagcaacugaggcggcuua

SEQ ID NO: 1126927 - RNA, 19 nt, Homo sapiens
  misc_RNA (1)...(19): siRNA sense strand
caagcaacuucuacguaaa

SEQ ID NO: 1126928 - RNA, 19 nt, Homo sapiens
  misc_RNA (1)...(19): siRNA sense strand
agacaggguuacuauauuc

SEQ ID NO: 1126929 - RNA, 19 nt, Homo sapiens
  misc_RNA (1)...(19): siRNA sense strand
ugagaaagacagaacauga

SEQ ID NO: 1126930 - RNA, 19 nt, Homo sapiens
  misc_RNA (1)...(19): siRNA sense strand
gcagaaggaugauaaagaa

SEQ ID NO: 1126931 - RNA, 19 nt, Homo sapiens
  misc_RNA (1)...(19): siRNA sense strand
gcacagggauggacucaaa

SEQ ID NO: 1126932 - RNA, 19 nt, Homo sapiens
  misc_RNA (1)...(19): siRNA sense strand
gaagauugaugaugaaguu

SEQ ID NO: 1126933 - RNA, 19 nt, Homo sapiens
  misc_RNA (1)...(19): siRNA sense strand
ccaaucaacuggagauaua

SEQ ID NO: 1126934 - RNA, 19 nt, Homo sapiens
  misc_RNA (1)...(19): siRNA sense strand
gaaagaacauugagaacau

SEQ ID NO: 1126935 - RNA, 19 nt, Homo sapiens
  misc_RNA (1)...(19): siRNA sense strand
caaauuagcucgcuuagag

SEQ ID NO: 1126936 - RNA, 19 nt, Homo sapiens
  misc_RNA (1)...(19): siRNA sense strand
gaacaugucucagccagaa

SEQ ID NO: 1126937 - RNA, 19 nt, Homo sapiens
  misc_RNA (1)...(19): siRNA sense strand
caaccaagauaaagaacua

SEQ ID NO: 1126938 - RNA, 19 nt, Homo sapiens
  misc_RNA (1)...(19): siRNA sense strand
ggaaugcgauggcuuacaa

SEQ ID NO: 1126939 - RNA, 19 nt, Homo sapiens
  misc_RNA (1)...(19): siRNA sense strand
ggaagaaugucccaucugu

SEQ ID NO: 1126940 - RNA, 19 nt, Homo sapiens
  misc_RNA (1)...(19): siRNA sense strand
ccaagcaacuucuacguaa

SEQ ID NO: 1126941 - RNA, 19 nt, Homo sapiens
  misc_RNA (1)...(19): siRNA sense strand
gcucugcgcugacuucaaa

SEQ ID NO: 1126942 - RNA, 19 nt, Homo sapiens
  misc_RNA (1)...(19): siRNA sense strand
ggaggaagcagaauuagaa

SEQ ID NO: 1126943 - RNA, 19 nt, Homo sapiens
  misc_RNA (1)...(19): siRNA sense strand
gaacaugaaccugugauaa

SEQ ID NO: 1126944 - RNA, 19 nt, Homo sapiens
  misc_RNA (1)...(19): siRNA sense strand
gauagugacuuugaagaaa

SEQ ID NO: 1126945 - RNA, 19 nt, Homo sapiens
  misc_RNA (1)...(19): siRNA sense strand
gaucagagcuaugguguca

SEQ ID NO: 1126946 - RNA, 19 nt, Homo sapiens
  misc_RNA (1)...(19): siRNA sense strand
ggagaaagaggaagaagaa

SEQ ID NO: 1126947 - RNA, 19 nt, Homo sapiens
  misc_RNA (1)...(19): siRNA sense strand
gucaucaacugaagucuua

SEQ ID NO: 1126948 - RNA, 19 nt, Homo sapiens
  misc_RNA (1)...(19): siRNA sense strand
gacuauggcuucaaacuga

SEQ ID NO: 1126949 - RNA, 19 nt, Homo sapiens
  misc_RNA (1)...(19): siRNA sense strand
ugagagaucuuccaaauac

SEQ ID NO: 1126950 - RNA, 19 nt, Homo sapiens
  misc_RNA (1)...(19): siRNA sense strand
ggaaggaacuacagcgaau

SEQ ID NO: 1126951 - RNA, 19 nt, Homo sapiens
  misc_RNA (1)...(19): siRNA sense strand
caacacagcagaaggauga

SEQ ID NO: 1126952 - RNA, 19 nt, Homo sapiens
  misc_RNA (1)...(19): siRNA sense strand
ucacugaacucacggcaaa

SEQ ID NO: 1126953 - RNA, 19 nt, Homo sapiens
  misc_RNA (1)...(19): siRNA sense strand
ucacagagaugaugacaca

SEQ ID NO: 1126954 - RNA, 19 nt, Homo sapiens
  misc_RNA (1)...(19): siRNA sense strand
ccacucagauuaugaugaa

SEQ ID NO: 1126955 - RNA, 19 nt, Homo sapiens
  misc_RNA (1)...(19): siRNA sense strand
caugauagcugcagagcaa

SEQ ID NO: 1126956 - RNA, 19 nt, Homo sapiens
  misc_RNA (1)...(19): siRNA sense strand
gacgcugucucaagauuua

SEQ ID NO: 1126957 - RNA, 19 nt, Homo sapiens
  misc_RNA (1)...(19): siRNA sense strand
ucaaugagguggcagaaga

SEQ ID NO: 1126958 - RNA, 19 nt, Homo sapiens
  misc_RNA (1)...(19): siRNA sense strand
gaaagcagcauccggaaga

SEQ ID NO: 1126959 - RNA, 19 nt, Homo sapiens
  misc_RNA (1)...(19): siRNA sense strand
gcagugcugugcuuauuau

SEQ ID NO: 1126960 - RNA, 19 nt, Homo sapiens
  misc_RNA (1)...(19): siRNA sense strand
caacugaggcggcuuaaga

SEQ ID NO: 1126961 - RNA, 19 nt, Homo sapiens
  misc_RNA (1)...(19): siRNA sense strand
gaaaauggacccuuaauga

SEQ ID NO: 1126962 - RNA, 19 nt, Homo sapiens
  misc_RNA (1)...(19): siRNA sense strand
caugagagaucuuccaaau

SEQ ID NO: 1126963 - RNA, 19 nt, Homo sapiens
  misc_RNA (1)...(19): siRNA sense strand
gggaaagcgucuuggauga

SEQ ID NO: 1126964 - RNA, 19 nt, Homo sapiens
  misc_RNA (1)...(19): siRNA sense strand
gaaaagacagucauucaua

SEQ ID NO: 1126965 - RNA, 19 nt, Homo sapiens
  misc_RNA (1)...(19): siRNA sense strand
gaaagcgucuuggaugaug

SEQ ID NO: 1126966 - RNA, 19 nt, Homo sapiens
  misc_RNA (1)...(19): siRNA sense strand
caagauuuaucgcacguuu

SEQ ID NO: 1126967 - RNA, 19 nt, Homo sapiens
  misc_RNA (1)...(19): siRNA sense strand
guaagaacaucuccaagca

SEQ ID NO: 1126968 - RNA, 19 nt, Homo sapiens
  misc_RNA (1)...(19): siRNA sense strand
gagagucaguauacuaaga

SEQ ID NO: 1126969 - RNA, 19 nt, Homo sapiens
  misc_RNA (1)...(19): siRNA sense strand
aaacaggagucaucaagga

SEQ ID NO: 1126970 - RNA, 19 nt, Homo sapiens
  misc_RNA (1)...(19): siRNA sense strand
ugacuagccuuaacucuuc

SEQ ID NO: 1126971 - RNA, 19 nt, Homo sapiens
  misc_RNA (1)...(19): siRNA sense strand
caacugaagucuuaucaac

SEQ ID NO: 1126972 - RNA, 19 nt, Homo sapiens
  misc_RNA (1)...(19): siRNA sense strand
gaagauaccagcagacgau

SEQ ID NO: 1126973 - RNA, 19 nt, Homo sapiens
  misc_RNA (1)...(19): siRNA sense strand
gaaacaaucacagagauga

SEQ ID NO: 1126974 - RNA, 19 nt, Homo sapiens
  misc_RNA (1)...(19): siRNA sense strand
agacauugauugcaaguug

SEQ ID NO: 1126975 - RNA, 19 nt, Homo sapiens
  misc_RNA (1)...(19): siRNA sense strand
ugugggaucugguggaaua

SEQ ID NO: 1126976 - RNA, 19 nt, Homo sapiens
  misc_RNA (1)...(19): siRNA sense strand
caauaugucugucuuggau

SEQ ID NO: 1126977 - RNA, 19 nt, Homo sapiens
  misc_RNA (1)...(19): siRNA sense strand
gagagcaucuggagcuaau

SEQ ID NO: 1126978 - RNA, 19 nt, Homo sapiens
  misc_RNA (1)...(19): siRNA sense strand
gaaaaucucugguucucaa

SEQ ID NO: 1126979 - RNA, 19 nt, Homo sapiens
  misc_RNA (1)...(19): siRNA sense strand
gaugaagauugaugaugaa

SEQ ID NO: 1126980 - RNA, 19 nt, Homo sapiens
  misc_RNA (1)...(19): siRNA sense strand
agaugaagauugaugauga

SEQ ID NO: 1126981 - RNA, 19 nt, Homo sapiens
  misc_RNA (1)...(19): siRNA sense strand
caagacaggguuacuauau

SEQ ID NO: 1126982 - RNA, 19 nt, Homo sapiens
  misc_RNA (1)...(19): siRNA sense strand
ggaaucaucucugaagaag

SEQ ID NO: 1126983 - RNA, 19 nt, Homo sapiens
  misc_RNA (1)...(19): siRNA sense strand
ggagauauagauaaaguga

SEQ ID NO: 1126984 - RNA, 19 nt, Homo sapiens
  misc_RNA (1)...(19): siRNA sense strand
gaagcaccgugagcugaua

SEQ ID NO: 1126985 - RNA, 19 nt, Homo sapiens
  misc_RNA (1)...(19): siRNA sense strand
gugaagacauugauugcaa

SEQ ID NO: 1126986 - RNA, 19 nt, Homo sapiens
  misc_RNA (1)...(19): siRNA sense strand
gaagaaaugggaaagaaca

SEQ ID NO: 1126987 - RNA, 19 nt, Homo sapiens
  misc_RNA (1)...(19): siRNA sense strand
caacuucuacguaaauuug

SEQ ID NO: 1126988 - RNA, 19 nt, Homo sapiens
  misc_RNA (1)...(19): siRNA sense strand
ggauacgaauggaagauau

SEQ ID NO: 1126989 - RNA, 19 nt, Homo sapiens
  misc_RNA (1)...(19): siRNA sense strand
gcuccaauuuaucuucaua

SEQ ID NO: 1126990 - RNA, 19 nt, Homo sapiens
  misc_RNA (1)...(19): siRNA sense strand
caacuggagauauagauaa

SEQ ID NO: 1126991 - RNA, 19 nt, Homo sapiens
  misc_RNA (1)...(19): siRNA sense strand
gaaagaagacaaauuagcu

SEQ ID NO: 1126992 - RNA, 19 nt, Homo sapiens
  misc_RNA (1)...(19): siRNA sense strand
caugaggacuaacaaauuc

SEQ ID NO: 1126993 - RNA, 19 nt, Homo sapiens
  misc_RNA (1)...(19): siRNA sense strand
gaaggaugcuggcuauggu

SEQ ID NO: 1126994 - RNA, 19 nt, Homo sapiens
  misc_RNA (1)...(19): siRNA sense strand
gagaaagacagaacaugaa

SEQ ID NO: 1126995 - RNA, 19 nt, Homo sapiens
  misc_RNA (1)...(19): siRNA sense strand
gcuuaugucugaaggagaa

SEQ ID NO: 1126996 - RNA, 19 nt, Homo sapiens
  misc_RNA (1)...(19): siRNA sense strand
gaagaagagaucagagcua

SEQ ID NO: 1126997 - RNA, 19 nt, Homo sapiens
  misc_RNA (1)...(19): siRNA sense strand
ggugggugcuuaagucuga

SEQ ID NO: 1126998 - RNA, 19 nt, Homo sapiens
  misc_RNA (1)...(19): siRNA sense strand
ggacaagacaggguuacua

SEQ ID NO: 1126999 - RNA, 19 nt, Homo sapiens
  misc_RNA (1)...(19): siRNA sense strand
gcccgacugugguaugaua

SEQ ID NO: 1127000 - RNA, 19 nt, Homo sapiens
  misc_RNA (1)...(19): siRNA sense strand
ggaauaagacccaaacaac

SEQ ID NO: 1127001 - RNA, 19 nt, Homo sapiens
  misc_RNA (1)...(19): siRNA sense strand
gacaauccuuucucugcua

SEQ ID NO: 1127002 - RNA, 19 nt, Homo sapiens
  misc_RNA (1)...(19): siRNA sense strand
caacacaucccucaguaug

SEQ ID NO: 1127003 - RNA, 19 nt, Homo sapiens
  misc_RNA (1)...(19): siRNA sense strand
gcaccagauuguaaauaug

SEQ ID NO: 1127004 - RNA, 19 nt, Homo sapiens
  misc_RNA (1)...(19): siRNA sense strand
gaaggaaucaucucugaag

SEQ ID NO: 1127005 - RNA, 19 nt, Homo sapiens
  misc_RNA (1)...(19): siRNA sense strand
gggaggaugucaaacacaa

SEQ ID NO: 1127006 - RNA, 19 nt, Homo sapiens
  misc_RNA (1)...(19): siRNA sense strand
gcaguggguuugacuaugg

SEQ ID NO: 1127007 - RNA, 19 nt, Homo sapiens
  misc_RNA (1)...(19): siRNA sense strand
cuggaaagguguuacguuu

SEQ ID NO: 1127008 - RNA, 19 nt, Homo sapiens
  misc_RNA (1)...(19): siRNA sense strand
gaggauagcaacaucaguu

SEQ ID NO: 1127009 - RNA, 19 nt, Homo sapiens
  misc_RNA (1)...(19): siRNA sense strand
ggaaagaacauugagaaca

SEQ ID NO: 1127010 - RNA, 19 nt, Homo sapiens
  misc_RNA (1)...(19): siRNA sense strand
gaagauuuccagaugaaga

SEQ ID NO: 1127011 - RNA, 19 nt, Homo sapiens
  misc_RNA (1)...(19): siRNA sense strand
caaugaggaucugguauau

SEQ ID NO: 1127012 - RNA, 19 nt, Homo sapiens
  misc_RNA (1)...(19): siRNA sense strand
gaaagaggaagaagaagca

SEQ ID NO: 1127013 - RNA, 19 nt, Homo sapiens
  misc_RNA (1)...(19): siRNA sense strand
gagaagaugaugaggaaga

SEQ ID NO: 1127014 - RNA, 19 nt, Homo sapiens
  misc_RNA (1)...(19): siRNA sense strand
guaaaggacuacuacaaaa

SEQ ID NO: 1127015 - RNA, 19 nt, Homo sapiens
  misc_RNA (1)...(19): siRNA sense strand
ugacacagcuuccgugacu

SEQ ID NO: 1127016 - RNA, 19 nt, Homo sapiens
  misc_RNA (1)...(19): siRNA sense strand
gaagagaucagagcuaugg

SEQ ID NO: 1127017 - RNA, 19 nt, Homo sapiens
  misc_RNA (1)...(19): siRNA sense strand
aagaaggaaucaucucuga

SEQ ID NO: 1127018 - RNA, 19 nt, Homo sapiens
  misc_RNA (1)...(19): siRNA sense strand
cagccacucuugaugauga

SEQ ID NO: 1127019 - RNA, 19 nt, Homo sapiens
  misc_RNA (1)...(19): siRNA sense strand
gaugaaggguggguuagga

SEQ ID NO: 1127020 - RNA, 19 nt, Homo sapiens
  misc_RNA (1)...(19): siRNA sense strand
acacaaggauggacaugga

SEQ ID NO: 1127021 - RNA, 19 nt, Homo sapiens
  misc_RNA (1)...(19): siRNA sense strand
ugacucagaucucucaauc

SEQ ID NO: 1127022 - RNA, 19 nt, Homo sapiens
  misc_RNA (1)...(19): siRNA sense strand
gaagauggcaguggguuug

SEQ ID NO: 1127023 - RNA, 19 nt, Homo sapiens
  misc_RNA (1)...(19): siRNA sense strand
ggaccaggauucuauuacu

SEQ ID NO: 1127024 - RNA, 19 nt, Homo sapiens
  misc_RNA (1)...(19): siRNA sense strand
ugaguaugaugaacauuug

SEQ ID NO: 1127025 - RNA, 19 nt, Homo sapiens
  misc_RNA (1)...(19): siRNA sense strand
gaagaaacggcgaguugga

SEQ ID NO: 1127026 - RNA, 19 nt, Homo sapiens
  misc_RNA (1)...(19): siRNA sense strand
gagcaacugaggcggcuua

SEQ ID NO: 1127027 - RNA, 19 nt, Homo sapiens
  misc_RNA (1)...(19): siRNA sense strand
caagcaacuucuacguaaa

SEQ ID NO: 1127028 - RNA, 19 nt, Homo sapiens
  misc_RNA (1)...(19): siRNA sense strand
agacaggguuacuauauuc

SEQ ID NO: 1127029 - RNA, 19 nt, Homo sapiens
  misc_RNA (1)...(19): siRNA sense strand
ugagaaagacagaacauga

SEQ ID NO: 1127030 - RNA, 19 nt, Homo sapiens
  misc_RNA (1)...(19): siRNA sense strand
caucaagaaccacgccuuu

SEQ ID NO: 1127031 - RNA, 19 nt, Homo sapiens
  misc_RNA (1)...(19): siRNA sense strand
gggagcugaugaaguccaa

SEQ ID NO: 1127032 - RNA, 19 nt, Homo sapiens
  misc_RNA (1)...(19): siRNA sense strand
gaugaaguccaaguacuca

SEQ ID NO: 1127033 - RNA, 19 nt, Homo sapiens
  misc_RNA (1)...(19): siRNA sense strand
acucagacaucaccaucau

SEQ ID NO: 1127034 - RNA, 19 nt, Homo sapiens
  misc_RNA (1)...(19): siRNA sense strand
gcacacacaccaguucaac

SEQ ID NO: 1127035 - RNA, 19 nt, Homo sapiens
  misc_RNA (1)...(19): siRNA sense strand
ugaaguccaaguacucaga

SEQ ID NO: 1127036 - RNA, 19 nt, Homo sapiens
  misc_RNA (1)...(19): siRNA sense strand
ggaggagaccuggcacaca

SEQ ID NO: 1127037 - RNA, 19 nt, Homo sapiens
  misc_RNA (1)...(19): siRNA sense strand
uugaugggauccuguacga

SEQ ID NO: 1127038 - RNA, 19 nt, Homo sapiens
  misc_RNA (1)...(19): siRNA sense strand
gagcugaugaaguccaagu

SEQ ID NO: 1127039 - RNA, 19 nt, Homo sapiens
  misc_RNA (1)...(19): siRNA sense strand
gcccauugaugagcauugg

SEQ ID NO: 1127040 - RNA, 19 nt, Homo sapiens
  misc_RNA (1)...(19): siRNA sense strand
ucaagaaccacgccuuucg

SEQ ID NO: 1127041 - RNA, 19 nt, Homo sapiens
  misc_RNA (1)...(19): siRNA sense strand
caucaagaaccacgccuuu

SEQ ID NO: 1127042 - RNA, 19 nt, Homo sapiens
  misc_RNA (1)...(19): siRNA sense strand
gggagcugaugaaguccaa

SEQ ID NO: 1127043 - RNA, 19 nt, Homo sapiens
  misc_RNA (1)...(19): siRNA sense strand
gaugaaguccaaguacuca

SEQ ID NO: 1127044 - RNA, 19 nt, Homo sapiens
  misc_RNA (1)...(19): siRNA sense strand
acucagacaucaccaucau

SEQ ID NO: 1127045 - RNA, 19 nt, Homo sapiens
  misc_RNA (1)...(19): siRNA sense strand
gcacacacaccaguucaac

SEQ ID NO: 1127046 - RNA, 19 nt, Homo sapiens
  misc_RNA (1)...(19): siRNA sense strand
ugaaguccaaguacucaga

SEQ ID NO: 1127047 - RNA, 19 nt, Homo sapiens
  misc_RNA (1)...(19): siRNA sense strand
ggaggagaccuggcacaca

SEQ ID NO: 1127048 - RNA, 19 nt, Homo sapiens
  misc_RNA (1)...(19): siRNA sense strand
uugaugggauccuguacga

SEQ ID NO: 1127049 - RNA, 19 nt, Homo sapiens
  misc_RNA (1)...(19): siRNA sense strand
gagcugaugaaguccaagu

SEQ ID NO: 1127050 - RNA, 19 nt, Homo sapiens
  misc_RNA (1)...(19): siRNA sense strand
gcccauugaugagcauugg

SEQ ID NO: 1127051 - RNA, 19 nt, Homo sapiens
  misc_RNA (1)...(19): siRNA sense strand
ucaagaaccacgccuuucg

SEQ ID NO: 1127052 - RNA, 19 nt, Homo sapiens
  misc_RNA (1)...(19): siRNA sense strand
gaacauggcugaccucaua

SEQ ID NO: 1127053 - RNA, 19 nt, Homo sapiens
  misc_RNA (1)...(19): siRNA sense strand
ggaccacgcugcucuauuu

SEQ ID NO: 1127054 - RNA, 19 nt, Homo sapiens
  misc_RNA (1)...(19): siRNA sense strand
caaagcagaugcaggagaa

SEQ ID NO: 1127055 - RNA, 19 nt, Homo sapiens
  misc_RNA (1)...(19): siRNA sense strand
ucagagagcugcagcauag

SEQ ID NO: 1127056 - RNA, 19 nt, Homo sapiens
  misc_RNA (1)...(19): siRNA sense strand
ggacgaggacuauuacaaa

SEQ ID NO: 1127057 - RNA, 19 nt, Homo sapiens
  misc_RNA (1)...(19): siRNA sense strand
uggcagagcucaucaacaa

SEQ ID NO: 1127058 - RNA, 19 nt, Homo sapiens
  misc_RNA (1)...(19): siRNA sense strand
auucaaggauggaacauua

SEQ ID NO: 1127059 - RNA, 19 nt, Homo sapiens
  misc_RNA (1)...(19): siRNA sense strand
agaaacugcucaacaaaga

SEQ ID NO: 1127060 - RNA, 19 nt, Homo sapiens
  misc_RNA (1)...(19): siRNA sense strand
caccaaggcucucucauca

SEQ ID NO: 1127061 - RNA, 19 nt, Homo sapiens
  misc_RNA (1)...(19): siRNA sense strand
caucauccauccuaggaaa

SEQ ID NO: 1127062 - RNA, 19 nt, Homo sapiens
  misc_RNA (1)...(19): siRNA sense strand
gaacaagaacucccugaag

SEQ ID NO: 1127063 - RNA, 19 nt, Homo sapiens
  misc_RNA (1)...(19): siRNA sense strand
ccaaggcucucucaucauc

SEQ ID NO: 1127064 - RNA, 19 nt, Homo sapiens
  misc_RNA (1)...(19): siRNA sense strand
gcccggagguccacaguau

SEQ ID NO: 1127065 - RNA, 19 nt, Homo sapiens
  misc_RNA (1)...(19): siRNA sense strand
ccacccaccugcagaguga

SEQ ID NO: 1127066 - RNA, 19 nt, Homo sapiens
  misc_RNA (1)...(19): siRNA sense strand
gaugugguccugaaucgua

SEQ ID NO: 1127067 - RNA, 19 nt, Homo sapiens
  misc_RNA (1)...(19): siRNA sense strand
gagcccaccuggaucauca

SEQ ID NO: 1127068 - RNA, 19 nt, Homo sapiens
  misc_RNA (1)...(19): siRNA sense strand
gcagagcucaucaacaaga

SEQ ID NO: 1127069 - RNA, 19 nt, Homo sapiens
  misc_RNA (1)...(19): siRNA sense strand
gcagaugcaggagaacuua

SEQ ID NO: 1127070 - RNA, 19 nt, Homo sapiens
  misc_RNA (1)...(19): siRNA sense strand
ggacugaugaccuggugua

SEQ ID NO: 1127071 - RNA, 19 nt, Homo sapiens
  misc_RNA (1)...(19): siRNA sense strand
gugaagaugugguccugaa

SEQ ID NO: 1127072 - RNA, 19 nt, Homo sapiens
  misc_RNA (1)...(19): siRNA sense strand
caacuucgagcuccuagaa

SEQ ID NO: 1127073 - RNA, 19 nt, Homo sapiens
  misc_RNA (1)...(19): siRNA sense strand
gcccaagccugaucucugu

SEQ ID NO: 1127074 - RNA, 19 nt, Homo sapiens
  misc_RNA (1)...(19): siRNA sense strand
uaggaaagauggugagaag

SEQ ID NO: 1127075 - RNA, 19 nt, Homo sapiens
  misc_RNA (1)...(19): siRNA sense strand
gucaagaccugcaagaaag

SEQ ID NO: 1127076 - RNA, 19 nt, Homo sapiens
  misc_RNA (1)...(19): siRNA sense strand
aaacaguuccggaagauga

SEQ ID NO: 1127077 - RNA, 19 nt, Homo sapiens
  misc_RNA (1)...(19): siRNA sense strand
gcgaggcagugaucaugaa

SEQ ID NO: 1127078 - RNA, 19 nt, Homo sapiens
  misc_RNA (1)...(19): siRNA sense strand
cucaaggucugcuucuaua

SEQ ID NO: 1127079 - RNA, 19 nt, Homo sapiens
  misc_RNA (1)...(19): siRNA sense strand
cccagaaacugcucaacaa

SEQ ID NO: 1127080 - RNA, 19 nt, Homo sapiens
  misc_RNA (1)...(19): siRNA sense strand
gaggaggagugcgucauga

SEQ ID NO: 1127081 - RNA, 19 nt, Homo sapiens
  misc_RNA (1)...(19): siRNA sense strand
gaacuuaaagcccaaacag

SEQ ID NO: 1127082 - RNA, 19 nt, Homo sapiens
  misc_RNA (1)...(19): siRNA sense strand
ggcaaauccuggacaaaca

SEQ ID NO: 1127083 - RNA, 19 nt, Homo sapiens
  misc_RNA (1)...(19): siRNA sense strand
gcaccaaggcucucucauc

SEQ ID NO: 1127084 - RNA, 19 nt, Homo sapiens
  misc_RNA (1)...(19): siRNA sense strand
gcuaugggcugaggcugaa

SEQ ID NO: 1127085 - RNA, 19 nt, Homo sapiens
  misc_RNA (1)...(19): siRNA sense strand
gccgugaccucccuaagug

SEQ ID NO: 1127086 - RNA, 19 nt, Homo sapiens
  misc_RNA (1)...(19): siRNA sense strand
gaguaaaguugggcacguu

SEQ ID NO: 1127087 - RNA, 19 nt, Homo sapiens
  misc_RNA (1)...(19): siRNA sense strand
ugcuggagcucaagaauga

SEQ ID NO: 1127088 - RNA, 19 nt, Homo sapiens
  misc_RNA (1)...(19): siRNA sense strand
agaaggacauugccaugga

SEQ ID NO: 1127089 - RNA, 19 nt, Homo sapiens
  misc_RNA (1)...(19): siRNA sense strand
ucagugacguuuaucagau

SEQ ID NO: 1127090 - RNA, 19 nt, Homo sapiens
  misc_RNA (1)...(19): siRNA sense strand
gcaaagccauggccuaccu

SEQ ID NO: 1127091 - RNA, 19 nt, Homo sapiens
  misc_RNA (1)...(19): siRNA sense strand
cagcuucaauccugggaaa

SEQ ID NO: 1127092 - RNA, 19 nt, Homo sapiens
  misc_RNA (1)...(19): siRNA sense strand
ggaucaucauggaauugua

SEQ ID NO: 1127093 - RNA, 19 nt, Homo sapiens
  misc_RNA (1)...(19): siRNA sense strand
ccaaacaguuccggaagau

SEQ ID NO: 1127094 - RNA, 19 nt, Homo sapiens
  misc_RNA (1)...(19): siRNA sense strand
ccaagguucuggccaaucu

SEQ ID NO: 1127095 - RNA, 19 nt, Homo sapiens
  misc_RNA (1)...(19): siRNA sense strand
ggaacaagaacucccugaa

SEQ ID NO: 1127096 - RNA, 19 nt, Homo sapiens
  misc_RNA (1)...(19): siRNA sense strand
ccaccuggaucaucaugga

SEQ ID NO: 1127097 - RNA, 19 nt, Homo sapiens
  misc_RNA (1)...(19): siRNA sense strand
ggacgugcguauccucaag

SEQ ID NO: 1127098 - RNA, 19 nt, Homo sapiens
  misc_RNA (1)...(19): siRNA sense strand
gacgaggacuauuacaaag

SEQ ID NO: 1127099 - RNA, 19 nt, Homo sapiens
  misc_RNA (1)...(19): siRNA sense strand
gaucaucauggaauuguau

SEQ ID NO: 1127100 - RNA, 19 nt, Homo sapiens
  misc_RNA (1)...(19): siRNA sense strand
gaagaugugguccugaauc

SEQ ID NO: 1127101 - RNA, 19 nt, Homo sapiens
  misc_RNA (1)...(19): siRNA sense strand
ggaggaggacuucauccaa

SEQ ID NO: 1127102 - RNA, 19 nt, Homo sapiens
  misc_RNA (1)...(19): siRNA sense strand
gaucgagggcacccagaaa

SEQ ID NO: 1127103 - RNA, 19 nt, Homo sapiens
  misc_RNA (1)...(19): siRNA sense strand
cuaccgcugugaacucauu

SEQ ID NO: 1127104 - RNA, 19 nt, Homo sapiens
  misc_RNA (1)...(19): siRNA sense strand
uuacaaagccucugugacu

SEQ ID NO: 1127105 - RNA, 19 nt, Homo sapiens
  misc_RNA (1)...(19): siRNA sense strand
ugucaagaccugcaagaaa

SEQ ID NO: 1127106 - RNA, 19 nt, Homo sapiens
  misc_RNA (1)...(19): siRNA sense strand
aggcagugaucaugaagaa

SEQ ID NO: 1127107 - RNA, 19 nt, Homo sapiens
  misc_RNA (1)...(19): siRNA sense strand
ccagaaacugcucaacaaa

SEQ ID NO: 1127108 - RNA, 19 nt, Homo sapiens
  misc_RNA (1)...(19): siRNA sense strand
cagcauagagucagacauc

SEQ ID NO: 1127109 - RNA, 19 nt, Homo sapiens
  misc_RNA (1)...(19): siRNA sense strand
gaagccgaguggagguaug

SEQ ID NO: 1127110 - RNA, 19 nt, Homo sapiens
  misc_RNA (1)...(19): siRNA sense strand
gaccugguguaccucaaug

SEQ ID NO: 1127111 - RNA, 19 nt, Homo sapiens
  misc_RNA (1)...(19): siRNA sense strand
cagccucagugacguuuau

SEQ ID NO: 1127112 - RNA, 19 nt, Homo sapiens
  misc_RNA (1)...(19): siRNA sense strand
ggacaacaaggagaaguuc

SEQ ID NO: 1127113 - RNA, 19 nt, Homo sapiens
  misc_RNA (1)...(19): siRNA sense strand
gagcucaggcgguucuuca

SEQ ID NO: 1127114 - RNA, 19 nt, Homo sapiens
  misc_RNA (1)...(19): siRNA sense strand
ggucuuucccgguacauug

SEQ ID NO: 1127115 - RNA, 19 nt, Homo sapiens
  misc_RNA (1)...(19): siRNA sense strand
gcagagauucccgacgaaa

SEQ ID NO: 1127116 - RNA, 19 nt, Homo sapiens
  misc_RNA (1)...(19): siRNA sense strand
ucagacaucuacgcagaga

SEQ ID NO: 1127117 - RNA, 19 nt, Homo sapiens
  misc_RNA (1)...(19): siRNA sense strand
gugaggugcaggacaagua

SEQ ID NO: 1127118 - RNA, 19 nt, Homo sapiens
  misc_RNA (1)...(19): siRNA sense strand
acaaacagcagaagcagau

SEQ ID NO: 1127119 - RNA, 19 nt, Homo sapiens
  misc_RNA (1)...(19): siRNA sense strand
uuuaucagauggagaagga

SEQ ID NO: 1127120 - RNA, 19 nt, Homo sapiens
  misc_RNA (1)...(19): siRNA sense strand
uagcagaggcugagaacau

SEQ ID NO: 1127121 - RNA, 19 nt, Homo sapiens
  misc_RNA (1)...(19): siRNA sense strand
ggaggaggagugcgucaug

SEQ ID NO: 1127122 - RNA, 19 nt, Homo sapiens
  misc_RNA (1)...(19): siRNA sense strand
aggcgguucuucaaggaua

SEQ ID NO: 1127123 - RNA, 19 nt, Homo sapiens
  misc_RNA (1)...(19): siRNA sense strand
uugaggacgaggacuauua

SEQ ID NO: 1127124 - RNA, 19 nt, Homo sapiens
  misc_RNA (1)...(19): siRNA sense strand
cccaaacaguuccggaaga

SEQ ID NO: 1127125 - RNA, 19 nt, Homo sapiens
  misc_RNA (1)...(19): siRNA sense strand
uguacucacugcagauaug

SEQ ID NO: 1127126 - RNA, 19 nt, Homo sapiens
  misc_RNA (1)...(19): siRNA sense strand
gaggagcccaccuggauca

SEQ ID NO: 1127127 - RNA, 19 nt, Homo sapiens
  misc_RNA (1)...(19): siRNA sense strand
gcaggacaaguaugagugu

SEQ ID NO: 1127128 - RNA, 19 nt, Homo sapiens
  misc_RNA (1)...(19): siRNA sense strand
ucaagaaugagcucuguca

SEQ ID NO: 1127129 - RNA, 19 nt, Homo sapiens
  misc_RNA (1)...(19): siRNA sense strand
cacaugaaguccgaugaga

SEQ ID NO: 1127130 - RNA, 19 nt, Homo sapiens
  misc_RNA (1)...(19): siRNA sense strand
gagcgaggcagugaucaug

SEQ ID NO: 1127131 - RNA, 19 nt, Homo sapiens
  misc_RNA (1)...(19): siRNA sense strand
caacaaggagaaguucaug

SEQ ID NO: 1127132 - RNA, 19 nt, Homo sapiens
  misc_RNA (1)...(19): siRNA sense strand
aagcagaucagguccauca

SEQ ID NO: 1127133 - RNA, 19 nt, Homo sapiens
  misc_RNA (1)...(19): siRNA sense strand
acuuaaagcccaaacaguu

SEQ ID NO: 1127134 - RNA, 19 nt, Homo sapiens
  misc_RNA (1)...(19): siRNA sense strand
gcacaugaaguccgaugag

SEQ ID NO: 1127135 - RNA, 19 nt, Homo sapiens
  misc_RNA (1)...(19): siRNA sense strand
guccaccgguccuuuauac

SEQ ID NO: 1127136 - RNA, 19 nt, Homo sapiens
  misc_RNA (1)...(19): siRNA sense strand
ugugggagauccugagcuu

SEQ ID NO: 1127137 - RNA, 19 nt, Homo sapiens
  misc_RNA (1)...(19): siRNA sense strand
caugaaguccgaugagauc

SEQ ID NO: 1127138 - RNA, 19 nt, Homo sapiens
  misc_RNA (1)...(19): siRNA sense strand
ccauccagcccacagcuaa

SEQ ID NO: 1127139 - RNA, 19 nt, Homo sapiens
  misc_RNA (1)...(19): siRNA sense strand
cagugacguuuaucagaug

SEQ ID NO: 1127140 - RNA, 19 nt, Homo sapiens
  misc_RNA (1)...(19): siRNA sense strand
gcuguacucacugcagaua

SEQ ID NO: 1127141 - RNA, 19 nt, Homo sapiens
  misc_RNA (1)...(19): siRNA sense strand
gcauugcccgugaagaugu

SEQ ID NO: 1127142 - RNA, 19 nt, Homo sapiens
  misc_RNA (1)...(19): siRNA sense strand
guacuucagcugggcauug

SEQ ID NO: 1127143 - RNA, 19 nt, Homo sapiens
  misc_RNA (1)...(19): siRNA sense strand
aggagugcgucaugaaguu

SEQ ID NO: 1127144 - RNA, 19 nt, Homo sapiens
  misc_RNA (1)...(19): siRNA sense strand
ggagaccuaccgcugugaa

SEQ ID NO: 1127145 - RNA, 19 nt, Homo sapiens
  misc_RNA (1)...(19): siRNA sense strand
ccucaaggucugcuucuau

SEQ ID NO: 1127146 - RNA, 19 nt, Homo sapiens
  misc_RNA (1)...(19): siRNA sense strand
ugggugaggugcaggacaa

SEQ ID NO: 1127147 - RNA, 19 nt, Homo sapiens
  misc_RNA (1)...(19): siRNA sense strand
cuccaaagcugcaguucca

SEQ ID NO: 1127148 - RNA, 19 nt, Homo sapiens
  misc_RNA (1)...(19): siRNA sense strand
ccaaccuccuggcuccaaa

SEQ ID NO: 1127149 - RNA, 19 nt, Homo sapiens
  misc_RNA (1)...(19): siRNA sense strand
ugggagauccugagcuuug

SEQ ID NO: 1127150 - RNA, 19 nt, Homo sapiens
  misc_RNA (1)...(19): siRNA sense strand
acuucaaacuggucaaaug

SEQ ID NO: 1127151 - RNA, 19 nt, Homo sapiens
  misc_RNA (1)...(19): siRNA sense strand
gggauccgccagcugacua

SEQ ID NO: 1127152 - RNA, 19 nt, Homo sapiens
  misc_RNA (1)...(19): siRNA sense strand
gaacauggcugaccucaua

SEQ ID NO: 1127153 - RNA, 19 nt, Homo sapiens
  misc_RNA (1)...(19): siRNA sense strand
ggaccacgcugcucuauuu

SEQ ID NO: 1127154 - RNA, 19 nt, Homo sapiens
  misc_RNA (1)...(19): siRNA sense strand
caaagcagaugcaggagaa

SEQ ID NO: 1127155 - RNA, 19 nt, Homo sapiens
  misc_RNA (1)...(19): siRNA sense strand
ucagagagcugcagcauag

SEQ ID NO: 1127156 - RNA, 19 nt, Homo sapiens
  misc_RNA (1)...(19): siRNA sense strand
ggacgaggacuauuacaaa

SEQ ID NO: 1127157 - RNA, 19 nt, Homo sapiens
  misc_RNA (1)...(19): siRNA sense strand
uggcagagcucaucaacaa

SEQ ID NO: 1127158 - RNA, 19 nt, Homo sapiens
  misc_RNA (1)...(19): siRNA sense strand
auucaaggauggaacauua

SEQ ID NO: 1127159 - RNA, 19 nt, Homo sapiens
  misc_RNA (1)...(19): siRNA sense strand
agaaacugcucaacaaaga

SEQ ID NO: 1127160 - RNA, 19 nt, Homo sapiens
  misc_RNA (1)...(19): siRNA sense strand
caccaaggcucucucauca

SEQ ID NO: 1127161 - RNA, 19 nt, Homo sapiens
  misc_RNA (1)...(19): siRNA sense strand
caucauccauccuaggaaa

SEQ ID NO: 1127162 - RNA, 19 nt, Homo sapiens
  misc_RNA (1)...(19): siRNA sense strand
gaacaagaacucccugaag

SEQ ID NO: 1127163 - RNA, 19 nt, Homo sapiens
  misc_RNA (1)...(19): siRNA sense strand
ccaaggcucucucaucauc

SEQ ID NO: 1127164 - RNA, 19 nt, Homo sapiens
  misc_RNA (1)...(19): siRNA sense strand
gcccggagguccacaguau

SEQ ID NO: 1127165 - RNA, 19 nt, Homo sapiens
  misc_RNA (1)...(19): siRNA sense strand
ccacccaccugcagaguga

SEQ ID NO: 1127166 - RNA, 19 nt, Homo sapiens
  misc_RNA (1)...(19): siRNA sense strand
gaugugguccugaaucgua

SEQ ID NO: 1127167 - RNA, 19 nt, Homo sapiens
  misc_RNA (1)...(19): siRNA sense strand
gagcccaccuggaucauca

SEQ ID NO: 1127168 - RNA, 19 nt, Homo sapiens
  misc_RNA (1)...(19): siRNA sense strand
gcagagcucaucaacaaga

SEQ ID NO: 1127169 - RNA, 19 nt, Homo sapiens
  misc_RNA (1)...(19): siRNA sense strand
gcagaugcaggagaacuua

SEQ ID NO: 1127170 - RNA, 19 nt, Homo sapiens
  misc_RNA (1)...(19): siRNA sense strand
ggacugaugaccuggugua

SEQ ID NO: 1127171 - RNA, 19 nt, Homo sapiens
  misc_RNA (1)...(19): siRNA sense strand
gugaagaugugguccugaa

SEQ ID NO: 1127172 - RNA, 19 nt, Homo sapiens
  misc_RNA (1)...(19): siRNA sense strand
caacuucgagcuccuagaa

SEQ ID NO: 1127173 - RNA, 19 nt, Homo sapiens
  misc_RNA (1)...(19): siRNA sense strand
gcccaagccugaucucugu

SEQ ID NO: 1127174 - RNA, 19 nt, Homo sapiens
  misc_RNA (1)...(19): siRNA sense strand
uaggaaagauggugagaag

SEQ ID NO: 1127175 - RNA, 19 nt, Homo sapiens
  misc_RNA (1)...(19): siRNA sense strand
gucaagaccugcaagaaag

SEQ ID NO: 1127176 - RNA, 19 nt, Homo sapiens
  misc_RNA (1)...(19): siRNA sense strand
aaacaguuccggaagauga

SEQ ID NO: 1127177 - RNA, 19 nt, Homo sapiens
  misc_RNA (1)...(19): siRNA sense strand
gcgaggcagugaucaugaa

SEQ ID NO: 1127178 - RNA, 19 nt, Homo sapiens
  misc_RNA (1)...(19): siRNA sense strand
cucaaggucugcuucuaua

SEQ ID NO: 1127179 - RNA, 19 nt, Homo sapiens
  misc_RNA (1)...(19): siRNA sense strand
cccagaaacugcucaacaa

SEQ ID NO: 1127180 - RNA, 19 nt, Homo sapiens
  misc_RNA (1)...(19): siRNA sense strand
gaggaggagugcgucauga

SEQ ID NO: 1127181 - RNA, 19 nt, Homo sapiens
  misc_RNA (1)...(19): siRNA sense strand
gaacuuaaagcccaaacag

SEQ ID NO: 1127182 - RNA, 19 nt, Homo sapiens
  misc_RNA (1)...(19): siRNA sense strand
ggcaaauccuggacaaaca

SEQ ID NO: 1127183 - RNA, 19 nt, Homo sapiens
  misc_RNA (1)...(19): siRNA sense strand
gcaccaaggcucucucauc

SEQ ID NO: 1127184 - RNA, 19 nt, Homo sapiens
  misc_RNA (1)...(19): siRNA sense strand
gcuaugggcugaggcugaa

SEQ ID NO: 1127185 - RNA, 19 nt, Homo sapiens
  misc_RNA (1)...(19): siRNA sense strand
gccgugaccucccuaagug

SEQ ID NO: 1127186 - RNA, 19 nt, Homo sapiens
  misc_RNA (1)...(19): siRNA sense strand
gaguaaaguugggcacguu

SEQ ID NO: 1127187 - RNA, 19 nt, Homo sapiens
  misc_RNA (1)...(19): siRNA sense strand
ugcuggagcucaagaauga

SEQ ID NO: 1127188 - RNA, 19 nt, Homo sapiens
  misc_RNA (1)...(19): siRNA sense strand
agaaggacauugccaugga

SEQ ID NO: 1127189 - RNA, 19 nt, Homo sapiens
  misc_RNA (1)...(19): siRNA sense strand
ucagugacguuuaucagau

SEQ ID NO: 1127190 - RNA, 19 nt, Homo sapiens
  misc_RNA (1)...(19): siRNA sense strand
gcaaagccauggccuaccu

SEQ ID NO: 1127191 - RNA, 19 nt, Homo sapiens
  misc_RNA (1)...(19): siRNA sense strand
cagcuucaauccugggaaa

SEQ ID NO: 1127192 - RNA, 19 nt, Homo sapiens
  misc_RNA (1)...(19): siRNA sense strand
ggaucaucauggaauugua

SEQ ID NO: 1127193 - RNA, 19 nt, Homo sapiens
  misc_RNA (1)...(19): siRNA sense strand
ccaaacaguuccggaagau

SEQ ID NO: 1127194 - RNA, 19 nt, Homo sapiens
  misc_RNA (1)...(19): siRNA sense strand
ccaagguucuggccaaucu

SEQ ID NO: 1127195 - RNA, 19 nt, Homo sapiens
  misc_RNA (1)...(19): siRNA sense strand
ggaacaagaacucccugaa

SEQ ID NO: 1127196 - RNA, 19 nt, Homo sapiens
  misc_RNA (1)...(19): siRNA sense strand
ccaccuggaucaucaugga

SEQ ID NO: 1127197 - RNA, 19 nt, Homo sapiens
  misc_RNA (1)...(19): siRNA sense strand
ggacgugcguauccucaag

SEQ ID NO: 1127198 - RNA, 19 nt, Homo sapiens
  misc_RNA (1)...(19): siRNA sense strand
gacgaggacuauuacaaag

SEQ ID NO: 1127199 - RNA, 19 nt, Homo sapiens
  misc_RNA (1)...(19): siRNA sense strand
gaucaucauggaauuguau

SEQ ID NO: 1127200 - RNA, 19 nt, Homo sapiens
  misc_RNA (1)...(19): siRNA sense strand
gaagaugugguccugaauc

SEQ ID NO: 1127201 - RNA, 19 nt, Homo sapiens
  misc_RNA (1)...(19): siRNA sense strand
ggaggaggacuucauccaa

SEQ ID NO: 1127202 - RNA, 19 nt, Homo sapiens
  misc_RNA (1)...(19): siRNA sense strand
gaucgagggcacccagaaa

SEQ ID NO: 1127203 - RNA, 19 nt, Homo sapiens
  misc_RNA (1)...(19): siRNA sense strand
cuaccgcugugaacucauu

SEQ ID NO: 1127204 - RNA, 19 nt, Homo sapiens
  misc_RNA (1)...(19): siRNA sense strand
uuacaaagccucugugacu

SEQ ID NO: 1127205 - RNA, 19 nt, Homo sapiens
  misc_RNA (1)...(19): siRNA sense strand
ugucaagaccugcaagaaa

SEQ ID NO: 1127206 - RNA, 19 nt, Homo sapiens
  misc_RNA (1)...(19): siRNA sense strand
aggcagugaucaugaagaa

SEQ ID NO: 1127207 - RNA, 19 nt, Homo sapiens
  misc_RNA (1)...(19): siRNA sense strand
ccagaaacugcucaacaaa

SEQ ID NO: 1127208 - RNA, 19 nt, Homo sapiens
  misc_RNA (1)...(19): siRNA sense strand
cagcauagagucagacauc

SEQ ID NO: 1127209 - RNA, 19 nt, Homo sapiens
  misc_RNA (1)...(19): siRNA sense strand
gaagccgaguggagguaug

SEQ ID NO: 1127210 - RNA, 19 nt, Homo sapiens
  misc_RNA (1)...(19): siRNA sense strand
gaccugguguaccucaaug

SEQ ID NO: 1127211 - RNA, 19 nt, Homo sapiens
  misc_RNA (1)...(19): siRNA sense strand
cagccucagugacguuuau

SEQ ID NO: 1127212 - RNA, 19 nt, Homo sapiens
  misc_RNA (1)...(19): siRNA sense strand
ggacaacaaggagaaguuc

SEQ ID NO: 1127213 - RNA, 19 nt, Homo sapiens
  misc_RNA (1)...(19): siRNA sense strand
gagcucaggcgguucuuca

SEQ ID NO: 1127214 - RNA, 19 nt, Homo sapiens
  misc_RNA (1)...(19): siRNA sense strand
ggucuuucccgguacauug

SEQ ID NO: 1127215 - RNA, 19 nt, Homo sapiens
  misc_RNA (1)...(19): siRNA sense strand
gcagagauucccgacgaaa

SEQ ID NO: 1127216 - RNA, 19 nt, Homo sapiens
  misc_RNA (1)...(19): siRNA sense strand
ucagacaucuacgcagaga

SEQ ID NO: 1127217 - RNA, 19 nt, Homo sapiens
  misc_RNA (1)...(19): siRNA sense strand
gugaggugcaggacaagua

SEQ ID NO: 1127218 - RNA, 19 nt, Homo sapiens
  misc_RNA (1)...(19): siRNA sense strand
acaaacagcagaagcagau

SEQ ID NO: 1127219 - RNA, 19 nt, Homo sapiens
  misc_RNA (1)...(19): siRNA sense strand
uuuaucagauggagaagga

SEQ ID NO: 1127220 - RNA, 19 nt, Homo sapiens
  misc_RNA (1)...(19): siRNA sense strand
uagcagaggcugagaacau

SEQ ID NO: 1127221 - RNA, 19 nt, Homo sapiens
  misc_RNA (1)...(19): siRNA sense strand
ggaggaggagugcgucaug

SEQ ID NO: 1127222 - RNA, 19 nt, Homo sapiens
  misc_RNA (1)...(19): siRNA sense strand
aggcgguucuucaaggaua

SEQ ID NO: 1127223 - RNA, 19 nt, Homo sapiens
  misc_RNA (1)...(19): siRNA sense strand
uugaggacgaggacuauua

SEQ ID NO: 1127224 - RNA, 19 nt, Homo sapiens
  misc_RNA (1)...(19): siRNA sense strand
cccaaacaguuccggaaga

SEQ ID NO: 1127225 - RNA, 19 nt, Homo sapiens
  misc_RNA (1)...(19): siRNA sense strand
uguacucacugcagauaug

SEQ ID NO: 1127226 - RNA, 19 nt, Homo sapiens
  misc_RNA (1)...(19): siRNA sense strand
gaggagcccaccuggauca

SEQ ID NO: 1127227 - RNA, 19 nt, Homo sapiens
  misc_RNA (1)...(19): siRNA sense strand
gcaggacaaguaugagugu

SEQ ID NO: 1127228 - RNA, 19 nt, Homo sapiens
  misc_RNA (1)...(19): siRNA sense strand
ucaagaaugagcucuguca

SEQ ID NO: 1127229 - RNA, 19 nt, Homo sapiens
  misc_RNA (1)...(19): siRNA sense strand
cacaugaaguccgaugaga

SEQ ID NO: 1127230 - RNA, 19 nt, Homo sapiens
  misc_RNA (1)...(19): siRNA sense strand
gagcgaggcagugaucaug

SEQ ID NO: 1127231 - RNA, 19 nt, Homo sapiens
  misc_RNA (1)...(19): siRNA sense strand
caacaaggagaaguucaug

SEQ ID NO: 1127232 - RNA, 19 nt, Homo sapiens
  misc_RNA (1)...(19): siRNA sense strand
aagcagaucagguccauca

SEQ ID NO: 1127233 - RNA, 19 nt, Homo sapiens
  misc_RNA (1)...(19): siRNA sense strand
acuuaaagcccaaacaguu

SEQ ID NO: 1127234 - RNA, 19 nt, Homo sapiens
  misc_RNA (1)...(19): siRNA sense strand
gcacaugaaguccgaugag

SEQ ID NO: 1127235 - RNA, 19 nt, Homo sapiens
  misc_RNA (1)...(19): siRNA sense strand
guccaccgguccuuuauac

SEQ ID NO: 1127236 - RNA, 19 nt, Homo sapiens
  misc_RNA (1)...(19): siRNA sense strand
ugugggagauccugagcuu

SEQ ID NO: 1127237 - RNA, 19 nt, Homo sapiens
  misc_RNA (1)...(19): siRNA sense strand
caugaaguccgaugagauc

SEQ ID NO: 1127238 - RNA, 19 nt, Homo sapiens
  misc_RNA (1)...(19): siRNA sense strand
ccauccagcccacagcuaa

SEQ ID NO: 1127239 - RNA, 19 nt, Homo sapiens
  misc_RNA (1)...(19): siRNA sense strand
cagugacguuuaucagaug

SEQ ID NO: 1127240 - RNA, 19 nt, Homo sapiens
  misc_RNA (1)...(19): siRNA sense strand
gcuguacucacugcagaua

SEQ ID NO: 1127241 - RNA, 19 nt, Homo sapiens
  misc_RNA (1)...(19): siRNA sense strand
gcauugcccgugaagaugu

SEQ ID NO: 1127242 - RNA, 19 nt, Homo sapiens
  misc_RNA (1)...(19): siRNA sense strand
guacuucagcugggcauug

SEQ ID NO: 1127243 - RNA, 19 nt, Homo sapiens
  misc_RNA (1)...(19): siRNA sense strand
aggagugcgucaugaaguu

SEQ ID NO: 1127244 - RNA, 19 nt, Homo sapiens
  misc_RNA (1)...(19): siRNA sense strand
ggagaccuaccgcugugaa

SEQ ID NO: 1127245 - RNA, 19 nt, Homo sapiens
  misc_RNA (1)...(19): siRNA sense strand
ccucaaggucugcuucuau

SEQ ID NO: 1127246 - RNA, 19 nt, Homo sapiens
  misc_RNA (1)...(19): siRNA sense strand
ugggugaggugcaggacaa

SEQ ID NO: 1127247 - RNA, 19 nt, Homo sapiens
  misc_RNA (1)...(19): siRNA sense strand
cuccaaagcugcaguucca

SEQ ID NO: 1127248 - RNA, 19 nt, Homo sapiens
  misc_RNA (1)...(19): siRNA sense strand
ccaaccuccuggcuccaaa

SEQ ID NO: 1127249 - RNA, 19 nt, Homo sapiens
  misc_RNA (1)...(19): siRNA sense strand
ugggagauccugagcuuug

SEQ ID NO: 1127250 - RNA, 19 nt, Homo sapiens
  misc_RNA (1)...(19): siRNA sense strand
acuucaaacuggucaaaug

SEQ ID NO: 1127251 - RNA, 19 nt, Homo sapiens
  misc_RNA (1)...(19): siRNA sense strand
gggauccgccagcugacua

SEQ ID NO: 1127252 - RNA, 19 nt, Homo sapiens
  misc_RNA (1)...(19): siRNA sense strand
gaacauggcugaccucaua

SEQ ID NO: 1127253 - RNA, 19 nt, Homo sapiens
  misc_RNA (1)...(19): siRNA sense strand
ggaccacgcugcucuauuu

SEQ ID NO: 1127254 - RNA, 19 nt, Homo sapiens
  misc_RNA (1)...(19): siRNA sense strand
caaagcagaugcaggagaa

SEQ ID NO: 1127255 - RNA, 19 nt, Homo sapiens
  misc_RNA (1)...(19): siRNA sense strand
ucagagagcugcagcauag

SEQ ID NO: 1127256 - RNA, 19 nt, Homo sapiens
  misc_RNA (1)...(19): siRNA sense strand
ggacgaggacuauuacaaa

SEQ ID NO: 1127257 - RNA, 19 nt, Homo sapiens
  misc_RNA (1)...(19): siRNA sense strand
uggcagagcucaucaacaa

SEQ ID NO: 1127258 - RNA, 19 nt, Homo sapiens
  misc_RNA (1)...(19): siRNA sense strand
auucaaggauggaacauua

SEQ ID NO: 1127259 - RNA, 19 nt, Homo sapiens
  misc_RNA (1)...(19): siRNA sense strand
agaaacugcucaacaaaga

SEQ ID NO: 1127260 - RNA, 19 nt, Homo sapiens
  misc_RNA (1)...(19): siRNA sense strand
caccaaggcucucucauca

SEQ ID NO: 1127261 - RNA, 19 nt, Homo sapiens
  misc_RNA (1)...(19): siRNA sense strand
caucauccauccuaggaaa

SEQ ID NO: 1127262 - RNA, 19 nt, Homo sapiens
  misc_RNA (1)...(19): siRNA sense strand
gaacaagaacucccugaag

SEQ ID NO: 1127263 - RNA, 19 nt, Homo sapiens
  misc_RNA (1)...(19): siRNA sense strand
ccaaggcucucucaucauc

SEQ ID NO: 1127264 - RNA, 19 nt, Homo sapiens
  misc_RNA (1)...(19): siRNA sense strand
gcccggagguccacaguau

SEQ ID NO: 1127265 - RNA, 19 nt, Homo sapiens
  misc_RNA (1)...(19): siRNA sense strand
ccacccaccugcagaguga

SEQ ID NO: 1127266 - RNA, 19 nt, Homo sapiens
  misc_RNA (1)...(19): siRNA sense strand
gaugugguccugaaucgua

SEQ ID NO: 1127267 - RNA, 19 nt, Homo sapiens
  misc_RNA (1)...(19): siRNA sense strand
gagcccaccuggaucauca

SEQ ID NO: 1127268 - RNA, 19 nt, Homo sapiens
  misc_RNA (1)...(19): siRNA sense strand
gcagagcucaucaacaaga

SEQ ID NO: 1127269 - RNA, 19 nt, Homo sapiens
  misc_RNA (1)...(19): siRNA sense strand
gcagaugcaggagaacuua

SEQ ID NO: 1127270 - RNA, 19 nt, Homo sapiens
  misc_RNA (1)...(19): siRNA sense strand
ggacugaugaccuggugua

SEQ ID NO: 1127271 - RNA, 19 nt, Homo sapiens
  misc_RNA (1)...(19): siRNA sense strand
gugaagaugugguccugaa

SEQ ID NO: 1127272 - RNA, 19 nt, Homo sapiens
  misc_RNA (1)...(19): siRNA sense strand
caacuucgagcuccuagaa

SEQ ID NO: 1127273 - RNA, 19 nt, Homo sapiens
  misc_RNA (1)...(19): siRNA sense strand
gcccaagccugaucucugu

SEQ ID NO: 1127274 - RNA, 19 nt, Homo sapiens
  misc_RNA (1)...(19): siRNA sense strand
uaggaaagauggugagaag

SEQ ID NO: 1127275 - RNA, 19 nt, Homo sapiens
  misc_RNA (1)...(19): siRNA sense strand
gucaagaccugcaagaaag

SEQ ID NO: 1127276 - RNA, 19 nt, Homo sapiens
  misc_RNA (1)...(19): siRNA sense strand
aaacaguuccggaagauga

SEQ ID NO: 1127277 - RNA, 19 nt, Homo sapiens
  misc_RNA (1)...(19): siRNA sense strand
gcgaggcagugaucaugaa

SEQ ID NO: 1127278 - RNA, 19 nt, Homo sapiens
  misc_RNA (1)...(19): siRNA sense strand
cucaaggucugcuucuaua

SEQ ID NO: 1127279 - RNA, 19 nt, Homo sapiens
  misc_RNA (1)...(19): siRNA sense strand
cccagaaacugcucaacaa

SEQ ID NO: 1127280 - RNA, 19 nt, Homo sapiens
  misc_RNA (1)...(19): siRNA sense strand
gaggaggagugcgucauga

SEQ ID NO: 1127281 - RNA, 19 nt, Homo sapiens
  misc_RNA (1)...(19): siRNA sense strand
gaacuuaaagcccaaacag

SEQ ID NO: 1127282 - RNA, 19 nt, Homo sapiens
  misc_RNA (1)...(19): siRNA sense strand
ggcaaauccuggacaaaca

SEQ ID NO: 1127283 - RNA, 19 nt, Homo sapiens
  misc_RNA (1)...(19): siRNA sense strand
gcaccaaggcucucucauc

SEQ ID NO: 1127284 - RNA, 19 nt, Homo sapiens
  misc_RNA (1)...(19): siRNA sense strand
gcuaugggcugaggcugaa

SEQ ID NO: 1127285 - RNA, 19 nt, Homo sapiens
  misc_RNA (1)...(19): siRNA sense strand
gccgugaccucccuaagug

SEQ ID NO: 1127286 - RNA, 19 nt, Homo sapiens
  misc_RNA (1)...(19): siRNA sense strand
gaguaaaguugggcacguu

SEQ ID NO: 1127287 - RNA, 19 nt, Homo sapiens
  misc_RNA (1)...(19): siRNA sense strand
ugcuggagcucaagaauga

SEQ ID NO: 1127288 - RNA, 19 nt, Homo sapiens
  misc_RNA (1)...(19): siRNA sense strand
agaaggacauugccaugga

SEQ ID NO: 1127289 - RNA, 19 nt, Homo sapiens
  misc_RNA (1)...(19): siRNA sense strand
ucagugacguuuaucagau

SEQ ID NO: 1127290 - RNA, 19 nt, Homo sapiens
  misc_RNA (1)...(19): siRNA sense strand
gcaaagccauggccuaccu

SEQ ID NO: 1127291 - RNA, 19 nt, Homo sapiens
  misc_RNA (1)...(19): siRNA sense strand
cagcuucaauccugggaaa

SEQ ID NO: 1127292 - RNA, 19 nt, Homo sapiens
  misc_RNA (1)...(19): siRNA sense strand
ggaucaucauggaauugua

SEQ ID NO: 1127293 - RNA, 19 nt, Homo sapiens
  misc_RNA (1)...(19): siRNA sense strand
ccaaacaguuccggaagau

SEQ ID NO: 1127294 - RNA, 19 nt, Homo sapiens
  misc_RNA (1)...(19): siRNA sense strand
ccaagguucuggccaaucu

SEQ ID NO: 1127295 - RNA, 19 nt, Homo sapiens
  misc_RNA (1)...(19): siRNA sense strand
ggaacaagaacucccugaa

SEQ ID NO: 1127296 - RNA, 19 nt, Homo sapiens
  misc_RNA (1)...(19): siRNA sense strand
ccaccuggaucaucaugga

SEQ ID NO: 1127297 - RNA, 19 nt, Homo sapiens
  misc_RNA (1)...(19): siRNA sense strand
ggacgugcguauccucaag

SEQ ID NO: 1127298 - RNA, 19 nt, Homo sapiens
  misc_RNA (1)...(19): siRNA sense strand
gacgaggacuauuacaaag

SEQ ID NO: 1127299 - RNA, 19 nt, Homo sapiens
  misc_RNA (1)...(19): siRNA sense strand
gaucaucauggaauuguau

SEQ ID NO: 1127300 - RNA, 19 nt, Homo sapiens
  misc_RNA (1)...(19): siRNA sense strand
gaagaugugguccugaauc

SEQ ID NO: 1127301 - RNA, 19 nt, Homo sapiens
  misc_RNA (1)...(19): siRNA sense strand
ggaggaggacuucauccaa

SEQ ID NO: 1127302 - RNA, 19 nt, Homo sapiens
  misc_RNA (1)...(19): siRNA sense strand
gaucgagggcacccagaaa

SEQ ID NO: 1127303 - RNA, 19 nt, Homo sapiens
  misc_RNA (1)...(19): siRNA sense strand
cuaccgcugugaacucauu

SEQ ID NO: 1127304 - RNA, 19 nt, Homo sapiens
  misc_RNA (1)...(19): siRNA sense strand
uuacaaagccucugugacu

SEQ ID NO: 1127305 - RNA, 19 nt, Homo sapiens
  misc_RNA (1)...(19): siRNA sense strand
ugucaagaccugcaagaaa

SEQ ID NO: 1127306 - RNA, 19 nt, Homo sapiens
  misc_RNA (1)...(19): siRNA sense strand
aggcagugaucaugaagaa

SEQ ID NO: 1127307 - RNA, 19 nt, Homo sapiens
  misc_RNA (1)...(19): siRNA sense strand
ccagaaacugcucaacaaa

SEQ ID NO: 1127308 - RNA, 19 nt, Homo sapiens
  misc_RNA (1)...(19): siRNA sense strand
cagcauagagucagacauc

SEQ ID NO: 1127309 - RNA, 19 nt, Homo sapiens
  misc_RNA (1)...(19): siRNA sense strand
gaagccgaguggagguaug

SEQ ID NO: 1127310 - RNA, 19 nt, Homo sapiens
  misc_RNA (1)...(19): siRNA sense strand
gaccugguguaccucaaug

SEQ ID NO: 1127311 - RNA, 19 nt, Homo sapiens
  misc_RNA (1)...(19): siRNA sense strand
cagccucagugacguuuau

SEQ ID NO: 1127312 - RNA, 19 nt, Homo sapiens
  misc_RNA (1)...(19): siRNA sense strand
ggacaacaaggagaaguuc

SEQ ID NO: 1127313 - RNA, 19 nt, Homo sapiens
  misc_RNA (1)...(19): siRNA sense strand
gagcucaggcgguucuuca

SEQ ID NO: 1127314 - RNA, 19 nt, Homo sapiens
  misc_RNA (1)...(19): siRNA sense strand
ggucuuucccgguacauug

SEQ ID NO: 1127315 - RNA, 19 nt, Homo sapiens
  misc_RNA (1)...(19): siRNA sense strand
gcagagauucccgacgaaa

SEQ ID NO: 1127316 - RNA, 19 nt, Homo sapiens
  misc_RNA (1)...(19): siRNA sense strand
ucagacaucuacgcagaga

SEQ ID NO: 1127317 - RNA, 19 nt, Homo sapiens
  misc_RNA (1)...(19): siRNA sense strand
gugaggugcaggacaagua

SEQ ID NO: 1127318 - RNA, 19 nt, Homo sapiens
  misc_RNA (1)...(19): siRNA sense strand
acaaacagcagaagcagau

SEQ ID NO: 1127319 - RNA, 19 nt, Homo sapiens
  misc_RNA (1)...(19): siRNA sense strand
uuuaucagauggagaagga

SEQ ID NO: 1127320 - RNA, 19 nt, Homo sapiens
  misc_RNA (1)...(19): siRNA sense strand
uagcagaggcugagaacau

SEQ ID NO: 1127321 - RNA, 19 nt, Homo sapiens
  misc_RNA (1)...(19): siRNA sense strand
ggaggaggagugcgucaug

SEQ ID NO: 1127322 - RNA, 19 nt, Homo sapiens
  misc_RNA (1)...(19): siRNA sense strand
aggcgguucuucaaggaua

SEQ ID NO: 1127323 - RNA, 19 nt, Homo sapiens
  misc_RNA (1)...(19): siRNA sense strand
uugaggacgaggacuauua

SEQ ID NO: 1127324 - RNA, 19 nt, Homo sapiens
  misc_RNA (1)...(19): siRNA sense strand
cccaaacaguuccggaaga

SEQ ID NO: 1127325 - RNA, 19 nt, Homo sapiens
  misc_RNA (1)...(19): siRNA sense strand
uguacucacugcagauaug

SEQ ID NO: 1127326 - RNA, 19 nt, Homo sapiens
  misc_RNA (1)...(19): siRNA sense strand
gaggagcccaccuggauca

SEQ ID NO: 1127327 - RNA, 19 nt, Homo sapiens
  misc_RNA (1)...(19): siRNA sense strand
gcaggacaaguaugagugu

SEQ ID NO: 1127328 - RNA, 19 nt, Homo sapiens
  misc_RNA (1)...(19): siRNA sense strand
ucaagaaugagcucuguca

SEQ ID NO: 1127329 - RNA, 19 nt, Homo sapiens
  misc_RNA (1)...(19): siRNA sense strand
cacaugaaguccgaugaga

SEQ ID NO: 1127330 - RNA, 19 nt, Homo sapiens
  misc_RNA (1)...(19): siRNA sense strand
gagcgaggcagugaucaug

SEQ ID NO: 1127331 - RNA, 19 nt, Homo sapiens
  misc_RNA (1)...(19): siRNA sense strand
caacaaggagaaguucaug

SEQ ID NO: 1127332 - RNA, 19 nt, Homo sapiens
  misc_RNA (1)...(19): siRNA sense strand
aagcagaucagguccauca

SEQ ID NO: 1127333 - RNA, 19 nt, Homo sapiens
  misc_RNA (1)...(19): siRNA sense strand
acuuaaagcccaaacaguu

SEQ ID NO: 1127334 - RNA, 19 nt, Homo sapiens
  misc_RNA (1)...(19): siRNA sense strand
gcacaugaaguccgaugag

SEQ ID NO: 1127335 - RNA, 19 nt, Homo sapiens
  misc_RNA (1)...(19): siRNA sense strand
guccaccgguccuuuauac

SEQ ID NO: 1127336 - RNA, 19 nt, Homo sapiens
  misc_RNA (1)...(19): siRNA sense strand
ugugggagauccugagcuu

SEQ ID NO: 1127337 - RNA, 19 nt, Homo sapiens
  misc_RNA (1)...(19): siRNA sense strand
caugaaguccgaugagauc

SEQ ID NO: 1127338 - RNA, 19 nt, Homo sapiens
  misc_RNA (1)...(19): siRNA sense strand
ccauccagcccacagcuaa

SEQ ID NO: 1127339 - RNA, 19 nt, Homo sapiens
  misc_RNA (1)...(19): siRNA sense strand
cagugacguuuaucagaug

SEQ ID NO: 1127340 - RNA, 19 nt, Homo sapiens
  misc_RNA (1)...(19): siRNA sense strand
gcuguacucacugcagaua

SEQ ID NO: 1127341 - RNA, 19 nt, Homo sapiens
  misc_RNA (1)...(19): siRNA sense strand
gcauugcccgugaagaugu

SEQ ID NO: 1127342 - RNA, 19 nt, Homo sapiens
  misc_RNA (1)...(19): siRNA sense strand
guacuucagcugggcauug

SEQ ID NO: 1127343 - RNA, 19 nt, Homo sapiens
  misc_RNA (1)...(19): siRNA sense strand
aggagugcgucaugaaguu

SEQ ID NO: 1127344 - RNA, 19 nt, Homo sapiens
  misc_RNA (1)...(19): siRNA sense strand
ggagaccuaccgcugugaa

SEQ ID NO: 1127345 - RNA, 19 nt, Homo sapiens
  misc_RNA (1)...(19): siRNA sense strand
ccucaaggucugcuucuau

SEQ ID NO: 1127346 - RNA, 19 nt, Homo sapiens
  misc_RNA (1)...(19): siRNA sense strand
ugggugaggugcaggacaa

SEQ ID NO: 1127347 - RNA, 19 nt, Homo sapiens
  misc_RNA (1)...(19): siRNA sense strand
cuccaaagcugcaguucca

SEQ ID NO: 1127348 - RNA, 19 nt, Homo sapiens
  misc_RNA (1)...(19): siRNA sense strand
ccaaccuccuggcuccaaa

SEQ ID NO: 1127349 - RNA, 19 nt, Homo sapiens
  misc_RNA (1)...(19): siRNA sense strand
ugggagauccugagcuuug

SEQ ID NO: 1127350 - RNA, 19 nt, Homo sapiens
  misc_RNA (1)...(19): siRNA sense strand
acuucaaacuggucaaaug

SEQ ID NO: 1127351 - RNA, 19 nt, Homo sapiens
  misc_RNA (1)...(19): siRNA sense strand
gggauccgccagcugacua

SEQ ID NO: 1127352 - RNA, 19 nt, Homo sapiens
  misc_RNA (1)...(19): siRNA sense strand
gaacauggcugaccucaua

SEQ ID NO: 1127353 - RNA, 19 nt, Homo sapiens
  misc_RNA (1)...(19): siRNA sense strand
ggaccacgcugcucuauuu

SEQ ID NO: 1127354 - RNA, 19 nt, Homo sapiens
  misc_RNA (1)...(19): siRNA sense strand
caaagcagaugcaggagaa

SEQ ID NO: 1127355 - RNA, 19 nt, Homo sapiens
  misc_RNA (1)...(19): siRNA sense strand
ucagagagcugcagcauag

SEQ ID NO: 1127356 - RNA, 19 nt, Homo sapiens
  misc_RNA (1)...(19): siRNA sense strand
ggacgaggacuauuacaaa

SEQ ID NO: 1127357 - RNA, 19 nt, Homo sapiens
  misc_RNA (1)...(19): siRNA sense strand
uggcagagcucaucaacaa

SEQ ID NO: 1127358 - RNA, 19 nt, Homo sapiens
  misc_RNA (1)...(19): siRNA sense strand
auucaaggauggaacauua

SEQ ID NO: 1127359 - RNA, 19 nt, Homo sapiens
  misc_RNA (1)...(19): siRNA sense strand
agaaacugcucaacaaaga

SEQ ID NO: 1127360 - RNA, 19 nt, Homo sapiens
  misc_RNA (1)...(19): siRNA sense strand
caccaaggcucucucauca

SEQ ID NO: 1127361 - RNA, 19 nt, Homo sapiens
  misc_RNA (1)...(19): siRNA sense strand
caucauccauccuaggaaa

SEQ ID NO: 1127362 - RNA, 19 nt, Homo sapiens
  misc_RNA (1)...(19): siRNA sense strand
gaacaagaacucccugaag

SEQ ID NO: 1127363 - RNA, 19 nt, Homo sapiens
  misc_RNA (1)...(19): siRNA sense strand
ccaaggcucucucaucauc

SEQ ID NO: 1127364 - RNA, 19 nt, Homo sapiens
  misc_RNA (1)...(19): siRNA sense strand
gcccggagguccacaguau

SEQ ID NO: 1127365 - RNA, 19 nt, Homo sapiens
  misc_RNA (1)...(19): siRNA sense strand
ccacccaccugcagaguga

SEQ ID NO: 1127366 - RNA, 19 nt, Homo sapiens
  misc_RNA (1)...(19): siRNA sense strand
gaugugguccugaaucgua

SEQ ID NO: 1127367 - RNA, 19 nt, Homo sapiens
  misc_RNA (1)...(19): siRNA sense strand
gagcccaccuggaucauca

SEQ ID NO: 1127368 - RNA, 19 nt, Homo sapiens
  misc_RNA (1)...(19): siRNA sense strand
gcagagcucaucaacaaga

SEQ ID NO: 1127369 - RNA, 19 nt, Homo sapiens
  misc_RNA (1)...(19): siRNA sense strand
gcagaugcaggagaacuua

SEQ ID NO: 1127370 - RNA, 19 nt, Homo sapiens
  misc_RNA (1)...(19): siRNA sense strand
ggacugaugaccuggugua

SEQ ID NO: 1127371 - RNA, 19 nt, Homo sapiens
  misc_RNA (1)...(19): siRNA sense strand
gugaagaugugguccugaa

SEQ ID NO: 1127372 - RNA, 19 nt, Homo sapiens
  misc_RNA (1)...(19): siRNA sense strand
caacuucgagcuccuagaa

SEQ ID NO: 1127373 - RNA, 19 nt, Homo sapiens
  misc_RNA (1)...(19): siRNA sense strand
gcccaagccugaucucugu

SEQ ID NO: 1127374 - RNA, 19 nt, Homo sapiens
  misc_RNA (1)...(19): siRNA sense strand
uaggaaagauggugagaag

SEQ ID NO: 1127375 - RNA, 19 nt, Homo sapiens
  misc_RNA (1)...(19): siRNA sense strand
gucaagaccugcaagaaag

SEQ ID NO: 1127376 - RNA, 19 nt, Homo sapiens
  misc_RNA (1)...(19): siRNA sense strand
aaacaguuccggaagauga

SEQ ID NO: 1127377 - RNA, 19 nt, Homo sapiens
  misc_RNA (1)...(19): siRNA sense strand
gcgaggcagugaucaugaa

SEQ ID NO: 1127378 - RNA, 19 nt, Homo sapiens
  misc_RNA (1)...(19): siRNA sense strand
cucaaggucugcuucuaua

SEQ ID NO: 1127379 - RNA, 19 nt, Homo sapiens
  misc_RNA (1)...(19): siRNA sense strand
cccagaaacugcucaacaa

SEQ ID NO: 1127380 - RNA, 19 nt, Homo sapiens
  misc_RNA (1)...(19): siRNA sense strand
gaggaggagugcgucauga

SEQ ID NO: 1127381 - RNA, 19 nt, Homo sapiens
  misc_RNA (1)...(19): siRNA sense strand
gaacuuaaagcccaaacag

SEQ ID NO: 1127382 - RNA, 19 nt, Homo sapiens
  misc_RNA (1)...(19): siRNA sense strand
ggcaaauccuggacaaaca

SEQ ID NO: 1127383 - RNA, 19 nt, Homo sapiens
  misc_RNA (1)...(19): siRNA sense strand
gcaccaaggcucucucauc

SEQ ID NO: 1127384 - RNA, 19 nt, Homo sapiens
  misc_RNA (1)...(19): siRNA sense strand
gcuaugggcugaggcugaa

SEQ ID NO: 1127385 - RNA, 19 nt, Homo sapiens
  misc_RNA (1)...(19): siRNA sense strand
gccgugaccucccuaagug

SEQ ID NO: 1127386 - RNA, 19 nt, Homo sapiens
  misc_RNA (1)...(19): siRNA sense strand
gaguaaaguugggcacguu

SEQ ID NO: 1127387 - RNA, 19 nt, Homo sapiens
  misc_RNA (1)...(19): siRNA sense strand
ugcuggagcucaagaauga

SEQ ID NO: 1127388 - RNA, 19 nt, Homo sapiens
  misc_RNA (1)...(19): siRNA sense strand
agaaggacauugccaugga

SEQ ID NO: 1127389 - RNA, 19 nt, Homo sapiens
  misc_RNA (1)...(19): siRNA sense strand
ucagugacguuuaucagau

SEQ ID NO: 1127390 - RNA, 19 nt, Homo sapiens
  misc_RNA (1)...(19): siRNA sense strand
gcaaagccauggccuaccu

SEQ ID NO: 1127391 - RNA, 19 nt, Homo sapiens
  misc_RNA (1)...(19): siRNA sense strand
cagcuucaauccugggaaa

SEQ ID NO: 1127392 - RNA, 19 nt, Homo sapiens
  misc_RNA (1)...(19): siRNA sense strand
ggaucaucauggaauugua

SEQ ID NO: 1127393 - RNA, 19 nt, Homo sapiens
  misc_RNA (1)...(19): siRNA sense strand
ccaaacaguuccggaagau

SEQ ID NO: 1127394 - RNA, 19 nt, Homo sapiens
  misc_RNA (1)...(19): siRNA sense strand
ccaagguucuggccaaucu

SEQ ID NO: 1127395 - RNA, 19 nt, Homo sapiens
  misc_RNA (1)...(19): siRNA sense strand
ggaacaagaacucccugaa

SEQ ID NO: 1127396 - RNA, 19 nt, Homo sapiens
  misc_RNA (1)...(19): siRNA sense strand
ccaccuggaucaucaugga

SEQ ID NO: 1127397 - RNA, 19 nt, Homo sapiens
  misc_RNA (1)...(19): siRNA sense strand
ggacgugcguauccucaag

SEQ ID NO: 1127398 - RNA, 19 nt, Homo sapiens
  misc_RNA (1)...(19): siRNA sense strand
gacgaggacuauuacaaag

SEQ ID NO: 1127399 - RNA, 19 nt, Homo sapiens
  misc_RNA (1)...(19): siRNA sense strand
gaucaucauggaauuguau

SEQ ID NO: 1127400 - RNA, 19 nt, Homo sapiens
  misc_RNA (1)...(19): siRNA sense strand
gaagaugugguccugaauc

SEQ ID NO: 1127401 - RNA, 19 nt, Homo sapiens
  misc_RNA (1)...(19): siRNA sense strand
ggaggaggacuucauccaa

SEQ ID NO: 1127402 - RNA, 19 nt, Homo sapiens
  misc_RNA (1)...(19): siRNA sense strand
gaucgagggcacccagaaa

SEQ ID NO: 1127403 - RNA, 19 nt, Homo sapiens
  misc_RNA (1)...(19): siRNA sense strand
cuaccgcugugaacucauu

SEQ ID NO: 1127404 - RNA, 19 nt, Homo sapiens
  misc_RNA (1)...(19): siRNA sense strand
uuacaaagccucugugacu

SEQ ID NO: 1127405 - RNA, 19 nt, Homo sapiens
  misc_RNA (1)...(19): siRNA sense strand
ugucaagaccugcaagaaa

SEQ ID NO: 1127406 - RNA, 19 nt, Homo sapiens
  misc_RNA (1)...(19): siRNA sense strand
aggcagugaucaugaagaa

SEQ ID NO: 1127407 - RNA, 19 nt, Homo sapiens
  misc_RNA (1)...(19): siRNA sense strand
ccagaaacugcucaacaaa

SEQ ID NO: 1127408 - RNA, 19 nt, Homo sapiens
  misc_RNA (1)...(19): siRNA sense strand
cagcauagagucagacauc

SEQ ID NO: 1127409 - RNA, 19 nt, Homo sapiens
  misc_RNA (1)...(19): siRNA sense strand
gaagccgaguggagguaug

SEQ ID NO: 1127410 - RNA, 19 nt, Homo sapiens
  misc_RNA (1)...(19): siRNA sense strand
gaccugguguaccucaaug

SEQ ID NO: 1127411 - RNA, 19 nt, Homo sapiens
  misc_RNA (1)...(19): siRNA sense strand
cagccucagugacguuuau

SEQ ID NO: 1127412 - RNA, 19 nt, Homo sapiens
  misc_RNA (1)...(19): siRNA sense strand
ggacaacaaggagaaguuc

SEQ ID NO: 1127413 - RNA, 19 nt, Homo sapiens
  misc_RNA (1)...(19): siRNA sense strand
gagcucaggcgguucuuca

SEQ ID NO: 1127414 - RNA, 19 nt, Homo sapiens
  misc_RNA (1)...(19): siRNA sense strand
ggucuuucccgguacauug

SEQ ID NO: 1127415 - RNA, 19 nt, Homo sapiens
  misc_RNA (1)...(19): siRNA sense strand
gcagagauucccgacgaaa

SEQ ID NO: 1127416 - RNA, 19 nt, Homo sapiens
  misc_RNA (1)...(19): siRNA sense strand
ucagacaucuacgcagaga

SEQ ID NO: 1127417 - RNA, 19 nt, Homo sapiens
  misc_RNA (1)...(19): siRNA sense strand
gugaggugcaggacaagua

SEQ ID NO: 1127418 - RNA, 19 nt, Homo sapiens
  misc_RNA (1)...(19): siRNA sense strand
acaaacagcagaagcagau

SEQ ID NO: 1127419 - RNA, 19 nt, Homo sapiens
  misc_RNA (1)...(19): siRNA sense strand
uuuaucagauggagaagga

SEQ ID NO: 1127420 - RNA, 19 nt, Homo sapiens
  misc_RNA (1)...(19): siRNA sense strand
uagcagaggcugagaacau

SEQ ID NO: 1127421 - RNA, 19 nt, Homo sapiens
  misc_RNA (1)...(19): siRNA sense strand
ggaggaggagugcgucaug

SEQ ID NO: 1127422 - RNA, 19 nt, Homo sapiens
  misc_RNA (1)...(19): siRNA sense strand
aggcgguucuucaaggaua

SEQ ID NO: 1127423 - RNA, 19 nt, Homo sapiens
  misc_RNA (1)...(19): siRNA sense strand
uugaggacgaggacuauua

SEQ ID NO: 1127424 - RNA, 19 nt, Homo sapiens
  misc_RNA (1)...(19): siRNA sense strand
cccaaacaguuccggaaga

SEQ ID NO: 1127425 - RNA, 19 nt, Homo sapiens
  misc_RNA (1)...(19): siRNA sense strand
uguacucacugcagauaug

SEQ ID NO: 1127426 - RNA, 19 nt, Homo sapiens
  misc_RNA (1)...(19): siRNA sense strand
gaggagcccaccuggauca

SEQ ID NO: 1127427 - RNA, 19 nt, Homo sapiens
  misc_RNA (1)...(19): siRNA sense strand
gcaggacaaguaugagugu

SEQ ID NO: 1127428 - RNA, 19 nt, Homo sapiens
  misc_RNA (1)...(19): siRNA sense strand
ucaagaaugagcucuguca

SEQ ID NO: 1127429 - RNA, 19 nt, Homo sapiens
  misc_RNA (1)...(19): siRNA sense strand
cacaugaaguccgaugaga

SEQ ID NO: 1127430 - RNA, 19 nt, Homo sapiens
  misc_RNA (1)...(19): siRNA sense strand
gagcgaggcagugaucaug

SEQ ID NO: 1127431 - RNA, 19 nt, Homo sapiens
  misc_RNA (1)...(19): siRNA sense strand
caacaaggagaaguucaug

SEQ ID NO: 1127432 - RNA, 19 nt, Homo sapiens
  misc_RNA (1)...(19): siRNA sense strand
aagcagaucagguccauca

SEQ ID NO: 1127433 - RNA, 19 nt, Homo sapiens
  misc_RNA (1)...(19): siRNA sense strand
acuuaaagcccaaacaguu

SEQ ID NO: 1127434 - RNA, 19 nt, Homo sapiens
  misc_RNA (1)...(19): siRNA sense strand
gcacaugaaguccgaugag

SEQ ID NO: 1127435 - RNA, 19 nt, Homo sapiens
  misc_RNA (1)...(19): siRNA sense strand
guccaccgguccuuuauac

SEQ ID NO: 1127436 - RNA, 19 nt, Homo sapiens
  misc_RNA (1)...(19): siRNA sense strand
ugugggagauccugagcuu

SEQ ID NO: 1127437 - RNA, 19 nt, Homo sapiens
  misc_RNA (1)...(19): siRNA sense strand
caugaaguccgaugagauc

SEQ ID NO: 1127438 - RNA, 19 nt, Homo sapiens
  misc_RNA (1)...(19): siRNA sense strand
ccauccagcccacagcuaa

SEQ ID NO: 1127439 - RNA, 19 nt, Homo sapiens
  misc_RNA (1)...(19): siRNA sense strand
cagugacguuuaucagaug

SEQ ID NO: 1127440 - RNA, 19 nt, Homo sapiens
  misc_RNA (1)...(19): siRNA sense strand
gcuguacucacugcagaua

SEQ ID NO: 1127441 - RNA, 19 nt, Homo sapiens
  misc_RNA (1)...(19): siRNA sense strand
gcauugcccgugaagaugu

SEQ ID NO: 1127442 - RNA, 19 nt, Homo sapiens
  misc_RNA (1)...(19): siRNA sense strand
guacuucagcugggcauug

SEQ ID NO: 1127443 - RNA, 19 nt, Homo sapiens
  misc_RNA (1)...(19): siRNA sense strand
aggagugcgucaugaaguu

SEQ ID NO: 1127444 - RNA, 19 nt, Homo sapiens
  misc_RNA (1)...(19): siRNA sense strand
ggagaccuaccgcugugaa

SEQ ID NO: 1127445 - RNA, 19 nt, Homo sapiens
  misc_RNA (1)...(19): siRNA sense strand
ccucaaggucugcuucuau

SEQ ID NO: 1127446 - RNA, 19 nt, Homo sapiens
  misc_RNA (1)...(19): siRNA sense strand
ugggugaggugcaggacaa

SEQ ID NO: 1127447 - RNA, 19 nt, Homo sapiens
  misc_RNA (1)...(19): siRNA sense strand
cuccaaagcugcaguucca

SEQ ID NO: 1127448 - RNA, 19 nt, Homo sapiens
  misc_RNA (1)...(19): siRNA sense strand
ccaaccuccuggcuccaaa

SEQ ID NO: 1127449 - RNA, 19 nt, Homo sapiens
  misc_RNA (1)...(19): siRNA sense strand
ugggagauccugagcuuug

SEQ ID NO: 1127450 - RNA, 19 nt, Homo sapiens
  misc_RNA (1)...(19): siRNA sense strand
acuucaaacuggucaaaug

SEQ ID NO: 1127451 - RNA, 19 nt, Homo sapiens
  misc_RNA (1)...(19): siRNA sense strand
gggauccgccagcugacua

SEQ ID NO: 1127452 - RNA, 19 nt, Homo sapiens
  misc_RNA (1)...(19): siRNA sense strand
ggacugaguuuauugauga

SEQ ID NO: 1127453 - RNA, 19 nt, Homo sapiens
  misc_RNA (1)...(19): siRNA sense strand
acagugauguugagguuua

SEQ ID NO: 1127454 - RNA, 19 nt, Homo sapiens
  misc_RNA (1)...(19): siRNA sense strand
gcccuaggcucuugcuuaa

SEQ ID NO: 1127455 - RNA, 19 nt, Homo sapiens
  misc_RNA (1)...(19): siRNA sense strand
gagcuggcaugaucuucua

SEQ ID NO: 1127456 - RNA, 19 nt, Homo sapiens
  misc_RNA (1)...(19): siRNA sense strand
ccacguccaucuucuuuga

SEQ ID NO: 1127457 - RNA, 19 nt, Homo sapiens
  misc_RNA (1)...(19): siRNA sense strand
cuaugacucuggaauuuaa

SEQ ID NO: 1127458 - RNA, 19 nt, Homo sapiens
  misc_RNA (1)...(19): siRNA sense strand
ugacggagcugggcuacaa

SEQ ID NO: 1127459 - RNA, 19 nt, Homo sapiens
  misc_RNA (1)...(19): siRNA sense strand
gggaggagguugagagcuu

SEQ ID NO: 1127460 - RNA, 19 nt, Homo sapiens
  misc_RNA (1)...(19): siRNA sense strand
gagccacccugaaagaguu

SEQ ID NO: 1127461 - RNA, 19 nt, Homo sapiens
  misc_RNA (1)...(19): siRNA sense strand
gagcuucgccucucucuuc

SEQ ID NO: 1127462 - RNA, 19 nt, Homo sapiens
  misc_RNA (1)...(19): siRNA sense strand
ccuaggcucuugcuuaaau

SEQ ID NO: 1127463 - RNA, 19 nt, Homo sapiens
  misc_RNA (1)...(19): siRNA sense strand
ggagaacgcacgccucuuc

SEQ ID NO: 1127464 - RNA, 19 nt, Homo sapiens
  misc_RNA (1)...(19): siRNA sense strand
gcacugaagcaagcuauga

SEQ ID NO: 1127465 - RNA, 19 nt, Homo sapiens
  misc_RNA (1)...(19): siRNA sense strand
agacagugauguugagguu

SEQ ID NO: 1127466 - RNA, 19 nt, Homo sapiens
  misc_RNA (1)...(19): siRNA sense strand
uacggaagauugcagauga

SEQ ID NO: 1127467 - RNA, 19 nt, Homo sapiens
  misc_RNA (1)...(19): siRNA sense strand
caaagacagugauguugag

SEQ ID NO: 1127468 - RNA, 19 nt, Homo sapiens
  misc_RNA (1)...(19): siRNA sense strand
gcuaugacucuggaauuua

SEQ ID NO: 1127469 - RNA, 19 nt, Homo sapiens
  misc_RNA (1)...(19): siRNA sense strand
gagguuuacaacaucauua

SEQ ID NO: 1127470 - RNA, 19 nt, Homo sapiens
  misc_RNA (1)...(19): siRNA sense strand
gggacugaguuuauugaug

SEQ ID NO: 1127471 - RNA, 19 nt, Homo sapiens
  misc_RNA (1)...(19): siRNA sense strand
ucauuaagaaggagaguaa

SEQ ID NO: 1127472 - RNA, 19 nt, Homo sapiens
  misc_RNA (1)...(19): siRNA sense strand
gaagauugcagaugagaac

SEQ ID NO: 1127473 - RNA, 19 nt, Homo sapiens
  misc_RNA (1)...(19): siRNA sense strand
gauacuggcuacaucaacu

SEQ ID NO: 1127474 - RNA, 19 nt, Homo sapiens
  misc_RNA (1)...(19): siRNA sense strand
ggcccuaggcucuugcuua

SEQ ID NO: 1127475 - RNA, 19 nt, Homo sapiens
  misc_RNA (1)...(19): siRNA sense strand
gagcugggcuacaaaauag

SEQ ID NO: 1127476 - RNA, 19 nt, Homo sapiens
  misc_RNA (1)...(19): siRNA sense strand
gcucuugcuuaaauaacaa

SEQ ID NO: 1127477 - RNA, 19 nt, Homo sapiens
  misc_RNA (1)...(19): siRNA sense strand
uggccugccugacuucuaa

SEQ ID NO: 1127478 - RNA, 19 nt, Homo sapiens
  misc_RNA (1)...(19): siRNA sense strand
ugacaaccauuugauccuu

SEQ ID NO: 1127479 - RNA, 19 nt, Homo sapiens
  misc_RNA (1)...(19): siRNA sense strand
caucuucuuugaaucuaug

SEQ ID NO: 1127480 - RNA, 19 nt, Homo sapiens
  misc_RNA (1)...(19): siRNA sense strand
ccucaaagacagugauguu

SEQ ID NO: 1127481 - RNA, 19 nt, Homo sapiens
  misc_RNA (1)...(19): siRNA sense strand
guagcccacuuuauucaca

SEQ ID NO: 1127482 - RNA, 19 nt, Homo sapiens
  misc_RNA (1)...(19): siRNA sense strand
cuggcuacaucaacuauga

SEQ ID NO: 1127483 - RNA, 19 nt, Homo sapiens
  misc_RNA (1)...(19): siRNA sense strand
ggagcugggcuacaaaaua

SEQ ID NO: 1127484 - RNA, 19 nt, Homo sapiens
  misc_RNA (1)...(19): siRNA sense strand
gcaugaucuucuacaggaa

SEQ ID NO: 1127485 - RNA, 19 nt, Homo sapiens
  misc_RNA (1)...(19): siRNA sense strand
cccgaaaccuggaauaugc

SEQ ID NO: 1127486 - RNA, 19 nt, Homo sapiens
  misc_RNA (1)...(19): siRNA sense strand
cuaggcucuugcuuaaaua

SEQ ID NO: 1127487 - RNA, 19 nt, Homo sapiens
  misc_RNA (1)...(19): siRNA sense strand
gagcccugcaggccuauaa

SEQ ID NO: 1127488 - RNA, 19 nt, Homo sapiens
  misc_RNA (1)...(19): siRNA sense strand
uugaaucuaugcccuacaa

SEQ ID NO: 1127489 - RNA, 19 nt, Homo sapiens
  misc_RNA (1)...(19): siRNA sense strand
ggaagauugcagaugagaa

SEQ ID NO: 1127490 - RNA, 19 nt, Homo sapiens
  misc_RNA (1)...(19): siRNA sense strand
uggcgggacugaguuuauu

SEQ ID NO: 1127491 - RNA, 19 nt, Homo sapiens
  misc_RNA (1)...(19): siRNA sense strand
aaacuuugcuguguacacu

SEQ ID NO: 1127492 - RNA, 19 nt, Homo sapiens
  misc_RNA (1)...(19): siRNA sense strand
gggcugagaaggugcuaga

SEQ ID NO: 1127493 - RNA, 19 nt, Homo sapiens
  misc_RNA (1)...(19): siRNA sense strand
guccucacaugacaagaug

SEQ ID NO: 1127494 - RNA, 19 nt, Homo sapiens
  misc_RNA (1)...(19): siRNA sense strand
acaacaucauuaagaagga

SEQ ID NO: 1127495 - RNA, 19 nt, Homo sapiens
  misc_RNA (1)...(19): siRNA sense strand
gaaagaguucaaggagaga

SEQ ID NO: 1127496 - RNA, 19 nt, Homo sapiens
  misc_RNA (1)...(19): siRNA sense strand
cugauugccucggagaauu

SEQ ID NO: 1127497 - RNA, 19 nt, Homo sapiens
  misc_RNA (1)...(19): siRNA sense strand
gcacaaccccucaaagaca

SEQ ID NO: 1127498 - RNA, 19 nt, Homo sapiens
  misc_RNA (1)...(19): siRNA sense strand
caacguccagcccuacuca

SEQ ID NO: 1127499 - RNA, 19 nt, Homo sapiens
  misc_RNA (1)...(19): siRNA sense strand
guacacugcccugguggaa

SEQ ID NO: 1127500 - RNA, 19 nt, Homo sapiens
  misc_RNA (1)...(19): siRNA sense strand
ggcucuugcuuaaauaaca

SEQ ID NO: 1127501 - RNA, 19 nt, Homo sapiens
  misc_RNA (1)...(19): siRNA sense strand
agcuaugacucuggaauuu

SEQ ID NO: 1127502 - RNA, 19 nt, Homo sapiens
  misc_RNA (1)...(19): siRNA sense strand
guucaugacagacaagaag

SEQ ID NO: 1127503 - RNA, 19 nt, Homo sapiens
  misc_RNA (1)...(19): siRNA sense strand
ggcagaggguuggauugga

SEQ ID NO: 1127504 - RNA, 19 nt, Homo sapiens
  misc_RNA (1)...(19): siRNA sense strand
gauacuauggcgggacuga

SEQ ID NO: 1127505 - RNA, 19 nt, Homo sapiens
  misc_RNA (1)...(19): siRNA sense strand
ugauugccucggagaauuu

SEQ ID NO: 1127506 - RNA, 19 nt, Homo sapiens
  misc_RNA (1)...(19): siRNA sense strand
caugaucuucuacaggaaa

SEQ ID NO: 1127507 - RNA, 19 nt, Homo sapiens
  misc_RNA (1)...(19): siRNA sense strand
caugacagacaagaagaaa

SEQ ID NO: 1127508 - RNA, 19 nt, Homo sapiens
  misc_RNA (1)...(19): siRNA sense strand
gcgggacugaguuuauuga

SEQ ID NO: 1127509 - RNA, 19 nt, Homo sapiens
  misc_RNA (1)...(19): siRNA sense strand
ucacaggugguucugacaa

SEQ ID NO: 1127510 - RNA, 19 nt, Homo sapiens
  misc_RNA (1)...(19): siRNA sense strand
gacugaguuuauugaugaa

SEQ ID NO: 1127511 - RNA, 19 nt, Homo sapiens
  misc_RNA (1)...(19): siRNA sense strand
gcugagaaggugcuagaag

SEQ ID NO: 1127512 - RNA, 19 nt, Homo sapiens
  misc_RNA (1)...(19): siRNA sense strand
aagcuaugacucuggaauu

SEQ ID NO: 1127513 - RNA, 19 nt, Homo sapiens
  misc_RNA (1)...(19): siRNA sense strand
ggguugcuguggcacugaa

SEQ ID NO: 1127514 - RNA, 19 nt, Homo sapiens
  misc_RNA (1)...(19): siRNA sense strand
gguccucacaugacaagau

SEQ ID NO: 1127515 - RNA, 19 nt, Homo sapiens
  misc_RNA (1)...(19): siRNA sense strand
augaccagcuggaggagaa

SEQ ID NO: 1127516 - RNA, 19 nt, Homo sapiens
  misc_RNA (1)...(19): siRNA sense strand
gcugauugccucggagaau

SEQ ID NO: 1127517 - RNA, 19 nt, Homo sapiens
  misc_RNA (1)...(19): siRNA sense strand
caagcuaugacucuggaau

SEQ ID NO: 1127518 - RNA, 19 nt, Homo sapiens
  misc_RNA (1)...(19): siRNA sense strand
ugaagcaagcuaugacucu

SEQ ID NO: 1127519 - RNA, 19 nt, Homo sapiens
  misc_RNA (1)...(19): siRNA sense strand
ugacagacaagaagaaaau

SEQ ID NO: 1127520 - RNA, 19 nt, Homo sapiens
  misc_RNA (1)...(19): siRNA sense strand
ggacugaguuuauugauga

SEQ ID NO: 1127521 - RNA, 19 nt, Homo sapiens
  misc_RNA (1)...(19): siRNA sense strand
acagugauguugagguuua

SEQ ID NO: 1127522 - RNA, 19 nt, Homo sapiens
  misc_RNA (1)...(19): siRNA sense strand
gcccuaggcucuugcuuaa

SEQ ID NO: 1127523 - RNA, 19 nt, Homo sapiens
  misc_RNA (1)...(19): siRNA sense strand
gagcuggcaugaucuucua

SEQ ID NO: 1127524 - RNA, 19 nt, Homo sapiens
  misc_RNA (1)...(19): siRNA sense strand
ccacguccaucuucuuuga

SEQ ID NO: 1127525 - RNA, 19 nt, Homo sapiens
  misc_RNA (1)...(19): siRNA sense strand
cuaugacucuggaauuuaa

SEQ ID NO: 1127526 - RNA, 19 nt, Homo sapiens
  misc_RNA (1)...(19): siRNA sense strand
ugacggagcugggcuacaa

SEQ ID NO: 1127527 - RNA, 19 nt, Homo sapiens
  misc_RNA (1)...(19): siRNA sense strand
gggaggagguugagagcuu

SEQ ID NO: 1127528 - RNA, 19 nt, Homo sapiens
  misc_RNA (1)...(19): siRNA sense strand
gagccacccugaaagaguu

SEQ ID NO: 1127529 - RNA, 19 nt, Homo sapiens
  misc_RNA (1)...(19): siRNA sense strand
gagcuucgccucucucuuc

SEQ ID NO: 1127530 - RNA, 19 nt, Homo sapiens
  misc_RNA (1)...(19): siRNA sense strand
ccuaggcucuugcuuaaau

SEQ ID NO: 1127531 - RNA, 19 nt, Homo sapiens
  misc_RNA (1)...(19): siRNA sense strand
ggagaacgcacgccucuuc

SEQ ID NO: 1127532 - RNA, 19 nt, Homo sapiens
  misc_RNA (1)...(19): siRNA sense strand
gcacugaagcaagcuauga

SEQ ID NO: 1127533 - RNA, 19 nt, Homo sapiens
  misc_RNA (1)...(19): siRNA sense strand
agacagugauguugagguu

SEQ ID NO: 1127534 - RNA, 19 nt, Homo sapiens
  misc_RNA (1)...(19): siRNA sense strand
uacggaagauugcagauga

SEQ ID NO: 1127535 - RNA, 19 nt, Homo sapiens
  misc_RNA (1)...(19): siRNA sense strand
caaagacagugauguugag

SEQ ID NO: 1127536 - RNA, 19 nt, Homo sapiens
  misc_RNA (1)...(19): siRNA sense strand
gcuaugacucuggaauuua

SEQ ID NO: 1127537 - RNA, 19 nt, Homo sapiens
  misc_RNA (1)...(19): siRNA sense strand
gagguuuacaacaucauua

SEQ ID NO: 1127538 - RNA, 19 nt, Homo sapiens
  misc_RNA (1)...(19): siRNA sense strand
gggacugaguuuauugaug

SEQ ID NO: 1127539 - RNA, 19 nt, Homo sapiens
  misc_RNA (1)...(19): siRNA sense strand
ucauuaagaaggagaguaa

SEQ ID NO: 1127540 - RNA, 19 nt, Homo sapiens
  misc_RNA (1)...(19): siRNA sense strand
gaagauugcagaugagaac

SEQ ID NO: 1127541 - RNA, 19 nt, Homo sapiens
  misc_RNA (1)...(19): siRNA sense strand
gauacuggcuacaucaacu

SEQ ID NO: 1127542 - RNA, 19 nt, Homo sapiens
  misc_RNA (1)...(19): siRNA sense strand
ggcccuaggcucuugcuua

SEQ ID NO: 1127543 - RNA, 19 nt, Homo sapiens
  misc_RNA (1)...(19): siRNA sense strand
gagcugggcuacaaaauag

SEQ ID NO: 1127544 - RNA, 19 nt, Homo sapiens
  misc_RNA (1)...(19): siRNA sense strand
gcucuugcuuaaauaacaa

SEQ ID NO: 1127545 - RNA, 19 nt, Homo sapiens
  misc_RNA (1)...(19): siRNA sense strand
uggccugccugacuucuaa

SEQ ID NO: 1127546 - RNA, 19 nt, Homo sapiens
  misc_RNA (1)...(19): siRNA sense strand
ugacaaccauuugauccuu

SEQ ID NO: 1127547 - RNA, 19 nt, Homo sapiens
  misc_RNA (1)...(19): siRNA sense strand
caucuucuuugaaucuaug

SEQ ID NO: 1127548 - RNA, 19 nt, Homo sapiens
  misc_RNA (1)...(19): siRNA sense strand
ccucaaagacagugauguu

SEQ ID NO: 1127549 - RNA, 19 nt, Homo sapiens
  misc_RNA (1)...(19): siRNA sense strand
guagcccacuuuauucaca

SEQ ID NO: 1127550 - RNA, 19 nt, Homo sapiens
  misc_RNA (1)...(19): siRNA sense strand
cuggcuacaucaacuauga

SEQ ID NO: 1127551 - RNA, 19 nt, Homo sapiens
  misc_RNA (1)...(19): siRNA sense strand
ggagcugggcuacaaaaua

SEQ ID NO: 1127552 - RNA, 19 nt, Homo sapiens
  misc_RNA (1)...(19): siRNA sense strand
gcaugaucuucuacaggaa

SEQ ID NO: 1127553 - RNA, 19 nt, Homo sapiens
  misc_RNA (1)...(19): siRNA sense strand
cccgaaaccuggaauaugc

SEQ ID NO: 1127554 - RNA, 19 nt, Homo sapiens
  misc_RNA (1)...(19): siRNA sense strand
cuaggcucuugcuuaaaua

SEQ ID NO: 1127555 - RNA, 19 nt, Homo sapiens
  misc_RNA (1)...(19): siRNA sense strand
gagcccugcaggccuauaa

SEQ ID NO: 1127556 - RNA, 19 nt, Homo sapiens
  misc_RNA (1)...(19): siRNA sense strand
uugaaucuaugcccuacaa

SEQ ID NO: 1127557 - RNA, 19 nt, Homo sapiens
  misc_RNA (1)...(19): siRNA sense strand
ggaagauugcagaugagaa

SEQ ID NO: 1127558 - RNA, 19 nt, Homo sapiens
  misc_RNA (1)...(19): siRNA sense strand
uggcgggacugaguuuauu

SEQ ID NO: 1127559 - RNA, 19 nt, Homo sapiens
  misc_RNA (1)...(19): siRNA sense strand
aaacuuugcuguguacacu

SEQ ID NO: 1127560 - RNA, 19 nt, Homo sapiens
  misc_RNA (1)...(19): siRNA sense strand
gggcugagaaggugcuaga

SEQ ID NO: 1127561 - RNA, 19 nt, Homo sapiens
  misc_RNA (1)...(19): siRNA sense strand
guccucacaugacaagaug

SEQ ID NO: 1127562 - RNA, 19 nt, Homo sapiens
  misc_RNA (1)...(19): siRNA sense strand
acaacaucauuaagaagga

SEQ ID NO: 1127563 - RNA, 19 nt, Homo sapiens
  misc_RNA (1)...(19): siRNA sense strand
gaaagaguucaaggagaga

SEQ ID NO: 1127564 - RNA, 19 nt, Homo sapiens
  misc_RNA (1)...(19): siRNA sense strand
cugauugccucggagaauu

SEQ ID NO: 1127565 - RNA, 19 nt, Homo sapiens
  misc_RNA (1)...(19): siRNA sense strand
gcacaaccccucaaagaca

SEQ ID NO: 1127566 - RNA, 19 nt, Homo sapiens
  misc_RNA (1)...(19): siRNA sense strand
caacguccagcccuacuca

SEQ ID NO: 1127567 - RNA, 19 nt, Homo sapiens
  misc_RNA (1)...(19): siRNA sense strand
guacacugcccugguggaa

SEQ ID NO: 1127568 - RNA, 19 nt, Homo sapiens
  misc_RNA (1)...(19): siRNA sense strand
ggcucuugcuuaaauaaca

SEQ ID NO: 1127569 - RNA, 19 nt, Homo sapiens
  misc_RNA (1)...(19): siRNA sense strand
agcuaugacucuggaauuu

SEQ ID NO: 1127570 - RNA, 19 nt, Homo sapiens
  misc_RNA (1)...(19): siRNA sense strand
guucaugacagacaagaag

SEQ ID NO: 1127571 - RNA, 19 nt, Homo sapiens
  misc_RNA (1)...(19): siRNA sense strand
ggcagaggguuggauugga

SEQ ID NO: 1127572 - RNA, 19 nt, Homo sapiens
  misc_RNA (1)...(19): siRNA sense strand
gauacuauggcgggacuga

SEQ ID NO: 1127573 - RNA, 19 nt, Homo sapiens
  misc_RNA (1)...(19): siRNA sense strand
ugauugccucggagaauuu

SEQ ID NO: 1127574 - RNA, 19 nt, Homo sapiens
  misc_RNA (1)...(19): siRNA sense strand
caugaucuucuacaggaaa

SEQ ID NO: 1127575 - RNA, 19 nt, Homo sapiens
  misc_RNA (1)...(19): siRNA sense strand
caugacagacaagaagaaa

SEQ ID NO: 1127576 - RNA, 19 nt, Homo sapiens
  misc_RNA (1)...(19): siRNA sense strand
gcgggacugaguuuauuga

SEQ ID NO: 1127577 - RNA, 19 nt, Homo sapiens
  misc_RNA (1)...(19): siRNA sense strand
ucacaggugguucugacaa

SEQ ID NO: 1127578 - RNA, 19 nt, Homo sapiens
  misc_RNA (1)...(19): siRNA sense strand
gacugaguuuauugaugaa

SEQ ID NO: 1127579 - RNA, 19 nt, Homo sapiens
  misc_RNA (1)...(19): siRNA sense strand
gcugagaaggugcuagaag

SEQ ID NO: 1127580 - RNA, 19 nt, Homo sapiens
  misc_RNA (1)...(19): siRNA sense strand
aagcuaugacucuggaauu

SEQ ID NO: 1127581 - RNA, 19 nt, Homo sapiens
  misc_RNA (1)...(19): siRNA sense strand
ggguugcuguggcacugaa

SEQ ID NO: 1127582 - RNA, 19 nt, Homo sapiens
  misc_RNA (1)...(19): siRNA sense strand
gguccucacaugacaagau

SEQ ID NO: 1127583 - RNA, 19 nt, Homo sapiens
  misc_RNA (1)...(19): siRNA sense strand
augaccagcuggaggagaa

SEQ ID NO: 1127584 - RNA, 19 nt, Homo sapiens
  misc_RNA (1)...(19): siRNA sense strand
gcugauugccucggagaau

SEQ ID NO: 1127585 - RNA, 19 nt, Homo sapiens
  misc_RNA (1)...(19): siRNA sense strand
caagcuaugacucuggaau

SEQ ID NO: 1127586 - RNA, 19 nt, Homo sapiens
  misc_RNA (1)...(19): siRNA sense strand
ugaagcaagcuaugacucu

SEQ ID NO: 1127587 - RNA, 19 nt, Homo sapiens
  misc_RNA (1)...(19): siRNA sense strand
ugacagacaagaagaaaau

SEQ ID NO: 1127588 - RNA, 19 nt, Homo sapiens
  misc_RNA (1)...(19): siRNA sense strand
cuaaagagauggaacauaa

SEQ ID NO: 1127589 - RNA, 19 nt, Homo sapiens
  misc_RNA (1)...(19): siRNA sense strand
agaaggagcuuuagcauuu

SEQ ID NO: 1127590 - RNA, 19 nt, Homo sapiens
  misc_RNA (1)...(19): siRNA sense strand
gcuagaaccuccuguagua

SEQ ID NO: 1127591 - RNA, 19 nt, Homo sapiens
  misc_RNA (1)...(19): siRNA sense strand
ggaaauuggugaagagaaa

SEQ ID NO: 1127592 - RNA, 19 nt, Homo sapiens
  misc_RNA (1)...(19): siRNA sense strand
gagccagaaucuucaauua

SEQ ID NO: 1127593 - RNA, 19 nt, Homo sapiens
  misc_RNA (1)...(19): siRNA sense strand
ggauaaggcucaauuacuu

SEQ ID NO: 1127594 - RNA, 19 nt, Homo sapiens
  misc_RNA (1)...(19): siRNA sense strand
caacugagguggcuauaga

SEQ ID NO: 1127595 - RNA, 19 nt, Homo sapiens
  misc_RNA (1)...(19): siRNA sense strand
ugacaaagauucuggauuc

SEQ ID NO: 1127596 - RNA, 19 nt, Homo sapiens
  misc_RNA (1)...(19): siRNA sense strand
cgacagcgcuggaauccua

SEQ ID NO: 1127597 - RNA, 19 nt, Homo sapiens
  misc_RNA (1)...(19): siRNA sense strand
gcgcuggaauccuauaaua

SEQ ID NO: 1127598 - RNA, 19 nt, Homo sapiens
  misc_RNA (1)...(19): siRNA sense strand
ggucuuagauacagaacua

SEQ ID NO: 1127599 - RNA, 19 nt, Homo sapiens
  misc_RNA (1)...(19): siRNA sense strand
gaagauagaggaaguacuu

SEQ ID NO: 1127600 - RNA, 19 nt, Homo sapiens
  misc_RNA (1)...(19): siRNA sense strand
gaaguaagcguuccaaauc

SEQ ID NO: 1127601 - RNA, 19 nt, Homo sapiens
  misc_RNA (1)...(19): siRNA sense strand
ucauuaagaucucgaagua

SEQ ID NO: 1127602 - RNA, 19 nt, Homo sapiens
  misc_RNA (1)...(19): siRNA sense strand
aaacagauccuacugauga

SEQ ID NO: 1127603 - RNA, 19 nt, Homo sapiens
  misc_RNA (1)...(19): siRNA sense strand
ggaagaagaucuguaucaa

SEQ ID NO: 1127604 - RNA, 19 nt, Homo sapiens
  misc_RNA (1)...(19): siRNA sense strand
ggauacagaagaaccauua

SEQ ID NO: 1127605 - RNA, 19 nt, Homo sapiens
  misc_RNA (1)...(19): siRNA sense strand
agaaagagcuucagagucu

SEQ ID NO: 1127606 - RNA, 19 nt, Homo sapiens
  misc_RNA (1)...(19): siRNA sense strand
gcucuaugaugucagcuua

SEQ ID NO: 1127607 - RNA, 19 nt, Homo sapiens
  misc_RNA (1)...(19): siRNA sense strand
ggagaucucuguucagucu

SEQ ID NO: 1127608 - RNA, 19 nt, Homo sapiens
  misc_RNA (1)...(19): siRNA sense strand
caucaucccuuuaaacuca

SEQ ID NO: 1127609 - RNA, 19 nt, Homo sapiens
  misc_RNA (1)...(19): siRNA sense strand
agacgaagcuucaguaucu

SEQ ID NO: 1127610 - RNA, 19 nt, Homo sapiens
  misc_RNA (1)...(19): siRNA sense strand
gcugaacgcucuaugaugu

SEQ ID NO: 1127611 - RNA, 19 nt, Homo sapiens
  misc_RNA (1)...(19): siRNA sense strand
gcucuaugaugucuuauga

SEQ ID NO: 1127612 - RNA, 19 nt, Homo sapiens
  misc_RNA (1)...(19): siRNA sense strand
gaagaaauagugcagaaga

SEQ ID NO: 1127613 - RNA, 19 nt, Homo sapiens
  misc_RNA (1)...(19): siRNA sense strand
caaaucuucugaacacaaa

SEQ ID NO: 1127614 - RNA, 19 nt, Homo sapiens
  misc_RNA (1)...(19): siRNA sense strand
gauauaagccagacuugaa

SEQ ID NO: 1127615 - RNA, 19 nt, Homo sapiens
  misc_RNA (1)...(19): siRNA sense strand
gaaacucuaucuucuacug

SEQ ID NO: 1127616 - RNA, 19 nt, Homo sapiens
  misc_RNA (1)...(19): siRNA sense strand
gaugaagucugugcugaaa

SEQ ID NO: 1127617 - RNA, 19 nt, Homo sapiens
  misc_RNA (1)...(19): siRNA sense strand
gaagucaucugagccaguu

SEQ ID NO: 1127618 - RNA, 19 nt, Homo sapiens
  misc_RNA (1)...(19): siRNA sense strand
gcugagcgcucuaugaugu

SEQ ID NO: 1127619 - RNA, 19 nt, Homo sapiens
  misc_RNA (1)...(19): siRNA sense strand
aaacagaucgcacagagua

SEQ ID NO: 1127620 - RNA, 19 nt, Homo sapiens
  misc_RNA (1)...(19): siRNA sense strand
gaagaagaucuguaucaaa

SEQ ID NO: 1127621 - RNA, 19 nt, Homo sapiens
  misc_RNA (1)...(19): siRNA sense strand
caucggagauugcagauuc

SEQ ID NO: 1127622 - RNA, 19 nt, Homo sapiens
  misc_RNA (1)...(19): siRNA sense strand
ugaagcagauuuagugaga

SEQ ID NO: 1127623 - RNA, 19 nt, Homo sapiens
  misc_RNA (1)...(19): siRNA sense strand
gaaagugaacaugguauaa

SEQ ID NO: 1127624 - RNA, 19 nt, Homo sapiens
  misc_RNA (1)...(19): siRNA sense strand
agagcagacucaaguaaua

SEQ ID NO: 1127625 - RNA, 19 nt, Homo sapiens
  misc_RNA (1)...(19): siRNA sense strand
gguagaagaaggagcuuua

SEQ ID NO: 1127626 - RNA, 19 nt, Homo sapiens
  misc_RNA (1)...(19): siRNA sense strand
ccaggagucuaccaaauga

SEQ ID NO: 1127627 - RNA, 19 nt, Homo sapiens
  misc_RNA (1)...(19): siRNA sense strand
gaacgucuuacaagccuua

SEQ ID NO: 1127628 - RNA, 19 nt, Homo sapiens
  misc_RNA (1)...(19): siRNA sense strand
ugacuuguaugguaucuga

SEQ ID NO: 1127629 - RNA, 19 nt, Homo sapiens
  misc_RNA (1)...(19): siRNA sense strand
caaagauucuggauuccuu

SEQ ID NO: 1127630 - RNA, 19 nt, Homo sapiens
  misc_RNA (1)...(19): siRNA sense strand
uguagagucugcaguagua

SEQ ID NO: 1127631 - RNA, 19 nt, Homo sapiens
  misc_RNA (1)...(19): siRNA sense strand
gcugaucgaucuaugaugu

SEQ ID NO: 1127632 - RNA, 19 nt, Homo sapiens
  misc_RNA (1)...(19): siRNA sense strand
caucaaagaucauguuggu

SEQ ID NO: 1127633 - RNA, 19 nt, Homo sapiens
  misc_RNA (1)...(19): siRNA sense strand
caucagagccuccuguuau

SEQ ID NO: 1127634 - RNA, 19 nt, Homo sapiens
  misc_RNA (1)...(19): siRNA sense strand
gaagaagguuuagcagauc

SEQ ID NO: 1127635 - RNA, 19 nt, Homo sapiens
  misc_RNA (1)...(19): siRNA sense strand
gaaaggaauuaaucuaucc

SEQ ID NO: 1127636 - RNA, 19 nt, Homo sapiens
  misc_RNA (1)...(19): siRNA sense strand
ccaagcacaucaacaacaa

SEQ ID NO: 1127637 - RNA, 19 nt, Homo sapiens
  misc_RNA (1)...(19): siRNA sense strand
uaugaacgcuccaugaugu

SEQ ID NO: 1127638 - RNA, 19 nt, Homo sapiens
  misc_RNA (1)...(19): siRNA sense strand
uaugaacgcuccaugaugu

SEQ ID NO: 1127639 - RNA, 19 nt, Homo sapiens
  misc_RNA (1)...(19): siRNA sense strand
cgacagcagugccugaguu

SEQ ID NO: 1127640 - RNA, 19 nt, Homo sapiens
  misc_RNA (1)...(19): siRNA sense strand
agaagaagguuuagcagau

SEQ ID NO: 1127641 - RNA, 19 nt, Homo sapiens
  misc_RNA (1)...(19): siRNA sense strand
cgacgaaggucuagaucug

SEQ ID NO: 1127642 - RNA, 19 nt, Homo sapiens
  misc_RNA (1)...(19): siRNA sense strand
ccuuagagcuggcauugaa

SEQ ID NO: 1127643 - RNA, 19 nt, Homo sapiens
  misc_RNA (1)...(19): siRNA sense strand
gaaaguaguggaggagaaa

SEQ ID NO: 1127644 - RNA, 19 nt, Homo sapiens
  misc_RNA (1)...(19): siRNA sense strand
gcucagcccuaaagaaagu

SEQ ID NO: 1127645 - RNA, 19 nt, Homo sapiens
  misc_RNA (1)...(19): siRNA sense strand
gcuccaugaugucagcuua

SEQ ID NO: 1127646 - RNA, 19 nt, Homo sapiens
  misc_RNA (1)...(19): siRNA sense strand
caacgauggugcuggaguu

SEQ ID NO: 1127647 - RNA, 19 nt, Homo sapiens
  misc_RNA (1)...(19): siRNA sense strand
gauacagaacuacgauaua

SEQ ID NO: 1127648 - RNA, 19 nt, Homo sapiens
  misc_RNA (1)...(19): siRNA sense strand
agaacacccuuaagaagaa

SEQ ID NO: 1127649 - RNA, 19 nt, Homo sapiens
  misc_RNA (1)...(19): siRNA sense strand
uagugaagcugacauugaa

SEQ ID NO: 1127650 - RNA, 19 nt, Homo sapiens
  misc_RNA (1)...(19): siRNA sense strand
cugaugaaauucccacuaa

SEQ ID NO: 1127651 - RNA, 19 nt, Homo sapiens
  misc_RNA (1)...(19): siRNA sense strand
ugaaagagggcuccagaaa

SEQ ID NO: 1127652 - RNA, 19 nt, Homo sapiens
  misc_RNA (1)...(19): siRNA sense strand
ggauaguguuuauggagaa

SEQ ID NO: 1127653 - RNA, 19 nt, Homo sapiens
  misc_RNA (1)...(19): siRNA sense strand
guaaagaagaugaugaugu

SEQ ID NO: 1127654 - RNA, 19 nt, Homo sapiens
  misc_RNA (1)...(19): siRNA sense strand
uaaugcagcugccaugugu

SEQ ID NO: 1127655 - RNA, 19 nt, Homo sapiens
  misc_RNA (1)...(19): siRNA sense strand
agaucaagcuccagggaua

SEQ ID NO: 1127656 - RNA, 19 nt, Homo sapiens
  misc_RNA (1)...(19): siRNA sense strand
ugaaacaaauacacccauu

SEQ ID NO: 1127657 - RNA, 19 nt, Homo sapiens
  misc_RNA (1)...(19): siRNA sense strand
aaacaaauacacccauuga

SEQ ID NO: 1127658 - RNA, 19 nt, Homo sapiens
  misc_RNA (1)...(19): siRNA sense strand
gcagcugaccgaucuauga

SEQ ID NO: 1127659 - RNA, 19 nt, Homo sapiens
  misc_RNA (1)...(19): siRNA sense strand
ccagagccaucaaagauca

SEQ ID NO: 1127660 - RNA, 19 nt, Homo sapiens
  misc_RNA (1)...(19): siRNA sense strand
ggaugaagaggaagaagaa

SEQ ID NO: 1127661 - RNA, 19 nt, Homo sapiens
  misc_RNA (1)...(19): siRNA sense strand
aggaggagcuacuauagaa

SEQ ID NO: 1127662 - RNA, 19 nt, Homo sapiens
  misc_RNA (1)...(19): siRNA sense strand
gaagaucuguaucaaaaga

SEQ ID NO: 1127663 - RNA, 19 nt, Homo sapiens
  misc_RNA (1)...(19): siRNA sense strand
guaaguaguaugccagaaa

SEQ ID NO: 1127664 - RNA, 19 nt, Homo sapiens
  misc_RNA (1)...(19): siRNA sense strand
gaaacaaauacacccauug

SEQ ID NO: 1127665 - RNA, 19 nt, Homo sapiens
  misc_RNA (1)...(19): siRNA sense strand
ggucuuucguggucaguaa

SEQ ID NO: 1127666 - RNA, 19 nt, Homo sapiens
  misc_RNA (1)...(19): siRNA sense strand
caaugucaguggaguauca

SEQ ID NO: 1127667 - RNA, 19 nt, Homo sapiens
  misc_RNA (1)...(19): siRNA sense strand
agagacagcagaaacauuu

SEQ ID NO: 1127668 - RNA, 19 nt, Homo sapiens
  misc_RNA (1)...(19): siRNA sense strand
gagccaagcacaucaacaa

SEQ ID NO: 1127669 - RNA, 19 nt, Homo sapiens
  misc_RNA (1)...(19): siRNA sense strand
ucaagaacacccuuaagaa

SEQ ID NO: 1127670 - RNA, 19 nt, Homo sapiens
  misc_RNA (1)...(19): siRNA sense strand
guagugaagcugacauuga

SEQ ID NO: 1127671 - RNA, 19 nt, Homo sapiens
  misc_RNA (1)...(19): siRNA sense strand
gcugaucguucaaugaugu

SEQ ID NO: 1127672 - RNA, 19 nt, Homo sapiens
  misc_RNA (1)...(19): siRNA sense strand
gaaauagugcagaagauag

SEQ ID NO: 1127673 - RNA, 19 nt, Homo sapiens
  misc_RNA (1)...(19): siRNA sense strand
gcauuuggcccaucugaga

SEQ ID NO: 1127674 - RNA, 19 nt, Homo sapiens
  misc_RNA (1)...(19): siRNA sense strand
guuaacaccuguagagucu

SEQ ID NO: 1127675 - RNA, 19 nt, Homo sapiens
  misc_RNA (1)...(19): siRNA sense strand
caaagaucauguugguaga

SEQ ID NO: 1127676 - RNA, 19 nt, Homo sapiens
  misc_RNA (1)...(19): siRNA sense strand
gcugaauggugaaacaaau

SEQ ID NO: 1127677 - RNA, 19 nt, Homo sapiens
  misc_RNA (1)...(19): siRNA sense strand
ugaagucugugcugaaauc

SEQ ID NO: 1127678 - RNA, 19 nt, Homo sapiens
  misc_RNA (1)...(19): siRNA sense strand
ggacauggaacgucuuaca

SEQ ID NO: 1127679 - RNA, 19 nt, Homo sapiens
  misc_RNA (1)...(19): siRNA sense strand
aaagagacacugccugauu

SEQ ID NO: 1127680 - RNA, 19 nt, Homo sapiens
  misc_RNA (1)...(19): siRNA sense strand
cagcaucuacucucaguuu

SEQ ID NO: 1127681 - RNA, 19 nt, Homo sapiens
  misc_RNA (1)...(19): siRNA sense strand
gcagaaacauuugauucca

SEQ ID NO: 1127682 - RNA, 19 nt, Homo sapiens
  misc_RNA (1)...(19): siRNA sense strand
cagaaacccuugugguauc

SEQ ID NO: 1127683 - RNA, 19 nt, Homo sapiens
  misc_RNA (1)...(19): siRNA sense strand
caucacauguuaugaaagg

SEQ ID NO: 1127684 - RNA, 19 nt, Homo sapiens
  misc_RNA (1)...(19): siRNA sense strand
gaaggagcuuuagcauuuc

SEQ ID NO: 1127685 - RNA, 19 nt, Homo sapiens
  misc_RNA (1)...(19): siRNA sense strand
aagcacagauccaagucua

SEQ ID NO: 1127686 - RNA, 19 nt, Homo sapiens
  misc_RNA (1)...(19): siRNA sense strand
uaaugaagcagauuuagug

SEQ ID NO: 1127687 - RNA, 19 nt, Homo sapiens
  misc_RNA (1)...(19): siRNA sense strand
gaacuaguaaggguauuga

SEQ ID NO: 1127688 - RNA, 19 nt, Homo sapiens
  misc_RNA (1)...(19): siRNA sense strand
cuaaagagauggaacauaa

SEQ ID NO: 1127689 - RNA, 19 nt, Homo sapiens
  misc_RNA (1)...(19): siRNA sense strand
agaaggagcuuuagcauuu

SEQ ID NO: 1127690 - RNA, 19 nt, Homo sapiens
  misc_RNA (1)...(19): siRNA sense strand
gcuagaaccuccuguagua

SEQ ID NO: 1127691 - RNA, 19 nt, Homo sapiens
  misc_RNA (1)...(19): siRNA sense strand
ggaaauuggugaagagaaa

SEQ ID NO: 1127692 - RNA, 19 nt, Homo sapiens
  misc_RNA (1)...(19): siRNA sense strand
gagccagaaucuucaauua

SEQ ID NO: 1127693 - RNA, 19 nt, Homo sapiens
  misc_RNA (1)...(19): siRNA sense strand
ggauaaggcucaauuacuu

SEQ ID NO: 1127694 - RNA, 19 nt, Homo sapiens
  misc_RNA (1)...(19): siRNA sense strand
caacugagguggcuauaga

SEQ ID NO: 1127695 - RNA, 19 nt, Homo sapiens
  misc_RNA (1)...(19): siRNA sense strand
ugacaaagauucuggauuc

SEQ ID NO: 1127696 - RNA, 19 nt, Homo sapiens
  misc_RNA (1)...(19): siRNA sense strand
cgacagcgcuggaauccua

SEQ ID NO: 1127697 - RNA, 19 nt, Homo sapiens
  misc_RNA (1)...(19): siRNA sense strand
gcgcuggaauccuauaaua

SEQ ID NO: 1127698 - RNA, 19 nt, Homo sapiens
  misc_RNA (1)...(19): siRNA sense strand
ggucuuagauacagaacua

SEQ ID NO: 1127699 - RNA, 19 nt, Homo sapiens
  misc_RNA (1)...(19): siRNA sense strand
gaagauagaggaaguacuu

SEQ ID NO: 1127700 - RNA, 19 nt, Homo sapiens
  misc_RNA (1)...(19): siRNA sense strand
gaaguaagcguuccaaauc

SEQ ID NO: 1127701 - RNA, 19 nt, Homo sapiens
  misc_RNA (1)...(19): siRNA sense strand
ucauuaagaucucgaagua

SEQ ID NO: 1127702 - RNA, 19 nt, Homo sapiens
  misc_RNA (1)...(19): siRNA sense strand
aaacagauccuacugauga

SEQ ID NO: 1127703 - RNA, 19 nt, Homo sapiens
  misc_RNA (1)...(19): siRNA sense strand
ggaagaagaucuguaucaa

SEQ ID NO: 1127704 - RNA, 19 nt, Homo sapiens
  misc_RNA (1)...(19): siRNA sense strand
ggauacagaagaaccauua

SEQ ID NO: 1127705 - RNA, 19 nt, Homo sapiens
  misc_RNA (1)...(19): siRNA sense strand
agaaagagcuucagagucu

SEQ ID NO: 1127706 - RNA, 19 nt, Homo sapiens
  misc_RNA (1)...(19): siRNA sense strand
gcucuaugaugucagcuua

SEQ ID NO: 1127707 - RNA, 19 nt, Homo sapiens
  misc_RNA (1)...(19): siRNA sense strand
ggagaucucuguucagucu

SEQ ID NO: 1127708 - RNA, 19 nt, Homo sapiens
  misc_RNA (1)...(19): siRNA sense strand
caucaucccuuuaaacuca

SEQ ID NO: 1127709 - RNA, 19 nt, Homo sapiens
  misc_RNA (1)...(19): siRNA sense strand
agacgaagcuucaguaucu

SEQ ID NO: 1127710 - RNA, 19 nt, Homo sapiens
  misc_RNA (1)...(19): siRNA sense strand
gcugaacgcucuaugaugu

SEQ ID NO: 1127711 - RNA, 19 nt, Homo sapiens
  misc_RNA (1)...(19): siRNA sense strand
gcucuaugaugucuuauga

SEQ ID NO: 1127712 - RNA, 19 nt, Homo sapiens
  misc_RNA (1)...(19): siRNA sense strand
gaagaaauagugcagaaga

SEQ ID NO: 1127713 - RNA, 19 nt, Homo sapiens
  misc_RNA (1)...(19): siRNA sense strand
caaaucuucugaacacaaa

SEQ ID NO: 1127714 - RNA, 19 nt, Homo sapiens
  misc_RNA (1)...(19): siRNA sense strand
gauauaagccagacuugaa

SEQ ID NO: 1127715 - RNA, 19 nt, Homo sapiens
  misc_RNA (1)...(19): siRNA sense strand
gaaacucuaucuucuacug

SEQ ID NO: 1127716 - RNA, 19 nt, Homo sapiens
  misc_RNA (1)...(19): siRNA sense strand
gaugaagucugugcugaaa

SEQ ID NO: 1127717 - RNA, 19 nt, Homo sapiens
  misc_RNA (1)...(19): siRNA sense strand
gaagucaucugagccaguu

SEQ ID NO: 1127718 - RNA, 19 nt, Homo sapiens
  misc_RNA (1)...(19): siRNA sense strand
gcugagcgcucuaugaugu

SEQ ID NO: 1127719 - RNA, 19 nt, Homo sapiens
  misc_RNA (1)...(19): siRNA sense strand
aaacagaucgcacagagua

SEQ ID NO: 1127720 - RNA, 19 nt, Homo sapiens
  misc_RNA (1)...(19): siRNA sense strand
gaagaagaucuguaucaaa

SEQ ID NO: 1127721 - RNA, 19 nt, Homo sapiens
  misc_RNA (1)...(19): siRNA sense strand
caucggagauugcagauuc

SEQ ID NO: 1127722 - RNA, 19 nt, Homo sapiens
  misc_RNA (1)...(19): siRNA sense strand
ugaagcagauuuagugaga

SEQ ID NO: 1127723 - RNA, 19 nt, Homo sapiens
  misc_RNA (1)...(19): siRNA sense strand
gaaagugaacaugguauaa

SEQ ID NO: 1127724 - RNA, 19 nt, Homo sapiens
  misc_RNA (1)...(19): siRNA sense strand
agagcagacucaaguaaua

SEQ ID NO: 1127725 - RNA, 19 nt, Homo sapiens
  misc_RNA (1)...(19): siRNA sense strand
gguagaagaaggagcuuua

SEQ ID NO: 1127726 - RNA, 19 nt, Homo sapiens
  misc_RNA (1)...(19): siRNA sense strand
ccaggagucuaccaaauga

SEQ ID NO: 1127727 - RNA, 19 nt, Homo sapiens
  misc_RNA (1)...(19): siRNA sense strand
gaacgucuuacaagccuua

SEQ ID NO: 1127728 - RNA, 19 nt, Homo sapiens
  misc_RNA (1)...(19): siRNA sense strand
ugacuuguaugguaucuga

SEQ ID NO: 1127729 - RNA, 19 nt, Homo sapiens
  misc_RNA (1)...(19): siRNA sense strand
caaagauucuggauuccuu

SEQ ID NO: 1127730 - RNA, 19 nt, Homo sapiens
  misc_RNA (1)...(19): siRNA sense strand
uguagagucugcaguagua

SEQ ID NO: 1127731 - RNA, 19 nt, Homo sapiens
  misc_RNA (1)...(19): siRNA sense strand
gcugaucgaucuaugaugu

SEQ ID NO: 1127732 - RNA, 19 nt, Homo sapiens
  misc_RNA (1)...(19): siRNA sense strand
caucaaagaucauguuggu

SEQ ID NO: 1127733 - RNA, 19 nt, Homo sapiens
  misc_RNA (1)...(19): siRNA sense strand
caucagagccuccuguuau

SEQ ID NO: 1127734 - RNA, 19 nt, Homo sapiens
  misc_RNA (1)...(19): siRNA sense strand
gaagaagguuuagcagauc

SEQ ID NO: 1127735 - RNA, 19 nt, Homo sapiens
  misc_RNA (1)...(19): siRNA sense strand
gaaaggaauuaaucuaucc

SEQ ID NO: 1127736 - RNA, 19 nt, Homo sapiens
  misc_RNA (1)...(19): siRNA sense strand
ccaagcacaucaacaacaa

SEQ ID NO: 1127737 - RNA, 19 nt, Homo sapiens
  misc_RNA (1)...(19): siRNA sense strand
uaugaacgcuccaugaugu

SEQ ID NO: 1127738 - RNA, 19 nt, Homo sapiens
  misc_RNA (1)...(19): siRNA sense strand
uaugaacgcuccaugaugu

SEQ ID NO: 1127739 - RNA, 19 nt, Homo sapiens
  misc_RNA (1)...(19): siRNA sense strand
cgacagcagugccugaguu

SEQ ID NO: 1127740 - RNA, 19 nt, Homo sapiens
  misc_RNA (1)...(19): siRNA sense strand
agaagaagguuuagcagau

SEQ ID NO: 1127741 - RNA, 19 nt, Homo sapiens
  misc_RNA (1)...(19): siRNA sense strand
cgacgaaggucuagaucug

SEQ ID NO: 1127742 - RNA, 19 nt, Homo sapiens
  misc_RNA (1)...(19): siRNA sense strand
ccuuagagcuggcauugaa

SEQ ID NO: 1127743 - RNA, 19 nt, Homo sapiens
  misc_RNA (1)...(19): siRNA sense strand
gaaaguaguggaggagaaa

SEQ ID NO: 1127744 - RNA, 19 nt, Homo sapiens
  misc_RNA (1)...(19): siRNA sense strand
gcucagcccuaaagaaagu

SEQ ID NO: 1127745 - RNA, 19 nt, Homo sapiens
  misc_RNA (1)...(19): siRNA sense strand
gcuccaugaugucagcuua

SEQ ID NO: 1127746 - RNA, 19 nt, Homo sapiens
  misc_RNA (1)...(19): siRNA sense strand
caacgauggugcuggaguu

SEQ ID NO: 1127747 - RNA, 19 nt, Homo sapiens
  misc_RNA (1)...(19): siRNA sense strand
gauacagaacuacgauaua

SEQ ID NO: 1127748 - RNA, 19 nt, Homo sapiens
  misc_RNA (1)...(19): siRNA sense strand
agaacacccuuaagaagaa

SEQ ID NO: 1127749 - RNA, 19 nt, Homo sapiens
  misc_RNA (1)...(19): siRNA sense strand
uagugaagcugacauugaa

SEQ ID NO: 1127750 - RNA, 19 nt, Homo sapiens
  misc_RNA (1)...(19): siRNA sense strand
cugaugaaauucccacuaa

SEQ ID NO: 1127751 - RNA, 19 nt, Homo sapiens
  misc_RNA (1)...(19): siRNA sense strand
ugaaagagggcuccagaaa

SEQ ID NO: 1127752 - RNA, 19 nt, Homo sapiens
  misc_RNA (1)...(19): siRNA sense strand
ggauaguguuuauggagaa

SEQ ID NO: 1127753 - RNA, 19 nt, Homo sapiens
  misc_RNA (1)...(19): siRNA sense strand
uaaugcagcugccaugugu

SEQ ID NO: 1127754 - RNA, 19 nt, Homo sapiens
  misc_RNA (1)...(19): siRNA sense strand
agaucaagcuccagggaua

SEQ ID NO: 1127755 - RNA, 19 nt, Homo sapiens
  misc_RNA (1)...(19): siRNA sense strand
ugaaacaaauacacccauu

SEQ ID NO: 1127756 - RNA, 19 nt, Homo sapiens
  misc_RNA (1)...(19): siRNA sense strand
aaacaaauacacccauuga

SEQ ID NO: 1127757 - RNA, 19 nt, Homo sapiens
  misc_RNA (1)...(19): siRNA sense strand
gcagcugaccgaucuauga

SEQ ID NO: 1127758 - RNA, 19 nt, Homo sapiens
  misc_RNA (1)...(19): siRNA sense strand
ccagagccaucaaagauca

SEQ ID NO: 1127759 - RNA, 19 nt, Homo sapiens
  misc_RNA (1)...(19): siRNA sense strand
ggaugaagaggaagaagaa

SEQ ID NO: 1127760 - RNA, 19 nt, Homo sapiens
  misc_RNA (1)...(19): siRNA sense strand
aggaggagcuacuauagaa

SEQ ID NO: 1127761 - RNA, 19 nt, Homo sapiens
  misc_RNA (1)...(19): siRNA sense strand
gaagaucuguaucaaaaga

SEQ ID NO: 1127762 - RNA, 19 nt, Homo sapiens
  misc_RNA (1)...(19): siRNA sense strand
guaaguaguaugccagaaa

SEQ ID NO: 1127763 - RNA, 19 nt, Homo sapiens
  misc_RNA (1)...(19): siRNA sense strand
gaaacaaauacacccauug

SEQ ID NO: 1127764 - RNA, 19 nt, Homo sapiens
  misc_RNA (1)...(19): siRNA sense strand
ggucuuucguggucaguaa

SEQ ID NO: 1127765 - RNA, 19 nt, Homo sapiens
  misc_RNA (1)...(19): siRNA sense strand
caaugucaguggaguauca

SEQ ID NO: 1127766 - RNA, 19 nt, Homo sapiens
  misc_RNA (1)...(19): siRNA sense strand
agagacagcagaaacauuu

SEQ ID NO: 1127767 - RNA, 19 nt, Homo sapiens
  misc_RNA (1)...(19): siRNA sense strand
gaaauagugcagaagauag

SEQ ID NO: 1127768 - RNA, 19 nt, Homo sapiens
  misc_RNA (1)...(19): siRNA sense strand
ucaagaacacccuuaagaa

SEQ ID NO: 1127769 - RNA, 19 nt, Homo sapiens
  misc_RNA (1)...(19): siRNA sense strand
guagugaagcugacauuga

SEQ ID NO: 1127770 - RNA, 19 nt, Homo sapiens
  misc_RNA (1)...(19): siRNA sense strand
gcugaucguucaaugaugu

SEQ ID NO: 1127771 - RNA, 19 nt, Homo sapiens
  misc_RNA (1)...(19): siRNA sense strand
gagccaagcacaucaacaa

SEQ ID NO: 1127772 - RNA, 19 nt, Homo sapiens
  misc_RNA (1)...(19): siRNA sense strand
gcauuuggcccaucugaga

SEQ ID NO: 1127773 - RNA, 19 nt, Homo sapiens
  misc_RNA (1)...(19): siRNA sense strand
guuaacaccuguagagucu

SEQ ID NO: 1127774 - RNA, 19 nt, Homo sapiens
  misc_RNA (1)...(19): siRNA sense strand
caaagaucauguugguaga

SEQ ID NO: 1127775 - RNA, 19 nt, Homo sapiens
  misc_RNA (1)...(19): siRNA sense strand
gcugaauggugaaacaaau

SEQ ID NO: 1127776 - RNA, 19 nt, Homo sapiens
  misc_RNA (1)...(19): siRNA sense strand
ugaagucugugcugaaauc

SEQ ID NO: 1127777 - RNA, 19 nt, Homo sapiens
  misc_RNA (1)...(19): siRNA sense strand
ggacauggaacgucuuaca

SEQ ID NO: 1127778 - RNA, 19 nt, Homo sapiens
  misc_RNA (1)...(19): siRNA sense strand
aaagagacacugccugauu

SEQ ID NO: 1127779 - RNA, 19 nt, Homo sapiens
  misc_RNA (1)...(19): siRNA sense strand
cagcaucuacucucaguuu

SEQ ID NO: 1127780 - RNA, 19 nt, Homo sapiens
  misc_RNA (1)...(19): siRNA sense strand
gcagaaacauuugauucca

SEQ ID NO: 1127781 - RNA, 19 nt, Homo sapiens
  misc_RNA (1)...(19): siRNA sense strand
cagaaacccuugugguauc

SEQ ID NO: 1127782 - RNA, 19 nt, Homo sapiens
  misc_RNA (1)...(19): siRNA sense strand
gaaccauccaugacaaaga

SEQ ID NO: 1127783 - RNA, 19 nt, Homo sapiens
  misc_RNA (1)...(19): siRNA sense strand
gaaggagcuuuagcauuuc

SEQ ID NO: 1127784 - RNA, 19 nt, Homo sapiens
  misc_RNA (1)...(19): siRNA sense strand
aagcacagauccaagucua

SEQ ID NO: 1127785 - RNA, 19 nt, Homo sapiens
  misc_RNA (1)...(19): siRNA sense strand
uaaugaagcagauuuagug

SEQ ID NO: 1127786 - RNA, 19 nt, Homo sapiens
  misc_RNA (1)...(19): siRNA sense strand
gaacuaguaaggguauuga

SEQ ID NO: 1127787 - RNA, 19 nt, Homo sapiens
  misc_RNA (1)...(19): siRNA sense strand
caucacauguuaugaaagg

SEQ ID NO: 1127788 - RNA, 19 nt, Homo sapiens
  misc_RNA (1)...(19): siRNA sense strand
cuaaagagauggaacauaa

SEQ ID NO: 1127789 - RNA, 19 nt, Homo sapiens
  misc_RNA (1)...(19): siRNA sense strand
agaaggagcuuuagcauuu

SEQ ID NO: 1127790 - RNA, 19 nt, Homo sapiens
  misc_RNA (1)...(19): siRNA sense strand
gcuagaaccuccuguagua

SEQ ID NO: 1127791 - RNA, 19 nt, Homo sapiens
  misc_RNA (1)...(19): siRNA sense strand
ggaaauuggugaagagaaa

SEQ ID NO: 1127792 - RNA, 19 nt, Homo sapiens
  misc_RNA (1)...(19): siRNA sense strand
gagccagaaucuucaauua

SEQ ID NO: 1127793 - RNA, 19 nt, Homo sapiens
  misc_RNA (1)...(19): siRNA sense strand
ggauaaggcucaauuacuu

SEQ ID NO: 1127794 - RNA, 19 nt, Homo sapiens
  misc_RNA (1)...(19): siRNA sense strand
caacugagguggcuauaga

SEQ ID NO: 1127795 - RNA, 19 nt, Homo sapiens
  misc_RNA (1)...(19): siRNA sense strand
ugacaaagauucuggauuc

SEQ ID NO: 1127796 - RNA, 19 nt, Homo sapiens
  misc_RNA (1)...(19): siRNA sense strand
cgacagcgcuggaauccua

SEQ ID NO: 1127797 - RNA, 19 nt, Homo sapiens
  misc_RNA (1)...(19): siRNA sense strand
gcgcuggaauccuauaaua

SEQ ID NO: 1127798 - RNA, 19 nt, Homo sapiens
  misc_RNA (1)...(19): siRNA sense strand
ggucuuagauacagaacua

SEQ ID NO: 1127799 - RNA, 19 nt, Homo sapiens
  misc_RNA (1)...(19): siRNA sense strand
gaagauagaggaaguacuu

SEQ ID NO: 1127800 - RNA, 19 nt, Homo sapiens
  misc_RNA (1)...(19): siRNA sense strand
gaaguaagcguuccaaauc

SEQ ID NO: 1127801 - RNA, 19 nt, Homo sapiens
  misc_RNA (1)...(19): siRNA sense strand
ucauuaagaucucgaagua

SEQ ID NO: 1127802 - RNA, 19 nt, Homo sapiens
  misc_RNA (1)...(19): siRNA sense strand
aaacagauccuacugauga

SEQ ID NO: 1127803 - RNA, 19 nt, Homo sapiens
  misc_RNA (1)...(19): siRNA sense strand
ggaagaagaucuguaucaa

SEQ ID NO: 1127804 - RNA, 19 nt, Homo sapiens
  misc_RNA (1)...(19): siRNA sense strand
ggauacagaagaaccauua

SEQ ID NO: 1127805 - RNA, 19 nt, Homo sapiens
  misc_RNA (1)...(19): siRNA sense strand
agaaagagcuucagagucu

SEQ ID NO: 1127806 - RNA, 19 nt, Homo sapiens
  misc_RNA (1)...(19): siRNA sense strand
gcucuaugaugucagcuua

SEQ ID NO: 1127807 - RNA, 19 nt, Homo sapiens
  misc_RNA (1)...(19): siRNA sense strand
ggagaucucuguucagucu

SEQ ID NO: 1127808 - RNA, 19 nt, Homo sapiens
  misc_RNA (1)...(19): siRNA sense strand
agacgaagcuucaguaucu

SEQ ID NO: 1127809 - RNA, 19 nt, Homo sapiens
  misc_RNA (1)...(19): siRNA sense strand
gcugaacgcucuaugaugu

SEQ ID NO: 1127810 - RNA, 19 nt, Homo sapiens
  misc_RNA (1)...(19): siRNA sense strand
gcucuaugaugucuuauga

SEQ ID NO: 1127811 - RNA, 19 nt, Homo sapiens
  misc_RNA (1)...(19): siRNA sense strand
gaagaaauagugcagaaga

SEQ ID NO: 1127812 - RNA, 19 nt, Homo sapiens
  misc_RNA (1)...(19): siRNA sense strand
caaaucuucugaacacaaa

SEQ ID NO: 1127813 - RNA, 19 nt, Homo sapiens
  misc_RNA (1)...(19): siRNA sense strand
gauauaagccagacuugaa

SEQ ID NO: 1127814 - RNA, 19 nt, Homo sapiens
  misc_RNA (1)...(19): siRNA sense strand
gaaacucuaucuucuacug

SEQ ID NO: 1127815 - RNA, 19 nt, Homo sapiens
  misc_RNA (1)...(19): siRNA sense strand
gaugaagucugugcugaaa

SEQ ID NO: 1127816 - RNA, 19 nt, Homo sapiens
  misc_RNA (1)...(19): siRNA sense strand
gaagucaucugagccaguu

SEQ ID NO: 1127817 - RNA, 19 nt, Homo sapiens
  misc_RNA (1)...(19): siRNA sense strand
gcugagcgcucuaugaugu

SEQ ID NO: 1127818 - RNA, 19 nt, Homo sapiens
  misc_RNA (1)...(19): siRNA sense strand
gaagaagaucuguaucaaa

SEQ ID NO: 1127819 - RNA, 19 nt, Homo sapiens
  misc_RNA (1)...(19): siRNA sense strand
caucggagauugcagauuc

SEQ ID NO: 1127820 - RNA, 19 nt, Homo sapiens
  misc_RNA (1)...(19): siRNA sense strand
ugaagcagauuuagugaga

SEQ ID NO: 1127821 - RNA, 19 nt, Homo sapiens
  misc_RNA (1)...(19): siRNA sense strand
gaaagugaacaugguauaa

SEQ ID NO: 1127822 - RNA, 19 nt, Homo sapiens
  misc_RNA (1)...(19): siRNA sense strand
agagcagacucaaguaaua

SEQ ID NO: 1127823 - RNA, 19 nt, Homo sapiens
  misc_RNA (1)...(19): siRNA sense strand
gguagaagaaggagcuuua

SEQ ID NO: 1127824 - RNA, 19 nt, Homo sapiens
  misc_RNA (1)...(19): siRNA sense strand
ccaggagucuaccaaauga

SEQ ID NO: 1127825 - RNA, 19 nt, Homo sapiens
  misc_RNA (1)...(19): siRNA sense strand
gaacgucuuacaagccuua

SEQ ID NO: 1127826 - RNA, 19 nt, Homo sapiens
  misc_RNA (1)...(19): siRNA sense strand
ugacuuguaugguaucuga

SEQ ID NO: 1127827 - RNA, 19 nt, Homo sapiens
  misc_RNA (1)...(19): siRNA sense strand
caaagauucuggauuccuu

SEQ ID NO: 1127828 - RNA, 19 nt, Homo sapiens
  misc_RNA (1)...(19): siRNA sense strand
uguagagucugcaguagua

SEQ ID NO: 1127829 - RNA, 19 nt, Homo sapiens
  misc_RNA (1)...(19): siRNA sense strand
gcugaucgaucuaugaugu

SEQ ID NO: 1127830 - RNA, 19 nt, Homo sapiens
  misc_RNA (1)...(19): siRNA sense strand
caucaaagaucauguuggu

SEQ ID NO: 1127831 - RNA, 19 nt, Homo sapiens
  misc_RNA (1)...(19): siRNA sense strand
caucagagccuccuguuau

SEQ ID NO: 1127832 - RNA, 19 nt, Homo sapiens
  misc_RNA (1)...(19): siRNA sense strand
gaagaagguuuagcagauc

SEQ ID NO: 1127833 - RNA, 19 nt, Homo sapiens
  misc_RNA (1)...(19): siRNA sense strand
gaaaggaauuaaucuaucc

SEQ ID NO: 1127834 - RNA, 19 nt, Homo sapiens
  misc_RNA (1)...(19): siRNA sense strand
ccaagcacaucaacaacaa

SEQ ID NO: 1127835 - RNA, 19 nt, Homo sapiens
  misc_RNA (1)...(19): siRNA sense strand
uaugaacgcuccaugaugu

SEQ ID NO: 1127836 - RNA, 19 nt, Homo sapiens
  misc_RNA (1)...(19): siRNA sense strand
uaugaacgcuccaugaugu

SEQ ID NO: 1127837 - RNA, 19 nt, Homo sapiens
  misc_RNA (1)...(19): siRNA sense strand
cgacagcagugccugaguu

SEQ ID NO: 1127838 - RNA, 19 nt, Homo sapiens
  misc_RNA (1)...(19): siRNA sense strand
agaagaagguuuagcagau

SEQ ID NO: 1127839 - RNA, 19 nt, Homo sapiens
  misc_RNA (1)...(19): siRNA sense strand
cgacgaaggucuagaucug

SEQ ID NO: 1127840 - RNA, 19 nt, Homo sapiens
  misc_RNA (1)...(19): siRNA sense strand
ccuuagagcuggcauugaa

SEQ ID NO: 1127841 - RNA, 19 nt, Homo sapiens
  misc_RNA (1)...(19): siRNA sense strand
gaaaguaguggaggagaaa

SEQ ID NO: 1127842 - RNA, 19 nt, Homo sapiens
  misc_RNA (1)...(19): siRNA sense strand
gcucagcccuaaagaaagu

SEQ ID NO: 1127843 - RNA, 19 nt, Homo sapiens
  misc_RNA (1)...(19): siRNA sense strand
gcuccaugaugucagcuua

SEQ ID NO: 1127844 - RNA, 19 nt, Homo sapiens
  misc_RNA (1)...(19): siRNA sense strand
caacgauggugcuggaguu

SEQ ID NO: 1127845 - RNA, 19 nt, Homo sapiens
  misc_RNA (1)...(19): siRNA sense strand
gauacagaacuacgauaua

SEQ ID NO: 1127846 - RNA, 19 nt, Homo sapiens
  misc_RNA (1)...(19): siRNA sense strand
agaacacccuuaagaagaa

SEQ ID NO: 1127847 - RNA, 19 nt, Homo sapiens
  misc_RNA (1)...(19): siRNA sense strand
uagugaagcugacauugaa

SEQ ID NO: 1127848 - RNA, 19 nt, Homo sapiens
  misc_RNA (1)...(19): siRNA sense strand
cugaugaaauucccacuaa

SEQ ID NO: 1127849 - RNA, 19 nt, Homo sapiens
  misc_RNA (1)...(19): siRNA sense strand
ugaaagagggcuccagaaa

SEQ ID NO: 1127850 - RNA, 19 nt, Homo sapiens
  misc_RNA (1)...(19): siRNA sense strand
uaaugcagcugccaugugu

SEQ ID NO: 1127851 - RNA, 19 nt, Homo sapiens
  misc_RNA (1)...(19): siRNA sense strand
aaacaaauacacccauuga

SEQ ID NO: 1127852 - RNA, 19 nt, Homo sapiens
  misc_RNA (1)...(19): siRNA sense strand
agaucaagcuccagggaua

SEQ ID NO: 1127853 - RNA, 19 nt, Homo sapiens
  misc_RNA (1)...(19): siRNA sense strand
ugaaacaaauacacccauu

SEQ ID NO: 1127854 - RNA, 19 nt, Homo sapiens
  misc_RNA (1)...(19): siRNA sense strand
gcagcugaccgaucuauga

SEQ ID NO: 1127855 - RNA, 19 nt, Homo sapiens
  misc_RNA (1)...(19): siRNA sense strand
ccagagccaucaaagauca

SEQ ID NO: 1127856 - RNA, 19 nt, Homo sapiens
  misc_RNA (1)...(19): siRNA sense strand
aggaggagcuacuauagaa

SEQ ID NO: 1127857 - RNA, 19 nt, Homo sapiens
  misc_RNA (1)...(19): siRNA sense strand
gaagaucuguaucaaaaga

SEQ ID NO: 1127858 - RNA, 19 nt, Homo sapiens
  misc_RNA (1)...(19): siRNA sense strand
guaaguaguaugccagaaa

SEQ ID NO: 1127859 - RNA, 19 nt, Homo sapiens
  misc_RNA (1)...(19): siRNA sense strand
ggucuuucguggucaguaa

SEQ ID NO: 1127860 - RNA, 19 nt, Homo sapiens
  misc_RNA (1)...(19): siRNA sense strand
gaaacaaauacacccauug

SEQ ID NO: 1127861 - RNA, 19 nt, Homo sapiens
  misc_RNA (1)...(19): siRNA sense strand
caaugucaguggaguauca

SEQ ID NO: 1127862 - RNA, 19 nt, Homo sapiens
  misc_RNA (1)...(19): siRNA sense strand
agagacagcagaaacauuu

SEQ ID NO: 1127863 - RNA, 19 nt, Homo sapiens
  misc_RNA (1)...(19): siRNA sense strand
gagccaagcacaucaacaa

SEQ ID NO: 1127864 - RNA, 19 nt, Homo sapiens
  misc_RNA (1)...(19): siRNA sense strand
ucaagaacacccuuaagaa

SEQ ID NO: 1127865 - RNA, 19 nt, Homo sapiens
  misc_RNA (1)...(19): siRNA sense strand
gaaauagugcagaagauag

SEQ ID NO: 1127866 - RNA, 19 nt, Homo sapiens
  misc_RNA (1)...(19): siRNA sense strand
guagugaagcugacauuga

SEQ ID NO: 1127867 - RNA, 19 nt, Homo sapiens
  misc_RNA (1)...(19): siRNA sense strand
gcugaucguucaaugaugu

SEQ ID NO: 1127868 - RNA, 19 nt, Homo sapiens
  misc_RNA (1)...(19): siRNA sense strand
gcugaauggugaaacaaau

SEQ ID NO: 1127869 - RNA, 19 nt, Homo sapiens
  misc_RNA (1)...(19): siRNA sense strand
guuaacaccuguagagucu

SEQ ID NO: 1127870 - RNA, 19 nt, Homo sapiens
  misc_RNA (1)...(19): siRNA sense strand
caaagaucauguugguaga

SEQ ID NO: 1127871 - RNA, 19 nt, Homo sapiens
  misc_RNA (1)...(19): siRNA sense strand
gcauuuggcccaucugaga

SEQ ID NO: 1127872 - RNA, 19 nt, Homo sapiens
  misc_RNA (1)...(19): siRNA sense strand
ugaagucugugcugaaauc

SEQ ID NO: 1127873 - RNA, 19 nt, Homo sapiens
  misc_RNA (1)...(19): siRNA sense strand
ggacauggaacgucuuaca

SEQ ID NO: 1127874 - RNA, 19 nt, Homo sapiens
  misc_RNA (1)...(19): siRNA sense strand
aaagagacacugccugauu

SEQ ID NO: 1127875 - RNA, 19 nt, Homo sapiens
  misc_RNA (1)...(19): siRNA sense strand
cagcaucuacucucaguuu

SEQ ID NO: 1127876 - RNA, 19 nt, Homo sapiens
  misc_RNA (1)...(19): siRNA sense strand
gcagaaacauuugauucca

SEQ ID NO: 1127877 - RNA, 19 nt, Homo sapiens
  misc_RNA (1)...(19): siRNA sense strand
cagaaacccuugugguauc

SEQ ID NO: 1127878 - RNA, 19 nt, Homo sapiens
  misc_RNA (1)...(19): siRNA sense strand
ccacacaucuuagaaacuc

SEQ ID NO: 1127879 - RNA, 19 nt, Homo sapiens
  misc_RNA (1)...(19): siRNA sense strand
gaaggagcuuuagcauuuc

SEQ ID NO: 1127880 - RNA, 19 nt, Homo sapiens
  misc_RNA (1)...(19): siRNA sense strand
aagcacagauccaagucua

SEQ ID NO: 1127881 - RNA, 19 nt, Homo sapiens
  misc_RNA (1)...(19): siRNA sense strand
uaaugaagcagauuuagug

SEQ ID NO: 1127882 - RNA, 19 nt, Homo sapiens
  misc_RNA (1)...(19): siRNA sense strand
gaacuaguaaggguauuga

SEQ ID NO: 1127883 - RNA, 19 nt, Homo sapiens
  misc_RNA (1)...(19): siRNA sense strand
caucacauguuaugaaagg

SEQ ID NO: 1127884 - RNA, 19 nt, Homo sapiens
  misc_RNA (1)...(19): siRNA sense strand
gaaccauccaugacaaaga

SEQ ID NO: 1127885 - RNA, 19 nt, Homo sapiens
  misc_RNA (1)...(19): siRNA sense strand
ccagaaccauccaugacaa

SEQ ID NO: 1127886 - RNA, 19 nt, Homo sapiens
  misc_RNA (1)...(19): siRNA sense strand
cuacaucaguaaucucaga

SEQ ID NO: 1127887 - RNA, 19 nt, Homo sapiens
  misc_RNA (1)...(19): siRNA sense strand
caagaacacccuuaagaag

SEQ ID NO: 1127888 - RNA, 19 nt, Homo sapiens
  misc_RNA (1)...(19): siRNA sense strand
cuaaagagauggaacauaa

SEQ ID NO: 1127889 - RNA, 19 nt, Homo sapiens
  misc_RNA (1)...(19): siRNA sense strand
agaaggagcuuuagcauuu

SEQ ID NO: 1127890 - RNA, 19 nt, Homo sapiens
  misc_RNA (1)...(19): siRNA sense strand
gcuagaaccuccuguagua

SEQ ID NO: 1127891 - RNA, 19 nt, Homo sapiens
  misc_RNA (1)...(19): siRNA sense strand
ggaaauuggugaagagaaa

SEQ ID NO: 1127892 - RNA, 19 nt, Homo sapiens
  misc_RNA (1)...(19): siRNA sense strand
gagccagaaucuucaauua

SEQ ID NO: 1127893 - RNA, 19 nt, Homo sapiens
  misc_RNA (1)...(19): siRNA sense strand
ggauaaggcucaauuacuu

SEQ ID NO: 1127894 - RNA, 19 nt, Homo sapiens
  misc_RNA (1)...(19): siRNA sense strand
caacugagguggcuauaga

SEQ ID NO: 1127895 - RNA, 19 nt, Homo sapiens
  misc_RNA (1)...(19): siRNA sense strand
ugacaaagauucuggauuc

SEQ ID NO: 1127896 - RNA, 19 nt, Homo sapiens
  misc_RNA (1)...(19): siRNA sense strand
cgacagcgcuggaauccua

SEQ ID NO: 1127897 - RNA, 19 nt, Homo sapiens
  misc_RNA (1)...(19): siRNA sense strand
gcgcuggaauccuauaaua

SEQ ID NO: 1127898 - RNA, 19 nt, Homo sapiens
  misc_RNA (1)...(19): siRNA sense strand
ggucuuagauacagaacua

SEQ ID NO: 1127899 - RNA, 19 nt, Homo sapiens
  misc_RNA (1)...(19): siRNA sense strand
gaagauagaggaaguacuu

SEQ ID NO: 1127900 - RNA, 19 nt, Homo sapiens
  misc_RNA (1)...(19): siRNA sense strand
gaaguaagcguuccaaauc

SEQ ID NO: 1127901 - RNA, 19 nt, Homo sapiens
  misc_RNA (1)...(19): siRNA sense strand
ucauuaagaucucgaagua

SEQ ID NO: 1127902 - RNA, 19 nt, Homo sapiens
  misc_RNA (1)...(19): siRNA sense strand
aaacagauccuacugauga

SEQ ID NO: 1127903 - RNA, 19 nt, Homo sapiens
  misc_RNA (1)...(19): siRNA sense strand
ggaagaagaucuguaucaa

SEQ ID NO: 1127904 - RNA, 19 nt, Homo sapiens
  misc_RNA (1)...(19): siRNA sense strand
ggauacagaagaaccauua

SEQ ID NO: 1127905 - RNA, 19 nt, Homo sapiens
  misc_RNA (1)...(19): siRNA sense strand
agaaagagcuucagagucu

SEQ ID NO: 1127906 - RNA, 19 nt, Homo sapiens
  misc_RNA (1)...(19): siRNA sense strand
gcucuaugaugucagcuua

SEQ ID NO: 1127907 - RNA, 19 nt, Homo sapiens
  misc_RNA (1)...(19): siRNA sense strand
ggagaucucuguucagucu

SEQ ID NO: 1127908 - RNA, 19 nt, Homo sapiens
  misc_RNA (1)...(19): siRNA sense strand
caucaucccuuuaaacuca

SEQ ID NO: 1127909 - RNA, 19 nt, Homo sapiens
  misc_RNA (1)...(19): siRNA sense strand
agacgaagcuucaguaucu

SEQ ID NO: 1127910 - RNA, 19 nt, Homo sapiens
  misc_RNA (1)...(19): siRNA sense strand
gcugaacgcucuaugaugu

SEQ ID NO: 1127911 - RNA, 19 nt, Homo sapiens
  misc_RNA (1)...(19): siRNA sense strand
gcucuaugaugucuuauga

SEQ ID NO: 1127912 - RNA, 19 nt, Homo sapiens
  misc_RNA (1)...(19): siRNA sense strand
gaagaaauagugcagaaga

SEQ ID NO: 1127913 - RNA, 19 nt, Homo sapiens
  misc_RNA (1)...(19): siRNA sense strand
caaaucuucugaacacaaa

SEQ ID NO: 1127914 - RNA, 19 nt, Homo sapiens
  misc_RNA (1)...(19): siRNA sense strand
gauauaagccagacuugaa

SEQ ID NO: 1127915 - RNA, 19 nt, Homo sapiens
  misc_RNA (1)...(19): siRNA sense strand
gaaacucuaucuucuacug

SEQ ID NO: 1127916 - RNA, 19 nt, Homo sapiens
  misc_RNA (1)...(19): siRNA sense strand
gaugaagucugugcugaaa

SEQ ID NO: 1127917 - RNA, 19 nt, Homo sapiens
  misc_RNA (1)...(19): siRNA sense strand
gaagucaucugagccaguu

SEQ ID NO: 1127918 - RNA, 19 nt, Homo sapiens
  misc_RNA (1)...(19): siRNA sense strand
gcugagcgcucuaugaugu

SEQ ID NO: 1127919 - RNA, 19 nt, Homo sapiens
  misc_RNA (1)...(19): siRNA sense strand
aaacagaucgcacagagua

SEQ ID NO: 1127920 - RNA, 19 nt, Homo sapiens
  misc_RNA (1)...(19): siRNA sense strand
gaagaagaucuguaucaaa

SEQ ID NO: 1127921 - RNA, 19 nt, Homo sapiens
  misc_RNA (1)...(19): siRNA sense strand
caucggagauugcagauuc

SEQ ID NO: 1127922 - RNA, 19 nt, Homo sapiens
  misc_RNA (1)...(19): siRNA sense strand
ugaagcagauuuagugaga

SEQ ID NO: 1127923 - RNA, 19 nt, Homo sapiens
  misc_RNA (1)...(19): siRNA sense strand
gaaagugaacaugguauaa

SEQ ID NO: 1127924 - RNA, 19 nt, Homo sapiens
  misc_RNA (1)...(19): siRNA sense strand
agagcagacucaaguaaua

SEQ ID NO: 1127925 - RNA, 19 nt, Homo sapiens
  misc_RNA (1)...(19): siRNA sense strand
gguagaagaaggagcuuua

SEQ ID NO: 1127926 - RNA, 19 nt, Homo sapiens
  misc_RNA (1)...(19): siRNA sense strand
ccaggagucuaccaaauga

SEQ ID NO: 1127927 - RNA, 19 nt, Homo sapiens
  misc_RNA (1)...(19): siRNA sense strand
gaacgucuuacaagccuua

SEQ ID NO: 1127928 - RNA, 19 nt, Homo sapiens
  misc_RNA (1)...(19): siRNA sense strand
ugacuuguaugguaucuga

SEQ ID NO: 1127929 - RNA, 19 nt, Homo sapiens
  misc_RNA (1)...(19): siRNA sense strand
caaagauucuggauuccuu

SEQ ID NO: 1127930 - RNA, 19 nt, Homo sapiens
  misc_RNA (1)...(19): siRNA sense strand
uguagagucugcaguagua

SEQ ID NO: 1127931 - RNA, 19 nt, Homo sapiens
  misc_RNA (1)...(19): siRNA sense strand
gcugaucgaucuaugaugu

SEQ ID NO: 1127932 - RNA, 19 nt, Homo sapiens
  misc_RNA (1)...(19): siRNA sense strand
caucaaagaucauguuggu

SEQ ID NO: 1127933 - RNA, 19 nt, Homo sapiens
  misc_RNA (1)...(19): siRNA sense strand
caucagagccuccuguuau

SEQ ID NO: 1127934 - RNA, 19 nt, Homo sapiens
  misc_RNA (1)...(19): siRNA sense strand
gaagaagguuuagcagauc

SEQ ID NO: 1127935 - RNA, 19 nt, Homo sapiens
  misc_RNA (1)...(19): siRNA sense strand
gaaaggaauuaaucuaucc

SEQ ID NO: 1127936 - RNA, 19 nt, Homo sapiens
  misc_RNA (1)...(19): siRNA sense strand
ccaagcacaucaacaacaa

SEQ ID NO: 1127937 - RNA, 19 nt, Homo sapiens
  misc_RNA (1)...(19): siRNA sense strand
uaugaacgcuccaugaugu

SEQ ID NO: 1127938 - RNA, 19 nt, Homo sapiens
  misc_RNA (1)...(19): siRNA sense strand
uaugaacgcuccaugaugu

SEQ ID NO: 1127939 - RNA, 19 nt, Homo sapiens
  misc_RNA (1)...(19): siRNA sense strand
cgacagcagugccugaguu

SEQ ID NO: 1127940 - RNA, 19 nt, Homo sapiens
  misc_RNA (1)...(19): siRNA sense strand
agaagaagguuuagcagau

SEQ ID NO: 1127941 - RNA, 19 nt, Homo sapiens
  misc_RNA (1)...(19): siRNA sense strand
cgacgaaggucuagaucug

SEQ ID NO: 1127942 - RNA, 19 nt, Homo sapiens
  misc_RNA (1)...(19): siRNA sense strand
ccuuagagcuggcauugaa

SEQ ID NO: 1127943 - RNA, 19 nt, Homo sapiens
  misc_RNA (1)...(19): siRNA sense strand
gaaaguaguggaggagaaa

SEQ ID NO: 1127944 - RNA, 19 nt, Homo sapiens
  misc_RNA (1)...(19): siRNA sense strand
gcucagcccuaaagaaagu

SEQ ID NO: 1127945 - RNA, 19 nt, Homo sapiens
  misc_RNA (1)...(19): siRNA sense strand
gcuccaugaugucagcuua

SEQ ID NO: 1127946 - RNA, 19 nt, Homo sapiens
  misc_RNA (1)...(19): siRNA sense strand
caacgauggugcuggaguu

SEQ ID NO: 1127947 - RNA, 19 nt, Homo sapiens
  misc_RNA (1)...(19): siRNA sense strand
gauacagaacuacgauaua

SEQ ID NO: 1127948 - RNA, 19 nt, Homo sapiens
  misc_RNA (1)...(19): siRNA sense strand
agaacacccuuaagaagaa

SEQ ID NO: 1127949 - RNA, 19 nt, Homo sapiens
  misc_RNA (1)...(19): siRNA sense strand
uagugaagcugacauugaa

SEQ ID NO: 1127950 - RNA, 19 nt, Homo sapiens
  misc_RNA (1)...(19): siRNA sense strand
cugaugaaauucccacuaa

SEQ ID NO: 1127951 - RNA, 19 nt, Homo sapiens
  misc_RNA (1)...(19): siRNA sense strand
ugaaagagggcuccagaaa

SEQ ID NO: 1127952 - RNA, 19 nt, Homo sapiens
  misc_RNA (1)...(19): siRNA sense strand
ggauaguguuuauggagaa

SEQ ID NO: 1127953 - RNA, 19 nt, Homo sapiens
  misc_RNA (1)...(19): siRNA sense strand
uaaugcagcugccaugugu

SEQ ID NO: 1127954 - RNA, 19 nt, Homo sapiens
  misc_RNA (1)...(19): siRNA sense strand
agaucaagcuccagggaua

SEQ ID NO: 1127955 - RNA, 19 nt, Homo sapiens
  misc_RNA (1)...(19): siRNA sense strand
ugaaacaaauacacccauu

SEQ ID NO: 1127956 - RNA, 19 nt, Homo sapiens
  misc_RNA (1)...(19): siRNA sense strand
aaacaaauacacccauuga

SEQ ID NO: 1127957 - RNA, 19 nt, Homo sapiens
  misc_RNA (1)...(19): siRNA sense strand
gcagcugaccgaucuauga

SEQ ID NO: 1127958 - RNA, 19 nt, Homo sapiens
  misc_RNA (1)...(19): siRNA sense strand
ccagagccaucaaagauca

SEQ ID NO: 1127959 - RNA, 19 nt, Homo sapiens
  misc_RNA (1)...(19): siRNA sense strand
ggaugaagaggaagaagaa

SEQ ID NO: 1127960 - RNA, 19 nt, Homo sapiens
  misc_RNA (1)...(19): siRNA sense strand
aggaggagcuacuauagaa

SEQ ID NO: 1127961 - RNA, 19 nt, Homo sapiens
  misc_RNA (1)...(19): siRNA sense strand
gaagaucuguaucaaaaga

SEQ ID NO: 1127962 - RNA, 19 nt, Homo sapiens
  misc_RNA (1)...(19): siRNA sense strand
guaaguaguaugccagaaa

SEQ ID NO: 1127963 - RNA, 19 nt, Homo sapiens
  misc_RNA (1)...(19): siRNA sense strand
gaaacaaauacacccauug

SEQ ID NO: 1127964 - RNA, 19 nt, Homo sapiens
  misc_RNA (1)...(19): siRNA sense strand
ggucuuucguggucaguaa

SEQ ID NO: 1127965 - RNA, 19 nt, Homo sapiens
  misc_RNA (1)...(19): siRNA sense strand
caaugucaguggaguauca

SEQ ID NO: 1127966 - RNA, 19 nt, Homo sapiens
  misc_RNA (1)...(19): siRNA sense strand
agagacagcagaaacauuu

SEQ ID NO: 1127967 - RNA, 19 nt, Homo sapiens
  misc_RNA (1)...(19): siRNA sense strand
gaaauagugcagaagauag

SEQ ID NO: 1127968 - RNA, 19 nt, Homo sapiens
  misc_RNA (1)...(19): siRNA sense strand
ucaagaacacccuuaagaa

SEQ ID NO: 1127969 - RNA, 19 nt, Homo sapiens
  misc_RNA (1)...(19): siRNA sense strand
guagugaagcugacauuga

SEQ ID NO: 1127970 - RNA, 19 nt, Homo sapiens
  misc_RNA (1)...(19): siRNA sense strand
gcugaucguucaaugaugu

SEQ ID NO: 1127971 - RNA, 19 nt, Homo sapiens
  misc_RNA (1)...(19): siRNA sense strand
gagccaagcacaucaacaa

SEQ ID NO: 1127972 - RNA, 19 nt, Homo sapiens
  misc_RNA (1)...(19): siRNA sense strand
gcauuuggcccaucugaga

SEQ ID NO: 1127973 - RNA, 19 nt, Homo sapiens
  misc_RNA (1)...(19): siRNA sense strand
guuaacaccuguagagucu

SEQ ID NO: 1127974 - RNA, 19 nt, Homo sapiens
  misc_RNA (1)...(19): siRNA sense strand
caaagaucauguugguaga

SEQ ID NO: 1127975 - RNA, 19 nt, Homo sapiens
  misc_RNA (1)...(19): siRNA sense strand
gcugaauggugaaacaaau

SEQ ID NO: 1127976 - RNA, 19 nt, Homo sapiens
  misc_RNA (1)...(19): siRNA sense strand
ugaagucugugcugaaauc

SEQ ID NO: 1127977 - RNA, 19 nt, Homo sapiens
  misc_RNA (1)...(19): siRNA sense strand
ggacauggaacgucuuaca

SEQ ID NO: 1127978 - RNA, 19 nt, Homo sapiens
  misc_RNA (1)...(19): siRNA sense strand
aaagagacacugccugauu

SEQ ID NO: 1127979 - RNA, 19 nt, Homo sapiens
  misc_RNA (1)...(19): siRNA sense strand
cagcaucuacucucaguuu

SEQ ID NO: 1127980 - RNA, 19 nt, Homo sapiens
  misc_RNA (1)...(19): siRNA sense strand
gcagaaacauuugauucca

SEQ ID NO: 1127981 - RNA, 19 nt, Homo sapiens
  misc_RNA (1)...(19): siRNA sense strand
cagaaacccuugugguauc

SEQ ID NO: 1127982 - RNA, 19 nt, Homo sapiens
  misc_RNA (1)...(19): siRNA sense strand
gaaccauccaugacaaaga

SEQ ID NO: 1127983 - RNA, 19 nt, Homo sapiens
  misc_RNA (1)...(19): siRNA sense strand
gaaggagcuuuagcauuuc

SEQ ID NO: 1127984 - RNA, 19 nt, Homo sapiens
  misc_RNA (1)...(19): siRNA sense strand
aagcacagauccaagucua

SEQ ID NO: 1127985 - RNA, 19 nt, Homo sapiens
  misc_RNA (1)...(19): siRNA sense strand
uaaugaagcagauuuagug

SEQ ID NO: 1127986 - RNA, 19 nt, Homo sapiens
  misc_RNA (1)...(19): siRNA sense strand
gaacuaguaaggguauuga

SEQ ID NO: 1127987 - RNA, 19 nt, Homo sapiens
  misc_RNA (1)...(19): siRNA sense strand
caucacauguuaugaaagg

SEQ ID NO: 1127988 - RNA, 19 nt, Homo sapiens
  misc_RNA (1)...(19): siRNA sense strand
cuaaagagauggaacauaa

SEQ ID NO: 1127989 - RNA, 19 nt, Homo sapiens
  misc_RNA (1)...(19): siRNA sense strand
agaaggagcuuuagcauuu

SEQ ID NO: 1127990 - RNA, 19 nt, Homo sapiens
  misc_RNA (1)...(19): siRNA sense strand
gcuagaaccuccuguagua

SEQ ID NO: 1127991 - RNA, 19 nt, Homo sapiens
  misc_RNA (1)...(19): siRNA sense strand
ggaaauuggugaagagaaa

SEQ ID NO: 1127992 - RNA, 19 nt, Homo sapiens
  misc_RNA (1)...(19): siRNA sense strand
gagccagaaucuucaauua

SEQ ID NO: 1127993 - RNA, 19 nt, Homo sapiens
  misc_RNA (1)...(19): siRNA sense strand
ggauaaggcucaauuacuu

SEQ ID NO: 1127994 - RNA, 19 nt, Homo sapiens
  misc_RNA (1)...(19): siRNA sense strand
caacugagguggcuauaga

SEQ ID NO: 1127995 - RNA, 19 nt, Homo sapiens
  misc_RNA (1)...(19): siRNA sense strand
ugacaaagauucuggauuc

SEQ ID NO: 1127996 - RNA, 19 nt, Homo sapiens
  misc_RNA (1)...(19): siRNA sense strand
cgacagcgcuggaauccua

SEQ ID NO: 1127997 - RNA, 19 nt, Homo sapiens
  misc_RNA (1)...(19): siRNA sense strand
gcgcuggaauccuauaaua

SEQ ID NO: 1127998 - RNA, 19 nt, Homo sapiens
  misc_RNA (1)...(19): siRNA sense strand
ggucuuagauacagaacua

SEQ ID NO: 1127999 - RNA, 19 nt, Homo sapiens
  misc_RNA (1)...(19): siRNA sense strand
gaagauagaggaaguacuu

SEQ ID NO: 1128000 - RNA, 19 nt, Homo sapiens
  misc_RNA (1)...(19): siRNA sense strand
gaaguaagcguuccaaauc

SEQ ID NO: 1128001 - RNA, 19 nt, Homo sapiens
  misc_RNA (1)...(19): siRNA sense strand
ucauuaagaucucgaagua

SEQ ID NO: 1128002 - RNA, 19 nt, Homo sapiens
  misc_RNA (1)...(19): siRNA sense strand
aaacagauccuacugauga

SEQ ID NO: 1128003 - RNA, 19 nt, Homo sapiens
  misc_RNA (1)...(19): siRNA sense strand
ggaagaagaucuguaucaa

SEQ ID NO: 1128004 - RNA, 19 nt, Homo sapiens
  misc_RNA (1)...(19): siRNA sense strand
ggauacagaagaaccauua

SEQ ID NO: 1128005 - RNA, 19 nt, Homo sapiens
  misc_RNA (1)...(19): siRNA sense strand
agaaagagcuucagagucu

SEQ ID NO: 1128006 - RNA, 19 nt, Homo sapiens
  misc_RNA (1)...(19): siRNA sense strand
gcucuaugaugucagcuua

SEQ ID NO: 1128007 - RNA, 19 nt, Homo sapiens
  misc_RNA (1)...(19): siRNA sense strand
ggagaucucuguucagucu

SEQ ID NO: 1128008 - RNA, 19 nt, Homo sapiens
  misc_RNA (1)...(19): siRNA sense strand
caucaucccuuuaaacuca

SEQ ID NO: 1128009 - RNA, 19 nt, Homo sapiens
  misc_RNA (1)...(19): siRNA sense strand
agacgaagcuucaguaucu

SEQ ID NO: 1128010 - RNA, 19 nt, Homo sapiens
  misc_RNA (1)...(19): siRNA sense strand
gcugaacgcucuaugaugu

SEQ ID NO: 1128011 - RNA, 19 nt, Homo sapiens
  misc_RNA (1)...(19): siRNA sense strand
gcucuaugaugucuuauga

SEQ ID NO: 1128012 - RNA, 19 nt, Homo sapiens
  misc_RNA (1)...(19): siRNA sense strand
gaagaaauagugcagaaga

SEQ ID NO: 1128013 - RNA, 19 nt, Homo sapiens
  misc_RNA (1)...(19): siRNA sense strand
caaaucuucugaacacaaa

SEQ ID NO: 1128014 - RNA, 19 nt, Homo sapiens
  misc_RNA (1)...(19): siRNA sense strand
gauauaagccagacuugaa

SEQ ID NO: 1128015 - RNA, 19 nt, Homo sapiens
  misc_RNA (1)...(19): siRNA sense strand
gaaacucuaucuucuacug

SEQ ID NO: 1128016 - RNA, 19 nt, Homo sapiens
  misc_RNA (1)...(19): siRNA sense strand
gaugaagucugugcugaaa

SEQ ID NO: 1128017 - RNA, 19 nt, Homo sapiens
  misc_RNA (1)...(19): siRNA sense strand
gaagucaucugagccaguu

SEQ ID NO: 1128018 - RNA, 19 nt, Homo sapiens
  misc_RNA (1)...(19): siRNA sense strand
gcugagcgcucuaugaugu

SEQ ID NO: 1128019 - RNA, 19 nt, Homo sapiens
  misc_RNA (1)...(19): siRNA sense strand
aaacagaucgcacagagua

SEQ ID NO: 1128020 - RNA, 19 nt, Homo sapiens
  misc_RNA (1)...(19): siRNA sense strand
gaagaagaucuguaucaaa

SEQ ID NO: 1128021 - RNA, 19 nt, Homo sapiens
  misc_RNA (1)...(19): siRNA sense strand
caucggagauugcagauuc

SEQ ID NO: 1128022 - RNA, 19 nt, Homo sapiens
  misc_RNA (1)...(19): siRNA sense strand
ugaagcagauuuagugaga

SEQ ID NO: 1128023 - RNA, 19 nt, Homo sapiens
  misc_RNA (1)...(19): siRNA sense strand
gaaagugaacaugguauaa

SEQ ID NO: 1128024 - RNA, 19 nt, Homo sapiens
  misc_RNA (1)...(19): siRNA sense strand
agagcagacucaaguaaua

SEQ ID NO: 1128025 - RNA, 19 nt, Homo sapiens
  misc_RNA (1)...(19): siRNA sense strand
gguagaagaaggagcuuua

SEQ ID NO: 1128026 - RNA, 19 nt, Homo sapiens
  misc_RNA (1)...(19): siRNA sense strand
ccaggagucuaccaaauga

SEQ ID NO: 1128027 - RNA, 19 nt, Homo sapiens
  misc_RNA (1)...(19): siRNA sense strand
gaacgucuuacaagccuua

SEQ ID NO: 1128028 - RNA, 19 nt, Homo sapiens
  misc_RNA (1)...(19): siRNA sense strand
ugacuuguaugguaucuga

SEQ ID NO: 1128029 - RNA, 19 nt, Homo sapiens
  misc_RNA (1)...(19): siRNA sense strand
caaagauucuggauuccuu

SEQ ID NO: 1128030 - RNA, 19 nt, Homo sapiens
  misc_RNA (1)...(19): siRNA sense strand
uguagagucugcaguagua

SEQ ID NO: 1128031 - RNA, 19 nt, Homo sapiens
  misc_RNA (1)...(19): siRNA sense strand
gcugaucgaucuaugaugu

SEQ ID NO: 1128032 - RNA, 19 nt, Homo sapiens
  misc_RNA (1)...(19): siRNA sense strand
caucaaagaucauguuggu

SEQ ID NO: 1128033 - RNA, 19 nt, Homo sapiens
  misc_RNA (1)...(19): siRNA sense strand
caucagagccuccuguuau

SEQ ID NO: 1128034 - RNA, 19 nt, Homo sapiens
  misc_RNA (1)...(19): siRNA sense strand
gaagaagguuuagcagauc

SEQ ID NO: 1128035 - RNA, 19 nt, Homo sapiens
  misc_RNA (1)...(19): siRNA sense strand
gaaaggaauuaaucuaucc

SEQ ID NO: 1128036 - RNA, 19 nt, Homo sapiens
  misc_RNA (1)...(19): siRNA sense strand
ccaagcacaucaacaacaa

SEQ ID NO: 1128037 - RNA, 19 nt, Homo sapiens
  misc_RNA (1)...(19): siRNA sense strand
uaugaacgcuccaugaugu

SEQ ID NO: 1128038 - RNA, 19 nt, Homo sapiens
  misc_RNA (1)...(19): siRNA sense strand
uaugaacgcuccaugaugu

SEQ ID NO: 1128039 - RNA, 19 nt, Homo sapiens
  misc_RNA (1)...(19): siRNA sense strand
cgacagcagugccugaguu

SEQ ID NO: 1128040 - RNA, 19 nt, Homo sapiens
  misc_RNA (1)...(19): siRNA sense strand
agaagaagguuuagcagau

SEQ ID NO: 1128041 - RNA, 19 nt, Homo sapiens
  misc_RNA (1)...(19): siRNA sense strand
cgacgaaggucuagaucug

SEQ ID NO: 1128042 - RNA, 19 nt, Homo sapiens
  misc_RNA (1)...(19): siRNA sense strand
ccuuagagcuggcauugaa

SEQ ID NO: 1128043 - RNA, 19 nt, Homo sapiens
  misc_RNA (1)...(19): siRNA sense strand
gaaaguaguggaggagaaa

SEQ ID NO: 1128044 - RNA, 19 nt, Homo sapiens
  misc_RNA (1)...(19): siRNA sense strand
gcucagcccuaaagaaagu

SEQ ID NO: 1128045 - RNA, 19 nt, Homo sapiens
  misc_RNA (1)...(19): siRNA sense strand
gcuccaugaugucagcuua

SEQ ID NO: 1128046 - RNA, 19 nt, Homo sapiens
  misc_RNA (1)...(19): siRNA sense strand
caacgauggugcuggaguu

SEQ ID NO: 1128047 - RNA, 19 nt, Homo sapiens
  misc_RNA (1)...(19): siRNA sense strand
gauacagaacuacgauaua

SEQ ID NO: 1128048 - RNA, 19 nt, Homo sapiens
  misc_RNA (1)...(19): siRNA sense strand
agaacacccuuaagaagaa

SEQ ID NO: 1128049 - RNA, 19 nt, Homo sapiens
  misc_RNA (1)...(19): siRNA sense strand
uagugaagcugacauugaa

SEQ ID NO: 1128050 - RNA, 19 nt, Homo sapiens
  misc_RNA (1)...(19): siRNA sense strand
cugaugaaauucccacuaa

SEQ ID NO: 1128051 - RNA, 19 nt, Homo sapiens
  misc_RNA (1)...(19): siRNA sense strand
ugaaagagggcuccagaaa

SEQ ID NO: 1128052 - RNA, 19 nt, Homo sapiens
  misc_RNA (1)...(19): siRNA sense strand
ggauaguguuuauggagaa

SEQ ID NO: 1128053 - RNA, 19 nt, Homo sapiens
  misc_RNA (1)...(19): siRNA sense strand
uaaugcagcugccaugugu

SEQ ID NO: 1128054 - RNA, 19 nt, Homo sapiens
  misc_RNA (1)...(19): siRNA sense strand
agaucaagcuccagggaua

SEQ ID NO: 1128055 - RNA, 19 nt, Homo sapiens
  misc_RNA (1)...(19): siRNA sense strand
ugaaacaaauacacccauu

SEQ ID NO: 1128056 - RNA, 19 nt, Homo sapiens
  misc_RNA (1)...(19): siRNA sense strand
aaacaaauacacccauuga

SEQ ID NO: 1128057 - RNA, 19 nt, Homo sapiens
  misc_RNA (1)...(19): siRNA sense strand
gcagcugaccgaucuauga

SEQ ID NO: 1128058 - RNA, 19 nt, Homo sapiens
  misc_RNA (1)...(19): siRNA sense strand
ccagagccaucaaagauca

SEQ ID NO: 1128059 - RNA, 19 nt, Homo sapiens
  misc_RNA (1)...(19): siRNA sense strand
ggaugaagaggaagaagaa

SEQ ID NO: 1128060 - RNA, 19 nt, Homo sapiens
  misc_RNA (1)...(19): siRNA sense strand
aggaggagcuacuauagaa

SEQ ID NO: 1128061 - RNA, 19 nt, Homo sapiens
  misc_RNA (1)...(19): siRNA sense strand
gaagaucuguaucaaaaga

SEQ ID NO: 1128062 - RNA, 19 nt, Homo sapiens
  misc_RNA (1)...(19): siRNA sense strand
guaaguaguaugccagaaa

SEQ ID NO: 1128063 - RNA, 19 nt, Homo sapiens
  misc_RNA (1)...(19): siRNA sense strand
gaaacaaauacacccauug

SEQ ID NO: 1128064 - RNA, 19 nt, Homo sapiens
  misc_RNA (1)...(19): siRNA sense strand
ggucuuucguggucaguaa

SEQ ID NO: 1128065 - RNA, 19 nt, Homo sapiens
  misc_RNA (1)...(19): siRNA sense strand
caaugucaguggaguauca

SEQ ID NO: 1128066 - RNA, 19 nt, Homo sapiens
  misc_RNA (1)...(19): siRNA sense strand
agagacagcagaaacauuu

SEQ ID NO: 1128067 - RNA, 19 nt, Homo sapiens
  misc_RNA (1)...(19): siRNA sense strand
gaaauagugcagaagauag

SEQ ID NO: 1128068 - RNA, 19 nt, Homo sapiens
  misc_RNA (1)...(19): siRNA sense strand
ucaagaacacccuuaagaa

SEQ ID NO: 1128069 - RNA, 19 nt, Homo sapiens
  misc_RNA (1)...(19): siRNA sense strand
guagugaagcugacauuga

SEQ ID NO: 1128070 - RNA, 19 nt, Homo sapiens
  misc_RNA (1)...(19): siRNA sense strand
gcugaucguucaaugaugu

SEQ ID NO: 1128071 - RNA, 19 nt, Homo sapiens
  misc_RNA (1)...(19): siRNA sense strand
gagccaagcacaucaacaa

SEQ ID NO: 1128072 - RNA, 19 nt, Homo sapiens
  misc_RNA (1)...(19): siRNA sense strand
gcauuuggcccaucugaga

SEQ ID NO: 1128073 - RNA, 19 nt, Homo sapiens
  misc_RNA (1)...(19): siRNA sense strand
guuaacaccuguagagucu

SEQ ID NO: 1128074 - RNA, 19 nt, Homo sapiens
  misc_RNA (1)...(19): siRNA sense strand
caaagaucauguugguaga

SEQ ID NO: 1128075 - RNA, 19 nt, Homo sapiens
  misc_RNA (1)...(19): siRNA sense strand
gcugaauggugaaacaaau

SEQ ID NO: 1128076 - RNA, 19 nt, Homo sapiens
  misc_RNA (1)...(19): siRNA sense strand
ugaagucugugcugaaauc

SEQ ID NO: 1128077 - RNA, 19 nt, Homo sapiens
  misc_RNA (1)...(19): siRNA sense strand
ggacauggaacgucuuaca

SEQ ID NO: 1128078 - RNA, 19 nt, Homo sapiens
  misc_RNA (1)...(19): siRNA sense strand
aaagagacacugccugauu

SEQ ID NO: 1128079 - RNA, 19 nt, Homo sapiens
  misc_RNA (1)...(19): siRNA sense strand
cagcaucuacucucaguuu

SEQ ID NO: 1128080 - RNA, 19 nt, Homo sapiens
  misc_RNA (1)...(19): siRNA sense strand
gcagaaacauuugauucca

SEQ ID NO: 1128081 - RNA, 19 nt, Homo sapiens
  misc_RNA (1)...(19): siRNA sense strand
cagaaacccuugugguauc

SEQ ID NO: 1128082 - RNA, 19 nt, Homo sapiens
  misc_RNA (1)...(19): siRNA sense strand
gaaccauccaugacaaaga

SEQ ID NO: 1128083 - RNA, 19 nt, Homo sapiens
  misc_RNA (1)...(19): siRNA sense strand
gaaggagcuuuagcauuuc

SEQ ID NO: 1128084 - RNA, 19 nt, Homo sapiens
  misc_RNA (1)...(19): siRNA sense strand
aagcacagauccaagucua

SEQ ID NO: 1128085 - RNA, 19 nt, Homo sapiens
  misc_RNA (1)...(19): siRNA sense strand
uaaugaagcagauuuagug

SEQ ID NO: 1128086 - RNA, 19 nt, Homo sapiens
  misc_RNA (1)...(19): siRNA sense strand
gaacuaguaaggguauuga

SEQ ID NO: 1128087 - RNA, 19 nt, Homo sapiens
  misc_RNA (1)...(19): siRNA sense strand
caucacauguuaugaaagg

SEQ ID NO: 1128088 - RNA, 19 nt, Homo sapiens
  misc_RNA (1)...(19): siRNA sense strand
cuaaagagauggaacauaa

SEQ ID NO: 1128089 - RNA, 19 nt, Homo sapiens
  misc_RNA (1)...(19): siRNA sense strand
agaaggagcuuuagcauuu

SEQ ID NO: 1128090 - RNA, 19 nt, Homo sapiens
  misc_RNA (1)...(19): siRNA sense strand
gcuagaaccuccuguagua

SEQ ID NO: 1128091 - RNA, 19 nt, Homo sapiens
  misc_RNA (1)...(19): siRNA sense strand
ggaaauuggugaagagaaa

SEQ ID NO: 1128092 - RNA, 19 nt, Homo sapiens
  misc_RNA (1)...(19): siRNA sense strand
gagccagaaucuucaauua

SEQ ID NO: 1128093 - RNA, 19 nt, Homo sapiens
  misc_RNA (1)...(19): siRNA sense strand
ggauaaggcucaauuacuu

SEQ ID NO: 1128094 - RNA, 19 nt, Homo sapiens
  misc_RNA (1)...(19): siRNA sense strand
caacugagguggcuauaga

SEQ ID NO: 1128095 - RNA, 19 nt, Homo sapiens
  misc_RNA (1)...(19): siRNA sense strand
ugacaaagauucuggauuc

SEQ ID NO: 1128096 - RNA, 19 nt, Homo sapiens
  misc_RNA (1)...(19): siRNA sense strand
cgacagcgcuggaauccua

SEQ ID NO: 1128097 - RNA, 19 nt, Homo sapiens
  misc_RNA (1)...(19): siRNA sense strand
gcgcuggaauccuauaaua

SEQ ID NO: 1128098 - RNA, 19 nt, Homo sapiens
  misc_RNA (1)...(19): siRNA sense strand
ggucuuagauacagaacua

SEQ ID NO: 1128099 - RNA, 19 nt, Homo sapiens
  misc_RNA (1)...(19): siRNA sense strand
gaagauagaggaaguacuu

SEQ ID NO: 1128100 - RNA, 19 nt, Homo sapiens
  misc_RNA (1)...(19): siRNA sense strand
gaaguaagcguuccaaauc

SEQ ID NO: 1128101 - RNA, 19 nt, Homo sapiens
  misc_RNA (1)...(19): siRNA sense strand
ucauuaagaucucgaagua

SEQ ID NO: 1128102 - RNA, 19 nt, Homo sapiens
  misc_RNA (1)...(19): siRNA sense strand
aaacagauccuacugauga

SEQ ID NO: 1128103 - RNA, 19 nt, Homo sapiens
  misc_RNA (1)...(19): siRNA sense strand
ggaagaagaucuguaucaa

SEQ ID NO: 1128104 - RNA, 19 nt, Homo sapiens
  misc_RNA (1)...(19): siRNA sense strand
ggauacagaagaaccauua

SEQ ID NO: 1128105 - RNA, 19 nt, Homo sapiens
  misc_RNA (1)...(19): siRNA sense strand
agaaagagcuucagagucu

SEQ ID NO: 1128106 - RNA, 19 nt, Homo sapiens
  misc_RNA (1)...(19): siRNA sense strand
gcucuaugaugucagcuua

SEQ ID NO: 1128107 - RNA, 19 nt, Homo sapiens
  misc_RNA (1)...(19): siRNA sense strand
ggagaucucuguucagucu

SEQ ID NO: 1128108 - RNA, 19 nt, Homo sapiens
  misc_RNA (1)...(19): siRNA sense strand
caucaucccuuuaaacuca

SEQ ID NO: 1128109 - RNA, 19 nt, Homo sapiens
  misc_RNA (1)...(19): siRNA sense strand
agacgaagcuucaguaucu

SEQ ID NO: 1128110 - RNA, 19 nt, Homo sapiens
  misc_RNA (1)...(19): siRNA sense strand
gcugaacgcucuaugaugu

SEQ ID NO: 1128111 - RNA, 19 nt, Homo sapiens
  misc_RNA (1)...(19): siRNA sense strand
gcucuaugaugucuuauga

SEQ ID NO: 1128112 - RNA, 19 nt, Homo sapiens
  misc_RNA (1)...(19): siRNA sense strand
gaagaaauagugcagaaga

SEQ ID NO: 1128113 - RNA, 19 nt, Homo sapiens
  misc_RNA (1)...(19): siRNA sense strand
caaaucuucugaacacaaa

SEQ ID NO: 1128114 - RNA, 19 nt, Homo sapiens
  misc_RNA (1)...(19): siRNA sense strand
gauauaagccagacuugaa

SEQ ID NO: 1128115 - RNA, 19 nt, Homo sapiens
  misc_RNA (1)...(19): siRNA sense strand
gaaacucuaucuucuacug

SEQ ID NO: 1128116 - RNA, 19 nt, Homo sapiens
  misc_RNA (1)...(19): siRNA sense strand
gaugaagucugugcugaaa

SEQ ID NO: 1128117 - RNA, 19 nt, Homo sapiens
  misc_RNA (1)...(19): siRNA sense strand
gaagucaucugagccaguu

SEQ ID NO: 1128118 - RNA, 19 nt, Homo sapiens
  misc_RNA (1)...(19): siRNA sense strand
gcugagcgcucuaugaugu

SEQ ID NO: 1128119 - RNA, 19 nt, Homo sapiens
  misc_RNA (1)...(19): siRNA sense strand
aaacagaucgcacagagua

SEQ ID NO: 1128120 - RNA, 19 nt, Homo sapiens
  misc_RNA (1)...(19): siRNA sense strand
gaagaagaucuguaucaaa

SEQ ID NO: 1128121 - RNA, 19 nt, Homo sapiens
  misc_RNA (1)...(19): siRNA sense strand
caucggagauugcagauuc

SEQ ID NO: 1128122 - RNA, 19 nt, Homo sapiens
  misc_RNA (1)...(19): siRNA sense strand
ugaagcagauuuagugaga

SEQ ID NO: 1128123 - RNA, 19 nt, Homo sapiens
  misc_RNA (1)...(19): siRNA sense strand
gaaagugaacaugguauaa

SEQ ID NO: 1128124 - RNA, 19 nt, Homo sapiens
  misc_RNA (1)...(19): siRNA sense strand
agagcagacucaaguaaua

SEQ ID NO: 1128125 - RNA, 19 nt, Homo sapiens
  misc_RNA (1)...(19): siRNA sense strand
gguagaagaaggagcuuua

SEQ ID NO: 1128126 - RNA, 19 nt, Homo sapiens
  misc_RNA (1)...(19): siRNA sense strand
ccaggagucuaccaaauga

SEQ ID NO: 1128127 - RNA, 19 nt, Homo sapiens
  misc_RNA (1)...(19): siRNA sense strand
gaacgucuuacaagccuua

SEQ ID NO: 1128128 - RNA, 19 nt, Homo sapiens
  misc_RNA (1)...(19): siRNA sense strand
ugacuuguaugguaucuga

SEQ ID NO: 1128129 - RNA, 19 nt, Homo sapiens
  misc_RNA (1)...(19): siRNA sense strand
caaagauucuggauuccuu

SEQ ID NO: 1128130 - RNA, 19 nt, Homo sapiens
  misc_RNA (1)...(19): siRNA sense strand
uguagagucugcaguagua

SEQ ID NO: 1128131 - RNA, 19 nt, Homo sapiens
  misc_RNA (1)...(19): siRNA sense strand
gcugaucgaucuaugaugu

SEQ ID NO: 1128132 - RNA, 19 nt, Homo sapiens
  misc_RNA (1)...(19): siRNA sense strand
caucaaagaucauguuggu

SEQ ID NO: 1128133 - RNA, 19 nt, Homo sapiens
  misc_RNA (1)...(19): siRNA sense strand
caucagagccuccuguuau

SEQ ID NO: 1128134 - RNA, 19 nt, Homo sapiens
  misc_RNA (1)...(19): siRNA sense strand
gaagaagguuuagcagauc

SEQ ID NO: 1128135 - RNA, 19 nt, Homo sapiens
  misc_RNA (1)...(19): siRNA sense strand
gaaaggaauuaaucuaucc

SEQ ID NO: 1128136 - RNA, 19 nt, Homo sapiens
  misc_RNA (1)...(19): siRNA sense strand
ccaagcacaucaacaacaa

SEQ ID NO: 1128137 - RNA, 19 nt, Homo sapiens
  misc_RNA (1)...(19): siRNA sense strand
uaugaacgcuccaugaugu

SEQ ID NO: 1128138 - RNA, 19 nt, Homo sapiens
  misc_RNA (1)...(19): siRNA sense strand
uaugaacgcuccaugaugu

SEQ ID NO: 1128139 - RNA, 19 nt, Homo sapiens
  misc_RNA (1)...(19): siRNA sense strand
cgacagcagugccugaguu

SEQ ID NO: 1128140 - RNA, 19 nt, Homo sapiens
  misc_RNA (1)...(19): siRNA sense strand
agaagaagguuuagcagau

SEQ ID NO: 1128141 - RNA, 19 nt, Homo sapiens
  misc_RNA (1)...(19): siRNA sense strand
cgacgaaggucuagaucug

SEQ ID NO: 1128142 - RNA, 19 nt, Homo sapiens
  misc_RNA (1)...(19): siRNA sense strand
ccuuagagcuggcauugaa

SEQ ID NO: 1128143 - RNA, 19 nt, Homo sapiens
  misc_RNA (1)...(19): siRNA sense strand
gaaaguaguggaggagaaa

SEQ ID NO: 1128144 - RNA, 19 nt, Homo sapiens
  misc_RNA (1)...(19): siRNA sense strand
gcucagcccuaaagaaagu

SEQ ID NO: 1128145 - RNA, 19 nt, Homo sapiens
  misc_RNA (1)...(19): siRNA sense strand
gcuccaugaugucagcuua

SEQ ID NO: 1128146 - RNA, 19 nt, Homo sapiens
  misc_RNA (1)...(19): siRNA sense strand
caacgauggugcuggaguu

SEQ ID NO: 1128147 - RNA, 19 nt, Homo sapiens
  misc_RNA (1)...(19): siRNA sense strand
gauacagaacuacgauaua

SEQ ID NO: 1128148 - RNA, 19 nt, Homo sapiens
  misc_RNA (1)...(19): siRNA sense strand
agaacacccuuaagaagaa

SEQ ID NO: 1128149 - RNA, 19 nt, Homo sapiens
  misc_RNA (1)...(19): siRNA sense strand
uagugaagcugacauugaa

SEQ ID NO: 1128150 - RNA, 19 nt, Homo sapiens
  misc_RNA (1)...(19): siRNA sense strand
cugaugaaauucccacuaa

SEQ ID NO: 1128151 - RNA, 19 nt, Homo sapiens
  misc_RNA (1)...(19): siRNA sense strand
ugaaagagggcuccagaaa

SEQ ID NO: 1128152 - RNA, 19 nt, Homo sapiens
  misc_RNA (1)...(19): siRNA sense strand
ggauaguguuuauggagaa

SEQ ID NO: 1128153 - RNA, 19 nt, Homo sapiens
  misc_RNA (1)...(19): siRNA sense strand
uaaugcagcugccaugugu

SEQ ID NO: 1128154 - RNA, 19 nt, Homo sapiens
  misc_RNA (1)...(19): siRNA sense strand
agaucaagcuccagggaua

SEQ ID NO: 1128155 - RNA, 19 nt, Homo sapiens
  misc_RNA (1)...(19): siRNA sense strand
ugaaacaaauacacccauu

SEQ ID NO: 1128156 - RNA, 19 nt, Homo sapiens
  misc_RNA (1)...(19): siRNA sense strand
aaacaaauacacccauuga

SEQ ID NO: 1128157 - RNA, 19 nt, Homo sapiens
  misc_RNA (1)...(19): siRNA sense strand
gcagcugaccgaucuauga

SEQ ID NO: 1128158 - RNA, 19 nt, Homo sapiens
  misc_RNA (1)...(19): siRNA sense strand
ccagagccaucaaagauca

SEQ ID NO: 1128159 - RNA, 19 nt, Homo sapiens
  misc_RNA (1)...(19): siRNA sense strand
ggaugaagaggaagaagaa

SEQ ID NO: 1128160 - RNA, 19 nt, Homo sapiens
  misc_RNA (1)...(19): siRNA sense strand
aggaggagcuacuauagaa

SEQ ID NO: 1128161 - RNA, 19 nt, Homo sapiens
  misc_RNA (1)...(19): siRNA sense strand
gaagaucuguaucaaaaga

SEQ ID NO: 1128162 - RNA, 19 nt, Homo sapiens
  misc_RNA (1)...(19): siRNA sense strand
guaaguaguaugccagaaa

SEQ ID NO: 1128163 - RNA, 19 nt, Homo sapiens
  misc_RNA (1)...(19): siRNA sense strand
gaaacaaauacacccauug

SEQ ID NO: 1128164 - RNA, 19 nt, Homo sapiens
  misc_RNA (1)...(19): siRNA sense strand
ggucuuucguggucaguaa

SEQ ID NO: 1128165 - RNA, 19 nt, Homo sapiens
  misc_RNA (1)...(19): siRNA sense strand
caaugucaguggaguauca

SEQ ID NO: 1128166 - RNA, 19 nt, Homo sapiens
  misc_RNA (1)...(19): siRNA sense strand
agagacagcagaaacauuu

SEQ ID NO: 1128167 - RNA, 19 nt, Homo sapiens
  misc_RNA (1)...(19): siRNA sense strand
gaaauagugcagaagauag

SEQ ID NO: 1128168 - RNA, 19 nt, Homo sapiens
  misc_RNA (1)...(19): siRNA sense strand
ucaagaacacccuuaagaa

SEQ ID NO: 1128169 - RNA, 19 nt, Homo sapiens
  misc_RNA (1)...(19): siRNA sense strand
guagugaagcugacauuga

SEQ ID NO: 1128170 - RNA, 19 nt, Homo sapiens
  misc_RNA (1)...(19): siRNA sense strand
gcugaucguucaaugaugu

SEQ ID NO: 1128171 - RNA, 19 nt, Homo sapiens
  misc_RNA (1)...(19): siRNA sense strand
gagccaagcacaucaacaa

SEQ ID NO: 1128172 - RNA, 19 nt, Homo sapiens
  misc_RNA (1)...(19): siRNA sense strand
gcauuuggcccaucugaga

SEQ ID NO: 1128173 - RNA, 19 nt, Homo sapiens
  misc_RNA (1)...(19): siRNA sense strand
guuaacaccuguagagucu

SEQ ID NO: 1128174 - RNA, 19 nt, Homo sapiens
  misc_RNA (1)...(19): siRNA sense strand
caaagaucauguugguaga

SEQ ID NO: 1128175 - RNA, 19 nt, Homo sapiens
  misc_RNA (1)...(19): siRNA sense strand
gcugaauggugaaacaaau

SEQ ID NO: 1128176 - RNA, 19 nt, Homo sapiens
  misc_RNA (1)...(19): siRNA sense strand
ugaagucugugcugaaauc

SEQ ID NO: 1128177 - RNA, 19 nt, Homo sapiens
  misc_RNA (1)...(19): siRNA sense strand
ggacauggaacgucuuaca

SEQ ID NO: 1128178 - RNA, 19 nt, Homo sapiens
  misc_RNA (1)...(19): siRNA sense strand
aaagagacacugccugauu

SEQ ID NO: 1128179 - RNA, 19 nt, Homo sapiens
  misc_RNA (1)...(19): siRNA sense strand
cagcaucuacucucaguuu

SEQ ID NO: 1128180 - RNA, 19 nt, Homo sapiens
  misc_RNA (1)...(19): siRNA sense strand
gcagaaacauuugauucca

SEQ ID NO: 1128181 - RNA, 19 nt, Homo sapiens
  misc_RNA (1)...(19): siRNA sense strand
cagaaacccuugugguauc

SEQ ID NO: 1128182 - RNA, 19 nt, Homo sapiens
  misc_RNA (1)...(19): siRNA sense strand
gaaccauccaugacaaaga

SEQ ID NO: 1128183 - RNA, 19 nt, Homo sapiens
  misc_RNA (1)...(19): siRNA sense strand
gaaggagcuuuagcauuuc

SEQ ID NO: 1128184 - RNA, 19 nt, Homo sapiens
  misc_RNA (1)...(19): siRNA sense strand
aagcacagauccaagucua

SEQ ID NO: 1128185 - RNA, 19 nt, Homo sapiens
  misc_RNA (1)...(19): siRNA sense strand
uaaugaagcagauuuagug

SEQ ID NO: 1128186 - RNA, 19 nt, Homo sapiens
  misc_RNA (1)...(19): siRNA sense strand
gaacuaguaaggguauuga

SEQ ID NO: 1128187 - RNA, 19 nt, Homo sapiens
  misc_RNA (1)...(19): siRNA sense strand
caucacauguuaugaaagg

SEQ ID NO: 1128188 - RNA, 19 nt, Homo sapiens
  misc_RNA (1)...(19): siRNA sense strand
gacaacaucugcuccaucu

SEQ ID NO: 1128189 - RNA, 19 nt, Homo sapiens
  misc_RNA (1)...(19): siRNA sense strand
ucaaugcaguggcuuucuu

SEQ ID NO: 1128190 - RNA, 19 nt, Homo sapiens
  misc_RNA (1)...(19): siRNA sense strand
caacaucugcuccaucuac

SEQ ID NO: 1128191 - RNA, 19 nt, Homo sapiens
  misc_RNA (1)...(19): siRNA sense strand
guacucccaugacaacauc

SEQ ID NO: 1128192 - RNA, 19 nt, Homo sapiens
  misc_RNA (1)...(19): siRNA sense strand
cuggguaccugucguguug

SEQ ID NO: 1128193 - RNA, 19 nt, Homo sapiens
  misc_RNA (1)...(19): siRNA sense strand
ccaugaauccgacaucaau

SEQ ID NO: 1128194 - RNA, 19 nt, Homo sapiens
  misc_RNA (1)...(19): siRNA sense strand
gugggcaccuggcaaagau

SEQ ID NO: 1128195 - RNA, 19 nt, Homo sapiens
  misc_RNA (1)...(19): siRNA sense strand
gacuucaacugcaacaucu

SEQ ID NO: 1128196 - RNA, 19 nt, Homo sapiens
  misc_RNA (1)...(19): siRNA sense strand
acucaacacugacccagau

SEQ ID NO: 1128197 - RNA, 19 nt, Homo sapiens
  misc_RNA (1)...(19): siRNA sense strand
ggccaugaauccgacauca

SEQ ID NO: 1128198 - RNA, 19 nt, Homo sapiens
  misc_RNA (1)...(19): siRNA sense strand
gcaccuggcaaagaucuau

SEQ ID NO: 1128199 - RNA, 19 nt, Homo sapiens
  misc_RNA (1)...(19): siRNA sense strand
gauuccaugugccgacaga

SEQ ID NO: 1128200 - RNA, 19 nt, Homo sapiens
  misc_RNA (1)...(19): siRNA sense strand
cgacuucaacugcaacauc

SEQ ID NO: 1128201 - RNA, 19 nt, Homo sapiens
  misc_RNA (1)...(19): siRNA sense strand
gggacuccuuccucaagau

SEQ ID NO: 1128202 - RNA, 19 nt, Homo sapiens
  misc_RNA (1)...(19): siRNA sense strand
gauggccgcacguuugugu

SEQ ID NO: 1128203 - RNA, 19 nt, Homo sapiens
  misc_RNA (1)...(19): siRNA sense strand
gccagcagacaguggguuu

SEQ ID NO: 1128204 - RNA, 19 nt, Homo sapiens
  misc_RNA (1)...(19): siRNA sense strand
ggacuccuuccucaagauc

SEQ ID NO: 1128205 - RNA, 19 nt, Homo sapiens
  misc_RNA (1)...(19): siRNA sense strand
augggaagcucaucaucug

SEQ ID NO: 1128206 - RNA, 19 nt, Homo sapiens
  misc_RNA (1)...(19): siRNA sense strand
aacaucaucuguggcauca

SEQ ID NO: 1128207 - RNA, 19 nt, Homo sapiens
  misc_RNA (1)...(19): siRNA sense strand
ccucaagaucuggaacuaa

SEQ ID NO: 1128208 - RNA, 19 nt, Homo sapiens
  misc_RNA (1)...(19): siRNA sense strand
cuuccuggaugacaaccaa

SEQ ID NO: 1128209 - RNA, 19 nt, Homo sapiens
  misc_RNA (1)...(19): siRNA sense strand
cuaaagagauggaacauaa

SEQ ID NO: 1128210 - RNA, 19 nt, Homo sapiens
  misc_RNA (1)...(19): siRNA sense strand
agaaggagcuuuagcauuu

SEQ ID NO: 1128211 - RNA, 19 nt, Homo sapiens
  misc_RNA (1)...(19): siRNA sense strand
gcuagaaccuccuguagua

SEQ ID NO: 1128212 - RNA, 19 nt, Homo sapiens
  misc_RNA (1)...(19): siRNA sense strand
ggaaauuggugaagagaaa

SEQ ID NO: 1128213 - RNA, 19 nt, Homo sapiens
  misc_RNA (1)...(19): siRNA sense strand
gagccagaaucuucaauua

SEQ ID NO: 1128214 - RNA, 19 nt, Homo sapiens
  misc_RNA (1)...(19): siRNA sense strand
ggauaaggcucaauuacuu

SEQ ID NO: 1128215 - RNA, 19 nt, Homo sapiens
  misc_RNA (1)...(19): siRNA sense strand
caacugagguggcuauaga

SEQ ID NO: 1128216 - RNA, 19 nt, Homo sapiens
  misc_RNA (1)...(19): siRNA sense strand
ugacaaagauucuggauuc

SEQ ID NO: 1128217 - RNA, 19 nt, Homo sapiens
  misc_RNA (1)...(19): siRNA sense strand
cgacagcgcuggaauccua

SEQ ID NO: 1128218 - RNA, 19 nt, Homo sapiens
  misc_RNA (1)...(19): siRNA sense strand
gcgcuggaauccuauaaua

SEQ ID NO: 1128219 - RNA, 19 nt, Homo sapiens
  misc_RNA (1)...(19): siRNA sense strand
ggucuuagauacagaacua

SEQ ID NO: 1128220 - RNA, 19 nt, Homo sapiens
  misc_RNA (1)...(19): siRNA sense strand
gaagauagaggaaguacuu

SEQ ID NO: 1128221 - RNA, 19 nt, Homo sapiens
  misc_RNA (1)...(19): siRNA sense strand
gaaguaagcguuccaaauc

SEQ ID NO: 1128222 - RNA, 19 nt, Homo sapiens
  misc_RNA (1)...(19): siRNA sense strand
ucauuaagaucucgaagua

SEQ ID NO: 1128223 - RNA, 19 nt, Homo sapiens
  misc_RNA (1)...(19): siRNA sense strand
aaacagauccuacugauga

SEQ ID NO: 1128224 - RNA, 19 nt, Homo sapiens
  misc_RNA (1)...(19): siRNA sense strand
ggaagaagaucuguaucaa

SEQ ID NO: 1128225 - RNA, 19 nt, Homo sapiens
  misc_RNA (1)...(19): siRNA sense strand
ggauacagaagaaccauua

SEQ ID NO: 1128226 - RNA, 19 nt, Homo sapiens
  misc_RNA (1)...(19): siRNA sense strand
agaaagagcuucagagucu

SEQ ID NO: 1128227 - RNA, 19 nt, Homo sapiens
  misc_RNA (1)...(19): siRNA sense strand
gcucuaugaugucagcuua

SEQ ID NO: 1128228 - RNA, 19 nt, Homo sapiens
  misc_RNA (1)...(19): siRNA sense strand
ggagaucucuguucagucu

SEQ ID NO: 1128229 - RNA, 19 nt, Homo sapiens
  misc_RNA (1)...(19): siRNA sense strand
caucaucccuuuaaacuca

SEQ ID NO: 1128230 - RNA, 19 nt, Homo sapiens
  misc_RNA (1)...(19): siRNA sense strand
agacgaagcuucaguaucu

SEQ ID NO: 1128231 - RNA, 19 nt, Homo sapiens
  misc_RNA (1)...(19): siRNA sense strand
gcugaacgcucuaugaugu

SEQ ID NO: 1128232 - RNA, 19 nt, Homo sapiens
  misc_RNA (1)...(19): siRNA sense strand
gcucuaugaugucuuauga

SEQ ID NO: 1128233 - RNA, 19 nt, Homo sapiens
  misc_RNA (1)...(19): siRNA sense strand
gaagaaauagugcagaaga

SEQ ID NO: 1128234 - RNA, 19 nt, Homo sapiens
  misc_RNA (1)...(19): siRNA sense strand
caaaucuucugaacacaaa

SEQ ID NO: 1128235 - RNA, 19 nt, Homo sapiens
  misc_RNA (1)...(19): siRNA sense strand
gauauaagccagacuugaa

SEQ ID NO: 1128236 - RNA, 19 nt, Homo sapiens
  misc_RNA (1)...(19): siRNA sense strand
gaaacucuaucuucuacug

SEQ ID NO: 1128237 - RNA, 19 nt, Homo sapiens
  misc_RNA (1)...(19): siRNA sense strand
gaugaagucugugcugaaa

SEQ ID NO: 1128238 - RNA, 19 nt, Homo sapiens
  misc_RNA (1)...(19): siRNA sense strand
gaagucaucugagccaguu

SEQ ID NO: 1128239 - RNA, 19 nt, Homo sapiens
  misc_RNA (1)...(19): siRNA sense strand
gcugagcgcucuaugaugu

SEQ ID NO: 1128240 - RNA, 19 nt, Homo sapiens
  misc_RNA (1)...(19): siRNA sense strand
aaacagaucgcacagagua

SEQ ID NO: 1128241 - RNA, 19 nt, Homo sapiens
  misc_RNA (1)...(19): siRNA sense strand
gaagaagaucuguaucaaa

SEQ ID NO: 1128242 - RNA, 19 nt, Homo sapiens
  misc_RNA (1)...(19): siRNA sense strand
caucggagauugcagauuc

SEQ ID NO: 1128243 - RNA, 19 nt, Homo sapiens
  misc_RNA (1)...(19): siRNA sense strand
ugaagcagauuuagugaga

SEQ ID NO: 1128244 - RNA, 19 nt, Homo sapiens
  misc_RNA (1)...(19): siRNA sense strand
gaaagugaacaugguauaa

SEQ ID NO: 1128245 - RNA, 19 nt, Homo sapiens
  misc_RNA (1)...(19): siRNA sense strand
agagcagacucaaguaaua

SEQ ID NO: 1128246 - RNA, 19 nt, Homo sapiens
  misc_RNA (1)...(19): siRNA sense strand
gguagaagaaggagcuuua

SEQ ID NO: 1128247 - RNA, 19 nt, Homo sapiens
  misc_RNA (1)...(19): siRNA sense strand
ccaggagucuaccaaauga

SEQ ID NO: 1128248 - RNA, 19 nt, Homo sapiens
  misc_RNA (1)...(19): siRNA sense strand
gaacgucuuacaagccuua

SEQ ID NO: 1128249 - RNA, 19 nt, Homo sapiens
  misc_RNA (1)...(19): siRNA sense strand
ugacuuguaugguaucuga

SEQ ID NO: 1128250 - RNA, 19 nt, Homo sapiens
  misc_RNA (1)...(19): siRNA sense strand
caaagauucuggauuccuu

SEQ ID NO: 1128251 - RNA, 19 nt, Homo sapiens
  misc_RNA (1)...(19): siRNA sense strand
uguagagucugcaguagua

SEQ ID NO: 1128252 - RNA, 19 nt, Homo sapiens
  misc_RNA (1)...(19): siRNA sense strand
gcugaucgaucuaugaugu

SEQ ID NO: 1128253 - RNA, 19 nt, Homo sapiens
  misc_RNA (1)...(19): siRNA sense strand
caucaaagaucauguuggu

SEQ ID NO: 1128254 - RNA, 19 nt, Homo sapiens
  misc_RNA (1)...(19): siRNA sense strand
caucagagccuccuguuau

SEQ ID NO: 1128255 - RNA, 19 nt, Homo sapiens
  misc_RNA (1)...(19): siRNA sense strand
gaagaagguuuagcagauc

SEQ ID NO: 1128256 - RNA, 19 nt, Homo sapiens
  misc_RNA (1)...(19): siRNA sense strand
gaaaggaauuaaucuaucc

SEQ ID NO: 1128257 - RNA, 19 nt, Homo sapiens
  misc_RNA (1)...(19): siRNA sense strand
ccaagcacaucaacaacaa

SEQ ID NO: 1128258 - RNA, 19 nt, Homo sapiens
  misc_RNA (1)...(19): siRNA sense strand
uaugaacgcuccaugaugu

SEQ ID NO: 1128259 - RNA, 19 nt, Homo sapiens
  misc_RNA (1)...(19): siRNA sense strand
uaugaacgcuccaugaugu

SEQ ID NO: 1128260 - RNA, 19 nt, Homo sapiens
  misc_RNA (1)...(19): siRNA sense strand
cgacagcagugccugaguu

SEQ ID NO: 1128261 - RNA, 19 nt, Homo sapiens
  misc_RNA (1)...(19): siRNA sense strand
agaagaagguuuagcagau

SEQ ID NO: 1128262 - RNA, 19 nt, Homo sapiens
  misc_RNA (1)...(19): siRNA sense strand
cgacgaaggucuagaucug

SEQ ID NO: 1128263 - RNA, 19 nt, Homo sapiens
  misc_RNA (1)...(19): siRNA sense strand
ccuuagagcuggcauugaa

SEQ ID NO: 1128264 - RNA, 19 nt, Homo sapiens
  misc_RNA (1)...(19): siRNA sense strand
gaaaguaguggaggagaaa

SEQ ID NO: 1128265 - RNA, 19 nt, Homo sapiens
  misc_RNA (1)...(19): siRNA sense strand
gcucagcccuaaagaaagu

SEQ ID NO: 1128266 - RNA, 19 nt, Homo sapiens
  misc_RNA (1)...(19): siRNA sense strand
gcuccaugaugucagcuua

SEQ ID NO: 1128267 - RNA, 19 nt, Homo sapiens
  misc_RNA (1)...(19): siRNA sense strand
caacgauggugcuggaguu

SEQ ID NO: 1128268 - RNA, 19 nt, Homo sapiens
  misc_RNA (1)...(19): siRNA sense strand
gauacagaacuacgauaua

SEQ ID NO: 1128269 - RNA, 19 nt, Homo sapiens
  misc_RNA (1)...(19): siRNA sense strand
agaacacccuuaagaagaa

SEQ ID NO: 1128270 - RNA, 19 nt, Homo sapiens
  misc_RNA (1)...(19): siRNA sense strand
uagugaagcugacauugaa

SEQ ID NO: 1128271 - RNA, 19 nt, Homo sapiens
  misc_RNA (1)...(19): siRNA sense strand
cugaugaaauucccacuaa

SEQ ID NO: 1128272 - RNA, 19 nt, Homo sapiens
  misc_RNA (1)...(19): siRNA sense strand
ugaaagagggcuccagaaa

SEQ ID NO: 1128273 - RNA, 19 nt, Homo sapiens
  misc_RNA (1)...(19): siRNA sense strand
ggauaguguuuauggagaa

SEQ ID NO: 1128274 - RNA, 19 nt, Homo sapiens
  misc_RNA (1)...(19): siRNA sense strand
guaaagaagaugaugaugu

SEQ ID NO: 1128275 - RNA, 19 nt, Homo sapiens
  misc_RNA (1)...(19): siRNA sense strand
uaaugcagcugccaugugu

SEQ ID NO: 1128276 - RNA, 19 nt, Homo sapiens
  misc_RNA (1)...(19): siRNA sense strand
agaucaagcuccagggaua

SEQ ID NO: 1128277 - RNA, 19 nt, Homo sapiens
  misc_RNA (1)...(19): siRNA sense strand
ugaaacaaauacacccauu

SEQ ID NO: 1128278 - RNA, 19 nt, Homo sapiens
  misc_RNA (1)...(19): siRNA sense strand
aaacaaauacacccauuga

SEQ ID NO: 1128279 - RNA, 19 nt, Homo sapiens
  misc_RNA (1)...(19): siRNA sense strand
gcagcugaccgaucuauga

SEQ ID NO: 1128280 - RNA, 19 nt, Homo sapiens
  misc_RNA (1)...(19): siRNA sense strand
ccagagccaucaaagauca

SEQ ID NO: 1128281 - RNA, 19 nt, Homo sapiens
  misc_RNA (1)...(19): siRNA sense strand
ggaugaagaggaagaagaa

SEQ ID NO: 1128282 - RNA, 19 nt, Homo sapiens
  misc_RNA (1)...(19): siRNA sense strand
aggaggagcuacuauagaa

SEQ ID NO: 1128283 - RNA, 19 nt, Homo sapiens
  misc_RNA (1)...(19): siRNA sense strand
gaagaucuguaucaaaaga

SEQ ID NO: 1128284 - RNA, 19 nt, Homo sapiens
  misc_RNA (1)...(19): siRNA sense strand
guaaguaguaugccagaaa

SEQ ID NO: 1128285 - RNA, 19 nt, Homo sapiens
  misc_RNA (1)...(19): siRNA sense strand
gaaacaaauacacccauug

SEQ ID NO: 1128286 - RNA, 19 nt, Homo sapiens
  misc_RNA (1)...(19): siRNA sense strand
ggucuuucguggucaguaa

SEQ ID NO: 1128287 - RNA, 19 nt, Homo sapiens
  misc_RNA (1)...(19): siRNA sense strand
caaugucaguggaguauca

SEQ ID NO: 1128288 - RNA, 19 nt, Homo sapiens
  misc_RNA (1)...(19): siRNA sense strand
agagacagcagaaacauuu

SEQ ID NO: 1128289 - RNA, 19 nt, Homo sapiens
  misc_RNA (1)...(19): siRNA sense strand
gagccaagcacaucaacaa

SEQ ID NO: 1128290 - RNA, 19 nt, Homo sapiens
  misc_RNA (1)...(19): siRNA sense strand
ucaagaacacccuuaagaa

SEQ ID NO: 1128291 - RNA, 19 nt, Homo sapiens
  misc_RNA (1)...(19): siRNA sense strand
guagugaagcugacauuga

SEQ ID NO: 1128292 - RNA, 19 nt, Homo sapiens
  misc_RNA (1)...(19): siRNA sense strand
gcugaucguucaaugaugu

SEQ ID NO: 1128293 - RNA, 19 nt, Homo sapiens
  misc_RNA (1)...(19): siRNA sense strand
gaaauagugcagaagauag

SEQ ID NO: 1128294 - RNA, 19 nt, Homo sapiens
  misc_RNA (1)...(19): siRNA sense strand
gcauuuggcccaucugaga

SEQ ID NO: 1128295 - RNA, 19 nt, Homo sapiens
  misc_RNA (1)...(19): siRNA sense strand
guuaacaccuguagagucu

SEQ ID NO: 1128296 - RNA, 19 nt, Homo sapiens
  misc_RNA (1)...(19): siRNA sense strand
caaagaucauguugguaga

SEQ ID NO: 1128297 - RNA, 19 nt, Homo sapiens
  misc_RNA (1)...(19): siRNA sense strand
gcugaauggugaaacaaau

SEQ ID NO: 1128298 - RNA, 19 nt, Homo sapiens
  misc_RNA (1)...(19): siRNA sense strand
ugaagucugugcugaaauc

SEQ ID NO: 1128299 - RNA, 19 nt, Homo sapiens
  misc_RNA (1)...(19): siRNA sense strand
ggacauggaacgucuuaca

SEQ ID NO: 1128300 - RNA, 19 nt, Homo sapiens
  misc_RNA (1)...(19): siRNA sense strand
aaagagacacugccugauu

SEQ ID NO: 1128301 - RNA, 19 nt, Homo sapiens
  misc_RNA (1)...(19): siRNA sense strand
cagcaucuacucucaguuu

SEQ ID NO: 1128302 - RNA, 19 nt, Homo sapiens
  misc_RNA (1)...(19): siRNA sense strand
gcagaaacauuugauucca

SEQ ID NO: 1128303 - RNA, 19 nt, Homo sapiens
  misc_RNA (1)...(19): siRNA sense strand
cagaaacccuugugguauc

SEQ ID NO: 1128304 - RNA, 19 nt, Homo sapiens
  misc_RNA (1)...(19): siRNA sense strand
caucacauguuaugaaagg

SEQ ID NO: 1128305 - RNA, 19 nt, Homo sapiens
  misc_RNA (1)...(19): siRNA sense strand
gaaggagcuuuagcauuuc

SEQ ID NO: 1128306 - RNA, 19 nt, Homo sapiens
  misc_RNA (1)...(19): siRNA sense strand
aagcacagauccaagucua

SEQ ID NO: 1128307 - RNA, 19 nt, Homo sapiens
  misc_RNA (1)...(19): siRNA sense strand
uaaugaagcagauuuagug

SEQ ID NO: 1128308 - RNA, 19 nt, Homo sapiens
  misc_RNA (1)...(19): siRNA sense strand
gaacuaguaaggguauuga

SEQ ID NO: 1128309 - RNA, 19 nt, Homo sapiens
  misc_RNA (1)...(19): siRNA sense strand
cuaaagagauggaacauaa

SEQ ID NO: 1128310 - RNA, 19 nt, Homo sapiens
  misc_RNA (1)...(19): siRNA sense strand
agaaggagcuuuagcauuu

SEQ ID NO: 1128311 - RNA, 19 nt, Homo sapiens
  misc_RNA (1)...(19): siRNA sense strand
gcuagaaccuccuguagua

SEQ ID NO: 1128312 - RNA, 19 nt, Homo sapiens
  misc_RNA (1)...(19): siRNA sense strand
ggaaauuggugaagagaaa

SEQ ID NO: 1128313 - RNA, 19 nt, Homo sapiens
  misc_RNA (1)...(19): siRNA sense strand
gagccagaaucuucaauua

SEQ ID NO: 1128314 - RNA, 19 nt, Homo sapiens
  misc_RNA (1)...(19): siRNA sense strand
ggauaaggcucaauuacuu

SEQ ID NO: 1128315 - RNA, 19 nt, Homo sapiens
  misc_RNA (1)...(19): siRNA sense strand
caacugagguggcuauaga

SEQ ID NO: 1128316 - RNA, 19 nt, Homo sapiens
  misc_RNA (1)...(19): siRNA sense strand
ugacaaagauucuggauuc

SEQ ID NO: 1128317 - RNA, 19 nt, Homo sapiens
  misc_RNA (1)...(19): siRNA sense strand
cgacagcgcuggaauccua

SEQ ID NO: 1128318 - RNA, 19 nt, Homo sapiens
  misc_RNA (1)...(19): siRNA sense strand
gcgcuggaauccuauaaua

SEQ ID NO: 1128319 - RNA, 19 nt, Homo sapiens
  misc_RNA (1)...(19): siRNA sense strand
ggucuuagauacagaacua

SEQ ID NO: 1128320 - RNA, 19 nt, Homo sapiens
  misc_RNA (1)...(19): siRNA sense strand
gaagauagaggaaguacuu

SEQ ID NO: 1128321 - RNA, 19 nt, Homo sapiens
  misc_RNA (1)...(19): siRNA sense strand
gaaguaagcguuccaaauc

SEQ ID NO: 1128322 - RNA, 19 nt, Homo sapiens
  misc_RNA (1)...(19): siRNA sense strand
ucauuaagaucucgaagua

SEQ ID NO: 1128323 - RNA, 19 nt, Homo sapiens
  misc_RNA (1)...(19): siRNA sense strand
aaacagauccuacugauga

SEQ ID NO: 1128324 - RNA, 19 nt, Homo sapiens
  misc_RNA (1)...(19): siRNA sense strand
ggaagaagaucuguaucaa

SEQ ID NO: 1128325 - RNA, 19 nt, Homo sapiens
  misc_RNA (1)...(19): siRNA sense strand
ggauacagaagaaccauua

SEQ ID NO: 1128326 - RNA, 19 nt, Homo sapiens
  misc_RNA (1)...(19): siRNA sense strand
agaaagagcuucagagucu

SEQ ID NO: 1128327 - RNA, 19 nt, Homo sapiens
  misc_RNA (1)...(19): siRNA sense strand
gcucuaugaugucagcuua

SEQ ID NO: 1128328 - RNA, 19 nt, Homo sapiens
  misc_RNA (1)...(19): siRNA sense strand
ggagaucucuguucagucu

SEQ ID NO: 1128329 - RNA, 19 nt, Homo sapiens
  misc_RNA (1)...(19): siRNA sense strand
caucaucccuuuaaacuca

SEQ ID NO: 1128330 - RNA, 19 nt, Homo sapiens
  misc_RNA (1)...(19): siRNA sense strand
agacgaagcuucaguaucu

SEQ ID NO: 1128331 - RNA, 19 nt, Homo sapiens
  misc_RNA (1)...(19): siRNA sense strand
gcugaacgcucuaugaugu

SEQ ID NO: 1128332 - RNA, 19 nt, Homo sapiens
  misc_RNA (1)...(19): siRNA sense strand
gcucuaugaugucuuauga

SEQ ID NO: 1128333 - RNA, 19 nt, Homo sapiens
  misc_RNA (1)...(19): siRNA sense strand
gaagaaauagugcagaaga

SEQ ID NO: 1128334 - RNA, 19 nt, Homo sapiens
  misc_RNA (1)...(19): siRNA sense strand
caaaucuucugaacacaaa

SEQ ID NO: 1128335 - RNA, 19 nt, Homo sapiens
  misc_RNA (1)...(19): siRNA sense strand
gauauaagccagacuugaa

SEQ ID NO: 1128336 - RNA, 19 nt, Homo sapiens
  misc_RNA (1)...(19): siRNA sense strand
gaaacucuaucuucuacug

SEQ ID NO: 1128337 - RNA, 19 nt, Homo sapiens
  misc_RNA (1)...(19): siRNA sense strand
gaugaagucugugcugaaa

SEQ ID NO: 1128338 - RNA, 19 nt, Homo sapiens
  misc_RNA (1)...(19): siRNA sense strand
gaagucaucugagccaguu

SEQ ID NO: 1128339 - RNA, 19 nt, Homo sapiens
  misc_RNA (1)...(19): siRNA sense strand
gcugagcgcucuaugaugu

SEQ ID NO: 1128340 - RNA, 19 nt, Homo sapiens
  misc_RNA (1)...(19): siRNA sense strand
aaacagaucgcacagagua

SEQ ID NO: 1128341 - RNA, 19 nt, Homo sapiens
  misc_RNA (1)...(19): siRNA sense strand
gaagaagaucuguaucaaa

SEQ ID NO: 1128342 - RNA, 19 nt, Homo sapiens
  misc_RNA (1)...(19): siRNA sense strand
caucggagauugcagauuc

SEQ ID NO: 1128343 - RNA, 19 nt, Homo sapiens
  misc_RNA (1)...(19): siRNA sense strand
ugaagcagauuuagugaga

SEQ ID NO: 1128344 - RNA, 19 nt, Homo sapiens
  misc_RNA (1)...(19): siRNA sense strand
gaaagugaacaugguauaa

SEQ ID NO: 1128345 - RNA, 19 nt, Homo sapiens
  misc_RNA (1)...(19): siRNA sense strand
agagcagacucaaguaaua

SEQ ID NO: 1128346 - RNA, 19 nt, Homo sapiens
  misc_RNA (1)...(19): siRNA sense strand
gguagaagaaggagcuuua

SEQ ID NO: 1128347 - RNA, 19 nt, Homo sapiens
  misc_RNA (1)...(19): siRNA sense strand
ccaggagucuaccaaauga

SEQ ID NO: 1128348 - RNA, 19 nt, Homo sapiens
  misc_RNA (1)...(19): siRNA sense strand
gaacgucuuacaagccuua

SEQ ID NO: 1128349 - RNA, 19 nt, Homo sapiens
  misc_RNA (1)...(19): siRNA sense strand
ugacuuguaugguaucuga

SEQ ID NO: 1128350 - RNA, 19 nt, Homo sapiens
  misc_RNA (1)...(19): siRNA sense strand
caaagauucuggauuccuu

SEQ ID NO: 1128351 - RNA, 19 nt, Homo sapiens
  misc_RNA (1)...(19): siRNA sense strand
uguagagucugcaguagua

SEQ ID NO: 1128352 - RNA, 19 nt, Homo sapiens
  misc_RNA (1)...(19): siRNA sense strand
gcugaucgaucuaugaugu

SEQ ID NO: 1128353 - RNA, 19 nt, Homo sapiens
  misc_RNA (1)...(19): siRNA sense strand
caucaaagaucauguuggu

SEQ ID NO: 1128354 - RNA, 19 nt, Homo sapiens
  misc_RNA (1)...(19): siRNA sense strand
caucagagccuccuguuau

SEQ ID NO: 1128355 - RNA, 19 nt, Homo sapiens
  misc_RNA (1)...(19): siRNA sense strand
gaagaagguuuagcagauc

SEQ ID NO: 1128356 - RNA, 19 nt, Homo sapiens
  misc_RNA (1)...(19): siRNA sense strand
gaaaggaauuaaucuaucc

SEQ ID NO: 1128357 - RNA, 19 nt, Homo sapiens
  misc_RNA (1)...(19): siRNA sense strand
ccaagcacaucaacaacaa

SEQ ID NO: 1128358 - RNA, 19 nt, Homo sapiens
  misc_RNA (1)...(19): siRNA sense strand
uaugaacgcuccaugaugu

SEQ ID NO: 1128359 - RNA, 19 nt, Homo sapiens
  misc_RNA (1)...(19): siRNA sense strand
uaugaacgcuccaugaugu

SEQ ID NO: 1128360 - RNA, 19 nt, Homo sapiens
  misc_RNA (1)...(19): siRNA sense strand
cgacagcagugccugaguu

SEQ ID NO: 1128361 - RNA, 19 nt, Homo sapiens
  misc_RNA (1)...(19): siRNA sense strand
agaagaagguuuagcagau

SEQ ID NO: 1128362 - RNA, 19 nt, Homo sapiens
  misc_RNA (1)...(19): siRNA sense strand
cgacgaaggucuagaucug

SEQ ID NO: 1128363 - RNA, 19 nt, Homo sapiens
  misc_RNA (1)...(19): siRNA sense strand
ccuuagagcuggcauugaa

SEQ ID NO: 1128364 - RNA, 19 nt, Homo sapiens
  misc_RNA (1)...(19): siRNA sense strand
gaaaguaguggaggagaaa

SEQ ID NO: 1128365 - RNA, 19 nt, Homo sapiens
  misc_RNA (1)...(19): siRNA sense strand
gcucagcccuaaagaaagu

SEQ ID NO: 1128366 - RNA, 19 nt, Homo sapiens
  misc_RNA (1)...(19): siRNA sense strand
gcuccaugaugucagcuua

SEQ ID NO: 1128367 - RNA, 19 nt, Homo sapiens
  misc_RNA (1)...(19): siRNA sense strand
caacgauggugcuggaguu

SEQ ID NO: 1128368 - RNA, 19 nt, Homo sapiens
  misc_RNA (1)...(19): siRNA sense strand
gauacagaacuacgauaua

SEQ ID NO: 1128369 - RNA, 19 nt, Homo sapiens
  misc_RNA (1)...(19): siRNA sense strand
agaacacccuuaagaagaa

SEQ ID NO: 1128370 - RNA, 19 nt, Homo sapiens
  misc_RNA (1)...(19): siRNA sense strand
uagugaagcugacauugaa

SEQ ID NO: 1128371 - RNA, 19 nt, Homo sapiens
  misc_RNA (1)...(19): siRNA sense strand
cugaugaaauucccacuaa

SEQ ID NO: 1128372 - RNA, 19 nt, Homo sapiens
  misc_RNA (1)...(19): siRNA sense strand
ugaaagagggcuccagaaa

SEQ ID NO: 1128373 - RNA, 19 nt, Homo sapiens
  misc_RNA (1)...(19): siRNA sense strand
ggauaguguuuauggagaa

SEQ ID NO: 1128374 - RNA, 19 nt, Homo sapiens
  misc_RNA (1)...(19): siRNA sense strand
uaaugcagcugccaugugu

SEQ ID NO: 1128375 - RNA, 19 nt, Homo sapiens
  misc_RNA (1)...(19): siRNA sense strand
agaucaagcuccagggaua

SEQ ID NO: 1128376 - RNA, 19 nt, Homo sapiens
  misc_RNA (1)...(19): siRNA sense strand
ugaaacaaauacacccauu

SEQ ID NO: 1128377 - RNA, 19 nt, Homo sapiens
  misc_RNA (1)...(19): siRNA sense strand
aaacaaauacacccauuga

SEQ ID NO: 1128378 - RNA, 19 nt, Homo sapiens
  misc_RNA (1)...(19): siRNA sense strand
gcagcugaccgaucuauga

SEQ ID NO: 1128379 - RNA, 19 nt, Homo sapiens
  misc_RNA (1)...(19): siRNA sense strand
ccagagccaucaaagauca

SEQ ID NO: 1128380 - RNA, 19 nt, Homo sapiens
  misc_RNA (1)...(19): siRNA sense strand
ggaugaagaggaagaagaa

SEQ ID NO: 1128381 - RNA, 19 nt, Homo sapiens
  misc_RNA (1)...(19): siRNA sense strand
aggaggagcuacuauagaa

SEQ ID NO: 1128382 - RNA, 19 nt, Homo sapiens
  misc_RNA (1)...(19): siRNA sense strand
gaagaucuguaucaaaaga

SEQ ID NO: 1128383 - RNA, 19 nt, Homo sapiens
  misc_RNA (1)...(19): siRNA sense strand
guaaguaguaugccagaaa

SEQ ID NO: 1128384 - RNA, 19 nt, Homo sapiens
  misc_RNA (1)...(19): siRNA sense strand
gaaacaaauacacccauug

SEQ ID NO: 1128385 - RNA, 19 nt, Homo sapiens
  misc_RNA (1)...(19): siRNA sense strand
ggucuuucguggucaguaa

SEQ ID NO: 1128386 - RNA, 19 nt, Homo sapiens
  misc_RNA (1)...(19): siRNA sense strand
caaugucaguggaguauca

SEQ ID NO: 1128387 - RNA, 19 nt, Homo sapiens
  misc_RNA (1)...(19): siRNA sense strand
agagacagcagaaacauuu

SEQ ID NO: 1128388 - RNA, 19 nt, Homo sapiens
  misc_RNA (1)...(19): siRNA sense strand
gaaauagugcagaagauag

SEQ ID NO: 1128389 - RNA, 19 nt, Homo sapiens
  misc_RNA (1)...(19): siRNA sense strand
ucaagaacacccuuaagaa

SEQ ID NO: 1128390 - RNA, 19 nt, Homo sapiens
  misc_RNA (1)...(19): siRNA sense strand
guagugaagcugacauuga

SEQ ID NO: 1128391 - RNA, 19 nt, Homo sapiens
  misc_RNA (1)...(19): siRNA sense strand
gcugaucguucaaugaugu

SEQ ID NO: 1128392 - RNA, 19 nt, Homo sapiens
  misc_RNA (1)...(19): siRNA sense strand
gagccaagcacaucaacaa

SEQ ID NO: 1128393 - RNA, 19 nt, Homo sapiens
  misc_RNA (1)...(19): siRNA sense strand
gcauuuggcccaucugaga

SEQ ID NO: 1128394 - RNA, 19 nt, Homo sapiens
  misc_RNA (1)...(19): siRNA sense strand
guuaacaccuguagagucu

SEQ ID NO: 1128395 - RNA, 19 nt, Homo sapiens
  misc_RNA (1)...(19): siRNA sense strand
caaagaucauguugguaga

SEQ ID NO: 1128396 - RNA, 19 nt, Homo sapiens
  misc_RNA (1)...(19): siRNA sense strand
gcugaauggugaaacaaau

SEQ ID NO: 1128397 - RNA, 19 nt, Homo sapiens
  misc_RNA (1)...(19): siRNA sense strand
ugaagucugugcugaaauc

SEQ ID NO: 1128398 - RNA, 19 nt, Homo sapiens
  misc_RNA (1)...(19): siRNA sense strand
ggacauggaacgucuuaca

SEQ ID NO: 1128399 - RNA, 19 nt, Homo sapiens
  misc_RNA (1)...(19): siRNA sense strand
aaagagacacugccugauu

SEQ ID NO: 1128400 - RNA, 19 nt, Homo sapiens
  misc_RNA (1)...(19): siRNA sense strand
cagcaucuacucucaguuu

SEQ ID NO: 1128401 - RNA, 19 nt, Homo sapiens
  misc_RNA (1)...(19): siRNA sense strand
gcagaaacauuugauucca

SEQ ID NO: 1128402 - RNA, 19 nt, Homo sapiens
  misc_RNA (1)...(19): siRNA sense strand
cagaaacccuugugguauc

SEQ ID NO: 1128403 - RNA, 19 nt, Homo sapiens
  misc_RNA (1)...(19): siRNA sense strand
gaaccauccaugacaaaga

SEQ ID NO: 1128404 - RNA, 19 nt, Homo sapiens
  misc_RNA (1)...(19): siRNA sense strand
gaaggagcuuuagcauuuc

SEQ ID NO: 1128405 - RNA, 19 nt, Homo sapiens
  misc_RNA (1)...(19): siRNA sense strand
aagcacagauccaagucua

SEQ ID NO: 1128406 - RNA, 19 nt, Homo sapiens
  misc_RNA (1)...(19): siRNA sense strand
uaaugaagcagauuuagug

SEQ ID NO: 1128407 - RNA, 19 nt, Homo sapiens
  misc_RNA (1)...(19): siRNA sense strand
gaacuaguaaggguauuga

SEQ ID NO: 1128408 - RNA, 19 nt, Homo sapiens
  misc_RNA (1)...(19): siRNA sense strand
caucacauguuaugaaagg

SEQ ID NO: 1128409 - RNA, 19 nt, Homo sapiens
  misc_RNA (1)...(19): siRNA sense strand
cuaaagagauggaacauaa

SEQ ID NO: 1128410 - RNA, 19 nt, Homo sapiens
  misc_RNA (1)...(19): siRNA sense strand
agaaggagcuuuagcauuu

SEQ ID NO: 1128411 - RNA, 19 nt, Homo sapiens
  misc_RNA (1)...(19): siRNA sense strand
gcuagaaccuccuguagua

SEQ ID NO: 1128412 - RNA, 19 nt, Homo sapiens
  misc_RNA (1)...(19): siRNA sense strand
ggaaauuggugaagagaaa

SEQ ID NO: 1128413 - RNA, 19 nt, Homo sapiens
  misc_RNA (1)...(19): siRNA sense strand
gagccagaaucuucaauua

SEQ ID NO: 1128414 - RNA, 19 nt, Homo sapiens
  misc_RNA (1)...(19): siRNA sense strand
ggauaaggcucaauuacuu

SEQ ID NO: 1128415 - RNA, 19 nt, Homo sapiens
  misc_RNA (1)...(19): siRNA sense strand
caacugagguggcuauaga

SEQ ID NO: 1128416 - RNA, 19 nt, Homo sapiens
  misc_RNA (1)...(19): siRNA sense strand
ugacaaagauucuggauuc

SEQ ID NO: 1128417 - RNA, 19 nt, Homo sapiens
  misc_RNA (1)...(19): siRNA sense strand
cgacagcgcuggaauccua

SEQ ID NO: 1128418 - RNA, 19 nt, Homo sapiens
  misc_RNA (1)...(19): siRNA sense strand
gcgcuggaauccuauaaua

SEQ ID NO: 1128419 - RNA, 19 nt, Homo sapiens
  misc_RNA (1)...(19): siRNA sense strand
ggucuuagauacagaacua

SEQ ID NO: 1128420 - RNA, 19 nt, Homo sapiens
  misc_RNA (1)...(19): siRNA sense strand
gaagauagaggaaguacuu

SEQ ID NO: 1128421 - RNA, 19 nt, Homo sapiens
  misc_RNA (1)...(19): siRNA sense strand
gaaguaagcguuccaaauc

SEQ ID NO: 1128422 - RNA, 19 nt, Homo sapiens
  misc_RNA (1)...(19): siRNA sense strand
ucauuaagaucucgaagua

SEQ ID NO: 1128423 - RNA, 19 nt, Homo sapiens
  misc_RNA (1)...(19): siRNA sense strand
aaacagauccuacugauga

SEQ ID NO: 1128424 - RNA, 19 nt, Homo sapiens
  misc_RNA (1)...(19): siRNA sense strand
ggaagaagaucuguaucaa

SEQ ID NO: 1128425 - RNA, 19 nt, Homo sapiens
  misc_RNA (1)...(19): siRNA sense strand
ggauacagaagaaccauua

SEQ ID NO: 1128426 - RNA, 19 nt, Homo sapiens
  misc_RNA (1)...(19): siRNA sense strand
agaaagagcuucagagucu

SEQ ID NO: 1128427 - RNA, 19 nt, Homo sapiens
  misc_RNA (1)...(19): siRNA sense strand
gcucuaugaugucagcuua

SEQ ID NO: 1128428 - RNA, 19 nt, Homo sapiens
  misc_RNA (1)...(19): siRNA sense strand
ggagaucucuguucagucu

SEQ ID NO: 1128429 - RNA, 19 nt, Homo sapiens
  misc_RNA (1)...(19): siRNA sense strand
agacgaagcuucaguaucu

SEQ ID NO: 1128430 - RNA, 19 nt, Homo sapiens
  misc_RNA (1)...(19): siRNA sense strand
gcugaacgcucuaugaugu

SEQ ID NO: 1128431 - RNA, 19 nt, Homo sapiens
  misc_RNA (1)...(19): siRNA sense strand
gcucuaugaugucuuauga

SEQ ID NO: 1128432 - RNA, 19 nt, Homo sapiens
  misc_RNA (1)...(19): siRNA sense strand
gaagaaauagugcagaaga

SEQ ID NO: 1128433 - RNA, 19 nt, Homo sapiens
  misc_RNA (1)...(19): siRNA sense strand
caaaucuucugaacacaaa

SEQ ID NO: 1128434 - RNA, 19 nt, Homo sapiens
  misc_RNA (1)...(19): siRNA sense strand
gauauaagccagacuugaa

SEQ ID NO: 1128435 - RNA, 19 nt, Homo sapiens
  misc_RNA (1)...(19): siRNA sense strand
gaaacucuaucuucuacug

SEQ ID NO: 1128436 - RNA, 19 nt, Homo sapiens
  misc_RNA (1)...(19): siRNA sense strand
gaugaagucugugcugaaa

SEQ ID NO: 1128437 - RNA, 19 nt, Homo sapiens
  misc_RNA (1)...(19): siRNA sense strand
gaagucaucugagccaguu

SEQ ID NO: 1128438 - RNA, 19 nt, Homo sapiens
  misc_RNA (1)...(19): siRNA sense strand
gcugagcgcucuaugaugu

SEQ ID NO: 1128439 - RNA, 19 nt, Homo sapiens
  misc_RNA (1)...(19): siRNA sense strand
gaagaagaucuguaucaaa

SEQ ID NO: 1128440 - RNA, 19 nt, Homo sapiens
  misc_RNA (1)...(19): siRNA sense strand
caucggagauugcagauuc

SEQ ID NO: 1128441 - RNA, 19 nt, Homo sapiens
  misc_RNA (1)...(19): siRNA sense strand
ugaagcagauuuagugaga

SEQ ID NO: 1128442 - RNA, 19 nt, Homo sapiens
  misc_RNA (1)...(19): siRNA sense strand
gaaagugaacaugguauaa

SEQ ID NO: 1128443 - RNA, 19 nt, Homo sapiens
  misc_RNA (1)...(19): siRNA sense strand
agagcagacucaaguaaua

SEQ ID NO: 1128444 - RNA, 19 nt, Homo sapiens
  misc_RNA (1)...(19): siRNA sense strand
gguagaagaaggagcuuua

SEQ ID NO: 1128445 - RNA, 19 nt, Homo sapiens
  misc_RNA (1)...(19): siRNA sense strand
ccaggagucuaccaaauga

SEQ ID NO: 1128446 - RNA, 19 nt, Homo sapiens
  misc_RNA (1)...(19): siRNA sense strand
gaacgucuuacaagccuua

SEQ ID NO: 1128447 - RNA, 19 nt, Homo sapiens
  misc_RNA (1)...(19): siRNA sense strand
ugacuuguaugguaucuga

SEQ ID NO: 1128448 - RNA, 19 nt, Homo sapiens
  misc_RNA (1)...(19): siRNA sense strand
caaagauucuggauuccuu

SEQ ID NO: 1128449 - RNA, 19 nt, Homo sapiens
  misc_RNA (1)...(19): siRNA sense strand
uguagagucugcaguagua

SEQ ID NO: 1128450 - RNA, 19 nt, Homo sapiens
  misc_RNA (1)...(19): siRNA sense strand
gcugaucgaucuaugaugu

SEQ ID NO: 1128451 - RNA, 19 nt, Homo sapiens
  misc_RNA (1)...(19): siRNA sense strand
caucaaagaucauguuggu

SEQ ID NO: 1128452 - RNA, 19 nt, Homo sapiens
  misc_RNA (1)...(19): siRNA sense strand
caucagagccuccuguuau

SEQ ID NO: 1128453 - RNA, 19 nt, Homo sapiens
  misc_RNA (1)...(19): siRNA sense strand
gaagaagguuuagcagauc

SEQ ID NO: 1128454 - RNA, 19 nt, Homo sapiens
  misc_RNA (1)...(19): siRNA sense strand
gaaaggaauuaaucuaucc

SEQ ID NO: 1128455 - RNA, 19 nt, Homo sapiens
  misc_RNA (1)...(19): siRNA sense strand
ccaagcacaucaacaacaa

SEQ ID NO: 1128456 - RNA, 19 nt, Homo sapiens
  misc_RNA (1)...(19): siRNA sense strand
uaugaacgcuccaugaugu

SEQ ID NO: 1128457 - RNA, 19 nt, Homo sapiens
  misc_RNA (1)...(19): siRNA sense strand
uaugaacgcuccaugaugu

SEQ ID NO: 1128458 - RNA, 19 nt, Homo sapiens
  misc_RNA (1)...(19): siRNA sense strand
cgacagcagugccugaguu

SEQ ID NO: 1128459 - RNA, 19 nt, Homo sapiens
  misc_RNA (1)...(19): siRNA sense strand
agaagaagguuuagcagau

SEQ ID NO: 1128460 - RNA, 19 nt, Homo sapiens
  misc_RNA (1)...(19): siRNA sense strand
cgacgaaggucuagaucug

SEQ ID NO: 1128461 - RNA, 19 nt, Homo sapiens
  misc_RNA (1)...(19): siRNA sense strand
ccuuagagcuggcauugaa

SEQ ID NO: 1128462 - RNA, 19 nt, Homo sapiens
  misc_RNA (1)...(19): siRNA sense strand
gaaaguaguggaggagaaa

SEQ ID NO: 1128463 - RNA, 19 nt, Homo sapiens
  misc_RNA (1)...(19): siRNA sense strand
gcucagcccuaaagaaagu

SEQ ID NO: 1128464 - RNA, 19 nt, Homo sapiens
  misc_RNA (1)...(19): siRNA sense strand
gcuccaugaugucagcuua

SEQ ID NO: 1128465 - RNA, 19 nt, Homo sapiens
  misc_RNA (1)...(19): siRNA sense strand
caacgauggugcuggaguu

SEQ ID NO: 1128466 - RNA, 19 nt, Homo sapiens
  misc_RNA (1)...(19): siRNA sense strand
gauacagaacuacgauaua

SEQ ID NO: 1128467 - RNA, 19 nt, Homo sapiens
  misc_RNA (1)...(19): siRNA sense strand
agaacacccuuaagaagaa

SEQ ID NO: 1128468 - RNA, 19 nt, Homo sapiens
  misc_RNA (1)...(19): siRNA sense strand
uagugaagcugacauugaa

SEQ ID NO: 1128469 - RNA, 19 nt, Homo sapiens
  misc_RNA (1)...(19): siRNA sense strand
cugaugaaauucccacuaa

SEQ ID NO: 1128470 - RNA, 19 nt, Homo sapiens
  misc_RNA (1)...(19): siRNA sense strand
ugaaagagggcuccagaaa

SEQ ID NO: 1128471 - RNA, 19 nt, Homo sapiens
  misc_RNA (1)...(19): siRNA sense strand
uaaugcagcugccaugugu

SEQ ID NO: 1128472 - RNA, 19 nt, Homo sapiens
  misc_RNA (1)...(19): siRNA sense strand
aaacaaauacacccauuga

SEQ ID NO: 1128473 - RNA, 19 nt, Homo sapiens
  misc_RNA (1)...(19): siRNA sense strand
agaucaagcuccagggaua

SEQ ID NO: 1128474 - RNA, 19 nt, Homo sapiens
  misc_RNA (1)...(19): siRNA sense strand
ugaaacaaauacacccauu

SEQ ID NO: 1128475 - RNA, 19 nt, Homo sapiens
  misc_RNA (1)...(19): siRNA sense strand
gcagcugaccgaucuauga

SEQ ID NO: 1128476 - RNA, 19 nt, Homo sapiens
  misc_RNA (1)...(19): siRNA sense strand
ccagagccaucaaagauca

SEQ ID NO: 1128477 - RNA, 19 nt, Homo sapiens
  misc_RNA (1)...(19): siRNA sense strand
aggaggagcuacuauagaa

SEQ ID NO: 1128478 - RNA, 19 nt, Homo sapiens
  misc_RNA (1)...(19): siRNA sense strand
gaagaucuguaucaaaaga

SEQ ID NO: 1128479 - RNA, 19 nt, Homo sapiens
  misc_RNA (1)...(19): siRNA sense strand
guaaguaguaugccagaaa

SEQ ID NO: 1128480 - RNA, 19 nt, Homo sapiens
  misc_RNA (1)...(19): siRNA sense strand
ggucuuucguggucaguaa

SEQ ID NO: 1128481 - RNA, 19 nt, Homo sapiens
  misc_RNA (1)...(19): siRNA sense strand
gaaacaaauacacccauug

SEQ ID NO: 1128482 - RNA, 19 nt, Homo sapiens
  misc_RNA (1)...(19): siRNA sense strand
caaugucaguggaguauca

SEQ ID NO: 1128483 - RNA, 19 nt, Homo sapiens
  misc_RNA (1)...(19): siRNA sense strand
agagacagcagaaacauuu

SEQ ID NO: 1128484 - RNA, 19 nt, Homo sapiens
  misc_RNA (1)...(19): siRNA sense strand
gagccaagcacaucaacaa

SEQ ID NO: 1128485 - RNA, 19 nt, Homo sapiens
  misc_RNA (1)...(19): siRNA sense strand
ucaagaacacccuuaagaa

SEQ ID NO: 1128486 - RNA, 19 nt, Homo sapiens
  misc_RNA (1)...(19): siRNA sense strand
gaaauagugcagaagauag

SEQ ID NO: 1128487 - RNA, 19 nt, Homo sapiens
  misc_RNA (1)...(19): siRNA sense strand
guagugaagcugacauuga

SEQ ID NO: 1128488 - RNA, 19 nt, Homo sapiens
  misc_RNA (1)...(19): siRNA sense strand
gcugaucguucaaugaugu

SEQ ID NO: 1128489 - RNA, 19 nt, Homo sapiens
  misc_RNA (1)...(19): siRNA sense strand
gcugaauggugaaacaaau

SEQ ID NO: 1128490 - RNA, 19 nt, Homo sapiens
  misc_RNA (1)...(19): siRNA sense strand
guuaacaccuguagagucu

SEQ ID NO: 1128491 - RNA, 19 nt, Homo sapiens
  misc_RNA (1)...(19): siRNA sense strand
caaagaucauguugguaga

SEQ ID NO: 1128492 - RNA, 19 nt, Homo sapiens
  misc_RNA (1)...(19): siRNA sense strand
gcauuuggcccaucugaga

SEQ ID NO: 1128493 - RNA, 19 nt, Homo sapiens
  misc_RNA (1)...(19): siRNA sense strand
ugaagucugugcugaaauc

SEQ ID NO: 1128494 - RNA, 19 nt, Homo sapiens
  misc_RNA (1)...(19): siRNA sense strand
ggacauggaacgucuuaca

SEQ ID NO: 1128495 - RNA, 19 nt, Homo sapiens
  misc_RNA (1)...(19): siRNA sense strand
aaagagacacugccugauu

SEQ ID NO: 1128496 - RNA, 19 nt, Homo sapiens
  misc_RNA (1)...(19): siRNA sense strand
cagcaucuacucucaguuu

SEQ ID NO: 1128497 - RNA, 19 nt, Homo sapiens
  misc_RNA (1)...(19): siRNA sense strand
gcagaaacauuugauucca

SEQ ID NO: 1128498 - RNA, 19 nt, Homo sapiens
  misc_RNA (1)...(19): siRNA sense strand
cagaaacccuugugguauc

SEQ ID NO: 1128499 - RNA, 19 nt, Homo sapiens
  misc_RNA (1)...(19): siRNA sense strand
ccacacaucuuagaaacuc

SEQ ID NO: 1128500 - RNA, 19 nt, Homo sapiens
  misc_RNA (1)...(19): siRNA sense strand
gaaggagcuuuagcauuuc

SEQ ID NO: 1128501 - RNA, 19 nt, Homo sapiens
  misc_RNA (1)...(19): siRNA sense strand
aagcacagauccaagucua

SEQ ID NO: 1128502 - RNA, 19 nt, Homo sapiens
  misc_RNA (1)...(19): siRNA sense strand
uaaugaagcagauuuagug

SEQ ID NO: 1128503 - RNA, 19 nt, Homo sapiens
  misc_RNA (1)...(19): siRNA sense strand
gaacuaguaaggguauuga

SEQ ID NO: 1128504 - RNA, 19 nt, Homo sapiens
  misc_RNA (1)...(19): siRNA sense strand
caucacauguuaugaaagg

SEQ ID NO: 1128505 - RNA, 19 nt, Homo sapiens
  misc_RNA (1)...(19): siRNA sense strand
gaaccauccaugacaaaga

SEQ ID NO: 1128506 - RNA, 19 nt, Homo sapiens
  misc_RNA (1)...(19): siRNA sense strand
ccagaaccauccaugacaa

SEQ ID NO: 1128507 - RNA, 19 nt, Homo sapiens
  misc_RNA (1)...(19): siRNA sense strand
cuacaucaguaaucucaga

SEQ ID NO: 1128508 - RNA, 19 nt, Homo sapiens
  misc_RNA (1)...(19): siRNA sense strand
caagaacacccuuaagaag

SEQ ID NO: 1128509 - RNA, 19 nt, Homo sapiens
  misc_RNA (1)...(19): siRNA sense strand
cuaaagagauggaacauaa

SEQ ID NO: 1128510 - RNA, 19 nt, Homo sapiens
  misc_RNA (1)...(19): siRNA sense strand
agaaggagcuuuagcauuu

SEQ ID NO: 1128511 - RNA, 19 nt, Homo sapiens
  misc_RNA (1)...(19): siRNA sense strand
gcuagaaccuccuguagua

SEQ ID NO: 1128512 - RNA, 19 nt, Homo sapiens
  misc_RNA (1)...(19): siRNA sense strand
ggaaauuggugaagagaaa

SEQ ID NO: 1128513 - RNA, 19 nt, Homo sapiens
  misc_RNA (1)...(19): siRNA sense strand
gagccagaaucuucaauua

SEQ ID NO: 1128514 - RNA, 19 nt, Homo sapiens
  misc_RNA (1)...(19): siRNA sense strand
ggauaaggcucaauuacuu

SEQ ID NO: 1128515 - RNA, 19 nt, Homo sapiens
  misc_RNA (1)...(19): siRNA sense strand
caacugagguggcuauaga

SEQ ID NO: 1128516 - RNA, 19 nt, Homo sapiens
  misc_RNA (1)...(19): siRNA sense strand
ugacaaagauucuggauuc

SEQ ID NO: 1128517 - RNA, 19 nt, Homo sapiens
  misc_RNA (1)...(19): siRNA sense strand
cgacagcgcuggaauccua

SEQ ID NO: 1128518 - RNA, 19 nt, Homo sapiens
  misc_RNA (1)...(19): siRNA sense strand
gcgcuggaauccuauaaua

SEQ ID NO: 1128519 - RNA, 19 nt, Homo sapiens
  misc_RNA (1)...(19): siRNA sense strand
ggucuuagauacagaacua

SEQ ID NO: 1128520 - RNA, 19 nt, Homo sapiens
  misc_RNA (1)...(19): siRNA sense strand
gaagauagaggaaguacuu

SEQ ID NO: 1128521 - RNA, 19 nt, Homo sapiens
  misc_RNA (1)...(19): siRNA sense strand
gaaguaagcguuccaaauc

SEQ ID NO: 1128522 - RNA, 19 nt, Homo sapiens
  misc_RNA (1)...(19): siRNA sense strand
ucauuaagaucucgaagua

SEQ ID NO: 1128523 - RNA, 19 nt, Homo sapiens
  misc_RNA (1)...(19): siRNA sense strand
aaacagauccuacugauga

SEQ ID NO: 1128524 - RNA, 19 nt, Homo sapiens
  misc_RNA (1)...(19): siRNA sense strand
ggaagaagaucuguaucaa

SEQ ID NO: 1128525 - RNA, 19 nt, Homo sapiens
  misc_RNA (1)...(19): siRNA sense strand
ggauacagaagaaccauua

SEQ ID NO: 1128526 - RNA, 19 nt, Homo sapiens
  misc_RNA (1)...(19): siRNA sense strand
agaaagagcuucagagucu

SEQ ID NO: 1128527 - RNA, 19 nt, Homo sapiens
  misc_RNA (1)...(19): siRNA sense strand
gcucuaugaugucagcuua

SEQ ID NO: 1128528 - RNA, 19 nt, Homo sapiens
  misc_RNA (1)...(19): siRNA sense strand
ggagaucucuguucagucu

SEQ ID NO: 1128529 - RNA, 19 nt, Homo sapiens
  misc_RNA (1)...(19): siRNA sense strand
caucaucccuuuaaacuca

SEQ ID NO: 1128530 - RNA, 19 nt, Homo sapiens
  misc_RNA (1)...(19): siRNA sense strand
agacgaagcuucaguaucu

SEQ ID NO: 1128531 - RNA, 19 nt, Homo sapiens
  misc_RNA (1)...(19): siRNA sense strand
gcugaacgcucuaugaugu

SEQ ID NO: 1128532 - RNA, 19 nt, Homo sapiens
  misc_RNA (1)...(19): siRNA sense strand
gcucuaugaugucuuauga

SEQ ID NO: 1128533 - RNA, 19 nt, Homo sapiens
  misc_RNA (1)...(19): siRNA sense strand
gaagaaauagugcagaaga

SEQ ID NO: 1128534 - RNA, 19 nt, Homo sapiens
  misc_RNA (1)...(19): siRNA sense strand
caaaucuucugaacacaaa

SEQ ID NO: 1128535 - RNA, 19 nt, Homo sapiens
  misc_RNA (1)...(19): siRNA sense strand
gauauaagccagacuugaa

SEQ ID NO: 1128536 - RNA, 19 nt, Homo sapiens
  misc_RNA (1)...(19): siRNA sense strand
gaaacucuaucuucuacug

SEQ ID NO: 1128537 - RNA, 19 nt, Homo sapiens
  misc_RNA (1)...(19): siRNA sense strand
gaugaagucugugcugaaa

SEQ ID NO: 1128538 - RNA, 19 nt, Homo sapiens
  misc_RNA (1)...(19): siRNA sense strand
gaagucaucugagccaguu

SEQ ID NO: 1128539 - RNA, 19 nt, Homo sapiens
  misc_RNA (1)...(19): siRNA sense strand
gcugagcgcucuaugaugu

SEQ ID NO: 1128540 - RNA, 19 nt, Homo sapiens
  misc_RNA (1)...(19): siRNA sense strand
aaacagaucgcacagagua

SEQ ID NO: 1128541 - RNA, 19 nt, Homo sapiens
  misc_RNA (1)...(19): siRNA sense strand
gaagaagaucuguaucaaa

SEQ ID NO: 1128542 - RNA, 19 nt, Homo sapiens
  misc_RNA (1)...(19): siRNA sense strand
caucggagauugcagauuc

SEQ ID NO: 1128543 - RNA, 19 nt, Homo sapiens
  misc_RNA (1)...(19): siRNA sense strand
ugaagcagauuuagugaga

SEQ ID NO: 1128544 - RNA, 19 nt, Homo sapiens
  misc_RNA (1)...(19): siRNA sense strand
gaaagugaacaugguauaa

SEQ ID NO: 1128545 - RNA, 19 nt, Homo sapiens
  misc_RNA (1)...(19): siRNA sense strand
agagcagacucaaguaaua

SEQ ID NO: 1128546 - RNA, 19 nt, Homo sapiens
  misc_RNA (1)...(19): siRNA sense strand
gguagaagaaggagcuuua

SEQ ID NO: 1128547 - RNA, 19 nt, Homo sapiens
  misc_RNA (1)...(19): siRNA sense strand
ccaggagucuaccaaauga

SEQ ID NO: 1128548 - RNA, 19 nt, Homo sapiens
  misc_RNA (1)...(19): siRNA sense strand
gaacgucuuacaagccuua

SEQ ID NO: 1128549 - RNA, 19 nt, Homo sapiens
  misc_RNA (1)...(19): siRNA sense strand
ugacuuguaugguaucuga

SEQ ID NO: 1128550 - RNA, 19 nt, Homo sapiens
  misc_RNA (1)...(19): siRNA sense strand
caaagauucuggauuccuu

SEQ ID NO: 1128551 - RNA, 19 nt, Homo sapiens
  misc_RNA (1)...(19): siRNA sense strand
uguagagucugcaguagua

SEQ ID NO: 1128552 - RNA, 19 nt, Homo sapiens
  misc_RNA (1)...(19): siRNA sense strand
gcugaucgaucuaugaugu

SEQ ID NO: 1128553 - RNA, 19 nt, Homo sapiens
  misc_RNA (1)...(19): siRNA sense strand
caucaaagaucauguuggu

SEQ ID NO: 1128554 - RNA, 19 nt, Homo sapiens
  misc_RNA (1)...(19): siRNA sense strand
caucagagccuccuguuau

SEQ ID NO: 1128555 - RNA, 19 nt, Homo sapiens
  misc_RNA (1)...(19): siRNA sense strand
gaagaagguuuagcagauc

SEQ ID NO: 1128556 - RNA, 19 nt, Homo sapiens
  misc_RNA (1)...(19): siRNA sense strand
gaaaggaauuaaucuaucc

SEQ ID NO: 1128557 - RNA, 19 nt, Homo sapiens
  misc_RNA (1)...(19): siRNA sense strand
ccaagcacaucaacaacaa

SEQ ID NO: 1128558 - RNA, 19 nt, Homo sapiens
  misc_RNA (1)...(19): siRNA sense strand
uaugaacgcuccaugaugu

SEQ ID NO: 1128559 - RNA, 19 nt, Homo sapiens
  misc_RNA (1)...(19): siRNA sense strand
uaugaacgcuccaugaugu

SEQ ID NO: 1128560 - RNA, 19 nt, Homo sapiens
  misc_RNA (1)...(19): siRNA sense strand
cgacagcagugccugaguu

SEQ ID NO: 1128561 - RNA, 19 nt, Homo sapiens
  misc_RNA (1)...(19): siRNA sense strand
agaagaagguuuagcagau

SEQ ID NO: 1128562 - RNA, 19 nt, Homo sapiens
  misc_RNA (1)...(19): siRNA sense strand
cgacgaaggucuagaucug

SEQ ID NO: 1128563 - RNA, 19 nt, Homo sapiens
  misc_RNA (1)...(19): siRNA sense strand
ccuuagagcuggcauugaa

SEQ ID NO: 1128564 - RNA, 19 nt, Homo sapiens
  misc_RNA (1)...(19): siRNA sense strand
gaaaguaguggaggagaaa

SEQ ID NO: 1128565 - RNA, 19 nt, Homo sapiens
  misc_RNA (1)...(19): siRNA sense strand
gcucagcccuaaagaaagu

SEQ ID NO: 1128566 - RNA, 19 nt, Homo sapiens
  misc_RNA (1)...(19): siRNA sense strand
gcuccaugaugucagcuua

SEQ ID NO: 1128567 - RNA, 19 nt, Homo sapiens
  misc_RNA (1)...(19): siRNA sense strand
caacgauggugcuggaguu

SEQ ID NO: 1128568 - RNA, 19 nt, Homo sapiens
  misc_RNA (1)...(19): siRNA sense strand
gauacagaacuacgauaua

SEQ ID NO: 1128569 - RNA, 19 nt, Homo sapiens
  misc_RNA (1)...(19): siRNA sense strand
agaacacccuuaagaagaa

SEQ ID NO: 1128570 - RNA, 19 nt, Homo sapiens
  misc_RNA (1)...(19): siRNA sense strand
uagugaagcugacauugaa

SEQ ID NO: 1128571 - RNA, 19 nt, Homo sapiens
  misc_RNA (1)...(19): siRNA sense strand
cugaugaaauucccacuaa

SEQ ID NO: 1128572 - RNA, 19 nt, Homo sapiens
  misc_RNA (1)...(19): siRNA sense strand
ugaaagagggcuccagaaa

SEQ ID NO: 1128573 - RNA, 19 nt, Homo sapiens
  misc_RNA (1)...(19): siRNA sense strand
ggauaguguuuauggagaa

SEQ ID NO: 1128574 - RNA, 19 nt, Homo sapiens
  misc_RNA (1)...(19): siRNA sense strand
uaaugcagcugccaugugu

SEQ ID NO: 1128575 - RNA, 19 nt, Homo sapiens
  misc_RNA (1)...(19): siRNA sense strand
agaucaagcuccagggaua

SEQ ID NO: 1128576 - RNA, 19 nt, Homo sapiens
  misc_RNA (1)...(19): siRNA sense strand
ugaaacaaauacacccauu

SEQ ID NO: 1128577 - RNA, 19 nt, Homo sapiens
  misc_RNA (1)...(19): siRNA sense strand
aaacaaauacacccauuga

SEQ ID NO: 1128578 - RNA, 19 nt, Homo sapiens
  misc_RNA (1)...(19): siRNA sense strand
gcagcugaccgaucuauga

SEQ ID NO: 1128579 - RNA, 19 nt, Homo sapiens
  misc_RNA (1)...(19): siRNA sense strand
ccagagccaucaaagauca

SEQ ID NO: 1128580 - RNA, 19 nt, Homo sapiens
  misc_RNA (1)...(19): siRNA sense strand
ggaugaagaggaagaagaa

SEQ ID NO: 1128581 - RNA, 19 nt, Homo sapiens
  misc_RNA (1)...(19): siRNA sense strand
aggaggagcuacuauagaa

SEQ ID NO: 1128582 - RNA, 19 nt, Homo sapiens
  misc_RNA (1)...(19): siRNA sense strand
gaagaucuguaucaaaaga

SEQ ID NO: 1128583 - RNA, 19 nt, Homo sapiens
  misc_RNA (1)...(19): siRNA sense strand
guaaguaguaugccagaaa

SEQ ID NO: 1128584 - RNA, 19 nt, Homo sapiens
  misc_RNA (1)...(19): siRNA sense strand
gaaacaaauacacccauug

SEQ ID NO: 1128585 - RNA, 19 nt, Homo sapiens
  misc_RNA (1)...(19): siRNA sense strand
ggucuuucguggucaguaa

SEQ ID NO: 1128586 - RNA, 19 nt, Homo sapiens
  misc_RNA (1)...(19): siRNA sense strand
caaugucaguggaguauca

SEQ ID NO: 1128587 - RNA, 19 nt, Homo sapiens
  misc_RNA (1)...(19): siRNA sense strand
agagacagcagaaacauuu

SEQ ID NO: 1128588 - RNA, 19 nt, Homo sapiens
  misc_RNA (1)...(19): siRNA sense strand
gaaauagugcagaagauag

SEQ ID NO: 1128589 - RNA, 19 nt, Homo sapiens
  misc_RNA (1)...(19): siRNA sense strand
ucaagaacacccuuaagaa

SEQ ID NO: 1128590 - RNA, 19 nt, Homo sapiens
  misc_RNA (1)...(19): siRNA sense strand
guagugaagcugacauuga

SEQ ID NO: 1128591 - RNA, 19 nt, Homo sapiens
  misc_RNA (1)...(19): siRNA sense strand
gcugaucguucaaugaugu

SEQ ID NO: 1128592 - RNA, 19 nt, Homo sapiens
  misc_RNA (1)...(19): siRNA sense strand
gagccaagcacaucaacaa

SEQ ID NO: 1128593 - RNA, 19 nt, Homo sapiens
  misc_RNA (1)...(19): siRNA sense strand
gcauuuggcccaucugaga

SEQ ID NO: 1128594 - RNA, 19 nt, Homo sapiens
  misc_RNA (1)...(19): siRNA sense strand
guuaacaccuguagagucu

SEQ ID NO: 1128595 - RNA, 19 nt, Homo sapiens
  misc_RNA (1)...(19): siRNA sense strand
caaagaucauguugguaga

SEQ ID NO: 1128596 - RNA, 19 nt, Homo sapiens
  misc_RNA (1)...(19): siRNA sense strand
gcugaauggugaaacaaau

SEQ ID NO: 1128597 - RNA, 19 nt, Homo sapiens
  misc_RNA (1)...(19): siRNA sense strand
ugaagucugugcugaaauc

SEQ ID NO: 1128598 - RNA, 19 nt, Homo sapiens
  misc_RNA (1)...(19): siRNA sense strand
ggacauggaacgucuuaca

SEQ ID NO: 1128599 - RNA, 19 nt, Homo sapiens
  misc_RNA (1)...(19): siRNA sense strand
aaagagacacugccugauu

SEQ ID NO: 1128600 - RNA, 19 nt, Homo sapiens
  misc_RNA (1)...(19): siRNA sense strand
cagcaucuacucucaguuu

SEQ ID NO: 1128601 - RNA, 19 nt, Homo sapiens
  misc_RNA (1)...(19): siRNA sense strand
gcagaaacauuugauucca

SEQ ID NO: 1128602 - RNA, 19 nt, Homo sapiens
  misc_RNA (1)...(19): siRNA sense strand
cagaaacccuugugguauc

SEQ ID NO: 1128603 - RNA, 19 nt, Homo sapiens
  misc_RNA (1)...(19): siRNA sense strand
gaaccauccaugacaaaga

SEQ ID NO: 1128604 - RNA, 19 nt, Homo sapiens
  misc_RNA (1)...(19): siRNA sense strand
gaaggagcuuuagcauuuc

SEQ ID NO: 1128605 - RNA, 19 nt, Homo sapiens
  misc_RNA (1)...(19): siRNA sense strand
aagcacagauccaagucua

SEQ ID NO: 1128606 - RNA, 19 nt, Homo sapiens
  misc_RNA (1)...(19): siRNA sense strand
uaaugaagcagauuuagug

SEQ ID NO: 1128607 - RNA, 19 nt, Homo sapiens
  misc_RNA (1)...(19): siRNA sense strand
gaacuaguaaggguauuga

SEQ ID NO: 1128608 - RNA, 19 nt, Homo sapiens
  misc_RNA (1)...(19): siRNA sense strand
caucacauguuaugaaagg

SEQ ID NO: 1128609 - RNA, 19 nt, Homo sapiens
  misc_RNA (1)...(19): siRNA sense strand
cuaaagagauggaacauaa

SEQ ID NO: 1128610 - RNA, 19 nt, Homo sapiens
  misc_RNA (1)...(19): siRNA sense strand
agaaggagcuuuagcauuu

SEQ ID NO: 1128611 - RNA, 19 nt, Homo sapiens
  misc_RNA (1)...(19): siRNA sense strand
gcuagaaccuccuguagua

SEQ ID NO: 1128612 - RNA, 19 nt, Homo sapiens
  misc_RNA (1)...(19): siRNA sense strand
ggaaauuggugaagagaaa

SEQ ID NO: 1128613 - RNA, 19 nt, Homo sapiens
  misc_RNA (1)...(19): siRNA sense strand
gagccagaaucuucaauua

SEQ ID NO: 1128614 - RNA, 19 nt, Homo sapiens
  misc_RNA (1)...(19): siRNA sense strand
ggauaaggcucaauuacuu

SEQ ID NO: 1128615 - RNA, 19 nt, Homo sapiens
  misc_RNA (1)...(19): siRNA sense strand
caacugagguggcuauaga

SEQ ID NO: 1128616 - RNA, 19 nt, Homo sapiens
  misc_RNA (1)...(19): siRNA sense strand
ugacaaagauucuggauuc

SEQ ID NO: 1128617 - RNA, 19 nt, Homo sapiens
  misc_RNA (1)...(19): siRNA sense strand
cgacagcgcuggaauccua

SEQ ID NO: 1128618 - RNA, 19 nt, Homo sapiens
  misc_RNA (1)...(19): siRNA sense strand
gcgcuggaauccuauaaua

SEQ ID NO: 1128619 - RNA, 19 nt, Homo sapiens
  misc_RNA (1)...(19): siRNA sense strand
ggucuuagauacagaacua

SEQ ID NO: 1128620 - RNA, 19 nt, Homo sapiens
  misc_RNA (1)...(19): siRNA sense strand
gaagauagaggaaguacuu

SEQ ID NO: 1128621 - RNA, 19 nt, Homo sapiens
  misc_RNA (1)...(19): siRNA sense strand
gaaguaagcguuccaaauc

SEQ ID NO: 1128622 - RNA, 19 nt, Homo sapiens
  misc_RNA (1)...(19): siRNA sense strand
ucauuaagaucucgaagua

SEQ ID NO: 1128623 - RNA, 19 nt, Homo sapiens
  misc_RNA (1)...(19): siRNA sense strand
aaacagauccuacugauga

SEQ ID NO: 1128624 - RNA, 19 nt, Homo sapiens
  misc_RNA (1)...(19): siRNA sense strand
ggaagaagaucuguaucaa

SEQ ID NO: 1128625 - RNA, 19 nt, Homo sapiens
  misc_RNA (1)...(19): siRNA sense strand
ggauacagaagaaccauua

SEQ ID NO: 1128626 - RNA, 19 nt, Homo sapiens
  misc_RNA (1)...(19): siRNA sense strand
agaaagagcuucagagucu

SEQ ID NO: 1128627 - RNA, 19 nt, Homo sapiens
  misc_RNA (1)...(19): siRNA sense strand
gcucuaugaugucagcuua

SEQ ID NO: 1128628 - RNA, 19 nt, Homo sapiens
  misc_RNA (1)...(19): siRNA sense strand
ggagaucucuguucagucu

SEQ ID NO: 1128629 - RNA, 19 nt, Homo sapiens
  misc_RNA (1)...(19): siRNA sense strand
caucaucccuuuaaacuca

SEQ ID NO: 1128630 - RNA, 19 nt, Homo sapiens
  misc_RNA (1)...(19): siRNA sense strand
agacgaagcuucaguaucu

SEQ ID NO: 1128631 - RNA, 19 nt, Homo sapiens
  misc_RNA (1)...(19): siRNA sense strand
gcugaacgcucuaugaugu

SEQ ID NO: 1128632 - RNA, 19 nt, Homo sapiens
  misc_RNA (1)...(19): siRNA sense strand
gcucuaugaugucuuauga

SEQ ID NO: 1128633 - RNA, 19 nt, Homo sapiens
  misc_RNA (1)...(19): siRNA sense strand
gaagaaauagugcagaaga

SEQ ID NO: 1128634 - RNA, 19 nt, Homo sapiens
  misc_RNA (1)...(19): siRNA sense strand
caaaucuucugaacacaaa

SEQ ID NO: 1128635 - RNA, 19 nt, Homo sapiens
  misc_RNA (1)...(19): siRNA sense strand
gauauaagccagacuugaa

SEQ ID NO: 1128636 - RNA, 19 nt, Homo sapiens
  misc_RNA (1)...(19): siRNA sense strand
gaaacucuaucuucuacug

SEQ ID NO: 1128637 - RNA, 19 nt, Homo sapiens
  misc_RNA (1)...(19): siRNA sense strand
gaugaagucugugcugaaa

SEQ ID NO: 1128638 - RNA, 19 nt, Homo sapiens
  misc_RNA (1)...(19): siRNA sense strand
gaagucaucugagccaguu

SEQ ID NO: 1128639 - RNA, 19 nt, Homo sapiens
  misc_RNA (1)...(19): siRNA sense strand
gcugagcgcucuaugaugu

SEQ ID NO: 1128640 - RNA, 19 nt, Homo sapiens
  misc_RNA (1)...(19): siRNA sense strand
aaacagaucgcacagagua

SEQ ID NO: 1128641 - RNA, 19 nt, Homo sapiens
  misc_RNA (1)...(19): siRNA sense strand
gaagaagaucuguaucaaa

SEQ ID NO: 1128642 - RNA, 19 nt, Homo sapiens
  misc_RNA (1)...(19): siRNA sense strand
caucggagauugcagauuc

SEQ ID NO: 1128643 - RNA, 19 nt, Homo sapiens
  misc_RNA (1)...(19): siRNA sense strand
ugaagcagauuuagugaga

SEQ ID NO: 1128644 - RNA, 19 nt, Homo sapiens
  misc_RNA (1)...(19): siRNA sense strand
gaaagugaacaugguauaa

SEQ ID NO: 1128645 - RNA, 19 nt, Homo sapiens
  misc_RNA (1)...(19): siRNA sense strand
agagcagacucaaguaaua

SEQ ID NO: 1128646 - RNA, 19 nt, Homo sapiens
  misc_RNA (1)...(19): siRNA sense strand
gguagaagaaggagcuuua

SEQ ID NO: 1128647 - RNA, 19 nt, Homo sapiens
  misc_RNA (1)...(19): siRNA sense strand
ccaggagucuaccaaauga

SEQ ID NO: 1128648 - RNA, 19 nt, Homo sapiens
  misc_RNA (1)...(19): siRNA sense strand
gaacgucuuacaagccuua

SEQ ID NO: 1128649 - RNA, 19 nt, Homo sapiens
  misc_RNA (1)...(19): siRNA sense strand
ugacuuguaugguaucuga

SEQ ID NO: 1128650 - RNA, 19 nt, Homo sapiens
  misc_RNA (1)...(19): siRNA sense strand
caaagauucuggauuccuu

SEQ ID NO: 1128651 - RNA, 19 nt, Homo sapiens
  misc_RNA (1)...(19): siRNA sense strand
uguagagucugcaguagua

SEQ ID NO: 1128652 - RNA, 19 nt, Homo sapiens
  misc_RNA (1)...(19): siRNA sense strand
gcugaucgaucuaugaugu

SEQ ID NO: 1128653 - RNA, 19 nt, Homo sapiens
  misc_RNA (1)...(19): siRNA sense strand
caucaaagaucauguuggu

SEQ ID NO: 1128654 - RNA, 19 nt, Homo sapiens
  misc_RNA (1)...(19): siRNA sense strand
caucagagccuccuguuau

SEQ ID NO: 1128655 - RNA, 19 nt, Homo sapiens
  misc_RNA (1)...(19): siRNA sense strand
gaagaagguuuagcagauc

SEQ ID NO: 1128656 - RNA, 19 nt, Homo sapiens
  misc_RNA (1)...(19): siRNA sense strand
gaaaggaauuaaucuaucc

SEQ ID NO: 1128657 - RNA, 19 nt, Homo sapiens
  misc_RNA (1)...(19): siRNA sense strand
ccaagcacaucaacaacaa

SEQ ID NO: 1128658 - RNA, 19 nt, Homo sapiens
  misc_RNA (1)...(19): siRNA sense strand
uaugaacgcuccaugaugu

SEQ ID NO: 1128659 - RNA, 19 nt, Homo sapiens
  misc_RNA (1)...(19): siRNA sense strand
uaugaacgcuccaugaugu

SEQ ID NO: 1128660 - RNA, 19 nt, Homo sapiens
  misc_RNA (1)...(19): siRNA sense strand
cgacagcagugccugaguu

SEQ ID NO: 1128661 - RNA, 19 nt, Homo sapiens
  misc_RNA (1)...(19): siRNA sense strand
agaagaagguuuagcagau

SEQ ID NO: 1128662 - RNA, 19 nt, Homo sapiens
  misc_RNA (1)...(19): siRNA sense strand
cgacgaaggucuagaucug

SEQ ID NO: 1128663 - RNA, 19 nt, Homo sapiens
  misc_RNA (1)...(19): siRNA sense strand
ccuuagagcuggcauugaa

SEQ ID NO: 1128664 - RNA, 19 nt, Homo sapiens
  misc_RNA (1)...(19): siRNA sense strand
gaaaguaguggaggagaaa

SEQ ID NO: 1128665 - RNA, 19 nt, Homo sapiens
  misc_RNA (1)...(19): siRNA sense strand
gcucagcccuaaagaaagu

SEQ ID NO: 1128666 - RNA, 19 nt, Homo sapiens
  misc_RNA (1)...(19): siRNA sense strand
gcuccaugaugucagcuua

SEQ ID NO: 1128667 - RNA, 19 nt, Homo sapiens
  misc_RNA (1)...(19): siRNA sense strand
caacgauggugcuggaguu

SEQ ID NO: 1128668 - RNA, 19 nt, Homo sapiens
  misc_RNA (1)...(19): siRNA sense strand
gauacagaacuacgauaua

SEQ ID NO: 1128669 - RNA, 19 nt, Homo sapiens
  misc_RNA (1)...(19): siRNA sense strand
agaacacccuuaagaagaa

SEQ ID NO: 1128670 - RNA, 19 nt, Homo sapiens
  misc_RNA (1)...(19): siRNA sense strand
uagugaagcugacauugaa

SEQ ID NO: 1128671 - RNA, 19 nt, Homo sapiens
  misc_RNA (1)...(19): siRNA sense strand
cugaugaaauucccacuaa

SEQ ID NO: 1128672 - RNA, 19 nt, Homo sapiens
  misc_RNA (1)...(19): siRNA sense strand
ugaaagagggcuccagaaa

SEQ ID NO: 1128673 - RNA, 19 nt, Homo sapiens
  misc_RNA (1)...(19): siRNA sense strand
ggauaguguuuauggagaa

SEQ ID NO: 1128674 - RNA, 19 nt, Homo sapiens
  misc_RNA (1)...(19): siRNA sense strand
uaaugcagcugccaugugu

SEQ ID NO: 1128675 - RNA, 19 nt, Homo sapiens
  misc_RNA (1)...(19): siRNA sense strand
agaucaagcuccagggaua

SEQ ID NO: 1128676 - RNA, 19 nt, Homo sapiens
  misc_RNA (1)...(19): siRNA sense strand
ugaaacaaauacacccauu

SEQ ID NO: 1128677 - RNA, 19 nt, Homo sapiens
  misc_RNA (1)...(19): siRNA sense strand
aaacaaauacacccauuga

SEQ ID NO: 1128678 - RNA, 19 nt, Homo sapiens
  misc_RNA (1)...(19): siRNA sense strand
gcagcugaccgaucuauga

SEQ ID NO: 1128679 - RNA, 19 nt, Homo sapiens
  misc_RNA (1)...(19): siRNA sense strand
ccagagccaucaaagauca

SEQ ID NO: 1128680 - RNA, 19 nt, Homo sapiens
  misc_RNA (1)...(19): siRNA sense strand
ggaugaagaggaagaagaa

SEQ ID NO: 1128681 - RNA, 19 nt, Homo sapiens
  misc_RNA (1)...(19): siRNA sense strand
aggaggagcuacuauagaa

SEQ ID NO: 1128682 - RNA, 19 nt, Homo sapiens
  misc_RNA (1)...(19): siRNA sense strand
gaagaucuguaucaaaaga

SEQ ID NO: 1128683 - RNA, 19 nt, Homo sapiens
  misc_RNA (1)...(19): siRNA sense strand
guaaguaguaugccagaaa

SEQ ID NO: 1128684 - RNA, 19 nt, Homo sapiens
  misc_RNA (1)...(19): siRNA sense strand
gaaacaaauacacccauug

SEQ ID NO: 1128685 - RNA, 19 nt, Homo sapiens
  misc_RNA (1)...(19): siRNA sense strand
ggucuuucguggucaguaa

SEQ ID NO: 1128686 - RNA, 19 nt, Homo sapiens
  misc_RNA (1)...(19): siRNA sense strand
caaugucaguggaguauca

SEQ ID NO: 1128687 - RNA, 19 nt, Homo sapiens
  misc_RNA (1)...(19): siRNA sense strand
agagacagcagaaacauuu

SEQ ID NO: 1128688 - RNA, 19 nt, Homo sapiens
  misc_RNA (1)...(19): siRNA sense strand
gaaauagugcagaagauag

SEQ ID NO: 1128689 - RNA, 19 nt, Homo sapiens
  misc_RNA (1)...(19): siRNA sense strand
ucaagaacacccuuaagaa

SEQ ID NO: 1128690 - RNA, 19 nt, Homo sapiens
  misc_RNA (1)...(19): siRNA sense strand
guagugaagcugacauuga

SEQ ID NO: 1128691 - RNA, 19 nt, Homo sapiens
  misc_RNA (1)...(19): siRNA sense strand
gcugaucguucaaugaugu

SEQ ID NO: 1128692 - RNA, 19 nt, Homo sapiens
  misc_RNA (1)...(19): siRNA sense strand
gagccaagcacaucaacaa

SEQ ID NO: 1128693 - RNA, 19 nt, Homo sapiens
  misc_RNA (1)...(19): siRNA sense strand
gcauuuggcccaucugaga

SEQ ID NO: 1128694 - RNA, 19 nt, Homo sapiens
  misc_RNA (1)...(19): siRNA sense strand
guuaacaccuguagagucu

SEQ ID NO: 1128695 - RNA, 19 nt, Homo sapiens
  misc_RNA (1)...(19): siRNA sense strand
caaagaucauguugguaga

SEQ ID NO: 1128696 - RNA, 19 nt, Homo sapiens
  misc_RNA (1)...(19): siRNA sense strand
gcugaauggugaaacaaau

SEQ ID NO: 1128697 - RNA, 19 nt, Homo sapiens
  misc_RNA (1)...(19): siRNA sense strand
ugaagucugugcugaaauc

SEQ ID NO: 1128698 - RNA, 19 nt, Homo sapiens
  misc_RNA (1)...(19): siRNA sense strand
ggacauggaacgucuuaca

SEQ ID NO: 1128699 - RNA, 19 nt, Homo sapiens
  misc_RNA (1)...(19): siRNA sense strand
aaagagacacugccugauu

SEQ ID NO: 1128700 - RNA, 19 nt, Homo sapiens
  misc_RNA (1)...(19): siRNA sense strand
cagcaucuacucucaguuu

SEQ ID NO: 1128701 - RNA, 19 nt, Homo sapiens
  misc_RNA (1)...(19): siRNA sense strand
gcagaaacauuugauucca

SEQ ID NO: 1128702 - RNA, 19 nt, Homo sapiens
  misc_RNA (1)...(19): siRNA sense strand
cagaaacccuugugguauc

SEQ ID NO: 1128703 - RNA, 19 nt, Homo sapiens
  misc_RNA (1)...(19): siRNA sense strand
gaaccauccaugacaaaga

SEQ ID NO: 1128704 - RNA, 19 nt, Homo sapiens
  misc_RNA (1)...(19): siRNA sense strand
gaaggagcuuuagcauuuc

SEQ ID NO: 1128705 - RNA, 19 nt, Homo sapiens
  misc_RNA (1)...(19): siRNA sense strand
aagcacagauccaagucua

SEQ ID NO: 1128706 - RNA, 19 nt, Homo sapiens
  misc_RNA (1)...(19): siRNA sense strand
uaaugaagcagauuuagug

SEQ ID NO: 1128707 - RNA, 19 nt, Homo sapiens
  misc_RNA (1)...(19): siRNA sense strand
gaacuaguaaggguauuga

SEQ ID NO: 1128708 - RNA, 19 nt, Homo sapiens
  misc_RNA (1)...(19): siRNA sense strand
caucacauguuaugaaagg

SEQ ID NO: 1128709 - RNA, 19 nt, Homo sapiens
  misc_RNA (1)...(19): siRNA sense strand
cuaaagagauggaacauaa

SEQ ID NO: 1128710 - RNA, 19 nt, Homo sapiens
  misc_RNA (1)...(19): siRNA sense strand
agaaggagcuuuagcauuu

SEQ ID NO: 1128711 - RNA, 19 nt, Homo sapiens
  misc_RNA (1)...(19): siRNA sense strand
gcuagaaccuccuguagua

SEQ ID NO: 1128712 - RNA, 19 nt, Homo sapiens
  misc_RNA (1)...(19): siRNA sense strand
ggaaauuggugaagagaaa

SEQ ID NO: 1128713 - RNA, 19 nt, Homo sapiens
  misc_RNA (1)...(19): siRNA sense strand
gagccagaaucuucaauua

SEQ ID NO: 1128714 - RNA, 19 nt, Homo sapiens
  misc_RNA (1)...(19): siRNA sense strand
ggauaaggcucaauuacuu

SEQ ID NO: 1128715 - RNA, 19 nt, Homo sapiens
  misc_RNA (1)...(19): siRNA sense strand
caacugagguggcuauaga

SEQ ID NO: 1128716 - RNA, 19 nt, Homo sapiens
  misc_RNA (1)...(19): siRNA sense strand
ugacaaagauucuggauuc

SEQ ID NO: 1128717 - RNA, 19 nt, Homo sapiens
  misc_RNA (1)...(19): siRNA sense strand
cgacagcgcuggaauccua

SEQ ID NO: 1128718 - RNA, 19 nt, Homo sapiens
  misc_RNA (1)...(19): siRNA sense strand
gcgcuggaauccuauaaua

SEQ ID NO: 1128719 - RNA, 19 nt, Homo sapiens
  misc_RNA (1)...(19): siRNA sense strand
ggucuuagauacagaacua

SEQ ID NO: 1128720 - RNA, 19 nt, Homo sapiens
  misc_RNA (1)...(19): siRNA sense strand
gaagauagaggaaguacuu

SEQ ID NO: 1128721 - RNA, 19 nt, Homo sapiens
  misc_RNA (1)...(19): siRNA sense strand
gaaguaagcguuccaaauc

SEQ ID NO: 1128722 - RNA, 19 nt, Homo sapiens
  misc_RNA (1)...(19): siRNA sense strand
ucauuaagaucucgaagua

SEQ ID NO: 1128723 - RNA, 19 nt, Homo sapiens
  misc_RNA (1)...(19): siRNA sense strand
aaacagauccuacugauga

SEQ ID NO: 1128724 - RNA, 19 nt, Homo sapiens
  misc_RNA (1)...(19): siRNA sense strand
ggaagaagaucuguaucaa

SEQ ID NO: 1128725 - RNA, 19 nt, Homo sapiens
  misc_RNA (1)...(19): siRNA sense strand
ggauacagaagaaccauua

SEQ ID NO: 1128726 - RNA, 19 nt, Homo sapiens
  misc_RNA (1)...(19): siRNA sense strand
agaaagagcuucagagucu

SEQ ID NO: 1128727 - RNA, 19 nt, Homo sapiens
  misc_RNA (1)...(19): siRNA sense strand
gcucuaugaugucagcuua

SEQ ID NO: 1128728 - RNA, 19 nt, Homo sapiens
  misc_RNA (1)...(19): siRNA sense strand
ggagaucucuguucagucu

SEQ ID NO: 1128729 - RNA, 19 nt, Homo sapiens
  misc_RNA (1)...(19): siRNA sense strand
caucaucccuuuaaacuca

SEQ ID NO: 1128730 - RNA, 19 nt, Homo sapiens
  misc_RNA (1)...(19): siRNA sense strand
agacgaagcuucaguaucu

SEQ ID NO: 1128731 - RNA, 19 nt, Homo sapiens
  misc_RNA (1)...(19): siRNA sense strand
gcugaacgcucuaugaugu

SEQ ID NO: 1128732 - RNA, 19 nt, Homo sapiens
  misc_RNA (1)...(19): siRNA sense strand
gcucuaugaugucuuauga

SEQ ID NO: 1128733 - RNA, 19 nt, Homo sapiens
  misc_RNA (1)...(19): siRNA sense strand
gaagaaauagugcagaaga

SEQ ID NO: 1128734 - RNA, 19 nt, Homo sapiens
  misc_RNA (1)...(19): siRNA sense strand
caaaucuucugaacacaaa

SEQ ID NO: 1128735 - RNA, 19 nt, Homo sapiens
  misc_RNA (1)...(19): siRNA sense strand
gauauaagccagacuugaa

SEQ ID NO: 1128736 - RNA, 19 nt, Homo sapiens
  misc_RNA (1)...(19): siRNA sense strand
gaaacucuaucuucuacug

SEQ ID NO: 1128737 - RNA, 19 nt, Homo sapiens
  misc_RNA (1)...(19): siRNA sense strand
gaugaagucugugcugaaa

SEQ ID NO: 1128738 - RNA, 19 nt, Homo sapiens
  misc_RNA (1)...(19): siRNA sense strand
gaagucaucugagccaguu

SEQ ID NO: 1128739 - RNA, 19 nt, Homo sapiens
  misc_RNA (1)...(19): siRNA sense strand
gcugagcgcucuaugaugu

SEQ ID NO: 1128740 - RNA, 19 nt, Homo sapiens
  misc_RNA (1)...(19): siRNA sense strand
aaacagaucgcacagagua

SEQ ID NO: 1128741 - RNA, 19 nt, Homo sapiens
  misc_RNA (1)...(19): siRNA sense strand
gaagaagaucuguaucaaa

SEQ ID NO: 1128742 - RNA, 19 nt, Homo sapiens
  misc_RNA (1)...(19): siRNA sense strand
caucggagauugcagauuc

SEQ ID NO: 1128743 - RNA, 19 nt, Homo sapiens
  misc_RNA (1)...(19): siRNA sense strand
ugaagcagauuuagugaga

SEQ ID NO: 1128744 - RNA, 19 nt, Homo sapiens
  misc_RNA (1)...(19): siRNA sense strand
gaaagugaacaugguauaa

SEQ ID NO: 1128745 - RNA, 19 nt, Homo sapiens
  misc_RNA (1)...(19): siRNA sense strand
agagcagacucaaguaaua

SEQ ID NO: 1128746 - RNA, 19 nt, Homo sapiens
  misc_RNA (1)...(19): siRNA sense strand
gguagaagaaggagcuuua

SEQ ID NO: 1128747 - RNA, 19 nt, Homo sapiens
  misc_RNA (1)...(19): siRNA sense strand
ccaggagucuaccaaauga

SEQ ID NO: 1128748 - RNA, 19 nt, Homo sapiens
  misc_RNA (1)...(19): siRNA sense strand
gaacgucuuacaagccuua

SEQ ID NO: 1128749 - RNA, 19 nt, Homo sapiens
  misc_RNA (1)...(19): siRNA sense strand
ugacuuguaugguaucuga

SEQ ID NO: 1128750 - RNA, 19 nt, Homo sapiens
  misc_RNA (1)...(19): siRNA sense strand
caaagauucuggauuccuu

SEQ ID NO: 1128751 - RNA, 19 nt, Homo sapiens
  misc_RNA (1)...(19): siRNA sense strand
uguagagucugcaguagua

SEQ ID NO: 1128752 - RNA, 19 nt, Homo sapiens
  misc_RNA (1)...(19): siRNA sense strand
gcugaucgaucuaugaugu

SEQ ID NO: 1128753 - RNA, 19 nt, Homo sapiens
  misc_RNA (1)...(19): siRNA sense strand
caucaaagaucauguuggu

SEQ ID NO: 1128754 - RNA, 19 nt, Homo sapiens
  misc_RNA (1)...(19): siRNA sense strand
caucagagccuccuguuau

SEQ ID NO: 1128755 - RNA, 19 nt, Homo sapiens
  misc_RNA (1)...(19): siRNA sense strand
gaagaagguuuagcagauc

SEQ ID NO: 1128756 - RNA, 19 nt, Homo sapiens
  misc_RNA (1)...(19): siRNA sense strand
gaaaggaauuaaucuaucc

SEQ ID NO: 1128757 - RNA, 19 nt, Homo sapiens
  misc_RNA (1)...(19): siRNA sense strand
ccaagcacaucaacaacaa

SEQ ID NO: 1128758 - RNA, 19 nt, Homo sapiens
  misc_RNA (1)...(19): siRNA sense strand
uaugaacgcuccaugaugu

SEQ ID NO: 1128759 - RNA, 19 nt, Homo sapiens
  misc_RNA (1)...(19): siRNA sense strand
uaugaacgcuccaugaugu

SEQ ID NO: 1128760 - RNA, 19 nt, Homo sapiens
  misc_RNA (1)...(19): siRNA sense strand
cgacagcagugccugaguu

SEQ ID NO: 1128761 - RNA, 19 nt, Homo sapiens
  misc_RNA (1)...(19): siRNA sense strand
agaagaagguuuagcagau

SEQ ID NO: 1128762 - RNA, 19 nt, Homo sapiens
  misc_RNA (1)...(19): siRNA sense strand
cgacgaaggucuagaucug

SEQ ID NO: 1128763 - RNA, 19 nt, Homo sapiens
  misc_RNA (1)...(19): siRNA sense strand
ccuuagagcuggcauugaa

SEQ ID NO: 1128764 - RNA, 19 nt, Homo sapiens
  misc_RNA (1)...(19): siRNA sense strand
gaaaguaguggaggagaaa

SEQ ID NO: 1128765 - RNA, 19 nt, Homo sapiens
  misc_RNA (1)...(19): siRNA sense strand
gcucagcccuaaagaaagu

SEQ ID NO: 1128766 - RNA, 19 nt, Homo sapiens
  misc_RNA (1)...(19): siRNA sense strand
gcuccaugaugucagcuua

SEQ ID NO: 1128767 - RNA, 19 nt, Homo sapiens
  misc_RNA (1)...(19): siRNA sense strand
caacgauggugcuggaguu

SEQ ID NO: 1128768 - RNA, 19 nt, Homo sapiens
  misc_RNA (1)...(19): siRNA sense strand
gauacagaacuacgauaua

SEQ ID NO: 1128769 - RNA, 19 nt, Homo sapiens
  misc_RNA (1)...(19): siRNA sense strand
agaacacccuuaagaagaa

SEQ ID NO: 1128770 - RNA, 19 nt, Homo sapiens
  misc_RNA (1)...(19): siRNA sense strand
uagugaagcugacauugaa

SEQ ID NO: 1128771 - RNA, 19 nt, Homo sapiens
  misc_RNA (1)...(19): siRNA sense strand
cugaugaaauucccacuaa

SEQ ID NO: 1128772 - RNA, 19 nt, Homo sapiens
  misc_RNA (1)...(19): siRNA sense strand
ugaaagagggcuccagaaa

SEQ ID NO: 1128773 - RNA, 19 nt, Homo sapiens
  misc_RNA (1)...(19): siRNA sense strand
ggauaguguuuauggagaa

SEQ ID NO: 1128774 - RNA, 19 nt, Homo sapiens
  misc_RNA (1)...(19): siRNA sense strand
uaaugcagcugccaugugu

SEQ ID NO: 1128775 - RNA, 19 nt, Homo sapiens
  misc_RNA (1)...(19): siRNA sense strand
agaucaagcuccagggaua

SEQ ID NO: 1128776 - RNA, 19 nt, Homo sapiens
  misc_RNA (1)...(19): siRNA sense strand
ugaaacaaauacacccauu

SEQ ID NO: 1128777 - RNA, 19 nt, Homo sapiens
  misc_RNA (1)...(19): siRNA sense strand
aaacaaauacacccauuga

SEQ ID NO: 1128778 - RNA, 19 nt, Homo sapiens
  misc_RNA (1)...(19): siRNA sense strand
gcagcugaccgaucuauga

SEQ ID NO: 1128779 - RNA, 19 nt, Homo sapiens
  misc_RNA (1)...(19): siRNA sense strand
ccagagccaucaaagauca

SEQ ID NO: 1128780 - RNA, 19 nt, Homo sapiens
  misc_RNA (1)...(19): siRNA sense strand
ggaugaagaggaagaagaa

SEQ ID NO: 1128781 - RNA, 19 nt, Homo sapiens
  misc_RNA (1)...(19): siRNA sense strand
aggaggagcuacuauagaa

SEQ ID NO: 1128782 - RNA, 19 nt, Homo sapiens
  misc_RNA (1)...(19): siRNA sense strand
gaagaucuguaucaaaaga

SEQ ID NO: 1128783 - RNA, 19 nt, Homo sapiens
  misc_RNA (1)...(19): siRNA sense strand
guaaguaguaugccagaaa

SEQ ID NO: 1128784 - RNA, 19 nt, Homo sapiens
  misc_RNA (1)...(19): siRNA sense strand
gaaacaaauacacccauug

SEQ ID NO: 1128785 - RNA, 19 nt, Homo sapiens
  misc_RNA (1)...(19): siRNA sense strand
ggucuuucguggucaguaa

SEQ ID NO: 1128786 - RNA, 19 nt, Homo sapiens
  misc_RNA (1)...(19): siRNA sense strand
caaugucaguggaguauca

SEQ ID NO: 1128787 - RNA, 19 nt, Homo sapiens
  misc_RNA (1)...(19): siRNA sense strand
agagacagcagaaacauuu

SEQ ID NO: 1128788 - RNA, 19 nt, Homo sapiens
  misc_RNA (1)...(19): siRNA sense strand
gaaauagugcagaagauag

SEQ ID NO: 1128789 - RNA, 19 nt, Homo sapiens
  misc_RNA (1)...(19): siRNA sense strand
ucaagaacacccuuaagaa

SEQ ID NO: 1128790 - RNA, 19 nt, Homo sapiens
  misc_RNA (1)...(19): siRNA sense strand
guagugaagcugacauuga

SEQ ID NO: 1128791 - RNA, 19 nt, Homo sapiens
  misc_RNA (1)...(19): siRNA sense strand
gcugaucguucaaugaugu

SEQ ID NO: 1128792 - RNA, 19 nt, Homo sapiens
  misc_RNA (1)...(19): siRNA sense strand
gagccaagcacaucaacaa

SEQ ID NO: 1128793 - RNA, 19 nt, Homo sapiens
  misc_RNA (1)...(19): siRNA sense strand
gcauuuggcccaucugaga

SEQ ID NO: 1128794 - RNA, 19 nt, Homo sapiens
  misc_RNA (1)...(19): siRNA sense strand
guuaacaccuguagagucu

SEQ ID NO: 1128795 - RNA, 19 nt, Homo sapiens
  misc_RNA (1)...(19): siRNA sense strand
caaagaucauguugguaga

SEQ ID NO: 1128796 - RNA, 19 nt, Homo sapiens
  misc_RNA (1)...(19): siRNA sense strand
gcugaauggugaaacaaau

SEQ ID NO: 1128797 - RNA, 19 nt, Homo sapiens
  misc_RNA (1)...(19): siRNA sense strand
ugaagucugugcugaaauc

SEQ ID NO: 1128798 - RNA, 19 nt, Homo sapiens
  misc_RNA (1)...(19): siRNA sense strand
ggacauggaacgucuuaca

SEQ ID NO: 1128799 - RNA, 19 nt, Homo sapiens
  misc_RNA (1)...(19): siRNA sense strand
aaagagacacugccugauu

SEQ ID NO: 1128800 - RNA, 19 nt, Homo sapiens
  misc_RNA (1)...(19): siRNA sense strand
cagcaucuacucucaguuu

SEQ ID NO: 1128801 - RNA, 19 nt, Homo sapiens
  misc_RNA (1)...(19): siRNA sense strand
gcagaaacauuugauucca

SEQ ID NO: 1128802 - RNA, 19 nt, Homo sapiens
  misc_RNA (1)...(19): siRNA sense strand
cagaaacccuugugguauc

SEQ ID NO: 1128803 - RNA, 19 nt, Homo sapiens
  misc_RNA (1)...(19): siRNA sense strand
gaaccauccaugacaaaga

SEQ ID NO: 1128804 - RNA, 19 nt, Homo sapiens
  misc_RNA (1)...(19): siRNA sense strand
gaaggagcuuuagcauuuc

SEQ ID NO: 1128805 - RNA, 19 nt, Homo sapiens
  misc_RNA (1)...(19): siRNA sense strand
aagcacagauccaagucua

SEQ ID NO: 1128806 - RNA, 19 nt, Homo sapiens
  misc_RNA (1)...(19): siRNA sense strand
uaaugaagcagauuuagug

SEQ ID NO: 1128807 - RNA, 19 nt, Homo sapiens
  misc_RNA (1)...(19): siRNA sense strand
gaacuaguaaggguauuga

SEQ ID NO: 1128808 - RNA, 19 nt, Homo sapiens
  misc_RNA (1)...(19): siRNA sense strand
caucacauguuaugaaagg

SEQ ID NO: 1128809 - RNA, 19 nt, Homo sapiens
  misc_RNA (1)...(19): siRNA sense strand
cuaaagagauggaacauaa

SEQ ID NO: 1128810 - RNA, 19 nt, Homo sapiens
  misc_RNA (1)...(19): siRNA sense strand
agaaggagcuuuagcauuu

SEQ ID NO: 1128811 - RNA, 19 nt, Homo sapiens
  misc_RNA (1)...(19): siRNA sense strand
gcuagaaccuccuguagua

SEQ ID NO: 1128812 - RNA, 19 nt, Homo sapiens
  misc_RNA (1)...(19): siRNA sense strand
ggaaauuggugaagagaaa

SEQ ID NO: 1128813 - RNA, 19 nt, Homo sapiens
  misc_RNA (1)...(19): siRNA sense strand
gagccagaaucuucaauua

SEQ ID NO: 1128814 - RNA, 19 nt, Homo sapiens
  misc_RNA (1)...(19): siRNA sense strand
ggauaaggcucaauuacuu

SEQ ID NO: 1128815 - RNA, 19 nt, Homo sapiens
  misc_RNA (1)...(19): siRNA sense strand
caacugagguggcuauaga

SEQ ID NO: 1128816 - RNA, 19 nt, Homo sapiens
  misc_RNA (1)...(19): siRNA sense strand
ugacaaagauucuggauuc

SEQ ID NO: 1128817 - RNA, 19 nt, Homo sapiens
  misc_RNA (1)...(19): siRNA sense strand
cgacagcgcuggaauccua

SEQ ID NO: 1128818 - RNA, 19 nt, Homo sapiens
  misc_RNA (1)...(19): siRNA sense strand
gcgcuggaauccuauaaua

SEQ ID NO: 1128819 - RNA, 19 nt, Homo sapiens
  misc_RNA (1)...(19): siRNA sense strand
ggucuuagauacagaacua

SEQ ID NO: 1128820 - RNA, 19 nt, Homo sapiens
  misc_RNA (1)...(19): siRNA sense strand
gaagauagaggaaguacuu

SEQ ID NO: 1128821 - RNA, 19 nt, Homo sapiens
  misc_RNA (1)...(19): siRNA sense strand
gaaguaagcguuccaaauc

SEQ ID NO: 1128822 - RNA, 19 nt, Homo sapiens
  misc_RNA (1)...(19): siRNA sense strand
ucauuaagaucucgaagua

SEQ ID NO: 1128823 - RNA, 19 nt, Homo sapiens
  misc_RNA (1)...(19): siRNA sense strand
aaacagauccuacugauga

SEQ ID NO: 1128824 - RNA, 19 nt, Homo sapiens
  misc_RNA (1)...(19): siRNA sense strand
ggaagaagaucuguaucaa

SEQ ID NO: 1128825 - RNA, 19 nt, Homo sapiens
  misc_RNA (1)...(19): siRNA sense strand
ggauacagaagaaccauua

SEQ ID NO: 1128826 - RNA, 19 nt, Homo sapiens
  misc_RNA (1)...(19): siRNA sense strand
agaaagagcuucagagucu

SEQ ID NO: 1128827 - RNA, 19 nt, Homo sapiens
  misc_RNA (1)...(19): siRNA sense strand
gcucuaugaugucagcuua

SEQ ID NO: 1128828 - RNA, 19 nt, Homo sapiens
  misc_RNA (1)...(19): siRNA sense strand
ggagaucucuguucagucu

SEQ ID NO: 1128829 - RNA, 19 nt, Homo sapiens
  misc_RNA (1)...(19): siRNA sense strand
caucaucccuuuaaacuca

SEQ ID NO: 1128830 - RNA, 19 nt, Homo sapiens
  misc_RNA (1)...(19): siRNA sense strand
agacgaagcuucaguaucu

SEQ ID NO: 1128831 - RNA, 19 nt, Homo sapiens
  misc_RNA (1)...(19): siRNA sense strand
gcugaacgcucuaugaugu

SEQ ID NO: 1128832 - RNA, 19 nt, Homo sapiens
  misc_RNA (1)...(19): siRNA sense strand
gcucuaugaugucuuauga

SEQ ID NO: 1128833 - RNA, 19 nt, Homo sapiens
  misc_RNA (1)...(19): siRNA sense strand
gaagaaauagugcagaaga

SEQ ID NO: 1128834 - RNA, 19 nt, Homo sapiens
  misc_RNA (1)...(19): siRNA sense strand
caaaucuucugaacacaaa

SEQ ID NO: 1128835 - RNA, 19 nt, Homo sapiens
  misc_RNA (1)...(19): siRNA sense strand
gauauaagccagacuugaa

SEQ ID NO: 1128836 - RNA, 19 nt, Homo sapiens
  misc_RNA (1)...(19): siRNA sense strand
gaaacucuaucuucuacug

SEQ ID NO: 1128837 - RNA, 19 nt, Homo sapiens
  misc_RNA (1)...(19): siRNA sense strand
gaugaagucugugcugaaa

SEQ ID NO: 1128838 - RNA, 19 nt, Homo sapiens
  misc_RNA (1)...(19): siRNA sense strand
gaagucaucugagccaguu

SEQ ID NO: 1128839 - RNA, 19 nt, Homo sapiens
  misc_RNA (1)...(19): siRNA sense strand
gcugagcgcucuaugaugu

SEQ ID NO: 1128840 - RNA, 19 nt, Homo sapiens
  misc_RNA (1)...(19): siRNA sense strand
aaacagaucgcacagagua

SEQ ID NO: 1128841 - RNA, 19 nt, Homo sapiens
  misc_RNA (1)...(19): siRNA sense strand
gaagaagaucuguaucaaa

SEQ ID NO: 1128842 - RNA, 19 nt, Homo sapiens
  misc_RNA (1)...(19): siRNA sense strand
caucggagauugcagauuc

SEQ ID NO: 1128843 - RNA, 19 nt, Homo sapiens
  misc_RNA (1)...(19): siRNA sense strand
ugaagcagauuuagugaga

SEQ ID NO: 1128844 - RNA, 19 nt, Homo sapiens
  misc_RNA (1)...(19): siRNA sense strand
gaaagugaacaugguauaa

SEQ ID NO: 1128845 - RNA, 19 nt, Homo sapiens
  misc_RNA (1)...(19): siRNA sense strand
agagcagacucaaguaaua

SEQ ID NO: 1128846 - RNA, 19 nt, Homo sapiens
  misc_RNA (1)...(19): siRNA sense strand
gguagaagaaggagcuuua

SEQ ID NO: 1128847 - RNA, 19 nt, Homo sapiens
  misc_RNA (1)...(19): siRNA sense strand
ccaggagucuaccaaauga

SEQ ID NO: 1128848 - RNA, 19 nt, Homo sapiens
  misc_RNA (1)...(19): siRNA sense strand
gaacgucuuacaagccuua

SEQ ID NO: 1128849 - RNA, 19 nt, Homo sapiens
  misc_RNA (1)...(19): siRNA sense strand
ugacuuguaugguaucuga

SEQ ID NO: 1128850 - RNA, 19 nt, Homo sapiens
  misc_RNA (1)...(19): siRNA sense strand
caaagauucuggauuccuu

SEQ ID NO: 1128851 - RNA, 19 nt, Homo sapiens
  misc_RNA (1)...(19): siRNA sense strand
uguagagucugcaguagua

SEQ ID NO: 1128852 - RNA, 19 nt, Homo sapiens
  misc_RNA (1)...(19): siRNA sense strand
gcugaucgaucuaugaugu

SEQ ID NO: 1128853 - RNA, 19 nt, Homo sapiens
  misc_RNA (1)...(19): siRNA sense strand
caucaaagaucauguuggu

SEQ ID NO: 1128854 - RNA, 19 nt, Homo sapiens
  misc_RNA (1)...(19): siRNA sense strand
caucagagccuccuguuau

SEQ ID NO: 1128855 - RNA, 19 nt, Homo sapiens
  misc_RNA (1)...(19): siRNA sense strand
gaagaagguuuagcagauc

SEQ ID NO: 1128856 - RNA, 19 nt, Homo sapiens
  misc_RNA (1)...(19): siRNA sense strand
gaaaggaauuaaucuaucc

SEQ ID NO: 1128857 - RNA, 19 nt, Homo sapiens
  misc_RNA (1)...(19): siRNA sense strand
ccaagcacaucaacaacaa

SEQ ID NO: 1128858 - RNA, 19 nt, Homo sapiens
  misc_RNA (1)...(19): siRNA sense strand
uaugaacgcuccaugaugu

SEQ ID NO: 1128859 - RNA, 19 nt, Homo sapiens
  misc_RNA (1)...(19): siRNA sense strand
uaugaacgcuccaugaugu

SEQ ID NO: 1128860 - RNA, 19 nt, Homo sapiens
  misc_RNA (1)...(19): siRNA sense strand
cgacagcagugccugaguu

SEQ ID NO: 1128861 - RNA, 19 nt, Homo sapiens
  misc_RNA (1)...(19): siRNA sense strand
agaagaagguuuagcagau

SEQ ID NO: 1128862 - RNA, 19 nt, Homo sapiens
  misc_RNA (1)...(19): siRNA sense strand
cgacgaaggucuagaucug

SEQ ID NO: 1128863 - RNA, 19 nt, Homo sapiens
  misc_RNA (1)...(19): siRNA sense strand
ccuuagagcuggcauugaa

SEQ ID NO: 1128864 - RNA, 19 nt, Homo sapiens
  misc_RNA (1)...(19): siRNA sense strand
gaaaguaguggaggagaaa

SEQ ID NO: 1128865 - RNA, 19 nt, Homo sapiens
  misc_RNA (1)...(19): siRNA sense strand
gcucagcccuaaagaaagu

SEQ ID NO: 1128866 - RNA, 19 nt, Homo sapiens
  misc_RNA (1)...(19): siRNA sense strand
gcuccaugaugucagcuua

SEQ ID NO: 1128867 - RNA, 19 nt, Homo sapiens
  misc_RNA (1)...(19): siRNA sense strand
caacgauggugcuggaguu

SEQ ID NO: 1128868 - RNA, 19 nt, Homo sapiens
  misc_RNA (1)...(19): siRNA sense strand
gauacagaacuacgauaua

SEQ ID NO: 1128869 - RNA, 19 nt, Homo sapiens
  misc_RNA (1)...(19): siRNA sense strand
agaacacccuuaagaagaa

SEQ ID NO: 1128870 - RNA, 19 nt, Homo sapiens
  misc_RNA (1)...(19): siRNA sense strand
uagugaagcugacauugaa

SEQ ID NO: 1128871 - RNA, 19 nt, Homo sapiens
  misc_RNA (1)...(19): siRNA sense strand
cugaugaaauucccacuaa

SEQ ID NO: 1128872 - RNA, 19 nt, Homo sapiens
  misc_RNA (1)...(19): siRNA sense strand
ugaaagagggcuccagaaa

SEQ ID NO: 1128873 - RNA, 19 nt, Homo sapiens
  misc_RNA (1)...(19): siRNA sense strand
ggauaguguuuauggagaa

SEQ ID NO: 1128874 - RNA, 19 nt, Homo sapiens
  misc_RNA (1)...(19): siRNA sense strand
guaaagaagaugaugaugu

SEQ ID NO: 1128875 - RNA, 19 nt, Homo sapiens
  misc_RNA (1)...(19): siRNA sense strand
uaaugcagcugccaugugu

SEQ ID NO: 1128876 - RNA, 19 nt, Homo sapiens
  misc_RNA (1)...(19): siRNA sense strand
agaucaagcuccagggaua

SEQ ID NO: 1128877 - RNA, 19 nt, Homo sapiens
  misc_RNA (1)...(19): siRNA sense strand
ugaaacaaauacacccauu

SEQ ID NO: 1128878 - RNA, 19 nt, Homo sapiens
  misc_RNA (1)...(19): siRNA sense strand
aaacaaauacacccauuga

SEQ ID NO: 1128879 - RNA, 19 nt, Homo sapiens
  misc_RNA (1)...(19): siRNA sense strand
gcagcugaccgaucuauga

SEQ ID NO: 1128880 - RNA, 19 nt, Homo sapiens
  misc_RNA (1)...(19): siRNA sense strand
ccagagccaucaaagauca

SEQ ID NO: 1128881 - RNA, 19 nt, Homo sapiens
  misc_RNA (1)...(19): siRNA sense strand
ggaugaagaggaagaagaa

SEQ ID NO: 1128882 - RNA, 19 nt, Homo sapiens
  misc_RNA (1)...(19): siRNA sense strand
aggaggagcuacuauagaa

SEQ ID NO: 1128883 - RNA, 19 nt, Homo sapiens
  misc_RNA (1)...(19): siRNA sense strand
gaagaucuguaucaaaaga

SEQ ID NO: 1128884 - RNA, 19 nt, Homo sapiens
  misc_RNA (1)...(19): siRNA sense strand
guaaguaguaugccagaaa

SEQ ID NO: 1128885 - RNA, 19 nt, Homo sapiens
  misc_RNA (1)...(19): siRNA sense strand
gaaacaaauacacccauug

SEQ ID NO: 1128886 - RNA, 19 nt, Homo sapiens
  misc_RNA (1)...(19): siRNA sense strand
ggucuuucguggucaguaa

SEQ ID NO: 1128887 - RNA, 19 nt, Homo sapiens
  misc_RNA (1)...(19): siRNA sense strand
caaugucaguggaguauca

SEQ ID NO: 1128888 - RNA, 19 nt, Homo sapiens
  misc_RNA (1)...(19): siRNA sense strand
agagacagcagaaacauuu

SEQ ID NO: 1128889 - RNA, 19 nt, Homo sapiens
  misc_RNA (1)...(19): siRNA sense strand
gagccaagcacaucaacaa

SEQ ID NO: 1128890 - RNA, 19 nt, Homo sapiens
  misc_RNA (1)...(19): siRNA sense strand
ucaagaacacccuuaagaa

SEQ ID NO: 1128891 - RNA, 19 nt, Homo sapiens
  misc_RNA (1)...(19): siRNA sense strand
guagugaagcugacauuga

SEQ ID NO: 1128892 - RNA, 19 nt, Homo sapiens
  misc_RNA (1)...(19): siRNA sense strand
gcugaucguucaaugaugu

SEQ ID NO: 1128893 - RNA, 19 nt, Homo sapiens
  misc_RNA (1)...(19): siRNA sense strand
gaaauagugcagaagauag

SEQ ID NO: 1128894 - RNA, 19 nt, Homo sapiens
  misc_RNA (1)...(19): siRNA sense strand
gcauuuggcccaucugaga

SEQ ID NO: 1128895 - RNA, 19 nt, Homo sapiens
  misc_RNA (1)...(19): siRNA sense strand
guuaacaccuguagagucu

SEQ ID NO: 1128896 - RNA, 19 nt, Homo sapiens
  misc_RNA (1)...(19): siRNA sense strand
caaagaucauguugguaga

SEQ ID NO: 1128897 - RNA, 19 nt, Homo sapiens
  misc_RNA (1)...(19): siRNA sense strand
gcugaauggugaaacaaau

SEQ ID NO: 1128898 - RNA, 19 nt, Homo sapiens
  misc_RNA (1)...(19): siRNA sense strand
ugaagucugugcugaaauc

SEQ ID NO: 1128899 - RNA, 19 nt, Homo sapiens
  misc_RNA (1)...(19): siRNA sense strand
ggacauggaacgucuuaca

SEQ ID NO: 1128900 - RNA, 19 nt, Homo sapiens
  misc_RNA (1)...(19): siRNA sense strand
aaagagacacugccugauu

SEQ ID NO: 1128901 - RNA, 19 nt, Homo sapiens
  misc_RNA (1)...(19): siRNA sense strand
cagcaucuacucucaguuu

SEQ ID NO: 1128902 - RNA, 19 nt, Homo sapiens
  misc_RNA (1)...(19): siRNA sense strand
gcagaaacauuugauucca

SEQ ID NO: 1128903 - RNA, 19 nt, Homo sapiens
  misc_RNA (1)...(19): siRNA sense strand
cagaaacccuugugguauc

SEQ ID NO: 1128904 - RNA, 19 nt, Homo sapiens
  misc_RNA (1)...(19): siRNA sense strand
caucacauguuaugaaagg

SEQ ID NO: 1128905 - RNA, 19 nt, Homo sapiens
  misc_RNA (1)...(19): siRNA sense strand
gaaggagcuuuagcauuuc

SEQ ID NO: 1128906 - RNA, 19 nt, Homo sapiens
  misc_RNA (1)...(19): siRNA sense strand
aagcacagauccaagucua

SEQ ID NO: 1128907 - RNA, 19 nt, Homo sapiens
  misc_RNA (1)...(19): siRNA sense strand
uaaugaagcagauuuagug

SEQ ID NO: 1128908 - RNA, 19 nt, Homo sapiens
  misc_RNA (1)...(19): siRNA sense strand
gaacuaguaaggguauuga

SEQ ID NO: 1128909 - RNA, 19 nt, Homo sapiens
  misc_RNA (1)...(19): siRNA sense strand
cuaaagagauggaacauaa

SEQ ID NO: 1128910 - RNA, 19 nt, Homo sapiens
  misc_RNA (1)...(19): siRNA sense strand
agaaggagcuuuagcauuu

SEQ ID NO: 1128911 - RNA, 19 nt, Homo sapiens
  misc_RNA (1)...(19): siRNA sense strand
gcuagaaccuccuguagua

SEQ ID NO: 1128912 - RNA, 19 nt, Homo sapiens
  misc_RNA (1)...(19): siRNA sense strand
ggaaauuggugaagagaaa

SEQ ID NO: 1128913 - RNA, 19 nt, Homo sapiens
  misc_RNA (1)...(19): siRNA sense strand
gagccagaaucuucaauua

SEQ ID NO: 1128914 - RNA, 19 nt, Homo sapiens
  misc_RNA (1)...(19): siRNA sense strand
ggauaaggcucaauuacuu

SEQ ID NO: 1128915 - RNA, 19 nt, Homo sapiens
  misc_RNA (1)...(19): siRNA sense strand
caacugagguggcuauaga

SEQ ID NO: 1128916 - RNA, 19 nt, Homo sapiens
  misc_RNA (1)...(19): siRNA sense strand
ugacaaagauucuggauuc

SEQ ID NO: 1128917 - RNA, 19 nt, Homo sapiens
  misc_RNA (1)...(19): siRNA sense strand
cgacagcgcuggaauccua

SEQ ID NO: 1128918 - RNA, 19 nt, Homo sapiens
  misc_RNA (1)...(19): siRNA sense strand
gcgcuggaauccuauaaua

SEQ ID NO: 1128919 - RNA, 19 nt, Homo sapiens
  misc_RNA (1)...(19): siRNA sense strand
ggucuuagauacagaacua

SEQ ID NO: 1128920 - RNA, 19 nt, Homo sapiens
  misc_RNA (1)...(19): siRNA sense strand
gaagauagaggaaguacuu

SEQ ID NO: 1128921 - RNA, 19 nt, Homo sapiens
  misc_RNA (1)...(19): siRNA sense strand
gaaguaagcguuccaaauc

SEQ ID NO: 1128922 - RNA, 19 nt, Homo sapiens
  misc_RNA (1)...(19): siRNA sense strand
ucauuaagaucucgaagua

SEQ ID NO: 1128923 - RNA, 19 nt, Homo sapiens
  misc_RNA (1)...(19): siRNA sense strand
aaacagauccuacugauga

SEQ ID NO: 1128924 - RNA, 19 nt, Homo sapiens
  misc_RNA (1)...(19): siRNA sense strand
ggaagaagaucuguaucaa

SEQ ID NO: 1128925 - RNA, 19 nt, Homo sapiens
  misc_RNA (1)...(19): siRNA sense strand
ggauacagaagaaccauua

SEQ ID NO: 1128926 - RNA, 19 nt, Homo sapiens
  misc_RNA (1)...(19): siRNA sense strand
agaaagagcuucagagucu

SEQ ID NO: 1128927 - RNA, 19 nt, Homo sapiens
  misc_RNA (1)...(19): siRNA sense strand
gcucuaugaugucagcuua

SEQ ID NO: 1128928 - RNA, 19 nt, Homo sapiens
  misc_RNA (1)...(19): siRNA sense strand
ggagaucucuguucagucu

SEQ ID NO: 1128929 - RNA, 19 nt, Homo sapiens
  misc_RNA (1)...(19): siRNA sense strand
caucaucccuuuaaacuca

SEQ ID NO: 1128930 - RNA, 19 nt, Homo sapiens
  misc_RNA (1)...(19): siRNA sense strand
agacgaagcuucaguaucu

SEQ ID NO: 1128931 - RNA, 19 nt, Homo sapiens
  misc_RNA (1)...(19): siRNA sense strand
gcugaacgcucuaugaugu

SEQ ID NO: 1128932 - RNA, 19 nt, Homo sapiens
  misc_RNA (1)...(19): siRNA sense strand
gcucuaugaugucuuauga

SEQ ID NO: 1128933 - RNA, 19 nt, Homo sapiens
  misc_RNA (1)...(19): siRNA sense strand
gaagaaauagugcagaaga

SEQ ID NO: 1128934 - RNA, 19 nt, Homo sapiens
  misc_RNA (1)...(19): siRNA sense strand
caaaucuucugaacacaaa

SEQ ID NO: 1128935 - RNA, 19 nt, Homo sapiens
  misc_RNA (1)...(19): siRNA sense strand
gauauaagccagacuugaa

SEQ ID NO: 1128936 - RNA, 19 nt, Homo sapiens
  misc_RNA (1)...(19): siRNA sense strand
gaaacucuaucuucuacug

SEQ ID NO: 1128937 - RNA, 19 nt, Homo sapiens
  misc_RNA (1)...(19): siRNA sense strand
gaugaagucugugcugaaa

SEQ ID NO: 1128938 - RNA, 19 nt, Homo sapiens
  misc_RNA (1)...(19): siRNA sense strand
gaagucaucugagccaguu

SEQ ID NO: 1128939 - RNA, 19 nt, Homo sapiens
  misc_RNA (1)...(19): siRNA sense strand
gcugagcgcucuaugaugu

SEQ ID NO: 1128940 - RNA, 19 nt, Homo sapiens
  misc_RNA (1)...(19): siRNA sense strand
aaacagaucgcacagagua

SEQ ID NO: 1128941 - RNA, 19 nt, Homo sapiens
  misc_RNA (1)...(19): siRNA sense strand
gaagaagaucuguaucaaa

SEQ ID NO: 1128942 - RNA, 19 nt, Homo sapiens
  misc_RNA (1)...(19): siRNA sense strand
caucggagauugcagauuc

SEQ ID NO: 1128943 - RNA, 19 nt, Homo sapiens
  misc_RNA (1)...(19): siRNA sense strand
ugaagcagauuuagugaga

SEQ ID NO: 1128944 - RNA, 19 nt, Homo sapiens
  misc_RNA (1)...(19): siRNA sense strand
gaaagugaacaugguauaa

SEQ ID NO: 1128945 - RNA, 19 nt, Homo sapiens
  misc_RNA (1)...(19): siRNA sense strand
agagcagacucaaguaaua

SEQ ID NO: 1128946 - RNA, 19 nt, Homo sapiens
  misc_RNA (1)...(19): siRNA sense strand
gguagaagaaggagcuuua

SEQ ID NO: 1128947 - RNA, 19 nt, Homo sapiens
  misc_RNA (1)...(19): siRNA sense strand
ccaggagucuaccaaauga

SEQ ID NO: 1128948 - RNA, 19 nt, Homo sapiens
  misc_RNA (1)...(19): siRNA sense strand
gaacgucuuacaagccuua

SEQ ID NO: 1128949 - RNA, 19 nt, Homo sapiens
  misc_RNA (1)...(19): siRNA sense strand
ugacuuguaugguaucuga

SEQ ID NO: 1128950 - RNA, 19 nt, Homo sapiens
  misc_RNA (1)...(19): siRNA sense strand
caaagauucuggauuccuu

SEQ ID NO: 1128951 - RNA, 19 nt, Homo sapiens
  misc_RNA (1)...(19): siRNA sense strand
uguagagucugcaguagua

SEQ ID NO: 1128952 - RNA, 19 nt, Homo sapiens
  misc_RNA (1)...(19): siRNA sense strand
gcugaucgaucuaugaugu

SEQ ID NO: 1128953 - RNA, 19 nt, Homo sapiens
  misc_RNA (1)...(19): siRNA sense strand
caucaaagaucauguuggu

SEQ ID NO: 1128954 - RNA, 19 nt, Homo sapiens
  misc_RNA (1)...(19): siRNA sense strand
caucagagccuccuguuau

SEQ ID NO: 1128955 - RNA, 19 nt, Homo sapiens
  misc_RNA (1)...(19): siRNA sense strand
gaagaagguuuagcagauc

SEQ ID NO: 1128956 - RNA, 19 nt, Homo sapiens
  misc_RNA (1)...(19): siRNA sense strand
gaaaggaauuaaucuaucc

SEQ ID NO: 1128957 - RNA, 19 nt, Homo sapiens
  misc_RNA (1)...(19): siRNA sense strand
ccaagcacaucaacaacaa

SEQ ID NO: 1128958 - RNA, 19 nt, Homo sapiens
  misc_RNA (1)...(19): siRNA sense strand
uaugaacgcuccaugaugu

SEQ ID NO: 1128959 - RNA, 19 nt, Homo sapiens
  misc_RNA (1)...(19): siRNA sense strand
uaugaacgcuccaugaugu

SEQ ID NO: 1128960 - RNA, 19 nt, Homo sapiens
  misc_RNA (1)...(19): siRNA sense strand
cgacagcagugccugaguu

SEQ ID NO: 1128961 - RNA, 19 nt, Homo sapiens
  misc_RNA (1)...(19): siRNA sense strand
agaagaagguuuagcagau

SEQ ID NO: 1128962 - RNA, 19 nt, Homo sapiens
  misc_RNA (1)...(19): siRNA sense strand
cgacgaaggucuagaucug

SEQ ID NO: 1128963 - RNA, 19 nt, Homo sapiens
  misc_RNA (1)...(19): siRNA sense strand
ccuuagagcuggcauugaa

SEQ ID NO: 1128964 - RNA, 19 nt, Homo sapiens
  misc_RNA (1)...(19): siRNA sense strand
gaaaguaguggaggagaaa

SEQ ID NO: 1128965 - RNA, 19 nt, Homo sapiens
  misc_RNA (1)...(19): siRNA sense strand
gcucagcccuaaagaaagu

SEQ ID NO: 1128966 - RNA, 19 nt, Homo sapiens
  misc_RNA (1)...(19): siRNA sense strand
gcuccaugaugucagcuua

SEQ ID NO: 1128967 - RNA, 19 nt, Homo sapiens
  misc_RNA (1)...(19): siRNA sense strand
caacgauggugcuggaguu

SEQ ID NO: 1128968 - RNA, 19 nt, Homo sapiens
  misc_RNA (1)...(19): siRNA sense strand
gauacagaacuacgauaua

SEQ ID NO: 1128969 - RNA, 19 nt, Homo sapiens
  misc_RNA (1)...(19): siRNA sense strand
agaacacccuuaagaagaa

SEQ ID NO: 1128970 - RNA, 19 nt, Homo sapiens
  misc_RNA (1)...(19): siRNA sense strand
uagugaagcugacauugaa

SEQ ID NO: 1128971 - RNA, 19 nt, Homo sapiens
  misc_RNA (1)...(19): siRNA sense strand
cugaugaaauucccacuaa

SEQ ID NO: 1128972 - RNA, 19 nt, Homo sapiens
  misc_RNA (1)...(19): siRNA sense strand
ugaaagagggcuccagaaa

SEQ ID NO: 1128973 - RNA, 19 nt, Homo sapiens
  misc_RNA (1)...(19): siRNA sense strand
ggauaguguuuauggagaa

SEQ ID NO: 1128974 - RNA, 19 nt, Homo sapiens
  misc_RNA (1)...(19): siRNA sense strand
uaaugcagcugccaugugu

SEQ ID NO: 1128975 - RNA, 19 nt, Homo sapiens
  misc_RNA (1)...(19): siRNA sense strand
agaucaagcuccagggaua

SEQ ID NO: 1128976 - RNA, 19 nt, Homo sapiens
  misc_RNA (1)...(19): siRNA sense strand
ugaaacaaauacacccauu

SEQ ID NO: 1128977 - RNA, 19 nt, Homo sapiens
  misc_RNA (1)...(19): siRNA sense strand
aaacaaauacacccauuga

SEQ ID NO: 1128978 - RNA, 19 nt, Homo sapiens
  misc_RNA (1)...(19): siRNA sense strand
gcagcugaccgaucuauga

SEQ ID NO: 1128979 - RNA, 19 nt, Homo sapiens
  misc_RNA (1)...(19): siRNA sense strand
ccagagccaucaaagauca

SEQ ID NO: 1128980 - RNA, 19 nt, Homo sapiens
  misc_RNA (1)...(19): siRNA sense strand
ggaugaagaggaagaagaa

SEQ ID NO: 1128981 - RNA, 19 nt, Homo sapiens
  misc_RNA (1)...(19): siRNA sense strand
aggaggagcuacuauagaa

SEQ ID NO: 1128982 - RNA, 19 nt, Homo sapiens
  misc_RNA (1)...(19): siRNA sense strand
gaagaucuguaucaaaaga

SEQ ID NO: 1128983 - RNA, 19 nt, Homo sapiens
  misc_RNA (1)...(19): siRNA sense strand
guaaguaguaugccagaaa

SEQ ID NO: 1128984 - RNA, 19 nt, Homo sapiens
  misc_RNA (1)...(19): siRNA sense strand
gaaacaaauacacccauug

SEQ ID NO: 1128985 - RNA, 19 nt, Homo sapiens
  misc_RNA (1)...(19): siRNA sense strand
ggucuuucguggucaguaa

SEQ ID NO: 1128986 - RNA, 19 nt, Homo sapiens
  misc_RNA (1)...(19): siRNA sense strand
caaugucaguggaguauca

SEQ ID NO: 1128987 - RNA, 19 nt, Homo sapiens
  misc_RNA (1)...(19): siRNA sense strand
agagacagcagaaacauuu

SEQ ID NO: 1128988 - RNA, 19 nt, Homo sapiens
  misc_RNA (1)...(19): siRNA sense strand
gaaauagugcagaagauag

SEQ ID NO: 1128989 - RNA, 19 nt, Homo sapiens
  misc_RNA (1)...(19): siRNA sense strand
ucaagaacacccuuaagaa

SEQ ID NO: 1128990 - RNA, 19 nt, Homo sapiens
  misc_RNA (1)...(19): siRNA sense strand
guagugaagcugacauuga

SEQ ID NO: 1128991 - RNA, 19 nt, Homo sapiens
  misc_RNA (1)...(19): siRNA sense strand
gcugaucguucaaugaugu

SEQ ID NO: 1128992 - RNA, 19 nt, Homo sapiens
  misc_RNA (1)...(19): siRNA sense strand
gagccaagcacaucaacaa

SEQ ID NO: 1128993 - RNA, 19 nt, Homo sapiens
  misc_RNA (1)...(19): siRNA sense strand
gcauuuggcccaucugaga

SEQ ID NO: 1128994 - RNA, 19 nt, Homo sapiens
  misc_RNA (1)...(19): siRNA sense strand
guuaacaccuguagagucu

SEQ ID NO: 1128995 - RNA, 19 nt, Homo sapiens
  misc_RNA (1)...(19): siRNA sense strand
caaagaucauguugguaga

SEQ ID NO: 1128996 - RNA, 19 nt, Homo sapiens
  misc_RNA (1)...(19): siRNA sense strand
gcugaauggugaaacaaau

SEQ ID NO: 1128997 - RNA, 19 nt, Homo sapiens
  misc_RNA (1)...(19): siRNA sense strand
ugaagucugugcugaaauc

SEQ ID NO: 1128998 - RNA, 19 nt, Homo sapiens
  misc_RNA (1)...(19): siRNA sense strand
ggacauggaacgucuuaca

SEQ ID NO: 1128999 - RNA, 19 nt, Homo sapiens
  misc_RNA (1)...(19): siRNA sense strand
aaagagacacugccugauu

SEQ ID NO: 1129000 - RNA, 19 nt, Homo sapiens
  misc_RNA (1)...(19): siRNA sense strand
cagcaucuacucucaguuu

SEQ ID NO: 1129001 - RNA, 19 nt, Homo sapiens
  misc_RNA (1)...(19): siRNA sense strand
gcagaaacauuugauucca

SEQ ID NO: 1129002 - RNA, 19 nt, Homo sapiens
  misc_RNA (1)...(19): siRNA sense strand
cagaaacccuugugguauc

SEQ ID NO: 1129003 - RNA, 19 nt, Homo sapiens
  misc_RNA (1)...(19): siRNA sense strand
gaaccauccaugacaaaga

SEQ ID NO: 1129004 - RNA, 19 nt, Homo sapiens
  misc_RNA (1)...(19): siRNA sense strand
gaaggagcuuuagcauuuc

SEQ ID NO: 1129005 - RNA, 19 nt, Homo sapiens
  misc_RNA (1)...(19): siRNA sense strand
aagcacagauccaagucua

SEQ ID NO: 1129006 - RNA, 19 nt, Homo sapiens
  misc_RNA (1)...(19): siRNA sense strand
uaaugaagcagauuuagug

SEQ ID NO: 1129007 - RNA, 19 nt, Homo sapiens
  misc_RNA (1)...(19): siRNA sense strand
gaacuaguaaggguauuga

SEQ ID NO: 1129008 - RNA, 19 nt, Homo sapiens
  misc_RNA (1)...(19): siRNA sense strand
caucacauguuaugaaagg

SEQ ID NO: 1129009 - RNA, 19 nt, Homo sapiens
  misc_RNA (1)...(19): siRNA sense strand
cuaaagagauggaacauaa

SEQ ID NO: 1129010 - RNA, 19 nt, Homo sapiens
  misc_RNA (1)...(19): siRNA sense strand
agaaggagcuuuagcauuu

SEQ ID NO: 1129011 - RNA, 19 nt, Homo sapiens
  misc_RNA (1)...(19): siRNA sense strand
gcuagaaccuccuguagua

SEQ ID NO: 1129012 - RNA, 19 nt, Homo sapiens
  misc_RNA (1)...(19): siRNA sense strand
ggaaauuggugaagagaaa

SEQ ID NO: 1129013 - RNA, 19 nt, Homo sapiens
  misc_RNA (1)...(19): siRNA sense strand
gagccagaaucuucaauua

SEQ ID NO: 1129014 - RNA, 19 nt, Homo sapiens
  misc_RNA (1)...(19): siRNA sense strand
ggauaaggcucaauuacuu

SEQ ID NO: 1129015 - RNA, 19 nt, Homo sapiens
  misc_RNA (1)...(19): siRNA sense strand
caacugagguggcuauaga

SEQ ID NO: 1129016 - RNA, 19 nt, Homo sapiens
  misc_RNA (1)...(19): siRNA sense strand
ugacaaagauucuggauuc

SEQ ID NO: 1129017 - RNA, 19 nt, Homo sapiens
  misc_RNA (1)...(19): siRNA sense strand
cgacagcgcuggaauccua

SEQ ID NO: 1129018 - RNA, 19 nt, Homo sapiens
  misc_RNA (1)...(19): siRNA sense strand
gcgcuggaauccuauaaua

SEQ ID NO: 1129019 - RNA, 19 nt, Homo sapiens
  misc_RNA (1)...(19): siRNA sense strand
ggucuuagauacagaacua

SEQ ID NO: 1129020 - RNA, 19 nt, Homo sapiens
  misc_RNA (1)...(19): siRNA sense strand
gaagauagaggaaguacuu

SEQ ID NO: 1129021 - RNA, 19 nt, Homo sapiens
  misc_RNA (1)...(19): siRNA sense strand
gaaguaagcguuccaaauc

SEQ ID NO: 1129022 - RNA, 19 nt, Homo sapiens
  misc_RNA (1)...(19): siRNA sense strand
ucauuaagaucucgaagua

SEQ ID NO: 1129023 - RNA, 19 nt, Homo sapiens
  misc_RNA (1)...(19): siRNA sense strand
aaacagauccuacugauga

SEQ ID NO: 1129024 - RNA, 19 nt, Homo sapiens
  misc_RNA (1)...(19): siRNA sense strand
ggaagaagaucuguaucaa

SEQ ID NO: 1129025 - RNA, 19 nt, Homo sapiens
  misc_RNA (1)...(19): siRNA sense strand
ggauacagaagaaccauua

SEQ ID NO: 1129026 - RNA, 19 nt, Homo sapiens
  misc_RNA (1)...(19): siRNA sense strand
agaaagagcuucagagucu

SEQ ID NO: 1129027 - RNA, 19 nt, Homo sapiens
  misc_RNA (1)...(19): siRNA sense strand
gcucuaugaugucagcuua

SEQ ID NO: 1129028 - RNA, 19 nt, Homo sapiens
  misc_RNA (1)...(19): siRNA sense strand
ggagaucucuguucagucu

SEQ ID NO: 1129029 - RNA, 19 nt, Homo sapiens
  misc_RNA (1)...(19): siRNA sense strand
agacgaagcuucaguaucu

SEQ ID NO: 1129030 - RNA, 19 nt, Homo sapiens
  misc_RNA (1)...(19): siRNA sense strand
gcugaacgcucuaugaugu

SEQ ID NO: 1129031 - RNA, 19 nt, Homo sapiens
  misc_RNA (1)...(19): siRNA sense strand
gcucuaugaugucuuauga

SEQ ID NO: 1129032 - RNA, 19 nt, Homo sapiens
  misc_RNA (1)...(19): siRNA sense strand
gaagaaauagugcagaaga

SEQ ID NO: 1129033 - RNA, 19 nt, Homo sapiens
  misc_RNA (1)...(19): siRNA sense strand
caaaucuucugaacacaaa

SEQ ID NO: 1129034 - RNA, 19 nt, Homo sapiens
  misc_RNA (1)...(19): siRNA sense strand
gauauaagccagacuugaa

SEQ ID NO: 1129035 - RNA, 19 nt, Homo sapiens
  misc_RNA (1)...(19): siRNA sense strand
gaaacucuaucuucuacug

SEQ ID NO: 1129036 - RNA, 19 nt, Homo sapiens
  misc_RNA (1)...(19): siRNA sense strand
gaugaagucugugcugaaa

SEQ ID NO: 1129037 - RNA, 19 nt, Homo sapiens
  misc_RNA (1)...(19): siRNA sense strand
gaagucaucugagccaguu

SEQ ID NO: 1129038 - RNA, 19 nt, Homo sapiens
  misc_RNA (1)...(19): siRNA sense strand
gcugagcgcucuaugaugu

SEQ ID NO: 1129039 - RNA, 19 nt, Homo sapiens
  misc_RNA (1)...(19): siRNA sense strand
gaagaagaucuguaucaaa

SEQ ID NO: 1129040 - RNA, 19 nt, Homo sapiens
  misc_RNA (1)...(19): siRNA sense strand
caucggagauugcagauuc

SEQ ID NO: 1129041 - RNA, 19 nt, Homo sapiens
  misc_RNA (1)...(19): siRNA sense strand
ugaagcagauuuagugaga

SEQ ID NO: 1129042 - RNA, 19 nt, Homo sapiens
  misc_RNA (1)...(19): siRNA sense strand
gaaagugaacaugguauaa

SEQ ID NO: 1129043 - RNA, 19 nt, Homo sapiens
  misc_RNA (1)...(19): siRNA sense strand
agagcagacucaaguaaua

SEQ ID NO: 1129044 - RNA, 19 nt, Homo sapiens
  misc_RNA (1)...(19): siRNA sense strand
gguagaagaaggagcuuua

SEQ ID NO: 1129045 - RNA, 19 nt, Homo sapiens
  misc_RNA (1)...(19): siRNA sense strand
ccaggagucuaccaaauga

SEQ ID NO: 1129046 - RNA, 19 nt, Homo sapiens
  misc_RNA (1)...(19): siRNA sense strand
gaacgucuuacaagccuua

SEQ ID NO: 1129047 - RNA, 19 nt, Homo sapiens
  misc_RNA (1)...(19): siRNA sense strand
ugacuuguaugguaucuga

SEQ ID NO: 1129048 - RNA, 19 nt, Homo sapiens
  misc_RNA (1)...(19): siRNA sense strand
caaagauucuggauuccuu

SEQ ID NO: 1129049 - RNA, 19 nt, Homo sapiens
  misc_RNA (1)...(19): siRNA sense strand
uguagagucugcaguagua

SEQ ID NO: 1129050 - RNA, 19 nt, Homo sapiens
  misc_RNA (1)...(19): siRNA sense strand
gcugaucgaucuaugaugu

SEQ ID NO: 1129051 - RNA, 19 nt, Homo sapiens
  misc_RNA (1)...(19): siRNA sense strand
caucaaagaucauguuggu

SEQ ID NO: 1129052 - RNA, 19 nt, Homo sapiens
  misc_RNA (1)...(19): siRNA sense strand
caucagagccuccuguuau

SEQ ID NO: 1129053 - RNA, 19 nt, Homo sapiens
  misc_RNA (1)...(19): siRNA sense strand
gaagaagguuuagcagauc

SEQ ID NO: 1129054 - RNA, 19 nt, Homo sapiens
  misc_RNA (1)...(19): siRNA sense strand
gaaaggaauuaaucuaucc

SEQ ID NO: 1129055 - RNA, 19 nt, Homo sapiens
  misc_RNA (1)...(19): siRNA sense strand
ccaagcacaucaacaacaa

SEQ ID NO: 1129056 - RNA, 19 nt, Homo sapiens
  misc_RNA (1)...(19): siRNA sense strand
uaugaacgcuccaugaugu

SEQ ID NO: 1129057 - RNA, 19 nt, Homo sapiens
  misc_RNA (1)...(19): siRNA sense strand
uaugaacgcuccaugaugu

SEQ ID NO: 1129058 - RNA, 19 nt, Homo sapiens
  misc_RNA (1)...(19): siRNA sense strand
cgacagcagugccugaguu

SEQ ID NO: 1129059 - RNA, 19 nt, Homo sapiens
  misc_RNA (1)...(19): siRNA sense strand
agaagaagguuuagcagau

SEQ ID NO: 1129060 - RNA, 19 nt, Homo sapiens
  misc_RNA (1)...(19): siRNA sense strand
cgacgaaggucuagaucug

SEQ ID NO: 1129061 - RNA, 19 nt, Homo sapiens
  misc_RNA (1)...(19): siRNA sense strand
ccuuagagcuggcauugaa

SEQ ID NO: 1129062 - RNA, 19 nt, Homo sapiens
  misc_RNA (1)...(19): siRNA sense strand
gaaaguaguggaggagaaa

SEQ ID NO: 1129063 - RNA, 19 nt, Homo sapiens
  misc_RNA (1)...(19): siRNA sense strand
gcucagcccuaaagaaagu

SEQ ID NO: 1129064 - RNA, 19 nt, Homo sapiens
  misc_RNA (1)...(19): siRNA sense strand
gcuccaugaugucagcuua

SEQ ID NO: 1129065 - RNA, 19 nt, Homo sapiens
  misc_RNA (1)...(19): siRNA sense strand
caacgauggugcuggaguu

SEQ ID NO: 1129066 - RNA, 19 nt, Homo sapiens
  misc_RNA (1)...(19): siRNA sense strand
gauacagaacuacgauaua

SEQ ID NO: 1129067 - RNA, 19 nt, Homo sapiens
  misc_RNA (1)...(19): siRNA sense strand
agaacacccuuaagaagaa

SEQ ID NO: 1129068 - RNA, 19 nt, Homo sapiens
  misc_RNA (1)...(19): siRNA sense strand
uagugaagcugacauugaa

SEQ ID NO: 1129069 - RNA, 19 nt, Homo sapiens
  misc_RNA (1)...(19): siRNA sense strand
cugaugaaauucccacuaa

SEQ ID NO: 1129070 - RNA, 19 nt, Homo sapiens
  misc_RNA (1)...(19): siRNA sense strand
ugaaagagggcuccagaaa

SEQ ID NO: 1129071 - RNA, 19 nt, Homo sapiens
  misc_RNA (1)...(19): siRNA sense strand
uaaugcagcugccaugugu

SEQ ID NO: 1129072 - RNA, 19 nt, Homo sapiens
  misc_RNA (1)...(19): siRNA sense strand
aaacaaauacacccauuga

SEQ ID NO: 1129073 - RNA, 19 nt, Homo sapiens
  misc_RNA (1)...(19): siRNA sense strand
agaucaagcuccagggaua

SEQ ID NO: 1129074 - RNA, 19 nt, Homo sapiens
  misc_RNA (1)...(19): siRNA sense strand
ugaaacaaauacacccauu

SEQ ID NO: 1129075 - RNA, 19 nt, Homo sapiens
  misc_RNA (1)...(19): siRNA sense strand
gcagcugaccgaucuauga

SEQ ID NO: 1129076 - RNA, 19 nt, Homo sapiens
  misc_RNA (1)...(19): siRNA sense strand
ccagagccaucaaagauca

SEQ ID NO: 1129077 - RNA, 19 nt, Homo sapiens
  misc_RNA (1)...(19): siRNA sense strand
aggaggagcuacuauagaa

SEQ ID NO: 1129078 - RNA, 19 nt, Homo sapiens
  misc_RNA (1)...(19): siRNA sense strand
gaagaucuguaucaaaaga

SEQ ID NO: 1129079 - RNA, 19 nt, Homo sapiens
  misc_RNA (1)...(19): siRNA sense strand
guaaguaguaugccagaaa

SEQ ID NO: 1129080 - RNA, 19 nt, Homo sapiens
  misc_RNA (1)...(19): siRNA sense strand
ggucuuucguggucaguaa

SEQ ID NO: 1129081 - RNA, 19 nt, Homo sapiens
  misc_RNA (1)...(19): siRNA sense strand
gaaacaaauacacccauug

SEQ ID NO: 1129082 - RNA, 19 nt, Homo sapiens
  misc_RNA (1)...(19): siRNA sense strand
caaugucaguggaguauca

SEQ ID NO: 1129083 - RNA, 19 nt, Homo sapiens
  misc_RNA (1)...(19): siRNA sense strand
agagacagcagaaacauuu

SEQ ID NO: 1129084 - RNA, 19 nt, Homo sapiens
  misc_RNA (1)...(19): siRNA sense strand
gagccaagcacaucaacaa

SEQ ID NO: 1129085 - RNA, 19 nt, Homo sapiens
  misc_RNA (1)...(19): siRNA sense strand
ucaagaacacccuuaagaa

SEQ ID NO: 1129086 - RNA, 19 nt, Homo sapiens
  misc_RNA (1)...(19): siRNA sense strand
gaaauagugcagaagauag

SEQ ID NO: 1129087 - RNA, 19 nt, Homo sapiens
  misc_RNA (1)...(19): siRNA sense strand
guagugaagcugacauuga

SEQ ID NO: 1129088 - RNA, 19 nt, Homo sapiens
  misc_RNA (1)...(19): siRNA sense strand
gcugaucguucaaugaugu

SEQ ID NO: 1129089 - RNA, 19 nt, Homo sapiens
  misc_RNA (1)...(19): siRNA sense strand
gcugaauggugaaacaaau

SEQ ID NO: 1129090 - RNA, 19 nt, Homo sapiens
  misc_RNA (1)...(19): siRNA sense strand
guuaacaccuguagagucu

SEQ ID NO: 1129091 - RNA, 19 nt, Homo sapiens
  misc_RNA (1)...(19): siRNA sense strand
caaagaucauguugguaga

SEQ ID NO: 1129092 - RNA, 19 nt, Homo sapiens
  misc_RNA (1)...(19): siRNA sense strand
gcauuuggcccaucugaga

SEQ ID NO: 1129093 - RNA, 19 nt, Homo sapiens
  misc_RNA (1)...(19): siRNA sense strand
ugaagucugugcugaaauc

SEQ ID NO: 1129094 - RNA, 19 nt, Homo sapiens
  misc_RNA (1)...(19): siRNA sense strand
ggacauggaacgucuuaca

SEQ ID NO: 1129095 - RNA, 19 nt, Homo sapiens
  misc_RNA (1)...(19): siRNA sense strand
aaagagacacugccugauu

SEQ ID NO: 1129096 - RNA, 19 nt, Homo sapiens
  misc_RNA (1)...(19): siRNA sense strand
cagcaucuacucucaguuu

SEQ ID NO: 1129097 - RNA, 19 nt, Homo sapiens
  misc_RNA (1)...(19): siRNA sense strand
gcagaaacauuugauucca

SEQ ID NO: 1129098 - RNA, 19 nt, Homo sapiens
  misc_RNA (1)...(19): siRNA sense strand
cagaaacccuugugguauc

SEQ ID NO: 1129099 - RNA, 19 nt, Homo sapiens
  misc_RNA (1)...(19): siRNA sense strand
ccacacaucuuagaaacuc

SEQ ID NO: 1129100 - RNA, 19 nt, Homo sapiens
  misc_RNA (1)...(19): siRNA sense strand
gaaggagcuuuagcauuuc

SEQ ID NO: 1129101 - RNA, 19 nt, Homo sapiens
  misc_RNA (1)...(19): siRNA sense strand
aagcacagauccaagucua

SEQ ID NO: 1129102 - RNA, 19 nt, Homo sapiens
  misc_RNA (1)...(19): siRNA sense strand
uaaugaagcagauuuagug

SEQ ID NO: 1129103 - RNA, 19 nt, Homo sapiens
  misc_RNA (1)...(19): siRNA sense strand
gaacuaguaaggguauuga

SEQ ID NO: 1129104 - RNA, 19 nt, Homo sapiens
  misc_RNA (1)...(19): siRNA sense strand
caucacauguuaugaaagg

SEQ ID NO: 1129105 - RNA, 19 nt, Homo sapiens
  misc_RNA (1)...(19): siRNA sense strand
gaaccauccaugacaaaga

SEQ ID NO: 1129106 - RNA, 19 nt, Homo sapiens
  misc_RNA (1)...(19): siRNA sense strand
ccagaaccauccaugacaa

SEQ ID NO: 1129107 - RNA, 19 nt, Homo sapiens
  misc_RNA (1)...(19): siRNA sense strand
cuacaucaguaaucucaga

SEQ ID NO: 1129108 - RNA, 19 nt, Homo sapiens
  misc_RNA (1)...(19): siRNA sense strand
caagaacacccuuaagaag

SEQ ID NO: 1129109 - RNA, 19 nt, Homo sapiens
  misc_RNA (1)...(19): siRNA sense strand
cuaaagagauggaacauaa

SEQ ID NO: 1129110 - RNA, 19 nt, Homo sapiens
  misc_RNA (1)...(19): siRNA sense strand
agaaggagcuuuagcauuu

SEQ ID NO: 1129111 - RNA, 19 nt, Homo sapiens
  misc_RNA (1)...(19): siRNA sense strand
gcuagaaccuccuguagua

SEQ ID NO: 1129112 - RNA, 19 nt, Homo sapiens
  misc_RNA (1)...(19): siRNA sense strand
ggaaauuggugaagagaaa

SEQ ID NO: 1129113 - RNA, 19 nt, Homo sapiens
  misc_RNA (1)...(19): siRNA sense strand
gagccagaaucuucaauua

SEQ ID NO: 1129114 - RNA, 19 nt, Homo sapiens
  misc_RNA (1)...(19): siRNA sense strand
ggauaaggcucaauuacuu

SEQ ID NO: 1129115 - RNA, 19 nt, Homo sapiens
  misc_RNA (1)...(19): siRNA sense strand
caacugagguggcuauaga

SEQ ID NO: 1129116 - RNA, 19 nt, Homo sapiens
  misc_RNA (1)...(19): siRNA sense strand
ugacaaagauucuggauuc

SEQ ID NO: 1129117 - RNA, 19 nt, Homo sapiens
  misc_RNA (1)...(19): siRNA sense strand
cgacagcgcuggaauccua

SEQ ID NO: 1129118 - RNA, 19 nt, Homo sapiens
  misc_RNA (1)...(19): siRNA sense strand
gcgcuggaauccuauaaua

SEQ ID NO: 1129119 - RNA, 19 nt, Homo sapiens
  misc_RNA (1)...(19): siRNA sense strand
ggucuuagauacagaacua

SEQ ID NO: 1129120 - RNA, 19 nt, Homo sapiens
  misc_RNA (1)...(19): siRNA sense strand
gaagauagaggaaguacuu

SEQ ID NO: 1129121 - RNA, 19 nt, Homo sapiens
  misc_RNA (1)...(19): siRNA sense strand
gaaguaagcguuccaaauc

SEQ ID NO: 1129122 - RNA, 19 nt, Homo sapiens
  misc_RNA (1)...(19): siRNA sense strand
ucauuaagaucucgaagua

SEQ ID NO: 1129123 - RNA, 19 nt, Homo sapiens
  misc_RNA (1)...(19): siRNA sense strand
aaacagauccuacugauga

SEQ ID NO: 1129124 - RNA, 19 nt, Homo sapiens
  misc_RNA (1)...(19): siRNA sense strand
ggaagaagaucuguaucaa

SEQ ID NO: 1129125 - RNA, 19 nt, Homo sapiens
  misc_RNA (1)...(19): siRNA sense strand
ggauacagaagaaccauua

SEQ ID NO: 1129126 - RNA, 19 nt, Homo sapiens
  misc_RNA (1)...(19): siRNA sense strand
agaaagagcuucagagucu

SEQ ID NO: 1129127 - RNA, 19 nt, Homo sapiens
  misc_RNA (1)...(19): siRNA sense strand
gcucuaugaugucagcuua

SEQ ID NO: 1129128 - RNA, 19 nt, Homo sapiens
  misc_RNA (1)...(19): siRNA sense strand
ggagaucucuguucagucu

SEQ ID NO: 1129129 - RNA, 19 nt, Homo sapiens
  misc_RNA (1)...(19): siRNA sense strand
caucaucccuuuaaacuca

SEQ ID NO: 1129130 - RNA, 19 nt, Homo sapiens
  misc_RNA (1)...(19): siRNA sense strand
agacgaagcuucaguaucu

SEQ ID NO: 1129131 - RNA, 19 nt, Homo sapiens
  misc_RNA (1)...(19): siRNA sense strand
gcugaacgcucuaugaugu

SEQ ID NO: 1129132 - RNA, 19 nt, Homo sapiens
  misc_RNA (1)...(19): siRNA sense strand
gcucuaugaugucuuauga

SEQ ID NO: 1129133 - RNA, 19 nt, Homo sapiens
  misc_RNA (1)...(19): siRNA sense strand
gaagaaauagugcagaaga

SEQ ID NO: 1129134 - RNA, 19 nt, Homo sapiens
  misc_RNA (1)...(19): siRNA sense strand
caaaucuucugaacacaaa

SEQ ID NO: 1129135 - RNA, 19 nt, Homo sapiens
  misc_RNA (1)...(19): siRNA sense strand
gauauaagccagacuugaa

SEQ ID NO: 1129136 - RNA, 19 nt, Homo sapiens
  misc_RNA (1)...(19): siRNA sense strand
gaaacucuaucuucuacug

SEQ ID NO: 1129137 - RNA, 19 nt, Homo sapiens
  misc_RNA (1)...(19): siRNA sense strand
gaugaagucugugcugaaa

SEQ ID NO: 1129138 - RNA, 19 nt, Homo sapiens
  misc_RNA (1)...(19): siRNA sense strand
gaagucaucugagccaguu

SEQ ID NO: 1129139 - RNA, 19 nt, Homo sapiens
  misc_RNA (1)...(19): siRNA sense strand
gcugagcgcucuaugaugu

SEQ ID NO: 1129140 - RNA, 19 nt, Homo sapiens
  misc_RNA (1)...(19): siRNA sense strand
aaacagaucgcacagagua

SEQ ID NO: 1129141 - RNA, 19 nt, Homo sapiens
  misc_RNA (1)...(19): siRNA sense strand
gaagaagaucuguaucaaa

SEQ ID NO: 1129142 - RNA, 19 nt, Homo sapiens
  misc_RNA (1)...(19): siRNA sense strand
caucggagauugcagauuc

SEQ ID NO: 1129143 - RNA, 19 nt, Homo sapiens
  misc_RNA (1)...(19): siRNA sense strand
ugaagcagauuuagugaga

SEQ ID NO: 1129144 - RNA, 19 nt, Homo sapiens
  misc_RNA (1)...(19): siRNA sense strand
gaaagugaacaugguauaa

SEQ ID NO: 1129145 - RNA, 19 nt, Homo sapiens
  misc_RNA (1)...(19): siRNA sense strand
agagcagacucaaguaaua

SEQ ID NO: 1129146 - RNA, 19 nt, Homo sapiens
  misc_RNA (1)...(19): siRNA sense strand
gguagaagaaggagcuuua

SEQ ID NO: 1129147 - RNA, 19 nt, Homo sapiens
  misc_RNA (1)...(19): siRNA sense strand
ccaggagucuaccaaauga

SEQ ID NO: 1129148 - RNA, 19 nt, Homo sapiens
  misc_RNA (1)...(19): siRNA sense strand
gaacgucuuacaagccuua

SEQ ID NO: 1129149 - RNA, 19 nt, Homo sapiens
  misc_RNA (1)...(19): siRNA sense strand
ugacuuguaugguaucuga

SEQ ID NO: 1129150 - RNA, 19 nt, Homo sapiens
  misc_RNA (1)...(19): siRNA sense strand
caaagauucuggauuccuu

SEQ ID NO: 1129151 - RNA, 19 nt, Homo sapiens
  misc_RNA (1)...(19): siRNA sense strand
uguagagucugcaguagua

SEQ ID NO: 1129152 - RNA, 19 nt, Homo sapiens
  misc_RNA (1)...(19): siRNA sense strand
gcugaucgaucuaugaugu

SEQ ID NO: 1129153 - RNA, 19 nt, Homo sapiens
  misc_RNA (1)...(19): siRNA sense strand
caucaaagaucauguuggu

SEQ ID NO: 1129154 - RNA, 19 nt, Homo sapiens
  misc_RNA (1)...(19): siRNA sense strand
caucagagccuccuguuau

SEQ ID NO: 1129155 - RNA, 19 nt, Homo sapiens
  misc_RNA (1)...(19): siRNA sense strand
gaagaagguuuagcagauc

SEQ ID NO: 1129156 - RNA, 19 nt, Homo sapiens
  misc_RNA (1)...(19): siRNA sense strand
gaaaggaauuaaucuaucc

SEQ ID NO: 1129157 - RNA, 19 nt, Homo sapiens
  misc_RNA (1)...(19): siRNA sense strand
ccaagcacaucaacaacaa

SEQ ID NO: 1129158 - RNA, 19 nt, Homo sapiens
  misc_RNA (1)...(19): siRNA sense strand
uaugaacgcuccaugaugu

SEQ ID NO: 1129159 - RNA, 19 nt, Homo sapiens
  misc_RNA (1)...(19): siRNA sense strand
uaugaacgcuccaugaugu

SEQ ID NO: 1129160 - RNA, 19 nt, Homo sapiens
  misc_RNA (1)...(19): siRNA sense strand
cgacagcagugccugaguu

SEQ ID NO: 1129161 - RNA, 19 nt, Homo sapiens
  misc_RNA (1)...(19): siRNA sense strand
agaagaagguuuagcagau

SEQ ID NO: 1129162 - RNA, 19 nt, Homo sapiens
  misc_RNA (1)...(19): siRNA sense strand
cgacgaaggucuagaucug

SEQ ID NO: 1129163 - RNA, 19 nt, Homo sapiens
  misc_RNA (1)...(19): siRNA sense strand
ccuuagagcuggcauugaa

SEQ ID NO: 1129164 - RNA, 19 nt, Homo sapiens
  misc_RNA (1)...(19): siRNA sense strand
gaaaguaguggaggagaaa

SEQ ID NO: 1129165 - RNA, 19 nt, Homo sapiens
  misc_RNA (1)...(19): siRNA sense strand
gcucagcccuaaagaaagu

SEQ ID NO: 1129166 - RNA, 19 nt, Homo sapiens
  misc_RNA (1)...(19): siRNA sense strand
gcuccaugaugucagcuua

SEQ ID NO: 1129167 - RNA, 19 nt, Homo sapiens
  misc_RNA (1)...(19): siRNA sense strand
caacgauggugcuggaguu

SEQ ID NO: 1129168 - RNA, 19 nt, Homo sapiens
  misc_RNA (1)...(19): siRNA sense strand
gauacagaacuacgauaua

SEQ ID NO: 1129169 - RNA, 19 nt, Homo sapiens
  misc_RNA (1)...(19): siRNA sense strand
agaacacccuuaagaagaa

SEQ ID NO: 1129170 - RNA, 19 nt, Homo sapiens
  misc_RNA (1)...(19): siRNA sense strand
uagugaagcugacauugaa

SEQ ID NO: 1129171 - RNA, 19 nt, Homo sapiens
  misc_RNA (1)...(19): siRNA sense strand
cugaugaaauucccacuaa

SEQ ID NO: 1129172 - RNA, 19 nt, Homo sapiens
  misc_RNA (1)...(19): siRNA sense strand
ugaaagagggcuccagaaa

SEQ ID NO: 1129173 - RNA, 19 nt, Homo sapiens
  misc_RNA (1)...(19): siRNA sense strand
ggauaguguuuauggagaa

SEQ ID NO: 1129174 - RNA, 19 nt, Homo sapiens
  misc_RNA (1)...(19): siRNA sense strand
uaaugcagcugccaugugu

SEQ ID NO: 1129175 - RNA, 19 nt, Homo sapiens
  misc_RNA (1)...(19): siRNA sense strand
agaucaagcuccagggaua

SEQ ID NO: 1129176 - RNA, 19 nt, Homo sapiens
  misc_RNA (1)...(19): siRNA sense strand
ugaaacaaauacacccauu

SEQ ID NO: 1129177 - RNA, 19 nt, Homo sapiens
  misc_RNA (1)...(19): siRNA sense strand
aaacaaauacacccauuga

SEQ ID NO: 1129178 - RNA, 19 nt, Homo sapiens
  misc_RNA (1)...(19): siRNA sense strand
gcagcugaccgaucuauga

SEQ ID NO: 1129179 - RNA, 19 nt, Homo sapiens
  misc_RNA (1)...(19): siRNA sense strand
ccagagccaucaaagauca

SEQ ID NO: 1129180 - RNA, 19 nt, Homo sapiens
  misc_RNA (1)...(19): siRNA sense strand
ggaugaagaggaagaagaa

SEQ ID NO: 1129181 - RNA, 19 nt, Homo sapiens
  misc_RNA (1)...(19): siRNA sense strand
aggaggagcuacuauagaa

SEQ ID NO: 1129182 - RNA, 19 nt, Homo sapiens
  misc_RNA (1)...(19): siRNA sense strand
gaagaucuguaucaaaaga

SEQ ID NO: 1129183 - RNA, 19 nt, Homo sapiens
  misc_RNA (1)...(19): siRNA sense strand
guaaguaguaugccagaaa

SEQ ID NO: 1129184 - RNA, 19 nt, Homo sapiens
  misc_RNA (1)...(19): siRNA sense strand
gaaacaaauacacccauug

SEQ ID NO: 1129185 - RNA, 19 nt, Homo sapiens
  misc_RNA (1)...(19): siRNA sense strand
ggucuuucguggucaguaa

SEQ ID NO: 1129186 - RNA, 19 nt, Homo sapiens
  misc_RNA (1)...(19): siRNA sense strand
caaugucaguggaguauca

SEQ ID NO: 1129187 - RNA, 19 nt, Homo sapiens
  misc_RNA (1)...(19): siRNA sense strand
agagacagcagaaacauuu

SEQ ID NO: 1129188 - RNA, 19 nt, Homo sapiens
  misc_RNA (1)...(19): siRNA sense strand
gaaauagugcagaagauag

SEQ ID NO: 1129189 - RNA, 19 nt, Homo sapiens
  misc_RNA (1)...(19): siRNA sense strand
ucaagaacacccuuaagaa

SEQ ID NO: 1129190 - RNA, 19 nt, Homo sapiens
  misc_RNA (1)...(19): siRNA sense strand
guagugaagcugacauuga

SEQ ID NO: 1129191 - RNA, 19 nt, Homo sapiens
  misc_RNA (1)...(19): siRNA sense strand
gcugaucguucaaugaugu

SEQ ID NO: 1129192 - RNA, 19 nt, Homo sapiens
  misc_RNA (1)...(19): siRNA sense strand
gagccaagcacaucaacaa

SEQ ID NO: 1129193 - RNA, 19 nt, Homo sapiens
  misc_RNA (1)...(19): siRNA sense strand
gcauuuggcccaucugaga

SEQ ID NO: 1129194 - RNA, 19 nt, Homo sapiens
  misc_RNA (1)...(19): siRNA sense strand
guuaacaccuguagagucu

SEQ ID NO: 1129195 - RNA, 19 nt, Homo sapiens
  misc_RNA (1)...(19): siRNA sense strand
caaagaucauguugguaga

SEQ ID NO: 1129196 - RNA, 19 nt, Homo sapiens
  misc_RNA (1)...(19): siRNA sense strand
gcugaauggugaaacaaau

SEQ ID NO: 1129197 - RNA, 19 nt, Homo sapiens
  misc_RNA (1)...(19): siRNA sense strand
ugaagucugugcugaaauc

SEQ ID NO: 1129198 - RNA, 19 nt, Homo sapiens
  misc_RNA (1)...(19): siRNA sense strand
ggacauggaacgucuuaca

SEQ ID NO: 1129199 - RNA, 19 nt, Homo sapiens
  misc_RNA (1)...(19): siRNA sense strand
aaagagacacugccugauu

SEQ ID NO: 1129200 - RNA, 19 nt, Homo sapiens
  misc_RNA (1)...(19): siRNA sense strand
cagcaucuacucucaguuu

SEQ ID NO: 1129201 - RNA, 19 nt, Homo sapiens
  misc_RNA (1)...(19): siRNA sense strand
gcagaaacauuugauucca

SEQ ID NO: 1129202 - RNA, 19 nt, Homo sapiens
  misc_RNA (1)...(19): siRNA sense strand
cagaaacccuugugguauc

SEQ ID NO: 1129203 - RNA, 19 nt, Homo sapiens
  misc_RNA (1)...(19): siRNA sense strand
gaaccauccaugacaaaga

SEQ ID NO: 1129204 - RNA, 19 nt, Homo sapiens
  misc_RNA (1)...(19): siRNA sense strand
gaaggagcuuuagcauuuc

SEQ ID NO: 1129205 - RNA, 19 nt, Homo sapiens
  misc_RNA (1)...(19): siRNA sense strand
aagcacagauccaagucua

SEQ ID NO: 1129206 - RNA, 19 nt, Homo sapiens
  misc_RNA (1)...(19): siRNA sense strand
uaaugaagcagauuuagug

SEQ ID NO: 1129207 - RNA, 19 nt, Homo sapiens
  misc_RNA (1)...(19): siRNA sense strand
gaacuaguaaggguauuga

SEQ ID NO: 1129208 - RNA, 19 nt, Homo sapiens
  misc_RNA (1)...(19): siRNA sense strand
caucacauguuaugaaagg

SEQ ID NO: 1129209 - RNA, 19 nt, Homo sapiens
  misc_RNA (1)...(19): siRNA sense strand
cuaaagagauggaacauaa

SEQ ID NO: 1129210 - RNA, 19 nt, Homo sapiens
  misc_RNA (1)...(19): siRNA sense strand
agaaggagcuuuagcauuu

SEQ ID NO: 1129211 - RNA, 19 nt, Homo sapiens
  misc_RNA (1)...(19): siRNA sense strand
gcuagaaccuccuguagua

SEQ ID NO: 1129212 - RNA, 19 nt, Homo sapiens
  misc_RNA (1)...(19): siRNA sense strand
ggaaauuggugaagagaaa

SEQ ID NO: 1129213 - RNA, 19 nt, Homo sapiens
  misc_RNA (1)...(19): siRNA sense strand
gagccagaaucuucaauua

SEQ ID NO: 1129214 - RNA, 19 nt, Homo sapiens
  misc_RNA (1)...(19): siRNA sense strand
ggauaaggcucaauuacuu

SEQ ID NO: 1129215 - RNA, 19 nt, Homo sapiens
  misc_RNA (1)...(19): siRNA sense strand
caacugagguggcuauaga

SEQ ID NO: 1129216 - RNA, 19 nt, Homo sapiens
  misc_RNA (1)...(19): siRNA sense strand
ugacaaagauucuggauuc

SEQ ID NO: 1129217 - RNA, 19 nt, Homo sapiens
  misc_RNA (1)...(19): siRNA sense strand
cgacagcgcuggaauccua

SEQ ID NO: 1129218 - RNA, 19 nt, Homo sapiens
  misc_RNA (1)...(19): siRNA sense strand
gcgcuggaauccuauaaua

SEQ ID NO: 1129219 - RNA, 19 nt, Homo sapiens
  misc_RNA (1)...(19): siRNA sense strand
ggucuuagauacagaacua

SEQ ID NO: 1129220 - RNA, 19 nt, Homo sapiens
  misc_RNA (1)...(19): siRNA sense strand
gaagauagaggaaguacuu

SEQ ID NO: 1129221 - RNA, 19 nt, Homo sapiens
  misc_RNA (1)...(19): siRNA sense strand
gaaguaagcguuccaaauc

SEQ ID NO: 1129222 - RNA, 19 nt, Homo sapiens
  misc_RNA (1)...(19): siRNA sense strand
ucauuaagaucucgaagua

SEQ ID NO: 1129223 - RNA, 19 nt, Homo sapiens
  misc_RNA (1)...(19): siRNA sense strand
aaacagauccuacugauga

SEQ ID NO: 1129224 - RNA, 19 nt, Homo sapiens
  misc_RNA (1)...(19): siRNA sense strand
ggaagaagaucuguaucaa

SEQ ID NO: 1129225 - RNA, 19 nt, Homo sapiens
  misc_RNA (1)...(19): siRNA sense strand
ggauacagaagaaccauua

SEQ ID NO: 1129226 - RNA, 19 nt, Homo sapiens
  misc_RNA (1)...(19): siRNA sense strand
agaaagagcuucagagucu

SEQ ID NO: 1129227 - RNA, 19 nt, Homo sapiens
  misc_RNA (1)...(19): siRNA sense strand
gcucuaugaugucagcuua

SEQ ID NO: 1129228 - RNA, 19 nt, Homo sapiens
  misc_RNA (1)...(19): siRNA sense strand
ggagaucucuguucagucu

SEQ ID NO: 1129229 - RNA, 19 nt, Homo sapiens
  misc_RNA (1)...(19): siRNA sense strand
caucaucccuuuaaacuca

SEQ ID NO: 1129230 - RNA, 19 nt, Homo sapiens
  misc_RNA (1)...(19): siRNA sense strand
agacgaagcuucaguaucu

SEQ ID NO: 1129231 - RNA, 19 nt, Homo sapiens
  misc_RNA (1)...(19): siRNA sense strand
gcugaacgcucuaugaugu

SEQ ID NO: 1129232 - RNA, 19 nt, Homo sapiens
  misc_RNA (1)...(19): siRNA sense strand
gcucuaugaugucuuauga

SEQ ID NO: 1129233 - RNA, 19 nt, Homo sapiens
  misc_RNA (1)...(19): siRNA sense strand
gaagaaauagugcagaaga

SEQ ID NO: 1129234 - RNA, 19 nt, Homo sapiens
  misc_RNA (1)...(19): siRNA sense strand
caaaucuucugaacacaaa

SEQ ID NO: 1129235 - RNA, 19 nt, Homo sapiens
  misc_RNA (1)...(19): siRNA sense strand
gauauaagccagacuugaa

SEQ ID NO: 1129236 - RNA, 19 nt, Homo sapiens
  misc_RNA (1)...(19): siRNA sense strand
gaaacucuaucuucuacug

SEQ ID NO: 1129237 - RNA, 19 nt, Homo sapiens
  misc_RNA (1)...(19): siRNA sense strand
gaugaagucugugcugaaa

SEQ ID NO: 1129238 - RNA, 19 nt, Homo sapiens
  misc_RNA (1)...(19): siRNA sense strand
gaagucaucugagccaguu

SEQ ID NO: 1129239 - RNA, 19 nt, Homo sapiens
  misc_RNA (1)...(19): siRNA sense strand
gcugagcgcucuaugaugu

SEQ ID NO: 1129240 - RNA, 19 nt, Homo sapiens
  misc_RNA (1)...(19): siRNA sense strand
aaacagaucgcacagagua

SEQ ID NO: 1129241 - RNA, 19 nt, Homo sapiens
  misc_RNA (1)...(19): siRNA sense strand
gaagaagaucuguaucaaa

SEQ ID NO: 1129242 - RNA, 19 nt, Homo sapiens
  misc_RNA (1)...(19): siRNA sense strand
caucggagauugcagauuc

SEQ ID NO: 1129243 - RNA, 19 nt, Homo sapiens
  misc_RNA (1)...(19): siRNA sense strand
ugaagcagauuuagugaga

SEQ ID NO: 1129244 - RNA, 19 nt, Homo sapiens
  misc_RNA (1)...(19): siRNA sense strand
gaaagugaacaugguauaa

SEQ ID NO: 1129245 - RNA, 19 nt, Homo sapiens
  misc_RNA (1)...(19): siRNA sense strand
agagcagacucaaguaaua

SEQ ID NO: 1129246 - RNA, 19 nt, Homo sapiens
  misc_RNA (1)...(19): siRNA sense strand
gguagaagaaggagcuuua

SEQ ID NO: 1129247 - RNA, 19 nt, Homo sapiens
  misc_RNA (1)...(19): siRNA sense strand
ccaggagucuaccaaauga

SEQ ID NO: 1129248 - RNA, 19 nt, Homo sapiens
  misc_RNA (1)...(19): siRNA sense strand
gaacgucuuacaagccuua

SEQ ID NO: 1129249 - RNA, 19 nt, Homo sapiens
  misc_RNA (1)...(19): siRNA sense strand
ugacuuguaugguaucuga

SEQ ID NO: 1129250 - RNA, 19 nt, Homo sapiens
  misc_RNA (1)...(19): siRNA sense strand
caaagauucuggauuccuu

SEQ ID NO: 1129251 - RNA, 19 nt, Homo sapiens
  misc_RNA (1)...(19): siRNA sense strand
uguagagucugcaguagua

SEQ ID NO: 1129252 - RNA, 19 nt, Homo sapiens
  misc_RNA (1)...(19): siRNA sense strand
gcugaucgaucuaugaugu

SEQ ID NO: 1129253 - RNA, 19 nt, Homo sapiens
  misc_RNA (1)...(19): siRNA sense strand
caucaaagaucauguuggu

SEQ ID NO: 1129254 - RNA, 19 nt, Homo sapiens
  misc_RNA (1)...(19): siRNA sense strand
caucagagccuccuguuau

SEQ ID NO: 1129255 - RNA, 19 nt, Homo sapiens
  misc_RNA (1)...(19): siRNA sense strand
gaagaagguuuagcagauc

SEQ ID NO: 1129256 - RNA, 19 nt, Homo sapiens
  misc_RNA (1)...(19): siRNA sense strand
gaaaggaauuaaucuaucc

SEQ ID NO: 1129257 - RNA, 19 nt, Homo sapiens
  misc_RNA (1)...(19): siRNA sense strand
ccaagcacaucaacaacaa

SEQ ID NO: 1129258 - RNA, 19 nt, Homo sapiens
  misc_RNA (1)...(19): siRNA sense strand
uaugaacgcuccaugaugu

SEQ ID NO: 1129259 - RNA, 19 nt, Homo sapiens
  misc_RNA (1)...(19): siRNA sense strand
uaugaacgcuccaugaugu

SEQ ID NO: 1129260 - RNA, 19 nt, Homo sapiens
  misc_RNA (1)...(19): siRNA sense strand
cgacagcagugccugaguu

SEQ ID NO: 1129261 - RNA, 19 nt, Homo sapiens
  misc_RNA (1)...(19): siRNA sense strand
agaagaagguuuagcagau

SEQ ID NO: 1129262 - RNA, 19 nt, Homo sapiens
  misc_RNA (1)...(19): siRNA sense strand
cgacgaaggucuagaucug

SEQ ID NO: 1129263 - RNA, 19 nt, Homo sapiens
  misc_RNA (1)...(19): siRNA sense strand
ccuuagagcuggcauugaa

SEQ ID NO: 1129264 - RNA, 19 nt, Homo sapiens
  misc_RNA (1)...(19): siRNA sense strand
gaaaguaguggaggagaaa

SEQ ID NO: 1129265 - RNA, 19 nt, Homo sapiens
  misc_RNA (1)...(19): siRNA sense strand
gcucagcccuaaagaaagu

SEQ ID NO: 1129266 - RNA, 19 nt, Homo sapiens
  misc_RNA (1)...(19): siRNA sense strand
gcuccaugaugucagcuua

SEQ ID NO: 1129267 - RNA, 19 nt, Homo sapiens
  misc_RNA (1)...(19): siRNA sense strand
caacgauggugcuggaguu

SEQ ID NO: 1129268 - RNA, 19 nt, Homo sapiens
  misc_RNA (1)...(19): siRNA sense strand
gauacagaacuacgauaua

SEQ ID NO: 1129269 - RNA, 19 nt, Homo sapiens
  misc_RNA (1)...(19): siRNA sense strand
agaacacccuuaagaagaa

SEQ ID NO: 1129270 - RNA, 19 nt, Homo sapiens
  misc_RNA (1)...(19): siRNA sense strand
uagugaagcugacauugaa

SEQ ID NO: 1129271 - RNA, 19 nt, Homo sapiens
  misc_RNA (1)...(19): siRNA sense strand
cugaugaaauucccacuaa

SEQ ID NO: 1129272 - RNA, 19 nt, Homo sapiens
  misc_RNA (1)...(19): siRNA sense strand
ugaaagagggcuccagaaa

SEQ ID NO: 1129273 - RNA, 19 nt, Homo sapiens
  misc_RNA (1)...(19): siRNA sense strand
ggauaguguuuauggagaa

SEQ ID NO: 1129274 - RNA, 19 nt, Homo sapiens
  misc_RNA (1)...(19): siRNA sense strand
uaaugcagcugccaugugu

SEQ ID NO: 1129275 - RNA, 19 nt, Homo sapiens
  misc_RNA (1)...(19): siRNA sense strand
agaucaagcuccagggaua

SEQ ID NO: 1129276 - RNA, 19 nt, Homo sapiens
  misc_RNA (1)...(19): siRNA sense strand
ugaaacaaauacacccauu

SEQ ID NO: 1129277 - RNA, 19 nt, Homo sapiens
  misc_RNA (1)...(19): siRNA sense strand
aaacaaauacacccauuga

SEQ ID NO: 1129278 - RNA, 19 nt, Homo sapiens
  misc_RNA (1)...(19): siRNA sense strand
gcagcugaccgaucuauga

SEQ ID NO: 1129279 - RNA, 19 nt, Homo sapiens
  misc_RNA (1)...(19): siRNA sense strand
ccagagccaucaaagauca

SEQ ID NO: 1129280 - RNA, 19 nt, Homo sapiens
  misc_RNA (1)...(19): siRNA sense strand
ggaugaagaggaagaagaa

SEQ ID NO: 1129281 - RNA, 19 nt, Homo sapiens
  misc_RNA (1)...(19): siRNA sense strand
aggaggagcuacuauagaa

SEQ ID NO: 1129282 - RNA, 19 nt, Homo sapiens
  misc_RNA (1)...(19): siRNA sense strand
gaagaucuguaucaaaaga

SEQ ID NO: 1129283 - RNA, 19 nt, Homo sapiens
  misc_RNA (1)...(19): siRNA sense strand
guaaguaguaugccagaaa

SEQ ID NO: 1129284 - RNA, 19 nt, Homo sapiens
  misc_RNA (1)...(19): siRNA sense strand
gaaacaaauacacccauug

SEQ ID NO: 1129285 - RNA, 19 nt, Homo sapiens
  misc_RNA (1)...(19): siRNA sense strand
ggucuuucguggucaguaa

SEQ ID NO: 1129286 - RNA, 19 nt, Homo sapiens
  misc_RNA (1)...(19): siRNA sense strand
caaugucaguggaguauca

SEQ ID NO: 1129287 - RNA, 19 nt, Homo sapiens
  misc_RNA (1)...(19): siRNA sense strand
agagacagcagaaacauuu

SEQ ID NO: 1129288 - RNA, 19 nt, Homo sapiens
  misc_RNA (1)...(19): siRNA sense strand
gaaauagugcagaagauag

SEQ ID NO: 1129289 - RNA, 19 nt, Homo sapiens
  misc_RNA (1)...(19): siRNA sense strand
ucaagaacacccuuaagaa

SEQ ID NO: 1129290 - RNA, 19 nt, Homo sapiens
  misc_RNA (1)...(19): siRNA sense strand
guagugaagcugacauuga

SEQ ID NO: 1129291 - RNA, 19 nt, Homo sapiens
  misc_RNA (1)...(19): siRNA sense strand
gcugaucguucaaugaugu

SEQ ID NO: 1129292 - RNA, 19 nt, Homo sapiens
  misc_RNA (1)...(19): siRNA sense strand
gagccaagcacaucaacaa

SEQ ID NO: 1129293 - RNA, 19 nt, Homo sapiens
  misc_RNA (1)...(19): siRNA sense strand
gcauuuggcccaucugaga

SEQ ID NO: 1129294 - RNA, 19 nt, Homo sapiens
  misc_RNA (1)...(19): siRNA sense strand
guuaacaccuguagagucu

SEQ ID NO: 1129295 - RNA, 19 nt, Homo sapiens
  misc_RNA (1)...(19): siRNA sense strand
caaagaucauguugguaga

SEQ ID NO: 1129296 - RNA, 19 nt, Homo sapiens
  misc_RNA (1)...(19): siRNA sense strand
gcugaauggugaaacaaau

SEQ ID NO: 1129297 - RNA, 19 nt, Homo sapiens
  misc_RNA (1)...(19): siRNA sense strand
ugaagucugugcugaaauc

SEQ ID NO: 1129298 - RNA, 19 nt, Homo sapiens
  misc_RNA (1)...(19): siRNA sense strand
ggacauggaacgucuuaca

SEQ ID NO: 1129299 - RNA, 19 nt, Homo sapiens
  misc_RNA (1)...(19): siRNA sense strand
aaagagacacugccugauu

SEQ ID NO: 1129300 - RNA, 19 nt, Homo sapiens
  misc_RNA (1)...(19): siRNA sense strand
cagcaucuacucucaguuu

SEQ ID NO: 1129301 - RNA, 19 nt, Homo sapiens
  misc_RNA (1)...(19): siRNA sense strand
gcagaaacauuugauucca

SEQ ID NO: 1129302 - RNA, 19 nt, Homo sapiens
  misc_RNA (1)...(19): siRNA sense strand
cagaaacccuugugguauc

SEQ ID NO: 1129303 - RNA, 19 nt, Homo sapiens
  misc_RNA (1)...(19): siRNA sense strand
gaaccauccaugacaaaga

SEQ ID NO: 1129304 - RNA, 19 nt, Homo sapiens
  misc_RNA (1)...(19): siRNA sense strand
gaaggagcuuuagcauuuc

SEQ ID NO: 1129305 - RNA, 19 nt, Homo sapiens
  misc_RNA (1)...(19): siRNA sense strand
aagcacagauccaagucua

SEQ ID NO: 1129306 - RNA, 19 nt, Homo sapiens
  misc_RNA (1)...(19): siRNA sense strand
uaaugaagcagauuuagug

SEQ ID NO: 1129307 - RNA, 19 nt, Homo sapiens
  misc_RNA (1)...(19): siRNA sense strand
gaacuaguaaggguauuga

SEQ ID NO: 1129308 - RNA, 19 nt, Homo sapiens
  misc_RNA (1)...(19): siRNA sense strand
caucacauguuaugaaagg

SEQ ID NO: 1129309 - RNA, 19 nt, Homo sapiens
  misc_RNA (1)...(19): siRNA sense strand
cuaaagagauggaacauaa

SEQ ID NO: 1129310 - RNA, 19 nt, Homo sapiens
  misc_RNA (1)...(19): siRNA sense strand
agaaggagcuuuagcauuu

SEQ ID NO: 1129311 - RNA, 19 nt, Homo sapiens
  misc_RNA (1)...(19): siRNA sense strand
gcuagaaccuccuguagua

SEQ ID NO: 1129312 - RNA, 19 nt, Homo sapiens
  misc_RNA (1)...(19): siRNA sense strand
ggaaauuggugaagagaaa

SEQ ID NO: 1129313 - RNA, 19 nt, Homo sapiens
  misc_RNA (1)...(19): siRNA sense strand
gagccagaaucuucaauua

SEQ ID NO: 1129314 - RNA, 19 nt, Homo sapiens
  misc_RNA (1)...(19): siRNA sense strand
ggauaaggcucaauuacuu

SEQ ID NO: 1129315 - RNA, 19 nt, Homo sapiens
  misc_RNA (1)...(19): siRNA sense strand
caacugagguggcuauaga

SEQ ID NO: 1129316 - RNA, 19 nt, Homo sapiens
  misc_RNA (1)...(19): siRNA sense strand
ugacaaagauucuggauuc

SEQ ID NO: 1129317 - RNA, 19 nt, Homo sapiens
  misc_RNA (1)...(19): siRNA sense strand
cgacagcgcuggaauccua

SEQ ID NO: 1129318 - RNA, 19 nt, Homo sapiens
  misc_RNA (1)...(19): siRNA sense strand
gcgcuggaauccuauaaua

SEQ ID NO: 1129319 - RNA, 19 nt, Homo sapiens
  misc_RNA (1)...(19): siRNA sense strand
ggucuuagauacagaacua

SEQ ID NO: 1129320 - RNA, 19 nt, Homo sapiens
  misc_RNA (1)...(19): siRNA sense strand
gaagauagaggaaguacuu

SEQ ID NO: 1129321 - RNA, 19 nt, Homo sapiens
  misc_RNA (1)...(19): siRNA sense strand
gaaguaagcguuccaaauc

SEQ ID NO: 1129322 - RNA, 19 nt, Homo sapiens
  misc_RNA (1)...(19): siRNA sense strand
ucauuaagaucucgaagua

SEQ ID NO: 1129323 - RNA, 19 nt, Homo sapiens
  misc_RNA (1)...(19): siRNA sense strand
aaacagauccuacugauga

SEQ ID NO: 1129324 - RNA, 19 nt, Homo sapiens
  misc_RNA (1)...(19): siRNA sense strand
ggaagaagaucuguaucaa

SEQ ID NO: 1129325 - RNA, 19 nt, Homo sapiens
  misc_RNA (1)...(19): siRNA sense strand
ggauacagaagaaccauua

SEQ ID NO: 1129326 - RNA, 19 nt, Homo sapiens
  misc_RNA (1)...(19): siRNA sense strand
agaaagagcuucagagucu

SEQ ID NO: 1129327 - RNA, 19 nt, Homo sapiens
  misc_RNA (1)...(19): siRNA sense strand
gcucuaugaugucagcuua

SEQ ID NO: 1129328 - RNA, 19 nt, Homo sapiens
  misc_RNA (1)...(19): siRNA sense strand
ggagaucucuguucagucu

SEQ ID NO: 1129329 - RNA, 19 nt, Homo sapiens
  misc_RNA (1)...(19): siRNA sense strand
caucaucccuuuaaacuca

SEQ ID NO: 1129330 - RNA, 19 nt, Homo sapiens
  misc_RNA (1)...(19): siRNA sense strand
agacgaagcuucaguaucu

SEQ ID NO: 1129331 - RNA, 19 nt, Homo sapiens
  misc_RNA (1)...(19): siRNA sense strand
gcugaacgcucuaugaugu

SEQ ID NO: 1129332 - RNA, 19 nt, Homo sapiens
  misc_RNA (1)...(19): siRNA sense strand
gcucuaugaugucuuauga

SEQ ID NO: 1129333 - RNA, 19 nt, Homo sapiens
  misc_RNA (1)...(19): siRNA sense strand
gaagaaauagugcagaaga

SEQ ID NO: 1129334 - RNA, 19 nt, Homo sapiens
  misc_RNA (1)...(19): siRNA sense strand
caaaucuucugaacacaaa

SEQ ID NO: 1129335 - RNA, 19 nt, Homo sapiens
  misc_RNA (1)...(19): siRNA sense strand
gauauaagccagacuugaa

SEQ ID NO: 1129336 - RNA, 19 nt, Homo sapiens
  misc_RNA (1)...(19): siRNA sense strand
gaaacucuaucuucuacug

SEQ ID NO: 1129337 - RNA, 19 nt, Homo sapiens
  misc_RNA (1)...(19): siRNA sense strand
gaugaagucugugcugaaa

SEQ ID NO: 1129338 - RNA, 19 nt, Homo sapiens
  misc_RNA (1)...(19): siRNA sense strand
gaagucaucugagccaguu

SEQ ID NO: 1129339 - RNA, 19 nt, Homo sapiens
  misc_RNA (1)...(19): siRNA sense strand
gcugagcgcucuaugaugu

SEQ ID NO: 1129340 - RNA, 19 nt, Homo sapiens
  misc_RNA (1)...(19): siRNA sense strand
aaacagaucgcacagagua

SEQ ID NO: 1129341 - RNA, 19 nt, Homo sapiens
  misc_RNA (1)...(19): siRNA sense strand
gaagaagaucuguaucaaa

SEQ ID NO: 1129342 - RNA, 19 nt, Homo sapiens
  misc_RNA (1)...(19): siRNA sense strand
caucggagauugcagauuc

SEQ ID NO: 1129343 - RNA, 19 nt, Homo sapiens
  misc_RNA (1)...(19): siRNA sense strand
ugaagcagauuuagugaga

SEQ ID NO: 1129344 - RNA, 19 nt, Homo sapiens
  misc_RNA (1)...(19): siRNA sense strand
gaaagugaacaugguauaa

SEQ ID NO: 1129345 - RNA, 19 nt, Homo sapiens
  misc_RNA (1)...(19): siRNA sense strand
agagcagacucaaguaaua

SEQ ID NO: 1129346 - RNA, 19 nt, Homo sapiens
  misc_RNA (1)...(19): siRNA sense strand
gguagaagaaggagcuuua

SEQ ID NO: 1129347 - RNA, 19 nt, Homo sapiens
  misc_RNA (1)...(19): siRNA sense strand
ccaggagucuaccaaauga

SEQ ID NO: 1129348 - RNA, 19 nt, Homo sapiens
  misc_RNA (1)...(19): siRNA sense strand
gaacgucuuacaagccuua

SEQ ID NO: 1129349 - RNA, 19 nt, Homo sapiens
  misc_RNA (1)...(19): siRNA sense strand
ugacuuguaugguaucuga

SEQ ID NO: 1129350 - RNA, 19 nt, Homo sapiens
  misc_RNA (1)...(19): siRNA sense strand
caaagauucuggauuccuu

SEQ ID NO: 1129351 - RNA, 19 nt, Homo sapiens
  misc_RNA (1)...(19): siRNA sense strand
uguagagucugcaguagua

SEQ ID NO: 1129352 - RNA, 19 nt, Homo sapiens
  misc_RNA (1)...(19): siRNA sense strand
gcugaucgaucuaugaugu

SEQ ID NO: 1129353 - RNA, 19 nt, Homo sapiens
  misc_RNA (1)...(19): siRNA sense strand
caucaaagaucauguuggu

SEQ ID NO: 1129354 - RNA, 19 nt, Homo sapiens
  misc_RNA (1)...(19): siRNA sense strand
caucagagccuccuguuau

SEQ ID NO: 1129355 - RNA, 19 nt, Homo sapiens
  misc_RNA (1)...(19): siRNA sense strand
gaagaagguuuagcagauc

SEQ ID NO: 1129356 - RNA, 19 nt, Homo sapiens
  misc_RNA (1)...(19): siRNA sense strand
gaaaggaauuaaucuaucc

SEQ ID NO: 1129357 - RNA, 19 nt, Homo sapiens
  misc_RNA (1)...(19): siRNA sense strand
ccaagcacaucaacaacaa

SEQ ID NO: 1129358 - RNA, 19 nt, Homo sapiens
  misc_RNA (1)...(19): siRNA sense strand
uaugaacgcuccaugaugu

SEQ ID NO: 1129359 - RNA, 19 nt, Homo sapiens
  misc_RNA (1)...(19): siRNA sense strand
uaugaacgcuccaugaugu

SEQ ID NO: 1129360 - RNA, 19 nt, Homo sapiens
  misc_RNA (1)...(19): siRNA sense strand
cgacagcagugccugaguu

SEQ ID NO: 1129361 - RNA, 19 nt, Homo sapiens
  misc_RNA (1)...(19): siRNA sense strand
agaagaagguuuagcagau

SEQ ID NO: 1129362 - RNA, 19 nt, Homo sapiens
  misc_RNA (1)...(19): siRNA sense strand
cgacgaaggucuagaucug

SEQ ID NO: 1129363 - RNA, 19 nt, Homo sapiens
  misc_RNA (1)...(19): siRNA sense strand
ccuuagagcuggcauugaa

SEQ ID NO: 1129364 - RNA, 19 nt, Homo sapiens
  misc_RNA (1)...(19): siRNA sense strand
gaaaguaguggaggagaaa

SEQ ID NO: 1129365 - RNA, 19 nt, Homo sapiens
  misc_RNA (1)...(19): siRNA sense strand
gcucagcccuaaagaaagu

SEQ ID NO: 1129366 - RNA, 19 nt, Homo sapiens
  misc_RNA (1)...(19): siRNA sense strand
gcuccaugaugucagcuua

SEQ ID NO: 1129367 - RNA, 19 nt, Homo sapiens
  misc_RNA (1)...(19): siRNA sense strand
caacgauggugcuggaguu

SEQ ID NO: 1129368 - RNA, 19 nt, Homo sapiens
  misc_RNA (1)...(19): siRNA sense strand
gauacagaacuacgauaua

SEQ ID NO: 1129369 - RNA, 19 nt, Homo sapiens
  misc_RNA (1)...(19): siRNA sense strand
agaacacccuuaagaagaa

SEQ ID NO: 1129370 - RNA, 19 nt, Homo sapiens
  misc_RNA (1)...(19): siRNA sense strand
uagugaagcugacauugaa

SEQ ID NO: 1129371 - RNA, 19 nt, Homo sapiens
  misc_RNA (1)...(19): siRNA sense strand
cugaugaaauucccacuaa

SEQ ID NO: 1129372 - RNA, 19 nt, Homo sapiens
  misc_RNA (1)...(19): siRNA sense strand
ugaaagagggcuccagaaa

SEQ ID NO: 1129373 - RNA, 19 nt, Homo sapiens
  misc_RNA (1)...(19): siRNA sense strand
ggauaguguuuauggagaa

SEQ ID NO: 1129374 - RNA, 19 nt, Homo sapiens
  misc_RNA (1)...(19): siRNA sense strand
uaaugcagcugccaugugu

SEQ ID NO: 1129375 - RNA, 19 nt, Homo sapiens
  misc_RNA (1)...(19): siRNA sense strand
agaucaagcuccagggaua

SEQ ID NO: 1129376 - RNA, 19 nt, Homo sapiens
  misc_RNA (1)...(19): siRNA sense strand
ugaaacaaauacacccauu

SEQ ID NO: 1129377 - RNA, 19 nt, Homo sapiens
  misc_RNA (1)...(19): siRNA sense strand
aaacaaauacacccauuga

SEQ ID NO: 1129378 - RNA, 19 nt, Homo sapiens
  misc_RNA (1)...(19): siRNA sense strand
gcagcugaccgaucuauga

SEQ ID NO: 1129379 - RNA, 19 nt, Homo sapiens
  misc_RNA (1)...(19): siRNA sense strand
ccagagccaucaaagauca

SEQ ID NO: 1129380 - RNA, 19 nt, Homo sapiens
  misc_RNA (1)...(19): siRNA sense strand
ggaugaagaggaagaagaa

SEQ ID NO: 1129381 - RNA, 19 nt, Homo sapiens
  misc_RNA (1)...(19): siRNA sense strand
aggaggagcuacuauagaa

SEQ ID NO: 1129382 - RNA, 19 nt, Homo sapiens
  misc_RNA (1)...(19): siRNA sense strand
gaagaucuguaucaaaaga

SEQ ID NO: 1129383 - RNA, 19 nt, Homo sapiens
  misc_RNA (1)...(19): siRNA sense strand
guaaguaguaugccagaaa

SEQ ID NO: 1129384 - RNA, 19 nt, Homo sapiens
  misc_RNA (1)...(19): siRNA sense strand
gaaacaaauacacccauug

SEQ ID NO: 1129385 - RNA, 19 nt, Homo sapiens
  misc_RNA (1)...(19): siRNA sense strand
ggucuuucguggucaguaa

SEQ ID NO: 1129386 - RNA, 19 nt, Homo sapiens
  misc_RNA (1)...(19): siRNA sense strand
caaugucaguggaguauca

SEQ ID NO: 1129387 - RNA, 19 nt, Homo sapiens
  misc_RNA (1)...(19): siRNA sense strand
agagacagcagaaacauuu

SEQ ID NO: 1129388 - RNA, 19 nt, Homo sapiens
  misc_RNA (1)...(19): siRNA sense strand
gaaauagugcagaagauag

SEQ ID NO: 1129389 - RNA, 19 nt, Homo sapiens
  misc_RNA (1)...(19): siRNA sense strand
ucaagaacacccuuaagaa

SEQ ID NO: 1129390 - RNA, 19 nt, Homo sapiens
  misc_RNA (1)...(19): siRNA sense strand
guagugaagcugacauuga

SEQ ID NO: 1129391 - RNA, 19 nt, Homo sapiens
  misc_RNA (1)...(19): siRNA sense strand
gcugaucguucaaugaugu

SEQ ID NO: 1129392 - RNA, 19 nt, Homo sapiens
  misc_RNA (1)...(19): siRNA sense strand
gagccaagcacaucaacaa

SEQ ID NO: 1129393 - RNA, 19 nt, Homo sapiens
  misc_RNA (1)...(19): siRNA sense strand
gcauuuggcccaucugaga

SEQ ID NO: 1129394 - RNA, 19 nt, Homo sapiens
  misc_RNA (1)...(19): siRNA sense strand
guuaacaccuguagagucu

SEQ ID NO: 1129395 - RNA, 19 nt, Homo sapiens
  misc_RNA (1)...(19): siRNA sense strand
caaagaucauguugguaga

SEQ ID NO: 1129396 - RNA, 19 nt, Homo sapiens
  misc_RNA (1)...(19): siRNA sense strand
gcugaauggugaaacaaau

SEQ ID NO: 1129397 - RNA, 19 nt, Homo sapiens
  misc_RNA (1)...(19): siRNA sense strand
ugaagucugugcugaaauc

SEQ ID NO: 1129398 - RNA, 19 nt, Homo sapiens
  misc_RNA (1)...(19): siRNA sense strand
ggacauggaacgucuuaca

SEQ ID NO: 1129399 - RNA, 19 nt, Homo sapiens
  misc_RNA (1)...(19): siRNA sense strand
aaagagacacugccugauu

SEQ ID NO: 1129400 - RNA, 19 nt, Homo sapiens
  misc_RNA (1)...(19): siRNA sense strand
cagcaucuacucucaguuu

SEQ ID NO: 1129401 - RNA, 19 nt, Homo sapiens
  misc_RNA (1)...(19): siRNA sense strand
gcagaaacauuugauucca

SEQ ID NO: 1129402 - RNA, 19 nt, Homo sapiens
  misc_RNA (1)...(19): siRNA sense strand
cagaaacccuugugguauc

SEQ ID NO: 1129403 - RNA, 19 nt, Homo sapiens
  misc_RNA (1)...(19): siRNA sense strand
gaaccauccaugacaaaga

SEQ ID NO: 1129404 - RNA, 19 nt, Homo sapiens
  misc_RNA (1)...(19): siRNA sense strand
gaaggagcuuuagcauuuc

SEQ ID NO: 1129405 - RNA, 19 nt, Homo sapiens
  misc_RNA (1)...(19): siRNA sense strand
aagcacagauccaagucua

SEQ ID NO: 1129406 - RNA, 19 nt, Homo sapiens
  misc_RNA (1)...(19): siRNA sense strand
uaaugaagcagauuuagug

SEQ ID NO: 1129407 - RNA, 19 nt, Homo sapiens
  misc_RNA (1)...(19): siRNA sense strand
gaacuaguaaggguauuga

SEQ ID NO: 1129408 - RNA, 19 nt, Homo sapiens
  misc_RNA (1)...(19): siRNA sense strand
caucacauguuaugaaagg

SEQ ID NO: 1129409 - RNA, 19 nt, Homo sapiens
  misc_RNA (1)...(19): siRNA sense strand
gaaaggagaugcccuagug

SEQ ID NO: 1129410 - RNA, 19 nt, Homo sapiens
  misc_RNA (1)...(19): siRNA sense strand
ucaagaagauggucagcua

SEQ ID NO: 1129411 - RNA, 19 nt, Homo sapiens
  misc_RNA (1)...(19): siRNA sense strand
gaggagaucaagcucauua

SEQ ID NO: 1129412 - RNA, 19 nt, Homo sapiens
  misc_RNA (1)...(19): siRNA sense strand
ccgcacagaugucagagua

SEQ ID NO: 1129413 - RNA, 19 nt, Homo sapiens
  misc_RNA (1)...(19): siRNA sense strand
gaugugcgcuucauagagu

SEQ ID NO: 1129414 - RNA, 19 nt, Homo sapiens
  misc_RNA (1)...(19): siRNA sense strand
uagaguauaugcccuuuga

SEQ ID NO: 1129415 - RNA, 19 nt, Homo sapiens
  misc_RNA (1)...(19): siRNA sense strand
gcacagccaaggccuuuaa

SEQ ID NO: 1129416 - RNA, 19 nt, Homo sapiens
  misc_RNA (1)...(19): siRNA sense strand
gcagggacaucguguugga

SEQ ID NO: 1129417 - RNA, 19 nt, Homo sapiens
  misc_RNA (1)...(19): siRNA sense strand
gcaggaagccagacacaga

SEQ ID NO: 1129418 - RNA, 19 nt, Homo sapiens
  misc_RNA (1)...(19): siRNA sense strand
gcacagaugucagaguaag

SEQ ID NO: 1129419 - RNA, 19 nt, Homo sapiens
  misc_RNA (1)...(19): siRNA sense strand
cagaacaacuaacucaugu

SEQ ID NO: 1129420 - RNA, 19 nt, Homo sapiens
  misc_RNA (1)...(19): siRNA sense strand
ucagaaggcuggucucagu

SEQ ID NO: 1129421 - RNA, 19 nt, Homo sapiens
  misc_RNA (1)...(19): siRNA sense strand
gggcagcuaugguagaugu

SEQ ID NO: 1129422 - RNA, 19 nt, Homo sapiens
  misc_RNA (1)...(19): siRNA sense strand
agaagauggucagcuauaa

SEQ ID NO: 1129423 - RNA, 19 nt, Homo sapiens
  misc_RNA (1)...(19): siRNA sense strand
cagaucagcuucaucacau

SEQ ID NO: 1129424 - RNA, 19 nt, Homo sapiens
  misc_RNA (1)...(19): siRNA sense strand
agacucagaugccaacuca

SEQ ID NO: 1129425 - RNA, 19 nt, Homo sapiens
  misc_RNA (1)...(19): siRNA sense strand
gcagaaccagcucaagaaa

SEQ ID NO: 1129426 - RNA, 19 nt, Homo sapiens
  misc_RNA (1)...(19): siRNA sense strand
gaagugcaaccucagaugu

SEQ ID NO: 1129427 - RNA, 19 nt, Homo sapiens
  misc_RNA (1)...(19): siRNA sense strand
gaaggaaggcaucgacaag

SEQ ID NO: 1129428 - RNA, 19 nt, Homo sapiens
  misc_RNA (1)...(19): siRNA sense strand
ccuggugccugccaaguuu

SEQ ID NO: 1129429 - RNA, 19 nt, Homo sapiens
  misc_RNA (1)...(19): siRNA sense strand
gguggccacuuuauggaaa

SEQ ID NO: 1129430 - RNA, 19 nt, Homo sapiens
  misc_RNA (1)...(19): siRNA sense strand
gcuaaccucagaacaacua

SEQ ID NO: 1129431 - RNA, 19 nt, Homo sapiens
  misc_RNA (1)...(19): siRNA sense strand
gaguauaugcccuuugaug

SEQ ID NO: 1129432 - RNA, 19 nt, Homo sapiens
  misc_RNA (1)...(19): siRNA sense strand
agaucaagcucauuagcaa

SEQ ID NO: 1129433 - RNA, 19 nt, Homo sapiens
  misc_RNA (1)...(19): siRNA sense strand
guuggaagcuccgcacaga

SEQ ID NO: 1129434 - RNA, 19 nt, Homo sapiens
  misc_RNA (1)...(19): siRNA sense strand
cagcagaaccagcucaaga

SEQ ID NO: 1129435 - RNA, 19 nt, Homo sapiens
  misc_RNA (1)...(19): siRNA sense strand
uaaaaucccuggcuuccaa

SEQ ID NO: 1129436 - RNA, 19 nt, Homo sapiens
  misc_RNA (1)...(19): siRNA sense strand
agaaccagcucaagaaagg

SEQ ID NO: 1129437 - RNA, 19 nt, Homo sapiens
  misc_RNA (1)...(19): siRNA sense strand
gaagauggucagcuauaag

SEQ ID NO: 1129438 - RNA, 19 nt, Homo sapiens
  misc_RNA (1)...(19): siRNA sense strand
gcuauaaggagaugcuaga

SEQ ID NO: 1129439 - RNA, 19 nt, Homo sapiens
  misc_RNA (1)...(19): siRNA sense strand
ggacuuccaucgggcuuag

SEQ ID NO: 1129440 - RNA, 19 nt, Homo sapiens
  misc_RNA (1)...(19): siRNA sense strand
aagaagauggucagcuaua

SEQ ID NO: 1129441 - RNA, 19 nt, Homo sapiens
  misc_RNA (1)...(19): siRNA sense strand
ccagcuaaccucagaacaa

SEQ ID NO: 1129442 - RNA, 19 nt, Homo sapiens
  misc_RNA (1)...(19): siRNA sense strand
gagcugcugagaaucauug

SEQ ID NO: 1129443 - RNA, 19 nt, Homo sapiens
  misc_RNA (1)...(19): siRNA sense strand
ggccagaucagcuucauca

SEQ ID NO: 1129444 - RNA, 19 nt, Homo sapiens
  misc_RNA (1)...(19): siRNA sense strand
ccaaccugcugaccacaga

SEQ ID NO: 1129445 - RNA, 19 nt, Homo sapiens
  misc_RNA (1)...(19): siRNA sense strand
gaugaacuccuggacuuug

SEQ ID NO: 1129446 - RNA, 19 nt, Homo sapiens
  misc_RNA (1)...(19): siRNA sense strand
gcugagaaccauagguguu

SEQ ID NO: 1129447 - RNA, 19 nt, Homo sapiens
  misc_RNA (1)...(19): siRNA sense strand
ggaaggacgggcagcuaug

SEQ ID NO: 1129448 - RNA, 19 nt, Homo sapiens
  misc_RNA (1)...(19): siRNA sense strand
ccaucgagcugggcuacaa

SEQ ID NO: 1129449 - RNA, 19 nt, Homo sapiens
  misc_RNA (1)...(19): siRNA sense strand
gaagggcugagaaccauag

SEQ ID NO: 1129450 - RNA, 19 nt, Homo sapiens
  misc_RNA (1)...(19): siRNA sense strand
gagaucaagcucauuagca

SEQ ID NO: 1129451 - RNA, 19 nt, Homo sapiens
  misc_RNA (1)...(19): siRNA sense strand
ccucaaggucugccucuuu

SEQ ID NO: 1129452 - RNA, 19 nt, Homo sapiens
  misc_RNA (1)...(19): siRNA sense strand
gcaggcgguucuccuugug

SEQ ID NO: 1129453 - RNA, 19 nt, Homo sapiens
  misc_RNA (1)...(19): siRNA sense strand
ggucagcuauaaggagaug

SEQ ID NO: 1129454 - RNA, 19 nt, Homo sapiens
  misc_RNA (1)...(19): siRNA sense strand
ggugaacuguguggugaug

SEQ ID NO: 1129455 - RNA, 19 nt, Homo sapiens
  misc_RNA (1)...(19): siRNA sense strand
ucagaacaacuaacucaug

SEQ ID NO: 1129456 - RNA, 19 nt, Homo sapiens
  misc_RNA (1)...(19): siRNA sense strand
cagcuaaccucagaacaac

SEQ ID NO: 1129457 - RNA, 19 nt, Homo sapiens
  misc_RNA (1)...(19): siRNA sense strand
gggacccgcuccauguuca

SEQ ID NO: 1129458 - RNA, 19 nt, Homo sapiens
  misc_RNA (1)...(19): siRNA sense strand
gaaggugccagaggaggaa

SEQ ID NO: 1129459 - RNA, 19 nt, Homo sapiens
  misc_RNA (1)...(19): siRNA sense strand
cagcagggacaucguguug

SEQ ID NO: 1129460 - RNA, 19 nt, Homo sapiens
  misc_RNA (1)...(19): siRNA sense strand
ggaugaacuccuggacuuu

SEQ ID NO: 1129461 - RNA, 19 nt, Homo sapiens
  misc_RNA (1)...(19): siRNA sense strand
acucagaugccaacucaaa

SEQ ID NO: 1129462 - RNA, 19 nt, Homo sapiens
  misc_RNA (1)...(19): siRNA sense strand
ggaagggcugagaaccaua

SEQ ID NO: 1129463 - RNA, 19 nt, Homo sapiens
  misc_RNA (1)...(19): siRNA sense strand
ggcaggcgguucuccuugu

SEQ ID NO: 1129464 - RNA, 19 nt, Homo sapiens
  misc_RNA (1)...(19): siRNA sense strand
ggaaggcaucgacaagauc

SEQ ID NO: 1129465 - RNA, 19 nt, Homo sapiens
  misc_RNA (1)...(19): siRNA sense strand
cucaaggucugccucuuug

SEQ ID NO: 1129466 - RNA, 19 nt, Homo sapiens
  misc_RNA (1)...(19): siRNA sense strand
cugagaaccauagguguua

SEQ ID NO: 1129467 - RNA, 19 nt, Homo sapiens
  misc_RNA (1)...(19): siRNA sense strand
gcuacaacccugugaaggu

SEQ ID NO: 1129468 - RNA, 19 nt, Homo sapiens
  misc_RNA (1)...(19): siRNA sense strand
cagcacagccaaggccuuu

SEQ ID NO: 1129469 - RNA, 19 nt, Homo sapiens
  misc_RNA (1)...(19): siRNA sense strand
cuaagacccagaaugaguu

SEQ ID NO: 1129470 - RNA, 19 nt, Homo sapiens
  misc_RNA (1)...(19): siRNA sense strand
ccucagaacaacuaacuca

SEQ ID NO: 1129471 - RNA, 19 nt, Homo sapiens
  misc_RNA (1)...(19): siRNA sense strand
ggacgugguggacauugug

SEQ ID NO: 1129472 - RNA, 19 nt, Homo sapiens
  misc_RNA (1)...(19): siRNA sense strand
ccagguggccacuuuaugg

SEQ ID NO: 1129473 - RNA, 19 nt, Homo sapiens
  misc_RNA (1)...(19): siRNA sense strand
gagaagugcaaccucagau

SEQ ID NO: 1129474 - RNA, 19 nt, Homo sapiens
  misc_RNA (1)...(19): siRNA sense strand
uaagacccagaaugaguuu

SEQ ID NO: 1129475 - RNA, 19 nt, Homo sapiens
  misc_RNA (1)...(19): siRNA sense strand
caggagcugcugagaauca

SEQ ID NO: 1129476 - RNA, 19 nt, Homo sapiens
  misc_RNA (1)...(19): siRNA sense strand
ccagaucagcuucaucaca

SEQ ID NO: 1129477 - RNA, 19 nt, Homo sapiens
  misc_RNA (1)...(19): siRNA sense strand
aggaaggcaucgacaagau

SEQ ID NO: 1129478 - RNA, 19 nt, Homo sapiens
  misc_RNA (1)...(19): siRNA sense strand
caagaagauggucagcuau

SEQ ID NO: 1129479 - RNA, 19 nt, Homo sapiens
  misc_RNA (1)...(19): siRNA sense strand
ucaagcuuguccagcagaa

SEQ ID NO: 1129480 - RNA, 19 nt, Homo sapiens
  misc_RNA (1)...(19): siRNA sense strand
caaggucugccucuuugga

SEQ ID NO: 1129481 - RNA, 19 nt, Homo sapiens
  misc_RNA (1)...(19): siRNA sense strand
ggacuuugcggccuugacu

SEQ ID NO: 1129482 - RNA, 19 nt, Homo sapiens
  misc_RNA (1)...(19): siRNA sense strand
gaaggacgggcagcuaugg

SEQ ID NO: 1129483 - RNA, 19 nt, Homo sapiens
  misc_RNA (1)...(19): siRNA sense strand
gcccuuugauggcaacaag

SEQ ID NO: 1129484 - RNA, 19 nt, Homo sapiens
  misc_RNA (1)...(19): siRNA sense strand
ugaaggaaggcaucgacaa

SEQ ID NO: 1129485 - RNA, 19 nt, Homo sapiens
  misc_RNA (1)...(19): siRNA sense strand
uggaggagaucaagcucau

SEQ ID NO: 1129486 - RNA, 19 nt, Homo sapiens
  misc_RNA (1)...(19): siRNA sense strand
cugugaaggugaacugugu

SEQ ID NO: 1129487 - RNA, 19 nt, Homo sapiens
  misc_RNA (1)...(19): siRNA sense strand
uggaagcuccgcacagaug

SEQ ID NO: 1129488 - RNA, 19 nt, Homo sapiens
  misc_RNA (1)...(19): siRNA sense strand
uggaagggcugagaaccau

SEQ ID NO: 1129489 - RNA, 19 nt, Homo sapiens
  misc_RNA (1)...(19): siRNA sense strand
ggaagcuccgcacagaugu

SEQ ID NO: 1129490 - RNA, 19 nt, Homo sapiens
  misc_RNA (1)...(19): siRNA sense strand
gcuggggucuggcuccuuu

SEQ ID NO: 1129491 - RNA, 19 nt, Homo sapiens
  misc_RNA (1)...(19): siRNA sense strand
ucuaagacccagaaugagu

SEQ ID NO: 1129492 - RNA, 19 nt, Homo sapiens
  misc_RNA (1)...(19): siRNA sense strand
guggugaugcgaggccuua

SEQ ID NO: 1129493 - RNA, 19 nt, Homo sapiens
  misc_RNA (1)...(19): siRNA sense strand
ccagccaauccaagcauuu

SEQ ID NO: 1129494 - RNA, 19 nt, Homo sapiens
  misc_RNA (1)...(19): siRNA sense strand
uuuggaaacucugagguau

SEQ ID NO: 1129495 - RNA, 19 nt, Homo sapiens
  misc_RNA (1)...(19): siRNA sense strand
ggaugugcgcuucauagag

SEQ ID NO: 1129496 - RNA, 19 nt, Homo sapiens
  misc_RNA (1)...(19): siRNA sense strand
gcuccgcacagaugucaga

SEQ ID NO: 1129497 - RNA, 19 nt, Homo sapiens
  misc_RNA (1)...(19): siRNA sense strand
gcccucacccuguaugaca

SEQ ID NO: 1129498 - RNA, 19 nt, Homo sapiens
  misc_RNA (1)...(19): siRNA sense strand
ucagaugccaacucaaagu

SEQ ID NO: 1129499 - RNA, 19 nt, Homo sapiens
  misc_RNA (1)...(19): siRNA sense strand
cauccaugucugagcauuu

SEQ ID NO: 1129500 - RNA, 19 nt, Homo sapiens
  misc_RNA (1)...(19): siRNA sense strand
guucauuguccgcaggaaa

SEQ ID NO: 1129501 - RNA, 19 nt, Homo sapiens
  misc_RNA (1)...(19): siRNA sense strand
ggagaucaagcucauuagc

SEQ ID NO: 1129502 - RNA, 19 nt, Homo sapiens
  misc_RNA (1)...(19): siRNA sense strand
aggagaugcuagacacugu

SEQ ID NO: 1129503 - RNA, 19 nt, Homo sapiens
  misc_RNA (1)...(19): siRNA sense strand
ucaagaagauggucagcua

SEQ ID NO: 1129504 - RNA, 19 nt, Homo sapiens
  misc_RNA (1)...(19): siRNA sense strand
ccgcacagaugucagagua

SEQ ID NO: 1129505 - RNA, 19 nt, Homo sapiens
  misc_RNA (1)...(19): siRNA sense strand
gaugugcgcuucauagagu

SEQ ID NO: 1129506 - RNA, 19 nt, Homo sapiens
  misc_RNA (1)...(19): siRNA sense strand
uagaguauaugcccuuuga

SEQ ID NO: 1129507 - RNA, 19 nt, Homo sapiens
  misc_RNA (1)...(19): siRNA sense strand
gcacagccaaggccuuuaa

SEQ ID NO: 1129508 - RNA, 19 nt, Homo sapiens
  misc_RNA (1)...(19): siRNA sense strand
gcacagaugucagaguaag

SEQ ID NO: 1129509 - RNA, 19 nt, Homo sapiens
  misc_RNA (1)...(19): siRNA sense strand
ucagaaggcuggucucagu

SEQ ID NO: 1129510 - RNA, 19 nt, Homo sapiens
  misc_RNA (1)...(19): siRNA sense strand
agaagauggucagcuauaa

SEQ ID NO: 1129511 - RNA, 19 nt, Homo sapiens
  misc_RNA (1)...(19): siRNA sense strand
cagaucagcuucaucacau

SEQ ID NO: 1129512 - RNA, 19 nt, Homo sapiens
  misc_RNA (1)...(19): siRNA sense strand
gaagugcaaccucagaugu

SEQ ID NO: 1129513 - RNA, 19 nt, Homo sapiens
  misc_RNA (1)...(19): siRNA sense strand
gaaggaaggcaucgacaag

SEQ ID NO: 1129514 - RNA, 19 nt, Homo sapiens
  misc_RNA (1)...(19): siRNA sense strand
ccuggugccugccaaguuu

SEQ ID NO: 1129515 - RNA, 19 nt, Homo sapiens
  misc_RNA (1)...(19): siRNA sense strand
gaguauaugcccuuugaug

SEQ ID NO: 1129516 - RNA, 19 nt, Homo sapiens
  misc_RNA (1)...(19): siRNA sense strand
guuggaagcuccgcacaga

SEQ ID NO: 1129517 - RNA, 19 nt, Homo sapiens
  misc_RNA (1)...(19): siRNA sense strand
uaaaaucccuggcuuccaa

SEQ ID NO: 1129518 - RNA, 19 nt, Homo sapiens
  misc_RNA (1)...(19): siRNA sense strand
gaagauggucagcuauaag

SEQ ID NO: 1129519 - RNA, 19 nt, Homo sapiens
  misc_RNA (1)...(19): siRNA sense strand
gcuauaaggagaugcuaga

SEQ ID NO: 1129520 - RNA, 19 nt, Homo sapiens
  misc_RNA (1)...(19): siRNA sense strand
aagaagauggucagcuaua

SEQ ID NO: 1129521 - RNA, 19 nt, Homo sapiens
  misc_RNA (1)...(19): siRNA sense strand
gagcugcugagaaucauug

SEQ ID NO: 1129522 - RNA, 19 nt, Homo sapiens
  misc_RNA (1)...(19): siRNA sense strand
ggccagaucagcuucauca

SEQ ID NO: 1129523 - RNA, 19 nt, Homo sapiens
  misc_RNA (1)...(19): siRNA sense strand
ccaaccugcugaccacaga

SEQ ID NO: 1129524 - RNA, 19 nt, Homo sapiens
  misc_RNA (1)...(19): siRNA sense strand
gaugaacuccuggacuuug

SEQ ID NO: 1129525 - RNA, 19 nt, Homo sapiens
  misc_RNA (1)...(19): siRNA sense strand
gcugagaaccauagguguu

SEQ ID NO: 1129526 - RNA, 19 nt, Homo sapiens
  misc_RNA (1)...(19): siRNA sense strand
ccaucgagcugggcuacaa

SEQ ID NO: 1129527 - RNA, 19 nt, Homo sapiens
  misc_RNA (1)...(19): siRNA sense strand
gaagggcugagaaccauag

SEQ ID NO: 1129528 - RNA, 19 nt, Homo sapiens
  misc_RNA (1)...(19): siRNA sense strand
ccucaaggucugccucuuu

SEQ ID NO: 1129529 - RNA, 19 nt, Homo sapiens
  misc_RNA (1)...(19): siRNA sense strand
ggucagcuauaaggagaug

SEQ ID NO: 1129530 - RNA, 19 nt, Homo sapiens
  misc_RNA (1)...(19): siRNA sense strand
gcaggcgguucuccuugug

SEQ ID NO: 1129531 - RNA, 19 nt, Homo sapiens
  misc_RNA (1)...(19): siRNA sense strand
ggugaacuguguggugaug

SEQ ID NO: 1129532 - RNA, 19 nt, Homo sapiens
  misc_RNA (1)...(19): siRNA sense strand
gaaggugccagaggaggaa

SEQ ID NO: 1129533 - RNA, 19 nt, Homo sapiens
  misc_RNA (1)...(19): siRNA sense strand
ggaugaacuccuggacuuu

SEQ ID NO: 1129534 - RNA, 19 nt, Homo sapiens
  misc_RNA (1)...(19): siRNA sense strand
ggaaggcaucgacaagauc

SEQ ID NO: 1129535 - RNA, 19 nt, Homo sapiens
  misc_RNA (1)...(19): siRNA sense strand
cucaaggucugccucuuug

SEQ ID NO: 1129536 - RNA, 19 nt, Homo sapiens
  misc_RNA (1)...(19): siRNA sense strand
ggcaggcgguucuccuugu

SEQ ID NO: 1129537 - RNA, 19 nt, Homo sapiens
  misc_RNA (1)...(19): siRNA sense strand
cugagaaccauagguguua

SEQ ID NO: 1129538 - RNA, 19 nt, Homo sapiens
  misc_RNA (1)...(19): siRNA sense strand
ggaagggcugagaaccaua

SEQ ID NO: 1129539 - RNA, 19 nt, Homo sapiens
  misc_RNA (1)...(19): siRNA sense strand
gcuacaacccugugaaggu

SEQ ID NO: 1129540 - RNA, 19 nt, Homo sapiens
  misc_RNA (1)...(19): siRNA sense strand
cagcacagccaaggccuuu

SEQ ID NO: 1129541 - RNA, 19 nt, Homo sapiens
  misc_RNA (1)...(19): siRNA sense strand
ggacgugguggacauugug

SEQ ID NO: 1129542 - RNA, 19 nt, Homo sapiens
  misc_RNA (1)...(19): siRNA sense strand
aggaaggcaucgacaagau

SEQ ID NO: 1129543 - RNA, 19 nt, Homo sapiens
  misc_RNA (1)...(19): siRNA sense strand
caggagcugcugagaauca

SEQ ID NO: 1129544 - RNA, 19 nt, Homo sapiens
  misc_RNA (1)...(19): siRNA sense strand
ccagaucagcuucaucaca

SEQ ID NO: 1129545 - RNA, 19 nt, Homo sapiens
  misc_RNA (1)...(19): siRNA sense strand
gagaagugcaaccucagau

SEQ ID NO: 1129546 - RNA, 19 nt, Homo sapiens
  misc_RNA (1)...(19): siRNA sense strand
caagaagauggucagcuau

SEQ ID NO: 1129547 - RNA, 19 nt, Homo sapiens
  misc_RNA (1)...(19): siRNA sense strand
caaggucugccucuuugga

SEQ ID NO: 1129548 - RNA, 19 nt, Homo sapiens
  misc_RNA (1)...(19): siRNA sense strand
ggacuuugcggccuugacu

SEQ ID NO: 1129549 - RNA, 19 nt, Homo sapiens
  misc_RNA (1)...(19): siRNA sense strand
gcccuuugauggcaacaag

SEQ ID NO: 1129550 - RNA, 19 nt, Homo sapiens
  misc_RNA (1)...(19): siRNA sense strand
ugaaggaaggcaucgacaa

SEQ ID NO: 1129551 - RNA, 19 nt, Homo sapiens
  misc_RNA (1)...(19): siRNA sense strand
uggaagggcugagaaccau

SEQ ID NO: 1129552 - RNA, 19 nt, Homo sapiens
  misc_RNA (1)...(19): siRNA sense strand
uggaagcuccgcacagaug

SEQ ID NO: 1129553 - RNA, 19 nt, Homo sapiens
  misc_RNA (1)...(19): siRNA sense strand
cugugaaggugaacugugu

SEQ ID NO: 1129554 - RNA, 19 nt, Homo sapiens
  misc_RNA (1)...(19): siRNA sense strand
ggaagcuccgcacagaugu

SEQ ID NO: 1129555 - RNA, 19 nt, Homo sapiens
  misc_RNA (1)...(19): siRNA sense strand
guggugaugcgaggccuua

SEQ ID NO: 1129556 - RNA, 19 nt, Homo sapiens
  misc_RNA (1)...(19): siRNA sense strand
uuuggaaacucugagguau

SEQ ID NO: 1129557 - RNA, 19 nt, Homo sapiens
  misc_RNA (1)...(19): siRNA sense strand
gcuccgcacagaugucaga

SEQ ID NO: 1129558 - RNA, 19 nt, Homo sapiens
  misc_RNA (1)...(19): siRNA sense strand
cauccaugucugagcauuu

SEQ ID NO: 1129559 - RNA, 19 nt, Homo sapiens
  misc_RNA (1)...(19): siRNA sense strand
ggaugugcgcuucauagag

SEQ ID NO: 1129560 - RNA, 19 nt, Homo sapiens
  misc_RNA (1)...(19): siRNA sense strand
guucauuguccgcaggaaa

SEQ ID NO: 1129561 - RNA, 19 nt, Homo sapiens
  misc_RNA (1)...(19): siRNA sense strand
aggagaugcuagacacugu

SEQ ID NO: 1129562 - RNA, 19 nt, Homo sapiens
  misc_RNA (1)...(19): siRNA sense strand
gaaaggagaugcccuagug

SEQ ID NO: 1129563 - RNA, 19 nt, Homo sapiens
  misc_RNA (1)...(19): siRNA sense strand
ucaagaagauggucagcua

SEQ ID NO: 1129564 - RNA, 19 nt, Homo sapiens
  misc_RNA (1)...(19): siRNA sense strand
gaggagaucaagcucauua

SEQ ID NO: 1129565 - RNA, 19 nt, Homo sapiens
  misc_RNA (1)...(19): siRNA sense strand
ccgcacagaugucagagua

SEQ ID NO: 1129566 - RNA, 19 nt, Homo sapiens
  misc_RNA (1)...(19): siRNA sense strand
gaugugcgcuucauagagu

SEQ ID NO: 1129567 - RNA, 19 nt, Homo sapiens
  misc_RNA (1)...(19): siRNA sense strand
uagaguauaugcccuuuga

SEQ ID NO: 1129568 - RNA, 19 nt, Homo sapiens
  misc_RNA (1)...(19): siRNA sense strand
gcacagccaaggccuuuaa

SEQ ID NO: 1129569 - RNA, 19 nt, Homo sapiens
  misc_RNA (1)...(19): siRNA sense strand
gcagggacaucguguugga

SEQ ID NO: 1129570 - RNA, 19 nt, Homo sapiens
  misc_RNA (1)...(19): siRNA sense strand
gcaggaagccagacacaga

SEQ ID NO: 1129571 - RNA, 19 nt, Homo sapiens
  misc_RNA (1)...(19): siRNA sense strand
gcacagaugucagaguaag

SEQ ID NO: 1129572 - RNA, 19 nt, Homo sapiens
  misc_RNA (1)...(19): siRNA sense strand
cagaacaacuaacucaugu

SEQ ID NO: 1129573 - RNA, 19 nt, Homo sapiens
  misc_RNA (1)...(19): siRNA sense strand
ucagaaggcuggucucagu

SEQ ID NO: 1129574 - RNA, 19 nt, Homo sapiens
  misc_RNA (1)...(19): siRNA sense strand
gggcagcuaugguagaugu

SEQ ID NO: 1129575 - RNA, 19 nt, Homo sapiens
  misc_RNA (1)...(19): siRNA sense strand
agaagauggucagcuauaa

SEQ ID NO: 1129576 - RNA, 19 nt, Homo sapiens
  misc_RNA (1)...(19): siRNA sense strand
cagaucagcuucaucacau

SEQ ID NO: 1129577 - RNA, 19 nt, Homo sapiens
  misc_RNA (1)...(19): siRNA sense strand
agacucagaugccaacuca

SEQ ID NO: 1129578 - RNA, 19 nt, Homo sapiens
  misc_RNA (1)...(19): siRNA sense strand
gcagaaccagcucaagaaa

SEQ ID NO: 1129579 - RNA, 19 nt, Homo sapiens
  misc_RNA (1)...(19): siRNA sense strand
gaagugcaaccucagaugu

SEQ ID NO: 1129580 - RNA, 19 nt, Homo sapiens
  misc_RNA (1)...(19): siRNA sense strand
gaaggaaggcaucgacaag

SEQ ID NO: 1129581 - RNA, 19 nt, Homo sapiens
  misc_RNA (1)...(19): siRNA sense strand
ccuggugccugccaaguuu

SEQ ID NO: 1129582 - RNA, 19 nt, Homo sapiens
  misc_RNA (1)...(19): siRNA sense strand
gguggccacuuuauggaaa

SEQ ID NO: 1129583 - RNA, 19 nt, Homo sapiens
  misc_RNA (1)...(19): siRNA sense strand
gcuaaccucagaacaacua

SEQ ID NO: 1129584 - RNA, 19 nt, Homo sapiens
  misc_RNA (1)...(19): siRNA sense strand
gaguauaugcccuuugaug

SEQ ID NO: 1129585 - RNA, 19 nt, Homo sapiens
  misc_RNA (1)...(19): siRNA sense strand
agaucaagcucauuagcaa

SEQ ID NO: 1129586 - RNA, 19 nt, Homo sapiens
  misc_RNA (1)...(19): siRNA sense strand
guuggaagcuccgcacaga

SEQ ID NO: 1129587 - RNA, 19 nt, Homo sapiens
  misc_RNA (1)...(19): siRNA sense strand
cagcagaaccagcucaaga

SEQ ID NO: 1129588 - RNA, 19 nt, Homo sapiens
  misc_RNA (1)...(19): siRNA sense strand
uaaaaucccuggcuuccaa

SEQ ID NO: 1129589 - RNA, 19 nt, Homo sapiens
  misc_RNA (1)...(19): siRNA sense strand
agaaccagcucaagaaagg

SEQ ID NO: 1129590 - RNA, 19 nt, Homo sapiens
  misc_RNA (1)...(19): siRNA sense strand
gaagauggucagcuauaag

SEQ ID NO: 1129591 - RNA, 19 nt, Homo sapiens
  misc_RNA (1)...(19): siRNA sense strand
gcuauaaggagaugcuaga

SEQ ID NO: 1129592 - RNA, 19 nt, Homo sapiens
  misc_RNA (1)...(19): siRNA sense strand
ggacuuccaucgggcuuag

SEQ ID NO: 1129593 - RNA, 19 nt, Homo sapiens
  misc_RNA (1)...(19): siRNA sense strand
aagaagauggucagcuaua

SEQ ID NO: 1129594 - RNA, 19 nt, Homo sapiens
  misc_RNA (1)...(19): siRNA sense strand
ccagcuaaccucagaacaa

SEQ ID NO: 1129595 - RNA, 19 nt, Homo sapiens
  misc_RNA (1)...(19): siRNA sense strand
gagcugcugagaaucauug

SEQ ID NO: 1129596 - RNA, 19 nt, Homo sapiens
  misc_RNA (1)...(19): siRNA sense strand
ggccagaucagcuucauca

SEQ ID NO: 1129597 - RNA, 19 nt, Homo sapiens
  misc_RNA (1)...(19): siRNA sense strand
ccaaccugcugaccacaga

SEQ ID NO: 1129598 - RNA, 19 nt, Homo sapiens
  misc_RNA (1)...(19): siRNA sense strand
gaugaacuccuggacuuug

SEQ ID NO: 1129599 - RNA, 19 nt, Homo sapiens
  misc_RNA (1)...(19): siRNA sense strand
gcugagaaccauagguguu

SEQ ID NO: 1129600 - RNA, 19 nt, Homo sapiens
  misc_RNA (1)...(19): siRNA sense strand
ggaaggacgggcagcuaug

SEQ ID NO: 1129601 - RNA, 19 nt, Homo sapiens
  misc_RNA (1)...(19): siRNA sense strand
ccaucgagcugggcuacaa

SEQ ID NO: 1129602 - RNA, 19 nt, Homo sapiens
  misc_RNA (1)...(19): siRNA sense strand
gaagggcugagaaccauag

SEQ ID NO: 1129603 - RNA, 19 nt, Homo sapiens
  misc_RNA (1)...(19): siRNA sense strand
gagaucaagcucauuagca

SEQ ID NO: 1129604 - RNA, 19 nt, Homo sapiens
  misc_RNA (1)...(19): siRNA sense strand
ccucaaggucugccucuuu

SEQ ID NO: 1129605 - RNA, 19 nt, Homo sapiens
  misc_RNA (1)...(19): siRNA sense strand
gcaggcgguucuccuugug

SEQ ID NO: 1129606 - RNA, 19 nt, Homo sapiens
  misc_RNA (1)...(19): siRNA sense strand
ggucagcuauaaggagaug

SEQ ID NO: 1129607 - RNA, 19 nt, Homo sapiens
  misc_RNA (1)...(19): siRNA sense strand
ggugaacuguguggugaug

SEQ ID NO: 1129608 - RNA, 19 nt, Homo sapiens
  misc_RNA (1)...(19): siRNA sense strand
ucagaacaacuaacucaug

SEQ ID NO: 1129609 - RNA, 19 nt, Homo sapiens
  misc_RNA (1)...(19): siRNA sense strand
cagcuaaccucagaacaac

SEQ ID NO: 1129610 - RNA, 19 nt, Homo sapiens
  misc_RNA (1)...(19): siRNA sense strand
gggacccgcuccauguuca

SEQ ID NO: 1129611 - RNA, 19 nt, Homo sapiens
  misc_RNA (1)...(19): siRNA sense strand
gaaggugccagaggaggaa

SEQ ID NO: 1129612 - RNA, 19 nt, Homo sapiens
  misc_RNA (1)...(19): siRNA sense strand
cagcagggacaucguguug

SEQ ID NO: 1129613 - RNA, 19 nt, Homo sapiens
  misc_RNA (1)...(19): siRNA sense strand
ggaugaacuccuggacuuu

SEQ ID NO: 1129614 - RNA, 19 nt, Homo sapiens
  misc_RNA (1)...(19): siRNA sense strand
acucagaugccaacucaaa

SEQ ID NO: 1129615 - RNA, 19 nt, Homo sapiens
  misc_RNA (1)...(19): siRNA sense strand
ggaagggcugagaaccaua

SEQ ID NO: 1129616 - RNA, 19 nt, Homo sapiens
  misc_RNA (1)...(19): siRNA sense strand
ggcaggcgguucuccuugu

SEQ ID NO: 1129617 - RNA, 19 nt, Homo sapiens
  misc_RNA (1)...(19): siRNA sense strand
ggaaggcaucgacaagauc

SEQ ID NO: 1129618 - RNA, 19 nt, Homo sapiens
  misc_RNA (1)...(19): siRNA sense strand
cucaaggucugccucuuug

SEQ ID NO: 1129619 - RNA, 19 nt, Homo sapiens
  misc_RNA (1)...(19): siRNA sense strand
cugagaaccauagguguua

SEQ ID NO: 1129620 - RNA, 19 nt, Homo sapiens
  misc_RNA (1)...(19): siRNA sense strand
gcuacaacccugugaaggu

SEQ ID NO: 1129621 - RNA, 19 nt, Homo sapiens
  misc_RNA (1)...(19): siRNA sense strand
cagcacagccaaggccuuu

SEQ ID NO: 1129622 - RNA, 19 nt, Homo sapiens
  misc_RNA (1)...(19): siRNA sense strand
cuaagacccagaaugaguu

SEQ ID NO: 1129623 - RNA, 19 nt, Homo sapiens
  misc_RNA (1)...(19): siRNA sense strand
ccucagaacaacuaacuca

SEQ ID NO: 1129624 - RNA, 19 nt, Homo sapiens
  misc_RNA (1)...(19): siRNA sense strand
ggacgugguggacauugug

SEQ ID NO: 1129625 - RNA, 19 nt, Homo sapiens
  misc_RNA (1)...(19): siRNA sense strand
ccagguggccacuuuaugg

SEQ ID NO: 1129626 - RNA, 19 nt, Homo sapiens
  misc_RNA (1)...(19): siRNA sense strand
gagaagugcaaccucagau

SEQ ID NO: 1129627 - RNA, 19 nt, Homo sapiens
  misc_RNA (1)...(19): siRNA sense strand
uaagacccagaaugaguuu

SEQ ID NO: 1129628 - RNA, 19 nt, Homo sapiens
  misc_RNA (1)...(19): siRNA sense strand
caggagcugcugagaauca

SEQ ID NO: 1129629 - RNA, 19 nt, Homo sapiens
  misc_RNA (1)...(19): siRNA sense strand
ccagaucagcuucaucaca

SEQ ID NO: 1129630 - RNA, 19 nt, Homo sapiens
  misc_RNA (1)...(19): siRNA sense strand
aggaaggcaucgacaagau

SEQ ID NO: 1129631 - RNA, 19 nt, Homo sapiens
  misc_RNA (1)...(19): siRNA sense strand
caagaagauggucagcuau

SEQ ID NO: 1129632 - RNA, 19 nt, Homo sapiens
  misc_RNA (1)...(19): siRNA sense strand
ucaagcuuguccagcagaa

SEQ ID NO: 1129633 - RNA, 19 nt, Homo sapiens
  misc_RNA (1)...(19): siRNA sense strand
caaggucugccucuuugga

SEQ ID NO: 1129634 - RNA, 19 nt, Homo sapiens
  misc_RNA (1)...(19): siRNA sense strand
ggacuuugcggccuugacu

SEQ ID NO: 1129635 - RNA, 19 nt, Homo sapiens
  misc_RNA (1)...(19): siRNA sense strand
gaaggacgggcagcuaugg

SEQ ID NO: 1129636 - RNA, 19 nt, Homo sapiens
  misc_RNA (1)...(19): siRNA sense strand
gcccuuugauggcaacaag

SEQ ID NO: 1129637 - RNA, 19 nt, Homo sapiens
  misc_RNA (1)...(19): siRNA sense strand
ugaaggaaggcaucgacaa

SEQ ID NO: 1129638 - RNA, 19 nt, Homo sapiens
  misc_RNA (1)...(19): siRNA sense strand
uggaggagaucaagcucau

SEQ ID NO: 1129639 - RNA, 19 nt, Homo sapiens
  misc_RNA (1)...(19): siRNA sense strand
cugugaaggugaacugugu

SEQ ID NO: 1129640 - RNA, 19 nt, Homo sapiens
  misc_RNA (1)...(19): siRNA sense strand
uggaagcuccgcacagaug

SEQ ID NO: 1129641 - RNA, 19 nt, Homo sapiens
  misc_RNA (1)...(19): siRNA sense strand
uggaagggcugagaaccau

SEQ ID NO: 1129642 - RNA, 19 nt, Homo sapiens
  misc_RNA (1)...(19): siRNA sense strand
ggaagcuccgcacagaugu

SEQ ID NO: 1129643 - RNA, 19 nt, Homo sapiens
  misc_RNA (1)...(19): siRNA sense strand
gcuggggucuggcuccuuu

SEQ ID NO: 1129644 - RNA, 19 nt, Homo sapiens
  misc_RNA (1)...(19): siRNA sense strand
ucuaagacccagaaugagu

SEQ ID NO: 1129645 - RNA, 19 nt, Homo sapiens
  misc_RNA (1)...(19): siRNA sense strand
guggugaugcgaggccuua

SEQ ID NO: 1129646 - RNA, 19 nt, Homo sapiens
  misc_RNA (1)...(19): siRNA sense strand
ccagccaauccaagcauuu

SEQ ID NO: 1129647 - RNA, 19 nt, Homo sapiens
  misc_RNA (1)...(19): siRNA sense strand
uuuggaaacucugagguau

SEQ ID NO: 1129648 - RNA, 19 nt, Homo sapiens
  misc_RNA (1)...(19): siRNA sense strand
ggaugugcgcuucauagag

SEQ ID NO: 1129649 - RNA, 19 nt, Homo sapiens
  misc_RNA (1)...(19): siRNA sense strand
gcuccgcacagaugucaga

SEQ ID NO: 1129650 - RNA, 19 nt, Homo sapiens
  misc_RNA (1)...(19): siRNA sense strand
gcccucacccuguaugaca

SEQ ID NO: 1129651 - RNA, 19 nt, Homo sapiens
  misc_RNA (1)...(19): siRNA sense strand
ucagaugccaacucaaagu

SEQ ID NO: 1129652 - RNA, 19 nt, Homo sapiens
  misc_RNA (1)...(19): siRNA sense strand
cauccaugucugagcauuu

SEQ ID NO: 1129653 - RNA, 19 nt, Homo sapiens
  misc_RNA (1)...(19): siRNA sense strand
guucauuguccgcaggaaa

SEQ ID NO: 1129654 - RNA, 19 nt, Homo sapiens
  misc_RNA (1)...(19): siRNA sense strand
ggagaucaagcucauuagc

SEQ ID NO: 1129655 - RNA, 19 nt, Homo sapiens
  misc_RNA (1)...(19): siRNA sense strand
aggagaugcuagacacugu

SEQ ID NO: 1129656 - RNA, 19 nt, Homo sapiens
  misc_RNA (1)...(19): siRNA sense strand
gagcugagaugacuucaaa

SEQ ID NO: 1129657 - RNA, 19 nt, Homo sapiens
  misc_RNA (1)...(19): siRNA sense strand
cagcguaacuucauucuuc

SEQ ID NO: 1129658 - RNA, 19 nt, Homo sapiens
  misc_RNA (1)...(19): siRNA sense strand
uaacuucauucuucaggua

SEQ ID NO: 1129659 - RNA, 19 nt, Homo sapiens
  misc_RNA (1)...(19): siRNA sense strand
gcagaucaggccucuauaa

SEQ ID NO: 1129660 - RNA, 19 nt, Homo sapiens
  misc_RNA (1)...(19): siRNA sense strand
uagaagagcuccgucagaa

SEQ ID NO: 1129661 - RNA, 19 nt, Homo sapiens
  misc_RNA (1)...(19): siRNA sense strand
gauaagaccauggcacaaa

SEQ ID NO: 1129662 - RNA, 19 nt, Homo sapiens
  misc_RNA (1)...(19): siRNA sense strand
ccgacaauauacaaguuua

SEQ ID NO: 1129663 - RNA, 19 nt, Homo sapiens
  misc_RNA (1)...(19): siRNA sense strand
guacagacaguguuugugu

SEQ ID NO: 1129664 - RNA, 19 nt, Homo sapiens
  misc_RNA (1)...(19): siRNA sense strand
gcgcagaucaggccucuau

SEQ ID NO: 1129665 - RNA, 19 nt, Homo sapiens
  misc_RNA (1)...(19): siRNA sense strand
acgauuggcuuuggaguaa

SEQ ID NO: 1129666 - RNA, 19 nt, Homo sapiens
  misc_RNA (1)...(19): siRNA sense strand
gaagagcuccgucagaaaa

SEQ ID NO: 1129667 - RNA, 19 nt, Homo sapiens
  misc_RNA (1)...(19): siRNA sense strand
uaccuuaacuucucuuuac

SEQ ID NO: 1129668 - RNA, 19 nt, Homo sapiens
  misc_RNA (1)...(19): siRNA sense strand
ggaaaccacuuggaugacu

SEQ ID NO: 1129669 - RNA, 19 nt, Homo sapiens
  misc_RNA (1)...(19): siRNA sense strand
gaagcugcauaucaaacug

SEQ ID NO: 1129670 - RNA, 19 nt, Homo sapiens
  misc_RNA (1)...(19): siRNA sense strand
gcaguuggucuuucagaga

SEQ ID NO: 1129671 - RNA, 19 nt, Homo sapiens
  misc_RNA (1)...(19): siRNA sense strand
agacaguguuuguguguuc

SEQ ID NO: 1129672 - RNA, 19 nt, Homo sapiens
  misc_RNA (1)...(19): siRNA sense strand
guuuauaccuuaacuucuc

SEQ ID NO: 1129673 - RNA, 19 nt, Homo sapiens
  misc_RNA (1)...(19): siRNA sense strand
cagaagcacagauagaaga

SEQ ID NO: 1129674 - RNA, 19 nt, Homo sapiens
  misc_RNA (1)...(19): siRNA sense strand
gacgauuggcuuuggagua

SEQ ID NO: 1129675 - RNA, 19 nt, Homo sapiens
  misc_RNA (1)...(19): siRNA sense strand
gcuggcagaagcacagaua

SEQ ID NO: 1129676 - RNA, 19 nt, Homo sapiens
  misc_RNA (1)...(19): siRNA sense strand
ggcagaagcacagauagaa

SEQ ID NO: 1129677 - RNA, 19 nt, Homo sapiens
  misc_RNA (1)...(19): siRNA sense strand
ucucuuuaccgacaauaua

SEQ ID NO: 1129678 - RNA, 19 nt, Homo sapiens
  misc_RNA (1)...(19): siRNA sense strand
caccagcucucccggaaag

SEQ ID NO: 1129679 - RNA, 19 nt, Homo sapiens
  misc_RNA (1)...(19): siRNA sense strand
uaccgacaauauacaaguu

SEQ ID NO: 1129680 - RNA, 19 nt, Homo sapiens
  misc_RNA (1)...(19): siRNA sense strand
caguuggucuuucagagau

SEQ ID NO: 1129681 - RNA, 19 nt, Homo sapiens
  misc_RNA (1)...(19): siRNA sense strand
gcagaagcacagauagaag

SEQ ID NO: 1129682 - RNA, 19 nt, Homo sapiens
  misc_RNA (1)...(19): siRNA sense strand
gacugcaguuggucuuuca

SEQ ID NO: 1129683 - RNA, 19 nt, Homo sapiens
  misc_RNA (1)...(19): siRNA sense strand
ucagguacagacaguguuu

SEQ ID NO: 1129684 - RNA, 19 nt, Homo sapiens
  misc_RNA (1)...(19): siRNA sense strand
gaauucagaggaggaagau

SEQ ID NO: 1129685 - RNA, 19 nt, Homo sapiens
  misc_RNA (1)...(19): siRNA sense strand
ugaaacugcagguggaaga

SEQ ID NO: 1129686 - RNA, 19 nt, Homo sapiens
  misc_RNA (1)...(19): siRNA sense strand
ugacugcaguuggucuuuc

SEQ ID NO: 1129687 - RNA, 19 nt, Homo sapiens
  misc_RNA (1)...(19): siRNA sense strand
cuggaaaccacuuggauga

SEQ ID NO: 1129688 - RNA, 19 nt, Homo sapiens
  misc_RNA (1)...(19): siRNA sense strand
ugaauucagaggaggaaga

SEQ ID NO: 1129689 - RNA, 19 nt, Homo sapiens
  misc_RNA (1)...(19): siRNA sense strand
cuaccugcgugaggauuga

SEQ ID NO: 1129690 - RNA, 19 nt, Homo sapiens
  misc_RNA (1)...(19): siRNA sense strand
gcaccagcucucccggaaa

SEQ ID NO: 1129691 - RNA, 19 nt, Homo sapiens
  misc_RNA (1)...(19): siRNA sense strand
ccagagcugagaugacuuc

SEQ ID NO: 1129692 - RNA, 19 nt, Homo sapiens
  misc_RNA (1)...(19): siRNA sense strand
auucagaggaggaagauga

SEQ ID NO: 1129693 - RNA, 19 nt, Homo sapiens
  misc_RNA (1)...(19): siRNA sense strand
ggagccagagcugagauga

SEQ ID NO: 1129694 - RNA, 19 nt, Homo sapiens
  misc_RNA (1)...(19): siRNA sense strand
gaaaccaagcuggcagaag

SEQ ID NO: 1129695 - RNA, 19 nt, Homo sapiens
  misc_RNA (1)...(19): siRNA sense strand
ccuguuguggcuaacuuua

SEQ ID NO: 1129696 - RNA, 19 nt, Homo sapiens
  misc_RNA (1)...(19): siRNA sense strand
ggaaagcagaaaccaagcu

SEQ ID NO: 1129697 - RNA, 19 nt, Homo sapiens
  misc_RNA (1)...(19): siRNA sense strand
guguuccuguuguggcuaa

SEQ ID NO: 1129698 - RNA, 19 nt, Homo sapiens
  misc_RNA (1)...(19): siRNA sense strand
agaagagcuccgucagaaa

SEQ ID NO: 1129699 - RNA, 19 nt, Homo sapiens
  misc_RNA (1)...(19): siRNA sense strand
gaaguguggcaggugauca

SEQ ID NO: 1129700 - RNA, 19 nt, Homo sapiens
  misc_RNA (1)...(19): siRNA sense strand
gcgcagcguaacuucauuc

SEQ ID NO: 1129701 - RNA, 19 nt, Homo sapiens
  misc_RNA (1)...(19): siRNA sense strand
uggcagaagcacagauaga

SEQ ID NO: 1129702 - RNA, 19 nt, Homo sapiens
  misc_RNA (1)...(19): siRNA sense strand
guguuuguguguuccuguu

SEQ ID NO: 1129703 - RNA, 19 nt, Homo sapiens
  misc_RNA (1)...(19): siRNA sense strand
caaaacaccaagaguacuu

SEQ ID NO: 1129704 - RNA, 19 nt, Homo sapiens
  misc_RNA (1)...(19): siRNA sense strand
gagcugagaugacuucaaa

SEQ ID NO: 1129705 - RNA, 19 nt, Homo sapiens
  misc_RNA (1)...(19): siRNA sense strand
cagcguaacuucauucuuc

SEQ ID NO: 1129706 - RNA, 19 nt, Homo sapiens
  misc_RNA (1)...(19): siRNA sense strand
uaacuucauucuucaggua

SEQ ID NO: 1129707 - RNA, 19 nt, Homo sapiens
  misc_RNA (1)...(19): siRNA sense strand
gcagaucaggccucuauaa

SEQ ID NO: 1129708 - RNA, 19 nt, Homo sapiens
  misc_RNA (1)...(19): siRNA sense strand
uagaagagcuccgucagaa

SEQ ID NO: 1129709 - RNA, 19 nt, Homo sapiens
  misc_RNA (1)...(19): siRNA sense strand
gauaagaccauggcacaaa

SEQ ID NO: 1129710 - RNA, 19 nt, Homo sapiens
  misc_RNA (1)...(19): siRNA sense strand
ccgacaauauacaaguuua

SEQ ID NO: 1129711 - RNA, 19 nt, Homo sapiens
  misc_RNA (1)...(19): siRNA sense strand
guacagacaguguuugugu

SEQ ID NO: 1129712 - RNA, 19 nt, Homo sapiens
  misc_RNA (1)...(19): siRNA sense strand
gcgcagaucaggccucuau

SEQ ID NO: 1129713 - RNA, 19 nt, Homo sapiens
  misc_RNA (1)...(19): siRNA sense strand
acgauuggcuuuggaguaa

SEQ ID NO: 1129714 - RNA, 19 nt, Homo sapiens
  misc_RNA (1)...(19): siRNA sense strand
gaagagcuccgucagaaaa

SEQ ID NO: 1129715 - RNA, 19 nt, Homo sapiens
  misc_RNA (1)...(19): siRNA sense strand
uaccuuaacuucucuuuac

SEQ ID NO: 1129716 - RNA, 19 nt, Homo sapiens
  misc_RNA (1)...(19): siRNA sense strand
ggaaaccacuuggaugacu

SEQ ID NO: 1129717 - RNA, 19 nt, Homo sapiens
  misc_RNA (1)...(19): siRNA sense strand
gaagcugcauaucaaacug

SEQ ID NO: 1129718 - RNA, 19 nt, Homo sapiens
  misc_RNA (1)...(19): siRNA sense strand
gcaguuggucuuucagaga

SEQ ID NO: 1129719 - RNA, 19 nt, Homo sapiens
  misc_RNA (1)...(19): siRNA sense strand
agacaguguuuguguguuc

SEQ ID NO: 1129720 - RNA, 19 nt, Homo sapiens
  misc_RNA (1)...(19): siRNA sense strand
guuuauaccuuaacuucuc

SEQ ID NO: 1129721 - RNA, 19 nt, Homo sapiens
  misc_RNA (1)...(19): siRNA sense strand
cagaagcacagauagaaga

SEQ ID NO: 1129722 - RNA, 19 nt, Homo sapiens
  misc_RNA (1)...(19): siRNA sense strand
gacgauuggcuuuggagua

SEQ ID NO: 1129723 - RNA, 19 nt, Homo sapiens
  misc_RNA (1)...(19): siRNA sense strand
gcuggcagaagcacagaua

SEQ ID NO: 1129724 - RNA, 19 nt, Homo sapiens
  misc_RNA (1)...(19): siRNA sense strand
ggcagaagcacagauagaa

SEQ ID NO: 1129725 - RNA, 19 nt, Homo sapiens
  misc_RNA (1)...(19): siRNA sense strand
ucucuuuaccgacaauaua

SEQ ID NO: 1129726 - RNA, 19 nt, Homo sapiens
  misc_RNA (1)...(19): siRNA sense strand
caccagcucucccggaaag

SEQ ID NO: 1129727 - RNA, 19 nt, Homo sapiens
  misc_RNA (1)...(19): siRNA sense strand
uaccgacaauauacaaguu

SEQ ID NO: 1129728 - RNA, 19 nt, Homo sapiens
  misc_RNA (1)...(19): siRNA sense strand
caguuggucuuucagagau

SEQ ID NO: 1129729 - RNA, 19 nt, Homo sapiens
  misc_RNA (1)...(19): siRNA sense strand
gcagaagcacagauagaag

SEQ ID NO: 1129730 - RNA, 19 nt, Homo sapiens
  misc_RNA (1)...(19): siRNA sense strand
gacugcaguuggucuuuca

SEQ ID NO: 1129731 - RNA, 19 nt, Homo sapiens
  misc_RNA (1)...(19): siRNA sense strand
ucagguacagacaguguuu

SEQ ID NO: 1129732 - RNA, 19 nt, Homo sapiens
  misc_RNA (1)...(19): siRNA sense strand
gaauucagaggaggaagau

SEQ ID NO: 1129733 - RNA, 19 nt, Homo sapiens
  misc_RNA (1)...(19): siRNA sense strand
ugaaacugcagguggaaga

SEQ ID NO: 1129734 - RNA, 19 nt, Homo sapiens
  misc_RNA (1)...(19): siRNA sense strand
ugacugcaguuggucuuuc

SEQ ID NO: 1129735 - RNA, 19 nt, Homo sapiens
  misc_RNA (1)...(19): siRNA sense strand
cuggaaaccacuuggauga

SEQ ID NO: 1129736 - RNA, 19 nt, Homo sapiens
  misc_RNA (1)...(19): siRNA sense strand
ugaauucagaggaggaaga

SEQ ID NO: 1129737 - RNA, 19 nt, Homo sapiens
  misc_RNA (1)...(19): siRNA sense strand
cuaccugcgugaggauuga

SEQ ID NO: 1129738 - RNA, 19 nt, Homo sapiens
  misc_RNA (1)...(19): siRNA sense strand
gcaccagcucucccggaaa

SEQ ID NO: 1129739 - RNA, 19 nt, Homo sapiens
  misc_RNA (1)...(19): siRNA sense strand
ccagagcugagaugacuuc

SEQ ID NO: 1129740 - RNA, 19 nt, Homo sapiens
  misc_RNA (1)...(19): siRNA sense strand
auucagaggaggaagauga

SEQ ID NO: 1129741 - RNA, 19 nt, Homo sapiens
  misc_RNA (1)...(19): siRNA sense strand
ggagccagagcugagauga

SEQ ID NO: 1129742 - RNA, 19 nt, Homo sapiens
  misc_RNA (1)...(19): siRNA sense strand
gaaaccaagcuggcagaag

SEQ ID NO: 1129743 - RNA, 19 nt, Homo sapiens
  misc_RNA (1)...(19): siRNA sense strand
ccuguuguggcuaacuuua

SEQ ID NO: 1129744 - RNA, 19 nt, Homo sapiens
  misc_RNA (1)...(19): siRNA sense strand
ggaaagcagaaaccaagcu

SEQ ID NO: 1129745 - RNA, 19 nt, Homo sapiens
  misc_RNA (1)...(19): siRNA sense strand
guguuccuguuguggcuaa

SEQ ID NO: 1129746 - RNA, 19 nt, Homo sapiens
  misc_RNA (1)...(19): siRNA sense strand
agaagagcuccgucagaaa

SEQ ID NO: 1129747 - RNA, 19 nt, Homo sapiens
  misc_RNA (1)...(19): siRNA sense strand
gaaguguggcaggugauca

SEQ ID NO: 1129748 - RNA, 19 nt, Homo sapiens
  misc_RNA (1)...(19): siRNA sense strand
gcgcagcguaacuucauuc

SEQ ID NO: 1129749 - RNA, 19 nt, Homo sapiens
  misc_RNA (1)...(19): siRNA sense strand
uggcagaagcacagauaga

SEQ ID NO: 1129750 - RNA, 19 nt, Homo sapiens
  misc_RNA (1)...(19): siRNA sense strand
guguuuguguguuccuguu

SEQ ID NO: 1129751 - RNA, 19 nt, Homo sapiens
  misc_RNA (1)...(19): siRNA sense strand
caaaacaccaagaguacuu

SEQ ID NO: 1129752 - RNA, 19 nt, Homo sapiens
  misc_RNA (1)...(19): siRNA sense strand
gagcugagaugacuucaaa

SEQ ID NO: 1129753 - RNA, 19 nt, Homo sapiens
  misc_RNA (1)...(19): siRNA sense strand
cagcguaacuucauucuuc

SEQ ID NO: 1129754 - RNA, 19 nt, Homo sapiens
  misc_RNA (1)...(19): siRNA sense strand
uaacuucauucuucaggua

SEQ ID NO: 1129755 - RNA, 19 nt, Homo sapiens
  misc_RNA (1)...(19): siRNA sense strand
gcagaucaggccucuauaa

SEQ ID NO: 1129756 - RNA, 19 nt, Homo sapiens
  misc_RNA (1)...(19): siRNA sense strand
uagaagagcuccgucagaa

SEQ ID NO: 1129757 - RNA, 19 nt, Homo sapiens
  misc_RNA (1)...(19): siRNA sense strand
gauaagaccauggcacaaa

SEQ ID NO: 1129758 - RNA, 19 nt, Homo sapiens
  misc_RNA (1)...(19): siRNA sense strand
ccgacaauauacaaguuua

SEQ ID NO: 1129759 - RNA, 19 nt, Homo sapiens
  misc_RNA (1)...(19): siRNA sense strand
guacagacaguguuugugu

SEQ ID NO: 1129760 - RNA, 19 nt, Homo sapiens
  misc_RNA (1)...(19): siRNA sense strand
gcgcagaucaggccucuau

SEQ ID NO: 1129761 - RNA, 19 nt, Homo sapiens
  misc_RNA (1)...(19): siRNA sense strand
acgauuggcuuuggaguaa

SEQ ID NO: 1129762 - RNA, 19 nt, Homo sapiens
  misc_RNA (1)...(19): siRNA sense strand
gaagagcuccgucagaaaa

SEQ ID NO: 1129763 - RNA, 19 nt, Homo sapiens
  misc_RNA (1)...(19): siRNA sense strand
uaccuuaacuucucuuuac

SEQ ID NO: 1129764 - RNA, 19 nt, Homo sapiens
  misc_RNA (1)...(19): siRNA sense strand
ggaaaccacuuggaugacu

SEQ ID NO: 1129765 - RNA, 19 nt, Homo sapiens
  misc_RNA (1)...(19): siRNA sense strand
gaagcugcauaucaaacug

SEQ ID NO: 1129766 - RNA, 19 nt, Homo sapiens
  misc_RNA (1)...(19): siRNA sense strand
gcaguuggucuuucagaga

SEQ ID NO: 1129767 - RNA, 19 nt, Homo sapiens
  misc_RNA (1)...(19): siRNA sense strand
agacaguguuuguguguuc

SEQ ID NO: 1129768 - RNA, 19 nt, Homo sapiens
  misc_RNA (1)...(19): siRNA sense strand
guuuauaccuuaacuucuc

SEQ ID NO: 1129769 - RNA, 19 nt, Homo sapiens
  misc_RNA (1)...(19): siRNA sense strand
cagaagcacagauagaaga

SEQ ID NO: 1129770 - RNA, 19 nt, Homo sapiens
  misc_RNA (1)...(19): siRNA sense strand
gacgauuggcuuuggagua

SEQ ID NO: 1129771 - RNA, 19 nt, Homo sapiens
  misc_RNA (1)...(19): siRNA sense strand
gcuggcagaagcacagaua

SEQ ID NO: 1129772 - RNA, 19 nt, Homo sapiens
  misc_RNA (1)...(19): siRNA sense strand
ggcagaagcacagauagaa

SEQ ID NO: 1129773 - RNA, 19 nt, Homo sapiens
  misc_RNA (1)...(19): siRNA sense strand
ucucuuuaccgacaauaua

SEQ ID NO: 1129774 - RNA, 19 nt, Homo sapiens
  misc_RNA (1)...(19): siRNA sense strand
caccagcucucccggaaag

SEQ ID NO: 1129775 - RNA, 19 nt, Homo sapiens
  misc_RNA (1)...(19): siRNA sense strand
uaccgacaauauacaaguu

SEQ ID NO: 1129776 - RNA, 19 nt, Homo sapiens
  misc_RNA (1)...(19): siRNA sense strand
caguuggucuuucagagau

SEQ ID NO: 1129777 - RNA, 19 nt, Homo sapiens
  misc_RNA (1)...(19): siRNA sense strand
gcagaagcacagauagaag

SEQ ID NO: 1129778 - RNA, 19 nt, Homo sapiens
  misc_RNA (1)...(19): siRNA sense strand
gacugcaguuggucuuuca

SEQ ID NO: 1129779 - RNA, 19 nt, Homo sapiens
  misc_RNA (1)...(19): siRNA sense strand
ucagguacagacaguguuu

SEQ ID NO: 1129780 - RNA, 19 nt, Homo sapiens
  misc_RNA (1)...(19): siRNA sense strand
gaauucagaggaggaagau

SEQ ID NO: 1129781 - RNA, 19 nt, Homo sapiens
  misc_RNA (1)...(19): siRNA sense strand
ugaaacugcagguggaaga

SEQ ID NO: 1129782 - RNA, 19 nt, Homo sapiens
  misc_RNA (1)...(19): siRNA sense strand
ugacugcaguuggucuuuc

SEQ ID NO: 1129783 - RNA, 19 nt, Homo sapiens
  misc_RNA (1)...(19): siRNA sense strand
cuggaaaccacuuggauga

SEQ ID NO: 1129784 - RNA, 19 nt, Homo sapiens
  misc_RNA (1)...(19): siRNA sense strand
ugaauucagaggaggaaga

SEQ ID NO: 1129785 - RNA, 19 nt, Homo sapiens
  misc_RNA (1)...(19): siRNA sense strand
cuaccugcgugaggauuga

SEQ ID NO: 1129786 - RNA, 19 nt, Homo sapiens
  misc_RNA (1)...(19): siRNA sense strand
gcaccagcucucccggaaa

SEQ ID NO: 1129787 - RNA, 19 nt, Homo sapiens
  misc_RNA (1)...(19): siRNA sense strand
ccagagcugagaugacuuc

SEQ ID NO: 1129788 - RNA, 19 nt, Homo sapiens
  misc_RNA (1)...(19): siRNA sense strand
auucagaggaggaagauga

SEQ ID NO: 1129789 - RNA, 19 nt, Homo sapiens
  misc_RNA (1)...(19): siRNA sense strand
ggagccagagcugagauga

SEQ ID NO: 1129790 - RNA, 19 nt, Homo sapiens
  misc_RNA (1)...(19): siRNA sense strand
gaaaccaagcuggcagaag

SEQ ID NO: 1129791 - RNA, 19 nt, Homo sapiens
  misc_RNA (1)...(19): siRNA sense strand
ccuguuguggcuaacuuua

SEQ ID NO: 1129792 - RNA, 19 nt, Homo sapiens
  misc_RNA (1)...(19): siRNA sense strand
ggaaagcagaaaccaagcu

SEQ ID NO: 1129793 - RNA, 19 nt, Homo sapiens
  misc_RNA (1)...(19): siRNA sense strand
guguuccuguuguggcuaa

SEQ ID NO: 1129794 - RNA, 19 nt, Homo sapiens
  misc_RNA (1)...(19): siRNA sense strand
agaagagcuccgucagaaa

SEQ ID NO: 1129795 - RNA, 19 nt, Homo sapiens
  misc_RNA (1)...(19): siRNA sense strand
gaaguguggcaggugauca

SEQ ID NO: 1129796 - RNA, 19 nt, Homo sapiens
  misc_RNA (1)...(19): siRNA sense strand
gcgcagcguaacuucauuc

SEQ ID NO: 1129797 - RNA, 19 nt, Homo sapiens
  misc_RNA (1)...(19): siRNA sense strand
uggcagaagcacagauaga

SEQ ID NO: 1129798 - RNA, 19 nt, Homo sapiens
  misc_RNA (1)...(19): siRNA sense strand
guguuuguguguuccuguu

SEQ ID NO: 1129799 - RNA, 19 nt, Homo sapiens
  misc_RNA (1)...(19): siRNA sense strand
caaaacaccaagaguacuu

SEQ ID NO: 1129800 - RNA, 19 nt, Homo sapiens
  misc_RNA (1)...(19): siRNA sense strand
gagcugagaugacuucaaa

SEQ ID NO: 1129801 - RNA, 19 nt, Homo sapiens
  misc_RNA (1)...(19): siRNA sense strand
cagcguaacuucauucuuc

SEQ ID NO: 1129802 - RNA, 19 nt, Homo sapiens
  misc_RNA (1)...(19): siRNA sense strand
uaacuucauucuucaggua

SEQ ID NO: 1129803 - RNA, 19 nt, Homo sapiens
  misc_RNA (1)...(19): siRNA sense strand
gcagaucaggccucuauaa

SEQ ID NO: 1129804 - RNA, 19 nt, Homo sapiens
  misc_RNA (1)...(19): siRNA sense strand
uagaagagcuccgucagaa

SEQ ID NO: 1129805 - RNA, 19 nt, Homo sapiens
  misc_RNA (1)...(19): siRNA sense strand
gauaagaccauggcacaaa

SEQ ID NO: 1129806 - RNA, 19 nt, Homo sapiens
  misc_RNA (1)...(19): siRNA sense strand
ccgacaauauacaaguuua

SEQ ID NO: 1129807 - RNA, 19 nt, Homo sapiens
  misc_RNA (1)...(19): siRNA sense strand
guacagacaguguuugugu

SEQ ID NO: 1129808 - RNA, 19 nt, Homo sapiens
  misc_RNA (1)...(19): siRNA sense strand
gcgcagaucaggccucuau

SEQ ID NO: 1129809 - RNA, 19 nt, Homo sapiens
  misc_RNA (1)...(19): siRNA sense strand
acgauuggcuuuggaguaa

SEQ ID NO: 1129810 - RNA, 19 nt, Homo sapiens
  misc_RNA (1)...(19): siRNA sense strand
gaagagcuccgucagaaaa

SEQ ID NO: 1129811 - RNA, 19 nt, Homo sapiens
  misc_RNA (1)...(19): siRNA sense strand
uaccuuaacuucucuuuac

SEQ ID NO: 1129812 - RNA, 19 nt, Homo sapiens
  misc_RNA (1)...(19): siRNA sense strand
ggaaaccacuuggaugacu

SEQ ID NO: 1129813 - RNA, 19 nt, Homo sapiens
  misc_RNA (1)...(19): siRNA sense strand
gaagcugcauaucaaacug

SEQ ID NO: 1129814 - RNA, 19 nt, Homo sapiens
  misc_RNA (1)...(19): siRNA sense strand
gcaguuggucuuucagaga

SEQ ID NO: 1129815 - RNA, 19 nt, Homo sapiens
  misc_RNA (1)...(19): siRNA sense strand
agacaguguuuguguguuc

SEQ ID NO: 1129816 - RNA, 19 nt, Homo sapiens
  misc_RNA (1)...(19): siRNA sense strand
guuuauaccuuaacuucuc

SEQ ID NO: 1129817 - RNA, 19 nt, Homo sapiens
  misc_RNA (1)...(19): siRNA sense strand
cagaagcacagauagaaga

SEQ ID NO: 1129818 - RNA, 19 nt, Homo sapiens
  misc_RNA (1)...(19): siRNA sense strand
gacgauuggcuuuggagua

SEQ ID NO: 1129819 - RNA, 19 nt, Homo sapiens
  misc_RNA (1)...(19): siRNA sense strand
gcuggcagaagcacagaua

SEQ ID NO: 1129820 - RNA, 19 nt, Homo sapiens
  misc_RNA (1)...(19): siRNA sense strand
ggcagaagcacagauagaa

SEQ ID NO: 1129821 - RNA, 19 nt, Homo sapiens
  misc_RNA (1)...(19): siRNA sense strand
ucucuuuaccgacaauaua

SEQ ID NO: 1129822 - RNA, 19 nt, Homo sapiens
  misc_RNA (1)...(19): siRNA sense strand
caccagcucucccggaaag

SEQ ID NO: 1129823 - RNA, 19 nt, Homo sapiens
  misc_RNA (1)...(19): siRNA sense strand
uaccgacaauauacaaguu

SEQ ID NO: 1129824 - RNA, 19 nt, Homo sapiens
  misc_RNA (1)...(19): siRNA sense strand
caguuggucuuucagagau

SEQ ID NO: 1129825 - RNA, 19 nt, Homo sapiens
  misc_RNA (1)...(19): siRNA sense strand
gcagaagcacagauagaag

SEQ ID NO: 1129826 - RNA, 19 nt, Homo sapiens
  misc_RNA (1)...(19): siRNA sense strand
gacugcaguuggucuuuca

SEQ ID NO: 1129827 - RNA, 19 nt, Homo sapiens
  misc_RNA (1)...(19): siRNA sense strand
ucagguacagacaguguuu

SEQ ID NO: 1129828 - RNA, 19 nt, Homo sapiens
  misc_RNA (1)...(19): siRNA sense strand
gaauucagaggaggaagau

SEQ ID NO: 1129829 - RNA, 19 nt, Homo sapiens
  misc_RNA (1)...(19): siRNA sense strand
ugaaacugcagguggaaga

SEQ ID NO: 1129830 - RNA, 19 nt, Homo sapiens
  misc_RNA (1)...(19): siRNA sense strand
ugacugcaguuggucuuuc

SEQ ID NO: 1129831 - RNA, 19 nt, Homo sapiens
  misc_RNA (1)...(19): siRNA sense strand
cuggaaaccacuuggauga

SEQ ID NO: 1129832 - RNA, 19 nt, Homo sapiens
  misc_RNA (1)...(19): siRNA sense strand
ugaauucagaggaggaaga

SEQ ID NO: 1129833 - RNA, 19 nt, Homo sapiens
  misc_RNA (1)...(19): siRNA sense strand
cuaccugcgugaggauuga

SEQ ID NO: 1129834 - RNA, 19 nt, Homo sapiens
  misc_RNA (1)...(19): siRNA sense strand
gcaccagcucucccggaaa

SEQ ID NO: 1129835 - RNA, 19 nt, Homo sapiens
  misc_RNA (1)...(19): siRNA sense strand
ccagagcugagaugacuuc

SEQ ID NO: 1129836 - RNA, 19 nt, Homo sapiens
  misc_RNA (1)...(19): siRNA sense strand
auucagaggaggaagauga

SEQ ID NO: 1129837 - RNA, 19 nt, Homo sapiens
  misc_RNA (1)...(19): siRNA sense strand
ggagccagagcugagauga

SEQ ID NO: 1129838 - RNA, 19 nt, Homo sapiens
  misc_RNA (1)...(19): siRNA sense strand
gaaaccaagcuggcagaag

SEQ ID NO: 1129839 - RNA, 19 nt, Homo sapiens
  misc_RNA (1)...(19): siRNA sense strand
ccuguuguggcuaacuuua

SEQ ID NO: 1129840 - RNA, 19 nt, Homo sapiens
  misc_RNA (1)...(19): siRNA sense strand
ggaaagcagaaaccaagcu

SEQ ID NO: 1129841 - RNA, 19 nt, Homo sapiens
  misc_RNA (1)...(19): siRNA sense strand
guguuccuguuguggcuaa

SEQ ID NO: 1129842 - RNA, 19 nt, Homo sapiens
  misc_RNA (1)...(19): siRNA sense strand
agaagagcuccgucagaaa

SEQ ID NO: 1129843 - RNA, 19 nt, Homo sapiens
  misc_RNA (1)...(19): siRNA sense strand
gaaguguggcaggugauca

SEQ ID NO: 1129844 - RNA, 19 nt, Homo sapiens
  misc_RNA (1)...(19): siRNA sense strand
gcgcagcguaacuucauuc

SEQ ID NO: 1129845 - RNA, 19 nt, Homo sapiens
  misc_RNA (1)...(19): siRNA sense strand
uggcagaagcacagauaga

SEQ ID NO: 1129846 - RNA, 19 nt, Homo sapiens
  misc_RNA (1)...(19): siRNA sense strand
guguuuguguguuccuguu

SEQ ID NO: 1129847 - RNA, 19 nt, Homo sapiens
  misc_RNA (1)...(19): siRNA sense strand
caaaacaccaagaguacuu

SEQ ID NO: 1129848 - RNA, 19 nt, Homo sapiens
  misc_RNA (1)...(19): siRNA sense strand
gagagaagcccuacaaaug

SEQ ID NO: 1129849 - RNA, 19 nt, Homo sapiens
  misc_RNA (1)...(19): siRNA sense strand
gaagaggcacgaagugaua

SEQ ID NO: 1129850 - RNA, 19 nt, Homo sapiens
  misc_RNA (1)...(19): siRNA sense strand
gcaguggccuguucuauag

SEQ ID NO: 1129851 - RNA, 19 nt, Homo sapiens
  misc_RNA (1)...(19): siRNA sense strand
gagagaaaccuuaccauug

SEQ ID NO: 1129852 - RNA, 19 nt, Homo sapiens
  misc_RNA (1)...(19): siRNA sense strand
gagaacaaccugccacuga

SEQ ID NO: 1129853 - RNA, 19 nt, Homo sapiens
  misc_RNA (1)...(19): siRNA sense strand
agagaaaccuuaccauugu

SEQ ID NO: 1129854 - RNA, 19 nt, Homo sapiens
  misc_RNA (1)...(19): siRNA sense strand
ggagagaaaccuuaccauu

SEQ ID NO: 1129855 - RNA, 19 nt, Homo sapiens
  misc_RNA (1)...(19): siRNA sense strand
guacacaucucggcucaau

SEQ ID NO: 1129856 - RNA, 19 nt, Homo sapiens
  misc_RNA (1)...(19): siRNA sense strand
ccacaccgccagccucuua

SEQ ID NO: 1129857 - RNA, 19 nt, Homo sapiens
  misc_RNA (1)...(19): siRNA sense strand
ugacaaacccuacaagugu

SEQ ID NO: 1129858 - RNA, 19 nt, Homo sapiens
  misc_RNA (1)...(19): siRNA sense strand
ggagagaagcccuacaaau

SEQ ID NO: 1129859 - RNA, 19 nt, Homo sapiens
  misc_RNA (1)...(19): siRNA sense strand
acacaucucggcucaauuu

SEQ ID NO: 1129860 - RNA, 19 nt, Homo sapiens
  misc_RNA (1)...(19): siRNA sense strand
caucaagccuccucgugaa

SEQ ID NO: 1129861 - RNA, 19 nt, Homo sapiens
  misc_RNA (1)...(19): siRNA sense strand
ugacaaggccagcaaagaa

SEQ ID NO: 1129862 - RNA, 19 nt, Homo sapiens
  misc_RNA (1)...(19): siRNA sense strand
gagaaacccuaucguugca

SEQ ID NO: 1129863 - RNA, 19 nt, Homo sapiens
  misc_RNA (1)...(19): siRNA sense strand
uuacagaccaguugaaaug

SEQ ID NO: 1129864 - RNA, 19 nt, Homo sapiens
  misc_RNA (1)...(19): siRNA sense strand
gucgagacaucuugacuga

SEQ ID NO: 1129865 - RNA, 19 nt, Homo sapiens
  misc_RNA (1)...(19): siRNA sense strand
gauguucuucucaaccuua

SEQ ID NO: 1129866 - RNA, 19 nt, Homo sapiens
  misc_RNA (1)...(19): siRNA sense strand
cagcaaagaagaagagaga

SEQ ID NO: 1129867 - RNA, 19 nt, Homo sapiens
  misc_RNA (1)...(19): siRNA sense strand
ccagugauguucuucucaa

SEQ ID NO: 1129868 - RNA, 19 nt, Homo sapiens
  misc_RNA (1)...(19): siRNA sense strand
gaagaaauacaaguucauc

SEQ ID NO: 1129869 - RNA, 19 nt, Homo sapiens
  misc_RNA (1)...(19): siRNA sense strand
gcaacuggaagaaauacaa

SEQ ID NO: 1129870 - RNA, 19 nt, Homo sapiens
  misc_RNA (1)...(19): siRNA sense strand
ugacagcuguauccaguuc

SEQ ID NO: 1129871 - RNA, 19 nt, Homo sapiens
  misc_RNA (1)...(19): siRNA sense strand
gagaaaccuuaccauugug

SEQ ID NO: 1129872 - RNA, 19 nt, Homo sapiens
  misc_RNA (1)...(19): siRNA sense strand
ggugagaaacccuaucguu

SEQ ID NO: 1129873 - RNA, 19 nt, Homo sapiens
  misc_RNA (1)...(19): siRNA sense strand
acacaggagagaaaccuua

SEQ ID NO: 1129874 - RNA, 19 nt, Homo sapiens
  misc_RNA (1)...(19): siRNA sense strand
gcagauggagcauguugug

SEQ ID NO: 1129875 - RNA, 19 nt, Homo sapiens
  misc_RNA (1)...(19): siRNA sense strand
caaggaaacaaucccagaa

SEQ ID NO: 1129876 - RNA, 19 nt, Homo sapiens
  misc_RNA (1)...(19): siRNA sense strand
gugaagaguuccucaacag

SEQ ID NO: 1129877 - RNA, 19 nt, Homo sapiens
  misc_RNA (1)...(19): siRNA sense strand
cuauguaccugcagaugga

SEQ ID NO: 1129878 - RNA, 19 nt, Homo sapiens
  misc_RNA (1)...(19): siRNA sense strand
gaagcccuaucccugugaa

SEQ ID NO: 1129879 - RNA, 19 nt, Homo sapiens
  misc_RNA (1)...(19): siRNA sense strand
ucuauagcaucuuuacaga

SEQ ID NO: 1129880 - RNA, 19 nt, Homo sapiens
  misc_RNA (1)...(19): siRNA sense strand
ggaaacaaucccagaagag

SEQ ID NO: 1129881 - RNA, 19 nt, Homo sapiens
  misc_RNA (1)...(19): siRNA sense strand
uggaagaaauacaaguuca

SEQ ID NO: 1129882 - RNA, 19 nt, Homo sapiens
  misc_RNA (1)...(19): siRNA sense strand
ccuguucuauagcaucuuu

SEQ ID NO: 1129883 - RNA, 19 nt, Homo sapiens
  misc_RNA (1)...(19): siRNA sense strand
aaaugcaaccuuaguguga

SEQ ID NO: 1129884 - RNA, 19 nt, Homo sapiens
  misc_RNA (1)...(19): siRNA sense strand
gucgugaggugguggagaa

SEQ ID NO: 1129885 - RNA, 19 nt, Homo sapiens
  misc_RNA (1)...(19): siRNA sense strand
aggaaacaaucccagaaga

SEQ ID NO: 1129886 - RNA, 19 nt, Homo sapiens
  misc_RNA (1)...(19): siRNA sense strand
gauguugucauuguuguga

SEQ ID NO: 1129887 - RNA, 19 nt, Homo sapiens
  misc_RNA (1)...(19): siRNA sense strand
gcagacccacagugacaaa

SEQ ID NO: 1129888 - RNA, 19 nt, Homo sapiens
  misc_RNA (1)...(19): siRNA sense strand
ccacucaccacucuacaug

SEQ ID NO: 1129889 - RNA, 19 nt, Homo sapiens
  misc_RNA (1)...(19): siRNA sense strand
gugaggugguggagaacaa

SEQ ID NO: 1129890 - RNA, 19 nt, Homo sapiens
  misc_RNA (1)...(19): siRNA sense strand
cagaagaggcacgaaguga

SEQ ID NO: 1129891 - RNA, 19 nt, Homo sapiens
  misc_RNA (1)...(19): siRNA sense strand
cugcggagccagauuugua

SEQ ID NO: 1129892 - RNA, 19 nt, Homo sapiens
  misc_RNA (1)...(19): siRNA sense strand
ggaagaaauacaaguucau

SEQ ID NO: 1129893 - RNA, 19 nt, Homo sapiens
  misc_RNA (1)...(19): siRNA sense strand
gaugagauugcccugcauu

SEQ ID NO: 1129894 - RNA, 19 nt, Homo sapiens
  misc_RNA (1)...(19): siRNA sense strand
ccagccggcucaauaacau

SEQ ID NO: 1129895 - RNA, 19 nt, Homo sapiens
  misc_RNA (1)...(19): siRNA sense strand
agaaguguaaccugcauuu

SEQ ID NO: 1129896 - RNA, 19 nt, Homo sapiens
  misc_RNA (1)...(19): siRNA sense strand
gugacaaacccuacaagug

SEQ ID NO: 1129897 - RNA, 19 nt, Homo sapiens
  misc_RNA (1)...(19): siRNA sense strand
cagaccaguugaaaugcaa

SEQ ID NO: 1129898 - RNA, 19 nt, Homo sapiens
  misc_RNA (1)...(19): siRNA sense strand
gaagagccaccugcgaauc

SEQ ID NO: 1129899 - RNA, 19 nt, Homo sapiens
  misc_RNA (1)...(19): siRNA sense strand
ugcaguggccuguucuaua

SEQ ID NO: 1129900 - RNA, 19 nt, Homo sapiens
  misc_RNA (1)...(19): siRNA sense strand
gccugcaacuggaagaaau

SEQ ID NO: 1129901 - RNA, 19 nt, Homo sapiens
  misc_RNA (1)...(19): siRNA sense strand
ugaaaugcaaccuuagugu

SEQ ID NO: 1129902 - RNA, 19 nt, Homo sapiens
  misc_RNA (1)...(19): siRNA sense strand
gagauugcccugcauuucg

SEQ ID NO: 1129903 - RNA, 19 nt, Homo sapiens
  misc_RNA (1)...(19): siRNA sense strand
ggacuccaccaucccacaa

SEQ ID NO: 1129904 - RNA, 19 nt, Homo sapiens
  misc_RNA (1)...(19): siRNA sense strand
caaccuuagugugaucaau

SEQ ID NO: 1129905 - RNA, 19 nt, Homo sapiens
  misc_RNA (1)...(19): siRNA sense strand
uauccacacuggugagaag

SEQ ID NO: 1129906 - RNA, 19 nt, Homo sapiens
  misc_RNA (1)...(19): siRNA sense strand
cgugaagaguuccucaaca

SEQ ID NO: 1129907 - RNA, 19 nt, Homo sapiens
  misc_RNA (1)...(19): siRNA sense strand
uuagugugaucaaucuaga

SEQ ID NO: 1129908 - RNA, 19 nt, Homo sapiens
  misc_RNA (1)...(19): siRNA sense strand
gacaaggccagcaaagaag

SEQ ID NO: 1129909 - RNA, 19 nt, Homo sapiens
  misc_RNA (1)...(19): siRNA sense strand
gagugugacugccgcuucu

SEQ ID NO: 1129910 - RNA, 19 nt, Homo sapiens
  misc_RNA (1)...(19): siRNA sense strand
gaaguguaaccugcauuuc

SEQ ID NO: 1129911 - RNA, 19 nt, Homo sapiens
  misc_RNA (1)...(19): siRNA sense strand
aaagccagcugcgacuuca

SEQ ID NO: 1129912 - RNA, 19 nt, Homo sapiens
  misc_RNA (1)...(19): siRNA sense strand
ugugagccgugagcaguuu

SEQ ID NO: 1129913 - RNA, 19 nt, Homo sapiens
  misc_RNA (1)...(19): siRNA sense strand
gaaaacccacacucgaauu

SEQ ID NO: 1129914 - RNA, 19 nt, Homo sapiens
  misc_RNA (1)...(19): siRNA sense strand
caucuuuacagaccaguug

SEQ ID NO: 1129915 - RNA, 19 nt, Homo sapiens
  misc_RNA (1)...(19): siRNA sense strand
ccaaagccugcaacuggaa

SEQ ID NO: 1129916 - RNA, 19 nt, Homo sapiens
  misc_RNA (1)...(19): siRNA sense strand
gacugauguugucauuguu

SEQ ID NO: 1129917 - RNA, 19 nt, Homo sapiens
  misc_RNA (1)...(19): siRNA sense strand
caaccucgccagccacaag

SEQ ID NO: 1129918 - RNA, 19 nt, Homo sapiens
  misc_RNA (1)...(19): siRNA sense strand
ggcaacaucauggcuguga

SEQ ID NO: 1129919 - RNA, 19 nt, Homo sapiens
  misc_RNA (1)...(19): siRNA sense strand
ugagaaguguaaccugcau

SEQ ID NO: 1129920 - RNA, 19 nt, Homo sapiens
  misc_RNA (1)...(19): siRNA sense strand
agagaagcccuacaaaugc

SEQ ID NO: 1129921 - RNA, 19 nt, Homo sapiens
  misc_RNA (1)...(19): siRNA sense strand
cauggagccugagaaccuu

SEQ ID NO: 1129922 - RNA, 19 nt, Homo sapiens
  misc_RNA (1)...(19): siRNA sense strand
ugccggaaguuuauuaagg

SEQ ID NO: 1129923 - RNA, 19 nt, Homo sapiens
  misc_RNA (1)...(19): siRNA sense strand
caaggccagcaaagaagaa

SEQ ID NO: 1129924 - RNA, 19 nt, Homo sapiens
  misc_RNA (1)...(19): siRNA sense strand
cgggcacucccaugugaua

SEQ ID NO: 1129925 - RNA, 19 nt, Homo sapiens
  misc_RNA (1)...(19): siRNA sense strand
caacuggaagaaauacaag

SEQ ID NO: 1129926 - RNA, 19 nt, Homo sapiens
  misc_RNA (1)...(19): siRNA sense strand
agauugcccugcauuucga

SEQ ID NO: 1129927 - RNA, 19 nt, Homo sapiens
  misc_RNA (1)...(19): siRNA sense strand
ugagauugcccugcauuuc

SEQ ID NO: 1129928 - RNA, 19 nt, Homo sapiens
  misc_RNA (1)...(19): siRNA sense strand
ccagaagaggcacgaagug

SEQ ID NO: 1129929 - RNA, 19 nt, Homo sapiens
  misc_RNA (1)...(19): siRNA sense strand
gugacaaggccagcaaaga

SEQ ID NO: 1129930 - RNA, 19 nt, Homo sapiens
  misc_RNA (1)...(19): siRNA sense strand
gagaaguguaaccugcauu

SEQ ID NO: 1129931 - RNA, 19 nt, Homo sapiens
  misc_RNA (1)...(19): siRNA sense strand
acaaguucaucgugcucaa

SEQ ID NO: 1129932 - RNA, 19 nt, Homo sapiens
  misc_RNA (1)...(19): siRNA sense strand
acagaccaguugaaaugca

SEQ ID NO: 1129933 - RNA, 19 nt, Homo sapiens
  misc_RNA (1)...(19): siRNA sense strand
guucuucucaaccuuaauc

SEQ ID NO: 1129934 - RNA, 19 nt, Homo sapiens
  misc_RNA (1)...(19): siRNA sense strand
ccaugccagugauguucuu

SEQ ID NO: 1129935 - RNA, 19 nt, Homo sapiens
  misc_RNA (1)...(19): siRNA sense strand
ccacguucccugaggagau

SEQ ID NO: 1129936 - RNA, 19 nt, Homo sapiens
  misc_RNA (1)...(19): siRNA sense strand
ccugcaacuggaagaaaua

SEQ ID NO: 1129937 - RNA, 19 nt, Homo sapiens
  misc_RNA (1)...(19): siRNA sense strand
ggccuguucuauagcaucu

SEQ ID NO: 1129938 - RNA, 19 nt, Homo sapiens
  misc_RNA (1)...(19): siRNA sense strand
gagagaagcccuacaaaug

SEQ ID NO: 1129939 - RNA, 19 nt, Homo sapiens
  misc_RNA (1)...(19): siRNA sense strand
gaagaggcacgaagugaua

SEQ ID NO: 1129940 - RNA, 19 nt, Homo sapiens
  misc_RNA (1)...(19): siRNA sense strand
gcaguggccuguucuauag

SEQ ID NO: 1129941 - RNA, 19 nt, Homo sapiens
  misc_RNA (1)...(19): siRNA sense strand
gagagaaaccuuaccauug

SEQ ID NO: 1129942 - RNA, 19 nt, Homo sapiens
  misc_RNA (1)...(19): siRNA sense strand
gagaacaaccugccacuga

SEQ ID NO: 1129943 - RNA, 19 nt, Homo sapiens
  misc_RNA (1)...(19): siRNA sense strand
agagaaaccuuaccauugu

SEQ ID NO: 1129944 - RNA, 19 nt, Homo sapiens
  misc_RNA (1)...(19): siRNA sense strand
ggagagaaaccuuaccauu

SEQ ID NO: 1129945 - RNA, 19 nt, Homo sapiens
  misc_RNA (1)...(19): siRNA sense strand
guacacaucucggcucaau

SEQ ID NO: 1129946 - RNA, 19 nt, Homo sapiens
  misc_RNA (1)...(19): siRNA sense strand
ccacaccgccagccucuua

SEQ ID NO: 1129947 - RNA, 19 nt, Homo sapiens
  misc_RNA (1)...(19): siRNA sense strand
ugacaaacccuacaagugu

SEQ ID NO: 1129948 - RNA, 19 nt, Homo sapiens
  misc_RNA (1)...(19): siRNA sense strand
ggagagaagcccuacaaau

SEQ ID NO: 1129949 - RNA, 19 nt, Homo sapiens
  misc_RNA (1)...(19): siRNA sense strand
acacaucucggcucaauuu

SEQ ID NO: 1129950 - RNA, 19 nt, Homo sapiens
  misc_RNA (1)...(19): siRNA sense strand
caucaagccuccucgugaa

SEQ ID NO: 1129951 - RNA, 19 nt, Homo sapiens
  misc_RNA (1)...(19): siRNA sense strand
ugacaaggccagcaaagaa

SEQ ID NO: 1129952 - RNA, 19 nt, Homo sapiens
  misc_RNA (1)...(19): siRNA sense strand
gagaaacccuaucguugca

SEQ ID NO: 1129953 - RNA, 19 nt, Homo sapiens
  misc_RNA (1)...(19): siRNA sense strand
uuacagaccaguugaaaug

SEQ ID NO: 1129954 - RNA, 19 nt, Homo sapiens
  misc_RNA (1)...(19): siRNA sense strand
gucgagacaucuugacuga

SEQ ID NO: 1129955 - RNA, 19 nt, Homo sapiens
  misc_RNA (1)...(19): siRNA sense strand
gauguucuucucaaccuua

SEQ ID NO: 1129956 - RNA, 19 nt, Homo sapiens
  misc_RNA (1)...(19): siRNA sense strand
cagcaaagaagaagagaga

SEQ ID NO: 1129957 - RNA, 19 nt, Homo sapiens
  misc_RNA (1)...(19): siRNA sense strand
ccagugauguucuucucaa

SEQ ID NO: 1129958 - RNA, 19 nt, Homo sapiens
  misc_RNA (1)...(19): siRNA sense strand
gaagaaauacaaguucauc

SEQ ID NO: 1129959 - RNA, 19 nt, Homo sapiens
  misc_RNA (1)...(19): siRNA sense strand
gcaacuggaagaaauacaa

SEQ ID NO: 1129960 - RNA, 19 nt, Homo sapiens
  misc_RNA (1)...(19): siRNA sense strand
ugacagcuguauccaguuc

SEQ ID NO: 1129961 - RNA, 19 nt, Homo sapiens
  misc_RNA (1)...(19): siRNA sense strand
gagaaaccuuaccauugug

SEQ ID NO: 1129962 - RNA, 19 nt, Homo sapiens
  misc_RNA (1)...(19): siRNA sense strand
ggugagaaacccuaucguu

SEQ ID NO: 1129963 - RNA, 19 nt, Homo sapiens
  misc_RNA (1)...(19): siRNA sense strand
acacaggagagaaaccuua

SEQ ID NO: 1129964 - RNA, 19 nt, Homo sapiens
  misc_RNA (1)...(19): siRNA sense strand
gcagauggagcauguugug

SEQ ID NO: 1129965 - RNA, 19 nt, Homo sapiens
  misc_RNA (1)...(19): siRNA sense strand
caaggaaacaaucccagaa

SEQ ID NO: 1129966 - RNA, 19 nt, Homo sapiens
  misc_RNA (1)...(19): siRNA sense strand
gugaagaguuccucaacag

SEQ ID NO: 1129967 - RNA, 19 nt, Homo sapiens
  misc_RNA (1)...(19): siRNA sense strand
cuauguaccugcagaugga

SEQ ID NO: 1129968 - RNA, 19 nt, Homo sapiens
  misc_RNA (1)...(19): siRNA sense strand
gaagcccuaucccugugaa

SEQ ID NO: 1129969 - RNA, 19 nt, Homo sapiens
  misc_RNA (1)...(19): siRNA sense strand
ucuauagcaucuuuacaga

SEQ ID NO: 1129970 - RNA, 19 nt, Homo sapiens
  misc_RNA (1)...(19): siRNA sense strand
ggaaacaaucccagaagag

SEQ ID NO: 1129971 - RNA, 19 nt, Homo sapiens
  misc_RNA (1)...(19): siRNA sense strand
uggaagaaauacaaguuca

SEQ ID NO: 1129972 - RNA, 19 nt, Homo sapiens
  misc_RNA (1)...(19): siRNA sense strand
ccuguucuauagcaucuuu

SEQ ID NO: 1129973 - RNA, 19 nt, Homo sapiens
  misc_RNA (1)...(19): siRNA sense strand
aaaugcaaccuuaguguga

SEQ ID NO: 1129974 - RNA, 19 nt, Homo sapiens
  misc_RNA (1)...(19): siRNA sense strand
gucgugaggugguggagaa

SEQ ID NO: 1129975 - RNA, 19 nt, Homo sapiens
  misc_RNA (1)...(19): siRNA sense strand
aggaaacaaucccagaaga

SEQ ID NO: 1129976 - RNA, 19 nt, Homo sapiens
  misc_RNA (1)...(19): siRNA sense strand
gauguugucauuguuguga

SEQ ID NO: 1129977 - RNA, 19 nt, Homo sapiens
  misc_RNA (1)...(19): siRNA sense strand
gcagacccacagugacaaa

SEQ ID NO: 1129978 - RNA, 19 nt, Homo sapiens
  misc_RNA (1)...(19): siRNA sense strand
ccacucaccacucuacaug

SEQ ID NO: 1129979 - RNA, 19 nt, Homo sapiens
  misc_RNA (1)...(19): siRNA sense strand
gugaggugguggagaacaa

SEQ ID NO: 1129980 - RNA, 19 nt, Homo sapiens
  misc_RNA (1)...(19): siRNA sense strand
cagaagaggcacgaaguga

SEQ ID NO: 1129981 - RNA, 19 nt, Homo sapiens
  misc_RNA (1)...(19): siRNA sense strand
cugcggagccagauuugua

SEQ ID NO: 1129982 - RNA, 19 nt, Homo sapiens
  misc_RNA (1)...(19): siRNA sense strand
ggaagaaauacaaguucau

SEQ ID NO: 1129983 - RNA, 19 nt, Homo sapiens
  misc_RNA (1)...(19): siRNA sense strand
gaugagauugcccugcauu

SEQ ID NO: 1129984 - RNA, 19 nt, Homo sapiens
  misc_RNA (1)...(19): siRNA sense strand
ccagccggcucaauaacau

SEQ ID NO: 1129985 - RNA, 19 nt, Homo sapiens
  misc_RNA (1)...(19): siRNA sense strand
agaaguguaaccugcauuu

SEQ ID NO: 1129986 - RNA, 19 nt, Homo sapiens
  misc_RNA (1)...(19): siRNA sense strand
gugacaaacccuacaagug

SEQ ID NO: 1129987 - RNA, 19 nt, Homo sapiens
  misc_RNA (1)...(19): siRNA sense strand
cagaccaguugaaaugcaa

SEQ ID NO: 1129988 - RNA, 19 nt, Homo sapiens
  misc_RNA (1)...(19): siRNA sense strand
gaagagccaccugcgaauc

SEQ ID NO: 1129989 - RNA, 19 nt, Homo sapiens
  misc_RNA (1)...(19): siRNA sense strand
ugcaguggccuguucuaua

SEQ ID NO: 1129990 - RNA, 19 nt, Homo sapiens
  misc_RNA (1)...(19): siRNA sense strand
gccugcaacuggaagaaau

SEQ ID NO: 1129991 - RNA, 19 nt, Homo sapiens
  misc_RNA (1)...(19): siRNA sense strand
ugaaaugcaaccuuagugu

SEQ ID NO: 1129992 - RNA, 19 nt, Homo sapiens
  misc_RNA (1)...(19): siRNA sense strand
gagauugcccugcauuucg

SEQ ID NO: 1129993 - RNA, 19 nt, Homo sapiens
  misc_RNA (1)...(19): siRNA sense strand
ggacuccaccaucccacaa

SEQ ID NO: 1129994 - RNA, 19 nt, Homo sapiens
  misc_RNA (1)...(19): siRNA sense strand
caaccuuagugugaucaau

SEQ ID NO: 1129995 - RNA, 19 nt, Homo sapiens
  misc_RNA (1)...(19): siRNA sense strand
uauccacacuggugagaag

SEQ ID NO: 1129996 - RNA, 19 nt, Homo sapiens
  misc_RNA (1)...(19): siRNA sense strand
cgugaagaguuccucaaca

SEQ ID NO: 1129997 - RNA, 19 nt, Homo sapiens
  misc_RNA (1)...(19): siRNA sense strand
uuagugugaucaaucuaga

SEQ ID NO: 1129998 - RNA, 19 nt, Homo sapiens
  misc_RNA (1)...(19): siRNA sense strand
gacaaggccagcaaagaag

SEQ ID NO: 1129999 - RNA, 19 nt, Homo sapiens
  misc_RNA (1)...(19): siRNA sense strand
gagugugacugccgcuucu

SEQ ID NO: 1130000 - RNA, 19 nt, Homo sapiens
  misc_RNA (1)...(19): siRNA sense strand
gaaguguaaccugcauuuc

SEQ ID NO: 1130001 - RNA, 19 nt, Homo sapiens
  misc_RNA (1)...(19): siRNA sense strand
aaagccagcugcgacuuca

SEQ ID NO: 1130002 - RNA, 19 nt, Homo sapiens
  misc_RNA (1)...(19): siRNA sense strand
ugugagccgugagcaguuu

SEQ ID NO: 1130003 - RNA, 19 nt, Homo sapiens
  misc_RNA (1)...(19): siRNA sense strand
gaaaacccacacucgaauu

SEQ ID NO: 1130004 - RNA, 19 nt, Homo sapiens
  misc_RNA (1)...(19): siRNA sense strand
caucuuuacagaccaguug

SEQ ID NO: 1130005 - RNA, 19 nt, Homo sapiens
  misc_RNA (1)...(19): siRNA sense strand
ccaaagccugcaacuggaa

SEQ ID NO: 1130006 - RNA, 19 nt, Homo sapiens
  misc_RNA (1)...(19): siRNA sense strand
gacugauguugucauuguu

SEQ ID NO: 1130007 - RNA, 19 nt, Homo sapiens
  misc_RNA (1)...(19): siRNA sense strand
caaccucgccagccacaag

SEQ ID NO: 1130008 - RNA, 19 nt, Homo sapiens
  misc_RNA (1)...(19): siRNA sense strand
ggcaacaucauggcuguga

SEQ ID NO: 1130009 - RNA, 19 nt, Homo sapiens
  misc_RNA (1)...(19): siRNA sense strand
ugagaaguguaaccugcau

SEQ ID NO: 1130010 - RNA, 19 nt, Homo sapiens
  misc_RNA (1)...(19): siRNA sense strand
agagaagcccuacaaaugc

SEQ ID NO: 1130011 - RNA, 19 nt, Homo sapiens
  misc_RNA (1)...(19): siRNA sense strand
cauggagccugagaaccuu

SEQ ID NO: 1130012 - RNA, 19 nt, Homo sapiens
  misc_RNA (1)...(19): siRNA sense strand
ugccggaaguuuauuaagg

SEQ ID NO: 1130013 - RNA, 19 nt, Homo sapiens
  misc_RNA (1)...(19): siRNA sense strand
caaggccagcaaagaagaa

SEQ ID NO: 1130014 - RNA, 19 nt, Homo sapiens
  misc_RNA (1)...(19): siRNA sense strand
cgggcacucccaugugaua

SEQ ID NO: 1130015 - RNA, 19 nt, Homo sapiens
  misc_RNA (1)...(19): siRNA sense strand
caacuggaagaaauacaag

SEQ ID NO: 1130016 - RNA, 19 nt, Homo sapiens
  misc_RNA (1)...(19): siRNA sense strand
agauugcccugcauuucga

SEQ ID NO: 1130017 - RNA, 19 nt, Homo sapiens
  misc_RNA (1)...(19): siRNA sense strand
ugagauugcccugcauuuc

SEQ ID NO: 1130018 - RNA, 19 nt, Homo sapiens
  misc_RNA (1)...(19): siRNA sense strand
ccagaagaggcacgaagug

SEQ ID NO: 1130019 - RNA, 19 nt, Homo sapiens
  misc_RNA (1)...(19): siRNA sense strand
gugacaaggccagcaaaga

SEQ ID NO: 1130020 - RNA, 19 nt, Homo sapiens
  misc_RNA (1)...(19): siRNA sense strand
gagaaguguaaccugcauu

SEQ ID NO: 1130021 - RNA, 19 nt, Homo sapiens
  misc_RNA (1)...(19): siRNA sense strand
acaaguucaucgugcucaa

SEQ ID NO: 1130022 - RNA, 19 nt, Homo sapiens
  misc_RNA (1)...(19): siRNA sense strand
acagaccaguugaaaugca

SEQ ID NO: 1130023 - RNA, 19 nt, Homo sapiens
  misc_RNA (1)...(19): siRNA sense strand
guucuucucaaccuuaauc

SEQ ID NO: 1130024 - RNA, 19 nt, Homo sapiens
  misc_RNA (1)...(19): siRNA sense strand
ccaugccagugauguucuu

SEQ ID NO: 1130025 - RNA, 19 nt, Homo sapiens
  misc_RNA (1)...(19): siRNA sense strand
ccacguucccugaggagau

SEQ ID NO: 1130026 - RNA, 19 nt, Homo sapiens
  misc_RNA (1)...(19): siRNA sense strand
ccugcaacuggaagaaaua

SEQ ID NO: 1130027 - RNA, 19 nt, Homo sapiens
  misc_RNA (1)...(19): siRNA sense strand
ggccuguucuauagcaucu

SEQ ID NO: 1130028 - RNA, 19 nt, Homo sapiens
  misc_RNA (1)...(19): siRNA sense strand
ggacaacugccgauuauuu

SEQ ID NO: 1130029 - RNA, 19 nt, Homo sapiens
  misc_RNA (1)...(19): siRNA sense strand
gaaaggggcugugaaauuu

SEQ ID NO: 1130030 - RNA, 19 nt, Homo sapiens
  misc_RNA (1)...(19): siRNA sense strand
gauacaaugucuucaguga

SEQ ID NO: 1130031 - RNA, 19 nt, Homo sapiens
  misc_RNA (1)...(19): siRNA sense strand
gcaaucaagcaacuuaaua

SEQ ID NO: 1130032 - RNA, 19 nt, Homo sapiens
  misc_RNA (1)...(19): siRNA sense strand
gacaaggacaguuauguua

SEQ ID NO: 1130033 - RNA, 19 nt, Homo sapiens
  misc_RNA (1)...(19): siRNA sense strand
ggacaguuauguuagguau

SEQ ID NO: 1130034 - RNA, 19 nt, Homo sapiens
  misc_RNA (1)...(19): siRNA sense strand
ugagaaugaugauggauuu

SEQ ID NO: 1130035 - RNA, 19 nt, Homo sapiens
  misc_RNA (1)...(19): siRNA sense strand
gacaaacucuaugacauuu

SEQ ID NO: 1130036 - RNA, 19 nt, Homo sapiens
  misc_RNA (1)...(19): siRNA sense strand
uagaggauaugcauuugua

SEQ ID NO: 1130037 - RNA, 19 nt, Homo sapiens
  misc_RNA (1)...(19): siRNA sense strand
caauagaggauaugcauuu

SEQ ID NO: 1130038 - RNA, 19 nt, Homo sapiens
  misc_RNA (1)...(19): siRNA sense strand
gaagagauuugucagaaaa

SEQ ID NO: 1130039 - RNA, 19 nt, Homo sapiens
  misc_RNA (1)...(19): siRNA sense strand
ggaugagcuuauaccauua

SEQ ID NO: 1130040 - RNA, 19 nt, Homo sapiens
  misc_RNA (1)...(19): siRNA sense strand
gacaagacuuagcagcaua

SEQ ID NO: 1130041 - RNA, 19 nt, Homo sapiens
  misc_RNA (1)...(19): siRNA sense strand
gcaauucccagucuucauu

SEQ ID NO: 1130042 - RNA, 19 nt, Homo sapiens
  misc_RNA (1)...(19): siRNA sense strand
gaagaaaauucgagacuau

SEQ ID NO: 1130043 - RNA, 19 nt, Homo sapiens
  misc_RNA (1)...(19): siRNA sense strand
uagaagagauuugucagaa

SEQ ID NO: 1130044 - RNA, 19 nt, Homo sapiens
  misc_RNA (1)...(19): siRNA sense strand
gcacuucaguaaccgagaa

SEQ ID NO: 1130045 - RNA, 19 nt, Homo sapiens
  misc_RNA (1)...(19): siRNA sense strand
aggaugagcuuauaccauu

SEQ ID NO: 1130046 - RNA, 19 nt, Homo sapiens
  misc_RNA (1)...(19): siRNA sense strand
gagaagacaaacucuauga

SEQ ID NO: 1130047 - RNA, 19 nt, Homo sapiens
  misc_RNA (1)...(19): siRNA sense strand
ggacaaggacaguuauguu

SEQ ID NO: 1130048 - RNA, 19 nt, Homo sapiens
  misc_RNA (1)...(19): siRNA sense strand
cccaagcgcugcagauaaa

SEQ ID NO: 1130049 - RNA, 19 nt, Homo sapiens
  misc_RNA (1)...(19): siRNA sense strand
ggacaagacuuagcagcau

SEQ ID NO: 1130050 - RNA, 19 nt, Homo sapiens
  misc_RNA (1)...(19): siRNA sense strand
ggaaucaaaucacaaaucc

SEQ ID NO: 1130051 - RNA, 19 nt, Homo sapiens
  misc_RNA (1)...(19): siRNA sense strand
gaagacaaacucuaugaca

SEQ ID NO: 1130052 - RNA, 19 nt, Homo sapiens
  misc_RNA (1)...(19): siRNA sense strand
guggacaacugccgauuau

SEQ ID NO: 1130053 - RNA, 19 nt, Homo sapiens
  misc_RNA (1)...(19): siRNA sense strand
ugaauccugucacauuaaa

SEQ ID NO: 1130054 - RNA, 19 nt, Homo sapiens
  misc_RNA (1)...(19): siRNA sense strand
uaaacucgcuccccagaua

SEQ ID NO: 1130055 - RNA, 19 nt, Homo sapiens
  misc_RNA (1)...(19): siRNA sense strand
gaaaucuuaugcugucuac

SEQ ID NO: 1130056 - RNA, 19 nt, Homo sapiens
  misc_RNA (1)...(19): siRNA sense strand
gagcggcacucagaaggaa

SEQ ID NO: 1130057 - RNA, 19 nt, Homo sapiens
  misc_RNA (1)...(19): siRNA sense strand
gcacucugcuauuggacaa

SEQ ID NO: 1130058 - RNA, 19 nt, Homo sapiens
  misc_RNA (1)...(19): siRNA sense strand
cagcugcacucugcuauug

SEQ ID NO: 1130059 - RNA, 19 nt, Homo sapiens
  misc_RNA (1)...(19): siRNA sense strand
ccagaccuaugcagcaauu

SEQ ID NO: 1130060 - RNA, 19 nt, Homo sapiens
  misc_RNA (1)...(19): siRNA sense strand
gagcuuauaccauuaugug

SEQ ID NO: 1130061 - RNA, 19 nt, Homo sapiens
  misc_RNA (1)...(19): siRNA sense strand
gauaugcugucccuaaugc

SEQ ID NO: 1130062 - RNA, 19 nt, Homo sapiens
  misc_RNA (1)...(19): siRNA sense strand
gcuaugaaagcuuuaaaug

SEQ ID NO: 1130063 - RNA, 19 nt, Homo sapiens
  misc_RNA (1)...(19): siRNA sense strand
caggaagaauucaguuaug

SEQ ID NO: 1130064 - RNA, 19 nt, Homo sapiens
  misc_RNA (1)...(19): siRNA sense strand
gggcagagccagaaguaga

SEQ ID NO: 1130065 - RNA, 19 nt, Homo sapiens
  misc_RNA (1)...(19): siRNA sense strand
agaagagauuugucagaaa

SEQ ID NO: 1130066 - RNA, 19 nt, Homo sapiens
  misc_RNA (1)...(19): siRNA sense strand
gacaugguauugcaguaga

SEQ ID NO: 1130067 - RNA, 19 nt, Homo sapiens
  misc_RNA (1)...(19): siRNA sense strand
agacaaacucuaugacauu

SEQ ID NO: 1130068 - RNA, 19 nt, Homo sapiens
  misc_RNA (1)...(19): siRNA sense strand
gacaacugccgauuauuug

SEQ ID NO: 1130069 - RNA, 19 nt, Homo sapiens
  misc_RNA (1)...(19): siRNA sense strand
cuacugcuuucccaggaua

SEQ ID NO: 1130070 - RNA, 19 nt, Homo sapiens
  misc_RNA (1)...(19): siRNA sense strand
ggauaugcauuuguaacau

SEQ ID NO: 1130071 - RNA, 19 nt, Homo sapiens
  misc_RNA (1)...(19): siRNA sense strand
caggauaugcugucccuaa

SEQ ID NO: 1130072 - RNA, 19 nt, Homo sapiens
  misc_RNA (1)...(19): siRNA sense strand
ccagauauuagaagagauu

SEQ ID NO: 1130073 - RNA, 19 nt, Homo sapiens
  misc_RNA (1)...(19): siRNA sense strand
agaaguagaaguugaugaa

SEQ ID NO: 1130074 - RNA, 19 nt, Homo sapiens
  misc_RNA (1)...(19): siRNA sense strand
aaguagaaguugaugaaga

SEQ ID NO: 1130075 - RNA, 19 nt, Homo sapiens
  misc_RNA (1)...(19): siRNA sense strand
caaggacaguuauguuagg

SEQ ID NO: 1130076 - RNA, 19 nt, Homo sapiens
  misc_RNA (1)...(19): siRNA sense strand
uaugaggucuacccaacuu

SEQ ID NO: 1130077 - RNA, 19 nt, Homo sapiens
  misc_RNA (1)...(19): siRNA sense strand
agacuuagcagcauauaca

SEQ ID NO: 1130078 - RNA, 19 nt, Homo sapiens
  misc_RNA (1)...(19): siRNA sense strand
agacagcuauucuuguaca

SEQ ID NO: 1130079 - RNA, 19 nt, Homo sapiens
  misc_RNA (1)...(19): siRNA sense strand
caacugccgauuauuuguu

SEQ ID NO: 1130080 - RNA, 19 nt, Homo sapiens
  misc_RNA (1)...(19): siRNA sense strand
agacguaugcagccgaaua

SEQ ID NO: 1130081 - RNA, 19 nt, Homo sapiens
  misc_RNA (1)...(19): siRNA sense strand
gaggauaccaggucaaagg

SEQ ID NO: 1130082 - RNA, 19 nt, Homo sapiens
  misc_RNA (1)...(19): siRNA sense strand
ccaaaggacaucucagcaa

SEQ ID NO: 1130083 - RNA, 19 nt, Homo sapiens
  misc_RNA (1)...(19): siRNA sense strand
uaaccgagaagaugcaguu

SEQ ID NO: 1130084 - RNA, 19 nt, Homo sapiens
  misc_RNA (1)...(19): siRNA sense strand
gggacaugguauugcagua

SEQ ID NO: 1130085 - RNA, 19 nt, Homo sapiens
  misc_RNA (1)...(19): siRNA sense strand
ccaggaagaauucaguuau

SEQ ID NO: 1130086 - RNA, 19 nt, Homo sapiens
  misc_RNA (1)...(19): siRNA sense strand
aaagguuacugaagguguu

SEQ ID NO: 1130087 - RNA, 19 nt, Homo sapiens
  misc_RNA (1)...(19): siRNA sense strand
uaaaguggaagccaagaau

SEQ ID NO: 1130088 - RNA, 19 nt, Homo sapiens
  misc_RNA (1)...(19): siRNA sense strand
ugagugccuuuguggauga

SEQ ID NO: 1130089 - RNA, 19 nt, Homo sapiens
  misc_RNA (1)...(19): siRNA sense strand
cugaagagaugauugaaaa

SEQ ID NO: 1130090 - RNA, 19 nt, Homo sapiens
  misc_RNA (1)...(19): siRNA sense strand
agaaguugaugaagauaca

SEQ ID NO: 1130091 - RNA, 19 nt, Homo sapiens
  misc_RNA (1)...(19): siRNA sense strand
aguagaaguugaugaagau

SEQ ID NO: 1130092 - RNA, 19 nt, Homo sapiens
  misc_RNA (1)...(19): siRNA sense strand
gcuuauaccauuaugugaa

SEQ ID NO: 1130093 - RNA, 19 nt, Homo sapiens
  misc_RNA (1)...(19): siRNA sense strand
gaccaaagacagcuauucu

SEQ ID NO: 1130094 - RNA, 19 nt, Homo sapiens
  misc_RNA (1)...(19): siRNA sense strand
uggcaacaauagaggauau

SEQ ID NO: 1130095 - RNA, 19 nt, Homo sapiens
  misc_RNA (1)...(19): siRNA sense strand
ugaugaagauacaaugucu

SEQ ID NO: 1130096 - RNA, 19 nt, Homo sapiens
  misc_RNA (1)...(19): siRNA sense strand
gcugcacucugcuauugga

SEQ ID NO: 1130097 - RNA, 19 nt, Homo sapiens
  misc_RNA (1)...(19): siRNA sense strand
ggauggagcucaccccaau

SEQ ID NO: 1130098 - RNA, 19 nt, Homo sapiens
  misc_RNA (1)...(19): siRNA sense strand
ccgagaagaugcaguugag

SEQ ID NO: 1130099 - RNA, 19 nt, Homo sapiens
  misc_RNA (1)...(19): siRNA sense strand
aaaugagaaugaugaugga

SEQ ID NO: 1130100 - RNA, 19 nt, Homo sapiens
  misc_RNA (1)...(19): siRNA sense strand
aagacaaacucuaugacau

SEQ ID NO: 1130101 - RNA, 19 nt, Homo sapiens
  misc_RNA (1)...(19): siRNA sense strand
acaguuauguuagguauac

SEQ ID NO: 1130102 - RNA, 19 nt, Homo sapiens
  misc_RNA (1)...(19): siRNA sense strand
gaugagcuuauaccauuau

SEQ ID NO: 1130103 - RNA, 19 nt, Homo sapiens
  misc_RNA (1)...(19): siRNA sense strand
caagaaugcaaucaagcaa

SEQ ID NO: 1130104 - RNA, 19 nt, Homo sapiens
  misc_RNA (1)...(19): siRNA sense strand
ggaaaauggacaaagaaaa

SEQ ID NO: 1130105 - RNA, 19 nt, Homo sapiens
  misc_RNA (1)...(19): siRNA sense strand
caguggacaaggacaguua

SEQ ID NO: 1130106 - RNA, 19 nt, Homo sapiens
  misc_RNA (1)...(19): siRNA sense strand
ggacaugguauugcaguag

SEQ ID NO: 1130107 - RNA, 19 nt, Homo sapiens
  misc_RNA (1)...(19): siRNA sense strand
gcuuugccuucguggagua

SEQ ID NO: 1130108 - RNA, 19 nt, Homo sapiens
  misc_RNA (1)...(19): siRNA sense strand
aauagaggauaugcauuug

SEQ ID NO: 1130109 - RNA, 19 nt, Homo sapiens
  misc_RNA (1)...(19): siRNA sense strand
caaaaccaguggacaagga

SEQ ID NO: 1130110 - RNA, 19 nt, Homo sapiens
  misc_RNA (1)...(19): siRNA sense strand
uugaggcuaugaaagcuuu

SEQ ID NO: 1130111 - RNA, 19 nt, Homo sapiens
  misc_RNA (1)...(19): siRNA sense strand
aagaugcaguugaggcuau

SEQ ID NO: 1130112 - RNA, 19 nt, Homo sapiens
  misc_RNA (1)...(19): siRNA sense strand
gaaacugcuaccaggaaga

SEQ ID NO: 1130113 - RNA, 19 nt, Homo sapiens
  misc_RNA (1)...(19): siRNA sense strand
cugaagguguugucgaugu

SEQ ID NO: 1130114 - RNA, 19 nt, Homo sapiens
  misc_RNA (1)...(19): siRNA sense strand
ggucaaaggagacaaaaga

SEQ ID NO: 1130115 - RNA, 19 nt, Homo sapiens
  misc_RNA (1)...(19): siRNA sense strand
gcagcaauucccagucuuc

SEQ ID NO: 1130116 - RNA, 19 nt, Homo sapiens
  misc_RNA (1)...(19): siRNA sense strand
ugaaaggggcugugaaauu

SEQ ID NO: 1130117 - RNA, 19 nt, Homo sapiens
  misc_RNA (1)...(19): siRNA sense strand
ccaagaaugcaaucaagca

SEQ ID NO: 1130118 - RNA, 19 nt, Homo sapiens
  misc_RNA (1)...(19): siRNA sense strand
aaugcaaucaagcaacuua

SEQ ID NO: 1130119 - RNA, 19 nt, Homo sapiens
  misc_RNA (1)...(19): siRNA sense strand
ggauaugcugucccuaaug

SEQ ID NO: 1130120 - RNA, 19 nt, Homo sapiens
  misc_RNA (1)...(19): siRNA sense strand
ggaugaagcaaagacguau

SEQ ID NO: 1130121 - RNA, 19 nt, Homo sapiens
  misc_RNA (1)...(19): siRNA sense strand
cagcuauucuuguacaaaa

SEQ ID NO: 1130122 - RNA, 19 nt, Homo sapiens
  misc_RNA (1)...(19): siRNA sense strand
caaaggagacaaaagagaa

SEQ ID NO: 1130123 - RNA, 19 nt, Homo sapiens
  misc_RNA (1)...(19): siRNA sense strand
guccagcgcacaggauaua

SEQ ID NO: 1130124 - RNA, 19 nt, Homo sapiens
  misc_RNA (1)...(19): siRNA sense strand
agaaugcaaucaagcaacu

SEQ ID NO: 1130125 - RNA, 19 nt, Homo sapiens
  misc_RNA (1)...(19): siRNA sense strand
ggcagagccagaaguagaa

SEQ ID NO: 1130126 - RNA, 19 nt, Homo sapiens
  misc_RNA (1)...(19): siRNA sense strand
gcugagugccuuuguggau

SEQ ID NO: 1130127 - RNA, 19 nt, Homo sapiens
  misc_RNA (1)...(19): siRNA sense strand
uguggacaacugccgauua

SEQ ID NO: 1130128 - RNA, 19 nt, Homo sapiens
  misc_RNA (1)...(19): siRNA sense strand
ggacaacugccgauuauuu

SEQ ID NO: 1130129 - RNA, 19 nt, Homo sapiens
  misc_RNA (1)...(19): siRNA sense strand
gaaaggggcugugaaauuu

SEQ ID NO: 1130130 - RNA, 19 nt, Homo sapiens
  misc_RNA (1)...(19): siRNA sense strand
gauacaaugucuucaguga

SEQ ID NO: 1130131 - RNA, 19 nt, Homo sapiens
  misc_RNA (1)...(19): siRNA sense strand
gcaaucaagcaacuuaaua

SEQ ID NO: 1130132 - RNA, 19 nt, Homo sapiens
  misc_RNA (1)...(19): siRNA sense strand
gacaaggacaguuauguua

SEQ ID NO: 1130133 - RNA, 19 nt, Homo sapiens
  misc_RNA (1)...(19): siRNA sense strand
ggacaguuauguuagguau

SEQ ID NO: 1130134 - RNA, 19 nt, Homo sapiens
  misc_RNA (1)...(19): siRNA sense strand
ugagaaugaugauggauuu

SEQ ID NO: 1130135 - RNA, 19 nt, Homo sapiens
  misc_RNA (1)...(19): siRNA sense strand
gacaaacucuaugacauuu

SEQ ID NO: 1130136 - RNA, 19 nt, Homo sapiens
  misc_RNA (1)...(19): siRNA sense strand
uagaggauaugcauuugua

SEQ ID NO: 1130137 - RNA, 19 nt, Homo sapiens
  misc_RNA (1)...(19): siRNA sense strand
caauagaggauaugcauuu

SEQ ID NO: 1130138 - RNA, 19 nt, Homo sapiens
  misc_RNA (1)...(19): siRNA sense strand
gaagagauuugucagaaaa

SEQ ID NO: 1130139 - RNA, 19 nt, Homo sapiens
  misc_RNA (1)...(19): siRNA sense strand
ggaugagcuuauaccauua

SEQ ID NO: 1130140 - RNA, 19 nt, Homo sapiens
  misc_RNA (1)...(19): siRNA sense strand
gacaagacuuagcagcaua

SEQ ID NO: 1130141 - RNA, 19 nt, Homo sapiens
  misc_RNA (1)...(19): siRNA sense strand
gcaauucccagucuucauu

SEQ ID NO: 1130142 - RNA, 19 nt, Homo sapiens
  misc_RNA (1)...(19): siRNA sense strand
gaagaaaauucgagacuau

SEQ ID NO: 1130143 - RNA, 19 nt, Homo sapiens
  misc_RNA (1)...(19): siRNA sense strand
uagaagagauuugucagaa

SEQ ID NO: 1130144 - RNA, 19 nt, Homo sapiens
  misc_RNA (1)...(19): siRNA sense strand
gcacuucaguaaccgagaa

SEQ ID NO: 1130145 - RNA, 19 nt, Homo sapiens
  misc_RNA (1)...(19): siRNA sense strand
aggaugagcuuauaccauu

SEQ ID NO: 1130146 - RNA, 19 nt, Homo sapiens
  misc_RNA (1)...(19): siRNA sense strand
gagaagacaaacucuauga

SEQ ID NO: 1130147 - RNA, 19 nt, Homo sapiens
  misc_RNA (1)...(19): siRNA sense strand
ggacaaggacaguuauguu

SEQ ID NO: 1130148 - RNA, 19 nt, Homo sapiens
  misc_RNA (1)...(19): siRNA sense strand
cccaagcgcugcagauaaa

SEQ ID NO: 1130149 - RNA, 19 nt, Homo sapiens
  misc_RNA (1)...(19): siRNA sense strand
ggacaagacuuagcagcau

SEQ ID NO: 1130150 - RNA, 19 nt, Homo sapiens
  misc_RNA (1)...(19): siRNA sense strand
ggaaucaaaucacaaaucc

SEQ ID NO: 1130151 - RNA, 19 nt, Homo sapiens
  misc_RNA (1)...(19): siRNA sense strand
gaagacaaacucuaugaca

SEQ ID NO: 1130152 - RNA, 19 nt, Homo sapiens
  misc_RNA (1)...(19): siRNA sense strand
guggacaacugccgauuau

SEQ ID NO: 1130153 - RNA, 19 nt, Homo sapiens
  misc_RNA (1)...(19): siRNA sense strand
ugaauccugucacauuaaa

SEQ ID NO: 1130154 - RNA, 19 nt, Homo sapiens
  misc_RNA (1)...(19): siRNA sense strand
uaaacucgcuccccagaua

SEQ ID NO: 1130155 - RNA, 19 nt, Homo sapiens
  misc_RNA (1)...(19): siRNA sense strand
gaaaucuuaugcugucuac

SEQ ID NO: 1130156 - RNA, 19 nt, Homo sapiens
  misc_RNA (1)...(19): siRNA sense strand
gagcggcacucagaaggaa

SEQ ID NO: 1130157 - RNA, 19 nt, Homo sapiens
  misc_RNA (1)...(19): siRNA sense strand
gcacucugcuauuggacaa

SEQ ID NO: 1130158 - RNA, 19 nt, Homo sapiens
  misc_RNA (1)...(19): siRNA sense strand
cagcugcacucugcuauug

SEQ ID NO: 1130159 - RNA, 19 nt, Homo sapiens
  misc_RNA (1)...(19): siRNA sense strand
ccagaccuaugcagcaauu

SEQ ID NO: 1130160 - RNA, 19 nt, Homo sapiens
  misc_RNA (1)...(19): siRNA sense strand
gagcuuauaccauuaugug

SEQ ID NO: 1130161 - RNA, 19 nt, Homo sapiens
  misc_RNA (1)...(19): siRNA sense strand
gauaugcugucccuaaugc

SEQ ID NO: 1130162 - RNA, 19 nt, Homo sapiens
  misc_RNA (1)...(19): siRNA sense strand
gcuaugaaagcuuuaaaug

SEQ ID NO: 1130163 - RNA, 19 nt, Homo sapiens
  misc_RNA (1)...(19): siRNA sense strand
caggaagaauucaguuaug

SEQ ID NO: 1130164 - RNA, 19 nt, Homo sapiens
  misc_RNA (1)...(19): siRNA sense strand
gggcagagccagaaguaga

SEQ ID NO: 1130165 - RNA, 19 nt, Homo sapiens
  misc_RNA (1)...(19): siRNA sense strand
agaagagauuugucagaaa

SEQ ID NO: 1130166 - RNA, 19 nt, Homo sapiens
  misc_RNA (1)...(19): siRNA sense strand
gacaugguauugcaguaga

SEQ ID NO: 1130167 - RNA, 19 nt, Homo sapiens
  misc_RNA (1)...(19): siRNA sense strand
agacaaacucuaugacauu

SEQ ID NO: 1130168 - RNA, 19 nt, Homo sapiens
  misc_RNA (1)...(19): siRNA sense strand
gacaacugccgauuauuug

SEQ ID NO: 1130169 - RNA, 19 nt, Homo sapiens
  misc_RNA (1)...(19): siRNA sense strand
cuacugcuuucccaggaua

SEQ ID NO: 1130170 - RNA, 19 nt, Homo sapiens
  misc_RNA (1)...(19): siRNA sense strand
ggauaugcauuuguaacau

SEQ ID NO: 1130171 - RNA, 19 nt, Homo sapiens
  misc_RNA (1)...(19): siRNA sense strand
caggauaugcugucccuaa

SEQ ID NO: 1130172 - RNA, 19 nt, Homo sapiens
  misc_RNA (1)...(19): siRNA sense strand
ccagauauuagaagagauu

SEQ ID NO: 1130173 - RNA, 19 nt, Homo sapiens
  misc_RNA (1)...(19): siRNA sense strand
agaaguagaaguugaugaa

SEQ ID NO: 1130174 - RNA, 19 nt, Homo sapiens
  misc_RNA (1)...(19): siRNA sense strand
aaguagaaguugaugaaga

SEQ ID NO: 1130175 - RNA, 19 nt, Homo sapiens
  misc_RNA (1)...(19): siRNA sense strand
caaggacaguuauguuagg

SEQ ID NO: 1130176 - RNA, 19 nt, Homo sapiens
  misc_RNA (1)...(19): siRNA sense strand
uaugaggucuacccaacuu

SEQ ID NO: 1130177 - RNA, 19 nt, Homo sapiens
  misc_RNA (1)...(19): siRNA sense strand
agacuuagcagcauauaca

SEQ ID NO: 1130178 - RNA, 19 nt, Homo sapiens
  misc_RNA (1)...(19): siRNA sense strand
agacagcuauucuuguaca

SEQ ID NO: 1130179 - RNA, 19 nt, Homo sapiens
  misc_RNA (1)...(19): siRNA sense strand
caacugccgauuauuuguu

SEQ ID NO: 1130180 - RNA, 19 nt, Homo sapiens
  misc_RNA (1)...(19): siRNA sense strand
agacguaugcagccgaaua

SEQ ID NO: 1130181 - RNA, 19 nt, Homo sapiens
  misc_RNA (1)...(19): siRNA sense strand
gaggauaccaggucaaagg

SEQ ID NO: 1130182 - RNA, 19 nt, Homo sapiens
  misc_RNA (1)...(19): siRNA sense strand
ccaaaggacaucucagcaa

SEQ ID NO: 1130183 - RNA, 19 nt, Homo sapiens
  misc_RNA (1)...(19): siRNA sense strand
uaaccgagaagaugcaguu

SEQ ID NO: 1130184 - RNA, 19 nt, Homo sapiens
  misc_RNA (1)...(19): siRNA sense strand
gggacaugguauugcagua

SEQ ID NO: 1130185 - RNA, 19 nt, Homo sapiens
  misc_RNA (1)...(19): siRNA sense strand
ccaggaagaauucaguuau

SEQ ID NO: 1130186 - RNA, 19 nt, Homo sapiens
  misc_RNA (1)...(19): siRNA sense strand
aaagguuacugaagguguu

SEQ ID NO: 1130187 - RNA, 19 nt, Homo sapiens
  misc_RNA (1)...(19): siRNA sense strand
uaaaguggaagccaagaau

SEQ ID NO: 1130188 - RNA, 19 nt, Homo sapiens
  misc_RNA (1)...(19): siRNA sense strand
ugagugccuuuguggauga

SEQ ID NO: 1130189 - RNA, 19 nt, Homo sapiens
  misc_RNA (1)...(19): siRNA sense strand
cugaagagaugauugaaaa

SEQ ID NO: 1130190 - RNA, 19 nt, Homo sapiens
  misc_RNA (1)...(19): siRNA sense strand
agaaguugaugaagauaca

SEQ ID NO: 1130191 - RNA, 19 nt, Homo sapiens
  misc_RNA (1)...(19): siRNA sense strand
aguagaaguugaugaagau

SEQ ID NO: 1130192 - RNA, 19 nt, Homo sapiens
  misc_RNA (1)...(19): siRNA sense strand
gcuuauaccauuaugugaa

SEQ ID NO: 1130193 - RNA, 19 nt, Homo sapiens
  misc_RNA (1)...(19): siRNA sense strand
gaccaaagacagcuauucu

SEQ ID NO: 1130194 - RNA, 19 nt, Homo sapiens
  misc_RNA (1)...(19): siRNA sense strand
uggcaacaauagaggauau

SEQ ID NO: 1130195 - RNA, 19 nt, Homo sapiens
  misc_RNA (1)...(19): siRNA sense strand
ugaugaagauacaaugucu

SEQ ID NO: 1130196 - RNA, 19 nt, Homo sapiens
  misc_RNA (1)...(19): siRNA sense strand
gcugcacucugcuauugga

SEQ ID NO: 1130197 - RNA, 19 nt, Homo sapiens
  misc_RNA (1)...(19): siRNA sense strand
ggauggagcucaccccaau

SEQ ID NO: 1130198 - RNA, 19 nt, Homo sapiens
  misc_RNA (1)...(19): siRNA sense strand
ccgagaagaugcaguugag

SEQ ID NO: 1130199 - RNA, 19 nt, Homo sapiens
  misc_RNA (1)...(19): siRNA sense strand
aaaugagaaugaugaugga

SEQ ID NO: 1130200 - RNA, 19 nt, Homo sapiens
  misc_RNA (1)...(19): siRNA sense strand
aagacaaacucuaugacau

SEQ ID NO: 1130201 - RNA, 19 nt, Homo sapiens
  misc_RNA (1)...(19): siRNA sense strand
acaguuauguuagguauac

SEQ ID NO: 1130202 - RNA, 19 nt, Homo sapiens
  misc_RNA (1)...(19): siRNA sense strand
gaugagcuuauaccauuau

SEQ ID NO: 1130203 - RNA, 19 nt, Homo sapiens
  misc_RNA (1)...(19): siRNA sense strand
caagaaugcaaucaagcaa

SEQ ID NO: 1130204 - RNA, 19 nt, Homo sapiens
  misc_RNA (1)...(19): siRNA sense strand
ggaaaauggacaaagaaaa

SEQ ID NO: 1130205 - RNA, 19 nt, Homo sapiens
  misc_RNA (1)...(19): siRNA sense strand
caguggacaaggacaguua

SEQ ID NO: 1130206 - RNA, 19 nt, Homo sapiens
  misc_RNA (1)...(19): siRNA sense strand
ggacaugguauugcaguag

SEQ ID NO: 1130207 - RNA, 19 nt, Homo sapiens
  misc_RNA (1)...(19): siRNA sense strand
gcuuugccuucguggagua

SEQ ID NO: 1130208 - RNA, 19 nt, Homo sapiens
  misc_RNA (1)...(19): siRNA sense strand
aauagaggauaugcauuug

SEQ ID NO: 1130209 - RNA, 19 nt, Homo sapiens
  misc_RNA (1)...(19): siRNA sense strand
caaaaccaguggacaagga

SEQ ID NO: 1130210 - RNA, 19 nt, Homo sapiens
  misc_RNA (1)...(19): siRNA sense strand
uugaggcuaugaaagcuuu

SEQ ID NO: 1130211 - RNA, 19 nt, Homo sapiens
  misc_RNA (1)...(19): siRNA sense strand
aagaugcaguugaggcuau

SEQ ID NO: 1130212 - RNA, 19 nt, Homo sapiens
  misc_RNA (1)...(19): siRNA sense strand
gaaacugcuaccaggaaga

SEQ ID NO: 1130213 - RNA, 19 nt, Homo sapiens
  misc_RNA (1)...(19): siRNA sense strand
cugaagguguugucgaugu

SEQ ID NO: 1130214 - RNA, 19 nt, Homo sapiens
  misc_RNA (1)...(19): siRNA sense strand
ggucaaaggagacaaaaga

SEQ ID NO: 1130215 - RNA, 19 nt, Homo sapiens
  misc_RNA (1)...(19): siRNA sense strand
gcagcaauucccagucuuc

SEQ ID NO: 1130216 - RNA, 19 nt, Homo sapiens
  misc_RNA (1)...(19): siRNA sense strand
ugaaaggggcugugaaauu

SEQ ID NO: 1130217 - RNA, 19 nt, Homo sapiens
  misc_RNA (1)...(19): siRNA sense strand
ccaagaaugcaaucaagca

SEQ ID NO: 1130218 - RNA, 19 nt, Homo sapiens
  misc_RNA (1)...(19): siRNA sense strand
aaugcaaucaagcaacuua

SEQ ID NO: 1130219 - RNA, 19 nt, Homo sapiens
  misc_RNA (1)...(19): siRNA sense strand
ggauaugcugucccuaaug

SEQ ID NO: 1130220 - RNA, 19 nt, Homo sapiens
  misc_RNA (1)...(19): siRNA sense strand
ggaugaagcaaagacguau

SEQ ID NO: 1130221 - RNA, 19 nt, Homo sapiens
  misc_RNA (1)...(19): siRNA sense strand
cagcuauucuuguacaaaa

SEQ ID NO: 1130222 - RNA, 19 nt, Homo sapiens
  misc_RNA (1)...(19): siRNA sense strand
caaaggagacaaaagagaa

SEQ ID NO: 1130223 - RNA, 19 nt, Homo sapiens
  misc_RNA (1)...(19): siRNA sense strand
guccagcgcacaggauaua

SEQ ID NO: 1130224 - RNA, 19 nt, Homo sapiens
  misc_RNA (1)...(19): siRNA sense strand
agaaugcaaucaagcaacu

SEQ ID NO: 1130225 - RNA, 19 nt, Homo sapiens
  misc_RNA (1)...(19): siRNA sense strand
ggcagagccagaaguagaa

SEQ ID NO: 1130226 - RNA, 19 nt, Homo sapiens
  misc_RNA (1)...(19): siRNA sense strand
gcugagugccuuuguggau

SEQ ID NO: 1130227 - RNA, 19 nt, Homo sapiens
  misc_RNA (1)...(19): siRNA sense strand
uguggacaacugccgauua

SEQ ID NO: 1130228 - RNA, 19 nt, Homo sapiens
  misc_RNA (1)...(19): siRNA sense strand
ggacaacugccgauuauuu

SEQ ID NO: 1130229 - RNA, 19 nt, Homo sapiens
  misc_RNA (1)...(19): siRNA sense strand
gaaaggggcugugaaauuu

SEQ ID NO: 1130230 - RNA, 19 nt, Homo sapiens
  misc_RNA (1)...(19): siRNA sense strand
gauacaaugucuucaguga

SEQ ID NO: 1130231 - RNA, 19 nt, Homo sapiens
  misc_RNA (1)...(19): siRNA sense strand
gcaaucaagcaacuuaaua

SEQ ID NO: 1130232 - RNA, 19 nt, Homo sapiens
  misc_RNA (1)...(19): siRNA sense strand
gacaaggacaguuauguua

SEQ ID NO: 1130233 - RNA, 19 nt, Homo sapiens
  misc_RNA (1)...(19): siRNA sense strand
ggacaguuauguuagguau

SEQ ID NO: 1130234 - RNA, 19 nt, Homo sapiens
  misc_RNA (1)...(19): siRNA sense strand
ugagaaugaugauggauuu

SEQ ID NO: 1130235 - RNA, 19 nt, Homo sapiens
  misc_RNA (1)...(19): siRNA sense strand
gacaaacucuaugacauuu

SEQ ID NO: 1130236 - RNA, 19 nt, Homo sapiens
  misc_RNA (1)...(19): siRNA sense strand
uagaggauaugcauuugua

SEQ ID NO: 1130237 - RNA, 19 nt, Homo sapiens
  misc_RNA (1)...(19): siRNA sense strand
caauagaggauaugcauuu

SEQ ID NO: 1130238 - RNA, 19 nt, Homo sapiens
  misc_RNA (1)...(19): siRNA sense strand
gaagagauuugucagaaaa

SEQ ID NO: 1130239 - RNA, 19 nt, Homo sapiens
  misc_RNA (1)...(19): siRNA sense strand
ggaugagcuuauaccauua

SEQ ID NO: 1130240 - RNA, 19 nt, Homo sapiens
  misc_RNA (1)...(19): siRNA sense strand
gacaagacuuagcagcaua

SEQ ID NO: 1130241 - RNA, 19 nt, Homo sapiens
  misc_RNA (1)...(19): siRNA sense strand
gcaauucccagucuucauu

SEQ ID NO: 1130242 - RNA, 19 nt, Homo sapiens
  misc_RNA (1)...(19): siRNA sense strand
gaagaaaauucgagacuau

SEQ ID NO: 1130243 - RNA, 19 nt, Homo sapiens
  misc_RNA (1)...(19): siRNA sense strand
uagaagagauuugucagaa

SEQ ID NO: 1130244 - RNA, 19 nt, Homo sapiens
  misc_RNA (1)...(19): siRNA sense strand
gcacuucaguaaccgagaa

SEQ ID NO: 1130245 - RNA, 19 nt, Homo sapiens
  misc_RNA (1)...(19): siRNA sense strand
aggaugagcuuauaccauu

SEQ ID NO: 1130246 - RNA, 19 nt, Homo sapiens
  misc_RNA (1)...(19): siRNA sense strand
gagaagacaaacucuauga

SEQ ID NO: 1130247 - RNA, 19 nt, Homo sapiens
  misc_RNA (1)...(19): siRNA sense strand
ggacaaggacaguuauguu

SEQ ID NO: 1130248 - RNA, 19 nt, Homo sapiens
  misc_RNA (1)...(19): siRNA sense strand
cccaagcgcugcagauaaa

SEQ ID NO: 1130249 - RNA, 19 nt, Homo sapiens
  misc_RNA (1)...(19): siRNA sense strand
ggacaagacuuagcagcau

SEQ ID NO: 1130250 - RNA, 19 nt, Homo sapiens
  misc_RNA (1)...(19): siRNA sense strand
gaagacaaacucuaugaca

SEQ ID NO: 1130251 - RNA, 19 nt, Homo sapiens
  misc_RNA (1)...(19): siRNA sense strand
guggacaacugccgauuau

SEQ ID NO: 1130252 - RNA, 19 nt, Homo sapiens
  misc_RNA (1)...(19): siRNA sense strand
ugaauccugucacauuaaa

SEQ ID NO: 1130253 - RNA, 19 nt, Homo sapiens
  misc_RNA (1)...(19): siRNA sense strand
uaaacucgcuccccagaua

SEQ ID NO: 1130254 - RNA, 19 nt, Homo sapiens
  misc_RNA (1)...(19): siRNA sense strand
gaaaucuuaugcugucuac

SEQ ID NO: 1130255 - RNA, 19 nt, Homo sapiens
  misc_RNA (1)...(19): siRNA sense strand
gcacucugcuauuggacaa

SEQ ID NO: 1130256 - RNA, 19 nt, Homo sapiens
  misc_RNA (1)...(19): siRNA sense strand
cagcugcacucugcuauug

SEQ ID NO: 1130257 - RNA, 19 nt, Homo sapiens
  misc_RNA (1)...(19): siRNA sense strand
ccagaccuaugcagcaauu

SEQ ID NO: 1130258 - RNA, 19 nt, Homo sapiens
  misc_RNA (1)...(19): siRNA sense strand
gagcuuauaccauuaugug

SEQ ID NO: 1130259 - RNA, 19 nt, Homo sapiens
  misc_RNA (1)...(19): siRNA sense strand
gauaugcugucccuaaugc

SEQ ID NO: 1130260 - RNA, 19 nt, Homo sapiens
  misc_RNA (1)...(19): siRNA sense strand
gcuaugaaagcuuuaaaug

SEQ ID NO: 1130261 - RNA, 19 nt, Homo sapiens
  misc_RNA (1)...(19): siRNA sense strand
caggaagaauucaguuaug

SEQ ID NO: 1130262 - RNA, 19 nt, Homo sapiens
  misc_RNA (1)...(19): siRNA sense strand
gggcagagccagaaguaga

SEQ ID NO: 1130263 - RNA, 19 nt, Homo sapiens
  misc_RNA (1)...(19): siRNA sense strand
agaagagauuugucagaaa

SEQ ID NO: 1130264 - RNA, 19 nt, Homo sapiens
  misc_RNA (1)...(19): siRNA sense strand
gacaugguauugcaguaga

SEQ ID NO: 1130265 - RNA, 19 nt, Homo sapiens
  misc_RNA (1)...(19): siRNA sense strand
agacaaacucuaugacauu

SEQ ID NO: 1130266 - RNA, 19 nt, Homo sapiens
  misc_RNA (1)...(19): siRNA sense strand
gacaacugccgauuauuug

SEQ ID NO: 1130267 - RNA, 19 nt, Homo sapiens
  misc_RNA (1)...(19): siRNA sense strand
cuacugcuuucccaggaua

SEQ ID NO: 1130268 - RNA, 19 nt, Homo sapiens
  misc_RNA (1)...(19): siRNA sense strand
ggauaugcauuuguaacau

SEQ ID NO: 1130269 - RNA, 19 nt, Homo sapiens
  misc_RNA (1)...(19): siRNA sense strand
caggauaugcugucccuaa

SEQ ID NO: 1130270 - RNA, 19 nt, Homo sapiens
  misc_RNA (1)...(19): siRNA sense strand
ccagauauuagaagagauu

SEQ ID NO: 1130271 - RNA, 19 nt, Homo sapiens
  misc_RNA (1)...(19): siRNA sense strand
agaaguagaaguugaugaa

SEQ ID NO: 1130272 - RNA, 19 nt, Homo sapiens
  misc_RNA (1)...(19): siRNA sense strand
aaguagaaguugaugaaga

SEQ ID NO: 1130273 - RNA, 19 nt, Homo sapiens
  misc_RNA (1)...(19): siRNA sense strand
caaggacaguuauguuagg

SEQ ID NO: 1130274 - RNA, 19 nt, Homo sapiens
  misc_RNA (1)...(19): siRNA sense strand
uaugaggucuacccaacuu

SEQ ID NO: 1130275 - RNA, 19 nt, Homo sapiens
  misc_RNA (1)...(19): siRNA sense strand
agacuuagcagcauauaca

SEQ ID NO: 1130276 - RNA, 19 nt, Homo sapiens
  misc_RNA (1)...(19): siRNA sense strand
agacagcuauucuuguaca

SEQ ID NO: 1130277 - RNA, 19 nt, Homo sapiens
  misc_RNA (1)...(19): siRNA sense strand
caacugccgauuauuuguu

SEQ ID NO: 1130278 - RNA, 19 nt, Homo sapiens
  misc_RNA (1)...(19): siRNA sense strand
agacguaugcagccgaaua

SEQ ID NO: 1130279 - RNA, 19 nt, Homo sapiens
  misc_RNA (1)...(19): siRNA sense strand
gaggauaccaggucaaagg

SEQ ID NO: 1130280 - RNA, 19 nt, Homo sapiens
  misc_RNA (1)...(19): siRNA sense strand
ccaaaggacaucucagcaa

SEQ ID NO: 1130281 - RNA, 19 nt, Homo sapiens
  misc_RNA (1)...(19): siRNA sense strand
uaaccgagaagaugcaguu

SEQ ID NO: 1130282 - RNA, 19 nt, Homo sapiens
  misc_RNA (1)...(19): siRNA sense strand
gggacaugguauugcagua

SEQ ID NO: 1130283 - RNA, 19 nt, Homo sapiens
  misc_RNA (1)...(19): siRNA sense strand
ccaggaagaauucaguuau

SEQ ID NO: 1130284 - RNA, 19 nt, Homo sapiens
  misc_RNA (1)...(19): siRNA sense strand
aaagguuacugaagguguu

SEQ ID NO: 1130285 - RNA, 19 nt, Homo sapiens
  misc_RNA (1)...(19): siRNA sense strand
uaaaguggaagccaagaau

SEQ ID NO: 1130286 - RNA, 19 nt, Homo sapiens
  misc_RNA (1)...(19): siRNA sense strand
ugagugccuuuguggauga

SEQ ID NO: 1130287 - RNA, 19 nt, Homo sapiens
  misc_RNA (1)...(19): siRNA sense strand
cugaagagaugauugaaaa

SEQ ID NO: 1130288 - RNA, 19 nt, Homo sapiens
  misc_RNA (1)...(19): siRNA sense strand
agaaguugaugaagauaca

SEQ ID NO: 1130289 - RNA, 19 nt, Homo sapiens
  misc_RNA (1)...(19): siRNA sense strand
aguagaaguugaugaagau

SEQ ID NO: 1130290 - RNA, 19 nt, Homo sapiens
  misc_RNA (1)...(19): siRNA sense strand
gcuuauaccauuaugugaa

SEQ ID NO: 1130291 - RNA, 19 nt, Homo sapiens
  misc_RNA (1)...(19): siRNA sense strand
gaccaaagacagcuauucu

SEQ ID NO: 1130292 - RNA, 19 nt, Homo sapiens
  misc_RNA (1)...(19): siRNA sense strand
uggcaacaauagaggauau

SEQ ID NO: 1130293 - RNA, 19 nt, Homo sapiens
  misc_RNA (1)...(19): siRNA sense strand
ugaugaagauacaaugucu

SEQ ID NO: 1130294 - RNA, 19 nt, Homo sapiens
  misc_RNA (1)...(19): siRNA sense strand
gcugcacucugcuauugga

SEQ ID NO: 1130295 - RNA, 19 nt, Homo sapiens
  misc_RNA (1)...(19): siRNA sense strand
ggauggagcucaccccaau

SEQ ID NO: 1130296 - RNA, 19 nt, Homo sapiens
  misc_RNA (1)...(19): siRNA sense strand
ccgagaagaugcaguugag

SEQ ID NO: 1130297 - RNA, 19 nt, Homo sapiens
  misc_RNA (1)...(19): siRNA sense strand
acaguuauguuagguauac

SEQ ID NO: 1130298 - RNA, 19 nt, Homo sapiens
  misc_RNA (1)...(19): siRNA sense strand
aaaugagaaugaugaugga

SEQ ID NO: 1130299 - RNA, 19 nt, Homo sapiens
  misc_RNA (1)...(19): siRNA sense strand
aagacaaacucuaugacau

SEQ ID NO: 1130300 - RNA, 19 nt, Homo sapiens
  misc_RNA (1)...(19): siRNA sense strand
gaugagcuuauaccauuau

SEQ ID NO: 1130301 - RNA, 19 nt, Homo sapiens
  misc_RNA (1)...(19): siRNA sense strand
gcuuugccuucguggagua

SEQ ID NO: 1130302 - RNA, 19 nt, Homo sapiens
  misc_RNA (1)...(19): siRNA sense strand
ggaaaauggacaaagaaaa

SEQ ID NO: 1130303 - RNA, 19 nt, Homo sapiens
  misc_RNA (1)...(19): siRNA sense strand
caagaaugcaaucaagcaa

SEQ ID NO: 1130304 - RNA, 19 nt, Homo sapiens
  misc_RNA (1)...(19): siRNA sense strand
caguggacaaggacaguua

SEQ ID NO: 1130305 - RNA, 19 nt, Homo sapiens
  misc_RNA (1)...(19): siRNA sense strand
ggacaugguauugcaguag

SEQ ID NO: 1130306 - RNA, 19 nt, Homo sapiens
  misc_RNA (1)...(19): siRNA sense strand
gaaacugcuaccaggaaga

SEQ ID NO: 1130307 - RNA, 19 nt, Homo sapiens
  misc_RNA (1)...(19): siRNA sense strand
aauagaggauaugcauuug

SEQ ID NO: 1130308 - RNA, 19 nt, Homo sapiens
  misc_RNA (1)...(19): siRNA sense strand
caaaaccaguggacaagga

SEQ ID NO: 1130309 - RNA, 19 nt, Homo sapiens
  misc_RNA (1)...(19): siRNA sense strand
uugaggcuaugaaagcuuu

SEQ ID NO: 1130310 - RNA, 19 nt, Homo sapiens
  misc_RNA (1)...(19): siRNA sense strand
aagaugcaguugaggcuau

SEQ ID NO: 1130311 - RNA, 19 nt, Homo sapiens
  misc_RNA (1)...(19): siRNA sense strand
cugaagguguugucgaugu

SEQ ID NO: 1130312 - RNA, 19 nt, Homo sapiens
  misc_RNA (1)...(19): siRNA sense strand
ccaagaaugcaaucaagca

SEQ ID NO: 1130313 - RNA, 19 nt, Homo sapiens
  misc_RNA (1)...(19): siRNA sense strand
ggucaaaggagacaaaaga

SEQ ID NO: 1130314 - RNA, 19 nt, Homo sapiens
  misc_RNA (1)...(19): siRNA sense strand
gcagcaauucccagucuuc

SEQ ID NO: 1130315 - RNA, 19 nt, Homo sapiens
  misc_RNA (1)...(19): siRNA sense strand
ugaaaggggcugugaaauu

SEQ ID NO: 1130316 - RNA, 19 nt, Homo sapiens
  misc_RNA (1)...(19): siRNA sense strand
caaaggagacaaaagagaa

SEQ ID NO: 1130317 - RNA, 19 nt, Homo sapiens
  misc_RNA (1)...(19): siRNA sense strand
ggauaugcugucccuaaug

SEQ ID NO: 1130318 - RNA, 19 nt, Homo sapiens
  misc_RNA (1)...(19): siRNA sense strand
ggaugaagcaaagacguau

SEQ ID NO: 1130319 - RNA, 19 nt, Homo sapiens
  misc_RNA (1)...(19): siRNA sense strand
cagcuauucuuguacaaaa

SEQ ID NO: 1130320 - RNA, 19 nt, Homo sapiens
  misc_RNA (1)...(19): siRNA sense strand
aaugcaaucaagcaacuua

SEQ ID NO: 1130321 - RNA, 19 nt, Homo sapiens
  misc_RNA (1)...(19): siRNA sense strand
ggcagagccagaaguagaa

SEQ ID NO: 1130322 - RNA, 19 nt, Homo sapiens
  misc_RNA (1)...(19): siRNA sense strand
agaaugcaaucaagcaacu

SEQ ID NO: 1130323 - RNA, 19 nt, Homo sapiens
  misc_RNA (1)...(19): siRNA sense strand
gcugagugccuuuguggau

SEQ ID NO: 1130324 - RNA, 19 nt, Homo sapiens
  misc_RNA (1)...(19): siRNA sense strand
uguggacaacugccgauua

SEQ ID NO: 1130325 - RNA, 19 nt, Homo sapiens
  misc_RNA (1)...(19): siRNA sense strand
cccaaugaauccugucaca

SEQ ID NO: 1130326 - RNA, 19 nt, Homo sapiens
  misc_RNA (1)...(19): siRNA sense strand
gaggaugagcuuauaccau

SEQ ID NO: 1130327 - RNA, 19 nt, Homo sapiens
  misc_RNA (1)...(19): siRNA sense strand
caauucccagucuucauuu

SEQ ID NO: 1130328 - RNA, 19 nt, Homo sapiens
  misc_RNA (1)...(19): siRNA sense strand
ggacaacugccgauuauuu

SEQ ID NO: 1130329 - RNA, 19 nt, Homo sapiens
  misc_RNA (1)...(19): siRNA sense strand
gaaaggggcugugaaauuu

SEQ ID NO: 1130330 - RNA, 19 nt, Homo sapiens
  misc_RNA (1)...(19): siRNA sense strand
gauacaaugucuucaguga

SEQ ID NO: 1130331 - RNA, 19 nt, Homo sapiens
  misc_RNA (1)...(19): siRNA sense strand
gcaaucaagcaacuuaaua

SEQ ID NO: 1130332 - RNA, 19 nt, Homo sapiens
  misc_RNA (1)...(19): siRNA sense strand
gacaaggacaguuauguua

SEQ ID NO: 1130333 - RNA, 19 nt, Homo sapiens
  misc_RNA (1)...(19): siRNA sense strand
ggacaguuauguuagguau

SEQ ID NO: 1130334 - RNA, 19 nt, Homo sapiens
  misc_RNA (1)...(19): siRNA sense strand
ugagaaugaugauggauuu

SEQ ID NO: 1130335 - RNA, 19 nt, Homo sapiens
  misc_RNA (1)...(19): siRNA sense strand
gacaaacucuaugacauuu

SEQ ID NO: 1130336 - RNA, 19 nt, Homo sapiens
  misc_RNA (1)...(19): siRNA sense strand
uagaggauaugcauuugua

SEQ ID NO: 1130337 - RNA, 19 nt, Homo sapiens
  misc_RNA (1)...(19): siRNA sense strand
caauagaggauaugcauuu

SEQ ID NO: 1130338 - RNA, 19 nt, Homo sapiens
  misc_RNA (1)...(19): siRNA sense strand
gaagagauuugucagaaaa

SEQ ID NO: 1130339 - RNA, 19 nt, Homo sapiens
  misc_RNA (1)...(19): siRNA sense strand
ggaugagcuuauaccauua

SEQ ID NO: 1130340 - RNA, 19 nt, Homo sapiens
  misc_RNA (1)...(19): siRNA sense strand
gacaagacuuagcagcaua

SEQ ID NO: 1130341 - RNA, 19 nt, Homo sapiens
  misc_RNA (1)...(19): siRNA sense strand
gcaauucccagucuucauu

SEQ ID NO: 1130342 - RNA, 19 nt, Homo sapiens
  misc_RNA (1)...(19): siRNA sense strand
gaagaaaauucgagacuau

SEQ ID NO: 1130343 - RNA, 19 nt, Homo sapiens
  misc_RNA (1)...(19): siRNA sense strand
uagaagagauuugucagaa

SEQ ID NO: 1130344 - RNA, 19 nt, Homo sapiens
  misc_RNA (1)...(19): siRNA sense strand
gcacuucaguaaccgagaa

SEQ ID NO: 1130345 - RNA, 19 nt, Homo sapiens
  misc_RNA (1)...(19): siRNA sense strand
aggaugagcuuauaccauu

SEQ ID NO: 1130346 - RNA, 19 nt, Homo sapiens
  misc_RNA (1)...(19): siRNA sense strand
gagaagacaaacucuauga

SEQ ID NO: 1130347 - RNA, 19 nt, Homo sapiens
  misc_RNA (1)...(19): siRNA sense strand
ggacaaggacaguuauguu

SEQ ID NO: 1130348 - RNA, 19 nt, Homo sapiens
  misc_RNA (1)...(19): siRNA sense strand
cccaagcgcugcagauaaa

SEQ ID NO: 1130349 - RNA, 19 nt, Homo sapiens
  misc_RNA (1)...(19): siRNA sense strand
ggacaagacuuagcagcau

SEQ ID NO: 1130350 - RNA, 19 nt, Homo sapiens
  misc_RNA (1)...(19): siRNA sense strand
ggaaucaaaucacaaaucc

SEQ ID NO: 1130351 - RNA, 19 nt, Homo sapiens
  misc_RNA (1)...(19): siRNA sense strand
gaagacaaacucuaugaca

SEQ ID NO: 1130352 - RNA, 19 nt, Homo sapiens
  misc_RNA (1)...(19): siRNA sense strand
guggacaacugccgauuau

SEQ ID NO: 1130353 - RNA, 19 nt, Homo sapiens
  misc_RNA (1)...(19): siRNA sense strand
ugaauccugucacauuaaa

SEQ ID NO: 1130354 - RNA, 19 nt, Homo sapiens
  misc_RNA (1)...(19): siRNA sense strand
uaaacucgcuccccagaua

SEQ ID NO: 1130355 - RNA, 19 nt, Homo sapiens
  misc_RNA (1)...(19): siRNA sense strand
gaaaucuuaugcugucuac

SEQ ID NO: 1130356 - RNA, 19 nt, Homo sapiens
  misc_RNA (1)...(19): siRNA sense strand
gagcggcacucagaaggaa

SEQ ID NO: 1130357 - RNA, 19 nt, Homo sapiens
  misc_RNA (1)...(19): siRNA sense strand
gcacucugcuauuggacaa

SEQ ID NO: 1130358 - RNA, 19 nt, Homo sapiens
  misc_RNA (1)...(19): siRNA sense strand
cagcugcacucugcuauug

SEQ ID NO: 1130359 - RNA, 19 nt, Homo sapiens
  misc_RNA (1)...(19): siRNA sense strand
ccagaccuaugcagcaauu

SEQ ID NO: 1130360 - RNA, 19 nt, Homo sapiens
  misc_RNA (1)...(19): siRNA sense strand
gagcuuauaccauuaugug

SEQ ID NO: 1130361 - RNA, 19 nt, Homo sapiens
  misc_RNA (1)...(19): siRNA sense strand
gauaugcugucccuaaugc

SEQ ID NO: 1130362 - RNA, 19 nt, Homo sapiens
  misc_RNA (1)...(19): siRNA sense strand
gcuaugaaagcuuuaaaug

SEQ ID NO: 1130363 - RNA, 19 nt, Homo sapiens
  misc_RNA (1)...(19): siRNA sense strand
caggaagaauucaguuaug

SEQ ID NO: 1130364 - RNA, 19 nt, Homo sapiens
  misc_RNA (1)...(19): siRNA sense strand
gggcagagccagaaguaga

SEQ ID NO: 1130365 - RNA, 19 nt, Homo sapiens
  misc_RNA (1)...(19): siRNA sense strand
agaagagauuugucagaaa

SEQ ID NO: 1130366 - RNA, 19 nt, Homo sapiens
  misc_RNA (1)...(19): siRNA sense strand
gacaugguauugcaguaga

SEQ ID NO: 1130367 - RNA, 19 nt, Homo sapiens
  misc_RNA (1)...(19): siRNA sense strand
agacaaacucuaugacauu

SEQ ID NO: 1130368 - RNA, 19 nt, Homo sapiens
  misc_RNA (1)...(19): siRNA sense strand
gacaacugccgauuauuug

SEQ ID NO: 1130369 - RNA, 19 nt, Homo sapiens
  misc_RNA (1)...(19): siRNA sense strand
cuacugcuuucccaggaua

SEQ ID NO: 1130370 - RNA, 19 nt, Homo sapiens
  misc_RNA (1)...(19): siRNA sense strand
ggauaugcauuuguaacau

SEQ ID NO: 1130371 - RNA, 19 nt, Homo sapiens
  misc_RNA (1)...(19): siRNA sense strand
caggauaugcugucccuaa

SEQ ID NO: 1130372 - RNA, 19 nt, Homo sapiens
  misc_RNA (1)...(19): siRNA sense strand
ccagauauuagaagagauu

SEQ ID NO: 1130373 - RNA, 19 nt, Homo sapiens
  misc_RNA (1)...(19): siRNA sense strand
agaaguagaaguugaugaa

SEQ ID NO: 1130374 - RNA, 19 nt, Homo sapiens
  misc_RNA (1)...(19): siRNA sense strand
aaguagaaguugaugaaga

SEQ ID NO: 1130375 - RNA, 19 nt, Homo sapiens
  misc_RNA (1)...(19): siRNA sense strand
caaggacaguuauguuagg

SEQ ID NO: 1130376 - RNA, 19 nt, Homo sapiens
  misc_RNA (1)...(19): siRNA sense strand
uaugaggucuacccaacuu

SEQ ID NO: 1130377 - RNA, 19 nt, Homo sapiens
  misc_RNA (1)...(19): siRNA sense strand
agacuuagcagcauauaca

SEQ ID NO: 1130378 - RNA, 19 nt, Homo sapiens
  misc_RNA (1)...(19): siRNA sense strand
agacagcuauucuuguaca

SEQ ID NO: 1130379 - RNA, 19 nt, Homo sapiens
  misc_RNA (1)...(19): siRNA sense strand
caacugccgauuauuuguu

SEQ ID NO: 1130380 - RNA, 19 nt, Homo sapiens
  misc_RNA (1)...(19): siRNA sense strand
agacguaugcagccgaaua

SEQ ID NO: 1130381 - RNA, 19 nt, Homo sapiens
  misc_RNA (1)...(19): siRNA sense strand
gaggauaccaggucaaagg

SEQ ID NO: 1130382 - RNA, 19 nt, Homo sapiens
  misc_RNA (1)...(19): siRNA sense strand
ccaaaggacaucucagcaa

SEQ ID NO: 1130383 - RNA, 19 nt, Homo sapiens
  misc_RNA (1)...(19): siRNA sense strand
uaaccgagaagaugcaguu

SEQ ID NO: 1130384 - RNA, 19 nt, Homo sapiens
  misc_RNA (1)...(19): siRNA sense strand
gggacaugguauugcagua

SEQ ID NO: 1130385 - RNA, 19 nt, Homo sapiens
  misc_RNA (1)...(19): siRNA sense strand
ccaggaagaauucaguuau

SEQ ID NO: 1130386 - RNA, 19 nt, Homo sapiens
  misc_RNA (1)...(19): siRNA sense strand
aaagguuacugaagguguu

SEQ ID NO: 1130387 - RNA, 19 nt, Homo sapiens
  misc_RNA (1)...(19): siRNA sense strand
uaaaguggaagccaagaau

SEQ ID NO: 1130388 - RNA, 19 nt, Homo sapiens
  misc_RNA (1)...(19): siRNA sense strand
ugagugccuuuguggauga

SEQ ID NO: 1130389 - RNA, 19 nt, Homo sapiens
  misc_RNA (1)...(19): siRNA sense strand
cugaagagaugauugaaaa

SEQ ID NO: 1130390 - RNA, 19 nt, Homo sapiens
  misc_RNA (1)...(19): siRNA sense strand
agaaguugaugaagauaca

SEQ ID NO: 1130391 - RNA, 19 nt, Homo sapiens
  misc_RNA (1)...(19): siRNA sense strand
aguagaaguugaugaagau

SEQ ID NO: 1130392 - RNA, 19 nt, Homo sapiens
  misc_RNA (1)...(19): siRNA sense strand
gcuuauaccauuaugugaa

SEQ ID NO: 1130393 - RNA, 19 nt, Homo sapiens
  misc_RNA (1)...(19): siRNA sense strand
gaccaaagacagcuauucu

SEQ ID NO: 1130394 - RNA, 19 nt, Homo sapiens
  misc_RNA (1)...(19): siRNA sense strand
uggcaacaauagaggauau

SEQ ID NO: 1130395 - RNA, 19 nt, Homo sapiens
  misc_RNA (1)...(19): siRNA sense strand
ugaugaagauacaaugucu

SEQ ID NO: 1130396 - RNA, 19 nt, Homo sapiens
  misc_RNA (1)...(19): siRNA sense strand
gcugcacucugcuauugga

SEQ ID NO: 1130397 - RNA, 19 nt, Homo sapiens
  misc_RNA (1)...(19): siRNA sense strand
ggauggagcucaccccaau

SEQ ID NO: 1130398 - RNA, 19 nt, Homo sapiens
  misc_RNA (1)...(19): siRNA sense strand
ccgagaagaugcaguugag

SEQ ID NO: 1130399 - RNA, 19 nt, Homo sapiens
  misc_RNA (1)...(19): siRNA sense strand
aaaugagaaugaugaugga

SEQ ID NO: 1130400 - RNA, 19 nt, Homo sapiens
  misc_RNA (1)...(19): siRNA sense strand
aagacaaacucuaugacau

SEQ ID NO: 1130401 - RNA, 19 nt, Homo sapiens
  misc_RNA (1)...(19): siRNA sense strand
acaguuauguuagguauac

SEQ ID NO: 1130402 - RNA, 19 nt, Homo sapiens
  misc_RNA (1)...(19): siRNA sense strand
gaugagcuuauaccauuau

SEQ ID NO: 1130403 - RNA, 19 nt, Homo sapiens
  misc_RNA (1)...(19): siRNA sense strand
caagaaugcaaucaagcaa

SEQ ID NO: 1130404 - RNA, 19 nt, Homo sapiens
  misc_RNA (1)...(19): siRNA sense strand
ggaaaauggacaaagaaaa

SEQ ID NO: 1130405 - RNA, 19 nt, Homo sapiens
  misc_RNA (1)...(19): siRNA sense strand
caguggacaaggacaguua

SEQ ID NO: 1130406 - RNA, 19 nt, Homo sapiens
  misc_RNA (1)...(19): siRNA sense strand
ggacaugguauugcaguag

SEQ ID NO: 1130407 - RNA, 19 nt, Homo sapiens
  misc_RNA (1)...(19): siRNA sense strand
gcuuugccuucguggagua

SEQ ID NO: 1130408 - RNA, 19 nt, Homo sapiens
  misc_RNA (1)...(19): siRNA sense strand
aauagaggauaugcauuug

SEQ ID NO: 1130409 - RNA, 19 nt, Homo sapiens
  misc_RNA (1)...(19): siRNA sense strand
caaaaccaguggacaagga

SEQ ID NO: 1130410 - RNA, 19 nt, Homo sapiens
  misc_RNA (1)...(19): siRNA sense strand
uugaggcuaugaaagcuuu

SEQ ID NO: 1130411 - RNA, 19 nt, Homo sapiens
  misc_RNA (1)...(19): siRNA sense strand
aagaugcaguugaggcuau

SEQ ID NO: 1130412 - RNA, 19 nt, Homo sapiens
  misc_RNA (1)...(19): siRNA sense strand
gaaacugcuaccaggaaga

SEQ ID NO: 1130413 - RNA, 19 nt, Homo sapiens
  misc_RNA (1)...(19): siRNA sense strand
cugaagguguugucgaugu

SEQ ID NO: 1130414 - RNA, 19 nt, Homo sapiens
  misc_RNA (1)...(19): siRNA sense strand
ggucaaaggagacaaaaga

SEQ ID NO: 1130415 - RNA, 19 nt, Homo sapiens
  misc_RNA (1)...(19): siRNA sense strand
gcagcaauucccagucuuc

SEQ ID NO: 1130416 - RNA, 19 nt, Homo sapiens
  misc_RNA (1)...(19): siRNA sense strand
ugaaaggggcugugaaauu

SEQ ID NO: 1130417 - RNA, 19 nt, Homo sapiens
  misc_RNA (1)...(19): siRNA sense strand
ccaagaaugcaaucaagca

SEQ ID NO: 1130418 - RNA, 19 nt, Homo sapiens
  misc_RNA (1)...(19): siRNA sense strand
aaugcaaucaagcaacuua

SEQ ID NO: 1130419 - RNA, 19 nt, Homo sapiens
  misc_RNA (1)...(19): siRNA sense strand
ggauaugcugucccuaaug

SEQ ID NO: 1130420 - RNA, 19 nt, Homo sapiens
  misc_RNA (1)...(19): siRNA sense strand
ggaugaagcaaagacguau

SEQ ID NO: 1130421 - RNA, 19 nt, Homo sapiens
  misc_RNA (1)...(19): siRNA sense strand
cagcuauucuuguacaaaa

SEQ ID NO: 1130422 - RNA, 19 nt, Homo sapiens
  misc_RNA (1)...(19): siRNA sense strand
caaaggagacaaaagagaa

SEQ ID NO: 1130423 - RNA, 19 nt, Homo sapiens
  misc_RNA (1)...(19): siRNA sense strand
guccagcgcacaggauaua

SEQ ID NO: 1130424 - RNA, 19 nt, Homo sapiens
  misc_RNA (1)...(19): siRNA sense strand
agaaugcaaucaagcaacu

SEQ ID NO: 1130425 - RNA, 19 nt, Homo sapiens
  misc_RNA (1)...(19): siRNA sense strand
ggcagagccagaaguagaa

SEQ ID NO: 1130426 - RNA, 19 nt, Homo sapiens
  misc_RNA (1)...(19): siRNA sense strand
gcugagugccuuuguggau

SEQ ID NO: 1130427 - RNA, 19 nt, Homo sapiens
  misc_RNA (1)...(19): siRNA sense strand
uguggacaacugccgauua

SEQ ID NO: 1130428 - RNA, 19 nt, Homo sapiens
  misc_RNA (1)...(19): siRNA sense strand
ggacaacugccgauuauuu

SEQ ID NO: 1130429 - RNA, 19 nt, Homo sapiens
  misc_RNA (1)...(19): siRNA sense strand
gaaaggggcugugaaauuu

SEQ ID NO: 1130430 - RNA, 19 nt, Homo sapiens
  misc_RNA (1)...(19): siRNA sense strand
gauacaaugucuucaguga

SEQ ID NO: 1130431 - RNA, 19 nt, Homo sapiens
  misc_RNA (1)...(19): siRNA sense strand
gcaaucaagcaacuuaaua

SEQ ID NO: 1130432 - RNA, 19 nt, Homo sapiens
  misc_RNA (1)...(19): siRNA sense strand
gacaaggacaguuauguua

SEQ ID NO: 1130433 - RNA, 19 nt, Homo sapiens
  misc_RNA (1)...(19): siRNA sense strand
ggacaguuauguuagguau

SEQ ID NO: 1130434 - RNA, 19 nt, Homo sapiens
  misc_RNA (1)...(19): siRNA sense strand
ugagaaugaugauggauuu

SEQ ID NO: 1130435 - RNA, 19 nt, Homo sapiens
  misc_RNA (1)...(19): siRNA sense strand
gacaaacucuaugacauuu

SEQ ID NO: 1130436 - RNA, 19 nt, Homo sapiens
  misc_RNA (1)...(19): siRNA sense strand
uagaggauaugcauuugua

SEQ ID NO: 1130437 - RNA, 19 nt, Homo sapiens
  misc_RNA (1)...(19): siRNA sense strand
caauagaggauaugcauuu

SEQ ID NO: 1130438 - RNA, 19 nt, Homo sapiens
  misc_RNA (1)...(19): siRNA sense strand
gaagagauuugucagaaaa

SEQ ID NO: 1130439 - RNA, 19 nt, Homo sapiens
  misc_RNA (1)...(19): siRNA sense strand
ggaugagcuuauaccauua

SEQ ID NO: 1130440 - RNA, 19 nt, Homo sapiens
  misc_RNA (1)...(19): siRNA sense strand
gacaagacuuagcagcaua

SEQ ID NO: 1130441 - RNA, 19 nt, Homo sapiens
  misc_RNA (1)...(19): siRNA sense strand
gcaauucccagucuucauu

SEQ ID NO: 1130442 - RNA, 19 nt, Homo sapiens
  misc_RNA (1)...(19): siRNA sense strand
gaagaaaauucgagacuau

SEQ ID NO: 1130443 - RNA, 19 nt, Homo sapiens
  misc_RNA (1)...(19): siRNA sense strand
uagaagagauuugucagaa

SEQ ID NO: 1130444 - RNA, 19 nt, Homo sapiens
  misc_RNA (1)...(19): siRNA sense strand
gcacuucaguaaccgagaa

SEQ ID NO: 1130445 - RNA, 19 nt, Homo sapiens
  misc_RNA (1)...(19): siRNA sense strand
aggaugagcuuauaccauu

SEQ ID NO: 1130446 - RNA, 19 nt, Homo sapiens
  misc_RNA (1)...(19): siRNA sense strand
gagaagacaaacucuauga

SEQ ID NO: 1130447 - RNA, 19 nt, Homo sapiens
  misc_RNA (1)...(19): siRNA sense strand
ggacaaggacaguuauguu

SEQ ID NO: 1130448 - RNA, 19 nt, Homo sapiens
  misc_RNA (1)...(19): siRNA sense strand
cccaagcgcugcagauaaa

SEQ ID NO: 1130449 - RNA, 19 nt, Homo sapiens
  misc_RNA (1)...(19): siRNA sense strand
ggacaagacuuagcagcau

SEQ ID NO: 1130450 - RNA, 19 nt, Homo sapiens
  misc_RNA (1)...(19): siRNA sense strand
ggaaucaaaucacaaaucc

SEQ ID NO: 1130451 - RNA, 19 nt, Homo sapiens
  misc_RNA (1)...(19): siRNA sense strand
gaagacaaacucuaugaca

SEQ ID NO: 1130452 - RNA, 19 nt, Homo sapiens
  misc_RNA (1)...(19): siRNA sense strand
guggacaacugccgauuau

SEQ ID NO: 1130453 - RNA, 19 nt, Homo sapiens
  misc_RNA (1)...(19): siRNA sense strand
ugaauccugucacauuaaa

SEQ ID NO: 1130454 - RNA, 19 nt, Homo sapiens
  misc_RNA (1)...(19): siRNA sense strand
uaaacucgcuccccagaua

SEQ ID NO: 1130455 - RNA, 19 nt, Homo sapiens
  misc_RNA (1)...(19): siRNA sense strand
gaaaucuuaugcugucuac

SEQ ID NO: 1130456 - RNA, 19 nt, Homo sapiens
  misc_RNA (1)...(19): siRNA sense strand
gagcggcacucagaaggaa

SEQ ID NO: 1130457 - RNA, 19 nt, Homo sapiens
  misc_RNA (1)...(19): siRNA sense strand
gcacucugcuauuggacaa

SEQ ID NO: 1130458 - RNA, 19 nt, Homo sapiens
  misc_RNA (1)...(19): siRNA sense strand
cagcugcacucugcuauug

SEQ ID NO: 1130459 - RNA, 19 nt, Homo sapiens
  misc_RNA (1)...(19): siRNA sense strand
ccagaccuaugcagcaauu

SEQ ID NO: 1130460 - RNA, 19 nt, Homo sapiens
  misc_RNA (1)...(19): siRNA sense strand
gagcuuauaccauuaugug

SEQ ID NO: 1130461 - RNA, 19 nt, Homo sapiens
  misc_RNA (1)...(19): siRNA sense strand
gauaugcugucccuaaugc

SEQ ID NO: 1130462 - RNA, 19 nt, Homo sapiens
  misc_RNA (1)...(19): siRNA sense strand
gcuaugaaagcuuuaaaug

SEQ ID NO: 1130463 - RNA, 19 nt, Homo sapiens
  misc_RNA (1)...(19): siRNA sense strand
caggaagaauucaguuaug

SEQ ID NO: 1130464 - RNA, 19 nt, Homo sapiens
  misc_RNA (1)...(19): siRNA sense strand
gggcagagccagaaguaga

SEQ ID NO: 1130465 - RNA, 19 nt, Homo sapiens
  misc_RNA (1)...(19): siRNA sense strand
agaagagauuugucagaaa

SEQ ID NO: 1130466 - RNA, 19 nt, Homo sapiens
  misc_RNA (1)...(19): siRNA sense strand
gacaugguauugcaguaga

SEQ ID NO: 1130467 - RNA, 19 nt, Homo sapiens
  misc_RNA (1)...(19): siRNA sense strand
agacaaacucuaugacauu

SEQ ID NO: 1130468 - RNA, 19 nt, Homo sapiens
  misc_RNA (1)...(19): siRNA sense strand
gacaacugccgauuauuug

SEQ ID NO: 1130469 - RNA, 19 nt, Homo sapiens
  misc_RNA (1)...(19): siRNA sense strand
cuacugcuuucccaggaua

SEQ ID NO: 1130470 - RNA, 19 nt, Homo sapiens
  misc_RNA (1)...(19): siRNA sense strand
ggauaugcauuuguaacau

SEQ ID NO: 1130471 - RNA, 19 nt, Homo sapiens
  misc_RNA (1)...(19): siRNA sense strand
caggauaugcugucccuaa

SEQ ID NO: 1130472 - RNA, 19 nt, Homo sapiens
  misc_RNA (1)...(19): siRNA sense strand
ccagauauuagaagagauu

SEQ ID NO: 1130473 - RNA, 19 nt, Homo sapiens
  misc_RNA (1)...(19): siRNA sense strand
agaaguagaaguugaugaa

SEQ ID NO: 1130474 - RNA, 19 nt, Homo sapiens
  misc_RNA (1)...(19): siRNA sense strand
aaguagaaguugaugaaga

SEQ ID NO: 1130475 - RNA, 19 nt, Homo sapiens
  misc_RNA (1)...(19): siRNA sense strand
caaggacaguuauguuagg

SEQ ID NO: 1130476 - RNA, 19 nt, Homo sapiens
  misc_RNA (1)...(19): siRNA sense strand
uaugaggucuacccaacuu

SEQ ID NO: 1130477 - RNA, 19 nt, Homo sapiens
  misc_RNA (1)...(19): siRNA sense strand
agacuuagcagcauauaca

SEQ ID NO: 1130478 - RNA, 19 nt, Homo sapiens
  misc_RNA (1)...(19): siRNA sense strand
agacagcuauucuuguaca

SEQ ID NO: 1130479 - RNA, 19 nt, Homo sapiens
  misc_RNA (1)...(19): siRNA sense strand
caacugccgauuauuuguu

SEQ ID NO: 1130480 - RNA, 19 nt, Homo sapiens
  misc_RNA (1)...(19): siRNA sense strand
agacguaugcagccgaaua

SEQ ID NO: 1130481 - RNA, 19 nt, Homo sapiens
  misc_RNA (1)...(19): siRNA sense strand
gaggauaccaggucaaagg

SEQ ID NO: 1130482 - RNA, 19 nt, Homo sapiens
  misc_RNA (1)...(19): siRNA sense strand
ccaaaggacaucucagcaa

SEQ ID NO: 1130483 - RNA, 19 nt, Homo sapiens
  misc_RNA (1)...(19): siRNA sense strand
uaaccgagaagaugcaguu

SEQ ID NO: 1130484 - RNA, 19 nt, Homo sapiens
  misc_RNA (1)...(19): siRNA sense strand
gggacaugguauugcagua

SEQ ID NO: 1130485 - RNA, 19 nt, Homo sapiens
  misc_RNA (1)...(19): siRNA sense strand
ccaggaagaauucaguuau

SEQ ID NO: 1130486 - RNA, 19 nt, Homo sapiens
  misc_RNA (1)...(19): siRNA sense strand
aaagguuacugaagguguu

SEQ ID NO: 1130487 - RNA, 19 nt, Homo sapiens
  misc_RNA (1)...(19): siRNA sense strand
uaaaguggaagccaagaau

SEQ ID NO: 1130488 - RNA, 19 nt, Homo sapiens
  misc_RNA (1)...(19): siRNA sense strand
ugagugccuuuguggauga

SEQ ID NO: 1130489 - RNA, 19 nt, Homo sapiens
  misc_RNA (1)...(19): siRNA sense strand
cugaagagaugauugaaaa

SEQ ID NO: 1130490 - RNA, 19 nt, Homo sapiens
  misc_RNA (1)...(19): siRNA sense strand
agaaguugaugaagauaca

SEQ ID NO: 1130491 - RNA, 19 nt, Homo sapiens
  misc_RNA (1)...(19): siRNA sense strand
aguagaaguugaugaagau

SEQ ID NO: 1130492 - RNA, 19 nt, Homo sapiens
  misc_RNA (1)...(19): siRNA sense strand
gcuuauaccauuaugugaa

SEQ ID NO: 1130493 - RNA, 19 nt, Homo sapiens
  misc_RNA (1)...(19): siRNA sense strand
gaccaaagacagcuauucu

SEQ ID NO: 1130494 - RNA, 19 nt, Homo sapiens
  misc_RNA (1)...(19): siRNA sense strand
uggcaacaauagaggauau

SEQ ID NO: 1130495 - RNA, 19 nt, Homo sapiens
  misc_RNA (1)...(19): siRNA sense strand
ugaugaagauacaaugucu

SEQ ID NO: 1130496 - RNA, 19 nt, Homo sapiens
  misc_RNA (1)...(19): siRNA sense strand
gcugcacucugcuauugga

SEQ ID NO: 1130497 - RNA, 19 nt, Homo sapiens
  misc_RNA (1)...(19): siRNA sense strand
ggauggagcucaccccaau

SEQ ID NO: 1130498 - RNA, 19 nt, Homo sapiens
  misc_RNA (1)...(19): siRNA sense strand
ccgagaagaugcaguugag

SEQ ID NO: 1130499 - RNA, 19 nt, Homo sapiens
  misc_RNA (1)...(19): siRNA sense strand
aaaugagaaugaugaugga

SEQ ID NO: 1130500 - RNA, 19 nt, Homo sapiens
  misc_RNA (1)...(19): siRNA sense strand
aagacaaacucuaugacau

SEQ ID NO: 1130501 - RNA, 19 nt, Homo sapiens
  misc_RNA (1)...(19): siRNA sense strand
acaguuauguuagguauac

SEQ ID NO: 1130502 - RNA, 19 nt, Homo sapiens
  misc_RNA (1)...(19): siRNA sense strand
gaugagcuuauaccauuau

SEQ ID NO: 1130503 - RNA, 19 nt, Homo sapiens
  misc_RNA (1)...(19): siRNA sense strand
caagaaugcaaucaagcaa

SEQ ID NO: 1130504 - RNA, 19 nt, Homo sapiens
  misc_RNA (1)...(19): siRNA sense strand
ggaaaauggacaaagaaaa

SEQ ID NO: 1130505 - RNA, 19 nt, Homo sapiens
  misc_RNA (1)...(19): siRNA sense strand
caguggacaaggacaguua

SEQ ID NO: 1130506 - RNA, 19 nt, Homo sapiens
  misc_RNA (1)...(19): siRNA sense strand
ggacaugguauugcaguag

SEQ ID NO: 1130507 - RNA, 19 nt, Homo sapiens
  misc_RNA (1)...(19): siRNA sense strand
gcuuugccuucguggagua

SEQ ID NO: 1130508 - RNA, 19 nt, Homo sapiens
  misc_RNA (1)...(19): siRNA sense strand
aauagaggauaugcauuug

SEQ ID NO: 1130509 - RNA, 19 nt, Homo sapiens
  misc_RNA (1)...(19): siRNA sense strand
caaaaccaguggacaagga

SEQ ID NO: 1130510 - RNA, 19 nt, Homo sapiens
  misc_RNA (1)...(19): siRNA sense strand
uugaggcuaugaaagcuuu

SEQ ID NO: 1130511 - RNA, 19 nt, Homo sapiens
  misc_RNA (1)...(19): siRNA sense strand
aagaugcaguugaggcuau

SEQ ID NO: 1130512 - RNA, 19 nt, Homo sapiens
  misc_RNA (1)...(19): siRNA sense strand
gaaacugcuaccaggaaga

SEQ ID NO: 1130513 - RNA, 19 nt, Homo sapiens
  misc_RNA (1)...(19): siRNA sense strand
cugaagguguugucgaugu

SEQ ID NO: 1130514 - RNA, 19 nt, Homo sapiens
  misc_RNA (1)...(19): siRNA sense strand
ggucaaaggagacaaaaga

SEQ ID NO: 1130515 - RNA, 19 nt, Homo sapiens
  misc_RNA (1)...(19): siRNA sense strand
gcagcaauucccagucuuc

SEQ ID NO: 1130516 - RNA, 19 nt, Homo sapiens
  misc_RNA (1)...(19): siRNA sense strand
ugaaaggggcugugaaauu

SEQ ID NO: 1130517 - RNA, 19 nt, Homo sapiens
  misc_RNA (1)...(19): siRNA sense strand
ccaagaaugcaaucaagca

SEQ ID NO: 1130518 - RNA, 19 nt, Homo sapiens
  misc_RNA (1)...(19): siRNA sense strand
aaugcaaucaagcaacuua

SEQ ID NO: 1130519 - RNA, 19 nt, Homo sapiens
  misc_RNA (1)...(19): siRNA sense strand
ggauaugcugucccuaaug

SEQ ID NO: 1130520 - RNA, 19 nt, Homo sapiens
  misc_RNA (1)...(19): siRNA sense strand
ggaugaagcaaagacguau

SEQ ID NO: 1130521 - RNA, 19 nt, Homo sapiens
  misc_RNA (1)...(19): siRNA sense strand
cagcuauucuuguacaaaa

SEQ ID NO: 1130522 - RNA, 19 nt, Homo sapiens
  misc_RNA (1)...(19): siRNA sense strand
caaaggagacaaaagagaa

SEQ ID NO: 1130523 - RNA, 19 nt, Homo sapiens
  misc_RNA (1)...(19): siRNA sense strand
guccagcgcacaggauaua

SEQ ID NO: 1130524 - RNA, 19 nt, Homo sapiens
  misc_RNA (1)...(19): siRNA sense strand
agaaugcaaucaagcaacu

SEQ ID NO: 1130525 - RNA, 19 nt, Homo sapiens
  misc_RNA (1)...(19): siRNA sense strand
ggcagagccagaaguagaa

SEQ ID NO: 1130526 - RNA, 19 nt, Homo sapiens
  misc_RNA (1)...(19): siRNA sense strand
gcugagugccuuuguggau

SEQ ID NO: 1130527 - RNA, 19 nt, Homo sapiens
  misc_RNA (1)...(19): siRNA sense strand
uguggacaacugccgauua

SEQ ID NO: 1130528 - RNA, 19 nt, Homo sapiens
  misc_RNA (1)...(19): siRNA sense strand
ggacaacugccgauuauuu

SEQ ID NO: 1130529 - RNA, 19 nt, Homo sapiens
  misc_RNA (1)...(19): siRNA sense strand
gaaaggggcugugaaauuu

SEQ ID NO: 1130530 - RNA, 19 nt, Homo sapiens
  misc_RNA (1)...(19): siRNA sense strand
gauacaaugucuucaguga

SEQ ID NO: 1130531 - RNA, 19 nt, Homo sapiens
  misc_RNA (1)...(19): siRNA sense strand
gcaaucaagcaacuuaaua

SEQ ID NO: 1130532 - RNA, 19 nt, Homo sapiens
  misc_RNA (1)...(19): siRNA sense strand
gacaaggacaguuauguua

SEQ ID NO: 1130533 - RNA, 19 nt, Homo sapiens
  misc_RNA (1)...(19): siRNA sense strand
ggacaguuauguuagguau

SEQ ID NO: 1130534 - RNA, 19 nt, Homo sapiens
  misc_RNA (1)...(19): siRNA sense strand
ugagaaugaugauggauuu

SEQ ID NO: 1130535 - RNA, 19 nt, Homo sapiens
  misc_RNA (1)...(19): siRNA sense strand
gacaaacucuaugacauuu

SEQ ID NO: 1130536 - RNA, 19 nt, Homo sapiens
  misc_RNA (1)...(19): siRNA sense strand
uagaggauaugcauuugua

SEQ ID NO: 1130537 - RNA, 19 nt, Homo sapiens
  misc_RNA (1)...(19): siRNA sense strand
caauagaggauaugcauuu

SEQ ID NO: 1130538 - RNA, 19 nt, Homo sapiens
  misc_RNA (1)...(19): siRNA sense strand
gaagagauuugucagaaaa

SEQ ID NO: 1130539 - RNA, 19 nt, Homo sapiens
  misc_RNA (1)...(19): siRNA sense strand
ggaugagcuuauaccauua

SEQ ID NO: 1130540 - RNA, 19 nt, Homo sapiens
  misc_RNA (1)...(19): siRNA sense strand
gacaagacuuagcagcaua

SEQ ID NO: 1130541 - RNA, 19 nt, Homo sapiens
  misc_RNA (1)...(19): siRNA sense strand
gcaauucccagucuucauu

SEQ ID NO: 1130542 - RNA, 19 nt, Homo sapiens
  misc_RNA (1)...(19): siRNA sense strand
gaagaaaauucgagacuau

SEQ ID NO: 1130543 - RNA, 19 nt, Homo sapiens
  misc_RNA (1)...(19): siRNA sense strand
uagaagagauuugucagaa

SEQ ID NO: 1130544 - RNA, 19 nt, Homo sapiens
  misc_RNA (1)...(19): siRNA sense strand
gcacuucaguaaccgagaa

SEQ ID NO: 1130545 - RNA, 19 nt, Homo sapiens
  misc_RNA (1)...(19): siRNA sense strand
aggaugagcuuauaccauu

SEQ ID NO: 1130546 - RNA, 19 nt, Homo sapiens
  misc_RNA (1)...(19): siRNA sense strand
gagaagacaaacucuauga

SEQ ID NO: 1130547 - RNA, 19 nt, Homo sapiens
  misc_RNA (1)...(19): siRNA sense strand
ggacaaggacaguuauguu

SEQ ID NO: 1130548 - RNA, 19 nt, Homo sapiens
  misc_RNA (1)...(19): siRNA sense strand
cccaagcgcugcagauaaa

SEQ ID NO: 1130549 - RNA, 19 nt, Homo sapiens
  misc_RNA (1)...(19): siRNA sense strand
ggacaagacuuagcagcau

SEQ ID NO: 1130550 - RNA, 19 nt, Homo sapiens
  misc_RNA (1)...(19): siRNA sense strand
gaagacaaacucuaugaca

SEQ ID NO: 1130551 - RNA, 19 nt, Homo sapiens
  misc_RNA (1)...(19): siRNA sense strand
guggacaacugccgauuau

SEQ ID NO: 1130552 - RNA, 19 nt, Homo sapiens
  misc_RNA (1)...(19): siRNA sense strand
ugaauccugucacauuaaa

SEQ ID NO: 1130553 - RNA, 19 nt, Homo sapiens
  misc_RNA (1)...(19): siRNA sense strand
uaaacucgcuccccagaua

SEQ ID NO: 1130554 - RNA, 19 nt, Homo sapiens
  misc_RNA (1)...(19): siRNA sense strand
gaaaucuuaugcugucuac

SEQ ID NO: 1130555 - RNA, 19 nt, Homo sapiens
  misc_RNA (1)...(19): siRNA sense strand
gcacucugcuauuggacaa

SEQ ID NO: 1130556 - RNA, 19 nt, Homo sapiens
  misc_RNA (1)...(19): siRNA sense strand
cagcugcacucugcuauug

SEQ ID NO: 1130557 - RNA, 19 nt, Homo sapiens
  misc_RNA (1)...(19): siRNA sense strand
ccagaccuaugcagcaauu

SEQ ID NO: 1130558 - RNA, 19 nt, Homo sapiens
  misc_RNA (1)...(19): siRNA sense strand
gagcuuauaccauuaugug

SEQ ID NO: 1130559 - RNA, 19 nt, Homo sapiens
  misc_RNA (1)...(19): siRNA sense strand
gauaugcugucccuaaugc

SEQ ID NO: 1130560 - RNA, 19 nt, Homo sapiens
  misc_RNA (1)...(19): siRNA sense strand
gcuaugaaagcuuuaaaug

SEQ ID NO: 1130561 - RNA, 19 nt, Homo sapiens
  misc_RNA (1)...(19): siRNA sense strand
caggaagaauucaguuaug

SEQ ID NO: 1130562 - RNA, 19 nt, Homo sapiens
  misc_RNA (1)...(19): siRNA sense strand
gggcagagccagaaguaga

SEQ ID NO: 1130563 - RNA, 19 nt, Homo sapiens
  misc_RNA (1)...(19): siRNA sense strand
agaagagauuugucagaaa

SEQ ID NO: 1130564 - RNA, 19 nt, Homo sapiens
  misc_RNA (1)...(19): siRNA sense strand
gacaugguauugcaguaga

SEQ ID NO: 1130565 - RNA, 19 nt, Homo sapiens
  misc_RNA (1)...(19): siRNA sense strand
agacaaacucuaugacauu

SEQ ID NO: 1130566 - RNA, 19 nt, Homo sapiens
  misc_RNA (1)...(19): siRNA sense strand
gacaacugccgauuauuug

SEQ ID NO: 1130567 - RNA, 19 nt, Homo sapiens
  misc_RNA (1)...(19): siRNA sense strand
cuacugcuuucccaggaua

SEQ ID NO: 1130568 - RNA, 19 nt, Homo sapiens
  misc_RNA (1)...(19): siRNA sense strand
ggauaugcauuuguaacau

SEQ ID NO: 1130569 - RNA, 19 nt, Homo sapiens
  misc_RNA (1)...(19): siRNA sense strand
caggauaugcugucccuaa

SEQ ID NO: 1130570 - RNA, 19 nt, Homo sapiens
  misc_RNA (1)...(19): siRNA sense strand
ccagauauuagaagagauu

SEQ ID NO: 1130571 - RNA, 19 nt, Homo sapiens
  misc_RNA (1)...(19): siRNA sense strand
agaaguagaaguugaugaa

SEQ ID NO: 1130572 - RNA, 19 nt, Homo sapiens
  misc_RNA (1)...(19): siRNA sense strand
aaguagaaguugaugaaga

SEQ ID NO: 1130573 - RNA, 19 nt, Homo sapiens
  misc_RNA (1)...(19): siRNA sense strand
caaggacaguuauguuagg

SEQ ID NO: 1130574 - RNA, 19 nt, Homo sapiens
  misc_RNA (1)...(19): siRNA sense strand
uaugaggucuacccaacuu

SEQ ID NO: 1130575 - RNA, 19 nt, Homo sapiens
  misc_RNA (1)...(19): siRNA sense strand
agacuuagcagcauauaca

SEQ ID NO: 1130576 - RNA, 19 nt, Homo sapiens
  misc_RNA (1)...(19): siRNA sense strand
agacagcuauucuuguaca

SEQ ID NO: 1130577 - RNA, 19 nt, Homo sapiens
  misc_RNA (1)...(19): siRNA sense strand
caacugccgauuauuuguu

SEQ ID NO: 1130578 - RNA, 19 nt, Homo sapiens
  misc_RNA (1)...(19): siRNA sense strand
agacguaugcagccgaaua

SEQ ID NO: 1130579 - RNA, 19 nt, Homo sapiens
  misc_RNA (1)...(19): siRNA sense strand
gaggauaccaggucaaagg

SEQ ID NO: 1130580 - RNA, 19 nt, Homo sapiens
  misc_RNA (1)...(19): siRNA sense strand
ccaaaggacaucucagcaa

SEQ ID NO: 1130581 - RNA, 19 nt, Homo sapiens
  misc_RNA (1)...(19): siRNA sense strand
uaaccgagaagaugcaguu

SEQ ID NO: 1130582 - RNA, 19 nt, Homo sapiens
  misc_RNA (1)...(19): siRNA sense strand
gggacaugguauugcagua

SEQ ID NO: 1130583 - RNA, 19 nt, Homo sapiens
  misc_RNA (1)...(19): siRNA sense strand
ccaggaagaauucaguuau

SEQ ID NO: 1130584 - RNA, 19 nt, Homo sapiens
  misc_RNA (1)...(19): siRNA sense strand
aaagguuacugaagguguu

SEQ ID NO: 1130585 - RNA, 19 nt, Homo sapiens
  misc_RNA (1)...(19): siRNA sense strand
uaaaguggaagccaagaau

SEQ ID NO: 1130586 - RNA, 19 nt, Homo sapiens
  misc_RNA (1)...(19): siRNA sense strand
ugagugccuuuguggauga

SEQ ID NO: 1130587 - RNA, 19 nt, Homo sapiens
  misc_RNA (1)...(19): siRNA sense strand
cugaagagaugauugaaaa

SEQ ID NO: 1130588 - RNA, 19 nt, Homo sapiens
  misc_RNA (1)...(19): siRNA sense strand
agaaguugaugaagauaca

SEQ ID NO: 1130589 - RNA, 19 nt, Homo sapiens
  misc_RNA (1)...(19): siRNA sense strand
aguagaaguugaugaagau

SEQ ID NO: 1130590 - RNA, 19 nt, Homo sapiens
  misc_RNA (1)...(19): siRNA sense strand
gcuuauaccauuaugugaa

SEQ ID NO: 1130591 - RNA, 19 nt, Homo sapiens
  misc_RNA (1)...(19): siRNA sense strand
gaccaaagacagcuauucu

SEQ ID NO: 1130592 - RNA, 19 nt, Homo sapiens
  misc_RNA (1)...(19): siRNA sense strand
uggcaacaauagaggauau

SEQ ID NO: 1130593 - RNA, 19 nt, Homo sapiens
  misc_RNA (1)...(19): siRNA sense strand
ugaugaagauacaaugucu

SEQ ID NO: 1130594 - RNA, 19 nt, Homo sapiens
  misc_RNA (1)...(19): siRNA sense strand
gcugcacucugcuauugga

SEQ ID NO: 1130595 - RNA, 19 nt, Homo sapiens
  misc_RNA (1)...(19): siRNA sense strand
ggauggagcucaccccaau

SEQ ID NO: 1130596 - RNA, 19 nt, Homo sapiens
  misc_RNA (1)...(19): siRNA sense strand
ccgagaagaugcaguugag

SEQ ID NO: 1130597 - RNA, 19 nt, Homo sapiens
  misc_RNA (1)...(19): siRNA sense strand
acaguuauguuagguauac

SEQ ID NO: 1130598 - RNA, 19 nt, Homo sapiens
  misc_RNA (1)...(19): siRNA sense strand
aaaugagaaugaugaugga

SEQ ID NO: 1130599 - RNA, 19 nt, Homo sapiens
  misc_RNA (1)...(19): siRNA sense strand
aagacaaacucuaugacau

SEQ ID NO: 1130600 - RNA, 19 nt, Homo sapiens
  misc_RNA (1)...(19): siRNA sense strand
gaugagcuuauaccauuau

SEQ ID NO: 1130601 - RNA, 19 nt, Homo sapiens
  misc_RNA (1)...(19): siRNA sense strand
gcuuugccuucguggagua

SEQ ID NO: 1130602 - RNA, 19 nt, Homo sapiens
  misc_RNA (1)...(19): siRNA sense strand
ggaaaauggacaaagaaaa

SEQ ID NO: 1130603 - RNA, 19 nt, Homo sapiens
  misc_RNA (1)...(19): siRNA sense strand
caagaaugcaaucaagcaa

SEQ ID NO: 1130604 - RNA, 19 nt, Homo sapiens
  misc_RNA (1)...(19): siRNA sense strand
caguggacaaggacaguua

SEQ ID NO: 1130605 - RNA, 19 nt, Homo sapiens
  misc_RNA (1)...(19): siRNA sense strand
ggacaugguauugcaguag

SEQ ID NO: 1130606 - RNA, 19 nt, Homo sapiens
  misc_RNA (1)...(19): siRNA sense strand
gaaacugcuaccaggaaga

SEQ ID NO: 1130607 - RNA, 19 nt, Homo sapiens
  misc_RNA (1)...(19): siRNA sense strand
aauagaggauaugcauuug

SEQ ID NO: 1130608 - RNA, 19 nt, Homo sapiens
  misc_RNA (1)...(19): siRNA sense strand
caaaaccaguggacaagga

SEQ ID NO: 1130609 - RNA, 19 nt, Homo sapiens
  misc_RNA (1)...(19): siRNA sense strand
uugaggcuaugaaagcuuu

SEQ ID NO: 1130610 - RNA, 19 nt, Homo sapiens
  misc_RNA (1)...(19): siRNA sense strand
aagaugcaguugaggcuau

SEQ ID NO: 1130611 - RNA, 19 nt, Homo sapiens
  misc_RNA (1)...(19): siRNA sense strand
cugaagguguugucgaugu

SEQ ID NO: 1130612 - RNA, 19 nt, Homo sapiens
  misc_RNA (1)...(19): siRNA sense strand
ccaagaaugcaaucaagca

SEQ ID NO: 1130613 - RNA, 19 nt, Homo sapiens
  misc_RNA (1)...(19): siRNA sense strand
ggucaaaggagacaaaaga

SEQ ID NO: 1130614 - RNA, 19 nt, Homo sapiens
  misc_RNA (1)...(19): siRNA sense strand
gcagcaauucccagucuuc

SEQ ID NO: 1130615 - RNA, 19 nt, Homo sapiens
  misc_RNA (1)...(19): siRNA sense strand
ugaaaggggcugugaaauu

SEQ ID NO: 1130616 - RNA, 19 nt, Homo sapiens
  misc_RNA (1)...(19): siRNA sense strand
caaaggagacaaaagagaa

SEQ ID NO: 1130617 - RNA, 19 nt, Homo sapiens
  misc_RNA (1)...(19): siRNA sense strand
ggauaugcugucccuaaug

SEQ ID NO: 1130618 - RNA, 19 nt, Homo sapiens
  misc_RNA (1)...(19): siRNA sense strand
ggaugaagcaaagacguau

SEQ ID NO: 1130619 - RNA, 19 nt, Homo sapiens
  misc_RNA (1)...(19): siRNA sense strand
cagcuauucuuguacaaaa

SEQ ID NO: 1130620 - RNA, 19 nt, Homo sapiens
  misc_RNA (1)...(19): siRNA sense strand
aaugcaaucaagcaacuua

SEQ ID NO: 1130621 - RNA, 19 nt, Homo sapiens
  misc_RNA (1)...(19): siRNA sense strand
ggcagagccagaaguagaa

SEQ ID NO: 1130622 - RNA, 19 nt, Homo sapiens
  misc_RNA (1)...(19): siRNA sense strand
agaaugcaaucaagcaacu

SEQ ID NO: 1130623 - RNA, 19 nt, Homo sapiens
  misc_RNA (1)...(19): siRNA sense strand
gcugagugccuuuguggau

SEQ ID NO: 1130624 - RNA, 19 nt, Homo sapiens
  misc_RNA (1)...(19): siRNA sense strand
uguggacaacugccgauua

SEQ ID NO: 1130625 - RNA, 19 nt, Homo sapiens
  misc_RNA (1)...(19): siRNA sense strand
cccaaugaauccugucaca

SEQ ID NO: 1130626 - RNA, 19 nt, Homo sapiens
  misc_RNA (1)...(19): siRNA sense strand
gaggaugagcuuauaccau

SEQ ID NO: 1130627 - RNA, 19 nt, Homo sapiens
  misc_RNA (1)...(19): siRNA sense strand
caauucccagucuucauuu

SEQ ID NO: 1130628 - RNA, 19 nt, Homo sapiens
  misc_RNA (1)...(19): siRNA sense strand
gauaacauuugcuccauuu

SEQ ID NO: 1130629 - RNA, 19 nt, Homo sapiens
  misc_RNA (1)...(19): siRNA sense strand
gcaacucucucucagauca

SEQ ID NO: 1130630 - RNA, 19 nt, Homo sapiens
  misc_RNA (1)...(19): siRNA sense strand
accaggagcucaugacuua

SEQ ID NO: 1130631 - RNA, 19 nt, Homo sapiens
  misc_RNA (1)...(19): siRNA sense strand
ccacgagucugacaucaau

SEQ ID NO: 1130632 - RNA, 19 nt, Homo sapiens
  misc_RNA (1)...(19): siRNA sense strand
ugggauagcuuccucaaga

SEQ ID NO: 1130633 - RNA, 19 nt, Homo sapiens
  misc_RNA (1)...(19): siRNA sense strand
ggagaugucaugagccuuu

SEQ ID NO: 1130634 - RNA, 19 nt, Homo sapiens
  misc_RNA (1)...(19): siRNA sense strand
ggauaacauuugcuccauu

SEQ ID NO: 1130635 - RNA, 19 nt, Homo sapiens
  misc_RNA (1)...(19): siRNA sense strand
gagugagcuugaccaguua

SEQ ID NO: 1130636 - RNA, 19 nt, Homo sapiens
  misc_RNA (1)...(19): siRNA sense strand
cgucugggaugcacucaaa

SEQ ID NO: 1130637 - RNA, 19 nt, Homo sapiens
  misc_RNA (1)...(19): siRNA sense strand
cagcagacgaccacguuua

SEQ ID NO: 1130638 - RNA, 19 nt, Homo sapiens
  misc_RNA (1)...(19): siRNA sense strand
gucaugagccuuucucuug

SEQ ID NO: 1130639 - RNA, 19 nt, Homo sapiens
  misc_RNA (1)...(19): siRNA sense strand
gccauuugcuucuuuccaa

SEQ ID NO: 1130640 - RNA, 19 nt, Homo sapiens
  misc_RNA (1)...(19): siRNA sense strand
ucucucagaucacaaacaa

SEQ ID NO: 1130641 - RNA, 19 nt, Homo sapiens
  misc_RNA (1)...(19): siRNA sense strand
gcaggaugguaaacuuauc

SEQ ID NO: 1130642 - RNA, 19 nt, Homo sapiens
  misc_RNA (1)...(19): siRNA sense strand
caacuuaagaaccagauuc

SEQ ID NO: 1130643 - RNA, 19 nt, Homo sapiens
  misc_RNA (1)...(19): siRNA sense strand
guucgucucuggugcuugu

SEQ ID NO: 1130644 - RNA, 19 nt, Homo sapiens
  misc_RNA (1)...(19): siRNA sense strand
gggauagcuuccucaagau

SEQ ID NO: 1130645 - RNA, 19 nt, Homo sapiens
  misc_RNA (1)...(19): siRNA sense strand
gcaggaggccgagcaacuu

SEQ ID NO: 1130646 - RNA, 19 nt, Homo sapiens
  misc_RNA (1)...(19): siRNA sense strand
gcgguggccuggauaacau

SEQ ID NO: 1130647 - RNA, 19 nt, Homo sapiens
  misc_RNA (1)...(19): siRNA sense strand
caggaaagcaugugcagau

SEQ ID NO: 1130648 - RNA, 19 nt, Homo sapiens
  misc_RNA (1)...(19): siRNA sense strand
caggaggccgagcaacuua

SEQ ID NO: 1130649 - RNA, 19 nt, Homo sapiens
  misc_RNA (1)...(19): siRNA sense strand
gucaugaccugugcauaug

SEQ ID NO: 1130650 - RNA, 19 nt, Homo sapiens
  misc_RNA (1)...(19): siRNA sense strand
uggcaggacacacagguua

SEQ ID NO: 1130651 - RNA, 19 nt, Homo sapiens
  misc_RNA (1)...(19): siRNA sense strand
cagccaaacucugggaugu

SEQ ID NO: 1130652 - RNA, 19 nt, Homo sapiens
  misc_RNA (1)...(19): siRNA sense strand
ccgagcaacuuaagaacca

SEQ ID NO: 1130653 - RNA, 19 nt, Homo sapiens
  misc_RNA (1)...(19): siRNA sense strand
ucacuggccacgagucuga

SEQ ID NO: 1130654 - RNA, 19 nt, Homo sapiens
  misc_RNA (1)...(19): siRNA sense strand
gccgauuccuggaugacaa

SEQ ID NO: 1130655 - RNA, 19 nt, Homo sapiens
  misc_RNA (1)...(19): siRNA sense strand
uaacauuugcuccauuuac

SEQ ID NO: 1130656 - RNA, 19 nt, Homo sapiens
  misc_RNA (1)...(19): siRNA sense strand
aacauuugcuccauuuaca

SEQ ID NO: 1130657 - RNA, 19 nt, Homo sapiens
  misc_RNA (1)...(19): siRNA sense strand
gauucgagacgccaggaaa

SEQ ID NO: 1130658 - RNA, 19 nt, Homo sapiens
  misc_RNA (1)...(19): siRNA sense strand
ucucagaucacaaacaaca

SEQ ID NO: 1130659 - RNA, 19 nt, Homo sapiens
  misc_RNA (1)...(19): siRNA sense strand
gaccaggagcucaugacuu

SEQ ID NO: 1130660 - RNA, 19 nt, Homo sapiens
  misc_RNA (1)...(19): siRNA sense strand
ucgcaggaugguaaacuua

SEQ ID NO: 1130661 - RNA, 19 nt, Homo sapiens
  misc_RNA (1)...(19): siRNA sense strand
ccagugggaagaauccaaa

SEQ ID NO: 1130662 - RNA, 19 nt, Homo sapiens
  misc_RNA (1)...(19): siRNA sense strand
gagaugucaugagccuuuc

SEQ ID NO: 1130663 - RNA, 19 nt, Homo sapiens
  misc_RNA (1)...(19): siRNA sense strand
ugacuuacucccaugacaa

SEQ ID NO: 1130664 - RNA, 19 nt, Homo sapiens
  misc_RNA (1)...(19): siRNA sense strand
gugccucgcaggaugguaa

SEQ ID NO: 1130665 - RNA, 19 nt, Homo sapiens
  misc_RNA (1)...(19): siRNA sense strand
ggauagcuuccucaagauc

SEQ ID NO: 1130666 - RNA, 19 nt, Homo sapiens
  misc_RNA (1)...(19): siRNA sense strand
augcaacucucucucagau

SEQ ID NO: 1130667 - RNA, 19 nt, Homo sapiens
  misc_RNA (1)...(19): siRNA sense strand
cagaugcaacucucucuca

SEQ ID NO: 1130668 - RNA, 19 nt, Homo sapiens
  misc_RNA (1)...(19): siRNA sense strand
gaugcaacucucucucaga

SEQ ID NO: 1130669 - RNA, 19 nt, Homo sapiens
  misc_RNA (1)...(19): siRNA sense strand
gccagcagacgaccacguu

SEQ ID NO: 1130670 - RNA, 19 nt, Homo sapiens
  misc_RNA (1)...(19): siRNA sense strand
uuacucccaugacaacauc

SEQ ID NO: 1130671 - RNA, 19 nt, Homo sapiens
  misc_RNA (1)...(19): siRNA sense strand
gcaacuuaagaaccagauu

SEQ ID NO: 1130672 - RNA, 19 nt, Homo sapiens
  misc_RNA (1)...(19): siRNA sense strand
gcaccuggccaagaucuac

SEQ ID NO: 1130673 - RNA, 19 nt, Homo sapiens
  misc_RNA (1)...(19): siRNA sense strand
gauagcuuccucaagaucu

SEQ ID NO: 1130674 - RNA, 19 nt, Homo sapiens
  misc_RNA (1)...(19): siRNA sense strand
augguaaacuuaucaucug

SEQ ID NO: 1130675 - RNA, 19 nt, Homo sapiens
  misc_RNA (1)...(19): siRNA sense strand
gcacagacuccaggcuucu

SEQ ID NO: 1130676 - RNA, 19 nt, Homo sapiens
  misc_RNA (1)...(19): siRNA sense strand
gcaugugccggcagaccuu

SEQ ID NO: 1130677 - RNA, 19 nt, Homo sapiens
  misc_RNA (1)...(19): siRNA sense strand
ccucaagaucuggaacuaa

SEQ ID NO: 1130678 - RNA, 19 nt, Homo sapiens
  misc_RNA (1)...(19): siRNA sense strand
ucagaucacaaacaacauc

SEQ ID NO: 1130679 - RNA, 19 nt, Homo sapiens
  misc_RNA (1)...(19): siRNA sense strand
ggccacgagucugacauca

SEQ ID NO: 1130680 - RNA, 19 nt, Homo sapiens
  misc_RNA (1)...(19): siRNA sense strand
ccaccugcaggcuguuuga

SEQ ID NO: 1130681 - RNA, 19 nt, Homo sapiens
  misc_RNA (1)...(19): siRNA sense strand
caacguggauucuuucauc

SEQ ID NO: 1130682 - RNA, 19 nt, Homo sapiens
  misc_RNA (1)...(19): siRNA sense strand
ggaaagagaccaucccaau

SEQ ID NO: 1130683 - RNA, 19 nt, Homo sapiens
  misc_RNA (1)...(19): siRNA sense strand
gaaagagaccaucccaaug

SEQ ID NO: 1130684 - RNA, 19 nt, Homo sapiens
  misc_RNA (1)...(19): siRNA sense strand
ugacagugcucgaucucuu

SEQ ID NO: 1130685 - RNA, 19 nt, Homo sapiens
  misc_RNA (1)...(19): siRNA sense strand
gggugcaucucaucugcua

SEQ ID NO: 1130686 - RNA, 19 nt, Homo sapiens
  misc_RNA (1)...(19): siRNA sense strand
cagcuucuuugguuucuau

SEQ ID NO: 1130687 - RNA, 19 nt, Homo sapiens
  misc_RNA (1)...(19): siRNA sense strand
ccaccacgaugacuuguac

SEQ ID NO: 1130688 - RNA, 19 nt, Homo sapiens
  misc_RNA (1)...(19): siRNA sense strand
ccaccuccaugcggucuaa

SEQ ID NO: 1130689 - RNA, 19 nt, Homo sapiens
  misc_RNA (1)...(19): siRNA sense strand
caguccagcuucuuugguu

SEQ ID NO: 1130690 - RNA, 19 nt, Homo sapiens
  misc_RNA (1)...(19): siRNA sense strand
ccacagaugggacaguaug

SEQ ID NO: 1130691 - RNA, 19 nt, Homo sapiens
  misc_RNA (1)...(19): siRNA sense strand
ggccaggaauucuccaucu

SEQ ID NO: 1130692 - RNA, 19 nt, Homo sapiens
  misc_RNA (1)...(19): siRNA sense strand
gaucacaacguggauucuu

SEQ ID NO: 1130693 - RNA, 19 nt, Homo sapiens
  misc_RNA (1)...(19): siRNA sense strand
aaagagaccaucccaaugc

SEQ ID NO: 1130694 - RNA, 19 nt, Homo sapiens
  misc_RNA (1)...(19): siRNA sense strand
ccucuccucuccacagaug

SEQ ID NO: 1130695 - RNA, 19 nt, Homo sapiens
  misc_RNA (1)...(19): siRNA sense strand
ggagacacggacuacuuga

SEQ ID NO: 1130696 - RNA, 19 nt, Homo sapiens
  misc_RNA (1)...(19): siRNA sense strand
gaugacuuguaccucaaug

SEQ ID NO: 1130697 - RNA, 19 nt, Homo sapiens
  misc_RNA (1)...(19): siRNA sense strand
caugcggucuaaccucuau

SEQ ID NO: 1130698 - RNA, 19 nt, Homo sapiens
  misc_RNA (1)...(19): siRNA sense strand
gagacacggacuacuugaa

SEQ ID NO: 1130699 - RNA, 19 nt, Homo sapiens
  misc_RNA (1)...(19): siRNA sense strand
ggaauacaucaaugagaca

SEQ ID NO: 1130700 - RNA, 19 nt, Homo sapiens
  misc_RNA (1)...(19): siRNA sense strand
cuccacagaugggacagua

SEQ ID NO: 1130701 - RNA, 19 nt, Homo sapiens
  misc_RNA (1)...(19): siRNA sense strand
caguauggcggaagaacuu

SEQ ID NO: 1130702 - RNA, 19 nt, Homo sapiens
  misc_RNA (1)...(19): siRNA sense strand
gccaggaauucuccaucug

SEQ ID NO: 1130703 - RNA, 19 nt, Homo sapiens
  misc_RNA (1)...(19): siRNA sense strand
ucacaacguggauucuuuc

SEQ ID NO: 1130704 - RNA, 19 nt, Homo sapiens
  misc_RNA (1)...(19): siRNA sense strand
ggagauggaggagcaacug

SEQ ID NO: 1130705 - RNA, 19 nt, Homo sapiens
  misc_RNA (1)...(19): siRNA sense strand
gaugaugguguuauuacuc

SEQ ID NO: 1130706 - RNA, 19 nt, Homo sapiens
  misc_RNA (1)...(19): siRNA sense strand
ccaucccaaugccacagua

SEQ ID NO: 1130707 - RNA, 19 nt, Homo sapiens
  misc_RNA (1)...(19): siRNA sense strand
gcagcuuccuggcccugau

SEQ ID NO: 1130708 - RNA, 19 nt, Homo sapiens
  misc_RNA (1)...(19): siRNA sense strand
uccgccaccugcuggaaua

SEQ ID NO: 1130709 - RNA, 19 nt, Homo sapiens
  misc_RNA (1)...(19): siRNA sense strand
gggcucugcuuucugucau

SEQ ID NO: 1130710 - RNA, 19 nt, Homo sapiens
  misc_RNA (1)...(19): siRNA sense strand
ccugaugaugguguuauua

SEQ ID NO: 1130711 - RNA, 19 nt, Homo sapiens
  misc_RNA (1)...(19): siRNA sense strand
gaugaucacaacguggauu

SEQ ID NO: 1130712 - RNA, 19 nt, Homo sapiens
  misc_RNA (1)...(19): siRNA sense strand
aucacaacguggauucuuu

SEQ ID NO: 1130713 - RNA, 19 nt, Homo sapiens
  misc_RNA (1)...(19): siRNA sense strand
cuucuuugguuucuaugau

SEQ ID NO: 1130714 - RNA, 19 nt, Homo sapiens
  misc_RNA (1)...(19): siRNA sense strand
agacacggacuacuugaag

SEQ ID NO: 1130715 - RNA, 19 nt, Homo sapiens
  misc_RNA (1)...(19): siRNA sense strand
ucuaaccucuaucggaucu

SEQ ID NO: 1130716 - RNA, 19 nt, Homo sapiens
  misc_RNA (1)...(19): siRNA sense strand
gacagugcucgaucucuuc

SEQ ID NO: 1130717 - RNA, 19 nt, Homo sapiens
  misc_RNA (1)...(19): siRNA sense strand
agaccguccuggagaugga

SEQ ID NO: 1130718 - RNA, 19 nt, Homo sapiens
  misc_RNA (1)...(19): siRNA sense strand
cugcuggaauacaucaaug

SEQ ID NO: 1130719 - RNA, 19 nt, Homo sapiens
  misc_RNA (1)...(19): siRNA sense strand
caacguggauucuuucauc

SEQ ID NO: 1130720 - RNA, 19 nt, Homo sapiens
  misc_RNA (1)...(19): siRNA sense strand
ggaaagagaccaucccaau

SEQ ID NO: 1130721 - RNA, 19 nt, Homo sapiens
  misc_RNA (1)...(19): siRNA sense strand
gaaagagaccaucccaaug

SEQ ID NO: 1130722 - RNA, 19 nt, Homo sapiens
  misc_RNA (1)...(19): siRNA sense strand
ugacagugcucgaucucuu

SEQ ID NO: 1130723 - RNA, 19 nt, Homo sapiens
  misc_RNA (1)...(19): siRNA sense strand
gggugcaucucaucugcua

SEQ ID NO: 1130724 - RNA, 19 nt, Homo sapiens
  misc_RNA (1)...(19): siRNA sense strand
cagcuucuuugguuucuau

SEQ ID NO: 1130725 - RNA, 19 nt, Homo sapiens
  misc_RNA (1)...(19): siRNA sense strand
ccaccacgaugacuuguac

SEQ ID NO: 1130726 - RNA, 19 nt, Homo sapiens
  misc_RNA (1)...(19): siRNA sense strand
ccaccuccaugcggucuaa

SEQ ID NO: 1130727 - RNA, 19 nt, Homo sapiens
  misc_RNA (1)...(19): siRNA sense strand
caguccagcuucuuugguu

SEQ ID NO: 1130728 - RNA, 19 nt, Homo sapiens
  misc_RNA (1)...(19): siRNA sense strand
ccacagaugggacaguaug

SEQ ID NO: 1130729 - RNA, 19 nt, Homo sapiens
  misc_RNA (1)...(19): siRNA sense strand
ggccaggaauucuccaucu

SEQ ID NO: 1130730 - RNA, 19 nt, Homo sapiens
  misc_RNA (1)...(19): siRNA sense strand
gaucacaacguggauucuu

SEQ ID NO: 1130731 - RNA, 19 nt, Homo sapiens
  misc_RNA (1)...(19): siRNA sense strand
aaagagaccaucccaaugc

SEQ ID NO: 1130732 - RNA, 19 nt, Homo sapiens
  misc_RNA (1)...(19): siRNA sense strand
ccucuccucuccacagaug

SEQ ID NO: 1130733 - RNA, 19 nt, Homo sapiens
  misc_RNA (1)...(19): siRNA sense strand
ggagacacggacuacuuga

SEQ ID NO: 1130734 - RNA, 19 nt, Homo sapiens
  misc_RNA (1)...(19): siRNA sense strand
gaugacuuguaccucaaug

SEQ ID NO: 1130735 - RNA, 19 nt, Homo sapiens
  misc_RNA (1)...(19): siRNA sense strand
caugcggucuaaccucuau

SEQ ID NO: 1130736 - RNA, 19 nt, Homo sapiens
  misc_RNA (1)...(19): siRNA sense strand
gagacacggacuacuugaa

SEQ ID NO: 1130737 - RNA, 19 nt, Homo sapiens
  misc_RNA (1)...(19): siRNA sense strand
ggaauacaucaaugagaca

SEQ ID NO: 1130738 - RNA, 19 nt, Homo sapiens
  misc_RNA (1)...(19): siRNA sense strand
cuccacagaugggacagua

SEQ ID NO: 1130739 - RNA, 19 nt, Homo sapiens
  misc_RNA (1)...(19): siRNA sense strand
caguauggcggaagaacuu

SEQ ID NO: 1130740 - RNA, 19 nt, Homo sapiens
  misc_RNA (1)...(19): siRNA sense strand
gccaggaauucuccaucug

SEQ ID NO: 1130741 - RNA, 19 nt, Homo sapiens
  misc_RNA (1)...(19): siRNA sense strand
ucacaacguggauucuuuc

SEQ ID NO: 1130742 - RNA, 19 nt, Homo sapiens
  misc_RNA (1)...(19): siRNA sense strand
ggagauggaggagcaacug

SEQ ID NO: 1130743 - RNA, 19 nt, Homo sapiens
  misc_RNA (1)...(19): siRNA sense strand
gaugaugguguuauuacuc

SEQ ID NO: 1130744 - RNA, 19 nt, Homo sapiens
  misc_RNA (1)...(19): siRNA sense strand
ccaucccaaugccacagua

SEQ ID NO: 1130745 - RNA, 19 nt, Homo sapiens
  misc_RNA (1)...(19): siRNA sense strand
gcagcuuccuggcccugau

SEQ ID NO: 1130746 - RNA, 19 nt, Homo sapiens
  misc_RNA (1)...(19): siRNA sense strand
uccgccaccugcuggaaua

SEQ ID NO: 1130747 - RNA, 19 nt, Homo sapiens
  misc_RNA (1)...(19): siRNA sense strand
gggcucugcuuucugucau

SEQ ID NO: 1130748 - RNA, 19 nt, Homo sapiens
  misc_RNA (1)...(19): siRNA sense strand
ccugaugaugguguuauua

SEQ ID NO: 1130749 - RNA, 19 nt, Homo sapiens
  misc_RNA (1)...(19): siRNA sense strand
gaugaucacaacguggauu

SEQ ID NO: 1130750 - RNA, 19 nt, Homo sapiens
  misc_RNA (1)...(19): siRNA sense strand
aucacaacguggauucuuu

SEQ ID NO: 1130751 - RNA, 19 nt, Homo sapiens
  misc_RNA (1)...(19): siRNA sense strand
cuucuuugguuucuaugau

SEQ ID NO: 1130752 - RNA, 19 nt, Homo sapiens
  misc_RNA (1)...(19): siRNA sense strand
agacacggacuacuugaag

SEQ ID NO: 1130753 - RNA, 19 nt, Homo sapiens
  misc_RNA (1)...(19): siRNA sense strand
ucuaaccucuaucggaucu

SEQ ID NO: 1130754 - RNA, 19 nt, Homo sapiens
  misc_RNA (1)...(19): siRNA sense strand
gacagugcucgaucucuuc

SEQ ID NO: 1130755 - RNA, 19 nt, Homo sapiens
  misc_RNA (1)...(19): siRNA sense strand
agaccguccuggagaugga

SEQ ID NO: 1130756 - RNA, 19 nt, Homo sapiens
  misc_RNA (1)...(19): siRNA sense strand
cugcuggaauacaucaaug

SEQ ID NO: 1130757 - RNA, 19 nt, Homo sapiens
  misc_RNA (1)...(19): siRNA sense strand
caacguggauucuuucauc

SEQ ID NO: 1130758 - RNA, 19 nt, Homo sapiens
  misc_RNA (1)...(19): siRNA sense strand
ggaaagagaccaucccaau

SEQ ID NO: 1130759 - RNA, 19 nt, Homo sapiens
  misc_RNA (1)...(19): siRNA sense strand
gaaagagaccaucccaaug

SEQ ID NO: 1130760 - RNA, 19 nt, Homo sapiens
  misc_RNA (1)...(19): siRNA sense strand
ugacagugcucgaucucuu

SEQ ID NO: 1130761 - RNA, 19 nt, Homo sapiens
  misc_RNA (1)...(19): siRNA sense strand
gggugcaucucaucugcua

SEQ ID NO: 1130762 - RNA, 19 nt, Homo sapiens
  misc_RNA (1)...(19): siRNA sense strand
cagcuucuuugguuucuau

SEQ ID NO: 1130763 - RNA, 19 nt, Homo sapiens
  misc_RNA (1)...(19): siRNA sense strand
ccaccacgaugacuuguac

SEQ ID NO: 1130764 - RNA, 19 nt, Homo sapiens
  misc_RNA (1)...(19): siRNA sense strand
ccaccuccaugcggucuaa

SEQ ID NO: 1130765 - RNA, 19 nt, Homo sapiens
  misc_RNA (1)...(19): siRNA sense strand
caguccagcuucuuugguu

SEQ ID NO: 1130766 - RNA, 19 nt, Homo sapiens
  misc_RNA (1)...(19): siRNA sense strand
ccacagaugggacaguaug

SEQ ID NO: 1130767 - RNA, 19 nt, Homo sapiens
  misc_RNA (1)...(19): siRNA sense strand
ggccaggaauucuccaucu

SEQ ID NO: 1130768 - RNA, 19 nt, Homo sapiens
  misc_RNA (1)...(19): siRNA sense strand
gaucacaacguggauucuu

SEQ ID NO: 1130769 - RNA, 19 nt, Homo sapiens
  misc_RNA (1)...(19): siRNA sense strand
aaagagaccaucccaaugc

SEQ ID NO: 1130770 - RNA, 19 nt, Homo sapiens
  misc_RNA (1)...(19): siRNA sense strand
ccucuccucuccacagaug

SEQ ID NO: 1130771 - RNA, 19 nt, Homo sapiens
  misc_RNA (1)...(19): siRNA sense strand
ggagacacggacuacuuga

SEQ ID NO: 1130772 - RNA, 19 nt, Homo sapiens
  misc_RNA (1)...(19): siRNA sense strand
gaugacuuguaccucaaug

SEQ ID NO: 1130773 - RNA, 19 nt, Homo sapiens
  misc_RNA (1)...(19): siRNA sense strand
caugcggucuaaccucuau

SEQ ID NO: 1130774 - RNA, 19 nt, Homo sapiens
  misc_RNA (1)...(19): siRNA sense strand
gagacacggacuacuugaa

SEQ ID NO: 1130775 - RNA, 19 nt, Homo sapiens
  misc_RNA (1)...(19): siRNA sense strand
ggaauacaucaaugagaca

SEQ ID NO: 1130776 - RNA, 19 nt, Homo sapiens
  misc_RNA (1)...(19): siRNA sense strand
cuccacagaugggacagua

SEQ ID NO: 1130777 - RNA, 19 nt, Homo sapiens
  misc_RNA (1)...(19): siRNA sense strand
caguauggcggaagaacuu

SEQ ID NO: 1130778 - RNA, 19 nt, Homo sapiens
  misc_RNA (1)...(19): siRNA sense strand
gccaggaauucuccaucug

SEQ ID NO: 1130779 - RNA, 19 nt, Homo sapiens
  misc_RNA (1)...(19): siRNA sense strand
ucacaacguggauucuuuc

SEQ ID NO: 1130780 - RNA, 19 nt, Homo sapiens
  misc_RNA (1)...(19): siRNA sense strand
ggagauggaggagcaacug

SEQ ID NO: 1130781 - RNA, 19 nt, Homo sapiens
  misc_RNA (1)...(19): siRNA sense strand
gaugaugguguuauuacuc

SEQ ID NO: 1130782 - RNA, 19 nt, Homo sapiens
  misc_RNA (1)...(19): siRNA sense strand
ccaucccaaugccacagua

SEQ ID NO: 1130783 - RNA, 19 nt, Homo sapiens
  misc_RNA (1)...(19): siRNA sense strand
gcagcuuccuggcccugau

SEQ ID NO: 1130784 - RNA, 19 nt, Homo sapiens
  misc_RNA (1)...(19): siRNA sense strand
uccgccaccugcuggaaua

SEQ ID NO: 1130785 - RNA, 19 nt, Homo sapiens
  misc_RNA (1)...(19): siRNA sense strand
gggcucugcuuucugucau

SEQ ID NO: 1130786 - RNA, 19 nt, Homo sapiens
  misc_RNA (1)...(19): siRNA sense strand
ccugaugaugguguuauua

SEQ ID NO: 1130787 - RNA, 19 nt, Homo sapiens
  misc_RNA (1)...(19): siRNA sense strand
gaugaucacaacguggauu

SEQ ID NO: 1130788 - RNA, 19 nt, Homo sapiens
  misc_RNA (1)...(19): siRNA sense strand
aucacaacguggauucuuu

SEQ ID NO: 1130789 - RNA, 19 nt, Homo sapiens
  misc_RNA (1)...(19): siRNA sense strand
cuucuuugguuucuaugau

SEQ ID NO: 1130790 - RNA, 19 nt, Homo sapiens
  misc_RNA (1)...(19): siRNA sense strand
agacacggacuacuugaag

SEQ ID NO: 1130791 - RNA, 19 nt, Homo sapiens
  misc_RNA (1)...(19): siRNA sense strand
ucuaaccucuaucggaucu

SEQ ID NO: 1130792 - RNA, 19 nt, Homo sapiens
  misc_RNA (1)...(19): siRNA sense strand
gacagugcucgaucucuuc

SEQ ID NO: 1130793 - RNA, 19 nt, Homo sapiens
  misc_RNA (1)...(19): siRNA sense strand
agaccguccuggagaugga

SEQ ID NO: 1130794 - RNA, 19 nt, Homo sapiens
  misc_RNA (1)...(19): siRNA sense strand
cugcuggaauacaucaaug

SEQ ID NO: 1130795 - RNA, 19 nt, Homo sapiens
  misc_RNA (1)...(19): siRNA sense strand
gcacaaccuugcuuugaau

SEQ ID NO: 1130796 - RNA, 19 nt, Homo sapiens
  misc_RNA (1)...(19): siRNA sense strand
uggaggagcuggaggauga

SEQ ID NO: 1130797 - RNA, 19 nt, Homo sapiens
  misc_RNA (1)...(19): siRNA sense strand
gcucucugcugaccuguuu

SEQ ID NO: 1130798 - RNA, 19 nt, Homo sapiens
  misc_RNA (1)...(19): siRNA sense strand
gaagggcaguggcaacauc

SEQ ID NO: 1130799 - RNA, 19 nt, Homo sapiens
  misc_RNA (1)...(19): siRNA sense strand
agacaaagcuacccagacu

SEQ ID NO: 1130800 - RNA, 19 nt, Homo sapiens
  misc_RNA (1)...(19): siRNA sense strand
gcuggaggaugauguguuc

SEQ ID NO: 1130801 - RNA, 19 nt, Homo sapiens
  misc_RNA (1)...(19): siRNA sense strand
ccagcagucuugcccauug

SEQ ID NO: 1130802 - RNA, 19 nt, Homo sapiens
  misc_RNA (1)...(19): siRNA sense strand
caaccuugcuuugaaugga

SEQ ID NO: 1130803 - RNA, 19 nt, Homo sapiens
  misc_RNA (1)...(19): siRNA sense strand
cuucagcucuucccucuca

SEQ ID NO: 1130804 - RNA, 19 nt, Homo sapiens
  misc_RNA (1)...(19): siRNA sense strand
ggaggaugauguguuccaa

SEQ ID NO: 1130805 - RNA, 19 nt, Homo sapiens
  misc_RNA (1)...(19): siRNA sense strand
ucaagcagagguacagauu

SEQ ID NO: 1130806 - RNA, 19 nt, Homo sapiens
  misc_RNA (1)...(19): siRNA sense strand
cccgaaagcuucagugcau

SEQ ID NO: 1130807 - RNA, 19 nt, Homo sapiens
  misc_RNA (1)...(19): siRNA sense strand
ugcacaaccuugcuuugaa

SEQ ID NO: 1130808 - RNA, 19 nt, Homo sapiens
  misc_RNA (1)...(19): siRNA sense strand
caacaccagcagaaccaaa

SEQ ID NO: 1130809 - RNA, 19 nt, Homo sapiens
  misc_RNA (1)...(19): siRNA sense strand
gguggcagauccuccucuu

SEQ ID NO: 1130810 - RNA, 19 nt, Homo sapiens
  misc_RNA (1)...(19): siRNA sense strand
aagcagagguacagauugc

SEQ ID NO: 1130811 - RNA, 19 nt, Homo sapiens
  misc_RNA (1)...(19): siRNA sense strand
cgaaagcuucagugcauug

SEQ ID NO: 1130812 - RNA, 19 nt, Homo sapiens
  misc_RNA (1)...(19): siRNA sense strand
gcaacaucaagcagaggua

SEQ ID NO: 1130813 - RNA, 19 nt, Homo sapiens
  misc_RNA (1)...(19): siRNA sense strand
caagcagagguacagauug

SEQ ID NO: 1130814 - RNA, 19 nt, Homo sapiens
  misc_RNA (1)...(19): siRNA sense strand
agguacagauugcccgaaa

SEQ ID NO: 1130815 - RNA, 19 nt, Homo sapiens
  misc_RNA (1)...(19): siRNA sense strand
acagauugcccgaaagcuu

SEQ ID NO: 1130816 - RNA, 19 nt, Homo sapiens
  misc_RNA (1)...(19): siRNA sense strand
aaagcuacccagacucuca

SEQ ID NO: 1130817 - RNA, 19 nt, Homo sapiens
  misc_RNA (1)...(19): siRNA sense strand
gcaguggcaacaucaagca

SEQ ID NO: 1130818 - RNA, 19 nt, Homo sapiens
  misc_RNA (1)...(19): siRNA sense strand
ccgaaagcuucagugcauu

SEQ ID NO: 1130819 - RNA, 19 nt, Homo sapiens
  misc_RNA (1)...(19): siRNA sense strand
ggagcuggaggaugaugug

SEQ ID NO: 1130820 - RNA, 19 nt, Homo sapiens
  misc_RNA (1)...(19): siRNA sense strand
guacagauugcccgaaagc

SEQ ID NO: 1130821 - RNA, 19 nt, Homo sapiens
  misc_RNA (1)...(19): siRNA sense strand
caccagccaggaagacaaa

SEQ ID NO: 1130822 - RNA, 19 nt, Homo sapiens
  misc_RNA (1)...(19): siRNA sense strand
gguacagauugcccgaaag

SEQ ID NO: 1130823 - RNA, 19 nt, Homo sapiens
  misc_RNA (1)...(19): siRNA sense strand
acaaagcuacccagacucu

SEQ ID NO: 1130824 - RNA, 19 nt, Homo sapiens
  misc_RNA (1)...(19): siRNA sense strand
cugcacaaccuugcuuuga

SEQ ID NO: 1130825 - RNA, 19 nt, Homo sapiens
  misc_RNA (1)...(19): siRNA sense strand
uuauggcaaugcuggcuau

SEQ ID NO: 1130826 - RNA, 19 nt, Homo sapiens
  misc_RNA (1)...(19): siRNA sense strand
gcagugaugugaugaauua

SEQ ID NO: 1130827 - RNA, 19 nt, Homo sapiens
  misc_RNA (1)...(19): siRNA sense strand
ccacugcuaugccuuguuu

SEQ ID NO: 1130828 - RNA, 19 nt, Homo sapiens
  misc_RNA (1)...(19): siRNA sense strand
guggaaagauuauaacugu

SEQ ID NO: 1130829 - RNA, 19 nt, Homo sapiens
  misc_RNA (1)...(19): siRNA sense strand
gaguagcagugaugugaug

SEQ ID NO: 1130830 - RNA, 19 nt, Homo sapiens
  misc_RNA (1)...(19): siRNA sense strand
agaaaucccuccaccaucu

SEQ ID NO: 1130831 - RNA, 19 nt, Homo sapiens
  misc_RNA (1)...(19): siRNA sense strand
gugaugugaugaauuacuu

SEQ ID NO: 1130832 - RNA, 19 nt, Homo sapiens
  misc_RNA (1)...(19): siRNA sense strand
gguaacagcuacucauacg

SEQ ID NO: 1130833 - RNA, 19 nt, Homo sapiens
  misc_RNA (1)...(19): siRNA sense strand
uaucuuggaugcugcuuuc

SEQ ID NO: 1130834 - RNA, 19 nt, Homo sapiens
  misc_RNA (1)...(19): siRNA sense strand
cuggaaaccuggugucugu

SEQ ID NO: 1130835 - RNA, 19 nt, Homo sapiens
  misc_RNA (1)...(19): siRNA sense strand
ugagguggaaagauuauaa

SEQ ID NO: 1130836 - RNA, 19 nt, Homo sapiens
  misc_RNA (1)...(19): siRNA sense strand
cagcauuucugagguggaa

SEQ ID NO: 1130837 - RNA, 19 nt, Homo sapiens
  misc_RNA (1)...(19): siRNA sense strand
aaugugagguuacccuaug

SEQ ID NO: 1130838 - RNA, 19 nt, Homo sapiens
  misc_RNA (1)...(19): siRNA sense strand
gugaagagcauugguaaca

SEQ ID NO: 1130839 - RNA, 19 nt, Homo sapiens
  misc_RNA (1)...(19): siRNA sense strand
gaagguugggaguggagua

SEQ ID NO: 1130840 - RNA, 19 nt, Homo sapiens
  misc_RNA (1)...(19): siRNA sense strand
gaugugaugaauuacuuug

SEQ ID NO: 1130841 - RNA, 19 nt, Homo sapiens
  misc_RNA (1)...(19): siRNA sense strand
gugcgagccugucgagaag

SEQ ID NO: 1130842 - RNA, 19 nt, Homo sapiens
  misc_RNA (1)...(19): siRNA sense strand
ccaaaauccuggacagaug

SEQ ID NO: 1130843 - RNA, 19 nt, Homo sapiens
  misc_RNA (1)...(19): siRNA sense strand
ggaguggaguagcagugau

SEQ ID NO: 1130844 - RNA, 19 nt, Homo sapiens
  misc_RNA (1)...(19): siRNA sense strand
uagcagugaugugaugaau

SEQ ID NO: 1130845 - RNA, 19 nt, Homo sapiens
  misc_RNA (1)...(19): siRNA sense strand
ucugcaaguucacugacua

SEQ ID NO: 1130846 - RNA, 19 nt, Homo sapiens
  misc_RNA (1)...(19): siRNA sense strand
cggauccgcugucccaaag

SEQ ID NO: 1130847 - RNA, 19 nt, Homo sapiens
  misc_RNA (1)...(19): siRNA sense strand
cuacucauacgucuggauu

SEQ ID NO: 1130848 - RNA, 19 nt, Homo sapiens
  misc_RNA (1)...(19): siRNA sense strand
agagaaaucccuccaccau

SEQ ID NO: 1130849 - RNA, 19 nt, Homo sapiens
  misc_RNA (1)...(19): siRNA sense strand
uggaguagcagugauguga

SEQ ID NO: 1130850 - RNA, 19 nt, Homo sapiens
  misc_RNA (1)...(19): siRNA sense strand
gcgagccugucgagaagca

SEQ ID NO: 1130851 - RNA, 19 nt, Homo sapiens
  misc_RNA (1)...(19): siRNA sense strand
gguggaaagauuauaacug

SEQ ID NO: 1130852 - RNA, 19 nt, Homo sapiens
  misc_RNA (1)...(19): siRNA sense strand
gucgagaagcacagcauuu

SEQ ID NO: 1130853 - RNA, 19 nt, Homo sapiens
  misc_RNA (1)...(19): siRNA sense strand
ugugaugaauuacuuugca

SEQ ID NO: 1130854 - RNA, 19 nt, Homo sapiens
  misc_RNA (1)...(19): siRNA sense strand
gugaugaauuacuuugcau

SEQ ID NO: 1130855 - RNA, 19 nt, Homo sapiens
  misc_RNA (1)...(19): siRNA sense strand
uacccuaugucugcaaguu

SEQ ID NO: 1130856 - RNA, 19 nt, Homo sapiens
  misc_RNA (1)...(19): siRNA sense strand
gggaguggaguagcaguga

SEQ ID NO: 1130857 - RNA, 19 nt, Homo sapiens
  misc_RNA (1)...(19): siRNA sense strand
gaguggaguagcagugaug

SEQ ID NO: 1130858 - RNA, 19 nt, Homo sapiens
  misc_RNA (1)...(19): siRNA sense strand
gcugcugucucagguucaa

SEQ ID NO: 1130859 - RNA, 19 nt, Homo sapiens
  misc_RNA (1)...(19): siRNA sense strand
ugaagagcauugguaacag

SEQ ID NO: 1130860 - RNA, 19 nt, Homo sapiens
  misc_RNA (1)...(19): siRNA sense strand
cccuaugucugcaaguuca

SEQ ID NO: 1130861 - RNA, 19 nt, Homo sapiens
  misc_RNA (1)...(19): siRNA sense strand
gguugggaguggaguagca

SEQ ID NO: 1130862 - RNA, 19 nt, Homo sapiens
  misc_RNA (1)...(19): siRNA sense strand
gcagugaugugaugaauua

SEQ ID NO: 1130863 - RNA, 19 nt, Homo sapiens
  misc_RNA (1)...(19): siRNA sense strand
ccacugcuaugccuuguuu

SEQ ID NO: 1130864 - RNA, 19 nt, Homo sapiens
  misc_RNA (1)...(19): siRNA sense strand
guggaaagauuauaacugu

SEQ ID NO: 1130865 - RNA, 19 nt, Homo sapiens
  misc_RNA (1)...(19): siRNA sense strand
gaguagcagugaugugaug

SEQ ID NO: 1130866 - RNA, 19 nt, Homo sapiens
  misc_RNA (1)...(19): siRNA sense strand
agaaaucccuccaccaucu

SEQ ID NO: 1130867 - RNA, 19 nt, Homo sapiens
  misc_RNA (1)...(19): siRNA sense strand
gugaugugaugaauuacuu

SEQ ID NO: 1130868 - RNA, 19 nt, Homo sapiens
  misc_RNA (1)...(19): siRNA sense strand
gguaacagcuacucauacg

SEQ ID NO: 1130869 - RNA, 19 nt, Homo sapiens
  misc_RNA (1)...(19): siRNA sense strand
uaucuuggaugcugcuuuc

SEQ ID NO: 1130870 - RNA, 19 nt, Homo sapiens
  misc_RNA (1)...(19): siRNA sense strand
cuggaaaccuggugucugu

SEQ ID NO: 1130871 - RNA, 19 nt, Homo sapiens
  misc_RNA (1)...(19): siRNA sense strand
ugagguggaaagauuauaa

SEQ ID NO: 1130872 - RNA, 19 nt, Homo sapiens
  misc_RNA (1)...(19): siRNA sense strand
cagcauuucugagguggaa

SEQ ID NO: 1130873 - RNA, 19 nt, Homo sapiens
  misc_RNA (1)...(19): siRNA sense strand
aaugugagguuacccuaug

SEQ ID NO: 1130874 - RNA, 19 nt, Homo sapiens
  misc_RNA (1)...(19): siRNA sense strand
gugaagagcauugguaaca

SEQ ID NO: 1130875 - RNA, 19 nt, Homo sapiens
  misc_RNA (1)...(19): siRNA sense strand
gaagguugggaguggagua

SEQ ID NO: 1130876 - RNA, 19 nt, Homo sapiens
  misc_RNA (1)...(19): siRNA sense strand
gaugugaugaauuacuuug

SEQ ID NO: 1130877 - RNA, 19 nt, Homo sapiens
  misc_RNA (1)...(19): siRNA sense strand
gugcgagccugucgagaag

SEQ ID NO: 1130878 - RNA, 19 nt, Homo sapiens
  misc_RNA (1)...(19): siRNA sense strand
ccaaaauccuggacagaug

SEQ ID NO: 1130879 - RNA, 19 nt, Homo sapiens
  misc_RNA (1)...(19): siRNA sense strand
ggaguggaguagcagugau

SEQ ID NO: 1130880 - RNA, 19 nt, Homo sapiens
  misc_RNA (1)...(19): siRNA sense strand
uagcagugaugugaugaau

SEQ ID NO: 1130881 - RNA, 19 nt, Homo sapiens
  misc_RNA (1)...(19): siRNA sense strand
ucugcaaguucacugacua

SEQ ID NO: 1130882 - RNA, 19 nt, Homo sapiens
  misc_RNA (1)...(19): siRNA sense strand
cggauccgcugucccaaag

SEQ ID NO: 1130883 - RNA, 19 nt, Homo sapiens
  misc_RNA (1)...(19): siRNA sense strand
cuacucauacgucuggauu

SEQ ID NO: 1130884 - RNA, 19 nt, Homo sapiens
  misc_RNA (1)...(19): siRNA sense strand
agagaaaucccuccaccau

SEQ ID NO: 1130885 - RNA, 19 nt, Homo sapiens
  misc_RNA (1)...(19): siRNA sense strand
uggaguagcagugauguga

SEQ ID NO: 1130886 - RNA, 19 nt, Homo sapiens
  misc_RNA (1)...(19): siRNA sense strand
gcgagccugucgagaagca

SEQ ID NO: 1130887 - RNA, 19 nt, Homo sapiens
  misc_RNA (1)...(19): siRNA sense strand
gguggaaagauuauaacug

SEQ ID NO: 1130888 - RNA, 19 nt, Homo sapiens
  misc_RNA (1)...(19): siRNA sense strand
gucgagaagcacagcauuu

SEQ ID NO: 1130889 - RNA, 19 nt, Homo sapiens
  misc_RNA (1)...(19): siRNA sense strand
ugugaugaauuacuuugca

SEQ ID NO: 1130890 - RNA, 19 nt, Homo sapiens
  misc_RNA (1)...(19): siRNA sense strand
gugaugaauuacuuugcau

SEQ ID NO: 1130891 - RNA, 19 nt, Homo sapiens
  misc_RNA (1)...(19): siRNA sense strand
uacccuaugucugcaaguu

SEQ ID NO: 1130892 - RNA, 19 nt, Homo sapiens
  misc_RNA (1)...(19): siRNA sense strand
gggaguggaguagcaguga

SEQ ID NO: 1130893 - RNA, 19 nt, Homo sapiens
  misc_RNA (1)...(19): siRNA sense strand
gaguggaguagcagugaug

SEQ ID NO: 1130894 - RNA, 19 nt, Homo sapiens
  misc_RNA (1)...(19): siRNA sense strand
gcugcugucucagguucaa

SEQ ID NO: 1130895 - RNA, 19 nt, Homo sapiens
  misc_RNA (1)...(19): siRNA sense strand
ugaagagcauugguaacag

SEQ ID NO: 1130896 - RNA, 19 nt, Homo sapiens
  misc_RNA (1)...(19): siRNA sense strand
cccuaugucugcaaguuca

SEQ ID NO: 1130897 - RNA, 19 nt, Homo sapiens
  misc_RNA (1)...(19): siRNA sense strand
gguugggaguggaguagca

SEQ ID NO: 1130898 - RNA, 19 nt, Homo sapiens
  misc_RNA (1)...(19): siRNA sense strand
gcagugaugugaugaauua

SEQ ID NO: 1130899 - RNA, 19 nt, Homo sapiens
  misc_RNA (1)...(19): siRNA sense strand
ccacugcuaugccuuguuu

SEQ ID NO: 1130900 - RNA, 19 nt, Homo sapiens
  misc_RNA (1)...(19): siRNA sense strand
guggaaagauuauaacugu

SEQ ID NO: 1130901 - RNA, 19 nt, Homo sapiens
  misc_RNA (1)...(19): siRNA sense strand
gaguagcagugaugugaug

SEQ ID NO: 1130902 - RNA, 19 nt, Homo sapiens
  misc_RNA (1)...(19): siRNA sense strand
agaaaucccuccaccaucu

SEQ ID NO: 1130903 - RNA, 19 nt, Homo sapiens
  misc_RNA (1)...(19): siRNA sense strand
gugaugugaugaauuacuu

SEQ ID NO: 1130904 - RNA, 19 nt, Homo sapiens
  misc_RNA (1)...(19): siRNA sense strand
gguaacagcuacucauacg

SEQ ID NO: 1130905 - RNA, 19 nt, Homo sapiens
  misc_RNA (1)...(19): siRNA sense strand
uaucuuggaugcugcuuuc

SEQ ID NO: 1130906 - RNA, 19 nt, Homo sapiens
  misc_RNA (1)...(19): siRNA sense strand
cuggaaaccuggugucugu

SEQ ID NO: 1130907 - RNA, 19 nt, Homo sapiens
  misc_RNA (1)...(19): siRNA sense strand
ugagguggaaagauuauaa

SEQ ID NO: 1130908 - RNA, 19 nt, Homo sapiens
  misc_RNA (1)...(19): siRNA sense strand
cagcauuucugagguggaa

SEQ ID NO: 1130909 - RNA, 19 nt, Homo sapiens
  misc_RNA (1)...(19): siRNA sense strand
aaugugagguuacccuaug

SEQ ID NO: 1130910 - RNA, 19 nt, Homo sapiens
  misc_RNA (1)...(19): siRNA sense strand
gugaagagcauugguaaca

SEQ ID NO: 1130911 - RNA, 19 nt, Homo sapiens
  misc_RNA (1)...(19): siRNA sense strand
gaagguugggaguggagua

SEQ ID NO: 1130912 - RNA, 19 nt, Homo sapiens
  misc_RNA (1)...(19): siRNA sense strand
gaugugaugaauuacuuug

SEQ ID NO: 1130913 - RNA, 19 nt, Homo sapiens
  misc_RNA (1)...(19): siRNA sense strand
gugcgagccugucgagaag

SEQ ID NO: 1130914 - RNA, 19 nt, Homo sapiens
  misc_RNA (1)...(19): siRNA sense strand
ccaaaauccuggacagaug

SEQ ID NO: 1130915 - RNA, 19 nt, Homo sapiens
  misc_RNA (1)...(19): siRNA sense strand
ggaguggaguagcagugau

SEQ ID NO: 1130916 - RNA, 19 nt, Homo sapiens
  misc_RNA (1)...(19): siRNA sense strand
uagcagugaugugaugaau

SEQ ID NO: 1130917 - RNA, 19 nt, Homo sapiens
  misc_RNA (1)...(19): siRNA sense strand
ucugcaaguucacugacua

SEQ ID NO: 1130918 - RNA, 19 nt, Homo sapiens
  misc_RNA (1)...(19): siRNA sense strand
cggauccgcugucccaaag

SEQ ID NO: 1130919 - RNA, 19 nt, Homo sapiens
  misc_RNA (1)...(19): siRNA sense strand
cuacucauacgucuggauu

SEQ ID NO: 1130920 - RNA, 19 nt, Homo sapiens
  misc_RNA (1)...(19): siRNA sense strand
agagaaaucccuccaccau

SEQ ID NO: 1130921 - RNA, 19 nt, Homo sapiens
  misc_RNA (1)...(19): siRNA sense strand
uggaguagcagugauguga

SEQ ID NO: 1130922 - RNA, 19 nt, Homo sapiens
  misc_RNA (1)...(19): siRNA sense strand
gcgagccugucgagaagca

SEQ ID NO: 1130923 - RNA, 19 nt, Homo sapiens
  misc_RNA (1)...(19): siRNA sense strand
gguggaaagauuauaacug

SEQ ID NO: 1130924 - RNA, 19 nt, Homo sapiens
  misc_RNA (1)...(19): siRNA sense strand
gucgagaagcacagcauuu

SEQ ID NO: 1130925 - RNA, 19 nt, Homo sapiens
  misc_RNA (1)...(19): siRNA sense strand
ugugaugaauuacuuugca

SEQ ID NO: 1130926 - RNA, 19 nt, Homo sapiens
  misc_RNA (1)...(19): siRNA sense strand
gugaugaauuacuuugcau

SEQ ID NO: 1130927 - RNA, 19 nt, Homo sapiens
  misc_RNA (1)...(19): siRNA sense strand
uacccuaugucugcaaguu

SEQ ID NO: 1130928 - RNA, 19 nt, Homo sapiens
  misc_RNA (1)...(19): siRNA sense strand
gggaguggaguagcaguga

SEQ ID NO: 1130929 - RNA, 19 nt, Homo sapiens
  misc_RNA (1)...(19): siRNA sense strand
gaguggaguagcagugaug

SEQ ID NO: 1130930 - RNA, 19 nt, Homo sapiens
  misc_RNA (1)...(19): siRNA sense strand
gcugcugucucagguucaa

SEQ ID NO: 1130931 - RNA, 19 nt, Homo sapiens
  misc_RNA (1)...(19): siRNA sense strand
ugaagagcauugguaacag

SEQ ID NO: 1130932 - RNA, 19 nt, Homo sapiens
  misc_RNA (1)...(19): siRNA sense strand
cccuaugucugcaaguuca

SEQ ID NO: 1130933 - RNA, 19 nt, Homo sapiens
  misc_RNA (1)...(19): siRNA sense strand
gguugggaguggaguagca

SEQ ID NO: 1130934 - RNA, 19 nt, Homo sapiens
  misc_RNA (1)...(19): siRNA sense strand
gaagauggcugacaaaauu

SEQ ID NO: 1130935 - RNA, 19 nt, Homo sapiens
  misc_RNA (1)...(19): siRNA sense strand
gcagagacgacaagaauua

SEQ ID NO: 1130936 - RNA, 19 nt, Homo sapiens
  misc_RNA (1)...(19): siRNA sense strand
gcacuguggcaauauauua

SEQ ID NO: 1130937 - RNA, 19 nt, Homo sapiens
  misc_RNA (1)...(19): siRNA sense strand
caaauaugaugccacuaaa

SEQ ID NO: 1130938 - RNA, 19 nt, Homo sapiens
  misc_RNA (1)...(19): siRNA sense strand
gaaccuaucaucauuaauc

SEQ ID NO: 1130939 - RNA, 19 nt, Homo sapiens
  misc_RNA (1)...(19): siRNA sense strand
ugacugaugugguggguaa

SEQ ID NO: 1130940 - RNA, 19 nt, Homo sapiens
  misc_RNA (1)...(19): siRNA sense strand
ccaaauaugaugccacuaa

SEQ ID NO: 1130941 - RNA, 19 nt, Homo sapiens
  misc_RNA (1)...(19): siRNA sense strand
cagaaccuaucaucauuaa

SEQ ID NO: 1130942 - RNA, 19 nt, Homo sapiens
  misc_RNA (1)...(19): siRNA sense strand
ugauugaacuggacaaaga

SEQ ID NO: 1130943 - RNA, 19 nt, Homo sapiens
  misc_RNA (1)...(19): siRNA sense strand
caagcacuguggcaauaua

SEQ ID NO: 1130944 - RNA, 19 nt, Homo sapiens
  misc_RNA (1)...(19): siRNA sense strand
aaacggaagcugcgaauuu

SEQ ID NO: 1130945 - RNA, 19 nt, Homo sapiens
  misc_RNA (1)...(19): siRNA sense strand
ggcaauauauuaagacaca

SEQ ID NO: 1130946 - RNA, 19 nt, Homo sapiens
  misc_RNA (1)...(19): siRNA sense strand
agacccagaugaauucuuu

SEQ ID NO: 1130947 - RNA, 19 nt, Homo sapiens
  misc_RNA (1)...(19): siRNA sense strand
aaaccacaaugcaaagaaa

SEQ ID NO: 1130948 - RNA, 19 nt, Homo sapiens
  misc_RNA (1)...(19): siRNA sense strand
ggaaacggcuagauaucca

SEQ ID NO: 1130949 - RNA, 19 nt, Homo sapiens
  misc_RNA (1)...(19): siRNA sense strand
gaaaccacaaugcaaagaa

SEQ ID NO: 1130950 - RNA, 19 nt, Homo sapiens
  misc_RNA (1)...(19): siRNA sense strand
aaagacagcuuguuaugac

SEQ ID NO: 1130951 - RNA, 19 nt, Homo sapiens
  misc_RNA (1)...(19): siRNA sense strand
ggagauugcuacucuagac

SEQ ID NO: 1130952 - RNA, 19 nt, Homo sapiens
  misc_RNA (1)...(19): siRNA sense strand
cagcagagacgacaagaau

SEQ ID NO: 1130953 - RNA, 19 nt, Homo sapiens
  misc_RNA (1)...(19): siRNA sense strand
gggaguuugucaucuguga

SEQ ID NO: 1130954 - RNA, 19 nt, Homo sapiens
  misc_RNA (1)...(19): siRNA sense strand
gagcugaguucuacuucca

SEQ ID NO: 1130955 - RNA, 19 nt, Homo sapiens
  misc_RNA (1)...(19): siRNA sense strand
ccagaaccuaucaucauua

SEQ ID NO: 1130956 - RNA, 19 nt, Homo sapiens
  misc_RNA (1)...(19): siRNA sense strand
auauggaucucuuggcuuu

SEQ ID NO: 1130957 - RNA, 19 nt, Homo sapiens
  misc_RNA (1)...(19): siRNA sense strand
uaagucagaugccgaggau

SEQ ID NO: 1130958 - RNA, 19 nt, Homo sapiens
  misc_RNA (1)...(19): siRNA sense strand
cagaaucccaggccuauau

SEQ ID NO: 1130959 - RNA, 19 nt, Homo sapiens
  misc_RNA (1)...(19): siRNA sense strand
ucaaaggauucgugaacug

SEQ ID NO: 1130960 - RNA, 19 nt, Homo sapiens
  misc_RNA (1)...(19): siRNA sense strand
uuaaucaugucaucagugu

SEQ ID NO: 1130961 - RNA, 19 nt, Homo sapiens
  misc_RNA (1)...(19): siRNA sense strand
caucauuaaucaugucauc

SEQ ID NO: 1130962 - RNA, 19 nt, Homo sapiens
  misc_RNA (1)...(19): siRNA sense strand
gauucagccuuguccaaau

SEQ ID NO: 1130963 - RNA, 19 nt, Homo sapiens
  misc_RNA (1)...(19): siRNA sense strand
uccaagcacuguggcaaua

SEQ ID NO: 1130964 - RNA, 19 nt, Homo sapiens
  misc_RNA (1)...(19): siRNA sense strand
auucagccuuguccaaaua

SEQ ID NO: 1130965 - RNA, 19 nt, Homo sapiens
  misc_RNA (1)...(19): siRNA sense strand
uuaaguccuuggugauuga

SEQ ID NO: 1130966 - RNA, 19 nt, Homo sapiens
  misc_RNA (1)...(19): siRNA sense strand
ugaggaaacggcuagauau

SEQ ID NO: 1130967 - RNA, 19 nt, Homo sapiens
  misc_RNA (1)...(19): siRNA sense strand
ugaagacccagaugaauuc

SEQ ID NO: 1130968 - RNA, 19 nt, Homo sapiens
  misc_RNA (1)...(19): siRNA sense strand
gacagcuuguuaugacauu

SEQ ID NO: 1130969 - RNA, 19 nt, Homo sapiens
  misc_RNA (1)...(19): siRNA sense strand
ggauucagccuuguccaaa

SEQ ID NO: 1130970 - RNA, 19 nt, Homo sapiens
  misc_RNA (1)...(19): siRNA sense strand
aaaagaagauggcugacaa

SEQ ID NO: 1130971 - RNA, 19 nt, Homo sapiens
  misc_RNA (1)...(19): siRNA sense strand
gcgccgagcugaguucuac

SEQ ID NO: 1130972 - RNA, 19 nt, Homo sapiens
  misc_RNA (1)...(19): siRNA sense strand
ugacccgaaugaucagaaa

SEQ ID NO: 1130973 - RNA, 19 nt, Homo sapiens
  misc_RNA (1)...(19): siRNA sense strand
uaugaugccacuaaacaaa

SEQ ID NO: 1130974 - RNA, 19 nt, Homo sapiens
  misc_RNA (1)...(19): siRNA sense strand
gccgauacuucuacuccaa

SEQ ID NO: 1130975 - RNA, 19 nt, Homo sapiens
  misc_RNA (1)...(19): siRNA sense strand
accagaaccuaucaucauu

SEQ ID NO: 1130976 - RNA, 19 nt, Homo sapiens
  misc_RNA (1)...(19): siRNA sense strand
aaucaugucaucaguguug

SEQ ID NO: 1130977 - RNA, 19 nt, Homo sapiens
  misc_RNA (1)...(19): siRNA sense strand
gaggaaacggcuagauauc

SEQ ID NO: 1130978 - RNA, 19 nt, Homo sapiens
  misc_RNA (1)...(19): siRNA sense strand
aauucuaccucaaaggauu

SEQ ID NO: 1130979 - RNA, 19 nt, Homo sapiens
  misc_RNA (1)...(19): siRNA sense strand
gcccugggaauccggaaua

SEQ ID NO: 1130980 - RNA, 19 nt, Homo sapiens
  misc_RNA (1)...(19): siRNA sense strand
aaggauucgugaacuggua

SEQ ID NO: 1130981 - RNA, 19 nt, Homo sapiens
  misc_RNA (1)...(19): siRNA sense strand
aacaggagauugcuacucu

SEQ ID NO: 1130982 - RNA, 19 nt, Homo sapiens
  misc_RNA (1)...(19): siRNA sense strand
gagcgggaguuugucaucu

SEQ ID NO: 1130983 - RNA, 19 nt, Homo sapiens
  misc_RNA (1)...(19): siRNA sense strand
uugaagacccagaugaauu

SEQ ID NO: 1130984 - RNA, 19 nt, Homo sapiens
  misc_RNA (1)...(19): siRNA sense strand
caucaguguugacccgaau

SEQ ID NO: 1130985 - RNA, 19 nt, Homo sapiens
  misc_RNA (1)...(19): siRNA sense strand
ccugggagcuucggguaga

SEQ ID NO: 1130986 - RNA, 19 nt, Homo sapiens
  misc_RNA (1)...(19): siRNA sense strand
caccagaaccuaucaucau

SEQ ID NO: 1130987 - RNA, 19 nt, Homo sapiens
  misc_RNA (1)...(19): siRNA sense strand
aauaugaugccacuaaaca

SEQ ID NO: 1130988 - RNA, 19 nt, Homo sapiens
  misc_RNA (1)...(19): siRNA sense strand
ucaauccggcuaagucaga

SEQ ID NO: 1130989 - RNA, 19 nt, Homo sapiens
  misc_RNA (1)...(19): siRNA sense strand
ggaucagucccgcaagaga

SEQ ID NO: 1130990 - RNA, 19 nt, Homo sapiens
  misc_RNA (1)...(19): siRNA sense strand
ccuaucaucauuaaucaug

SEQ ID NO: 1130991 - RNA, 19 nt, Homo sapiens
  misc_RNA (1)...(19): siRNA sense strand
gcgggaguuugucaucugu

SEQ ID NO: 1130992 - RNA, 19 nt, Homo sapiens
  misc_RNA (1)...(19): siRNA sense strand
gaaacggcuagauauccaa

SEQ ID NO: 1130993 - RNA, 19 nt, Homo sapiens
  misc_RNA (1)...(19): siRNA sense strand
gcagcagagacgacaagaa

SEQ ID NO: 1130994 - RNA, 19 nt, Homo sapiens
  misc_RNA (1)...(19): siRNA sense strand
gguguacuguccuacugau

SEQ ID NO: 1130995 - RNA, 19 nt, Homo sapiens
  misc_RNA (1)...(19): siRNA sense strand
aaagaagauggcugacaaa

SEQ ID NO: 1130996 - RNA, 19 nt, Homo sapiens
  misc_RNA (1)...(19): siRNA sense strand
uugcuacucuagacaacaa

SEQ ID NO: 1130997 - RNA, 19 nt, Homo sapiens
  misc_RNA (1)...(19): siRNA sense strand
gacaaaauucuaccucaaa

SEQ ID NO: 1130998 - RNA, 19 nt, Homo sapiens
  misc_RNA (1)...(19): siRNA sense strand
uuuaaguccuuggugauug

SEQ ID NO: 1130999 - RNA, 19 nt, Homo sapiens
  misc_RNA (1)...(19): siRNA sense strand
gagacgacaagaauuagag

SEQ ID NO: 1131000 - RNA, 19 nt, Homo sapiens
  misc_RNA (1)...(19): siRNA sense strand
acaggagauugcuacucua

SEQ ID NO: 1131001 - RNA, 19 nt, Homo sapiens
  misc_RNA (1)...(19): siRNA sense strand
guggaugacaccuugaaga

SEQ ID NO: 1131002 - RNA, 19 nt, Homo sapiens
  misc_RNA (1)...(19): siRNA sense strand
gaaguggaugacaccuuga

SEQ ID NO: 1131003 - RNA, 19 nt, Homo sapiens
  misc_RNA (1)...(19): siRNA sense strand
ccaccagaaccuaucauca

SEQ ID NO: 1131004 - RNA, 19 nt, Homo sapiens
  misc_RNA (1)...(19): siRNA sense strand
gggcauccauacccagacu

SEQ ID NO: 1131005 - RNA, 19 nt, Homo sapiens
  misc_RNA (1)...(19): siRNA sense strand
augaggaaacggcuagaua

SEQ ID NO: 1131006 - RNA, 19 nt, Homo sapiens
  misc_RNA (1)...(19): siRNA sense strand
aaucgaaaccacaaugcaa

SEQ ID NO: 1131007 - RNA, 19 nt, Homo sapiens
  misc_RNA (1)...(19): siRNA sense strand
guguugacccgaaugauca

SEQ ID NO: 1131008 - RNA, 19 nt, Homo sapiens
  misc_RNA (1)...(19): siRNA sense strand
guggcaauauauuaagaca

SEQ ID NO: 1131009 - RNA, 19 nt, Homo sapiens
  misc_RNA (1)...(19): siRNA sense strand
uccuacugaugcuggauua

SEQ ID NO: 1131010 - RNA, 19 nt, Homo sapiens
  misc_RNA (1)...(19): siRNA sense strand
ugacaaaauucuaccucaa

SEQ ID NO: 1131011 - RNA, 19 nt, Homo sapiens
  misc_RNA (1)...(19): siRNA sense strand
cgacuccugggcauccaua

SEQ ID NO: 1131012 - RNA, 19 nt, Homo sapiens
  misc_RNA (1)...(19): siRNA sense strand
guacuguccuacugaugcu

SEQ ID NO: 1131013 - RNA, 19 nt, Homo sapiens
  misc_RNA (1)...(19): siRNA sense strand
ugggaauccggaauacaua

SEQ ID NO: 1131014 - RNA, 19 nt, Homo sapiens
  misc_RNA (1)...(19): siRNA sense strand
cgaaaccacaaugcaaaga

SEQ ID NO: 1131015 - RNA, 19 nt, Homo sapiens
  misc_RNA (1)...(19): siRNA sense strand
cauuaaucaugucaucagu

SEQ ID NO: 1131016 - RNA, 19 nt, Homo sapiens
  misc_RNA (1)...(19): siRNA sense strand
cuccaugccuugcuuaugc

SEQ ID NO: 1131017 - RNA, 19 nt, Homo sapiens
  misc_RNA (1)...(19): siRNA sense strand
cagccuuguccaaauauga

SEQ ID NO: 1131018 - RNA, 19 nt, Homo sapiens
  misc_RNA (1)...(19): siRNA sense strand
cagcuuguuaugacauuga

SEQ ID NO: 1131019 - RNA, 19 nt, Homo sapiens
  misc_RNA (1)...(19): siRNA sense strand
cacuguggcaauauauuaa

SEQ ID NO: 1131020 - RNA, 19 nt, Homo sapiens
  misc_RNA (1)...(19): siRNA sense strand
ccagacucguccagugauc

SEQ ID NO: 1131021 - RNA, 19 nt, Homo sapiens
  misc_RNA (1)...(19): siRNA sense strand
gggaauccggaauacauag

SEQ ID NO: 1131022 - RNA, 19 nt, Homo sapiens
  misc_RNA (1)...(19): siRNA sense strand
ccuugaagacccagaugaa

SEQ ID NO: 1131023 - RNA, 19 nt, Homo sapiens
  misc_RNA (1)...(19): siRNA sense strand
ccucaaaggauucgugaac

SEQ ID NO: 1131024 - RNA, 19 nt, Homo sapiens
  misc_RNA (1)...(19): siRNA sense strand
gaagauggcugacaaaauu

SEQ ID NO: 1131025 - RNA, 19 nt, Homo sapiens
  misc_RNA (1)...(19): siRNA sense strand
gcagagacgacaagaauua

SEQ ID NO: 1131026 - RNA, 19 nt, Homo sapiens
  misc_RNA (1)...(19): siRNA sense strand
gcacuguggcaauauauua

SEQ ID NO: 1131027 - RNA, 19 nt, Homo sapiens
  misc_RNA (1)...(19): siRNA sense strand
caaauaugaugccacuaaa

SEQ ID NO: 1131028 - RNA, 19 nt, Homo sapiens
  misc_RNA (1)...(19): siRNA sense strand
gaaccuaucaucauuaauc

SEQ ID NO: 1131029 - RNA, 19 nt, Homo sapiens
  misc_RNA (1)...(19): siRNA sense strand
ugacugaugugguggguaa

SEQ ID NO: 1131030 - RNA, 19 nt, Homo sapiens
  misc_RNA (1)...(19): siRNA sense strand
ccaaauaugaugccacuaa

SEQ ID NO: 1131031 - RNA, 19 nt, Homo sapiens
  misc_RNA (1)...(19): siRNA sense strand
cagaaccuaucaucauuaa

SEQ ID NO: 1131032 - RNA, 19 nt, Homo sapiens
  misc_RNA (1)...(19): siRNA sense strand
ugauugaacuggacaaaga

SEQ ID NO: 1131033 - RNA, 19 nt, Homo sapiens
  misc_RNA (1)...(19): siRNA sense strand
caagcacuguggcaauaua

SEQ ID NO: 1131034 - RNA, 19 nt, Homo sapiens
  misc_RNA (1)...(19): siRNA sense strand
aaacggaagcugcgaauuu

SEQ ID NO: 1131035 - RNA, 19 nt, Homo sapiens
  misc_RNA (1)...(19): siRNA sense strand
ggcaauauauuaagacaca

SEQ ID NO: 1131036 - RNA, 19 nt, Homo sapiens
  misc_RNA (1)...(19): siRNA sense strand
agacccagaugaauucuuu

SEQ ID NO: 1131037 - RNA, 19 nt, Homo sapiens
  misc_RNA (1)...(19): siRNA sense strand
aaaccacaaugcaaagaaa

SEQ ID NO: 1131038 - RNA, 19 nt, Homo sapiens
  misc_RNA (1)...(19): siRNA sense strand
ggaaacggcuagauaucca

SEQ ID NO: 1131039 - RNA, 19 nt, Homo sapiens
  misc_RNA (1)...(19): siRNA sense strand
gaaaccacaaugcaaagaa

SEQ ID NO: 1131040 - RNA, 19 nt, Homo sapiens
  misc_RNA (1)...(19): siRNA sense strand
aaagacagcuuguuaugac

SEQ ID NO: 1131041 - RNA, 19 nt, Homo sapiens
  misc_RNA (1)...(19): siRNA sense strand
ggagauugcuacucuagac

SEQ ID NO: 1131042 - RNA, 19 nt, Homo sapiens
  misc_RNA (1)...(19): siRNA sense strand
cagcagagacgacaagaau

SEQ ID NO: 1131043 - RNA, 19 nt, Homo sapiens
  misc_RNA (1)...(19): siRNA sense strand
gggaguuugucaucuguga

SEQ ID NO: 1131044 - RNA, 19 nt, Homo sapiens
  misc_RNA (1)...(19): siRNA sense strand
gagcugaguucuacuucca

SEQ ID NO: 1131045 - RNA, 19 nt, Homo sapiens
  misc_RNA (1)...(19): siRNA sense strand
ccagaaccuaucaucauua

SEQ ID NO: 1131046 - RNA, 19 nt, Homo sapiens
  misc_RNA (1)...(19): siRNA sense strand
auauggaucucuuggcuuu

SEQ ID NO: 1131047 - RNA, 19 nt, Homo sapiens
  misc_RNA (1)...(19): siRNA sense strand
uaagucagaugccgaggau

SEQ ID NO: 1131048 - RNA, 19 nt, Homo sapiens
  misc_RNA (1)...(19): siRNA sense strand
cagaaucccaggccuauau

SEQ ID NO: 1131049 - RNA, 19 nt, Homo sapiens
  misc_RNA (1)...(19): siRNA sense strand
ucaaaggauucgugaacug

SEQ ID NO: 1131050 - RNA, 19 nt, Homo sapiens
  misc_RNA (1)...(19): siRNA sense strand
uuaaucaugucaucagugu

SEQ ID NO: 1131051 - RNA, 19 nt, Homo sapiens
  misc_RNA (1)...(19): siRNA sense strand
caucauuaaucaugucauc

SEQ ID NO: 1131052 - RNA, 19 nt, Homo sapiens
  misc_RNA (1)...(19): siRNA sense strand
gauucagccuuguccaaau

SEQ ID NO: 1131053 - RNA, 19 nt, Homo sapiens
  misc_RNA (1)...(19): siRNA sense strand
uccaagcacuguggcaaua

SEQ ID NO: 1131054 - RNA, 19 nt, Homo sapiens
  misc_RNA (1)...(19): siRNA sense strand
auucagccuuguccaaaua

SEQ ID NO: 1131055 - RNA, 19 nt, Homo sapiens
  misc_RNA (1)...(19): siRNA sense strand
uuaaguccuuggugauuga

SEQ ID NO: 1131056 - RNA, 19 nt, Homo sapiens
  misc_RNA (1)...(19): siRNA sense strand
ugaggaaacggcuagauau

SEQ ID NO: 1131057 - RNA, 19 nt, Homo sapiens
  misc_RNA (1)...(19): siRNA sense strand
ugaagacccagaugaauuc

SEQ ID NO: 1131058 - RNA, 19 nt, Homo sapiens
  misc_RNA (1)...(19): siRNA sense strand
gacagcuuguuaugacauu

SEQ ID NO: 1131059 - RNA, 19 nt, Homo sapiens
  misc_RNA (1)...(19): siRNA sense strand
ggauucagccuuguccaaa

SEQ ID NO: 1131060 - RNA, 19 nt, Homo sapiens
  misc_RNA (1)...(19): siRNA sense strand
aaaagaagauggcugacaa

SEQ ID NO: 1131061 - RNA, 19 nt, Homo sapiens
  misc_RNA (1)...(19): siRNA sense strand
gcgccgagcugaguucuac

SEQ ID NO: 1131062 - RNA, 19 nt, Homo sapiens
  misc_RNA (1)...(19): siRNA sense strand
ugacccgaaugaucagaaa

SEQ ID NO: 1131063 - RNA, 19 nt, Homo sapiens
  misc_RNA (1)...(19): siRNA sense strand
uaugaugccacuaaacaaa

SEQ ID NO: 1131064 - RNA, 19 nt, Homo sapiens
  misc_RNA (1)...(19): siRNA sense strand
gccgauacuucuacuccaa

SEQ ID NO: 1131065 - RNA, 19 nt, Homo sapiens
  misc_RNA (1)...(19): siRNA sense strand
accagaaccuaucaucauu

SEQ ID NO: 1131066 - RNA, 19 nt, Homo sapiens
  misc_RNA (1)...(19): siRNA sense strand
aaucaugucaucaguguug

SEQ ID NO: 1131067 - RNA, 19 nt, Homo sapiens
  misc_RNA (1)...(19): siRNA sense strand
gaggaaacggcuagauauc

SEQ ID NO: 1131068 - RNA, 19 nt, Homo sapiens
  misc_RNA (1)...(19): siRNA sense strand
aauucuaccucaaaggauu

SEQ ID NO: 1131069 - RNA, 19 nt, Homo sapiens
  misc_RNA (1)...(19): siRNA sense strand
gcccugggaauccggaaua

SEQ ID NO: 1131070 - RNA, 19 nt, Homo sapiens
  misc_RNA (1)...(19): siRNA sense strand
aaggauucgugaacuggua

SEQ ID NO: 1131071 - RNA, 19 nt, Homo sapiens
  misc_RNA (1)...(19): siRNA sense strand
aacaggagauugcuacucu

SEQ ID NO: 1131072 - RNA, 19 nt, Homo sapiens
  misc_RNA (1)...(19): siRNA sense strand
gagcgggaguuugucaucu

SEQ ID NO: 1131073 - RNA, 19 nt, Homo sapiens
  misc_RNA (1)...(19): siRNA sense strand
uugaagacccagaugaauu

SEQ ID NO: 1131074 - RNA, 19 nt, Homo sapiens
  misc_RNA (1)...(19): siRNA sense strand
caucaguguugacccgaau

SEQ ID NO: 1131075 - RNA, 19 nt, Homo sapiens
  misc_RNA (1)...(19): siRNA sense strand
ccugggagcuucggguaga

SEQ ID NO: 1131076 - RNA, 19 nt, Homo sapiens
  misc_RNA (1)...(19): siRNA sense strand
caccagaaccuaucaucau

SEQ ID NO: 1131077 - RNA, 19 nt, Homo sapiens
  misc_RNA (1)...(19): siRNA sense strand
aauaugaugccacuaaaca

SEQ ID NO: 1131078 - RNA, 19 nt, Homo sapiens
  misc_RNA (1)...(19): siRNA sense strand
ucaauccggcuaagucaga

SEQ ID NO: 1131079 - RNA, 19 nt, Homo sapiens
  misc_RNA (1)...(19): siRNA sense strand
ggaucagucccgcaagaga

SEQ ID NO: 1131080 - RNA, 19 nt, Homo sapiens
  misc_RNA (1)...(19): siRNA sense strand
ccuaucaucauuaaucaug

SEQ ID NO: 1131081 - RNA, 19 nt, Homo sapiens
  misc_RNA (1)...(19): siRNA sense strand
gcgggaguuugucaucugu

SEQ ID NO: 1131082 - RNA, 19 nt, Homo sapiens
  misc_RNA (1)...(19): siRNA sense strand
gaaacggcuagauauccaa

SEQ ID NO: 1131083 - RNA, 19 nt, Homo sapiens
  misc_RNA (1)...(19): siRNA sense strand
gcagcagagacgacaagaa

SEQ ID NO: 1131084 - RNA, 19 nt, Homo sapiens
  misc_RNA (1)...(19): siRNA sense strand
gguguacuguccuacugau

SEQ ID NO: 1131085 - RNA, 19 nt, Homo sapiens
  misc_RNA (1)...(19): siRNA sense strand
aaagaagauggcugacaaa

SEQ ID NO: 1131086 - RNA, 19 nt, Homo sapiens
  misc_RNA (1)...(19): siRNA sense strand
uugcuacucuagacaacaa

SEQ ID NO: 1131087 - RNA, 19 nt, Homo sapiens
  misc_RNA (1)...(19): siRNA sense strand
gacaaaauucuaccucaaa

SEQ ID NO: 1131088 - RNA, 19 nt, Homo sapiens
  misc_RNA (1)...(19): siRNA sense strand
uuuaaguccuuggugauug

SEQ ID NO: 1131089 - RNA, 19 nt, Homo sapiens
  misc_RNA (1)...(19): siRNA sense strand
gagacgacaagaauuagag

SEQ ID NO: 1131090 - RNA, 19 nt, Homo sapiens
  misc_RNA (1)...(19): siRNA sense strand
acaggagauugcuacucua

SEQ ID NO: 1131091 - RNA, 19 nt, Homo sapiens
  misc_RNA (1)...(19): siRNA sense strand
guggaugacaccuugaaga

SEQ ID NO: 1131092 - RNA, 19 nt, Homo sapiens
  misc_RNA (1)...(19): siRNA sense strand
gaaguggaugacaccuuga

SEQ ID NO: 1131093 - RNA, 19 nt, Homo sapiens
  misc_RNA (1)...(19): siRNA sense strand
ccaccagaaccuaucauca

SEQ ID NO: 1131094 - RNA, 19 nt, Homo sapiens
  misc_RNA (1)...(19): siRNA sense strand
gggcauccauacccagacu

SEQ ID NO: 1131095 - RNA, 19 nt, Homo sapiens
  misc_RNA (1)...(19): siRNA sense strand
augaggaaacggcuagaua

SEQ ID NO: 1131096 - RNA, 19 nt, Homo sapiens
  misc_RNA (1)...(19): siRNA sense strand
aaucgaaaccacaaugcaa

SEQ ID NO: 1131097 - RNA, 19 nt, Homo sapiens
  misc_RNA (1)...(19): siRNA sense strand
guguugacccgaaugauca

SEQ ID NO: 1131098 - RNA, 19 nt, Homo sapiens
  misc_RNA (1)...(19): siRNA sense strand
guggcaauauauuaagaca

SEQ ID NO: 1131099 - RNA, 19 nt, Homo sapiens
  misc_RNA (1)...(19): siRNA sense strand
uccuacugaugcuggauua

SEQ ID NO: 1131100 - RNA, 19 nt, Homo sapiens
  misc_RNA (1)...(19): siRNA sense strand
ugacaaaauucuaccucaa

SEQ ID NO: 1131101 - RNA, 19 nt, Homo sapiens
  misc_RNA (1)...(19): siRNA sense strand
cgacuccugggcauccaua

SEQ ID NO: 1131102 - RNA, 19 nt, Homo sapiens
  misc_RNA (1)...(19): siRNA sense strand
guacuguccuacugaugcu

SEQ ID NO: 1131103 - RNA, 19 nt, Homo sapiens
  misc_RNA (1)...(19): siRNA sense strand
ugggaauccggaauacaua

SEQ ID NO: 1131104 - RNA, 19 nt, Homo sapiens
  misc_RNA (1)...(19): siRNA sense strand
cgaaaccacaaugcaaaga

SEQ ID NO: 1131105 - RNA, 19 nt, Homo sapiens
  misc_RNA (1)...(19): siRNA sense strand
cauuaaucaugucaucagu

SEQ ID NO: 1131106 - RNA, 19 nt, Homo sapiens
  misc_RNA (1)...(19): siRNA sense strand
cuccaugccuugcuuaugc

SEQ ID NO: 1131107 - RNA, 19 nt, Homo sapiens
  misc_RNA (1)...(19): siRNA sense strand
cagccuuguccaaauauga

SEQ ID NO: 1131108 - RNA, 19 nt, Homo sapiens
  misc_RNA (1)...(19): siRNA sense strand
cagcuuguuaugacauuga

SEQ ID NO: 1131109 - RNA, 19 nt, Homo sapiens
  misc_RNA (1)...(19): siRNA sense strand
cacuguggcaauauauuaa

SEQ ID NO: 1131110 - RNA, 19 nt, Homo sapiens
  misc_RNA (1)...(19): siRNA sense strand
ccagacucguccagugauc

SEQ ID NO: 1131111 - RNA, 19 nt, Homo sapiens
  misc_RNA (1)...(19): siRNA sense strand
gggaauccggaauacauag

SEQ ID NO: 1131112 - RNA, 19 nt, Homo sapiens
  misc_RNA (1)...(19): siRNA sense strand
ccuugaagacccagaugaa

SEQ ID NO: 1131113 - RNA, 19 nt, Homo sapiens
  misc_RNA (1)...(19): siRNA sense strand
ccucaaaggauucgugaac

SEQ ID NO: 1131114 - RNA, 19 nt, Homo sapiens
  misc_RNA (1)...(19): siRNA sense strand
ggaaugauuuggauaauga

SEQ ID NO: 1131115 - RNA, 19 nt, Homo sapiens
  misc_RNA (1)...(19): siRNA sense strand
gaacggagacgacgccuuu

SEQ ID NO: 1131116 - RNA, 19 nt, Homo sapiens
  misc_RNA (1)...(19): siRNA sense strand
ccaaauacuucucuaagga

SEQ ID NO: 1131117 - RNA, 19 nt, Homo sapiens
  misc_RNA (1)...(19): siRNA sense strand
gaugaaagccucggagaaa

SEQ ID NO: 1131118 - RNA, 19 nt, Homo sapiens
  misc_RNA (1)...(19): siRNA sense strand
caaaaggccuucgaugaua

SEQ ID NO: 1131119 - RNA, 19 nt, Homo sapiens
  misc_RNA (1)...(19): siRNA sense strand
gaaaugauucggaggaagu

SEQ ID NO: 1131120 - RNA, 19 nt, Homo sapiens
  misc_RNA (1)...(19): siRNA sense strand
ccaacuaccucugagaaga

SEQ ID NO: 1131121 - RNA, 19 nt, Homo sapiens
  misc_RNA (1)...(19): siRNA sense strand
gcagaggaaggaaaugauu

SEQ ID NO: 1131122 - RNA, 19 nt, Homo sapiens
  misc_RNA (1)...(19): siRNA sense strand
gagaaaguaugaggcuaug

SEQ ID NO: 1131123 - RNA, 19 nt, Homo sapiens
  misc_RNA (1)...(19): siRNA sense strand
cgaagaucaugcccaagaa

SEQ ID NO: 1131124 - RNA, 19 nt, Homo sapiens
  misc_RNA (1)...(19): siRNA sense strand
gggaaugauuuggauaaug

SEQ ID NO: 1131125 - RNA, 19 nt, Homo sapiens
  misc_RNA (1)...(19): siRNA sense strand
cacgguuggugcucaaaua

SEQ ID NO: 1131126 - RNA, 19 nt, Homo sapiens
  misc_RNA (1)...(19): siRNA sense strand
caaauacuucucuaaggaa

SEQ ID NO: 1131127 - RNA, 19 nt, Homo sapiens
  misc_RNA (1)...(19): siRNA sense strand
ccaccuuucauguguaaua

SEQ ID NO: 1131128 - RNA, 19 nt, Homo sapiens
  misc_RNA (1)...(19): siRNA sense strand
aguaugaggcuaugacuaa

SEQ ID NO: 1131129 - RNA, 19 nt, Homo sapiens
  misc_RNA (1)...(19): siRNA sense strand
agaagcaucuggcccacaa

SEQ ID NO: 1131130 - RNA, 19 nt, Homo sapiens
  misc_RNA (1)...(19): siRNA sense strand
caagaagccagcagaggaa

SEQ ID NO: 1131131 - RNA, 19 nt, Homo sapiens
  misc_RNA (1)...(19): siRNA sense strand
guaugaggcuaugacuaaa

SEQ ID NO: 1131132 - RNA, 19 nt, Homo sapiens
  misc_RNA (1)...(19): siRNA sense strand
ugagaagauucacgagaga

SEQ ID NO: 1131133 - RNA, 19 nt, Homo sapiens
  misc_RNA (1)...(19): siRNA sense strand
gccaaauacuucucuaagg

SEQ ID NO: 1131134 - RNA, 19 nt, Homo sapiens
  misc_RNA (1)...(19): siRNA sense strand
gguugaacguccucagaug

SEQ ID NO: 1131135 - RNA, 19 nt, Homo sapiens
  misc_RNA (1)...(19): siRNA sense strand
gcucaaauaccagagaaga

SEQ ID NO: 1131136 - RNA, 19 nt, Homo sapiens
  misc_RNA (1)...(19): siRNA sense strand
gaaaguaugaggcuaugac

SEQ ID NO: 1131137 - RNA, 19 nt, Homo sapiens
  misc_RNA (1)...(19): siRNA sense strand
caccuuucauguguaauaa

SEQ ID NO: 1131138 - RNA, 19 nt, Homo sapiens
  misc_RNA (1)...(19): siRNA sense strand
gaaaaccaacuaccucuga

SEQ ID NO: 1131139 - RNA, 19 nt, Homo sapiens
  misc_RNA (1)...(19): siRNA sense strand
ggaagugccagaagcaucu

SEQ ID NO: 1131140 - RNA, 19 nt, Homo sapiens
  misc_RNA (1)...(19): siRNA sense strand
ccgaagaucaugcccaaga

SEQ ID NO: 1131141 - RNA, 19 nt, Homo sapiens
  misc_RNA (1)...(19): siRNA sense strand
gugcucaaauaccagagaa

SEQ ID NO: 1131142 - RNA, 19 nt, Homo sapiens
  misc_RNA (1)...(19): siRNA sense strand
cagcagaggaaggaaauga

SEQ ID NO: 1131143 - RNA, 19 nt, Homo sapiens
  misc_RNA (1)...(19): siRNA sense strand
ucaaauaccagagaagauc

SEQ ID NO: 1131144 - RNA, 19 nt, Homo sapiens
  misc_RNA (1)...(19): siRNA sense strand
caacuaccucugagaagau

SEQ ID NO: 1131145 - RNA, 19 nt, Homo sapiens
  misc_RNA (1)...(19): siRNA sense strand
gaacguccucagaugacuu

SEQ ID NO: 1131146 - RNA, 19 nt, Homo sapiens
  misc_RNA (1)...(19): siRNA sense strand
gaagccagcagaggaagga

SEQ ID NO: 1131147 - RNA, 19 nt, Homo sapiens
  misc_RNA (1)...(19): siRNA sense strand
ccucccaccuuucaugugu

SEQ ID NO: 1131148 - RNA, 19 nt, Homo sapiens
  misc_RNA (1)...(19): siRNA sense strand
ccacagacugcgugagaga

SEQ ID NO: 1131149 - RNA, 19 nt, Homo sapiens
  misc_RNA (1)...(19): siRNA sense strand
ggagacgacgccuuugcaa

SEQ ID NO: 1131150 - RNA, 19 nt, Homo sapiens
  misc_RNA (1)...(19): siRNA sense strand
gaagaucaugcccaagaag

SEQ ID NO: 1131151 - RNA, 19 nt, Homo sapiens
  misc_RNA (1)...(19): siRNA sense strand
ggaggaagugccagaagca

SEQ ID NO: 1131152 - RNA, 19 nt, Homo sapiens
  misc_RNA (1)...(19): siRNA sense strand
guugaacguccucagauga

SEQ ID NO: 1131153 - RNA, 19 nt, Homo sapiens
  misc_RNA (1)...(19): siRNA sense strand
agagaaaguaugaggcuau

SEQ ID NO: 1131154 - RNA, 19 nt, Homo sapiens
  misc_RNA (1)...(19): siRNA sense strand
ggcuaugacuaaacuaggu

SEQ ID NO: 1131155 - RNA, 19 nt, Homo sapiens
  misc_RNA (1)...(19): siRNA sense strand
ucccaccuuucauguguaa

SEQ ID NO: 1131156 - RNA, 19 nt, Homo sapiens
  misc_RNA (1)...(19): siRNA sense strand
gaggcuaugacuaaacuag

SEQ ID NO: 1131157 - RNA, 19 nt, Homo sapiens
  misc_RNA (1)...(19): siRNA sense strand
aggccacccucccaccuuu

SEQ ID NO: 1131158 - RNA, 19 nt, Homo sapiens
  misc_RNA (1)...(19): siRNA sense strand
ccaaaaggccuucgaugau

SEQ ID NO: 1131159 - RNA, 19 nt, Homo sapiens
  misc_RNA (1)...(19): siRNA sense strand
gcuaugacuaaacuagguu

SEQ ID NO: 1131160 - RNA, 19 nt, Homo sapiens
  misc_RNA (1)...(19): siRNA sense strand
cagaggaaggaaaugauuc

SEQ ID NO: 1131161 - RNA, 19 nt, Homo sapiens
  misc_RNA (1)...(19): siRNA sense strand
aaaaggccuucgaugauau

SEQ ID NO: 1131162 - RNA, 19 nt, Homo sapiens
  misc_RNA (1)...(19): siRNA sense strand
acagacugcgugagagaaa

SEQ ID NO: 1131163 - RNA, 19 nt, Homo sapiens
  misc_RNA (1)...(19): siRNA sense strand
cuucgaugauauugccaaa

SEQ ID NO: 1131164 - RNA, 19 nt, Homo sapiens
  misc_RNA (1)...(19): siRNA sense strand
aggaaaugauucggaggaa

SEQ ID NO: 1131165 - RNA, 19 nt, Homo sapiens
  misc_RNA (1)...(19): siRNA sense strand
gaagagugggaaaagauga

SEQ ID NO: 1131166 - RNA, 19 nt, Homo sapiens
  misc_RNA (1)...(19): siRNA sense strand
gagaagauucacgagagau

SEQ ID NO: 1131167 - RNA, 19 nt, Homo sapiens
  misc_RNA (1)...(19): siRNA sense strand
gaaaacagcuggugauuua

SEQ ID NO: 1131168 - RNA, 19 nt, Homo sapiens
  misc_RNA (1)...(19): siRNA sense strand
ggaaugauuuggauaauga

SEQ ID NO: 1131169 - RNA, 19 nt, Homo sapiens
  misc_RNA (1)...(19): siRNA sense strand
gaacggagacgacgccuuu

SEQ ID NO: 1131170 - RNA, 19 nt, Homo sapiens
  misc_RNA (1)...(19): siRNA sense strand
ugaggaagaugacgaguaa

SEQ ID NO: 1131171 - RNA, 19 nt, Homo sapiens
  misc_RNA (1)...(19): siRNA sense strand
ccaaauacuucucuaagga

SEQ ID NO: 1131172 - RNA, 19 nt, Homo sapiens
  misc_RNA (1)...(19): siRNA sense strand
gaugaaagccucggagaaa

SEQ ID NO: 1131173 - RNA, 19 nt, Homo sapiens
  misc_RNA (1)...(19): siRNA sense strand
caaaaggccuucgaugaua

SEQ ID NO: 1131174 - RNA, 19 nt, Homo sapiens
  misc_RNA (1)...(19): siRNA sense strand
gaaaugauucggaggaagu

SEQ ID NO: 1131175 - RNA, 19 nt, Homo sapiens
  misc_RNA (1)...(19): siRNA sense strand
ccaacuaccucugagaaga

SEQ ID NO: 1131176 - RNA, 19 nt, Homo sapiens
  misc_RNA (1)...(19): siRNA sense strand
gcagaggaaggaaaugauu

SEQ ID NO: 1131177 - RNA, 19 nt, Homo sapiens
  misc_RNA (1)...(19): siRNA sense strand
gagaaaguaugaggcuaug

SEQ ID NO: 1131178 - RNA, 19 nt, Homo sapiens
  misc_RNA (1)...(19): siRNA sense strand
cgaagaucaugcccaagaa

SEQ ID NO: 1131179 - RNA, 19 nt, Homo sapiens
  misc_RNA (1)...(19): siRNA sense strand
gggaaugauuuggauaaug

SEQ ID NO: 1131180 - RNA, 19 nt, Homo sapiens
  misc_RNA (1)...(19): siRNA sense strand
cacgguuggugcucaaaua

SEQ ID NO: 1131181 - RNA, 19 nt, Homo sapiens
  misc_RNA (1)...(19): siRNA sense strand
caaauacuucucuaaggaa

SEQ ID NO: 1131182 - RNA, 19 nt, Homo sapiens
  misc_RNA (1)...(19): siRNA sense strand
ccaccuuucauguguaaua

SEQ ID NO: 1131183 - RNA, 19 nt, Homo sapiens
  misc_RNA (1)...(19): siRNA sense strand
aguaugaggcuaugacuaa

SEQ ID NO: 1131184 - RNA, 19 nt, Homo sapiens
  misc_RNA (1)...(19): siRNA sense strand
agaagcaucuggcccacaa

SEQ ID NO: 1131185 - RNA, 19 nt, Homo sapiens
  misc_RNA (1)...(19): siRNA sense strand
caagaagccagcagaggaa

SEQ ID NO: 1131186 - RNA, 19 nt, Homo sapiens
  misc_RNA (1)...(19): siRNA sense strand
guaugaggcuaugacuaaa

SEQ ID NO: 1131187 - RNA, 19 nt, Homo sapiens
  misc_RNA (1)...(19): siRNA sense strand
ugagaagauucacgagaga

SEQ ID NO: 1131188 - RNA, 19 nt, Homo sapiens
  misc_RNA (1)...(19): siRNA sense strand
gccaaauacuucucuaagg

SEQ ID NO: 1131189 - RNA, 19 nt, Homo sapiens
  misc_RNA (1)...(19): siRNA sense strand
gcucaaauaccagagaaga

SEQ ID NO: 1131190 - RNA, 19 nt, Homo sapiens
  misc_RNA (1)...(19): siRNA sense strand
gguugaacguccucagaug

SEQ ID NO: 1131191 - RNA, 19 nt, Homo sapiens
  misc_RNA (1)...(19): siRNA sense strand
gaaaguaugaggcuaugac

SEQ ID NO: 1131192 - RNA, 19 nt, Homo sapiens
  misc_RNA (1)...(19): siRNA sense strand
ggugauuuaugaagagauc

SEQ ID NO: 1131193 - RNA, 19 nt, Homo sapiens
  misc_RNA (1)...(19): siRNA sense strand
caccuuucauguguaauaa

SEQ ID NO: 1131194 - RNA, 19 nt, Homo sapiens
  misc_RNA (1)...(19): siRNA sense strand
gaaaaccaacuaccucuga

SEQ ID NO: 1131195 - RNA, 19 nt, Homo sapiens
  misc_RNA (1)...(19): siRNA sense strand
ggaagugccagaagcaucu

SEQ ID NO: 1131196 - RNA, 19 nt, Homo sapiens
  misc_RNA (1)...(19): siRNA sense strand
ccgaagaucaugcccaaga

SEQ ID NO: 1131197 - RNA, 19 nt, Homo sapiens
  misc_RNA (1)...(19): siRNA sense strand
aaacagcuggugauuuaug

SEQ ID NO: 1131198 - RNA, 19 nt, Homo sapiens
  misc_RNA (1)...(19): siRNA sense strand
gugcucaaauaccagagaa

SEQ ID NO: 1131199 - RNA, 19 nt, Homo sapiens
  misc_RNA (1)...(19): siRNA sense strand
ucaaauaccagagaagauc

SEQ ID NO: 1131200 - RNA, 19 nt, Homo sapiens
  misc_RNA (1)...(19): siRNA sense strand
caacuaccucugagaagau

SEQ ID NO: 1131201 - RNA, 19 nt, Homo sapiens
  misc_RNA (1)...(19): siRNA sense strand
cagcagaggaaggaaauga

SEQ ID NO: 1131202 - RNA, 19 nt, Homo sapiens
  misc_RNA (1)...(19): siRNA sense strand
gaacguccucagaugacuu

SEQ ID NO: 1131203 - RNA, 19 nt, Homo sapiens
  misc_RNA (1)...(19): siRNA sense strand
gaagccagcagaggaagga

SEQ ID NO: 1131204 - RNA, 19 nt, Homo sapiens
  misc_RNA (1)...(19): siRNA sense strand
ccucccaccuuucaugugu

SEQ ID NO: 1131205 - RNA, 19 nt, Homo sapiens
  misc_RNA (1)...(19): siRNA sense strand
cagcgacccugaggaagau

SEQ ID NO: 1131206 - RNA, 19 nt, Homo sapiens
  misc_RNA (1)...(19): siRNA sense strand
ccacagacugcgugagaga

SEQ ID NO: 1131207 - RNA, 19 nt, Homo sapiens
  misc_RNA (1)...(19): siRNA sense strand
gaagaucaugcccaagaag

SEQ ID NO: 1131208 - RNA, 19 nt, Homo sapiens
  misc_RNA (1)...(19): siRNA sense strand
ggagacgacgccuuugcaa

SEQ ID NO: 1131209 - RNA, 19 nt, Homo sapiens
  misc_RNA (1)...(19): siRNA sense strand
ggaggaagugccagaagca

SEQ ID NO: 1131210 - RNA, 19 nt, Homo sapiens
  misc_RNA (1)...(19): siRNA sense strand
guugaacguccucagauga

SEQ ID NO: 1131211 - RNA, 19 nt, Homo sapiens
  misc_RNA (1)...(19): siRNA sense strand
aacagcuggugauuuauga

SEQ ID NO: 1131212 - RNA, 19 nt, Homo sapiens
  misc_RNA (1)...(19): siRNA sense strand
gcuggugauuuaugaagag

SEQ ID NO: 1131213 - RNA, 19 nt, Homo sapiens
  misc_RNA (1)...(19): siRNA sense strand
agagaaaguaugaggcuau

SEQ ID NO: 1131214 - RNA, 19 nt, Homo sapiens
  misc_RNA (1)...(19): siRNA sense strand
ggcuaugacuaaacuaggu

SEQ ID NO: 1131215 - RNA, 19 nt, Homo sapiens
  misc_RNA (1)...(19): siRNA sense strand
ucccaccuuucauguguaa

SEQ ID NO: 1131216 - RNA, 19 nt, Homo sapiens
  misc_RNA (1)...(19): siRNA sense strand
gaggcuaugacuaaacuag

SEQ ID NO: 1131217 - RNA, 19 nt, Homo sapiens
  misc_RNA (1)...(19): siRNA sense strand
aggccacccucccaccuuu

SEQ ID NO: 1131218 - RNA, 19 nt, Homo sapiens
  misc_RNA (1)...(19): siRNA sense strand
ccaaaaggccuucgaugau

SEQ ID NO: 1131219 - RNA, 19 nt, Homo sapiens
  misc_RNA (1)...(19): siRNA sense strand
gcuaugacuaaacuagguu

SEQ ID NO: 1131220 - RNA, 19 nt, Homo sapiens
  misc_RNA (1)...(19): siRNA sense strand
cagaggaaggaaaugauuc

SEQ ID NO: 1131221 - RNA, 19 nt, Homo sapiens
  misc_RNA (1)...(19): siRNA sense strand
cuucgaugauauugccaaa

SEQ ID NO: 1131222 - RNA, 19 nt, Homo sapiens
  misc_RNA (1)...(19): siRNA sense strand
aaaaggccuucgaugauau

SEQ ID NO: 1131223 - RNA, 19 nt, Homo sapiens
  misc_RNA (1)...(19): siRNA sense strand
acagacugcgugagagaaa

SEQ ID NO: 1131224 - RNA, 19 nt, Homo sapiens
  misc_RNA (1)...(19): siRNA sense strand
gaagagugggaaaagauga

SEQ ID NO: 1131225 - RNA, 19 nt, Homo sapiens
  misc_RNA (1)...(19): siRNA sense strand
cugaggaagaugacgagua

SEQ ID NO: 1131226 - RNA, 19 nt, Homo sapiens
  misc_RNA (1)...(19): siRNA sense strand
gagaagauucacgagagau

SEQ ID NO: 1131227 - RNA, 19 nt, Homo sapiens
  misc_RNA (1)...(19): siRNA sense strand
aggaaaugauucggaggaa

SEQ ID NO: 1131228 - RNA, 19 nt, Homo sapiens
  misc_RNA (1)...(19): siRNA sense strand
acacggagcugccagagaa

SEQ ID NO: 1131229 - RNA, 19 nt, Homo sapiens
  misc_RNA (1)...(19): siRNA sense strand
ccaaacagcacucgucguu

SEQ ID NO: 1131230 - RNA, 19 nt, Homo sapiens
  misc_RNA (1)...(19): siRNA sense strand
gugcgggucugguucaaga

SEQ ID NO: 1131231 - RNA, 19 nt, Homo sapiens
  misc_RNA (1)...(19): siRNA sense strand
caacguacgcacuucacaa

SEQ ID NO: 1131232 - RNA, 19 nt, Homo sapiens
  misc_RNA (1)...(19): siRNA sense strand
ggcguaagcgcgagcguaa

SEQ ID NO: 1131233 - RNA, 19 nt, Homo sapiens
  misc_RNA (1)...(19): siRNA sense strand
caagccagcaguugcaaga

SEQ ID NO: 1131234 - RNA, 19 nt, Homo sapiens
  misc_RNA (1)...(19): siRNA sense strand
gagcuucaccuucuucaac

SEQ ID NO: 1131235 - RNA, 19 nt, Homo sapiens
  misc_RNA (1)...(19): siRNA sense strand
gcaguucagcggccuagug

SEQ ID NO: 1131236 - RNA, 19 nt, Homo sapiens
  misc_RNA (1)...(19): siRNA sense strand
accaagagcuucaccuucu

SEQ ID NO: 1131237 - RNA, 19 nt, Homo sapiens
  misc_RNA (1)...(19): siRNA sense strand
gcagacgacccagccaaga

SEQ ID NO: 1131238 - RNA, 19 nt, Homo sapiens
  misc_RNA (1)...(19): siRNA sense strand
cagacgacccagccaagaa

SEQ ID NO: 1131239 - RNA, 19 nt, Homo sapiens
  misc_RNA (1)...(19): siRNA sense strand
ucaacaacaucaacaaccu

SEQ ID NO: 1131240 - RNA, 19 nt, Homo sapiens
  misc_RNA (1)...(19): siRNA sense strand
ccaccaagagcuucaccuu

SEQ ID NO: 1131241 - RNA, 19 nt, Homo sapiens
  misc_RNA (1)...(19): siRNA sense strand
guggcuacgugccgcaguu

SEQ ID NO: 1131242 - RNA, 19 nt, Homo sapiens
  misc_RNA (1)...(19): siRNA sense strand
gcaacguacgcacuucaca

SEQ ID NO: 1131243 - RNA, 19 nt, Homo sapiens
  misc_RNA (1)...(19): siRNA sense strand
acucgggccucaacaacau

SEQ ID NO: 1131244 - RNA, 19 nt, Homo sapiens
  misc_RNA (1)...(19): siRNA sense strand
ccaacucgggccucaacaa

SEQ ID NO: 1131245 - RNA, 19 nt, Homo sapiens
  misc_RNA (1)...(19): siRNA sense strand
ucacaagccagcaguugca

SEQ ID NO: 1131246 - RNA, 19 nt, Homo sapiens
  misc_RNA (1)...(19): siRNA sense strand
caacucgggccucaacaac

SEQ ID NO: 1131247 - RNA, 19 nt, Homo sapiens
  misc_RNA (1)...(19): siRNA sense strand
gccugcggcucaaguccaa

SEQ ID NO: 1131248 - RNA, 19 nt, Homo sapiens
  misc_RNA (1)...(19): siRNA sense strand
ccucaacgcgugccaguac

SEQ ID NO: 1131249 - RNA, 19 nt, Homo sapiens
  misc_RNA (1)...(19): siRNA sense strand
gaacugaagauucuggauu

SEQ ID NO: 1131250 - RNA, 19 nt, Homo sapiens
  misc_RNA (1)...(19): siRNA sense strand
ggaguggcaugaagcugua

SEQ ID NO: 1131251 - RNA, 19 nt, Homo sapiens
  misc_RNA (1)...(19): siRNA sense strand
ucaaaggccuuaaguacau

SEQ ID NO: 1131252 - RNA, 19 nt, Homo sapiens
  misc_RNA (1)...(19): siRNA sense strand
ggaagcagcacaucuacaa

SEQ ID NO: 1131253 - RNA, 19 nt, Homo sapiens
  misc_RNA (1)...(19): siRNA sense strand
caacuucuaugacuucuac

SEQ ID NO: 1131254 - RNA, 19 nt, Homo sapiens
  misc_RNA (1)...(19): siRNA sense strand
gggagaagguggccaucaa

SEQ ID NO: 1131255 - RNA, 19 nt, Homo sapiens
  misc_RNA (1)...(19): siRNA sense strand
gccguuugaugauuccuua

SEQ ID NO: 1131256 - RNA, 19 nt, Homo sapiens
  misc_RNA (1)...(19): siRNA sense strand
gcucaaaggccuuaaguac

SEQ ID NO: 1131257 - RNA, 19 nt, Homo sapiens
  misc_RNA (1)...(19): siRNA sense strand
ggauuucacucagcuguuc

SEQ ID NO: 1131258 - RNA, 19 nt, Homo sapiens
  misc_RNA (1)...(19): siRNA sense strand
gaagguggccaucaagaag

SEQ ID NO: 1131259 - RNA, 19 nt, Homo sapiens
  misc_RNA (1)...(19): siRNA sense strand
aacugaagauucuggauuu

SEQ ID NO: 1131260 - RNA, 19 nt, Homo sapiens
  misc_RNA (1)...(19): siRNA sense strand
cagcagccguuugaugauu

SEQ ID NO: 1131261 - RNA, 19 nt, Homo sapiens
  misc_RNA (1)...(19): siRNA sense strand
ccucacccaucccuucuuu

SEQ ID NO: 1131262 - RNA, 19 nt, Homo sapiens
  misc_RNA (1)...(19): siRNA sense strand
ucauugggcuccuggaugu

SEQ ID NO: 1131263 - RNA, 19 nt, Homo sapiens
  misc_RNA (1)...(19): siRNA sense strand
agaagaugcuggagcuaga

SEQ ID NO: 1131264 - RNA, 19 nt, Homo sapiens
  misc_RNA (1)...(19): siRNA sense strand
acaaagcggccaaauccua

SEQ ID NO: 1131265 - RNA, 19 nt, Homo sapiens
  misc_RNA (1)...(19): siRNA sense strand
ugcagaagcugaacgacaa

SEQ ID NO: 1131266 - RNA, 19 nt, Homo sapiens
  misc_RNA (1)...(19): siRNA sense strand
gugaggagaagauccagua

SEQ ID NO: 1131267 - RNA, 19 nt, Homo sapiens
  misc_RNA (1)...(19): siRNA sense strand
ugacccagauccugaaagu

SEQ ID NO: 1131268 - RNA, 19 nt, Homo sapiens
  misc_RNA (1)...(19): siRNA sense strand
gaaugaggacugugaacug

SEQ ID NO: 1131269 - RNA, 19 nt, Homo sapiens
  misc_RNA (1)...(19): siRNA sense strand
gaagcugagccgacccuuu

SEQ ID NO: 1131270 - RNA, 19 nt, Homo sapiens
  misc_RNA (1)...(19): siRNA sense strand
cgacaaagcggccaaaucc

SEQ ID NO: 1131271 - RNA, 19 nt, Homo sapiens
  misc_RNA (1)...(19): siRNA sense strand
aaugaggacugugaacuga

SEQ ID NO: 1131272 - RNA, 19 nt, Homo sapiens
  misc_RNA (1)...(19): siRNA sense strand
gaaacucacaguggaugaa

SEQ ID NO: 1131273 - RNA, 19 nt, Homo sapiens
  misc_RNA (1)...(19): siRNA sense strand
gcaaccuggcugugaauga

SEQ ID NO: 1131274 - RNA, 19 nt, Homo sapiens
  misc_RNA (1)...(19): siRNA sense strand
cugcggaccugcuggagaa

SEQ ID NO: 1131275 - RNA, 19 nt, Homo sapiens
  misc_RNA (1)...(19): siRNA sense strand
gagaagguggccaucaaga

SEQ ID NO: 1131276 - RNA, 19 nt, Homo sapiens
  misc_RNA (1)...(19): siRNA sense strand
ucagcuggaugcacuacaa

SEQ ID NO: 1131277 - RNA, 19 nt, Homo sapiens
  misc_RNA (1)...(19): siRNA sense strand
caaccuggcugugaaugag

SEQ ID NO: 1131278 - RNA, 19 nt, Homo sapiens
  misc_RNA (1)...(19): siRNA sense strand
ccaggaaggauuucacuca

SEQ ID NO: 1131279 - RNA, 19 nt, Homo sapiens
  misc_RNA (1)...(19): siRNA sense strand
ucacccaucccuucuuuga

SEQ ID NO: 1131280 - RNA, 19 nt, Homo sapiens
  misc_RNA (1)...(19): siRNA sense strand
guuugaugauuccuuagaa

SEQ ID NO: 1131281 - RNA, 19 nt, Homo sapiens
  misc_RNA (1)...(19): siRNA sense strand
ggaguucagugaggagaag

SEQ ID NO: 1131282 - RNA, 19 nt, Homo sapiens
  misc_RNA (1)...(19): siRNA sense strand
caaggagauugugaacuuc

SEQ ID NO: 1131283 - RNA, 19 nt, Homo sapiens
  misc_RNA (1)...(19): siRNA sense strand
gggagcugcugcugcugaa

SEQ ID NO: 1131284 - RNA, 19 nt, Homo sapiens
  misc_RNA (1)...(19): siRNA sense strand
ggacugugaacugaagauu

SEQ ID NO: 1131285 - RNA, 19 nt, Homo sapiens
  misc_RNA (1)...(19): siRNA sense strand
gaacgacaaagcggccaaa

SEQ ID NO: 1131286 - RNA, 19 nt, Homo sapiens
  misc_RNA (1)...(19): siRNA sense strand
gcgcaacuucuaugacuuc

SEQ ID NO: 1131287 - RNA, 19 nt, Homo sapiens
  misc_RNA (1)...(19): siRNA sense strand
aauggaagcagcacaucua

SEQ ID NO: 1131288 - RNA, 19 nt, Homo sapiens
  misc_RNA (1)...(19): siRNA sense strand
acccagauccugaaaguga

SEQ ID NO: 1131289 - RNA, 19 nt, Homo sapiens
  misc_RNA (1)...(19): siRNA sense strand
uguaucagaugcucaaagg

SEQ ID NO: 1131290 - RNA, 19 nt, Homo sapiens
  misc_RNA (1)...(19): siRNA sense strand
gcagaagcugaacgacaaa

SEQ ID NO: 1131291 - RNA, 19 nt, Homo sapiens
  misc_RNA (1)...(19): siRNA sense strand
ugaggacugugaacugaag

SEQ ID NO: 1131292 - RNA, 19 nt, Homo sapiens
  misc_RNA (1)...(19): siRNA sense strand
aagcugagccgacccuuuc

SEQ ID NO: 1131293 - RNA, 19 nt, Homo sapiens
  misc_RNA (1)...(19): siRNA sense strand
cccagcagccguuugauga

SEQ ID NO: 1131294 - RNA, 19 nt, Homo sapiens
  misc_RNA (1)...(19): siRNA sense strand
acugugaacugaagauucu

SEQ ID NO: 1131295 - RNA, 19 nt, Homo sapiens
  misc_RNA (1)...(19): siRNA sense strand
ucacaguggaugaauggaa

SEQ ID NO: 1131296 - RNA, 19 nt, Homo sapiens
  misc_RNA (1)...(19): siRNA sense strand
gaauggaagcagcacaucu

SEQ ID NO: 1131297 - RNA, 19 nt, Homo sapiens
  misc_RNA (1)...(19): siRNA sense strand
agaagguggccaucaagaa

SEQ ID NO: 1131298 - RNA, 19 nt, Homo sapiens
  misc_RNA (1)...(19): siRNA sense strand
ggagaagguggccaucaag

SEQ ID NO: 1131299 - RNA, 19 nt, Homo sapiens
  misc_RNA (1)...(19): siRNA sense strand
gggagcugcccaagaccua

SEQ ID NO: 1131300 - RNA, 19 nt, Homo sapiens
  misc_RNA (1)...(19): siRNA sense strand
caaaggccuuaaguacauc

SEQ ID NO: 1131301 - RNA, 19 nt, Homo sapiens
  misc_RNA (1)...(19): siRNA sense strand
aagcaggacgucaacaaga

SEQ ID NO: 1131302 - RNA, 19 nt, Homo sapiens
  misc_RNA (1)...(19): siRNA sense strand
uggaccagcugacccagau

SEQ ID NO: 1131303 - RNA, 19 nt, Homo sapiens
  misc_RNA (1)...(19): siRNA sense strand
acaagcaggacgucaacaa

SEQ ID NO: 1131304 - RNA, 19 nt, Homo sapiens
  misc_RNA (1)...(19): siRNA sense strand
guaccugguguaucagaug

SEQ ID NO: 1131305 - RNA, 19 nt, Homo sapiens
  misc_RNA (1)...(19): siRNA sense strand
gcccagcagccguuugaug

SEQ ID NO: 1131306 - RNA, 19 nt, Homo sapiens
  misc_RNA (1)...(19): siRNA sense strand
ggagcuagacguggacaag

SEQ ID NO: 1131307 - RNA, 19 nt, Homo sapiens
  misc_RNA (1)...(19): siRNA sense strand
caagcaggacgucaacaag

SEQ ID NO: 1131308 - RNA, 19 nt, Homo sapiens
  misc_RNA (1)...(19): siRNA sense strand
gcuguaucauggcagagau

SEQ ID NO: 1131309 - RNA, 19 nt, Homo sapiens
  misc_RNA (1)...(19): siRNA sense strand
cagaugcucaaaggccuua

SEQ ID NO: 1131310 - RNA, 19 nt, Homo sapiens
  misc_RNA (1)...(19): siRNA sense strand
ggagaagaugcuggagcua

SEQ ID NO: 1131311 - RNA, 19 nt, Homo sapiens
  misc_RNA (1)...(19): siRNA sense strand
gaagcagcacaucuacaag

SEQ ID NO: 1131312 - RNA, 19 nt, Homo sapiens
  misc_RNA (1)...(19): siRNA sense strand
gcaacuucuaugacuucua

SEQ ID NO: 1131313 - RNA, 19 nt, Homo sapiens
  misc_RNA (1)...(19): siRNA sense strand
gcagugaugugaugaauua

SEQ ID NO: 1131314 - RNA, 19 nt, Homo sapiens
  misc_RNA (1)...(19): siRNA sense strand
ccacugcuaugccuuguuu

SEQ ID NO: 1131315 - RNA, 19 nt, Homo sapiens
  misc_RNA (1)...(19): siRNA sense strand
guggaaagauuauaacugu

SEQ ID NO: 1131316 - RNA, 19 nt, Homo sapiens
  misc_RNA (1)...(19): siRNA sense strand
gaguagcagugaugugaug

SEQ ID NO: 1131317 - RNA, 19 nt, Homo sapiens
  misc_RNA (1)...(19): siRNA sense strand
agaaaucccuccaccaucu

SEQ ID NO: 1131318 - RNA, 19 nt, Homo sapiens
  misc_RNA (1)...(19): siRNA sense strand
gugaugugaugaauuacuu

SEQ ID NO: 1131319 - RNA, 19 nt, Homo sapiens
  misc_RNA (1)...(19): siRNA sense strand
gguaacagcuacucauacg

SEQ ID NO: 1131320 - RNA, 19 nt, Homo sapiens
  misc_RNA (1)...(19): siRNA sense strand
uaucuuggaugcugcuuuc

SEQ ID NO: 1131321 - RNA, 19 nt, Homo sapiens
  misc_RNA (1)...(19): siRNA sense strand
cuggaaaccuggugucugu

SEQ ID NO: 1131322 - RNA, 19 nt, Homo sapiens
  misc_RNA (1)...(19): siRNA sense strand
ugagguggaaagauuauaa

SEQ ID NO: 1131323 - RNA, 19 nt, Homo sapiens
  misc_RNA (1)...(19): siRNA sense strand
cagcauuucugagguggaa

SEQ ID NO: 1131324 - RNA, 19 nt, Homo sapiens
  misc_RNA (1)...(19): siRNA sense strand
aaugugagguuacccuaug

SEQ ID NO: 1131325 - RNA, 19 nt, Homo sapiens
  misc_RNA (1)...(19): siRNA sense strand
gugaagagcauugguaaca

SEQ ID NO: 1131326 - RNA, 19 nt, Homo sapiens
  misc_RNA (1)...(19): siRNA sense strand
gaagguugggaguggagua

SEQ ID NO: 1131327 - RNA, 19 nt, Homo sapiens
  misc_RNA (1)...(19): siRNA sense strand
gaugugaugaauuacuuug

SEQ ID NO: 1131328 - RNA, 19 nt, Homo sapiens
  misc_RNA (1)...(19): siRNA sense strand
gugcgagccugucgagaag

SEQ ID NO: 1131329 - RNA, 19 nt, Homo sapiens
  misc_RNA (1)...(19): siRNA sense strand
ccaaaauccuggacagaug

SEQ ID NO: 1131330 - RNA, 19 nt, Homo sapiens
  misc_RNA (1)...(19): siRNA sense strand
ggaguggaguagcagugau

SEQ ID NO: 1131331 - RNA, 19 nt, Homo sapiens
  misc_RNA (1)...(19): siRNA sense strand
uagcagugaugugaugaau

SEQ ID NO: 1131332 - RNA, 19 nt, Homo sapiens
  misc_RNA (1)...(19): siRNA sense strand
ucugcaaguucacugacua

SEQ ID NO: 1131333 - RNA, 19 nt, Homo sapiens
  misc_RNA (1)...(19): siRNA sense strand
cggauccgcugucccaaag

SEQ ID NO: 1131334 - RNA, 19 nt, Homo sapiens
  misc_RNA (1)...(19): siRNA sense strand
cuacucauacgucuggauu

SEQ ID NO: 1131335 - RNA, 19 nt, Homo sapiens
  misc_RNA (1)...(19): siRNA sense strand
agagaaaucccuccaccau

SEQ ID NO: 1131336 - RNA, 19 nt, Homo sapiens
  misc_RNA (1)...(19): siRNA sense strand
uggaguagcagugauguga

SEQ ID NO: 1131337 - RNA, 19 nt, Homo sapiens
  misc_RNA (1)...(19): siRNA sense strand
gcgagccugucgagaagca

SEQ ID NO: 1131338 - RNA, 19 nt, Homo sapiens
  misc_RNA (1)...(19): siRNA sense strand
gguggaaagauuauaacug

SEQ ID NO: 1131339 - RNA, 19 nt, Homo sapiens
  misc_RNA (1)...(19): siRNA sense strand
gucgagaagcacagcauuu

SEQ ID NO: 1131340 - RNA, 19 nt, Homo sapiens
  misc_RNA (1)...(19): siRNA sense strand
ugugaugaauuacuuugca

SEQ ID NO: 1131341 - RNA, 19 nt, Homo sapiens
  misc_RNA (1)...(19): siRNA sense strand
gugaugaauuacuuugcau

SEQ ID NO: 1131342 - RNA, 19 nt, Homo sapiens
  misc_RNA (1)...(19): siRNA sense strand
uacccuaugucugcaaguu

SEQ ID NO: 1131343 - RNA, 19 nt, Homo sapiens
  misc_RNA (1)...(19): siRNA sense strand
gggaguggaguagcaguga

SEQ ID NO: 1131344 - RNA, 19 nt, Homo sapiens
  misc_RNA (1)...(19): siRNA sense strand
gaguggaguagcagugaug

SEQ ID NO: 1131345 - RNA, 19 nt, Homo sapiens
  misc_RNA (1)...(19): siRNA sense strand
gcugcugucucagguucaa

SEQ ID NO: 1131346 - RNA, 19 nt, Homo sapiens
  misc_RNA (1)...(19): siRNA sense strand
ugaagagcauugguaacag

SEQ ID NO: 1131347 - RNA, 19 nt, Homo sapiens
  misc_RNA (1)...(19): siRNA sense strand
cccuaugucugcaaguuca

SEQ ID NO: 1131348 - RNA, 19 nt, Homo sapiens
  misc_RNA (1)...(19): siRNA sense strand
gguugggaguggaguagca

SEQ ID NO: 1131349 - RNA, 19 nt, Homo sapiens
  misc_RNA (1)...(19): siRNA sense strand
gcagugaugugaugaauua

SEQ ID NO: 1131350 - RNA, 19 nt, Homo sapiens
  misc_RNA (1)...(19): siRNA sense strand
ccacugcuaugccuuguuu

SEQ ID NO: 1131351 - RNA, 19 nt, Homo sapiens
  misc_RNA (1)...(19): siRNA sense strand
guggaaagauuauaacugu

SEQ ID NO: 1131352 - RNA, 19 nt, Homo sapiens
  misc_RNA (1)...(19): siRNA sense strand
gaguagcagugaugugaug

SEQ ID NO: 1131353 - RNA, 19 nt, Homo sapiens
  misc_RNA (1)...(19): siRNA sense strand
agaaaucccuccaccaucu

SEQ ID NO: 1131354 - RNA, 19 nt, Homo sapiens
  misc_RNA (1)...(19): siRNA sense strand
gugaugugaugaauuacuu

SEQ ID NO: 1131355 - RNA, 19 nt, Homo sapiens
  misc_RNA (1)...(19): siRNA sense strand
gguaacagcuacucauacg

SEQ ID NO: 1131356 - RNA, 19 nt, Homo sapiens
  misc_RNA (1)...(19): siRNA sense strand
uaucuuggaugcugcuuuc

SEQ ID NO: 1131357 - RNA, 19 nt, Homo sapiens
  misc_RNA (1)...(19): siRNA sense strand
cuggaaaccuggugucugu

SEQ ID NO: 1131358 - RNA, 19 nt, Homo sapiens
  misc_RNA (1)...(19): siRNA sense strand
ugagguggaaagauuauaa

SEQ ID NO: 1131359 - RNA, 19 nt, Homo sapiens
  misc_RNA (1)...(19): siRNA sense strand
cagcauuucugagguggaa

SEQ ID NO: 1131360 - RNA, 19 nt, Homo sapiens
  misc_RNA (1)...(19): siRNA sense strand
aaugugagguuacccuaug

SEQ ID NO: 1131361 - RNA, 19 nt, Homo sapiens
  misc_RNA (1)...(19): siRNA sense strand
gugaagagcauugguaaca

SEQ ID NO: 1131362 - RNA, 19 nt, Homo sapiens
  misc_RNA (1)...(19): siRNA sense strand
gaagguugggaguggagua

SEQ ID NO: 1131363 - RNA, 19 nt, Homo sapiens
  misc_RNA (1)...(19): siRNA sense strand
gaugugaugaauuacuuug

SEQ ID NO: 1131364 - RNA, 19 nt, Homo sapiens
  misc_RNA (1)...(19): siRNA sense strand
gugcgagccugucgagaag

SEQ ID NO: 1131365 - RNA, 19 nt, Homo sapiens
  misc_RNA (1)...(19): siRNA sense strand
ccaaaauccuggacagaug

SEQ ID NO: 1131366 - RNA, 19 nt, Homo sapiens
  misc_RNA (1)...(19): siRNA sense strand
ggaguggaguagcagugau

SEQ ID NO: 1131367 - RNA, 19 nt, Homo sapiens
  misc_RNA (1)...(19): siRNA sense strand
uagcagugaugugaugaau

SEQ ID NO: 1131368 - RNA, 19 nt, Homo sapiens
  misc_RNA (1)...(19): siRNA sense strand
ucugcaaguucacugacua

SEQ ID NO: 1131369 - RNA, 19 nt, Homo sapiens
  misc_RNA (1)...(19): siRNA sense strand
cggauccgcugucccaaag

SEQ ID NO: 1131370 - RNA, 19 nt, Homo sapiens
  misc_RNA (1)...(19): siRNA sense strand
cuacucauacgucuggauu

SEQ ID NO: 1131371 - RNA, 19 nt, Homo sapiens
  misc_RNA (1)...(19): siRNA sense strand
agagaaaucccuccaccau

SEQ ID NO: 1131372 - RNA, 19 nt, Homo sapiens
  misc_RNA (1)...(19): siRNA sense strand
uggaguagcagugauguga

SEQ ID NO: 1131373 - RNA, 19 nt, Homo sapiens
  misc_RNA (1)...(19): siRNA sense strand
gcgagccugucgagaagca

SEQ ID NO: 1131374 - RNA, 19 nt, Homo sapiens
  misc_RNA (1)...(19): siRNA sense strand
gguggaaagauuauaacug

SEQ ID NO: 1131375 - RNA, 19 nt, Homo sapiens
  misc_RNA (1)...(19): siRNA sense strand
gucgagaagcacagcauuu

SEQ ID NO: 1131376 - RNA, 19 nt, Homo sapiens
  misc_RNA (1)...(19): siRNA sense strand
ugugaugaauuacuuugca

SEQ ID NO: 1131377 - RNA, 19 nt, Homo sapiens
  misc_RNA (1)...(19): siRNA sense strand
gugaugaauuacuuugcau

SEQ ID NO: 1131378 - RNA, 19 nt, Homo sapiens
  misc_RNA (1)...(19): siRNA sense strand
uacccuaugucugcaaguu

SEQ ID NO: 1131379 - RNA, 19 nt, Homo sapiens
  misc_RNA (1)...(19): siRNA sense strand
gggaguggaguagcaguga

SEQ ID NO: 1131380 - RNA, 19 nt, Homo sapiens
  misc_RNA (1)...(19): siRNA sense strand
gaguggaguagcagugaug

SEQ ID NO: 1131381 - RNA, 19 nt, Homo sapiens
  misc_RNA (1)...(19): siRNA sense strand
gcugcugucucagguucaa

SEQ ID NO: 1131382 - RNA, 19 nt, Homo sapiens
  misc_RNA (1)...(19): siRNA sense strand
ugaagagcauugguaacag

SEQ ID NO: 1131383 - RNA, 19 nt, Homo sapiens
  misc_RNA (1)...(19): siRNA sense strand
cccuaugucugcaaguuca

SEQ ID NO: 1131384 - RNA, 19 nt, Homo sapiens
  misc_RNA (1)...(19): siRNA sense strand
gguugggaguggaguagca

SEQ ID NO: 1131385 - RNA, 19 nt, Homo sapiens
  misc_RNA (1)...(19): siRNA sense strand
gcagugaugugaugaauua

SEQ ID NO: 1131386 - RNA, 19 nt, Homo sapiens
  misc_RNA (1)...(19): siRNA sense strand
ccacugcuaugccuuguuu

SEQ ID NO: 1131387 - RNA, 19 nt, Homo sapiens
  misc_RNA (1)...(19): siRNA sense strand
guggaaagauuauaacugu

SEQ ID NO: 1131388 - RNA, 19 nt, Homo sapiens
  misc_RNA (1)...(19): siRNA sense strand
gaguagcagugaugugaug

SEQ ID NO: 1131389 - RNA, 19 nt, Homo sapiens
  misc_RNA (1)...(19): siRNA sense strand
agaaaucccuccaccaucu

SEQ ID NO: 1131390 - RNA, 19 nt, Homo sapiens
  misc_RNA (1)...(19): siRNA sense strand
gugaugugaugaauuacuu

SEQ ID NO: 1131391 - RNA, 19 nt, Homo sapiens
  misc_RNA (1)...(19): siRNA sense strand
gguaacagcuacucauacg

SEQ ID NO: 1131392 - RNA, 19 nt, Homo sapiens
  misc_RNA (1)...(19): siRNA sense strand
uaucuuggaugcugcuuuc

SEQ ID NO: 1131393 - RNA, 19 nt, Homo sapiens
  misc_RNA (1)...(19): siRNA sense strand
cuggaaaccuggugucugu

SEQ ID NO: 1131394 - RNA, 19 nt, Homo sapiens
  misc_RNA (1)...(19): siRNA sense strand
ugagguggaaagauuauaa

SEQ ID NO: 1131395 - RNA, 19 nt, Homo sapiens
  misc_RNA (1)...(19): siRNA sense strand
cagcauuucugagguggaa

SEQ ID NO: 1131396 - RNA, 19 nt, Homo sapiens
  misc_RNA (1)...(19): siRNA sense strand
aaugugagguuacccuaug

SEQ ID NO: 1131397 - RNA, 19 nt, Homo sapiens
  misc_RNA (1)...(19): siRNA sense strand
gugaagagcauugguaaca

SEQ ID NO: 1131398 - RNA, 19 nt, Homo sapiens
  misc_RNA (1)...(19): siRNA sense strand
gaagguugggaguggagua

SEQ ID NO: 1131399 - RNA, 19 nt, Homo sapiens
  misc_RNA (1)...(19): siRNA sense strand
gaugugaugaauuacuuug

SEQ ID NO: 1131400 - RNA, 19 nt, Homo sapiens
  misc_RNA (1)...(19): siRNA sense strand
gugcgagccugucgagaag

SEQ ID NO: 1131401 - RNA, 19 nt, Homo sapiens
  misc_RNA (1)...(19): siRNA sense strand
ccaaaauccuggacagaug

SEQ ID NO: 1131402 - RNA, 19 nt, Homo sapiens
  misc_RNA (1)...(19): siRNA sense strand
ggaguggaguagcagugau

SEQ ID NO: 1131403 - RNA, 19 nt, Homo sapiens
  misc_RNA (1)...(19): siRNA sense strand
uagcagugaugugaugaau

SEQ ID NO: 1131404 - RNA, 19 nt, Homo sapiens
  misc_RNA (1)...(19): siRNA sense strand
ucugcaaguucacugacua

SEQ ID NO: 1131405 - RNA, 19 nt, Homo sapiens
  misc_RNA (1)...(19): siRNA sense strand
cggauccgcugucccaaag

SEQ ID NO: 1131406 - RNA, 19 nt, Homo sapiens
  misc_RNA (1)...(19): siRNA sense strand
cuacucauacgucuggauu

SEQ ID NO: 1131407 - RNA, 19 nt, Homo sapiens
  misc_RNA (1)...(19): siRNA sense strand
agagaaaucccuccaccau

SEQ ID NO: 1131408 - RNA, 19 nt, Homo sapiens
  misc_RNA (1)...(19): siRNA sense strand
uggaguagcagugauguga

SEQ ID NO: 1131409 - RNA, 19 nt, Homo sapiens
  misc_RNA (1)...(19): siRNA sense strand
gcgagccugucgagaagca

SEQ ID NO: 1131410 - RNA, 19 nt, Homo sapiens
  misc_RNA (1)...(19): siRNA sense strand
gguggaaagauuauaacug

SEQ ID NO: 1131411 - RNA, 19 nt, Homo sapiens
  misc_RNA (1)...(19): siRNA sense strand
gucgagaagcacagcauuu

SEQ ID NO: 1131412 - RNA, 19 nt, Homo sapiens
  misc_RNA (1)...(19): siRNA sense strand
ugugaugaauuacuuugca

SEQ ID NO: 1131413 - RNA, 19 nt, Homo sapiens
  misc_RNA (1)...(19): siRNA sense strand
gugaugaauuacuuugcau

SEQ ID NO: 1131414 - RNA, 19 nt, Homo sapiens
  misc_RNA (1)...(19): siRNA sense strand
uacccuaugucugcaaguu

SEQ ID NO: 1131415 - RNA, 19 nt, Homo sapiens
  misc_RNA (1)...(19): siRNA sense strand
gggaguggaguagcaguga

SEQ ID NO: 1131416 - RNA, 19 nt, Homo sapiens
  misc_RNA (1)...(19): siRNA sense strand
gaguggaguagcagugaug

SEQ ID NO: 1131417 - RNA, 19 nt, Homo sapiens
  misc_RNA (1)...(19): siRNA sense strand
gcugcugucucagguucaa

SEQ ID NO: 1131418 - RNA, 19 nt, Homo sapiens
  misc_RNA (1)...(19): siRNA sense strand
ugaagagcauugguaacag

SEQ ID NO: 1131419 - RNA, 19 nt, Homo sapiens
  misc_RNA (1)...(19): siRNA sense strand
cccuaugucugcaaguuca

SEQ ID NO: 1131420 - RNA, 19 nt, Homo sapiens
  misc_RNA (1)...(19): siRNA sense strand
gguugggaguggaguagca

SEQ ID NO: 1131421 - RNA, 19 nt, Homo sapiens
  misc_RNA (1)...(19): siRNA sense strand
acgcugagcuuaacuacaa

SEQ ID NO: 1131422 - RNA, 19 nt, Homo sapiens
  misc_RNA (1)...(19): siRNA sense strand
gacauaagcggcaacauca

SEQ ID NO: 1131423 - RNA, 19 nt, Homo sapiens
  misc_RNA (1)...(19): siRNA sense strand
agauggcccucaagaagua

SEQ ID NO: 1131424 - RNA, 19 nt, Homo sapiens
  misc_RNA (1)...(19): siRNA sense strand
gaugaacgcugagcuuaac

SEQ ID NO: 1131425 - RNA, 19 nt, Homo sapiens
  misc_RNA (1)...(19): siRNA sense strand
cagaugaacgcugagcuua

SEQ ID NO: 1131426 - RNA, 19 nt, Homo sapiens
  misc_RNA (1)...(19): siRNA sense strand
gagcagaguggcccaaagu

SEQ ID NO: 1131427 - RNA, 19 nt, Homo sapiens
  misc_RNA (1)...(19): siRNA sense strand
ggagguggagaaagaaaug

SEQ ID NO: 1131428 - RNA, 19 nt, Homo sapiens
  misc_RNA (1)...(19): siRNA sense strand
cgagauggcccucaagaag

SEQ ID NO: 1131429 - RNA, 19 nt, Homo sapiens
  misc_RNA (1)...(19): siRNA sense strand
gcagaguggcccaaaguag

SEQ ID NO: 1131430 - RNA, 19 nt, Homo sapiens
  misc_RNA (1)...(19): siRNA sense strand
gagauguacacccagauga

SEQ ID NO: 1131431 - RNA, 19 nt, Homo sapiens
  misc_RNA (1)...(19): siRNA sense strand
gagauggcccucaagaagu

SEQ ID NO: 1131432 - RNA, 19 nt, Homo sapiens
  misc_RNA (1)...(19): siRNA sense strand
caccaaggccuacgagaug

SEQ ID NO: 1131433 - RNA, 19 nt, Homo sapiens
  misc_RNA (1)...(19): siRNA sense strand
ggagaaagaaauguaugga

SEQ ID NO: 1131434 - RNA, 19 nt, Homo sapiens
  misc_RNA (1)...(19): siRNA sense strand
guacgcagcacccuauaag

SEQ ID NO: 1131435 - RNA, 19 nt, Homo sapiens
  misc_RNA (1)...(19): siRNA sense strand
gcgcugauguggcugaaaa

SEQ ID NO: 1131436 - RNA, 19 nt, Homo sapiens
  misc_RNA (1)...(19): siRNA sense strand
agacauaagcggcaacauc

SEQ ID NO: 1131437 - RNA, 19 nt, Homo sapiens
  misc_RNA (1)...(19): siRNA sense strand
ggagcagaguggcccaaag

SEQ ID NO: 1131438 - RNA, 19 nt, Homo sapiens
  misc_RNA (1)...(19): siRNA sense strand
gcugcuggccgaacacuug

SEQ ID NO: 1131439 - RNA, 19 nt, Homo sapiens
  misc_RNA (1)...(19): siRNA sense strand
caacaucacgaaaaucaaa

SEQ ID NO: 1131440 - RNA, 19 nt, Homo sapiens
  misc_RNA (1)...(19): siRNA sense strand
gaggagugccuggagaaga

SEQ ID NO: 1131441 - RNA, 19 nt, Homo sapiens
  misc_RNA (1)...(19): siRNA sense strand
ccaccaaggccuacgagau

SEQ ID NO: 1131442 - RNA, 19 nt, Homo sapiens
  misc_RNA (1)...(19): siRNA sense strand
caucaaggcagacauaagc

SEQ ID NO: 1131443 - RNA, 19 nt, Homo sapiens
  misc_RNA (1)...(19): siRNA sense strand
gaacgcugagcuuaacuac

SEQ ID NO: 1131444 - RNA, 19 nt, Homo sapiens
  misc_RNA (1)...(19): siRNA sense strand
aggagugccuggagaagau

SEQ ID NO: 1131445 - RNA, 19 nt, Homo sapiens
  misc_RNA (1)...(19): siRNA sense strand
acaccaacccagccaaguu

SEQ ID NO: 1131446 - RNA, 19 nt, Homo sapiens
  misc_RNA (1)...(19): siRNA sense strand
ccuacgagauggcccucaa

SEQ ID NO: 1131447 - RNA, 19 nt, Homo sapiens
  misc_RNA (1)...(19): siRNA sense strand
aaagaggccuccgcuucau

SEQ ID NO: 1131448 - RNA, 19 nt, Homo sapiens
  misc_RNA (1)...(19): siRNA sense strand
ccagaugaacgcugagcuu

SEQ ID NO: 1131449 - RNA, 19 nt, Homo sapiens
  misc_RNA (1)...(19): siRNA sense strand
uccuggagguggagaaaga

SEQ ID NO: 1131450 - RNA, 19 nt, Homo sapiens
  misc_RNA (1)...(19): siRNA sense strand
agaugaacgcugagcuuaa

SEQ ID NO: 1131451 - RNA, 19 nt, Homo sapiens
  misc_RNA (1)...(19): siRNA sense strand
gcuggaucgugcagaagau

SEQ ID NO: 1131452 - RNA, 19 nt, Homo sapiens
  misc_RNA (1)...(19): siRNA sense strand
gguggagaaagaaauguau

SEQ ID NO: 1131453 - RNA, 19 nt, Homo sapiens
  misc_RNA (1)...(19): siRNA sense strand
gaaaaucaaagcuguguac

SEQ ID NO: 1131454 - RNA, 19 nt, Homo sapiens
  misc_RNA (1)...(19): siRNA sense strand
acacggcgaccaucgaugu

SEQ ID NO: 1131455 - RNA, 19 nt, Homo sapiens
  misc_RNA (1)...(19): siRNA sense strand
ugaacgcugagcuuaacua

SEQ ID NO: 1131456 - RNA, 19 nt, Homo sapiens
  misc_RNA (1)...(19): siRNA sense strand
cgagauguacacccagaug

SEQ ID NO: 1131457 - RNA, 19 nt, Homo sapiens
  misc_RNA (1)...(19): siRNA sense strand
caccaacccagccaaguuc

SEQ ID NO: 1131458 - RNA, 19 nt, Homo sapiens
  misc_RNA (1)...(19): siRNA sense strand
gaaaccaacuguacugaug

SEQ ID NO: 1131459 - RNA, 19 nt, Homo sapiens
  misc_RNA (1)...(19): siRNA sense strand
gaauagaacugcaguaugc

SEQ ID NO: 1131460 - RNA, 19 nt, Homo sapiens
  misc_RNA (1)...(19): siRNA sense strand
gaagugacccuguuucaaa

SEQ ID NO: 1131461 - RNA, 19 nt, Homo sapiens
  misc_RNA (1)...(19): siRNA sense strand
gaaaguacucgcagaaguu

SEQ ID NO: 1131462 - RNA, 19 nt, Homo sapiens
  misc_RNA (1)...(19): siRNA sense strand
gauaucaccuccaaguguu

SEQ ID NO: 1131463 - RNA, 19 nt, Homo sapiens
  misc_RNA (1)...(19): siRNA sense strand
caacuguacugaugagaga

SEQ ID NO: 1131464 - RNA, 19 nt, Homo sapiens
  misc_RNA (1)...(19): siRNA sense strand
caagaauacuggagcaaug

SEQ ID NO: 1131465 - RNA, 19 nt, Homo sapiens
  misc_RNA (1)...(19): siRNA sense strand
guaaagauggcuacaaaug

SEQ ID NO: 1131466 - RNA, 19 nt, Homo sapiens
  misc_RNA (1)...(19): siRNA sense strand
gguaacaccugaugggaau

SEQ ID NO: 1131467 - RNA, 19 nt, Homo sapiens
  misc_RNA (1)...(19): siRNA sense strand
acacagaacuacucgaaag

SEQ ID NO: 1131468 - RNA, 19 nt, Homo sapiens
  misc_RNA (1)...(19): siRNA sense strand
cgaaaguacucgcagaagu

SEQ ID NO: 1131469 - RNA, 19 nt, Homo sapiens
  misc_RNA (1)...(19): siRNA sense strand
gaagccagcugcgcauauc

SEQ ID NO: 1131470 - RNA, 19 nt, Homo sapiens
  misc_RNA (1)...(19): siRNA sense strand
ucaagcaguuuauguaugg

SEQ ID NO: 1131471 - RNA, 19 nt, Homo sapiens
  misc_RNA (1)...(19): siRNA sense strand
gcacaaaagccuacaagaa

SEQ ID NO: 1131472 - RNA, 19 nt, Homo sapiens
  misc_RNA (1)...(19): siRNA sense strand
ggauaucaccuccaagugu

SEQ ID NO: 1131473 - RNA, 19 nt, Homo sapiens
  misc_RNA (1)...(19): siRNA sense strand
gaauucggaccuucagauu

SEQ ID NO: 1131474 - RNA, 19 nt, Homo sapiens
  misc_RNA (1)...(19): siRNA sense strand
caaaugagaccaaggaaac

SEQ ID NO: 1131475 - RNA, 19 nt, Homo sapiens
  misc_RNA (1)...(19): siRNA sense strand
ccuaucgcauuaagaaauu

SEQ ID NO: 1131476 - RNA, 19 nt, Homo sapiens
  misc_RNA (1)...(19): siRNA sense strand
uuggagaacugcuaaccua

SEQ ID NO: 1131477 - RNA, 19 nt, Homo sapiens
  misc_RNA (1)...(19): siRNA sense strand
ggaauagaacugcaguaug

SEQ ID NO: 1131478 - RNA, 19 nt, Homo sapiens
  misc_RNA (1)...(19): siRNA sense strand
aaacaaaugagaccaagga

SEQ ID NO: 1131479 - RNA, 19 nt, Homo sapiens
  misc_RNA (1)...(19): siRNA sense strand
uuacagaugcauaauggua

SEQ ID NO: 1131480 - RNA, 19 nt, Homo sapiens
  misc_RNA (1)...(19): siRNA sense strand
uaaccuagggcuacuguug

SEQ ID NO: 1131481 - RNA, 19 nt, Homo sapiens
  misc_RNA (1)...(19): siRNA sense strand
ccacuaagcaagaauacug

SEQ ID NO: 1131482 - RNA, 19 nt, Homo sapiens
  misc_RNA (1)...(19): siRNA sense strand
aaaguacucgcagaaguua

SEQ ID NO: 1131483 - RNA, 19 nt, Homo sapiens
  misc_RNA (1)...(19): siRNA sense strand
cuccagaccugaucagaau

SEQ ID NO: 1131484 - RNA, 19 nt, Homo sapiens
  misc_RNA (1)...(19): siRNA sense strand
aaagauggcuacaaaugcu

SEQ ID NO: 1131485 - RNA, 19 nt, Homo sapiens
  misc_RNA (1)...(19): siRNA sense strand
gcaagaauacuggagcaau

SEQ ID NO: 1131486 - RNA, 19 nt, Homo sapiens
  misc_RNA (1)...(19): siRNA sense strand
ucacucaugacggguauua

SEQ ID NO: 1131487 - RNA, 19 nt, Homo sapiens
  misc_RNA (1)...(19): siRNA sense strand
ggaagccagcugcgcauau

SEQ ID NO: 1131488 - RNA, 19 nt, Homo sapiens
  misc_RNA (1)...(19): siRNA sense strand
cacaaaagccuacaagaaa

SEQ ID NO: 1131489 - RNA, 19 nt, Homo sapiens
  misc_RNA (1)...(19): siRNA sense strand
uaacaccugaugggaauuu

SEQ ID NO: 1131490 - RNA, 19 nt, Homo sapiens
  misc_RNA (1)...(19): siRNA sense strand
caagaaagaaacaaaugag

SEQ ID NO: 1131491 - RNA, 19 nt, Homo sapiens
  misc_RNA (1)...(19): siRNA sense strand
ccaaggaaaccaacuguac

SEQ ID NO: 1131492 - RNA, 19 nt, Homo sapiens
  misc_RNA (1)...(19): siRNA sense strand
ggaaaccaacuguacugau

SEQ ID NO: 1131493 - RNA, 19 nt, Homo sapiens
  misc_RNA (1)...(19): siRNA sense strand
caccugaagugacccuguu

SEQ ID NO: 1131494 - RNA, 19 nt, Homo sapiens
  misc_RNA (1)...(19): siRNA sense strand
cuucauggccuguaaagau

SEQ ID NO: 1131495 - RNA, 19 nt, Homo sapiens
  misc_RNA (1)...(19): siRNA sense strand
uuacacagaacuacucgaa

SEQ ID NO: 1131496 - RNA, 19 nt, Homo sapiens
  misc_RNA (1)...(19): siRNA sense strand
ggguauuacagaugcauaa

SEQ ID NO: 1131497 - RNA, 19 nt, Homo sapiens
  misc_RNA (1)...(19): siRNA sense strand
cuagggcuacuguugauuu

SEQ ID NO: 1131498 - RNA, 19 nt, Homo sapiens
  misc_RNA (1)...(19): siRNA sense strand
gggcuacuguugauuuuga

SEQ ID NO: 1131499 - RNA, 19 nt, Homo sapiens
  misc_RNA (1)...(19): siRNA sense strand
ccuccuaucgcauuaagaa

SEQ ID NO: 1131500 - RNA, 19 nt, Homo sapiens
  misc_RNA (1)...(19): siRNA sense strand
uaaagauggcuacaaaugc

SEQ ID NO: 1131501 - RNA, 19 nt, Homo sapiens
  misc_RNA (1)...(19): siRNA sense strand
gugcuuuguugcccuccua

SEQ ID NO: 1131502 - RNA, 19 nt, Homo sapiens
  misc_RNA (1)...(19): siRNA sense strand
acaaaugagaccaaggaaa

SEQ ID NO: 1131503 - RNA, 19 nt, Homo sapiens
  misc_RNA (1)...(19): siRNA sense strand
gcaguuuauguauggauga

SEQ ID NO: 1131504 - RNA, 19 nt, Homo sapiens
  misc_RNA (1)...(19): siRNA sense strand
caucacucaugacggguau

SEQ ID NO: 1131505 - RNA, 19 nt, Homo sapiens
  misc_RNA (1)...(19): siRNA sense strand
aaaccaacuguacugauga

SEQ ID NO: 1131506 - RNA, 19 nt, Homo sapiens
  misc_RNA (1)...(19): siRNA sense strand
caugacggguauuacagau

SEQ ID NO: 1131507 - RNA, 19 nt, Homo sapiens
  misc_RNA (1)...(19): siRNA sense strand
ggccagccuuccugcacaa

SEQ ID NO: 1131508 - RNA, 19 nt, Homo sapiens
  misc_RNA (1)...(19): siRNA sense strand
gaccaaggaaaccaacugu

SEQ ID NO: 1131509 - RNA, 19 nt, Homo sapiens
  misc_RNA (1)...(19): siRNA sense strand
ggcuacaaaugcugugcuu

SEQ ID NO: 1131510 - RNA, 19 nt, Homo sapiens
  misc_RNA (1)...(19): siRNA sense strand
uacagaugcauaaugguaa

SEQ ID NO: 1131511 - RNA, 19 nt, Homo sapiens
  misc_RNA (1)...(19): siRNA sense strand
ccuacaagaaagaaacaaa

SEQ ID NO: 1131512 - RNA, 19 nt, Homo sapiens
  misc_RNA (1)...(19): siRNA sense strand
gcucugcccuuggagaacu

SEQ ID NO: 1131513 - RNA, 19 nt, Homo sapiens
  misc_RNA (1)...(19): siRNA sense strand
caaggaaaccaacuguacu

SEQ ID NO: 1131514 - RNA, 19 nt, Homo sapiens
  misc_RNA (1)...(19): siRNA sense strand
uucauggccuguaaagaug

SEQ ID NO: 1131515 - RNA, 19 nt, Homo sapiens
  misc_RNA (1)...(19): siRNA sense strand
gugccacuaagcaagaaua

SEQ ID NO: 1131516 - RNA, 19 nt, Homo sapiens
  misc_RNA (1)...(19): siRNA sense strand
ccagaccugaucagaauuc

SEQ ID NO: 1131517 - RNA, 19 nt, Homo sapiens
  misc_RNA (1)...(19): siRNA sense strand
caguuuauguauggaugaa

SEQ ID NO: 1131518 - RNA, 19 nt, Homo sapiens
  misc_RNA (1)...(19): siRNA sense strand
gcgauugugccacuaagca

SEQ ID NO: 1131519 - RNA, 19 nt, Homo sapiens
  misc_RNA (1)...(19): siRNA sense strand
gaucccagagggcgauugu

SEQ ID NO: 1131520 - RNA, 19 nt, Homo sapiens
  misc_RNA (1)...(19): siRNA sense strand
gcaguaugcaaggcaguug

SEQ ID NO: 1131521 - RNA, 19 nt, Homo sapiens
  misc_RNA (1)...(19): siRNA sense strand
ccguggccaucacucauga

SEQ ID NO: 1131522 - RNA, 19 nt, Homo sapiens
  misc_RNA (1)...(19): siRNA sense strand
gggaagccagcugcgcaua

SEQ ID NO: 1131523 - RNA, 19 nt, Homo sapiens
  misc_RNA (1)...(19): siRNA sense strand
aaacagauuacacagaacu

SEQ ID NO: 1131524 - RNA, 19 nt, Homo sapiens
  misc_RNA (1)...(19): siRNA sense strand
guaccguggccaucacuca

SEQ ID NO: 1131525 - RNA, 19 nt, Homo sapiens
  misc_RNA (1)...(19): siRNA sense strand
uucaagcaguuuauguaug

SEQ ID NO: 1131526 - RNA, 19 nt, Homo sapiens
  misc_RNA (1)...(19): siRNA sense strand
cuucaagcaguuuauguau

SEQ ID NO: 1131527 - RNA, 19 nt, Homo sapiens
  misc_RNA (1)...(19): siRNA sense strand
gcccuuggagaacugcuaa

SEQ ID NO: 1131528 - RNA, 19 nt, Homo sapiens
  misc_RNA (1)...(19): siRNA sense strand
gaaaccaacuguacugaug

SEQ ID NO: 1131529 - RNA, 19 nt, Homo sapiens
  misc_RNA (1)...(19): siRNA sense strand
gaaaguacucgcagaaguu

SEQ ID NO: 1131530 - RNA, 19 nt, Homo sapiens
  misc_RNA (1)...(19): siRNA sense strand
gauaucaccuccaaguguu

SEQ ID NO: 1131531 - RNA, 19 nt, Homo sapiens
  misc_RNA (1)...(19): siRNA sense strand
caacuguacugaugagaga

SEQ ID NO: 1131532 - RNA, 19 nt, Homo sapiens
  misc_RNA (1)...(19): siRNA sense strand
guaaagauggcuacaaaug

SEQ ID NO: 1131533 - RNA, 19 nt, Homo sapiens
  misc_RNA (1)...(19): siRNA sense strand
gguaacaccugaugggaau

SEQ ID NO: 1131534 - RNA, 19 nt, Homo sapiens
  misc_RNA (1)...(19): siRNA sense strand
acacagaacuacucgaaag

SEQ ID NO: 1131535 - RNA, 19 nt, Homo sapiens
  misc_RNA (1)...(19): siRNA sense strand
cgaaaguacucgcagaagu

SEQ ID NO: 1131536 - RNA, 19 nt, Homo sapiens
  misc_RNA (1)...(19): siRNA sense strand
ucaagcaguuuauguaugg

SEQ ID NO: 1131537 - RNA, 19 nt, Homo sapiens
  misc_RNA (1)...(19): siRNA sense strand
gcacaaaagccuacaagaa

SEQ ID NO: 1131538 - RNA, 19 nt, Homo sapiens
  misc_RNA (1)...(19): siRNA sense strand
ggauaucaccuccaagugu

SEQ ID NO: 1131539 - RNA, 19 nt, Homo sapiens
  misc_RNA (1)...(19): siRNA sense strand
gaauucggaccuucagauu

SEQ ID NO: 1131540 - RNA, 19 nt, Homo sapiens
  misc_RNA (1)...(19): siRNA sense strand
caaaugagaccaaggaaac

SEQ ID NO: 1131541 - RNA, 19 nt, Homo sapiens
  misc_RNA (1)...(19): siRNA sense strand
ccuaucgcauuaagaaauu

SEQ ID NO: 1131542 - RNA, 19 nt, Homo sapiens
  misc_RNA (1)...(19): siRNA sense strand
uuggagaacugcuaaccua

SEQ ID NO: 1131543 - RNA, 19 nt, Homo sapiens
  misc_RNA (1)...(19): siRNA sense strand
aaacaaaugagaccaagga

SEQ ID NO: 1131544 - RNA, 19 nt, Homo sapiens
  misc_RNA (1)...(19): siRNA sense strand
uuacagaugcauaauggua

SEQ ID NO: 1131545 - RNA, 19 nt, Homo sapiens
  misc_RNA (1)...(19): siRNA sense strand
uaaccuagggcuacuguug

SEQ ID NO: 1131546 - RNA, 19 nt, Homo sapiens
  misc_RNA (1)...(19): siRNA sense strand
aaaguacucgcagaaguua

SEQ ID NO: 1131547 - RNA, 19 nt, Homo sapiens
  misc_RNA (1)...(19): siRNA sense strand
cuccagaccugaucagaau

SEQ ID NO: 1131548 - RNA, 19 nt, Homo sapiens
  misc_RNA (1)...(19): siRNA sense strand
aaagauggcuacaaaugcu

SEQ ID NO: 1131549 - RNA, 19 nt, Homo sapiens
  misc_RNA (1)...(19): siRNA sense strand
ucacucaugacggguauua

SEQ ID NO: 1131550 - RNA, 19 nt, Homo sapiens
  misc_RNA (1)...(19): siRNA sense strand
cacaaaagccuacaagaaa

SEQ ID NO: 1131551 - RNA, 19 nt, Homo sapiens
  misc_RNA (1)...(19): siRNA sense strand
uaacaccugaugggaauuu

SEQ ID NO: 1131552 - RNA, 19 nt, Homo sapiens
  misc_RNA (1)...(19): siRNA sense strand
caagaaagaaacaaaugag

SEQ ID NO: 1131553 - RNA, 19 nt, Homo sapiens
  misc_RNA (1)...(19): siRNA sense strand
ccaaggaaaccaacuguac

SEQ ID NO: 1131554 - RNA, 19 nt, Homo sapiens
  misc_RNA (1)...(19): siRNA sense strand
ggaaaccaacuguacugau

SEQ ID NO: 1131555 - RNA, 19 nt, Homo sapiens
  misc_RNA (1)...(19): siRNA sense strand
cuucauggccuguaaagau

SEQ ID NO: 1131556 - RNA, 19 nt, Homo sapiens
  misc_RNA (1)...(19): siRNA sense strand
uuacacagaacuacucgaa

SEQ ID NO: 1131557 - RNA, 19 nt, Homo sapiens
  misc_RNA (1)...(19): siRNA sense strand
cuagggcuacuguugauuu

SEQ ID NO: 1131558 - RNA, 19 nt, Homo sapiens
  misc_RNA (1)...(19): siRNA sense strand
ggguauuacagaugcauaa

SEQ ID NO: 1131559 - RNA, 19 nt, Homo sapiens
  misc_RNA (1)...(19): siRNA sense strand
gggcuacuguugauuuuga

SEQ ID NO: 1131560 - RNA, 19 nt, Homo sapiens
  misc_RNA (1)...(19): siRNA sense strand
ccuccuaucgcauuaagaa

SEQ ID NO: 1131561 - RNA, 19 nt, Homo sapiens
  misc_RNA (1)...(19): siRNA sense strand
uaaagauggcuacaaaugc

SEQ ID NO: 1131562 - RNA, 19 nt, Homo sapiens
  misc_RNA (1)...(19): siRNA sense strand
gugcuuuguugcccuccua

SEQ ID NO: 1131563 - RNA, 19 nt, Homo sapiens
  misc_RNA (1)...(19): siRNA sense strand
acaaaugagaccaaggaaa

SEQ ID NO: 1131564 - RNA, 19 nt, Homo sapiens
  misc_RNA (1)...(19): siRNA sense strand
aaaccaacuguacugauga

SEQ ID NO: 1131565 - RNA, 19 nt, Homo sapiens
  misc_RNA (1)...(19): siRNA sense strand
caucacucaugacggguau

SEQ ID NO: 1131566 - RNA, 19 nt, Homo sapiens
  misc_RNA (1)...(19): siRNA sense strand
gcaguuuauguauggauga

SEQ ID NO: 1131567 - RNA, 19 nt, Homo sapiens
  misc_RNA (1)...(19): siRNA sense strand
caugacggguauuacagau

SEQ ID NO: 1131568 - RNA, 19 nt, Homo sapiens
  misc_RNA (1)...(19): siRNA sense strand
ggccagccuuccugcacaa

SEQ ID NO: 1131569 - RNA, 19 nt, Homo sapiens
  misc_RNA (1)...(19): siRNA sense strand
gaccaaggaaaccaacugu

SEQ ID NO: 1131570 - RNA, 19 nt, Homo sapiens
  misc_RNA (1)...(19): siRNA sense strand
ggcuacaaaugcugugcuu

SEQ ID NO: 1131571 - RNA, 19 nt, Homo sapiens
  misc_RNA (1)...(19): siRNA sense strand
uacagaugcauaaugguaa

SEQ ID NO: 1131572 - RNA, 19 nt, Homo sapiens
  misc_RNA (1)...(19): siRNA sense strand
ccuacaagaaagaaacaaa

SEQ ID NO: 1131573 - RNA, 19 nt, Homo sapiens
  misc_RNA (1)...(19): siRNA sense strand
gcucugcccuuggagaacu

SEQ ID NO: 1131574 - RNA, 19 nt, Homo sapiens
  misc_RNA (1)...(19): siRNA sense strand
caaggaaaccaacuguacu

SEQ ID NO: 1131575 - RNA, 19 nt, Homo sapiens
  misc_RNA (1)...(19): siRNA sense strand
uucauggccuguaaagaug

SEQ ID NO: 1131576 - RNA, 19 nt, Homo sapiens
  misc_RNA (1)...(19): siRNA sense strand
ccagaccugaucagaauuc

SEQ ID NO: 1131577 - RNA, 19 nt, Homo sapiens
  misc_RNA (1)...(19): siRNA sense strand
caguuuauguauggaugaa

SEQ ID NO: 1131578 - RNA, 19 nt, Homo sapiens
  misc_RNA (1)...(19): siRNA sense strand
aaacagauuacacagaacu

SEQ ID NO: 1131579 - RNA, 19 nt, Homo sapiens
  misc_RNA (1)...(19): siRNA sense strand
ccguggccaucacucauga

SEQ ID NO: 1131580 - RNA, 19 nt, Homo sapiens
  misc_RNA (1)...(19): siRNA sense strand
guaccguggccaucacuca

SEQ ID NO: 1131581 - RNA, 19 nt, Homo sapiens
  misc_RNA (1)...(19): siRNA sense strand
uucaagcaguuuauguaug

SEQ ID NO: 1131582 - RNA, 19 nt, Homo sapiens
  misc_RNA (1)...(19): siRNA sense strand
gcccuuggagaacugcuaa

SEQ ID NO: 1131583 - RNA, 19 nt, Homo sapiens
  misc_RNA (1)...(19): siRNA sense strand
cuucaagcaguuuauguau

SEQ ID NO: 1131584 - RNA, 19 nt, Homo sapiens
  misc_RNA (1)...(19): siRNA sense strand
gaaaccaacuguacugaug

SEQ ID NO: 1131585 - RNA, 19 nt, Homo sapiens
  misc_RNA (1)...(19): siRNA sense strand
gaaaguacucgcagaaguu

SEQ ID NO: 1131586 - RNA, 19 nt, Homo sapiens
  misc_RNA (1)...(19): siRNA sense strand
gauaucaccuccaaguguu

SEQ ID NO: 1131587 - RNA, 19 nt, Homo sapiens
  misc_RNA (1)...(19): siRNA sense strand
caacuguacugaugagaga

SEQ ID NO: 1131588 - RNA, 19 nt, Homo sapiens
  misc_RNA (1)...(19): siRNA sense strand
guaaagauggcuacaaaug

SEQ ID NO: 1131589 - RNA, 19 nt, Homo sapiens
  misc_RNA (1)...(19): siRNA sense strand
gguaacaccugaugggaau

SEQ ID NO: 1131590 - RNA, 19 nt, Homo sapiens
  misc_RNA (1)...(19): siRNA sense strand
acacagaacuacucgaaag

SEQ ID NO: 1131591 - RNA, 19 nt, Homo sapiens
  misc_RNA (1)...(19): siRNA sense strand
cgaaaguacucgcagaagu

SEQ ID NO: 1131592 - RNA, 19 nt, Homo sapiens
  misc_RNA (1)...(19): siRNA sense strand
ucaagcaguuuauguaugg

SEQ ID NO: 1131593 - RNA, 19 nt, Homo sapiens
  misc_RNA (1)...(19): siRNA sense strand
gcacaaaagccuacaagaa

SEQ ID NO: 1131594 - RNA, 19 nt, Homo sapiens
  misc_RNA (1)...(19): siRNA sense strand
ggauaucaccuccaagugu

SEQ ID NO: 1131595 - RNA, 19 nt, Homo sapiens
  misc_RNA (1)...(19): siRNA sense strand
gaauucggaccuucagauu

SEQ ID NO: 1131596 - RNA, 19 nt, Homo sapiens
  misc_RNA (1)...(19): siRNA sense strand
caaaugagaccaaggaaac

SEQ ID NO: 1131597 - RNA, 19 nt, Homo sapiens
  misc_RNA (1)...(19): siRNA sense strand
ccuaucgcauuaagaaauu

SEQ ID NO: 1131598 - RNA, 19 nt, Homo sapiens
  misc_RNA (1)...(19): siRNA sense strand
uuggagaacugcuaaccua

SEQ ID NO: 1131599 - RNA, 19 nt, Homo sapiens
  misc_RNA (1)...(19): siRNA sense strand
aaacaaaugagaccaagga

SEQ ID NO: 1131600 - RNA, 19 nt, Homo sapiens
  misc_RNA (1)...(19): siRNA sense strand
uuacagaugcauaauggua

SEQ ID NO: 1131601 - RNA, 19 nt, Homo sapiens
  misc_RNA (1)...(19): siRNA sense strand
uaaccuagggcuacuguug

SEQ ID NO: 1131602 - RNA, 19 nt, Homo sapiens
  misc_RNA (1)...(19): siRNA sense strand
aaaguacucgcagaaguua

SEQ ID NO: 1131603 - RNA, 19 nt, Homo sapiens
  misc_RNA (1)...(19): siRNA sense strand
cuccagaccugaucagaau

SEQ ID NO: 1131604 - RNA, 19 nt, Homo sapiens
  misc_RNA (1)...(19): siRNA sense strand
aaagauggcuacaaaugcu

SEQ ID NO: 1131605 - RNA, 19 nt, Homo sapiens
  misc_RNA (1)...(19): siRNA sense strand
ucacucaugacggguauua

SEQ ID NO: 1131606 - RNA, 19 nt, Homo sapiens
  misc_RNA (1)...(19): siRNA sense strand
cacaaaagccuacaagaaa

SEQ ID NO: 1131607 - RNA, 19 nt, Homo sapiens
  misc_RNA (1)...(19): siRNA sense strand
uaacaccugaugggaauuu

SEQ ID NO: 1131608 - RNA, 19 nt, Homo sapiens
  misc_RNA (1)...(19): siRNA sense strand
caagaaagaaacaaaugag

SEQ ID NO: 1131609 - RNA, 19 nt, Homo sapiens
  misc_RNA (1)...(19): siRNA sense strand
ccaaggaaaccaacuguac

SEQ ID NO: 1131610 - RNA, 19 nt, Homo sapiens
  misc_RNA (1)...(19): siRNA sense strand
ggaaaccaacuguacugau

SEQ ID NO: 1131611 - RNA, 19 nt, Homo sapiens
  misc_RNA (1)...(19): siRNA sense strand
cuucauggccuguaaagau

SEQ ID NO: 1131612 - RNA, 19 nt, Homo sapiens
  misc_RNA (1)...(19): siRNA sense strand
uuacacagaacuacucgaa

SEQ ID NO: 1131613 - RNA, 19 nt, Homo sapiens
  misc_RNA (1)...(19): siRNA sense strand
cuagggcuacuguugauuu

SEQ ID NO: 1131614 - RNA, 19 nt, Homo sapiens
  misc_RNA (1)...(19): siRNA sense strand
ggguauuacagaugcauaa

SEQ ID NO: 1131615 - RNA, 19 nt, Homo sapiens
  misc_RNA (1)...(19): siRNA sense strand
gggcuacuguugauuuuga

SEQ ID NO: 1131616 - RNA, 19 nt, Homo sapiens
  misc_RNA (1)...(19): siRNA sense strand
ccuccuaucgcauuaagaa

SEQ ID NO: 1131617 - RNA, 19 nt, Homo sapiens
  misc_RNA (1)...(19): siRNA sense strand
uaaagauggcuacaaaugc

SEQ ID NO: 1131618 - RNA, 19 nt, Homo sapiens
  misc_RNA (1)...(19): siRNA sense strand
gugcuuuguugcccuccua

SEQ ID NO: 1131619 - RNA, 19 nt, Homo sapiens
  misc_RNA (1)...(19): siRNA sense strand
acaaaugagaccaaggaaa

SEQ ID NO: 1131620 - RNA, 19 nt, Homo sapiens
  misc_RNA (1)...(19): siRNA sense strand
aaaccaacuguacugauga

SEQ ID NO: 1131621 - RNA, 19 nt, Homo sapiens
  misc_RNA (1)...(19): siRNA sense strand
caucacucaugacggguau

SEQ ID NO: 1131622 - RNA, 19 nt, Homo sapiens
  misc_RNA (1)...(19): siRNA sense strand
gcaguuuauguauggauga

SEQ ID NO: 1131623 - RNA, 19 nt, Homo sapiens
  misc_RNA (1)...(19): siRNA sense strand
caugacggguauuacagau

SEQ ID NO: 1131624 - RNA, 19 nt, Homo sapiens
  misc_RNA (1)...(19): siRNA sense strand
ggccagccuuccugcacaa

SEQ ID NO: 1131625 - RNA, 19 nt, Homo sapiens
  misc_RNA (1)...(19): siRNA sense strand
gaccaaggaaaccaacugu

SEQ ID NO: 1131626 - RNA, 19 nt, Homo sapiens
  misc_RNA (1)...(19): siRNA sense strand
ggcuacaaaugcugugcuu

SEQ ID NO: 1131627 - RNA, 19 nt, Homo sapiens
  misc_RNA (1)...(19): siRNA sense strand
uacagaugcauaaugguaa

SEQ ID NO: 1131628 - RNA, 19 nt, Homo sapiens
  misc_RNA (1)...(19): siRNA sense strand
ccuacaagaaagaaacaaa

SEQ ID NO: 1131629 - RNA, 19 nt, Homo sapiens
  misc_RNA (1)...(19): siRNA sense strand
gcucugcccuuggagaacu

SEQ ID NO: 1131630 - RNA, 19 nt, Homo sapiens
  misc_RNA (1)...(19): siRNA sense strand
caaggaaaccaacuguacu

SEQ ID NO: 1131631 - RNA, 19 nt, Homo sapiens
  misc_RNA (1)...(19): siRNA sense strand
uucauggccuguaaagaug

SEQ ID NO: 1131632 - RNA, 19 nt, Homo sapiens
  misc_RNA (1)...(19): siRNA sense strand
ccagaccugaucagaauuc

SEQ ID NO: 1131633 - RNA, 19 nt, Homo sapiens
  misc_RNA (1)...(19): siRNA sense strand
caguuuauguauggaugaa

SEQ ID NO: 1131634 - RNA, 19 nt, Homo sapiens
  misc_RNA (1)...(19): siRNA sense strand
aaacagauuacacagaacu

SEQ ID NO: 1131635 - RNA, 19 nt, Homo sapiens
  misc_RNA (1)...(19): siRNA sense strand
ccguggccaucacucauga

SEQ ID NO: 1131636 - RNA, 19 nt, Homo sapiens
  misc_RNA (1)...(19): siRNA sense strand
guaccguggccaucacuca

SEQ ID NO: 1131637 - RNA, 19 nt, Homo sapiens
  misc_RNA (1)...(19): siRNA sense strand
uucaagcaguuuauguaug

SEQ ID NO: 1131638 - RNA, 19 nt, Homo sapiens
  misc_RNA (1)...(19): siRNA sense strand
gcccuuggagaacugcuaa

SEQ ID NO: 1131639 - RNA, 19 nt, Homo sapiens
  misc_RNA (1)...(19): siRNA sense strand
cuucaagcaguuuauguau

SEQ ID NO: 1131640 - RNA, 19 nt, Homo sapiens
  misc_RNA (1)...(19): siRNA sense strand
gaaaccaacuguacugaug

SEQ ID NO: 1131641 - RNA, 19 nt, Homo sapiens
  misc_RNA (1)...(19): siRNA sense strand
gaauagaacugcaguaugc

SEQ ID NO: 1131642 - RNA, 19 nt, Homo sapiens
  misc_RNA (1)...(19): siRNA sense strand
gaagugacccuguuucaaa

SEQ ID NO: 1131643 - RNA, 19 nt, Homo sapiens
  misc_RNA (1)...(19): siRNA sense strand
gaaaguacucgcagaaguu

SEQ ID NO: 1131644 - RNA, 19 nt, Homo sapiens
  misc_RNA (1)...(19): siRNA sense strand
gauaucaccuccaaguguu

SEQ ID NO: 1131645 - RNA, 19 nt, Homo sapiens
  misc_RNA (1)...(19): siRNA sense strand
caacuguacugaugagaga

SEQ ID NO: 1131646 - RNA, 19 nt, Homo sapiens
  misc_RNA (1)...(19): siRNA sense strand
caagaauacuggagcaaug

SEQ ID NO: 1131647 - RNA, 19 nt, Homo sapiens
  misc_RNA (1)...(19): siRNA sense strand
guaaagauggcuacaaaug

SEQ ID NO: 1131648 - RNA, 19 nt, Homo sapiens
  misc_RNA (1)...(19): siRNA sense strand
gguaacaccugaugggaau

SEQ ID NO: 1131649 - RNA, 19 nt, Homo sapiens
  misc_RNA (1)...(19): siRNA sense strand
acacagaacuacucgaaag

SEQ ID NO: 1131650 - RNA, 19 nt, Homo sapiens
  misc_RNA (1)...(19): siRNA sense strand
cgaaaguacucgcagaagu

SEQ ID NO: 1131651 - RNA, 19 nt, Homo sapiens
  misc_RNA (1)...(19): siRNA sense strand
gaagccagcugcgcauauc

SEQ ID NO: 1131652 - RNA, 19 nt, Homo sapiens
  misc_RNA (1)...(19): siRNA sense strand
ucaagcaguuuauguaugg

SEQ ID NO: 1131653 - RNA, 19 nt, Homo sapiens
  misc_RNA (1)...(19): siRNA sense strand
gcacaaaagccuacaagaa

SEQ ID NO: 1131654 - RNA, 19 nt, Homo sapiens
  misc_RNA (1)...(19): siRNA sense strand
ggauaucaccuccaagugu

SEQ ID NO: 1131655 - RNA, 19 nt, Homo sapiens
  misc_RNA (1)...(19): siRNA sense strand
gaauucggaccuucagauu

SEQ ID NO: 1131656 - RNA, 19 nt, Homo sapiens
  misc_RNA (1)...(19): siRNA sense strand
caaaugagaccaaggaaac

SEQ ID NO: 1131657 - RNA, 19 nt, Homo sapiens
  misc_RNA (1)...(19): siRNA sense strand
ccuaucgcauuaagaaauu

SEQ ID NO: 1131658 - RNA, 19 nt, Homo sapiens
  misc_RNA (1)...(19): siRNA sense strand
uuggagaacugcuaaccua

SEQ ID NO: 1131659 - RNA, 19 nt, Homo sapiens
  misc_RNA (1)...(19): siRNA sense strand
ggaauagaacugcaguaug

SEQ ID NO: 1131660 - RNA, 19 nt, Homo sapiens
  misc_RNA (1)...(19): siRNA sense strand
aaacaaaugagaccaagga

SEQ ID NO: 1131661 - RNA, 19 nt, Homo sapiens
  misc_RNA (1)...(19): siRNA sense strand
uuacagaugcauaauggua

SEQ ID NO: 1131662 - RNA, 19 nt, Homo sapiens
  misc_RNA (1)...(19): siRNA sense strand
uaaccuagggcuacuguug

SEQ ID NO: 1131663 - RNA, 19 nt, Homo sapiens
  misc_RNA (1)...(19): siRNA sense strand
ccacuaagcaagaauacug

SEQ ID NO: 1131664 - RNA, 19 nt, Homo sapiens
  misc_RNA (1)...(19): siRNA sense strand
aaaguacucgcagaaguua

SEQ ID NO: 1131665 - RNA, 19 nt, Homo sapiens
  misc_RNA (1)...(19): siRNA sense strand
cuccagaccugaucagaau

SEQ ID NO: 1131666 - RNA, 19 nt, Homo sapiens
  misc_RNA (1)...(19): siRNA sense strand
aaagauggcuacaaaugcu

SEQ ID NO: 1131667 - RNA, 19 nt, Homo sapiens
  misc_RNA (1)...(19): siRNA sense strand
gcaagaauacuggagcaau

SEQ ID NO: 1131668 - RNA, 19 nt, Homo sapiens
  misc_RNA (1)...(19): siRNA sense strand
ucacucaugacggguauua

SEQ ID NO: 1131669 - RNA, 19 nt, Homo sapiens
  misc_RNA (1)...(19): siRNA sense strand
ggaagccagcugcgcauau

SEQ ID NO: 1131670 - RNA, 19 nt, Homo sapiens
  misc_RNA (1)...(19): siRNA sense strand
cacaaaagccuacaagaaa

SEQ ID NO: 1131671 - RNA, 19 nt, Homo sapiens
  misc_RNA (1)...(19): siRNA sense strand
uaacaccugaugggaauuu

SEQ ID NO: 1131672 - RNA, 19 nt, Homo sapiens
  misc_RNA (1)...(19): siRNA sense strand
caagaaagaaacaaaugag

SEQ ID NO: 1131673 - RNA, 19 nt, Homo sapiens
  misc_RNA (1)...(19): siRNA sense strand
ccaaggaaaccaacuguac

SEQ ID NO: 1131674 - RNA, 19 nt, Homo sapiens
  misc_RNA (1)...(19): siRNA sense strand
ggaaaccaacuguacugau

SEQ ID NO: 1131675 - RNA, 19 nt, Homo sapiens
  misc_RNA (1)...(19): siRNA sense strand
caccugaagugacccuguu

SEQ ID NO: 1131676 - RNA, 19 nt, Homo sapiens
  misc_RNA (1)...(19): siRNA sense strand
cuucauggccuguaaagau

SEQ ID NO: 1131677 - RNA, 19 nt, Homo sapiens
  misc_RNA (1)...(19): siRNA sense strand
uuacacagaacuacucgaa

SEQ ID NO: 1131678 - RNA, 19 nt, Homo sapiens
  misc_RNA (1)...(19): siRNA sense strand
ggguauuacagaugcauaa

SEQ ID NO: 1131679 - RNA, 19 nt, Homo sapiens
  misc_RNA (1)...(19): siRNA sense strand
cuagggcuacuguugauuu

SEQ ID NO: 1131680 - RNA, 19 nt, Homo sapiens
  misc_RNA (1)...(19): siRNA sense strand
gggcuacuguugauuuuga

SEQ ID NO: 1131681 - RNA, 19 nt, Homo sapiens
  misc_RNA (1)...(19): siRNA sense strand
ccuccuaucgcauuaagaa

SEQ ID NO: 1131682 - RNA, 19 nt, Homo sapiens
  misc_RNA (1)...(19): siRNA sense strand
uaaagauggcuacaaaugc

SEQ ID NO: 1131683 - RNA, 19 nt, Homo sapiens
  misc_RNA (1)...(19): siRNA sense strand
gugcuuuguugcccuccua

SEQ ID NO: 1131684 - RNA, 19 nt, Homo sapiens
  misc_RNA (1)...(19): siRNA sense strand
acaaaugagaccaaggaaa

SEQ ID NO: 1131685 - RNA, 19 nt, Homo sapiens
  misc_RNA (1)...(19): siRNA sense strand
gcaguuuauguauggauga

SEQ ID NO: 1131686 - RNA, 19 nt, Homo sapiens
  misc_RNA (1)...(19): siRNA sense strand
caucacucaugacggguau

SEQ ID NO: 1131687 - RNA, 19 nt, Homo sapiens
  misc_RNA (1)...(19): siRNA sense strand
aaaccaacuguacugauga

SEQ ID NO: 1131688 - RNA, 19 nt, Homo sapiens
  misc_RNA (1)...(19): siRNA sense strand
caugacggguauuacagau

SEQ ID NO: 1131689 - RNA, 19 nt, Homo sapiens
  misc_RNA (1)...(19): siRNA sense strand
ggccagccuuccugcacaa

SEQ ID NO: 1131690 - RNA, 19 nt, Homo sapiens
  misc_RNA (1)...(19): siRNA sense strand
gaccaaggaaaccaacugu

SEQ ID NO: 1131691 - RNA, 19 nt, Homo sapiens
  misc_RNA (1)...(19): siRNA sense strand
ggcuacaaaugcugugcuu

SEQ ID NO: 1131692 - RNA, 19 nt, Homo sapiens
  misc_RNA (1)...(19): siRNA sense strand
uacagaugcauaaugguaa

SEQ ID NO: 1131693 - RNA, 19 nt, Homo sapiens
  misc_RNA (1)...(19): siRNA sense strand
ccuacaagaaagaaacaaa

SEQ ID NO: 1131694 - RNA, 19 nt, Homo sapiens
  misc_RNA (1)...(19): siRNA sense strand
gcucugcccuuggagaacu

SEQ ID NO: 1131695 - RNA, 19 nt, Homo sapiens
  misc_RNA (1)...(19): siRNA sense strand
caaggaaaccaacuguacu

SEQ ID NO: 1131696 - RNA, 19 nt, Homo sapiens
  misc_RNA (1)...(19): siRNA sense strand
uucauggccuguaaagaug

SEQ ID NO: 1131697 - RNA, 19 nt, Homo sapiens
  misc_RNA (1)...(19): siRNA sense strand
gugccacuaagcaagaaua

SEQ ID NO: 1131698 - RNA, 19 nt, Homo sapiens
  misc_RNA (1)...(19): siRNA sense strand
ccagaccugaucagaauuc

SEQ ID NO: 1131699 - RNA, 19 nt, Homo sapiens
  misc_RNA (1)...(19): siRNA sense strand
caguuuauguauggaugaa

SEQ ID NO: 1131700 - RNA, 19 nt, Homo sapiens
  misc_RNA (1)...(19): siRNA sense strand
gcgauugugccacuaagca

SEQ ID NO: 1131701 - RNA, 19 nt, Homo sapiens
  misc_RNA (1)...(19): siRNA sense strand
gaucccagagggcgauugu

SEQ ID NO: 1131702 - RNA, 19 nt, Homo sapiens
  misc_RNA (1)...(19): siRNA sense strand
gcaguaugcaaggcaguug

SEQ ID NO: 1131703 - RNA, 19 nt, Homo sapiens
  misc_RNA (1)...(19): siRNA sense strand
ccguggccaucacucauga

SEQ ID NO: 1131704 - RNA, 19 nt, Homo sapiens
  misc_RNA (1)...(19): siRNA sense strand
gggaagccagcugcgcaua

SEQ ID NO: 1131705 - RNA, 19 nt, Homo sapiens
  misc_RNA (1)...(19): siRNA sense strand
aaacagauuacacagaacu

SEQ ID NO: 1131706 - RNA, 19 nt, Homo sapiens
  misc_RNA (1)...(19): siRNA sense strand
guaccguggccaucacuca

SEQ ID NO: 1131707 - RNA, 19 nt, Homo sapiens
  misc_RNA (1)...(19): siRNA sense strand
uucaagcaguuuauguaug

SEQ ID NO: 1131708 - RNA, 19 nt, Homo sapiens
  misc_RNA (1)...(19): siRNA sense strand
cuucaagcaguuuauguau

SEQ ID NO: 1131709 - RNA, 19 nt, Homo sapiens
  misc_RNA (1)...(19): siRNA sense strand
gcccuuggagaacugcuaa

SEQ ID NO: 1131710 - RNA, 19 nt, Homo sapiens
  misc_RNA (1)...(19): siRNA sense strand
gaaaccaacuguacugaug

SEQ ID NO: 1131711 - RNA, 19 nt, Homo sapiens
  misc_RNA (1)...(19): siRNA sense strand
gaauagaacugcaguaugc

SEQ ID NO: 1131712 - RNA, 19 nt, Homo sapiens
  misc_RNA (1)...(19): siRNA sense strand
gaagugacccuguuucaaa

SEQ ID NO: 1131713 - RNA, 19 nt, Homo sapiens
  misc_RNA (1)...(19): siRNA sense strand
gaaaguacucgcagaaguu

SEQ ID NO: 1131714 - RNA, 19 nt, Homo sapiens
  misc_RNA (1)...(19): siRNA sense strand
gauaucaccuccaaguguu

SEQ ID NO: 1131715 - RNA, 19 nt, Homo sapiens
  misc_RNA (1)...(19): siRNA sense strand
caacuguacugaugagaga

SEQ ID NO: 1131716 - RNA, 19 nt, Homo sapiens
  misc_RNA (1)...(19): siRNA sense strand
caagaauacuggagcaaug

SEQ ID NO: 1131717 - RNA, 19 nt, Homo sapiens
  misc_RNA (1)...(19): siRNA sense strand
guaaagauggcuacaaaug

SEQ ID NO: 1131718 - RNA, 19 nt, Homo sapiens
  misc_RNA (1)...(19): siRNA sense strand
gguaacaccugaugggaau

SEQ ID NO: 1131719 - RNA, 19 nt, Homo sapiens
  misc_RNA (1)...(19): siRNA sense strand
acacagaacuacucgaaag

SEQ ID NO: 1131720 - RNA, 19 nt, Homo sapiens
  misc_RNA (1)...(19): siRNA sense strand
cgaaaguacucgcagaagu

SEQ ID NO: 1131721 - RNA, 19 nt, Homo sapiens
  misc_RNA (1)...(19): siRNA sense strand
gaagccagcugcgcauauc

SEQ ID NO: 1131722 - RNA, 19 nt, Homo sapiens
  misc_RNA (1)...(19): siRNA sense strand
ucaagcaguuuauguaugg

SEQ ID NO: 1131723 - RNA, 19 nt, Homo sapiens
  misc_RNA (1)...(19): siRNA sense strand
gcacaaaagccuacaagaa

SEQ ID NO: 1131724 - RNA, 19 nt, Homo sapiens
  misc_RNA (1)...(19): siRNA sense strand
ggauaucaccuccaagugu

SEQ ID NO: 1131725 - RNA, 19 nt, Homo sapiens
  misc_RNA (1)...(19): siRNA sense strand
gaauucggaccuucagauu

SEQ ID NO: 1131726 - RNA, 19 nt, Homo sapiens
  misc_RNA (1)...(19): siRNA sense strand
caaaugagaccaaggaaac

SEQ ID NO: 1131727 - RNA, 19 nt, Homo sapiens
  misc_RNA (1)...(19): siRNA sense strand
ccuaucgcauuaagaaauu

SEQ ID NO: 1131728 - RNA, 19 nt, Homo sapiens
  misc_RNA (1)...(19): siRNA sense strand
uuggagaacugcuaaccua

SEQ ID NO: 1131729 - RNA, 19 nt, Homo sapiens
  misc_RNA (1)...(19): siRNA sense strand
ggaauagaacugcaguaug

SEQ ID NO: 1131730 - RNA, 19 nt, Homo sapiens
  misc_RNA (1)...(19): siRNA sense strand
aaacaaaugagaccaagga

SEQ ID NO: 1131731 - RNA, 19 nt, Homo sapiens
  misc_RNA (1)...(19): siRNA sense strand
uuacagaugcauaauggua

SEQ ID NO: 1131732 - RNA, 19 nt, Homo sapiens
  misc_RNA (1)...(19): siRNA sense strand
uaaccuagggcuacuguug

SEQ ID NO: 1131733 - RNA, 19 nt, Homo sapiens
  misc_RNA (1)...(19): siRNA sense strand
ccacuaagcaagaauacug

SEQ ID NO: 1131734 - RNA, 19 nt, Homo sapiens
  misc_RNA (1)...(19): siRNA sense strand
aaaguacucgcagaaguua

SEQ ID NO: 1131735 - RNA, 19 nt, Homo sapiens
  misc_RNA (1)...(19): siRNA sense strand
cuccagaccugaucagaau

SEQ ID NO: 1131736 - RNA, 19 nt, Homo sapiens
  misc_RNA (1)...(19): siRNA sense strand
aaagauggcuacaaaugcu

SEQ ID NO: 1131737 - RNA, 19 nt, Homo sapiens
  misc_RNA (1)...(19): siRNA sense strand
gcaagaauacuggagcaau

SEQ ID NO: 1131738 - RNA, 19 nt, Homo sapiens
  misc_RNA (1)...(19): siRNA sense strand
ucacucaugacggguauua

SEQ ID NO: 1131739 - RNA, 19 nt, Homo sapiens
  misc_RNA (1)...(19): siRNA sense strand
ggaagccagcugcgcauau

SEQ ID NO: 1131740 - RNA, 19 nt, Homo sapiens
  misc_RNA (1)...(19): siRNA sense strand
cacaaaagccuacaagaaa

SEQ ID NO: 1131741 - RNA, 19 nt, Homo sapiens
  misc_RNA (1)...(19): siRNA sense strand
uaacaccugaugggaauuu

SEQ ID NO: 1131742 - RNA, 19 nt, Homo sapiens
  misc_RNA (1)...(19): siRNA sense strand
caagaaagaaacaaaugag

SEQ ID NO: 1131743 - RNA, 19 nt, Homo sapiens
  misc_RNA (1)...(19): siRNA sense strand
ccaaggaaaccaacuguac

SEQ ID NO: 1131744 - RNA, 19 nt, Homo sapiens
  misc_RNA (1)...(19): siRNA sense strand
ggaaaccaacuguacugau

SEQ ID NO: 1131745 - RNA, 19 nt, Homo sapiens
  misc_RNA (1)...(19): siRNA sense strand
caccugaagugacccuguu

SEQ ID NO: 1131746 - RNA, 19 nt, Homo sapiens
  misc_RNA (1)...(19): siRNA sense strand
cuucauggccuguaaagau

SEQ ID NO: 1131747 - RNA, 19 nt, Homo sapiens
  misc_RNA (1)...(19): siRNA sense strand
uuacacagaacuacucgaa

SEQ ID NO: 1131748 - RNA, 19 nt, Homo sapiens
  misc_RNA (1)...(19): siRNA sense strand
ggguauuacagaugcauaa

SEQ ID NO: 1131749 - RNA, 19 nt, Homo sapiens
  misc_RNA (1)...(19): siRNA sense strand
cuagggcuacuguugauuu

SEQ ID NO: 1131750 - RNA, 19 nt, Homo sapiens
  misc_RNA (1)...(19): siRNA sense strand
gggcuacuguugauuuuga

SEQ ID NO: 1131751 - RNA, 19 nt, Homo sapiens
  misc_RNA (1)...(19): siRNA sense strand
ccuccuaucgcauuaagaa

SEQ ID NO: 1131752 - RNA, 19 nt, Homo sapiens
  misc_RNA (1)...(19): siRNA sense strand
uaaagauggcuacaaaugc

SEQ ID NO: 1131753 - RNA, 19 nt, Homo sapiens
  misc_RNA (1)...(19): siRNA sense strand
gugcuuuguugcccuccua

SEQ ID NO: 1131754 - RNA, 19 nt, Homo sapiens
  misc_RNA (1)...(19): siRNA sense strand
acaaaugagaccaaggaaa

SEQ ID NO: 1131755 - RNA, 19 nt, Homo sapiens
  misc_RNA (1)...(19): siRNA sense strand
gcaguuuauguauggauga

SEQ ID NO: 1131756 - RNA, 19 nt, Homo sapiens
  misc_RNA (1)...(19): siRNA sense strand
caucacucaugacggguau

SEQ ID NO: 1131757 - RNA, 19 nt, Homo sapiens
  misc_RNA (1)...(19): siRNA sense strand
aaaccaacuguacugauga

SEQ ID NO: 1131758 - RNA, 19 nt, Homo sapiens
  misc_RNA (1)...(19): siRNA sense strand
caugacggguauuacagau

SEQ ID NO: 1131759 - RNA, 19 nt, Homo sapiens
  misc_RNA (1)...(19): siRNA sense strand
ggccagccuuccugcacaa

SEQ ID NO: 1131760 - RNA, 19 nt, Homo sapiens
  misc_RNA (1)...(19): siRNA sense strand
gaccaaggaaaccaacugu

SEQ ID NO: 1131761 - RNA, 19 nt, Homo sapiens
  misc_RNA (1)...(19): siRNA sense strand
ggcuacaaaugcugugcuu

SEQ ID NO: 1131762 - RNA, 19 nt, Homo sapiens
  misc_RNA (1)...(19): siRNA sense strand
uacagaugcauaaugguaa

SEQ ID NO: 1131763 - RNA, 19 nt, Homo sapiens
  misc_RNA (1)...(19): siRNA sense strand
ccuacaagaaagaaacaaa

SEQ ID NO: 1131764 - RNA, 19 nt, Homo sapiens
  misc_RNA (1)...(19): siRNA sense strand
gcucugcccuuggagaacu

SEQ ID NO: 1131765 - RNA, 19 nt, Homo sapiens
  misc_RNA (1)...(19): siRNA sense strand
caaggaaaccaacuguacu

SEQ ID NO: 1131766 - RNA, 19 nt, Homo sapiens
  misc_RNA (1)...(19): siRNA sense strand
uucauggccuguaaagaug

SEQ ID NO: 1131767 - RNA, 19 nt, Homo sapiens
  misc_RNA (1)...(19): siRNA sense strand
gugccacuaagcaagaaua

SEQ ID NO: 1131768 - RNA, 19 nt, Homo sapiens
  misc_RNA (1)...(19): siRNA sense strand
ccagaccugaucagaauuc

SEQ ID NO: 1131769 - RNA, 19 nt, Homo sapiens
  misc_RNA (1)...(19): siRNA sense strand
caguuuauguauggaugaa

SEQ ID NO: 1131770 - RNA, 19 nt, Homo sapiens
  misc_RNA (1)...(19): siRNA sense strand
gcgauugugccacuaagca

SEQ ID NO: 1131771 - RNA, 19 nt, Homo sapiens
  misc_RNA (1)...(19): siRNA sense strand
gaucccagagggcgauugu

SEQ ID NO: 1131772 - RNA, 19 nt, Homo sapiens
  misc_RNA (1)...(19): siRNA sense strand
gcaguaugcaaggcaguug

SEQ ID NO: 1131773 - RNA, 19 nt, Homo sapiens
  misc_RNA (1)...(19): siRNA sense strand
ccguggccaucacucauga

SEQ ID NO: 1131774 - RNA, 19 nt, Homo sapiens
  misc_RNA (1)...(19): siRNA sense strand
gggaagccagcugcgcaua

SEQ ID NO: 1131775 - RNA, 19 nt, Homo sapiens
  misc_RNA (1)...(19): siRNA sense strand
aaacagauuacacagaacu

SEQ ID NO: 1131776 - RNA, 19 nt, Homo sapiens
  misc_RNA (1)...(19): siRNA sense strand
guaccguggccaucacuca

SEQ ID NO: 1131777 - RNA, 19 nt, Homo sapiens
  misc_RNA (1)...(19): siRNA sense strand
uucaagcaguuuauguaug

SEQ ID NO: 1131778 - RNA, 19 nt, Homo sapiens
  misc_RNA (1)...(19): siRNA sense strand
cuucaagcaguuuauguau

SEQ ID NO: 1131779 - RNA, 19 nt, Homo sapiens
  misc_RNA (1)...(19): siRNA sense strand
gcccuuggagaacugcuaa

SEQ ID NO: 1131780 - RNA, 19 nt, Homo sapiens
  misc_RNA (1)...(19): siRNA sense strand
gaaaccaacuguacugaug

SEQ ID NO: 1131781 - RNA, 19 nt, Homo sapiens
  misc_RNA (1)...(19): siRNA sense strand
gaaaguacucgcagaaguu

SEQ ID NO: 1131782 - RNA, 19 nt, Homo sapiens
  misc_RNA (1)...(19): siRNA sense strand
gauaucaccuccaaguguu

SEQ ID NO: 1131783 - RNA, 19 nt, Homo sapiens
  misc_RNA (1)...(19): siRNA sense strand
caacuguacugaugagaga

SEQ ID NO: 1131784 - RNA, 19 nt, Homo sapiens
  misc_RNA (1)...(19): siRNA sense strand
guaaagauggcuacaaaug

SEQ ID NO: 1131785 - RNA, 19 nt, Homo sapiens
  misc_RNA (1)...(19): siRNA sense strand
gguaacaccugaugggaau

SEQ ID NO: 1131786 - RNA, 19 nt, Homo sapiens
  misc_RNA (1)...(19): siRNA sense strand
acacagaacuacucgaaag

SEQ ID NO: 1131787 - RNA, 19 nt, Homo sapiens
  misc_RNA (1)...(19): siRNA sense strand
cgaaaguacucgcagaagu

SEQ ID NO: 1131788 - RNA, 19 nt, Homo sapiens
  misc_RNA (1)...(19): siRNA sense strand
ucaagcaguuuauguaugg

SEQ ID NO: 1131789 - RNA, 19 nt, Homo sapiens
  misc_RNA (1)...(19): siRNA sense strand
gcacaaaagccuacaagaa

SEQ ID NO: 1131790 - RNA, 19 nt, Homo sapiens
  misc_RNA (1)...(19): siRNA sense strand
ggauaucaccuccaagugu

SEQ ID NO: 1131791 - RNA, 19 nt, Homo sapiens
  misc_RNA (1)...(19): siRNA sense strand
gaauucggaccuucagauu

SEQ ID NO: 1131792 - RNA, 19 nt, Homo sapiens
  misc_RNA (1)...(19): siRNA sense strand
caaaugagaccaaggaaac

SEQ ID NO: 1131793 - RNA, 19 nt, Homo sapiens
  misc_RNA (1)...(19): siRNA sense strand
ccuaucgcauuaagaaauu

SEQ ID NO: 1131794 - RNA, 19 nt, Homo sapiens
  misc_RNA (1)...(19): siRNA sense strand
uuggagaacugcuaaccua

SEQ ID NO: 1131795 - RNA, 19 nt, Homo sapiens
  misc_RNA (1)...(19): siRNA sense strand
aaacaaaugagaccaagga

SEQ ID NO: 1131796 - RNA, 19 nt, Homo sapiens
  misc_RNA (1)...(19): siRNA sense strand
uuacagaugcauaauggua

SEQ ID NO: 1131797 - RNA, 19 nt, Homo sapiens
  misc_RNA (1)...(19): siRNA sense strand
uaaccuagggcuacuguug

SEQ ID NO: 1131798 - RNA, 19 nt, Homo sapiens
  misc_RNA (1)...(19): siRNA sense strand
aaaguacucgcagaaguua

SEQ ID NO: 1131799 - RNA, 19 nt, Homo sapiens
  misc_RNA (1)...(19): siRNA sense strand
cuccagaccugaucagaau

SEQ ID NO: 1131800 - RNA, 19 nt, Homo sapiens
  misc_RNA (1)...(19): siRNA sense strand
aaagauggcuacaaaugcu

SEQ ID NO: 1131801 - RNA, 19 nt, Homo sapiens
  misc_RNA (1)...(19): siRNA sense strand
ucacucaugacggguauua

SEQ ID NO: 1131802 - RNA, 19 nt, Homo sapiens
  misc_RNA (1)...(19): siRNA sense strand
cacaaaagccuacaagaaa

SEQ ID NO: 1131803 - RNA, 19 nt, Homo sapiens
  misc_RNA (1)...(19): siRNA sense strand
uaacaccugaugggaauuu

SEQ ID NO: 1131804 - RNA, 19 nt, Homo sapiens
  misc_RNA (1)...(19): siRNA sense strand
caagaaagaaacaaaugag

SEQ ID NO: 1131805 - RNA, 19 nt, Homo sapiens
  misc_RNA (1)...(19): siRNA sense strand
ccaaggaaaccaacuguac

SEQ ID NO: 1131806 - RNA, 19 nt, Homo sapiens
  misc_RNA (1)...(19): siRNA sense strand
ggaaaccaacuguacugau

SEQ ID NO: 1131807 - RNA, 19 nt, Homo sapiens
  misc_RNA (1)...(19): siRNA sense strand
cuucauggccuguaaagau

SEQ ID NO: 1131808 - RNA, 19 nt, Homo sapiens
  misc_RNA (1)...(19): siRNA sense strand
uuacacagaacuacucgaa

SEQ ID NO: 1131809 - RNA, 19 nt, Homo sapiens
  misc_RNA (1)...(19): siRNA sense strand
cuagggcuacuguugauuu

SEQ ID NO: 1131810 - RNA, 19 nt, Homo sapiens
  misc_RNA (1)...(19): siRNA sense strand
ggguauuacagaugcauaa

SEQ ID NO: 1131811 - RNA, 19 nt, Homo sapiens
  misc_RNA (1)...(19): siRNA sense strand
gggcuacuguugauuuuga

SEQ ID NO: 1131812 - RNA, 19 nt, Homo sapiens
  misc_RNA (1)...(19): siRNA sense strand
ccuccuaucgcauuaagaa

SEQ ID NO: 1131813 - RNA, 19 nt, Homo sapiens
  misc_RNA (1)...(19): siRNA sense strand
uaaagauggcuacaaaugc

SEQ ID NO: 1131814 - RNA, 19 nt, Homo sapiens
  misc_RNA (1)...(19): siRNA sense strand
gugcuuuguugcccuccua

SEQ ID NO: 1131815 - RNA, 19 nt, Homo sapiens
  misc_RNA (1)...(19): siRNA sense strand
acaaaugagaccaaggaaa

SEQ ID NO: 1131816 - RNA, 19 nt, Homo sapiens
  misc_RNA (1)...(19): siRNA sense strand
aaaccaacuguacugauga

SEQ ID NO: 1131817 - RNA, 19 nt, Homo sapiens
  misc_RNA (1)...(19): siRNA sense strand
caucacucaugacggguau

SEQ ID NO: 1131818 - RNA, 19 nt, Homo sapiens
  misc_RNA (1)...(19): siRNA sense strand
gcaguuuauguauggauga

SEQ ID NO: 1131819 - RNA, 19 nt, Homo sapiens
  misc_RNA (1)...(19): siRNA sense strand
caugacggguauuacagau

SEQ ID NO: 1131820 - RNA, 19 nt, Homo sapiens
  misc_RNA (1)...(19): siRNA sense strand
ggccagccuuccugcacaa

SEQ ID NO: 1131821 - RNA, 19 nt, Homo sapiens
  misc_RNA (1)...(19): siRNA sense strand
gaccaaggaaaccaacugu

SEQ ID NO: 1131822 - RNA, 19 nt, Homo sapiens
  misc_RNA (1)...(19): siRNA sense strand
ggcuacaaaugcugugcuu

SEQ ID NO: 1131823 - RNA, 19 nt, Homo sapiens
  misc_RNA (1)...(19): siRNA sense strand
uacagaugcauaaugguaa

SEQ ID NO: 1131824 - RNA, 19 nt, Homo sapiens
  misc_RNA (1)...(19): siRNA sense strand
ccuacaagaaagaaacaaa

SEQ ID NO: 1131825 - RNA, 19 nt, Homo sapiens
  misc_RNA (1)...(19): siRNA sense strand
gcucugcccuuggagaacu

SEQ ID NO: 1131826 - RNA, 19 nt, Homo sapiens
  misc_RNA (1)...(19): siRNA sense strand
caaggaaaccaacuguacu

SEQ ID NO: 1131827 - RNA, 19 nt, Homo sapiens
  misc_RNA (1)...(19): siRNA sense strand
uucauggccuguaaagaug

SEQ ID NO: 1131828 - RNA, 19 nt, Homo sapiens
  misc_RNA (1)...(19): siRNA sense strand
ccagaccugaucagaauuc

SEQ ID NO: 1131829 - RNA, 19 nt, Homo sapiens
  misc_RNA (1)...(19): siRNA sense strand
caguuuauguauggaugaa

SEQ ID NO: 1131830 - RNA, 19 nt, Homo sapiens
  misc_RNA (1)...(19): siRNA sense strand
aaacagauuacacagaacu

SEQ ID NO: 1131831 - RNA, 19 nt, Homo sapiens
  misc_RNA (1)...(19): siRNA sense strand
ccguggccaucacucauga

SEQ ID NO: 1131832 - RNA, 19 nt, Homo sapiens
  misc_RNA (1)...(19): siRNA sense strand
guaccguggccaucacuca

SEQ ID NO: 1131833 - RNA, 19 nt, Homo sapiens
  misc_RNA (1)...(19): siRNA sense strand
uucaagcaguuuauguaug

SEQ ID NO: 1131834 - RNA, 19 nt, Homo sapiens
  misc_RNA (1)...(19): siRNA sense strand
gcccuuggagaacugcuaa

SEQ ID NO: 1131835 - RNA, 19 nt, Homo sapiens
  misc_RNA (1)...(19): siRNA sense strand
cuucaagcaguuuauguau

SEQ ID NO: 1131836 - RNA, 19 nt, Homo sapiens
  misc_RNA (1)...(19): siRNA sense strand
gaaaccaacuguacugaug

SEQ ID NO: 1131837 - RNA, 19 nt, Homo sapiens
  misc_RNA (1)...(19): siRNA sense strand
gaaaguacucgcagaaguu

SEQ ID NO: 1131838 - RNA, 19 nt, Homo sapiens
  misc_RNA (1)...(19): siRNA sense strand
gauaucaccuccaaguguu

SEQ ID NO: 1131839 - RNA, 19 nt, Homo sapiens
  misc_RNA (1)...(19): siRNA sense strand
caacuguacugaugagaga

SEQ ID NO: 1131840 - RNA, 19 nt, Homo sapiens
  misc_RNA (1)...(19): siRNA sense strand
guaaagauggcuacaaaug

SEQ ID NO: 1131841 - RNA, 19 nt, Homo sapiens
  misc_RNA (1)...(19): siRNA sense strand
gguaacaccugaugggaau

SEQ ID NO: 1131842 - RNA, 19 nt, Homo sapiens
  misc_RNA (1)...(19): siRNA sense strand
acacagaacuacucgaaag

SEQ ID NO: 1131843 - RNA, 19 nt, Homo sapiens
  misc_RNA (1)...(19): siRNA sense strand
cgaaaguacucgcagaagu

SEQ ID NO: 1131844 - RNA, 19 nt, Homo sapiens
  misc_RNA (1)...(19): siRNA sense strand
ucaagcaguuuauguaugg

SEQ ID NO: 1131845 - RNA, 19 nt, Homo sapiens
  misc_RNA (1)...(19): siRNA sense strand
gcacaaaagccuacaagaa

SEQ ID NO: 1131846 - RNA, 19 nt, Homo sapiens
  misc_RNA (1)...(19): siRNA sense strand
ggauaucaccuccaagugu

SEQ ID NO: 1131847 - RNA, 19 nt, Homo sapiens
  misc_RNA (1)...(19): siRNA sense strand
gaauucggaccuucagauu

SEQ ID NO: 1131848 - RNA, 19 nt, Homo sapiens
  misc_RNA (1)...(19): siRNA sense strand
caaaugagaccaaggaaac

SEQ ID NO: 1131849 - RNA, 19 nt, Homo sapiens
  misc_RNA (1)...(19): siRNA sense strand
ccuaucgcauuaagaaauu

SEQ ID NO: 1131850 - RNA, 19 nt, Homo sapiens
  misc_RNA (1)...(19): siRNA sense strand
uuggagaacugcuaaccua

SEQ ID NO: 1131851 - RNA, 19 nt, Homo sapiens
  misc_RNA (1)...(19): siRNA sense strand
aaacaaaugagaccaagga

SEQ ID NO: 1131852 - RNA, 19 nt, Homo sapiens
  misc_RNA (1)...(19): siRNA sense strand
uuacagaugcauaauggua

SEQ ID NO: 1131853 - RNA, 19 nt, Homo sapiens
  misc_RNA (1)...(19): siRNA sense strand
uaaccuagggcuacuguug

SEQ ID NO: 1131854 - RNA, 19 nt, Homo sapiens
  misc_RNA (1)...(19): siRNA sense strand
aaaguacucgcagaaguua

SEQ ID NO: 1131855 - RNA, 19 nt, Homo sapiens
  misc_RNA (1)...(19): siRNA sense strand
cuccagaccugaucagaau

SEQ ID NO: 1131856 - RNA, 19 nt, Homo sapiens
  misc_RNA (1)...(19): siRNA sense strand
aaagauggcuacaaaugcu

SEQ ID NO: 1131857 - RNA, 19 nt, Homo sapiens
  misc_RNA (1)...(19): siRNA sense strand
ucacucaugacggguauua

SEQ ID NO: 1131858 - RNA, 19 nt, Homo sapiens
  misc_RNA (1)...(19): siRNA sense strand
cacaaaagccuacaagaaa

SEQ ID NO: 1131859 - RNA, 19 nt, Homo sapiens
  misc_RNA (1)...(19): siRNA sense strand
uaacaccugaugggaauuu

SEQ ID NO: 1131860 - RNA, 19 nt, Homo sapiens
  misc_RNA (1)...(19): siRNA sense strand
caagaaagaaacaaaugag

SEQ ID NO: 1131861 - RNA, 19 nt, Homo sapiens
  misc_RNA (1)...(19): siRNA sense strand
ccaaggaaaccaacuguac

SEQ ID NO: 1131862 - RNA, 19 nt, Homo sapiens
  misc_RNA (1)...(19): siRNA sense strand
ggaaaccaacuguacugau

SEQ ID NO: 1131863 - RNA, 19 nt, Homo sapiens
  misc_RNA (1)...(19): siRNA sense strand
cuucauggccuguaaagau

SEQ ID NO: 1131864 - RNA, 19 nt, Homo sapiens
  misc_RNA (1)...(19): siRNA sense strand
uuacacagaacuacucgaa

SEQ ID NO: 1131865 - RNA, 19 nt, Homo sapiens
  misc_RNA (1)...(19): siRNA sense strand
cuagggcuacuguugauuu

SEQ ID NO: 1131866 - RNA, 19 nt, Homo sapiens
  misc_RNA (1)...(19): siRNA sense strand
ggguauuacagaugcauaa

SEQ ID NO: 1131867 - RNA, 19 nt, Homo sapiens
  misc_RNA (1)...(19): siRNA sense strand
gggcuacuguugauuuuga

SEQ ID NO: 1131868 - RNA, 19 nt, Homo sapiens
  misc_RNA (1)...(19): siRNA sense strand
ccuccuaucgcauuaagaa

SEQ ID NO: 1131869 - RNA, 19 nt, Homo sapiens
  misc_RNA (1)...(19): siRNA sense strand
uaaagauggcuacaaaugc

SEQ ID NO: 1131870 - RNA, 19 nt, Homo sapiens
  misc_RNA (1)...(19): siRNA sense strand
gugcuuuguugcccuccua

SEQ ID NO: 1131871 - RNA, 19 nt, Homo sapiens
  misc_RNA (1)...(19): siRNA sense strand
acaaaugagaccaaggaaa

SEQ ID NO: 1131872 - RNA, 19 nt, Homo sapiens
  misc_RNA (1)...(19): siRNA sense strand
aaaccaacuguacugauga

SEQ ID NO: 1131873 - RNA, 19 nt, Homo sapiens
  misc_RNA (1)...(19): siRNA sense strand
caucacucaugacggguau

SEQ ID NO: 1131874 - RNA, 19 nt, Homo sapiens
  misc_RNA (1)...(19): siRNA sense strand
gcaguuuauguauggauga

SEQ ID NO: 1131875 - RNA, 19 nt, Homo sapiens
  misc_RNA (1)...(19): siRNA sense strand
caugacggguauuacagau

SEQ ID NO: 1131876 - RNA, 19 nt, Homo sapiens
  misc_RNA (1)...(19): siRNA sense strand
ggccagccuuccugcacaa

SEQ ID NO: 1131877 - RNA, 19 nt, Homo sapiens
  misc_RNA (1)...(19): siRNA sense strand
gaccaaggaaaccaacugu

SEQ ID NO: 1131878 - RNA, 19 nt, Homo sapiens
  misc_RNA (1)...(19): siRNA sense strand
ggcuacaaaugcugugcuu

SEQ ID NO: 1131879 - RNA, 19 nt, Homo sapiens
  misc_RNA (1)...(19): siRNA sense strand
uacagaugcauaaugguaa

SEQ ID NO: 1131880 - RNA, 19 nt, Homo sapiens
  misc_RNA (1)...(19): siRNA sense strand
ccuacaagaaagaaacaaa

SEQ ID NO: 1131881 - RNA, 19 nt, Homo sapiens
  misc_RNA (1)...(19): siRNA sense strand
gcucugcccuuggagaacu

SEQ ID NO: 1131882 - RNA, 19 nt, Homo sapiens
  misc_RNA (1)...(19): siRNA sense strand
caaggaaaccaacuguacu

SEQ ID NO: 1131883 - RNA, 19 nt, Homo sapiens
  misc_RNA (1)...(19): siRNA sense strand
uucauggccuguaaagaug

SEQ ID NO: 1131884 - RNA, 19 nt, Homo sapiens
  misc_RNA (1)...(19): siRNA sense strand
ccagaccugaucagaauuc

SEQ ID NO: 1131885 - RNA, 19 nt, Homo sapiens
  misc_RNA (1)...(19): siRNA sense strand
caguuuauguauggaugaa

SEQ ID NO: 1131886 - RNA, 19 nt, Homo sapiens
  misc_RNA (1)...(19): siRNA sense strand
aaacagauuacacagaacu

SEQ ID NO: 1131887 - RNA, 19 nt, Homo sapiens
  misc_RNA (1)...(19): siRNA sense strand
ccguggccaucacucauga

SEQ ID NO: 1131888 - RNA, 19 nt, Homo sapiens
  misc_RNA (1)...(19): siRNA sense strand
guaccguggccaucacuca

SEQ ID NO: 1131889 - RNA, 19 nt, Homo sapiens
  misc_RNA (1)...(19): siRNA sense strand
uucaagcaguuuauguaug

SEQ ID NO: 1131890 - RNA, 19 nt, Homo sapiens
  misc_RNA (1)...(19): siRNA sense strand
gcccuuggagaacugcuaa

SEQ ID NO: 1131891 - RNA, 19 nt, Homo sapiens
  misc_RNA (1)...(19): siRNA sense strand
cuucaagcaguuuauguau

SEQ ID NO: 1131892 - RNA, 19 nt, Homo sapiens
  misc_RNA (1)...(19): siRNA sense strand
gaaaccaacuguacugaug

SEQ ID NO: 1131893 - RNA, 19 nt, Homo sapiens
  misc_RNA (1)...(19): siRNA sense strand
gaauagaacugcaguaugc

SEQ ID NO: 1131894 - RNA, 19 nt, Homo sapiens
  misc_RNA (1)...(19): siRNA sense strand
gaagugacccuguuucaaa

SEQ ID NO: 1131895 - RNA, 19 nt, Homo sapiens
  misc_RNA (1)...(19): siRNA sense strand
gaaaguacucgcagaaguu

SEQ ID NO: 1131896 - RNA, 19 nt, Homo sapiens
  misc_RNA (1)...(19): siRNA sense strand
gauaucaccuccaaguguu

SEQ ID NO: 1131897 - RNA, 19 nt, Homo sapiens
  misc_RNA (1)...(19): siRNA sense strand
caacuguacugaugagaga

SEQ ID NO: 1131898 - RNA, 19 nt, Homo sapiens
  misc_RNA (1)...(19): siRNA sense strand
caagaauacuggagcaaug

SEQ ID NO: 1131899 - RNA, 19 nt, Homo sapiens
  misc_RNA (1)...(19): siRNA sense strand
guaaagauggcuacaaaug

SEQ ID NO: 1131900 - RNA, 19 nt, Homo sapiens
  misc_RNA (1)...(19): siRNA sense strand
gguaacaccugaugggaau

SEQ ID NO: 1131901 - RNA, 19 nt, Homo sapiens
  misc_RNA (1)...(19): siRNA sense strand
acacagaacuacucgaaag

SEQ ID NO: 1131902 - RNA, 19 nt, Homo sapiens
  misc_RNA (1)...(19): siRNA sense strand
cgaaaguacucgcagaagu

SEQ ID NO: 1131903 - RNA, 19 nt, Homo sapiens
  misc_RNA (1)...(19): siRNA sense strand
gaagccagcugcgcauauc

SEQ ID NO: 1131904 - RNA, 19 nt, Homo sapiens
  misc_RNA (1)...(19): siRNA sense strand
ucaagcaguuuauguaugg

SEQ ID NO: 1131905 - RNA, 19 nt, Homo sapiens
  misc_RNA (1)...(19): siRNA sense strand
gcacaaaagccuacaagaa

SEQ ID NO: 1131906 - RNA, 19 nt, Homo sapiens
  misc_RNA (1)...(19): siRNA sense strand
ggauaucaccuccaagugu

SEQ ID NO: 1131907 - RNA, 19 nt, Homo sapiens
  misc_RNA (1)...(19): siRNA sense strand
gaauucggaccuucagauu

SEQ ID NO: 1131908 - RNA, 19 nt, Homo sapiens
  misc_RNA (1)...(19): siRNA sense strand
caaaugagaccaaggaaac

SEQ ID NO: 1131909 - RNA, 19 nt, Homo sapiens
  misc_RNA (1)...(19): siRNA sense strand
ccuaucgcauuaagaaauu

SEQ ID NO: 1131910 - RNA, 19 nt, Homo sapiens
  misc_RNA (1)...(19): siRNA sense strand
uuggagaacugcuaaccua

SEQ ID NO: 1131911 - RNA, 19 nt, Homo sapiens
  misc_RNA (1)...(19): siRNA sense strand
ggaauagaacugcaguaug

SEQ ID NO: 1131912 - RNA, 19 nt, Homo sapiens
  misc_RNA (1)...(19): siRNA sense strand
aaacaaaugagaccaagga

SEQ ID NO: 1131913 - RNA, 19 nt, Homo sapiens
  misc_RNA (1)...(19): siRNA sense strand
uuacagaugcauaauggua

SEQ ID NO: 1131914 - RNA, 19 nt, Homo sapiens
  misc_RNA (1)...(19): siRNA sense strand
uaaccuagggcuacuguug

SEQ ID NO: 1131915 - RNA, 19 nt, Homo sapiens
  misc_RNA (1)...(19): siRNA sense strand
ccacuaagcaagaauacug

SEQ ID NO: 1131916 - RNA, 19 nt, Homo sapiens
  misc_RNA (1)...(19): siRNA sense strand
aaaguacucgcagaaguua

SEQ ID NO: 1131917 - RNA, 19 nt, Homo sapiens
  misc_RNA (1)...(19): siRNA sense strand
cuccagaccugaucagaau

SEQ ID NO: 1131918 - RNA, 19 nt, Homo sapiens
  misc_RNA (1)...(19): siRNA sense strand
aaagauggcuacaaaugcu

SEQ ID NO: 1131919 - RNA, 19 nt, Homo sapiens
  misc_RNA (1)...(19): siRNA sense strand
gcaagaauacuggagcaau

SEQ ID NO: 1131920 - RNA, 19 nt, Homo sapiens
  misc_RNA (1)...(19): siRNA sense strand
ucacucaugacggguauua

SEQ ID NO: 1131921 - RNA, 19 nt, Homo sapiens
  misc_RNA (1)...(19): siRNA sense strand
ggaagccagcugcgcauau

SEQ ID NO: 1131922 - RNA, 19 nt, Homo sapiens
  misc_RNA (1)...(19): siRNA sense strand
cacaaaagccuacaagaaa

SEQ ID NO: 1131923 - RNA, 19 nt, Homo sapiens
  misc_RNA (1)...(19): siRNA sense strand
uaacaccugaugggaauuu

SEQ ID NO: 1131924 - RNA, 19 nt, Homo sapiens
  misc_RNA (1)...(19): siRNA sense strand
caagaaagaaacaaaugag

SEQ ID NO: 1131925 - RNA, 19 nt, Homo sapiens
  misc_RNA (1)...(19): siRNA sense strand
ccaaggaaaccaacuguac

SEQ ID NO: 1131926 - RNA, 19 nt, Homo sapiens
  misc_RNA (1)...(19): siRNA sense strand
ggaaaccaacuguacugau

SEQ ID NO: 1131927 - RNA, 19 nt, Homo sapiens
  misc_RNA (1)...(19): siRNA sense strand
caccugaagugacccuguu

SEQ ID NO: 1131928 - RNA, 19 nt, Homo sapiens
  misc_RNA (1)...(19): siRNA sense strand
cuucauggccuguaaagau

SEQ ID NO: 1131929 - RNA, 19 nt, Homo sapiens
  misc_RNA (1)...(19): siRNA sense strand
uuacacagaacuacucgaa

SEQ ID NO: 1131930 - RNA, 19 nt, Homo sapiens
  misc_RNA (1)...(19): siRNA sense strand
ggguauuacagaugcauaa

SEQ ID NO: 1131931 - RNA, 19 nt, Homo sapiens
  misc_RNA (1)...(19): siRNA sense strand
cuagggcuacuguugauuu

SEQ ID NO: 1131932 - RNA, 19 nt, Homo sapiens
  misc_RNA (1)...(19): siRNA sense strand
gggcuacuguugauuuuga

SEQ ID NO: 1131933 - RNA, 19 nt, Homo sapiens
  misc_RNA (1)...(19): siRNA sense strand
ccuccuaucgcauuaagaa

SEQ ID NO: 1131934 - RNA, 19 nt, Homo sapiens
  misc_RNA (1)...(19): siRNA sense strand
uaaagauggcuacaaaugc

SEQ ID NO: 1131935 - RNA, 19 nt, Homo sapiens
  misc_RNA (1)...(19): siRNA sense strand
gugcuuuguugcccuccua

SEQ ID NO: 1131936 - RNA, 19 nt, Homo sapiens
  misc_RNA (1)...(19): siRNA sense strand
acaaaugagaccaaggaaa

SEQ ID NO: 1131937 - RNA, 19 nt, Homo sapiens
  misc_RNA (1)...(19): siRNA sense strand
gcaguuuauguauggauga

SEQ ID NO: 1131938 - RNA, 19 nt, Homo sapiens
  misc_RNA (1)...(19): siRNA sense strand
caucacucaugacggguau

SEQ ID NO: 1131939 - RNA, 19 nt, Homo sapiens
  misc_RNA (1)...(19): siRNA sense strand
aaaccaacuguacugauga

SEQ ID NO: 1131940 - RNA, 19 nt, Homo sapiens
  misc_RNA (1)...(19): siRNA sense strand
caugacggguauuacagau

SEQ ID NO: 1131941 - RNA, 19 nt, Homo sapiens
  misc_RNA (1)...(19): siRNA sense strand
ggccagccuuccugcacaa

SEQ ID NO: 1131942 - RNA, 19 nt, Homo sapiens
  misc_RNA (1)...(19): siRNA sense strand
gaccaaggaaaccaacugu

SEQ ID NO: 1131943 - RNA, 19 nt, Homo sapiens
  misc_RNA (1)...(19): siRNA sense strand
ggcuacaaaugcugugcuu

SEQ ID NO: 1131944 - RNA, 19 nt, Homo sapiens
  misc_RNA (1)...(19): siRNA sense strand
uacagaugcauaaugguaa

SEQ ID NO: 1131945 - RNA, 19 nt, Homo sapiens
  misc_RNA (1)...(19): siRNA sense strand
ccuacaagaaagaaacaaa

SEQ ID NO: 1131946 - RNA, 19 nt, Homo sapiens
  misc_RNA (1)...(19): siRNA sense strand
gcucugcccuuggagaacu

SEQ ID NO: 1131947 - RNA, 19 nt, Homo sapiens
  misc_RNA (1)...(19): siRNA sense strand
caaggaaaccaacuguacu

SEQ ID NO: 1131948 - RNA, 19 nt, Homo sapiens
  misc_RNA (1)...(19): siRNA sense strand
uucauggccuguaaagaug

SEQ ID NO: 1131949 - RNA, 19 nt, Homo sapiens
  misc_RNA (1)...(19): siRNA sense strand
gugccacuaagcaagaaua

SEQ ID NO: 1131950 - RNA, 19 nt, Homo sapiens
  misc_RNA (1)...(19): siRNA sense strand
ccagaccugaucagaauuc

SEQ ID NO: 1131951 - RNA, 19 nt, Homo sapiens
  misc_RNA (1)...(19): siRNA sense strand
caguuuauguauggaugaa

SEQ ID NO: 1131952 - RNA, 19 nt, Homo sapiens
  misc_RNA (1)...(19): siRNA sense strand
gcgauugugccacuaagca

SEQ ID NO: 1131953 - RNA, 19 nt, Homo sapiens
  misc_RNA (1)...(19): siRNA sense strand
gaucccagagggcgauugu

SEQ ID NO: 1131954 - RNA, 19 nt, Homo sapiens
  misc_RNA (1)...(19): siRNA sense strand
gcaguaugcaaggcaguug

SEQ ID NO: 1131955 - RNA, 19 nt, Homo sapiens
  misc_RNA (1)...(19): siRNA sense strand
ccguggccaucacucauga

SEQ ID NO: 1131956 - RNA, 19 nt, Homo sapiens
  misc_RNA (1)...(19): siRNA sense strand
gggaagccagcugcgcaua

SEQ ID NO: 1131957 - RNA, 19 nt, Homo sapiens
  misc_RNA (1)...(19): siRNA sense strand
aaacagauuacacagaacu

SEQ ID NO: 1131958 - RNA, 19 nt, Homo sapiens
  misc_RNA (1)...(19): siRNA sense strand
guaccguggccaucacuca

SEQ ID NO: 1131959 - RNA, 19 nt, Homo sapiens
  misc_RNA (1)...(19): siRNA sense strand
uucaagcaguuuauguaug

SEQ ID NO: 1131960 - RNA, 19 nt, Homo sapiens
  misc_RNA (1)...(19): siRNA sense strand
cuucaagcaguuuauguau

SEQ ID NO: 1131961 - RNA, 19 nt, Homo sapiens
  misc_RNA (1)...(19): siRNA sense strand
gcccuuggagaacugcuaa

SEQ ID NO: 1131962 - RNA, 19 nt, Homo sapiens
  misc_RNA (1)...(19): siRNA sense strand
guacagggcuccagaaauu

SEQ ID NO: 1131963 - RNA, 19 nt, Homo sapiens
  misc_RNA (1)...(19): siRNA sense strand
ggaaacagaucuuuacaag

SEQ ID NO: 1131964 - RNA, 19 nt, Homo sapiens
  misc_RNA (1)...(19): siRNA sense strand
ccaaagcucuggacuuauu

SEQ ID NO: 1131965 - RNA, 19 nt, Homo sapiens
  misc_RNA (1)...(19): siRNA sense strand
gcuaggaacuauuugcuuu

SEQ ID NO: 1131966 - RNA, 19 nt, Homo sapiens
  misc_RNA (1)...(19): siRNA sense strand
aagaagaccugaauuguau

SEQ ID NO: 1131967 - RNA, 19 nt, Homo sapiens
  misc_RNA (1)...(19): siRNA sense strand
caagaagaccugaauugua

SEQ ID NO: 1131968 - RNA, 19 nt, Homo sapiens
  misc_RNA (1)...(19): siRNA sense strand
gcaaugaccauaucugcua

SEQ ID NO: 1131969 - RNA, 19 nt, Homo sapiens
  misc_RNA (1)...(19): siRNA sense strand
aaacagaucuuuacaagcu

SEQ ID NO: 1131970 - RNA, 19 nt, Homo sapiens
  misc_RNA (1)...(19): siRNA sense strand
ccaaguccauugauauuug

SEQ ID NO: 1131971 - RNA, 19 nt, Homo sapiens
  misc_RNA (1)...(19): siRNA sense strand
caagaggauugaaguagaa

SEQ ID NO: 1131972 - RNA, 19 nt, Homo sapiens
  misc_RNA (1)...(19): siRNA sense strand
caacaaaguucgaguagcu

SEQ ID NO: 1131973 - RNA, 19 nt, Homo sapiens
  misc_RNA (1)...(19): siRNA sense strand
ucgaguagcuaucaagaaa

SEQ ID NO: 1131974 - RNA, 19 nt, Homo sapiens
  misc_RNA (1)...(19): siRNA sense strand
ugaagagacugcuagauuc

SEQ ID NO: 1131975 - RNA, 19 nt, Homo sapiens
  misc_RNA (1)...(19): siRNA sense strand
guacaggaccucauggaaa

SEQ ID NO: 1131976 - RNA, 19 nt, Homo sapiens
  misc_RNA (1)...(19): siRNA sense strand
gaagaccugaauuguauaa

SEQ ID NO: 1131977 - RNA, 19 nt, Homo sapiens
  misc_RNA (1)...(19): siRNA sense strand
uuacugcgcuucagacaug

SEQ ID NO: 1131978 - RNA, 19 nt, Homo sapiens
  misc_RNA (1)...(19): siRNA sense strand
ggaacuauuugcuuucucu

SEQ ID NO: 1131979 - RNA, 19 nt, Homo sapiens
  misc_RNA (1)...(19): siRNA sense strand
cacaacaccucagcaauga

SEQ ID NO: 1131980 - RNA, 19 nt, Homo sapiens
  misc_RNA (1)...(19): siRNA sense strand
acccauaucuggagcagua

SEQ ID NO: 1131981 - RNA, 19 nt, Homo sapiens
  misc_RNA (1)...(19): siRNA sense strand
gaccauaucugcuauuuuc

SEQ ID NO: 1131982 - RNA, 19 nt, Homo sapiens
  misc_RNA (1)...(19): siRNA sense strand
acaagaggauugaaguaga

SEQ ID NO: 1131983 - RNA, 19 nt, Homo sapiens
  misc_RNA (1)...(19): siRNA sense strand
gauaaugucaacaaaguuc

SEQ ID NO: 1131984 - RNA, 19 nt, Homo sapiens
  misc_RNA (1)...(19): siRNA sense strand
gagaacaucauuggaauca

SEQ ID NO: 1131985 - RNA, 19 nt, Homo sapiens
  misc_RNA (1)...(19): siRNA sense strand
aaaauaaggugccauggaa

SEQ ID NO: 1131986 - RNA, 19 nt, Homo sapiens
  misc_RNA (1)...(19): siRNA sense strand
ggugugcucugcuuaugau

SEQ ID NO: 1131987 - RNA, 19 nt, Homo sapiens
  misc_RNA (1)...(19): siRNA sense strand
cccaaaugcugacuccaaa

SEQ ID NO: 1131988 - RNA, 19 nt, Homo sapiens
  misc_RNA (1)...(19): siRNA sense strand
cuccagaaauuauguugaa

SEQ ID NO: 1131989 - RNA, 19 nt, Homo sapiens
  misc_RNA (1)...(19): siRNA sense strand
cagggaagcauuaucuuga

SEQ ID NO: 1131990 - RNA, 19 nt, Homo sapiens
  misc_RNA (1)...(19): siRNA sense strand
acacaacaccucagcaaug

SEQ ID NO: 1131991 - RNA, 19 nt, Homo sapiens
  misc_RNA (1)...(19): siRNA sense strand
acaccaaccucucguacau

SEQ ID NO: 1131992 - RNA, 19 nt, Homo sapiens
  misc_RNA (1)...(19): siRNA sense strand
uacaccaaguccauugaua

SEQ ID NO: 1131993 - RNA, 19 nt, Homo sapiens
  misc_RNA (1)...(19): siRNA sense strand
cacaagaagaccugaauug

SEQ ID NO: 1131994 - RNA, 19 nt, Homo sapiens
  misc_RNA (1)...(19): siRNA sense strand
cauaucuggagcaguauua

SEQ ID NO: 1131995 - RNA, 19 nt, Homo sapiens
  misc_RNA (1)...(19): siRNA sense strand
caccaaccaucgagcaaau

SEQ ID NO: 1131996 - RNA, 19 nt, Homo sapiens
  misc_RNA (1)...(19): siRNA sense strand
uugaagagacugcuagauu

SEQ ID NO: 1131997 - RNA, 19 nt, Homo sapiens
  misc_RNA (1)...(19): siRNA sense strand
gagcaaaugaaagauguau

SEQ ID NO: 1131998 - RNA, 19 nt, Homo sapiens
  misc_RNA (1)...(19): siRNA sense strand
gaaaagcucaaagaacuaa

SEQ ID NO: 1131999 - RNA, 19 nt, Homo sapiens
  misc_RNA (1)...(19): siRNA sense strand
cgaagcaccauucaaguuc

SEQ ID NO: 1132000 - RNA, 19 nt, Homo sapiens
  misc_RNA (1)...(19): siRNA sense strand
caaugaccauaucugcuau

SEQ ID NO: 1132001 - RNA, 19 nt, Homo sapiens
  misc_RNA (1)...(19): siRNA sense strand
gcaccaaccaucgagcaaa

SEQ ID NO: 1132002 - RNA, 19 nt, Homo sapiens
  misc_RNA (1)...(19): siRNA sense strand
caaguucgacauggaauug

SEQ ID NO: 1132003 - RNA, 19 nt, Homo sapiens
  misc_RNA (1)...(19): siRNA sense strand
ccucagcaaugaccauauc

SEQ ID NO: 1132004 - RNA, 19 nt, Homo sapiens
  misc_RNA (1)...(19): siRNA sense strand
ucauggaaacagaucuuua

SEQ ID NO: 1132005 - RNA, 19 nt, Homo sapiens
  misc_RNA (1)...(19): siRNA sense strand
caccaaguccauugauauu

SEQ ID NO: 1132006 - RNA, 19 nt, Homo sapiens
  misc_RNA (1)...(19): siRNA sense strand
acacaagaggauugaagua

SEQ ID NO: 1132007 - RNA, 19 nt, Homo sapiens
  misc_RNA (1)...(19): siRNA sense strand
ccauugauauuuggucugu

SEQ ID NO: 1132008 - RNA, 19 nt, Homo sapiens
  misc_RNA (1)...(19): siRNA sense strand
ccagggaagcauuaucuug

SEQ ID NO: 1132009 - RNA, 19 nt, Homo sapiens
  misc_RNA (1)...(19): siRNA sense strand
cucaagaucugugacuuug

SEQ ID NO: 1132010 - RNA, 19 nt, Homo sapiens
  misc_RNA (1)...(19): siRNA sense strand
ccaaccaucgagcaaauga

SEQ ID NO: 1132011 - RNA, 19 nt, Homo sapiens
  misc_RNA (1)...(19): siRNA sense strand
gccaggauacagaucuuaa

SEQ ID NO: 1132012 - RNA, 19 nt, Homo sapiens
  misc_RNA (1)...(19): siRNA sense strand
ccgaagcaccauucaaguu

SEQ ID NO: 1132013 - RNA, 19 nt, Homo sapiens
  misc_RNA (1)...(19): siRNA sense strand
ccauucagcuaacguucug

SEQ ID NO: 1132014 - RNA, 19 nt, Homo sapiens
  misc_RNA (1)...(19): siRNA sense strand
ucgagcaaaugaaagaugu

SEQ ID NO: 1132015 - RNA, 19 nt, Homo sapiens
  misc_RNA (1)...(19): siRNA sense strand
uacaggaccucauggaaac

SEQ ID NO: 1132016 - RNA, 19 nt, Homo sapiens
  misc_RNA (1)...(19): siRNA sense strand
uggaugacuugccuaagga

SEQ ID NO: 1132017 - RNA, 19 nt, Homo sapiens
  misc_RNA (1)...(19): siRNA sense strand
caaguccauugauauuugg

SEQ ID NO: 1132018 - RNA, 19 nt, Homo sapiens
  misc_RNA (1)...(19): siRNA sense strand
acaccaaguccauugauau

SEQ ID NO: 1132019 - RNA, 19 nt, Homo sapiens
  misc_RNA (1)...(19): siRNA sense strand
gaguagcuaucaagaaaau

SEQ ID NO: 1132020 - RNA, 19 nt, Homo sapiens
  misc_RNA (1)...(19): siRNA sense strand
ucacaagaagaccugaauu

SEQ ID NO: 1132021 - RNA, 19 nt, Homo sapiens
  misc_RNA (1)...(19): siRNA sense strand
ccaucgagcaaaugaaaga

SEQ ID NO: 1132022 - RNA, 19 nt, Homo sapiens
  misc_RNA (1)...(19): siRNA sense strand
ggcauggugugcucugcuu

SEQ ID NO: 1132023 - RNA, 19 nt, Homo sapiens
  misc_RNA (1)...(19): siRNA sense strand
ucucaagaucugugacuuu

SEQ ID NO: 1132024 - RNA, 19 nt, Homo sapiens
  misc_RNA (1)...(19): siRNA sense strand
caacaccaccugugaucuc

SEQ ID NO: 1132025 - RNA, 19 nt, Homo sapiens
  misc_RNA (1)...(19): siRNA sense strand
gcauggugugcucugcuua

SEQ ID NO: 1132026 - RNA, 19 nt, Homo sapiens
  misc_RNA (1)...(19): siRNA sense strand
ugucaacaaaguucgagua

SEQ ID NO: 1132027 - RNA, 19 nt, Homo sapiens
  misc_RNA (1)...(19): siRNA sense strand
uugcagauccagaccauga

SEQ ID NO: 1132028 - RNA, 19 nt, Homo sapiens
  misc_RNA (1)...(19): siRNA sense strand
agacacaacaccucagcaa

SEQ ID NO: 1132029 - RNA, 19 nt, Homo sapiens
  misc_RNA (1)...(19): siRNA sense strand
ggacuuauuggacaaaaug

SEQ ID NO: 1132030 - RNA, 19 nt, Homo sapiens
  misc_RNA (1)...(19): siRNA sense strand
cagccaggauacagaucuu

SEQ ID NO: 1132031 - RNA, 19 nt, Homo sapiens
  misc_RNA (1)...(19): siRNA sense strand
cuagauuccagccaggaua

SEQ ID NO: 1132032 - RNA, 19 nt, Homo sapiens
  misc_RNA (1)...(19): siRNA sense strand
gaagagacugcuagauucc

SEQ ID NO: 1132033 - RNA, 19 nt, Homo sapiens
  misc_RNA (1)...(19): siRNA sense strand
ggaaaagcucaaagaacua

SEQ ID NO: 1132034 - RNA, 19 nt, Homo sapiens
  misc_RNA (1)...(19): siRNA sense strand
cuucagacaugagaacauc

SEQ ID NO: 1132035 - RNA, 19 nt, Homo sapiens
  misc_RNA (1)...(19): siRNA sense strand
cauggaaacagaucuuuac

SEQ ID NO: 1132036 - RNA, 19 nt, Homo sapiens
  misc_RNA (1)...(19): siRNA sense strand
aaccaucgagcaaaugaaa

SEQ ID NO: 1132037 - RNA, 19 nt, Homo sapiens
  misc_RNA (1)...(19): siRNA sense strand
ccacacaagaggauugaag

SEQ ID NO: 1132038 - RNA, 19 nt, Homo sapiens
  misc_RNA (1)...(19): siRNA sense strand
gaacuauuugcuuucucuu

SEQ ID NO: 1132039 - RNA, 19 nt, Homo sapiens
  misc_RNA (1)...(19): siRNA sense strand
uccaagggcuacaccaagu

SEQ ID NO: 1132040 - RNA, 19 nt, Homo sapiens
  misc_RNA (1)...(19): siRNA sense strand
gguacagggcuccagaaau

SEQ ID NO: 1132041 - RNA, 19 nt, Homo sapiens
  misc_RNA (1)...(19): siRNA sense strand
uauaguacaggaccucaug

SEQ ID NO: 1132042 - RNA, 19 nt, Homo sapiens
  misc_RNA (1)...(19): siRNA sense strand
acauggaauuggaugacuu

SEQ ID NO: 1132043 - RNA, 19 nt, Homo sapiens
  misc_RNA (1)...(19): siRNA sense strand
cauucaaguucgacaugga

SEQ ID NO: 1132044 - RNA, 19 nt, Homo sapiens
  misc_RNA (1)...(19): siRNA sense strand
gaugacuugccuaaggaaa

SEQ ID NO: 1132045 - RNA, 19 nt, Homo sapiens
  misc_RNA (1)...(19): siRNA sense strand
gcucaacaccaccugugau

SEQ ID NO: 1132046 - RNA, 19 nt, Homo sapiens
  misc_RNA (1)...(19): siRNA sense strand
cagaccuacugccagagaa

SEQ ID NO: 1132047 - RNA, 19 nt, Homo sapiens
  misc_RNA (1)...(19): siRNA sense strand
ccuuugagcaccagaccua

SEQ ID NO: 1132048 - RNA, 19 nt, Homo sapiens
  misc_RNA (1)...(19): siRNA sense strand
gcuacaccaaccucucgua

SEQ ID NO: 1132049 - RNA, 19 nt, Homo sapiens
  misc_RNA (1)...(19): siRNA sense strand
gacacaacaccucagcaau

SEQ ID NO: 1132050 - RNA, 19 nt, Homo sapiens
  misc_RNA (1)...(19): siRNA sense strand
cauggaauuggaugacuug

SEQ ID NO: 1132051 - RNA, 19 nt, Homo sapiens
  misc_RNA (1)...(19): siRNA sense strand
gacauucaacccacacaag

SEQ ID NO: 1132052 - RNA, 19 nt, Homo sapiens
  misc_RNA (1)...(19): siRNA sense strand
caaagcucuggacuuauug

SEQ ID NO: 1132053 - RNA, 19 nt, Homo sapiens
  misc_RNA (1)...(19): siRNA sense strand
gcuacaccaaguccauuga

SEQ ID NO: 1132054 - RNA, 19 nt, Homo sapiens
  misc_RNA (1)...(19): siRNA sense strand
gcuccagaaauuauguuga

SEQ ID NO: 1132055 - RNA, 19 nt, Homo sapiens
  misc_RNA (1)...(19): siRNA sense strand
acagggcuccagaaauuau

SEQ ID NO: 1132056 - RNA, 19 nt, Homo sapiens
  misc_RNA (1)...(19): siRNA sense strand
cuuccaaccugcugcucaa

SEQ ID NO: 1132057 - RNA, 19 nt, Homo sapiens
  misc_RNA (1)...(19): siRNA sense strand
ccagaccuacugccagaga

SEQ ID NO: 1132058 - RNA, 19 nt, Homo sapiens
  misc_RNA (1)...(19): siRNA sense strand
aaaguucgaguagcuauca

SEQ ID NO: 1132059 - RNA, 19 nt, Homo sapiens
  misc_RNA (1)...(19): siRNA sense strand
gacauggaauuggaugacu

SEQ ID NO: 1132060 - RNA, 19 nt, Homo sapiens
  misc_RNA (1)...(19): siRNA sense strand
gaaaaucagccccuuugag

SEQ ID NO: 1132061 - RNA, 19 nt, Homo sapiens
  misc_RNA (1)...(19): siRNA sense strand
uuggaugacuugccuaagg

SEQ ID NO: 1132062 - RNA, 19 nt, Homo sapiens
  misc_RNA (1)...(19): siRNA sense strand
guacagggcuccagaaauu

SEQ ID NO: 1132063 - RNA, 19 nt, Homo sapiens
  misc_RNA (1)...(19): siRNA sense strand
ggaaacagaucuuuacaag

SEQ ID NO: 1132064 - RNA, 19 nt, Homo sapiens
  misc_RNA (1)...(19): siRNA sense strand
ccaaagcucuggacuuauu

SEQ ID NO: 1132065 - RNA, 19 nt, Homo sapiens
  misc_RNA (1)...(19): siRNA sense strand
gcuaggaacuauuugcuuu

SEQ ID NO: 1132066 - RNA, 19 nt, Homo sapiens
  misc_RNA (1)...(19): siRNA sense strand
aagaagaccugaauuguau

SEQ ID NO: 1132067 - RNA, 19 nt, Homo sapiens
  misc_RNA (1)...(19): siRNA sense strand
caagaagaccugaauugua

SEQ ID NO: 1132068 - RNA, 19 nt, Homo sapiens
  misc_RNA (1)...(19): siRNA sense strand
gcaaugaccauaucugcua

SEQ ID NO: 1132069 - RNA, 19 nt, Homo sapiens
  misc_RNA (1)...(19): siRNA sense strand
aaacagaucuuuacaagcu

SEQ ID NO: 1132070 - RNA, 19 nt, Homo sapiens
  misc_RNA (1)...(19): siRNA sense strand
ccaaguccauugauauuug

SEQ ID NO: 1132071 - RNA, 19 nt, Homo sapiens
  misc_RNA (1)...(19): siRNA sense strand
caagaggauugaaguagaa

SEQ ID NO: 1132072 - RNA, 19 nt, Homo sapiens
  misc_RNA (1)...(19): siRNA sense strand
caacaaaguucgaguagcu

SEQ ID NO: 1132073 - RNA, 19 nt, Homo sapiens
  misc_RNA (1)...(19): siRNA sense strand
ucgaguagcuaucaagaaa

SEQ ID NO: 1132074 - RNA, 19 nt, Homo sapiens
  misc_RNA (1)...(19): siRNA sense strand
ugaagagacugcuagauuc

SEQ ID NO: 1132075 - RNA, 19 nt, Homo sapiens
  misc_RNA (1)...(19): siRNA sense strand
guacaggaccucauggaaa

SEQ ID NO: 1132076 - RNA, 19 nt, Homo sapiens
  misc_RNA (1)...(19): siRNA sense strand
gaagaccugaauuguauaa

SEQ ID NO: 1132077 - RNA, 19 nt, Homo sapiens
  misc_RNA (1)...(19): siRNA sense strand
uuacugcgcuucagacaug

SEQ ID NO: 1132078 - RNA, 19 nt, Homo sapiens
  misc_RNA (1)...(19): siRNA sense strand
ggaacuauuugcuuucucu

SEQ ID NO: 1132079 - RNA, 19 nt, Homo sapiens
  misc_RNA (1)...(19): siRNA sense strand
cacaacaccucagcaauga

SEQ ID NO: 1132080 - RNA, 19 nt, Homo sapiens
  misc_RNA (1)...(19): siRNA sense strand
acccauaucuggagcagua

SEQ ID NO: 1132081 - RNA, 19 nt, Homo sapiens
  misc_RNA (1)...(19): siRNA sense strand
gaccauaucugcuauuuuc

SEQ ID NO: 1132082 - RNA, 19 nt, Homo sapiens
  misc_RNA (1)...(19): siRNA sense strand
acaagaggauugaaguaga

SEQ ID NO: 1132083 - RNA, 19 nt, Homo sapiens
  misc_RNA (1)...(19): siRNA sense strand
gauaaugucaacaaaguuc

SEQ ID NO: 1132084 - RNA, 19 nt, Homo sapiens
  misc_RNA (1)...(19): siRNA sense strand
gagaacaucauuggaauca

SEQ ID NO: 1132085 - RNA, 19 nt, Homo sapiens
  misc_RNA (1)...(19): siRNA sense strand
aaaauaaggugccauggaa

SEQ ID NO: 1132086 - RNA, 19 nt, Homo sapiens
  misc_RNA (1)...(19): siRNA sense strand
ggugugcucugcuuaugau

SEQ ID NO: 1132087 - RNA, 19 nt, Homo sapiens
  misc_RNA (1)...(19): siRNA sense strand
cccaaaugcugacuccaaa

SEQ ID NO: 1132088 - RNA, 19 nt, Homo sapiens
  misc_RNA (1)...(19): siRNA sense strand
cuccagaaauuauguugaa

SEQ ID NO: 1132089 - RNA, 19 nt, Homo sapiens
  misc_RNA (1)...(19): siRNA sense strand
cagggaagcauuaucuuga

SEQ ID NO: 1132090 - RNA, 19 nt, Homo sapiens
  misc_RNA (1)...(19): siRNA sense strand
acacaacaccucagcaaug

SEQ ID NO: 1132091 - RNA, 19 nt, Homo sapiens
  misc_RNA (1)...(19): siRNA sense strand
acaccaaccucucguacau

SEQ ID NO: 1132092 - RNA, 19 nt, Homo sapiens
  misc_RNA (1)...(19): siRNA sense strand
uacaccaaguccauugaua

SEQ ID NO: 1132093 - RNA, 19 nt, Homo sapiens
  misc_RNA (1)...(19): siRNA sense strand
cacaagaagaccugaauug

SEQ ID NO: 1132094 - RNA, 19 nt, Homo sapiens
  misc_RNA (1)...(19): siRNA sense strand
cauaucuggagcaguauua

SEQ ID NO: 1132095 - RNA, 19 nt, Homo sapiens
  misc_RNA (1)...(19): siRNA sense strand
caccaaccaucgagcaaau

SEQ ID NO: 1132096 - RNA, 19 nt, Homo sapiens
  misc_RNA (1)...(19): siRNA sense strand
uugaagagacugcuagauu

SEQ ID NO: 1132097 - RNA, 19 nt, Homo sapiens
  misc_RNA (1)...(19): siRNA sense strand
gagcaaaugaaagauguau

SEQ ID NO: 1132098 - RNA, 19 nt, Homo sapiens
  misc_RNA (1)...(19): siRNA sense strand
gaaaagcucaaagaacuaa

SEQ ID NO: 1132099 - RNA, 19 nt, Homo sapiens
  misc_RNA (1)...(19): siRNA sense strand
cgaagcaccauucaaguuc

SEQ ID NO: 1132100 - RNA, 19 nt, Homo sapiens
  misc_RNA (1)...(19): siRNA sense strand
caaugaccauaucugcuau

SEQ ID NO: 1132101 - RNA, 19 nt, Homo sapiens
  misc_RNA (1)...(19): siRNA sense strand
gcaccaaccaucgagcaaa

SEQ ID NO: 1132102 - RNA, 19 nt, Homo sapiens
  misc_RNA (1)...(19): siRNA sense strand
caaguucgacauggaauug

SEQ ID NO: 1132103 - RNA, 19 nt, Homo sapiens
  misc_RNA (1)...(19): siRNA sense strand
ccucagcaaugaccauauc

SEQ ID NO: 1132104 - RNA, 19 nt, Homo sapiens
  misc_RNA (1)...(19): siRNA sense strand
ucauggaaacagaucuuua

SEQ ID NO: 1132105 - RNA, 19 nt, Homo sapiens
  misc_RNA (1)...(19): siRNA sense strand
caccaaguccauugauauu

SEQ ID NO: 1132106 - RNA, 19 nt, Homo sapiens
  misc_RNA (1)...(19): siRNA sense strand
acacaagaggauugaagua

SEQ ID NO: 1132107 - RNA, 19 nt, Homo sapiens
  misc_RNA (1)...(19): siRNA sense strand
ccauugauauuuggucugu

SEQ ID NO: 1132108 - RNA, 19 nt, Homo sapiens
  misc_RNA (1)...(19): siRNA sense strand
ccagggaagcauuaucuug

SEQ ID NO: 1132109 - RNA, 19 nt, Homo sapiens
  misc_RNA (1)...(19): siRNA sense strand
cucaagaucugugacuuug

SEQ ID NO: 1132110 - RNA, 19 nt, Homo sapiens
  misc_RNA (1)...(19): siRNA sense strand
ccaaccaucgagcaaauga

SEQ ID NO: 1132111 - RNA, 19 nt, Homo sapiens
  misc_RNA (1)...(19): siRNA sense strand
gccaggauacagaucuuaa

SEQ ID NO: 1132112 - RNA, 19 nt, Homo sapiens
  misc_RNA (1)...(19): siRNA sense strand
ccgaagcaccauucaaguu

SEQ ID NO: 1132113 - RNA, 19 nt, Homo sapiens
  misc_RNA (1)...(19): siRNA sense strand
ccauucagcuaacguucug

SEQ ID NO: 1132114 - RNA, 19 nt, Homo sapiens
  misc_RNA (1)...(19): siRNA sense strand
ucgagcaaaugaaagaugu

SEQ ID NO: 1132115 - RNA, 19 nt, Homo sapiens
  misc_RNA (1)...(19): siRNA sense strand
uacaggaccucauggaaac

SEQ ID NO: 1132116 - RNA, 19 nt, Homo sapiens
  misc_RNA (1)...(19): siRNA sense strand
uggaugacuugccuaagga

SEQ ID NO: 1132117 - RNA, 19 nt, Homo sapiens
  misc_RNA (1)...(19): siRNA sense strand
caaguccauugauauuugg

SEQ ID NO: 1132118 - RNA, 19 nt, Homo sapiens
  misc_RNA (1)...(19): siRNA sense strand
acaccaaguccauugauau

SEQ ID NO: 1132119 - RNA, 19 nt, Homo sapiens
  misc_RNA (1)...(19): siRNA sense strand
gaguagcuaucaagaaaau

SEQ ID NO: 1132120 - RNA, 19 nt, Homo sapiens
  misc_RNA (1)...(19): siRNA sense strand
ucacaagaagaccugaauu

SEQ ID NO: 1132121 - RNA, 19 nt, Homo sapiens
  misc_RNA (1)...(19): siRNA sense strand
ccaucgagcaaaugaaaga

SEQ ID NO: 1132122 - RNA, 19 nt, Homo sapiens
  misc_RNA (1)...(19): siRNA sense strand
ggcauggugugcucugcuu

SEQ ID NO: 1132123 - RNA, 19 nt, Homo sapiens
  misc_RNA (1)...(19): siRNA sense strand
ucucaagaucugugacuuu

SEQ ID NO: 1132124 - RNA, 19 nt, Homo sapiens
  misc_RNA (1)...(19): siRNA sense strand
caacaccaccugugaucuc

SEQ ID NO: 1132125 - RNA, 19 nt, Homo sapiens
  misc_RNA (1)...(19): siRNA sense strand
gcauggugugcucugcuua

SEQ ID NO: 1132126 - RNA, 19 nt, Homo sapiens
  misc_RNA (1)...(19): siRNA sense strand
ugucaacaaaguucgagua

SEQ ID NO: 1132127 - RNA, 19 nt, Homo sapiens
  misc_RNA (1)...(19): siRNA sense strand
uugcagauccagaccauga

SEQ ID NO: 1132128 - RNA, 19 nt, Homo sapiens
  misc_RNA (1)...(19): siRNA sense strand
agacacaacaccucagcaa

SEQ ID NO: 1132129 - RNA, 19 nt, Homo sapiens
  misc_RNA (1)...(19): siRNA sense strand
ggacuuauuggacaaaaug

SEQ ID NO: 1132130 - RNA, 19 nt, Homo sapiens
  misc_RNA (1)...(19): siRNA sense strand
cagccaggauacagaucuu

SEQ ID NO: 1132131 - RNA, 19 nt, Homo sapiens
  misc_RNA (1)...(19): siRNA sense strand
cuagauuccagccaggaua

SEQ ID NO: 1132132 - RNA, 19 nt, Homo sapiens
  misc_RNA (1)...(19): siRNA sense strand
gaagagacugcuagauucc

SEQ ID NO: 1132133 - RNA, 19 nt, Homo sapiens
  misc_RNA (1)...(19): siRNA sense strand
ggaaaagcucaaagaacua

SEQ ID NO: 1132134 - RNA, 19 nt, Homo sapiens
  misc_RNA (1)...(19): siRNA sense strand
cuucagacaugagaacauc

SEQ ID NO: 1132135 - RNA, 19 nt, Homo sapiens
  misc_RNA (1)...(19): siRNA sense strand
cauggaaacagaucuuuac

SEQ ID NO: 1132136 - RNA, 19 nt, Homo sapiens
  misc_RNA (1)...(19): siRNA sense strand
aaccaucgagcaaaugaaa

SEQ ID NO: 1132137 - RNA, 19 nt, Homo sapiens
  misc_RNA (1)...(19): siRNA sense strand
ccacacaagaggauugaag

SEQ ID NO: 1132138 - RNA, 19 nt, Homo sapiens
  misc_RNA (1)...(19): siRNA sense strand
gaacuauuugcuuucucuu

SEQ ID NO: 1132139 - RNA, 19 nt, Homo sapiens
  misc_RNA (1)...(19): siRNA sense strand
uccaagggcuacaccaagu

SEQ ID NO: 1132140 - RNA, 19 nt, Homo sapiens
  misc_RNA (1)...(19): siRNA sense strand
gguacagggcuccagaaau

SEQ ID NO: 1132141 - RNA, 19 nt, Homo sapiens
  misc_RNA (1)...(19): siRNA sense strand
uauaguacaggaccucaug

SEQ ID NO: 1132142 - RNA, 19 nt, Homo sapiens
  misc_RNA (1)...(19): siRNA sense strand
acauggaauuggaugacuu

SEQ ID NO: 1132143 - RNA, 19 nt, Homo sapiens
  misc_RNA (1)...(19): siRNA sense strand
cauucaaguucgacaugga

SEQ ID NO: 1132144 - RNA, 19 nt, Homo sapiens
  misc_RNA (1)...(19): siRNA sense strand
gaugacuugccuaaggaaa

SEQ ID NO: 1132145 - RNA, 19 nt, Homo sapiens
  misc_RNA (1)...(19): siRNA sense strand
gcucaacaccaccugugau

SEQ ID NO: 1132146 - RNA, 19 nt, Homo sapiens
  misc_RNA (1)...(19): siRNA sense strand
cagaccuacugccagagaa

SEQ ID NO: 1132147 - RNA, 19 nt, Homo sapiens
  misc_RNA (1)...(19): siRNA sense strand
ccuuugagcaccagaccua

SEQ ID NO: 1132148 - RNA, 19 nt, Homo sapiens
  misc_RNA (1)...(19): siRNA sense strand
gcuacaccaaccucucgua

SEQ ID NO: 1132149 - RNA, 19 nt, Homo sapiens
  misc_RNA (1)...(19): siRNA sense strand
gacacaacaccucagcaau

SEQ ID NO: 1132150 - RNA, 19 nt, Homo sapiens
  misc_RNA (1)...(19): siRNA sense strand
cauggaauuggaugacuug

SEQ ID NO: 1132151 - RNA, 19 nt, Homo sapiens
  misc_RNA (1)...(19): siRNA sense strand
gacauucaacccacacaag

SEQ ID NO: 1132152 - RNA, 19 nt, Homo sapiens
  misc_RNA (1)...(19): siRNA sense strand
caaagcucuggacuuauug

SEQ ID NO: 1132153 - RNA, 19 nt, Homo sapiens
  misc_RNA (1)...(19): siRNA sense strand
gcuacaccaaguccauuga

SEQ ID NO: 1132154 - RNA, 19 nt, Homo sapiens
  misc_RNA (1)...(19): siRNA sense strand
gcuccagaaauuauguuga

SEQ ID NO: 1132155 - RNA, 19 nt, Homo sapiens
  misc_RNA (1)...(19): siRNA sense strand
acagggcuccagaaauuau

SEQ ID NO: 1132156 - RNA, 19 nt, Homo sapiens
  misc_RNA (1)...(19): siRNA sense strand
cuuccaaccugcugcucaa

SEQ ID NO: 1132157 - RNA, 19 nt, Homo sapiens
  misc_RNA (1)...(19): siRNA sense strand
ccagaccuacugccagaga

SEQ ID NO: 1132158 - RNA, 19 nt, Homo sapiens
  misc_RNA (1)...(19): siRNA sense strand
aaaguucgaguagcuauca

SEQ ID NO: 1132159 - RNA, 19 nt, Homo sapiens
  misc_RNA (1)...(19): siRNA sense strand
gacauggaauuggaugacu

SEQ ID NO: 1132160 - RNA, 19 nt, Homo sapiens
  misc_RNA (1)...(19): siRNA sense strand
gaaaaucagccccuuugag

SEQ ID NO: 1132161 - RNA, 19 nt, Homo sapiens
  misc_RNA (1)...(19): siRNA sense strand
uuggaugacuugccuaagg

SEQ ID NO: 1132162 - RNA, 19 nt, Homo sapiens
  misc_RNA (1)...(19): siRNA sense strand
gcaaggaucgauuugaaua

SEQ ID NO: 1132163 - RNA, 19 nt, Homo sapiens
  misc_RNA (1)...(19): siRNA sense strand
ggagcuggcugucaacaau

SEQ ID NO: 1132164 - RNA, 19 nt, Homo sapiens
  misc_RNA (1)...(19): siRNA sense strand
gcaaacguuucuugaacaa

SEQ ID NO: 1132165 - RNA, 19 nt, Homo sapiens
  misc_RNA (1)...(19): siRNA sense strand
gaggacugcucaugugauu

SEQ ID NO: 1132166 - RNA, 19 nt, Homo sapiens
  misc_RNA (1)...(19): siRNA sense strand
gcagcugcguuaccuguuu

SEQ ID NO: 1132167 - RNA, 19 nt, Homo sapiens
  misc_RNA (1)...(19): siRNA sense strand
gaagggacgugggaaggaa

SEQ ID NO: 1132168 - RNA, 19 nt, Homo sapiens
  misc_RNA (1)...(19): siRNA sense strand
cgagcuggcugccgaguuu

SEQ ID NO: 1132169 - RNA, 19 nt, Homo sapiens
  misc_RNA (1)...(19): siRNA sense strand
ggacguaugucuauuacac

SEQ ID NO: 1132170 - RNA, 19 nt, Homo sapiens
  misc_RNA (1)...(19): siRNA sense strand
gacagcaucucaaagacaa

SEQ ID NO: 1132171 - RNA, 19 nt, Homo sapiens
  misc_RNA (1)...(19): siRNA sense strand
ugcaauggcucaucagauu

SEQ ID NO: 1132172 - RNA, 19 nt, Homo sapiens
  misc_RNA (1)...(19): siRNA sense strand
caucagaccugcauugaac

SEQ ID NO: 1132173 - RNA, 19 nt, Homo sapiens
  misc_RNA (1)...(19): siRNA sense strand
cagaggagcuggcugucaa

SEQ ID NO: 1132174 - RNA, 19 nt, Homo sapiens
  misc_RNA (1)...(19): siRNA sense strand
ccagugagguggaagacuu

SEQ ID NO: 1132175 - RNA, 19 nt, Homo sapiens
  misc_RNA (1)...(19): siRNA sense strand
caagucugcugaugagaga

SEQ ID NO: 1132176 - RNA, 19 nt, Homo sapiens
  misc_RNA (1)...(19): siRNA sense strand
ucaaugcaauggcucauca

SEQ ID NO: 1132177 - RNA, 19 nt, Homo sapiens
  misc_RNA (1)...(19): siRNA sense strand
gcaccauauucacauguug

SEQ ID NO: 1132178 - RNA, 19 nt, Homo sapiens
  misc_RNA (1)...(19): siRNA sense strand
gacacgcucaguugaaaua

SEQ ID NO: 1132179 - RNA, 19 nt, Homo sapiens
  misc_RNA (1)...(19): siRNA sense strand
gaaugcacaccuuggcuuu

SEQ ID NO: 1132180 - RNA, 19 nt, Homo sapiens
  misc_RNA (1)...(19): siRNA sense strand
acacagacuuugucaugga

SEQ ID NO: 1132181 - RNA, 19 nt, Homo sapiens
  misc_RNA (1)...(19): siRNA sense strand
gcuaagcucauccagugua

SEQ ID NO: 1132182 - RNA, 19 nt, Homo sapiens
  misc_RNA (1)...(19): siRNA sense strand
uggaagagguggucaugug

SEQ ID NO: 1132183 - RNA, 19 nt, Homo sapiens
  misc_RNA (1)...(19): siRNA sense strand
aaauaccgcuugcuguguu

SEQ ID NO: 1132184 - RNA, 19 nt, Homo sapiens
  misc_RNA (1)...(19): siRNA sense strand
cugcaaggaucgauuugaa

SEQ ID NO: 1132185 - RNA, 19 nt, Homo sapiens
  misc_RNA (1)...(19): siRNA sense strand
gcacaagaacuaucuacgu

SEQ ID NO: 1132186 - RNA, 19 nt, Homo sapiens
  misc_RNA (1)...(19): siRNA sense strand
gccaagcagugaccaggaa

SEQ ID NO: 1132187 - RNA, 19 nt, Homo sapiens
  misc_RNA (1)...(19): siRNA sense strand
cauccaguguauuguguuu

SEQ ID NO: 1132188 - RNA, 19 nt, Homo sapiens
  misc_RNA (1)...(19): siRNA sense strand
ccagcaagcucgcaaacgu

SEQ ID NO: 1132189 - RNA, 19 nt, Homo sapiens
  misc_RNA (1)...(19): siRNA sense strand
ugcguuaccuguuucauga

SEQ ID NO: 1132190 - RNA, 19 nt, Homo sapiens
  misc_RNA (1)...(19): siRNA sense strand
ggaucgauuugaauaucuu

SEQ ID NO: 1132191 - RNA, 19 nt, Homo sapiens
  misc_RNA (1)...(19): siRNA sense strand
cccaguaccugcucucaga

SEQ ID NO: 1132192 - RNA, 19 nt, Homo sapiens
  misc_RNA (1)...(19): siRNA sense strand
gcaucucaaagacaaauuu

SEQ ID NO: 1132193 - RNA, 19 nt, Homo sapiens
  misc_RNA (1)...(19): siRNA sense strand
gcacaccaccaacauucuu

SEQ ID NO: 1132194 - RNA, 19 nt, Homo sapiens
  misc_RNA (1)...(19): siRNA sense strand
ugacgacugugccaucugu

SEQ ID NO: 1132195 - RNA, 19 nt, Homo sapiens
  misc_RNA (1)...(19): siRNA sense strand
uuacacagacuuugucaug

SEQ ID NO: 1132196 - RNA, 19 nt, Homo sapiens
  misc_RNA (1)...(19): siRNA sense strand
gcggucagauagcaucaga

SEQ ID NO: 1132197 - RNA, 19 nt, Homo sapiens
  misc_RNA (1)...(19): siRNA sense strand
gaaggacggauucaaguac

SEQ ID NO: 1132198 - RNA, 19 nt, Homo sapiens
  misc_RNA (1)...(19): siRNA sense strand
gaauucgucggcacaagaa

SEQ ID NO: 1132199 - RNA, 19 nt, Homo sapiens
  misc_RNA (1)...(19): siRNA sense strand
gaaacugcccuguggacau

SEQ ID NO: 1132200 - RNA, 19 nt, Homo sapiens
  misc_RNA (1)...(19): siRNA sense strand
ggacgaacuccuccagcaa

SEQ ID NO: 1132201 - RNA, 19 nt, Homo sapiens
  misc_RNA (1)...(19): siRNA sense strand
ggcaacaucugguuaucca

SEQ ID NO: 1132202 - RNA, 19 nt, Homo sapiens
  misc_RNA (1)...(19): siRNA sense strand
cuacacagcggucagauag

SEQ ID NO: 1132203 - RNA, 19 nt, Homo sapiens
  misc_RNA (1)...(19): siRNA sense strand
gcucugcaaggaucgauuu

SEQ ID NO: 1132204 - RNA, 19 nt, Homo sapiens
  misc_RNA (1)...(19): siRNA sense strand
caaaaguucugaagaugau

SEQ ID NO: 1132205 - RNA, 19 nt, Homo sapiens
  misc_RNA (1)...(19): siRNA sense strand
ggacuucggcgagguggaa

SEQ ID NO: 1132206 - RNA, 19 nt, Homo sapiens
  misc_RNA (1)...(19): siRNA sense strand
gaggccagguuugcaguug

SEQ ID NO: 1132207 - RNA, 19 nt, Homo sapiens
  misc_RNA (1)...(19): siRNA sense strand
ggacugcucaugugauuuu

SEQ ID NO: 1132208 - RNA, 19 nt, Homo sapiens
  misc_RNA (1)...(19): siRNA sense strand
aaacugcccuguggacauc

SEQ ID NO: 1132209 - RNA, 19 nt, Homo sapiens
  misc_RNA (1)...(19): siRNA sense strand
uugaauaucuuuccuucuc

SEQ ID NO: 1132210 - RNA, 19 nt, Homo sapiens
  misc_RNA (1)...(19): siRNA sense strand
gcucaucagauucaagaga

SEQ ID NO: 1132211 - RNA, 19 nt, Homo sapiens
  misc_RNA (1)...(19): siRNA sense strand
gaggugcaacgucgaauuc

SEQ ID NO: 1132212 - RNA, 19 nt, Homo sapiens
  misc_RNA (1)...(19): siRNA sense strand
uuucauggcugcagagucu

SEQ ID NO: 1132213 - RNA, 19 nt, Homo sapiens
  misc_RNA (1)...(19): siRNA sense strand
agaagcagcagaccuccua

SEQ ID NO: 1132214 - RNA, 19 nt, Homo sapiens
  misc_RNA (1)...(19): siRNA sense strand
agaaggacggauucaagua

SEQ ID NO: 1132215 - RNA, 19 nt, Homo sapiens
  misc_RNA (1)...(19): siRNA sense strand
gaaaggggacguaugucua

SEQ ID NO: 1132216 - RNA, 19 nt, Homo sapiens
  misc_RNA (1)...(19): siRNA sense strand
cguguggguucuaguaaau

SEQ ID NO: 1132217 - RNA, 19 nt, Homo sapiens
  misc_RNA (1)...(19): siRNA sense strand
ucgcaaacguuucuugaac

SEQ ID NO: 1132218 - RNA, 19 nt, Homo sapiens
  misc_RNA (1)...(19): siRNA sense strand
gcucgcaaacguuucuuga

SEQ ID NO: 1132219 - RNA, 19 nt, Homo sapiens
  misc_RNA (1)...(19): siRNA sense strand
gcaucagaccugcauugaa

SEQ ID NO: 1132220 - RNA, 19 nt, Homo sapiens
  misc_RNA (1)...(19): siRNA sense strand
acacagcggucagauagca

SEQ ID NO: 1132221 - RNA, 19 nt, Homo sapiens
  misc_RNA (1)...(19): siRNA sense strand
gaaacauggaggccagguu

SEQ ID NO: 1132222 - RNA, 19 nt, Homo sapiens
  misc_RNA (1)...(19): siRNA sense strand
cgaauucgucggcacaaga

SEQ ID NO: 1132223 - RNA, 19 nt, Homo sapiens
  misc_RNA (1)...(19): siRNA sense strand
caaggaucgauuugaauau

SEQ ID NO: 1132224 - RNA, 19 nt, Homo sapiens
  misc_RNA (1)...(19): siRNA sense strand
gaacuaucuacgugugguu

SEQ ID NO: 1132225 - RNA, 19 nt, Homo sapiens
  misc_RNA (1)...(19): siRNA sense strand
gcaauggcucaucagauuc

SEQ ID NO: 1132226 - RNA, 19 nt, Homo sapiens
  misc_RNA (1)...(19): siRNA sense strand
gcauuacgcaggccagcaa

SEQ ID NO: 1132227 - RNA, 19 nt, Homo sapiens
  misc_RNA (1)...(19): siRNA sense strand
aagcucauccaguguauug

SEQ ID NO: 1132228 - RNA, 19 nt, Homo sapiens
  misc_RNA (1)...(19): siRNA sense strand
cgcaaacguuucuugaaca

SEQ ID NO: 1132229 - RNA, 19 nt, Homo sapiens
  misc_RNA (1)...(19): siRNA sense strand
ucaaguaccuuuuccuaca

SEQ ID NO: 1132230 - RNA, 19 nt, Homo sapiens
  misc_RNA (1)...(19): siRNA sense strand
gaugcacaccaccaacauu

SEQ ID NO: 1132231 - RNA, 19 nt, Homo sapiens
  misc_RNA (1)...(19): siRNA sense strand
gcacaccuuggcuuucaug

SEQ ID NO: 1132232 - RNA, 19 nt, Homo sapiens
  misc_RNA (1)...(19): siRNA sense strand
caauggcucaucagauuca

SEQ ID NO: 1132233 - RNA, 19 nt, Homo sapiens
  misc_RNA (1)...(19): siRNA sense strand
ggaccucaugcaccauauu

SEQ ID NO: 1132234 - RNA, 19 nt, Homo sapiens
  misc_RNA (1)...(19): siRNA sense strand
aaggaucgauuugaauauc

SEQ ID NO: 1132235 - RNA, 19 nt, Homo sapiens
  misc_RNA (1)...(19): siRNA sense strand
gaugaugcggccucagaga

SEQ ID NO: 1132236 - RNA, 19 nt, Homo sapiens
  misc_RNA (1)...(19): siRNA sense strand
acgcucaguugaaauaaca

SEQ ID NO: 1132237 - RNA, 19 nt, Homo sapiens
  misc_RNA (1)...(19): siRNA sense strand
cuaagcucauccaguguau

SEQ ID NO: 1132238 - RNA, 19 nt, Homo sapiens
  misc_RNA (1)...(19): siRNA sense strand
caucuuuggugugcugaau

SEQ ID NO: 1132239 - RNA, 19 nt, Homo sapiens
  misc_RNA (1)...(19): siRNA sense strand
gcaacucccagcucaaugc

SEQ ID NO: 1132240 - RNA, 19 nt, Homo sapiens
  misc_RNA (1)...(19): siRNA sense strand
caacauucuuggcauuacg

SEQ ID NO: 1132241 - RNA, 19 nt, Homo sapiens
  misc_RNA (1)...(19): siRNA sense strand
gaccucaugcaccauauuc

SEQ ID NO: 1132242 - RNA, 19 nt, Homo sapiens
  misc_RNA (1)...(19): siRNA sense strand
gcucauccaguguauugug

SEQ ID NO: 1132243 - RNA, 19 nt, Homo sapiens
  misc_RNA (1)...(19): siRNA sense strand
gcucucagacagccucuuc

SEQ ID NO: 1132244 - RNA, 19 nt, Homo sapiens
  misc_RNA (1)...(19): siRNA sense strand
gauagcaucagaccugcau

SEQ ID NO: 1132245 - RNA, 19 nt, Homo sapiens
  misc_RNA (1)...(19): siRNA sense strand
cagcugcguuaccuguuuc

SEQ ID NO: 1132246 - RNA, 19 nt, Homo sapiens
  misc_RNA (1)...(19): siRNA sense strand
gcggaacggaggcuucaga

SEQ ID NO: 1132247 - RNA, 19 nt, Homo sapiens
  misc_RNA (1)...(19): siRNA sense strand
cggaaggugcguccucuga

SEQ ID NO: 1132248 - RNA, 19 nt, Homo sapiens
  misc_RNA (1)...(19): siRNA sense strand
uagcaucagaccugcauug

SEQ ID NO: 1132249 - RNA, 19 nt, Homo sapiens
  misc_RNA (1)...(19): siRNA sense strand
ucguguggguucuaguaaa

SEQ ID NO: 1132250 - RNA, 19 nt, Homo sapiens
  misc_RNA (1)...(19): siRNA sense strand
acucccagcucaaugcaau

SEQ ID NO: 1132251 - RNA, 19 nt, Homo sapiens
  misc_RNA (1)...(19): siRNA sense strand
cagcaacucccagcucaau

SEQ ID NO: 1132252 - RNA, 19 nt, Homo sapiens
  misc_RNA (1)...(19): siRNA sense strand
ccauauucacauguuguua

SEQ ID NO: 1132253 - RNA, 19 nt, Homo sapiens
  misc_RNA (1)...(19): siRNA sense strand
ggaggagacgcuggacuuc

SEQ ID NO: 1132254 - RNA, 19 nt, Homo sapiens
  misc_RNA (1)...(19): siRNA sense strand
ccaggaagagggagaaacu

SEQ ID NO: 1132255 - RNA, 19 nt, Homo sapiens
  misc_RNA (1)...(19): siRNA sense strand
uaaauaccgcuugcugugu

SEQ ID NO: 1132256 - RNA, 19 nt, Homo sapiens
  misc_RNA (1)...(19): siRNA sense strand
uagaaggacggauucaagu

SEQ ID NO: 1132257 - RNA, 19 nt, Homo sapiens
  misc_RNA (1)...(19): siRNA sense strand
ccuacacagcggucagaua

SEQ ID NO: 1132258 - RNA, 19 nt, Homo sapiens
  misc_RNA (1)...(19): siRNA sense strand
cauguggugccucugguuu

SEQ ID NO: 1132259 - RNA, 19 nt, Homo sapiens
  misc_RNA (1)...(19): siRNA sense strand
cagcaagcucgcaaacguu

SEQ ID NO: 1132260 - RNA, 19 nt, Homo sapiens
  misc_RNA (1)...(19): siRNA sense strand
ggacggauucaaguaccuu

SEQ ID NO: 1132261 - RNA, 19 nt, Homo sapiens
  misc_RNA (1)...(19): siRNA sense strand
aagaugaugcggccucaga

SEQ ID NO: 1132262 - RNA, 19 nt, Homo sapiens
  misc_RNA (1)...(19): siRNA sense strand
gcaaggaucgauuugaaua

SEQ ID NO: 1132263 - RNA, 19 nt, Homo sapiens
  misc_RNA (1)...(19): siRNA sense strand
ggagcuggcugucaacaau

SEQ ID NO: 1132264 - RNA, 19 nt, Homo sapiens
  misc_RNA (1)...(19): siRNA sense strand
gaggacugcucaugugauu

SEQ ID NO: 1132265 - RNA, 19 nt, Homo sapiens
  misc_RNA (1)...(19): siRNA sense strand
gcagcugcguuaccuguuu

SEQ ID NO: 1132266 - RNA, 19 nt, Homo sapiens
  misc_RNA (1)...(19): siRNA sense strand
gaagggacgugggaaggaa

SEQ ID NO: 1132267 - RNA, 19 nt, Homo sapiens
  misc_RNA (1)...(19): siRNA sense strand
cgagcuggcugccgaguuu

SEQ ID NO: 1132268 - RNA, 19 nt, Homo sapiens
  misc_RNA (1)...(19): siRNA sense strand
ggacguaugucuauuacac

SEQ ID NO: 1132269 - RNA, 19 nt, Homo sapiens
  misc_RNA (1)...(19): siRNA sense strand
gacagcaucucaaagacaa

SEQ ID NO: 1132270 - RNA, 19 nt, Homo sapiens
  misc_RNA (1)...(19): siRNA sense strand
cagaggagcuggcugucaa

SEQ ID NO: 1132271 - RNA, 19 nt, Homo sapiens
  misc_RNA (1)...(19): siRNA sense strand
gcaccauauucacauguug

SEQ ID NO: 1132272 - RNA, 19 nt, Homo sapiens
  misc_RNA (1)...(19): siRNA sense strand
gaaugcacaccuuggcuuu

SEQ ID NO: 1132273 - RNA, 19 nt, Homo sapiens
  misc_RNA (1)...(19): siRNA sense strand
acacagacuuugucaugga

SEQ ID NO: 1132274 - RNA, 19 nt, Homo sapiens
  misc_RNA (1)...(19): siRNA sense strand
gcuaagcucauccagugua

SEQ ID NO: 1132275 - RNA, 19 nt, Homo sapiens
  misc_RNA (1)...(19): siRNA sense strand
uggaagagguggucaugug

SEQ ID NO: 1132276 - RNA, 19 nt, Homo sapiens
  misc_RNA (1)...(19): siRNA sense strand
aaauaccgcuugcuguguu

SEQ ID NO: 1132277 - RNA, 19 nt, Homo sapiens
  misc_RNA (1)...(19): siRNA sense strand
cugcaaggaucgauuugaa

SEQ ID NO: 1132278 - RNA, 19 nt, Homo sapiens
  misc_RNA (1)...(19): siRNA sense strand
gcacaagaacuaucuacgu

SEQ ID NO: 1132279 - RNA, 19 nt, Homo sapiens
  misc_RNA (1)...(19): siRNA sense strand
cauccaguguauuguguuu

SEQ ID NO: 1132280 - RNA, 19 nt, Homo sapiens
  misc_RNA (1)...(19): siRNA sense strand
ugcguuaccuguuucauga

SEQ ID NO: 1132281 - RNA, 19 nt, Homo sapiens
  misc_RNA (1)...(19): siRNA sense strand
ggaucgauuugaauaucuu

SEQ ID NO: 1132282 - RNA, 19 nt, Homo sapiens
  misc_RNA (1)...(19): siRNA sense strand
cccaguaccugcucucaga

SEQ ID NO: 1132283 - RNA, 19 nt, Homo sapiens
  misc_RNA (1)...(19): siRNA sense strand
gcaucucaaagacaaauuu

SEQ ID NO: 1132284 - RNA, 19 nt, Homo sapiens
  misc_RNA (1)...(19): siRNA sense strand
ugacgacugugccaucugu

SEQ ID NO: 1132285 - RNA, 19 nt, Homo sapiens
  misc_RNA (1)...(19): siRNA sense strand
uuacacagacuuugucaug

SEQ ID NO: 1132286 - RNA, 19 nt, Homo sapiens
  misc_RNA (1)...(19): siRNA sense strand
gaauucgucggcacaagaa

SEQ ID NO: 1132287 - RNA, 19 nt, Homo sapiens
  misc_RNA (1)...(19): siRNA sense strand
gaaacugcccuguggacau

SEQ ID NO: 1132288 - RNA, 19 nt, Homo sapiens
  misc_RNA (1)...(19): siRNA sense strand
ggcaacaucugguuaucca

SEQ ID NO: 1132289 - RNA, 19 nt, Homo sapiens
  misc_RNA (1)...(19): siRNA sense strand
gcucugcaaggaucgauuu

SEQ ID NO: 1132290 - RNA, 19 nt, Homo sapiens
  misc_RNA (1)...(19): siRNA sense strand
gaggccagguuugcaguug

SEQ ID NO: 1132291 - RNA, 19 nt, Homo sapiens
  misc_RNA (1)...(19): siRNA sense strand
ggacugcucaugugauuuu

SEQ ID NO: 1132292 - RNA, 19 nt, Homo sapiens
  misc_RNA (1)...(19): siRNA sense strand
aaacugcccuguggacauc

SEQ ID NO: 1132293 - RNA, 19 nt, Homo sapiens
  misc_RNA (1)...(19): siRNA sense strand
uugaauaucuuuccuucuc

SEQ ID NO: 1132294 - RNA, 19 nt, Homo sapiens
  misc_RNA (1)...(19): siRNA sense strand
gaggugcaacgucgaauuc

SEQ ID NO: 1132295 - RNA, 19 nt, Homo sapiens
  misc_RNA (1)...(19): siRNA sense strand
uuucauggcugcagagucu

SEQ ID NO: 1132296 - RNA, 19 nt, Homo sapiens
  misc_RNA (1)...(19): siRNA sense strand
gaaaggggacguaugucua

SEQ ID NO: 1132297 - RNA, 19 nt, Homo sapiens
  misc_RNA (1)...(19): siRNA sense strand
cguguggguucuaguaaau

SEQ ID NO: 1132298 - RNA, 19 nt, Homo sapiens
  misc_RNA (1)...(19): siRNA sense strand
gaaacauggaggccagguu

SEQ ID NO: 1132299 - RNA, 19 nt, Homo sapiens
  misc_RNA (1)...(19): siRNA sense strand
cgaauucgucggcacaaga

SEQ ID NO: 1132300 - RNA, 19 nt, Homo sapiens
  misc_RNA (1)...(19): siRNA sense strand
caaggaucgauuugaauau

SEQ ID NO: 1132301 - RNA, 19 nt, Homo sapiens
  misc_RNA (1)...(19): siRNA sense strand
gaacuaucuacgugugguu

SEQ ID NO: 1132302 - RNA, 19 nt, Homo sapiens
  misc_RNA (1)...(19): siRNA sense strand
aagcucauccaguguauug

SEQ ID NO: 1132303 - RNA, 19 nt, Homo sapiens
  misc_RNA (1)...(19): siRNA sense strand
gcacaccuuggcuuucaug

SEQ ID NO: 1132304 - RNA, 19 nt, Homo sapiens
  misc_RNA (1)...(19): siRNA sense strand
ggaccucaugcaccauauu

SEQ ID NO: 1132305 - RNA, 19 nt, Homo sapiens
  misc_RNA (1)...(19): siRNA sense strand
cuaagcucauccaguguau

SEQ ID NO: 1132306 - RNA, 19 nt, Homo sapiens
  misc_RNA (1)...(19): siRNA sense strand
aaggaucgauuugaauauc

SEQ ID NO: 1132307 - RNA, 19 nt, Homo sapiens
  misc_RNA (1)...(19): siRNA sense strand
caucuuuggugugcugaau

SEQ ID NO: 1132308 - RNA, 19 nt, Homo sapiens
  misc_RNA (1)...(19): siRNA sense strand
gaccucaugcaccauauuc

SEQ ID NO: 1132309 - RNA, 19 nt, Homo sapiens
  misc_RNA (1)...(19): siRNA sense strand
gcucauccaguguauugug

SEQ ID NO: 1132310 - RNA, 19 nt, Homo sapiens
  misc_RNA (1)...(19): siRNA sense strand
gcucucagacagccucuuc

SEQ ID NO: 1132311 - RNA, 19 nt, Homo sapiens
  misc_RNA (1)...(19): siRNA sense strand
cagcugcguuaccuguuuc

SEQ ID NO: 1132312 - RNA, 19 nt, Homo sapiens
  misc_RNA (1)...(19): siRNA sense strand
ucguguggguucuaguaaa

SEQ ID NO: 1132313 - RNA, 19 nt, Homo sapiens
  misc_RNA (1)...(19): siRNA sense strand
ccauauucacauguuguua

SEQ ID NO: 1132314 - RNA, 19 nt, Homo sapiens
  misc_RNA (1)...(19): siRNA sense strand
uaaauaccgcuugcugugu

SEQ ID NO: 1132315 - RNA, 19 nt, Homo sapiens
  misc_RNA (1)...(19): siRNA sense strand
cauguggugccucugguuu

SEQ ID NO: 1132316 - RNA, 19 nt, Homo sapiens
  misc_RNA (1)...(19): siRNA sense strand
gagcuggcugucaacaaug

SEQ ID NO: 1132317 - RNA, 19 nt, Homo sapiens
  misc_RNA (1)...(19): siRNA sense strand
cggcuacacccacggaaug

SEQ ID NO: 1132318 - RNA, 19 nt, Homo sapiens
  misc_RNA (1)...(19): siRNA sense strand
guugguggcuaagcucauc

SEQ ID NO: 1132319 - RNA, 19 nt, Homo sapiens
  misc_RNA (1)...(19): siRNA sense strand
aauaccgcuugcuguguuu

SEQ ID NO: 1132320 - RNA, 19 nt, Homo sapiens
  misc_RNA (1)...(19): siRNA sense strand
ggaggccagguuugcaguu

SEQ ID NO: 1132321 - RNA, 19 nt, Homo sapiens
  misc_RNA (1)...(19): siRNA sense strand
uaagaaagcucagccgaaa

SEQ ID NO: 1132322 - RNA, 19 nt, Homo sapiens
  misc_RNA (1)...(19): siRNA sense strand
gcacagaggguuuggcuuu

SEQ ID NO: 1132323 - RNA, 19 nt, Homo sapiens
  misc_RNA (1)...(19): siRNA sense strand
uggcagaccucaccagaua

SEQ ID NO: 1132324 - RNA, 19 nt, Homo sapiens
  misc_RNA (1)...(19): siRNA sense strand
ggagaaagucugugagauu

SEQ ID NO: 1132325 - RNA, 19 nt, Homo sapiens
  misc_RNA (1)...(19): siRNA sense strand
gagaaagucugugagauuc

SEQ ID NO: 1132326 - RNA, 19 nt, Homo sapiens
  misc_RNA (1)...(19): siRNA sense strand
gaaauuagagaauguaugg

SEQ ID NO: 1132327 - RNA, 19 nt, Homo sapiens
  misc_RNA (1)...(19): siRNA sense strand
gcaaugcugauguuugaua

SEQ ID NO: 1132328 - RNA, 19 nt, Homo sapiens
  misc_RNA (1)...(19): siRNA sense strand
uggaagauguaaagcaaua

SEQ ID NO: 1132329 - RNA, 19 nt, Homo sapiens
  misc_RNA (1)...(19): siRNA sense strand
caaugcugauguuugauaa

SEQ ID NO: 1132330 - RNA, 19 nt, Homo sapiens
  misc_RNA (1)...(19): siRNA sense strand
gagaauguauggucaugag

SEQ ID NO: 1132331 - RNA, 19 nt, Homo sapiens
  misc_RNA (1)...(19): siRNA sense strand
gaaagucugugagauucau

SEQ ID NO: 1132332 - RNA, 19 nt, Homo sapiens
  misc_RNA (1)...(19): siRNA sense strand
ugagagaucccacuacgaa

SEQ ID NO: 1132333 - RNA, 19 nt, Homo sapiens
  misc_RNA (1)...(19): siRNA sense strand
gaagaugcaaugcugaugu

SEQ ID NO: 1132334 - RNA, 19 nt, Homo sapiens
  misc_RNA (1)...(19): siRNA sense strand
cagauagccuuagagacua

SEQ ID NO: 1132335 - RNA, 19 nt, Homo sapiens
  misc_RNA (1)...(19): siRNA sense strand
ggagaaauuagagaaugua

SEQ ID NO: 1132336 - RNA, 19 nt, Homo sapiens
  misc_RNA (1)...(19): siRNA sense strand
ccagauagccuuagagacu

SEQ ID NO: 1132337 - RNA, 19 nt, Homo sapiens
  misc_RNA (1)...(19): siRNA sense strand
caacaggcacagaggguuu

SEQ ID NO: 1132338 - RNA, 19 nt, Homo sapiens
  misc_RNA (1)...(19): siRNA sense strand
cagcaaguguagauaaagu

SEQ ID NO: 1132339 - RNA, 19 nt, Homo sapiens
  misc_RNA (1)...(19): siRNA sense strand
gcaaguguagauaaaguau

SEQ ID NO: 1132340 - RNA, 19 nt, Homo sapiens
  misc_RNA (1)...(19): siRNA sense strand
gaacacaguaguggaagau

SEQ ID NO: 1132341 - RNA, 19 nt, Homo sapiens
  misc_RNA (1)...(19): siRNA sense strand
augcaaugcugauguuuga

SEQ ID NO: 1132342 - RNA, 19 nt, Homo sapiens
  misc_RNA (1)...(19): siRNA sense strand
cggauuugcuccaagcuau

SEQ ID NO: 1132343 - RNA, 19 nt, Homo sapiens
  misc_RNA (1)...(19): siRNA sense strand
gguuuggcuuugucacuuu

SEQ ID NO: 1132344 - RNA, 19 nt, Homo sapiens
  misc_RNA (1)...(19): siRNA sense strand
agaaagcucagccgaaaga

SEQ ID NO: 1132345 - RNA, 19 nt, Homo sapiens
  misc_RNA (1)...(19): siRNA sense strand
acacaguaguggaagaugu

SEQ ID NO: 1132346 - RNA, 19 nt, Homo sapiens
  misc_RNA (1)...(19): siRNA sense strand
augaagauguuguggagaa

SEQ ID NO: 1132347 - RNA, 19 nt, Homo sapiens
  misc_RNA (1)...(19): siRNA sense strand
aagaugcaaugcugauguu

SEQ ID NO: 1132348 - RNA, 19 nt, Homo sapiens
  misc_RNA (1)...(19): siRNA sense strand
cccagcaaguguagauaaa

SEQ ID NO: 1132349 - RNA, 19 nt, Homo sapiens
  misc_RNA (1)...(19): siRNA sense strand
gaugcaaugcugauguuug

SEQ ID NO: 1132350 - RNA, 19 nt, Homo sapiens
  misc_RNA (1)...(19): siRNA sense strand
caagguggaagaugcaaug

SEQ ID NO: 1132351 - RNA, 19 nt, Homo sapiens
  misc_RNA (1)...(19): siRNA sense strand
cgaacacaguaguggaaga

SEQ ID NO: 1132352 - RNA, 19 nt, Homo sapiens
  misc_RNA (1)...(19): siRNA sense strand
ccaagauggucacaagaac

SEQ ID NO: 1132353 - RNA, 19 nt, Homo sapiens
  misc_RNA (1)...(19): siRNA sense strand
ugaagauguuguggagaaa

SEQ ID NO: 1132354 - RNA, 19 nt, Homo sapiens
  misc_RNA (1)...(19): siRNA sense strand
gcaauauuucgagcaguuu

SEQ ID NO: 1132355 - RNA, 19 nt, Homo sapiens
  misc_RNA (1)...(19): siRNA sense strand
aguggaagauguaaagcaa

SEQ ID NO: 1132356 - RNA, 19 nt, Homo sapiens
  misc_RNA (1)...(19): siRNA sense strand
ggucacaagaacaaagaaa

SEQ ID NO: 1132357 - RNA, 19 nt, Homo sapiens
  misc_RNA (1)...(19): siRNA sense strand
uggagaaauuagagaaugu

SEQ ID NO: 1132358 - RNA, 19 nt, Homo sapiens
  misc_RNA (1)...(19): siRNA sense strand
gccgaaagaagucauguuc

SEQ ID NO: 1132359 - RNA, 19 nt, Homo sapiens
  misc_RNA (1)...(19): siRNA sense strand
ggguuuggcuuugucacuu

SEQ ID NO: 1132360 - RNA, 19 nt, Homo sapiens
  misc_RNA (1)...(19): siRNA sense strand
cacaguaguggaagaugua

SEQ ID NO: 1132361 - RNA, 19 nt, Homo sapiens
  misc_RNA (1)...(19): siRNA sense strand
caagcuauggcuaucaguu

SEQ ID NO: 1132362 - RNA, 19 nt, Homo sapiens
  misc_RNA (1)...(19): siRNA sense strand
gcuccaagcuauggcuauc

SEQ ID NO: 1132363 - RNA, 19 nt, Homo sapiens
  misc_RNA (1)...(19): siRNA sense strand
ccaacuucguggcgaccua

SEQ ID NO: 1132364 - RNA, 19 nt, Homo sapiens
  misc_RNA (1)...(19): siRNA sense strand
gagagaucccacuacgaaa

SEQ ID NO: 1132365 - RNA, 19 nt, Homo sapiens
  misc_RNA (1)...(19): siRNA sense strand
uagagaauguauggucaug

SEQ ID NO: 1132366 - RNA, 19 nt, Homo sapiens
  misc_RNA (1)...(19): siRNA sense strand
gagcgcaacccaagauggu

SEQ ID NO: 1132367 - RNA, 19 nt, Homo sapiens
  misc_RNA (1)...(19): siRNA sense strand
agcaauauuucgagcaguu

SEQ ID NO: 1132368 - RNA, 19 nt, Homo sapiens
  misc_RNA (1)...(19): siRNA sense strand
caagauggucacaagaaca

SEQ ID NO: 1132369 - RNA, 19 nt, Homo sapiens
  misc_RNA (1)...(19): siRNA sense strand
aauguauggucaugagaga

SEQ ID NO: 1132370 - RNA, 19 nt, Homo sapiens
  misc_RNA (1)...(19): siRNA sense strand
caccagauagccuuagaga

SEQ ID NO: 1132371 - RNA, 19 nt, Homo sapiens
  misc_RNA (1)...(19): siRNA sense strand
cacagaggguuuggcuuug

SEQ ID NO: 1132372 - RNA, 19 nt, Homo sapiens
  misc_RNA (1)...(19): siRNA sense strand
ggaagaugcaaugcugaug

SEQ ID NO: 1132373 - RNA, 19 nt, Homo sapiens
  misc_RNA (1)...(19): siRNA sense strand
cccaagauggucacaagaa

SEQ ID NO: 1132374 - RNA, 19 nt, Homo sapiens
  misc_RNA (1)...(19): siRNA sense strand
gguagaauguaagaaagcu

SEQ ID NO: 1132375 - RNA, 19 nt, Homo sapiens
  misc_RNA (1)...(19): siRNA sense strand
ucugugagauucauuucca

SEQ ID NO: 1132376 - RNA, 19 nt, Homo sapiens
  misc_RNA (1)...(19): siRNA sense strand
guggagaaagucugugaga

SEQ ID NO: 1132377 - RNA, 19 nt, Homo sapiens
  misc_RNA (1)...(19): siRNA sense strand
cggguuaucugcgaacaca

SEQ ID NO: 1132378 - RNA, 19 nt, Homo sapiens
  misc_RNA (1)...(19): siRNA sense strand
ggaagauguaaagcaauau

SEQ ID NO: 1132379 - RNA, 19 nt, Homo sapiens
  misc_RNA (1)...(19): siRNA sense strand
acagaggguuuggcuuugu

SEQ ID NO: 1132380 - RNA, 19 nt, Homo sapiens
  misc_RNA (1)...(19): siRNA sense strand
uuggagaaauuagagaaug

SEQ ID NO: 1132381 - RNA, 19 nt, Homo sapiens
  misc_RNA (1)...(19): siRNA sense strand
gcagacccagcaaguguag

SEQ ID NO: 1132382 - RNA, 19 nt, Homo sapiens
  misc_RNA (1)...(19): siRNA sense strand
uagauuccaagacgauuga

SEQ ID NO: 1132383 - RNA, 19 nt, Homo sapiens
  misc_RNA (1)...(19): siRNA sense strand
aagcucagccgaaagaagu

SEQ ID NO: 1132384 - RNA, 19 nt, Homo sapiens
  misc_RNA (1)...(19): siRNA sense strand
gauguaaagcaauauuucg

SEQ ID NO: 1132385 - RNA, 19 nt, Homo sapiens
  misc_RNA (1)...(19): siRNA sense strand
aagauguuguggagaaagu

SEQ ID NO: 1132386 - RNA, 19 nt, Homo sapiens
  misc_RNA (1)...(19): siRNA sense strand
gaaagcucagccgaaagaa

SEQ ID NO: 1132387 - RNA, 19 nt, Homo sapiens
  misc_RNA (1)...(19): siRNA sense strand
aacccaagauggucacaag

SEQ ID NO: 1132388 - RNA, 19 nt, Homo sapiens
  misc_RNA (1)...(19): siRNA sense strand
gaagauguuguggagaaag

SEQ ID NO: 1132389 - RNA, 19 nt, Homo sapiens
  misc_RNA (1)...(19): siRNA sense strand
caauauuucgagcaguuug

SEQ ID NO: 1132390 - RNA, 19 nt, Homo sapiens
  misc_RNA (1)...(19): siRNA sense strand
ucgcagacccagcaagugu

SEQ ID NO: 1132391 - RNA, 19 nt, Homo sapiens
  misc_RNA (1)...(19): siRNA sense strand
aagauggucacaagaacaa

SEQ ID NO: 1132392 - RNA, 19 nt, Homo sapiens
  misc_RNA (1)...(19): siRNA sense strand
gcaagguggaagaugcaau

SEQ ID NO: 1132393 - RNA, 19 nt, Homo sapiens
  misc_RNA (1)...(19): siRNA sense strand
uggagaaagucugugagau

SEQ ID NO: 1132394 - RNA, 19 nt, Homo sapiens
  misc_RNA (1)...(19): siRNA sense strand
cagaggguuuggcuuuguc

SEQ ID NO: 1132395 - RNA, 19 nt, Homo sapiens
  misc_RNA (1)...(19): siRNA sense strand
uaagaaagcucagccgaaa

SEQ ID NO: 1132396 - RNA, 19 nt, Homo sapiens
  misc_RNA (1)...(19): siRNA sense strand
gcacagaggguuuggcuuu

SEQ ID NO: 1132397 - RNA, 19 nt, Homo sapiens
  misc_RNA (1)...(19): siRNA sense strand
uggcagaccucaccagaua

SEQ ID NO: 1132398 - RNA, 19 nt, Homo sapiens
  misc_RNA (1)...(19): siRNA sense strand
ggagaaagucugugagauu

SEQ ID NO: 1132399 - RNA, 19 nt, Homo sapiens
  misc_RNA (1)...(19): siRNA sense strand
gagaaagucugugagauuc

SEQ ID NO: 1132400 - RNA, 19 nt, Homo sapiens
  misc_RNA (1)...(19): siRNA sense strand
gaaauuagagaauguaugg

SEQ ID NO: 1132401 - RNA, 19 nt, Homo sapiens
  misc_RNA (1)...(19): siRNA sense strand
gcaaugcugauguuugaua

SEQ ID NO: 1132402 - RNA, 19 nt, Homo sapiens
  misc_RNA (1)...(19): siRNA sense strand
uggaagauguaaagcaaua

SEQ ID NO: 1132403 - RNA, 19 nt, Homo sapiens
  misc_RNA (1)...(19): siRNA sense strand
caaugcugauguuugauaa

SEQ ID NO: 1132404 - RNA, 19 nt, Homo sapiens
  misc_RNA (1)...(19): siRNA sense strand
gagaauguauggucaugag

SEQ ID NO: 1132405 - RNA, 19 nt, Homo sapiens
  misc_RNA (1)...(19): siRNA sense strand
gaaagucugugagauucau

SEQ ID NO: 1132406 - RNA, 19 nt, Homo sapiens
  misc_RNA (1)...(19): siRNA sense strand
ugagagaucccacuacgaa

SEQ ID NO: 1132407 - RNA, 19 nt, Homo sapiens
  misc_RNA (1)...(19): siRNA sense strand
gaagaugcaaugcugaugu

SEQ ID NO: 1132408 - RNA, 19 nt, Homo sapiens
  misc_RNA (1)...(19): siRNA sense strand
cagauagccuuagagacua

SEQ ID NO: 1132409 - RNA, 19 nt, Homo sapiens
  misc_RNA (1)...(19): siRNA sense strand
ggagaaauuagagaaugua

SEQ ID NO: 1132410 - RNA, 19 nt, Homo sapiens
  misc_RNA (1)...(19): siRNA sense strand
ccagauagccuuagagacu

SEQ ID NO: 1132411 - RNA, 19 nt, Homo sapiens
  misc_RNA (1)...(19): siRNA sense strand
caacaggcacagaggguuu

SEQ ID NO: 1132412 - RNA, 19 nt, Homo sapiens
  misc_RNA (1)...(19): siRNA sense strand
cagcaaguguagauaaagu

SEQ ID NO: 1132413 - RNA, 19 nt, Homo sapiens
  misc_RNA (1)...(19): siRNA sense strand
gcaaguguagauaaaguau

SEQ ID NO: 1132414 - RNA, 19 nt, Homo sapiens
  misc_RNA (1)...(19): siRNA sense strand
gaacacaguaguggaagau

SEQ ID NO: 1132415 - RNA, 19 nt, Homo sapiens
  misc_RNA (1)...(19): siRNA sense strand
augcaaugcugauguuuga

SEQ ID NO: 1132416 - RNA, 19 nt, Homo sapiens
  misc_RNA (1)...(19): siRNA sense strand
cggauuugcuccaagcuau

SEQ ID NO: 1132417 - RNA, 19 nt, Homo sapiens
  misc_RNA (1)...(19): siRNA sense strand
gguuuggcuuugucacuuu

SEQ ID NO: 1132418 - RNA, 19 nt, Homo sapiens
  misc_RNA (1)...(19): siRNA sense strand
agaaagcucagccgaaaga

SEQ ID NO: 1132419 - RNA, 19 nt, Homo sapiens
  misc_RNA (1)...(19): siRNA sense strand
acacaguaguggaagaugu

SEQ ID NO: 1132420 - RNA, 19 nt, Homo sapiens
  misc_RNA (1)...(19): siRNA sense strand
augaagauguuguggagaa

SEQ ID NO: 1132421 - RNA, 19 nt, Homo sapiens
  misc_RNA (1)...(19): siRNA sense strand
aagaugcaaugcugauguu

SEQ ID NO: 1132422 - RNA, 19 nt, Homo sapiens
  misc_RNA (1)...(19): siRNA sense strand
cccagcaaguguagauaaa

SEQ ID NO: 1132423 - RNA, 19 nt, Homo sapiens
  misc_RNA (1)...(19): siRNA sense strand
gaugcaaugcugauguuug

SEQ ID NO: 1132424 - RNA, 19 nt, Homo sapiens
  misc_RNA (1)...(19): siRNA sense strand
caagguggaagaugcaaug

SEQ ID NO: 1132425 - RNA, 19 nt, Homo sapiens
  misc_RNA (1)...(19): siRNA sense strand
cgaacacaguaguggaaga

SEQ ID NO: 1132426 - RNA, 19 nt, Homo sapiens
  misc_RNA (1)...(19): siRNA sense strand
ccaagauggucacaagaac

SEQ ID NO: 1132427 - RNA, 19 nt, Homo sapiens
  misc_RNA (1)...(19): siRNA sense strand
ugaagauguuguggagaaa

SEQ ID NO: 1132428 - RNA, 19 nt, Homo sapiens
  misc_RNA (1)...(19): siRNA sense strand
gcaauauuucgagcaguuu

SEQ ID NO: 1132429 - RNA, 19 nt, Homo sapiens
  misc_RNA (1)...(19): siRNA sense strand
aguggaagauguaaagcaa

SEQ ID NO: 1132430 - RNA, 19 nt, Homo sapiens
  misc_RNA (1)...(19): siRNA sense strand
ggucacaagaacaaagaaa

SEQ ID NO: 1132431 - RNA, 19 nt, Homo sapiens
  misc_RNA (1)...(19): siRNA sense strand
uggagaaauuagagaaugu

SEQ ID NO: 1132432 - RNA, 19 nt, Homo sapiens
  misc_RNA (1)...(19): siRNA sense strand
gccgaaagaagucauguuc

SEQ ID NO: 1132433 - RNA, 19 nt, Homo sapiens
  misc_RNA (1)...(19): siRNA sense strand
ggguuuggcuuugucacuu

SEQ ID NO: 1132434 - RNA, 19 nt, Homo sapiens
  misc_RNA (1)...(19): siRNA sense strand
cacaguaguggaagaugua

SEQ ID NO: 1132435 - RNA, 19 nt, Homo sapiens
  misc_RNA (1)...(19): siRNA sense strand
caagcuauggcuaucaguu

SEQ ID NO: 1132436 - RNA, 19 nt, Homo sapiens
  misc_RNA (1)...(19): siRNA sense strand
gcuccaagcuauggcuauc

SEQ ID NO: 1132437 - RNA, 19 nt, Homo sapiens
  misc_RNA (1)...(19): siRNA sense strand
ccaacuucguggcgaccua

SEQ ID NO: 1132438 - RNA, 19 nt, Homo sapiens
  misc_RNA (1)...(19): siRNA sense strand
gagagaucccacuacgaaa

SEQ ID NO: 1132439 - RNA, 19 nt, Homo sapiens
  misc_RNA (1)...(19): siRNA sense strand
uagagaauguauggucaug

SEQ ID NO: 1132440 - RNA, 19 nt, Homo sapiens
  misc_RNA (1)...(19): siRNA sense strand
gagcgcaacccaagauggu

SEQ ID NO: 1132441 - RNA, 19 nt, Homo sapiens
  misc_RNA (1)...(19): siRNA sense strand
agcaauauuucgagcaguu

SEQ ID NO: 1132442 - RNA, 19 nt, Homo sapiens
  misc_RNA (1)...(19): siRNA sense strand
caagauggucacaagaaca

SEQ ID NO: 1132443 - RNA, 19 nt, Homo sapiens
  misc_RNA (1)...(19): siRNA sense strand
aauguauggucaugagaga

SEQ ID NO: 1132444 - RNA, 19 nt, Homo sapiens
  misc_RNA (1)...(19): siRNA sense strand
caccagauagccuuagaga

SEQ ID NO: 1132445 - RNA, 19 nt, Homo sapiens
  misc_RNA (1)...(19): siRNA sense strand
cacagaggguuuggcuuug

SEQ ID NO: 1132446 - RNA, 19 nt, Homo sapiens
  misc_RNA (1)...(19): siRNA sense strand
ggaagaugcaaugcugaug

SEQ ID NO: 1132447 - RNA, 19 nt, Homo sapiens
  misc_RNA (1)...(19): siRNA sense strand
cccaagauggucacaagaa

SEQ ID NO: 1132448 - RNA, 19 nt, Homo sapiens
  misc_RNA (1)...(19): siRNA sense strand
gguagaauguaagaaagcu

SEQ ID NO: 1132449 - RNA, 19 nt, Homo sapiens
  misc_RNA (1)...(19): siRNA sense strand
ucugugagauucauuucca

SEQ ID NO: 1132450 - RNA, 19 nt, Homo sapiens
  misc_RNA (1)...(19): siRNA sense strand
guggagaaagucugugaga

SEQ ID NO: 1132451 - RNA, 19 nt, Homo sapiens
  misc_RNA (1)...(19): siRNA sense strand
cggguuaucugcgaacaca

SEQ ID NO: 1132452 - RNA, 19 nt, Homo sapiens
  misc_RNA (1)...(19): siRNA sense strand
ggaagauguaaagcaauau

SEQ ID NO: 1132453 - RNA, 19 nt, Homo sapiens
  misc_RNA (1)...(19): siRNA sense strand
acagaggguuuggcuuugu

SEQ ID NO: 1132454 - RNA, 19 nt, Homo sapiens
  misc_RNA (1)...(19): siRNA sense strand
uuggagaaauuagagaaug

SEQ ID NO: 1132455 - RNA, 19 nt, Homo sapiens
  misc_RNA (1)...(19): siRNA sense strand
gcagacccagcaaguguag

SEQ ID NO: 1132456 - RNA, 19 nt, Homo sapiens
  misc_RNA (1)...(19): siRNA sense strand
uagauuccaagacgauuga

SEQ ID NO: 1132457 - RNA, 19 nt, Homo sapiens
  misc_RNA (1)...(19): siRNA sense strand
aagcucagccgaaagaagu

SEQ ID NO: 1132458 - RNA, 19 nt, Homo sapiens
  misc_RNA (1)...(19): siRNA sense strand
gauguaaagcaauauuucg

SEQ ID NO: 1132459 - RNA, 19 nt, Homo sapiens
  misc_RNA (1)...(19): siRNA sense strand
aagauguuguggagaaagu

SEQ ID NO: 1132460 - RNA, 19 nt, Homo sapiens
  misc_RNA (1)...(19): siRNA sense strand
gaaagcucagccgaaagaa

SEQ ID NO: 1132461 - RNA, 19 nt, Homo sapiens
  misc_RNA (1)...(19): siRNA sense strand
aacccaagauggucacaag

SEQ ID NO: 1132462 - RNA, 19 nt, Homo sapiens
  misc_RNA (1)...(19): siRNA sense strand
gaagauguuguggagaaag

SEQ ID NO: 1132463 - RNA, 19 nt, Homo sapiens
  misc_RNA (1)...(19): siRNA sense strand
caauauuucgagcaguuug

SEQ ID NO: 1132464 - RNA, 19 nt, Homo sapiens
  misc_RNA (1)...(19): siRNA sense strand
ucgcagacccagcaagugu

SEQ ID NO: 1132465 - RNA, 19 nt, Homo sapiens
  misc_RNA (1)...(19): siRNA sense strand
aagauggucacaagaacaa

SEQ ID NO: 1132466 - RNA, 19 nt, Homo sapiens
  misc_RNA (1)...(19): siRNA sense strand
gcaagguggaagaugcaau

SEQ ID NO: 1132467 - RNA, 19 nt, Homo sapiens
  misc_RNA (1)...(19): siRNA sense strand
uggagaaagucugugagau

SEQ ID NO: 1132468 - RNA, 19 nt, Homo sapiens
  misc_RNA (1)...(19): siRNA sense strand
cagaggguuuggcuuuguc

SEQ ID NO: 1132469 - RNA, 19 nt, Homo sapiens
  misc_RNA (1)...(19): siRNA sense strand
gcauugaacuuuacuuuga

SEQ ID NO: 1132470 - RNA, 19 nt, Homo sapiens
  misc_RNA (1)...(19): siRNA sense strand
gacagugcauugaacuuua

SEQ ID NO: 1132471 - RNA, 19 nt, Homo sapiens
  misc_RNA (1)...(19): siRNA sense strand
gcagagggagguaucuuua

SEQ ID NO: 1132472 - RNA, 19 nt, Homo sapiens
  misc_RNA (1)...(19): siRNA sense strand
ggaaugcaucuacaucaua

SEQ ID NO: 1132473 - RNA, 19 nt, Homo sapiens
  misc_RNA (1)...(19): siRNA sense strand
gaaugcaucuacaucauag

SEQ ID NO: 1132474 - RNA, 19 nt, Homo sapiens
  misc_RNA (1)...(19): siRNA sense strand
ggaagauuucuauggauua

SEQ ID NO: 1132475 - RNA, 19 nt, Homo sapiens
  misc_RNA (1)...(19): siRNA sense strand
gcaaaccaccucagaaaca

SEQ ID NO: 1132476 - RNA, 19 nt, Homo sapiens
  misc_RNA (1)...(19): siRNA sense strand
cauagaagccgcuccaaga

SEQ ID NO: 1132477 - RNA, 19 nt, Homo sapiens
  misc_RNA (1)...(19): siRNA sense strand
gagugcaaauuugaucaua

SEQ ID NO: 1132478 - RNA, 19 nt, Homo sapiens
  misc_RNA (1)...(19): siRNA sense strand
gaugaaaaguacucuauug

SEQ ID NO: 1132479 - RNA, 19 nt, Homo sapiens
  misc_RNA (1)...(19): siRNA sense strand
ccaacuaucccagcaagua

SEQ ID NO: 1132480 - RNA, 19 nt, Homo sapiens
  misc_RNA (1)...(19): siRNA sense strand
auggagagcuggaaucuau

SEQ ID NO: 1132481 - RNA, 19 nt, Homo sapiens
  misc_RNA (1)...(19): siRNA sense strand
uggaagauuucuauggauu

SEQ ID NO: 1132482 - RNA, 19 nt, Homo sapiens
  misc_RNA (1)...(19): siRNA sense strand
gaaaaguacucuauugaac

SEQ ID NO: 1132483 - RNA, 19 nt, Homo sapiens
  misc_RNA (1)...(19): siRNA sense strand
gggaaugcaucuacaucau

SEQ ID NO: 1132484 - RNA, 19 nt, Homo sapiens
  misc_RNA (1)...(19): siRNA sense strand
aagcaaaccaccucagaaa

SEQ ID NO: 1132485 - RNA, 19 nt, Homo sapiens
  misc_RNA (1)...(19): siRNA sense strand
gaaaggaacagaaaagcaa

SEQ ID NO: 1132486 - RNA, 19 nt, Homo sapiens
  misc_RNA (1)...(19): siRNA sense strand
guuuaaucauccuccauuu

SEQ ID NO: 1132487 - RNA, 19 nt, Homo sapiens
  misc_RNA (1)...(19): siRNA sense strand
gugcauugaacuuuacuuu

SEQ ID NO: 1132488 - RNA, 19 nt, Homo sapiens
  misc_RNA (1)...(19): siRNA sense strand
caacuaucccagcaaguau

SEQ ID NO: 1132489 - RNA, 19 nt, Homo sapiens
  misc_RNA (1)...(19): siRNA sense strand
ccaagacagugcauugaac

SEQ ID NO: 1132490 - RNA, 19 nt, Homo sapiens
  misc_RNA (1)...(19): siRNA sense strand
gcuccaagacagugcauug

SEQ ID NO: 1132491 - RNA, 19 nt, Homo sapiens
  misc_RNA (1)...(19): siRNA sense strand
agacagugcauugaacuuu

SEQ ID NO: 1132492 - RNA, 19 nt, Homo sapiens
  misc_RNA (1)...(19): siRNA sense strand
aguggaagauuucuaugga

SEQ ID NO: 1132493 - RNA, 19 nt, Homo sapiens
  misc_RNA (1)...(19): siRNA sense strand
ggacguuucuguggacaac

SEQ ID NO: 1132494 - RNA, 19 nt, Homo sapiens
  misc_RNA (1)...(19): siRNA sense strand
uuaaucauccuccauuugu

SEQ ID NO: 1132495 - RNA, 19 nt, Homo sapiens
  misc_RNA (1)...(19): siRNA sense strand
ucagcucgauacaauuuca

SEQ ID NO: 1132496 - RNA, 19 nt, Homo sapiens
  misc_RNA (1)...(19): siRNA sense strand
gaccgggaaugcaucuaca

SEQ ID NO: 1132497 - RNA, 19 nt, Homo sapiens
  misc_RNA (1)...(19): siRNA sense strand
uguagcaaguuuaaucauc

SEQ ID NO: 1132498 - RNA, 19 nt, Homo sapiens
  misc_RNA (1)...(19): siRNA sense strand
uauugaaguucgagaugga

SEQ ID NO: 1132499 - RNA, 19 nt, Homo sapiens
  misc_RNA (1)...(19): siRNA sense strand
cagaaacacagaagucagu

SEQ ID NO: 1132500 - RNA, 19 nt, Homo sapiens
  misc_RNA (1)...(19): siRNA sense strand
uuucagcucgauacaauuu

SEQ ID NO: 1132501 - RNA, 19 nt, Homo sapiens
  misc_RNA (1)...(19): siRNA sense strand
aaagcaaaccaccucagaa

SEQ ID NO: 1132502 - RNA, 19 nt, Homo sapiens
  misc_RNA (1)...(19): siRNA sense strand
guggaagauuucuauggau

SEQ ID NO: 1132503 - RNA, 19 nt, Homo sapiens
  misc_RNA (1)...(19): siRNA sense strand
caaaauccaccugucauaa

SEQ ID NO: 1132504 - RNA, 19 nt, Homo sapiens
  misc_RNA (1)...(19): siRNA sense strand
ggagagcuggaaucuaugg

SEQ ID NO: 1132505 - RNA, 19 nt, Homo sapiens
  misc_RNA (1)...(19): siRNA sense strand
caaaccaccucagaaacac

SEQ ID NO: 1132506 - RNA, 19 nt, Homo sapiens
  misc_RNA (1)...(19): siRNA sense strand
ucagugcaguguggaacuu

SEQ ID NO: 1132507 - RNA, 19 nt, Homo sapiens
  misc_RNA (1)...(19): siRNA sense strand
aaauccaccugucauaaaa

SEQ ID NO: 1132508 - RNA, 19 nt, Homo sapiens
  misc_RNA (1)...(19): siRNA sense strand
caacaaaauccaccuguca

SEQ ID NO: 1132509 - RNA, 19 nt, Homo sapiens
  misc_RNA (1)...(19): siRNA sense strand
agauggaccuuuuggcuuu

SEQ ID NO: 1132510 - RNA, 19 nt, Homo sapiens
  misc_RNA (1)...(19): siRNA sense strand
caaccaagaaaggaacaga

SEQ ID NO: 1132511 - RNA, 19 nt, Homo sapiens
  misc_RNA (1)...(19): siRNA sense strand
cauauugaaguucgagaug

SEQ ID NO: 1132512 - RNA, 19 nt, Homo sapiens
  misc_RNA (1)...(19): siRNA sense strand
cuuuaccucucccaacuau

SEQ ID NO: 1132513 - RNA, 19 nt, Homo sapiens
  misc_RNA (1)...(19): siRNA sense strand
ggagugcaaauuugaucau

SEQ ID NO: 1132514 - RNA, 19 nt, Homo sapiens
  misc_RNA (1)...(19): siRNA sense strand
gauggagagcuggaaucua

SEQ ID NO: 1132515 - RNA, 19 nt, Homo sapiens
  misc_RNA (1)...(19): siRNA sense strand
ucuugggagugcaaauuug

SEQ ID NO: 1132516 - RNA, 19 nt, Homo sapiens
  misc_RNA (1)...(19): siRNA sense strand
gaaguucgagauggaccuu

SEQ ID NO: 1132517 - RNA, 19 nt, Homo sapiens
  misc_RNA (1)...(19): siRNA sense strand
caagacagugcauugaacu

SEQ ID NO: 1132518 - RNA, 19 nt, Homo sapiens
  misc_RNA (1)...(19): siRNA sense strand
uggcuuuucuccaauaauu

SEQ ID NO: 1132519 - RNA, 19 nt, Homo sapiens
  misc_RNA (1)...(19): siRNA sense strand
acagugcauugaacuuuac

SEQ ID NO: 1132520 - RNA, 19 nt, Homo sapiens
  misc_RNA (1)...(19): siRNA sense strand
ccucagaaacacagaaguc

SEQ ID NO: 1132521 - RNA, 19 nt, Homo sapiens
  misc_RNA (1)...(19): siRNA sense strand
uaaucauccuccauuuguc

SEQ ID NO: 1132522 - RNA, 19 nt, Homo sapiens
  misc_RNA (1)...(19): siRNA sense strand
gcauugaacuuuacuuuga

SEQ ID NO: 1132523 - RNA, 19 nt, Homo sapiens
  misc_RNA (1)...(19): siRNA sense strand
gacagugcauugaacuuua

SEQ ID NO: 1132524 - RNA, 19 nt, Homo sapiens
  misc_RNA (1)...(19): siRNA sense strand
gcagagggagguaucuuua

SEQ ID NO: 1132525 - RNA, 19 nt, Homo sapiens
  misc_RNA (1)...(19): siRNA sense strand
ggaaugcaucuacaucaua

SEQ ID NO: 1132526 - RNA, 19 nt, Homo sapiens
  misc_RNA (1)...(19): siRNA sense strand
gaaugcaucuacaucauag

SEQ ID NO: 1132527 - RNA, 19 nt, Homo sapiens
  misc_RNA (1)...(19): siRNA sense strand
ggaagauuucuauggauua

SEQ ID NO: 1132528 - RNA, 19 nt, Homo sapiens
  misc_RNA (1)...(19): siRNA sense strand
gcaaaccaccucagaaaca

SEQ ID NO: 1132529 - RNA, 19 nt, Homo sapiens
  misc_RNA (1)...(19): siRNA sense strand
cauagaagccgcuccaaga

SEQ ID NO: 1132530 - RNA, 19 nt, Homo sapiens
  misc_RNA (1)...(19): siRNA sense strand
gagugcaaauuugaucaua

SEQ ID NO: 1132531 - RNA, 19 nt, Homo sapiens
  misc_RNA (1)...(19): siRNA sense strand
gaugaaaaguacucuauug

SEQ ID NO: 1132532 - RNA, 19 nt, Homo sapiens
  misc_RNA (1)...(19): siRNA sense strand
ccaacuaucccagcaagua

SEQ ID NO: 1132533 - RNA, 19 nt, Homo sapiens
  misc_RNA (1)...(19): siRNA sense strand
auggagagcuggaaucuau

SEQ ID NO: 1132534 - RNA, 19 nt, Homo sapiens
  misc_RNA (1)...(19): siRNA sense strand
uggaagauuucuauggauu

SEQ ID NO: 1132535 - RNA, 19 nt, Homo sapiens
  misc_RNA (1)...(19): siRNA sense strand
gaaaaguacucuauugaac

SEQ ID NO: 1132536 - RNA, 19 nt, Homo sapiens
  misc_RNA (1)...(19): siRNA sense strand
gggaaugcaucuacaucau

SEQ ID NO: 1132537 - RNA, 19 nt, Homo sapiens
  misc_RNA (1)...(19): siRNA sense strand
aagcaaaccaccucagaaa

SEQ ID NO: 1132538 - RNA, 19 nt, Homo sapiens
  misc_RNA (1)...(19): siRNA sense strand
gaaaggaacagaaaagcaa

SEQ ID NO: 1132539 - RNA, 19 nt, Homo sapiens
  misc_RNA (1)...(19): siRNA sense strand
guuuaaucauccuccauuu

SEQ ID NO: 1132540 - RNA, 19 nt, Homo sapiens
  misc_RNA (1)...(19): siRNA sense strand
gugcauugaacuuuacuuu

SEQ ID NO: 1132541 - RNA, 19 nt, Homo sapiens
  misc_RNA (1)...(19): siRNA sense strand
caacuaucccagcaaguau

SEQ ID NO: 1132542 - RNA, 19 nt, Homo sapiens
  misc_RNA (1)...(19): siRNA sense strand
ccaagacagugcauugaac

SEQ ID NO: 1132543 - RNA, 19 nt, Homo sapiens
  misc_RNA (1)...(19): siRNA sense strand
gcuccaagacagugcauug

SEQ ID NO: 1132544 - RNA, 19 nt, Homo sapiens
  misc_RNA (1)...(19): siRNA sense strand
agacagugcauugaacuuu

SEQ ID NO: 1132545 - RNA, 19 nt, Homo sapiens
  misc_RNA (1)...(19): siRNA sense strand
aguggaagauuucuaugga

SEQ ID NO: 1132546 - RNA, 19 nt, Homo sapiens
  misc_RNA (1)...(19): siRNA sense strand
ggacguuucuguggacaac

SEQ ID NO: 1132547 - RNA, 19 nt, Homo sapiens
  misc_RNA (1)...(19): siRNA sense strand
uuaaucauccuccauuugu

SEQ ID NO: 1132548 - RNA, 19 nt, Homo sapiens
  misc_RNA (1)...(19): siRNA sense strand
ucagcucgauacaauuuca

SEQ ID NO: 1132549 - RNA, 19 nt, Homo sapiens
  misc_RNA (1)...(19): siRNA sense strand
gaccgggaaugcaucuaca

SEQ ID NO: 1132550 - RNA, 19 nt, Homo sapiens
  misc_RNA (1)...(19): siRNA sense strand
uguagcaaguuuaaucauc

SEQ ID NO: 1132551 - RNA, 19 nt, Homo sapiens
  misc_RNA (1)...(19): siRNA sense strand
uauugaaguucgagaugga

SEQ ID NO: 1132552 - RNA, 19 nt, Homo sapiens
  misc_RNA (1)...(19): siRNA sense strand
cagaaacacagaagucagu

SEQ ID NO: 1132553 - RNA, 19 nt, Homo sapiens
  misc_RNA (1)...(19): siRNA sense strand
uuucagcucgauacaauuu

SEQ ID NO: 1132554 - RNA, 19 nt, Homo sapiens
  misc_RNA (1)...(19): siRNA sense strand
aaagcaaaccaccucagaa

SEQ ID NO: 1132555 - RNA, 19 nt, Homo sapiens
  misc_RNA (1)...(19): siRNA sense strand
guggaagauuucuauggau

SEQ ID NO: 1132556 - RNA, 19 nt, Homo sapiens
  misc_RNA (1)...(19): siRNA sense strand
caaaauccaccugucauaa

SEQ ID NO: 1132557 - RNA, 19 nt, Homo sapiens
  misc_RNA (1)...(19): siRNA sense strand
ggagagcuggaaucuaugg

SEQ ID NO: 1132558 - RNA, 19 nt, Homo sapiens
  misc_RNA (1)...(19): siRNA sense strand
caaaccaccucagaaacac

SEQ ID NO: 1132559 - RNA, 19 nt, Homo sapiens
  misc_RNA (1)...(19): siRNA sense strand
ucagugcaguguggaacuu

SEQ ID NO: 1132560 - RNA, 19 nt, Homo sapiens
  misc_RNA (1)...(19): siRNA sense strand
aaauccaccugucauaaaa

SEQ ID NO: 1132561 - RNA, 19 nt, Homo sapiens
  misc_RNA (1)...(19): siRNA sense strand
caacaaaauccaccuguca

SEQ ID NO: 1132562 - RNA, 19 nt, Homo sapiens
  misc_RNA (1)...(19): siRNA sense strand
agauggaccuuuuggcuuu

SEQ ID NO: 1132563 - RNA, 19 nt, Homo sapiens
  misc_RNA (1)...(19): siRNA sense strand
caaccaagaaaggaacaga

SEQ ID NO: 1132564 - RNA, 19 nt, Homo sapiens
  misc_RNA (1)...(19): siRNA sense strand
cauauugaaguucgagaug

SEQ ID NO: 1132565 - RNA, 19 nt, Homo sapiens
  misc_RNA (1)...(19): siRNA sense strand
cuuuaccucucccaacuau

SEQ ID NO: 1132566 - RNA, 19 nt, Homo sapiens
  misc_RNA (1)...(19): siRNA sense strand
ggagugcaaauuugaucau

SEQ ID NO: 1132567 - RNA, 19 nt, Homo sapiens
  misc_RNA (1)...(19): siRNA sense strand
gauggagagcuggaaucua

SEQ ID NO: 1132568 - RNA, 19 nt, Homo sapiens
  misc_RNA (1)...(19): siRNA sense strand
ucuugggagugcaaauuug

SEQ ID NO: 1132569 - RNA, 19 nt, Homo sapiens
  misc_RNA (1)...(19): siRNA sense strand
gaaguucgagauggaccuu

SEQ ID NO: 1132570 - RNA, 19 nt, Homo sapiens
  misc_RNA (1)...(19): siRNA sense strand
caagacagugcauugaacu

SEQ ID NO: 1132571 - RNA, 19 nt, Homo sapiens
  misc_RNA (1)...(19): siRNA sense strand
uggcuuuucuccaauaauu

SEQ ID NO: 1132572 - RNA, 19 nt, Homo sapiens
  misc_RNA (1)...(19): siRNA sense strand
acagugcauugaacuuuac

SEQ ID NO: 1132573 - RNA, 19 nt, Homo sapiens
  misc_RNA (1)...(19): siRNA sense strand
ccucagaaacacagaaguc

SEQ ID NO: 1132574 - RNA, 19 nt, Homo sapiens
  misc_RNA (1)...(19): siRNA sense strand
uaaucauccuccauuuguc

SEQ ID NO: 1132575 - RNA, 19 nt, Homo sapiens
  misc_RNA (1)...(19): siRNA sense strand
gcauugaacuuuacuuuga

SEQ ID NO: 1132576 - RNA, 19 nt, Homo sapiens
  misc_RNA (1)...(19): siRNA sense strand
gacagugcauugaacuuua

SEQ ID NO: 1132577 - RNA, 19 nt, Homo sapiens
  misc_RNA (1)...(19): siRNA sense strand
gcagagggagguaucuuua

SEQ ID NO: 1132578 - RNA, 19 nt, Homo sapiens
  misc_RNA (1)...(19): siRNA sense strand
ggaaugcaucuacaucaua

SEQ ID NO: 1132579 - RNA, 19 nt, Homo sapiens
  misc_RNA (1)...(19): siRNA sense strand
gaaugcaucuacaucauag

SEQ ID NO: 1132580 - RNA, 19 nt, Homo sapiens
  misc_RNA (1)...(19): siRNA sense strand
ggaagauuucuauggauua

SEQ ID NO: 1132581 - RNA, 19 nt, Homo sapiens
  misc_RNA (1)...(19): siRNA sense strand
gcaaaccaccucagaaaca

SEQ ID NO: 1132582 - RNA, 19 nt, Homo sapiens
  misc_RNA (1)...(19): siRNA sense strand
cauagaagccgcuccaaga

SEQ ID NO: 1132583 - RNA, 19 nt, Homo sapiens
  misc_RNA (1)...(19): siRNA sense strand
gagugcaaauuugaucaua

SEQ ID NO: 1132584 - RNA, 19 nt, Homo sapiens
  misc_RNA (1)...(19): siRNA sense strand
gaugaaaaguacucuauug

SEQ ID NO: 1132585 - RNA, 19 nt, Homo sapiens
  misc_RNA (1)...(19): siRNA sense strand
ccaacuaucccagcaagua

SEQ ID NO: 1132586 - RNA, 19 nt, Homo sapiens
  misc_RNA (1)...(19): siRNA sense strand
auggagagcuggaaucuau

SEQ ID NO: 1132587 - RNA, 19 nt, Homo sapiens
  misc_RNA (1)...(19): siRNA sense strand
uggaagauuucuauggauu

SEQ ID NO: 1132588 - RNA, 19 nt, Homo sapiens
  misc_RNA (1)...(19): siRNA sense strand
gaaaaguacucuauugaac

SEQ ID NO: 1132589 - RNA, 19 nt, Homo sapiens
  misc_RNA (1)...(19): siRNA sense strand
gggaaugcaucuacaucau

SEQ ID NO: 1132590 - RNA, 19 nt, Homo sapiens
  misc_RNA (1)...(19): siRNA sense strand
aagcaaaccaccucagaaa

SEQ ID NO: 1132591 - RNA, 19 nt, Homo sapiens
  misc_RNA (1)...(19): siRNA sense strand
gaaaggaacagaaaagcaa

SEQ ID NO: 1132592 - RNA, 19 nt, Homo sapiens
  misc_RNA (1)...(19): siRNA sense strand
guuuaaucauccuccauuu

SEQ ID NO: 1132593 - RNA, 19 nt, Homo sapiens
  misc_RNA (1)...(19): siRNA sense strand
gugcauugaacuuuacuuu

SEQ ID NO: 1132594 - RNA, 19 nt, Homo sapiens
  misc_RNA (1)...(19): siRNA sense strand
caacuaucccagcaaguau

SEQ ID NO: 1132595 - RNA, 19 nt, Homo sapiens
  misc_RNA (1)...(19): siRNA sense strand
ccaagacagugcauugaac

SEQ ID NO: 1132596 - RNA, 19 nt, Homo sapiens
  misc_RNA (1)...(19): siRNA sense strand
gcuccaagacagugcauug

SEQ ID NO: 1132597 - RNA, 19 nt, Homo sapiens
  misc_RNA (1)...(19): siRNA sense strand
agacagugcauugaacuuu

SEQ ID NO: 1132598 - RNA, 19 nt, Homo sapiens
  misc_RNA (1)...(19): siRNA sense strand
aguggaagauuucuaugga

SEQ ID NO: 1132599 - RNA, 19 nt, Homo sapiens
  misc_RNA (1)...(19): siRNA sense strand
ggacguuucuguggacaac

SEQ ID NO: 1132600 - RNA, 19 nt, Homo sapiens
  misc_RNA (1)...(19): siRNA sense strand
uuaaucauccuccauuugu

SEQ ID NO: 1132601 - RNA, 19 nt, Homo sapiens
  misc_RNA (1)...(19): siRNA sense strand
ucagcucgauacaauuuca

SEQ ID NO: 1132602 - RNA, 19 nt, Homo sapiens
  misc_RNA (1)...(19): siRNA sense strand
gaccgggaaugcaucuaca

SEQ ID NO: 1132603 - RNA, 19 nt, Homo sapiens
  misc_RNA (1)...(19): siRNA sense strand
uguagcaaguuuaaucauc

SEQ ID NO: 1132604 - RNA, 19 nt, Homo sapiens
  misc_RNA (1)...(19): siRNA sense strand
uauugaaguucgagaugga

SEQ ID NO: 1132605 - RNA, 19 nt, Homo sapiens
  misc_RNA (1)...(19): siRNA sense strand
cagaaacacagaagucagu

SEQ ID NO: 1132606 - RNA, 19 nt, Homo sapiens
  misc_RNA (1)...(19): siRNA sense strand
uuucagcucgauacaauuu

SEQ ID NO: 1132607 - RNA, 19 nt, Homo sapiens
  misc_RNA (1)...(19): siRNA sense strand
aaagcaaaccaccucagaa

SEQ ID NO: 1132608 - RNA, 19 nt, Homo sapiens
  misc_RNA (1)...(19): siRNA sense strand
guggaagauuucuauggau

SEQ ID NO: 1132609 - RNA, 19 nt, Homo sapiens
  misc_RNA (1)...(19): siRNA sense strand
caaaauccaccugucauaa

SEQ ID NO: 1132610 - RNA, 19 nt, Homo sapiens
  misc_RNA (1)...(19): siRNA sense strand
ggagagcuggaaucuaugg

SEQ ID NO: 1132611 - RNA, 19 nt, Homo sapiens
  misc_RNA (1)...(19): siRNA sense strand
caaaccaccucagaaacac

SEQ ID NO: 1132612 - RNA, 19 nt, Homo sapiens
  misc_RNA (1)...(19): siRNA sense strand
ucagugcaguguggaacuu

SEQ ID NO: 1132613 - RNA, 19 nt, Homo sapiens
  misc_RNA (1)...(19): siRNA sense strand
aaauccaccugucauaaaa

SEQ ID NO: 1132614 - RNA, 19 nt, Homo sapiens
  misc_RNA (1)...(19): siRNA sense strand
caacaaaauccaccuguca

SEQ ID NO: 1132615 - RNA, 19 nt, Homo sapiens
  misc_RNA (1)...(19): siRNA sense strand
agauggaccuuuuggcuuu

SEQ ID NO: 1132616 - RNA, 19 nt, Homo sapiens
  misc_RNA (1)...(19): siRNA sense strand
caaccaagaaaggaacaga

SEQ ID NO: 1132617 - RNA, 19 nt, Homo sapiens
  misc_RNA (1)...(19): siRNA sense strand
cauauugaaguucgagaug

SEQ ID NO: 1132618 - RNA, 19 nt, Homo sapiens
  misc_RNA (1)...(19): siRNA sense strand
cuuuaccucucccaacuau

SEQ ID NO: 1132619 - RNA, 19 nt, Homo sapiens
  misc_RNA (1)...(19): siRNA sense strand
ggagugcaaauuugaucau

SEQ ID NO: 1132620 - RNA, 19 nt, Homo sapiens
  misc_RNA (1)...(19): siRNA sense strand
gauggagagcuggaaucua

SEQ ID NO: 1132621 - RNA, 19 nt, Homo sapiens
  misc_RNA (1)...(19): siRNA sense strand
ucuugggagugcaaauuug

SEQ ID NO: 1132622 - RNA, 19 nt, Homo sapiens
  misc_RNA (1)...(19): siRNA sense strand
gaaguucgagauggaccuu

SEQ ID NO: 1132623 - RNA, 19 nt, Homo sapiens
  misc_RNA (1)...(19): siRNA sense strand
caagacagugcauugaacu

SEQ ID NO: 1132624 - RNA, 19 nt, Homo sapiens
  misc_RNA (1)...(19): siRNA sense strand
uggcuuuucuccaauaauu

SEQ ID NO: 1132625 - RNA, 19 nt, Homo sapiens
  misc_RNA (1)...(19): siRNA sense strand
acagugcauugaacuuuac

SEQ ID NO: 1132626 - RNA, 19 nt, Homo sapiens
  misc_RNA (1)...(19): siRNA sense strand
ccucagaaacacagaaguc

SEQ ID NO: 1132627 - RNA, 19 nt, Homo sapiens
  misc_RNA (1)...(19): siRNA sense strand
uaaucauccuccauuuguc

SEQ ID NO: 1132628 - RNA, 19 nt, Homo sapiens
  misc_RNA (1)...(19): siRNA sense strand
ggagaagucccaucaauuu

SEQ ID NO: 1132629 - RNA, 19 nt, Homo sapiens
  misc_RNA (1)...(19): siRNA sense strand
ggaaaccacuacuacaaug

SEQ ID NO: 1132630 - RNA, 19 nt, Homo sapiens
  misc_RNA (1)...(19): siRNA sense strand
gaagagcggccacaagaaa

SEQ ID NO: 1132631 - RNA, 19 nt, Homo sapiens
  misc_RNA (1)...(19): siRNA sense strand
ucucugggcucuauuauga

SEQ ID NO: 1132632 - RNA, 19 nt, Homo sapiens
  misc_RNA (1)...(19): siRNA sense strand
gagaacaaccccaauauua

SEQ ID NO: 1132633 - RNA, 19 nt, Homo sapiens
  misc_RNA (1)...(19): siRNA sense strand
ggacaaaggacgccucuuc

SEQ ID NO: 1132634 - RNA, 19 nt, Homo sapiens
  misc_RNA (1)...(19): siRNA sense strand
gaugaagacuuuguugaau

SEQ ID NO: 1132635 - RNA, 19 nt, Homo sapiens
  misc_RNA (1)...(19): siRNA sense strand
ccagaaaugucuacuacug

SEQ ID NO: 1132636 - RNA, 19 nt, Homo sapiens
  misc_RNA (1)...(19): siRNA sense strand
cgacagugcuccaggacuu

SEQ ID NO: 1132637 - RNA, 19 nt, Homo sapiens
  misc_RNA (1)...(19): siRNA sense strand
acaaggacagggaguauua

SEQ ID NO: 1132638 - RNA, 19 nt, Homo sapiens
  misc_RNA (1)...(19): siRNA sense strand
gaacauggcggcugagaac

SEQ ID NO: 1132639 - RNA, 19 nt, Homo sapiens
  misc_RNA (1)...(19): siRNA sense strand
gaacaaccccaauauuaaa

SEQ ID NO: 1132640 - RNA, 19 nt, Homo sapiens
  misc_RNA (1)...(19): siRNA sense strand
ugaagacuuuguugaaugu

SEQ ID NO: 1132641 - RNA, 19 nt, Homo sapiens
  misc_RNA (1)...(19): siRNA sense strand
guggugggcuuauccucua

SEQ ID NO: 1132642 - RNA, 19 nt, Homo sapiens
  misc_RNA (1)...(19): siRNA sense strand
gcucuauuaugaugguuug

SEQ ID NO: 1132643 - RNA, 19 nt, Homo sapiens
  misc_RNA (1)...(19): siRNA sense strand
gcacgcucaugaaggagaa

SEQ ID NO: 1132644 - RNA, 19 nt, Homo sapiens
  misc_RNA (1)...(19): siRNA sense strand
caccagaaaugucuacuac

SEQ ID NO: 1132645 - RNA, 19 nt, Homo sapiens
  misc_RNA (1)...(19): siRNA sense strand
caaaggacgccucuuccaa

SEQ ID NO: 1132646 - RNA, 19 nt, Homo sapiens
  misc_RNA (1)...(19): siRNA sense strand
ggagagaaccccuguaaau

SEQ ID NO: 1132647 - RNA, 19 nt, Homo sapiens
  misc_RNA (1)...(19): siRNA sense strand
gcauucagccaacaucaga

SEQ ID NO: 1132648 - RNA, 19 nt, Homo sapiens
  misc_RNA (1)...(19): siRNA sense strand
gcaucuugauccuccugua

SEQ ID NO: 1132649 - RNA, 19 nt, Homo sapiens
  misc_RNA (1)...(19): siRNA sense strand
ccaacucucugggcucuau

SEQ ID NO: 1132650 - RNA, 19 nt, Homo sapiens
  misc_RNA (1)...(19): siRNA sense strand
ggaacuacaucagcaacuc

SEQ ID NO: 1132651 - RNA, 19 nt, Homo sapiens
  misc_RNA (1)...(19): siRNA sense strand
caacacagacgaccuccau

SEQ ID NO: 1132652 - RNA, 19 nt, Homo sapiens
  misc_RNA (1)...(19): siRNA sense strand
gcaguuaaccaucuucaac

SEQ ID NO: 1132653 - RNA, 19 nt, Homo sapiens
  misc_RNA (1)...(19): siRNA sense strand
ugaugaagacuuuguugaa

SEQ ID NO: 1132654 - RNA, 19 nt, Homo sapiens
  misc_RNA (1)...(19): siRNA sense strand
uaugaugguuugaaaguac

SEQ ID NO: 1132655 - RNA, 19 nt, Homo sapiens
  misc_RNA (1)...(19): siRNA sense strand
caaauagccauugguggaa

SEQ ID NO: 1132656 - RNA, 19 nt, Homo sapiens
  misc_RNA (1)...(19): siRNA sense strand
ucgaagagcggccacaaga

SEQ ID NO: 1132657 - RNA, 19 nt, Homo sapiens
  misc_RNA (1)...(19): siRNA sense strand
gaugaugaagacuuuguug

SEQ ID NO: 1132658 - RNA, 19 nt, Homo sapiens
  misc_RNA (1)...(19): siRNA sense strand
gcaacggcacgcucaugaa

SEQ ID NO: 1132659 - RNA, 19 nt, Homo sapiens
  misc_RNA (1)...(19): siRNA sense strand
aaauuggaguugucuucaa

SEQ ID NO: 1132660 - RNA, 19 nt, Homo sapiens
  misc_RNA (1)...(19): siRNA sense strand
cuacuacaauggcgacuac

SEQ ID NO: 1132661 - RNA, 19 nt, Homo sapiens
  misc_RNA (1)...(19): siRNA sense strand
gaaaugucuacuacuguca

SEQ ID NO: 1132662 - RNA, 19 nt, Homo sapiens
  misc_RNA (1)...(19): siRNA sense strand
aaauagccauugguggaaa

SEQ ID NO: 1132663 - RNA, 19 nt, Homo sapiens
  misc_RNA (1)...(19): siRNA sense strand
gaggagagaaccccuguaa

SEQ ID NO: 1132664 - RNA, 19 nt, Homo sapiens
  misc_RNA (1)...(19): siRNA sense strand
ccacaacccguaagaaucg

SEQ ID NO: 1132665 - RNA, 19 nt, Homo sapiens
  misc_RNA (1)...(19): siRNA sense strand
gaaaauuggaguugucuuc

SEQ ID NO: 1132666 - RNA, 19 nt, Homo sapiens
  misc_RNA (1)...(19): siRNA sense strand
gaaaaguggugggcuuauc

SEQ ID NO: 1132667 - RNA, 19 nt, Homo sapiens
  misc_RNA (1)...(19): siRNA sense strand
caacggcacgcucaugaag

SEQ ID NO: 1132668 - RNA, 19 nt, Homo sapiens
  misc_RNA (1)...(19): siRNA sense strand
augaagacuuuguugaaug

SEQ ID NO: 1132669 - RNA, 19 nt, Homo sapiens
  misc_RNA (1)...(19): siRNA sense strand
cgacuaccacaacccguaa

SEQ ID NO: 1132670 - RNA, 19 nt, Homo sapiens
  misc_RNA (1)...(19): siRNA sense strand
gaaaccacuacuacaaugg

SEQ ID NO: 1132671 - RNA, 19 nt, Homo sapiens
  misc_RNA (1)...(19): siRNA sense strand
caacacucaggcgcaaaua

SEQ ID NO: 1132672 - RNA, 19 nt, Homo sapiens
  misc_RNA (1)...(19): siRNA sense strand
ugacaucuccaucaaagag

SEQ ID NO: 1132673 - RNA, 19 nt, Homo sapiens
  misc_RNA (1)...(19): siRNA sense strand
uaaaugacggcaaauacca

SEQ ID NO: 1132674 - RNA, 19 nt, Homo sapiens
  misc_RNA (1)...(19): siRNA sense strand
aaacaaggacagggaguau

SEQ ID NO: 1132675 - RNA, 19 nt, Homo sapiens
  misc_RNA (1)...(19): siRNA sense strand
cuacuacugucauggaaac

SEQ ID NO: 1132676 - RNA, 19 nt, Homo sapiens
  misc_RNA (1)...(19): siRNA sense strand
ccaccagaaaugucuacua

SEQ ID NO: 1132677 - RNA, 19 nt, Homo sapiens
  misc_RNA (1)...(19): siRNA sense strand
uggagaagucccaucaauu

SEQ ID NO: 1132678 - RNA, 19 nt, Homo sapiens
  misc_RNA (1)...(19): siRNA sense strand
uaaccaucuucaacacuca

SEQ ID NO: 1132679 - RNA, 19 nt, Homo sapiens
  misc_RNA (1)...(19): siRNA sense strand
cgaagagcggccacaagaa

SEQ ID NO: 1132680 - RNA, 19 nt, Homo sapiens
  misc_RNA (1)...(19): siRNA sense strand
cuucaacauuggcacaguu

SEQ ID NO: 1132681 - RNA, 19 nt, Homo sapiens
  misc_RNA (1)...(19): siRNA sense strand
uuggagaagucccaucaau

SEQ ID NO: 1132682 - RNA, 19 nt, Homo sapiens
  misc_RNA (1)...(19): siRNA sense strand
uaccacaacccguaagaau

SEQ ID NO: 1132683 - RNA, 19 nt, Homo sapiens
  misc_RNA (1)...(19): siRNA sense strand
aagacuuuguugaauguga

SEQ ID NO: 1132684 - RNA, 19 nt, Homo sapiens
  misc_RNA (1)...(19): siRNA sense strand
cagcaccacugugaaggau

SEQ ID NO: 1132685 - RNA, 19 nt, Homo sapiens
  misc_RNA (1)...(19): siRNA sense strand
ucugggcucuauuaugaug

SEQ ID NO: 1132686 - RNA, 19 nt, Homo sapiens
  misc_RNA (1)...(19): siRNA sense strand
gcaacuccgcccagagcaa

SEQ ID NO: 1132687 - RNA, 19 nt, Homo sapiens
  misc_RNA (1)...(19): siRNA sense strand
gagaagucccaucaauuuu

SEQ ID NO: 1132688 - RNA, 19 nt, Homo sapiens
  misc_RNA (1)...(19): siRNA sense strand
agaacaaccccaauauuaa

SEQ ID NO: 1132689 - RNA, 19 nt, Homo sapiens
  misc_RNA (1)...(19): siRNA sense strand
cagaaaugucuacuacugu

SEQ ID NO: 1132690 - RNA, 19 nt, Homo sapiens
  misc_RNA (1)...(19): siRNA sense strand
ccuccagcuucacauagaa

SEQ ID NO: 1132691 - RNA, 19 nt, Homo sapiens
  misc_RNA (1)...(19): siRNA sense strand
gagagaaccccuguaaaug

SEQ ID NO: 1132692 - RNA, 19 nt, Homo sapiens
  misc_RNA (1)...(19): siRNA sense strand
gaagucccaucaauuuugg

SEQ ID NO: 1132693 - RNA, 19 nt, Homo sapiens
  misc_RNA (1)...(19): siRNA sense strand
acagggaguauuacgugua

SEQ ID NO: 1132694 - RNA, 19 nt, Homo sapiens
  misc_RNA (1)...(19): siRNA sense strand
gcugagaacaaccccaaua

SEQ ID NO: 1132695 - RNA, 19 nt, Homo sapiens
  misc_RNA (1)...(19): siRNA sense strand
guaaaugacggcaaauacc

SEQ ID NO: 1132696 - RNA, 19 nt, Homo sapiens
  misc_RNA (1)...(19): siRNA sense strand
acggcacgcucaugaagga

SEQ ID NO: 1132697 - RNA, 19 nt, Homo sapiens
  misc_RNA (1)...(19): siRNA sense strand
ggacgagacgcggaacuac

SEQ ID NO: 1132698 - RNA, 19 nt, Homo sapiens
  misc_RNA (1)...(19): siRNA sense strand
gaaugugagccgaguacag

SEQ ID NO: 1132699 - RNA, 19 nt, Homo sapiens
  misc_RNA (1)...(19): siRNA sense strand
ggcgcuacguacaucuuug

SEQ ID NO: 1132700 - RNA, 19 nt, Homo sapiens
  misc_RNA (1)...(19): siRNA sense strand
uggaaaccacuacuacaau

SEQ ID NO: 1132701 - RNA, 19 nt, Homo sapiens
  misc_RNA (1)...(19): siRNA sense strand
gcacaguugacaucuccau

SEQ ID NO: 1132702 - RNA, 19 nt, Homo sapiens
  misc_RNA (1)...(19): siRNA sense strand
agagaaccccuguaaauga

SEQ ID NO: 1132703 - RNA, 19 nt, Homo sapiens
  misc_RNA (1)...(19): siRNA sense strand
gguuggagaagucccauca

SEQ ID NO: 1132704 - RNA, 19 nt, Homo sapiens
  misc_RNA (1)...(19): siRNA sense strand
guuugaaaguacugaacau

SEQ ID NO: 1132705 - RNA, 19 nt, Homo sapiens
  misc_RNA (1)...(19): siRNA sense strand
cccuguaaaugacggcaaa

SEQ ID NO: 1132706 - RNA, 19 nt, Homo sapiens
  misc_RNA (1)...(19): siRNA sense strand
gacgagacgcggaacuaca

SEQ ID NO: 1132707 - RNA, 19 nt, Homo sapiens
  misc_RNA (1)...(19): siRNA sense strand
gauggucgucggcauugug

SEQ ID NO: 1132708 - RNA, 19 nt, Homo sapiens
  misc_RNA (1)...(19): siRNA sense strand
gggauggucgucggcauug

SEQ ID NO: 1132709 - RNA, 19 nt, Homo sapiens
  misc_RNA (1)...(19): siRNA sense strand
acaguugacaucuccauca

SEQ ID NO: 1132710 - RNA, 19 nt, Homo sapiens
  misc_RNA (1)...(19): siRNA sense strand
gugacuuccuccagcuuca

SEQ ID NO: 1132711 - RNA, 19 nt, Homo sapiens
  misc_RNA (1)...(19): siRNA sense strand
ggagaagucccaucaauuu

SEQ ID NO: 1132712 - RNA, 19 nt, Homo sapiens
  misc_RNA (1)...(19): siRNA sense strand
ggaaaccacuacuacaaug

SEQ ID NO: 1132713 - RNA, 19 nt, Homo sapiens
  misc_RNA (1)...(19): siRNA sense strand
gaagagcggccacaagaaa

SEQ ID NO: 1132714 - RNA, 19 nt, Homo sapiens
  misc_RNA (1)...(19): siRNA sense strand
ucucugggcucuauuauga

SEQ ID NO: 1132715 - RNA, 19 nt, Homo sapiens
  misc_RNA (1)...(19): siRNA sense strand
gagaacaaccccaauauua

SEQ ID NO: 1132716 - RNA, 19 nt, Homo sapiens
  misc_RNA (1)...(19): siRNA sense strand
ggacaaaggacgccucuuc

SEQ ID NO: 1132717 - RNA, 19 nt, Homo sapiens
  misc_RNA (1)...(19): siRNA sense strand
gaugaagacuuuguugaau

SEQ ID NO: 1132718 - RNA, 19 nt, Homo sapiens
  misc_RNA (1)...(19): siRNA sense strand
ccagaaaugucuacuacug

SEQ ID NO: 1132719 - RNA, 19 nt, Homo sapiens
  misc_RNA (1)...(19): siRNA sense strand
cgacagugcuccaggacuu

SEQ ID NO: 1132720 - RNA, 19 nt, Homo sapiens
  misc_RNA (1)...(19): siRNA sense strand
acaaggacagggaguauua

SEQ ID NO: 1132721 - RNA, 19 nt, Homo sapiens
  misc_RNA (1)...(19): siRNA sense strand
gaacauggcggcugagaac

SEQ ID NO: 1132722 - RNA, 19 nt, Homo sapiens
  misc_RNA (1)...(19): siRNA sense strand
gaacaaccccaauauuaaa

SEQ ID NO: 1132723 - RNA, 19 nt, Homo sapiens
  misc_RNA (1)...(19): siRNA sense strand
ugaagacuuuguugaaugu

SEQ ID NO: 1132724 - RNA, 19 nt, Homo sapiens
  misc_RNA (1)...(19): siRNA sense strand
guggugggcuuauccucua

SEQ ID NO: 1132725 - RNA, 19 nt, Homo sapiens
  misc_RNA (1)...(19): siRNA sense strand
gcucuauuaugaugguuug

SEQ ID NO: 1132726 - RNA, 19 nt, Homo sapiens
  misc_RNA (1)...(19): siRNA sense strand
gcacgcucaugaaggagaa

SEQ ID NO: 1132727 - RNA, 19 nt, Homo sapiens
  misc_RNA (1)...(19): siRNA sense strand
caccagaaaugucuacuac

SEQ ID NO: 1132728 - RNA, 19 nt, Homo sapiens
  misc_RNA (1)...(19): siRNA sense strand
caaaggacgccucuuccaa

SEQ ID NO: 1132729 - RNA, 19 nt, Homo sapiens
  misc_RNA (1)...(19): siRNA sense strand
ggagagaaccccuguaaau

SEQ ID NO: 1132730 - RNA, 19 nt, Homo sapiens
  misc_RNA (1)...(19): siRNA sense strand
gcauucagccaacaucaga

SEQ ID NO: 1132731 - RNA, 19 nt, Homo sapiens
  misc_RNA (1)...(19): siRNA sense strand
gcaucuugauccuccugua

SEQ ID NO: 1132732 - RNA, 19 nt, Homo sapiens
  misc_RNA (1)...(19): siRNA sense strand
ccaacucucugggcucuau

SEQ ID NO: 1132733 - RNA, 19 nt, Homo sapiens
  misc_RNA (1)...(19): siRNA sense strand
ggaacuacaucagcaacuc

SEQ ID NO: 1132734 - RNA, 19 nt, Homo sapiens
  misc_RNA (1)...(19): siRNA sense strand
caacacagacgaccuccau

SEQ ID NO: 1132735 - RNA, 19 nt, Homo sapiens
  misc_RNA (1)...(19): siRNA sense strand
gcaguuaaccaucuucaac

SEQ ID NO: 1132736 - RNA, 19 nt, Homo sapiens
  misc_RNA (1)...(19): siRNA sense strand
ugaugaagacuuuguugaa

SEQ ID NO: 1132737 - RNA, 19 nt, Homo sapiens
  misc_RNA (1)...(19): siRNA sense strand
uaugaugguuugaaaguac

SEQ ID NO: 1132738 - RNA, 19 nt, Homo sapiens
  misc_RNA (1)...(19): siRNA sense strand
caaauagccauugguggaa

SEQ ID NO: 1132739 - RNA, 19 nt, Homo sapiens
  misc_RNA (1)...(19): siRNA sense strand
ucgaagagcggccacaaga

SEQ ID NO: 1132740 - RNA, 19 nt, Homo sapiens
  misc_RNA (1)...(19): siRNA sense strand
gaugaugaagacuuuguug

SEQ ID NO: 1132741 - RNA, 19 nt, Homo sapiens
  misc_RNA (1)...(19): siRNA sense strand
gcaacggcacgcucaugaa

SEQ ID NO: 1132742 - RNA, 19 nt, Homo sapiens
  misc_RNA (1)...(19): siRNA sense strand
aaauuggaguugucuucaa

SEQ ID NO: 1132743 - RNA, 19 nt, Homo sapiens
  misc_RNA (1)...(19): siRNA sense strand
cuacuacaauggcgacuac

SEQ ID NO: 1132744 - RNA, 19 nt, Homo sapiens
  misc_RNA (1)...(19): siRNA sense strand
gaaaugucuacuacuguca

SEQ ID NO: 1132745 - RNA, 19 nt, Homo sapiens
  misc_RNA (1)...(19): siRNA sense strand
aaauagccauugguggaaa

SEQ ID NO: 1132746 - RNA, 19 nt, Homo sapiens
  misc_RNA (1)...(19): siRNA sense strand
gaggagagaaccccuguaa

SEQ ID NO: 1132747 - RNA, 19 nt, Homo sapiens
  misc_RNA (1)...(19): siRNA sense strand
ccacaacccguaagaaucg

SEQ ID NO: 1132748 - RNA, 19 nt, Homo sapiens
  misc_RNA (1)...(19): siRNA sense strand
gaaaauuggaguugucuuc

SEQ ID NO: 1132749 - RNA, 19 nt, Homo sapiens
  misc_RNA (1)...(19): siRNA sense strand
gaaaaguggugggcuuauc

SEQ ID NO: 1132750 - RNA, 19 nt, Homo sapiens
  misc_RNA (1)...(19): siRNA sense strand
caacggcacgcucaugaag

SEQ ID NO: 1132751 - RNA, 19 nt, Homo sapiens
  misc_RNA (1)...(19): siRNA sense strand
augaagacuuuguugaaug

SEQ ID NO: 1132752 - RNA, 19 nt, Homo sapiens
  misc_RNA (1)...(19): siRNA sense strand
cgacuaccacaacccguaa

SEQ ID NO: 1132753 - RNA, 19 nt, Homo sapiens
  misc_RNA (1)...(19): siRNA sense strand
gaaaccacuacuacaaugg

SEQ ID NO: 1132754 - RNA, 19 nt, Homo sapiens
  misc_RNA (1)...(19): siRNA sense strand
caacacucaggcgcaaaua

SEQ ID NO: 1132755 - RNA, 19 nt, Homo sapiens
  misc_RNA (1)...(19): siRNA sense strand
ugacaucuccaucaaagag

SEQ ID NO: 1132756 - RNA, 19 nt, Homo sapiens
  misc_RNA (1)...(19): siRNA sense strand
uaaaugacggcaaauacca

SEQ ID NO: 1132757 - RNA, 19 nt, Homo sapiens
  misc_RNA (1)...(19): siRNA sense strand
aaacaaggacagggaguau

SEQ ID NO: 1132758 - RNA, 19 nt, Homo sapiens
  misc_RNA (1)...(19): siRNA sense strand
cuacuacugucauggaaac

SEQ ID NO: 1132759 - RNA, 19 nt, Homo sapiens
  misc_RNA (1)...(19): siRNA sense strand
ccaccagaaaugucuacua

SEQ ID NO: 1132760 - RNA, 19 nt, Homo sapiens
  misc_RNA (1)...(19): siRNA sense strand
uggagaagucccaucaauu

SEQ ID NO: 1132761 - RNA, 19 nt, Homo sapiens
  misc_RNA (1)...(19): siRNA sense strand
uaaccaucuucaacacuca

SEQ ID NO: 1132762 - RNA, 19 nt, Homo sapiens
  misc_RNA (1)...(19): siRNA sense strand
cgaagagcggccacaagaa

SEQ ID NO: 1132763 - RNA, 19 nt, Homo sapiens
  misc_RNA (1)...(19): siRNA sense strand
cuucaacauuggcacaguu

SEQ ID NO: 1132764 - RNA, 19 nt, Homo sapiens
  misc_RNA (1)...(19): siRNA sense strand
uuggagaagucccaucaau

SEQ ID NO: 1132765 - RNA, 19 nt, Homo sapiens
  misc_RNA (1)...(19): siRNA sense strand
uaccacaacccguaagaau

SEQ ID NO: 1132766 - RNA, 19 nt, Homo sapiens
  misc_RNA (1)...(19): siRNA sense strand
aagacuuuguugaauguga

SEQ ID NO: 1132767 - RNA, 19 nt, Homo sapiens
  misc_RNA (1)...(19): siRNA sense strand
cagcaccacugugaaggau

SEQ ID NO: 1132768 - RNA, 19 nt, Homo sapiens
  misc_RNA (1)...(19): siRNA sense strand
ucugggcucuauuaugaug

SEQ ID NO: 1132769 - RNA, 19 nt, Homo sapiens
  misc_RNA (1)...(19): siRNA sense strand
gcaacuccgcccagagcaa

SEQ ID NO: 1132770 - RNA, 19 nt, Homo sapiens
  misc_RNA (1)...(19): siRNA sense strand
gagaagucccaucaauuuu

SEQ ID NO: 1132771 - RNA, 19 nt, Homo sapiens
  misc_RNA (1)...(19): siRNA sense strand
agaacaaccccaauauuaa

SEQ ID NO: 1132772 - RNA, 19 nt, Homo sapiens
  misc_RNA (1)...(19): siRNA sense strand
cagaaaugucuacuacugu

SEQ ID NO: 1132773 - RNA, 19 nt, Homo sapiens
  misc_RNA (1)...(19): siRNA sense strand
ccuccagcuucacauagaa

SEQ ID NO: 1132774 - RNA, 19 nt, Homo sapiens
  misc_RNA (1)...(19): siRNA sense strand
gagagaaccccuguaaaug

SEQ ID NO: 1132775 - RNA, 19 nt, Homo sapiens
  misc_RNA (1)...(19): siRNA sense strand
gaagucccaucaauuuugg

SEQ ID NO: 1132776 - RNA, 19 nt, Homo sapiens
  misc_RNA (1)...(19): siRNA sense strand
acagggaguauuacgugua

SEQ ID NO: 1132777 - RNA, 19 nt, Homo sapiens
  misc_RNA (1)...(19): siRNA sense strand
gcugagaacaaccccaaua

SEQ ID NO: 1132778 - RNA, 19 nt, Homo sapiens
  misc_RNA (1)...(19): siRNA sense strand
guaaaugacggcaaauacc

SEQ ID NO: 1132779 - RNA, 19 nt, Homo sapiens
  misc_RNA (1)...(19): siRNA sense strand
acggcacgcucaugaagga

SEQ ID NO: 1132780 - RNA, 19 nt, Homo sapiens
  misc_RNA (1)...(19): siRNA sense strand
ggacgagacgcggaacuac

SEQ ID NO: 1132781 - RNA, 19 nt, Homo sapiens
  misc_RNA (1)...(19): siRNA sense strand
gaaugugagccgaguacag

SEQ ID NO: 1132782 - RNA, 19 nt, Homo sapiens
  misc_RNA (1)...(19): siRNA sense strand
ggcgcuacguacaucuuug

SEQ ID NO: 1132783 - RNA, 19 nt, Homo sapiens
  misc_RNA (1)...(19): siRNA sense strand
uggaaaccacuacuacaau

SEQ ID NO: 1132784 - RNA, 19 nt, Homo sapiens
  misc_RNA (1)...(19): siRNA sense strand
gcacaguugacaucuccau

SEQ ID NO: 1132785 - RNA, 19 nt, Homo sapiens
  misc_RNA (1)...(19): siRNA sense strand
agagaaccccuguaaauga

SEQ ID NO: 1132786 - RNA, 19 nt, Homo sapiens
  misc_RNA (1)...(19): siRNA sense strand
gguuggagaagucccauca

SEQ ID NO: 1132787 - RNA, 19 nt, Homo sapiens
  misc_RNA (1)...(19): siRNA sense strand
guuugaaaguacugaacau

SEQ ID NO: 1132788 - RNA, 19 nt, Homo sapiens
  misc_RNA (1)...(19): siRNA sense strand
cccuguaaaugacggcaaa

SEQ ID NO: 1132789 - RNA, 19 nt, Homo sapiens
  misc_RNA (1)...(19): siRNA sense strand
gacgagacgcggaacuaca

SEQ ID NO: 1132790 - RNA, 19 nt, Homo sapiens
  misc_RNA (1)...(19): siRNA sense strand
gauggucgucggcauugug

SEQ ID NO: 1132791 - RNA, 19 nt, Homo sapiens
  misc_RNA (1)...(19): siRNA sense strand
gggauggucgucggcauug

SEQ ID NO: 1132792 - RNA, 19 nt, Homo sapiens
  misc_RNA (1)...(19): siRNA sense strand
acaguugacaucuccauca

SEQ ID NO: 1132793 - RNA, 19 nt, Homo sapiens
  misc_RNA (1)...(19): siRNA sense strand
gugacuuccuccagcuuca

SEQ ID NO: 1132794 - RNA, 19 nt, Homo sapiens
  misc_RNA (1)...(19): siRNA sense strand
gcucaugucuggcuauuaa

SEQ ID NO: 1132795 - RNA, 19 nt, Homo sapiens
  misc_RNA (1)...(19): siRNA sense strand
ggacucuucuuuagcuuua

SEQ ID NO: 1132796 - RNA, 19 nt, Homo sapiens
  misc_RNA (1)...(19): siRNA sense strand
caacaagacucgggaugaa

SEQ ID NO: 1132797 - RNA, 19 nt, Homo sapiens
  misc_RNA (1)...(19): siRNA sense strand
gggaugaacuggaaagaag

SEQ ID NO: 1132798 - RNA, 19 nt, Homo sapiens
  misc_RNA (1)...(19): siRNA sense strand
ggaaagaaguuuugauugu

SEQ ID NO: 1132799 - RNA, 19 nt, Homo sapiens
  misc_RNA (1)...(19): siRNA sense strand
ucacaacccuguaucaaca

SEQ ID NO: 1132800 - RNA, 19 nt, Homo sapiens
  misc_RNA (1)...(19): siRNA sense strand
gguguuggacucuucuuua

SEQ ID NO: 1132801 - RNA, 19 nt, Homo sapiens
  misc_RNA (1)...(19): siRNA sense strand
gaagcaaacagacagaugu

SEQ ID NO: 1132802 - RNA, 19 nt, Homo sapiens
  misc_RNA (1)...(19): siRNA sense strand
uguaaucucuugcucaugu

SEQ ID NO: 1132803 - RNA, 19 nt, Homo sapiens
  misc_RNA (1)...(19): siRNA sense strand
gcaacaagacucgggauga

SEQ ID NO: 1132804 - RNA, 19 nt, Homo sapiens
  misc_RNA (1)...(19): siRNA sense strand
ggucuucaucuuccaauuu

SEQ ID NO: 1132805 - RNA, 19 nt, Homo sapiens
  misc_RNA (1)...(19): siRNA sense strand
caucaucggcggagucauu

SEQ ID NO: 1132806 - RNA, 19 nt, Homo sapiens
  misc_RNA (1)...(19): siRNA sense strand
acagagauccuugguguuu

SEQ ID NO: 1132807 - RNA, 19 nt, Homo sapiens
  misc_RNA (1)...(19): siRNA sense strand
gcuauuaaccgaagcaaac

SEQ ID NO: 1132808 - RNA, 19 nt, Homo sapiens
  misc_RNA (1)...(19): siRNA sense strand
gucuucaucuuccaauuug

SEQ ID NO: 1132809 - RNA, 19 nt, Homo sapiens
  misc_RNA (1)...(19): siRNA sense strand
guguuggacucuucuuuag

SEQ ID NO: 1132810 - RNA, 19 nt, Homo sapiens
  misc_RNA (1)...(19): siRNA sense strand
ugccagauguguggagaaa

SEQ ID NO: 1132811 - RNA, 19 nt, Homo sapiens
  misc_RNA (1)...(19): siRNA sense strand
uucuuuagcuuuacagaga

SEQ ID NO: 1132812 - RNA, 19 nt, Homo sapiens
  misc_RNA (1)...(19): siRNA sense strand
gagucuuccuucuccuuau

SEQ ID NO: 1132813 - RNA, 19 nt, Homo sapiens
  misc_RNA (1)...(19): siRNA sense strand
cagagauccuugguguuug

SEQ ID NO: 1132814 - RNA, 19 nt, Homo sapiens
  misc_RNA (1)...(19): siRNA sense strand
ggcuuugccugcuccaaga

SEQ ID NO: 1132815 - RNA, 19 nt, Homo sapiens
  misc_RNA (1)...(19): siRNA sense strand
ugauuguuguggcuuauuc

SEQ ID NO: 1132816 - RNA, 19 nt, Homo sapiens
  misc_RNA (1)...(19): siRNA sense strand
gcuccaagaaugcgcuuug

SEQ ID NO: 1132817 - RNA, 19 nt, Homo sapiens
  misc_RNA (1)...(19): siRNA sense strand
gacucgggaugaacuggaa

SEQ ID NO: 1132818 - RNA, 19 nt, Homo sapiens
  misc_RNA (1)...(19): siRNA sense strand
caaccucacaacccuguau

SEQ ID NO: 1132819 - RNA, 19 nt, Homo sapiens
  misc_RNA (1)...(19): siRNA sense strand
guuggacucuucuuuagcu

SEQ ID NO: 1132820 - RNA, 19 nt, Homo sapiens
  misc_RNA (1)...(19): siRNA sense strand
uacaugaucauccuugguu

SEQ ID NO: 1132821 - RNA, 19 nt, Homo sapiens
  misc_RNA (1)...(19): siRNA sense strand
ucuuaagcauucagacgaa

SEQ ID NO: 1132822 - RNA, 19 nt, Homo sapiens
  misc_RNA (1)...(19): siRNA sense strand
agucuuccuucuccuuauu

SEQ ID NO: 1132823 - RNA, 19 nt, Homo sapiens
  misc_RNA (1)...(19): siRNA sense strand
cgaagcaaacagacagaug

SEQ ID NO: 1132824 - RNA, 19 nt, Homo sapiens
  misc_RNA (1)...(19): siRNA sense strand
acaugaucauccuugguuu

SEQ ID NO: 1132825 - RNA, 19 nt, Homo sapiens
  misc_RNA (1)...(19): siRNA sense strand
caucuuccaauuuguaauc

SEQ ID NO: 1132826 - RNA, 19 nt, Homo sapiens
  misc_RNA (1)...(19): siRNA sense strand
cuucaucuuccaauuugua

SEQ ID NO: 1132827 - RNA, 19 nt, Homo sapiens
  misc_RNA (1)...(19): siRNA sense strand
agagauccuugguguuugg

SEQ ID NO: 1132828 - RNA, 19 nt, Homo sapiens
  misc_RNA (1)...(19): siRNA sense strand
uccaauuuguaaucucuug

SEQ ID NO: 1132829 - RNA, 19 nt, Homo sapiens
  misc_RNA (1)...(19): siRNA sense strand
gguguuuggcuagcaauga

SEQ ID NO: 1132830 - RNA, 19 nt, Homo sapiens
  misc_RNA (1)...(19): siRNA sense strand
cccuguaucaacaagauua

SEQ ID NO: 1132831 - RNA, 19 nt, Homo sapiens
  misc_RNA (1)...(19): siRNA sense strand
uaaccgaagcaaacagaca

SEQ ID NO: 1132832 - RNA, 19 nt, Homo sapiens
  misc_RNA (1)...(19): siRNA sense strand
ccagauguguggagaaaag

SEQ ID NO: 1132833 - RNA, 19 nt, Homo sapiens
  misc_RNA (1)...(19): siRNA sense strand
ucuacaugcuggugagcuu

SEQ ID NO: 1132834 - RNA, 19 nt, Homo sapiens
  misc_RNA (1)...(19): siRNA sense strand
caugaucauccuugguuug

SEQ ID NO: 1132835 - RNA, 19 nt, Homo sapiens
  misc_RNA (1)...(19): siRNA sense strand
gaaucagaaggauccuaga

SEQ ID NO: 1132836 - RNA, 19 nt, Homo sapiens
  misc_RNA (1)...(19): siRNA sense strand
ggacuggugggugcuguca

SEQ ID NO: 1132837 - RNA, 19 nt, Homo sapiens
  misc_RNA (1)...(19): siRNA sense strand
ggaugaacuggaaagaagu

SEQ ID NO: 1132838 - RNA, 19 nt, Homo sapiens
  misc_RNA (1)...(19): siRNA sense strand
gaaguucccugaugguuuc

SEQ ID NO: 1132839 - RNA, 19 nt, Homo sapiens
  misc_RNA (1)...(19): siRNA sense strand
gcaaggaguacaacuauga

SEQ ID NO: 1132840 - RNA, 19 nt, Homo sapiens
  misc_RNA (1)...(19): siRNA sense strand
ggagggagcaugaucauug

SEQ ID NO: 1132841 - RNA, 19 nt, Homo sapiens
  misc_RNA (1)...(19): siRNA sense strand
uaugggagcuguuaucaug

SEQ ID NO: 1132842 - RNA, 19 nt, Homo sapiens
  misc_RNA (1)...(19): siRNA sense strand
agacgacuguuacaaguuu

SEQ ID NO: 1132843 - RNA, 19 nt, Homo sapiens
  misc_RNA (1)...(19): siRNA sense strand
ggagaucaauggacaggau

SEQ ID NO: 1132844 - RNA, 19 nt, Homo sapiens
  misc_RNA (1)...(19): siRNA sense strand
cgaauuggcuuugcuguca

SEQ ID NO: 1132845 - RNA, 19 nt, Homo sapiens
  misc_RNA (1)...(19): siRNA sense strand
caagacgacuguuacaagu

SEQ ID NO: 1132846 - RNA, 19 nt, Homo sapiens
  misc_RNA (1)...(19): siRNA sense strand
ggaagacuguggcuacaac

SEQ ID NO: 1132847 - RNA, 19 nt, Homo sapiens
  misc_RNA (1)...(19): siRNA sense strand
ccagcagcaugaugacuuu

SEQ ID NO: 1132848 - RNA, 19 nt, Homo sapiens
  misc_RNA (1)...(19): siRNA sense strand
gggcuucuacguugucuuu

SEQ ID NO: 1132849 - RNA, 19 nt, Homo sapiens
  misc_RNA (1)...(19): siRNA sense strand
ugucagcgcuugccaugug

SEQ ID NO: 1132850 - RNA, 19 nt, Homo sapiens
  misc_RNA (1)...(19): siRNA sense strand
caugaugacuuugcugaug

SEQ ID NO: 1132851 - RNA, 19 nt, Homo sapiens
  misc_RNA (1)...(19): siRNA sense strand
gaguacaacuaugacaaga

SEQ ID NO: 1132852 - RNA, 19 nt, Homo sapiens
  misc_RNA (1)...(19): siRNA sense strand
gcuucuacguugucuuuga

SEQ ID NO: 1132853 - RNA, 19 nt, Homo sapiens
  misc_RNA (1)...(19): siRNA sense strand
gacuguggcuacaacauuc

SEQ ID NO: 1132854 - RNA, 19 nt, Homo sapiens
  misc_RNA (1)...(19): siRNA sense strand
uuacaaguuugccaucuca

SEQ ID NO: 1132855 - RNA, 19 nt, Homo sapiens
  misc_RNA (1)...(19): siRNA sense strand
caucugcgcccucuucaug

SEQ ID NO: 1132856 - RNA, 19 nt, Homo sapiens
  misc_RNA (1)...(19): siRNA sense strand
gagggagcaugaucauugg

SEQ ID NO: 1132857 - RNA, 19 nt, Homo sapiens
  misc_RNA (1)...(19): siRNA sense strand
caauggacaggaucugaaa

SEQ ID NO: 1132858 - RNA, 19 nt, Homo sapiens
  misc_RNA (1)...(19): siRNA sense strand
cuacaacauuccacagaca

SEQ ID NO: 1132859 - RNA, 19 nt, Homo sapiens
  misc_RNA (1)...(19): siRNA sense strand
gacaggaucugaaaaugga

SEQ ID NO: 1132860 - RNA, 19 nt, Homo sapiens
  misc_RNA (1)...(19): siRNA sense strand
ggaguacaacuaugacaag

SEQ ID NO: 1132861 - RNA, 19 nt, Homo sapiens
  misc_RNA (1)...(19): siRNA sense strand
gcaccaccaaccuucguuu

SEQ ID NO: 1132862 - RNA, 19 nt, Homo sapiens
  misc_RNA (1)...(19): siRNA sense strand
ccaagacgacuguuacaag

SEQ ID NO: 1132863 - RNA, 19 nt, Homo sapiens
  misc_RNA (1)...(19): siRNA sense strand
gagaaguucccugaugguu

SEQ ID NO: 1132864 - RNA, 19 nt, Homo sapiens
  misc_RNA (1)...(19): siRNA sense strand
cugaagugcuggccucugu

SEQ ID NO: 1132865 - RNA, 19 nt, Homo sapiens
  misc_RNA (1)...(19): siRNA sense strand
caagaaaguguuugaagcu

SEQ ID NO: 1132866 - RNA, 19 nt, Homo sapiens
  misc_RNA (1)...(19): siRNA sense strand
agaaguucccugaugguuu

SEQ ID NO: 1132867 - RNA, 19 nt, Homo sapiens
  misc_RNA (1)...(19): siRNA sense strand
guggauacaggcagcagua

SEQ ID NO: 1132868 - RNA, 19 nt, Homo sapiens
  misc_RNA (1)...(19): siRNA sense strand
gggcagcuuuguggagaug

SEQ ID NO: 1132869 - RNA, 19 nt, Homo sapiens
  misc_RNA (1)...(19): siRNA sense strand
acggagaaguucccugaug

SEQ ID NO: 1132870 - RNA, 19 nt, Homo sapiens
  misc_RNA (1)...(19): siRNA sense strand
acacaggcagucucuggua

SEQ ID NO: 1132871 - RNA, 19 nt, Homo sapiens
  misc_RNA (1)...(19): siRNA sense strand
caagagcauuguggacagu

SEQ ID NO: 1132872 - RNA, 19 nt, Homo sapiens
  misc_RNA (1)...(19): siRNA sense strand
cacaggcagucucugguau

SEQ ID NO: 1132873 - RNA, 19 nt, Homo sapiens
  misc_RNA (1)...(19): siRNA sense strand
agacuguggcuacaacauu

SEQ ID NO: 1132874 - RNA, 19 nt, Homo sapiens
  misc_RNA (1)...(19): siRNA sense strand
gauacaggcagcaguaacu

SEQ ID NO: 1132875 - RNA, 19 nt, Homo sapiens
  misc_RNA (1)...(19): siRNA sense strand
ggcgggagugguauuauga

SEQ ID NO: 1132876 - RNA, 19 nt, Homo sapiens
  misc_RNA (1)...(19): siRNA sense strand
augaugacuuugcugauga

SEQ ID NO: 1132877 - RNA, 19 nt, Homo sapiens
  misc_RNA (1)...(19): siRNA sense strand
ucaauggacaggaucugaa

SEQ ID NO: 1132878 - RNA, 19 nt, Homo sapiens
  misc_RNA (1)...(19): siRNA sense strand
gcaugaucauuggagguau

SEQ ID NO: 1132879 - RNA, 19 nt, Homo sapiens
  misc_RNA (1)...(19): siRNA sense strand
caucucacucuaccuaaug

SEQ ID NO: 1132880 - RNA, 19 nt, Homo sapiens
  misc_RNA (1)...(19): siRNA sense strand
ucaucucacucuaccuaau

SEQ ID NO: 1132881 - RNA, 19 nt, Homo sapiens
  misc_RNA (1)...(19): siRNA sense strand
acaggcagcaguaacuuug

SEQ ID NO: 1132882 - RNA, 19 nt, Homo sapiens
  misc_RNA (1)...(19): siRNA sense strand
ggcagucucugguauacac

SEQ ID NO: 1132883 - RNA, 19 nt, Homo sapiens
  misc_RNA (1)...(19): siRNA sense strand
caugaucauuggagguauc

SEQ ID NO: 1132884 - RNA, 19 nt, Homo sapiens
  misc_RNA (1)...(19): siRNA sense strand
gcuacuacguggagaugac

SEQ ID NO: 1132885 - RNA, 19 nt, Homo sapiens
  misc_RNA (1)...(19): siRNA sense strand
aaccaguccuuccgcauca

SEQ ID NO: 1132886 - RNA, 19 nt, Homo sapiens
  misc_RNA (1)...(19): siRNA sense strand
acaggcagucucugguaua

SEQ ID NO: 1132887 - RNA, 19 nt, Homo sapiens
  misc_RNA (1)...(19): siRNA sense strand
guaucgaccacucgcugua

SEQ ID NO: 1132888 - RNA, 19 nt, Homo sapiens
  misc_RNA (1)...(19): siRNA sense strand
ugggagcuguuaucaugga

SEQ ID NO: 1132889 - RNA, 19 nt, Homo sapiens
  misc_RNA (1)...(19): siRNA sense strand
gccagcagcaugaugacuu

SEQ ID NO: 1132890 - RNA, 19 nt, Homo sapiens
  misc_RNA (1)...(19): siRNA sense strand
cauggagggcuucuacguu

SEQ ID NO: 1132891 - RNA, 19 nt, Homo sapiens
  misc_RNA (1)...(19): siRNA sense strand
caacuaugacaagagcauu

SEQ ID NO: 1132892 - RNA, 19 nt, Homo sapiens
  misc_RNA (1)...(19): siRNA sense strand
guuacaaguuugccaucuc

SEQ ID NO: 1132893 - RNA, 19 nt, Homo sapiens
  misc_RNA (1)...(19): siRNA sense strand
aaccuucguuugcccaaga

SEQ ID NO: 1132894 - RNA, 19 nt, Homo sapiens
  misc_RNA (1)...(19): siRNA sense strand
cugcaaggaguacaacuau

SEQ ID NO: 1132895 - RNA, 19 nt, Homo sapiens
  misc_RNA (1)...(19): siRNA sense strand
acaucucccugcugaagug

SEQ ID NO: 1132896 - RNA, 19 nt, Homo sapiens
  misc_RNA (1)...(19): siRNA sense strand
agucaucucacucuaccua

SEQ ID NO: 1132897 - RNA, 19 nt, Homo sapiens
  misc_RNA (1)...(19): siRNA sense strand
ggagaaguucccugauggu

SEQ ID NO: 1132898 - RNA, 19 nt, Homo sapiens
  misc_RNA (1)...(19): siRNA sense strand
gacgacuguuacaaguuug

SEQ ID NO: 1132899 - RNA, 19 nt, Homo sapiens
  misc_RNA (1)...(19): siRNA sense strand
ugacaucucccugcugaag

SEQ ID NO: 1132900 - RNA, 19 nt, Homo sapiens
  misc_RNA (1)...(19): siRNA sense strand
caacauuccacagacagau

SEQ ID NO: 1132901 - RNA, 19 nt, Homo sapiens
  misc_RNA (1)...(19): siRNA sense strand
gaagacuguggcuacaaca

SEQ ID NO: 1132902 - RNA, 19 nt, Homo sapiens
  misc_RNA (1)...(19): siRNA sense strand
cuucuacguugucuuugau

SEQ ID NO: 1132903 - RNA, 19 nt, Homo sapiens
  misc_RNA (1)...(19): siRNA sense strand
aaauggacugcaaggagua

SEQ ID NO: 1132904 - RNA, 19 nt, Homo sapiens
  misc_RNA (1)...(19): siRNA sense strand
gcagcuuuguggagauggu

SEQ ID NO: 1132905 - RNA, 19 nt, Homo sapiens
  misc_RNA (1)...(19): siRNA sense strand
ccggaaggguguguaugug

SEQ ID NO: 1132906 - RNA, 19 nt, Homo sapiens
  misc_RNA (1)...(19): siRNA sense strand
gccaugugcacgaugaguu

SEQ ID NO: 1132907 - RNA, 19 nt, Homo sapiens
  misc_RNA (1)...(19): siRNA sense strand
gaaguucccugaugguuuc

SEQ ID NO: 1132908 - RNA, 19 nt, Homo sapiens
  misc_RNA (1)...(19): siRNA sense strand
gcaaggaguacaacuauga

SEQ ID NO: 1132909 - RNA, 19 nt, Homo sapiens
  misc_RNA (1)...(19): siRNA sense strand
ggagggagcaugaucauug

SEQ ID NO: 1132910 - RNA, 19 nt, Homo sapiens
  misc_RNA (1)...(19): siRNA sense strand
uaugggagcuguuaucaug

SEQ ID NO: 1132911 - RNA, 19 nt, Homo sapiens
  misc_RNA (1)...(19): siRNA sense strand
agacgacuguuacaaguuu

SEQ ID NO: 1132912 - RNA, 19 nt, Homo sapiens
  misc_RNA (1)...(19): siRNA sense strand
ggagaucaauggacaggau

SEQ ID NO: 1132913 - RNA, 19 nt, Homo sapiens
  misc_RNA (1)...(19): siRNA sense strand
cgaauuggcuuugcuguca

SEQ ID NO: 1132914 - RNA, 19 nt, Homo sapiens
  misc_RNA (1)...(19): siRNA sense strand
caagacgacuguuacaagu

SEQ ID NO: 1132915 - RNA, 19 nt, Homo sapiens
  misc_RNA (1)...(19): siRNA sense strand
ggaagacuguggcuacaac

SEQ ID NO: 1132916 - RNA, 19 nt, Homo sapiens
  misc_RNA (1)...(19): siRNA sense strand
ccagcagcaugaugacuuu

SEQ ID NO: 1132917 - RNA, 19 nt, Homo sapiens
  misc_RNA (1)...(19): siRNA sense strand
gggcuucuacguugucuuu

SEQ ID NO: 1132918 - RNA, 19 nt, Homo sapiens
  misc_RNA (1)...(19): siRNA sense strand
ugucagcgcuugccaugug

SEQ ID NO: 1132919 - RNA, 19 nt, Homo sapiens
  misc_RNA (1)...(19): siRNA sense strand
caugaugacuuugcugaug

SEQ ID NO: 1132920 - RNA, 19 nt, Homo sapiens
  misc_RNA (1)...(19): siRNA sense strand
gaguacaacuaugacaaga

SEQ ID NO: 1132921 - RNA, 19 nt, Homo sapiens
  misc_RNA (1)...(19): siRNA sense strand
gcuucuacguugucuuuga

SEQ ID NO: 1132922 - RNA, 19 nt, Homo sapiens
  misc_RNA (1)...(19): siRNA sense strand
gacuguggcuacaacauuc

SEQ ID NO: 1132923 - RNA, 19 nt, Homo sapiens
  misc_RNA (1)...(19): siRNA sense strand
uuacaaguuugccaucuca

SEQ ID NO: 1132924 - RNA, 19 nt, Homo sapiens
  misc_RNA (1)...(19): siRNA sense strand
caucugcgcccucuucaug

SEQ ID NO: 1132925 - RNA, 19 nt, Homo sapiens
  misc_RNA (1)...(19): siRNA sense strand
gagggagcaugaucauugg

SEQ ID NO: 1132926 - RNA, 19 nt, Homo sapiens
  misc_RNA (1)...(19): siRNA sense strand
caauggacaggaucugaaa

SEQ ID NO: 1132927 - RNA, 19 nt, Homo sapiens
  misc_RNA (1)...(19): siRNA sense strand
cuacaacauuccacagaca

SEQ ID NO: 1132928 - RNA, 19 nt, Homo sapiens
  misc_RNA (1)...(19): siRNA sense strand
gacaggaucugaaaaugga

SEQ ID NO: 1132929 - RNA, 19 nt, Homo sapiens
  misc_RNA (1)...(19): siRNA sense strand
ggaguacaacuaugacaag

SEQ ID NO: 1132930 - RNA, 19 nt, Homo sapiens
  misc_RNA (1)...(19): siRNA sense strand
gcaccaccaaccuucguuu

SEQ ID NO: 1132931 - RNA, 19 nt, Homo sapiens
  misc_RNA (1)...(19): siRNA sense strand
ccaagacgacuguuacaag

SEQ ID NO: 1132932 - RNA, 19 nt, Homo sapiens
  misc_RNA (1)...(19): siRNA sense strand
gagaaguucccugaugguu

SEQ ID NO: 1132933 - RNA, 19 nt, Homo sapiens
  misc_RNA (1)...(19): siRNA sense strand
cugaagugcuggccucugu

SEQ ID NO: 1132934 - RNA, 19 nt, Homo sapiens
  misc_RNA (1)...(19): siRNA sense strand
caagaaaguguuugaagcu

SEQ ID NO: 1132935 - RNA, 19 nt, Homo sapiens
  misc_RNA (1)...(19): siRNA sense strand
agaaguucccugaugguuu

SEQ ID NO: 1132936 - RNA, 19 nt, Homo sapiens
  misc_RNA (1)...(19): siRNA sense strand
guggauacaggcagcagua

SEQ ID NO: 1132937 - RNA, 19 nt, Homo sapiens
  misc_RNA (1)...(19): siRNA sense strand
gggcagcuuuguggagaug

SEQ ID NO: 1132938 - RNA, 19 nt, Homo sapiens
  misc_RNA (1)...(19): siRNA sense strand
acggagaaguucccugaug

SEQ ID NO: 1132939 - RNA, 19 nt, Homo sapiens
  misc_RNA (1)...(19): siRNA sense strand
acacaggcagucucuggua

SEQ ID NO: 1132940 - RNA, 19 nt, Homo sapiens
  misc_RNA (1)...(19): siRNA sense strand
caagagcauuguggacagu

SEQ ID NO: 1132941 - RNA, 19 nt, Homo sapiens
  misc_RNA (1)...(19): siRNA sense strand
cacaggcagucucugguau

SEQ ID NO: 1132942 - RNA, 19 nt, Homo sapiens
  misc_RNA (1)...(19): siRNA sense strand
agacuguggcuacaacauu

SEQ ID NO: 1132943 - RNA, 19 nt, Homo sapiens
  misc_RNA (1)...(19): siRNA sense strand
gauacaggcagcaguaacu

SEQ ID NO: 1132944 - RNA, 19 nt, Homo sapiens
  misc_RNA (1)...(19): siRNA sense strand
ggcgggagugguauuauga

SEQ ID NO: 1132945 - RNA, 19 nt, Homo sapiens
  misc_RNA (1)...(19): siRNA sense strand
augaugacuuugcugauga

SEQ ID NO: 1132946 - RNA, 19 nt, Homo sapiens
  misc_RNA (1)...(19): siRNA sense strand
ucaauggacaggaucugaa

SEQ ID NO: 1132947 - RNA, 19 nt, Homo sapiens
  misc_RNA (1)...(19): siRNA sense strand
gcaugaucauuggagguau

SEQ ID NO: 1132948 - RNA, 19 nt, Homo sapiens
  misc_RNA (1)...(19): siRNA sense strand
caucucacucuaccuaaug

SEQ ID NO: 1132949 - RNA, 19 nt, Homo sapiens
  misc_RNA (1)...(19): siRNA sense strand
ucaucucacucuaccuaau

SEQ ID NO: 1132950 - RNA, 19 nt, Homo sapiens
  misc_RNA (1)...(19): siRNA sense strand
acaggcagcaguaacuuug

SEQ ID NO: 1132951 - RNA, 19 nt, Homo sapiens
  misc_RNA (1)...(19): siRNA sense strand
ggcagucucugguauacac

SEQ ID NO: 1132952 - RNA, 19 nt, Homo sapiens
  misc_RNA (1)...(19): siRNA sense strand
caugaucauuggagguauc

SEQ ID NO: 1132953 - RNA, 19 nt, Homo sapiens
  misc_RNA (1)...(19): siRNA sense strand
gcuacuacguggagaugac

SEQ ID NO: 1132954 - RNA, 19 nt, Homo sapiens
  misc_RNA (1)...(19): siRNA sense strand
aaccaguccuuccgcauca

SEQ ID NO: 1132955 - RNA, 19 nt, Homo sapiens
  misc_RNA (1)...(19): siRNA sense strand
acaggcagucucugguaua

SEQ ID NO: 1132956 - RNA, 19 nt, Homo sapiens
  misc_RNA (1)...(19): siRNA sense strand
guaucgaccacucgcugua

SEQ ID NO: 1132957 - RNA, 19 nt, Homo sapiens
  misc_RNA (1)...(19): siRNA sense strand
ugggagcuguuaucaugga

SEQ ID NO: 1132958 - RNA, 19 nt, Homo sapiens
  misc_RNA (1)...(19): siRNA sense strand
gccagcagcaugaugacuu

SEQ ID NO: 1132959 - RNA, 19 nt, Homo sapiens
  misc_RNA (1)...(19): siRNA sense strand
cauggagggcuucuacguu

SEQ ID NO: 1132960 - RNA, 19 nt, Homo sapiens
  misc_RNA (1)...(19): siRNA sense strand
caacuaugacaagagcauu

SEQ ID NO: 1132961 - RNA, 19 nt, Homo sapiens
  misc_RNA (1)...(19): siRNA sense strand
guuacaaguuugccaucuc

SEQ ID NO: 1132962 - RNA, 19 nt, Homo sapiens
  misc_RNA (1)...(19): siRNA sense strand
aaccuucguuugcccaaga

SEQ ID NO: 1132963 - RNA, 19 nt, Homo sapiens
  misc_RNA (1)...(19): siRNA sense strand
cugcaaggaguacaacuau

SEQ ID NO: 1132964 - RNA, 19 nt, Homo sapiens
  misc_RNA (1)...(19): siRNA sense strand
acaucucccugcugaagug

SEQ ID NO: 1132965 - RNA, 19 nt, Homo sapiens
  misc_RNA (1)...(19): siRNA sense strand
agucaucucacucuaccua

SEQ ID NO: 1132966 - RNA, 19 nt, Homo sapiens
  misc_RNA (1)...(19): siRNA sense strand
ggagaaguucccugauggu

SEQ ID NO: 1132967 - RNA, 19 nt, Homo sapiens
  misc_RNA (1)...(19): siRNA sense strand
gacgacuguuacaaguuug

SEQ ID NO: 1132968 - RNA, 19 nt, Homo sapiens
  misc_RNA (1)...(19): siRNA sense strand
ugacaucucccugcugaag

SEQ ID NO: 1132969 - RNA, 19 nt, Homo sapiens
  misc_RNA (1)...(19): siRNA sense strand
caacauuccacagacagau

SEQ ID NO: 1132970 - RNA, 19 nt, Homo sapiens
  misc_RNA (1)...(19): siRNA sense strand
gaagacuguggcuacaaca

SEQ ID NO: 1132971 - RNA, 19 nt, Homo sapiens
  misc_RNA (1)...(19): siRNA sense strand
cuucuacguugucuuugau

SEQ ID NO: 1132972 - RNA, 19 nt, Homo sapiens
  misc_RNA (1)...(19): siRNA sense strand
aaauggacugcaaggagua

SEQ ID NO: 1132973 - RNA, 19 nt, Homo sapiens
  misc_RNA (1)...(19): siRNA sense strand
gcagcuuuguggagauggu

SEQ ID NO: 1132974 - RNA, 19 nt, Homo sapiens
  misc_RNA (1)...(19): siRNA sense strand
ccggaaggguguguaugug

SEQ ID NO: 1132975 - RNA, 19 nt, Homo sapiens
  misc_RNA (1)...(19): siRNA sense strand
gccaugugcacgaugaguu

SEQ ID NO: 1132976 - RNA, 19 nt, Homo sapiens
  misc_RNA (1)...(19): siRNA sense strand
gaaguucccugaugguuuc

SEQ ID NO: 1132977 - RNA, 19 nt, Homo sapiens
  misc_RNA (1)...(19): siRNA sense strand
gcaaggaguacaacuauga

SEQ ID NO: 1132978 - RNA, 19 nt, Homo sapiens
  misc_RNA (1)...(19): siRNA sense strand
ggagggagcaugaucauug

SEQ ID NO: 1132979 - RNA, 19 nt, Homo sapiens
  misc_RNA (1)...(19): siRNA sense strand
uaugggagcuguuaucaug

SEQ ID NO: 1132980 - RNA, 19 nt, Homo sapiens
  misc_RNA (1)...(19): siRNA sense strand
agacgacuguuacaaguuu

SEQ ID NO: 1132981 - RNA, 19 nt, Homo sapiens
  misc_RNA (1)...(19): siRNA sense strand
ggagaucaauggacaggau

SEQ ID NO: 1132982 - RNA, 19 nt, Homo sapiens
  misc_RNA (1)...(19): siRNA sense strand
cgaauuggcuuugcuguca

SEQ ID NO: 1132983 - RNA, 19 nt, Homo sapiens
  misc_RNA (1)...(19): siRNA sense strand
caagacgacuguuacaagu

SEQ ID NO: 1132984 - RNA, 19 nt, Homo sapiens
  misc_RNA (1)...(19): siRNA sense strand
ggaagacuguggcuacaac

SEQ ID NO: 1132985 - RNA, 19 nt, Homo sapiens
  misc_RNA (1)...(19): siRNA sense strand
ccagcagcaugaugacuuu

SEQ ID NO: 1132986 - RNA, 19 nt, Homo sapiens
  misc_RNA (1)...(19): siRNA sense strand
gggcuucuacguugucuuu

SEQ ID NO: 1132987 - RNA, 19 nt, Homo sapiens
  misc_RNA (1)...(19): siRNA sense strand
ugucagcgcuugccaugug

SEQ ID NO: 1132988 - RNA, 19 nt, Homo sapiens
  misc_RNA (1)...(19): siRNA sense strand
caugaugacuuugcugaug

SEQ ID NO: 1132989 - RNA, 19 nt, Homo sapiens
  misc_RNA (1)...(19): siRNA sense strand
gaguacaacuaugacaaga

SEQ ID NO: 1132990 - RNA, 19 nt, Homo sapiens
  misc_RNA (1)...(19): siRNA sense strand
gcuucuacguugucuuuga

SEQ ID NO: 1132991 - RNA, 19 nt, Homo sapiens
  misc_RNA (1)...(19): siRNA sense strand
gacuguggcuacaacauuc

SEQ ID NO: 1132992 - RNA, 19 nt, Homo sapiens
  misc_RNA (1)...(19): siRNA sense strand
uuacaaguuugccaucuca

SEQ ID NO: 1132993 - RNA, 19 nt, Homo sapiens
  misc_RNA (1)...(19): siRNA sense strand
caucugcgcccucuucaug

SEQ ID NO: 1132994 - RNA, 19 nt, Homo sapiens
  misc_RNA (1)...(19): siRNA sense strand
gagggagcaugaucauugg

SEQ ID NO: 1132995 - RNA, 19 nt, Homo sapiens
  misc_RNA (1)...(19): siRNA sense strand
caauggacaggaucugaaa

SEQ ID NO: 1132996 - RNA, 19 nt, Homo sapiens
  misc_RNA (1)...(19): siRNA sense strand
cuacaacauuccacagaca

SEQ ID NO: 1132997 - RNA, 19 nt, Homo sapiens
  misc_RNA (1)...(19): siRNA sense strand
gacaggaucugaaaaugga

SEQ ID NO: 1132998 - RNA, 19 nt, Homo sapiens
  misc_RNA (1)...(19): siRNA sense strand
ggaguacaacuaugacaag

SEQ ID NO: 1132999 - RNA, 19 nt, Homo sapiens
  misc_RNA (1)...(19): siRNA sense strand
gcaccaccaaccuucguuu

SEQ ID NO: 1133000 - RNA, 19 nt, Homo sapiens
  misc_RNA (1)...(19): siRNA sense strand
ccaagacgacuguuacaag

SEQ ID NO: 1133001 - RNA, 19 nt, Homo sapiens
  misc_RNA (1)...(19): siRNA sense strand
gagaaguucccugaugguu

SEQ ID NO: 1133002 - RNA, 19 nt, Homo sapiens
  misc_RNA (1)...(19): siRNA sense strand
cugaagugcuggccucugu

SEQ ID NO: 1133003 - RNA, 19 nt, Homo sapiens
  misc_RNA (1)...(19): siRNA sense strand
caagaaaguguuugaagcu

SEQ ID NO: 1133004 - RNA, 19 nt, Homo sapiens
  misc_RNA (1)...(19): siRNA sense strand
agaaguucccugaugguuu

SEQ ID NO: 1133005 - RNA, 19 nt, Homo sapiens
  misc_RNA (1)...(19): siRNA sense strand
guggauacaggcagcagua

SEQ ID NO: 1133006 - RNA, 19 nt, Homo sapiens
  misc_RNA (1)...(19): siRNA sense strand
gggcagcuuuguggagaug

SEQ ID NO: 1133007 - RNA, 19 nt, Homo sapiens
  misc_RNA (1)...(19): siRNA sense strand
acggagaaguucccugaug

SEQ ID NO: 1133008 - RNA, 19 nt, Homo sapiens
  misc_RNA (1)...(19): siRNA sense strand
acacaggcagucucuggua

SEQ ID NO: 1133009 - RNA, 19 nt, Homo sapiens
  misc_RNA (1)...(19): siRNA sense strand
caagagcauuguggacagu

SEQ ID NO: 1133010 - RNA, 19 nt, Homo sapiens
  misc_RNA (1)...(19): siRNA sense strand
cacaggcagucucugguau

SEQ ID NO: 1133011 - RNA, 19 nt, Homo sapiens
  misc_RNA (1)...(19): siRNA sense strand
agacuguggcuacaacauu

SEQ ID NO: 1133012 - RNA, 19 nt, Homo sapiens
  misc_RNA (1)...(19): siRNA sense strand
gauacaggcagcaguaacu

SEQ ID NO: 1133013 - RNA, 19 nt, Homo sapiens
  misc_RNA (1)...(19): siRNA sense strand
ggcgggagugguauuauga

SEQ ID NO: 1133014 - RNA, 19 nt, Homo sapiens
  misc_RNA (1)...(19): siRNA sense strand
augaugacuuugcugauga

SEQ ID NO: 1133015 - RNA, 19 nt, Homo sapiens
  misc_RNA (1)...(19): siRNA sense strand
ucaauggacaggaucugaa

SEQ ID NO: 1133016 - RNA, 19 nt, Homo sapiens
  misc_RNA (1)...(19): siRNA sense strand
gcaugaucauuggagguau

SEQ ID NO: 1133017 - RNA, 19 nt, Homo sapiens
  misc_RNA (1)...(19): siRNA sense strand
caucucacucuaccuaaug

SEQ ID NO: 1133018 - RNA, 19 nt, Homo sapiens
  misc_RNA (1)...(19): siRNA sense strand
ucaucucacucuaccuaau

SEQ ID NO: 1133019 - RNA, 19 nt, Homo sapiens
  misc_RNA (1)...(19): siRNA sense strand
acaggcagcaguaacuuug

SEQ ID NO: 1133020 - RNA, 19 nt, Homo sapiens
  misc_RNA (1)...(19): siRNA sense strand
ggcagucucugguauacac

SEQ ID NO: 1133021 - RNA, 19 nt, Homo sapiens
  misc_RNA (1)...(19): siRNA sense strand
caugaucauuggagguauc

SEQ ID NO: 1133022 - RNA, 19 nt, Homo sapiens
  misc_RNA (1)...(19): siRNA sense strand
gcuacuacguggagaugac

SEQ ID NO: 1133023 - RNA, 19 nt, Homo sapiens
  misc_RNA (1)...(19): siRNA sense strand
aaccaguccuuccgcauca

SEQ ID NO: 1133024 - RNA, 19 nt, Homo sapiens
  misc_RNA (1)...(19): siRNA sense strand
acaggcagucucugguaua

SEQ ID NO: 1133025 - RNA, 19 nt, Homo sapiens
  misc_RNA (1)...(19): siRNA sense strand
guaucgaccacucgcugua

SEQ ID NO: 1133026 - RNA, 19 nt, Homo sapiens
  misc_RNA (1)...(19): siRNA sense strand
ugggagcuguuaucaugga

SEQ ID NO: 1133027 - RNA, 19 nt, Homo sapiens
  misc_RNA (1)...(19): siRNA sense strand
gccagcagcaugaugacuu

SEQ ID NO: 1133028 - RNA, 19 nt, Homo sapiens
  misc_RNA (1)...(19): siRNA sense strand
cauggagggcuucuacguu

SEQ ID NO: 1133029 - RNA, 19 nt, Homo sapiens
  misc_RNA (1)...(19): siRNA sense strand
caacuaugacaagagcauu

SEQ ID NO: 1133030 - RNA, 19 nt, Homo sapiens
  misc_RNA (1)...(19): siRNA sense strand
guuacaaguuugccaucuc

SEQ ID NO: 1133031 - RNA, 19 nt, Homo sapiens
  misc_RNA (1)...(19): siRNA sense strand
aaccuucguuugcccaaga

SEQ ID NO: 1133032 - RNA, 19 nt, Homo sapiens
  misc_RNA (1)...(19): siRNA sense strand
cugcaaggaguacaacuau

SEQ ID NO: 1133033 - RNA, 19 nt, Homo sapiens
  misc_RNA (1)...(19): siRNA sense strand
acaucucccugcugaagug

SEQ ID NO: 1133034 - RNA, 19 nt, Homo sapiens
  misc_RNA (1)...(19): siRNA sense strand
agucaucucacucuaccua

SEQ ID NO: 1133035 - RNA, 19 nt, Homo sapiens
  misc_RNA (1)...(19): siRNA sense strand
ggagaaguucccugauggu

SEQ ID NO: 1133036 - RNA, 19 nt, Homo sapiens
  misc_RNA (1)...(19): siRNA sense strand
gacgacuguuacaaguuug

SEQ ID NO: 1133037 - RNA, 19 nt, Homo sapiens
  misc_RNA (1)...(19): siRNA sense strand
ugacaucucccugcugaag

SEQ ID NO: 1133038 - RNA, 19 nt, Homo sapiens
  misc_RNA (1)...(19): siRNA sense strand
caacauuccacagacagau

SEQ ID NO: 1133039 - RNA, 19 nt, Homo sapiens
  misc_RNA (1)...(19): siRNA sense strand
gaagacuguggcuacaaca

SEQ ID NO: 1133040 - RNA, 19 nt, Homo sapiens
  misc_RNA (1)...(19): siRNA sense strand
cuucuacguugucuuugau

SEQ ID NO: 1133041 - RNA, 19 nt, Homo sapiens
  misc_RNA (1)...(19): siRNA sense strand
aaauggacugcaaggagua

SEQ ID NO: 1133042 - RNA, 19 nt, Homo sapiens
  misc_RNA (1)...(19): siRNA sense strand
gcagcuuuguggagauggu

SEQ ID NO: 1133043 - RNA, 19 nt, Homo sapiens
  misc_RNA (1)...(19): siRNA sense strand
ccggaaggguguguaugug

SEQ ID NO: 1133044 - RNA, 19 nt, Homo sapiens
  misc_RNA (1)...(19): siRNA sense strand
gccaugugcacgaugaguu

SEQ ID NO: 1133045 - RNA, 19 nt, Homo sapiens
  misc_RNA (1)...(19): siRNA sense strand
gaaguucccugaugguuuc

SEQ ID NO: 1133046 - RNA, 19 nt, Homo sapiens
  misc_RNA (1)...(19): siRNA sense strand
gcaaggaguacaacuauga

SEQ ID NO: 1133047 - RNA, 19 nt, Homo sapiens
  misc_RNA (1)...(19): siRNA sense strand
ggagggagcaugaucauug

SEQ ID NO: 1133048 - RNA, 19 nt, Homo sapiens
  misc_RNA (1)...(19): siRNA sense strand
uaugggagcuguuaucaug

SEQ ID NO: 1133049 - RNA, 19 nt, Homo sapiens
  misc_RNA (1)...(19): siRNA sense strand
agacgacuguuacaaguuu

SEQ ID NO: 1133050 - RNA, 19 nt, Homo sapiens
  misc_RNA (1)...(19): siRNA sense strand
ggagaucaauggacaggau

SEQ ID NO: 1133051 - RNA, 19 nt, Homo sapiens
  misc_RNA (1)...(19): siRNA sense strand
cgaauuggcuuugcuguca

SEQ ID NO: 1133052 - RNA, 19 nt, Homo sapiens
  misc_RNA (1)...(19): siRNA sense strand
caagacgacuguuacaagu

SEQ ID NO: 1133053 - RNA, 19 nt, Homo sapiens
  misc_RNA (1)...(19): siRNA sense strand
ggaagacuguggcuacaac

SEQ ID NO: 1133054 - RNA, 19 nt, Homo sapiens
  misc_RNA (1)...(19): siRNA sense strand
ccagcagcaugaugacuuu

SEQ ID NO: 1133055 - RNA, 19 nt, Homo sapiens
  misc_RNA (1)...(19): siRNA sense strand
gggcuucuacguugucuuu

SEQ ID NO: 1133056 - RNA, 19 nt, Homo sapiens
  misc_RNA (1)...(19): siRNA sense strand
ugucagcgcuugccaugug

SEQ ID NO: 1133057 - RNA, 19 nt, Homo sapiens
  misc_RNA (1)...(19): siRNA sense strand
caugaugacuuugcugaug

SEQ ID NO: 1133058 - RNA, 19 nt, Homo sapiens
  misc_RNA (1)...(19): siRNA sense strand
gaguacaacuaugacaaga

SEQ ID NO: 1133059 - RNA, 19 nt, Homo sapiens
  misc_RNA (1)...(19): siRNA sense strand
gcuucuacguugucuuuga

SEQ ID NO: 1133060 - RNA, 19 nt, Homo sapiens
  misc_RNA (1)...(19): siRNA sense strand
gacuguggcuacaacauuc

SEQ ID NO: 1133061 - RNA, 19 nt, Homo sapiens
  misc_RNA (1)...(19): siRNA sense strand
uuacaaguuugccaucuca

SEQ ID NO: 1133062 - RNA, 19 nt, Homo sapiens
  misc_RNA (1)...(19): siRNA sense strand
caucugcgcccucuucaug

SEQ ID NO: 1133063 - RNA, 19 nt, Homo sapiens
  misc_RNA (1)...(19): siRNA sense strand
gagggagcaugaucauugg

SEQ ID NO: 1133064 - RNA, 19 nt, Homo sapiens
  misc_RNA (1)...(19): siRNA sense strand
caauggacaggaucugaaa

SEQ ID NO: 1133065 - RNA, 19 nt, Homo sapiens
  misc_RNA (1)...(19): siRNA sense strand
cuacaacauuccacagaca

SEQ ID NO: 1133066 - RNA, 19 nt, Homo sapiens
  misc_RNA (1)...(19): siRNA sense strand
gacaggaucugaaaaugga

SEQ ID NO: 1133067 - RNA, 19 nt, Homo sapiens
  misc_RNA (1)...(19): siRNA sense strand
ggaguacaacuaugacaag

SEQ ID NO: 1133068 - RNA, 19 nt, Homo sapiens
  misc_RNA (1)...(19): siRNA sense strand
gcaccaccaaccuucguuu

SEQ ID NO: 1133069 - RNA, 19 nt, Homo sapiens
  misc_RNA (1)...(19): siRNA sense strand
ccaagacgacuguuacaag

SEQ ID NO: 1133070 - RNA, 19 nt, Homo sapiens
  misc_RNA (1)...(19): siRNA sense strand
gagaaguucccugaugguu

SEQ ID NO: 1133071 - RNA, 19 nt, Homo sapiens
  misc_RNA (1)...(19): siRNA sense strand
cugaagugcuggccucugu

SEQ ID NO: 1133072 - RNA, 19 nt, Homo sapiens
  misc_RNA (1)...(19): siRNA sense strand
caagaaaguguuugaagcu

SEQ ID NO: 1133073 - RNA, 19 nt, Homo sapiens
  misc_RNA (1)...(19): siRNA sense strand
agaaguucccugaugguuu

SEQ ID NO: 1133074 - RNA, 19 nt, Homo sapiens
  misc_RNA (1)...(19): siRNA sense strand
guggauacaggcagcagua

SEQ ID NO: 1133075 - RNA, 19 nt, Homo sapiens
  misc_RNA (1)...(19): siRNA sense strand
gggcagcuuuguggagaug

SEQ ID NO: 1133076 - RNA, 19 nt, Homo sapiens
  misc_RNA (1)...(19): siRNA sense strand
acggagaaguucccugaug

SEQ ID NO: 1133077 - RNA, 19 nt, Homo sapiens
  misc_RNA (1)...(19): siRNA sense strand
acacaggcagucucuggua

SEQ ID NO: 1133078 - RNA, 19 nt, Homo sapiens
  misc_RNA (1)...(19): siRNA sense strand
caagagcauuguggacagu

SEQ ID NO: 1133079 - RNA, 19 nt, Homo sapiens
  misc_RNA (1)...(19): siRNA sense strand
cacaggcagucucugguau

SEQ ID NO: 1133080 - RNA, 19 nt, Homo sapiens
  misc_RNA (1)...(19): siRNA sense strand
agacuguggcuacaacauu

SEQ ID NO: 1133081 - RNA, 19 nt, Homo sapiens
  misc_RNA (1)...(19): siRNA sense strand
gauacaggcagcaguaacu

SEQ ID NO: 1133082 - RNA, 19 nt, Homo sapiens
  misc_RNA (1)...(19): siRNA sense strand
ggcgggagugguauuauga

SEQ ID NO: 1133083 - RNA, 19 nt, Homo sapiens
  misc_RNA (1)...(19): siRNA sense strand
augaugacuuugcugauga

SEQ ID NO: 1133084 - RNA, 19 nt, Homo sapiens
  misc_RNA (1)...(19): siRNA sense strand
ucaauggacaggaucugaa

SEQ ID NO: 1133085 - RNA, 19 nt, Homo sapiens
  misc_RNA (1)...(19): siRNA sense strand
gcaugaucauuggagguau

SEQ ID NO: 1133086 - RNA, 19 nt, Homo sapiens
  misc_RNA (1)...(19): siRNA sense strand
caucucacucuaccuaaug

SEQ ID NO: 1133087 - RNA, 19 nt, Homo sapiens
  misc_RNA (1)...(19): siRNA sense strand
ucaucucacucuaccuaau

SEQ ID NO: 1133088 - RNA, 19 nt, Homo sapiens
  misc_RNA (1)...(19): siRNA sense strand
acaggcagcaguaacuuug

SEQ ID NO: 1133089 - RNA, 19 nt, Homo sapiens
  misc_RNA (1)...(19): siRNA sense strand
ggcagucucugguauacac

SEQ ID NO: 1133090 - RNA, 19 nt, Homo sapiens
  misc_RNA (1)...(19): siRNA sense strand
caugaucauuggagguauc

SEQ ID NO: 1133091 - RNA, 19 nt, Homo sapiens
  misc_RNA (1)...(19): siRNA sense strand
gcuacuacguggagaugac

SEQ ID NO: 1133092 - RNA, 19 nt, Homo sapiens
  misc_RNA (1)...(19): siRNA sense strand
aaccaguccuuccgcauca

SEQ ID NO: 1133093 - RNA, 19 nt, Homo sapiens
  misc_RNA (1)...(19): siRNA sense strand
acaggcagucucugguaua

SEQ ID NO: 1133094 - RNA, 19 nt, Homo sapiens
  misc_RNA (1)...(19): siRNA sense strand
guaucgaccacucgcugua

SEQ ID NO: 1133095 - RNA, 19 nt, Homo sapiens
  misc_RNA (1)...(19): siRNA sense strand
ugggagcuguuaucaugga

SEQ ID NO: 1133096 - RNA, 19 nt, Homo sapiens
  misc_RNA (1)...(19): siRNA sense strand
gccagcagcaugaugacuu

SEQ ID NO: 1133097 - RNA, 19 nt, Homo sapiens
  misc_RNA (1)...(19): siRNA sense strand
cauggagggcuucuacguu

SEQ ID NO: 1133098 - RNA, 19 nt, Homo sapiens
  misc_RNA (1)...(19): siRNA sense strand
caacuaugacaagagcauu

SEQ ID NO: 1133099 - RNA, 19 nt, Homo sapiens
  misc_RNA (1)...(19): siRNA sense strand
guuacaaguuugccaucuc

SEQ ID NO: 1133100 - RNA, 19 nt, Homo sapiens
  misc_RNA (1)...(19): siRNA sense strand
aaccuucguuugcccaaga

SEQ ID NO: 1133101 - RNA, 19 nt, Homo sapiens
  misc_RNA (1)...(19): siRNA sense strand
cugcaaggaguacaacuau

SEQ ID NO: 1133102 - RNA, 19 nt, Homo sapiens
  misc_RNA (1)...(19): siRNA sense strand
acaucucccugcugaagug

SEQ ID NO: 1133103 - RNA, 19 nt, Homo sapiens
  misc_RNA (1)...(19): siRNA sense strand
agucaucucacucuaccua

SEQ ID NO: 1133104 - RNA, 19 nt, Homo sapiens
  misc_RNA (1)...(19): siRNA sense strand
ggagaaguucccugauggu

SEQ ID NO: 1133105 - RNA, 19 nt, Homo sapiens
  misc_RNA (1)...(19): siRNA sense strand
gacgacuguuacaaguuug

SEQ ID NO: 1133106 - RNA, 19 nt, Homo sapiens
  misc_RNA (1)...(19): siRNA sense strand
ugacaucucccugcugaag

SEQ ID NO: 1133107 - RNA, 19 nt, Homo sapiens
  misc_RNA (1)...(19): siRNA sense strand
caacauuccacagacagau

SEQ ID NO: 1133108 - RNA, 19 nt, Homo sapiens
  misc_RNA (1)...(19): siRNA sense strand
gaagacuguggcuacaaca

SEQ ID NO: 1133109 - RNA, 19 nt, Homo sapiens
  misc_RNA (1)...(19): siRNA sense strand
cuucuacguugucuuugau

SEQ ID NO: 1133110 - RNA, 19 nt, Homo sapiens
  misc_RNA (1)...(19): siRNA sense strand
aaauggacugcaaggagua

SEQ ID NO: 1133111 - RNA, 19 nt, Homo sapiens
  misc_RNA (1)...(19): siRNA sense strand
gcagcuuuguggagauggu

SEQ ID NO: 1133112 - RNA, 19 nt, Homo sapiens
  misc_RNA (1)...(19): siRNA sense strand
ccggaaggguguguaugug

SEQ ID NO: 1133113 - RNA, 19 nt, Homo sapiens
  misc_RNA (1)...(19): siRNA sense strand
gccaugugcacgaugaguu

SEQ ID NO: 1133114 - RNA, 19 nt, Homo sapiens
  misc_RNA (1)...(19): siRNA sense strand
gaaguucccugaugguuuc

SEQ ID NO: 1133115 - RNA, 19 nt, Homo sapiens
  misc_RNA (1)...(19): siRNA sense strand
gcaaggaguacaacuauga

SEQ ID NO: 1133116 - RNA, 19 nt, Homo sapiens
  misc_RNA (1)...(19): siRNA sense strand
ggagggagcaugaucauug

SEQ ID NO: 1133117 - RNA, 19 nt, Homo sapiens
  misc_RNA (1)...(19): siRNA sense strand
uaugggagcuguuaucaug

SEQ ID NO: 1133118 - RNA, 19 nt, Homo sapiens
  misc_RNA (1)...(19): siRNA sense strand
agacgacuguuacaaguuu

SEQ ID NO: 1133119 - RNA, 19 nt, Homo sapiens
  misc_RNA (1)...(19): siRNA sense strand
ggagaucaauggacaggau

SEQ ID NO: 1133120 - RNA, 19 nt, Homo sapiens
  misc_RNA (1)...(19): siRNA sense strand
cgaauuggcuuugcuguca

SEQ ID NO: 1133121 - RNA, 19 nt, Homo sapiens
  misc_RNA (1)...(19): siRNA sense strand
caagacgacuguuacaagu

SEQ ID NO: 1133122 - RNA, 19 nt, Homo sapiens
  misc_RNA (1)...(19): siRNA sense strand
ggaagacuguggcuacaac

SEQ ID NO: 1133123 - RNA, 19 nt, Homo sapiens
  misc_RNA (1)...(19): siRNA sense strand
ccagcagcaugaugacuuu

SEQ ID NO: 1133124 - RNA, 19 nt, Homo sapiens
  misc_RNA (1)...(19): siRNA sense strand
gggcuucuacguugucuuu

SEQ ID NO: 1133125 - RNA, 19 nt, Homo sapiens
  misc_RNA (1)...(19): siRNA sense strand
ugucagcgcuugccaugug

SEQ ID NO: 1133126 - RNA, 19 nt, Homo sapiens
  misc_RNA (1)...(19): siRNA sense strand
caugaugacuuugcugaug

SEQ ID NO: 1133127 - RNA, 19 nt, Homo sapiens
  misc_RNA (1)...(19): siRNA sense strand
gaguacaacuaugacaaga

SEQ ID NO: 1133128 - RNA, 19 nt, Homo sapiens
  misc_RNA (1)...(19): siRNA sense strand
gcuucuacguugucuuuga

SEQ ID NO: 1133129 - RNA, 19 nt, Homo sapiens
  misc_RNA (1)...(19): siRNA sense strand
gacuguggcuacaacauuc

SEQ ID NO: 1133130 - RNA, 19 nt, Homo sapiens
  misc_RNA (1)...(19): siRNA sense strand
uuacaaguuugccaucuca

SEQ ID NO: 1133131 - RNA, 19 nt, Homo sapiens
  misc_RNA (1)...(19): siRNA sense strand
caucugcgcccucuucaug

SEQ ID NO: 1133132 - RNA, 19 nt, Homo sapiens
  misc_RNA (1)...(19): siRNA sense strand
gagggagcaugaucauugg

SEQ ID NO: 1133133 - RNA, 19 nt, Homo sapiens
  misc_RNA (1)...(19): siRNA sense strand
caauggacaggaucugaaa

SEQ ID NO: 1133134 - RNA, 19 nt, Homo sapiens
  misc_RNA (1)...(19): siRNA sense strand
cuacaacauuccacagaca

SEQ ID NO: 1133135 - RNA, 19 nt, Homo sapiens
  misc_RNA (1)...(19): siRNA sense strand
gacaggaucugaaaaugga

SEQ ID NO: 1133136 - RNA, 19 nt, Homo sapiens
  misc_RNA (1)...(19): siRNA sense strand
ggaguacaacuaugacaag

SEQ ID NO: 1133137 - RNA, 19 nt, Homo sapiens
  misc_RNA (1)...(19): siRNA sense strand
gcaccaccaaccuucguuu

SEQ ID NO: 1133138 - RNA, 19 nt, Homo sapiens
  misc_RNA (1)...(19): siRNA sense strand
ccaagacgacuguuacaag

SEQ ID NO: 1133139 - RNA, 19 nt, Homo sapiens
  misc_RNA (1)...(19): siRNA sense strand
gagaaguucccugaugguu

SEQ ID NO: 1133140 - RNA, 19 nt, Homo sapiens
  misc_RNA (1)...(19): siRNA sense strand
cugaagugcuggccucugu

SEQ ID NO: 1133141 - RNA, 19 nt, Homo sapiens
  misc_RNA (1)...(19): siRNA sense strand
caagaaaguguuugaagcu

SEQ ID NO: 1133142 - RNA, 19 nt, Homo sapiens
  misc_RNA (1)...(19): siRNA sense strand
agaaguucccugaugguuu

SEQ ID NO: 1133143 - RNA, 19 nt, Homo sapiens
  misc_RNA (1)...(19): siRNA sense strand
guggauacaggcagcagua

SEQ ID NO: 1133144 - RNA, 19 nt, Homo sapiens
  misc_RNA (1)...(19): siRNA sense strand
gggcagcuuuguggagaug

SEQ ID NO: 1133145 - RNA, 19 nt, Homo sapiens
  misc_RNA (1)...(19): siRNA sense strand
acggagaaguucccugaug

SEQ ID NO: 1133146 - RNA, 19 nt, Homo sapiens
  misc_RNA (1)...(19): siRNA sense strand
acacaggcagucucuggua

SEQ ID NO: 1133147 - RNA, 19 nt, Homo sapiens
  misc_RNA (1)...(19): siRNA sense strand
caagagcauuguggacagu

SEQ ID NO: 1133148 - RNA, 19 nt, Homo sapiens
  misc_RNA (1)...(19): siRNA sense strand
cacaggcagucucugguau

SEQ ID NO: 1133149 - RNA, 19 nt, Homo sapiens
  misc_RNA (1)...(19): siRNA sense strand
agacuguggcuacaacauu

SEQ ID NO: 1133150 - RNA, 19 nt, Homo sapiens
  misc_RNA (1)...(19): siRNA sense strand
gauacaggcagcaguaacu

SEQ ID NO: 1133151 - RNA, 19 nt, Homo sapiens
  misc_RNA (1)...(19): siRNA sense strand
ggcgggagugguauuauga

SEQ ID NO: 1133152 - RNA, 19 nt, Homo sapiens
  misc_RNA (1)...(19): siRNA sense strand
augaugacuuugcugauga

SEQ ID NO: 1133153 - RNA, 19 nt, Homo sapiens
  misc_RNA (1)...(19): siRNA sense strand
ucaauggacaggaucugaa

SEQ ID NO: 1133154 - RNA, 19 nt, Homo sapiens
  misc_RNA (1)...(19): siRNA sense strand
gcaugaucauuggagguau

SEQ ID NO: 1133155 - RNA, 19 nt, Homo sapiens
  misc_RNA (1)...(19): siRNA sense strand
caucucacucuaccuaaug

SEQ ID NO: 1133156 - RNA, 19 nt, Homo sapiens
  misc_RNA (1)...(19): siRNA sense strand
ucaucucacucuaccuaau

SEQ ID NO: 1133157 - RNA, 19 nt, Homo sapiens
  misc_RNA (1)...(19): siRNA sense strand
acaggcagcaguaacuuug

SEQ ID NO: 1133158 - RNA, 19 nt, Homo sapiens
  misc_RNA (1)...(19): siRNA sense strand
ggcagucucugguauacac

SEQ ID NO: 1133159 - RNA, 19 nt, Homo sapiens
  misc_RNA (1)...(19): siRNA sense strand
caugaucauuggagguauc

SEQ ID NO: 1133160 - RNA, 19 nt, Homo sapiens
  misc_RNA (1)...(19): siRNA sense strand
gcuacuacguggagaugac

SEQ ID NO: 1133161 - RNA, 19 nt, Homo sapiens
  misc_RNA (1)...(19): siRNA sense strand
aaccaguccuuccgcauca

SEQ ID NO: 1133162 - RNA, 19 nt, Homo sapiens
  misc_RNA (1)...(19): siRNA sense strand
acaggcagucucugguaua

SEQ ID NO: 1133163 - RNA, 19 nt, Homo sapiens
  misc_RNA (1)...(19): siRNA sense strand
guaucgaccacucgcugua

SEQ ID NO: 1133164 - RNA, 19 nt, Homo sapiens
  misc_RNA (1)...(19): siRNA sense strand
ugggagcuguuaucaugga

SEQ ID NO: 1133165 - RNA, 19 nt, Homo sapiens
  misc_RNA (1)...(19): siRNA sense strand
gccagcagcaugaugacuu

SEQ ID NO: 1133166 - RNA, 19 nt, Homo sapiens
  misc_RNA (1)...(19): siRNA sense strand
cauggagggcuucuacguu

SEQ ID NO: 1133167 - RNA, 19 nt, Homo sapiens
  misc_RNA (1)...(19): siRNA sense strand
caacuaugacaagagcauu

SEQ ID NO: 1133168 - RNA, 19 nt, Homo sapiens
  misc_RNA (1)...(19): siRNA sense strand
guuacaaguuugccaucuc

SEQ ID NO: 1133169 - RNA, 19 nt, Homo sapiens
  misc_RNA (1)...(19): siRNA sense strand
aaccuucguuugcccaaga

SEQ ID NO: 1133170 - RNA, 19 nt, Homo sapiens
  misc_RNA (1)...(19): siRNA sense strand
cugcaaggaguacaacuau

SEQ ID NO: 1133171 - RNA, 19 nt, Homo sapiens
  misc_RNA (1)...(19): siRNA sense strand
acaucucccugcugaagug

SEQ ID NO: 1133172 - RNA, 19 nt, Homo sapiens
  misc_RNA (1)...(19): siRNA sense strand
agucaucucacucuaccua

SEQ ID NO: 1133173 - RNA, 19 nt, Homo sapiens
  misc_RNA (1)...(19): siRNA sense strand
ggagaaguucccugauggu

SEQ ID NO: 1133174 - RNA, 19 nt, Homo sapiens
  misc_RNA (1)...(19): siRNA sense strand
gacgacuguuacaaguuug

SEQ ID NO: 1133175 - RNA, 19 nt, Homo sapiens
  misc_RNA (1)...(19): siRNA sense strand
ugacaucucccugcugaag

SEQ ID NO: 1133176 - RNA, 19 nt, Homo sapiens
  misc_RNA (1)...(19): siRNA sense strand
caacauuccacagacagau

SEQ ID NO: 1133177 - RNA, 19 nt, Homo sapiens
  misc_RNA (1)...(19): siRNA sense strand
gaagacuguggcuacaaca

SEQ ID NO: 1133178 - RNA, 19 nt, Homo sapiens
  misc_RNA (1)...(19): siRNA sense strand
cuucuacguugucuuugau

SEQ ID NO: 1133179 - RNA, 19 nt, Homo sapiens
  misc_RNA (1)...(19): siRNA sense strand
aaauggacugcaaggagua

SEQ ID NO: 1133180 - RNA, 19 nt, Homo sapiens
  misc_RNA (1)...(19): siRNA sense strand
gcagcuuuguggagauggu

SEQ ID NO: 1133181 - RNA, 19 nt, Homo sapiens
  misc_RNA (1)...(19): siRNA sense strand
ccggaaggguguguaugug

SEQ ID NO: 1133182 - RNA, 19 nt, Homo sapiens
  misc_RNA (1)...(19): siRNA sense strand
gccaugugcacgaugaguu

SEQ ID NO: 1133183 - RNA, 19 nt, Homo sapiens
  misc_RNA (1)...(19): siRNA sense strand
gaaguucccugaugguuuc

SEQ ID NO: 1133184 - RNA, 19 nt, Homo sapiens
  misc_RNA (1)...(19): siRNA sense strand
gcaaggaguacaacuauga

SEQ ID NO: 1133185 - RNA, 19 nt, Homo sapiens
  misc_RNA (1)...(19): siRNA sense strand
ggagggagcaugaucauug

SEQ ID NO: 1133186 - RNA, 19 nt, Homo sapiens
  misc_RNA (1)...(19): siRNA sense strand
uaugggagcuguuaucaug

SEQ ID NO: 1133187 - RNA, 19 nt, Homo sapiens
  misc_RNA (1)...(19): siRNA sense strand
agacgacuguuacaaguuu

SEQ ID NO: 1133188 - RNA, 19 nt, Homo sapiens
  misc_RNA (1)...(19): siRNA sense strand
ggagaucaauggacaggau

SEQ ID NO: 1133189 - RNA, 19 nt, Homo sapiens
  misc_RNA (1)...(19): siRNA sense strand
cgaauuggcuuugcuguca

SEQ ID NO: 1133190 - RNA, 19 nt, Homo sapiens
  misc_RNA (1)...(19): siRNA sense strand
caagacgacuguuacaagu

SEQ ID NO: 1133191 - RNA, 19 nt, Homo sapiens
  misc_RNA (1)...(19): siRNA sense strand
ggaagacuguggcuacaac

SEQ ID NO: 1133192 - RNA, 19 nt, Homo sapiens
  misc_RNA (1)...(19): siRNA sense strand
ccagcagcaugaugacuuu

SEQ ID NO: 1133193 - RNA, 19 nt, Homo sapiens
  misc_RNA (1)...(19): siRNA sense strand
gggcuucuacguugucuuu

SEQ ID NO: 1133194 - RNA, 19 nt, Homo sapiens
  misc_RNA (1)...(19): siRNA sense strand
ugucagcgcuugccaugug

SEQ ID NO: 1133195 - RNA, 19 nt, Homo sapiens
  misc_RNA (1)...(19): siRNA sense strand
caugaugacuuugcugaug

SEQ ID NO: 1133196 - RNA, 19 nt, Homo sapiens
  misc_RNA (1)...(19): siRNA sense strand
gaguacaacuaugacaaga

SEQ ID NO: 1133197 - RNA, 19 nt, Homo sapiens
  misc_RNA (1)...(19): siRNA sense strand
gcuucuacguugucuuuga

SEQ ID NO: 1133198 - RNA, 19 nt, Homo sapiens
  misc_RNA (1)...(19): siRNA sense strand
gacuguggcuacaacauuc

SEQ ID NO: 1133199 - RNA, 19 nt, Homo sapiens
  misc_RNA (1)...(19): siRNA sense strand
uuacaaguuugccaucuca

SEQ ID NO: 1133200 - RNA, 19 nt, Homo sapiens
  misc_RNA (1)...(19): siRNA sense strand
caucugcgcccucuucaug

SEQ ID NO: 1133201 - RNA, 19 nt, Homo sapiens
  misc_RNA (1)...(19): siRNA sense strand
gagggagcaugaucauugg

SEQ ID NO: 1133202 - RNA, 19 nt, Homo sapiens
  misc_RNA (1)...(19): siRNA sense strand
caauggacaggaucugaaa

SEQ ID NO: 1133203 - RNA, 19 nt, Homo sapiens
  misc_RNA (1)...(19): siRNA sense strand
cuacaacauuccacagaca

SEQ ID NO: 1133204 - RNA, 19 nt, Homo sapiens
  misc_RNA (1)...(19): siRNA sense strand
gacaggaucugaaaaugga

SEQ ID NO: 1133205 - RNA, 19 nt, Homo sapiens
  misc_RNA (1)...(19): siRNA sense strand
ggaguacaacuaugacaag

SEQ ID NO: 1133206 - RNA, 19 nt, Homo sapiens
  misc_RNA (1)...(19): siRNA sense strand
gcaccaccaaccuucguuu

SEQ ID NO: 1133207 - RNA, 19 nt, Homo sapiens
  misc_RNA (1)...(19): siRNA sense strand
ccaagacgacuguuacaag

SEQ ID NO: 1133208 - RNA, 19 nt, Homo sapiens
  misc_RNA (1)...(19): siRNA sense strand
gagaaguucccugaugguu

SEQ ID NO: 1133209 - RNA, 19 nt, Homo sapiens
  misc_RNA (1)...(19): siRNA sense strand
cugaagugcuggccucugu

SEQ ID NO: 1133210 - RNA, 19 nt, Homo sapiens
  misc_RNA (1)...(19): siRNA sense strand
caagaaaguguuugaagcu

SEQ ID NO: 1133211 - RNA, 19 nt, Homo sapiens
  misc_RNA (1)...(19): siRNA sense strand
agaaguucccugaugguuu

SEQ ID NO: 1133212 - RNA, 19 nt, Homo sapiens
  misc_RNA (1)...(19): siRNA sense strand
guggauacaggcagcagua

SEQ ID NO: 1133213 - RNA, 19 nt, Homo sapiens
  misc_RNA (1)...(19): siRNA sense strand
gggcagcuuuguggagaug

SEQ ID NO: 1133214 - RNA, 19 nt, Homo sapiens
  misc_RNA (1)...(19): siRNA sense strand
acggagaaguucccugaug

SEQ ID NO: 1133215 - RNA, 19 nt, Homo sapiens
  misc_RNA (1)...(19): siRNA sense strand
acacaggcagucucuggua

SEQ ID NO: 1133216 - RNA, 19 nt, Homo sapiens
  misc_RNA (1)...(19): siRNA sense strand
caagagcauuguggacagu

SEQ ID NO: 1133217 - RNA, 19 nt, Homo sapiens
  misc_RNA (1)...(19): siRNA sense strand
cacaggcagucucugguau

SEQ ID NO: 1133218 - RNA, 19 nt, Homo sapiens
  misc_RNA (1)...(19): siRNA sense strand
agacuguggcuacaacauu

SEQ ID NO: 1133219 - RNA, 19 nt, Homo sapiens
  misc_RNA (1)...(19): siRNA sense strand
gauacaggcagcaguaacu

SEQ ID NO: 1133220 - RNA, 19 nt, Homo sapiens
  misc_RNA (1)...(19): siRNA sense strand
ggcgggagugguauuauga

SEQ ID NO: 1133221 - RNA, 19 nt, Homo sapiens
  misc_RNA (1)...(19): siRNA sense strand
augaugacuuugcugauga

SEQ ID NO: 1133222 - RNA, 19 nt, Homo sapiens
  misc_RNA (1)...(19): siRNA sense strand
ucaauggacaggaucugaa

SEQ ID NO: 1133223 - RNA, 19 nt, Homo sapiens
  misc_RNA (1)...(19): siRNA sense strand
gcaugaucauuggagguau

SEQ ID NO: 1133224 - RNA, 19 nt, Homo sapiens
  misc_RNA (1)...(19): siRNA sense strand
caucucacucuaccuaaug

SEQ ID NO: 1133225 - RNA, 19 nt, Homo sapiens
  misc_RNA (1)...(19): siRNA sense strand
ucaucucacucuaccuaau

SEQ ID NO: 1133226 - RNA, 19 nt, Homo sapiens
  misc_RNA (1)...(19): siRNA sense strand
acaggcagcaguaacuuug

SEQ ID NO: 1133227 - RNA, 19 nt, Homo sapiens
  misc_RNA (1)...(19): siRNA sense strand
ggcagucucugguauacac

SEQ ID NO: 1133228 - RNA, 19 nt, Homo sapiens
  misc_RNA (1)...(19): siRNA sense strand
caugaucauuggagguauc

SEQ ID NO: 1133229 - RNA, 19 nt, Homo sapiens
  misc_RNA (1)...(19): siRNA sense strand
gcuacuacguggagaugac

SEQ ID NO: 1133230 - RNA, 19 nt, Homo sapiens
  misc_RNA (1)...(19): siRNA sense strand
aaccaguccuuccgcauca

SEQ ID NO: 1133231 - RNA, 19 nt, Homo sapiens
  misc_RNA (1)...(19): siRNA sense strand
acaggcagucucugguaua

SEQ ID NO: 1133232 - RNA, 19 nt, Homo sapiens
  misc_RNA (1)...(19): siRNA sense strand
guaucgaccacucgcugua

SEQ ID NO: 1133233 - RNA, 19 nt, Homo sapiens
  misc_RNA (1)...(19): siRNA sense strand
ugggagcuguuaucaugga

SEQ ID NO: 1133234 - RNA, 19 nt, Homo sapiens
  misc_RNA (1)...(19): siRNA sense strand
gccagcagcaugaugacuu

SEQ ID NO: 1133235 - RNA, 19 nt, Homo sapiens
  misc_RNA (1)...(19): siRNA sense strand
cauggagggcuucuacguu

SEQ ID NO: 1133236 - RNA, 19 nt, Homo sapiens
  misc_RNA (1)...(19): siRNA sense strand
caacuaugacaagagcauu

SEQ ID NO: 1133237 - RNA, 19 nt, Homo sapiens
  misc_RNA (1)...(19): siRNA sense strand
guuacaaguuugccaucuc

SEQ ID NO: 1133238 - RNA, 19 nt, Homo sapiens
  misc_RNA (1)...(19): siRNA sense strand
aaccuucguuugcccaaga

SEQ ID NO: 1133239 - RNA, 19 nt, Homo sapiens
  misc_RNA (1)...(19): siRNA sense strand
cugcaaggaguacaacuau

SEQ ID NO: 1133240 - RNA, 19 nt, Homo sapiens
  misc_RNA (1)...(19): siRNA sense strand
acaucucccugcugaagug

SEQ ID NO: 1133241 - RNA, 19 nt, Homo sapiens
  misc_RNA (1)...(19): siRNA sense strand
agucaucucacucuaccua

SEQ ID NO: 1133242 - RNA, 19 nt, Homo sapiens
  misc_RNA (1)...(19): siRNA sense strand
ggagaaguucccugauggu

SEQ ID NO: 1133243 - RNA, 19 nt, Homo sapiens
  misc_RNA (1)...(19): siRNA sense strand
gacgacuguuacaaguuug

SEQ ID NO: 1133244 - RNA, 19 nt, Homo sapiens
  misc_RNA (1)...(19): siRNA sense strand
ugacaucucccugcugaag

SEQ ID NO: 1133245 - RNA, 19 nt, Homo sapiens
  misc_RNA (1)...(19): siRNA sense strand
caacauuccacagacagau

SEQ ID NO: 1133246 - RNA, 19 nt, Homo sapiens
  misc_RNA (1)...(19): siRNA sense strand
gaagacuguggcuacaaca

SEQ ID NO: 1133247 - RNA, 19 nt, Homo sapiens
  misc_RNA (1)...(19): siRNA sense strand
cuucuacguugucuuugau

SEQ ID NO: 1133248 - RNA, 19 nt, Homo sapiens
  misc_RNA (1)...(19): siRNA sense strand
aaauggacugcaaggagua

SEQ ID NO: 1133249 - RNA, 19 nt, Homo sapiens
  misc_RNA (1)...(19): siRNA sense strand
gcagcuuuguggagauggu

SEQ ID NO: 1133250 - RNA, 19 nt, Homo sapiens
  misc_RNA (1)...(19): siRNA sense strand
ccggaaggguguguaugug

SEQ ID NO: 1133251 - RNA, 19 nt, Homo sapiens
  misc_RNA (1)...(19): siRNA sense strand
gccaugugcacgaugaguu

SEQ ID NO: 1133252 - RNA, 19 nt, Homo sapiens
  misc_RNA (1)...(19): siRNA sense strand
gaaguucccugaugguuuc

SEQ ID NO: 1133253 - RNA, 19 nt, Homo sapiens
  misc_RNA (1)...(19): siRNA sense strand
gcaaggaguacaacuauga

SEQ ID NO: 1133254 - RNA, 19 nt, Homo sapiens
  misc_RNA (1)...(19): siRNA sense strand
ggagggagcaugaucauug

SEQ ID NO: 1133255 - RNA, 19 nt, Homo sapiens
  misc_RNA (1)...(19): siRNA sense strand
uaugggagcuguuaucaug

SEQ ID NO: 1133256 - RNA, 19 nt, Homo sapiens
  misc_RNA (1)...(19): siRNA sense strand
agacgacuguuacaaguuu

SEQ ID NO: 1133257 - RNA, 19 nt, Homo sapiens
  misc_RNA (1)...(19): siRNA sense strand
ggagaucaauggacaggau

SEQ ID NO: 1133258 - RNA, 19 nt, Homo sapiens
  misc_RNA (1)...(19): siRNA sense strand
cgaauuggcuuugcuguca

SEQ ID NO: 1133259 - RNA, 19 nt, Homo sapiens
  misc_RNA (1)...(19): siRNA sense strand
caagacgacuguuacaagu

SEQ ID NO: 1133260 - RNA, 19 nt, Homo sapiens
  misc_RNA (1)...(19): siRNA sense strand
ggaagacuguggcuacaac

SEQ ID NO: 1133261 - RNA, 19 nt, Homo sapiens
  misc_RNA (1)...(19): siRNA sense strand
ccagcagcaugaugacuuu

SEQ ID NO: 1133262 - RNA, 19 nt, Homo sapiens
  misc_RNA (1)...(19): siRNA sense strand
gggcuucuacguugucuuu

SEQ ID NO: 1133263 - RNA, 19 nt, Homo sapiens
  misc_RNA (1)...(19): siRNA sense strand
ugucagcgcuugccaugug

SEQ ID NO: 1133264 - RNA, 19 nt, Homo sapiens
  misc_RNA (1)...(19): siRNA sense strand
caugaugacuuugcugaug

SEQ ID NO: 1133265 - RNA, 19 nt, Homo sapiens
  misc_RNA (1)...(19): siRNA sense strand
gaguacaacuaugacaaga

SEQ ID NO: 1133266 - RNA, 19 nt, Homo sapiens
  misc_RNA (1)...(19): siRNA sense strand
gcuucuacguugucuuuga

SEQ ID NO: 1133267 - RNA, 19 nt, Homo sapiens
  misc_RNA (1)...(19): siRNA sense strand
gacuguggcuacaacauuc

SEQ ID NO: 1133268 - RNA, 19 nt, Homo sapiens
  misc_RNA (1)...(19): siRNA sense strand
uuacaaguuugccaucuca

SEQ ID NO: 1133269 - RNA, 19 nt, Homo sapiens
  misc_RNA (1)...(19): siRNA sense strand
caucugcgcccucuucaug

SEQ ID NO: 1133270 - RNA, 19 nt, Homo sapiens
  misc_RNA (1)...(19): siRNA sense strand
gagggagcaugaucauugg

SEQ ID NO: 1133271 - RNA, 19 nt, Homo sapiens
  misc_RNA (1)...(19): siRNA sense strand
caauggacaggaucugaaa

SEQ ID NO: 1133272 - RNA, 19 nt, Homo sapiens
  misc_RNA (1)...(19): siRNA sense strand
cuacaacauuccacagaca

SEQ ID NO: 1133273 - RNA, 19 nt, Homo sapiens
  misc_RNA (1)...(19): siRNA sense strand
gacaggaucugaaaaugga

SEQ ID NO: 1133274 - RNA, 19 nt, Homo sapiens
  misc_RNA (1)...(19): siRNA sense strand
ggaguacaacuaugacaag

SEQ ID NO: 1133275 - RNA, 19 nt, Homo sapiens
  misc_RNA (1)...(19): siRNA sense strand
gcaccaccaaccuucguuu

SEQ ID NO: 1133276 - RNA, 19 nt, Homo sapiens
  misc_RNA (1)...(19): siRNA sense strand
ccaagacgacuguuacaag

SEQ ID NO: 1133277 - RNA, 19 nt, Homo sapiens
  misc_RNA (1)...(19): siRNA sense strand
gagaaguucccugaugguu

SEQ ID NO: 1133278 - RNA, 19 nt, Homo sapiens
  misc_RNA (1)...(19): siRNA sense strand
cugaagugcuggccucugu

SEQ ID NO: 1133279 - RNA, 19 nt, Homo sapiens
  misc_RNA (1)...(19): siRNA sense strand
caagaaaguguuugaagcu

SEQ ID NO: 1133280 - RNA, 19 nt, Homo sapiens
  misc_RNA (1)...(19): siRNA sense strand
agaaguucccugaugguuu

SEQ ID NO: 1133281 - RNA, 19 nt, Homo sapiens
  misc_RNA (1)...(19): siRNA sense strand
guggauacaggcagcagua

SEQ ID NO: 1133282 - RNA, 19 nt, Homo sapiens
  misc_RNA (1)...(19): siRNA sense strand
gggcagcuuuguggagaug

SEQ ID NO: 1133283 - RNA, 19 nt, Homo sapiens
  misc_RNA (1)...(19): siRNA sense strand
acggagaaguucccugaug

SEQ ID NO: 1133284 - RNA, 19 nt, Homo sapiens
  misc_RNA (1)...(19): siRNA sense strand
acacaggcagucucuggua

SEQ ID NO: 1133285 - RNA, 19 nt, Homo sapiens
  misc_RNA (1)...(19): siRNA sense strand
caagagcauuguggacagu

SEQ ID NO: 1133286 - RNA, 19 nt, Homo sapiens
  misc_RNA (1)...(19): siRNA sense strand
cacaggcagucucugguau

SEQ ID NO: 1133287 - RNA, 19 nt, Homo sapiens
  misc_RNA (1)...(19): siRNA sense strand
agacuguggcuacaacauu

SEQ ID NO: 1133288 - RNA, 19 nt, Homo sapiens
  misc_RNA (1)...(19): siRNA sense strand
gauacaggcagcaguaacu

SEQ ID NO: 1133289 - RNA, 19 nt, Homo sapiens
  misc_RNA (1)...(19): siRNA sense strand
ggcgggagugguauuauga

SEQ ID NO: 1133290 - RNA, 19 nt, Homo sapiens
  misc_RNA (1)...(19): siRNA sense strand
augaugacuuugcugauga

SEQ ID NO: 1133291 - RNA, 19 nt, Homo sapiens
  misc_RNA (1)...(19): siRNA sense strand
ucaauggacaggaucugaa

SEQ ID NO: 1133292 - RNA, 19 nt, Homo sapiens
  misc_RNA (1)...(19): siRNA sense strand
gcaugaucauuggagguau

SEQ ID NO: 1133293 - RNA, 19 nt, Homo sapiens
  misc_RNA (1)...(19): siRNA sense strand
caucucacucuaccuaaug

SEQ ID NO: 1133294 - RNA, 19 nt, Homo sapiens
  misc_RNA (1)...(19): siRNA sense strand
ucaucucacucuaccuaau

SEQ ID NO: 1133295 - RNA, 19 nt, Homo sapiens
  misc_RNA (1)...(19): siRNA sense strand
acaggcagcaguaacuuug

SEQ ID NO: 1133296 - RNA, 19 nt, Homo sapiens
  misc_RNA (1)...(19): siRNA sense strand
ggcagucucugguauacac

SEQ ID NO: 1133297 - RNA, 19 nt, Homo sapiens
  misc_RNA (1)...(19): siRNA sense strand
caugaucauuggagguauc

SEQ ID NO: 1133298 - RNA, 19 nt, Homo sapiens
  misc_RNA (1)...(19): siRNA sense strand
gcuacuacguggagaugac

SEQ ID NO: 1133299 - RNA, 19 nt, Homo sapiens
  misc_RNA (1)...(19): siRNA sense strand
aaccaguccuuccgcauca

SEQ ID NO: 1133300 - RNA, 19 nt, Homo sapiens
  misc_RNA (1)...(19): siRNA sense strand
acaggcagucucugguaua

SEQ ID NO: 1133301 - RNA, 19 nt, Homo sapiens
  misc_RNA (1)...(19): siRNA sense strand
guaucgaccacucgcugua

SEQ ID NO: 1133302 - RNA, 19 nt, Homo sapiens
  misc_RNA (1)...(19): siRNA sense strand
ugggagcuguuaucaugga

SEQ ID NO: 1133303 - RNA, 19 nt, Homo sapiens
  misc_RNA (1)...(19): siRNA sense strand
gccagcagcaugaugacuu

SEQ ID NO: 1133304 - RNA, 19 nt, Homo sapiens
  misc_RNA (1)...(19): siRNA sense strand
cauggagggcuucuacguu

SEQ ID NO: 1133305 - RNA, 19 nt, Homo sapiens
  misc_RNA (1)...(19): siRNA sense strand
caacuaugacaagagcauu

SEQ ID NO: 1133306 - RNA, 19 nt, Homo sapiens
  misc_RNA (1)...(19): siRNA sense strand
guuacaaguuugccaucuc

SEQ ID NO: 1133307 - RNA, 19 nt, Homo sapiens
  misc_RNA (1)...(19): siRNA sense strand
aaccuucguuugcccaaga

SEQ ID NO: 1133308 - RNA, 19 nt, Homo sapiens
  misc_RNA (1)...(19): siRNA sense strand
cugcaaggaguacaacuau

SEQ ID NO: 1133309 - RNA, 19 nt, Homo sapiens
  misc_RNA (1)...(19): siRNA sense strand
acaucucccugcugaagug

SEQ ID NO: 1133310 - RNA, 19 nt, Homo sapiens
  misc_RNA (1)...(19): siRNA sense strand
agucaucucacucuaccua

SEQ ID NO: 1133311 - RNA, 19 nt, Homo sapiens
  misc_RNA (1)...(19): siRNA sense strand
ggagaaguucccugauggu

SEQ ID NO: 1133312 - RNA, 19 nt, Homo sapiens
  misc_RNA (1)...(19): siRNA sense strand
gacgacuguuacaaguuug

SEQ ID NO: 1133313 - RNA, 19 nt, Homo sapiens
  misc_RNA (1)...(19): siRNA sense strand
ugacaucucccugcugaag

SEQ ID NO: 1133314 - RNA, 19 nt, Homo sapiens
  misc_RNA (1)...(19): siRNA sense strand
caacauuccacagacagau

SEQ ID NO: 1133315 - RNA, 19 nt, Homo sapiens
  misc_RNA (1)...(19): siRNA sense strand
gaagacuguggcuacaaca

SEQ ID NO: 1133316 - RNA, 19 nt, Homo sapiens
  misc_RNA (1)...(19): siRNA sense strand
cuucuacguugucuuugau

SEQ ID NO: 1133317 - RNA, 19 nt, Homo sapiens
  misc_RNA (1)...(19): siRNA sense strand
aaauggacugcaaggagua

SEQ ID NO: 1133318 - RNA, 19 nt, Homo sapiens
  misc_RNA (1)...(19): siRNA sense strand
gcagcuuuguggagauggu

SEQ ID NO: 1133319 - RNA, 19 nt, Homo sapiens
  misc_RNA (1)...(19): siRNA sense strand
ccggaaggguguguaugug

SEQ ID NO: 1133320 - RNA, 19 nt, Homo sapiens
  misc_RNA (1)...(19): siRNA sense strand
gccaugugcacgaugaguu

SEQ ID NO: 1133321 - RNA, 19 nt, Homo sapiens
  misc_RNA (1)...(19): siRNA sense strand
gaaguucccugaugguuuc

SEQ ID NO: 1133322 - RNA, 19 nt, Homo sapiens
  misc_RNA (1)...(19): siRNA sense strand
gcaaggaguacaacuauga

SEQ ID NO: 1133323 - RNA, 19 nt, Homo sapiens
  misc_RNA (1)...(19): siRNA sense strand
ggagggagcaugaucauug

SEQ ID NO: 1133324 - RNA, 19 nt, Homo sapiens
  misc_RNA (1)...(19): siRNA sense strand
uaugggagcuguuaucaug

SEQ ID NO: 1133325 - RNA, 19 nt, Homo sapiens
  misc_RNA (1)...(19): siRNA sense strand
agacgacuguuacaaguuu

SEQ ID NO: 1133326 - RNA, 19 nt, Homo sapiens
  misc_RNA (1)...(19): siRNA sense strand
ggagaucaauggacaggau

SEQ ID NO: 1133327 - RNA, 19 nt, Homo sapiens
  misc_RNA (1)...(19): siRNA sense strand
cgaauuggcuuugcuguca

SEQ ID NO: 1133328 - RNA, 19 nt, Homo sapiens
  misc_RNA (1)...(19): siRNA sense strand
caagacgacuguuacaagu

SEQ ID NO: 1133329 - RNA, 19 nt, Homo sapiens
  misc_RNA (1)...(19): siRNA sense strand
ggaagacuguggcuacaac

SEQ ID NO: 1133330 - RNA, 19 nt, Homo sapiens
  misc_RNA (1)...(19): siRNA sense strand
ccagcagcaugaugacuuu

SEQ ID NO: 1133331 - RNA, 19 nt, Homo sapiens
  misc_RNA (1)...(19): siRNA sense strand
gggcuucuacguugucuuu

SEQ ID NO: 1133332 - RNA, 19 nt, Homo sapiens
  misc_RNA (1)...(19): siRNA sense strand
ugucagcgcuugccaugug

SEQ ID NO: 1133333 - RNA, 19 nt, Homo sapiens
  misc_RNA (1)...(19): siRNA sense strand
caugaugacuuugcugaug

SEQ ID NO: 1133334 - RNA, 19 nt, Homo sapiens
  misc_RNA (1)...(19): siRNA sense strand
gaguacaacuaugacaaga

SEQ ID NO: 1133335 - RNA, 19 nt, Homo sapiens
  misc_RNA (1)...(19): siRNA sense strand
gcuucuacguugucuuuga

SEQ ID NO: 1133336 - RNA, 19 nt, Homo sapiens
  misc_RNA (1)...(19): siRNA sense strand
gacuguggcuacaacauuc

SEQ ID NO: 1133337 - RNA, 19 nt, Homo sapiens
  misc_RNA (1)...(19): siRNA sense strand
uuacaaguuugccaucuca

SEQ ID NO: 1133338 - RNA, 19 nt, Homo sapiens
  misc_RNA (1)...(19): siRNA sense strand
caucugcgcccucuucaug

SEQ ID NO: 1133339 - RNA, 19 nt, Homo sapiens
  misc_RNA (1)...(19): siRNA sense strand
gagggagcaugaucauugg

SEQ ID NO: 1133340 - RNA, 19 nt, Homo sapiens
  misc_RNA (1)...(19): siRNA sense strand
caauggacaggaucugaaa

SEQ ID NO: 1133341 - RNA, 19 nt, Homo sapiens
  misc_RNA (1)...(19): siRNA sense strand
cuacaacauuccacagaca

SEQ ID NO: 1133342 - RNA, 19 nt, Homo sapiens
  misc_RNA (1)...(19): siRNA sense strand
gacaggaucugaaaaugga

SEQ ID NO: 1133343 - RNA, 19 nt, Homo sapiens
  misc_RNA (1)...(19): siRNA sense strand
ggaguacaacuaugacaag

SEQ ID NO: 1133344 - RNA, 19 nt, Homo sapiens
  misc_RNA (1)...(19): siRNA sense strand
gcaccaccaaccuucguuu

SEQ ID NO: 1133345 - RNA, 19 nt, Homo sapiens
  misc_RNA (1)...(19): siRNA sense strand
ccaagacgacuguuacaag

SEQ ID NO: 1133346 - RNA, 19 nt, Homo sapiens
  misc_RNA (1)...(19): siRNA sense strand
gagaaguucccugaugguu

SEQ ID NO: 1133347 - RNA, 19 nt, Homo sapiens
  misc_RNA (1)...(19): siRNA sense strand
cugaagugcuggccucugu

SEQ ID NO: 1133348 - RNA, 19 nt, Homo sapiens
  misc_RNA (1)...(19): siRNA sense strand
caagaaaguguuugaagcu

SEQ ID NO: 1133349 - RNA, 19 nt, Homo sapiens
  misc_RNA (1)...(19): siRNA sense strand
agaaguucccugaugguuu

SEQ ID NO: 1133350 - RNA, 19 nt, Homo sapiens
  misc_RNA (1)...(19): siRNA sense strand
guggauacaggcagcagua

SEQ ID NO: 1133351 - RNA, 19 nt, Homo sapiens
  misc_RNA (1)...(19): siRNA sense strand
gggcagcuuuguggagaug

SEQ ID NO: 1133352 - RNA, 19 nt, Homo sapiens
  misc_RNA (1)...(19): siRNA sense strand
acggagaaguucccugaug

SEQ ID NO: 1133353 - RNA, 19 nt, Homo sapiens
  misc_RNA (1)...(19): siRNA sense strand
acacaggcagucucuggua

SEQ ID NO: 1133354 - RNA, 19 nt, Homo sapiens
  misc_RNA (1)...(19): siRNA sense strand
caagagcauuguggacagu

SEQ ID NO: 1133355 - RNA, 19 nt, Homo sapiens
  misc_RNA (1)...(19): siRNA sense strand
cacaggcagucucugguau

SEQ ID NO: 1133356 - RNA, 19 nt, Homo sapiens
  misc_RNA (1)...(19): siRNA sense strand
agacuguggcuacaacauu

SEQ ID NO: 1133357 - RNA, 19 nt, Homo sapiens
  misc_RNA (1)...(19): siRNA sense strand
gauacaggcagcaguaacu

SEQ ID NO: 1133358 - RNA, 19 nt, Homo sapiens
  misc_RNA (1)...(19): siRNA sense strand
ggcgggagugguauuauga

SEQ ID NO: 1133359 - RNA, 19 nt, Homo sapiens
  misc_RNA (1)...(19): siRNA sense strand
augaugacuuugcugauga

SEQ ID NO: 1133360 - RNA, 19 nt, Homo sapiens
  misc_RNA (1)...(19): siRNA sense strand
ucaauggacaggaucugaa

SEQ ID NO: 1133361 - RNA, 19 nt, Homo sapiens
  misc_RNA (1)...(19): siRNA sense strand
gcaugaucauuggagguau

SEQ ID NO: 1133362 - RNA, 19 nt, Homo sapiens
  misc_RNA (1)...(19): siRNA sense strand
caucucacucuaccuaaug

SEQ ID NO: 1133363 - RNA, 19 nt, Homo sapiens
  misc_RNA (1)...(19): siRNA sense strand
ucaucucacucuaccuaau

SEQ ID NO: 1133364 - RNA, 19 nt, Homo sapiens
  misc_RNA (1)...(19): siRNA sense strand
acaggcagcaguaacuuug

SEQ ID NO: 1133365 - RNA, 19 nt, Homo sapiens
  misc_RNA (1)...(19): siRNA sense strand
ggcagucucugguauacac

SEQ ID NO: 1133366 - RNA, 19 nt, Homo sapiens
  misc_RNA (1)...(19): siRNA sense strand
caugaucauuggagguauc

SEQ ID NO: 1133367 - RNA, 19 nt, Homo sapiens
  misc_RNA (1)...(19): siRNA sense strand
gcuacuacguggagaugac

SEQ ID NO: 1133368 - RNA, 19 nt, Homo sapiens
  misc_RNA (1)...(19): siRNA sense strand
aaccaguccuuccgcauca

SEQ ID NO: 1133369 - RNA, 19 nt, Homo sapiens
  misc_RNA (1)...(19): siRNA sense strand
acaggcagucucugguaua

SEQ ID NO: 1133370 - RNA, 19 nt, Homo sapiens
  misc_RNA (1)...(19): siRNA sense strand
guaucgaccacucgcugua

SEQ ID NO: 1133371 - RNA, 19 nt, Homo sapiens
  misc_RNA (1)...(19): siRNA sense strand
ugggagcuguuaucaugga

SEQ ID NO: 1133372 - RNA, 19 nt, Homo sapiens
  misc_RNA (1)...(19): siRNA sense strand
gccagcagcaugaugacuu

SEQ ID NO: 1133373 - RNA, 19 nt, Homo sapiens
  misc_RNA (1)...(19): siRNA sense strand
cauggagggcuucuacguu

SEQ ID NO: 1133374 - RNA, 19 nt, Homo sapiens
  misc_RNA (1)...(19): siRNA sense strand
caacuaugacaagagcauu

SEQ ID NO: 1133375 - RNA, 19 nt, Homo sapiens
  misc_RNA (1)...(19): siRNA sense strand
guuacaaguuugccaucuc

SEQ ID NO: 1133376 - RNA, 19 nt, Homo sapiens
  misc_RNA (1)...(19): siRNA sense strand
aaccuucguuugcccaaga

SEQ ID NO: 1133377 - RNA, 19 nt, Homo sapiens
  misc_RNA (1)...(19): siRNA sense strand
cugcaaggaguacaacuau

SEQ ID NO: 1133378 - RNA, 19 nt, Homo sapiens
  misc_RNA (1)...(19): siRNA sense strand
acaucucccugcugaagug

SEQ ID NO: 1133379 - RNA, 19 nt, Homo sapiens
  misc_RNA (1)...(19): siRNA sense strand
agucaucucacucuaccua

SEQ ID NO: 1133380 - RNA, 19 nt, Homo sapiens
  misc_RNA (1)...(19): siRNA sense strand
ggagaaguucccugauggu

SEQ ID NO: 1133381 - RNA, 19 nt, Homo sapiens
  misc_RNA (1)...(19): siRNA sense strand
gacgacuguuacaaguuug

SEQ ID NO: 1133382 - RNA, 19 nt, Homo sapiens
  misc_RNA (1)...(19): siRNA sense strand
ugacaucucccugcugaag

SEQ ID NO: 1133383 - RNA, 19 nt, Homo sapiens
  misc_RNA (1)...(19): siRNA sense strand
caacauuccacagacagau

SEQ ID NO: 1133384 - RNA, 19 nt, Homo sapiens
  misc_RNA (1)...(19): siRNA sense strand
gaagacuguggcuacaaca

SEQ ID NO: 1133385 - RNA, 19 nt, Homo sapiens
  misc_RNA (1)...(19): siRNA sense strand
cuucuacguugucuuugau

SEQ ID NO: 1133386 - RNA, 19 nt, Homo sapiens
  misc_RNA (1)...(19): siRNA sense strand
aaauggacugcaaggagua

SEQ ID NO: 1133387 - RNA, 19 nt, Homo sapiens
  misc_RNA (1)...(19): siRNA sense strand
gcagcuuuguggagauggu

SEQ ID NO: 1133388 - RNA, 19 nt, Homo sapiens
  misc_RNA (1)...(19): siRNA sense strand
ccggaaggguguguaugug

SEQ ID NO: 1133389 - RNA, 19 nt, Homo sapiens
  misc_RNA (1)...(19): siRNA sense strand
gccaugugcacgaugaguu

SEQ ID NO: 1133390 - RNA, 19 nt, Homo sapiens
  misc_RNA (1)...(19): siRNA sense strand
gaaguucccugaugguuuc

SEQ ID NO: 1133391 - RNA, 19 nt, Homo sapiens
  misc_RNA (1)...(19): siRNA sense strand
gcaaggaguacaacuauga

SEQ ID NO: 1133392 - RNA, 19 nt, Homo sapiens
  misc_RNA (1)...(19): siRNA sense strand
ggagggagcaugaucauug

SEQ ID NO: 1133393 - RNA, 19 nt, Homo sapiens
  misc_RNA (1)...(19): siRNA sense strand
uaugggagcuguuaucaug

SEQ ID NO: 1133394 - RNA, 19 nt, Homo sapiens
  misc_RNA (1)...(19): siRNA sense strand
agacgacuguuacaaguuu

SEQ ID NO: 1133395 - RNA, 19 nt, Homo sapiens
  misc_RNA (1)...(19): siRNA sense strand
ggagaucaauggacaggau

SEQ ID NO: 1133396 - RNA, 19 nt, Homo sapiens
  misc_RNA (1)...(19): siRNA sense strand
cgaauuggcuuugcuguca

SEQ ID NO: 1133397 - RNA, 19 nt, Homo sapiens
  misc_RNA (1)...(19): siRNA sense strand
caagacgacuguuacaagu

SEQ ID NO: 1133398 - RNA, 19 nt, Homo sapiens
  misc_RNA (1)...(19): siRNA sense strand
ggaagacuguggcuacaac

SEQ ID NO: 1133399 - RNA, 19 nt, Homo sapiens
  misc_RNA (1)...(19): siRNA sense strand
ccagcagcaugaugacuuu

SEQ ID NO: 1133400 - RNA, 19 nt, Homo sapiens
  misc_RNA (1)...(19): siRNA sense strand
gggcuucuacguugucuuu

SEQ ID NO: 1133401 - RNA, 19 nt, Homo sapiens
  misc_RNA (1)...(19): siRNA sense strand
ugucagcgcuugccaugug

SEQ ID NO: 1133402 - RNA, 19 nt, Homo sapiens
  misc_RNA (1)...(19): siRNA sense strand
caugaugacuuugcugaug

SEQ ID NO: 1133403 - RNA, 19 nt, Homo sapiens
  misc_RNA (1)...(19): siRNA sense strand
gaguacaacuaugacaaga

SEQ ID NO: 1133404 - RNA, 19 nt, Homo sapiens
  misc_RNA (1)...(19): siRNA sense strand
gcuucuacguugucuuuga

SEQ ID NO: 1133405 - RNA, 19 nt, Homo sapiens
  misc_RNA (1)...(19): siRNA sense strand
gacuguggcuacaacauuc

SEQ ID NO: 1133406 - RNA, 19 nt, Homo sapiens
  misc_RNA (1)...(19): siRNA sense strand
uuacaaguuugccaucuca

SEQ ID NO: 1133407 - RNA, 19 nt, Homo sapiens
  misc_RNA (1)...(19): siRNA sense strand
caucugcgcccucuucaug

SEQ ID NO: 1133408 - RNA, 19 nt, Homo sapiens
  misc_RNA (1)...(19): siRNA sense strand
gagggagcaugaucauugg

SEQ ID NO: 1133409 - RNA, 19 nt, Homo sapiens
  misc_RNA (1)...(19): siRNA sense strand
caauggacaggaucugaaa

SEQ ID NO: 1133410 - RNA, 19 nt, Homo sapiens
  misc_RNA (1)...(19): siRNA sense strand
cuacaacauuccacagaca

SEQ ID NO: 1133411 - RNA, 19 nt, Homo sapiens
  misc_RNA (1)...(19): siRNA sense strand
gacaggaucugaaaaugga

SEQ ID NO: 1133412 - RNA, 19 nt, Homo sapiens
  misc_RNA (1)...(19): siRNA sense strand
ggaguacaacuaugacaag

SEQ ID NO: 1133413 - RNA, 19 nt, Homo sapiens
  misc_RNA (1)...(19): siRNA sense strand
gcaccaccaaccuucguuu

SEQ ID NO: 1133414 - RNA, 19 nt, Homo sapiens
  misc_RNA (1)...(19): siRNA sense strand
ccaagacgacuguuacaag

SEQ ID NO: 1133415 - RNA, 19 nt, Homo sapiens
  misc_RNA (1)...(19): siRNA sense strand
gagaaguucccugaugguu

SEQ ID NO: 1133416 - RNA, 19 nt, Homo sapiens
  misc_RNA (1)...(19): siRNA sense strand
cugaagugcuggccucugu

SEQ ID NO: 1133417 - RNA, 19 nt, Homo sapiens
  misc_RNA (1)...(19): siRNA sense strand
caagaaaguguuugaagcu

SEQ ID NO: 1133418 - RNA, 19 nt, Homo sapiens
  misc_RNA (1)...(19): siRNA sense strand
agaaguucccugaugguuu

SEQ ID NO: 1133419 - RNA, 19 nt, Homo sapiens
  misc_RNA (1)...(19): siRNA sense strand
guggauacaggcagcagua

SEQ ID NO: 1133420 - RNA, 19 nt, Homo sapiens
  misc_RNA (1)...(19): siRNA sense strand
gggcagcuuuguggagaug

SEQ ID NO: 1133421 - RNA, 19 nt, Homo sapiens
  misc_RNA (1)...(19): siRNA sense strand
acggagaaguucccugaug

SEQ ID NO: 1133422 - RNA, 19 nt, Homo sapiens
  misc_RNA (1)...(19): siRNA sense strand
acacaggcagucucuggua

SEQ ID NO: 1133423 - RNA, 19 nt, Homo sapiens
  misc_RNA (1)...(19): siRNA sense strand
caagagcauuguggacagu

SEQ ID NO: 1133424 - RNA, 19 nt, Homo sapiens
  misc_RNA (1)...(19): siRNA sense strand
cacaggcagucucugguau

SEQ ID NO: 1133425 - RNA, 19 nt, Homo sapiens
  misc_RNA (1)...(19): siRNA sense strand
agacuguggcuacaacauu

SEQ ID NO: 1133426 - RNA, 19 nt, Homo sapiens
  misc_RNA (1)...(19): siRNA sense strand
gauacaggcagcaguaacu

SEQ ID NO: 1133427 - RNA, 19 nt, Homo sapiens
  misc_RNA (1)...(19): siRNA sense strand
ggcgggagugguauuauga

SEQ ID NO: 1133428 - RNA, 19 nt, Homo sapiens
  misc_RNA (1)...(19): siRNA sense strand
augaugacuuugcugauga

SEQ ID NO: 1133429 - RNA, 19 nt, Homo sapiens
  misc_RNA (1)...(19): siRNA sense strand
ucaauggacaggaucugaa

SEQ ID NO: 1133430 - RNA, 19 nt, Homo sapiens
  misc_RNA (1)...(19): siRNA sense strand
gcaugaucauuggagguau

SEQ ID NO: 1133431 - RNA, 19 nt, Homo sapiens
  misc_RNA (1)...(19): siRNA sense strand
caucucacucuaccuaaug

SEQ ID NO: 1133432 - RNA, 19 nt, Homo sapiens
  misc_RNA (1)...(19): siRNA sense strand
ucaucucacucuaccuaau

SEQ ID NO: 1133433 - RNA, 19 nt, Homo sapiens
  misc_RNA (1)...(19): siRNA sense strand
acaggcagcaguaacuuug

SEQ ID NO: 1133434 - RNA, 19 nt, Homo sapiens
  misc_RNA (1)...(19): siRNA sense strand
ggcagucucugguauacac

SEQ ID NO: 1133435 - RNA, 19 nt, Homo sapiens
  misc_RNA (1)...(19): siRNA sense strand
caugaucauuggagguauc

SEQ ID NO: 1133436 - RNA, 19 nt, Homo sapiens
  misc_RNA (1)...(19): siRNA sense strand
gcuacuacguggagaugac

SEQ ID NO: 1133437 - RNA, 19 nt, Homo sapiens
  misc_RNA (1)...(19): siRNA sense strand
aaccaguccuuccgcauca

SEQ ID NO: 1133438 - RNA, 19 nt, Homo sapiens
  misc_RNA (1)...(19): siRNA sense strand
acaggcagucucugguaua

SEQ ID NO: 1133439 - RNA, 19 nt, Homo sapiens
  misc_RNA (1)...(19): siRNA sense strand
guaucgaccacucgcugua

SEQ ID NO: 1133440 - RNA, 19 nt, Homo sapiens
  misc_RNA (1)...(19): siRNA sense strand
ugggagcuguuaucaugga

SEQ ID NO: 1133441 - RNA, 19 nt, Homo sapiens
  misc_RNA (1)...(19): siRNA sense strand
gccagcagcaugaugacuu

SEQ ID NO: 1133442 - RNA, 19 nt, Homo sapiens
  misc_RNA (1)...(19): siRNA sense strand
cauggagggcuucuacguu

SEQ ID NO: 1133443 - RNA, 19 nt, Homo sapiens
  misc_RNA (1)...(19): siRNA sense strand
caacuaugacaagagcauu

SEQ ID NO: 1133444 - RNA, 19 nt, Homo sapiens
  misc_RNA (1)...(19): siRNA sense strand
guuacaaguuugccaucuc

SEQ ID NO: 1133445 - RNA, 19 nt, Homo sapiens
  misc_RNA (1)...(19): siRNA sense strand
aaccuucguuugcccaaga

SEQ ID NO: 1133446 - RNA, 19 nt, Homo sapiens
  misc_RNA (1)...(19): siRNA sense strand
cugcaaggaguacaacuau

SEQ ID NO: 1133447 - RNA, 19 nt, Homo sapiens
  misc_RNA (1)...(19): siRNA sense strand
acaucucccugcugaagug

SEQ ID NO: 1133448 - RNA, 19 nt, Homo sapiens
  misc_RNA (1)...(19): siRNA sense strand
agucaucucacucuaccua

SEQ ID NO: 1133449 - RNA, 19 nt, Homo sapiens
  misc_RNA (1)...(19): siRNA sense strand
ggagaaguucccugauggu

SEQ ID NO: 1133450 - RNA, 19 nt, Homo sapiens
  misc_RNA (1)...(19): siRNA sense strand
gacgacuguuacaaguuug

SEQ ID NO: 1133451 - RNA, 19 nt, Homo sapiens
  misc_RNA (1)...(19): siRNA sense strand
ugacaucucccugcugaag

SEQ ID NO: 1133452 - RNA, 19 nt, Homo sapiens
  misc_RNA (1)...(19): siRNA sense strand
caacauuccacagacagau

SEQ ID NO: 1133453 - RNA, 19 nt, Homo sapiens
  misc_RNA (1)...(19): siRNA sense strand
gaagacuguggcuacaaca

SEQ ID NO: 1133454 - RNA, 19 nt, Homo sapiens
  misc_RNA (1)...(19): siRNA sense strand
cuucuacguugucuuugau

SEQ ID NO: 1133455 - RNA, 19 nt, Homo sapiens
  misc_RNA (1)...(19): siRNA sense strand
aaauggacugcaaggagua

SEQ ID NO: 1133456 - RNA, 19 nt, Homo sapiens
  misc_RNA (1)...(19): siRNA sense strand
gcagcuuuguggagauggu

SEQ ID NO: 1133457 - RNA, 19 nt, Homo sapiens
  misc_RNA (1)...(19): siRNA sense strand
ccggaaggguguguaugug

SEQ ID NO: 1133458 - RNA, 19 nt, Homo sapiens
  misc_RNA (1)...(19): siRNA sense strand
gccaugugcacgaugaguu

SEQ ID NO: 1133459 - RNA, 19 nt, Homo sapiens
  misc_RNA (1)...(19): siRNA sense strand
gaaguucccugaugguuuc

SEQ ID NO: 1133460 - RNA, 19 nt, Homo sapiens
  misc_RNA (1)...(19): siRNA sense strand
gcaaggaguacaacuauga

SEQ ID NO: 1133461 - RNA, 19 nt, Homo sapiens
  misc_RNA (1)...(19): siRNA sense strand
ggagggagcaugaucauug

SEQ ID NO: 1133462 - RNA, 19 nt, Homo sapiens
  misc_RNA (1)...(19): siRNA sense strand
uaugggagcuguuaucaug

SEQ ID NO: 1133463 - RNA, 19 nt, Homo sapiens
  misc_RNA (1)...(19): siRNA sense strand
agacgacuguuacaaguuu

SEQ ID NO: 1133464 - RNA, 19 nt, Homo sapiens
  misc_RNA (1)...(19): siRNA sense strand
ggagaucaauggacaggau

SEQ ID NO: 1133465 - RNA, 19 nt, Homo sapiens
  misc_RNA (1)...(19): siRNA sense strand
cgaauuggcuuugcuguca

SEQ ID NO: 1133466 - RNA, 19 nt, Homo sapiens
  misc_RNA (1)...(19): siRNA sense strand
caagacgacuguuacaagu

SEQ ID NO: 1133467 - RNA, 19 nt, Homo sapiens
  misc_RNA (1)...(19): siRNA sense strand
ggaagacuguggcuacaac

SEQ ID NO: 1133468 - RNA, 19 nt, Homo sapiens
  misc_RNA (1)...(19): siRNA sense strand
ccagcagcaugaugacuuu

SEQ ID NO: 1133469 - RNA, 19 nt, Homo sapiens
  misc_RNA (1)...(19): siRNA sense strand
gggcuucuacguugucuuu

SEQ ID NO: 1133470 - RNA, 19 nt, Homo sapiens
  misc_RNA (1)...(19): siRNA sense strand
ugucagcgcuugccaugug

SEQ ID NO: 1133471 - RNA, 19 nt, Homo sapiens
  misc_RNA (1)...(19): siRNA sense strand
caugaugacuuugcugaug

SEQ ID NO: 1133472 - RNA, 19 nt, Homo sapiens
  misc_RNA (1)...(19): siRNA sense strand
gaguacaacuaugacaaga

SEQ ID NO: 1133473 - RNA, 19 nt, Homo sapiens
  misc_RNA (1)...(19): siRNA sense strand
gcuucuacguugucuuuga

SEQ ID NO: 1133474 - RNA, 19 nt, Homo sapiens
  misc_RNA (1)...(19): siRNA sense strand
gacuguggcuacaacauuc

SEQ ID NO: 1133475 - RNA, 19 nt, Homo sapiens
  misc_RNA (1)...(19): siRNA sense strand
uuacaaguuugccaucuca

SEQ ID NO: 1133476 - RNA, 19 nt, Homo sapiens
  misc_RNA (1)...(19): siRNA sense strand
caucugcgcccucuucaug

SEQ ID NO: 1133477 - RNA, 19 nt, Homo sapiens
  misc_RNA (1)...(19): siRNA sense strand
gagggagcaugaucauugg

SEQ ID NO: 1133478 - RNA, 19 nt, Homo sapiens
  misc_RNA (1)...(19): siRNA sense strand
caauggacaggaucugaaa

SEQ ID NO: 1133479 - RNA, 19 nt, Homo sapiens
  misc_RNA (1)...(19): siRNA sense strand
cuacaacauuccacagaca

SEQ ID NO: 1133480 - RNA, 19 nt, Homo sapiens
  misc_RNA (1)...(19): siRNA sense strand
gacaggaucugaaaaugga

SEQ ID NO: 1133481 - RNA, 19 nt, Homo sapiens
  misc_RNA (1)...(19): siRNA sense strand
ggaguacaacuaugacaag

SEQ ID NO: 1133482 - RNA, 19 nt, Homo sapiens
  misc_RNA (1)...(19): siRNA sense strand
gcaccaccaaccuucguuu

SEQ ID NO: 1133483 - RNA, 19 nt, Homo sapiens
  misc_RNA (1)...(19): siRNA sense strand
ccaagacgacuguuacaag

SEQ ID NO: 1133484 - RNA, 19 nt, Homo sapiens
  misc_RNA (1)...(19): siRNA sense strand
gagaaguucccugaugguu

SEQ ID NO: 1133485 - RNA, 19 nt, Homo sapiens
  misc_RNA (1)...(19): siRNA sense strand
cugaagugcuggccucugu

SEQ ID NO: 1133486 - RNA, 19 nt, Homo sapiens
  misc_RNA (1)...(19): siRNA sense strand
caagaaaguguuugaagcu

SEQ ID NO: 1133487 - RNA, 19 nt, Homo sapiens
  misc_RNA (1)...(19): siRNA sense strand
agaaguucccugaugguuu

SEQ ID NO: 1133488 - RNA, 19 nt, Homo sapiens
  misc_RNA (1)...(19): siRNA sense strand
guggauacaggcagcagua

SEQ ID NO: 1133489 - RNA, 19 nt, Homo sapiens
  misc_RNA (1)...(19): siRNA sense strand
gggcagcuuuguggagaug

SEQ ID NO: 1133490 - RNA, 19 nt, Homo sapiens
  misc_RNA (1)...(19): siRNA sense strand
acggagaaguucccugaug

SEQ ID NO: 1133491 - RNA, 19 nt, Homo sapiens
  misc_RNA (1)...(19): siRNA sense strand
acacaggcagucucuggua

SEQ ID NO: 1133492 - RNA, 19 nt, Homo sapiens
  misc_RNA (1)...(19): siRNA sense strand
caagagcauuguggacagu

SEQ ID NO: 1133493 - RNA, 19 nt, Homo sapiens
  misc_RNA (1)...(19): siRNA sense strand
cacaggcagucucugguau

SEQ ID NO: 1133494 - RNA, 19 nt, Homo sapiens
  misc_RNA (1)...(19): siRNA sense strand
agacuguggcuacaacauu

SEQ ID NO: 1133495 - RNA, 19 nt, Homo sapiens
  misc_RNA (1)...(19): siRNA sense strand
gauacaggcagcaguaacu

SEQ ID NO: 1133496 - RNA, 19 nt, Homo sapiens
  misc_RNA (1)...(19): siRNA sense strand
ggcgggagugguauuauga

SEQ ID NO: 1133497 - RNA, 19 nt, Homo sapiens
  misc_RNA (1)...(19): siRNA sense strand
augaugacuuugcugauga

SEQ ID NO: 1133498 - RNA, 19 nt, Homo sapiens
  misc_RNA (1)...(19): siRNA sense strand
ucaauggacaggaucugaa

SEQ ID NO: 1133499 - RNA, 19 nt, Homo sapiens
  misc_RNA (1)...(19): siRNA sense strand
gcaugaucauuggagguau

SEQ ID NO: 1133500 - RNA, 19 nt, Homo sapiens
  misc_RNA (1)...(19): siRNA sense strand
caucucacucuaccuaaug

SEQ ID NO: 1133501 - RNA, 19 nt, Homo sapiens
  misc_RNA (1)...(19): siRNA sense strand
ucaucucacucuaccuaau

SEQ ID NO: 1133502 - RNA, 19 nt, Homo sapiens
  misc_RNA (1)...(19): siRNA sense strand
acaggcagcaguaacuuug

SEQ ID NO: 1133503 - RNA, 19 nt, Homo sapiens
  misc_RNA (1)...(19): siRNA sense strand
ggcagucucugguauacac

SEQ ID NO: 1133504 - RNA, 19 nt, Homo sapiens
  misc_RNA (1)...(19): siRNA sense strand
caugaucauuggagguauc

SEQ ID NO: 1133505 - RNA, 19 nt, Homo sapiens
  misc_RNA (1)...(19): siRNA sense strand
gcuacuacguggagaugac

SEQ ID NO: 1133506 - RNA, 19 nt, Homo sapiens
  misc_RNA (1)...(19): siRNA sense strand
aaccaguccuuccgcauca

SEQ ID NO: 1133507 - RNA, 19 nt, Homo sapiens
  misc_RNA (1)...(19): siRNA sense strand
acaggcagucucugguaua

SEQ ID NO: 1133508 - RNA, 19 nt, Homo sapiens
  misc_RNA (1)...(19): siRNA sense strand
guaucgaccacucgcugua

SEQ ID NO: 1133509 - RNA, 19 nt, Homo sapiens
  misc_RNA (1)...(19): siRNA sense strand
ugggagcuguuaucaugga

SEQ ID NO: 1133510 - RNA, 19 nt, Homo sapiens
  misc_RNA (1)...(19): siRNA sense strand
gccagcagcaugaugacuu

SEQ ID NO: 1133511 - RNA, 19 nt, Homo sapiens
  misc_RNA (1)...(19): siRNA sense strand
cauggagggcuucuacguu

SEQ ID NO: 1133512 - RNA, 19 nt, Homo sapiens
  misc_RNA (1)...(19): siRNA sense strand
caacuaugacaagagcauu

SEQ ID NO: 1133513 - RNA, 19 nt, Homo sapiens
  misc_RNA (1)...(19): siRNA sense strand
guuacaaguuugccaucuc

SEQ ID NO: 1133514 - RNA, 19 nt, Homo sapiens
  misc_RNA (1)...(19): siRNA sense strand
aaccuucguuugcccaaga

SEQ ID NO: 1133515 - RNA, 19 nt, Homo sapiens
  misc_RNA (1)...(19): siRNA sense strand
cugcaaggaguacaacuau

SEQ ID NO: 1133516 - RNA, 19 nt, Homo sapiens
  misc_RNA (1)...(19): siRNA sense strand
acaucucccugcugaagug

SEQ ID NO: 1133517 - RNA, 19 nt, Homo sapiens
  misc_RNA (1)...(19): siRNA sense strand
agucaucucacucuaccua

SEQ ID NO: 1133518 - RNA, 19 nt, Homo sapiens
  misc_RNA (1)...(19): siRNA sense strand
ggagaaguucccugauggu

SEQ ID NO: 1133519 - RNA, 19 nt, Homo sapiens
  misc_RNA (1)...(19): siRNA sense strand
gacgacuguuacaaguuug

SEQ ID NO: 1133520 - RNA, 19 nt, Homo sapiens
  misc_RNA (1)...(19): siRNA sense strand
ugacaucucccugcugaag

SEQ ID NO: 1133521 - RNA, 19 nt, Homo sapiens
  misc_RNA (1)...(19): siRNA sense strand
caacauuccacagacagau

SEQ ID NO: 1133522 - RNA, 19 nt, Homo sapiens
  misc_RNA (1)...(19): siRNA sense strand
gaagacuguggcuacaaca

SEQ ID NO: 1133523 - RNA, 19 nt, Homo sapiens
  misc_RNA (1)...(19): siRNA sense strand
cuucuacguugucuuugau

SEQ ID NO: 1133524 - RNA, 19 nt, Homo sapiens
  misc_RNA (1)...(19): siRNA sense strand
aaauggacugcaaggagua

SEQ ID NO: 1133525 - RNA, 19 nt, Homo sapiens
  misc_RNA (1)...(19): siRNA sense strand
gcagcuuuguggagauggu

SEQ ID NO: 1133526 - RNA, 19 nt, Homo sapiens
  misc_RNA (1)...(19): siRNA sense strand
ccggaaggguguguaugug

SEQ ID NO: 1133527 - RNA, 19 nt, Homo sapiens
  misc_RNA (1)...(19): siRNA sense strand
gccaugugcacgaugaguu

SEQ ID NO: 1133528 - RNA, 19 nt, Homo sapiens
  misc_RNA (1)...(19): siRNA sense strand
gaaguucccugaugguuuc

SEQ ID NO: 1133529 - RNA, 19 nt, Homo sapiens
  misc_RNA (1)...(19): siRNA sense strand
gcaaggaguacaacuauga

SEQ ID NO: 1133530 - RNA, 19 nt, Homo sapiens
  misc_RNA (1)...(19): siRNA sense strand
ggagggagcaugaucauug

SEQ ID NO: 1133531 - RNA, 19 nt, Homo sapiens
  misc_RNA (1)...(19): siRNA sense strand
uaugggagcuguuaucaug

SEQ ID NO: 1133532 - RNA, 19 nt, Homo sapiens
  misc_RNA (1)...(19): siRNA sense strand
agacgacuguuacaaguuu

SEQ ID NO: 1133533 - RNA, 19 nt, Homo sapiens
  misc_RNA (1)...(19): siRNA sense strand
ggagaucaauggacaggau

SEQ ID NO: 1133534 - RNA, 19 nt, Homo sapiens
  misc_RNA (1)...(19): siRNA sense strand
cgaauuggcuuugcuguca

SEQ ID NO: 1133535 - RNA, 19 nt, Homo sapiens
  misc_RNA (1)...(19): siRNA sense strand
caagacgacuguuacaagu

SEQ ID NO: 1133536 - RNA, 19 nt, Homo sapiens
  misc_RNA (1)...(19): siRNA sense strand
ggaagacuguggcuacaac

SEQ ID NO: 1133537 - RNA, 19 nt, Homo sapiens
  misc_RNA (1)...(19): siRNA sense strand
ccagcagcaugaugacuuu

SEQ ID NO: 1133538 - RNA, 19 nt, Homo sapiens
  misc_RNA (1)...(19): siRNA sense strand
gggcuucuacguugucuuu

SEQ ID NO: 1133539 - RNA, 19 nt, Homo sapiens
  misc_RNA (1)...(19): siRNA sense strand
ugucagcgcuugccaugug

SEQ ID NO: 1133540 - RNA, 19 nt, Homo sapiens
  misc_RNA (1)...(19): siRNA sense strand
caugaugacuuugcugaug

SEQ ID NO: 1133541 - RNA, 19 nt, Homo sapiens
  misc_RNA (1)...(19): siRNA sense strand
gaguacaacuaugacaaga

SEQ ID NO: 1133542 - RNA, 19 nt, Homo sapiens
  misc_RNA (1)...(19): siRNA sense strand
gcuucuacguugucuuuga

SEQ ID NO: 1133543 - RNA, 19 nt, Homo sapiens
  misc_RNA (1)...(19): siRNA sense strand
gacuguggcuacaacauuc

SEQ ID NO: 1133544 - RNA, 19 nt, Homo sapiens
  misc_RNA (1)...(19): siRNA sense strand
uuacaaguuugccaucuca

SEQ ID NO: 1133545 - RNA, 19 nt, Homo sapiens
  misc_RNA (1)...(19): siRNA sense strand
caucugcgcccucuucaug

SEQ ID NO: 1133546 - RNA, 19 nt, Homo sapiens
  misc_RNA (1)...(19): siRNA sense strand
gagggagcaugaucauugg

SEQ ID NO: 1133547 - RNA, 19 nt, Homo sapiens
  misc_RNA (1)...(19): siRNA sense strand
caauggacaggaucugaaa

SEQ ID NO: 1133548 - RNA, 19 nt, Homo sapiens
  misc_RNA (1)...(19): siRNA sense strand
cuacaacauuccacagaca

SEQ ID NO: 1133549 - RNA, 19 nt, Homo sapiens
  misc_RNA (1)...(19): siRNA sense strand
gacaggaucugaaaaugga

SEQ ID NO: 1133550 - RNA, 19 nt, Homo sapiens
  misc_RNA (1)...(19): siRNA sense strand
ggaguacaacuaugacaag

SEQ ID NO: 1133551 - RNA, 19 nt, Homo sapiens
  misc_RNA (1)...(19): siRNA sense strand
gcaccaccaaccuucguuu

SEQ ID NO: 1133552 - RNA, 19 nt, Homo sapiens
  misc_RNA (1)...(19): siRNA sense strand
ccaagacgacuguuacaag

SEQ ID NO: 1133553 - RNA, 19 nt, Homo sapiens
  misc_RNA (1)...(19): siRNA sense strand
gagaaguucccugaugguu

SEQ ID NO: 1133554 - RNA, 19 nt, Homo sapiens
  misc_RNA (1)...(19): siRNA sense strand
cugaagugcuggccucugu

SEQ ID NO: 1133555 - RNA, 19 nt, Homo sapiens
  misc_RNA (1)...(19): siRNA sense strand
caagaaaguguuugaagcu

SEQ ID NO: 1133556 - RNA, 19 nt, Homo sapiens
  misc_RNA (1)...(19): siRNA sense strand
agaaguucccugaugguuu

SEQ ID NO: 1133557 - RNA, 19 nt, Homo sapiens
  misc_RNA (1)...(19): siRNA sense strand
guggauacaggcagcagua

SEQ ID NO: 1133558 - RNA, 19 nt, Homo sapiens
  misc_RNA (1)...(19): siRNA sense strand
gggcagcuuuguggagaug

SEQ ID NO: 1133559 - RNA, 19 nt, Homo sapiens
  misc_RNA (1)...(19): siRNA sense strand
acggagaaguucccugaug

SEQ ID NO: 1133560 - RNA, 19 nt, Homo sapiens
  misc_RNA (1)...(19): siRNA sense strand
acacaggcagucucuggua

SEQ ID NO: 1133561 - RNA, 19 nt, Homo sapiens
  misc_RNA (1)...(19): siRNA sense strand
caagagcauuguggacagu

SEQ ID NO: 1133562 - RNA, 19 nt, Homo sapiens
  misc_RNA (1)...(19): siRNA sense strand
cacaggcagucucugguau

SEQ ID NO: 1133563 - RNA, 19 nt, Homo sapiens
  misc_RNA (1)...(19): siRNA sense strand
agacuguggcuacaacauu

SEQ ID NO: 1133564 - RNA, 19 nt, Homo sapiens
  misc_RNA (1)...(19): siRNA sense strand
gauacaggcagcaguaacu

SEQ ID NO: 1133565 - RNA, 19 nt, Homo sapiens
  misc_RNA (1)...(19): siRNA sense strand
ggcgggagugguauuauga

SEQ ID NO: 1133566 - RNA, 19 nt, Homo sapiens
  misc_RNA (1)...(19): siRNA sense strand
augaugacuuugcugauga

SEQ ID NO: 1133567 - RNA, 19 nt, Homo sapiens
  misc_RNA (1)...(19): siRNA sense strand
ucaauggacaggaucugaa

SEQ ID NO: 1133568 - RNA, 19 nt, Homo sapiens
  misc_RNA (1)...(19): siRNA sense strand
gcaugaucauuggagguau

SEQ ID NO: 1133569 - RNA, 19 nt, Homo sapiens
  misc_RNA (1)...(19): siRNA sense strand
caucucacucuaccuaaug

SEQ ID NO: 1133570 - RNA, 19 nt, Homo sapiens
  misc_RNA (1)...(19): siRNA sense strand
ucaucucacucuaccuaau

SEQ ID NO: 1133571 - RNA, 19 nt, Homo sapiens
  misc_RNA (1)...(19): siRNA sense strand
acaggcagcaguaacuuug

SEQ ID NO: 1133572 - RNA, 19 nt, Homo sapiens
  misc_RNA (1)...(19): siRNA sense strand
ggcagucucugguauacac

SEQ ID NO: 1133573 - RNA, 19 nt, Homo sapiens
  misc_RNA (1)...(19): siRNA sense strand
caugaucauuggagguauc

SEQ ID NO: 1133574 - RNA, 19 nt, Homo sapiens
  misc_RNA (1)...(19): siRNA sense strand
gcuacuacguggagaugac

SEQ ID NO: 1133575 - RNA, 19 nt, Homo sapiens
  misc_RNA (1)...(19): siRNA sense strand
aaccaguccuuccgcauca

SEQ ID NO: 1133576 - RNA, 19 nt, Homo sapiens
  misc_RNA (1)...(19): siRNA sense strand
acaggcagucucugguaua

SEQ ID NO: 1133577 - RNA, 19 nt, Homo sapiens
  misc_RNA (1)...(19): siRNA sense strand
guaucgaccacucgcugua

SEQ ID NO: 1133578 - RNA, 19 nt, Homo sapiens
  misc_RNA (1)...(19): siRNA sense strand
ugggagcuguuaucaugga

SEQ ID NO: 1133579 - RNA, 19 nt, Homo sapiens
  misc_RNA (1)...(19): siRNA sense strand
gccagcagcaugaugacuu

SEQ ID NO: 1133580 - RNA, 19 nt, Homo sapiens
  misc_RNA (1)...(19): siRNA sense strand
cauggagggcuucuacguu

SEQ ID NO: 1133581 - RNA, 19 nt, Homo sapiens
  misc_RNA (1)...(19): siRNA sense strand
caacuaugacaagagcauu

SEQ ID NO: 1133582 - RNA, 19 nt, Homo sapiens
  misc_RNA (1)...(19): siRNA sense strand
guuacaaguuugccaucuc

SEQ ID NO: 1133583 - RNA, 19 nt, Homo sapiens
  misc_RNA (1)...(19): siRNA sense strand
aaccuucguuugcccaaga

SEQ ID NO: 1133584 - RNA, 19 nt, Homo sapiens
  misc_RNA (1)...(19): siRNA sense strand
cugcaaggaguacaacuau

SEQ ID NO: 1133585 - RNA, 19 nt, Homo sapiens
  misc_RNA (1)...(19): siRNA sense strand
acaucucccugcugaagug

SEQ ID NO: 1133586 - RNA, 19 nt, Homo sapiens
  misc_RNA (1)...(19): siRNA sense strand
agucaucucacucuaccua

SEQ ID NO: 1133587 - RNA, 19 nt, Homo sapiens
  misc_RNA (1)...(19): siRNA sense strand
ggagaaguucccugauggu

SEQ ID NO: 1133588 - RNA, 19 nt, Homo sapiens
  misc_RNA (1)...(19): siRNA sense strand
gacgacuguuacaaguuug

SEQ ID NO: 1133589 - RNA, 19 nt, Homo sapiens
  misc_RNA (1)...(19): siRNA sense strand
ugacaucucccugcugaag

SEQ ID NO: 1133590 - RNA, 19 nt, Homo sapiens
  misc_RNA (1)...(19): siRNA sense strand
caacauuccacagacagau

SEQ ID NO: 1133591 - RNA, 19 nt, Homo sapiens
  misc_RNA (1)...(19): siRNA sense strand
gaagacuguggcuacaaca

SEQ ID NO: 1133592 - RNA, 19 nt, Homo sapiens
  misc_RNA (1)...(19): siRNA sense strand
cuucuacguugucuuugau

SEQ ID NO: 1133593 - RNA, 19 nt, Homo sapiens
  misc_RNA (1)...(19): siRNA sense strand
aaauggacugcaaggagua

SEQ ID NO: 1133594 - RNA, 19 nt, Homo sapiens
  misc_RNA (1)...(19): siRNA sense strand
gcagcuuuguggagauggu

SEQ ID NO: 1133595 - RNA, 19 nt, Homo sapiens
  misc_RNA (1)...(19): siRNA sense strand
ccggaaggguguguaugug

SEQ ID NO: 1133596 - RNA, 19 nt, Homo sapiens
  misc_RNA (1)...(19): siRNA sense strand
gccaugugcacgaugaguu

SEQ ID NO: 1133597 - RNA, 19 nt, Homo sapiens
  misc_RNA (1)...(19): siRNA sense strand
gaaguucccugaugguuuc

SEQ ID NO: 1133598 - RNA, 19 nt, Homo sapiens
  misc_RNA (1)...(19): siRNA sense strand
gcaaggaguacaacuauga

SEQ ID NO: 1133599 - RNA, 19 nt, Homo sapiens
  misc_RNA (1)...(19): siRNA sense strand
ggagggagcaugaucauug

SEQ ID NO: 1133600 - RNA, 19 nt, Homo sapiens
  misc_RNA (1)...(19): siRNA sense strand
uaugggagcuguuaucaug

SEQ ID NO: 1133601 - RNA, 19 nt, Homo sapiens
  misc_RNA (1)...(19): siRNA sense strand
agacgacuguuacaaguuu

SEQ ID NO: 1133602 - RNA, 19 nt, Homo sapiens
  misc_RNA (1)...(19): siRNA sense strand
ggagaucaauggacaggau

SEQ ID NO: 1133603 - RNA, 19 nt, Homo sapiens
  misc_RNA (1)...(19): siRNA sense strand
cgaauuggcuuugcuguca

SEQ ID NO: 1133604 - RNA, 19 nt, Homo sapiens
  misc_RNA (1)...(19): siRNA sense strand
caagacgacuguuacaagu

SEQ ID NO: 1133605 - RNA, 19 nt, Homo sapiens
  misc_RNA (1)...(19): siRNA sense strand
ggaagacuguggcuacaac

SEQ ID NO: 1133606 - RNA, 19 nt, Homo sapiens
  misc_RNA (1)...(19): siRNA sense strand
ccagcagcaugaugacuuu

SEQ ID NO: 1133607 - RNA, 19 nt, Homo sapiens
  misc_RNA (1)...(19): siRNA sense strand
gggcuucuacguugucuuu

SEQ ID NO: 1133608 - RNA, 19 nt, Homo sapiens
  misc_RNA (1)...(19): siRNA sense strand
ugucagcgcuugccaugug

SEQ ID NO: 1133609 - RNA, 19 nt, Homo sapiens
  misc_RNA (1)...(19): siRNA sense strand
caugaugacuuugcugaug

SEQ ID NO: 1133610 - RNA, 19 nt, Homo sapiens
  misc_RNA (1)...(19): siRNA sense strand
gaguacaacuaugacaaga

SEQ ID NO: 1133611 - RNA, 19 nt, Homo sapiens
  misc_RNA (1)...(19): siRNA sense strand
gcuucuacguugucuuuga

SEQ ID NO: 1133612 - RNA, 19 nt, Homo sapiens
  misc_RNA (1)...(19): siRNA sense strand
gacuguggcuacaacauuc

SEQ ID NO: 1133613 - RNA, 19 nt, Homo sapiens
  misc_RNA (1)...(19): siRNA sense strand
uuacaaguuugccaucuca

SEQ ID NO: 1133614 - RNA, 19 nt, Homo sapiens
  misc_RNA (1)...(19): siRNA sense strand
caucugcgcccucuucaug

SEQ ID NO: 1133615 - RNA, 19 nt, Homo sapiens
  misc_RNA (1)...(19): siRNA sense strand
gagggagcaugaucauugg

SEQ ID NO: 1133616 - RNA, 19 nt, Homo sapiens
  misc_RNA (1)...(19): siRNA sense strand
caauggacaggaucugaaa

SEQ ID NO: 1133617 - RNA, 19 nt, Homo sapiens
  misc_RNA (1)...(19): siRNA sense strand
cuacaacauuccacagaca

SEQ ID NO: 1133618 - RNA, 19 nt, Homo sapiens
  misc_RNA (1)...(19): siRNA sense strand
gacaggaucugaaaaugga

SEQ ID NO: 1133619 - RNA, 19 nt, Homo sapiens
  misc_RNA (1)...(19): siRNA sense strand
ggaguacaacuaugacaag

SEQ ID NO: 1133620 - RNA, 19 nt, Homo sapiens
  misc_RNA (1)...(19): siRNA sense strand
gcaccaccaaccuucguuu

SEQ ID NO: 1133621 - RNA, 19 nt, Homo sapiens
  misc_RNA (1)...(19): siRNA sense strand
ccaagacgacuguuacaag

SEQ ID NO: 1133622 - RNA, 19 nt, Homo sapiens
  misc_RNA (1)...(19): siRNA sense strand
gagaaguucccugaugguu

SEQ ID NO: 1133623 - RNA, 19 nt, Homo sapiens
  misc_RNA (1)...(19): siRNA sense strand
cugaagugcuggccucugu

SEQ ID NO: 1133624 - RNA, 19 nt, Homo sapiens
  misc_RNA (1)...(19): siRNA sense strand
caagaaaguguuugaagcu

SEQ ID NO: 1133625 - RNA, 19 nt, Homo sapiens
  misc_RNA (1)...(19): siRNA sense strand
agaaguucccugaugguuu

SEQ ID NO: 1133626 - RNA, 19 nt, Homo sapiens
  misc_RNA (1)...(19): siRNA sense strand
guggauacaggcagcagua

SEQ ID NO: 1133627 - RNA, 19 nt, Homo sapiens
  misc_RNA (1)...(19): siRNA sense strand
gggcagcuuuguggagaug

SEQ ID NO: 1133628 - RNA, 19 nt, Homo sapiens
  misc_RNA (1)...(19): siRNA sense strand
acggagaaguucccugaug

SEQ ID NO: 1133629 - RNA, 19 nt, Homo sapiens
  misc_RNA (1)...(19): siRNA sense strand
acacaggcagucucuggua

SEQ ID NO: 1133630 - RNA, 19 nt, Homo sapiens
  misc_RNA (1)...(19): siRNA sense strand
caagagcauuguggacagu

SEQ ID NO: 1133631 - RNA, 19 nt, Homo sapiens
  misc_RNA (1)...(19): siRNA sense strand
cacaggcagucucugguau

SEQ ID NO: 1133632 - RNA, 19 nt, Homo sapiens
  misc_RNA (1)...(19): siRNA sense strand
agacuguggcuacaacauu

SEQ ID NO: 1133633 - RNA, 19 nt, Homo sapiens
  misc_RNA (1)...(19): siRNA sense strand
gauacaggcagcaguaacu

SEQ ID NO: 1133634 - RNA, 19 nt, Homo sapiens
  misc_RNA (1)...(19): siRNA sense strand
ggcgggagugguauuauga

SEQ ID NO: 1133635 - RNA, 19 nt, Homo sapiens
  misc_RNA (1)...(19): siRNA sense strand
augaugacuuugcugauga

SEQ ID NO: 1133636 - RNA, 19 nt, Homo sapiens
  misc_RNA (1)...(19): siRNA sense strand
ucaauggacaggaucugaa

SEQ ID NO: 1133637 - RNA, 19 nt, Homo sapiens
  misc_RNA (1)...(19): siRNA sense strand
gcaugaucauuggagguau

SEQ ID NO: 1133638 - RNA, 19 nt, Homo sapiens
  misc_RNA (1)...(19): siRNA sense strand
caucucacucuaccuaaug

SEQ ID NO: 1133639 - RNA, 19 nt, Homo sapiens
  misc_RNA (1)...(19): siRNA sense strand
ucaucucacucuaccuaau

SEQ ID NO: 1133640 - RNA, 19 nt, Homo sapiens
  misc_RNA (1)...(19): siRNA sense strand
acaggcagcaguaacuuug

SEQ ID NO: 1133641 - RNA, 19 nt, Homo sapiens
  misc_RNA (1)...(19): siRNA sense strand
ggcagucucugguauacac

SEQ ID NO: 1133642 - RNA, 19 nt, Homo sapiens
  misc_RNA (1)...(19): siRNA sense strand
caugaucauuggagguauc

SEQ ID NO: 1133643 - RNA, 19 nt, Homo sapiens
  misc_RNA (1)...(19): siRNA sense strand
gcuacuacguggagaugac

SEQ ID NO: 1133644 - RNA, 19 nt, Homo sapiens
  misc_RNA (1)...(19): siRNA sense strand
aaccaguccuuccgcauca

SEQ ID NO: 1133645 - RNA, 19 nt, Homo sapiens
  misc_RNA (1)...(19): siRNA sense strand
acaggcagucucugguaua

SEQ ID NO: 1133646 - RNA, 19 nt, Homo sapiens
  misc_RNA (1)...(19): siRNA sense strand
guaucgaccacucgcugua

SEQ ID NO: 1133647 - RNA, 19 nt, Homo sapiens
  misc_RNA (1)...(19): siRNA sense strand
ugggagcuguuaucaugga

SEQ ID NO: 1133648 - RNA, 19 nt, Homo sapiens
  misc_RNA (1)...(19): siRNA sense strand
gccagcagcaugaugacuu

SEQ ID NO: 1133649 - RNA, 19 nt, Homo sapiens
  misc_RNA (1)...(19): siRNA sense strand
cauggagggcuucuacguu

SEQ ID NO: 1133650 - RNA, 19 nt, Homo sapiens
  misc_RNA (1)...(19): siRNA sense strand
caacuaugacaagagcauu

SEQ ID NO: 1133651 - RNA, 19 nt, Homo sapiens
  misc_RNA (1)...(19): siRNA sense strand
guuacaaguuugccaucuc

SEQ ID NO: 1133652 - RNA, 19 nt, Homo sapiens
  misc_RNA (1)...(19): siRNA sense strand
aaccuucguuugcccaaga

SEQ ID NO: 1133653 - RNA, 19 nt, Homo sapiens
  misc_RNA (1)...(19): siRNA sense strand
cugcaaggaguacaacuau

SEQ ID NO: 1133654 - RNA, 19 nt, Homo sapiens
  misc_RNA (1)...(19): siRNA sense strand
acaucucccugcugaagug

SEQ ID NO: 1133655 - RNA, 19 nt, Homo sapiens
  misc_RNA (1)...(19): siRNA sense strand
agucaucucacucuaccua

SEQ ID NO: 1133656 - RNA, 19 nt, Homo sapiens
  misc_RNA (1)...(19): siRNA sense strand
ggagaaguucccugauggu

SEQ ID NO: 1133657 - RNA, 19 nt, Homo sapiens
  misc_RNA (1)...(19): siRNA sense strand
gacgacuguuacaaguuug

SEQ ID NO: 1133658 - RNA, 19 nt, Homo sapiens
  misc_RNA (1)...(19): siRNA sense strand
ugacaucucccugcugaag

SEQ ID NO: 1133659 - RNA, 19 nt, Homo sapiens
  misc_RNA (1)...(19): siRNA sense strand
caacauuccacagacagau

SEQ ID NO: 1133660 - RNA, 19 nt, Homo sapiens
  misc_RNA (1)...(19): siRNA sense strand
gaagacuguggcuacaaca

SEQ ID NO: 1133661 - RNA, 19 nt, Homo sapiens
  misc_RNA (1)...(19): siRNA sense strand
cuucuacguugucuuugau

SEQ ID NO: 1133662 - RNA, 19 nt, Homo sapiens
  misc_RNA (1)...(19): siRNA sense strand
aaauggacugcaaggagua

SEQ ID NO: 1133663 - RNA, 19 nt, Homo sapiens
  misc_RNA (1)...(19): siRNA sense strand
gcagcuuuguggagauggu

SEQ ID NO: 1133664 - RNA, 19 nt, Homo sapiens
  misc_RNA (1)...(19): siRNA sense strand
ccggaaggguguguaugug

SEQ ID NO: 1133665 - RNA, 19 nt, Homo sapiens
  misc_RNA (1)...(19): siRNA sense strand
gccaugugcacgaugaguu

SEQ ID NO: 1133666 - RNA, 19 nt, Homo sapiens
  misc_RNA (1)...(19): siRNA sense strand
ggaaagaacuuaucuacaa

SEQ ID NO: 1133667 - RNA, 19 nt, Homo sapiens
  misc_RNA (1)...(19): siRNA sense strand
ggaauaagguaauugaaca

SEQ ID NO: 1133668 - RNA, 19 nt, Homo sapiens
  misc_RNA (1)...(19): siRNA sense strand
gcaguuggaugaaagagaa

SEQ ID NO: 1133669 - RNA, 19 nt, Homo sapiens
  misc_RNA (1)...(19): siRNA sense strand
caaagaugcuagugauuga

SEQ ID NO: 1133670 - RNA, 19 nt, Homo sapiens
  misc_RNA (1)...(19): siRNA sense strand
gaaacuauguggagaaucg

SEQ ID NO: 1133671 - RNA, 19 nt, Homo sapiens
  misc_RNA (1)...(19): siRNA sense strand
ugaagugugugaaccauaa

SEQ ID NO: 1133672 - RNA, 19 nt, Homo sapiens
  misc_RNA (1)...(19): siRNA sense strand
gaaagaacuuaucuacaag

SEQ ID NO: 1133673 - RNA, 19 nt, Homo sapiens
  misc_RNA (1)...(19): siRNA sense strand
gaaagagaacacacaauug

SEQ ID NO: 1133674 - RNA, 19 nt, Homo sapiens
  misc_RNA (1)...(19): siRNA sense strand
ccaaacacaugccaagaga

SEQ ID NO: 1133675 - RNA, 19 nt, Homo sapiens
  misc_RNA (1)...(19): siRNA sense strand
gaaauugcaacccacagua

SEQ ID NO: 1133676 - RNA, 19 nt, Homo sapiens
  misc_RNA (1)...(19): siRNA sense strand
cauauguggugacacguua

SEQ ID NO: 1133677 - RNA, 19 nt, Homo sapiens
  misc_RNA (1)...(19): siRNA sense strand
ugaaagagaacacacaauu

SEQ ID NO: 1133678 - RNA, 19 nt, Homo sapiens
  misc_RNA (1)...(19): siRNA sense strand
caaguaacauuguagucaa

SEQ ID NO: 1133679 - RNA, 19 nt, Homo sapiens
  misc_RNA (1)...(19): siRNA sense strand
acugauggaugccaacuua

SEQ ID NO: 1133680 - RNA, 19 nt, Homo sapiens
  misc_RNA (1)...(19): siRNA sense strand
agaaaugguucgccacaaa

SEQ ID NO: 1133681 - RNA, 19 nt, Homo sapiens
  misc_RNA (1)...(19): siRNA sense strand
aaagagaacacacaauuga

SEQ ID NO: 1133682 - RNA, 19 nt, Homo sapiens
  misc_RNA (1)...(19): siRNA sense strand
acaaggaaguaaugaauuc

SEQ ID NO: 1133683 - RNA, 19 nt, Homo sapiens
  misc_RNA (1)...(19): siRNA sense strand
ggugacacguuauuacaga

SEQ ID NO: 1133684 - RNA, 19 nt, Homo sapiens
  misc_RNA (1)...(19): siRNA sense strand
gaagaauggaaagaacuua

SEQ ID NO: 1133685 - RNA, 19 nt, Homo sapiens
  misc_RNA (1)...(19): siRNA sense strand
ggaacaccauguccagaau

SEQ ID NO: 1133686 - RNA, 19 nt, Homo sapiens
  misc_RNA (1)...(19): siRNA sense strand
ccagggacuuguugucaaa

SEQ ID NO: 1133687 - RNA, 19 nt, Homo sapiens
  misc_RNA (1)...(19): siRNA sense strand
gcauuaagcaccuccauuc

SEQ ID NO: 1133688 - RNA, 19 nt, Homo sapiens
  misc_RNA (1)...(19): siRNA sense strand
gacaagcaguuggaugaaa

SEQ ID NO: 1133689 - RNA, 19 nt, Homo sapiens
  misc_RNA (1)...(19): siRNA sense strand
guccagaauucaugaagaa

SEQ ID NO: 1133690 - RNA, 19 nt, Homo sapiens
  misc_RNA (1)...(19): siRNA sense strand
caagucugauugcacauug

SEQ ID NO: 1133691 - RNA, 19 nt, Homo sapiens
  misc_RNA (1)...(19): siRNA sense strand
cccaaacucuucccagauu

SEQ ID NO: 1133692 - RNA, 19 nt, Homo sapiens
  misc_RNA (1)...(19): siRNA sense strand
caugaugacuccauaugug

SEQ ID NO: 1133693 - RNA, 19 nt, Homo sapiens
  misc_RNA (1)...(19): siRNA sense strand
gaacaccauguccagaauu

SEQ ID NO: 1133694 - RNA, 19 nt, Homo sapiens
  misc_RNA (1)...(19): siRNA sense strand
gaacacacaauugaagaau

SEQ ID NO: 1133695 - RNA, 19 nt, Homo sapiens
  misc_RNA (1)...(19): siRNA sense strand
gagaaucggcccaaguaug

SEQ ID NO: 1133696 - RNA, 19 nt, Homo sapiens
  misc_RNA (1)...(19): siRNA sense strand
ggacgacgccuuacagcau

SEQ ID NO: 1133697 - RNA, 19 nt, Homo sapiens
  misc_RNA (1)...(19): siRNA sense strand
ggacuccgagcacaauaaa

SEQ ID NO: 1133698 - RNA, 19 nt, Homo sapiens
  misc_RNA (1)...(19): siRNA sense strand
gaugccaacuuaugucaag

SEQ ID NO: 1133699 - RNA, 19 nt, Homo sapiens
  misc_RNA (1)...(19): siRNA sense strand
gagaacacacaauugaaga

SEQ ID NO: 1133700 - RNA, 19 nt, Homo sapiens
  misc_RNA (1)...(19): siRNA sense strand
ucaaagaugcuagugauug

SEQ ID NO: 1133701 - RNA, 19 nt, Homo sapiens
  misc_RNA (1)...(19): siRNA sense strand
ugucaaagaugcuagugau

SEQ ID NO: 1133702 - RNA, 19 nt, Homo sapiens
  misc_RNA (1)...(19): siRNA sense strand
gagaaaugguucgccacaa

SEQ ID NO: 1133703 - RNA, 19 nt, Homo sapiens
  misc_RNA (1)...(19): siRNA sense strand
gaacaacuaggaacaccau

SEQ ID NO: 1133704 - RNA, 19 nt, Homo sapiens
  misc_RNA (1)...(19): siRNA sense strand
acacacaauugaagaaugg

SEQ ID NO: 1133705 - RNA, 19 nt, Homo sapiens
  misc_RNA (1)...(19): siRNA sense strand
ggaaguaaugaauucagaa

SEQ ID NO: 1133706 - RNA, 19 nt, Homo sapiens
  misc_RNA (1)...(19): siRNA sense strand
ccaggaagggacuauauug

SEQ ID NO: 1133707 - RNA, 19 nt, Homo sapiens
  misc_RNA (1)...(19): siRNA sense strand
gaugaaagagaacacacaa

SEQ ID NO: 1133708 - RNA, 19 nt, Homo sapiens
  misc_RNA (1)...(19): siRNA sense strand
caaggagaacguggauaua

SEQ ID NO: 1133709 - RNA, 19 nt, Homo sapiens
  misc_RNA (1)...(19): siRNA sense strand
gaaguaaugaauucagaag

SEQ ID NO: 1133710 - RNA, 19 nt, Homo sapiens
  misc_RNA (1)...(19): siRNA sense strand
ccaguggaauaagguaauu

SEQ ID NO: 1133711 - RNA, 19 nt, Homo sapiens
  misc_RNA (1)...(19): siRNA sense strand
ggagaacguggauauaugg

SEQ ID NO: 1133712 - RNA, 19 nt, Homo sapiens
  misc_RNA (1)...(19): siRNA sense strand
cgagcacaauaaacucaaa

SEQ ID NO: 1133713 - RNA, 19 nt, Homo sapiens
  misc_RNA (1)...(19): siRNA sense strand
guaauugaacaacuaggaa

SEQ ID NO: 1133714 - RNA, 19 nt, Homo sapiens
  misc_RNA (1)...(19): siRNA sense strand
ccaaguaacauuguaguca

SEQ ID NO: 1133715 - RNA, 19 nt, Homo sapiens
  misc_RNA (1)...(19): siRNA sense strand
ggacagccuucuccuucag

SEQ ID NO: 1133716 - RNA, 19 nt, Homo sapiens
  misc_RNA (1)...(19): siRNA sense strand
gagcugguccucaugaagu

SEQ ID NO: 1133717 - RNA, 19 nt, Homo sapiens
  misc_RNA (1)...(19): siRNA sense strand
uaagaaacuauguggagaa

SEQ ID NO: 1133718 - RNA, 19 nt, Homo sapiens
  misc_RNA (1)...(19): siRNA sense strand
acaaggagaacguggauau

SEQ ID NO: 1133719 - RNA, 19 nt, Homo sapiens
  misc_RNA (1)...(19): siRNA sense strand
gcaggcacaagcuucauga

SEQ ID NO: 1133720 - RNA, 19 nt, Homo sapiens
  misc_RNA (1)...(19): siRNA sense strand
ggacagcaggcacaagcuu

SEQ ID NO: 1133721 - RNA, 19 nt, Homo sapiens
  misc_RNA (1)...(19): siRNA sense strand
cuacaaggaaguaaugaau

SEQ ID NO: 1133722 - RNA, 19 nt, Homo sapiens
  misc_RNA (1)...(19): siRNA sense strand
uggagaaucggcccaagua

SEQ ID NO: 1133723 - RNA, 19 nt, Homo sapiens
  misc_RNA (1)...(19): siRNA sense strand
gccagggacuuguugucaa

SEQ ID NO: 1133724 - RNA, 19 nt, Homo sapiens
  misc_RNA (1)...(19): siRNA sense strand
gauggaugccaacuuaugu

SEQ ID NO: 1133725 - RNA, 19 nt, Homo sapiens
  misc_RNA (1)...(19): siRNA sense strand
ggacuuguugucaaagaug

SEQ ID NO: 1133726 - RNA, 19 nt, Homo sapiens
  misc_RNA (1)...(19): siRNA sense strand
ugucuuaccugcuguacca

SEQ ID NO: 1133727 - RNA, 19 nt, Homo sapiens
  misc_RNA (1)...(19): siRNA sense strand
gaauggaaagaacuuaucu

SEQ ID NO: 1133728 - RNA, 19 nt, Homo sapiens
  misc_RNA (1)...(19): siRNA sense strand
gguaauugaacaacuagga

SEQ ID NO: 1133729 - RNA, 19 nt, Homo sapiens
  misc_RNA (1)...(19): siRNA sense strand
caggaagggacuauauuga

SEQ ID NO: 1133730 - RNA, 19 nt, Homo sapiens
  misc_RNA (1)...(19): siRNA sense strand
aggagaacguggauauaug

SEQ ID NO: 1133731 - RNA, 19 nt, Homo sapiens
  misc_RNA (1)...(19): siRNA sense strand
cagcagacccuuucagaac

SEQ ID NO: 1133732 - RNA, 19 nt, Homo sapiens
  misc_RNA (1)...(19): siRNA sense strand
acaagcaguuggaugaaag

SEQ ID NO: 1133733 - RNA, 19 nt, Homo sapiens
  misc_RNA (1)...(19): siRNA sense strand
gaagcucagcagacccuuu

SEQ ID NO: 1133734 - RNA, 19 nt, Homo sapiens
  misc_RNA (1)...(19): siRNA sense strand
caccucagauauaugacaa

SEQ ID NO: 1133735 - RNA, 19 nt, Homo sapiens
  misc_RNA (1)...(19): siRNA sense strand
accaugagcgaaugucuua

SEQ ID NO: 1133736 - RNA, 19 nt, Homo sapiens
  misc_RNA (1)...(19): siRNA sense strand
gggagcugguccucaugaa

SEQ ID NO: 1133737 - RNA, 19 nt, Homo sapiens
  misc_RNA (1)...(19): siRNA sense strand
gaagugugugaaccauaaa

SEQ ID NO: 1133738 - RNA, 19 nt, Homo sapiens
  misc_RNA (1)...(19): siRNA sense strand
gcagacccuuucagaacca

SEQ ID NO: 1133739 - RNA, 19 nt, Homo sapiens
  misc_RNA (1)...(19): siRNA sense strand
cuacaucaacgucugguau

SEQ ID NO: 1133740 - RNA, 19 nt, Homo sapiens
  misc_RNA (1)...(19): siRNA sense strand
gucaagugauucagaugga

SEQ ID NO: 1133741 - RNA, 19 nt, Homo sapiens
  misc_RNA (1)...(19): siRNA sense strand
aaauugcaacccacaguaa

SEQ ID NO: 1133742 - RNA, 19 nt, Homo sapiens
  misc_RNA (1)...(19): siRNA sense strand
ccaaacucuucccagauuc

SEQ ID NO: 1133743 - RNA, 19 nt, Homo sapiens
  misc_RNA (1)...(19): siRNA sense strand
ucaagugauucagauggaa

SEQ ID NO: 1133744 - RNA, 19 nt, Homo sapiens
  misc_RNA (1)...(19): siRNA sense strand
ccagaauucaugaagaaau

SEQ ID NO: 1133745 - RNA, 19 nt, Homo sapiens
  misc_RNA (1)...(19): siRNA sense strand
ggagaaucggcccaaguau

SEQ ID NO: 1133746 - RNA, 19 nt, Homo sapiens
  misc_RNA (1)...(19): siRNA sense strand
aagaaacuauguggagaau

SEQ ID NO: 1133747 - RNA, 19 nt, Homo sapiens
  misc_RNA (1)...(19): siRNA sense strand
gaaaugguucgccacaaaa

SEQ ID NO: 1133748 - RNA, 19 nt, Homo sapiens
  misc_RNA (1)...(19): siRNA sense strand
aggaaguaaugaauucaga

SEQ ID NO: 1133749 - RNA, 19 nt, Homo sapiens
  misc_RNA (1)...(19): siRNA sense strand
gaaugucuuaccugcugua

SEQ ID NO: 1133750 - RNA, 19 nt, Homo sapiens
  misc_RNA (1)...(19): siRNA sense strand
caacuaggaacaccauguc

SEQ ID NO: 1133751 - RNA, 19 nt, Homo sapiens
  misc_RNA (1)...(19): siRNA sense strand
uaugucaagugauucagau

SEQ ID NO: 1133752 - RNA, 19 nt, Homo sapiens
  misc_RNA (1)...(19): siRNA sense strand
ugaagaauggaaagaacuu

SEQ ID NO: 1133753 - RNA, 19 nt, Homo sapiens
  misc_RNA (1)...(19): siRNA sense strand
ggaugaaagagaacacaca

SEQ ID NO: 1133754 - RNA, 19 nt, Homo sapiens
  misc_RNA (1)...(19): siRNA sense strand
gggacuuguugucaaagau

SEQ ID NO: 1133755 - RNA, 19 nt, Homo sapiens
  misc_RNA (1)...(19): siRNA sense strand
cguaugaugcuguccuuga

SEQ ID NO: 1133756 - RNA, 19 nt, Homo sapiens
  misc_RNA (1)...(19): siRNA sense strand
ucugugggaugcauuaugg

SEQ ID NO: 1133757 - RNA, 19 nt, Homo sapiens
  misc_RNA (1)...(19): siRNA sense strand
aagaacuuaucuacaagga

SEQ ID NO: 1133758 - RNA, 19 nt, Homo sapiens
  misc_RNA (1)...(19): siRNA sense strand
gguaugacccagccgaagu

SEQ ID NO: 1133759 - RNA, 19 nt, Homo sapiens
  misc_RNA (1)...(19): siRNA sense strand
ggacucaccuuccccaaac

SEQ ID NO: 1133760 - RNA, 19 nt, Homo sapiens
  misc_RNA (1)...(19): siRNA sense strand
gaccaguggaauaagguaa

SEQ ID NO: 1133761 - RNA, 19 nt, Homo sapiens
  misc_RNA (1)...(19): siRNA sense strand
aaggagaacguggauauau

SEQ ID NO: 1133762 - RNA, 19 nt, Homo sapiens
  misc_RNA (1)...(19): siRNA sense strand
gauauaugacaagcaguug

SEQ ID NO: 1133763 - RNA, 19 nt, Homo sapiens
  misc_RNA (1)...(19): siRNA sense strand
acaucaacgucugguauga

SEQ ID NO: 1133764 - RNA, 19 nt, Homo sapiens
  misc_RNA (1)...(19): siRNA sense strand
uguccagaauucaugaaga

SEQ ID NO: 1133765 - RNA, 19 nt, Homo sapiens
  misc_RNA (1)...(19): siRNA sense strand
uaucuacaaggaaguaaug

SEQ ID NO: 1133766 - RNA, 19 nt, Homo sapiens
  misc_RNA (1)...(19): siRNA sense strand
ggaaagaacuuaucuacaa

SEQ ID NO: 1133767 - RNA, 19 nt, Homo sapiens
  misc_RNA (1)...(19): siRNA sense strand
ggaauaagguaauugaaca

SEQ ID NO: 1133768 - RNA, 19 nt, Homo sapiens
  misc_RNA (1)...(19): siRNA sense strand
gcaguuggaugaaagagaa

SEQ ID NO: 1133769 - RNA, 19 nt, Homo sapiens
  misc_RNA (1)...(19): siRNA sense strand
caaagaugcuagugauuga

SEQ ID NO: 1133770 - RNA, 19 nt, Homo sapiens
  misc_RNA (1)...(19): siRNA sense strand
gaaacuauguggagaaucg

SEQ ID NO: 1133771 - RNA, 19 nt, Homo sapiens
  misc_RNA (1)...(19): siRNA sense strand
ugaagugugugaaccauaa

SEQ ID NO: 1133772 - RNA, 19 nt, Homo sapiens
  misc_RNA (1)...(19): siRNA sense strand
gaaagaacuuaucuacaag

SEQ ID NO: 1133773 - RNA, 19 nt, Homo sapiens
  misc_RNA (1)...(19): siRNA sense strand
gaaagagaacacacaauug

SEQ ID NO: 1133774 - RNA, 19 nt, Homo sapiens
  misc_RNA (1)...(19): siRNA sense strand
ccaaacacaugccaagaga

SEQ ID NO: 1133775 - RNA, 19 nt, Homo sapiens
  misc_RNA (1)...(19): siRNA sense strand
gaaauugcaacccacagua

SEQ ID NO: 1133776 - RNA, 19 nt, Homo sapiens
  misc_RNA (1)...(19): siRNA sense strand
cauauguggugacacguua

SEQ ID NO: 1133777 - RNA, 19 nt, Homo sapiens
  misc_RNA (1)...(19): siRNA sense strand
ugaaagagaacacacaauu

SEQ ID NO: 1133778 - RNA, 19 nt, Homo sapiens
  misc_RNA (1)...(19): siRNA sense strand
caaguaacauuguagucaa

SEQ ID NO: 1133779 - RNA, 19 nt, Homo sapiens
  misc_RNA (1)...(19): siRNA sense strand
acugauggaugccaacuua

SEQ ID NO: 1133780 - RNA, 19 nt, Homo sapiens
  misc_RNA (1)...(19): siRNA sense strand
agaaaugguucgccacaaa

SEQ ID NO: 1133781 - RNA, 19 nt, Homo sapiens
  misc_RNA (1)...(19): siRNA sense strand
aaagagaacacacaauuga

SEQ ID NO: 1133782 - RNA, 19 nt, Homo sapiens
  misc_RNA (1)...(19): siRNA sense strand
acaaggaaguaaugaauuc

SEQ ID NO: 1133783 - RNA, 19 nt, Homo sapiens
  misc_RNA (1)...(19): siRNA sense strand
ggugacacguuauuacaga

SEQ ID NO: 1133784 - RNA, 19 nt, Homo sapiens
  misc_RNA (1)...(19): siRNA sense strand
gaagaauggaaagaacuua

SEQ ID NO: 1133785 - RNA, 19 nt, Homo sapiens
  misc_RNA (1)...(19): siRNA sense strand
ggaacaccauguccagaau

SEQ ID NO: 1133786 - RNA, 19 nt, Homo sapiens
  misc_RNA (1)...(19): siRNA sense strand
ccagggacuuguugucaaa

SEQ ID NO: 1133787 - RNA, 19 nt, Homo sapiens
  misc_RNA (1)...(19): siRNA sense strand
gcauuaagcaccuccauuc

SEQ ID NO: 1133788 - RNA, 19 nt, Homo sapiens
  misc_RNA (1)...(19): siRNA sense strand
gacaagcaguuggaugaaa

SEQ ID NO: 1133789 - RNA, 19 nt, Homo sapiens
  misc_RNA (1)...(19): siRNA sense strand
guccagaauucaugaagaa

SEQ ID NO: 1133790 - RNA, 19 nt, Homo sapiens
  misc_RNA (1)...(19): siRNA sense strand
gcagugaacagcagugaga

SEQ ID NO: 1133791 - RNA, 19 nt, Homo sapiens
  misc_RNA (1)...(19): siRNA sense strand
caagucugauugcacauug

SEQ ID NO: 1133792 - RNA, 19 nt, Homo sapiens
  misc_RNA (1)...(19): siRNA sense strand
cccaaacucuucccagauu

SEQ ID NO: 1133793 - RNA, 19 nt, Homo sapiens
  misc_RNA (1)...(19): siRNA sense strand
caugaugacuccauaugug

SEQ ID NO: 1133794 - RNA, 19 nt, Homo sapiens
  misc_RNA (1)...(19): siRNA sense strand
gaacaccauguccagaauu

SEQ ID NO: 1133795 - RNA, 19 nt, Homo sapiens
  misc_RNA (1)...(19): siRNA sense strand
gaacacacaauugaagaau

SEQ ID NO: 1133796 - RNA, 19 nt, Homo sapiens
  misc_RNA (1)...(19): siRNA sense strand
gagaaucggcccaaguaug

SEQ ID NO: 1133797 - RNA, 19 nt, Homo sapiens
  misc_RNA (1)...(19): siRNA sense strand
ggacgacgccuuacagcau

SEQ ID NO: 1133798 - RNA, 19 nt, Homo sapiens
  misc_RNA (1)...(19): siRNA sense strand
ggacuccgagcacaauaaa

SEQ ID NO: 1133799 - RNA, 19 nt, Homo sapiens
  misc_RNA (1)...(19): siRNA sense strand
gaugccaacuuaugucaag

SEQ ID NO: 1133800 - RNA, 19 nt, Homo sapiens
  misc_RNA (1)...(19): siRNA sense strand
gagaacacacaauugaaga

SEQ ID NO: 1133801 - RNA, 19 nt, Homo sapiens
  misc_RNA (1)...(19): siRNA sense strand
ucaaagaugcuagugauug

SEQ ID NO: 1133802 - RNA, 19 nt, Homo sapiens
  misc_RNA (1)...(19): siRNA sense strand
ugucaaagaugcuagugau

SEQ ID NO: 1133803 - RNA, 19 nt, Homo sapiens
  misc_RNA (1)...(19): siRNA sense strand
gagaaaugguucgccacaa

SEQ ID NO: 1133804 - RNA, 19 nt, Homo sapiens
  misc_RNA (1)...(19): siRNA sense strand
gaacaacuaggaacaccau

SEQ ID NO: 1133805 - RNA, 19 nt, Homo sapiens
  misc_RNA (1)...(19): siRNA sense strand
acacacaauugaagaaugg

SEQ ID NO: 1133806 - RNA, 19 nt, Homo sapiens
  misc_RNA (1)...(19): siRNA sense strand
ucaaugacaucuccuccau

SEQ ID NO: 1133807 - RNA, 19 nt, Homo sapiens
  misc_RNA (1)...(19): siRNA sense strand
ggaaguaaugaauucagaa

SEQ ID NO: 1133808 - RNA, 19 nt, Homo sapiens
  misc_RNA (1)...(19): siRNA sense strand
ccaggaagggacuauauug

SEQ ID NO: 1133809 - RNA, 19 nt, Homo sapiens
  misc_RNA (1)...(19): siRNA sense strand
gaugaaagagaacacacaa

SEQ ID NO: 1133810 - RNA, 19 nt, Homo sapiens
  misc_RNA (1)...(19): siRNA sense strand
caaggagaacguggauaua

SEQ ID NO: 1133811 - RNA, 19 nt, Homo sapiens
  misc_RNA (1)...(19): siRNA sense strand
gaaguaaugaauucagaag

SEQ ID NO: 1133812 - RNA, 19 nt, Homo sapiens
  misc_RNA (1)...(19): siRNA sense strand
ccaguggaauaagguaauu

SEQ ID NO: 1133813 - RNA, 19 nt, Homo sapiens
  misc_RNA (1)...(19): siRNA sense strand
ggagaacguggauauaugg

SEQ ID NO: 1133814 - RNA, 19 nt, Homo sapiens
  misc_RNA (1)...(19): siRNA sense strand
cgagcacaauaaacucaaa

SEQ ID NO: 1133815 - RNA, 19 nt, Homo sapiens
  misc_RNA (1)...(19): siRNA sense strand
guaauugaacaacuaggaa

SEQ ID NO: 1133816 - RNA, 19 nt, Homo sapiens
  misc_RNA (1)...(19): siRNA sense strand
ccaaguaacauuguaguca

SEQ ID NO: 1133817 - RNA, 19 nt, Homo sapiens
  misc_RNA (1)...(19): siRNA sense strand
ggacagccuucuccuucag

SEQ ID NO: 1133818 - RNA, 19 nt, Homo sapiens
  misc_RNA (1)...(19): siRNA sense strand
uaagaaacuauguggagaa

SEQ ID NO: 1133819 - RNA, 19 nt, Homo sapiens
  misc_RNA (1)...(19): siRNA sense strand
acaaggagaacguggauau

SEQ ID NO: 1133820 - RNA, 19 nt, Homo sapiens
  misc_RNA (1)...(19): siRNA sense strand
gcaggcacaagcuucauga

SEQ ID NO: 1133821 - RNA, 19 nt, Homo sapiens
  misc_RNA (1)...(19): siRNA sense strand
gagcugguccucaugaagu

SEQ ID NO: 1133822 - RNA, 19 nt, Homo sapiens
  misc_RNA (1)...(19): siRNA sense strand
ggacagcaggcacaagcuu

SEQ ID NO: 1133823 - RNA, 19 nt, Homo sapiens
  misc_RNA (1)...(19): siRNA sense strand
cuacaaggaaguaaugaau

SEQ ID NO: 1133824 - RNA, 19 nt, Homo sapiens
  misc_RNA (1)...(19): siRNA sense strand
uggagaaucggcccaagua

SEQ ID NO: 1133825 - RNA, 19 nt, Homo sapiens
  misc_RNA (1)...(19): siRNA sense strand
gauggaugccaacuuaugu

SEQ ID NO: 1133826 - RNA, 19 nt, Homo sapiens
  misc_RNA (1)...(19): siRNA sense strand
ggacuuguugucaaagaug

SEQ ID NO: 1133827 - RNA, 19 nt, Homo sapiens
  misc_RNA (1)...(19): siRNA sense strand
gccagggacuuguugucaa

SEQ ID NO: 1133828 - RNA, 19 nt, Homo sapiens
  misc_RNA (1)...(19): siRNA sense strand
ugucuuaccugcuguacca

SEQ ID NO: 1133829 - RNA, 19 nt, Homo sapiens
  misc_RNA (1)...(19): siRNA sense strand
gaauggaaagaacuuaucu

SEQ ID NO: 1133830 - RNA, 19 nt, Homo sapiens
  misc_RNA (1)...(19): siRNA sense strand
gguaauugaacaacuagga

SEQ ID NO: 1133831 - RNA, 19 nt, Homo sapiens
  misc_RNA (1)...(19): siRNA sense strand
caggaagggacuauauuga

SEQ ID NO: 1133832 - RNA, 19 nt, Homo sapiens
  misc_RNA (1)...(19): siRNA sense strand
aggagaacguggauauaug

SEQ ID NO: 1133833 - RNA, 19 nt, Homo sapiens
  misc_RNA (1)...(19): siRNA sense strand
cagcagacccuuucagaac

SEQ ID NO: 1133834 - RNA, 19 nt, Homo sapiens
  misc_RNA (1)...(19): siRNA sense strand
acaagcaguuggaugaaag

SEQ ID NO: 1133835 - RNA, 19 nt, Homo sapiens
  misc_RNA (1)...(19): siRNA sense strand
gaagcucagcagacccuuu

SEQ ID NO: 1133836 - RNA, 19 nt, Homo sapiens
  misc_RNA (1)...(19): siRNA sense strand
accaugagcgaaugucuua

SEQ ID NO: 1133837 - RNA, 19 nt, Homo sapiens
  misc_RNA (1)...(19): siRNA sense strand
caccucagauauaugacaa

SEQ ID NO: 1133838 - RNA, 19 nt, Homo sapiens
  misc_RNA (1)...(19): siRNA sense strand
gucaagugauucagaugga

SEQ ID NO: 1133839 - RNA, 19 nt, Homo sapiens
  misc_RNA (1)...(19): siRNA sense strand
gcagacccuuucagaacca

SEQ ID NO: 1133840 - RNA, 19 nt, Homo sapiens
  misc_RNA (1)...(19): siRNA sense strand
cuacaucaacgucugguau

SEQ ID NO: 1133841 - RNA, 19 nt, Homo sapiens
  misc_RNA (1)...(19): siRNA sense strand
gggagcugguccucaugaa

SEQ ID NO: 1133842 - RNA, 19 nt, Homo sapiens
  misc_RNA (1)...(19): siRNA sense strand
aaauugcaacccacaguaa

SEQ ID NO: 1133843 - RNA, 19 nt, Homo sapiens
  misc_RNA (1)...(19): siRNA sense strand
gaagugugugaaccauaaa

SEQ ID NO: 1133844 - RNA, 19 nt, Homo sapiens
  misc_RNA (1)...(19): siRNA sense strand
ccaaacucuucccagauuc

SEQ ID NO: 1133845 - RNA, 19 nt, Homo sapiens
  misc_RNA (1)...(19): siRNA sense strand
ucaagugauucagauggaa

SEQ ID NO: 1133846 - RNA, 19 nt, Homo sapiens
  misc_RNA (1)...(19): siRNA sense strand
ccagaauucaugaagaaau

SEQ ID NO: 1133847 - RNA, 19 nt, Homo sapiens
  misc_RNA (1)...(19): siRNA sense strand
ggagaaucggcccaaguau

SEQ ID NO: 1133848 - RNA, 19 nt, Homo sapiens
  misc_RNA (1)...(19): siRNA sense strand
aagaaacuauguggagaau

SEQ ID NO: 1133849 - RNA, 19 nt, Homo sapiens
  misc_RNA (1)...(19): siRNA sense strand
gaaugucuuaccugcugua

SEQ ID NO: 1133850 - RNA, 19 nt, Homo sapiens
  misc_RNA (1)...(19): siRNA sense strand
cauccucgucugucaauga

SEQ ID NO: 1133851 - RNA, 19 nt, Homo sapiens
  misc_RNA (1)...(19): siRNA sense strand
aggaaguaaugaauucaga

SEQ ID NO: 1133852 - RNA, 19 nt, Homo sapiens
  misc_RNA (1)...(19): siRNA sense strand
caacuaggaacaccauguc

SEQ ID NO: 1133853 - RNA, 19 nt, Homo sapiens
  misc_RNA (1)...(19): siRNA sense strand
gaaaugguucgccacaaaa

SEQ ID NO: 1133854 - RNA, 19 nt, Homo sapiens
  misc_RNA (1)...(19): siRNA sense strand
cguaugaugcuguccuuga

SEQ ID NO: 1133855 - RNA, 19 nt, Homo sapiens
  misc_RNA (1)...(19): siRNA sense strand
uaugucaagugauucagau

SEQ ID NO: 1133856 - RNA, 19 nt, Homo sapiens
  misc_RNA (1)...(19): siRNA sense strand
ugaagaauggaaagaacuu

SEQ ID NO: 1133857 - RNA, 19 nt, Homo sapiens
  misc_RNA (1)...(19): siRNA sense strand
ggaugaaagagaacacaca

SEQ ID NO: 1133858 - RNA, 19 nt, Homo sapiens
  misc_RNA (1)...(19): siRNA sense strand
gggacuuguugucaaagau

SEQ ID NO: 1133859 - RNA, 19 nt, Homo sapiens
  misc_RNA (1)...(19): siRNA sense strand
ucugugggaugcauuaugg

SEQ ID NO: 1133860 - RNA, 19 nt, Homo sapiens
  misc_RNA (1)...(19): siRNA sense strand
aagaacuuaucuacaagga

SEQ ID NO: 1133861 - RNA, 19 nt, Homo sapiens
  misc_RNA (1)...(19): siRNA sense strand
gguaugacccagccgaagu

SEQ ID NO: 1133862 - RNA, 19 nt, Homo sapiens
  misc_RNA (1)...(19): siRNA sense strand
ggacucaccuuccccaaac

SEQ ID NO: 1133863 - RNA, 19 nt, Homo sapiens
  misc_RNA (1)...(19): siRNA sense strand
gaccaguggaauaagguaa

SEQ ID NO: 1133864 - RNA, 19 nt, Homo sapiens
  misc_RNA (1)...(19): siRNA sense strand
acaucaacgucugguauga

SEQ ID NO: 1133865 - RNA, 19 nt, Homo sapiens
  misc_RNA (1)...(19): siRNA sense strand
gauauaugacaagcaguug

SEQ ID NO: 1133866 - RNA, 19 nt, Homo sapiens
  misc_RNA (1)...(19): siRNA sense strand
ggaaagaacuuaucuacaa

SEQ ID NO: 1133867 - RNA, 19 nt, Homo sapiens
  misc_RNA (1)...(19): siRNA sense strand
ggaauaagguaauugaaca

SEQ ID NO: 1133868 - RNA, 19 nt, Homo sapiens
  misc_RNA (1)...(19): siRNA sense strand
gcaguuggaugaaagagaa

SEQ ID NO: 1133869 - RNA, 19 nt, Homo sapiens
  misc_RNA (1)...(19): siRNA sense strand
caaagaugcuagugauuga

SEQ ID NO: 1133870 - RNA, 19 nt, Homo sapiens
  misc_RNA (1)...(19): siRNA sense strand
gaaacuauguggagaaucg

SEQ ID NO: 1133871 - RNA, 19 nt, Homo sapiens
  misc_RNA (1)...(19): siRNA sense strand
gaaagagaacacacaauug

SEQ ID NO: 1133872 - RNA, 19 nt, Homo sapiens
  misc_RNA (1)...(19): siRNA sense strand
gaaagaacuuaucuacaag

SEQ ID NO: 1133873 - RNA, 19 nt, Homo sapiens
  misc_RNA (1)...(19): siRNA sense strand
gaaauugcaacccacagua

SEQ ID NO: 1133874 - RNA, 19 nt, Homo sapiens
  misc_RNA (1)...(19): siRNA sense strand
cauauguggugacacguua

SEQ ID NO: 1133875 - RNA, 19 nt, Homo sapiens
  misc_RNA (1)...(19): siRNA sense strand
ugaaagagaacacacaauu

SEQ ID NO: 1133876 - RNA, 19 nt, Homo sapiens
  misc_RNA (1)...(19): siRNA sense strand
caaguaacauuguagucaa

SEQ ID NO: 1133877 - RNA, 19 nt, Homo sapiens
  misc_RNA (1)...(19): siRNA sense strand
agaaaugguucgccacaaa

SEQ ID NO: 1133878 - RNA, 19 nt, Homo sapiens
  misc_RNA (1)...(19): siRNA sense strand
acugauggaugccaacuua

SEQ ID NO: 1133879 - RNA, 19 nt, Homo sapiens
  misc_RNA (1)...(19): siRNA sense strand
aaagagaacacacaauuga

SEQ ID NO: 1133880 - RNA, 19 nt, Homo sapiens
  misc_RNA (1)...(19): siRNA sense strand
acaaggaaguaaugaauuc

SEQ ID NO: 1133881 - RNA, 19 nt, Homo sapiens
  misc_RNA (1)...(19): siRNA sense strand
ggugacacguuauuacaga

SEQ ID NO: 1133882 - RNA, 19 nt, Homo sapiens
  misc_RNA (1)...(19): siRNA sense strand
gaagaauggaaagaacuua

SEQ ID NO: 1133883 - RNA, 19 nt, Homo sapiens
  misc_RNA (1)...(19): siRNA sense strand
ggaacaccauguccagaau

SEQ ID NO: 1133884 - RNA, 19 nt, Homo sapiens
  misc_RNA (1)...(19): siRNA sense strand
ccagggacuuguugucaaa

SEQ ID NO: 1133885 - RNA, 19 nt, Homo sapiens
  misc_RNA (1)...(19): siRNA sense strand
gcauuaagcaccuccauuc

SEQ ID NO: 1133886 - RNA, 19 nt, Homo sapiens
  misc_RNA (1)...(19): siRNA sense strand
gacaagcaguuggaugaaa

SEQ ID NO: 1133887 - RNA, 19 nt, Homo sapiens
  misc_RNA (1)...(19): siRNA sense strand
guccagaauucaugaagaa

SEQ ID NO: 1133888 - RNA, 19 nt, Homo sapiens
  misc_RNA (1)...(19): siRNA sense strand
caagucugauugcacauug

SEQ ID NO: 1133889 - RNA, 19 nt, Homo sapiens
  misc_RNA (1)...(19): siRNA sense strand
cccaaacucuucccagauu

SEQ ID NO: 1133890 - RNA, 19 nt, Homo sapiens
  misc_RNA (1)...(19): siRNA sense strand
caugaugacuccauaugug

SEQ ID NO: 1133891 - RNA, 19 nt, Homo sapiens
  misc_RNA (1)...(19): siRNA sense strand
gaacaccauguccagaauu

SEQ ID NO: 1133892 - RNA, 19 nt, Homo sapiens
  misc_RNA (1)...(19): siRNA sense strand
gaacacacaauugaagaau

SEQ ID NO: 1133893 - RNA, 19 nt, Homo sapiens
  misc_RNA (1)...(19): siRNA sense strand
gagaaucggcccaaguaug

SEQ ID NO: 1133894 - RNA, 19 nt, Homo sapiens
  misc_RNA (1)...(19): siRNA sense strand
ggacgacgccuuacagcau

SEQ ID NO: 1133895 - RNA, 19 nt, Homo sapiens
  misc_RNA (1)...(19): siRNA sense strand
ggacuccgagcacaauaaa

SEQ ID NO: 1133896 - RNA, 19 nt, Homo sapiens
  misc_RNA (1)...(19): siRNA sense strand
ugucaaagaugcuagugau

SEQ ID NO: 1133897 - RNA, 19 nt, Homo sapiens
  misc_RNA (1)...(19): siRNA sense strand
gagaacacacaauugaaga

SEQ ID NO: 1133898 - RNA, 19 nt, Homo sapiens
  misc_RNA (1)...(19): siRNA sense strand
gaugccaacuuaugucaag

SEQ ID NO: 1133899 - RNA, 19 nt, Homo sapiens
  misc_RNA (1)...(19): siRNA sense strand
ucaaagaugcuagugauug

SEQ ID NO: 1133900 - RNA, 19 nt, Homo sapiens
  misc_RNA (1)...(19): siRNA sense strand
gagaaaugguucgccacaa

SEQ ID NO: 1133901 - RNA, 19 nt, Homo sapiens
  misc_RNA (1)...(19): siRNA sense strand
gaacaacuaggaacaccau

SEQ ID NO: 1133902 - RNA, 19 nt, Homo sapiens
  misc_RNA (1)...(19): siRNA sense strand
acacacaauugaagaaugg

SEQ ID NO: 1133903 - RNA, 19 nt, Homo sapiens
  misc_RNA (1)...(19): siRNA sense strand
ggaaguaaugaauucagaa

SEQ ID NO: 1133904 - RNA, 19 nt, Homo sapiens
  misc_RNA (1)...(19): siRNA sense strand
ccaggaagggacuauauug

SEQ ID NO: 1133905 - RNA, 19 nt, Homo sapiens
  misc_RNA (1)...(19): siRNA sense strand
gaugaaagagaacacacaa

SEQ ID NO: 1133906 - RNA, 19 nt, Homo sapiens
  misc_RNA (1)...(19): siRNA sense strand
caaggagaacguggauaua

SEQ ID NO: 1133907 - RNA, 19 nt, Homo sapiens
  misc_RNA (1)...(19): siRNA sense strand
gaaguaaugaauucagaag

SEQ ID NO: 1133908 - RNA, 19 nt, Homo sapiens
  misc_RNA (1)...(19): siRNA sense strand
ccaguggaauaagguaauu

SEQ ID NO: 1133909 - RNA, 19 nt, Homo sapiens
  misc_RNA (1)...(19): siRNA sense strand
ggagaacguggauauaugg

SEQ ID NO: 1133910 - RNA, 19 nt, Homo sapiens
  misc_RNA (1)...(19): siRNA sense strand
cgagcacaauaaacucaaa

SEQ ID NO: 1133911 - RNA, 19 nt, Homo sapiens
  misc_RNA (1)...(19): siRNA sense strand
guaauugaacaacuaggaa

SEQ ID NO: 1133912 - RNA, 19 nt, Homo sapiens
  misc_RNA (1)...(19): siRNA sense strand
ccaaguaacauuguaguca

SEQ ID NO: 1133913 - RNA, 19 nt, Homo sapiens
  misc_RNA (1)...(19): siRNA sense strand
ggacagccuucuccuucag

SEQ ID NO: 1133914 - RNA, 19 nt, Homo sapiens
  misc_RNA (1)...(19): siRNA sense strand
uaagaaacuauguggagaa

SEQ ID NO: 1133915 - RNA, 19 nt, Homo sapiens
  misc_RNA (1)...(19): siRNA sense strand
acaaggagaacguggauau

SEQ ID NO: 1133916 - RNA, 19 nt, Homo sapiens
  misc_RNA (1)...(19): siRNA sense strand
gcaggcacaagcuucauga

SEQ ID NO: 1133917 - RNA, 19 nt, Homo sapiens
  misc_RNA (1)...(19): siRNA sense strand
ggacagcaggcacaagcuu

SEQ ID NO: 1133918 - RNA, 19 nt, Homo sapiens
  misc_RNA (1)...(19): siRNA sense strand
cuacaaggaaguaaugaau

SEQ ID NO: 1133919 - RNA, 19 nt, Homo sapiens
  misc_RNA (1)...(19): siRNA sense strand
uggagaaucggcccaagua

SEQ ID NO: 1133920 - RNA, 19 nt, Homo sapiens
  misc_RNA (1)...(19): siRNA sense strand
gccagggacuuguugucaa

SEQ ID NO: 1133921 - RNA, 19 nt, Homo sapiens
  misc_RNA (1)...(19): siRNA sense strand
gauggaugccaacuuaugu

SEQ ID NO: 1133922 - RNA, 19 nt, Homo sapiens
  misc_RNA (1)...(19): siRNA sense strand
ggacuuguugucaaagaug

SEQ ID NO: 1133923 - RNA, 19 nt, Homo sapiens
  misc_RNA (1)...(19): siRNA sense strand
aggagaacguggauauaug

SEQ ID NO: 1133924 - RNA, 19 nt, Homo sapiens
  misc_RNA (1)...(19): siRNA sense strand
gaauggaaagaacuuaucu

SEQ ID NO: 1133925 - RNA, 19 nt, Homo sapiens
  misc_RNA (1)...(19): siRNA sense strand
ugucuuaccugcuguacca

SEQ ID NO: 1133926 - RNA, 19 nt, Homo sapiens
  misc_RNA (1)...(19): siRNA sense strand
gguaauugaacaacuagga

SEQ ID NO: 1133927 - RNA, 19 nt, Homo sapiens
  misc_RNA (1)...(19): siRNA sense strand
caggaagggacuauauuga

SEQ ID NO: 1133928 - RNA, 19 nt, Homo sapiens
  misc_RNA (1)...(19): siRNA sense strand
acaagcaguuggaugaaag

SEQ ID NO: 1133929 - RNA, 19 nt, Homo sapiens
  misc_RNA (1)...(19): siRNA sense strand
accaugagcgaaugucuua

SEQ ID NO: 1133930 - RNA, 19 nt, Homo sapiens
  misc_RNA (1)...(19): siRNA sense strand
caccucagauauaugacaa

SEQ ID NO: 1133931 - RNA, 19 nt, Homo sapiens
  misc_RNA (1)...(19): siRNA sense strand
aaauugcaacccacaguaa

SEQ ID NO: 1133932 - RNA, 19 nt, Homo sapiens
  misc_RNA (1)...(19): siRNA sense strand
gucaagugauucagaugga

SEQ ID NO: 1133933 - RNA, 19 nt, Homo sapiens
  misc_RNA (1)...(19): siRNA sense strand
cuacaucaacgucugguau

SEQ ID NO: 1133934 - RNA, 19 nt, Homo sapiens
  misc_RNA (1)...(19): siRNA sense strand
ccaaacucuucccagauuc

SEQ ID NO: 1133935 - RNA, 19 nt, Homo sapiens
  misc_RNA (1)...(19): siRNA sense strand
ucaagugauucagauggaa

SEQ ID NO: 1133936 - RNA, 19 nt, Homo sapiens
  misc_RNA (1)...(19): siRNA sense strand
ccagaauucaugaagaaau

SEQ ID NO: 1133937 - RNA, 19 nt, Homo sapiens
  misc_RNA (1)...(19): siRNA sense strand
ggagaaucggcccaaguau

SEQ ID NO: 1133938 - RNA, 19 nt, Homo sapiens
  misc_RNA (1)...(19): siRNA sense strand
aagaaacuauguggagaau

SEQ ID NO: 1133939 - RNA, 19 nt, Homo sapiens
  misc_RNA (1)...(19): siRNA sense strand
gaaaugguucgccacaaaa

SEQ ID NO: 1133940 - RNA, 19 nt, Homo sapiens
  misc_RNA (1)...(19): siRNA sense strand
aggaaguaaugaauucaga

SEQ ID NO: 1133941 - RNA, 19 nt, Homo sapiens
  misc_RNA (1)...(19): siRNA sense strand
gaaugucuuaccugcugua

SEQ ID NO: 1133942 - RNA, 19 nt, Homo sapiens
  misc_RNA (1)...(19): siRNA sense strand
caacuaggaacaccauguc

SEQ ID NO: 1133943 - RNA, 19 nt, Homo sapiens
  misc_RNA (1)...(19): siRNA sense strand
uaugucaagugauucagau

SEQ ID NO: 1133944 - RNA, 19 nt, Homo sapiens
  misc_RNA (1)...(19): siRNA sense strand
ugaagaauggaaagaacuu

SEQ ID NO: 1133945 - RNA, 19 nt, Homo sapiens
  misc_RNA (1)...(19): siRNA sense strand
ggaugaaagagaacacaca

SEQ ID NO: 1133946 - RNA, 19 nt, Homo sapiens
  misc_RNA (1)...(19): siRNA sense strand
gggacuuguugucaaagau

SEQ ID NO: 1133947 - RNA, 19 nt, Homo sapiens
  misc_RNA (1)...(19): siRNA sense strand
ucugugggaugcauuaugg

SEQ ID NO: 1133948 - RNA, 19 nt, Homo sapiens
  misc_RNA (1)...(19): siRNA sense strand
aagaacuuaucuacaagga

SEQ ID NO: 1133949 - RNA, 19 nt, Homo sapiens
  misc_RNA (1)...(19): siRNA sense strand
gguaugacccagccgaagu

SEQ ID NO: 1133950 - RNA, 19 nt, Homo sapiens
  misc_RNA (1)...(19): siRNA sense strand
ggacucaccuuccccaaac

SEQ ID NO: 1133951 - RNA, 19 nt, Homo sapiens
  misc_RNA (1)...(19): siRNA sense strand
gaccaguggaauaagguaa

SEQ ID NO: 1133952 - RNA, 19 nt, Homo sapiens
  misc_RNA (1)...(19): siRNA sense strand
aaggagaacguggauauau

SEQ ID NO: 1133953 - RNA, 19 nt, Homo sapiens
  misc_RNA (1)...(19): siRNA sense strand
gauauaugacaagcaguug

SEQ ID NO: 1133954 - RNA, 19 nt, Homo sapiens
  misc_RNA (1)...(19): siRNA sense strand
acaucaacgucugguauga

SEQ ID NO: 1133955 - RNA, 19 nt, Homo sapiens
  misc_RNA (1)...(19): siRNA sense strand
uguccagaauucaugaaga

SEQ ID NO: 1133956 - RNA, 19 nt, Homo sapiens
  misc_RNA (1)...(19): siRNA sense strand
guaacauuguagucaaguc

SEQ ID NO: 1133957 - RNA, 19 nt, Homo sapiens
  misc_RNA (1)...(19): siRNA sense strand
uaucuacaaggaaguaaug

SEQ ID NO: 1133958 - RNA, 19 nt, Homo sapiens
  misc_RNA (1)...(19): siRNA sense strand
acauuguagucaagucuga

SEQ ID NO: 1133959 - RNA, 19 nt, Homo sapiens
  misc_RNA (1)...(19): siRNA sense strand
ucacagggauuuaaaacca

SEQ ID NO: 1133960 - RNA, 19 nt, Homo sapiens
  misc_RNA (1)...(19): siRNA sense strand
gaccaugagcgaaugucuu

SEQ ID NO: 1133961 - RNA, 19 nt, Homo sapiens
  misc_RNA (1)...(19): siRNA sense strand
guagucaagucugauugca

SEQ ID NO: 1133962 - RNA, 19 nt, Homo sapiens
  misc_RNA (1)...(19): siRNA sense strand
uaccugcuguaccaaaugu

SEQ ID NO: 1133963 - RNA, 19 nt, Homo sapiens
  misc_RNA (1)...(19): siRNA sense strand
ccacaguaagaaacuaugu

SEQ ID NO: 1133964 - RNA, 19 nt, Homo sapiens
  misc_RNA (1)...(19): siRNA sense strand
agauauaugacaagcaguu

SEQ ID NO: 1133965 - RNA, 19 nt, Homo sapiens
  misc_RNA (1)...(19): siRNA sense strand
ugauggaugccaacuuaug

SEQ ID NO: 1133966 - RNA, 19 nt, Homo sapiens
  misc_RNA (1)...(19): siRNA sense strand
ggaaagaacuuaucuacaa

SEQ ID NO: 1133967 - RNA, 19 nt, Homo sapiens
  misc_RNA (1)...(19): siRNA sense strand
ggaauaagguaauugaaca

SEQ ID NO: 1133968 - RNA, 19 nt, Homo sapiens
  misc_RNA (1)...(19): siRNA sense strand
gcaguuggaugaaagagaa

SEQ ID NO: 1133969 - RNA, 19 nt, Homo sapiens
  misc_RNA (1)...(19): siRNA sense strand
caaagaugcuagugauuga

SEQ ID NO: 1133970 - RNA, 19 nt, Homo sapiens
  misc_RNA (1)...(19): siRNA sense strand
gaaacuauguggagaaucg

SEQ ID NO: 1133971 - RNA, 19 nt, Homo sapiens
  misc_RNA (1)...(19): siRNA sense strand
ugaagugugugaaccauaa

SEQ ID NO: 1133972 - RNA, 19 nt, Homo sapiens
  misc_RNA (1)...(19): siRNA sense strand
gaaagaacuuaucuacaag

SEQ ID NO: 1133973 - RNA, 19 nt, Homo sapiens
  misc_RNA (1)...(19): siRNA sense strand
gaaagagaacacacaauug

SEQ ID NO: 1133974 - RNA, 19 nt, Homo sapiens
  misc_RNA (1)...(19): siRNA sense strand
ccaaacacaugccaagaga

SEQ ID NO: 1133975 - RNA, 19 nt, Homo sapiens
  misc_RNA (1)...(19): siRNA sense strand
gaaauugcaacccacagua

SEQ ID NO: 1133976 - RNA, 19 nt, Homo sapiens
  misc_RNA (1)...(19): siRNA sense strand
cauauguggugacacguua

SEQ ID NO: 1133977 - RNA, 19 nt, Homo sapiens
  misc_RNA (1)...(19): siRNA sense strand
ugaaagagaacacacaauu

SEQ ID NO: 1133978 - RNA, 19 nt, Homo sapiens
  misc_RNA (1)...(19): siRNA sense strand
caaguaacauuguagucaa

SEQ ID NO: 1133979 - RNA, 19 nt, Homo sapiens
  misc_RNA (1)...(19): siRNA sense strand
acugauggaugccaacuua

SEQ ID NO: 1133980 - RNA, 19 nt, Homo sapiens
  misc_RNA (1)...(19): siRNA sense strand
agaaaugguucgccacaaa

SEQ ID NO: 1133981 - RNA, 19 nt, Homo sapiens
  misc_RNA (1)...(19): siRNA sense strand
aaagagaacacacaauuga

SEQ ID NO: 1133982 - RNA, 19 nt, Homo sapiens
  misc_RNA (1)...(19): siRNA sense strand
acaaggaaguaaugaauuc

SEQ ID NO: 1133983 - RNA, 19 nt, Homo sapiens
  misc_RNA (1)...(19): siRNA sense strand
ggugacacguuauuacaga

SEQ ID NO: 1133984 - RNA, 19 nt, Homo sapiens
  misc_RNA (1)...(19): siRNA sense strand
gaagaauggaaagaacuua

SEQ ID NO: 1133985 - RNA, 19 nt, Homo sapiens
  misc_RNA (1)...(19): siRNA sense strand
ggaacaccauguccagaau

SEQ ID NO: 1133986 - RNA, 19 nt, Homo sapiens
  misc_RNA (1)...(19): siRNA sense strand
ccagggacuuguugucaaa

SEQ ID NO: 1133987 - RNA, 19 nt, Homo sapiens
  misc_RNA (1)...(19): siRNA sense strand
gcauuaagcaccuccauuc

SEQ ID NO: 1133988 - RNA, 19 nt, Homo sapiens
  misc_RNA (1)...(19): siRNA sense strand
gacaagcaguuggaugaaa

SEQ ID NO: 1133989 - RNA, 19 nt, Homo sapiens
  misc_RNA (1)...(19): siRNA sense strand
guccagaauucaugaagaa

SEQ ID NO: 1133990 - RNA, 19 nt, Homo sapiens
  misc_RNA (1)...(19): siRNA sense strand
gcagugaacagcagugaga

SEQ ID NO: 1133991 - RNA, 19 nt, Homo sapiens
  misc_RNA (1)...(19): siRNA sense strand
caagucugauugcacauug

SEQ ID NO: 1133992 - RNA, 19 nt, Homo sapiens
  misc_RNA (1)...(19): siRNA sense strand
cccaaacucuucccagauu

SEQ ID NO: 1133993 - RNA, 19 nt, Homo sapiens
  misc_RNA (1)...(19): siRNA sense strand
caugaugacuccauaugug

SEQ ID NO: 1133994 - RNA, 19 nt, Homo sapiens
  misc_RNA (1)...(19): siRNA sense strand
gaacaccauguccagaauu

SEQ ID NO: 1133995 - RNA, 19 nt, Homo sapiens
  misc_RNA (1)...(19): siRNA sense strand
gaacacacaauugaagaau

SEQ ID NO: 1133996 - RNA, 19 nt, Homo sapiens
  misc_RNA (1)...(19): siRNA sense strand
gagaaucggcccaaguaug

SEQ ID NO: 1133997 - RNA, 19 nt, Homo sapiens
  misc_RNA (1)...(19): siRNA sense strand
ggacgacgccuuacagcau

SEQ ID NO: 1133998 - RNA, 19 nt, Homo sapiens
  misc_RNA (1)...(19): siRNA sense strand
ggacuccgagcacaauaaa

SEQ ID NO: 1133999 - RNA, 19 nt, Homo sapiens
  misc_RNA (1)...(19): siRNA sense strand
gaugccaacuuaugucaag

SEQ ID NO: 1134000 - RNA, 19 nt, Homo sapiens
  misc_RNA (1)...(19): siRNA sense strand
gagaacacacaauugaaga

SEQ ID NO: 1134001 - RNA, 19 nt, Homo sapiens
  misc_RNA (1)...(19): siRNA sense strand
ucaaagaugcuagugauug

SEQ ID NO: 1134002 - RNA, 19 nt, Homo sapiens
  misc_RNA (1)...(19): siRNA sense strand
ugucaaagaugcuagugau

SEQ ID NO: 1134003 - RNA, 19 nt, Homo sapiens
  misc_RNA (1)...(19): siRNA sense strand
gagaaaugguucgccacaa

SEQ ID NO: 1134004 - RNA, 19 nt, Homo sapiens
  misc_RNA (1)...(19): siRNA sense strand
gaacaacuaggaacaccau

SEQ ID NO: 1134005 - RNA, 19 nt, Homo sapiens
  misc_RNA (1)...(19): siRNA sense strand
acacacaauugaagaaugg

SEQ ID NO: 1134006 - RNA, 19 nt, Homo sapiens
  misc_RNA (1)...(19): siRNA sense strand
ucaaugacaucuccuccau

SEQ ID NO: 1134007 - RNA, 19 nt, Homo sapiens
  misc_RNA (1)...(19): siRNA sense strand
ggaaguaaugaauucagaa

SEQ ID NO: 1134008 - RNA, 19 nt, Homo sapiens
  misc_RNA (1)...(19): siRNA sense strand
ccaggaagggacuauauug

SEQ ID NO: 1134009 - RNA, 19 nt, Homo sapiens
  misc_RNA (1)...(19): siRNA sense strand
gaugaaagagaacacacaa

SEQ ID NO: 1134010 - RNA, 19 nt, Homo sapiens
  misc_RNA (1)...(19): siRNA sense strand
caaggagaacguggauaua

SEQ ID NO: 1134011 - RNA, 19 nt, Homo sapiens
  misc_RNA (1)...(19): siRNA sense strand
gaaguaaugaauucagaag

SEQ ID NO: 1134012 - RNA, 19 nt, Homo sapiens
  misc_RNA (1)...(19): siRNA sense strand
ccaguggaauaagguaauu

SEQ ID NO: 1134013 - RNA, 19 nt, Homo sapiens
  misc_RNA (1)...(19): siRNA sense strand
ggagaacguggauauaugg

SEQ ID NO: 1134014 - RNA, 19 nt, Homo sapiens
  misc_RNA (1)...(19): siRNA sense strand
cgagcacaauaaacucaaa

SEQ ID NO: 1134015 - RNA, 19 nt, Homo sapiens
  misc_RNA (1)...(19): siRNA sense strand
guaauugaacaacuaggaa

SEQ ID NO: 1134016 - RNA, 19 nt, Homo sapiens
  misc_RNA (1)...(19): siRNA sense strand
ccaaguaacauuguaguca

SEQ ID NO: 1134017 - RNA, 19 nt, Homo sapiens
  misc_RNA (1)...(19): siRNA sense strand
ggacagccuucuccuucag

SEQ ID NO: 1134018 - RNA, 19 nt, Homo sapiens
  misc_RNA (1)...(19): siRNA sense strand
uaagaaacuauguggagaa

SEQ ID NO: 1134019 - RNA, 19 nt, Homo sapiens
  misc_RNA (1)...(19): siRNA sense strand
acaaggagaacguggauau

SEQ ID NO: 1134020 - RNA, 19 nt, Homo sapiens
  misc_RNA (1)...(19): siRNA sense strand
gcaggcacaagcuucauga

SEQ ID NO: 1134021 - RNA, 19 nt, Homo sapiens
  misc_RNA (1)...(19): siRNA sense strand
gagcugguccucaugaagu

SEQ ID NO: 1134022 - RNA, 19 nt, Homo sapiens
  misc_RNA (1)...(19): siRNA sense strand
ggacagcaggcacaagcuu

SEQ ID NO: 1134023 - RNA, 19 nt, Homo sapiens
  misc_RNA (1)...(19): siRNA sense strand
cuacaaggaaguaaugaau

SEQ ID NO: 1134024 - RNA, 19 nt, Homo sapiens
  misc_RNA (1)...(19): siRNA sense strand
uggagaaucggcccaagua

SEQ ID NO: 1134025 - RNA, 19 nt, Homo sapiens
  misc_RNA (1)...(19): siRNA sense strand
gauggaugccaacuuaugu

SEQ ID NO: 1134026 - RNA, 19 nt, Homo sapiens
  misc_RNA (1)...(19): siRNA sense strand
ggacuuguugucaaagaug

SEQ ID NO: 1134027 - RNA, 19 nt, Homo sapiens
  misc_RNA (1)...(19): siRNA sense strand
gccagggacuuguugucaa

SEQ ID NO: 1134028 - RNA, 19 nt, Homo sapiens
  misc_RNA (1)...(19): siRNA sense strand
ugucuuaccugcuguacca

SEQ ID NO: 1134029 - RNA, 19 nt, Homo sapiens
  misc_RNA (1)...(19): siRNA sense strand
gaauggaaagaacuuaucu

SEQ ID NO: 1134030 - RNA, 19 nt, Homo sapiens
  misc_RNA (1)...(19): siRNA sense strand
gguaauugaacaacuagga

SEQ ID NO: 1134031 - RNA, 19 nt, Homo sapiens
  misc_RNA (1)...(19): siRNA sense strand
caggaagggacuauauuga

SEQ ID NO: 1134032 - RNA, 19 nt, Homo sapiens
  misc_RNA (1)...(19): siRNA sense strand
aggagaacguggauauaug

SEQ ID NO: 1134033 - RNA, 19 nt, Homo sapiens
  misc_RNA (1)...(19): siRNA sense strand
cagcagacccuuucagaac

SEQ ID NO: 1134034 - RNA, 19 nt, Homo sapiens
  misc_RNA (1)...(19): siRNA sense strand
acaagcaguuggaugaaag

SEQ ID NO: 1134035 - RNA, 19 nt, Homo sapiens
  misc_RNA (1)...(19): siRNA sense strand
gaagcucagcagacccuuu

SEQ ID NO: 1134036 - RNA, 19 nt, Homo sapiens
  misc_RNA (1)...(19): siRNA sense strand
accaugagcgaaugucuua

SEQ ID NO: 1134037 - RNA, 19 nt, Homo sapiens
  misc_RNA (1)...(19): siRNA sense strand
caccucagauauaugacaa

SEQ ID NO: 1134038 - RNA, 19 nt, Homo sapiens
  misc_RNA (1)...(19): siRNA sense strand
gucaagugauucagaugga

SEQ ID NO: 1134039 - RNA, 19 nt, Homo sapiens
  misc_RNA (1)...(19): siRNA sense strand
gcagacccuuucagaacca

SEQ ID NO: 1134040 - RNA, 19 nt, Homo sapiens
  misc_RNA (1)...(19): siRNA sense strand
cuacaucaacgucugguau

SEQ ID NO: 1134041 - RNA, 19 nt, Homo sapiens
  misc_RNA (1)...(19): siRNA sense strand
gggagcugguccucaugaa

SEQ ID NO: 1134042 - RNA, 19 nt, Homo sapiens
  misc_RNA (1)...(19): siRNA sense strand
aaauugcaacccacaguaa

SEQ ID NO: 1134043 - RNA, 19 nt, Homo sapiens
  misc_RNA (1)...(19): siRNA sense strand
gaagugugugaaccauaaa

SEQ ID NO: 1134044 - RNA, 19 nt, Homo sapiens
  misc_RNA (1)...(19): siRNA sense strand
ccaaacucuucccagauuc

SEQ ID NO: 1134045 - RNA, 19 nt, Homo sapiens
  misc_RNA (1)...(19): siRNA sense strand
ucaagugauucagauggaa

SEQ ID NO: 1134046 - RNA, 19 nt, Homo sapiens
  misc_RNA (1)...(19): siRNA sense strand
ccagaauucaugaagaaau

SEQ ID NO: 1134047 - RNA, 19 nt, Homo sapiens
  misc_RNA (1)...(19): siRNA sense strand
ggagaaucggcccaaguau

SEQ ID NO: 1134048 - RNA, 19 nt, Homo sapiens
  misc_RNA (1)...(19): siRNA sense strand
aagaaacuauguggagaau

SEQ ID NO: 1134049 - RNA, 19 nt, Homo sapiens
  misc_RNA (1)...(19): siRNA sense strand
gaaugucuuaccugcugua

SEQ ID NO: 1134050 - RNA, 19 nt, Homo sapiens
  misc_RNA (1)...(19): siRNA sense strand
cauccucgucugucaauga

SEQ ID NO: 1134051 - RNA, 19 nt, Homo sapiens
  misc_RNA (1)...(19): siRNA sense strand
aggaaguaaugaauucaga

SEQ ID NO: 1134052 - RNA, 19 nt, Homo sapiens
  misc_RNA (1)...(19): siRNA sense strand
caacuaggaacaccauguc

SEQ ID NO: 1134053 - RNA, 19 nt, Homo sapiens
  misc_RNA (1)...(19): siRNA sense strand
gaaaugguucgccacaaaa

SEQ ID NO: 1134054 - RNA, 19 nt, Homo sapiens
  misc_RNA (1)...(19): siRNA sense strand
cguaugaugcuguccuuga

SEQ ID NO: 1134055 - RNA, 19 nt, Homo sapiens
  misc_RNA (1)...(19): siRNA sense strand
uaugucaagugauucagau

SEQ ID NO: 1134056 - RNA, 19 nt, Homo sapiens
  misc_RNA (1)...(19): siRNA sense strand
ugaagaauggaaagaacuu

SEQ ID NO: 1134057 - RNA, 19 nt, Homo sapiens
  misc_RNA (1)...(19): siRNA sense strand
ggaugaaagagaacacaca

SEQ ID NO: 1134058 - RNA, 19 nt, Homo sapiens
  misc_RNA (1)...(19): siRNA sense strand
gggacuuguugucaaagau

SEQ ID NO: 1134059 - RNA, 19 nt, Homo sapiens
  misc_RNA (1)...(19): siRNA sense strand
ucugugggaugcauuaugg

SEQ ID NO: 1134060 - RNA, 19 nt, Homo sapiens
  misc_RNA (1)...(19): siRNA sense strand
aagaacuuaucuacaagga

SEQ ID NO: 1134061 - RNA, 19 nt, Homo sapiens
  misc_RNA (1)...(19): siRNA sense strand
gguaugacccagccgaagu

SEQ ID NO: 1134062 - RNA, 19 nt, Homo sapiens
  misc_RNA (1)...(19): siRNA sense strand
ggacucaccuuccccaaac

SEQ ID NO: 1134063 - RNA, 19 nt, Homo sapiens
  misc_RNA (1)...(19): siRNA sense strand
gaccaguggaauaagguaa

SEQ ID NO: 1134064 - RNA, 19 nt, Homo sapiens
  misc_RNA (1)...(19): siRNA sense strand
acaucaacgucugguauga

SEQ ID NO: 1134065 - RNA, 19 nt, Homo sapiens
  misc_RNA (1)...(19): siRNA sense strand
gauauaugacaagcaguug

SEQ ID NO: 1134066 - RNA, 19 nt, Homo sapiens
  misc_RNA (1)...(19): siRNA sense strand
gaaagaaacuccuguauau

SEQ ID NO: 1134067 - RNA, 19 nt, Homo sapiens
  misc_RNA (1)...(19): siRNA sense strand
caaaggaccugugacauau

SEQ ID NO: 1134068 - RNA, 19 nt, Homo sapiens
  misc_RNA (1)...(19): siRNA sense strand
gaaagucugugcuugugaa

SEQ ID NO: 1134069 - RNA, 19 nt, Homo sapiens
  misc_RNA (1)...(19): siRNA sense strand
gcugguacauucugugaua

SEQ ID NO: 1134070 - RNA, 19 nt, Homo sapiens
  misc_RNA (1)...(19): siRNA sense strand
gauaauaacaggaaucaga

SEQ ID NO: 1134071 - RNA, 19 nt, Homo sapiens
  misc_RNA (1)...(19): siRNA sense strand
uaaacaaggucaagaacug

SEQ ID NO: 1134072 - RNA, 19 nt, Homo sapiens
  misc_RNA (1)...(19): siRNA sense strand
ugacugcacuccaggguuu

SEQ ID NO: 1134073 - RNA, 19 nt, Homo sapiens
  misc_RNA (1)...(19): siRNA sense strand
acaaaggaccugugacaua

SEQ ID NO: 1134074 - RNA, 19 nt, Homo sapiens
  misc_RNA (1)...(19): siRNA sense strand
gaaggaggaugugaacugu

SEQ ID NO: 1134075 - RNA, 19 nt, Homo sapiens
  misc_RNA (1)...(19): siRNA sense strand
agaaagaaacuccuguaua

SEQ ID NO: 1134076 - RNA, 19 nt, Homo sapiens
  misc_RNA (1)...(19): siRNA sense strand
gguacauucugugauaaua

SEQ ID NO: 1134077 - RNA, 19 nt, Homo sapiens
  misc_RNA (1)...(19): siRNA sense strand
ggacaaaggaccugugaca

SEQ ID NO: 1134078 - RNA, 19 nt, Homo sapiens
  misc_RNA (1)...(19): siRNA sense strand
gcagaaagaaacuccugua

SEQ ID NO: 1134079 - RNA, 19 nt, Homo sapiens
  misc_RNA (1)...(19): siRNA sense strand
gaucaucuccuucuuucuu

SEQ ID NO: 1134080 - RNA, 19 nt, Homo sapiens
  misc_RNA (1)...(19): siRNA sense strand
caaacaaccauuuaugaga

SEQ ID NO: 1134081 - RNA, 19 nt, Homo sapiens
  misc_RNA (1)...(19): siRNA sense strand
cauaguagccacucuguug

SEQ ID NO: 1134082 - RNA, 19 nt, Homo sapiens
  misc_RNA (1)...(19): siRNA sense strand
gaaacuccuguauauauuc

SEQ ID NO: 1134083 - RNA, 19 nt, Homo sapiens
  misc_RNA (1)...(19): siRNA sense strand
ggcuguagcugccgauuuc

SEQ ID NO: 1134084 - RNA, 19 nt, Homo sapiens
  misc_RNA (1)...(19): siRNA sense strand
acaaacuacucaagaggaa

SEQ ID NO: 1134085 - RNA, 19 nt, Homo sapiens
  misc_RNA (1)...(19): siRNA sense strand
ggacauuuaacgaucagaa

SEQ ID NO: 1134086 - RNA, 19 nt, Homo sapiens
  misc_RNA (1)...(19): siRNA sense strand
cagcaugugugaacaggau

SEQ ID NO: 1134087 - RNA, 19 nt, Homo sapiens
  misc_RNA (1)...(19): siRNA sense strand
gaagaaggaggaugugaac

SEQ ID NO: 1134088 - RNA, 19 nt, Homo sapiens
  misc_RNA (1)...(19): siRNA sense strand
ccguuucucuguuguuaaa

SEQ ID NO: 1134089 - RNA, 19 nt, Homo sapiens
  misc_RNA (1)...(19): siRNA sense strand
aggaggaugugaacuguga

SEQ ID NO: 1134090 - RNA, 19 nt, Homo sapiens
  misc_RNA (1)...(19): siRNA sense strand
ggaaagucugugcuuguga

SEQ ID NO: 1134091 - RNA, 19 nt, Homo sapiens
  misc_RNA (1)...(19): siRNA sense strand
caccagcaaugcagagugu

SEQ ID NO: 1134092 - RNA, 19 nt, Homo sapiens
  misc_RNA (1)...(19): siRNA sense strand
gcaggauccuuguaguaac

SEQ ID NO: 1134093 - RNA, 19 nt, Homo sapiens
  misc_RNA (1)...(19): siRNA sense strand
cagcgcagguggacaaagg

SEQ ID NO: 1134094 - RNA, 19 nt, Homo sapiens
  misc_RNA (1)...(19): siRNA sense strand
aaacuguucuuuggaugga

SEQ ID NO: 1134095 - RNA, 19 nt, Homo sapiens
  misc_RNA (1)...(19): siRNA sense strand
gacauuuaacgaucagaaa

SEQ ID NO: 1134096 - RNA, 19 nt, Homo sapiens
  misc_RNA (1)...(19): siRNA sense strand
ugugugaacaggauuguaa

SEQ ID NO: 1134097 - RNA, 19 nt, Homo sapiens
  misc_RNA (1)...(19): siRNA sense strand
ggaccaggaaggaguguuc

SEQ ID NO: 1134098 - RNA, 19 nt, Homo sapiens
  misc_RNA (1)...(19): siRNA sense strand
gacauaugcaggcagugua

SEQ ID NO: 1134099 - RNA, 19 nt, Homo sapiens
  misc_RNA (1)...(19): siRNA sense strand
cagaaagaaacuccuguau

SEQ ID NO: 1134100 - RNA, 19 nt, Homo sapiens
  misc_RNA (1)...(19): siRNA sense strand
ggagagggacguggucugu

SEQ ID NO: 1134101 - RNA, 19 nt, Homo sapiens
  misc_RNA (1)...(19): siRNA sense strand
gaucagaaacguggcaucu

SEQ ID NO: 1134102 - RNA, 19 nt, Homo sapiens
  misc_RNA (1)...(19): siRNA sense strand
agaagaagaaggaggaugu

SEQ ID NO: 1134103 - RNA, 19 nt, Homo sapiens
  misc_RNA (1)...(19): siRNA sense strand
ugagaggacaagaucauug

SEQ ID NO: 1134104 - RNA, 19 nt, Homo sapiens
  misc_RNA (1)...(19): siRNA sense strand
cugcccagcugguacauuc

SEQ ID NO: 1134105 - RNA, 19 nt, Homo sapiens
  misc_RNA (1)...(19): siRNA sense strand
agaagaaggaggaugugaa

SEQ ID NO: 1134106 - RNA, 19 nt, Homo sapiens
  misc_RNA (1)...(19): siRNA sense strand
gaagaagaaggaggaugug

SEQ ID NO: 1134107 - RNA, 19 nt, Homo sapiens
  misc_RNA (1)...(19): siRNA sense strand
gacaagaucauugcaggau

SEQ ID NO: 1134108 - RNA, 19 nt, Homo sapiens
  misc_RNA (1)...(19): siRNA sense strand
aaacuacucaagaggaaga

SEQ ID NO: 1134109 - RNA, 19 nt, Homo sapiens
  misc_RNA (1)...(19): siRNA sense strand
ucaaacaaccauuuaugag

SEQ ID NO: 1134110 - RNA, 19 nt, Homo sapiens
  misc_RNA (1)...(19): siRNA sense strand
aaacaaggucaagaacuga

SEQ ID NO: 1134111 - RNA, 19 nt, Homo sapiens
  misc_RNA (1)...(19): siRNA sense strand
agucugugcuugugaaugg

SEQ ID NO: 1134112 - RNA, 19 nt, Homo sapiens
  misc_RNA (1)...(19): siRNA sense strand
ggauggaaagucugugcuu

SEQ ID NO: 1134113 - RNA, 19 nt, Homo sapiens
  misc_RNA (1)...(19): siRNA sense strand
cuccguuucucuguuguua

SEQ ID NO: 1134114 - RNA, 19 nt, Homo sapiens
  misc_RNA (1)...(19): siRNA sense strand
ccgggagcauccucuguga

SEQ ID NO: 1134115 - RNA, 19 nt, Homo sapiens
  misc_RNA (1)...(19): siRNA sense strand
uggaaagucugugcuugug

SEQ ID NO: 1134116 - RNA, 19 nt, Homo sapiens
  misc_RNA (1)...(19): siRNA sense strand
guaaacaaggucaagaacu

SEQ ID NO: 1134117 - RNA, 19 nt, Homo sapiens
  misc_RNA (1)...(19): siRNA sense strand
caggauccuuguaguaacu

SEQ ID NO: 1134118 - RNA, 19 nt, Homo sapiens
  misc_RNA (1)...(19): siRNA sense strand
agaaggaggaugugaacug

SEQ ID NO: 1134119 - RNA, 19 nt, Homo sapiens
  misc_RNA (1)...(19): siRNA sense strand
gagaggacaagaucauugc

SEQ ID NO: 1134120 - RNA, 19 nt, Homo sapiens
  misc_RNA (1)...(19): siRNA sense strand
ugcaggauccuuguaguaa

SEQ ID NO: 1134121 - RNA, 19 nt, Homo sapiens
  misc_RNA (1)...(19): siRNA sense strand
cagcugguacauucuguga

SEQ ID NO: 1134122 - RNA, 19 nt, Homo sapiens
  misc_RNA (1)...(19): siRNA sense strand
cugccgauuuccagaagaa

SEQ ID NO: 1134123 - RNA, 19 nt, Homo sapiens
  misc_RNA (1)...(19): siRNA sense strand
uaugagaccaguacaaacu

SEQ ID NO: 1134124 - RNA, 19 nt, Homo sapiens
  misc_RNA (1)...(19): siRNA sense strand
ccagcaaugcagaguguga

SEQ ID NO: 1134125 - RNA, 19 nt, Homo sapiens
  misc_RNA (1)...(19): siRNA sense strand
acauaugcaggcaguguaa

SEQ ID NO: 1134126 - RNA, 19 nt, Homo sapiens
  misc_RNA (1)...(19): siRNA sense strand
gcaugugugaacaggauug

SEQ ID NO: 1134127 - RNA, 19 nt, Homo sapiens
  misc_RNA (1)...(19): siRNA sense strand
ugagaccaguacaaacuac

SEQ ID NO: 1134128 - RNA, 19 nt, Homo sapiens
  misc_RNA (1)...(19): siRNA sense strand
uuuaugagaccaguacaaa

SEQ ID NO: 1134129 - RNA, 19 nt, Homo sapiens
  misc_RNA (1)...(19): siRNA sense strand
ggacacucuccgcagauca

SEQ ID NO: 1134130 - RNA, 19 nt, Homo sapiens
  misc_RNA (1)...(19): siRNA sense strand
uaacugcccagcugguaca

SEQ ID NO: 1134131 - RNA, 19 nt, Homo sapiens
  misc_RNA (1)...(19): siRNA sense strand
ugacauaugcaggcagugu

SEQ ID NO: 1134132 - RNA, 19 nt, Homo sapiens
  misc_RNA (1)...(19): siRNA sense strand
gaagaagaagaaggaggau

SEQ ID NO: 1134133 - RNA, 19 nt, Homo sapiens
  misc_RNA (1)...(19): siRNA sense strand
gugaacaggauuguaaaca

SEQ ID NO: 1134134 - RNA, 19 nt, Homo sapiens
  misc_RNA (1)...(19): siRNA sense strand
uugcaggauccuuguagua

SEQ ID NO: 1134135 - RNA, 19 nt, Homo sapiens
  misc_RNA (1)...(19): siRNA sense strand
guggacaaaggaccuguga

SEQ ID NO: 1134136 - RNA, 19 nt, Homo sapiens
  misc_RNA (1)...(19): siRNA sense strand
ugcagucccuguccuccaa

SEQ ID NO: 1134137 - RNA, 19 nt, Homo sapiens
  misc_RNA (1)...(19): siRNA sense strand
ucucagauguggccuacuu

SEQ ID NO: 1134138 - RNA, 19 nt, Homo sapiens
  misc_RNA (1)...(19): siRNA sense strand
ggcugcagcuguacgguuu

SEQ ID NO: 1134139 - RNA, 19 nt, Homo sapiens
  misc_RNA (1)...(19): siRNA sense strand
gagagagccguuuccagaa

SEQ ID NO: 1134140 - RNA, 19 nt, Homo sapiens
  misc_RNA (1)...(19): siRNA sense strand
gcuacauguugccugguuu

SEQ ID NO: 1134141 - RNA, 19 nt, Homo sapiens
  misc_RNA (1)...(19): siRNA sense strand
gaaguucccuccccagaag

SEQ ID NO: 1134142 - RNA, 19 nt, Homo sapiens
  misc_RNA (1)...(19): siRNA sense strand
gcagaaggacgaguacuac

SEQ ID NO: 1134143 - RNA, 19 nt, Homo sapiens
  misc_RNA (1)...(19): siRNA sense strand
cauccacggugucuucuac

SEQ ID NO: 1134144 - RNA, 19 nt, Homo sapiens
  misc_RNA (1)...(19): siRNA sense strand
ucaucuaccuucggcacua

SEQ ID NO: 1134145 - RNA, 19 nt, Homo sapiens
  misc_RNA (1)...(19): siRNA sense strand
ggcuacauguugccugguu

SEQ ID NO: 1134146 - RNA, 19 nt, Homo sapiens
  misc_RNA (1)...(19): siRNA sense strand
gaggaguacgucagcauca

SEQ ID NO: 1134147 - RNA, 19 nt, Homo sapiens
  misc_RNA (1)...(19): siRNA sense strand
cccagaagcucaucuaccu

SEQ ID NO: 1134148 - RNA, 19 nt, Homo sapiens
  misc_RNA (1)...(19): siRNA sense strand
uuacauccacggugucuuc

SEQ ID NO: 1134149 - RNA, 19 nt, Homo sapiens
  misc_RNA (1)...(19): siRNA sense strand
cgcagaaggacgaguacua

SEQ ID NO: 1134150 - RNA, 19 nt, Homo sapiens
  misc_RNA (1)...(19): siRNA sense strand
ggaguacgucagcaucauc

SEQ ID NO: 1134151 - RNA, 19 nt, Homo sapiens
  misc_RNA (1)...(19): siRNA sense strand
acacggccacccugacuga

SEQ ID NO: 1134152 - RNA, 19 nt, Homo sapiens
  misc_RNA (1)...(19): siRNA sense strand
ccauggggcugcagcugua

SEQ ID NO: 1134153 - RNA, 19 nt, Homo sapiens
  misc_RNA (1)...(19): siRNA sense strand
ucagauguggccuacuuug

SEQ ID NO: 1134154 - RNA, 19 nt, Homo sapiens
  misc_RNA (1)...(19): siRNA sense strand
cggcgcagaaggacgagua

SEQ ID NO: 1134155 - RNA, 19 nt, Homo sapiens
  misc_RNA (1)...(19): siRNA sense strand
ugcccuaccugcuggacaa

SEQ ID NO: 1134156 - RNA, 19 nt, Homo sapiens
  misc_RNA (1)...(19): siRNA sense strand
ucucagauguggccuacuu

SEQ ID NO: 1134157 - RNA, 19 nt, Homo sapiens
  misc_RNA (1)...(19): siRNA sense strand
ggcugcagcuguacgguuu

SEQ ID NO: 1134158 - RNA, 19 nt, Homo sapiens
  misc_RNA (1)...(19): siRNA sense strand
gagagagccguuuccagaa

SEQ ID NO: 1134159 - RNA, 19 nt, Homo sapiens
  misc_RNA (1)...(19): siRNA sense strand
gcuacauguugccugguuu

SEQ ID NO: 1134160 - RNA, 19 nt, Homo sapiens
  misc_RNA (1)...(19): siRNA sense strand
gaaguucccuccccagaag

SEQ ID NO: 1134161 - RNA, 19 nt, Homo sapiens
  misc_RNA (1)...(19): siRNA sense strand
gcagaaggacgaguacuac

SEQ ID NO: 1134162 - RNA, 19 nt, Homo sapiens
  misc_RNA (1)...(19): siRNA sense strand
cauccacggugucuucuac

SEQ ID NO: 1134163 - RNA, 19 nt, Homo sapiens
  misc_RNA (1)...(19): siRNA sense strand
ucaucuaccuucggcacua

SEQ ID NO: 1134164 - RNA, 19 nt, Homo sapiens
  misc_RNA (1)...(19): siRNA sense strand
ggcuacauguugccugguu

SEQ ID NO: 1134165 - RNA, 19 nt, Homo sapiens
  misc_RNA (1)...(19): siRNA sense strand
gaggaguacgucagcauca

SEQ ID NO: 1134166 - RNA, 19 nt, Homo sapiens
  misc_RNA (1)...(19): siRNA sense strand
cccagaagcucaucuaccu

SEQ ID NO: 1134167 - RNA, 19 nt, Homo sapiens
  misc_RNA (1)...(19): siRNA sense strand
uuacauccacggugucuuc

SEQ ID NO: 1134168 - RNA, 19 nt, Homo sapiens
  misc_RNA (1)...(19): siRNA sense strand
cgcagaaggacgaguacua

SEQ ID NO: 1134169 - RNA, 19 nt, Homo sapiens
  misc_RNA (1)...(19): siRNA sense strand
ggaguacgucagcaucauc

SEQ ID NO: 1134170 - RNA, 19 nt, Homo sapiens
  misc_RNA (1)...(19): siRNA sense strand
acacggccacccugacuga

SEQ ID NO: 1134171 - RNA, 19 nt, Homo sapiens
  misc_RNA (1)...(19): siRNA sense strand
ccauggggcugcagcugua

SEQ ID NO: 1134172 - RNA, 19 nt, Homo sapiens
  misc_RNA (1)...(19): siRNA sense strand
ucagauguggccuacuuug

SEQ ID NO: 1134173 - RNA, 19 nt, Homo sapiens
  misc_RNA (1)...(19): siRNA sense strand
cggcgcagaaggacgagua

SEQ ID NO: 1134174 - RNA, 19 nt, Homo sapiens
  misc_RNA (1)...(19): siRNA sense strand
ugcccuaccugcuggacaa

SEQ ID NO: 1134175 - RNA, 19 nt, Homo sapiens
  misc_RNA (1)...(19): siRNA sense strand
gggaaaccaugaagaggaa

SEQ ID NO: 1134176 - RNA, 19 nt, Homo sapiens
  misc_RNA (1)...(19): siRNA sense strand
gcuggaaggugacgagugu

SEQ ID NO: 1134177 - RNA, 19 nt, Homo sapiens
  misc_RNA (1)...(19): siRNA sense strand
ccaggauggugacaaguug

SEQ ID NO: 1134178 - RNA, 19 nt, Homo sapiens
  misc_RNA (1)...(19): siRNA sense strand
cauggcaaguggcucucua

SEQ ID NO: 1134179 - RNA, 19 nt, Homo sapiens
  misc_RNA (1)...(19): siRNA sense strand
gaucagggaaaccaugaag

SEQ ID NO: 1134180 - RNA, 19 nt, Homo sapiens
  misc_RNA (1)...(19): siRNA sense strand
auaccaaagucugccacua

SEQ ID NO: 1134181 - RNA, 19 nt, Homo sapiens
  misc_RNA (1)...(19): siRNA sense strand
ggggugacgucccuuguga

SEQ ID NO: 1134182 - RNA, 19 nt, Homo sapiens
  misc_RNA (1)...(19): siRNA sense strand
ucagggaaaccaugaagag

SEQ ID NO: 1134183 - RNA, 19 nt, Homo sapiens
  misc_RNA (1)...(19): siRNA sense strand
ccaccgcaacgacaucaug

SEQ ID NO: 1134184 - RNA, 19 nt, Homo sapiens
  misc_RNA (1)...(19): siRNA sense strand
ggugacgucccuugugaca

SEQ ID NO: 1134185 - RNA, 19 nt, Homo sapiens
  misc_RNA (1)...(19): siRNA sense strand
gcuggaaggugacgagugu

SEQ ID NO: 1134186 - RNA, 19 nt, Homo sapiens
  misc_RNA (1)...(19): siRNA sense strand
ccaggauggugacaaguug

SEQ ID NO: 1134187 - RNA, 19 nt, Homo sapiens
  misc_RNA (1)...(19): siRNA sense strand
cauggcaaguggcucucua

SEQ ID NO: 1134188 - RNA, 19 nt, Homo sapiens
  misc_RNA (1)...(19): siRNA sense strand
ccaccgcaacgacaucaug

SEQ ID NO: 1134189 - RNA, 19 nt, Homo sapiens
  misc_RNA (1)...(19): siRNA sense strand
gcuggaaggugacgagugu

SEQ ID NO: 1134190 - RNA, 19 nt, Homo sapiens
  misc_RNA (1)...(19): siRNA sense strand
ccaggauggugacaaguug

SEQ ID NO: 1134191 - RNA, 19 nt, Homo sapiens
  misc_RNA (1)...(19): siRNA sense strand
cauggcaaguggcucucua

SEQ ID NO: 1134192 - RNA, 19 nt, Homo sapiens
  misc_RNA (1)...(19): siRNA sense strand
ccaccgcaacgacaucaug

SEQ ID NO: 1134193 - RNA, 19 nt, Homo sapiens
  misc_RNA (1)...(19): siRNA sense strand
gggaaaccaugaagaggaa

SEQ ID NO: 1134194 - RNA, 19 nt, Homo sapiens
  misc_RNA (1)...(19): siRNA sense strand
gcuggaaggugacgagugu

SEQ ID NO: 1134195 - RNA, 19 nt, Homo sapiens
  misc_RNA (1)...(19): siRNA sense strand
ccaggauggugacaaguug

SEQ ID NO: 1134196 - RNA, 19 nt, Homo sapiens
  misc_RNA (1)...(19): siRNA sense strand
cauggcaaguggcucucua

SEQ ID NO: 1134197 - RNA, 19 nt, Homo sapiens
  misc_RNA (1)...(19): siRNA sense strand
gaucagggaaaccaugaag

SEQ ID NO: 1134198 - RNA, 19 nt, Homo sapiens
  misc_RNA (1)...(19): siRNA sense strand
auaccaaagucugccacua

SEQ ID NO: 1134199 - RNA, 19 nt, Homo sapiens
  misc_RNA (1)...(19): siRNA sense strand
ggggugacgucccuuguga

SEQ ID NO: 1134200 - RNA, 19 nt, Homo sapiens
  misc_RNA (1)...(19): siRNA sense strand
ucagggaaaccaugaagag

SEQ ID NO: 1134201 - RNA, 19 nt, Homo sapiens
  misc_RNA (1)...(19): siRNA sense strand
ccaccgcaacgacaucaug

SEQ ID NO: 1134202 - RNA, 19 nt, Homo sapiens
  misc_RNA (1)...(19): siRNA sense strand
ggugacgucccuugugaca

SEQ ID NO: 1134203 - RNA, 19 nt, Homo sapiens
  misc_RNA (1)...(19): siRNA sense strand
gaacaagaccgaauggaua

SEQ ID NO: 1134204 - RNA, 19 nt, Homo sapiens
  misc_RNA (1)...(19): siRNA sense strand
gaauaucagucgaaacuuu

SEQ ID NO: 1134205 - RNA, 19 nt, Homo sapiens
  misc_RNA (1)...(19): siRNA sense strand
caucagagcuaacuuugaa

SEQ ID NO: 1134206 - RNA, 19 nt, Homo sapiens
  misc_RNA (1)...(19): siRNA sense strand
ggacagaguugaucagucu

SEQ ID NO: 1134207 - RNA, 19 nt, Homo sapiens
  misc_RNA (1)...(19): siRNA sense strand
acagagagauuacuccaaa

SEQ ID NO: 1134208 - RNA, 19 nt, Homo sapiens
  misc_RNA (1)...(19): siRNA sense strand
ccagaaagacuaugugaaa

SEQ ID NO: 1134209 - RNA, 19 nt, Homo sapiens
  misc_RNA (1)...(19): siRNA sense strand
gaaauuugguguggaacaa

SEQ ID NO: 1134210 - RNA, 19 nt, Homo sapiens
  misc_RNA (1)...(19): siRNA sense strand
caaguaacaucagagcuaa

SEQ ID NO: 1134211 - RNA, 19 nt, Homo sapiens
  misc_RNA (1)...(19): siRNA sense strand
uaagagcgccguuggcuuu

SEQ ID NO: 1134212 - RNA, 19 nt, Homo sapiens
  misc_RNA (1)...(19): siRNA sense strand
uaacaucagagcuaacuuu

SEQ ID NO: 1134213 - RNA, 19 nt, Homo sapiens
  misc_RNA (1)...(19): siRNA sense strand
ccaggagcauaucaacaua

SEQ ID NO: 1134214 - RNA, 19 nt, Homo sapiens
  misc_RNA (1)...(19): siRNA sense strand
ccacgaauaucagucgaaa

SEQ ID NO: 1134215 - RNA, 19 nt, Homo sapiens
  misc_RNA (1)...(19): siRNA sense strand
gagauuacuccaaagguuu

SEQ ID NO: 1134216 - RNA, 19 nt, Homo sapiens
  misc_RNA (1)...(19): siRNA sense strand
gaagcaugccucccagaaa

SEQ ID NO: 1134217 - RNA, 19 nt, Homo sapiens
  misc_RNA (1)...(19): siRNA sense strand
agaaggaucggauggauaa

SEQ ID NO: 1134218 - RNA, 19 nt, Homo sapiens
  misc_RNA (1)...(19): siRNA sense strand
ggagaaggaacuugaaaca

SEQ ID NO: 1134219 - RNA, 19 nt, Homo sapiens
  misc_RNA (1)...(19): siRNA sense strand
gcagaaggaucggauggau

SEQ ID NO: 1134220 - RNA, 19 nt, Homo sapiens
  misc_RNA (1)...(19): siRNA sense strand
caaguuugguguccagaug

SEQ ID NO: 1134221 - RNA, 19 nt, Homo sapiens
  misc_RNA (1)...(19): siRNA sense strand
ugaaugaugugagugagaa

SEQ ID NO: 1134222 - RNA, 19 nt, Homo sapiens
  misc_RNA (1)...(19): siRNA sense strand
ggaacaagaccgaauggau

SEQ ID NO: 1134223 - RNA, 19 nt, Homo sapiens
  misc_RNA (1)...(19): siRNA sense strand
uaagaaugcgucaaccuuu

SEQ ID NO: 1134224 - RNA, 19 nt, Homo sapiens
  misc_RNA (1)...(19): siRNA sense strand
gagcauaucaacauacaca

SEQ ID NO: 1134225 - RNA, 19 nt, Homo sapiens
  misc_RNA (1)...(19): siRNA sense strand
gaaaggguuuggaggaaaa

SEQ ID NO: 1134226 - RNA, 19 nt, Homo sapiens
  misc_RNA (1)...(19): siRNA sense strand
gagggagaaugucuuucaa

SEQ ID NO: 1134227 - RNA, 19 nt, Homo sapiens
  misc_RNA (1)...(19): siRNA sense strand
ggagcaagccagagccaaa

SEQ ID NO: 1134228 - RNA, 19 nt, Homo sapiens
  misc_RNA (1)...(19): siRNA sense strand
agagauuacuccaaagguu

SEQ ID NO: 1134229 - RNA, 19 nt, Homo sapiens
  misc_RNA (1)...(19): siRNA sense strand
ggacagcaccuacgaugag

SEQ ID NO: 1134230 - RNA, 19 nt, Homo sapiens
  misc_RNA (1)...(19): siRNA sense strand
gcauggaggccgcugacua

SEQ ID NO: 1134231 - RNA, 19 nt, Homo sapiens
  misc_RNA (1)...(19): siRNA sense strand
gggaucaccaggagaaauu

SEQ ID NO: 1134232 - RNA, 19 nt, Homo sapiens
  misc_RNA (1)...(19): siRNA sense strand
gaagcacgagucccagaaa

SEQ ID NO: 1134233 - RNA, 19 nt, Homo sapiens
  misc_RNA (1)...(19): siRNA sense strand
ggaugcggcuuccuucaag

SEQ ID NO: 1134234 - RNA, 19 nt, Homo sapiens
  misc_RNA (1)...(19): siRNA sense strand
aaaccucgcuaaggagaaa

SEQ ID NO: 1134235 - RNA, 19 nt, Homo sapiens
  misc_RNA (1)...(19): siRNA sense strand
ugaaaggguuuggaggaaa

SEQ ID NO: 1134236 - RNA, 19 nt, Homo sapiens
  misc_RNA (1)...(19): siRNA sense strand
ucagucugcuguaggcuuu

SEQ ID NO: 1134237 - RNA, 19 nt, Homo sapiens
  misc_RNA (1)...(19): siRNA sense strand
acaaguaacaucagagcua

SEQ ID NO: 1134238 - RNA, 19 nt, Homo sapiens
  misc_RNA (1)...(19): siRNA sense strand
gugaaaggguuuggaggaa

SEQ ID NO: 1134239 - RNA, 19 nt, Homo sapiens
  misc_RNA (1)...(19): siRNA sense strand
caagagcaucagacccuua

SEQ ID NO: 1134240 - RNA, 19 nt, Homo sapiens
  misc_RNA (1)...(19): siRNA sense strand
aagaaugcgucaaccuuug

SEQ ID NO: 1134241 - RNA, 19 nt, Homo sapiens
  misc_RNA (1)...(19): siRNA sense strand
aaagacuacuccagugguu

SEQ ID NO: 1134242 - RNA, 19 nt, Homo sapiens
  misc_RNA (1)...(19): siRNA sense strand
agacagacaagacaaaugu

SEQ ID NO: 1134243 - RNA, 19 nt, Homo sapiens
  misc_RNA (1)...(19): siRNA sense strand
caaaacaaguaacaucaga

SEQ ID NO: 1134244 - RNA, 19 nt, Homo sapiens
  misc_RNA (1)...(19): siRNA sense strand
gagaagcacgagucacaga

SEQ ID NO: 1134245 - RNA, 19 nt, Homo sapiens
  misc_RNA (1)...(19): siRNA sense strand
gaagcacgagucacagaga

SEQ ID NO: 1134246 - RNA, 19 nt, Homo sapiens
  misc_RNA (1)...(19): siRNA sense strand
aagcaugccucccagaaag

SEQ ID NO: 1134247 - RNA, 19 nt, Homo sapiens
  misc_RNA (1)...(19): siRNA sense strand
gcugagggagaaugucuuu

SEQ ID NO: 1134248 - RNA, 19 nt, Homo sapiens
  misc_RNA (1)...(19): siRNA sense strand
gaucucauuugacccugau

SEQ ID NO: 1134249 - RNA, 19 nt, Homo sapiens
  misc_RNA (1)...(19): siRNA sense strand
cagaaagacuaugugaaag

SEQ ID NO: 1134250 - RNA, 19 nt, Homo sapiens
  misc_RNA (1)...(19): siRNA sense strand
gaucggauggauaagaaug

SEQ ID NO: 1134251 - RNA, 19 nt, Homo sapiens
  misc_RNA (1)...(19): siRNA sense strand
cagaaggaucggauggaua

SEQ ID NO: 1134252 - RNA, 19 nt, Homo sapiens
  misc_RNA (1)...(19): siRNA sense strand
uuaaggagaaggaacuuga

SEQ ID NO: 1134253 - RNA, 19 nt, Homo sapiens
  misc_RNA (1)...(19): siRNA sense strand
gcucuucccagccaacuau

SEQ ID NO: 1134254 - RNA, 19 nt, Homo sapiens
  misc_RNA (1)...(19): siRNA sense strand
cagaggcugucuaugaaag

SEQ ID NO: 1134255 - RNA, 19 nt, Homo sapiens
  misc_RNA (1)...(19): siRNA sense strand
uacacaagcugagggagaa

SEQ ID NO: 1134256 - RNA, 19 nt, Homo sapiens
  misc_RNA (1)...(19): siRNA sense strand
ggaaauuugguguggaaca

SEQ ID NO: 1134257 - RNA, 19 nt, Homo sapiens
  misc_RNA (1)...(19): siRNA sense strand
acaaggacaaaguggauaa

SEQ ID NO: 1134258 - RNA, 19 nt, Homo sapiens
  misc_RNA (1)...(19): siRNA sense strand
aacaagaccgaauggauaa

SEQ ID NO: 1134259 - RNA, 19 nt, Homo sapiens
  misc_RNA (1)...(19): siRNA sense strand
gaacuugaaacaggaccaa

SEQ ID NO: 1134260 - RNA, 19 nt, Homo sapiens
  misc_RNA (1)...(19): siRNA sense strand
gcaccuacgaugaguacga

SEQ ID NO: 1134261 - RNA, 19 nt, Homo sapiens
  misc_RNA (1)...(19): siRNA sense strand
aggaucggauggauaagaa

SEQ ID NO: 1134262 - RNA, 19 nt, Homo sapiens
  misc_RNA (1)...(19): siRNA sense strand
cgacaaggacaaaguggau

SEQ ID NO: 1134263 - RNA, 19 nt, Homo sapiens
  misc_RNA (1)...(19): siRNA sense strand
gugagaaggagcaaagaug

SEQ ID NO: 1134264 - RNA, 19 nt, Homo sapiens
  misc_RNA (1)...(19): siRNA sense strand
gacagacagacaagacaaa

SEQ ID NO: 1134265 - RNA, 19 nt, Homo sapiens
  misc_RNA (1)...(19): siRNA sense strand
ugagggagaaugucuuuca

SEQ ID NO: 1134266 - RNA, 19 nt, Homo sapiens
  misc_RNA (1)...(19): siRNA sense strand
gacaaggacaaaguggaua

SEQ ID NO: 1134267 - RNA, 19 nt, Homo sapiens
  misc_RNA (1)...(19): siRNA sense strand
gcagacagacagacaagac

SEQ ID NO: 1134268 - RNA, 19 nt, Homo sapiens
  misc_RNA (1)...(19): siRNA sense strand
agggaaauuugguguggaa

SEQ ID NO: 1134269 - RNA, 19 nt, Homo sapiens
  misc_RNA (1)...(19): siRNA sense strand
gagcaucagacccuuaagg

SEQ ID NO: 1134270 - RNA, 19 nt, Homo sapiens
  misc_RNA (1)...(19): siRNA sense strand
gcauaucaacauacacaag

SEQ ID NO: 1134271 - RNA, 19 nt, Homo sapiens
  misc_RNA (1)...(19): siRNA sense strand
agacuacuccaaaggauuc

SEQ ID NO: 1134272 - RNA, 19 nt, Homo sapiens
  misc_RNA (1)...(19): siRNA sense strand
uaaggagaaggaacuugaa

SEQ ID NO: 1134273 - RNA, 19 nt, Homo sapiens
  misc_RNA (1)...(19): siRNA sense strand
gcacgagucacagagagau

SEQ ID NO: 1134274 - RNA, 19 nt, Homo sapiens
  misc_RNA (1)...(19): siRNA sense strand
aagagcaucagacccuuaa

SEQ ID NO: 1134275 - RNA, 19 nt, Homo sapiens
  misc_RNA (1)...(19): siRNA sense strand
gcacgagucccagaaagac

SEQ ID NO: 1134276 - RNA, 19 nt, Homo sapiens
  misc_RNA (1)...(19): siRNA sense strand
cggagaagcacgagucaca

SEQ ID NO: 1134277 - RNA, 19 nt, Homo sapiens
  misc_RNA (1)...(19): siRNA sense strand
ccagauggacagaguugau

SEQ ID NO: 1134278 - RNA, 19 nt, Homo sapiens
  misc_RNA (1)...(19): siRNA sense strand
gacagcaccuacgaugagu

SEQ ID NO: 1134279 - RNA, 19 nt, Homo sapiens
  misc_RNA (1)...(19): siRNA sense strand
gaaacaggaccaaaagcuu

SEQ ID NO: 1134280 - RNA, 19 nt, Homo sapiens
  misc_RNA (1)...(19): siRNA sense strand
gagcgccguuggcuuugag

SEQ ID NO: 1134281 - RNA, 19 nt, Homo sapiens
  misc_RNA (1)...(19): siRNA sense strand
guugaucagucugcuguag

SEQ ID NO: 1134282 - RNA, 19 nt, Homo sapiens
  misc_RNA (1)...(19): siRNA sense strand
gccguuggcuuugaguauc

SEQ ID NO: 1134283 - RNA, 19 nt, Homo sapiens
  misc_RNA (1)...(19): siRNA sense strand
gagagauuacuccaaaggu

SEQ ID NO: 1134284 - RNA, 19 nt, Homo sapiens
  misc_RNA (1)...(19): siRNA sense strand
uugaaaaccucgcuaagga

SEQ ID NO: 1134285 - RNA, 19 nt, Homo sapiens
  misc_RNA (1)...(19): siRNA sense strand
gcaccaggagcauaucaac

SEQ ID NO: 1134286 - RNA, 19 nt, Homo sapiens
  misc_RNA (1)...(19): siRNA sense strand
uggcuucggaggcaaguuu

SEQ ID NO: 1134287 - RNA, 19 nt, Homo sapiens
  misc_RNA (1)...(19): siRNA sense strand
aggagcauaucaacauaca

SEQ ID NO: 1134288 - RNA, 19 nt, Homo sapiens
  misc_RNA (1)...(19): siRNA sense strand
auaagaaugcgucaaccuu

SEQ ID NO: 1134289 - RNA, 19 nt, Homo sapiens
  misc_RNA (1)...(19): siRNA sense strand
aauuugguguggaacaaga

SEQ ID NO: 1134290 - RNA, 19 nt, Homo sapiens
  misc_RNA (1)...(19): siRNA sense strand
ggaaguauggggugcagaa

SEQ ID NO: 1134291 - RNA, 19 nt, Homo sapiens
  misc_RNA (1)...(19): siRNA sense strand
gagaaggaacuugaaacag

SEQ ID NO: 1134292 - RNA, 19 nt, Homo sapiens
  misc_RNA (1)...(19): siRNA sense strand
ugagugagaaggagcaaag

SEQ ID NO: 1134293 - RNA, 19 nt, Homo sapiens
  misc_RNA (1)...(19): siRNA sense strand
agaagcaugccucccagaa

SEQ ID NO: 1134294 - RNA, 19 nt, Homo sapiens
  misc_RNA (1)...(19): siRNA sense strand
gcaaguuugguguccagau

SEQ ID NO: 1134295 - RNA, 19 nt, Homo sapiens
  misc_RNA (1)...(19): siRNA sense strand
ggcuauggagggaaauuug

SEQ ID NO: 1134296 - RNA, 19 nt, Homo sapiens
  misc_RNA (1)...(19): siRNA sense strand
agacagacagacaagacaa

SEQ ID NO: 1134297 - RNA, 19 nt, Homo sapiens
  misc_RNA (1)...(19): siRNA sense strand
acgagucacagagagauua

SEQ ID NO: 1134298 - RNA, 19 nt, Homo sapiens
  misc_RNA (1)...(19): siRNA sense strand
caagaccgaauggauaagu

SEQ ID NO: 1134299 - RNA, 19 nt, Homo sapiens
  misc_RNA (1)...(19): siRNA sense strand
cauggaggccgcugacuac

SEQ ID NO: 1134300 - RNA, 19 nt, Homo sapiens
  misc_RNA (1)...(19): siRNA sense strand
gauaagaaugcgucaaccu

SEQ ID NO: 1134301 - RNA, 19 nt, Homo sapiens
  misc_RNA (1)...(19): siRNA sense strand
agaaagacuaugugaaagg

SEQ ID NO: 1134302 - RNA, 19 nt, Homo sapiens
  misc_RNA (1)...(19): siRNA sense strand
cagagagauuacuccaaag

SEQ ID NO: 1134303 - RNA, 19 nt, Homo sapiens
  misc_RNA (1)...(19): siRNA sense strand
gaacaagaccgaauggaua

SEQ ID NO: 1134304 - RNA, 19 nt, Homo sapiens
  misc_RNA (1)...(19): siRNA sense strand
gaauaucagucgaaacuuu

SEQ ID NO: 1134305 - RNA, 19 nt, Homo sapiens
  misc_RNA (1)...(19): siRNA sense strand
caucagagcuaacuuugaa

SEQ ID NO: 1134306 - RNA, 19 nt, Homo sapiens
  misc_RNA (1)...(19): siRNA sense strand
ggacagaguugaucagucu

SEQ ID NO: 1134307 - RNA, 19 nt, Homo sapiens
  misc_RNA (1)...(19): siRNA sense strand
acagagagauuacuccaaa

SEQ ID NO: 1134308 - RNA, 19 nt, Homo sapiens
  misc_RNA (1)...(19): siRNA sense strand
ccagaaagacuaugugaaa

SEQ ID NO: 1134309 - RNA, 19 nt, Homo sapiens
  misc_RNA (1)...(19): siRNA sense strand
gaaauuugguguggaacaa

SEQ ID NO: 1134310 - RNA, 19 nt, Homo sapiens
  misc_RNA (1)...(19): siRNA sense strand
caaguaacaucagagcuaa

SEQ ID NO: 1134311 - RNA, 19 nt, Homo sapiens
  misc_RNA (1)...(19): siRNA sense strand
uaagagcgccguuggcuuu

SEQ ID NO: 1134312 - RNA, 19 nt, Homo sapiens
  misc_RNA (1)...(19): siRNA sense strand
uaacaucagagcuaacuuu

SEQ ID NO: 1134313 - RNA, 19 nt, Homo sapiens
  misc_RNA (1)...(19): siRNA sense strand
ccaggagcauaucaacaua

SEQ ID NO: 1134314 - RNA, 19 nt, Homo sapiens
  misc_RNA (1)...(19): siRNA sense strand
ccacgaauaucagucgaaa

SEQ ID NO: 1134315 - RNA, 19 nt, Homo sapiens
  misc_RNA (1)...(19): siRNA sense strand
gagauuacuccaaagguuu

SEQ ID NO: 1134316 - RNA, 19 nt, Homo sapiens
  misc_RNA (1)...(19): siRNA sense strand
gaagcaugccucccagaaa

SEQ ID NO: 1134317 - RNA, 19 nt, Homo sapiens
  misc_RNA (1)...(19): siRNA sense strand
agaaggaucggauggauaa

SEQ ID NO: 1134318 - RNA, 19 nt, Homo sapiens
  misc_RNA (1)...(19): siRNA sense strand
ggagaaggaacuugaaaca

SEQ ID NO: 1134319 - RNA, 19 nt, Homo sapiens
  misc_RNA (1)...(19): siRNA sense strand
gcagaaggaucggauggau

SEQ ID NO: 1134320 - RNA, 19 nt, Homo sapiens
  misc_RNA (1)...(19): siRNA sense strand
caaguuugguguccagaug

SEQ ID NO: 1134321 - RNA, 19 nt, Homo sapiens
  misc_RNA (1)...(19): siRNA sense strand
ugaaugaugugagugagaa

SEQ ID NO: 1134322 - RNA, 19 nt, Homo sapiens
  misc_RNA (1)...(19): siRNA sense strand
ggaacaagaccgaauggau

SEQ ID NO: 1134323 - RNA, 19 nt, Homo sapiens
  misc_RNA (1)...(19): siRNA sense strand
uaagaaugcgucaaccuuu

SEQ ID NO: 1134324 - RNA, 19 nt, Homo sapiens
  misc_RNA (1)...(19): siRNA sense strand
gagcauaucaacauacaca

SEQ ID NO: 1134325 - RNA, 19 nt, Homo sapiens
  misc_RNA (1)...(19): siRNA sense strand
gaaaggguuuggaggaaaa

SEQ ID NO: 1134326 - RNA, 19 nt, Homo sapiens
  misc_RNA (1)...(19): siRNA sense strand
gagggagaaugucuuucaa

SEQ ID NO: 1134327 - RNA, 19 nt, Homo sapiens
  misc_RNA (1)...(19): siRNA sense strand
ggagcaagccagagccaaa

SEQ ID NO: 1134328 - RNA, 19 nt, Homo sapiens
  misc_RNA (1)...(19): siRNA sense strand
agagauuacuccaaagguu

SEQ ID NO: 1134329 - RNA, 19 nt, Homo sapiens
  misc_RNA (1)...(19): siRNA sense strand
ggacagcaccuacgaugag

SEQ ID NO: 1134330 - RNA, 19 nt, Homo sapiens
  misc_RNA (1)...(19): siRNA sense strand
gcauggaggccgcugacua

SEQ ID NO: 1134331 - RNA, 19 nt, Homo sapiens
  misc_RNA (1)...(19): siRNA sense strand
gggaucaccaggagaaauu

SEQ ID NO: 1134332 - RNA, 19 nt, Homo sapiens
  misc_RNA (1)...(19): siRNA sense strand
gaagcacgagucccagaaa

SEQ ID NO: 1134333 - RNA, 19 nt, Homo sapiens
  misc_RNA (1)...(19): siRNA sense strand
ggaugcggcuuccuucaag

SEQ ID NO: 1134334 - RNA, 19 nt, Homo sapiens
  misc_RNA (1)...(19): siRNA sense strand
aaaccucgcuaaggagaaa

SEQ ID NO: 1134335 - RNA, 19 nt, Homo sapiens
  misc_RNA (1)...(19): siRNA sense strand
ugaaaggguuuggaggaaa

SEQ ID NO: 1134336 - RNA, 19 nt, Homo sapiens
  misc_RNA (1)...(19): siRNA sense strand
ucagucugcuguaggcuuu

SEQ ID NO: 1134337 - RNA, 19 nt, Homo sapiens
  misc_RNA (1)...(19): siRNA sense strand
acaaguaacaucagagcua

SEQ ID NO: 1134338 - RNA, 19 nt, Homo sapiens
  misc_RNA (1)...(19): siRNA sense strand
gugaaaggguuuggaggaa

SEQ ID NO: 1134339 - RNA, 19 nt, Homo sapiens
  misc_RNA (1)...(19): siRNA sense strand
caagagcaucagacccuua

SEQ ID NO: 1134340 - RNA, 19 nt, Homo sapiens
  misc_RNA (1)...(19): siRNA sense strand
aagaaugcgucaaccuuug

SEQ ID NO: 1134341 - RNA, 19 nt, Homo sapiens
  misc_RNA (1)...(19): siRNA sense strand
aaagacuacuccagugguu

SEQ ID NO: 1134342 - RNA, 19 nt, Homo sapiens
  misc_RNA (1)...(19): siRNA sense strand
agacagacaagacaaaugu

SEQ ID NO: 1134343 - RNA, 19 nt, Homo sapiens
  misc_RNA (1)...(19): siRNA sense strand
caaaacaaguaacaucaga

SEQ ID NO: 1134344 - RNA, 19 nt, Homo sapiens
  misc_RNA (1)...(19): siRNA sense strand
gagaagcacgagucacaga

SEQ ID NO: 1134345 - RNA, 19 nt, Homo sapiens
  misc_RNA (1)...(19): siRNA sense strand
gaagcacgagucacagaga

SEQ ID NO: 1134346 - RNA, 19 nt, Homo sapiens
  misc_RNA (1)...(19): siRNA sense strand
aagcaugccucccagaaag

SEQ ID NO: 1134347 - RNA, 19 nt, Homo sapiens
  misc_RNA (1)...(19): siRNA sense strand
gcugagggagaaugucuuu

SEQ ID NO: 1134348 - RNA, 19 nt, Homo sapiens
  misc_RNA (1)...(19): siRNA sense strand
gaucucauuugacccugau

SEQ ID NO: 1134349 - RNA, 19 nt, Homo sapiens
  misc_RNA (1)...(19): siRNA sense strand
cagaaagacuaugugaaag

SEQ ID NO: 1134350 - RNA, 19 nt, Homo sapiens
  misc_RNA (1)...(19): siRNA sense strand
gaucggauggauaagaaug

SEQ ID NO: 1134351 - RNA, 19 nt, Homo sapiens
  misc_RNA (1)...(19): siRNA sense strand
cagaaggaucggauggaua

SEQ ID NO: 1134352 - RNA, 19 nt, Homo sapiens
  misc_RNA (1)...(19): siRNA sense strand
uuaaggagaaggaacuuga

SEQ ID NO: 1134353 - RNA, 19 nt, Homo sapiens
  misc_RNA (1)...(19): siRNA sense strand
gcucuucccagccaacuau

SEQ ID NO: 1134354 - RNA, 19 nt, Homo sapiens
  misc_RNA (1)...(19): siRNA sense strand
cagaggcugucuaugaaag

SEQ ID NO: 1134355 - RNA, 19 nt, Homo sapiens
  misc_RNA (1)...(19): siRNA sense strand
uacacaagcugagggagaa

SEQ ID NO: 1134356 - RNA, 19 nt, Homo sapiens
  misc_RNA (1)...(19): siRNA sense strand
ggaaauuugguguggaaca

SEQ ID NO: 1134357 - RNA, 19 nt, Homo sapiens
  misc_RNA (1)...(19): siRNA sense strand
acaaggacaaaguggauaa

SEQ ID NO: 1134358 - RNA, 19 nt, Homo sapiens
  misc_RNA (1)...(19): siRNA sense strand
aacaagaccgaauggauaa

SEQ ID NO: 1134359 - RNA, 19 nt, Homo sapiens
  misc_RNA (1)...(19): siRNA sense strand
gaacuugaaacaggaccaa

SEQ ID NO: 1134360 - RNA, 19 nt, Homo sapiens
  misc_RNA (1)...(19): siRNA sense strand
gcaccuacgaugaguacga

SEQ ID NO: 1134361 - RNA, 19 nt, Homo sapiens
  misc_RNA (1)...(19): siRNA sense strand
aggaucggauggauaagaa

SEQ ID NO: 1134362 - RNA, 19 nt, Homo sapiens
  misc_RNA (1)...(19): siRNA sense strand
cgacaaggacaaaguggau

SEQ ID NO: 1134363 - RNA, 19 nt, Homo sapiens
  misc_RNA (1)...(19): siRNA sense strand
gugagaaggagcaaagaug

SEQ ID NO: 1134364 - RNA, 19 nt, Homo sapiens
  misc_RNA (1)...(19): siRNA sense strand
gacagacagacaagacaaa

SEQ ID NO: 1134365 - RNA, 19 nt, Homo sapiens
  misc_RNA (1)...(19): siRNA sense strand
ugagggagaaugucuuuca

SEQ ID NO: 1134366 - RNA, 19 nt, Homo sapiens
  misc_RNA (1)...(19): siRNA sense strand
gacaaggacaaaguggaua

SEQ ID NO: 1134367 - RNA, 19 nt, Homo sapiens
  misc_RNA (1)...(19): siRNA sense strand
gcagacagacagacaagac

SEQ ID NO: 1134368 - RNA, 19 nt, Homo sapiens
  misc_RNA (1)...(19): siRNA sense strand
agggaaauuugguguggaa

SEQ ID NO: 1134369 - RNA, 19 nt, Homo sapiens
  misc_RNA (1)...(19): siRNA sense strand
gagcaucagacccuuaagg

SEQ ID NO: 1134370 - RNA, 19 nt, Homo sapiens
  misc_RNA (1)...(19): siRNA sense strand
gcauaucaacauacacaag

SEQ ID NO: 1134371 - RNA, 19 nt, Homo sapiens
  misc_RNA (1)...(19): siRNA sense strand
agacuacuccaaaggauuc

SEQ ID NO: 1134372 - RNA, 19 nt, Homo sapiens
  misc_RNA (1)...(19): siRNA sense strand
uaaggagaaggaacuugaa

SEQ ID NO: 1134373 - RNA, 19 nt, Homo sapiens
  misc_RNA (1)...(19): siRNA sense strand
gcacgagucacagagagau

SEQ ID NO: 1134374 - RNA, 19 nt, Homo sapiens
  misc_RNA (1)...(19): siRNA sense strand
aagagcaucagacccuuaa

SEQ ID NO: 1134375 - RNA, 19 nt, Homo sapiens
  misc_RNA (1)...(19): siRNA sense strand
gcacgagucccagaaagac

SEQ ID NO: 1134376 - RNA, 19 nt, Homo sapiens
  misc_RNA (1)...(19): siRNA sense strand
cggagaagcacgagucaca

SEQ ID NO: 1134377 - RNA, 19 nt, Homo sapiens
  misc_RNA (1)...(19): siRNA sense strand
ccagauggacagaguugau

SEQ ID NO: 1134378 - RNA, 19 nt, Homo sapiens
  misc_RNA (1)...(19): siRNA sense strand
gacagcaccuacgaugagu

SEQ ID NO: 1134379 - RNA, 19 nt, Homo sapiens
  misc_RNA (1)...(19): siRNA sense strand
gaaacaggaccaaaagcuu

SEQ ID NO: 1134380 - RNA, 19 nt, Homo sapiens
  misc_RNA (1)...(19): siRNA sense strand
gagcgccguuggcuuugag

SEQ ID NO: 1134381 - RNA, 19 nt, Homo sapiens
  misc_RNA (1)...(19): siRNA sense strand
guugaucagucugcuguag

SEQ ID NO: 1134382 - RNA, 19 nt, Homo sapiens
  misc_RNA (1)...(19): siRNA sense strand
gccguuggcuuugaguauc

SEQ ID NO: 1134383 - RNA, 19 nt, Homo sapiens
  misc_RNA (1)...(19): siRNA sense strand
gagagauuacuccaaaggu

SEQ ID NO: 1134384 - RNA, 19 nt, Homo sapiens
  misc_RNA (1)...(19): siRNA sense strand
uugaaaaccucgcuaagga

SEQ ID NO: 1134385 - RNA, 19 nt, Homo sapiens
  misc_RNA (1)...(19): siRNA sense strand
gcaccaggagcauaucaac

SEQ ID NO: 1134386 - RNA, 19 nt, Homo sapiens
  misc_RNA (1)...(19): siRNA sense strand
uggcuucggaggcaaguuu

SEQ ID NO: 1134387 - RNA, 19 nt, Homo sapiens
  misc_RNA (1)...(19): siRNA sense strand
aggagcauaucaacauaca

SEQ ID NO: 1134388 - RNA, 19 nt, Homo sapiens
  misc_RNA (1)...(19): siRNA sense strand
auaagaaugcgucaaccuu

SEQ ID NO: 1134389 - RNA, 19 nt, Homo sapiens
  misc_RNA (1)...(19): siRNA sense strand
aauuugguguggaacaaga

SEQ ID NO: 1134390 - RNA, 19 nt, Homo sapiens
  misc_RNA (1)...(19): siRNA sense strand
ggaaguauggggugcagaa

SEQ ID NO: 1134391 - RNA, 19 nt, Homo sapiens
  misc_RNA (1)...(19): siRNA sense strand
gagaaggaacuugaaacag

SEQ ID NO: 1134392 - RNA, 19 nt, Homo sapiens
  misc_RNA (1)...(19): siRNA sense strand
ugagugagaaggagcaaag

SEQ ID NO: 1134393 - RNA, 19 nt, Homo sapiens
  misc_RNA (1)...(19): siRNA sense strand
agaagcaugccucccagaa

SEQ ID NO: 1134394 - RNA, 19 nt, Homo sapiens
  misc_RNA (1)...(19): siRNA sense strand
gcaaguuugguguccagau

SEQ ID NO: 1134395 - RNA, 19 nt, Homo sapiens
  misc_RNA (1)...(19): siRNA sense strand
ggcuauggagggaaauuug

SEQ ID NO: 1134396 - RNA, 19 nt, Homo sapiens
  misc_RNA (1)...(19): siRNA sense strand
agacagacagacaagacaa

SEQ ID NO: 1134397 - RNA, 19 nt, Homo sapiens
  misc_RNA (1)...(19): siRNA sense strand
acgagucacagagagauua

SEQ ID NO: 1134398 - RNA, 19 nt, Homo sapiens
  misc_RNA (1)...(19): siRNA sense strand
caagaccgaauggauaagu

SEQ ID NO: 1134399 - RNA, 19 nt, Homo sapiens
  misc_RNA (1)...(19): siRNA sense strand
cauggaggccgcugacuac

SEQ ID NO: 1134400 - RNA, 19 nt, Homo sapiens
  misc_RNA (1)...(19): siRNA sense strand
gauaagaaugcgucaaccu

SEQ ID NO: 1134401 - RNA, 19 nt, Homo sapiens
  misc_RNA (1)...(19): siRNA sense strand
agaaagacuaugugaaagg

SEQ ID NO: 1134402 - RNA, 19 nt, Homo sapiens
  misc_RNA (1)...(19): siRNA sense strand
cagagagauuacuccaaag

SEQ ID NO: 1134403 - RNA, 19 nt, Homo sapiens
  misc_RNA (1)...(19): siRNA sense strand
ggaaagaacuuaucuacaa

SEQ ID NO: 1134404 - RNA, 19 nt, Homo sapiens
  misc_RNA (1)...(19): siRNA sense strand
ggaauaagguaauugaaca

SEQ ID NO: 1134405 - RNA, 19 nt, Homo sapiens
  misc_RNA (1)...(19): siRNA sense strand
gcaguuggaugaaagagaa

SEQ ID NO: 1134406 - RNA, 19 nt, Homo sapiens
  misc_RNA (1)...(19): siRNA sense strand
caaagaugcuagugauuga

SEQ ID NO: 1134407 - RNA, 19 nt, Homo sapiens
  misc_RNA (1)...(19): siRNA sense strand
gaaacuauguggagaaucg

SEQ ID NO: 1134408 - RNA, 19 nt, Homo sapiens
  misc_RNA (1)...(19): siRNA sense strand
ugaagugugugaaccauaa

SEQ ID NO: 1134409 - RNA, 19 nt, Homo sapiens
  misc_RNA (1)...(19): siRNA sense strand
gaaagaacuuaucuacaag

SEQ ID NO: 1134410 - RNA, 19 nt, Homo sapiens
  misc_RNA (1)...(19): siRNA sense strand
gaaagagaacacacaauug

SEQ ID NO: 1134411 - RNA, 19 nt, Homo sapiens
  misc_RNA (1)...(19): siRNA sense strand
ccaaacacaugccaagaga

SEQ ID NO: 1134412 - RNA, 19 nt, Homo sapiens
  misc_RNA (1)...(19): siRNA sense strand
gaaauugcaacccacagua

SEQ ID NO: 1134413 - RNA, 19 nt, Homo sapiens
  misc_RNA (1)...(19): siRNA sense strand
cauauguggugacacguua

SEQ ID NO: 1134414 - RNA, 19 nt, Homo sapiens
  misc_RNA (1)...(19): siRNA sense strand
ugaaagagaacacacaauu

SEQ ID NO: 1134415 - RNA, 19 nt, Homo sapiens
  misc_RNA (1)...(19): siRNA sense strand
caaguaacauuguagucaa

SEQ ID NO: 1134416 - RNA, 19 nt, Homo sapiens
  misc_RNA (1)...(19): siRNA sense strand
acugauggaugccaacuua

SEQ ID NO: 1134417 - RNA, 19 nt, Homo sapiens
  misc_RNA (1)...(19): siRNA sense strand
agaaaugguucgccacaaa

SEQ ID NO: 1134418 - RNA, 19 nt, Homo sapiens
  misc_RNA (1)...(19): siRNA sense strand
aaagagaacacacaauuga

SEQ ID NO: 1134419 - RNA, 19 nt, Homo sapiens
  misc_RNA (1)...(19): siRNA sense strand
acaaggaaguaaugaauuc

SEQ ID NO: 1134420 - RNA, 19 nt, Homo sapiens
  misc_RNA (1)...(19): siRNA sense strand
ggugacacguuauuacaga

SEQ ID NO: 1134421 - RNA, 19 nt, Homo sapiens
  misc_RNA (1)...(19): siRNA sense strand
gaagaauggaaagaacuua

SEQ ID NO: 1134422 - RNA, 19 nt, Homo sapiens
  misc_RNA (1)...(19): siRNA sense strand
ggaacaccauguccagaau

SEQ ID NO: 1134423 - RNA, 19 nt, Homo sapiens
  misc_RNA (1)...(19): siRNA sense strand
ccagggacuuguugucaaa

SEQ ID NO: 1134424 - RNA, 19 nt, Homo sapiens
  misc_RNA (1)...(19): siRNA sense strand
gcauuaagcaccuccauuc

SEQ ID NO: 1134425 - RNA, 19 nt, Homo sapiens
  misc_RNA (1)...(19): siRNA sense strand
gacaagcaguuggaugaaa

SEQ ID NO: 1134426 - RNA, 19 nt, Homo sapiens
  misc_RNA (1)...(19): siRNA sense strand
guccagaauucaugaagaa

SEQ ID NO: 1134427 - RNA, 19 nt, Homo sapiens
  misc_RNA (1)...(19): siRNA sense strand
caagucugauugcacauug

SEQ ID NO: 1134428 - RNA, 19 nt, Homo sapiens
  misc_RNA (1)...(19): siRNA sense strand
cccaaacucuucccagauu

SEQ ID NO: 1134429 - RNA, 19 nt, Homo sapiens
  misc_RNA (1)...(19): siRNA sense strand
caugaugacuccauaugug

SEQ ID NO: 1134430 - RNA, 19 nt, Homo sapiens
  misc_RNA (1)...(19): siRNA sense strand
gaacaccauguccagaauu

SEQ ID NO: 1134431 - RNA, 19 nt, Homo sapiens
  misc_RNA (1)...(19): siRNA sense strand
gaacacacaauugaagaau

SEQ ID NO: 1134432 - RNA, 19 nt, Homo sapiens
  misc_RNA (1)...(19): siRNA sense strand
gagaaucggcccaaguaug

SEQ ID NO: 1134433 - RNA, 19 nt, Homo sapiens
  misc_RNA (1)...(19): siRNA sense strand
ggacgacgccuuacagcau

SEQ ID NO: 1134434 - RNA, 19 nt, Homo sapiens
  misc_RNA (1)...(19): siRNA sense strand
ggacuccgagcacaauaaa

SEQ ID NO: 1134435 - RNA, 19 nt, Homo sapiens
  misc_RNA (1)...(19): siRNA sense strand
gaugccaacuuaugucaag

SEQ ID NO: 1134436 - RNA, 19 nt, Homo sapiens
  misc_RNA (1)...(19): siRNA sense strand
gagaacacacaauugaaga

SEQ ID NO: 1134437 - RNA, 19 nt, Homo sapiens
  misc_RNA (1)...(19): siRNA sense strand
ucaaagaugcuagugauug

SEQ ID NO: 1134438 - RNA, 19 nt, Homo sapiens
  misc_RNA (1)...(19): siRNA sense strand
ugucaaagaugcuagugau

SEQ ID NO: 1134439 - RNA, 19 nt, Homo sapiens
  misc_RNA (1)...(19): siRNA sense strand
gagaaaugguucgccacaa

SEQ ID NO: 1134440 - RNA, 19 nt, Homo sapiens
  misc_RNA (1)...(19): siRNA sense strand
gaacaacuaggaacaccau

SEQ ID NO: 1134441 - RNA, 19 nt, Homo sapiens
  misc_RNA (1)...(19): siRNA sense strand
acacacaauugaagaaugg

SEQ ID NO: 1134442 - RNA, 19 nt, Homo sapiens
  misc_RNA (1)...(19): siRNA sense strand
ggaaguaaugaauucagaa

SEQ ID NO: 1134443 - RNA, 19 nt, Homo sapiens
  misc_RNA (1)...(19): siRNA sense strand
ccaggaagggacuauauug

SEQ ID NO: 1134444 - RNA, 19 nt, Homo sapiens
  misc_RNA (1)...(19): siRNA sense strand
gaugaaagagaacacacaa

SEQ ID NO: 1134445 - RNA, 19 nt, Homo sapiens
  misc_RNA (1)...(19): siRNA sense strand
caaggagaacguggauaua

SEQ ID NO: 1134446 - RNA, 19 nt, Homo sapiens
  misc_RNA (1)...(19): siRNA sense strand
gaaguaaugaauucagaag

SEQ ID NO: 1134447 - RNA, 19 nt, Homo sapiens
  misc_RNA (1)...(19): siRNA sense strand
ccaguggaauaagguaauu

SEQ ID NO: 1134448 - RNA, 19 nt, Homo sapiens
  misc_RNA (1)...(19): siRNA sense strand
ggagaacguggauauaugg

SEQ ID NO: 1134449 - RNA, 19 nt, Homo sapiens
  misc_RNA (1)...(19): siRNA sense strand
cgagcacaauaaacucaaa

SEQ ID NO: 1134450 - RNA, 19 nt, Homo sapiens
  misc_RNA (1)...(19): siRNA sense strand
guaauugaacaacuaggaa

SEQ ID NO: 1134451 - RNA, 19 nt, Homo sapiens
  misc_RNA (1)...(19): siRNA sense strand
ccaaguaacauuguaguca

SEQ ID NO: 1134452 - RNA, 19 nt, Homo sapiens
  misc_RNA (1)...(19): siRNA sense strand
ggacagccuucuccuucag

SEQ ID NO: 1134453 - RNA, 19 nt, Homo sapiens
  misc_RNA (1)...(19): siRNA sense strand
gagcugguccucaugaagu

SEQ ID NO: 1134454 - RNA, 19 nt, Homo sapiens
  misc_RNA (1)...(19): siRNA sense strand
uaagaaacuauguggagaa

SEQ ID NO: 1134455 - RNA, 19 nt, Homo sapiens
  misc_RNA (1)...(19): siRNA sense strand
acaaggagaacguggauau

SEQ ID NO: 1134456 - RNA, 19 nt, Homo sapiens
  misc_RNA (1)...(19): siRNA sense strand
gcaggcacaagcuucauga

SEQ ID NO: 1134457 - RNA, 19 nt, Homo sapiens
  misc_RNA (1)...(19): siRNA sense strand
ggacagcaggcacaagcuu

SEQ ID NO: 1134458 - RNA, 19 nt, Homo sapiens
  misc_RNA (1)...(19): siRNA sense strand
cuacaaggaaguaaugaau

SEQ ID NO: 1134459 - RNA, 19 nt, Homo sapiens
  misc_RNA (1)...(19): siRNA sense strand
uggagaaucggcccaagua

SEQ ID NO: 1134460 - RNA, 19 nt, Homo sapiens
  misc_RNA (1)...(19): siRNA sense strand
gccagggacuuguugucaa

SEQ ID NO: 1134461 - RNA, 19 nt, Homo sapiens
  misc_RNA (1)...(19): siRNA sense strand
gauggaugccaacuuaugu

SEQ ID NO: 1134462 - RNA, 19 nt, Homo sapiens
  misc_RNA (1)...(19): siRNA sense strand
ggacuuguugucaaagaug

SEQ ID NO: 1134463 - RNA, 19 nt, Homo sapiens
  misc_RNA (1)...(19): siRNA sense strand
ugucuuaccugcuguacca

SEQ ID NO: 1134464 - RNA, 19 nt, Homo sapiens
  misc_RNA (1)...(19): siRNA sense strand
gaauggaaagaacuuaucu

SEQ ID NO: 1134465 - RNA, 19 nt, Homo sapiens
  misc_RNA (1)...(19): siRNA sense strand
gguaauugaacaacuagga

SEQ ID NO: 1134466 - RNA, 19 nt, Homo sapiens
  misc_RNA (1)...(19): siRNA sense strand
caggaagggacuauauuga

SEQ ID NO: 1134467 - RNA, 19 nt, Homo sapiens
  misc_RNA (1)...(19): siRNA sense strand
aggagaacguggauauaug

SEQ ID NO: 1134468 - RNA, 19 nt, Homo sapiens
  misc_RNA (1)...(19): siRNA sense strand
cagcagacccuuucagaac

SEQ ID NO: 1134469 - RNA, 19 nt, Homo sapiens
  misc_RNA (1)...(19): siRNA sense strand
acaagcaguuggaugaaag

SEQ ID NO: 1134470 - RNA, 19 nt, Homo sapiens
  misc_RNA (1)...(19): siRNA sense strand
gaagcucagcagacccuuu

SEQ ID NO: 1134471 - RNA, 19 nt, Homo sapiens
  misc_RNA (1)...(19): siRNA sense strand
caccucagauauaugacaa

SEQ ID NO: 1134472 - RNA, 19 nt, Homo sapiens
  misc_RNA (1)...(19): siRNA sense strand
accaugagcgaaugucuua

SEQ ID NO: 1134473 - RNA, 19 nt, Homo sapiens
  misc_RNA (1)...(19): siRNA sense strand
gggagcugguccucaugaa

SEQ ID NO: 1134474 - RNA, 19 nt, Homo sapiens
  misc_RNA (1)...(19): siRNA sense strand
gaagugugugaaccauaaa

SEQ ID NO: 1134475 - RNA, 19 nt, Homo sapiens
  misc_RNA (1)...(19): siRNA sense strand
gcagacccuuucagaacca

SEQ ID NO: 1134476 - RNA, 19 nt, Homo sapiens
  misc_RNA (1)...(19): siRNA sense strand
cuacaucaacgucugguau

SEQ ID NO: 1134477 - RNA, 19 nt, Homo sapiens
  misc_RNA (1)...(19): siRNA sense strand
gucaagugauucagaugga

SEQ ID NO: 1134478 - RNA, 19 nt, Homo sapiens
  misc_RNA (1)...(19): siRNA sense strand
aaauugcaacccacaguaa

SEQ ID NO: 1134479 - RNA, 19 nt, Homo sapiens
  misc_RNA (1)...(19): siRNA sense strand
ccaaacucuucccagauuc

SEQ ID NO: 1134480 - RNA, 19 nt, Homo sapiens
  misc_RNA (1)...(19): siRNA sense strand
ucaagugauucagauggaa

SEQ ID NO: 1134481 - RNA, 19 nt, Homo sapiens
  misc_RNA (1)...(19): siRNA sense strand
ccagaauucaugaagaaau

SEQ ID NO: 1134482 - RNA, 19 nt, Homo sapiens
  misc_RNA (1)...(19): siRNA sense strand
ggagaaucggcccaaguau

SEQ ID NO: 1134483 - RNA, 19 nt, Homo sapiens
  misc_RNA (1)...(19): siRNA sense strand
aagaaacuauguggagaau

SEQ ID NO: 1134484 - RNA, 19 nt, Homo sapiens
  misc_RNA (1)...(19): siRNA sense strand
gaaaugguucgccacaaaa

SEQ ID NO: 1134485 - RNA, 19 nt, Homo sapiens
  misc_RNA (1)...(19): siRNA sense strand
aggaaguaaugaauucaga

SEQ ID NO: 1134486 - RNA, 19 nt, Homo sapiens
  misc_RNA (1)...(19): siRNA sense strand
gaaugucuuaccugcugua

SEQ ID NO: 1134487 - RNA, 19 nt, Homo sapiens
  misc_RNA (1)...(19): siRNA sense strand
caacuaggaacaccauguc

SEQ ID NO: 1134488 - RNA, 19 nt, Homo sapiens
  misc_RNA (1)...(19): siRNA sense strand
uaugucaagugauucagau

SEQ ID NO: 1134489 - RNA, 19 nt, Homo sapiens
  misc_RNA (1)...(19): siRNA sense strand
ugaagaauggaaagaacuu

SEQ ID NO: 1134490 - RNA, 19 nt, Homo sapiens
  misc_RNA (1)...(19): siRNA sense strand
ggaugaaagagaacacaca

SEQ ID NO: 1134491 - RNA, 19 nt, Homo sapiens
  misc_RNA (1)...(19): siRNA sense strand
gggacuuguugucaaagau

SEQ ID NO: 1134492 - RNA, 19 nt, Homo sapiens
  misc_RNA (1)...(19): siRNA sense strand
cguaugaugcuguccuuga

SEQ ID NO: 1134493 - RNA, 19 nt, Homo sapiens
  misc_RNA (1)...(19): siRNA sense strand
ucugugggaugcauuaugg

SEQ ID NO: 1134494 - RNA, 19 nt, Homo sapiens
  misc_RNA (1)...(19): siRNA sense strand
aagaacuuaucuacaagga

SEQ ID NO: 1134495 - RNA, 19 nt, Homo sapiens
  misc_RNA (1)...(19): siRNA sense strand
gguaugacccagccgaagu

SEQ ID NO: 1134496 - RNA, 19 nt, Homo sapiens
  misc_RNA (1)...(19): siRNA sense strand
ggacucaccuuccccaaac

SEQ ID NO: 1134497 - RNA, 19 nt, Homo sapiens
  misc_RNA (1)...(19): siRNA sense strand
gaccaguggaauaagguaa

SEQ ID NO: 1134498 - RNA, 19 nt, Homo sapiens
  misc_RNA (1)...(19): siRNA sense strand
aaggagaacguggauauau

SEQ ID NO: 1134499 - RNA, 19 nt, Homo sapiens
  misc_RNA (1)...(19): siRNA sense strand
gauauaugacaagcaguug

SEQ ID NO: 1134500 - RNA, 19 nt, Homo sapiens
  misc_RNA (1)...(19): siRNA sense strand
acaucaacgucugguauga

SEQ ID NO: 1134501 - RNA, 19 nt, Homo sapiens
  misc_RNA (1)...(19): siRNA sense strand
uguccagaauucaugaaga

SEQ ID NO: 1134502 - RNA, 19 nt, Homo sapiens
  misc_RNA (1)...(19): siRNA sense strand
uaucuacaaggaaguaaug

SEQ ID NO: 1134503 - RNA, 19 nt, Homo sapiens
  misc_RNA (1)...(19): siRNA sense strand
ggaaagaacuuaucuacaa

SEQ ID NO: 1134504 - RNA, 19 nt, Homo sapiens
  misc_RNA (1)...(19): siRNA sense strand
ggaauaagguaauugaaca

SEQ ID NO: 1134505 - RNA, 19 nt, Homo sapiens
  misc_RNA (1)...(19): siRNA sense strand
gcaguuggaugaaagagaa

SEQ ID NO: 1134506 - RNA, 19 nt, Homo sapiens
  misc_RNA (1)...(19): siRNA sense strand
caaagaugcuagugauuga

SEQ ID NO: 1134507 - RNA, 19 nt, Homo sapiens
  misc_RNA (1)...(19): siRNA sense strand
gaaacuauguggagaaucg

SEQ ID NO: 1134508 - RNA, 19 nt, Homo sapiens
  misc_RNA (1)...(19): siRNA sense strand
ugaagugugugaaccauaa

SEQ ID NO: 1134509 - RNA, 19 nt, Homo sapiens
  misc_RNA (1)...(19): siRNA sense strand
gaaagaacuuaucuacaag

SEQ ID NO: 1134510 - RNA, 19 nt, Homo sapiens
  misc_RNA (1)...(19): siRNA sense strand
gaaagagaacacacaauug

SEQ ID NO: 1134511 - RNA, 19 nt, Homo sapiens
  misc_RNA (1)...(19): siRNA sense strand
ccaaacacaugccaagaga

SEQ ID NO: 1134512 - RNA, 19 nt, Homo sapiens
  misc_RNA (1)...(19): siRNA sense strand
gaaauugcaacccacagua

SEQ ID NO: 1134513 - RNA, 19 nt, Homo sapiens
  misc_RNA (1)...(19): siRNA sense strand
cauauguggugacacguua

SEQ ID NO: 1134514 - RNA, 19 nt, Homo sapiens
  misc_RNA (1)...(19): siRNA sense strand
ugaaagagaacacacaauu

SEQ ID NO: 1134515 - RNA, 19 nt, Homo sapiens
  misc_RNA (1)...(19): siRNA sense strand
caaguaacauuguagucaa

SEQ ID NO: 1134516 - RNA, 19 nt, Homo sapiens
  misc_RNA (1)...(19): siRNA sense strand
acugauggaugccaacuua

SEQ ID NO: 1134517 - RNA, 19 nt, Homo sapiens
  misc_RNA (1)...(19): siRNA sense strand
agaaaugguucgccacaaa

SEQ ID NO: 1134518 - RNA, 19 nt, Homo sapiens
  misc_RNA (1)...(19): siRNA sense strand
aaagagaacacacaauuga

SEQ ID NO: 1134519 - RNA, 19 nt, Homo sapiens
  misc_RNA (1)...(19): siRNA sense strand
acaaggaaguaaugaauuc

SEQ ID NO: 1134520 - RNA, 19 nt, Homo sapiens
  misc_RNA (1)...(19): siRNA sense strand
ggugacacguuauuacaga

SEQ ID NO: 1134521 - RNA, 19 nt, Homo sapiens
  misc_RNA (1)...(19): siRNA sense strand
gaagaauggaaagaacuua

SEQ ID NO: 1134522 - RNA, 19 nt, Homo sapiens
  misc_RNA (1)...(19): siRNA sense strand
ggaacaccauguccagaau

SEQ ID NO: 1134523 - RNA, 19 nt, Homo sapiens
  misc_RNA (1)...(19): siRNA sense strand
ccagggacuuguugucaaa

SEQ ID NO: 1134524 - RNA, 19 nt, Homo sapiens
  misc_RNA (1)...(19): siRNA sense strand
gcauuaagcaccuccauuc

SEQ ID NO: 1134525 - RNA, 19 nt, Homo sapiens
  misc_RNA (1)...(19): siRNA sense strand
gacaagcaguuggaugaaa

SEQ ID NO: 1134526 - RNA, 19 nt, Homo sapiens
  misc_RNA (1)...(19): siRNA sense strand
guccagaauucaugaagaa

SEQ ID NO: 1134527 - RNA, 19 nt, Homo sapiens
  misc_RNA (1)...(19): siRNA sense strand
gcagugaacagcagugaga

SEQ ID NO: 1134528 - RNA, 19 nt, Homo sapiens
  misc_RNA (1)...(19): siRNA sense strand
caagucugauugcacauug

SEQ ID NO: 1134529 - RNA, 19 nt, Homo sapiens
  misc_RNA (1)...(19): siRNA sense strand
cccaaacucuucccagauu

SEQ ID NO: 1134530 - RNA, 19 nt, Homo sapiens
  misc_RNA (1)...(19): siRNA sense strand
caugaugacuccauaugug

SEQ ID NO: 1134531 - RNA, 19 nt, Homo sapiens
  misc_RNA (1)...(19): siRNA sense strand
gaacaccauguccagaauu

SEQ ID NO: 1134532 - RNA, 19 nt, Homo sapiens
  misc_RNA (1)...(19): siRNA sense strand
gaacacacaauugaagaau

SEQ ID NO: 1134533 - RNA, 19 nt, Homo sapiens
  misc_RNA (1)...(19): siRNA sense strand
gagaaucggcccaaguaug

SEQ ID NO: 1134534 - RNA, 19 nt, Homo sapiens
  misc_RNA (1)...(19): siRNA sense strand
ggacgacgccuuacagcau

SEQ ID NO: 1134535 - RNA, 19 nt, Homo sapiens
  misc_RNA (1)...(19): siRNA sense strand
ggacuccgagcacaauaaa

SEQ ID NO: 1134536 - RNA, 19 nt, Homo sapiens
  misc_RNA (1)...(19): siRNA sense strand
gaugccaacuuaugucaag

SEQ ID NO: 1134537 - RNA, 19 nt, Homo sapiens
  misc_RNA (1)...(19): siRNA sense strand
gagaacacacaauugaaga

SEQ ID NO: 1134538 - RNA, 19 nt, Homo sapiens
  misc_RNA (1)...(19): siRNA sense strand
ucaaagaugcuagugauug

SEQ ID NO: 1134539 - RNA, 19 nt, Homo sapiens
  misc_RNA (1)...(19): siRNA sense strand
ugucaaagaugcuagugau

SEQ ID NO: 1134540 - RNA, 19 nt, Homo sapiens
  misc_RNA (1)...(19): siRNA sense strand
gagaaaugguucgccacaa

SEQ ID NO: 1134541 - RNA, 19 nt, Homo sapiens
  misc_RNA (1)...(19): siRNA sense strand
gaacaacuaggaacaccau

SEQ ID NO: 1134542 - RNA, 19 nt, Homo sapiens
  misc_RNA (1)...(19): siRNA sense strand
acacacaauugaagaaugg

SEQ ID NO: 1134543 - RNA, 19 nt, Homo sapiens
  misc_RNA (1)...(19): siRNA sense strand
ucaaugacaucuccuccau

SEQ ID NO: 1134544 - RNA, 19 nt, Homo sapiens
  misc_RNA (1)...(19): siRNA sense strand
ggaaguaaugaauucagaa

SEQ ID NO: 1134545 - RNA, 19 nt, Homo sapiens
  misc_RNA (1)...(19): siRNA sense strand
ccaggaagggacuauauug

SEQ ID NO: 1134546 - RNA, 19 nt, Homo sapiens
  misc_RNA (1)...(19): siRNA sense strand
gaugaaagagaacacacaa

SEQ ID NO: 1134547 - RNA, 19 nt, Homo sapiens
  misc_RNA (1)...(19): siRNA sense strand
caaggagaacguggauaua

SEQ ID NO: 1134548 - RNA, 19 nt, Homo sapiens
  misc_RNA (1)...(19): siRNA sense strand
gaaguaaugaauucagaag

SEQ ID NO: 1134549 - RNA, 19 nt, Homo sapiens
  misc_RNA (1)...(19): siRNA sense strand
ccaguggaauaagguaauu

SEQ ID NO: 1134550 - RNA, 19 nt, Homo sapiens
  misc_RNA (1)...(19): siRNA sense strand
ggagaacguggauauaugg

SEQ ID NO: 1134551 - RNA, 19 nt, Homo sapiens
  misc_RNA (1)...(19): siRNA sense strand
cgagcacaauaaacucaaa

SEQ ID NO: 1134552 - RNA, 19 nt, Homo sapiens
  misc_RNA (1)...(19): siRNA sense strand
guaauugaacaacuaggaa

SEQ ID NO: 1134553 - RNA, 19 nt, Homo sapiens
  misc_RNA (1)...(19): siRNA sense strand
ccaaguaacauuguaguca

SEQ ID NO: 1134554 - RNA, 19 nt, Homo sapiens
  misc_RNA (1)...(19): siRNA sense strand
ggacagccuucuccuucag

SEQ ID NO: 1134555 - RNA, 19 nt, Homo sapiens
  misc_RNA (1)...(19): siRNA sense strand
uaagaaacuauguggagaa

SEQ ID NO: 1134556 - RNA, 19 nt, Homo sapiens
  misc_RNA (1)...(19): siRNA sense strand
acaaggagaacguggauau

SEQ ID NO: 1134557 - RNA, 19 nt, Homo sapiens
  misc_RNA (1)...(19): siRNA sense strand
gcaggcacaagcuucauga

SEQ ID NO: 1134558 - RNA, 19 nt, Homo sapiens
  misc_RNA (1)...(19): siRNA sense strand
gagcugguccucaugaagu

SEQ ID NO: 1134559 - RNA, 19 nt, Homo sapiens
  misc_RNA (1)...(19): siRNA sense strand
ggacagcaggcacaagcuu

SEQ ID NO: 1134560 - RNA, 19 nt, Homo sapiens
  misc_RNA (1)...(19): siRNA sense strand
cuacaaggaaguaaugaau

SEQ ID NO: 1134561 - RNA, 19 nt, Homo sapiens
  misc_RNA (1)...(19): siRNA sense strand
uggagaaucggcccaagua

SEQ ID NO: 1134562 - RNA, 19 nt, Homo sapiens
  misc_RNA (1)...(19): siRNA sense strand
gauggaugccaacuuaugu

SEQ ID NO: 1134563 - RNA, 19 nt, Homo sapiens
  misc_RNA (1)...(19): siRNA sense strand
ggacuuguugucaaagaug

SEQ ID NO: 1134564 - RNA, 19 nt, Homo sapiens
  misc_RNA (1)...(19): siRNA sense strand
gccagggacuuguugucaa

SEQ ID NO: 1134565 - RNA, 19 nt, Homo sapiens
  misc_RNA (1)...(19): siRNA sense strand
ugucuuaccugcuguacca

SEQ ID NO: 1134566 - RNA, 19 nt, Homo sapiens
  misc_RNA (1)...(19): siRNA sense strand
gaauggaaagaacuuaucu

SEQ ID NO: 1134567 - RNA, 19 nt, Homo sapiens
  misc_RNA (1)...(19): siRNA sense strand
gguaauugaacaacuagga

SEQ ID NO: 1134568 - RNA, 19 nt, Homo sapiens
  misc_RNA (1)...(19): siRNA sense strand
caggaagggacuauauuga

SEQ ID NO: 1134569 - RNA, 19 nt, Homo sapiens
  misc_RNA (1)...(19): siRNA sense strand
aggagaacguggauauaug

SEQ ID NO: 1134570 - RNA, 19 nt, Homo sapiens
  misc_RNA (1)...(19): siRNA sense strand
cagcagacccuuucagaac

SEQ ID NO: 1134571 - RNA, 19 nt, Homo sapiens
  misc_RNA (1)...(19): siRNA sense strand
acaagcaguuggaugaaag

SEQ ID NO: 1134572 - RNA, 19 nt, Homo sapiens
  misc_RNA (1)...(19): siRNA sense strand
gaagcucagcagacccuuu

SEQ ID NO: 1134573 - RNA, 19 nt, Homo sapiens
  misc_RNA (1)...(19): siRNA sense strand
accaugagcgaaugucuua

SEQ ID NO: 1134574 - RNA, 19 nt, Homo sapiens
  misc_RNA (1)...(19): siRNA sense strand
caccucagauauaugacaa

SEQ ID NO: 1134575 - RNA, 19 nt, Homo sapiens
  misc_RNA (1)...(19): siRNA sense strand
gucaagugauucagaugga

SEQ ID NO: 1134576 - RNA, 19 nt, Homo sapiens
  misc_RNA (1)...(19): siRNA sense strand
gcagacccuuucagaacca

SEQ ID NO: 1134577 - RNA, 19 nt, Homo sapiens
  misc_RNA (1)...(19): siRNA sense strand
cuacaucaacgucugguau

SEQ ID NO: 1134578 - RNA, 19 nt, Homo sapiens
  misc_RNA (1)...(19): siRNA sense strand
gggagcugguccucaugaa

SEQ ID NO: 1134579 - RNA, 19 nt, Homo sapiens
  misc_RNA (1)...(19): siRNA sense strand
aaauugcaacccacaguaa

SEQ ID NO: 1134580 - RNA, 19 nt, Homo sapiens
  misc_RNA (1)...(19): siRNA sense strand
gaagugugugaaccauaaa

SEQ ID NO: 1134581 - RNA, 19 nt, Homo sapiens
  misc_RNA (1)...(19): siRNA sense strand
ccaaacucuucccagauuc

SEQ ID NO: 1134582 - RNA, 19 nt, Homo sapiens
  misc_RNA (1)...(19): siRNA sense strand
ucaagugauucagauggaa

SEQ ID NO: 1134583 - RNA, 19 nt, Homo sapiens
  misc_RNA (1)...(19): siRNA sense strand
ccagaauucaugaagaaau

SEQ ID NO: 1134584 - RNA, 19 nt, Homo sapiens
  misc_RNA (1)...(19): siRNA sense strand
ggagaaucggcccaaguau

SEQ ID NO: 1134585 - RNA, 19 nt, Homo sapiens
  misc_RNA (1)...(19): siRNA sense strand
aagaaacuauguggagaau

SEQ ID NO: 1134586 - RNA, 19 nt, Homo sapiens
  misc_RNA (1)...(19): siRNA sense strand
gaaugucuuaccugcugua

SEQ ID NO: 1134587 - RNA, 19 nt, Homo sapiens
  misc_RNA (1)...(19): siRNA sense strand
cauccucgucugucaauga

SEQ ID NO: 1134588 - RNA, 19 nt, Homo sapiens
  misc_RNA (1)...(19): siRNA sense strand
aggaaguaaugaauucaga

SEQ ID NO: 1134589 - RNA, 19 nt, Homo sapiens
  misc_RNA (1)...(19): siRNA sense strand
caacuaggaacaccauguc

SEQ ID NO: 1134590 - RNA, 19 nt, Homo sapiens
  misc_RNA (1)...(19): siRNA sense strand
gaaaugguucgccacaaaa

SEQ ID NO: 1134591 - RNA, 19 nt, Homo sapiens
  misc_RNA (1)...(19): siRNA sense strand
cguaugaugcuguccuuga

SEQ ID NO: 1134592 - RNA, 19 nt, Homo sapiens
  misc_RNA (1)...(19): siRNA sense strand
uaugucaagugauucagau

SEQ ID NO: 1134593 - RNA, 19 nt, Homo sapiens
  misc_RNA (1)...(19): siRNA sense strand
ugaagaauggaaagaacuu

SEQ ID NO: 1134594 - RNA, 19 nt, Homo sapiens
  misc_RNA (1)...(19): siRNA sense strand
ggaugaaagagaacacaca

SEQ ID NO: 1134595 - RNA, 19 nt, Homo sapiens
  misc_RNA (1)...(19): siRNA sense strand
gggacuuguugucaaagau

SEQ ID NO: 1134596 - RNA, 19 nt, Homo sapiens
  misc_RNA (1)...(19): siRNA sense strand
ucugugggaugcauuaugg

SEQ ID NO: 1134597 - RNA, 19 nt, Homo sapiens
  misc_RNA (1)...(19): siRNA sense strand
aagaacuuaucuacaagga

SEQ ID NO: 1134598 - RNA, 19 nt, Homo sapiens
  misc_RNA (1)...(19): siRNA sense strand
gguaugacccagccgaagu

SEQ ID NO: 1134599 - RNA, 19 nt, Homo sapiens
  misc_RNA (1)...(19): siRNA sense strand
ggacucaccuuccccaaac

SEQ ID NO: 1134600 - RNA, 19 nt, Homo sapiens
  misc_RNA (1)...(19): siRNA sense strand
gaccaguggaauaagguaa

SEQ ID NO: 1134601 - RNA, 19 nt, Homo sapiens
  misc_RNA (1)...(19): siRNA sense strand
acaucaacgucugguauga

SEQ ID NO: 1134602 - RNA, 19 nt, Homo sapiens
  misc_RNA (1)...(19): siRNA sense strand
gauauaugacaagcaguug

SEQ ID NO: 1134603 - RNA, 19 nt, Homo sapiens
  misc_RNA (1)...(19): siRNA sense strand
ggaaagaacuuaucuacaa

SEQ ID NO: 1134604 - RNA, 19 nt, Homo sapiens
  misc_RNA (1)...(19): siRNA sense strand
ggaauaagguaauugaaca

SEQ ID NO: 1134605 - RNA, 19 nt, Homo sapiens
  misc_RNA (1)...(19): siRNA sense strand
gcaguuggaugaaagagaa

SEQ ID NO: 1134606 - RNA, 19 nt, Homo sapiens
  misc_RNA (1)...(19): siRNA sense strand
caaagaugcuagugauuga

SEQ ID NO: 1134607 - RNA, 19 nt, Homo sapiens
  misc_RNA (1)...(19): siRNA sense strand
gaaacuauguggagaaucg

SEQ ID NO: 1134608 - RNA, 19 nt, Homo sapiens
  misc_RNA (1)...(19): siRNA sense strand
gaaagagaacacacaauug

SEQ ID NO: 1134609 - RNA, 19 nt, Homo sapiens
  misc_RNA (1)...(19): siRNA sense strand
gaaagaacuuaucuacaag

SEQ ID NO: 1134610 - RNA, 19 nt, Homo sapiens
  misc_RNA (1)...(19): siRNA sense strand
gaaauugcaacccacagua

SEQ ID NO: 1134611 - RNA, 19 nt, Homo sapiens
  misc_RNA (1)...(19): siRNA sense strand
cauauguggugacacguua

SEQ ID NO: 1134612 - RNA, 19 nt, Homo sapiens
  misc_RNA (1)...(19): siRNA sense strand
ugaaagagaacacacaauu

SEQ ID NO: 1134613 - RNA, 19 nt, Homo sapiens
  misc_RNA (1)...(19): siRNA sense strand
caaguaacauuguagucaa

SEQ ID NO: 1134614 - RNA, 19 nt, Homo sapiens
  misc_RNA (1)...(19): siRNA sense strand
agaaaugguucgccacaaa

SEQ ID NO: 1134615 - RNA, 19 nt, Homo sapiens
  misc_RNA (1)...(19): siRNA sense strand
acugauggaugccaacuua

SEQ ID NO: 1134616 - RNA, 19 nt, Homo sapiens
  misc_RNA (1)...(19): siRNA sense strand
aaagagaacacacaauuga

SEQ ID NO: 1134617 - RNA, 19 nt, Homo sapiens
  misc_RNA (1)...(19): siRNA sense strand
acaaggaaguaaugaauuc

SEQ ID NO: 1134618 - RNA, 19 nt, Homo sapiens
  misc_RNA (1)...(19): siRNA sense strand
ggugacacguuauuacaga

SEQ ID NO: 1134619 - RNA, 19 nt, Homo sapiens
  misc_RNA (1)...(19): siRNA sense strand
gaagaauggaaagaacuua

SEQ ID NO: 1134620 - RNA, 19 nt, Homo sapiens
  misc_RNA (1)...(19): siRNA sense strand
ggaacaccauguccagaau

SEQ ID NO: 1134621 - RNA, 19 nt, Homo sapiens
  misc_RNA (1)...(19): siRNA sense strand
ccagggacuuguugucaaa

SEQ ID NO: 1134622 - RNA, 19 nt, Homo sapiens
  misc_RNA (1)...(19): siRNA sense strand
gcauuaagcaccuccauuc

SEQ ID NO: 1134623 - RNA, 19 nt, Homo sapiens
  misc_RNA (1)...(19): siRNA sense strand
gacaagcaguuggaugaaa

SEQ ID NO: 1134624 - RNA, 19 nt, Homo sapiens
  misc_RNA (1)...(19): siRNA sense strand
guccagaauucaugaagaa

SEQ ID NO: 1134625 - RNA, 19 nt, Homo sapiens
  misc_RNA (1)...(19): siRNA sense strand
caagucugauugcacauug

SEQ ID NO: 1134626 - RNA, 19 nt, Homo sapiens
  misc_RNA (1)...(19): siRNA sense strand
cccaaacucuucccagauu

SEQ ID NO: 1134627 - RNA, 19 nt, Homo sapiens
  misc_RNA (1)...(19): siRNA sense strand
caugaugacuccauaugug

SEQ ID NO: 1134628 - RNA, 19 nt, Homo sapiens
  misc_RNA (1)...(19): siRNA sense strand
gaacaccauguccagaauu

SEQ ID NO: 1134629 - RNA, 19 nt, Homo sapiens
  misc_RNA (1)...(19): siRNA sense strand
gaacacacaauugaagaau

SEQ ID NO: 1134630 - RNA, 19 nt, Homo sapiens
  misc_RNA (1)...(19): siRNA sense strand
gagaaucggcccaaguaug

SEQ ID NO: 1134631 - RNA, 19 nt, Homo sapiens
  misc_RNA (1)...(19): siRNA sense strand
ggacgacgccuuacagcau

SEQ ID NO: 1134632 - RNA, 19 nt, Homo sapiens
  misc_RNA (1)...(19): siRNA sense strand
ggacuccgagcacaauaaa

SEQ ID NO: 1134633 - RNA, 19 nt, Homo sapiens
  misc_RNA (1)...(19): siRNA sense strand
ugucaaagaugcuagugau

SEQ ID NO: 1134634 - RNA, 19 nt, Homo sapiens
  misc_RNA (1)...(19): siRNA sense strand
gagaacacacaauugaaga

SEQ ID NO: 1134635 - RNA, 19 nt, Homo sapiens
  misc_RNA (1)...(19): siRNA sense strand
gaugccaacuuaugucaag

SEQ ID NO: 1134636 - RNA, 19 nt, Homo sapiens
  misc_RNA (1)...(19): siRNA sense strand
ucaaagaugcuagugauug

SEQ ID NO: 1134637 - RNA, 19 nt, Homo sapiens
  misc_RNA (1)...(19): siRNA sense strand
gagaaaugguucgccacaa

SEQ ID NO: 1134638 - RNA, 19 nt, Homo sapiens
  misc_RNA (1)...(19): siRNA sense strand
gaacaacuaggaacaccau

SEQ ID NO: 1134639 - RNA, 19 nt, Homo sapiens
  misc_RNA (1)...(19): siRNA sense strand
acacacaauugaagaaugg

SEQ ID NO: 1134640 - RNA, 19 nt, Homo sapiens
  misc_RNA (1)...(19): siRNA sense strand
ggaaguaaugaauucagaa

SEQ ID NO: 1134641 - RNA, 19 nt, Homo sapiens
  misc_RNA (1)...(19): siRNA sense strand
ccaggaagggacuauauug

SEQ ID NO: 1134642 - RNA, 19 nt, Homo sapiens
  misc_RNA (1)...(19): siRNA sense strand
gaugaaagagaacacacaa

SEQ ID NO: 1134643 - RNA, 19 nt, Homo sapiens
  misc_RNA (1)...(19): siRNA sense strand
caaggagaacguggauaua

SEQ ID NO: 1134644 - RNA, 19 nt, Homo sapiens
  misc_RNA (1)...(19): siRNA sense strand
gaaguaaugaauucagaag

SEQ ID NO: 1134645 - RNA, 19 nt, Homo sapiens
  misc_RNA (1)...(19): siRNA sense strand
ccaguggaauaagguaauu

SEQ ID NO: 1134646 - RNA, 19 nt, Homo sapiens
  misc_RNA (1)...(19): siRNA sense strand
ggagaacguggauauaugg

SEQ ID NO: 1134647 - RNA, 19 nt, Homo sapiens
  misc_RNA (1)...(19): siRNA sense strand
cgagcacaauaaacucaaa

SEQ ID NO: 1134648 - RNA, 19 nt, Homo sapiens
  misc_RNA (1)...(19): siRNA sense strand
guaauugaacaacuaggaa

SEQ ID NO: 1134649 - RNA, 19 nt, Homo sapiens
  misc_RNA (1)...(19): siRNA sense strand
ccaaguaacauuguaguca

SEQ ID NO: 1134650 - RNA, 19 nt, Homo sapiens
  misc_RNA (1)...(19): siRNA sense strand
ggacagccuucuccuucag

SEQ ID NO: 1134651 - RNA, 19 nt, Homo sapiens
  misc_RNA (1)...(19): siRNA sense strand
uaagaaacuauguggagaa

SEQ ID NO: 1134652 - RNA, 19 nt, Homo sapiens
  misc_RNA (1)...(19): siRNA sense strand
acaaggagaacguggauau

SEQ ID NO: 1134653 - RNA, 19 nt, Homo sapiens
  misc_RNA (1)...(19): siRNA sense strand
gcaggcacaagcuucauga

SEQ ID NO: 1134654 - RNA, 19 nt, Homo sapiens
  misc_RNA (1)...(19): siRNA sense strand
ggacagcaggcacaagcuu

SEQ ID NO: 1134655 - RNA, 19 nt, Homo sapiens
  misc_RNA (1)...(19): siRNA sense strand
cuacaaggaaguaaugaau

SEQ ID NO: 1134656 - RNA, 19 nt, Homo sapiens
  misc_RNA (1)...(19): siRNA sense strand
uggagaaucggcccaagua

SEQ ID NO: 1134657 - RNA, 19 nt, Homo sapiens
  misc_RNA (1)...(19): siRNA sense strand
gccagggacuuguugucaa

SEQ ID NO: 1134658 - RNA, 19 nt, Homo sapiens
  misc_RNA (1)...(19): siRNA sense strand
gauggaugccaacuuaugu

SEQ ID NO: 1134659 - RNA, 19 nt, Homo sapiens
  misc_RNA (1)...(19): siRNA sense strand
ggacuuguugucaaagaug

SEQ ID NO: 1134660 - RNA, 19 nt, Homo sapiens
  misc_RNA (1)...(19): siRNA sense strand
aggagaacguggauauaug

SEQ ID NO: 1134661 - RNA, 19 nt, Homo sapiens
  misc_RNA (1)...(19): siRNA sense strand
gaauggaaagaacuuaucu

SEQ ID NO: 1134662 - RNA, 19 nt, Homo sapiens
  misc_RNA (1)...(19): siRNA sense strand
ugucuuaccugcuguacca

SEQ ID NO: 1134663 - RNA, 19 nt, Homo sapiens
  misc_RNA (1)...(19): siRNA sense strand
gguaauugaacaacuagga

SEQ ID NO: 1134664 - RNA, 19 nt, Homo sapiens
  misc_RNA (1)...(19): siRNA sense strand
caggaagggacuauauuga

SEQ ID NO: 1134665 - RNA, 19 nt, Homo sapiens
  misc_RNA (1)...(19): siRNA sense strand
acaagcaguuggaugaaag

SEQ ID NO: 1134666 - RNA, 19 nt, Homo sapiens
  misc_RNA (1)...(19): siRNA sense strand
accaugagcgaaugucuua

SEQ ID NO: 1134667 - RNA, 19 nt, Homo sapiens
  misc_RNA (1)...(19): siRNA sense strand
caccucagauauaugacaa

SEQ ID NO: 1134668 - RNA, 19 nt, Homo sapiens
  misc_RNA (1)...(19): siRNA sense strand
aaauugcaacccacaguaa

SEQ ID NO: 1134669 - RNA, 19 nt, Homo sapiens
  misc_RNA (1)...(19): siRNA sense strand
gucaagugauucagaugga

SEQ ID NO: 1134670 - RNA, 19 nt, Homo sapiens
  misc_RNA (1)...(19): siRNA sense strand
cuacaucaacgucugguau

SEQ ID NO: 1134671 - RNA, 19 nt, Homo sapiens
  misc_RNA (1)...(19): siRNA sense strand
ccaaacucuucccagauuc

SEQ ID NO: 1134672 - RNA, 19 nt, Homo sapiens
  misc_RNA (1)...(19): siRNA sense strand
ucaagugauucagauggaa

SEQ ID NO: 1134673 - RNA, 19 nt, Homo sapiens
  misc_RNA (1)...(19): siRNA sense strand
ccagaauucaugaagaaau

SEQ ID NO: 1134674 - RNA, 19 nt, Homo sapiens
  misc_RNA (1)...(19): siRNA sense strand
ggagaaucggcccaaguau

SEQ ID NO: 1134675 - RNA, 19 nt, Homo sapiens
  misc_RNA (1)...(19): siRNA sense strand
aagaaacuauguggagaau

SEQ ID NO: 1134676 - RNA, 19 nt, Homo sapiens
  misc_RNA (1)...(19): siRNA sense strand
gaaaugguucgccacaaaa

SEQ ID NO: 1134677 - RNA, 19 nt, Homo sapiens
  misc_RNA (1)...(19): siRNA sense strand
aggaaguaaugaauucaga

SEQ ID NO: 1134678 - RNA, 19 nt, Homo sapiens
  misc_RNA (1)...(19): siRNA sense strand
gaaugucuuaccugcugua

SEQ ID NO: 1134679 - RNA, 19 nt, Homo sapiens
  misc_RNA (1)...(19): siRNA sense strand
caacuaggaacaccauguc

SEQ ID NO: 1134680 - RNA, 19 nt, Homo sapiens
  misc_RNA (1)...(19): siRNA sense strand
uaugucaagugauucagau

SEQ ID NO: 1134681 - RNA, 19 nt, Homo sapiens
  misc_RNA (1)...(19): siRNA sense strand
ugaagaauggaaagaacuu

SEQ ID NO: 1134682 - RNA, 19 nt, Homo sapiens
  misc_RNA (1)...(19): siRNA sense strand
ggaugaaagagaacacaca

SEQ ID NO: 1134683 - RNA, 19 nt, Homo sapiens
  misc_RNA (1)...(19): siRNA sense strand
gggacuuguugucaaagau

SEQ ID NO: 1134684 - RNA, 19 nt, Homo sapiens
  misc_RNA (1)...(19): siRNA sense strand
ucugugggaugcauuaugg

SEQ ID NO: 1134685 - RNA, 19 nt, Homo sapiens
  misc_RNA (1)...(19): siRNA sense strand
aagaacuuaucuacaagga

SEQ ID NO: 1134686 - RNA, 19 nt, Homo sapiens
  misc_RNA (1)...(19): siRNA sense strand
gguaugacccagccgaagu

SEQ ID NO: 1134687 - RNA, 19 nt, Homo sapiens
  misc_RNA (1)...(19): siRNA sense strand
ggacucaccuuccccaaac

SEQ ID NO: 1134688 - RNA, 19 nt, Homo sapiens
  misc_RNA (1)...(19): siRNA sense strand
gaccaguggaauaagguaa

SEQ ID NO: 1134689 - RNA, 19 nt, Homo sapiens
  misc_RNA (1)...(19): siRNA sense strand
aaggagaacguggauauau

SEQ ID NO: 1134690 - RNA, 19 nt, Homo sapiens
  misc_RNA (1)...(19): siRNA sense strand
gauauaugacaagcaguug

SEQ ID NO: 1134691 - RNA, 19 nt, Homo sapiens
  misc_RNA (1)...(19): siRNA sense strand
acaucaacgucugguauga

SEQ ID NO: 1134692 - RNA, 19 nt, Homo sapiens
  misc_RNA (1)...(19): siRNA sense strand
uguccagaauucaugaaga

SEQ ID NO: 1134693 - RNA, 19 nt, Homo sapiens
  misc_RNA (1)...(19): siRNA sense strand
guaacauuguagucaaguc

SEQ ID NO: 1134694 - RNA, 19 nt, Homo sapiens
  misc_RNA (1)...(19): siRNA sense strand
uaucuacaaggaaguaaug

SEQ ID NO: 1134695 - RNA, 19 nt, Homo sapiens
  misc_RNA (1)...(19): siRNA sense strand
acauuguagucaagucuga

SEQ ID NO: 1134696 - RNA, 19 nt, Homo sapiens
  misc_RNA (1)...(19): siRNA sense strand
ucacagggauuuaaaacca

SEQ ID NO: 1134697 - RNA, 19 nt, Homo sapiens
  misc_RNA (1)...(19): siRNA sense strand
gaccaugagcgaaugucuu

SEQ ID NO: 1134698 - RNA, 19 nt, Homo sapiens
  misc_RNA (1)...(19): siRNA sense strand
guagucaagucugauugca

SEQ ID NO: 1134699 - RNA, 19 nt, Homo sapiens
  misc_RNA (1)...(19): siRNA sense strand
uaccugcuguaccaaaugu

SEQ ID NO: 1134700 - RNA, 19 nt, Homo sapiens
  misc_RNA (1)...(19): siRNA sense strand
ccacaguaagaaacuaugu

SEQ ID NO: 1134701 - RNA, 19 nt, Homo sapiens
  misc_RNA (1)...(19): siRNA sense strand
agauauaugacaagcaguu

SEQ ID NO: 1134702 - RNA, 19 nt, Homo sapiens
  misc_RNA (1)...(19): siRNA sense strand
ugauggaugccaacuuaug

SEQ ID NO: 1134703 - RNA, 19 nt, Homo sapiens
  misc_RNA (1)...(19): siRNA sense strand
ggaaagaacuuaucuacaa

SEQ ID NO: 1134704 - RNA, 19 nt, Homo sapiens
  misc_RNA (1)...(19): siRNA sense strand
ggaauaagguaauugaaca

SEQ ID NO: 1134705 - RNA, 19 nt, Homo sapiens
  misc_RNA (1)...(19): siRNA sense strand
gcaguuggaugaaagagaa

SEQ ID NO: 1134706 - RNA, 19 nt, Homo sapiens
  misc_RNA (1)...(19): siRNA sense strand
caaagaugcuagugauuga

SEQ ID NO: 1134707 - RNA, 19 nt, Homo sapiens
  misc_RNA (1)...(19): siRNA sense strand
gaaacuauguggagaaucg

SEQ ID NO: 1134708 - RNA, 19 nt, Homo sapiens
  misc_RNA (1)...(19): siRNA sense strand
ugaagugugugaaccauaa

SEQ ID NO: 1134709 - RNA, 19 nt, Homo sapiens
  misc_RNA (1)...(19): siRNA sense strand
gaaagaacuuaucuacaag

SEQ ID NO: 1134710 - RNA, 19 nt, Homo sapiens
  misc_RNA (1)...(19): siRNA sense strand
gaaagagaacacacaauug

SEQ ID NO: 1134711 - RNA, 19 nt, Homo sapiens
  misc_RNA (1)...(19): siRNA sense strand
ccaaacacaugccaagaga

SEQ ID NO: 1134712 - RNA, 19 nt, Homo sapiens
  misc_RNA (1)...(19): siRNA sense strand
gaaauugcaacccacagua

SEQ ID NO: 1134713 - RNA, 19 nt, Homo sapiens
  misc_RNA (1)...(19): siRNA sense strand
cauauguggugacacguua

SEQ ID NO: 1134714 - RNA, 19 nt, Homo sapiens
  misc_RNA (1)...(19): siRNA sense strand
ugaaagagaacacacaauu

SEQ ID NO: 1134715 - RNA, 19 nt, Homo sapiens
  misc_RNA (1)...(19): siRNA sense strand
caaguaacauuguagucaa

SEQ ID NO: 1134716 - RNA, 19 nt, Homo sapiens
  misc_RNA (1)...(19): siRNA sense strand
acugauggaugccaacuua

SEQ ID NO: 1134717 - RNA, 19 nt, Homo sapiens
  misc_RNA (1)...(19): siRNA sense strand
agaaaugguucgccacaaa

SEQ ID NO: 1134718 - RNA, 19 nt, Homo sapiens
  misc_RNA (1)...(19): siRNA sense strand
aaagagaacacacaauuga

SEQ ID NO: 1134719 - RNA, 19 nt, Homo sapiens
  misc_RNA (1)...(19): siRNA sense strand
acaaggaaguaaugaauuc

SEQ ID NO: 1134720 - RNA, 19 nt, Homo sapiens
  misc_RNA (1)...(19): siRNA sense strand
ggugacacguuauuacaga

SEQ ID NO: 1134721 - RNA, 19 nt, Homo sapiens
  misc_RNA (1)...(19): siRNA sense strand
gaagaauggaaagaacuua

SEQ ID NO: 1134722 - RNA, 19 nt, Homo sapiens
  misc_RNA (1)...(19): siRNA sense strand
ggaacaccauguccagaau

SEQ ID NO: 1134723 - RNA, 19 nt, Homo sapiens
  misc_RNA (1)...(19): siRNA sense strand
ccagggacuuguugucaaa

SEQ ID NO: 1134724 - RNA, 19 nt, Homo sapiens
  misc_RNA (1)...(19): siRNA sense strand
gcauuaagcaccuccauuc

SEQ ID NO: 1134725 - RNA, 19 nt, Homo sapiens
  misc_RNA (1)...(19): siRNA sense strand
gacaagcaguuggaugaaa

SEQ ID NO: 1134726 - RNA, 19 nt, Homo sapiens
  misc_RNA (1)...(19): siRNA sense strand
guccagaauucaugaagaa

SEQ ID NO: 1134727 - RNA, 19 nt, Homo sapiens
  misc_RNA (1)...(19): siRNA sense strand
gcagugaacagcagugaga

SEQ ID NO: 1134728 - RNA, 19 nt, Homo sapiens
  misc_RNA (1)...(19): siRNA sense strand
caagucugauugcacauug

SEQ ID NO: 1134729 - RNA, 19 nt, Homo sapiens
  misc_RNA (1)...(19): siRNA sense strand
cccaaacucuucccagauu

SEQ ID NO: 1134730 - RNA, 19 nt, Homo sapiens
  misc_RNA (1)...(19): siRNA sense strand
caugaugacuccauaugug

SEQ ID NO: 1134731 - RNA, 19 nt, Homo sapiens
  misc_RNA (1)...(19): siRNA sense strand
gaacaccauguccagaauu

SEQ ID NO: 1134732 - RNA, 19 nt, Homo sapiens
  misc_RNA (1)...(19): siRNA sense strand
gaacacacaauugaagaau

SEQ ID NO: 1134733 - RNA, 19 nt, Homo sapiens
  misc_RNA (1)...(19): siRNA sense strand
gagaaucggcccaaguaug

SEQ ID NO: 1134734 - RNA, 19 nt, Homo sapiens
  misc_RNA (1)...(19): siRNA sense strand
ggacgacgccuuacagcau

SEQ ID NO: 1134735 - RNA, 19 nt, Homo sapiens
  misc_RNA (1)...(19): siRNA sense strand
ggacuccgagcacaauaaa

SEQ ID NO: 1134736 - RNA, 19 nt, Homo sapiens
  misc_RNA (1)...(19): siRNA sense strand
gaugccaacuuaugucaag

SEQ ID NO: 1134737 - RNA, 19 nt, Homo sapiens
  misc_RNA (1)...(19): siRNA sense strand
gagaacacacaauugaaga

SEQ ID NO: 1134738 - RNA, 19 nt, Homo sapiens
  misc_RNA (1)...(19): siRNA sense strand
ucaaagaugcuagugauug

SEQ ID NO: 1134739 - RNA, 19 nt, Homo sapiens
  misc_RNA (1)...(19): siRNA sense strand
ugucaaagaugcuagugau

SEQ ID NO: 1134740 - RNA, 19 nt, Homo sapiens
  misc_RNA (1)...(19): siRNA sense strand
gagaaaugguucgccacaa

SEQ ID NO: 1134741 - RNA, 19 nt, Homo sapiens
  misc_RNA (1)...(19): siRNA sense strand
gaacaacuaggaacaccau

SEQ ID NO: 1134742 - RNA, 19 nt, Homo sapiens
  misc_RNA (1)...(19): siRNA sense strand
acacacaauugaagaaugg

SEQ ID NO: 1134743 - RNA, 19 nt, Homo sapiens
  misc_RNA (1)...(19): siRNA sense strand
ucaaugacaucuccuccau

SEQ ID NO: 1134744 - RNA, 19 nt, Homo sapiens
  misc_RNA (1)...(19): siRNA sense strand
ggaaguaaugaauucagaa

SEQ ID NO: 1134745 - RNA, 19 nt, Homo sapiens
  misc_RNA (1)...(19): siRNA sense strand
ccaggaagggacuauauug

SEQ ID NO: 1134746 - RNA, 19 nt, Homo sapiens
  misc_RNA (1)...(19): siRNA sense strand
gaugaaagagaacacacaa

SEQ ID NO: 1134747 - RNA, 19 nt, Homo sapiens
  misc_RNA (1)...(19): siRNA sense strand
caaggagaacguggauaua

SEQ ID NO: 1134748 - RNA, 19 nt, Homo sapiens
  misc_RNA (1)...(19): siRNA sense strand
gaaguaaugaauucagaag

SEQ ID NO: 1134749 - RNA, 19 nt, Homo sapiens
  misc_RNA (1)...(19): siRNA sense strand
ccaguggaauaagguaauu

SEQ ID NO: 1134750 - RNA, 19 nt, Homo sapiens
  misc_RNA (1)...(19): siRNA sense strand
ggagaacguggauauaugg

SEQ ID NO: 1134751 - RNA, 19 nt, Homo sapiens
  misc_RNA (1)...(19): siRNA sense strand
cgagcacaauaaacucaaa

SEQ ID NO: 1134752 - RNA, 19 nt, Homo sapiens
  misc_RNA (1)...(19): siRNA sense strand
guaauugaacaacuaggaa

SEQ ID NO: 1134753 - RNA, 19 nt, Homo sapiens
  misc_RNA (1)...(19): siRNA sense strand
ccaaguaacauuguaguca

SEQ ID NO: 1134754 - RNA, 19 nt, Homo sapiens
  misc_RNA (1)...(19): siRNA sense strand
ggacagccuucuccuucag

SEQ ID NO: 1134755 - RNA, 19 nt, Homo sapiens
  misc_RNA (1)...(19): siRNA sense strand
uaagaaacuauguggagaa

SEQ ID NO: 1134756 - RNA, 19 nt, Homo sapiens
  misc_RNA (1)...(19): siRNA sense strand
acaaggagaacguggauau

SEQ ID NO: 1134757 - RNA, 19 nt, Homo sapiens
  misc_RNA (1)...(19): siRNA sense strand
gcaggcacaagcuucauga

SEQ ID NO: 1134758 - RNA, 19 nt, Homo sapiens
  misc_RNA (1)...(19): siRNA sense strand
gagcugguccucaugaagu

SEQ ID NO: 1134759 - RNA, 19 nt, Homo sapiens
  misc_RNA (1)...(19): siRNA sense strand
ggacagcaggcacaagcuu

SEQ ID NO: 1134760 - RNA, 19 nt, Homo sapiens
  misc_RNA (1)...(19): siRNA sense strand
cuacaaggaaguaaugaau

SEQ ID NO: 1134761 - RNA, 19 nt, Homo sapiens
  misc_RNA (1)...(19): siRNA sense strand
uggagaaucggcccaagua

SEQ ID NO: 1134762 - RNA, 19 nt, Homo sapiens
  misc_RNA (1)...(19): siRNA sense strand
gauggaugccaacuuaugu

SEQ ID NO: 1134763 - RNA, 19 nt, Homo sapiens
  misc_RNA (1)...(19): siRNA sense strand
ggacuuguugucaaagaug

SEQ ID NO: 1134764 - RNA, 19 nt, Homo sapiens
  misc_RNA (1)...(19): siRNA sense strand
gccagggacuuguugucaa

SEQ ID NO: 1134765 - RNA, 19 nt, Homo sapiens
  misc_RNA (1)...(19): siRNA sense strand
ugucuuaccugcuguacca

SEQ ID NO: 1134766 - RNA, 19 nt, Homo sapiens
  misc_RNA (1)...(19): siRNA sense strand
gaauggaaagaacuuaucu

SEQ ID NO: 1134767 - RNA, 19 nt, Homo sapiens
  misc_RNA (1)...(19): siRNA sense strand
gguaauugaacaacuagga

SEQ ID NO: 1134768 - RNA, 19 nt, Homo sapiens
  misc_RNA (1)...(19): siRNA sense strand
caggaagggacuauauuga

SEQ ID NO: 1134769 - RNA, 19 nt, Homo sapiens
  misc_RNA (1)...(19): siRNA sense strand
aggagaacguggauauaug

SEQ ID NO: 1134770 - RNA, 19 nt, Homo sapiens
  misc_RNA (1)...(19): siRNA sense strand
cagcagacccuuucagaac

SEQ ID NO: 1134771 - RNA, 19 nt, Homo sapiens
  misc_RNA (1)...(19): siRNA sense strand
acaagcaguuggaugaaag

SEQ ID NO: 1134772 - RNA, 19 nt, Homo sapiens
  misc_RNA (1)...(19): siRNA sense strand
gaagcucagcagacccuuu

SEQ ID NO: 1134773 - RNA, 19 nt, Homo sapiens
  misc_RNA (1)...(19): siRNA sense strand
accaugagcgaaugucuua

SEQ ID NO: 1134774 - RNA, 19 nt, Homo sapiens
  misc_RNA (1)...(19): siRNA sense strand
caccucagauauaugacaa

SEQ ID NO: 1134775 - RNA, 19 nt, Homo sapiens
  misc_RNA (1)...(19): siRNA sense strand
gucaagugauucagaugga

SEQ ID NO: 1134776 - RNA, 19 nt, Homo sapiens
  misc_RNA (1)...(19): siRNA sense strand
gcagacccuuucagaacca

SEQ ID NO: 1134777 - RNA, 19 nt, Homo sapiens
  misc_RNA (1)...(19): siRNA sense strand
cuacaucaacgucugguau

SEQ ID NO: 1134778 - RNA, 19 nt, Homo sapiens
  misc_RNA (1)...(19): siRNA sense strand
gggagcugguccucaugaa

SEQ ID NO: 1134779 - RNA, 19 nt, Homo sapiens
  misc_RNA (1)...(19): siRNA sense strand
aaauugcaacccacaguaa

SEQ ID NO: 1134780 - RNA, 19 nt, Homo sapiens
  misc_RNA (1)...(19): siRNA sense strand
gaagugugugaaccauaaa

SEQ ID NO: 1134781 - RNA, 19 nt, Homo sapiens
  misc_RNA (1)...(19): siRNA sense strand
ccaaacucuucccagauuc

SEQ ID NO: 1134782 - RNA, 19 nt, Homo sapiens
  misc_RNA (1)...(19): siRNA sense strand
ucaagugauucagauggaa

SEQ ID NO: 1134783 - RNA, 19 nt, Homo sapiens
  misc_RNA (1)...(19): siRNA sense strand
ccagaauucaugaagaaau

SEQ ID NO: 1134784 - RNA, 19 nt, Homo sapiens
  misc_RNA (1)...(19): siRNA sense strand
ggagaaucggcccaaguau

SEQ ID NO: 1134785 - RNA, 19 nt, Homo sapiens
  misc_RNA (1)...(19): siRNA sense strand
aagaaacuauguggagaau

SEQ ID NO: 1134786 - RNA, 19 nt, Homo sapiens
  misc_RNA (1)...(19): siRNA sense strand
gaaugucuuaccugcugua

SEQ ID NO: 1134787 - RNA, 19 nt, Homo sapiens
  misc_RNA (1)...(19): siRNA sense strand
cauccucgucugucaauga

SEQ ID NO: 1134788 - RNA, 19 nt, Homo sapiens
  misc_RNA (1)...(19): siRNA sense strand
aggaaguaaugaauucaga

SEQ ID NO: 1134789 - RNA, 19 nt, Homo sapiens
  misc_RNA (1)...(19): siRNA sense strand
caacuaggaacaccauguc

SEQ ID NO: 1134790 - RNA, 19 nt, Homo sapiens
  misc_RNA (1)...(19): siRNA sense strand
gaaaugguucgccacaaaa

SEQ ID NO: 1134791 - RNA, 19 nt, Homo sapiens
  misc_RNA (1)...(19): siRNA sense strand
cguaugaugcuguccuuga

SEQ ID NO: 1134792 - RNA, 19 nt, Homo sapiens
  misc_RNA (1)...(19): siRNA sense strand
uaugucaagugauucagau

SEQ ID NO: 1134793 - RNA, 19 nt, Homo sapiens
  misc_RNA (1)...(19): siRNA sense strand
ugaagaauggaaagaacuu

SEQ ID NO: 1134794 - RNA, 19 nt, Homo sapiens
  misc_RNA (1)...(19): siRNA sense strand
ggaugaaagagaacacaca

SEQ ID NO: 1134795 - RNA, 19 nt, Homo sapiens
  misc_RNA (1)...(19): siRNA sense strand
gggacuuguugucaaagau

SEQ ID NO: 1134796 - RNA, 19 nt, Homo sapiens
  misc_RNA (1)...(19): siRNA sense strand
ucugugggaugcauuaugg

SEQ ID NO: 1134797 - RNA, 19 nt, Homo sapiens
  misc_RNA (1)...(19): siRNA sense strand
aagaacuuaucuacaagga

SEQ ID NO: 1134798 - RNA, 19 nt, Homo sapiens
  misc_RNA (1)...(19): siRNA sense strand
gguaugacccagccgaagu

SEQ ID NO: 1134799 - RNA, 19 nt, Homo sapiens
  misc_RNA (1)...(19): siRNA sense strand
ggacucaccuuccccaaac

SEQ ID NO: 1134800 - RNA, 19 nt, Homo sapiens
  misc_RNA (1)...(19): siRNA sense strand
gaccaguggaauaagguaa

SEQ ID NO: 1134801 - RNA, 19 nt, Homo sapiens
  misc_RNA (1)...(19): siRNA sense strand
acaucaacgucugguauga

SEQ ID NO: 1134802 - RNA, 19 nt, Homo sapiens
  misc_RNA (1)...(19): siRNA sense strand
gauauaugacaagcaguug

SEQ ID NO: 1134803 - RNA, 19 nt, Homo sapiens
  misc_RNA (1)...(19): siRNA sense strand
ggaaagaacuuaucuacaa

SEQ ID NO: 1134804 - RNA, 19 nt, Homo sapiens
  misc_RNA (1)...(19): siRNA sense strand
ggaauaagguaauugaaca

SEQ ID NO: 1134805 - RNA, 19 nt, Homo sapiens
  misc_RNA (1)...(19): siRNA sense strand
gcaguuggaugaaagagaa

SEQ ID NO: 1134806 - RNA, 19 nt, Homo sapiens
  misc_RNA (1)...(19): siRNA sense strand
caaagaugcuagugauuga

SEQ ID NO: 1134807 - RNA, 19 nt, Homo sapiens
  misc_RNA (1)...(19): siRNA sense strand
gaaacuauguggagaaucg

SEQ ID NO: 1134808 - RNA, 19 nt, Homo sapiens
  misc_RNA (1)...(19): siRNA sense strand
ugaagugugugaaccauaa

SEQ ID NO: 1134809 - RNA, 19 nt, Homo sapiens
  misc_RNA (1)...(19): siRNA sense strand
gaaagaacuuaucuacaag

SEQ ID NO: 1134810 - RNA, 19 nt, Homo sapiens
  misc_RNA (1)...(19): siRNA sense strand
gaaagagaacacacaauug

SEQ ID NO: 1134811 - RNA, 19 nt, Homo sapiens
  misc_RNA (1)...(19): siRNA sense strand
ccaaacacaugccaagaga

SEQ ID NO: 1134812 - RNA, 19 nt, Homo sapiens
  misc_RNA (1)...(19): siRNA sense strand
gaaauugcaacccacagua

SEQ ID NO: 1134813 - RNA, 19 nt, Homo sapiens
  misc_RNA (1)...(19): siRNA sense strand
cauauguggugacacguua

SEQ ID NO: 1134814 - RNA, 19 nt, Homo sapiens
  misc_RNA (1)...(19): siRNA sense strand
ugaaagagaacacacaauu

SEQ ID NO: 1134815 - RNA, 19 nt, Homo sapiens
  misc_RNA (1)...(19): siRNA sense strand
caaguaacauuguagucaa

SEQ ID NO: 1134816 - RNA, 19 nt, Homo sapiens
  misc_RNA (1)...(19): siRNA sense strand
acugauggaugccaacuua

SEQ ID NO: 1134817 - RNA, 19 nt, Homo sapiens
  misc_RNA (1)...(19): siRNA sense strand
agaaaugguucgccacaaa

SEQ ID NO: 1134818 - RNA, 19 nt, Homo sapiens
  misc_RNA (1)...(19): siRNA sense strand
aaagagaacacacaauuga

SEQ ID NO: 1134819 - RNA, 19 nt, Homo sapiens
  misc_RNA (1)...(19): siRNA sense strand
acaaggaaguaaugaauuc

SEQ ID NO: 1134820 - RNA, 19 nt, Homo sapiens
  misc_RNA (1)...(19): siRNA sense strand
ggugacacguuauuacaga

SEQ ID NO: 1134821 - RNA, 19 nt, Homo sapiens
  misc_RNA (1)...(19): siRNA sense strand
gaagaauggaaagaacuua

SEQ ID NO: 1134822 - RNA, 19 nt, Homo sapiens
  misc_RNA (1)...(19): siRNA sense strand
ggaacaccauguccagaau

SEQ ID NO: 1134823 - RNA, 19 nt, Homo sapiens
  misc_RNA (1)...(19): siRNA sense strand
ccagggacuuguugucaaa

SEQ ID NO: 1134824 - RNA, 19 nt, Homo sapiens
  misc_RNA (1)...(19): siRNA sense strand
gcauuaagcaccuccauuc

SEQ ID NO: 1134825 - RNA, 19 nt, Homo sapiens
  misc_RNA (1)...(19): siRNA sense strand
gacaagcaguuggaugaaa

SEQ ID NO: 1134826 - RNA, 19 nt, Homo sapiens
  misc_RNA (1)...(19): siRNA sense strand
guccagaauucaugaagaa

SEQ ID NO: 1134827 - RNA, 19 nt, Homo sapiens
  misc_RNA (1)...(19): siRNA sense strand
caagucugauugcacauug

SEQ ID NO: 1134828 - RNA, 19 nt, Homo sapiens
  misc_RNA (1)...(19): siRNA sense strand
cccaaacucuucccagauu

SEQ ID NO: 1134829 - RNA, 19 nt, Homo sapiens
  misc_RNA (1)...(19): siRNA sense strand
caugaugacuccauaugug

SEQ ID NO: 1134830 - RNA, 19 nt, Homo sapiens
  misc_RNA (1)...(19): siRNA sense strand
gaacaccauguccagaauu

SEQ ID NO: 1134831 - RNA, 19 nt, Homo sapiens
  misc_RNA (1)...(19): siRNA sense strand
gaacacacaauugaagaau

SEQ ID NO: 1134832 - RNA, 19 nt, Homo sapiens
  misc_RNA (1)...(19): siRNA sense strand
gagaaucggcccaaguaug

SEQ ID NO: 1134833 - RNA, 19 nt, Homo sapiens
  misc_RNA (1)...(19): siRNA sense strand
ggacgacgccuuacagcau

SEQ ID NO: 1134834 - RNA, 19 nt, Homo sapiens
  misc_RNA (1)...(19): siRNA sense strand
ggacuccgagcacaauaaa

SEQ ID NO: 1134835 - RNA, 19 nt, Homo sapiens
  misc_RNA (1)...(19): siRNA sense strand
gaugccaacuuaugucaag

SEQ ID NO: 1134836 - RNA, 19 nt, Homo sapiens
  misc_RNA (1)...(19): siRNA sense strand
gagaacacacaauugaaga

SEQ ID NO: 1134837 - RNA, 19 nt, Homo sapiens
  misc_RNA (1)...(19): siRNA sense strand
ucaaagaugcuagugauug

SEQ ID NO: 1134838 - RNA, 19 nt, Homo sapiens
  misc_RNA (1)...(19): siRNA sense strand
ugucaaagaugcuagugau

SEQ ID NO: 1134839 - RNA, 19 nt, Homo sapiens
  misc_RNA (1)...(19): siRNA sense strand
gagaaaugguucgccacaa

SEQ ID NO: 1134840 - RNA, 19 nt, Homo sapiens
  misc_RNA (1)...(19): siRNA sense strand
gaacaacuaggaacaccau

SEQ ID NO: 1134841 - RNA, 19 nt, Homo sapiens
  misc_RNA (1)...(19): siRNA sense strand
acacacaauugaagaaugg

SEQ ID NO: 1134842 - RNA, 19 nt, Homo sapiens
  misc_RNA (1)...(19): siRNA sense strand
ggaaguaaugaauucagaa

SEQ ID NO: 1134843 - RNA, 19 nt, Homo sapiens
  misc_RNA (1)...(19): siRNA sense strand
ccaggaagggacuauauug

SEQ ID NO: 1134844 - RNA, 19 nt, Homo sapiens
  misc_RNA (1)...(19): siRNA sense strand
gaugaaagagaacacacaa

SEQ ID NO: 1134845 - RNA, 19 nt, Homo sapiens
  misc_RNA (1)...(19): siRNA sense strand
caaggagaacguggauaua

SEQ ID NO: 1134846 - RNA, 19 nt, Homo sapiens
  misc_RNA (1)...(19): siRNA sense strand
gaaguaaugaauucagaag

SEQ ID NO: 1134847 - RNA, 19 nt, Homo sapiens
  misc_RNA (1)...(19): siRNA sense strand
ccaguggaauaagguaauu

SEQ ID NO: 1134848 - RNA, 19 nt, Homo sapiens
  misc_RNA (1)...(19): siRNA sense strand
ggagaacguggauauaugg

SEQ ID NO: 1134849 - RNA, 19 nt, Homo sapiens
  misc_RNA (1)...(19): siRNA sense strand
cgagcacaauaaacucaaa

SEQ ID NO: 1134850 - RNA, 19 nt, Homo sapiens
  misc_RNA (1)...(19): siRNA sense strand
guaauugaacaacuaggaa

SEQ ID NO: 1134851 - RNA, 19 nt, Homo sapiens
  misc_RNA (1)...(19): siRNA sense strand
ccaaguaacauuguaguca

SEQ ID NO: 1134852 - RNA, 19 nt, Homo sapiens
  misc_RNA (1)...(19): siRNA sense strand
ggacagccuucuccuucag

SEQ ID NO: 1134853 - RNA, 19 nt, Homo sapiens
  misc_RNA (1)...(19): siRNA sense strand
gagcugguccucaugaagu

SEQ ID NO: 1134854 - RNA, 19 nt, Homo sapiens
  misc_RNA (1)...(19): siRNA sense strand
uaagaaacuauguggagaa

SEQ ID NO: 1134855 - RNA, 19 nt, Homo sapiens
  misc_RNA (1)...(19): siRNA sense strand
acaaggagaacguggauau

SEQ ID NO: 1134856 - RNA, 19 nt, Homo sapiens
  misc_RNA (1)...(19): siRNA sense strand
gcaggcacaagcuucauga

SEQ ID NO: 1134857 - RNA, 19 nt, Homo sapiens
  misc_RNA (1)...(19): siRNA sense strand
ggacagcaggcacaagcuu

SEQ ID NO: 1134858 - RNA, 19 nt, Homo sapiens
  misc_RNA (1)...(19): siRNA sense strand
cuacaaggaaguaaugaau

SEQ ID NO: 1134859 - RNA, 19 nt, Homo sapiens
  misc_RNA (1)...(19): siRNA sense strand
uggagaaucggcccaagua

SEQ ID NO: 1134860 - RNA, 19 nt, Homo sapiens
  misc_RNA (1)...(19): siRNA sense strand
gccagggacuuguugucaa

SEQ ID NO: 1134861 - RNA, 19 nt, Homo sapiens
  misc_RNA (1)...(19): siRNA sense strand
gauggaugccaacuuaugu

SEQ ID NO: 1134862 - RNA, 19 nt, Homo sapiens
  misc_RNA (1)...(19): siRNA sense strand
ggacuuguugucaaagaug

SEQ ID NO: 1134863 - RNA, 19 nt, Homo sapiens
  misc_RNA (1)...(19): siRNA sense strand
ugucuuaccugcuguacca

SEQ ID NO: 1134864 - RNA, 19 nt, Homo sapiens
  misc_RNA (1)...(19): siRNA sense strand
gaauggaaagaacuuaucu

SEQ ID NO: 1134865 - RNA, 19 nt, Homo sapiens
  misc_RNA (1)...(19): siRNA sense strand
gguaauugaacaacuagga

SEQ ID NO: 1134866 - RNA, 19 nt, Homo sapiens
  misc_RNA (1)...(19): siRNA sense strand
caggaagggacuauauuga

SEQ ID NO: 1134867 - RNA, 19 nt, Homo sapiens
  misc_RNA (1)...(19): siRNA sense strand
aggagaacguggauauaug

SEQ ID NO: 1134868 - RNA, 19 nt, Homo sapiens
  misc_RNA (1)...(19): siRNA sense strand
cagcagacccuuucagaac

SEQ ID NO: 1134869 - RNA, 19 nt, Homo sapiens
  misc_RNA (1)...(19): siRNA sense strand
acaagcaguuggaugaaag

SEQ ID NO: 1134870 - RNA, 19 nt, Homo sapiens
  misc_RNA (1)...(19): siRNA sense strand
gaagcucagcagacccuuu

SEQ ID NO: 1134871 - RNA, 19 nt, Homo sapiens
  misc_RNA (1)...(19): siRNA sense strand
caccucagauauaugacaa

SEQ ID NO: 1134872 - RNA, 19 nt, Homo sapiens
  misc_RNA (1)...(19): siRNA sense strand
accaugagcgaaugucuua

SEQ ID NO: 1134873 - RNA, 19 nt, Homo sapiens
  misc_RNA (1)...(19): siRNA sense strand
gggagcugguccucaugaa

SEQ ID NO: 1134874 - RNA, 19 nt, Homo sapiens
  misc_RNA (1)...(19): siRNA sense strand
gaagugugugaaccauaaa

SEQ ID NO: 1134875 - RNA, 19 nt, Homo sapiens
  misc_RNA (1)...(19): siRNA sense strand
gcagacccuuucagaacca

SEQ ID NO: 1134876 - RNA, 19 nt, Homo sapiens
  misc_RNA (1)...(19): siRNA sense strand
cuacaucaacgucugguau

SEQ ID NO: 1134877 - RNA, 19 nt, Homo sapiens
  misc_RNA (1)...(19): siRNA sense strand
gucaagugauucagaugga

SEQ ID NO: 1134878 - RNA, 19 nt, Homo sapiens
  misc_RNA (1)...(19): siRNA sense strand
aaauugcaacccacaguaa

SEQ ID NO: 1134879 - RNA, 19 nt, Homo sapiens
  misc_RNA (1)...(19): siRNA sense strand
ccaaacucuucccagauuc

SEQ ID NO: 1134880 - RNA, 19 nt, Homo sapiens
  misc_RNA (1)...(19): siRNA sense strand
ucaagugauucagauggaa

SEQ ID NO: 1134881 - RNA, 19 nt, Homo sapiens
  misc_RNA (1)...(19): siRNA sense strand
ccagaauucaugaagaaau

SEQ ID NO: 1134882 - RNA, 19 nt, Homo sapiens
  misc_RNA (1)...(19): siRNA sense strand
ggagaaucggcccaaguau

SEQ ID NO: 1134883 - RNA, 19 nt, Homo sapiens
  misc_RNA (1)...(19): siRNA sense strand
aagaaacuauguggagaau

SEQ ID NO: 1134884 - RNA, 19 nt, Homo sapiens
  misc_RNA (1)...(19): siRNA sense strand
gaaaugguucgccacaaaa

SEQ ID NO: 1134885 - RNA, 19 nt, Homo sapiens
  misc_RNA (1)...(19): siRNA sense strand
aggaaguaaugaauucaga

SEQ ID NO: 1134886 - RNA, 19 nt, Homo sapiens
  misc_RNA (1)...(19): siRNA sense strand
gaaugucuuaccugcugua

SEQ ID NO: 1134887 - RNA, 19 nt, Homo sapiens
  misc_RNA (1)...(19): siRNA sense strand
caacuaggaacaccauguc

SEQ ID NO: 1134888 - RNA, 19 nt, Homo sapiens
  misc_RNA (1)...(19): siRNA sense strand
uaugucaagugauucagau

SEQ ID NO: 1134889 - RNA, 19 nt, Homo sapiens
  misc_RNA (1)...(19): siRNA sense strand
ugaagaauggaaagaacuu

SEQ ID NO: 1134890 - RNA, 19 nt, Homo sapiens
  misc_RNA (1)...(19): siRNA sense strand
ggaugaaagagaacacaca

SEQ ID NO: 1134891 - RNA, 19 nt, Homo sapiens
  misc_RNA (1)...(19): siRNA sense strand
gggacuuguugucaaagau

SEQ ID NO: 1134892 - RNA, 19 nt, Homo sapiens
  misc_RNA (1)...(19): siRNA sense strand
cguaugaugcuguccuuga

SEQ ID NO: 1134893 - RNA, 19 nt, Homo sapiens
  misc_RNA (1)...(19): siRNA sense strand
ucugugggaugcauuaugg

SEQ ID NO: 1134894 - RNA, 19 nt, Homo sapiens
  misc_RNA (1)...(19): siRNA sense strand
aagaacuuaucuacaagga

SEQ ID NO: 1134895 - RNA, 19 nt, Homo sapiens
  misc_RNA (1)...(19): siRNA sense strand
gguaugacccagccgaagu

SEQ ID NO: 1134896 - RNA, 19 nt, Homo sapiens
  misc_RNA (1)...(19): siRNA sense strand
ggacucaccuuccccaaac

SEQ ID NO: 1134897 - RNA, 19 nt, Homo sapiens
  misc_RNA (1)...(19): siRNA sense strand
gaccaguggaauaagguaa

SEQ ID NO: 1134898 - RNA, 19 nt, Homo sapiens
  misc_RNA (1)...(19): siRNA sense strand
aaggagaacguggauauau

SEQ ID NO: 1134899 - RNA, 19 nt, Homo sapiens
  misc_RNA (1)...(19): siRNA sense strand
gauauaugacaagcaguug

SEQ ID NO: 1134900 - RNA, 19 nt, Homo sapiens
  misc_RNA (1)...(19): siRNA sense strand
acaucaacgucugguauga

SEQ ID NO: 1134901 - RNA, 19 nt, Homo sapiens
  misc_RNA (1)...(19): siRNA sense strand
uguccagaauucaugaaga

SEQ ID NO: 1134902 - RNA, 19 nt, Homo sapiens
  misc_RNA (1)...(19): siRNA sense strand
uaucuacaaggaaguaaug

SEQ ID NO: 1134903 - RNA, 19 nt, Homo sapiens
  misc_RNA (1)...(19): siRNA sense strand
ggaaagaacuuaucuacaa

SEQ ID NO: 1134904 - RNA, 19 nt, Homo sapiens
  misc_RNA (1)...(19): siRNA sense strand
ggaauaagguaauugaaca

SEQ ID NO: 1134905 - RNA, 19 nt, Homo sapiens
  misc_RNA (1)...(19): siRNA sense strand
gcaguuggaugaaagagaa

SEQ ID NO: 1134906 - RNA, 19 nt, Homo sapiens
  misc_RNA (1)...(19): siRNA sense strand
caaagaugcuagugauuga

SEQ ID NO: 1134907 - RNA, 19 nt, Homo sapiens
  misc_RNA (1)...(19): siRNA sense strand
gaaacuauguggagaaucg

SEQ ID NO: 1134908 - RNA, 19 nt, Homo sapiens
  misc_RNA (1)...(19): siRNA sense strand
ugaagugugugaaccauaa

SEQ ID NO: 1134909 - RNA, 19 nt, Homo sapiens
  misc_RNA (1)...(19): siRNA sense strand
gaaagaacuuaucuacaag

SEQ ID NO: 1134910 - RNA, 19 nt, Homo sapiens
  misc_RNA (1)...(19): siRNA sense strand
gaaagagaacacacaauug

SEQ ID NO: 1134911 - RNA, 19 nt, Homo sapiens
  misc_RNA (1)...(19): siRNA sense strand
ccaaacacaugccaagaga

SEQ ID NO: 1134912 - RNA, 19 nt, Homo sapiens
  misc_RNA (1)...(19): siRNA sense strand
gaaauugcaacccacagua

SEQ ID NO: 1134913 - RNA, 19 nt, Homo sapiens
  misc_RNA (1)...(19): siRNA sense strand
cauauguggugacacguua

SEQ ID NO: 1134914 - RNA, 19 nt, Homo sapiens
  misc_RNA (1)...(19): siRNA sense strand
ugaaagagaacacacaauu

SEQ ID NO: 1134915 - RNA, 19 nt, Homo sapiens
  misc_RNA (1)...(19): siRNA sense strand
caaguaacauuguagucaa

SEQ ID NO: 1134916 - RNA, 19 nt, Homo sapiens
  misc_RNA (1)...(19): siRNA sense strand
acugauggaugccaacuua

SEQ ID NO: 1134917 - RNA, 19 nt, Homo sapiens
  misc_RNA (1)...(19): siRNA sense strand
agaaaugguucgccacaaa

SEQ ID NO: 1134918 - RNA, 19 nt, Homo sapiens
  misc_RNA (1)...(19): siRNA sense strand
aaagagaacacacaauuga

SEQ ID NO: 1134919 - RNA, 19 nt, Homo sapiens
  misc_RNA (1)...(19): siRNA sense strand
acaaggaaguaaugaauuc

SEQ ID NO: 1134920 - RNA, 19 nt, Homo sapiens
  misc_RNA (1)...(19): siRNA sense strand
ggugacacguuauuacaga

SEQ ID NO: 1134921 - RNA, 19 nt, Homo sapiens
  misc_RNA (1)...(19): siRNA sense strand
gaagaauggaaagaacuua

SEQ ID NO: 1134922 - RNA, 19 nt, Homo sapiens
  misc_RNA (1)...(19): siRNA sense strand
ggaacaccauguccagaau

SEQ ID NO: 1134923 - RNA, 19 nt, Homo sapiens
  misc_RNA (1)...(19): siRNA sense strand
ccagggacuuguugucaaa

SEQ ID NO: 1134924 - RNA, 19 nt, Homo sapiens
  misc_RNA (1)...(19): siRNA sense strand
gcauuaagcaccuccauuc

SEQ ID NO: 1134925 - RNA, 19 nt, Homo sapiens
  misc_RNA (1)...(19): siRNA sense strand
gacaagcaguuggaugaaa

SEQ ID NO: 1134926 - RNA, 19 nt, Homo sapiens
  misc_RNA (1)...(19): siRNA sense strand
guccagaauucaugaagaa

SEQ ID NO: 1134927 - RNA, 19 nt, Homo sapiens
  misc_RNA (1)...(19): siRNA sense strand
gcagugaacagcagugaga

SEQ ID NO: 1134928 - RNA, 19 nt, Homo sapiens
  misc_RNA (1)...(19): siRNA sense strand
caagucugauugcacauug

SEQ ID NO: 1134929 - RNA, 19 nt, Homo sapiens
  misc_RNA (1)...(19): siRNA sense strand
cccaaacucuucccagauu

SEQ ID NO: 1134930 - RNA, 19 nt, Homo sapiens
  misc_RNA (1)...(19): siRNA sense strand
caugaugacuccauaugug

SEQ ID NO: 1134931 - RNA, 19 nt, Homo sapiens
  misc_RNA (1)...(19): siRNA sense strand
gaacaccauguccagaauu

SEQ ID NO: 1134932 - RNA, 19 nt, Homo sapiens
  misc_RNA (1)...(19): siRNA sense strand
gaacacacaauugaagaau

SEQ ID NO: 1134933 - RNA, 19 nt, Homo sapiens
  misc_RNA (1)...(19): siRNA sense strand
gagaaucggcccaaguaug

SEQ ID NO: 1134934 - RNA, 19 nt, Homo sapiens
  misc_RNA (1)...(19): siRNA sense strand
ggacgacgccuuacagcau

SEQ ID NO: 1134935 - RNA, 19 nt, Homo sapiens
  misc_RNA (1)...(19): siRNA sense strand
ggacuccgagcacaauaaa

SEQ ID NO: 1134936 - RNA, 19 nt, Homo sapiens
  misc_RNA (1)...(19): siRNA sense strand
gaugccaacuuaugucaag

SEQ ID NO: 1134937 - RNA, 19 nt, Homo sapiens
  misc_RNA (1)...(19): siRNA sense strand
gagaacacacaauugaaga

SEQ ID NO: 1134938 - RNA, 19 nt, Homo sapiens
  misc_RNA (1)...(19): siRNA sense strand
ucaaagaugcuagugauug

SEQ ID NO: 1134939 - RNA, 19 nt, Homo sapiens
  misc_RNA (1)...(19): siRNA sense strand
ugucaaagaugcuagugau

SEQ ID NO: 1134940 - RNA, 19 nt, Homo sapiens
  misc_RNA (1)...(19): siRNA sense strand
gagaaaugguucgccacaa

SEQ ID NO: 1134941 - RNA, 19 nt, Homo sapiens
  misc_RNA (1)...(19): siRNA sense strand
gaacaacuaggaacaccau

SEQ ID NO: 1134942 - RNA, 19 nt, Homo sapiens
  misc_RNA (1)...(19): siRNA sense strand
acacacaauugaagaaugg

SEQ ID NO: 1134943 - RNA, 19 nt, Homo sapiens
  misc_RNA (1)...(19): siRNA sense strand
ucaaugacaucuccuccau

SEQ ID NO: 1134944 - RNA, 19 nt, Homo sapiens
  misc_RNA (1)...(19): siRNA sense strand
ggaaguaaugaauucagaa

SEQ ID NO: 1134945 - RNA, 19 nt, Homo sapiens
  misc_RNA (1)...(19): siRNA sense strand
ccaggaagggacuauauug

SEQ ID NO: 1134946 - RNA, 19 nt, Homo sapiens
  misc_RNA (1)...(19): siRNA sense strand
gaugaaagagaacacacaa

SEQ ID NO: 1134947 - RNA, 19 nt, Homo sapiens
  misc_RNA (1)...(19): siRNA sense strand
caaggagaacguggauaua

SEQ ID NO: 1134948 - RNA, 19 nt, Homo sapiens
  misc_RNA (1)...(19): siRNA sense strand
gaaguaaugaauucagaag

SEQ ID NO: 1134949 - RNA, 19 nt, Homo sapiens
  misc_RNA (1)...(19): siRNA sense strand
ccaguggaauaagguaauu

SEQ ID NO: 1134950 - RNA, 19 nt, Homo sapiens
  misc_RNA (1)...(19): siRNA sense strand
ggagaacguggauauaugg

SEQ ID NO: 1134951 - RNA, 19 nt, Homo sapiens
  misc_RNA (1)...(19): siRNA sense strand
cgagcacaauaaacucaaa

SEQ ID NO: 1134952 - RNA, 19 nt, Homo sapiens
  misc_RNA (1)...(19): siRNA sense strand
guaauugaacaacuaggaa

SEQ ID NO: 1134953 - RNA, 19 nt, Homo sapiens
  misc_RNA (1)...(19): siRNA sense strand
ccaaguaacauuguaguca

SEQ ID NO: 1134954 - RNA, 19 nt, Homo sapiens
  misc_RNA (1)...(19): siRNA sense strand
ggacagccuucuccuucag

SEQ ID NO: 1134955 - RNA, 19 nt, Homo sapiens
  misc_RNA (1)...(19): siRNA sense strand
uaagaaacuauguggagaa

SEQ ID NO: 1134956 - RNA, 19 nt, Homo sapiens
  misc_RNA (1)...(19): siRNA sense strand
acaaggagaacguggauau

SEQ ID NO: 1134957 - RNA, 19 nt, Homo sapiens
  misc_RNA (1)...(19): siRNA sense strand
gcaggcacaagcuucauga

SEQ ID NO: 1134958 - RNA, 19 nt, Homo sapiens
  misc_RNA (1)...(19): siRNA sense strand
gagcugguccucaugaagu

SEQ ID NO: 1134959 - RNA, 19 nt, Homo sapiens
  misc_RNA (1)...(19): siRNA sense strand
ggacagcaggcacaagcuu

SEQ ID NO: 1134960 - RNA, 19 nt, Homo sapiens
  misc_RNA (1)...(19): siRNA sense strand
cuacaaggaaguaaugaau

SEQ ID NO: 1134961 - RNA, 19 nt, Homo sapiens
  misc_RNA (1)...(19): siRNA sense strand
uggagaaucggcccaagua

SEQ ID NO: 1134962 - RNA, 19 nt, Homo sapiens
  misc_RNA (1)...(19): siRNA sense strand
gauggaugccaacuuaugu

SEQ ID NO: 1134963 - RNA, 19 nt, Homo sapiens
  misc_RNA (1)...(19): siRNA sense strand
ggacuuguugucaaagaug

SEQ ID NO: 1134964 - RNA, 19 nt, Homo sapiens
  misc_RNA (1)...(19): siRNA sense strand
gccagggacuuguugucaa

SEQ ID NO: 1134965 - RNA, 19 nt, Homo sapiens
  misc_RNA (1)...(19): siRNA sense strand
ugucuuaccugcuguacca

SEQ ID NO: 1134966 - RNA, 19 nt, Homo sapiens
  misc_RNA (1)...(19): siRNA sense strand
gaauggaaagaacuuaucu

SEQ ID NO: 1134967 - RNA, 19 nt, Homo sapiens
  misc_RNA (1)...(19): siRNA sense strand
gguaauugaacaacuagga

SEQ ID NO: 1134968 - RNA, 19 nt, Homo sapiens
  misc_RNA (1)...(19): siRNA sense strand
caggaagggacuauauuga

SEQ ID NO: 1134969 - RNA, 19 nt, Homo sapiens
  misc_RNA (1)...(19): siRNA sense strand
aggagaacguggauauaug

SEQ ID NO: 1134970 - RNA, 19 nt, Homo sapiens
  misc_RNA (1)...(19): siRNA sense strand
cagcagacccuuucagaac

SEQ ID NO: 1134971 - RNA, 19 nt, Homo sapiens
  misc_RNA (1)...(19): siRNA sense strand
acaagcaguuggaugaaag

SEQ ID NO: 1134972 - RNA, 19 nt, Homo sapiens
  misc_RNA (1)...(19): siRNA sense strand
gaagcucagcagacccuuu

SEQ ID NO: 1134973 - RNA, 19 nt, Homo sapiens
  misc_RNA (1)...(19): siRNA sense strand
accaugagcgaaugucuua

SEQ ID NO: 1134974 - RNA, 19 nt, Homo sapiens
  misc_RNA (1)...(19): siRNA sense strand
caccucagauauaugacaa

SEQ ID NO: 1134975 - RNA, 19 nt, Homo sapiens
  misc_RNA (1)...(19): siRNA sense strand
gucaagugauucagaugga

SEQ ID NO: 1134976 - RNA, 19 nt, Homo sapiens
  misc_RNA (1)...(19): siRNA sense strand
gcagacccuuucagaacca

SEQ ID NO: 1134977 - RNA, 19 nt, Homo sapiens
  misc_RNA (1)...(19): siRNA sense strand
cuacaucaacgucugguau

SEQ ID NO: 1134978 - RNA, 19 nt, Homo sapiens
  misc_RNA (1)...(19): siRNA sense strand
gggagcugguccucaugaa

SEQ ID NO: 1134979 - RNA, 19 nt, Homo sapiens
  misc_RNA (1)...(19): siRNA sense strand
aaauugcaacccacaguaa

SEQ ID NO: 1134980 - RNA, 19 nt, Homo sapiens
  misc_RNA (1)...(19): siRNA sense strand
gaagugugugaaccauaaa

SEQ ID NO: 1134981 - RNA, 19 nt, Homo sapiens
  misc_RNA (1)...(19): siRNA sense strand
ccaaacucuucccagauuc

SEQ ID NO: 1134982 - RNA, 19 nt, Homo sapiens
  misc_RNA (1)...(19): siRNA sense strand
ucaagugauucagauggaa

SEQ ID NO: 1134983 - RNA, 19 nt, Homo sapiens
  misc_RNA (1)...(19): siRNA sense strand
ccagaauucaugaagaaau

SEQ ID NO: 1134984 - RNA, 19 nt, Homo sapiens
  misc_RNA (1)...(19): siRNA sense strand
ggagaaucggcccaaguau

SEQ ID NO: 1134985 - RNA, 19 nt, Homo sapiens
  misc_RNA (1)...(19): siRNA sense strand
aagaaacuauguggagaau

SEQ ID NO: 1134986 - RNA, 19 nt, Homo sapiens
  misc_RNA (1)...(19): siRNA sense strand
gaaugucuuaccugcugua

SEQ ID NO: 1134987 - RNA, 19 nt, Homo sapiens
  misc_RNA (1)...(19): siRNA sense strand
cauccucgucugucaauga

SEQ ID NO: 1134988 - RNA, 19 nt, Homo sapiens
  misc_RNA (1)...(19): siRNA sense strand
aggaaguaaugaauucaga

SEQ ID NO: 1134989 - RNA, 19 nt, Homo sapiens
  misc_RNA (1)...(19): siRNA sense strand
caacuaggaacaccauguc

SEQ ID NO: 1134990 - RNA, 19 nt, Homo sapiens
  misc_RNA (1)...(19): siRNA sense strand
gaaaugguucgccacaaaa

SEQ ID NO: 1134991 - RNA, 19 nt, Homo sapiens
  misc_RNA (1)...(19): siRNA sense strand
cguaugaugcuguccuuga

SEQ ID NO: 1134992 - RNA, 19 nt, Homo sapiens
  misc_RNA (1)...(19): siRNA sense strand
uaugucaagugauucagau

SEQ ID NO: 1134993 - RNA, 19 nt, Homo sapiens
  misc_RNA (1)...(19): siRNA sense strand
ugaagaauggaaagaacuu

SEQ ID NO: 1134994 - RNA, 19 nt, Homo sapiens
  misc_RNA (1)...(19): siRNA sense strand
ggaugaaagagaacacaca

SEQ ID NO: 1134995 - RNA, 19 nt, Homo sapiens
  misc_RNA (1)...(19): siRNA sense strand
gggacuuguugucaaagau

SEQ ID NO: 1134996 - RNA, 19 nt, Homo sapiens
  misc_RNA (1)...(19): siRNA sense strand
ucugugggaugcauuaugg

SEQ ID NO: 1134997 - RNA, 19 nt, Homo sapiens
  misc_RNA (1)...(19): siRNA sense strand
aagaacuuaucuacaagga

SEQ ID NO: 1134998 - RNA, 19 nt, Homo sapiens
  misc_RNA (1)...(19): siRNA sense strand
gguaugacccagccgaagu

SEQ ID NO: 1134999 - RNA, 19 nt, Homo sapiens
  misc_RNA (1)...(19): siRNA sense strand
ggacucaccuuccccaaac

SEQ ID NO: 1135000 - RNA, 19 nt, Homo sapiens
  misc_RNA (1)...(19): siRNA sense strand
gaccaguggaauaagguaa

SEQ ID NO: 1135001 - RNA, 19 nt, Homo sapiens
  misc_RNA (1)...(19): siRNA sense strand
acaucaacgucugguauga

SEQ ID NO: 1135002 - RNA, 19 nt, Homo sapiens
  misc_RNA (1)...(19): siRNA sense strand
gauauaugacaagcaguug

SEQ ID NO: 1135003 - RNA, 19 nt, Homo sapiens
  misc_RNA (1)...(19): siRNA sense strand
ggaaagaacuuaucuacaa

SEQ ID NO: 1135004 - RNA, 19 nt, Homo sapiens
  misc_RNA (1)...(19): siRNA sense strand
ggaauaagguaauugaaca

SEQ ID NO: 1135005 - RNA, 19 nt, Homo sapiens
  misc_RNA (1)...(19): siRNA sense strand
gcaguuggaugaaagagaa

SEQ ID NO: 1135006 - RNA, 19 nt, Homo sapiens
  misc_RNA (1)...(19): siRNA sense strand
caaagaugcuagugauuga

SEQ ID NO: 1135007 - RNA, 19 nt, Homo sapiens
  misc_RNA (1)...(19): siRNA sense strand
gaaacuauguggagaaucg

SEQ ID NO: 1135008 - RNA, 19 nt, Homo sapiens
  misc_RNA (1)...(19): siRNA sense strand
gaaagagaacacacaauug

SEQ ID NO: 1135009 - RNA, 19 nt, Homo sapiens
  misc_RNA (1)...(19): siRNA sense strand
gaaagaacuuaucuacaag

SEQ ID NO: 1135010 - RNA, 19 nt, Homo sapiens
  misc_RNA (1)...(19): siRNA sense strand
gaaauugcaacccacagua

SEQ ID NO: 1135011 - RNA, 19 nt, Homo sapiens
  misc_RNA (1)...(19): siRNA sense strand
cauauguggugacacguua

SEQ ID NO: 1135012 - RNA, 19 nt, Homo sapiens
  misc_RNA (1)...(19): siRNA sense strand
ugaaagagaacacacaauu

SEQ ID NO: 1135013 - RNA, 19 nt, Homo sapiens
  misc_RNA (1)...(19): siRNA sense strand
caaguaacauuguagucaa

SEQ ID NO: 1135014 - RNA, 19 nt, Homo sapiens
  misc_RNA (1)...(19): siRNA sense strand
agaaaugguucgccacaaa

SEQ ID NO: 1135015 - RNA, 19 nt, Homo sapiens
  misc_RNA (1)...(19): siRNA sense strand
acugauggaugccaacuua

SEQ ID NO: 1135016 - RNA, 19 nt, Homo sapiens
  misc_RNA (1)...(19): siRNA sense strand
aaagagaacacacaauuga

SEQ ID NO: 1135017 - RNA, 19 nt, Homo sapiens
  misc_RNA (1)...(19): siRNA sense strand
acaaggaaguaaugaauuc

SEQ ID NO: 1135018 - RNA, 19 nt, Homo sapiens
  misc_RNA (1)...(19): siRNA sense strand
ggugacacguuauuacaga

SEQ ID NO: 1135019 - RNA, 19 nt, Homo sapiens
  misc_RNA (1)...(19): siRNA sense strand
gaagaauggaaagaacuua

SEQ ID NO: 1135020 - RNA, 19 nt, Homo sapiens
  misc_RNA (1)...(19): siRNA sense strand
ggaacaccauguccagaau

SEQ ID NO: 1135021 - RNA, 19 nt, Homo sapiens
  misc_RNA (1)...(19): siRNA sense strand
ccagggacuuguugucaaa

SEQ ID NO: 1135022 - RNA, 19 nt, Homo sapiens
  misc_RNA (1)...(19): siRNA sense strand
gcauuaagcaccuccauuc

SEQ ID NO: 1135023 - RNA, 19 nt, Homo sapiens
  misc_RNA (1)...(19): siRNA sense strand
gacaagcaguuggaugaaa

SEQ ID NO: 1135024 - RNA, 19 nt, Homo sapiens
  misc_RNA (1)...(19): siRNA sense strand
guccagaauucaugaagaa

SEQ ID NO: 1135025 - RNA, 19 nt, Homo sapiens
  misc_RNA (1)...(19): siRNA sense strand
caagucugauugcacauug

SEQ ID NO: 1135026 - RNA, 19 nt, Homo sapiens
  misc_RNA (1)...(19): siRNA sense strand
cccaaacucuucccagauu

SEQ ID NO: 1135027 - RNA, 19 nt, Homo sapiens
  misc_RNA (1)...(19): siRNA sense strand
caugaugacuccauaugug

SEQ ID NO: 1135028 - RNA, 19 nt, Homo sapiens
  misc_RNA (1)...(19): siRNA sense strand
gaacaccauguccagaauu

SEQ ID NO: 1135029 - RNA, 19 nt, Homo sapiens
  misc_RNA (1)...(19): siRNA sense strand
gaacacacaauugaagaau

SEQ ID NO: 1135030 - RNA, 19 nt, Homo sapiens
  misc_RNA (1)...(19): siRNA sense strand
gagaaucggcccaaguaug

SEQ ID NO: 1135031 - RNA, 19 nt, Homo sapiens
  misc_RNA (1)...(19): siRNA sense strand
ggacgacgccuuacagcau

SEQ ID NO: 1135032 - RNA, 19 nt, Homo sapiens
  misc_RNA (1)...(19): siRNA sense strand
ggacuccgagcacaauaaa

SEQ ID NO: 1135033 - RNA, 19 nt, Homo sapiens
  misc_RNA (1)...(19): siRNA sense strand
ugucaaagaugcuagugau

SEQ ID NO: 1135034 - RNA, 19 nt, Homo sapiens
  misc_RNA (1)...(19): siRNA sense strand
gagaacacacaauugaaga

SEQ ID NO: 1135035 - RNA, 19 nt, Homo sapiens
  misc_RNA (1)...(19): siRNA sense strand
gaugccaacuuaugucaag

SEQ ID NO: 1135036 - RNA, 19 nt, Homo sapiens
  misc_RNA (1)...(19): siRNA sense strand
ucaaagaugcuagugauug

SEQ ID NO: 1135037 - RNA, 19 nt, Homo sapiens
  misc_RNA (1)...(19): siRNA sense strand
gagaaaugguucgccacaa

SEQ ID NO: 1135038 - RNA, 19 nt, Homo sapiens
  misc_RNA (1)...(19): siRNA sense strand
gaacaacuaggaacaccau

SEQ ID NO: 1135039 - RNA, 19 nt, Homo sapiens
  misc_RNA (1)...(19): siRNA sense strand
acacacaauugaagaaugg

SEQ ID NO: 1135040 - RNA, 19 nt, Homo sapiens
  misc_RNA (1)...(19): siRNA sense strand
ggaaguaaugaauucagaa

SEQ ID NO: 1135041 - RNA, 19 nt, Homo sapiens
  misc_RNA (1)...(19): siRNA sense strand
ccaggaagggacuauauug

SEQ ID NO: 1135042 - RNA, 19 nt, Homo sapiens
  misc_RNA (1)...(19): siRNA sense strand
gaugaaagagaacacacaa

SEQ ID NO: 1135043 - RNA, 19 nt, Homo sapiens
  misc_RNA (1)...(19): siRNA sense strand
caaggagaacguggauaua

SEQ ID NO: 1135044 - RNA, 19 nt, Homo sapiens
  misc_RNA (1)...(19): siRNA sense strand
gaaguaaugaauucagaag

SEQ ID NO: 1135045 - RNA, 19 nt, Homo sapiens
  misc_RNA (1)...(19): siRNA sense strand
ccaguggaauaagguaauu

SEQ ID NO: 1135046 - RNA, 19 nt, Homo sapiens
  misc_RNA (1)...(19): siRNA sense strand
ggagaacguggauauaugg

SEQ ID NO: 1135047 - RNA, 19 nt, Homo sapiens
  misc_RNA (1)...(19): siRNA sense strand
cgagcacaauaaacucaaa

SEQ ID NO: 1135048 - RNA, 19 nt, Homo sapiens
  misc_RNA (1)...(19): siRNA sense strand
guaauugaacaacuaggaa

SEQ ID NO: 1135049 - RNA, 19 nt, Homo sapiens
  misc_RNA (1)...(19): siRNA sense strand
ccaaguaacauuguaguca

SEQ ID NO: 1135050 - RNA, 19 nt, Homo sapiens
  misc_RNA (1)...(19): siRNA sense strand
ggacagccuucuccuucag

SEQ ID NO: 1135051 - RNA, 19 nt, Homo sapiens
  misc_RNA (1)...(19): siRNA sense strand
uaagaaacuauguggagaa

SEQ ID NO: 1135052 - RNA, 19 nt, Homo sapiens
  misc_RNA (1)...(19): siRNA sense strand
acaaggagaacguggauau

SEQ ID NO: 1135053 - RNA, 19 nt, Homo sapiens
  misc_RNA (1)...(19): siRNA sense strand
gcaggcacaagcuucauga

SEQ ID NO: 1135054 - RNA, 19 nt, Homo sapiens
  misc_RNA (1)...(19): siRNA sense strand
ggacagcaggcacaagcuu

SEQ ID NO: 1135055 - RNA, 19 nt, Homo sapiens
  misc_RNA (1)...(19): siRNA sense strand
cuacaaggaaguaaugaau

SEQ ID NO: 1135056 - RNA, 19 nt, Homo sapiens
  misc_RNA (1)...(19): siRNA sense strand
uggagaaucggcccaagua

SEQ ID NO: 1135057 - RNA, 19 nt, Homo sapiens
  misc_RNA (1)...(19): siRNA sense strand
gccagggacuuguugucaa

SEQ ID NO: 1135058 - RNA, 19 nt, Homo sapiens
  misc_RNA (1)...(19): siRNA sense strand
gauggaugccaacuuaugu

SEQ ID NO: 1135059 - RNA, 19 nt, Homo sapiens
  misc_RNA (1)...(19): siRNA sense strand
ggacuuguugucaaagaug

SEQ ID NO: 1135060 - RNA, 19 nt, Homo sapiens
  misc_RNA (1)...(19): siRNA sense strand
aggagaacguggauauaug

SEQ ID NO: 1135061 - RNA, 19 nt, Homo sapiens
  misc_RNA (1)...(19): siRNA sense strand
gaauggaaagaacuuaucu

SEQ ID NO: 1135062 - RNA, 19 nt, Homo sapiens
  misc_RNA (1)...(19): siRNA sense strand
ugucuuaccugcuguacca

SEQ ID NO: 1135063 - RNA, 19 nt, Homo sapiens
  misc_RNA (1)...(19): siRNA sense strand
gguaauugaacaacuagga

SEQ ID NO: 1135064 - RNA, 19 nt, Homo sapiens
  misc_RNA (1)...(19): siRNA sense strand
caggaagggacuauauuga

SEQ ID NO: 1135065 - RNA, 19 nt, Homo sapiens
  misc_RNA (1)...(19): siRNA sense strand
acaagcaguuggaugaaag

SEQ ID NO: 1135066 - RNA, 19 nt, Homo sapiens
  misc_RNA (1)...(19): siRNA sense strand
accaugagcgaaugucuua

SEQ ID NO: 1135067 - RNA, 19 nt, Homo sapiens
  misc_RNA (1)...(19): siRNA sense strand
caccucagauauaugacaa

SEQ ID NO: 1135068 - RNA, 19 nt, Homo sapiens
  misc_RNA (1)...(19): siRNA sense strand
aaauugcaacccacaguaa

SEQ ID NO: 1135069 - RNA, 19 nt, Homo sapiens
  misc_RNA (1)...(19): siRNA sense strand
gucaagugauucagaugga

SEQ ID NO: 1135070 - RNA, 19 nt, Homo sapiens
  misc_RNA (1)...(19): siRNA sense strand
cuacaucaacgucugguau

SEQ ID NO: 1135071 - RNA, 19 nt, Homo sapiens
  misc_RNA (1)...(19): siRNA sense strand
ccaaacucuucccagauuc

SEQ ID NO: 1135072 - RNA, 19 nt, Homo sapiens
  misc_RNA (1)...(19): siRNA sense strand
ucaagugauucagauggaa

SEQ ID NO: 1135073 - RNA, 19 nt, Homo sapiens
  misc_RNA (1)...(19): siRNA sense strand
ccagaauucaugaagaaau

SEQ ID NO: 1135074 - RNA, 19 nt, Homo sapiens
  misc_RNA (1)...(19): siRNA sense strand
ggagaaucggcccaaguau

SEQ ID NO: 1135075 - RNA, 19 nt, Homo sapiens
  misc_RNA (1)...(19): siRNA sense strand
aagaaacuauguggagaau

SEQ ID NO: 1135076 - RNA, 19 nt, Homo sapiens
  misc_RNA (1)...(19): siRNA sense strand
gaaaugguucgccacaaaa

SEQ ID NO: 1135077 - RNA, 19 nt, Homo sapiens
  misc_RNA (1)...(19): siRNA sense strand
aggaaguaaugaauucaga

SEQ ID NO: 1135078 - RNA, 19 nt, Homo sapiens
  misc_RNA (1)...(19): siRNA sense strand
gaaugucuuaccugcugua

SEQ ID NO: 1135079 - RNA, 19 nt, Homo sapiens
  misc_RNA (1)...(19): siRNA sense strand
caacuaggaacaccauguc

SEQ ID NO: 1135080 - RNA, 19 nt, Homo sapiens
  misc_RNA (1)...(19): siRNA sense strand
uaugucaagugauucagau

SEQ ID NO: 1135081 - RNA, 19 nt, Homo sapiens
  misc_RNA (1)...(19): siRNA sense strand
ugaagaauggaaagaacuu

SEQ ID NO: 1135082 - RNA, 19 nt, Homo sapiens
  misc_RNA (1)...(19): siRNA sense strand
ggaugaaagagaacacaca

SEQ ID NO: 1135083 - RNA, 19 nt, Homo sapiens
  misc_RNA (1)...(19): siRNA sense strand
gggacuuguugucaaagau

SEQ ID NO: 1135084 - RNA, 19 nt, Homo sapiens
  misc_RNA (1)...(19): siRNA sense strand
ucugugggaugcauuaugg

SEQ ID NO: 1135085 - RNA, 19 nt, Homo sapiens
  misc_RNA (1)...(19): siRNA sense strand
aagaacuuaucuacaagga

SEQ ID NO: 1135086 - RNA, 19 nt, Homo sapiens
  misc_RNA (1)...(19): siRNA sense strand
gguaugacccagccgaagu

SEQ ID NO: 1135087 - RNA, 19 nt, Homo sapiens
  misc_RNA (1)...(19): siRNA sense strand
ggacucaccuuccccaaac

SEQ ID NO: 1135088 - RNA, 19 nt, Homo sapiens
  misc_RNA (1)...(19): siRNA sense strand
gaccaguggaauaagguaa

SEQ ID NO: 1135089 - RNA, 19 nt, Homo sapiens
  misc_RNA (1)...(19): siRNA sense strand
aaggagaacguggauauau

SEQ ID NO: 1135090 - RNA, 19 nt, Homo sapiens
  misc_RNA (1)...(19): siRNA sense strand
gauauaugacaagcaguug

SEQ ID NO: 1135091 - RNA, 19 nt, Homo sapiens
  misc_RNA (1)...(19): siRNA sense strand
acaucaacgucugguauga

SEQ ID NO: 1135092 - RNA, 19 nt, Homo sapiens
  misc_RNA (1)...(19): siRNA sense strand
uguccagaauucaugaaga

SEQ ID NO: 1135093 - RNA, 19 nt, Homo sapiens
  misc_RNA (1)...(19): siRNA sense strand
guaacauuguagucaaguc

SEQ ID NO: 1135094 - RNA, 19 nt, Homo sapiens
  misc_RNA (1)...(19): siRNA sense strand
uaucuacaaggaaguaaug

SEQ ID NO: 1135095 - RNA, 19 nt, Homo sapiens
  misc_RNA (1)...(19): siRNA sense strand
acauuguagucaagucuga

SEQ ID NO: 1135096 - RNA, 19 nt, Homo sapiens
  misc_RNA (1)...(19): siRNA sense strand
ucacagggauuuaaaacca

SEQ ID NO: 1135097 - RNA, 19 nt, Homo sapiens
  misc_RNA (1)...(19): siRNA sense strand
gaccaugagcgaaugucuu

SEQ ID NO: 1135098 - RNA, 19 nt, Homo sapiens
  misc_RNA (1)...(19): siRNA sense strand
guagucaagucugauugca

SEQ ID NO: 1135099 - RNA, 19 nt, Homo sapiens
  misc_RNA (1)...(19): siRNA sense strand
uaccugcuguaccaaaugu

SEQ ID NO: 1135100 - RNA, 19 nt, Homo sapiens
  misc_RNA (1)...(19): siRNA sense strand
ccacaguaagaaacuaugu

SEQ ID NO: 1135101 - RNA, 19 nt, Homo sapiens
  misc_RNA (1)...(19): siRNA sense strand
agauauaugacaagcaguu

SEQ ID NO: 1135102 - RNA, 19 nt, Homo sapiens
  misc_RNA (1)...(19): siRNA sense strand
ugauggaugccaacuuaug

SEQ ID NO: 1135103 - RNA, 19 nt, Homo sapiens
  misc_RNA (1)...(19): siRNA sense strand
ggaaagaacuuaucuacaa

SEQ ID NO: 1135104 - RNA, 19 nt, Homo sapiens
  misc_RNA (1)...(19): siRNA sense strand
ggaauaagguaauugaaca

SEQ ID NO: 1135105 - RNA, 19 nt, Homo sapiens
  misc_RNA (1)...(19): siRNA sense strand
gcaguuggaugaaagagaa

SEQ ID NO: 1135106 - RNA, 19 nt, Homo sapiens
  misc_RNA (1)...(19): siRNA sense strand
caaagaugcuagugauuga

SEQ ID NO: 1135107 - RNA, 19 nt, Homo sapiens
  misc_RNA (1)...(19): siRNA sense strand
gaaacuauguggagaaucg

SEQ ID NO: 1135108 - RNA, 19 nt, Homo sapiens
  misc_RNA (1)...(19): siRNA sense strand
ugaagugugugaaccauaa

SEQ ID NO: 1135109 - RNA, 19 nt, Homo sapiens
  misc_RNA (1)...(19): siRNA sense strand
gaaagaacuuaucuacaag

SEQ ID NO: 1135110 - RNA, 19 nt, Homo sapiens
  misc_RNA (1)...(19): siRNA sense strand
gaaagagaacacacaauug

SEQ ID NO: 1135111 - RNA, 19 nt, Homo sapiens
  misc_RNA (1)...(19): siRNA sense strand
ccaaacacaugccaagaga

SEQ ID NO: 1135112 - RNA, 19 nt, Homo sapiens
  misc_RNA (1)...(19): siRNA sense strand
gaaauugcaacccacagua

SEQ ID NO: 1135113 - RNA, 19 nt, Homo sapiens
  misc_RNA (1)...(19): siRNA sense strand
cauauguggugacacguua

SEQ ID NO: 1135114 - RNA, 19 nt, Homo sapiens
  misc_RNA (1)...(19): siRNA sense strand
ugaaagagaacacacaauu

SEQ ID NO: 1135115 - RNA, 19 nt, Homo sapiens
  misc_RNA (1)...(19): siRNA sense strand
caaguaacauuguagucaa

SEQ ID NO: 1135116 - RNA, 19 nt, Homo sapiens
  misc_RNA (1)...(19): siRNA sense strand
acugauggaugccaacuua

SEQ ID NO: 1135117 - RNA, 19 nt, Homo sapiens
  misc_RNA (1)...(19): siRNA sense strand
agaaaugguucgccacaaa

SEQ ID NO: 1135118 - RNA, 19 nt, Homo sapiens
  misc_RNA (1)...(19): siRNA sense strand
aaagagaacacacaauuga

SEQ ID NO: 1135119 - RNA, 19 nt, Homo sapiens
  misc_RNA (1)...(19): siRNA sense strand
acaaggaaguaaugaauuc

SEQ ID NO: 1135120 - RNA, 19 nt, Homo sapiens
  misc_RNA (1)...(19): siRNA sense strand
ggugacacguuauuacaga

SEQ ID NO: 1135121 - RNA, 19 nt, Homo sapiens
  misc_RNA (1)...(19): siRNA sense strand
gaagaauggaaagaacuua

SEQ ID NO: 1135122 - RNA, 19 nt, Homo sapiens
  misc_RNA (1)...(19): siRNA sense strand
ggaacaccauguccagaau

SEQ ID NO: 1135123 - RNA, 19 nt, Homo sapiens
  misc_RNA (1)...(19): siRNA sense strand
ccagggacuuguugucaaa

SEQ ID NO: 1135124 - RNA, 19 nt, Homo sapiens
  misc_RNA (1)...(19): siRNA sense strand
gcauuaagcaccuccauuc

SEQ ID NO: 1135125 - RNA, 19 nt, Homo sapiens
  misc_RNA (1)...(19): siRNA sense strand
gacaagcaguuggaugaaa

SEQ ID NO: 1135126 - RNA, 19 nt, Homo sapiens
  misc_RNA (1)...(19): siRNA sense strand
guccagaauucaugaagaa

SEQ ID NO: 1135127 - RNA, 19 nt, Homo sapiens
  misc_RNA (1)...(19): siRNA sense strand
gcagugaacagcagugaga

SEQ ID NO: 1135128 - RNA, 19 nt, Homo sapiens
  misc_RNA (1)...(19): siRNA sense strand
caagucugauugcacauug

SEQ ID NO: 1135129 - RNA, 19 nt, Homo sapiens
  misc_RNA (1)...(19): siRNA sense strand
cccaaacucuucccagauu

SEQ ID NO: 1135130 - RNA, 19 nt, Homo sapiens
  misc_RNA (1)...(19): siRNA sense strand
caugaugacuccauaugug

SEQ ID NO: 1135131 - RNA, 19 nt, Homo sapiens
  misc_RNA (1)...(19): siRNA sense strand
gaacaccauguccagaauu

SEQ ID NO: 1135132 - RNA, 19 nt, Homo sapiens
  misc_RNA (1)...(19): siRNA sense strand
gaacacacaauugaagaau

SEQ ID NO: 1135133 - RNA, 19 nt, Homo sapiens
  misc_RNA (1)...(19): siRNA sense strand
gagaaucggcccaaguaug

SEQ ID NO: 1135134 - RNA, 19 nt, Homo sapiens
  misc_RNA (1)...(19): siRNA sense strand
ggacgacgccuuacagcau

SEQ ID NO: 1135135 - RNA, 19 nt, Homo sapiens
  misc_RNA (1)...(19): siRNA sense strand
ggacuccgagcacaauaaa

SEQ ID NO: 1135136 - RNA, 19 nt, Homo sapiens
  misc_RNA (1)...(19): siRNA sense strand
gaugccaacuuaugucaag

SEQ ID NO: 1135137 - RNA, 19 nt, Homo sapiens
  misc_RNA (1)...(19): siRNA sense strand
gagaacacacaauugaaga

SEQ ID NO: 1135138 - RNA, 19 nt, Homo sapiens
  misc_RNA (1)...(19): siRNA sense strand
ucaaagaugcuagugauug

SEQ ID NO: 1135139 - RNA, 19 nt, Homo sapiens
  misc_RNA (1)...(19): siRNA sense strand
ugucaaagaugcuagugau

SEQ ID NO: 1135140 - RNA, 19 nt, Homo sapiens
  misc_RNA (1)...(19): siRNA sense strand
gagaaaugguucgccacaa

SEQ ID NO: 1135141 - RNA, 19 nt, Homo sapiens
  misc_RNA (1)...(19): siRNA sense strand
gaacaacuaggaacaccau

SEQ ID NO: 1135142 - RNA, 19 nt, Homo sapiens
  misc_RNA (1)...(19): siRNA sense strand
acacacaauugaagaaugg

SEQ ID NO: 1135143 - RNA, 19 nt, Homo sapiens
  misc_RNA (1)...(19): siRNA sense strand
ucaaugacaucuccuccau

SEQ ID NO: 1135144 - RNA, 19 nt, Homo sapiens
  misc_RNA (1)...(19): siRNA sense strand
ggaaguaaugaauucagaa

SEQ ID NO: 1135145 - RNA, 19 nt, Homo sapiens
  misc_RNA (1)...(19): siRNA sense strand
ccaggaagggacuauauug

SEQ ID NO: 1135146 - RNA, 19 nt, Homo sapiens
  misc_RNA (1)...(19): siRNA sense strand
gaugaaagagaacacacaa

SEQ ID NO: 1135147 - RNA, 19 nt, Homo sapiens
  misc_RNA (1)...(19): siRNA sense strand
caaggagaacguggauaua

SEQ ID NO: 1135148 - RNA, 19 nt, Homo sapiens
  misc_RNA (1)...(19): siRNA sense strand
gaaguaaugaauucagaag

SEQ ID NO: 1135149 - RNA, 19 nt, Homo sapiens
  misc_RNA (1)...(19): siRNA sense strand
ccaguggaauaagguaauu

SEQ ID NO: 1135150 - RNA, 19 nt, Homo sapiens
  misc_RNA (1)...(19): siRNA sense strand
ggagaacguggauauaugg

SEQ ID NO: 1135151 - RNA, 19 nt, Homo sapiens
  misc_RNA (1)...(19): siRNA sense strand
cgagcacaauaaacucaaa

SEQ ID NO: 1135152 - RNA, 19 nt, Homo sapiens
  misc_RNA (1)...(19): siRNA sense strand
guaauugaacaacuaggaa

SEQ ID NO: 1135153 - RNA, 19 nt, Homo sapiens
  misc_RNA (1)...(19): siRNA sense strand
ccaaguaacauuguaguca

SEQ ID NO: 1135154 - RNA, 19 nt, Homo sapiens
  misc_RNA (1)...(19): siRNA sense strand
ggacagccuucuccuucag

SEQ ID NO: 1135155 - RNA, 19 nt, Homo sapiens
  misc_RNA (1)...(19): siRNA sense strand
uaagaaacuauguggagaa

SEQ ID NO: 1135156 - RNA, 19 nt, Homo sapiens
  misc_RNA (1)...(19): siRNA sense strand
acaaggagaacguggauau

SEQ ID NO: 1135157 - RNA, 19 nt, Homo sapiens
  misc_RNA (1)...(19): siRNA sense strand
gcaggcacaagcuucauga

SEQ ID NO: 1135158 - RNA, 19 nt, Homo sapiens
  misc_RNA (1)...(19): siRNA sense strand
gagcugguccucaugaagu

SEQ ID NO: 1135159 - RNA, 19 nt, Homo sapiens
  misc_RNA (1)...(19): siRNA sense strand
ggacagcaggcacaagcuu

SEQ ID NO: 1135160 - RNA, 19 nt, Homo sapiens
  misc_RNA (1)...(19): siRNA sense strand
cuacaaggaaguaaugaau

SEQ ID NO: 1135161 - RNA, 19 nt, Homo sapiens
  misc_RNA (1)...(19): siRNA sense strand
uggagaaucggcccaagua

SEQ ID NO: 1135162 - RNA, 19 nt, Homo sapiens
  misc_RNA (1)...(19): siRNA sense strand
gauggaugccaacuuaugu

SEQ ID NO: 1135163 - RNA, 19 nt, Homo sapiens
  misc_RNA (1)...(19): siRNA sense strand
ggacuuguugucaaagaug

SEQ ID NO: 1135164 - RNA, 19 nt, Homo sapiens
  misc_RNA (1)...(19): siRNA sense strand
gccagggacuuguugucaa

SEQ ID NO: 1135165 - RNA, 19 nt, Homo sapiens
  misc_RNA (1)...(19): siRNA sense strand
ugucuuaccugcuguacca

SEQ ID NO: 1135166 - RNA, 19 nt, Homo sapiens
  misc_RNA (1)...(19): siRNA sense strand
gaauggaaagaacuuaucu

SEQ ID NO: 1135167 - RNA, 19 nt, Homo sapiens
  misc_RNA (1)...(19): siRNA sense strand
gguaauugaacaacuagga

SEQ ID NO: 1135168 - RNA, 19 nt, Homo sapiens
  misc_RNA (1)...(19): siRNA sense strand
caggaagggacuauauuga

SEQ ID NO: 1135169 - RNA, 19 nt, Homo sapiens
  misc_RNA (1)...(19): siRNA sense strand
aggagaacguggauauaug

SEQ ID NO: 1135170 - RNA, 19 nt, Homo sapiens
  misc_RNA (1)...(19): siRNA sense strand
cagcagacccuuucagaac

SEQ ID NO: 1135171 - RNA, 19 nt, Homo sapiens
  misc_RNA (1)...(19): siRNA sense strand
acaagcaguuggaugaaag

SEQ ID NO: 1135172 - RNA, 19 nt, Homo sapiens
  misc_RNA (1)...(19): siRNA sense strand
gaagcucagcagacccuuu

SEQ ID NO: 1135173 - RNA, 19 nt, Homo sapiens
  misc_RNA (1)...(19): siRNA sense strand
accaugagcgaaugucuua

SEQ ID NO: 1135174 - RNA, 19 nt, Homo sapiens
  misc_RNA (1)...(19): siRNA sense strand
caccucagauauaugacaa

SEQ ID NO: 1135175 - RNA, 19 nt, Homo sapiens
  misc_RNA (1)...(19): siRNA sense strand
gucaagugauucagaugga

SEQ ID NO: 1135176 - RNA, 19 nt, Homo sapiens
  misc_RNA (1)...(19): siRNA sense strand
gcagacccuuucagaacca

SEQ ID NO: 1135177 - RNA, 19 nt, Homo sapiens
  misc_RNA (1)...(19): siRNA sense strand
cuacaucaacgucugguau

SEQ ID NO: 1135178 - RNA, 19 nt, Homo sapiens
  misc_RNA (1)...(19): siRNA sense strand
gggagcugguccucaugaa

SEQ ID NO: 1135179 - RNA, 19 nt, Homo sapiens
  misc_RNA (1)...(19): siRNA sense strand
aaauugcaacccacaguaa

SEQ ID NO: 1135180 - RNA, 19 nt, Homo sapiens
  misc_RNA (1)...(19): siRNA sense strand
gaagugugugaaccauaaa

SEQ ID NO: 1135181 - RNA, 19 nt, Homo sapiens
  misc_RNA (1)...(19): siRNA sense strand
ccaaacucuucccagauuc

SEQ ID NO: 1135182 - RNA, 19 nt, Homo sapiens
  misc_RNA (1)...(19): siRNA sense strand
ucaagugauucagauggaa

SEQ ID NO: 1135183 - RNA, 19 nt, Homo sapiens
  misc_RNA (1)...(19): siRNA sense strand
ccagaauucaugaagaaau

SEQ ID NO: 1135184 - RNA, 19 nt, Homo sapiens
  misc_RNA (1)...(19): siRNA sense strand
ggagaaucggcccaaguau

SEQ ID NO: 1135185 - RNA, 19 nt, Homo sapiens
  misc_RNA (1)...(19): siRNA sense strand
aagaaacuauguggagaau

SEQ ID NO: 1135186 - RNA, 19 nt, Homo sapiens
  misc_RNA (1)...(19): siRNA sense strand
gaaugucuuaccugcugua

SEQ ID NO: 1135187 - RNA, 19 nt, Homo sapiens
  misc_RNA (1)...(19): siRNA sense strand
cauccucgucugucaauga

SEQ ID NO: 1135188 - RNA, 19 nt, Homo sapiens
  misc_RNA (1)...(19): siRNA sense strand
aggaaguaaugaauucaga

SEQ ID NO: 1135189 - RNA, 19 nt, Homo sapiens
  misc_RNA (1)...(19): siRNA sense strand
caacuaggaacaccauguc

SEQ ID NO: 1135190 - RNA, 19 nt, Homo sapiens
  misc_RNA (1)...(19): siRNA sense strand
gaaaugguucgccacaaaa

SEQ ID NO: 1135191 - RNA, 19 nt, Homo sapiens
  misc_RNA (1)...(19): siRNA sense strand
cguaugaugcuguccuuga

SEQ ID NO: 1135192 - RNA, 19 nt, Homo sapiens
  misc_RNA (1)...(19): siRNA sense strand
uaugucaagugauucagau

SEQ ID NO: 1135193 - RNA, 19 nt, Homo sapiens
  misc_RNA (1)...(19): siRNA sense strand
ugaagaauggaaagaacuu

SEQ ID NO: 1135194 - RNA, 19 nt, Homo sapiens
  misc_RNA (1)...(19): siRNA sense strand
ggaugaaagagaacacaca

SEQ ID NO: 1135195 - RNA, 19 nt, Homo sapiens
  misc_RNA (1)...(19): siRNA sense strand
gggacuuguugucaaagau

SEQ ID NO: 1135196 - RNA, 19 nt, Homo sapiens
  misc_RNA (1)...(19): siRNA sense strand
ucugugggaugcauuaugg

SEQ ID NO: 1135197 - RNA, 19 nt, Homo sapiens
  misc_RNA (1)...(19): siRNA sense strand
aagaacuuaucuacaagga

SEQ ID NO: 1135198 - RNA, 19 nt, Homo sapiens
  misc_RNA (1)...(19): siRNA sense strand
gguaugacccagccgaagu

SEQ ID NO: 1135199 - RNA, 19 nt, Homo sapiens
  misc_RNA (1)...(19): siRNA sense strand
ggacucaccuuccccaaac

SEQ ID NO: 1135200 - RNA, 19 nt, Homo sapiens
  misc_RNA (1)...(19): siRNA sense strand
gaccaguggaauaagguaa

SEQ ID NO: 1135201 - RNA, 19 nt, Homo sapiens
  misc_RNA (1)...(19): siRNA sense strand
acaucaacgucugguauga

SEQ ID NO: 1135202 - RNA, 19 nt, Homo sapiens
  misc_RNA (1)...(19): siRNA sense strand
gauauaugacaagcaguug

SEQ ID NO: 1135203 - RNA, 19 nt, Homo sapiens
  misc_RNA (1)...(19): siRNA sense strand
gaaccaaguuuguauaaag

SEQ ID NO: 1135204 - RNA, 19 nt, Homo sapiens
  misc_RNA (1)...(19): siRNA sense strand
gggauuaaauggaauggaa

SEQ ID NO: 1135205 - RNA, 19 nt, Homo sapiens
  misc_RNA (1)...(19): siRNA sense strand
ggucagacaucgcuggaaa

SEQ ID NO: 1135206 - RNA, 19 nt, Homo sapiens
  misc_RNA (1)...(19): siRNA sense strand
gggaagaccucgucaccau

SEQ ID NO: 1135207 - RNA, 19 nt, Homo sapiens
  misc_RNA (1)...(19): siRNA sense strand
cccaaaggcuucaauacuu

SEQ ID NO: 1135208 - RNA, 19 nt, Homo sapiens
  misc_RNA (1)...(19): siRNA sense strand
gaauugaaccaaguuugua

SEQ ID NO: 1135209 - RNA, 19 nt, Homo sapiens
  misc_RNA (1)...(19): siRNA sense strand
ccaaaggcuucaauacuuc

SEQ ID NO: 1135210 - RNA, 19 nt, Homo sapiens
  misc_RNA (1)...(19): siRNA sense strand
caacggagguagucuuguc

SEQ ID NO: 1135211 - RNA, 19 nt, Homo sapiens
  misc_RNA (1)...(19): siRNA sense strand
ggaauugaaccaaguuugu

SEQ ID NO: 1135212 - RNA, 19 nt, Homo sapiens
  misc_RNA (1)...(19): siRNA sense strand
uaaaggagacaucugguau

SEQ ID NO: 1135213 - RNA, 19 nt, Homo sapiens
  misc_RNA (1)...(19): siRNA sense strand
cuacauagacacguacuuu

SEQ ID NO: 1135214 - RNA, 19 nt, Homo sapiens
  misc_RNA (1)...(19): siRNA sense strand
ggauguagccagcaacugu

SEQ ID NO: 1135215 - RNA, 19 nt, Homo sapiens
  misc_RNA (1)...(19): siRNA sense strand
acacguacuuugacacaga

SEQ ID NO: 1135216 - RNA, 19 nt, Homo sapiens
  misc_RNA (1)...(19): siRNA sense strand
acagagaggucuagcacau

SEQ ID NO: 1135217 - RNA, 19 nt, Homo sapiens
  misc_RNA (1)...(19): siRNA sense strand
acccugaggucgucaauga

SEQ ID NO: 1135218 - RNA, 19 nt, Homo sapiens
  misc_RNA (1)...(19): siRNA sense strand
guacuaccagauagaaauu

SEQ ID NO: 1135219 - RNA, 19 nt, Homo sapiens
  misc_RNA (1)...(19): siRNA sense strand
ugucuuggguggaauugaa

SEQ ID NO: 1135220 - RNA, 19 nt, Homo sapiens
  misc_RNA (1)...(19): siRNA sense strand
gcugcagugucugaaauuu

SEQ ID NO: 1135221 - RNA, 19 nt, Homo sapiens
  misc_RNA (1)...(19): siRNA sense strand
aaaggagacaucugguaua

SEQ ID NO: 1135222 - RNA, 19 nt, Homo sapiens
  misc_RNA (1)...(19): siRNA sense strand
gaauacuuggccuagcuua

SEQ ID NO: 1135223 - RNA, 19 nt, Homo sapiens
  misc_RNA (1)...(19): siRNA sense strand
gagaguauaacgcagacaa

SEQ ID NO: 1135224 - RNA, 19 nt, Homo sapiens
  misc_RNA (1)...(19): siRNA sense strand
caacuucuuggccauggua

SEQ ID NO: 1135225 - RNA, 19 nt, Homo sapiens
  misc_RNA (1)...(19): siRNA sense strand
gugcugcagugucugaaau

SEQ ID NO: 1135226 - RNA, 19 nt, Homo sapiens
  misc_RNA (1)...(19): siRNA sense strand
acauagacacguacuuuga

SEQ ID NO: 1135227 - RNA, 19 nt, Homo sapiens
  misc_RNA (1)...(19): siRNA sense strand
cagaggauguagccagcaa

SEQ ID NO: 1135228 - RNA, 19 nt, Homo sapiens
  misc_RNA (1)...(19): siRNA sense strand
gaagcuacagauucucguu

SEQ ID NO: 1135229 - RNA, 19 nt, Homo sapiens
  misc_RNA (1)...(19): siRNA sense strand
caagggcuuugacgucaca

SEQ ID NO: 1135230 - RNA, 19 nt, Homo sapiens
  misc_RNA (1)...(19): siRNA sense strand
gcuacuaccuggagaugcu

SEQ ID NO: 1135231 - RNA, 19 nt, Homo sapiens
  misc_RNA (1)...(19): siRNA sense strand
ugucaacauugccacuauu

SEQ ID NO: 1135232 - RNA, 19 nt, Homo sapiens
  misc_RNA (1)...(19): siRNA sense strand
agagaggucuagcacauac

SEQ ID NO: 1135233 - RNA, 19 nt, Homo sapiens
  misc_RNA (1)...(19): siRNA sense strand
ccgcagaagcuacagauuc

SEQ ID NO: 1135234 - RNA, 19 nt, Homo sapiens
  misc_RNA (1)...(19): siRNA sense strand
ugccugggauuaaauggaa

SEQ ID NO: 1135235 - RNA, 19 nt, Homo sapiens
  misc_RNA (1)...(19): siRNA sense strand
gagccauccuccuugucuu

SEQ ID NO: 1135236 - RNA, 19 nt, Homo sapiens
  misc_RNA (1)...(19): siRNA sense strand
cagagaggucuagcacaua

SEQ ID NO: 1135237 - RNA, 19 nt, Homo sapiens
  misc_RNA (1)...(19): siRNA sense strand
cggagguagucuugucuug

SEQ ID NO: 1135238 - RNA, 19 nt, Homo sapiens
  misc_RNA (1)...(19): siRNA sense strand
gucaacauugccacuauuu

SEQ ID NO: 1135239 - RNA, 19 nt, Homo sapiens
  misc_RNA (1)...(19): siRNA sense strand
cauccuccuugucuuaauc

SEQ ID NO: 1135240 - RNA, 19 nt, Homo sapiens
  misc_RNA (1)...(19): siRNA sense strand
acuccuacauagacacgua

SEQ ID NO: 1135241 - RNA, 19 nt, Homo sapiens
  misc_RNA (1)...(19): siRNA sense strand
auaaaggagacaucuggua

SEQ ID NO: 1135242 - RNA, 19 nt, Homo sapiens
  misc_RNA (1)...(19): siRNA sense strand
acagugaaguacacacaag

SEQ ID NO: 1135243 - RNA, 19 nt, Homo sapiens
  misc_RNA (1)...(19): siRNA sense strand
aaggagacaucugguauac

SEQ ID NO: 1135244 - RNA, 19 nt, Homo sapiens
  misc_RNA (1)...(19): siRNA sense strand
ggaauacuuggccuagcuu

SEQ ID NO: 1135245 - RNA, 19 nt, Homo sapiens
  misc_RNA (1)...(19): siRNA sense strand
gccaagccaucaaguucuc

SEQ ID NO: 1135246 - RNA, 19 nt, Homo sapiens
  misc_RNA (1)...(19): siRNA sense strand
ggauuaaauggaauggaau

SEQ ID NO: 1135247 - RNA, 19 nt, Homo sapiens
  misc_RNA (1)...(19): siRNA sense strand
ggguggaauugaaccaagu

SEQ ID NO: 1135248 - RNA, 19 nt, Homo sapiens
  misc_RNA (1)...(19): siRNA sense strand
gugaaguacacacaaggaa

SEQ ID NO: 1135249 - RNA, 19 nt, Homo sapiens
  misc_RNA (1)...(19): siRNA sense strand
ucagacaucgcuggaaaug

SEQ ID NO: 1135250 - RNA, 19 nt, Homo sapiens
  misc_RNA (1)...(19): siRNA sense strand
cuauuaaggaagaguggua

SEQ ID NO: 1135251 - RNA, 19 nt, Homo sapiens
  misc_RNA (1)...(19): siRNA sense strand
aaauggaauggaauacuug

SEQ ID NO: 1135252 - RNA, 19 nt, Homo sapiens
  misc_RNA (1)...(19): siRNA sense strand
cugaggucgucaaugauga

SEQ ID NO: 1135253 - RNA, 19 nt, Homo sapiens
  misc_RNA (1)...(19): siRNA sense strand
agucuugucuuggguggaa

SEQ ID NO: 1135254 - RNA, 19 nt, Homo sapiens
  misc_RNA (1)...(19): siRNA sense strand
gaccaacggagguagucuu

SEQ ID NO: 1135255 - RNA, 19 nt, Homo sapiens
  misc_RNA (1)...(19): siRNA sense strand
uuaaggaagagugguacua

SEQ ID NO: 1135256 - RNA, 19 nt, Homo sapiens
  misc_RNA (1)...(19): siRNA sense strand
ucaaugaugaguccucucu

SEQ ID NO: 1135257 - RNA, 19 nt, Homo sapiens
  misc_RNA (1)...(19): siRNA sense strand
uggaauacuuggccuagcu

SEQ ID NO: 1135258 - RNA, 19 nt, Homo sapiens
  misc_RNA (1)...(19): siRNA sense strand
aaccaaguuuguauaaagg

SEQ ID NO: 1135259 - RNA, 19 nt, Homo sapiens
  misc_RNA (1)...(19): siRNA sense strand
auacuuggccuagcuuaug

SEQ ID NO: 1135260 - RNA, 19 nt, Homo sapiens
  misc_RNA (1)...(19): siRNA sense strand
auagacacguacuuugaca

SEQ ID NO: 1135261 - RNA, 19 nt, Homo sapiens
  misc_RNA (1)...(19): siRNA sense strand
uaaggaagagugguacuac

SEQ ID NO: 1135262 - RNA, 19 nt, Homo sapiens
  misc_RNA (1)...(19): siRNA sense strand
gaaccaaguuuguauaaag

SEQ ID NO: 1135263 - RNA, 19 nt, Homo sapiens
  misc_RNA (1)...(19): siRNA sense strand
gggauuaaauggaauggaa

SEQ ID NO: 1135264 - RNA, 19 nt, Homo sapiens
  misc_RNA (1)...(19): siRNA sense strand
ggucagacaucgcuggaaa

SEQ ID NO: 1135265 - RNA, 19 nt, Homo sapiens
  misc_RNA (1)...(19): siRNA sense strand
gggaagaccucgucaccau

SEQ ID NO: 1135266 - RNA, 19 nt, Homo sapiens
  misc_RNA (1)...(19): siRNA sense strand
cccaaaggcuucaauacuu

SEQ ID NO: 1135267 - RNA, 19 nt, Homo sapiens
  misc_RNA (1)...(19): siRNA sense strand
gaauugaaccaaguuugua

SEQ ID NO: 1135268 - RNA, 19 nt, Homo sapiens
  misc_RNA (1)...(19): siRNA sense strand
ccaaaggcuucaauacuuc

SEQ ID NO: 1135269 - RNA, 19 nt, Homo sapiens
  misc_RNA (1)...(19): siRNA sense strand
caacggagguagucuuguc

SEQ ID NO: 1135270 - RNA, 19 nt, Homo sapiens
  misc_RNA (1)...(19): siRNA sense strand
ggaauugaaccaaguuugu

SEQ ID NO: 1135271 - RNA, 19 nt, Homo sapiens
  misc_RNA (1)...(19): siRNA sense strand
uaaaggagacaucugguau

SEQ ID NO: 1135272 - RNA, 19 nt, Homo sapiens
  misc_RNA (1)...(19): siRNA sense strand
cuacauagacacguacuuu

SEQ ID NO: 1135273 - RNA, 19 nt, Homo sapiens
  misc_RNA (1)...(19): siRNA sense strand
ggauguagccagcaacugu

SEQ ID NO: 1135274 - RNA, 19 nt, Homo sapiens
  misc_RNA (1)...(19): siRNA sense strand
acacguacuuugacacaga

SEQ ID NO: 1135275 - RNA, 19 nt, Homo sapiens
  misc_RNA (1)...(19): siRNA sense strand
acagagaggucuagcacau

SEQ ID NO: 1135276 - RNA, 19 nt, Homo sapiens
  misc_RNA (1)...(19): siRNA sense strand
acccugaggucgucaauga

SEQ ID NO: 1135277 - RNA, 19 nt, Homo sapiens
  misc_RNA (1)...(19): siRNA sense strand
guacuaccagauagaaauu

SEQ ID NO: 1135278 - RNA, 19 nt, Homo sapiens
  misc_RNA (1)...(19): siRNA sense strand
ugucuuggguggaauugaa

SEQ ID NO: 1135279 - RNA, 19 nt, Homo sapiens
  misc_RNA (1)...(19): siRNA sense strand
gcugcagugucugaaauuu

SEQ ID NO: 1135280 - RNA, 19 nt, Homo sapiens
  misc_RNA (1)...(19): siRNA sense strand
aaaggagacaucugguaua

SEQ ID NO: 1135281 - RNA, 19 nt, Homo sapiens
  misc_RNA (1)...(19): siRNA sense strand
gaauacuuggccuagcuua

SEQ ID NO: 1135282 - RNA, 19 nt, Homo sapiens
  misc_RNA (1)...(19): siRNA sense strand
gagaguauaacgcagacaa

SEQ ID NO: 1135283 - RNA, 19 nt, Homo sapiens
  misc_RNA (1)...(19): siRNA sense strand
caacuucuuggccauggua

SEQ ID NO: 1135284 - RNA, 19 nt, Homo sapiens
  misc_RNA (1)...(19): siRNA sense strand
gugcugcagugucugaaau

SEQ ID NO: 1135285 - RNA, 19 nt, Homo sapiens
  misc_RNA (1)...(19): siRNA sense strand
acauagacacguacuuuga

SEQ ID NO: 1135286 - RNA, 19 nt, Homo sapiens
  misc_RNA (1)...(19): siRNA sense strand
cagaggauguagccagcaa

SEQ ID NO: 1135287 - RNA, 19 nt, Homo sapiens
  misc_RNA (1)...(19): siRNA sense strand
gaagcuacagauucucguu

SEQ ID NO: 1135288 - RNA, 19 nt, Homo sapiens
  misc_RNA (1)...(19): siRNA sense strand
caagggcuuugacgucaca

SEQ ID NO: 1135289 - RNA, 19 nt, Homo sapiens
  misc_RNA (1)...(19): siRNA sense strand
gcuacuaccuggagaugcu

SEQ ID NO: 1135290 - RNA, 19 nt, Homo sapiens
  misc_RNA (1)...(19): siRNA sense strand
ugucaacauugccacuauu

SEQ ID NO: 1135291 - RNA, 19 nt, Homo sapiens
  misc_RNA (1)...(19): siRNA sense strand
agagaggucuagcacauac

SEQ ID NO: 1135292 - RNA, 19 nt, Homo sapiens
  misc_RNA (1)...(19): siRNA sense strand
ccgcagaagcuacagauuc

SEQ ID NO: 1135293 - RNA, 19 nt, Homo sapiens
  misc_RNA (1)...(19): siRNA sense strand
ugccugggauuaaauggaa

SEQ ID NO: 1135294 - RNA, 19 nt, Homo sapiens
  misc_RNA (1)...(19): siRNA sense strand
gagccauccuccuugucuu

SEQ ID NO: 1135295 - RNA, 19 nt, Homo sapiens
  misc_RNA (1)...(19): siRNA sense strand
cagagaggucuagcacaua

SEQ ID NO: 1135296 - RNA, 19 nt, Homo sapiens
  misc_RNA (1)...(19): siRNA sense strand
cggagguagucuugucuug

SEQ ID NO: 1135297 - RNA, 19 nt, Homo sapiens
  misc_RNA (1)...(19): siRNA sense strand
gucaacauugccacuauuu

SEQ ID NO: 1135298 - RNA, 19 nt, Homo sapiens
  misc_RNA (1)...(19): siRNA sense strand
cauccuccuugucuuaauc

SEQ ID NO: 1135299 - RNA, 19 nt, Homo sapiens
  misc_RNA (1)...(19): siRNA sense strand
acuccuacauagacacgua

SEQ ID NO: 1135300 - RNA, 19 nt, Homo sapiens
  misc_RNA (1)...(19): siRNA sense strand
auaaaggagacaucuggua

SEQ ID NO: 1135301 - RNA, 19 nt, Homo sapiens
  misc_RNA (1)...(19): siRNA sense strand
acagugaaguacacacaag

SEQ ID NO: 1135302 - RNA, 19 nt, Homo sapiens
  misc_RNA (1)...(19): siRNA sense strand
aaggagacaucugguauac

SEQ ID NO: 1135303 - RNA, 19 nt, Homo sapiens
  misc_RNA (1)...(19): siRNA sense strand
ggaauacuuggccuagcuu

SEQ ID NO: 1135304 - RNA, 19 nt, Homo sapiens
  misc_RNA (1)...(19): siRNA sense strand
gccaagccaucaaguucuc

SEQ ID NO: 1135305 - RNA, 19 nt, Homo sapiens
  misc_RNA (1)...(19): siRNA sense strand
ggauuaaauggaauggaau

SEQ ID NO: 1135306 - RNA, 19 nt, Homo sapiens
  misc_RNA (1)...(19): siRNA sense strand
ggguggaauugaaccaagu

SEQ ID NO: 1135307 - RNA, 19 nt, Homo sapiens
  misc_RNA (1)...(19): siRNA sense strand
gugaaguacacacaaggaa

SEQ ID NO: 1135308 - RNA, 19 nt, Homo sapiens
  misc_RNA (1)...(19): siRNA sense strand
ucagacaucgcuggaaaug

SEQ ID NO: 1135309 - RNA, 19 nt, Homo sapiens
  misc_RNA (1)...(19): siRNA sense strand
cuauuaaggaagaguggua

SEQ ID NO: 1135310 - RNA, 19 nt, Homo sapiens
  misc_RNA (1)...(19): siRNA sense strand
aaauggaauggaauacuug

SEQ ID NO: 1135311 - RNA, 19 nt, Homo sapiens
  misc_RNA (1)...(19): siRNA sense strand
cugaggucgucaaugauga

SEQ ID NO: 1135312 - RNA, 19 nt, Homo sapiens
  misc_RNA (1)...(19): siRNA sense strand
agucuugucuuggguggaa

SEQ ID NO: 1135313 - RNA, 19 nt, Homo sapiens
  misc_RNA (1)...(19): siRNA sense strand
gaccaacggagguagucuu

SEQ ID NO: 1135314 - RNA, 19 nt, Homo sapiens
  misc_RNA (1)...(19): siRNA sense strand
uuaaggaagagugguacua

SEQ ID NO: 1135315 - RNA, 19 nt, Homo sapiens
  misc_RNA (1)...(19): siRNA sense strand
ucaaugaugaguccucucu

SEQ ID NO: 1135316 - RNA, 19 nt, Homo sapiens
  misc_RNA (1)...(19): siRNA sense strand
uggaauacuuggccuagcu

SEQ ID NO: 1135317 - RNA, 19 nt, Homo sapiens
  misc_RNA (1)...(19): siRNA sense strand
aaccaaguuuguauaaagg

SEQ ID NO: 1135318 - RNA, 19 nt, Homo sapiens
  misc_RNA (1)...(19): siRNA sense strand
auacuuggccuagcuuaug

SEQ ID NO: 1135319 - RNA, 19 nt, Homo sapiens
  misc_RNA (1)...(19): siRNA sense strand
auagacacguacuuugaca

SEQ ID NO: 1135320 - RNA, 19 nt, Homo sapiens
  misc_RNA (1)...(19): siRNA sense strand
uaaggaagagugguacuac

SEQ ID NO: 1135321 - RNA, 19 nt, Homo sapiens
  misc_RNA (1)...(19): siRNA sense strand
gaaccaaguuuguauaaag

SEQ ID NO: 1135322 - RNA, 19 nt, Homo sapiens
  misc_RNA (1)...(19): siRNA sense strand
gggauuaaauggaauggaa

SEQ ID NO: 1135323 - RNA, 19 nt, Homo sapiens
  misc_RNA (1)...(19): siRNA sense strand
gggaagaccucgucaccau

SEQ ID NO: 1135324 - RNA, 19 nt, Homo sapiens
  misc_RNA (1)...(19): siRNA sense strand
cccaaaggcuucaauacuu

SEQ ID NO: 1135325 - RNA, 19 nt, Homo sapiens
  misc_RNA (1)...(19): siRNA sense strand
gaauugaaccaaguuugua

SEQ ID NO: 1135326 - RNA, 19 nt, Homo sapiens
  misc_RNA (1)...(19): siRNA sense strand
ccaaaggcuucaauacuuc

SEQ ID NO: 1135327 - RNA, 19 nt, Homo sapiens
  misc_RNA (1)...(19): siRNA sense strand
caacggagguagucuuguc

SEQ ID NO: 1135328 - RNA, 19 nt, Homo sapiens
  misc_RNA (1)...(19): siRNA sense strand
ggaauugaaccaaguuugu

SEQ ID NO: 1135329 - RNA, 19 nt, Homo sapiens
  misc_RNA (1)...(19): siRNA sense strand
uaaaggagacaucugguau

SEQ ID NO: 1135330 - RNA, 19 nt, Homo sapiens
  misc_RNA (1)...(19): siRNA sense strand
cuacauagacacguacuuu

SEQ ID NO: 1135331 - RNA, 19 nt, Homo sapiens
  misc_RNA (1)...(19): siRNA sense strand
acacguacuuugacacaga

SEQ ID NO: 1135332 - RNA, 19 nt, Homo sapiens
  misc_RNA (1)...(19): siRNA sense strand
acagagaggucuagcacau

SEQ ID NO: 1135333 - RNA, 19 nt, Homo sapiens
  misc_RNA (1)...(19): siRNA sense strand
guacuaccagauagaaauu

SEQ ID NO: 1135334 - RNA, 19 nt, Homo sapiens
  misc_RNA (1)...(19): siRNA sense strand
ugucuuggguggaauugaa

SEQ ID NO: 1135335 - RNA, 19 nt, Homo sapiens
  misc_RNA (1)...(19): siRNA sense strand
gcugcagugucugaaauuu

SEQ ID NO: 1135336 - RNA, 19 nt, Homo sapiens
  misc_RNA (1)...(19): siRNA sense strand
aaaggagacaucugguaua

SEQ ID NO: 1135337 - RNA, 19 nt, Homo sapiens
  misc_RNA (1)...(19): siRNA sense strand
gaauacuuggccuagcuua

SEQ ID NO: 1135338 - RNA, 19 nt, Homo sapiens
  misc_RNA (1)...(19): siRNA sense strand
gagaguauaacgcagacaa

SEQ ID NO: 1135339 - RNA, 19 nt, Homo sapiens
  misc_RNA (1)...(19): siRNA sense strand
caacuucuuggccauggua

SEQ ID NO: 1135340 - RNA, 19 nt, Homo sapiens
  misc_RNA (1)...(19): siRNA sense strand
gugcugcagugucugaaau

SEQ ID NO: 1135341 - RNA, 19 nt, Homo sapiens
  misc_RNA (1)...(19): siRNA sense strand
acauagacacguacuuuga

SEQ ID NO: 1135342 - RNA, 19 nt, Homo sapiens
  misc_RNA (1)...(19): siRNA sense strand
gaagcuacagauucucguu

SEQ ID NO: 1135343 - RNA, 19 nt, Homo sapiens
  misc_RNA (1)...(19): siRNA sense strand
caagggcuuugacgucaca

SEQ ID NO: 1135344 - RNA, 19 nt, Homo sapiens
  misc_RNA (1)...(19): siRNA sense strand
gcuacuaccuggagaugcu

SEQ ID NO: 1135345 - RNA, 19 nt, Homo sapiens
  misc_RNA (1)...(19): siRNA sense strand
ugucaacauugccacuauu

SEQ ID NO: 1135346 - RNA, 19 nt, Homo sapiens
  misc_RNA (1)...(19): siRNA sense strand
agagaggucuagcacauac

SEQ ID NO: 1135347 - RNA, 19 nt, Homo sapiens
  misc_RNA (1)...(19): siRNA sense strand
ccgcagaagcuacagauuc

SEQ ID NO: 1135348 - RNA, 19 nt, Homo sapiens
  misc_RNA (1)...(19): siRNA sense strand
ugccugggauuaaauggaa

SEQ ID NO: 1135349 - RNA, 19 nt, Homo sapiens
  misc_RNA (1)...(19): siRNA sense strand
cagagaggucuagcacaua

SEQ ID NO: 1135350 - RNA, 19 nt, Homo sapiens
  misc_RNA (1)...(19): siRNA sense strand
cggagguagucuugucuug

SEQ ID NO: 1135351 - RNA, 19 nt, Homo sapiens
  misc_RNA (1)...(19): siRNA sense strand
acuccuacauagacacgua

SEQ ID NO: 1135352 - RNA, 19 nt, Homo sapiens
  misc_RNA (1)...(19): siRNA sense strand
auaaaggagacaucuggua

SEQ ID NO: 1135353 - RNA, 19 nt, Homo sapiens
  misc_RNA (1)...(19): siRNA sense strand
gucaacauugccacuauuu

SEQ ID NO: 1135354 - RNA, 19 nt, Homo sapiens
  misc_RNA (1)...(19): siRNA sense strand
acagugaaguacacacaag

SEQ ID NO: 1135355 - RNA, 19 nt, Homo sapiens
  misc_RNA (1)...(19): siRNA sense strand
aaggagacaucugguauac

SEQ ID NO: 1135356 - RNA, 19 nt, Homo sapiens
  misc_RNA (1)...(19): siRNA sense strand
ggaauacuuggccuagcuu

SEQ ID NO: 1135357 - RNA, 19 nt, Homo sapiens
  misc_RNA (1)...(19): siRNA sense strand
gccaagccaucaaguucuc

SEQ ID NO: 1135358 - RNA, 19 nt, Homo sapiens
  misc_RNA (1)...(19): siRNA sense strand
ggauuaaauggaauggaau

SEQ ID NO: 1135359 - RNA, 19 nt, Homo sapiens
  misc_RNA (1)...(19): siRNA sense strand
ggguggaauugaaccaagu

SEQ ID NO: 1135360 - RNA, 19 nt, Homo sapiens
  misc_RNA (1)...(19): siRNA sense strand
gugaaguacacacaaggaa

SEQ ID NO: 1135361 - RNA, 19 nt, Homo sapiens
  misc_RNA (1)...(19): siRNA sense strand
cuauuaaggaagaguggua

SEQ ID NO: 1135362 - RNA, 19 nt, Homo sapiens
  misc_RNA (1)...(19): siRNA sense strand
aaauggaauggaauacuug

SEQ ID NO: 1135363 - RNA, 19 nt, Homo sapiens
  misc_RNA (1)...(19): siRNA sense strand
agucuugucuuggguggaa

SEQ ID NO: 1135364 - RNA, 19 nt, Homo sapiens
  misc_RNA (1)...(19): siRNA sense strand
gaccaacggagguagucuu

SEQ ID NO: 1135365 - RNA, 19 nt, Homo sapiens
  misc_RNA (1)...(19): siRNA sense strand
uuaaggaagagugguacua

SEQ ID NO: 1135366 - RNA, 19 nt, Homo sapiens
  misc_RNA (1)...(19): siRNA sense strand
uggaauacuuggccuagcu

SEQ ID NO: 1135367 - RNA, 19 nt, Homo sapiens
  misc_RNA (1)...(19): siRNA sense strand
aaccaaguuuguauaaagg

SEQ ID NO: 1135368 - RNA, 19 nt, Homo sapiens
  misc_RNA (1)...(19): siRNA sense strand
auacuuggccuagcuuaug

SEQ ID NO: 1135369 - RNA, 19 nt, Homo sapiens
  misc_RNA (1)...(19): siRNA sense strand
auagacacguacuuugaca

SEQ ID NO: 1135370 - RNA, 19 nt, Homo sapiens
  misc_RNA (1)...(19): siRNA sense strand
uaaggaagagugguacuac

SEQ ID NO: 1135371 - RNA, 19 nt, Homo sapiens
  misc_RNA (1)...(19): siRNA sense strand
gaaccaaguuuguauaaag

SEQ ID NO: 1135372 - RNA, 19 nt, Homo sapiens
  misc_RNA (1)...(19): siRNA sense strand
gggauuaaauggaauggaa

SEQ ID NO: 1135373 - RNA, 19 nt, Homo sapiens
  misc_RNA (1)...(19): siRNA sense strand
ggucagacaucgcuggaaa

SEQ ID NO: 1135374 - RNA, 19 nt, Homo sapiens
  misc_RNA (1)...(19): siRNA sense strand
gggaagaccucgucaccau

SEQ ID NO: 1135375 - RNA, 19 nt, Homo sapiens
  misc_RNA (1)...(19): siRNA sense strand
cccaaaggcuucaauacuu

SEQ ID NO: 1135376 - RNA, 19 nt, Homo sapiens
  misc_RNA (1)...(19): siRNA sense strand
gaauugaaccaaguuugua

SEQ ID NO: 1135377 - RNA, 19 nt, Homo sapiens
  misc_RNA (1)...(19): siRNA sense strand
ccaaaggcuucaauacuuc

SEQ ID NO: 1135378 - RNA, 19 nt, Homo sapiens
  misc_RNA (1)...(19): siRNA sense strand
caacggagguagucuuguc

SEQ ID NO: 1135379 - RNA, 19 nt, Homo sapiens
  misc_RNA (1)...(19): siRNA sense strand
ggaauugaaccaaguuugu

SEQ ID NO: 1135380 - RNA, 19 nt, Homo sapiens
  misc_RNA (1)...(19): siRNA sense strand
uaaaggagacaucugguau

SEQ ID NO: 1135381 - RNA, 19 nt, Homo sapiens
  misc_RNA (1)...(19): siRNA sense strand
cuacauagacacguacuuu

SEQ ID NO: 1135382 - RNA, 19 nt, Homo sapiens
  misc_RNA (1)...(19): siRNA sense strand
ggauguagccagcaacugu

SEQ ID NO: 1135383 - RNA, 19 nt, Homo sapiens
  misc_RNA (1)...(19): siRNA sense strand
acacguacuuugacacaga

SEQ ID NO: 1135384 - RNA, 19 nt, Homo sapiens
  misc_RNA (1)...(19): siRNA sense strand
acagagaggucuagcacau

SEQ ID NO: 1135385 - RNA, 19 nt, Homo sapiens
  misc_RNA (1)...(19): siRNA sense strand
acccugaggucgucaauga

SEQ ID NO: 1135386 - RNA, 19 nt, Homo sapiens
  misc_RNA (1)...(19): siRNA sense strand
guacuaccagauagaaauu

SEQ ID NO: 1135387 - RNA, 19 nt, Homo sapiens
  misc_RNA (1)...(19): siRNA sense strand
ugucuuggguggaauugaa

SEQ ID NO: 1135388 - RNA, 19 nt, Homo sapiens
  misc_RNA (1)...(19): siRNA sense strand
gcugcagugucugaaauuu

SEQ ID NO: 1135389 - RNA, 19 nt, Homo sapiens
  misc_RNA (1)...(19): siRNA sense strand
aaaggagacaucugguaua

SEQ ID NO: 1135390 - RNA, 19 nt, Homo sapiens
  misc_RNA (1)...(19): siRNA sense strand
gaauacuuggccuagcuua

SEQ ID NO: 1135391 - RNA, 19 nt, Homo sapiens
  misc_RNA (1)...(19): siRNA sense strand
gagaguauaacgcagacaa

SEQ ID NO: 1135392 - RNA, 19 nt, Homo sapiens
  misc_RNA (1)...(19): siRNA sense strand
caacuucuuggccauggua

SEQ ID NO: 1135393 - RNA, 19 nt, Homo sapiens
  misc_RNA (1)...(19): siRNA sense strand
gugcugcagugucugaaau

SEQ ID NO: 1135394 - RNA, 19 nt, Homo sapiens
  misc_RNA (1)...(19): siRNA sense strand
acauagacacguacuuuga

SEQ ID NO: 1135395 - RNA, 19 nt, Homo sapiens
  misc_RNA (1)...(19): siRNA sense strand
cagaggauguagccagcaa

SEQ ID NO: 1135396 - RNA, 19 nt, Homo sapiens
  misc_RNA (1)...(19): siRNA sense strand
gaagcuacagauucucguu

SEQ ID NO: 1135397 - RNA, 19 nt, Homo sapiens
  misc_RNA (1)...(19): siRNA sense strand
caagggcuuugacgucaca

SEQ ID NO: 1135398 - RNA, 19 nt, Homo sapiens
  misc_RNA (1)...(19): siRNA sense strand
gcuacuaccuggagaugcu

SEQ ID NO: 1135399 - RNA, 19 nt, Homo sapiens
  misc_RNA (1)...(19): siRNA sense strand
ugucaacauugccacuauu

SEQ ID NO: 1135400 - RNA, 19 nt, Homo sapiens
  misc_RNA (1)...(19): siRNA sense strand
agagaggucuagcacauac

SEQ ID NO: 1135401 - RNA, 19 nt, Homo sapiens
  misc_RNA (1)...(19): siRNA sense strand
ccgcagaagcuacagauuc

SEQ ID NO: 1135402 - RNA, 19 nt, Homo sapiens
  misc_RNA (1)...(19): siRNA sense strand
ugccugggauuaaauggaa

SEQ ID NO: 1135403 - RNA, 19 nt, Homo sapiens
  misc_RNA (1)...(19): siRNA sense strand
gagccauccuccuugucuu

SEQ ID NO: 1135404 - RNA, 19 nt, Homo sapiens
  misc_RNA (1)...(19): siRNA sense strand
cagagaggucuagcacaua

SEQ ID NO: 1135405 - RNA, 19 nt, Homo sapiens
  misc_RNA (1)...(19): siRNA sense strand
cggagguagucuugucuug

SEQ ID NO: 1135406 - RNA, 19 nt, Homo sapiens
  misc_RNA (1)...(19): siRNA sense strand
gucaacauugccacuauuu

SEQ ID NO: 1135407 - RNA, 19 nt, Homo sapiens
  misc_RNA (1)...(19): siRNA sense strand
cauccuccuugucuuaauc

SEQ ID NO: 1135408 - RNA, 19 nt, Homo sapiens
  misc_RNA (1)...(19): siRNA sense strand
acuccuacauagacacgua

SEQ ID NO: 1135409 - RNA, 19 nt, Homo sapiens
  misc_RNA (1)...(19): siRNA sense strand
auaaaggagacaucuggua

SEQ ID NO: 1135410 - RNA, 19 nt, Homo sapiens
  misc_RNA (1)...(19): siRNA sense strand
acagugaaguacacacaag

SEQ ID NO: 1135411 - RNA, 19 nt, Homo sapiens
  misc_RNA (1)...(19): siRNA sense strand
aaggagacaucugguauac

SEQ ID NO: 1135412 - RNA, 19 nt, Homo sapiens
  misc_RNA (1)...(19): siRNA sense strand
ggaauacuuggccuagcuu

SEQ ID NO: 1135413 - RNA, 19 nt, Homo sapiens
  misc_RNA (1)...(19): siRNA sense strand
gccaagccaucaaguucuc

SEQ ID NO: 1135414 - RNA, 19 nt, Homo sapiens
  misc_RNA (1)...(19): siRNA sense strand
ggauuaaauggaauggaau

SEQ ID NO: 1135415 - RNA, 19 nt, Homo sapiens
  misc_RNA (1)...(19): siRNA sense strand
ggguggaauugaaccaagu

SEQ ID NO: 1135416 - RNA, 19 nt, Homo sapiens
  misc_RNA (1)...(19): siRNA sense strand
gugaaguacacacaaggaa

SEQ ID NO: 1135417 - RNA, 19 nt, Homo sapiens
  misc_RNA (1)...(19): siRNA sense strand
ucagacaucgcuggaaaug

SEQ ID NO: 1135418 - RNA, 19 nt, Homo sapiens
  misc_RNA (1)...(19): siRNA sense strand
cuauuaaggaagaguggua

SEQ ID NO: 1135419 - RNA, 19 nt, Homo sapiens
  misc_RNA (1)...(19): siRNA sense strand
aaauggaauggaauacuug

SEQ ID NO: 1135420 - RNA, 19 nt, Homo sapiens
  misc_RNA (1)...(19): siRNA sense strand
cugaggucgucaaugauga

SEQ ID NO: 1135421 - RNA, 19 nt, Homo sapiens
  misc_RNA (1)...(19): siRNA sense strand
agucuugucuuggguggaa

SEQ ID NO: 1135422 - RNA, 19 nt, Homo sapiens
  misc_RNA (1)...(19): siRNA sense strand
gaccaacggagguagucuu

SEQ ID NO: 1135423 - RNA, 19 nt, Homo sapiens
  misc_RNA (1)...(19): siRNA sense strand
uuaaggaagagugguacua

SEQ ID NO: 1135424 - RNA, 19 nt, Homo sapiens
  misc_RNA (1)...(19): siRNA sense strand
ucaaugaugaguccucucu

SEQ ID NO: 1135425 - RNA, 19 nt, Homo sapiens
  misc_RNA (1)...(19): siRNA sense strand
uggaauacuuggccuagcu

SEQ ID NO: 1135426 - RNA, 19 nt, Homo sapiens
  misc_RNA (1)...(19): siRNA sense strand
aaccaaguuuguauaaagg

SEQ ID NO: 1135427 - RNA, 19 nt, Homo sapiens
  misc_RNA (1)...(19): siRNA sense strand
auacuuggccuagcuuaug

SEQ ID NO: 1135428 - RNA, 19 nt, Homo sapiens
  misc_RNA (1)...(19): siRNA sense strand
auagacacguacuuugaca

SEQ ID NO: 1135429 - RNA, 19 nt, Homo sapiens
  misc_RNA (1)...(19): siRNA sense strand
uaaggaagagugguacuac

SEQ ID NO: 1135430 - RNA, 19 nt, Homo sapiens
  misc_RNA (1)...(19): siRNA sense strand
gaaccaaguuuguauaaag

SEQ ID NO: 1135431 - RNA, 19 nt, Homo sapiens
  misc_RNA (1)...(19): siRNA sense strand
gggauuaaauggaauggaa

SEQ ID NO: 1135432 - RNA, 19 nt, Homo sapiens
  misc_RNA (1)...(19): siRNA sense strand
ggucagacaucgcuggaaa

SEQ ID NO: 1135433 - RNA, 19 nt, Homo sapiens
  misc_RNA (1)...(19): siRNA sense strand
gggaagaccucgucaccau

SEQ ID NO: 1135434 - RNA, 19 nt, Homo sapiens
  misc_RNA (1)...(19): siRNA sense strand
cccaaaggcuucaauacuu

SEQ ID NO: 1135435 - RNA, 19 nt, Homo sapiens
  misc_RNA (1)...(19): siRNA sense strand
gaauugaaccaaguuugua

SEQ ID NO: 1135436 - RNA, 19 nt, Homo sapiens
  misc_RNA (1)...(19): siRNA sense strand
ccaaaggcuucaauacuuc

SEQ ID NO: 1135437 - RNA, 19 nt, Homo sapiens
  misc_RNA (1)...(19): siRNA sense strand
caacggagguagucuuguc

SEQ ID NO: 1135438 - RNA, 19 nt, Homo sapiens
  misc_RNA (1)...(19): siRNA sense strand
ggaauugaaccaaguuugu

SEQ ID NO: 1135439 - RNA, 19 nt, Homo sapiens
  misc_RNA (1)...(19): siRNA sense strand
uaaaggagacaucugguau

SEQ ID NO: 1135440 - RNA, 19 nt, Homo sapiens
  misc_RNA (1)...(19): siRNA sense strand
cuacauagacacguacuuu

SEQ ID NO: 1135441 - RNA, 19 nt, Homo sapiens
  misc_RNA (1)...(19): siRNA sense strand
ggauguagccagcaacugu

SEQ ID NO: 1135442 - RNA, 19 nt, Homo sapiens
  misc_RNA (1)...(19): siRNA sense strand
acacguacuuugacacaga

SEQ ID NO: 1135443 - RNA, 19 nt, Homo sapiens
  misc_RNA (1)...(19): siRNA sense strand
acagagaggucuagcacau

SEQ ID NO: 1135444 - RNA, 19 nt, Homo sapiens
  misc_RNA (1)...(19): siRNA sense strand
acccugaggucgucaauga

SEQ ID NO: 1135445 - RNA, 19 nt, Homo sapiens
  misc_RNA (1)...(19): siRNA sense strand
guacuaccagauagaaauu

SEQ ID NO: 1135446 - RNA, 19 nt, Homo sapiens
  misc_RNA (1)...(19): siRNA sense strand
ugucuuggguggaauugaa

SEQ ID NO: 1135447 - RNA, 19 nt, Homo sapiens
  misc_RNA (1)...(19): siRNA sense strand
gcugcagugucugaaauuu

SEQ ID NO: 1135448 - RNA, 19 nt, Homo sapiens
  misc_RNA (1)...(19): siRNA sense strand
aaaggagacaucugguaua

SEQ ID NO: 1135449 - RNA, 19 nt, Homo sapiens
  misc_RNA (1)...(19): siRNA sense strand
gaauacuuggccuagcuua

SEQ ID NO: 1135450 - RNA, 19 nt, Homo sapiens
  misc_RNA (1)...(19): siRNA sense strand
gagaguauaacgcagacaa

SEQ ID NO: 1135451 - RNA, 19 nt, Homo sapiens
  misc_RNA (1)...(19): siRNA sense strand
caacuucuuggccauggua

SEQ ID NO: 1135452 - RNA, 19 nt, Homo sapiens
  misc_RNA (1)...(19): siRNA sense strand
gugcugcagugucugaaau

SEQ ID NO: 1135453 - RNA, 19 nt, Homo sapiens
  misc_RNA (1)...(19): siRNA sense strand
acauagacacguacuuuga

SEQ ID NO: 1135454 - RNA, 19 nt, Homo sapiens
  misc_RNA (1)...(19): siRNA sense strand
cagaggauguagccagcaa

SEQ ID NO: 1135455 - RNA, 19 nt, Homo sapiens
  misc_RNA (1)...(19): siRNA sense strand
gaagcuacagauucucguu

SEQ ID NO: 1135456 - RNA, 19 nt, Homo sapiens
  misc_RNA (1)...(19): siRNA sense strand
caagggcuuugacgucaca

SEQ ID NO: 1135457 - RNA, 19 nt, Homo sapiens
  misc_RNA (1)...(19): siRNA sense strand
gcuacuaccuggagaugcu

SEQ ID NO: 1135458 - RNA, 19 nt, Homo sapiens
  misc_RNA (1)...(19): siRNA sense strand
ugucaacauugccacuauu

SEQ ID NO: 1135459 - RNA, 19 nt, Homo sapiens
  misc_RNA (1)...(19): siRNA sense strand
agagaggucuagcacauac

SEQ ID NO: 1135460 - RNA, 19 nt, Homo sapiens
  misc_RNA (1)...(19): siRNA sense strand
ccgcagaagcuacagauuc

SEQ ID NO: 1135461 - RNA, 19 nt, Homo sapiens
  misc_RNA (1)...(19): siRNA sense strand
ugccugggauuaaauggaa

SEQ ID NO: 1135462 - RNA, 19 nt, Homo sapiens
  misc_RNA (1)...(19): siRNA sense strand
gagccauccuccuugucuu

SEQ ID NO: 1135463 - RNA, 19 nt, Homo sapiens
  misc_RNA (1)...(19): siRNA sense strand
cagagaggucuagcacaua

SEQ ID NO: 1135464 - RNA, 19 nt, Homo sapiens
  misc_RNA (1)...(19): siRNA sense strand
cggagguagucuugucuug

SEQ ID NO: 1135465 - RNA, 19 nt, Homo sapiens
  misc_RNA (1)...(19): siRNA sense strand
gucaacauugccacuauuu

SEQ ID NO: 1135466 - RNA, 19 nt, Homo sapiens
  misc_RNA (1)...(19): siRNA sense strand
cauccuccuugucuuaauc

SEQ ID NO: 1135467 - RNA, 19 nt, Homo sapiens
  misc_RNA (1)...(19): siRNA sense strand
acuccuacauagacacgua

SEQ ID NO: 1135468 - RNA, 19 nt, Homo sapiens
  misc_RNA (1)...(19): siRNA sense strand
auaaaggagacaucuggua

SEQ ID NO: 1135469 - RNA, 19 nt, Homo sapiens
  misc_RNA (1)...(19): siRNA sense strand
acagugaaguacacacaag

SEQ ID NO: 1135470 - RNA, 19 nt, Homo sapiens
  misc_RNA (1)...(19): siRNA sense strand
aaggagacaucugguauac

SEQ ID NO: 1135471 - RNA, 19 nt, Homo sapiens
  misc_RNA (1)...(19): siRNA sense strand
ggaauacuuggccuagcuu

SEQ ID NO: 1135472 - RNA, 19 nt, Homo sapiens
  misc_RNA (1)...(19): siRNA sense strand
gccaagccaucaaguucuc

SEQ ID NO: 1135473 - RNA, 19 nt, Homo sapiens
  misc_RNA (1)...(19): siRNA sense strand
ggauuaaauggaauggaau

SEQ ID NO: 1135474 - RNA, 19 nt, Homo sapiens
  misc_RNA (1)...(19): siRNA sense strand
ggguggaauugaaccaagu

SEQ ID NO: 1135475 - RNA, 19 nt, Homo sapiens
  misc_RNA (1)...(19): siRNA sense strand
gugaaguacacacaaggaa

SEQ ID NO: 1135476 - RNA, 19 nt, Homo sapiens
  misc_RNA (1)...(19): siRNA sense strand
ucagacaucgcuggaaaug

SEQ ID NO: 1135477 - RNA, 19 nt, Homo sapiens
  misc_RNA (1)...(19): siRNA sense strand
cuauuaaggaagaguggua

SEQ ID NO: 1135478 - RNA, 19 nt, Homo sapiens
  misc_RNA (1)...(19): siRNA sense strand
aaauggaauggaauacuug

SEQ ID NO: 1135479 - RNA, 19 nt, Homo sapiens
  misc_RNA (1)...(19): siRNA sense strand
cugaggucgucaaugauga

SEQ ID NO: 1135480 - RNA, 19 nt, Homo sapiens
  misc_RNA (1)...(19): siRNA sense strand
agucuugucuuggguggaa

SEQ ID NO: 1135481 - RNA, 19 nt, Homo sapiens
  misc_RNA (1)...(19): siRNA sense strand
gaccaacggagguagucuu

SEQ ID NO: 1135482 - RNA, 19 nt, Homo sapiens
  misc_RNA (1)...(19): siRNA sense strand
uuaaggaagagugguacua

SEQ ID NO: 1135483 - RNA, 19 nt, Homo sapiens
  misc_RNA (1)...(19): siRNA sense strand
ucaaugaugaguccucucu

SEQ ID NO: 1135484 - RNA, 19 nt, Homo sapiens
  misc_RNA (1)...(19): siRNA sense strand
uggaauacuuggccuagcu

SEQ ID NO: 1135485 - RNA, 19 nt, Homo sapiens
  misc_RNA (1)...(19): siRNA sense strand
aaccaaguuuguauaaagg

SEQ ID NO: 1135486 - RNA, 19 nt, Homo sapiens
  misc_RNA (1)...(19): siRNA sense strand
auacuuggccuagcuuaug

SEQ ID NO: 1135487 - RNA, 19 nt, Homo sapiens
  misc_RNA (1)...(19): siRNA sense strand
auagacacguacuuugaca

SEQ ID NO: 1135488 - RNA, 19 nt, Homo sapiens
  misc_RNA (1)...(19): siRNA sense strand
uaaggaagagugguacuac

SEQ ID NO: 1135489 - RNA, 19 nt, Homo sapiens
  misc_RNA (1)...(19): siRNA sense strand
gaaccaaguuuguauaaag

SEQ ID NO: 1135490 - RNA, 19 nt, Homo sapiens
  misc_RNA (1)...(19): siRNA sense strand
gggauuaaauggaauggaa

SEQ ID NO: 1135491 - RNA, 19 nt, Homo sapiens
  misc_RNA (1)...(19): siRNA sense strand
gggaagaccucgucaccau

SEQ ID NO: 1135492 - RNA, 19 nt, Homo sapiens
  misc_RNA (1)...(19): siRNA sense strand
cccaaaggcuucaauacuu

SEQ ID NO: 1135493 - RNA, 19 nt, Homo sapiens
  misc_RNA (1)...(19): siRNA sense strand
gaauugaaccaaguuugua

SEQ ID NO: 1135494 - RNA, 19 nt, Homo sapiens
  misc_RNA (1)...(19): siRNA sense strand
ccaaaggcuucaauacuuc

SEQ ID NO: 1135495 - RNA, 19 nt, Homo sapiens
  misc_RNA (1)...(19): siRNA sense strand
caacggagguagucuuguc

SEQ ID NO: 1135496 - RNA, 19 nt, Homo sapiens
  misc_RNA (1)...(19): siRNA sense strand
ggaauugaaccaaguuugu

SEQ ID NO: 1135497 - RNA, 19 nt, Homo sapiens
  misc_RNA (1)...(19): siRNA sense strand
uaaaggagacaucugguau

SEQ ID NO: 1135498 - RNA, 19 nt, Homo sapiens
  misc_RNA (1)...(19): siRNA sense strand
cuacauagacacguacuuu

SEQ ID NO: 1135499 - RNA, 19 nt, Homo sapiens
  misc_RNA (1)...(19): siRNA sense strand
acacguacuuugacacaga

SEQ ID NO: 1135500 - RNA, 19 nt, Homo sapiens
  misc_RNA (1)...(19): siRNA sense strand
acagagaggucuagcacau

SEQ ID NO: 1135501 - RNA, 19 nt, Homo sapiens
  misc_RNA (1)...(19): siRNA sense strand
guacuaccagauagaaauu

SEQ ID NO: 1135502 - RNA, 19 nt, Homo sapiens
  misc_RNA (1)...(19): siRNA sense strand
ugucuuggguggaauugaa

SEQ ID NO: 1135503 - RNA, 19 nt, Homo sapiens
  misc_RNA (1)...(19): siRNA sense strand
gcugcagugucugaaauuu

SEQ ID NO: 1135504 - RNA, 19 nt, Homo sapiens
  misc_RNA (1)...(19): siRNA sense strand
aaaggagacaucugguaua

SEQ ID NO: 1135505 - RNA, 19 nt, Homo sapiens
  misc_RNA (1)...(19): siRNA sense strand
gaauacuuggccuagcuua

SEQ ID NO: 1135506 - RNA, 19 nt, Homo sapiens
  misc_RNA (1)...(19): siRNA sense strand
gagaguauaacgcagacaa

SEQ ID NO: 1135507 - RNA, 19 nt, Homo sapiens
  misc_RNA (1)...(19): siRNA sense strand
caacuucuuggccauggua

SEQ ID NO: 1135508 - RNA, 19 nt, Homo sapiens
  misc_RNA (1)...(19): siRNA sense strand
gugcugcagugucugaaau

SEQ ID NO: 1135509 - RNA, 19 nt, Homo sapiens
  misc_RNA (1)...(19): siRNA sense strand
acauagacacguacuuuga

SEQ ID NO: 1135510 - RNA, 19 nt, Homo sapiens
  misc_RNA (1)...(19): siRNA sense strand
gaagcuacagauucucguu

SEQ ID NO: 1135511 - RNA, 19 nt, Homo sapiens
  misc_RNA (1)...(19): siRNA sense strand
caagggcuuugacgucaca

SEQ ID NO: 1135512 - RNA, 19 nt, Homo sapiens
  misc_RNA (1)...(19): siRNA sense strand
gcuacuaccuggagaugcu

SEQ ID NO: 1135513 - RNA, 19 nt, Homo sapiens
  misc_RNA (1)...(19): siRNA sense strand
ugucaacauugccacuauu

SEQ ID NO: 1135514 - RNA, 19 nt, Homo sapiens
  misc_RNA (1)...(19): siRNA sense strand
agagaggucuagcacauac

SEQ ID NO: 1135515 - RNA, 19 nt, Homo sapiens
  misc_RNA (1)...(19): siRNA sense strand
ccgcagaagcuacagauuc

SEQ ID NO: 1135516 - RNA, 19 nt, Homo sapiens
  misc_RNA (1)...(19): siRNA sense strand
ugccugggauuaaauggaa

SEQ ID NO: 1135517 - RNA, 19 nt, Homo sapiens
  misc_RNA (1)...(19): siRNA sense strand
cagagaggucuagcacaua

SEQ ID NO: 1135518 - RNA, 19 nt, Homo sapiens
  misc_RNA (1)...(19): siRNA sense strand
cggagguagucuugucuug

SEQ ID NO: 1135519 - RNA, 19 nt, Homo sapiens
  misc_RNA (1)...(19): siRNA sense strand
acuccuacauagacacgua

SEQ ID NO: 1135520 - RNA, 19 nt, Homo sapiens
  misc_RNA (1)...(19): siRNA sense strand
auaaaggagacaucuggua

SEQ ID NO: 1135521 - RNA, 19 nt, Homo sapiens
  misc_RNA (1)...(19): siRNA sense strand
gucaacauugccacuauuu

SEQ ID NO: 1135522 - RNA, 19 nt, Homo sapiens
  misc_RNA (1)...(19): siRNA sense strand
acagugaaguacacacaag

SEQ ID NO: 1135523 - RNA, 19 nt, Homo sapiens
  misc_RNA (1)...(19): siRNA sense strand
aaggagacaucugguauac

SEQ ID NO: 1135524 - RNA, 19 nt, Homo sapiens
  misc_RNA (1)...(19): siRNA sense strand
ggaauacuuggccuagcuu

SEQ ID NO: 1135525 - RNA, 19 nt, Homo sapiens
  misc_RNA (1)...(19): siRNA sense strand
gccaagccaucaaguucuc

SEQ ID NO: 1135526 - RNA, 19 nt, Homo sapiens
  misc_RNA (1)...(19): siRNA sense strand
ggauuaaauggaauggaau

SEQ ID NO: 1135527 - RNA, 19 nt, Homo sapiens
  misc_RNA (1)...(19): siRNA sense strand
ggguggaauugaaccaagu

SEQ ID NO: 1135528 - RNA, 19 nt, Homo sapiens
  misc_RNA (1)...(19): siRNA sense strand
gugaaguacacacaaggaa

SEQ ID NO: 1135529 - RNA, 19 nt, Homo sapiens
  misc_RNA (1)...(19): siRNA sense strand
cuauuaaggaagaguggua

SEQ ID NO: 1135530 - RNA, 19 nt, Homo sapiens
  misc_RNA (1)...(19): siRNA sense strand
aaauggaauggaauacuug

SEQ ID NO: 1135531 - RNA, 19 nt, Homo sapiens
  misc_RNA (1)...(19): siRNA sense strand
agucuugucuuggguggaa

SEQ ID NO: 1135532 - RNA, 19 nt, Homo sapiens
  misc_RNA (1)...(19): siRNA sense strand
gaccaacggagguagucuu

SEQ ID NO: 1135533 - RNA, 19 nt, Homo sapiens
  misc_RNA (1)...(19): siRNA sense strand
uuaaggaagagugguacua

SEQ ID NO: 1135534 - RNA, 19 nt, Homo sapiens
  misc_RNA (1)...(19): siRNA sense strand
uggaauacuuggccuagcu

SEQ ID NO: 1135535 - RNA, 19 nt, Homo sapiens
  misc_RNA (1)...(19): siRNA sense strand
aaccaaguuuguauaaagg

SEQ ID NO: 1135536 - RNA, 19 nt, Homo sapiens
  misc_RNA (1)...(19): siRNA sense strand
auacuuggccuagcuuaug

SEQ ID NO: 1135537 - RNA, 19 nt, Homo sapiens
  misc_RNA (1)...(19): siRNA sense strand
auagacacguacuuugaca

SEQ ID NO: 1135538 - RNA, 19 nt, Homo sapiens
  misc_RNA (1)...(19): siRNA sense strand
uaaggaagagugguacuac

SEQ ID NO: 1135539 - RNA, 19 nt, Homo sapiens
  misc_RNA (1)...(19): siRNA sense strand
ggaaggagcucacuuacca

SEQ ID NO: 1135540 - RNA, 19 nt, Homo sapiens
  misc_RNA (1)...(19): siRNA sense strand
ggagcucacuuaccaggaa

SEQ ID NO: 1135541 - RNA, 19 nt, Homo sapiens
  misc_RNA (1)...(19): siRNA sense strand
gcccugagguucuggcaaa

SEQ ID NO: 1135542 - RNA, 19 nt, Homo sapiens
  misc_RNA (1)...(19): siRNA sense strand
ucaacuggaugcauuacaa

SEQ ID NO: 1135543 - RNA, 19 nt, Homo sapiens
  misc_RNA (1)...(19): siRNA sense strand
ugaacaacaucgucaagug

SEQ ID NO: 1135544 - RNA, 19 nt, Homo sapiens
  misc_RNA (1)...(19): siRNA sense strand
ggcaggagcugaacaagac

SEQ ID NO: 1135545 - RNA, 19 nt, Homo sapiens
  misc_RNA (1)...(19): siRNA sense strand
ggagaugaccggcuaugug

SEQ ID NO: 1135546 - RNA, 19 nt, Homo sapiens
  misc_RNA (1)...(19): siRNA sense strand
gcgacgagcacguucaauu

SEQ ID NO: 1135547 - RNA, 19 nt, Homo sapiens
  misc_RNA (1)...(19): siRNA sense strand
gcgccgaccugaacaacau

SEQ ID NO: 1135548 - RNA, 19 nt, Homo sapiens
  misc_RNA (1)...(19): siRNA sense strand
cgacgagcacguucaauuc

SEQ ID NO: 1135549 - RNA, 19 nt, Homo sapiens
  misc_RNA (1)...(19): siRNA sense strand
ggccauagaccuccuugga

SEQ ID NO: 1135550 - RNA, 19 nt, Homo sapiens
  misc_RNA (1)...(19): siRNA sense strand
gaagguggcggugaagaag

SEQ ID NO: 1135551 - RNA, 19 nt, Homo sapiens
  misc_RNA (1)...(19): siRNA sense strand
gccauagaccuccuuggaa

SEQ ID NO: 1135552 - RNA, 19 nt, Homo sapiens
  misc_RNA (1)...(19): siRNA sense strand
gagcgacgagcacguucaa

SEQ ID NO: 1135553 - RNA, 19 nt, Homo sapiens
  misc_RNA (1)...(19): siRNA sense strand
agaaggaccugagcagcau

SEQ ID NO: 1135554 - RNA, 19 nt, Homo sapiens
  misc_RNA (1)...(19): siRNA sense strand
ugaagcgcaucauggaagu

SEQ ID NO: 1135555 - RNA, 19 nt, Homo sapiens
  misc_RNA (1)...(19): siRNA sense strand
caaccaaacaguggauauc

SEQ ID NO: 1135556 - RNA, 19 nt, Homo sapiens
  misc_RNA (1)...(19): siRNA sense strand
gcaacguggcugugaacga

SEQ ID NO: 1135557 - RNA, 19 nt, Homo sapiens
  misc_RNA (1)...(19): siRNA sense strand
guaccgggcaccugagauc

SEQ ID NO: 1135558 - RNA, 19 nt, Homo sapiens
  misc_RNA (1)...(19): siRNA sense strand
cagaggccgagccauauga

SEQ ID NO: 1135559 - RNA, 19 nt, Homo sapiens
  misc_RNA (1)...(19): siRNA sense strand
ggaccugagcagcaucuuc

SEQ ID NO: 1135560 - RNA, 19 nt, Homo sapiens
  misc_RNA (1)...(19): siRNA sense strand
agaagguggcggugaagaa

SEQ ID NO: 1135561 - RNA, 19 nt, Homo sapiens
  misc_RNA (1)...(19): siRNA sense strand
agccagaggccgagccaua

SEQ ID NO: 1135562 - RNA, 19 nt, Homo sapiens
  misc_RNA (1)...(19): siRNA sense strand
cuggaugcauuacaaccaa

SEQ ID NO: 1135563 - RNA, 19 nt, Homo sapiens
  misc_RNA (1)...(19): siRNA sense strand
gccagaggccgagccauau

SEQ ID NO: 1135564 - RNA, 19 nt, Homo sapiens
  misc_RNA (1)...(19): siRNA sense strand
gggaagcgacuacauugac

SEQ ID NO: 1135565 - RNA, 19 nt, Homo sapiens
  misc_RNA (1)...(19): siRNA sense strand
ccgggaagcgacuacauug

SEQ ID NO: 1135566 - RNA, 19 nt, Homo sapiens
  misc_RNA (1)...(19): siRNA sense strand
gaagcacgagaacgucauc

SEQ ID NO: 1135567 - RNA, 19 nt, Homo sapiens
  misc_RNA (1)...(19): siRNA sense strand
cggcaggagcugaacaaga

SEQ ID NO: 1135568 - RNA, 19 nt, Homo sapiens
  misc_RNA (1)...(19): siRNA sense strand
gcacgcuggaggaguggaa

SEQ ID NO: 1135569 - RNA, 19 nt, Homo sapiens
  misc_RNA (1)...(19): siRNA sense strand
gcugaagcgcaucauggaa

SEQ ID NO: 1135570 - RNA, 19 nt, Homo sapiens
  misc_RNA (1)...(19): siRNA sense strand
aggccgagccauaugauga

SEQ ID NO: 1135571 - RNA, 19 nt, Homo sapiens
  misc_RNA (1)...(19): siRNA sense strand
cuggcagccuggagauuga

SEQ ID NO: 1135572 - RNA, 19 nt, Homo sapiens
  misc_RNA (1)...(19): siRNA sense strand
gcugagcgacgagcacguu

SEQ ID NO: 1135573 - RNA, 19 nt, Homo sapiens
  misc_RNA (1)...(19): siRNA sense strand
ccagaggccgagccauaug

SEQ ID NO: 1135574 - RNA, 19 nt, Homo sapiens
  misc_RNA (1)...(19): siRNA sense strand
ggaaggagcucacuuacca

SEQ ID NO: 1135575 - RNA, 19 nt, Homo sapiens
  misc_RNA (1)...(19): siRNA sense strand
ggagcucacuuaccaggaa

SEQ ID NO: 1135576 - RNA, 19 nt, Homo sapiens
  misc_RNA (1)...(19): siRNA sense strand
gcccugagguucuggcaaa

SEQ ID NO: 1135577 - RNA, 19 nt, Homo sapiens
  misc_RNA (1)...(19): siRNA sense strand
ucaacuggaugcauuacaa

SEQ ID NO: 1135578 - RNA, 19 nt, Homo sapiens
  misc_RNA (1)...(19): siRNA sense strand
ugaacaacaucgucaagug

SEQ ID NO: 1135579 - RNA, 19 nt, Homo sapiens
  misc_RNA (1)...(19): siRNA sense strand
ggcaggagcugaacaagac

SEQ ID NO: 1135580 - RNA, 19 nt, Homo sapiens
  misc_RNA (1)...(19): siRNA sense strand
ggagaugaccggcuaugug

SEQ ID NO: 1135581 - RNA, 19 nt, Homo sapiens
  misc_RNA (1)...(19): siRNA sense strand
gcgacgagcacguucaauu

SEQ ID NO: 1135582 - RNA, 19 nt, Homo sapiens
  misc_RNA (1)...(19): siRNA sense strand
gcgccgaccugaacaacau

SEQ ID NO: 1135583 - RNA, 19 nt, Homo sapiens
  misc_RNA (1)...(19): siRNA sense strand
cgacgagcacguucaauuc

SEQ ID NO: 1135584 - RNA, 19 nt, Homo sapiens
  misc_RNA (1)...(19): siRNA sense strand
ggccauagaccuccuugga

SEQ ID NO: 1135585 - RNA, 19 nt, Homo sapiens
  misc_RNA (1)...(19): siRNA sense strand
gaagguggcggugaagaag

SEQ ID NO: 1135586 - RNA, 19 nt, Homo sapiens
  misc_RNA (1)...(19): siRNA sense strand
gccauagaccuccuuggaa

SEQ ID NO: 1135587 - RNA, 19 nt, Homo sapiens
  misc_RNA (1)...(19): siRNA sense strand
gagcgacgagcacguucaa

SEQ ID NO: 1135588 - RNA, 19 nt, Homo sapiens
  misc_RNA (1)...(19): siRNA sense strand
agaaggaccugagcagcau

SEQ ID NO: 1135589 - RNA, 19 nt, Homo sapiens
  misc_RNA (1)...(19): siRNA sense strand
ugaagcgcaucauggaagu

SEQ ID NO: 1135590 - RNA, 19 nt, Homo sapiens
  misc_RNA (1)...(19): siRNA sense strand
caaccaaacaguggauauc

SEQ ID NO: 1135591 - RNA, 19 nt, Homo sapiens
  misc_RNA (1)...(19): siRNA sense strand
gcaacguggcugugaacga

SEQ ID NO: 1135592 - RNA, 19 nt, Homo sapiens
  misc_RNA (1)...(19): siRNA sense strand
guaccgggcaccugagauc

SEQ ID NO: 1135593 - RNA, 19 nt, Homo sapiens
  misc_RNA (1)...(19): siRNA sense strand
cagaggccgagccauauga

SEQ ID NO: 1135594 - RNA, 19 nt, Homo sapiens
  misc_RNA (1)...(19): siRNA sense strand
ggaccugagcagcaucuuc

SEQ ID NO: 1135595 - RNA, 19 nt, Homo sapiens
  misc_RNA (1)...(19): siRNA sense strand
agaagguggcggugaagaa

SEQ ID NO: 1135596 - RNA, 19 nt, Homo sapiens
  misc_RNA (1)...(19): siRNA sense strand
agccagaggccgagccaua

SEQ ID NO: 1135597 - RNA, 19 nt, Homo sapiens
  misc_RNA (1)...(19): siRNA sense strand
cuggaugcauuacaaccaa

SEQ ID NO: 1135598 - RNA, 19 nt, Homo sapiens
  misc_RNA (1)...(19): siRNA sense strand
gccagaggccgagccauau

SEQ ID NO: 1135599 - RNA, 19 nt, Homo sapiens
  misc_RNA (1)...(19): siRNA sense strand
gggaagcgacuacauugac

SEQ ID NO: 1135600 - RNA, 19 nt, Homo sapiens
  misc_RNA (1)...(19): siRNA sense strand
ccgggaagcgacuacauug

SEQ ID NO: 1135601 - RNA, 19 nt, Homo sapiens
  misc_RNA (1)...(19): siRNA sense strand
gaagcacgagaacgucauc

SEQ ID NO: 1135602 - RNA, 19 nt, Homo sapiens
  misc_RNA (1)...(19): siRNA sense strand
cggcaggagcugaacaaga

SEQ ID NO: 1135603 - RNA, 19 nt, Homo sapiens
  misc_RNA (1)...(19): siRNA sense strand
gcacgcuggaggaguggaa

SEQ ID NO: 1135604 - RNA, 19 nt, Homo sapiens
  misc_RNA (1)...(19): siRNA sense strand
gcugaagcgcaucauggaa

SEQ ID NO: 1135605 - RNA, 19 nt, Homo sapiens
  misc_RNA (1)...(19): siRNA sense strand
aggccgagccauaugauga

SEQ ID NO: 1135606 - RNA, 19 nt, Homo sapiens
  misc_RNA (1)...(19): siRNA sense strand
cuggcagccuggagauuga

SEQ ID NO: 1135607 - RNA, 19 nt, Homo sapiens
  misc_RNA (1)...(19): siRNA sense strand
gcugagcgacgagcacguu

SEQ ID NO: 1135608 - RNA, 19 nt, Homo sapiens
  misc_RNA (1)...(19): siRNA sense strand
ccagaggccgagccauaug

SEQ ID NO: 1135609 - RNA, 19 nt, Homo sapiens
  misc_RNA (1)...(19): siRNA sense strand
gaaugaaacucucuaugaa

SEQ ID NO: 1135610 - RNA, 19 nt, Homo sapiens
  misc_RNA (1)...(19): siRNA sense strand
ucaacacuauccugaauua

SEQ ID NO: 1135611 - RNA, 19 nt, Homo sapiens
  misc_RNA (1)...(19): siRNA sense strand
gauccuagcauuagcaaua

SEQ ID NO: 1135612 - RNA, 19 nt, Homo sapiens
  misc_RNA (1)...(19): siRNA sense strand
caaugacucucaagcaauu

SEQ ID NO: 1135613 - RNA, 19 nt, Homo sapiens
  misc_RNA (1)...(19): siRNA sense strand
ugaaugaaacucucuauga

SEQ ID NO: 1135614 - RNA, 19 nt, Homo sapiens
  misc_RNA (1)...(19): siRNA sense strand
ugaauuaugugccugucua

SEQ ID NO: 1135615 - RNA, 19 nt, Homo sapiens
  misc_RNA (1)...(19): siRNA sense strand
gauacuggguuugguguuu

SEQ ID NO: 1135616 - RNA, 19 nt, Homo sapiens
  misc_RNA (1)...(19): siRNA sense strand
gcaauauggguacgaguaa

SEQ ID NO: 1135617 - RNA, 19 nt, Homo sapiens
  misc_RNA (1)...(19): siRNA sense strand
cuacguugcuguggacaua

SEQ ID NO: 1135618 - RNA, 19 nt, Homo sapiens
  misc_RNA (1)...(19): siRNA sense strand
gaccuguauuucuuucaua

SEQ ID NO: 1135619 - RNA, 19 nt, Homo sapiens
  misc_RNA (1)...(19): siRNA sense strand
ugccaaagcuauaauggaa

SEQ ID NO: 1135620 - RNA, 19 nt, Homo sapiens
  misc_RNA (1)...(19): siRNA sense strand
acacuauccugaauuaugu

SEQ ID NO: 1135621 - RNA, 19 nt, Homo sapiens
  misc_RNA (1)...(19): siRNA sense strand
uuaugugccugucuagaua

SEQ ID NO: 1135622 - RNA, 19 nt, Homo sapiens
  misc_RNA (1)...(19): siRNA sense strand
ggacauauugauugcugua

SEQ ID NO: 1135623 - RNA, 19 nt, Homo sapiens
  misc_RNA (1)...(19): siRNA sense strand
caaagagaccuguauuucu

SEQ ID NO: 1135624 - RNA, 19 nt, Homo sapiens
  misc_RNA (1)...(19): siRNA sense strand
ccuaggagcuguuuucaaa

SEQ ID NO: 1135625 - RNA, 19 nt, Homo sapiens
  misc_RNA (1)...(19): siRNA sense strand
ggugugagugccuguauaa

SEQ ID NO: 1135626 - RNA, 19 nt, Homo sapiens
  misc_RNA (1)...(19): siRNA sense strand
caagaagaguuuaaaugcu

SEQ ID NO: 1135627 - RNA, 19 nt, Homo sapiens
  misc_RNA (1)...(19): siRNA sense strand
gcaaugacucucaagcaau

SEQ ID NO: 1135628 - RNA, 19 nt, Homo sapiens
  misc_RNA (1)...(19): siRNA sense strand
uuauugagauacuggguuu

SEQ ID NO: 1135629 - RNA, 19 nt, Homo sapiens
  misc_RNA (1)...(19): siRNA sense strand
uaucuugauccuagcauua

SEQ ID NO: 1135630 - RNA, 19 nt, Homo sapiens
  misc_RNA (1)...(19): siRNA sense strand
ccauaauuguguuucaaga

SEQ ID NO: 1135631 - RNA, 19 nt, Homo sapiens
  misc_RNA (1)...(19): siRNA sense strand
gcugcaugcuucuguuguu

SEQ ID NO: 1135632 - RNA, 19 nt, Homo sapiens
  misc_RNA (1)...(19): siRNA sense strand
ccagaucgggaacaaauga

SEQ ID NO: 1135633 - RNA, 19 nt, Homo sapiens
  misc_RNA (1)...(19): siRNA sense strand
acaaagagaccuguauuuc

SEQ ID NO: 1135634 - RNA, 19 nt, Homo sapiens
  misc_RNA (1)...(19): siRNA sense strand
aagcagagaccaugccaaa

SEQ ID NO: 1135635 - RNA, 19 nt, Homo sapiens
  misc_RNA (1)...(19): siRNA sense strand
ccaggaagccauaauugug

SEQ ID NO: 1135636 - RNA, 19 nt, Homo sapiens
  misc_RNA (1)...(19): siRNA sense strand
uucauaggcuugcuucuga

SEQ ID NO: 1135637 - RNA, 19 nt, Homo sapiens
  misc_RNA (1)...(19): siRNA sense strand
gaccaugccaaagcuauaa

SEQ ID NO: 1135638 - RNA, 19 nt, Homo sapiens
  misc_RNA (1)...(19): siRNA sense strand
gcagagaccaugccaaagc

SEQ ID NO: 1135639 - RNA, 19 nt, Homo sapiens
  misc_RNA (1)...(19): siRNA sense strand
ucaagaagaguuuaaaugc

SEQ ID NO: 1135640 - RNA, 19 nt, Homo sapiens
  misc_RNA (1)...(19): siRNA sense strand
ccaaagcuauaauggaaaa

SEQ ID NO: 1135641 - RNA, 19 nt, Homo sapiens
  misc_RNA (1)...(19): siRNA sense strand
gcuguggacauauugauug

SEQ ID NO: 1135642 - RNA, 19 nt, Homo sapiens
  misc_RNA (1)...(19): siRNA sense strand
gggaugcugcggugcuaua

SEQ ID NO: 1135643 - RNA, 19 nt, Homo sapiens
  misc_RNA (1)...(19): siRNA sense strand
ggcgacagguauccuagga

SEQ ID NO: 1135644 - RNA, 19 nt, Homo sapiens
  misc_RNA (1)...(19): siRNA sense strand
gcuaugugguaucuugauc

SEQ ID NO: 1135645 - RNA, 19 nt, Homo sapiens
  misc_RNA (1)...(19): siRNA sense strand
uuucuaugguccuguauug

SEQ ID NO: 1135646 - RNA, 19 nt, Homo sapiens
  misc_RNA (1)...(19): siRNA sense strand
guaucuugauccuagcauu

SEQ ID NO: 1135647 - RNA, 19 nt, Homo sapiens
  misc_RNA (1)...(19): siRNA sense strand
gaagauguaggcucuagcu

SEQ ID NO: 1135648 - RNA, 19 nt, Homo sapiens
  misc_RNA (1)...(19): siRNA sense strand
gguccuguauugccagauc

SEQ ID NO: 1135649 - RNA, 19 nt, Homo sapiens
  misc_RNA (1)...(19): siRNA sense strand
ggaagccauaauuguguuu

SEQ ID NO: 1135650 - RNA, 19 nt, Homo sapiens
  misc_RNA (1)...(19): siRNA sense strand
gaaacucucuaugaaaaca

SEQ ID NO: 1135651 - RNA, 19 nt, Homo sapiens
  misc_RNA (1)...(19): siRNA sense strand
gagcuguuuucaaaucuaa

SEQ ID NO: 1135652 - RNA, 19 nt, Homo sapiens
  misc_RNA (1)...(19): siRNA sense strand
cauauugauugcuguaggu

SEQ ID NO: 1135653 - RNA, 19 nt, Homo sapiens
  misc_RNA (1)...(19): siRNA sense strand
uaagucugaucgcauugug

SEQ ID NO: 1135654 - RNA, 19 nt, Homo sapiens
  misc_RNA (1)...(19): siRNA sense strand
agcaaugacucucaagcaa

SEQ ID NO: 1135655 - RNA, 19 nt, Homo sapiens
  misc_RNA (1)...(19): siRNA sense strand
gugagugccuguauaaaau

SEQ ID NO: 1135656 - RNA, 19 nt, Homo sapiens
  misc_RNA (1)...(19): siRNA sense strand
caggaagccauaauugugu

SEQ ID NO: 1135657 - RNA, 19 nt, Homo sapiens
  misc_RNA (1)...(19): siRNA sense strand
gagaccaugccaaagcuau

SEQ ID NO: 1135658 - RNA, 19 nt, Homo sapiens
  misc_RNA (1)...(19): siRNA sense strand
cugcaugcuucuguuguuu

SEQ ID NO: 1135659 - RNA, 19 nt, Homo sapiens
  misc_RNA (1)...(19): siRNA sense strand
ggaugcugcggugcuauaa

SEQ ID NO: 1135660 - RNA, 19 nt, Homo sapiens
  misc_RNA (1)...(19): siRNA sense strand
aguaagcaaugacucucaa

SEQ ID NO: 1135661 - RNA, 19 nt, Homo sapiens
  misc_RNA (1)...(19): siRNA sense strand
guuuaaaugcugcgguuug

SEQ ID NO: 1135662 - RNA, 19 nt, Homo sapiens
  misc_RNA (1)...(19): siRNA sense strand
cuggcuaugugguaucuug

SEQ ID NO: 1135663 - RNA, 19 nt, Homo sapiens
  misc_RNA (1)...(19): siRNA sense strand
caauauggguacgaguaag

SEQ ID NO: 1135664 - RNA, 19 nt, Homo sapiens
  misc_RNA (1)...(19): siRNA sense strand
agaccaugccaaagcuaua

SEQ ID NO: 1135665 - RNA, 19 nt, Homo sapiens
  misc_RNA (1)...(19): siRNA sense strand
gugccugucuagauaagca

SEQ ID NO: 1135666 - RNA, 19 nt, Homo sapiens
  misc_RNA (1)...(19): siRNA sense strand
cagagaccaugccaaagcu

SEQ ID NO: 1135667 - RNA, 19 nt, Homo sapiens
  misc_RNA (1)...(19): siRNA sense strand
agaccuguauuucuuucau

SEQ ID NO: 1135668 - RNA, 19 nt, Homo sapiens
  misc_RNA (1)...(19): siRNA sense strand
gcagguggcgacagguauc

SEQ ID NO: 1135669 - RNA, 19 nt, Homo sapiens
  misc_RNA (1)...(19): siRNA sense strand
ggguacgaguaagcaauga

SEQ ID NO: 1135670 - RNA, 19 nt, Homo sapiens
  misc_RNA (1)...(19): siRNA sense strand
aacacuauccugaauuaug

SEQ ID NO: 1135671 - RNA, 19 nt, Homo sapiens
  misc_RNA (1)...(19): siRNA sense strand
ggagcuguuuucaaaucua

SEQ ID NO: 1135672 - RNA, 19 nt, Homo sapiens
  misc_RNA (1)...(19): siRNA sense strand
gaugcugcggugcuauaaa

SEQ ID NO: 1135673 - RNA, 19 nt, Homo sapiens
  misc_RNA (1)...(19): siRNA sense strand
agagaccuguauuucuuuc

SEQ ID NO: 1135674 - RNA, 19 nt, Homo sapiens
  misc_RNA (1)...(19): siRNA sense strand
gaauuaugugccugucuag

SEQ ID NO: 1135675 - RNA, 19 nt, Homo sapiens
  misc_RNA (1)...(19): siRNA sense strand
aggaagccauaauuguguu

SEQ ID NO: 1135676 - RNA, 19 nt, Homo sapiens
  misc_RNA (1)...(19): siRNA sense strand
gugaaugaaacucucuaug

SEQ ID NO: 1135677 - RNA, 19 nt, Homo sapiens
  misc_RNA (1)...(19): siRNA sense strand
gccaaagcuauaauggaaa

SEQ ID NO: 1135678 - RNA, 19 nt, Homo sapiens
  misc_RNA (1)...(19): siRNA sense strand
agcaauauggguacgagua

SEQ ID NO: 1135679 - RNA, 19 nt, Homo sapiens
  misc_RNA (1)...(19): siRNA sense strand
uauguuuaccuucaacuuc

SEQ ID NO: 1135680 - RNA, 19 nt, Homo sapiens
  misc_RNA (1)...(19): siRNA sense strand
gaacaggaguuuacuuauu

SEQ ID NO: 1135681 - RNA, 19 nt, Homo sapiens
  misc_RNA (1)...(19): siRNA sense strand
gcacaacggcucugacuua

SEQ ID NO: 1135682 - RNA, 19 nt, Homo sapiens
  misc_RNA (1)...(19): siRNA sense strand
gagggaaacugcauugauu

SEQ ID NO: 1135683 - RNA, 19 nt, Homo sapiens
  misc_RNA (1)...(19): siRNA sense strand
cacagcaggugucgaauua

SEQ ID NO: 1135684 - RNA, 19 nt, Homo sapiens
  misc_RNA (1)...(19): siRNA sense strand
gaaacugcauugauucuca

SEQ ID NO: 1135685 - RNA, 19 nt, Homo sapiens
  misc_RNA (1)...(19): siRNA sense strand
gcauugauucucaguauua

SEQ ID NO: 1135686 - RNA, 19 nt, Homo sapiens
  misc_RNA (1)...(19): siRNA sense strand
caacggcucugacuuaaca

SEQ ID NO: 1135687 - RNA, 19 nt, Homo sapiens
  misc_RNA (1)...(19): siRNA sense strand
gaaacaauaucgccaagag

SEQ ID NO: 1135688 - RNA, 19 nt, Homo sapiens
  misc_RNA (1)...(19): siRNA sense strand
ggaaccauuucuucuauau

SEQ ID NO: 1135689 - RNA, 19 nt, Homo sapiens
  misc_RNA (1)...(19): siRNA sense strand
caacuucaggccacuauua

SEQ ID NO: 1135690 - RNA, 19 nt, Homo sapiens
  misc_RNA (1)...(19): siRNA sense strand
ggucuccacuugugucuaa

SEQ ID NO: 1135691 - RNA, 19 nt, Homo sapiens
  misc_RNA (1)...(19): siRNA sense strand
ucagugaccuucagauaga

SEQ ID NO: 1135692 - RNA, 19 nt, Homo sapiens
  misc_RNA (1)...(19): siRNA sense strand
cagcaggugucgaauuaaa

SEQ ID NO: 1135693 - RNA, 19 nt, Homo sapiens
  misc_RNA (1)...(19): siRNA sense strand
agucacggcuggucaauaa

SEQ ID NO: 1135694 - RNA, 19 nt, Homo sapiens
  misc_RNA (1)...(19): siRNA sense strand
ucacaucacacugcaauua

SEQ ID NO: 1135695 - RNA, 19 nt, Homo sapiens
  misc_RNA (1)...(19): siRNA sense strand
ggagcaccuuucauuguaa

SEQ ID NO: 1135696 - RNA, 19 nt, Homo sapiens
  misc_RNA (1)...(19): siRNA sense strand
gugaacaggaguuuacuua

SEQ ID NO: 1135697 - RNA, 19 nt, Homo sapiens
  misc_RNA (1)...(19): siRNA sense strand
gaaauacuaauccagagaa

SEQ ID NO: 1135698 - RNA, 19 nt, Homo sapiens
  misc_RNA (1)...(19): siRNA sense strand
gaucagcuuuggagggauu

SEQ ID NO: 1135699 - RNA, 19 nt, Homo sapiens
  misc_RNA (1)...(19): siRNA sense strand
gcagucaugugaagccuau

SEQ ID NO: 1135700 - RNA, 19 nt, Homo sapiens
  misc_RNA (1)...(19): siRNA sense strand
aaacuuaagucgaaucucu

SEQ ID NO: 1135701 - RNA, 19 nt, Homo sapiens
  misc_RNA (1)...(19): siRNA sense strand
gcagagugaugggauucua

SEQ ID NO: 1135702 - RNA, 19 nt, Homo sapiens
  misc_RNA (1)...(19): siRNA sense strand
cuauauagauucagaugga

SEQ ID NO: 1135703 - RNA, 19 nt, Homo sapiens
  misc_RNA (1)...(19): siRNA sense strand
uaacaagagucagaaauac

SEQ ID NO: 1135704 - RNA, 19 nt, Homo sapiens
  misc_RNA (1)...(19): siRNA sense strand
guaggaagaaccaaugaaa

SEQ ID NO: 1135705 - RNA, 19 nt, Homo sapiens
  misc_RNA (1)...(19): siRNA sense strand
ccagcuaccuccugauguu

SEQ ID NO: 1135706 - RNA, 19 nt, Homo sapiens
  misc_RNA (1)...(19): siRNA sense strand
gcacagaggaaauacuuca

SEQ ID NO: 1135707 - RNA, 19 nt, Homo sapiens
  misc_RNA (1)...(19): siRNA sense strand
uggagcaccuuucauugua

SEQ ID NO: 1135708 - RNA, 19 nt, Homo sapiens
  misc_RNA (1)...(19): siRNA sense strand
gaacuucagugaccuucag

SEQ ID NO: 1135709 - RNA, 19 nt, Homo sapiens
  misc_RNA (1)...(19): siRNA sense strand
gaucauugcuaugggaaau

SEQ ID NO: 1135710 - RNA, 19 nt, Homo sapiens
  misc_RNA (1)...(19): siRNA sense strand
cagaagugguugaucuuga

SEQ ID NO: 1135711 - RNA, 19 nt, Homo sapiens
  misc_RNA (1)...(19): siRNA sense strand
ccaaugaaacgcaaaccua

SEQ ID NO: 1135712 - RNA, 19 nt, Homo sapiens
  misc_RNA (1)...(19): siRNA sense strand
guucggaugugcauacaga

SEQ ID NO: 1135713 - RNA, 19 nt, Homo sapiens
  misc_RNA (1)...(19): siRNA sense strand
caauuucgaacuuggaaua

SEQ ID NO: 1135714 - RNA, 19 nt, Homo sapiens
  misc_RNA (1)...(19): siRNA sense strand
gcaaagugguagaucugau

SEQ ID NO: 1135715 - RNA, 19 nt, Homo sapiens
  misc_RNA (1)...(19): siRNA sense strand
ggccugagcagauuuauuc

SEQ ID NO: 1135716 - RNA, 19 nt, Homo sapiens
  misc_RNA (1)...(19): siRNA sense strand
aaauggagaucacaucaca

SEQ ID NO: 1135717 - RNA, 19 nt, Homo sapiens
  misc_RNA (1)...(19): siRNA sense strand
gcaauuaagaagagcaaga

SEQ ID NO: 1135718 - RNA, 19 nt, Homo sapiens
  misc_RNA (1)...(19): siRNA sense strand
gcaaaugcagacaguguug

SEQ ID NO: 1135719 - RNA, 19 nt, Homo sapiens
  misc_RNA (1)...(19): siRNA sense strand
ucagugucauucccacaua

SEQ ID NO: 1135720 - RNA, 19 nt, Homo sapiens
  misc_RNA (1)...(19): siRNA sense strand
cagacaguguuguguacua

SEQ ID NO: 1135721 - RNA, 19 nt, Homo sapiens
  misc_RNA (1)...(19): siRNA sense strand
gcaguggcauucugucucu

SEQ ID NO: 1135722 - RNA, 19 nt, Homo sapiens
  misc_RNA (1)...(19): siRNA sense strand
ggaaauacuucaggguuuu

SEQ ID NO: 1135723 - RNA, 19 nt, Homo sapiens
  misc_RNA (1)...(19): siRNA sense strand
uauaagcacagaggaaaua

SEQ ID NO: 1135724 - RNA, 19 nt, Homo sapiens
  misc_RNA (1)...(19): siRNA sense strand
caaagugguagaucugauu

SEQ ID NO: 1135725 - RNA, 19 nt, Homo sapiens
  misc_RNA (1)...(19): siRNA sense strand
gaaugcgaaucgaaguguu

SEQ ID NO: 1135726 - RNA, 19 nt, Homo sapiens
  misc_RNA (1)...(19): siRNA sense strand
cacaacggcucugacuuaa

SEQ ID NO: 1135727 - RNA, 19 nt, Homo sapiens
  misc_RNA (1)...(19): siRNA sense strand
cauuguaacuguaccaaca

SEQ ID NO: 1135728 - RNA, 19 nt, Homo sapiens
  misc_RNA (1)...(19): siRNA sense strand
gguguuugcccaacuauug

SEQ ID NO: 1135729 - RNA, 19 nt, Homo sapiens
  misc_RNA (1)...(19): siRNA sense strand
gcaggugucgaauuaaaug

SEQ ID NO: 1135730 - RNA, 19 nt, Homo sapiens
  misc_RNA (1)...(19): siRNA sense strand
gaucacaucacacugcaau

SEQ ID NO: 1135731 - RNA, 19 nt, Homo sapiens
  misc_RNA (1)...(19): siRNA sense strand
acaagagucagaaauacua

SEQ ID NO: 1135732 - RNA, 19 nt, Homo sapiens
  misc_RNA (1)...(19): siRNA sense strand
ggauuugcaaggcugaaua

SEQ ID NO: 1135733 - RNA, 19 nt, Homo sapiens
  misc_RNA (1)...(19): siRNA sense strand
aggaaauacuucaggguuu

SEQ ID NO: 1135734 - RNA, 19 nt, Homo sapiens
  misc_RNA (1)...(19): siRNA sense strand
caucacagcaggugucgaa

SEQ ID NO: 1135735 - RNA, 19 nt, Homo sapiens
  misc_RNA (1)...(19): siRNA sense strand
aaccacagaucauugcuau

SEQ ID NO: 1135736 - RNA, 19 nt, Homo sapiens
  misc_RNA (1)...(19): siRNA sense strand
ggauuucagggauguauga

SEQ ID NO: 1135737 - RNA, 19 nt, Homo sapiens
  misc_RNA (1)...(19): siRNA sense strand
guggcauucugucucuuua

SEQ ID NO: 1135738 - RNA, 19 nt, Homo sapiens
  misc_RNA (1)...(19): siRNA sense strand
gguauccuccucuuucuga

SEQ ID NO: 1135739 - RNA, 19 nt, Homo sapiens
  misc_RNA (1)...(19): siRNA sense strand
ggcuggaacuggaaacaau

SEQ ID NO: 1135740 - RNA, 19 nt, Homo sapiens
  misc_RNA (1)...(19): siRNA sense strand
gaggagcuacuugccauaa

SEQ ID NO: 1135741 - RNA, 19 nt, Homo sapiens
  misc_RNA (1)...(19): siRNA sense strand
agacucauguggcaucuca

SEQ ID NO: 1135742 - RNA, 19 nt, Homo sapiens
  misc_RNA (1)...(19): siRNA sense strand
ugguugaucuugauggaaa

SEQ ID NO: 1135743 - RNA, 19 nt, Homo sapiens
  misc_RNA (1)...(19): siRNA sense strand
cugcauugauucucaguau

SEQ ID NO: 1135744 - RNA, 19 nt, Homo sapiens
  misc_RNA (1)...(19): siRNA sense strand
ggagcuacuugccauaacu

SEQ ID NO: 1135745 - RNA, 19 nt, Homo sapiens
  misc_RNA (1)...(19): siRNA sense strand
ggugucgaauuaaaugaug

SEQ ID NO: 1135746 - RNA, 19 nt, Homo sapiens
  misc_RNA (1)...(19): siRNA sense strand
guucacaaccacaaucuau

SEQ ID NO: 1135747 - RNA, 19 nt, Homo sapiens
  misc_RNA (1)...(19): siRNA sense strand
uugcaaggcugaauagaag

SEQ ID NO: 1135748 - RNA, 19 nt, Homo sapiens
  misc_RNA (1)...(19): siRNA sense strand
gaacacaggcaucauuucc

SEQ ID NO: 1135749 - RNA, 19 nt, Homo sapiens
  misc_RNA (1)...(19): siRNA sense strand
aaaguucccuucucuacag

SEQ ID NO: 1135750 - RNA, 19 nt, Homo sapiens
  misc_RNA (1)...(19): siRNA sense strand
ccacagaucauugcuaugg

SEQ ID NO: 1135751 - RNA, 19 nt, Homo sapiens
  misc_RNA (1)...(19): siRNA sense strand
gacgaacacaggcaucauu

SEQ ID NO: 1135752 - RNA, 19 nt, Homo sapiens
  misc_RNA (1)...(19): siRNA sense strand
auacagaucagaagugguu

SEQ ID NO: 1135753 - RNA, 19 nt, Homo sapiens
  misc_RNA (1)...(19): siRNA sense strand
uggaaccauuucuucuaua

SEQ ID NO: 1135754 - RNA, 19 nt, Homo sapiens
  misc_RNA (1)...(19): siRNA sense strand
acacugcaauuaagaagag

SEQ ID NO: 1135755 - RNA, 19 nt, Homo sapiens
  misc_RNA (1)...(19): siRNA sense strand
gcuggaacuggaaacaaua

SEQ ID NO: 1135756 - RNA, 19 nt, Homo sapiens
  misc_RNA (1)...(19): siRNA sense strand
agaagugguugaucuugau

SEQ ID NO: 1135757 - RNA, 19 nt, Homo sapiens
  misc_RNA (1)...(19): siRNA sense strand
caagagucagaaauacuaa

SEQ ID NO: 1135758 - RNA, 19 nt, Homo sapiens
  misc_RNA (1)...(19): siRNA sense strand
uaucagcggcaaaguggua

SEQ ID NO: 1135759 - RNA, 19 nt, Homo sapiens
  misc_RNA (1)...(19): siRNA sense strand
ggcauucugucucuuuauc

SEQ ID NO: 1135760 - RNA, 19 nt, Homo sapiens
  misc_RNA (1)...(19): siRNA sense strand
ggagguuucugccacuuuu

SEQ ID NO: 1135761 - RNA, 19 nt, Homo sapiens
  misc_RNA (1)...(19): siRNA sense strand
aaucuaugcccgugacuuu

SEQ ID NO: 1135762 - RNA, 19 nt, Homo sapiens
  misc_RNA (1)...(19): siRNA sense strand
ccaaauggagaucacauca

SEQ ID NO: 1135763 - RNA, 19 nt, Homo sapiens
  misc_RNA (1)...(19): siRNA sense strand
ucaaaaccaugcagaguga

SEQ ID NO: 1135764 - RNA, 19 nt, Homo sapiens
  misc_RNA (1)...(19): siRNA sense strand
gaauuggaaugcgaaucga

SEQ ID NO: 1135765 - RNA, 19 nt, Homo sapiens
  misc_RNA (1)...(19): siRNA sense strand
cuacuugccauaacucuau

SEQ ID NO: 1135766 - RNA, 19 nt, Homo sapiens
  misc_RNA (1)...(19): siRNA sense strand
acacaggcaucauuuccau

SEQ ID NO: 1135767 - RNA, 19 nt, Homo sapiens
  misc_RNA (1)...(19): siRNA sense strand
acuccagccuucuaucaaa

SEQ ID NO: 1135768 - RNA, 19 nt, Homo sapiens
  misc_RNA (1)...(19): siRNA sense strand
cuggaaccauuucuucuau

SEQ ID NO: 1135769 - RNA, 19 nt, Homo sapiens
  misc_RNA (1)...(19): siRNA sense strand
acagguguuugcccaacua

SEQ ID NO: 1135770 - RNA, 19 nt, Homo sapiens
  misc_RNA (1)...(19): siRNA sense strand
ucacagcaggugucgaauu

SEQ ID NO: 1135771 - RNA, 19 nt, Homo sapiens
  misc_RNA (1)...(19): siRNA sense strand
gaucagcauuggcauucag

SEQ ID NO: 1135772 - RNA, 19 nt, Homo sapiens
  misc_RNA (1)...(19): siRNA sense strand
cacaucacacugcaauuaa

SEQ ID NO: 1135773 - RNA, 19 nt, Homo sapiens
  misc_RNA (1)...(19): siRNA sense strand
ggaaugcgaaucgaagugu

SEQ ID NO: 1135774 - RNA, 19 nt, Homo sapiens
  misc_RNA (1)...(19): siRNA sense strand
guucuucgccugaucuuca

SEQ ID NO: 1135775 - RNA, 19 nt, Homo sapiens
  misc_RNA (1)...(19): siRNA sense strand
ugacugugaugauccucuu

SEQ ID NO: 1135776 - RNA, 19 nt, Homo sapiens
  misc_RNA (1)...(19): siRNA sense strand
gauugaccuuggagagaga

SEQ ID NO: 1135777 - RNA, 19 nt, Homo sapiens
  misc_RNA (1)...(19): siRNA sense strand
gaugaucagcauuggcauu

SEQ ID NO: 1135778 - RNA, 19 nt, Homo sapiens
  misc_RNA (1)...(19): siRNA sense strand
gcuaaacugccuuccacuu

SEQ ID NO: 1135779 - RNA, 19 nt, Homo sapiens
  misc_RNA (1)...(19): siRNA sense strand
gaccagcuaccuccugaug

SEQ ID NO: 1135780 - RNA, 19 nt, Homo sapiens
  misc_RNA (1)...(19): siRNA sense strand
gaacaggaguuuacuuauu

SEQ ID NO: 1135781 - RNA, 19 nt, Homo sapiens
  misc_RNA (1)...(19): siRNA sense strand
gcacaacggcucugacuua

SEQ ID NO: 1135782 - RNA, 19 nt, Homo sapiens
  misc_RNA (1)...(19): siRNA sense strand
gagggaaacugcauugauu

SEQ ID NO: 1135783 - RNA, 19 nt, Homo sapiens
  misc_RNA (1)...(19): siRNA sense strand
cacagcaggugucgaauua

SEQ ID NO: 1135784 - RNA, 19 nt, Homo sapiens
  misc_RNA (1)...(19): siRNA sense strand
gaaacugcauugauucuca

SEQ ID NO: 1135785 - RNA, 19 nt, Homo sapiens
  misc_RNA (1)...(19): siRNA sense strand
gcauugauucucaguauua

SEQ ID NO: 1135786 - RNA, 19 nt, Homo sapiens
  misc_RNA (1)...(19): siRNA sense strand
caacggcucugacuuaaca

SEQ ID NO: 1135787 - RNA, 19 nt, Homo sapiens
  misc_RNA (1)...(19): siRNA sense strand
gaaacaauaucgccaagag

SEQ ID NO: 1135788 - RNA, 19 nt, Homo sapiens
  misc_RNA (1)...(19): siRNA sense strand
ggaaccauuucuucuauau

SEQ ID NO: 1135789 - RNA, 19 nt, Homo sapiens
  misc_RNA (1)...(19): siRNA sense strand
caacuucaggccacuauua

SEQ ID NO: 1135790 - RNA, 19 nt, Homo sapiens
  misc_RNA (1)...(19): siRNA sense strand
ggucuccacuugugucuaa

SEQ ID NO: 1135791 - RNA, 19 nt, Homo sapiens
  misc_RNA (1)...(19): siRNA sense strand
ucagugaccuucagauaga

SEQ ID NO: 1135792 - RNA, 19 nt, Homo sapiens
  misc_RNA (1)...(19): siRNA sense strand
cagcaggugucgaauuaaa

SEQ ID NO: 1135793 - RNA, 19 nt, Homo sapiens
  misc_RNA (1)...(19): siRNA sense strand
agucacggcuggucaauaa

SEQ ID NO: 1135794 - RNA, 19 nt, Homo sapiens
  misc_RNA (1)...(19): siRNA sense strand
ucacaucacacugcaauua

SEQ ID NO: 1135795 - RNA, 19 nt, Homo sapiens
  misc_RNA (1)...(19): siRNA sense strand
ggagcaccuuucauuguaa

SEQ ID NO: 1135796 - RNA, 19 nt, Homo sapiens
  misc_RNA (1)...(19): siRNA sense strand
gugaacaggaguuuacuua

SEQ ID NO: 1135797 - RNA, 19 nt, Homo sapiens
  misc_RNA (1)...(19): siRNA sense strand
gaaauacuaauccagagaa

SEQ ID NO: 1135798 - RNA, 19 nt, Homo sapiens
  misc_RNA (1)...(19): siRNA sense strand
gaucagcuuuggagggauu

SEQ ID NO: 1135799 - RNA, 19 nt, Homo sapiens
  misc_RNA (1)...(19): siRNA sense strand
gcagucaugugaagccuau

SEQ ID NO: 1135800 - RNA, 19 nt, Homo sapiens
  misc_RNA (1)...(19): siRNA sense strand
aaacuuaagucgaaucucu

SEQ ID NO: 1135801 - RNA, 19 nt, Homo sapiens
  misc_RNA (1)...(19): siRNA sense strand
gcagagugaugggauucua

SEQ ID NO: 1135802 - RNA, 19 nt, Homo sapiens
  misc_RNA (1)...(19): siRNA sense strand
cuauauagauucagaugga

SEQ ID NO: 1135803 - RNA, 19 nt, Homo sapiens
  misc_RNA (1)...(19): siRNA sense strand
uaacaagagucagaaauac

SEQ ID NO: 1135804 - RNA, 19 nt, Homo sapiens
  misc_RNA (1)...(19): siRNA sense strand
guaggaagaaccaaugaaa

SEQ ID NO: 1135805 - RNA, 19 nt, Homo sapiens
  misc_RNA (1)...(19): siRNA sense strand
ccagcuaccuccugauguu

SEQ ID NO: 1135806 - RNA, 19 nt, Homo sapiens
  misc_RNA (1)...(19): siRNA sense strand
gcacagaggaaauacuuca

SEQ ID NO: 1135807 - RNA, 19 nt, Homo sapiens
  misc_RNA (1)...(19): siRNA sense strand
uggagcaccuuucauugua

SEQ ID NO: 1135808 - RNA, 19 nt, Homo sapiens
  misc_RNA (1)...(19): siRNA sense strand
gaacuucagugaccuucag

SEQ ID NO: 1135809 - RNA, 19 nt, Homo sapiens
  misc_RNA (1)...(19): siRNA sense strand
gaucauugcuaugggaaau

SEQ ID NO: 1135810 - RNA, 19 nt, Homo sapiens
  misc_RNA (1)...(19): siRNA sense strand
cagaagugguugaucuuga

SEQ ID NO: 1135811 - RNA, 19 nt, Homo sapiens
  misc_RNA (1)...(19): siRNA sense strand
ccaaugaaacgcaaaccua

SEQ ID NO: 1135812 - RNA, 19 nt, Homo sapiens
  misc_RNA (1)...(19): siRNA sense strand
guucggaugugcauacaga

SEQ ID NO: 1135813 - RNA, 19 nt, Homo sapiens
  misc_RNA (1)...(19): siRNA sense strand
caauuucgaacuuggaaua

SEQ ID NO: 1135814 - RNA, 19 nt, Homo sapiens
  misc_RNA (1)...(19): siRNA sense strand
gcaaagugguagaucugau

SEQ ID NO: 1135815 - RNA, 19 nt, Homo sapiens
  misc_RNA (1)...(19): siRNA sense strand
ggccugagcagauuuauuc

SEQ ID NO: 1135816 - RNA, 19 nt, Homo sapiens
  misc_RNA (1)...(19): siRNA sense strand
aaauggagaucacaucaca

SEQ ID NO: 1135817 - RNA, 19 nt, Homo sapiens
  misc_RNA (1)...(19): siRNA sense strand
gcaauuaagaagagcaaga

SEQ ID NO: 1135818 - RNA, 19 nt, Homo sapiens
  misc_RNA (1)...(19): siRNA sense strand
gcaaaugcagacaguguug

SEQ ID NO: 1135819 - RNA, 19 nt, Homo sapiens
  misc_RNA (1)...(19): siRNA sense strand
ucagugucauucccacaua

SEQ ID NO: 1135820 - RNA, 19 nt, Homo sapiens
  misc_RNA (1)...(19): siRNA sense strand
cagacaguguuguguacua

SEQ ID NO: 1135821 - RNA, 19 nt, Homo sapiens
  misc_RNA (1)...(19): siRNA sense strand
gcaguggcauucugucucu

SEQ ID NO: 1135822 - RNA, 19 nt, Homo sapiens
  misc_RNA (1)...(19): siRNA sense strand
ggaaauacuucaggguuuu

SEQ ID NO: 1135823 - RNA, 19 nt, Homo sapiens
  misc_RNA (1)...(19): siRNA sense strand
uauaagcacagaggaaaua

SEQ ID NO: 1135824 - RNA, 19 nt, Homo sapiens
  misc_RNA (1)...(19): siRNA sense strand
caaagugguagaucugauu

SEQ ID NO: 1135825 - RNA, 19 nt, Homo sapiens
  misc_RNA (1)...(19): siRNA sense strand
gaaugcgaaucgaaguguu

SEQ ID NO: 1135826 - RNA, 19 nt, Homo sapiens
  misc_RNA (1)...(19): siRNA sense strand
cacaacggcucugacuuaa

SEQ ID NO: 1135827 - RNA, 19 nt, Homo sapiens
  misc_RNA (1)...(19): siRNA sense strand
cauuguaacuguaccaaca

SEQ ID NO: 1135828 - RNA, 19 nt, Homo sapiens
  misc_RNA (1)...(19): siRNA sense strand
gguguuugcccaacuauug

SEQ ID NO: 1135829 - RNA, 19 nt, Homo sapiens
  misc_RNA (1)...(19): siRNA sense strand
gcaggugucgaauuaaaug

SEQ ID NO: 1135830 - RNA, 19 nt, Homo sapiens
  misc_RNA (1)...(19): siRNA sense strand
gaucacaucacacugcaau

SEQ ID NO: 1135831 - RNA, 19 nt, Homo sapiens
  misc_RNA (1)...(19): siRNA sense strand
acaagagucagaaauacua

SEQ ID NO: 1135832 - RNA, 19 nt, Homo sapiens
  misc_RNA (1)...(19): siRNA sense strand
ggauuugcaaggcugaaua

SEQ ID NO: 1135833 - RNA, 19 nt, Homo sapiens
  misc_RNA (1)...(19): siRNA sense strand
aggaaauacuucaggguuu

SEQ ID NO: 1135834 - RNA, 19 nt, Homo sapiens
  misc_RNA (1)...(19): siRNA sense strand
caucacagcaggugucgaa

SEQ ID NO: 1135835 - RNA, 19 nt, Homo sapiens
  misc_RNA (1)...(19): siRNA sense strand
aaccacagaucauugcuau

SEQ ID NO: 1135836 - RNA, 19 nt, Homo sapiens
  misc_RNA (1)...(19): siRNA sense strand
ggauuucagggauguauga

SEQ ID NO: 1135837 - RNA, 19 nt, Homo sapiens
  misc_RNA (1)...(19): siRNA sense strand
guggcauucugucucuuua

SEQ ID NO: 1135838 - RNA, 19 nt, Homo sapiens
  misc_RNA (1)...(19): siRNA sense strand
gguauccuccucuuucuga

SEQ ID NO: 1135839 - RNA, 19 nt, Homo sapiens
  misc_RNA (1)...(19): siRNA sense strand
ggcuggaacuggaaacaau

SEQ ID NO: 1135840 - RNA, 19 nt, Homo sapiens
  misc_RNA (1)...(19): siRNA sense strand
gaggagcuacuugccauaa

SEQ ID NO: 1135841 - RNA, 19 nt, Homo sapiens
  misc_RNA (1)...(19): siRNA sense strand
agacucauguggcaucuca

SEQ ID NO: 1135842 - RNA, 19 nt, Homo sapiens
  misc_RNA (1)...(19): siRNA sense strand
ugguugaucuugauggaaa

SEQ ID NO: 1135843 - RNA, 19 nt, Homo sapiens
  misc_RNA (1)...(19): siRNA sense strand
cugcauugauucucaguau

SEQ ID NO: 1135844 - RNA, 19 nt, Homo sapiens
  misc_RNA (1)...(19): siRNA sense strand
ggagcuacuugccauaacu

SEQ ID NO: 1135845 - RNA, 19 nt, Homo sapiens
  misc_RNA (1)...(19): siRNA sense strand
ggugucgaauuaaaugaug

SEQ ID NO: 1135846 - RNA, 19 nt, Homo sapiens
  misc_RNA (1)...(19): siRNA sense strand
guucacaaccacaaucuau

SEQ ID NO: 1135847 - RNA, 19 nt, Homo sapiens
  misc_RNA (1)...(19): siRNA sense strand
uugcaaggcugaauagaag

SEQ ID NO: 1135848 - RNA, 19 nt, Homo sapiens
  misc_RNA (1)...(19): siRNA sense strand
gaacacaggcaucauuucc

SEQ ID NO: 1135849 - RNA, 19 nt, Homo sapiens
  misc_RNA (1)...(19): siRNA sense strand
aaaguucccuucucuacag

SEQ ID NO: 1135850 - RNA, 19 nt, Homo sapiens
  misc_RNA (1)...(19): siRNA sense strand
ccacagaucauugcuaugg

SEQ ID NO: 1135851 - RNA, 19 nt, Homo sapiens
  misc_RNA (1)...(19): siRNA sense strand
gacgaacacaggcaucauu

SEQ ID NO: 1135852 - RNA, 19 nt, Homo sapiens
  misc_RNA (1)...(19): siRNA sense strand
auacagaucagaagugguu

SEQ ID NO: 1135853 - RNA, 19 nt, Homo sapiens
  misc_RNA (1)...(19): siRNA sense strand
uggaaccauuucuucuaua

SEQ ID NO: 1135854 - RNA, 19 nt, Homo sapiens
  misc_RNA (1)...(19): siRNA sense strand
acacugcaauuaagaagag

SEQ ID NO: 1135855 - RNA, 19 nt, Homo sapiens
  misc_RNA (1)...(19): siRNA sense strand
gcuggaacuggaaacaaua

SEQ ID NO: 1135856 - RNA, 19 nt, Homo sapiens
  misc_RNA (1)...(19): siRNA sense strand
agaagugguugaucuugau

SEQ ID NO: 1135857 - RNA, 19 nt, Homo sapiens
  misc_RNA (1)...(19): siRNA sense strand
caagagucagaaauacuaa

SEQ ID NO: 1135858 - RNA, 19 nt, Homo sapiens
  misc_RNA (1)...(19): siRNA sense strand
uaucagcggcaaaguggua

SEQ ID NO: 1135859 - RNA, 19 nt, Homo sapiens
  misc_RNA (1)...(19): siRNA sense strand
ggcauucugucucuuuauc

SEQ ID NO: 1135860 - RNA, 19 nt, Homo sapiens
  misc_RNA (1)...(19): siRNA sense strand
ggagguuucugccacuuuu

SEQ ID NO: 1135861 - RNA, 19 nt, Homo sapiens
  misc_RNA (1)...(19): siRNA sense strand
aaucuaugcccgugacuuu

SEQ ID NO: 1135862 - RNA, 19 nt, Homo sapiens
  misc_RNA (1)...(19): siRNA sense strand
ccaaauggagaucacauca

SEQ ID NO: 1135863 - RNA, 19 nt, Homo sapiens
  misc_RNA (1)...(19): siRNA sense strand
ucaaaaccaugcagaguga

SEQ ID NO: 1135864 - RNA, 19 nt, Homo sapiens
  misc_RNA (1)...(19): siRNA sense strand
gaauuggaaugcgaaucga

SEQ ID NO: 1135865 - RNA, 19 nt, Homo sapiens
  misc_RNA (1)...(19): siRNA sense strand
cuacuugccauaacucuau

SEQ ID NO: 1135866 - RNA, 19 nt, Homo sapiens
  misc_RNA (1)...(19): siRNA sense strand
acacaggcaucauuuccau

SEQ ID NO: 1135867 - RNA, 19 nt, Homo sapiens
  misc_RNA (1)...(19): siRNA sense strand
acuccagccuucuaucaaa

SEQ ID NO: 1135868 - RNA, 19 nt, Homo sapiens
  misc_RNA (1)...(19): siRNA sense strand
cuggaaccauuucuucuau

SEQ ID NO: 1135869 - RNA, 19 nt, Homo sapiens
  misc_RNA (1)...(19): siRNA sense strand
acagguguuugcccaacua

SEQ ID NO: 1135870 - RNA, 19 nt, Homo sapiens
  misc_RNA (1)...(19): siRNA sense strand
ucacagcaggugucgaauu

SEQ ID NO: 1135871 - RNA, 19 nt, Homo sapiens
  misc_RNA (1)...(19): siRNA sense strand
gaucagcauuggcauucag

SEQ ID NO: 1135872 - RNA, 19 nt, Homo sapiens
  misc_RNA (1)...(19): siRNA sense strand
cacaucacacugcaauuaa

SEQ ID NO: 1135873 - RNA, 19 nt, Homo sapiens
  misc_RNA (1)...(19): siRNA sense strand
ggaaugcgaaucgaagugu

SEQ ID NO: 1135874 - RNA, 19 nt, Homo sapiens
  misc_RNA (1)...(19): siRNA sense strand
guucuucgccugaucuuca

SEQ ID NO: 1135875 - RNA, 19 nt, Homo sapiens
  misc_RNA (1)...(19): siRNA sense strand
ugacugugaugauccucuu

SEQ ID NO: 1135876 - RNA, 19 nt, Homo sapiens
  misc_RNA (1)...(19): siRNA sense strand
gauugaccuuggagagaga

SEQ ID NO: 1135877 - RNA, 19 nt, Homo sapiens
  misc_RNA (1)...(19): siRNA sense strand
gaugaucagcauuggcauu

SEQ ID NO: 1135878 - RNA, 19 nt, Homo sapiens
  misc_RNA (1)...(19): siRNA sense strand
gcuaaacugccuuccacuu

SEQ ID NO: 1135879 - RNA, 19 nt, Homo sapiens
  misc_RNA (1)...(19): siRNA sense strand
gaccagcuaccuccugaug

SEQ ID NO: 1135880 - RNA, 19 nt, Homo sapiens
  misc_RNA (1)...(19): siRNA sense strand
gcaauuggccaacuucuuu

SEQ ID NO: 1135881 - RNA, 19 nt, Homo sapiens
  misc_RNA (1)...(19): siRNA sense strand
gaacguggcagaaaucuac

SEQ ID NO: 1135882 - RNA, 19 nt, Homo sapiens
  misc_RNA (1)...(19): siRNA sense strand
caaggauuguggaguuaaa

SEQ ID NO: 1135883 - RNA, 19 nt, Homo sapiens
  misc_RNA (1)...(19): siRNA sense strand
ccucugaucugguguuugu

SEQ ID NO: 1135884 - RNA, 19 nt, Homo sapiens
  misc_RNA (1)...(19): siRNA sense strand
ccaauaucuucaucccaua

SEQ ID NO: 1135885 - RNA, 19 nt, Homo sapiens
  misc_RNA (1)...(19): siRNA sense strand
caacugaacguggcagaaa

SEQ ID NO: 1135886 - RNA, 19 nt, Homo sapiens
  misc_RNA (1)...(19): siRNA sense strand
ucugggaacuuuauaaaca

SEQ ID NO: 1135887 - RNA, 19 nt, Homo sapiens
  misc_RNA (1)...(19): siRNA sense strand
caugaggccuggcacuuug

SEQ ID NO: 1135888 - RNA, 19 nt, Homo sapiens
  misc_RNA (1)...(19): siRNA sense strand
caucaaggccaauuuguuc

SEQ ID NO: 1135889 - RNA, 19 nt, Homo sapiens
  misc_RNA (1)...(19): siRNA sense strand
acuaacagcucccugaauc

SEQ ID NO: 1135890 - RNA, 19 nt, Homo sapiens
  misc_RNA (1)...(19): siRNA sense strand
ggucugggaacuuuauaaa

SEQ ID NO: 1135891 - RNA, 19 nt, Homo sapiens
  misc_RNA (1)...(19): siRNA sense strand
caacuuuucuggcggaauu

SEQ ID NO: 1135892 - RNA, 19 nt, Homo sapiens
  misc_RNA (1)...(19): siRNA sense strand
gcaaggauuguggaguuaa

SEQ ID NO: 1135893 - RNA, 19 nt, Homo sapiens
  misc_RNA (1)...(19): siRNA sense strand
ggucaucaaggccaauuug

SEQ ID NO: 1135894 - RNA, 19 nt, Homo sapiens
  misc_RNA (1)...(19): siRNA sense strand
uaaaagucuugcuccaaua

SEQ ID NO: 1135895 - RNA, 19 nt, Homo sapiens
  misc_RNA (1)...(19): siRNA sense strand
ggauuguggaguuaaauau

SEQ ID NO: 1135896 - RNA, 19 nt, Homo sapiens
  misc_RNA (1)...(19): siRNA sense strand
uugcaaggauuguggaguu

SEQ ID NO: 1135897 - RNA, 19 nt, Homo sapiens
  misc_RNA (1)...(19): siRNA sense strand
caacuucuuugccuucacu

SEQ ID NO: 1135898 - RNA, 19 nt, Homo sapiens
  misc_RNA (1)...(19): siRNA sense strand
agccagcucuucccucaaa

SEQ ID NO: 1135899 - RNA, 19 nt, Homo sapiens
  misc_RNA (1)...(19): siRNA sense strand
ggaacuuuauaaacaaugc

SEQ ID NO: 1135900 - RNA, 19 nt, Homo sapiens
  misc_RNA (1)...(19): siRNA sense strand
gcgaucgucuucuucaacu

SEQ ID NO: 1135901 - RNA, 19 nt, Homo sapiens
  misc_RNA (1)...(19): siRNA sense strand
gcuacggccugugacaaug

SEQ ID NO: 1135902 - RNA, 19 nt, Homo sapiens
  misc_RNA (1)...(19): siRNA sense strand
caaggucugggaacuuuau

SEQ ID NO: 1135903 - RNA, 19 nt, Homo sapiens
  misc_RNA (1)...(19): siRNA sense strand
ccaguaauuuaugucuuug

SEQ ID NO: 1135904 - RNA, 19 nt, Homo sapiens
  misc_RNA (1)...(19): siRNA sense strand
ccaauuuguucaucagcau

SEQ ID NO: 1135905 - RNA, 19 nt, Homo sapiens
  misc_RNA (1)...(19): siRNA sense strand
accaaggucugggaacuuu

SEQ ID NO: 1135906 - RNA, 19 nt, Homo sapiens
  misc_RNA (1)...(19): siRNA sense strand
gaccugggccugcaauugg

SEQ ID NO: 1135907 - RNA, 19 nt, Homo sapiens
  misc_RNA (1)...(19): siRNA sense strand
ugcaaggauuguggaguua

SEQ ID NO: 1135908 - RNA, 19 nt, Homo sapiens
  misc_RNA (1)...(19): siRNA sense strand
uuuaucaucuccaucuguu

SEQ ID NO: 1135909 - RNA, 19 nt, Homo sapiens
  misc_RNA (1)...(19): siRNA sense strand
ccaugaggccuggcacuuu

SEQ ID NO: 1135910 - RNA, 19 nt, Homo sapiens
  misc_RNA (1)...(19): siRNA sense strand
gaggaggucagcaggacaa

SEQ ID NO: 1135911 - RNA, 19 nt, Homo sapiens
  misc_RNA (1)...(19): siRNA sense strand
cauccaagccgucccagau

SEQ ID NO: 1135912 - RNA, 19 nt, Homo sapiens
  misc_RNA (1)...(19): siRNA sense strand
cccugaauccaguaauuua

SEQ ID NO: 1135913 - RNA, 19 nt, Homo sapiens
  misc_RNA (1)...(19): siRNA sense strand
cuaaaagucuugcuccaau

SEQ ID NO: 1135914 - RNA, 19 nt, Homo sapiens
  misc_RNA (1)...(19): siRNA sense strand
uggcugcgaucgucuucuu

SEQ ID NO: 1135915 - RNA, 19 nt, Homo sapiens
  misc_RNA (1)...(19): siRNA sense strand
cugggaacuuuauaaacaa

SEQ ID NO: 1135916 - RNA, 19 nt, Homo sapiens
  misc_RNA (1)...(19): siRNA sense strand
gaggucagcaggacaaggu

SEQ ID NO: 1135917 - RNA, 19 nt, Homo sapiens
  misc_RNA (1)...(19): siRNA sense strand
caaggccaauuuguucauc

SEQ ID NO: 1135918 - RNA, 19 nt, Homo sapiens
  misc_RNA (1)...(19): siRNA sense strand
aaacaaugcaccccuaaaa

SEQ ID NO: 1135919 - RNA, 19 nt, Homo sapiens
  misc_RNA (1)...(19): siRNA sense strand
uaucaucuccaucuguuuc

SEQ ID NO: 1135920 - RNA, 19 nt, Homo sapiens
  misc_RNA (1)...(19): siRNA sense strand
uauucuggguuuccuccua

SEQ ID NO: 1135921 - RNA, 19 nt, Homo sapiens
  misc_RNA (1)...(19): siRNA sense strand
ucaucaaggccaauuuguu

SEQ ID NO: 1135922 - RNA, 19 nt, Homo sapiens
  misc_RNA (1)...(19): siRNA sense strand
ucacuaacagcucccugaa

SEQ ID NO: 1135923 - RNA, 19 nt, Homo sapiens
  misc_RNA (1)...(19): siRNA sense strand
gaucgucuucuucaacuac

SEQ ID NO: 1135924 - RNA, 19 nt, Homo sapiens
  misc_RNA (1)...(19): siRNA sense strand
gcaacugaacguggcagaa

SEQ ID NO: 1135925 - RNA, 19 nt, Homo sapiens
  misc_RNA (1)...(19): siRNA sense strand
ccaaggucugggaacuuua

SEQ ID NO: 1135926 - RNA, 19 nt, Homo sapiens
  misc_RNA (1)...(19): siRNA sense strand
caaccuggcagccucugau

SEQ ID NO: 1135927 - RNA, 19 nt, Homo sapiens
  misc_RNA (1)...(19): siRNA sense strand
ugaccugggccugcaauug

SEQ ID NO: 1135928 - RNA, 19 nt, Homo sapiens
  misc_RNA (1)...(19): siRNA sense strand
gggaccugcugcacagagu

SEQ ID NO: 1135929 - RNA, 19 nt, Homo sapiens
  misc_RNA (1)...(19): siRNA sense strand
cucccugaauccaguaauu

SEQ ID NO: 1135930 - RNA, 19 nt, Homo sapiens
  misc_RNA (1)...(19): siRNA sense strand
caauuggccaacuucuuug

SEQ ID NO: 1135931 - RNA, 19 nt, Homo sapiens
  misc_RNA (1)...(19): siRNA sense strand
uaacagcucccugaaucca

SEQ ID NO: 1135932 - RNA, 19 nt, Homo sapiens
  misc_RNA (1)...(19): siRNA sense strand
gcacuuugcaaggauugug

SEQ ID NO: 1135933 - RNA, 19 nt, Homo sapiens
  misc_RNA (1)...(19): siRNA sense strand
ccugaauccaguaauuuau

SEQ ID NO: 1135934 - RNA, 19 nt, Homo sapiens
  misc_RNA (1)...(19): siRNA sense strand
cgaucgucuucuucaacua

SEQ ID NO: 1135935 - RNA, 19 nt, Homo sapiens
  misc_RNA (1)...(19): siRNA sense strand
aggauuguggaguuaaaua

SEQ ID NO: 1135936 - RNA, 19 nt, Homo sapiens
  misc_RNA (1)...(19): siRNA sense strand
gaacaaggauggucugcuu

SEQ ID NO: 1135937 - RNA, 19 nt, Homo sapiens
  misc_RNA (1)...(19): siRNA sense strand
gaaauaagcucuccuucag

SEQ ID NO: 1135938 - RNA, 19 nt, Homo sapiens
  misc_RNA (1)...(19): siRNA sense strand
ggacuaccuucuauuguaa

SEQ ID NO: 1135939 - RNA, 19 nt, Homo sapiens
  misc_RNA (1)...(19): siRNA sense strand
ggaauucagugccgauauu

SEQ ID NO: 1135940 - RNA, 19 nt, Homo sapiens
  misc_RNA (1)...(19): siRNA sense strand
ggaaacagaguagagauua

SEQ ID NO: 1135941 - RNA, 19 nt, Homo sapiens
  misc_RNA (1)...(19): siRNA sense strand
caacugugaugauccacua

SEQ ID NO: 1135942 - RNA, 19 nt, Homo sapiens
  misc_RNA (1)...(19): siRNA sense strand
cuacggauguuccuauaaa

SEQ ID NO: 1135943 - RNA, 19 nt, Homo sapiens
  misc_RNA (1)...(19): siRNA sense strand
gaauacagccggcuucuuc

SEQ ID NO: 1135944 - RNA, 19 nt, Homo sapiens
  misc_RNA (1)...(19): siRNA sense strand
ccaaggaccucauuucagu

SEQ ID NO: 1135945 - RNA, 19 nt, Homo sapiens
  misc_RNA (1)...(19): siRNA sense strand
ccauuuaccugguggauug

SEQ ID NO: 1135946 - RNA, 19 nt, Homo sapiens
  misc_RNA (1)...(19): siRNA sense strand
gaugugaucucccugaagu

SEQ ID NO: 1135947 - RNA, 19 nt, Homo sapiens
  misc_RNA (1)...(19): siRNA sense strand
cagaaaggcuuccuaggau

SEQ ID NO: 1135948 - RNA, 19 nt, Homo sapiens
  misc_RNA (1)...(19): siRNA sense strand
gaaagcaucagaucuauac

SEQ ID NO: 1135949 - RNA, 19 nt, Homo sapiens
  misc_RNA (1)...(19): siRNA sense strand
uaaaucccauuaaggcuuu

SEQ ID NO: 1135950 - RNA, 19 nt, Homo sapiens
  misc_RNA (1)...(19): siRNA sense strand
gacauugacuaugagcuua

SEQ ID NO: 1135951 - RNA, 19 nt, Homo sapiens
  misc_RNA (1)...(19): siRNA sense strand
aggcucaucuuuauugaua

SEQ ID NO: 1135952 - RNA, 19 nt, Homo sapiens
  misc_RNA (1)...(19): siRNA sense strand
gacagcaucuggaccuuug

SEQ ID NO: 1135953 - RNA, 19 nt, Homo sapiens
  misc_RNA (1)...(19): siRNA sense strand
gacaaaugauacuggcuuu

SEQ ID NO: 1135954 - RNA, 19 nt, Homo sapiens
  misc_RNA (1)...(19): siRNA sense strand
gacgaaagcaucagaucua

SEQ ID NO: 1135955 - RNA, 19 nt, Homo sapiens
  misc_RNA (1)...(19): siRNA sense strand
ggaaacaguacaaacaaga

SEQ ID NO: 1135956 - RNA, 19 nt, Homo sapiens
  misc_RNA (1)...(19): siRNA sense strand
uggacuaccuucuauugua

SEQ ID NO: 1135957 - RNA, 19 nt, Homo sapiens
  misc_RNA (1)...(19): siRNA sense strand
ccuuagacauugacuauga

SEQ ID NO: 1135958 - RNA, 19 nt, Homo sapiens
  misc_RNA (1)...(19): siRNA sense strand
gaaacaguacaaacaagaa

SEQ ID NO: 1135959 - RNA, 19 nt, Homo sapiens
  misc_RNA (1)...(19): siRNA sense strand
acacuugaauggacagaaa

SEQ ID NO: 1135960 - RNA, 19 nt, Homo sapiens
  misc_RNA (1)...(19): siRNA sense strand
gaugaauggacaaaugaua

SEQ ID NO: 1135961 - RNA, 19 nt, Homo sapiens
  misc_RNA (1)...(19): siRNA sense strand
gacaagaucuggacaucag

SEQ ID NO: 1135962 - RNA, 19 nt, Homo sapiens
  misc_RNA (1)...(19): siRNA sense strand
gaaacagaguagagauuac

SEQ ID NO: 1135963 - RNA, 19 nt, Homo sapiens
  misc_RNA (1)...(19): siRNA sense strand
ggaacgccgucucauuuua

SEQ ID NO: 1135964 - RNA, 19 nt, Homo sapiens
  misc_RNA (1)...(19): siRNA sense strand
ggcagcaacuugaaugaug

SEQ ID NO: 1135965 - RNA, 19 nt, Homo sapiens
  misc_RNA (1)...(19): siRNA sense strand
uaauugaccuggcuaagag

SEQ ID NO: 1135966 - RNA, 19 nt, Homo sapiens
  misc_RNA (1)...(19): siRNA sense strand
uaacagcgacaaacuacaa

SEQ ID NO: 1135967 - RNA, 19 nt, Homo sapiens
  misc_RNA (1)...(19): siRNA sense strand
cgacagaucaaacucagaa

SEQ ID NO: 1135968 - RNA, 19 nt, Homo sapiens
  misc_RNA (1)...(19): siRNA sense strand
aaagaccacuugccuguca

SEQ ID NO: 1135969 - RNA, 19 nt, Homo sapiens
  misc_RNA (1)...(19): siRNA sense strand
aaacuacugugaacaugga

SEQ ID NO: 1135970 - RNA, 19 nt, Homo sapiens
  misc_RNA (1)...(19): siRNA sense strand
gcucacuucuguacagguu

SEQ ID NO: 1135971 - RNA, 19 nt, Homo sapiens
  misc_RNA (1)...(19): siRNA sense strand
cgaaauaagcucuccuuca

SEQ ID NO: 1135972 - RNA, 19 nt, Homo sapiens
  misc_RNA (1)...(19): siRNA sense strand
uaacugcagugacacaagu

SEQ ID NO: 1135973 - RNA, 19 nt, Homo sapiens
  misc_RNA (1)...(19): siRNA sense strand
cuuguggcauuuaggauua

SEQ ID NO: 1135974 - RNA, 19 nt, Homo sapiens
  misc_RNA (1)...(19): siRNA sense strand
gaucuauacuggcaauguc

SEQ ID NO: 1135975 - RNA, 19 nt, Homo sapiens
  misc_RNA (1)...(19): siRNA sense strand
cuacaauggaguaaacaua

SEQ ID NO: 1135976 - RNA, 19 nt, Homo sapiens
  misc_RNA (1)...(19): siRNA sense strand
cgacaaacuacaacuguga

SEQ ID NO: 1135977 - RNA, 19 nt, Homo sapiens
  misc_RNA (1)...(19): siRNA sense strand
gauuaacagcgacaaacua

SEQ ID NO: 1135978 - RNA, 19 nt, Homo sapiens
  misc_RNA (1)...(19): siRNA sense strand
cugacugggugacgaguua

SEQ ID NO: 1135979 - RNA, 19 nt, Homo sapiens
  misc_RNA (1)...(19): siRNA sense strand
ggaacgucauccagacaga

SEQ ID NO: 1135980 - RNA, 19 nt, Homo sapiens
  misc_RNA (1)...(19): siRNA sense strand
ucagugaguuuccaguuuc

SEQ ID NO: 1135981 - RNA, 19 nt, Homo sapiens
  misc_RNA (1)...(19): siRNA sense strand
gcaugagagucgaggucua

SEQ ID NO: 1135982 - RNA, 19 nt, Homo sapiens
  misc_RNA (1)...(19): siRNA sense strand
gaagauacggaagcucuga

SEQ ID NO: 1135983 - RNA, 19 nt, Homo sapiens
  misc_RNA (1)...(19): siRNA sense strand
ccaaauugaugggcucuca

SEQ ID NO: 1135984 - RNA, 19 nt, Homo sapiens
  misc_RNA (1)...(19): siRNA sense strand
gggcgagacggaugccuua

SEQ ID NO: 1135985 - RNA, 19 nt, Homo sapiens
  misc_RNA (1)...(19): siRNA sense strand
cagguguacugcaauauca

SEQ ID NO: 1135986 - RNA, 19 nt, Homo sapiens
  misc_RNA (1)...(19): siRNA sense strand
cuccuucucuucugaauga

SEQ ID NO: 1135987 - RNA, 19 nt, Homo sapiens
  misc_RNA (1)...(19): siRNA sense strand
gaauucagugccgauauuu

SEQ ID NO: 1135988 - RNA, 19 nt, Homo sapiens
  misc_RNA (1)...(19): siRNA sense strand
aaggaugaauggacaaaug

SEQ ID NO: 1135989 - RNA, 19 nt, Homo sapiens
  misc_RNA (1)...(19): siRNA sense strand
caauaucacugaggacaag

SEQ ID NO: 1135990 - RNA, 19 nt, Homo sapiens
  misc_RNA (1)...(19): siRNA sense strand
acagaaaggcuuccuagga

SEQ ID NO: 1135991 - RNA, 19 nt, Homo sapiens
  misc_RNA (1)...(19): siRNA sense strand
ggcacucgguccucauuga

SEQ ID NO: 1135992 - RNA, 19 nt, Homo sapiens
  misc_RNA (1)...(19): siRNA sense strand
gggaaacagaguagagauu

SEQ ID NO: 1135993 - RNA, 19 nt, Homo sapiens
  misc_RNA (1)...(19): siRNA sense strand
gacaaccaauggcacuaug

SEQ ID NO: 1135994 - RNA, 19 nt, Homo sapiens
  misc_RNA (1)...(19): siRNA sense strand
ccaaacuacugugaacaug

SEQ ID NO: 1135995 - RNA, 19 nt, Homo sapiens
  misc_RNA (1)...(19): siRNA sense strand
cgaaagcaucagaucuaua

SEQ ID NO: 1135996 - RNA, 19 nt, Homo sapiens
  misc_RNA (1)...(19): siRNA sense strand
gagaccacaucaccuugga

SEQ ID NO: 1135997 - RNA, 19 nt, Homo sapiens
  misc_RNA (1)...(19): siRNA sense strand
ucucaccgauucccaaugu

SEQ ID NO: 1135998 - RNA, 19 nt, Homo sapiens
  misc_RNA (1)...(19): siRNA sense strand
gauacuggcuuucuuuccu

SEQ ID NO: 1135999 - RNA, 19 nt, Homo sapiens
  misc_RNA (1)...(19): siRNA sense strand
ggaccugggaaacagagua

SEQ ID NO: 1136000 - RNA, 19 nt, Homo sapiens
  misc_RNA (1)...(19): siRNA sense strand
gaucaccuuugccaucgau

SEQ ID NO: 1136001 - RNA, 19 nt, Homo sapiens
  misc_RNA (1)...(19): siRNA sense strand
uauuguaacugcagugaca

SEQ ID NO: 1136002 - RNA, 19 nt, Homo sapiens
  misc_RNA (1)...(19): siRNA sense strand
ucgaaaaccuuuacuacaa

SEQ ID NO: 1136003 - RNA, 19 nt, Homo sapiens
  misc_RNA (1)...(19): siRNA sense strand
gacggaugccuuagacauu

SEQ ID NO: 1136004 - RNA, 19 nt, Homo sapiens
  misc_RNA (1)...(19): siRNA sense strand
gaacgucauccagacagaa

SEQ ID NO: 1136005 - RNA, 19 nt, Homo sapiens
  misc_RNA (1)...(19): siRNA sense strand
cuggaacgccgucucauuu

SEQ ID NO: 1136006 - RNA, 19 nt, Homo sapiens
  misc_RNA (1)...(19): siRNA sense strand
gaaaaccuuuacuacaaug

SEQ ID NO: 1136007 - RNA, 19 nt, Homo sapiens
  misc_RNA (1)...(19): siRNA sense strand
cuucagagaucaccuuugc

SEQ ID NO: 1136008 - RNA, 19 nt, Homo sapiens
  misc_RNA (1)...(19): siRNA sense strand
gugccgauauuuccuucuu

SEQ ID NO: 1136009 - RNA, 19 nt, Homo sapiens
  misc_RNA (1)...(19): siRNA sense strand
gcaauaucacugaggacaa

SEQ ID NO: 1136010 - RNA, 19 nt, Homo sapiens
  misc_RNA (1)...(19): siRNA sense strand
ucaccgauucccaauguuu

SEQ ID NO: 1136011 - RNA, 19 nt, Homo sapiens
  misc_RNA (1)...(19): siRNA sense strand
ucagugagagcccgauuug

SEQ ID NO: 1136012 - RNA, 19 nt, Homo sapiens
  misc_RNA (1)...(19): siRNA sense strand
gaaugguccuguggagcuu

SEQ ID NO: 1136013 - RNA, 19 nt, Homo sapiens
  misc_RNA (1)...(19): siRNA sense strand
ggacaagaucuggacauca

SEQ ID NO: 1136014 - RNA, 19 nt, Homo sapiens
  misc_RNA (1)...(19): siRNA sense strand
gcccaaggaccucauuuca

SEQ ID NO: 1136015 - RNA, 19 nt, Homo sapiens
  misc_RNA (1)...(19): siRNA sense strand
caccgauucccaauguuua

SEQ ID NO: 1136016 - RNA, 19 nt, Homo sapiens
  misc_RNA (1)...(19): siRNA sense strand
caaacuacaacugugauga

SEQ ID NO: 1136017 - RNA, 19 nt, Homo sapiens
  misc_RNA (1)...(19): siRNA sense strand
gaacuucacgguggacaag

SEQ ID NO: 1136018 - RNA, 19 nt, Homo sapiens
  misc_RNA (1)...(19): siRNA sense strand
agugagagcccgauuuguu

SEQ ID NO: 1136019 - RNA, 19 nt, Homo sapiens
  misc_RNA (1)...(19): siRNA sense strand
ucagaucuauacuggcaau

SEQ ID NO: 1136020 - RNA, 19 nt, Homo sapiens
  misc_RNA (1)...(19): siRNA sense strand
gucuacggauguuccuaua

SEQ ID NO: 1136021 - RNA, 19 nt, Homo sapiens
  misc_RNA (1)...(19): siRNA sense strand
caaaugauacuggcuuucu

SEQ ID NO: 1136022 - RNA, 19 nt, Homo sapiens
  misc_RNA (1)...(19): siRNA sense strand
gcaauugcgacgcugacaa

SEQ ID NO: 1136023 - RNA, 19 nt, Homo sapiens
  misc_RNA (1)...(19): siRNA sense strand
cuacaacugugaugaucca

SEQ ID NO: 1136024 - RNA, 19 nt, Homo sapiens
  misc_RNA (1)...(19): siRNA sense strand
cagguucaaucagaaguug

SEQ ID NO: 1136025 - RNA, 19 nt, Homo sapiens
  misc_RNA (1)...(19): siRNA sense strand
ucacuucuguacagguuca

SEQ ID NO: 1136026 - RNA, 19 nt, Homo sapiens
  misc_RNA (1)...(19): siRNA sense strand
acacaggacgcaacuggaa

SEQ ID NO: 1136027 - RNA, 19 nt, Homo sapiens
  misc_RNA (1)...(19): siRNA sense strand
cagcccagcucaacucaac

SEQ ID NO: 1136028 - RNA, 19 nt, Homo sapiens
  misc_RNA (1)...(19): siRNA sense strand
ucacugauaccgacagauc

SEQ ID NO: 1136029 - RNA, 19 nt, Homo sapiens
  misc_RNA (1)...(19): siRNA sense strand
aaaugauacuggcuuucuu

SEQ ID NO: 1136030 - RNA, 19 nt, Homo sapiens
  misc_RNA (1)...(19): siRNA sense strand
gacagaacgcguagcugaa

SEQ ID NO: 1136031 - RNA, 19 nt, Homo sapiens
  misc_RNA (1)...(19): siRNA sense strand
cgagacggaugccuuagac

SEQ ID NO: 1136032 - RNA, 19 nt, Homo sapiens
  misc_RNA (1)...(19): siRNA sense strand
cauuaaagacuucauucga

SEQ ID NO: 1136033 - RNA, 19 nt, Homo sapiens
  misc_RNA (1)...(19): siRNA sense strand
caacacgccggauggaaca

SEQ ID NO: 1136034 - RNA, 19 nt, Homo sapiens
  misc_RNA (1)...(19): siRNA sense strand
cuccagguguacugcaaua

SEQ ID NO: 1136035 - RNA, 19 nt, Homo sapiens
  misc_RNA (1)...(19): siRNA sense strand
agagcugccuggacauuca

SEQ ID NO: 1136036 - RNA, 19 nt, Homo sapiens
  misc_RNA (1)...(19): siRNA sense strand
gaacaaggauggucugcuu

SEQ ID NO: 1136037 - RNA, 19 nt, Homo sapiens
  misc_RNA (1)...(19): siRNA sense strand
gaaauaagcucuccuucag

SEQ ID NO: 1136038 - RNA, 19 nt, Homo sapiens
  misc_RNA (1)...(19): siRNA sense strand
ggacuaccuucuauuguaa

SEQ ID NO: 1136039 - RNA, 19 nt, Homo sapiens
  misc_RNA (1)...(19): siRNA sense strand
ggaauucagugccgauauu

SEQ ID NO: 1136040 - RNA, 19 nt, Homo sapiens
  misc_RNA (1)...(19): siRNA sense strand
ggaaacagaguagagauua

SEQ ID NO: 1136041 - RNA, 19 nt, Homo sapiens
  misc_RNA (1)...(19): siRNA sense strand
caacugugaugauccacua

SEQ ID NO: 1136042 - RNA, 19 nt, Homo sapiens
  misc_RNA (1)...(19): siRNA sense strand
cuacggauguuccuauaaa

SEQ ID NO: 1136043 - RNA, 19 nt, Homo sapiens
  misc_RNA (1)...(19): siRNA sense strand
gaauacagccggcuucuuc

SEQ ID NO: 1136044 - RNA, 19 nt, Homo sapiens
  misc_RNA (1)...(19): siRNA sense strand
ccaaggaccucauuucagu

SEQ ID NO: 1136045 - RNA, 19 nt, Homo sapiens
  misc_RNA (1)...(19): siRNA sense strand
ccauuuaccugguggauug

SEQ ID NO: 1136046 - RNA, 19 nt, Homo sapiens
  misc_RNA (1)...(19): siRNA sense strand
gaugugaucucccugaagu

SEQ ID NO: 1136047 - RNA, 19 nt, Homo sapiens
  misc_RNA (1)...(19): siRNA sense strand
cagaaaggcuuccuaggau

SEQ ID NO: 1136048 - RNA, 19 nt, Homo sapiens
  misc_RNA (1)...(19): siRNA sense strand
gaaagcaucagaucuauac

SEQ ID NO: 1136049 - RNA, 19 nt, Homo sapiens
  misc_RNA (1)...(19): siRNA sense strand
uaaaucccauuaaggcuuu

SEQ ID NO: 1136050 - RNA, 19 nt, Homo sapiens
  misc_RNA (1)...(19): siRNA sense strand
gacauugacuaugagcuua

SEQ ID NO: 1136051 - RNA, 19 nt, Homo sapiens
  misc_RNA (1)...(19): siRNA sense strand
aggcucaucuuuauugaua

SEQ ID NO: 1136052 - RNA, 19 nt, Homo sapiens
  misc_RNA (1)...(19): siRNA sense strand
gacagcaucuggaccuuug

SEQ ID NO: 1136053 - RNA, 19 nt, Homo sapiens
  misc_RNA (1)...(19): siRNA sense strand
gacaaaugauacuggcuuu

SEQ ID NO: 1136054 - RNA, 19 nt, Homo sapiens
  misc_RNA (1)...(19): siRNA sense strand
gacgaaagcaucagaucua

SEQ ID NO: 1136055 - RNA, 19 nt, Homo sapiens
  misc_RNA (1)...(19): siRNA sense strand
ggaaacaguacaaacaaga

SEQ ID NO: 1136056 - RNA, 19 nt, Homo sapiens
  misc_RNA (1)...(19): siRNA sense strand
uggacuaccuucuauugua

SEQ ID NO: 1136057 - RNA, 19 nt, Homo sapiens
  misc_RNA (1)...(19): siRNA sense strand
ccuuagacauugacuauga

SEQ ID NO: 1136058 - RNA, 19 nt, Homo sapiens
  misc_RNA (1)...(19): siRNA sense strand
gaaacaguacaaacaagaa

SEQ ID NO: 1136059 - RNA, 19 nt, Homo sapiens
  misc_RNA (1)...(19): siRNA sense strand
acacuugaauggacagaaa

SEQ ID NO: 1136060 - RNA, 19 nt, Homo sapiens
  misc_RNA (1)...(19): siRNA sense strand
gaugaauggacaaaugaua

SEQ ID NO: 1136061 - RNA, 19 nt, Homo sapiens
  misc_RNA (1)...(19): siRNA sense strand
gacaagaucuggacaucag

SEQ ID NO: 1136062 - RNA, 19 nt, Homo sapiens
  misc_RNA (1)...(19): siRNA sense strand
gaaacagaguagagauuac

SEQ ID NO: 1136063 - RNA, 19 nt, Homo sapiens
  misc_RNA (1)...(19): siRNA sense strand
ggaacgccgucucauuuua

SEQ ID NO: 1136064 - RNA, 19 nt, Homo sapiens
  misc_RNA (1)...(19): siRNA sense strand
ggcagcaacuugaaugaug

SEQ ID NO: 1136065 - RNA, 19 nt, Homo sapiens
  misc_RNA (1)...(19): siRNA sense strand
uaauugaccuggcuaagag

SEQ ID NO: 1136066 - RNA, 19 nt, Homo sapiens
  misc_RNA (1)...(19): siRNA sense strand
uaacagcgacaaacuacaa

SEQ ID NO: 1136067 - RNA, 19 nt, Homo sapiens
  misc_RNA (1)...(19): siRNA sense strand
cgacagaucaaacucagaa

SEQ ID NO: 1136068 - RNA, 19 nt, Homo sapiens
  misc_RNA (1)...(19): siRNA sense strand
aaagaccacuugccuguca

SEQ ID NO: 1136069 - RNA, 19 nt, Homo sapiens
  misc_RNA (1)...(19): siRNA sense strand
aaacuacugugaacaugga

SEQ ID NO: 1136070 - RNA, 19 nt, Homo sapiens
  misc_RNA (1)...(19): siRNA sense strand
gcucacuucuguacagguu

SEQ ID NO: 1136071 - RNA, 19 nt, Homo sapiens
  misc_RNA (1)...(19): siRNA sense strand
cgaaauaagcucuccuuca

SEQ ID NO: 1136072 - RNA, 19 nt, Homo sapiens
  misc_RNA (1)...(19): siRNA sense strand
uaacugcagugacacaagu

SEQ ID NO: 1136073 - RNA, 19 nt, Homo sapiens
  misc_RNA (1)...(19): siRNA sense strand
cuuguggcauuuaggauua

SEQ ID NO: 1136074 - RNA, 19 nt, Homo sapiens
  misc_RNA (1)...(19): siRNA sense strand
gaucuauacuggcaauguc

SEQ ID NO: 1136075 - RNA, 19 nt, Homo sapiens
  misc_RNA (1)...(19): siRNA sense strand
cuacaauggaguaaacaua

SEQ ID NO: 1136076 - RNA, 19 nt, Homo sapiens
  misc_RNA (1)...(19): siRNA sense strand
cgacaaacuacaacuguga

SEQ ID NO: 1136077 - RNA, 19 nt, Homo sapiens
  misc_RNA (1)...(19): siRNA sense strand
gauuaacagcgacaaacua

SEQ ID NO: 1136078 - RNA, 19 nt, Homo sapiens
  misc_RNA (1)...(19): siRNA sense strand
cugacugggugacgaguua

SEQ ID NO: 1136079 - RNA, 19 nt, Homo sapiens
  misc_RNA (1)...(19): siRNA sense strand
ggaacgucauccagacaga

SEQ ID NO: 1136080 - RNA, 19 nt, Homo sapiens
  misc_RNA (1)...(19): siRNA sense strand
ucagugaguuuccaguuuc

SEQ ID NO: 1136081 - RNA, 19 nt, Homo sapiens
  misc_RNA (1)...(19): siRNA sense strand
gcaugagagucgaggucua

SEQ ID NO: 1136082 - RNA, 19 nt, Homo sapiens
  misc_RNA (1)...(19): siRNA sense strand
gaagauacggaagcucuga

SEQ ID NO: 1136083 - RNA, 19 nt, Homo sapiens
  misc_RNA (1)...(19): siRNA sense strand
ccaaauugaugggcucuca

SEQ ID NO: 1136084 - RNA, 19 nt, Homo sapiens
  misc_RNA (1)...(19): siRNA sense strand
gggcgagacggaugccuua

SEQ ID NO: 1136085 - RNA, 19 nt, Homo sapiens
  misc_RNA (1)...(19): siRNA sense strand
cagguguacugcaauauca

SEQ ID NO: 1136086 - RNA, 19 nt, Homo sapiens
  misc_RNA (1)...(19): siRNA sense strand
cuccuucucuucugaauga

SEQ ID NO: 1136087 - RNA, 19 nt, Homo sapiens
  misc_RNA (1)...(19): siRNA sense strand
gaauucagugccgauauuu

SEQ ID NO: 1136088 - RNA, 19 nt, Homo sapiens
  misc_RNA (1)...(19): siRNA sense strand
aaggaugaauggacaaaug

SEQ ID NO: 1136089 - RNA, 19 nt, Homo sapiens
  misc_RNA (1)...(19): siRNA sense strand
caauaucacugaggacaag

SEQ ID NO: 1136090 - RNA, 19 nt, Homo sapiens
  misc_RNA (1)...(19): siRNA sense strand
acagaaaggcuuccuagga

SEQ ID NO: 1136091 - RNA, 19 nt, Homo sapiens
  misc_RNA (1)...(19): siRNA sense strand
ggcacucgguccucauuga

SEQ ID NO: 1136092 - RNA, 19 nt, Homo sapiens
  misc_RNA (1)...(19): siRNA sense strand
gcugcagcauaaagaaauu

SEQ ID NO: 1136093 - RNA, 19 nt, Homo sapiens
  misc_RNA (1)...(19): siRNA sense strand
gggaaacagaguagagauu

SEQ ID NO: 1136094 - RNA, 19 nt, Homo sapiens
  misc_RNA (1)...(19): siRNA sense strand
gacaaccaauggcacuaug

SEQ ID NO: 1136095 - RNA, 19 nt, Homo sapiens
  misc_RNA (1)...(19): siRNA sense strand
ccaaacuacugugaacaug

SEQ ID NO: 1136096 - RNA, 19 nt, Homo sapiens
  misc_RNA (1)...(19): siRNA sense strand
cgaaagcaucagaucuaua

SEQ ID NO: 1136097 - RNA, 19 nt, Homo sapiens
  misc_RNA (1)...(19): siRNA sense strand
gagaccacaucaccuugga

SEQ ID NO: 1136098 - RNA, 19 nt, Homo sapiens
  misc_RNA (1)...(19): siRNA sense strand
ucucaccgauucccaaugu

SEQ ID NO: 1136099 - RNA, 19 nt, Homo sapiens
  misc_RNA (1)...(19): siRNA sense strand
gauacuggcuuucuuuccu

SEQ ID NO: 1136100 - RNA, 19 nt, Homo sapiens
  misc_RNA (1)...(19): siRNA sense strand
ggaccugggaaacagagua

SEQ ID NO: 1136101 - RNA, 19 nt, Homo sapiens
  misc_RNA (1)...(19): siRNA sense strand
gaucaccuuugccaucgau

SEQ ID NO: 1136102 - RNA, 19 nt, Homo sapiens
  misc_RNA (1)...(19): siRNA sense strand
uauuguaacugcagugaca

SEQ ID NO: 1136103 - RNA, 19 nt, Homo sapiens
  misc_RNA (1)...(19): siRNA sense strand
ucgaaaaccuuuacuacaa

SEQ ID NO: 1136104 - RNA, 19 nt, Homo sapiens
  misc_RNA (1)...(19): siRNA sense strand
gacggaugccuuagacauu

SEQ ID NO: 1136105 - RNA, 19 nt, Homo sapiens
  misc_RNA (1)...(19): siRNA sense strand
gaacgucauccagacagaa

SEQ ID NO: 1136106 - RNA, 19 nt, Homo sapiens
  misc_RNA (1)...(19): siRNA sense strand
cuggaacgccgucucauuu

SEQ ID NO: 1136107 - RNA, 19 nt, Homo sapiens
  misc_RNA (1)...(19): siRNA sense strand
gaaaaccuuuacuacaaug

SEQ ID NO: 1136108 - RNA, 19 nt, Homo sapiens
  misc_RNA (1)...(19): siRNA sense strand
cuucagagaucaccuuugc

SEQ ID NO: 1136109 - RNA, 19 nt, Homo sapiens
  misc_RNA (1)...(19): siRNA sense strand
gugccgauauuuccuucuu

SEQ ID NO: 1136110 - RNA, 19 nt, Homo sapiens
  misc_RNA (1)...(19): siRNA sense strand
gcaauaucacugaggacaa

SEQ ID NO: 1136111 - RNA, 19 nt, Homo sapiens
  misc_RNA (1)...(19): siRNA sense strand
ucaccgauucccaauguuu

SEQ ID NO: 1136112 - RNA, 19 nt, Homo sapiens
  misc_RNA (1)...(19): siRNA sense strand
ucagugagagcccgauuug

SEQ ID NO: 1136113 - RNA, 19 nt, Homo sapiens
  misc_RNA (1)...(19): siRNA sense strand
gaaugguccuguggagcuu

SEQ ID NO: 1136114 - RNA, 19 nt, Homo sapiens
  misc_RNA (1)...(19): siRNA sense strand
ggacaagaucuggacauca

SEQ ID NO: 1136115 - RNA, 19 nt, Homo sapiens
  misc_RNA (1)...(19): siRNA sense strand
gcccaaggaccucauuuca

SEQ ID NO: 1136116 - RNA, 19 nt, Homo sapiens
  misc_RNA (1)...(19): siRNA sense strand
caccgauucccaauguuua

SEQ ID NO: 1136117 - RNA, 19 nt, Homo sapiens
  misc_RNA (1)...(19): siRNA sense strand
caaacuacaacugugauga

SEQ ID NO: 1136118 - RNA, 19 nt, Homo sapiens
  misc_RNA (1)...(19): siRNA sense strand
gaacuucacgguggacaag

SEQ ID NO: 1136119 - RNA, 19 nt, Homo sapiens
  misc_RNA (1)...(19): siRNA sense strand
agugagagcccgauuuguu

SEQ ID NO: 1136120 - RNA, 19 nt, Homo sapiens
  misc_RNA (1)...(19): siRNA sense strand
ucagaucuauacuggcaau

SEQ ID NO: 1136121 - RNA, 19 nt, Homo sapiens
  misc_RNA (1)...(19): siRNA sense strand
gucuacggauguuccuaua

SEQ ID NO: 1136122 - RNA, 19 nt, Homo sapiens
  misc_RNA (1)...(19): siRNA sense strand
caaaugauacuggcuuucu

SEQ ID NO: 1136123 - RNA, 19 nt, Homo sapiens
  misc_RNA (1)...(19): siRNA sense strand
gcaauugcgacgcugacaa

SEQ ID NO: 1136124 - RNA, 19 nt, Homo sapiens
  misc_RNA (1)...(19): siRNA sense strand
cuacaacugugaugaucca

SEQ ID NO: 1136125 - RNA, 19 nt, Homo sapiens
  misc_RNA (1)...(19): siRNA sense strand
cagguucaaucagaaguug

SEQ ID NO: 1136126 - RNA, 19 nt, Homo sapiens
  misc_RNA (1)...(19): siRNA sense strand
ucacuucuguacagguuca

SEQ ID NO: 1136127 - RNA, 19 nt, Homo sapiens
  misc_RNA (1)...(19): siRNA sense strand
acacaggacgcaacuggaa

SEQ ID NO: 1136128 - RNA, 19 nt, Homo sapiens
  misc_RNA (1)...(19): siRNA sense strand
ucacugauaccgacagauc

SEQ ID NO: 1136129 - RNA, 19 nt, Homo sapiens
  misc_RNA (1)...(19): siRNA sense strand
aaaugauacuggcuuucuu

SEQ ID NO: 1136130 - RNA, 19 nt, Homo sapiens
  misc_RNA (1)...(19): siRNA sense strand
cagcccagcucaacucaac

SEQ ID NO: 1136131 - RNA, 19 nt, Homo sapiens
  misc_RNA (1)...(19): siRNA sense strand
gacagaacgcguagcugaa

SEQ ID NO: 1136132 - RNA, 19 nt, Homo sapiens
  misc_RNA (1)...(19): siRNA sense strand
cgagacggaugccuuagac

SEQ ID NO: 1136133 - RNA, 19 nt, Homo sapiens
  misc_RNA (1)...(19): siRNA sense strand
cauuaaagacuucauucga

SEQ ID NO: 1136134 - RNA, 19 nt, Homo sapiens
  misc_RNA (1)...(19): siRNA sense strand
caacacgccggauggaaca

SEQ ID NO: 1136135 - RNA, 19 nt, Homo sapiens
  misc_RNA (1)...(19): siRNA sense strand
cuccagguguacugcaaua

SEQ ID NO: 1136136 - RNA, 19 nt, Homo sapiens
  misc_RNA (1)...(19): siRNA sense strand
ggacaagauugacagguau

SEQ ID NO: 1136137 - RNA, 19 nt, Homo sapiens
  misc_RNA (1)...(19): siRNA sense strand
cggacaagauugacaggua

SEQ ID NO: 1136138 - RNA, 19 nt, Homo sapiens
  misc_RNA (1)...(19): siRNA sense strand
gcuguggcgucuccaacua

SEQ ID NO: 1136139 - RNA, 19 nt, Homo sapiens
  misc_RNA (1)...(19): siRNA sense strand
ggccugaccuucgccauga

SEQ ID NO: 1136140 - RNA, 19 nt, Homo sapiens
  misc_RNA (1)...(19): siRNA sense strand
ugacagguaugcccagcaa

SEQ ID NO: 1136141 - RNA, 19 nt, Homo sapiens
  misc_RNA (1)...(19): siRNA sense strand
agaaaggcuugcaccugua

SEQ ID NO: 1136142 - RNA, 19 nt, Homo sapiens
  misc_RNA (1)...(19): siRNA sense strand
ccaacuacacugacugguu

SEQ ID NO: 1136143 - RNA, 19 nt, Homo sapiens
  misc_RNA (1)...(19): siRNA sense strand
gaccauguacugccaagug

SEQ ID NO: 1136144 - RNA, 19 nt, Homo sapiens
  misc_RNA (1)...(19): siRNA sense strand
cagcaagaccugaagaaag

SEQ ID NO: 1136145 - RNA, 19 nt, Homo sapiens
  misc_RNA (1)...(19): siRNA sense strand
agcaagaccugaagaaagg

SEQ ID NO: 1136146 - RNA, 19 nt, Homo sapiens
  misc_RNA (1)...(19): siRNA sense strand
ucgccacgcuguccucuuc

SEQ ID NO: 1136147 - RNA, 19 nt, Homo sapiens
  misc_RNA (1)...(19): siRNA sense strand
ccagcaagaccugaagaaa

SEQ ID NO: 1136148 - RNA, 19 nt, Homo sapiens
  misc_RNA (1)...(19): siRNA sense strand
gaaaggcuugcaccuguac

SEQ ID NO: 1136149 - RNA, 19 nt, Homo sapiens
  misc_RNA (1)...(19): siRNA sense strand
caccaucgccauccucuuc

SEQ ID NO: 1136150 - RNA, 19 nt, Homo sapiens
  misc_RNA (1)...(19): siRNA sense strand
gcuacgagacggugaaggu

SEQ ID NO: 1136151 - RNA, 19 nt, Homo sapiens
  misc_RNA (1)...(19): siRNA sense strand
cgucaaguaccucauguuc

SEQ ID NO: 1136152 - RNA, 19 nt, Homo sapiens
  misc_RNA (1)...(19): siRNA sense strand
agguguggcuucaggagaa

SEQ ID NO: 1136153 - RNA, 19 nt, Homo sapiens
  misc_RNA (1)...(19): siRNA sense strand
acagguaugcccagcaaga

SEQ ID NO: 1136154 - RNA, 19 nt, Homo sapiens
  misc_RNA (1)...(19): siRNA sense strand
ugggugccaucaaggagaa

SEQ ID NO: 1136155 - RNA, 19 nt, Homo sapiens
  misc_RNA (1)...(19): siRNA sense strand
gcugccaaccugcucauca

SEQ ID NO: 1136156 - RNA, 19 nt, Homo sapiens
  misc_RNA (1)...(19): siRNA sense strand
gaagaaguguugaagaaga

SEQ ID NO: 1136157 - RNA, 19 nt, Homo sapiens
  misc_RNA (1)...(19): siRNA sense strand
caagaaggaugaagaagug

SEQ ID NO: 1136158 - RNA, 19 nt, Homo sapiens
  misc_RNA (1)...(19): siRNA sense strand
uaaagaaugugaagcacuu

SEQ ID NO: 1136159 - RNA, 19 nt, Homo sapiens
  misc_RNA (1)...(19): siRNA sense strand
ggacgagugugacaagaug

SEQ ID NO: 1136160 - RNA, 19 nt, Homo sapiens
  misc_RNA (1)...(19): siRNA sense strand
ggauuacgaugaagaggaa

SEQ ID NO: 1136161 - RNA, 19 nt, Homo sapiens
  misc_RNA (1)...(19): siRNA sense strand
gagaagcagugcaugaugu

SEQ ID NO: 1136162 - RNA, 19 nt, Homo sapiens
  misc_RNA (1)...(19): siRNA sense strand
caaggaauaugagcgcuuu

SEQ ID NO: 1136163 - RNA, 19 nt, Homo sapiens
  misc_RNA (1)...(19): siRNA sense strand
gagucaacaucgucuuuaa

SEQ ID NO: 1136164 - RNA, 19 nt, Homo sapiens
  misc_RNA (1)...(19): siRNA sense strand
aaaucgacaucuccacaua

SEQ ID NO: 1136165 - RNA, 19 nt, Homo sapiens
  misc_RNA (1)...(19): siRNA sense strand
uggaugugcuggaguuuaa

SEQ ID NO: 1136166 - RNA, 19 nt, Homo sapiens
  misc_RNA (1)...(19): siRNA sense strand
caggaccgguuugaaguua

SEQ ID NO: 1136167 - RNA, 19 nt, Homo sapiens
  misc_RNA (1)...(19): siRNA sense strand
gguggucucuccaucaaga

SEQ ID NO: 1136168 - RNA, 19 nt, Homo sapiens
  misc_RNA (1)...(19): siRNA sense strand
caaggugucuguguucuuc

SEQ ID NO: 1136169 - RNA, 19 nt, Homo sapiens
  misc_RNA (1)...(19): siRNA sense strand
ugacgagaaugaugccaaa

SEQ ID NO: 1136170 - RNA, 19 nt, Homo sapiens
  misc_RNA (1)...(19): siRNA sense strand
uaucagcaguucaaggauu

SEQ ID NO: 1136171 - RNA, 19 nt, Homo sapiens
  misc_RNA (1)...(19): siRNA sense strand
ucaaagacagugagaagaa

SEQ ID NO: 1136172 - RNA, 19 nt, Homo sapiens
  misc_RNA (1)...(19): siRNA sense strand
cuucugagguccagcauga

SEQ ID NO: 1136173 - RNA, 19 nt, Homo sapiens
  misc_RNA (1)...(19): siRNA sense strand
gaaggaugaagaaguguug

SEQ ID NO: 1136174 - RNA, 19 nt, Homo sapiens
  misc_RNA (1)...(19): siRNA sense strand
ggaccgguuugaaguuaau

SEQ ID NO: 1136175 - RNA, 19 nt, Homo sapiens
  misc_RNA (1)...(19): siRNA sense strand
caacaucgucuuuaacuac

SEQ ID NO: 1136176 - RNA, 19 nt, Homo sapiens
  misc_RNA (1)...(19): siRNA sense strand
augaagaaguguugaagaa

SEQ ID NO: 1136177 - RNA, 19 nt, Homo sapiens
  misc_RNA (1)...(19): siRNA sense strand
gauaaucuucgucaaguca

SEQ ID NO: 1136178 - RNA, 19 nt, Homo sapiens
  misc_RNA (1)...(19): siRNA sense strand
ucaacaucgucuuuaacua

SEQ ID NO: 1136179 - RNA, 19 nt, Homo sapiens
  misc_RNA (1)...(19): siRNA sense strand
gcuaucagcaguucaagga

SEQ ID NO: 1136180 - RNA, 19 nt, Homo sapiens
  misc_RNA (1)...(19): siRNA sense strand
gcuuugagcauccuucuga

SEQ ID NO: 1136181 - RNA, 19 nt, Homo sapiens
  misc_RNA (1)...(19): siRNA sense strand
gugauaaucuucgucaagu

SEQ ID NO: 1136182 - RNA, 19 nt, Homo sapiens
  misc_RNA (1)...(19): siRNA sense strand
aagaaguguugaagaagaa

SEQ ID NO: 1136183 - RNA, 19 nt, Homo sapiens
  misc_RNA (1)...(19): siRNA sense strand
guacuacgucaaacucaaa

SEQ ID NO: 1136184 - RNA, 19 nt, Homo sapiens
  misc_RNA (1)...(19): siRNA sense strand
gcucuuugaucucuuggau

SEQ ID NO: 1136185 - RNA, 19 nt, Homo sapiens
  misc_RNA (1)...(19): siRNA sense strand
gaugaagaaguguugaaga

SEQ ID NO: 1136186 - RNA, 19 nt, Homo sapiens
  misc_RNA (1)...(19): siRNA sense strand
gaguuuaaccaggugauaa

SEQ ID NO: 1136187 - RNA, 19 nt, Homo sapiens
  misc_RNA (1)...(19): siRNA sense strand
gcagcaguacuacgucaaa

SEQ ID NO: 1136188 - RNA, 19 nt, Homo sapiens
  misc_RNA (1)...(19): siRNA sense strand
gagcuucagccuaaagaau

SEQ ID NO: 1136189 - RNA, 19 nt, Homo sapiens
  misc_RNA (1)...(19): siRNA sense strand
caucguggacuguggcuuu

SEQ ID NO: 1136190 - RNA, 19 nt, Homo sapiens
  misc_RNA (1)...(19): siRNA sense strand
gauccuacguuuccaucca

SEQ ID NO: 1136191 - RNA, 19 nt, Homo sapiens
  misc_RNA (1)...(19): siRNA sense strand
cgacaucuccacauacauc

SEQ ID NO: 1136192 - RNA, 19 nt, Homo sapiens
  misc_RNA (1)...(19): siRNA sense strand
ggaguuuaaccaggugaua

SEQ ID NO: 1136193 - RNA, 19 nt, Homo sapiens
  misc_RNA (1)...(19): siRNA sense strand
gaaaucgacaucuccacau

SEQ ID NO: 1136194 - RNA, 19 nt, Homo sapiens
  misc_RNA (1)...(19): siRNA sense strand
ggacaucgagcgagucaac

SEQ ID NO: 1136195 - RNA, 19 nt, Homo sapiens
  misc_RNA (1)...(19): siRNA sense strand
uuaaccaggugauaaucuu

SEQ ID NO: 1136196 - RNA, 19 nt, Homo sapiens
  misc_RNA (1)...(19): siRNA sense strand
ucuuugaucucuuggaugu

SEQ ID NO: 1136197 - RNA, 19 nt, Homo sapiens
  misc_RNA (1)...(19): siRNA sense strand
cgagucaacaucgucuuua

SEQ ID NO: 1136198 - RNA, 19 nt, Homo sapiens
  misc_RNA (1)...(19): siRNA sense strand
gcgagucaacaucgucuuu

SEQ ID NO: 1136199 - RNA, 19 nt, Homo sapiens
  misc_RNA (1)...(19): siRNA sense strand
ucaagaaggaugaagaagu

SEQ ID NO: 1136200 - RNA, 19 nt, Homo sapiens
  misc_RNA (1)...(19): siRNA sense strand
caaagacagugagaagaac

SEQ ID NO: 1136201 - RNA, 19 nt, Homo sapiens
  misc_RNA (1)...(19): siRNA sense strand
caucaagggauccuacguu

SEQ ID NO: 1136202 - RNA, 19 nt, Homo sapiens
  misc_RNA (1)...(19): siRNA sense strand
cagaggaaaucgacaucuc

SEQ ID NO: 1136203 - RNA, 19 nt, Homo sapiens
  misc_RNA (1)...(19): siRNA sense strand
guacaugcccagcgucaag

SEQ ID NO: 1136204 - RNA, 19 nt, Homo sapiens
  misc_RNA (1)...(19): siRNA sense strand
gcgucaaggugucuguguu

SEQ ID NO: 1136205 - RNA, 19 nt, Homo sapiens
  misc_RNA (1)...(19): siRNA sense strand
gaagaacuguccccauguc

SEQ ID NO: 1136206 - RNA, 19 nt, Homo sapiens
  misc_RNA (1)...(19): siRNA sense strand
gcuucagccuaaagaaugu

SEQ ID NO: 1136207 - RNA, 19 nt, Homo sapiens
  misc_RNA (1)...(19): siRNA sense strand
gaaccgcaagcucuuugau

SEQ ID NO: 1136208 - RNA, 19 nt, Homo sapiens
  misc_RNA (1)...(19): siRNA sense strand
aucaagggauccuacguuu

SEQ ID NO: 1136209 - RNA, 19 nt, Homo sapiens
  misc_RNA (1)...(19): siRNA sense strand
gaaugugaagcacuuugug

SEQ ID NO: 1136210 - RNA, 19 nt, Homo sapiens
  misc_RNA (1)...(19): siRNA sense strand
ugaaguuaauguggcagaa

SEQ ID NO: 1136211 - RNA, 19 nt, Homo sapiens
  misc_RNA (1)...(19): siRNA sense strand
gcaguacuacgucaaacuc

SEQ ID NO: 1136212 - RNA, 19 nt, Homo sapiens
  misc_RNA (1)...(19): siRNA sense strand
caagggauccuacguuucc

SEQ ID NO: 1136213 - RNA, 19 nt, Homo sapiens
  misc_RNA (1)...(19): siRNA sense strand
ggacuguggcuuugagcau

SEQ ID NO: 1136214 - RNA, 19 nt, Homo sapiens
  misc_RNA (1)...(19): siRNA sense strand
gcaagcucuuugaucucuu

SEQ ID NO: 1136215 - RNA, 19 nt, Homo sapiens
  misc_RNA (1)...(19): siRNA sense strand
ggagaucuuccgccugaca

SEQ ID NO: 1136216 - RNA, 19 nt, Homo sapiens
  misc_RNA (1)...(19): siRNA sense strand
gaucagcaaggaauaugag

SEQ ID NO: 1136217 - RNA, 19 nt, Homo sapiens
  misc_RNA (1)...(19): siRNA sense strand
ccaaaggccuagccaucac

SEQ ID NO: 1136218 - RNA, 19 nt, Homo sapiens
  misc_RNA (1)...(19): siRNA sense strand
ggugauaaucuucgucaag

SEQ ID NO: 1136219 - RNA, 19 nt, Homo sapiens
  misc_RNA (1)...(19): siRNA sense strand
ggcgggaugugcaggagau

SEQ ID NO: 1136220 - RNA, 19 nt, Homo sapiens
  misc_RNA (1)...(19): siRNA sense strand
gguccagcaugagugcauu

SEQ ID NO: 1136221 - RNA, 19 nt, Homo sapiens
  misc_RNA (1)...(19): siRNA sense strand
cgagaagcagugcaugaug

SEQ ID NO: 1136222 - RNA, 19 nt, Homo sapiens
  misc_RNA (1)...(19): siRNA sense strand
ccagaucagcaaggaauau

SEQ ID NO: 1136223 - RNA, 19 nt, Homo sapiens
  misc_RNA (1)...(19): siRNA sense strand
cgagaaugaugccaaaauc

SEQ ID NO: 1136224 - RNA, 19 nt, Homo sapiens
  misc_RNA (1)...(19): siRNA sense strand
ucgguggucucuccaucaa

SEQ ID NO: 1136225 - RNA, 19 nt, Homo sapiens
  misc_RNA (1)...(19): siRNA sense strand
ccaggaccgguuugaaguu

SEQ ID NO: 1136226 - RNA, 19 nt, Homo sapiens
  misc_RNA (1)...(19): siRNA sense strand
ggcagaacaggauguggaa

SEQ ID NO: 1136227 - RNA, 19 nt, Homo sapiens
  misc_RNA (1)...(19): siRNA sense strand
ggaugaagaaguguugaag

SEQ ID NO: 1136228 - RNA, 19 nt, Homo sapiens
  misc_RNA (1)...(19): siRNA sense strand
aucagcaguucaaggauuu

SEQ ID NO: 1136229 - RNA, 19 nt, Homo sapiens
  misc_RNA (1)...(19): siRNA sense strand
ucuuggaugugcuggaguu

SEQ ID NO: 1136230 - RNA, 19 nt, Homo sapiens
  misc_RNA (1)...(19): siRNA sense strand
uaugagcgcuuuuccaagu

SEQ ID NO: 1136231 - RNA, 19 nt, Homo sapiens
  misc_RNA (1)...(19): siRNA sense strand
cacgagaagcagugcauga

SEQ ID NO: 1136232 - RNA, 19 nt, Homo sapiens
  misc_RNA (1)...(19): siRNA sense strand
gggaugugcaggagaucuu

SEQ ID NO: 1136233 - RNA, 19 nt, Homo sapiens
  misc_RNA (1)...(19): siRNA sense strand
gcagaacaggauguggaaa

SEQ ID NO: 1136234 - RNA, 19 nt, Homo sapiens
  misc_RNA (1)...(19): siRNA sense strand
cgcaagcucuuugaucucu

SEQ ID NO: 1136235 - RNA, 19 nt, Homo sapiens
  misc_RNA (1)...(19): siRNA sense strand
ggagcuucagccuaaagaa

SEQ ID NO: 1136236 - RNA, 19 nt, Homo sapiens
  misc_RNA (1)...(19): siRNA sense strand
gaagaaguguugaagaaga

SEQ ID NO: 1136237 - RNA, 19 nt, Homo sapiens
  misc_RNA (1)...(19): siRNA sense strand
caagaaggaugaagaagug

SEQ ID NO: 1136238 - RNA, 19 nt, Homo sapiens
  misc_RNA (1)...(19): siRNA sense strand
uaaagaaugugaagcacuu

SEQ ID NO: 1136239 - RNA, 19 nt, Homo sapiens
  misc_RNA (1)...(19): siRNA sense strand
ggacgagugugacaagaug

SEQ ID NO: 1136240 - RNA, 19 nt, Homo sapiens
  misc_RNA (1)...(19): siRNA sense strand
ggauuacgaugaagaggaa

SEQ ID NO: 1136241 - RNA, 19 nt, Homo sapiens
  misc_RNA (1)...(19): siRNA sense strand
gagaagcagugcaugaugu

SEQ ID NO: 1136242 - RNA, 19 nt, Homo sapiens
  misc_RNA (1)...(19): siRNA sense strand
caaggaauaugagcgcuuu

SEQ ID NO: 1136243 - RNA, 19 nt, Homo sapiens
  misc_RNA (1)...(19): siRNA sense strand
gguggucucuccaucaaga

SEQ ID NO: 1136244 - RNA, 19 nt, Homo sapiens
  misc_RNA (1)...(19): siRNA sense strand
caaggugucuguguucuuc

SEQ ID NO: 1136245 - RNA, 19 nt, Homo sapiens
  misc_RNA (1)...(19): siRNA sense strand
cuucugagguccagcauga

SEQ ID NO: 1136246 - RNA, 19 nt, Homo sapiens
  misc_RNA (1)...(19): siRNA sense strand
gaaggaugaagaaguguug

SEQ ID NO: 1136247 - RNA, 19 nt, Homo sapiens
  misc_RNA (1)...(19): siRNA sense strand
augaagaaguguugaagaa

SEQ ID NO: 1136248 - RNA, 19 nt, Homo sapiens
  misc_RNA (1)...(19): siRNA sense strand
gcuuugagcauccuucuga

SEQ ID NO: 1136249 - RNA, 19 nt, Homo sapiens
  misc_RNA (1)...(19): siRNA sense strand
aagaaguguugaagaagaa

SEQ ID NO: 1136250 - RNA, 19 nt, Homo sapiens
  misc_RNA (1)...(19): siRNA sense strand
gaugaagaaguguugaaga

SEQ ID NO: 1136251 - RNA, 19 nt, Homo sapiens
  misc_RNA (1)...(19): siRNA sense strand
gagcuucagccuaaagaau

SEQ ID NO: 1136252 - RNA, 19 nt, Homo sapiens
  misc_RNA (1)...(19): siRNA sense strand
caucguggacuguggcuuu

SEQ ID NO: 1136253 - RNA, 19 nt, Homo sapiens
  misc_RNA (1)...(19): siRNA sense strand
gauccuacguuuccaucca

SEQ ID NO: 1136254 - RNA, 19 nt, Homo sapiens
  misc_RNA (1)...(19): siRNA sense strand
ucaagaaggaugaagaagu

SEQ ID NO: 1136255 - RNA, 19 nt, Homo sapiens
  misc_RNA (1)...(19): siRNA sense strand
caucaagggauccuacguu

SEQ ID NO: 1136256 - RNA, 19 nt, Homo sapiens
  misc_RNA (1)...(19): siRNA sense strand
guacaugcccagcgucaag

SEQ ID NO: 1136257 - RNA, 19 nt, Homo sapiens
  misc_RNA (1)...(19): siRNA sense strand
gcgucaaggugucuguguu

SEQ ID NO: 1136258 - RNA, 19 nt, Homo sapiens
  misc_RNA (1)...(19): siRNA sense strand
gaagaacuguccccauguc

SEQ ID NO: 1136259 - RNA, 19 nt, Homo sapiens
  misc_RNA (1)...(19): siRNA sense strand
gcuucagccuaaagaaugu

SEQ ID NO: 1136260 - RNA, 19 nt, Homo sapiens
  misc_RNA (1)...(19): siRNA sense strand
aucaagggauccuacguuu

SEQ ID NO: 1136261 - RNA, 19 nt, Homo sapiens
  misc_RNA (1)...(19): siRNA sense strand
gaaugugaagcacuuugug

SEQ ID NO: 1136262 - RNA, 19 nt, Homo sapiens
  misc_RNA (1)...(19): siRNA sense strand
caagggauccuacguuucc

SEQ ID NO: 1136263 - RNA, 19 nt, Homo sapiens
  misc_RNA (1)...(19): siRNA sense strand
ggagaucuuccgccugaca

SEQ ID NO: 1136264 - RNA, 19 nt, Homo sapiens
  misc_RNA (1)...(19): siRNA sense strand
ggacuguggcuuugagcau

SEQ ID NO: 1136265 - RNA, 19 nt, Homo sapiens
  misc_RNA (1)...(19): siRNA sense strand
gaucagcaaggaauaugag

SEQ ID NO: 1136266 - RNA, 19 nt, Homo sapiens
  misc_RNA (1)...(19): siRNA sense strand
gguccagcaugagugcauu

SEQ ID NO: 1136267 - RNA, 19 nt, Homo sapiens
  misc_RNA (1)...(19): siRNA sense strand
cgagaagcagugcaugaug

SEQ ID NO: 1136268 - RNA, 19 nt, Homo sapiens
  misc_RNA (1)...(19): siRNA sense strand
ggcgggaugugcaggagau

SEQ ID NO: 1136269 - RNA, 19 nt, Homo sapiens
  misc_RNA (1)...(19): siRNA sense strand
ccagaucagcaaggaauau

SEQ ID NO: 1136270 - RNA, 19 nt, Homo sapiens
  misc_RNA (1)...(19): siRNA sense strand
ucgguggucucuccaucaa

SEQ ID NO: 1136271 - RNA, 19 nt, Homo sapiens
  misc_RNA (1)...(19): siRNA sense strand
ggcagaacaggauguggaa

SEQ ID NO: 1136272 - RNA, 19 nt, Homo sapiens
  misc_RNA (1)...(19): siRNA sense strand
ggaugaagaaguguugaag

SEQ ID NO: 1136273 - RNA, 19 nt, Homo sapiens
  misc_RNA (1)...(19): siRNA sense strand
uaugagcgcuuuuccaagu

SEQ ID NO: 1136274 - RNA, 19 nt, Homo sapiens
  misc_RNA (1)...(19): siRNA sense strand
cacgagaagcagugcauga

SEQ ID NO: 1136275 - RNA, 19 nt, Homo sapiens
  misc_RNA (1)...(19): siRNA sense strand
gggaugugcaggagaucuu

SEQ ID NO: 1136276 - RNA, 19 nt, Homo sapiens
  misc_RNA (1)...(19): siRNA sense strand
gcagaacaggauguggaaa

SEQ ID NO: 1136277 - RNA, 19 nt, Homo sapiens
  misc_RNA (1)...(19): siRNA sense strand
ggagcuucagccuaaagaa

SEQ ID NO: 1136278 - RNA, 19 nt, Homo sapiens
  misc_RNA (1)...(19): siRNA sense strand
gcauugaacuuuacuuuga

SEQ ID NO: 1136279 - RNA, 19 nt, Homo sapiens
  misc_RNA (1)...(19): siRNA sense strand
gacagugcauugaacuuua

SEQ ID NO: 1136280 - RNA, 19 nt, Homo sapiens
  misc_RNA (1)...(19): siRNA sense strand
gcagagggagguaucuuua

SEQ ID NO: 1136281 - RNA, 19 nt, Homo sapiens
  misc_RNA (1)...(19): siRNA sense strand
ggaaugcaucuacaucaua

SEQ ID NO: 1136282 - RNA, 19 nt, Homo sapiens
  misc_RNA (1)...(19): siRNA sense strand
gaaugcaucuacaucauag

SEQ ID NO: 1136283 - RNA, 19 nt, Homo sapiens
  misc_RNA (1)...(19): siRNA sense strand
ggaagauuucuauggauua

SEQ ID NO: 1136284 - RNA, 19 nt, Homo sapiens
  misc_RNA (1)...(19): siRNA sense strand
gcaaaccaccucagaaaca

SEQ ID NO: 1136285 - RNA, 19 nt, Homo sapiens
  misc_RNA (1)...(19): siRNA sense strand
cauagaagccgcuccaaga

SEQ ID NO: 1136286 - RNA, 19 nt, Homo sapiens
  misc_RNA (1)...(19): siRNA sense strand
gagugcaaauuugaucaua

SEQ ID NO: 1136287 - RNA, 19 nt, Homo sapiens
  misc_RNA (1)...(19): siRNA sense strand
gaugaaaaguacucuauug

SEQ ID NO: 1136288 - RNA, 19 nt, Homo sapiens
  misc_RNA (1)...(19): siRNA sense strand
ccaacuaucccagcaagua

SEQ ID NO: 1136289 - RNA, 19 nt, Homo sapiens
  misc_RNA (1)...(19): siRNA sense strand
auggagagcuggaaucuau

SEQ ID NO: 1136290 - RNA, 19 nt, Homo sapiens
  misc_RNA (1)...(19): siRNA sense strand
uggaagauuucuauggauu

SEQ ID NO: 1136291 - RNA, 19 nt, Homo sapiens
  misc_RNA (1)...(19): siRNA sense strand
gaaaaguacucuauugaac

SEQ ID NO: 1136292 - RNA, 19 nt, Homo sapiens
  misc_RNA (1)...(19): siRNA sense strand
gggaaugcaucuacaucau

SEQ ID NO: 1136293 - RNA, 19 nt, Homo sapiens
  misc_RNA (1)...(19): siRNA sense strand
aagcaaaccaccucagaaa

SEQ ID NO: 1136294 - RNA, 19 nt, Homo sapiens
  misc_RNA (1)...(19): siRNA sense strand
gaaaggaacagaaaagcaa

SEQ ID NO: 1136295 - RNA, 19 nt, Homo sapiens
  misc_RNA (1)...(19): siRNA sense strand
guuuaaucauccuccauuu

SEQ ID NO: 1136296 - RNA, 19 nt, Homo sapiens
  misc_RNA (1)...(19): siRNA sense strand
gugcauugaacuuuacuuu

SEQ ID NO: 1136297 - RNA, 19 nt, Homo sapiens
  misc_RNA (1)...(19): siRNA sense strand
caacuaucccagcaaguau

SEQ ID NO: 1136298 - RNA, 19 nt, Homo sapiens
  misc_RNA (1)...(19): siRNA sense strand
ccaagacagugcauugaac

SEQ ID NO: 1136299 - RNA, 19 nt, Homo sapiens
  misc_RNA (1)...(19): siRNA sense strand
gcuccaagacagugcauug

SEQ ID NO: 1136300 - RNA, 19 nt, Homo sapiens
  misc_RNA (1)...(19): siRNA sense strand
agacagugcauugaacuuu

SEQ ID NO: 1136301 - RNA, 19 nt, Homo sapiens
  misc_RNA (1)...(19): siRNA sense strand
aguggaagauuucuaugga

SEQ ID NO: 1136302 - RNA, 19 nt, Homo sapiens
  misc_RNA (1)...(19): siRNA sense strand
ggacguuucuguggacaac

SEQ ID NO: 1136303 - RNA, 19 nt, Homo sapiens
  misc_RNA (1)...(19): siRNA sense strand
uuaaucauccuccauuugu

SEQ ID NO: 1136304 - RNA, 19 nt, Homo sapiens
  misc_RNA (1)...(19): siRNA sense strand
ucagcucgauacaauuuca

SEQ ID NO: 1136305 - RNA, 19 nt, Homo sapiens
  misc_RNA (1)...(19): siRNA sense strand
gaccgggaaugcaucuaca

SEQ ID NO: 1136306 - RNA, 19 nt, Homo sapiens
  misc_RNA (1)...(19): siRNA sense strand
uguagcaaguuuaaucauc

SEQ ID NO: 1136307 - RNA, 19 nt, Homo sapiens
  misc_RNA (1)...(19): siRNA sense strand
uauugaaguucgagaugga

SEQ ID NO: 1136308 - RNA, 19 nt, Homo sapiens
  misc_RNA (1)...(19): siRNA sense strand
cagaaacacagaagucagu

SEQ ID NO: 1136309 - RNA, 19 nt, Homo sapiens
  misc_RNA (1)...(19): siRNA sense strand
uuucagcucgauacaauuu

SEQ ID NO: 1136310 - RNA, 19 nt, Homo sapiens
  misc_RNA (1)...(19): siRNA sense strand
aaagcaaaccaccucagaa

SEQ ID NO: 1136311 - RNA, 19 nt, Homo sapiens
  misc_RNA (1)...(19): siRNA sense strand
guggaagauuucuauggau

SEQ ID NO: 1136312 - RNA, 19 nt, Homo sapiens
  misc_RNA (1)...(19): siRNA sense strand
caaaauccaccugucauaa

SEQ ID NO: 1136313 - RNA, 19 nt, Homo sapiens
  misc_RNA (1)...(19): siRNA sense strand
ggagagcuggaaucuaugg

SEQ ID NO: 1136314 - RNA, 19 nt, Homo sapiens
  misc_RNA (1)...(19): siRNA sense strand
caaaccaccucagaaacac

SEQ ID NO: 1136315 - RNA, 19 nt, Homo sapiens
  misc_RNA (1)...(19): siRNA sense strand
ucagugcaguguggaacuu

SEQ ID NO: 1136316 - RNA, 19 nt, Homo sapiens
  misc_RNA (1)...(19): siRNA sense strand
aaauccaccugucauaaaa

SEQ ID NO: 1136317 - RNA, 19 nt, Homo sapiens
  misc_RNA (1)...(19): siRNA sense strand
caacaaaauccaccuguca

SEQ ID NO: 1136318 - RNA, 19 nt, Homo sapiens
  misc_RNA (1)...(19): siRNA sense strand
agauggaccuuuuggcuuu

SEQ ID NO: 1136319 - RNA, 19 nt, Homo sapiens
  misc_RNA (1)...(19): siRNA sense strand
caaccaagaaaggaacaga

SEQ ID NO: 1136320 - RNA, 19 nt, Homo sapiens
  misc_RNA (1)...(19): siRNA sense strand
cauauugaaguucgagaug

SEQ ID NO: 1136321 - RNA, 19 nt, Homo sapiens
  misc_RNA (1)...(19): siRNA sense strand
cuuuaccucucccaacuau

SEQ ID NO: 1136322 - RNA, 19 nt, Homo sapiens
  misc_RNA (1)...(19): siRNA sense strand
ggagugcaaauuugaucau

SEQ ID NO: 1136323 - RNA, 19 nt, Homo sapiens
  misc_RNA (1)...(19): siRNA sense strand
gauggagagcuggaaucua

SEQ ID NO: 1136324 - RNA, 19 nt, Homo sapiens
  misc_RNA (1)...(19): siRNA sense strand
ucuugggagugcaaauuug

SEQ ID NO: 1136325 - RNA, 19 nt, Homo sapiens
  misc_RNA (1)...(19): siRNA sense strand
gaaguucgagauggaccuu

SEQ ID NO: 1136326 - RNA, 19 nt, Homo sapiens
  misc_RNA (1)...(19): siRNA sense strand
caagacagugcauugaacu

SEQ ID NO: 1136327 - RNA, 19 nt, Homo sapiens
  misc_RNA (1)...(19): siRNA sense strand
uggcuuuucuccaauaauu

SEQ ID NO: 1136328 - RNA, 19 nt, Homo sapiens
  misc_RNA (1)...(19): siRNA sense strand
acagugcauugaacuuuac

SEQ ID NO: 1136329 - RNA, 19 nt, Homo sapiens
  misc_RNA (1)...(19): siRNA sense strand
ccucagaaacacagaaguc

SEQ ID NO: 1136330 - RNA, 19 nt, Homo sapiens
  misc_RNA (1)...(19): siRNA sense strand
uaaucauccuccauuuguc

SEQ ID NO: 1136331 - RNA, 19 nt, Homo sapiens
  misc_RNA (1)...(19): siRNA sense strand
gcauugaacuuuacuuuga

SEQ ID NO: 1136332 - RNA, 19 nt, Homo sapiens
  misc_RNA (1)...(19): siRNA sense strand
gacagugcauugaacuuua

SEQ ID NO: 1136333 - RNA, 19 nt, Homo sapiens
  misc_RNA (1)...(19): siRNA sense strand
gcagagggagguaucuuua

SEQ ID NO: 1136334 - RNA, 19 nt, Homo sapiens
  misc_RNA (1)...(19): siRNA sense strand
ggaaugcaucuacaucaua

SEQ ID NO: 1136335 - RNA, 19 nt, Homo sapiens
  misc_RNA (1)...(19): siRNA sense strand
gaaugcaucuacaucauag

SEQ ID NO: 1136336 - RNA, 19 nt, Homo sapiens
  misc_RNA (1)...(19): siRNA sense strand
ggaagauuucuauggauua

SEQ ID NO: 1136337 - RNA, 19 nt, Homo sapiens
  misc_RNA (1)...(19): siRNA sense strand
gcaaaccaccucagaaaca

SEQ ID NO: 1136338 - RNA, 19 nt, Homo sapiens
  misc_RNA (1)...(19): siRNA sense strand
cauagaagccgcuccaaga

SEQ ID NO: 1136339 - RNA, 19 nt, Homo sapiens
  misc_RNA (1)...(19): siRNA sense strand
gagugcaaauuugaucaua

SEQ ID NO: 1136340 - RNA, 19 nt, Homo sapiens
  misc_RNA (1)...(19): siRNA sense strand
gaugaaaaguacucuauug

SEQ ID NO: 1136341 - RNA, 19 nt, Homo sapiens
  misc_RNA (1)...(19): siRNA sense strand
ccaacuaucccagcaagua

SEQ ID NO: 1136342 - RNA, 19 nt, Homo sapiens
  misc_RNA (1)...(19): siRNA sense strand
auggagagcuggaaucuau

SEQ ID NO: 1136343 - RNA, 19 nt, Homo sapiens
  misc_RNA (1)...(19): siRNA sense strand
uggaagauuucuauggauu

SEQ ID NO: 1136344 - RNA, 19 nt, Homo sapiens
  misc_RNA (1)...(19): siRNA sense strand
gaaaaguacucuauugaac

SEQ ID NO: 1136345 - RNA, 19 nt, Homo sapiens
  misc_RNA (1)...(19): siRNA sense strand
gggaaugcaucuacaucau

SEQ ID NO: 1136346 - RNA, 19 nt, Homo sapiens
  misc_RNA (1)...(19): siRNA sense strand
aagcaaaccaccucagaaa

SEQ ID NO: 1136347 - RNA, 19 nt, Homo sapiens
  misc_RNA (1)...(19): siRNA sense strand
gaaaggaacagaaaagcaa

SEQ ID NO: 1136348 - RNA, 19 nt, Homo sapiens
  misc_RNA (1)...(19): siRNA sense strand
guuuaaucauccuccauuu

SEQ ID NO: 1136349 - RNA, 19 nt, Homo sapiens
  misc_RNA (1)...(19): siRNA sense strand
gugcauugaacuuuacuuu

SEQ ID NO: 1136350 - RNA, 19 nt, Homo sapiens
  misc_RNA (1)...(19): siRNA sense strand
caacuaucccagcaaguau

SEQ ID NO: 1136351 - RNA, 19 nt, Homo sapiens
  misc_RNA (1)...(19): siRNA sense strand
ccaagacagugcauugaac

SEQ ID NO: 1136352 - RNA, 19 nt, Homo sapiens
  misc_RNA (1)...(19): siRNA sense strand
gcuccaagacagugcauug

SEQ ID NO: 1136353 - RNA, 19 nt, Homo sapiens
  misc_RNA (1)...(19): siRNA sense strand
agacagugcauugaacuuu

SEQ ID NO: 1136354 - RNA, 19 nt, Homo sapiens
  misc_RNA (1)...(19): siRNA sense strand
aguggaagauuucuaugga

SEQ ID NO: 1136355 - RNA, 19 nt, Homo sapiens
  misc_RNA (1)...(19): siRNA sense strand
ggacguuucuguggacaac

SEQ ID NO: 1136356 - RNA, 19 nt, Homo sapiens
  misc_RNA (1)...(19): siRNA sense strand
uuaaucauccuccauuugu

SEQ ID NO: 1136357 - RNA, 19 nt, Homo sapiens
  misc_RNA (1)...(19): siRNA sense strand
ucagcucgauacaauuuca

SEQ ID NO: 1136358 - RNA, 19 nt, Homo sapiens
  misc_RNA (1)...(19): siRNA sense strand
gaccgggaaugcaucuaca

SEQ ID NO: 1136359 - RNA, 19 nt, Homo sapiens
  misc_RNA (1)...(19): siRNA sense strand
uguagcaaguuuaaucauc

SEQ ID NO: 1136360 - RNA, 19 nt, Homo sapiens
  misc_RNA (1)...(19): siRNA sense strand
uauugaaguucgagaugga

SEQ ID NO: 1136361 - RNA, 19 nt, Homo sapiens
  misc_RNA (1)...(19): siRNA sense strand
cagaaacacagaagucagu

SEQ ID NO: 1136362 - RNA, 19 nt, Homo sapiens
  misc_RNA (1)...(19): siRNA sense strand
uuucagcucgauacaauuu

SEQ ID NO: 1136363 - RNA, 19 nt, Homo sapiens
  misc_RNA (1)...(19): siRNA sense strand
aaagcaaaccaccucagaa

SEQ ID NO: 1136364 - RNA, 19 nt, Homo sapiens
  misc_RNA (1)...(19): siRNA sense strand
guggaagauuucuauggau

SEQ ID NO: 1136365 - RNA, 19 nt, Homo sapiens
  misc_RNA (1)...(19): siRNA sense strand
caaaauccaccugucauaa

SEQ ID NO: 1136366 - RNA, 19 nt, Homo sapiens
  misc_RNA (1)...(19): siRNA sense strand
ggagagcuggaaucuaugg

SEQ ID NO: 1136367 - RNA, 19 nt, Homo sapiens
  misc_RNA (1)...(19): siRNA sense strand
caaaccaccucagaaacac

SEQ ID NO: 1136368 - RNA, 19 nt, Homo sapiens
  misc_RNA (1)...(19): siRNA sense strand
ucagugcaguguggaacuu

SEQ ID NO: 1136369 - RNA, 19 nt, Homo sapiens
  misc_RNA (1)...(19): siRNA sense strand
aaauccaccugucauaaaa

SEQ ID NO: 1136370 - RNA, 19 nt, Homo sapiens
  misc_RNA (1)...(19): siRNA sense strand
caacaaaauccaccuguca

SEQ ID NO: 1136371 - RNA, 19 nt, Homo sapiens
  misc_RNA (1)...(19): siRNA sense strand
agauggaccuuuuggcuuu

SEQ ID NO: 1136372 - RNA, 19 nt, Homo sapiens
  misc_RNA (1)...(19): siRNA sense strand
caaccaagaaaggaacaga

SEQ ID NO: 1136373 - RNA, 19 nt, Homo sapiens
  misc_RNA (1)...(19): siRNA sense strand
cauauugaaguucgagaug

SEQ ID NO: 1136374 - RNA, 19 nt, Homo sapiens
  misc_RNA (1)...(19): siRNA sense strand
cuuuaccucucccaacuau

SEQ ID NO: 1136375 - RNA, 19 nt, Homo sapiens
  misc_RNA (1)...(19): siRNA sense strand
ggagugcaaauuugaucau

SEQ ID NO: 1136376 - RNA, 19 nt, Homo sapiens
  misc_RNA (1)...(19): siRNA sense strand
gauggagagcuggaaucua

SEQ ID NO: 1136377 - RNA, 19 nt, Homo sapiens
  misc_RNA (1)...(19): siRNA sense strand
ucuugggagugcaaauuug

SEQ ID NO: 1136378 - RNA, 19 nt, Homo sapiens
  misc_RNA (1)...(19): siRNA sense strand
gaaguucgagauggaccuu

SEQ ID NO: 1136379 - RNA, 19 nt, Homo sapiens
  misc_RNA (1)...(19): siRNA sense strand
caagacagugcauugaacu

SEQ ID NO: 1136380 - RNA, 19 nt, Homo sapiens
  misc_RNA (1)...(19): siRNA sense strand
uggcuuuucuccaauaauu

SEQ ID NO: 1136381 - RNA, 19 nt, Homo sapiens
  misc_RNA (1)...(19): siRNA sense strand
acagugcauugaacuuuac

SEQ ID NO: 1136382 - RNA, 19 nt, Homo sapiens
  misc_RNA (1)...(19): siRNA sense strand
ccucagaaacacagaaguc

SEQ ID NO: 1136383 - RNA, 19 nt, Homo sapiens
  misc_RNA (1)...(19): siRNA sense strand
uaaucauccuccauuuguc

SEQ ID NO: 1136384 - RNA, 19 nt, Homo sapiens
  misc_RNA (1)...(19): siRNA sense strand
gcauugaacuuuacuuuga

SEQ ID NO: 1136385 - RNA, 19 nt, Homo sapiens
  misc_RNA (1)...(19): siRNA sense strand
gacagugcauugaacuuua

SEQ ID NO: 1136386 - RNA, 19 nt, Homo sapiens
  misc_RNA (1)...(19): siRNA sense strand
gcagagggagguaucuuua

SEQ ID NO: 1136387 - RNA, 19 nt, Homo sapiens
  misc_RNA (1)...(19): siRNA sense strand
ggaaugcaucuacaucaua

SEQ ID NO: 1136388 - RNA, 19 nt, Homo sapiens
  misc_RNA (1)...(19): siRNA sense strand
gaaugcaucuacaucauag

SEQ ID NO: 1136389 - RNA, 19 nt, Homo sapiens
  misc_RNA (1)...(19): siRNA sense strand
ggaagauuucuauggauua

SEQ ID NO: 1136390 - RNA, 19 nt, Homo sapiens
  misc_RNA (1)...(19): siRNA sense strand
gcaaaccaccucagaaaca

SEQ ID NO: 1136391 - RNA, 19 nt, Homo sapiens
  misc_RNA (1)...(19): siRNA sense strand
cauagaagccgcuccaaga

SEQ ID NO: 1136392 - RNA, 19 nt, Homo sapiens
  misc_RNA (1)...(19): siRNA sense strand
gagugcaaauuugaucaua

SEQ ID NO: 1136393 - RNA, 19 nt, Homo sapiens
  misc_RNA (1)...(19): siRNA sense strand
gaugaaaaguacucuauug

SEQ ID NO: 1136394 - RNA, 19 nt, Homo sapiens
  misc_RNA (1)...(19): siRNA sense strand
ccaacuaucccagcaagua

SEQ ID NO: 1136395 - RNA, 19 nt, Homo sapiens
  misc_RNA (1)...(19): siRNA sense strand
auggagagcuggaaucuau

SEQ ID NO: 1136396 - RNA, 19 nt, Homo sapiens
  misc_RNA (1)...(19): siRNA sense strand
uggaagauuucuauggauu

SEQ ID NO: 1136397 - RNA, 19 nt, Homo sapiens
  misc_RNA (1)...(19): siRNA sense strand
gaaaaguacucuauugaac

SEQ ID NO: 1136398 - RNA, 19 nt, Homo sapiens
  misc_RNA (1)...(19): siRNA sense strand
gggaaugcaucuacaucau

SEQ ID NO: 1136399 - RNA, 19 nt, Homo sapiens
  misc_RNA (1)...(19): siRNA sense strand
aagcaaaccaccucagaaa

SEQ ID NO: 1136400 - RNA, 19 nt, Homo sapiens
  misc_RNA (1)...(19): siRNA sense strand
gaaaggaacagaaaagcaa

SEQ ID NO: 1136401 - RNA, 19 nt, Homo sapiens
  misc_RNA (1)...(19): siRNA sense strand
guuuaaucauccuccauuu

SEQ ID NO: 1136402 - RNA, 19 nt, Homo sapiens
  misc_RNA (1)...(19): siRNA sense strand
gugcauugaacuuuacuuu

SEQ ID NO: 1136403 - RNA, 19 nt, Homo sapiens
  misc_RNA (1)...(19): siRNA sense strand
caacuaucccagcaaguau

SEQ ID NO: 1136404 - RNA, 19 nt, Homo sapiens
  misc_RNA (1)...(19): siRNA sense strand
ccaagacagugcauugaac

SEQ ID NO: 1136405 - RNA, 19 nt, Homo sapiens
  misc_RNA (1)...(19): siRNA sense strand
gcuccaagacagugcauug

SEQ ID NO: 1136406 - RNA, 19 nt, Homo sapiens
  misc_RNA (1)...(19): siRNA sense strand
agacagugcauugaacuuu

SEQ ID NO: 1136407 - RNA, 19 nt, Homo sapiens
  misc_RNA (1)...(19): siRNA sense strand
aguggaagauuucuaugga

SEQ ID NO: 1136408 - RNA, 19 nt, Homo sapiens
  misc_RNA (1)...(19): siRNA sense strand
ggacguuucuguggacaac

SEQ ID NO: 1136409 - RNA, 19 nt, Homo sapiens
  misc_RNA (1)...(19): siRNA sense strand
uuaaucauccuccauuugu

SEQ ID NO: 1136410 - RNA, 19 nt, Homo sapiens
  misc_RNA (1)...(19): siRNA sense strand
ucagcucgauacaauuuca

SEQ ID NO: 1136411 - RNA, 19 nt, Homo sapiens
  misc_RNA (1)...(19): siRNA sense strand
gaccgggaaugcaucuaca

SEQ ID NO: 1136412 - RNA, 19 nt, Homo sapiens
  misc_RNA (1)...(19): siRNA sense strand
uguagcaaguuuaaucauc

SEQ ID NO: 1136413 - RNA, 19 nt, Homo sapiens
  misc_RNA (1)...(19): siRNA sense strand
uauugaaguucgagaugga

SEQ ID NO: 1136414 - RNA, 19 nt, Homo sapiens
  misc_RNA (1)...(19): siRNA sense strand
cagaaacacagaagucagu

SEQ ID NO: 1136415 - RNA, 19 nt, Homo sapiens
  misc_RNA (1)...(19): siRNA sense strand
uuucagcucgauacaauuu

SEQ ID NO: 1136416 - RNA, 19 nt, Homo sapiens
  misc_RNA (1)...(19): siRNA sense strand
aaagcaaaccaccucagaa

SEQ ID NO: 1136417 - RNA, 19 nt, Homo sapiens
  misc_RNA (1)...(19): siRNA sense strand
guggaagauuucuauggau

SEQ ID NO: 1136418 - RNA, 19 nt, Homo sapiens
  misc_RNA (1)...(19): siRNA sense strand
caaaauccaccugucauaa

SEQ ID NO: 1136419 - RNA, 19 nt, Homo sapiens
  misc_RNA (1)...(19): siRNA sense strand
ggagagcuggaaucuaugg

SEQ ID NO: 1136420 - RNA, 19 nt, Homo sapiens
  misc_RNA (1)...(19): siRNA sense strand
caaaccaccucagaaacac

SEQ ID NO: 1136421 - RNA, 19 nt, Homo sapiens
  misc_RNA (1)...(19): siRNA sense strand
ucagugcaguguggaacuu

SEQ ID NO: 1136422 - RNA, 19 nt, Homo sapiens
  misc_RNA (1)...(19): siRNA sense strand
aaauccaccugucauaaaa

SEQ ID NO: 1136423 - RNA, 19 nt, Homo sapiens
  misc_RNA (1)...(19): siRNA sense strand
caacaaaauccaccuguca

SEQ ID NO: 1136424 - RNA, 19 nt, Homo sapiens
  misc_RNA (1)...(19): siRNA sense strand
agauggaccuuuuggcuuu

SEQ ID NO: 1136425 - RNA, 19 nt, Homo sapiens
  misc_RNA (1)...(19): siRNA sense strand
caaccaagaaaggaacaga

SEQ ID NO: 1136426 - RNA, 19 nt, Homo sapiens
  misc_RNA (1)...(19): siRNA sense strand
cauauugaaguucgagaug

SEQ ID NO: 1136427 - RNA, 19 nt, Homo sapiens
  misc_RNA (1)...(19): siRNA sense strand
cuuuaccucucccaacuau

SEQ ID NO: 1136428 - RNA, 19 nt, Homo sapiens
  misc_RNA (1)...(19): siRNA sense strand
ggagugcaaauuugaucau

SEQ ID NO: 1136429 - RNA, 19 nt, Homo sapiens
  misc_RNA (1)...(19): siRNA sense strand
gauggagagcuggaaucua

SEQ ID NO: 1136430 - RNA, 19 nt, Homo sapiens
  misc_RNA (1)...(19): siRNA sense strand
ucuugggagugcaaauuug

SEQ ID NO: 1136431 - RNA, 19 nt, Homo sapiens
  misc_RNA (1)...(19): siRNA sense strand
gaaguucgagauggaccuu

SEQ ID NO: 1136432 - RNA, 19 nt, Homo sapiens
  misc_RNA (1)...(19): siRNA sense strand
caagacagugcauugaacu

SEQ ID NO: 1136433 - RNA, 19 nt, Homo sapiens
  misc_RNA (1)...(19): siRNA sense strand
uggcuuuucuccaauaauu

SEQ ID NO: 1136434 - RNA, 19 nt, Homo sapiens
  misc_RNA (1)...(19): siRNA sense strand
acagugcauugaacuuuac

SEQ ID NO: 1136435 - RNA, 19 nt, Homo sapiens
  misc_RNA (1)...(19): siRNA sense strand
ccucagaaacacagaaguc

SEQ ID NO: 1136436 - RNA, 19 nt, Homo sapiens
  misc_RNA (1)...(19): siRNA sense strand
uaaucauccuccauuuguc

SEQ ID NO: 1136437 - RNA, 19 nt, Homo sapiens
  misc_RNA (1)...(19): siRNA sense strand
gggaaaccaugaagaggaa

SEQ ID NO: 1136438 - RNA, 19 nt, Homo sapiens
  misc_RNA (1)...(19): siRNA sense strand
gcuggaaggugacgagugu

SEQ ID NO: 1136439 - RNA, 19 nt, Homo sapiens
  misc_RNA (1)...(19): siRNA sense strand
ccaggauggugacaaguug

SEQ ID NO: 1136440 - RNA, 19 nt, Homo sapiens
  misc_RNA (1)...(19): siRNA sense strand
cauggcaaguggcucucua

SEQ ID NO: 1136441 - RNA, 19 nt, Homo sapiens
  misc_RNA (1)...(19): siRNA sense strand
gaucagggaaaccaugaag

SEQ ID NO: 1136442 - RNA, 19 nt, Homo sapiens
  misc_RNA (1)...(19): siRNA sense strand
auaccaaagucugccacua

SEQ ID NO: 1136443 - RNA, 19 nt, Homo sapiens
  misc_RNA (1)...(19): siRNA sense strand
ggggugacgucccuuguga

SEQ ID NO: 1136444 - RNA, 19 nt, Homo sapiens
  misc_RNA (1)...(19): siRNA sense strand
ucagggaaaccaugaagag

SEQ ID NO: 1136445 - RNA, 19 nt, Homo sapiens
  misc_RNA (1)...(19): siRNA sense strand
ccaccgcaacgacaucaug

SEQ ID NO: 1136446 - RNA, 19 nt, Homo sapiens
  misc_RNA (1)...(19): siRNA sense strand
ggugacgucccuugugaca

SEQ ID NO: 1136447 - RNA, 19 nt, Homo sapiens
  misc_RNA (1)...(19): siRNA sense strand
gcuggaaggugacgagugu

SEQ ID NO: 1136448 - RNA, 19 nt, Homo sapiens
  misc_RNA (1)...(19): siRNA sense strand
ccaggauggugacaaguug

SEQ ID NO: 1136449 - RNA, 19 nt, Homo sapiens
  misc_RNA (1)...(19): siRNA sense strand
cauggcaaguggcucucua

SEQ ID NO: 1136450 - RNA, 19 nt, Homo sapiens
  misc_RNA (1)...(19): siRNA sense strand
ccaccgcaacgacaucaug

SEQ ID NO: 1136451 - RNA, 19 nt, Homo sapiens
  misc_RNA (1)...(19): siRNA sense strand
gcuggaaggugacgagugu

SEQ ID NO: 1136452 - RNA, 19 nt, Homo sapiens
  misc_RNA (1)...(19): siRNA sense strand
ccaggauggugacaaguug

SEQ ID NO: 1136453 - RNA, 19 nt, Homo sapiens
  misc_RNA (1)...(19): siRNA sense strand
cauggcaaguggcucucua

SEQ ID NO: 1136454 - RNA, 19 nt, Homo sapiens
  misc_RNA (1)...(19): siRNA sense strand
ccaccgcaacgacaucaug

SEQ ID NO: 1136455 - RNA, 19 nt, Homo sapiens
  misc_RNA (1)...(19): siRNA sense strand
gggaaaccaugaagaggaa

SEQ ID NO: 1136456 - RNA, 19 nt, Homo sapiens
  misc_RNA (1)...(19): siRNA sense strand
gcuggaaggugacgagugu

SEQ ID NO: 1136457 - RNA, 19 nt, Homo sapiens
  misc_RNA (1)...(19): siRNA sense strand
ccaggauggugacaaguug

SEQ ID NO: 1136458 - RNA, 19 nt, Homo sapiens
  misc_RNA (1)...(19): siRNA sense strand
cauggcaaguggcucucua

SEQ ID NO: 1136459 - RNA, 19 nt, Homo sapiens
  misc_RNA (1)...(19): siRNA sense strand
gaucagggaaaccaugaag

SEQ ID NO: 1136460 - RNA, 19 nt, Homo sapiens
  misc_RNA (1)...(19): siRNA sense strand
auaccaaagucugccacua

SEQ ID NO: 1136461 - RNA, 19 nt, Homo sapiens
  misc_RNA (1)...(19): siRNA sense strand
ggggugacgucccuuguga

SEQ ID NO: 1136462 - RNA, 19 nt, Homo sapiens
  misc_RNA (1)...(19): siRNA sense strand
ucagggaaaccaugaagag

SEQ ID NO: 1136463 - RNA, 19 nt, Homo sapiens
  misc_RNA (1)...(19): siRNA sense strand
ccaccgcaacgacaucaug

SEQ ID NO: 1136464 - RNA, 19 nt, Homo sapiens
  misc_RNA (1)...(19): siRNA sense strand
ggugacgucccuugugaca

SEQ ID NO: 1136465 - RNA, 19 nt, Homo sapiens
  misc_RNA (1)...(19): siRNA sense strand
gggaaaccaugaagaggaa

SEQ ID NO: 1136466 - RNA, 19 nt, Homo sapiens
  misc_RNA (1)...(19): siRNA sense strand
gcuggaaggugacgagugu

SEQ ID NO: 1136467 - RNA, 19 nt, Homo sapiens
  misc_RNA (1)...(19): siRNA sense strand
ccaggauggugacaaguug

SEQ ID NO: 1136468 - RNA, 19 nt, Homo sapiens
  misc_RNA (1)...(19): siRNA sense strand
cauggcaaguggcucucua

SEQ ID NO: 1136469 - RNA, 19 nt, Homo sapiens
  misc_RNA (1)...(19): siRNA sense strand
gaucagggaaaccaugaag

SEQ ID NO: 1136470 - RNA, 19 nt, Homo sapiens
  misc_RNA (1)...(19): siRNA sense strand
auaccaaagucugccacua

SEQ ID NO: 1136471 - RNA, 19 nt, Homo sapiens
  misc_RNA (1)...(19): siRNA sense strand
ggggugacgucccuuguga

SEQ ID NO: 1136472 - RNA, 19 nt, Homo sapiens
  misc_RNA (1)...(19): siRNA sense strand
ucagggaaaccaugaagag

SEQ ID NO: 1136473 - RNA, 19 nt, Homo sapiens
  misc_RNA (1)...(19): siRNA sense strand
ccaccgcaacgacaucaug

SEQ ID NO: 1136474 - RNA, 19 nt, Homo sapiens
  misc_RNA (1)...(19): siRNA sense strand
ggugacgucccuugugaca

SEQ ID NO: 1136475 - RNA, 19 nt, Homo sapiens
  misc_RNA (1)...(19): siRNA sense strand
gcuggaaggugacgagugu

SEQ ID NO: 1136476 - RNA, 19 nt, Homo sapiens
  misc_RNA (1)...(19): siRNA sense strand
ccaggauggugacaaguug

SEQ ID NO: 1136477 - RNA, 19 nt, Homo sapiens
  misc_RNA (1)...(19): siRNA sense strand
cauggcaaguggcucucua

SEQ ID NO: 1136478 - RNA, 19 nt, Homo sapiens
  misc_RNA (1)...(19): siRNA sense strand
ccaccgcaacgacaucaug

SEQ ID NO: 1136479 - RNA, 19 nt, Homo sapiens
  misc_RNA (1)...(19): siRNA sense strand
gcuggaaggugacgagugu

SEQ ID NO: 1136480 - RNA, 19 nt, Homo sapiens
  misc_RNA (1)...(19): siRNA sense strand
ccaggauggugacaaguug

SEQ ID NO: 1136481 - RNA, 19 nt, Homo sapiens
  misc_RNA (1)...(19): siRNA sense strand
cauggcaaguggcucucua

SEQ ID NO: 1136482 - RNA, 19 nt, Homo sapiens
  misc_RNA (1)...(19): siRNA sense strand
ccaccgcaacgacaucaug

SEQ ID NO: 1136483 - RNA, 19 nt, Homo sapiens
  misc_RNA (1)...(19): siRNA sense strand
gggaaaccaugaagaggaa

SEQ ID NO: 1136484 - RNA, 19 nt, Homo sapiens
  misc_RNA (1)...(19): siRNA sense strand
gcuggaaggugacgagugu

SEQ ID NO: 1136485 - RNA, 19 nt, Homo sapiens
  misc_RNA (1)...(19): siRNA sense strand
ccaggauggugacaaguug

SEQ ID NO: 1136486 - RNA, 19 nt, Homo sapiens
  misc_RNA (1)...(19): siRNA sense strand
cauggcaaguggcucucua

SEQ ID NO: 1136487 - RNA, 19 nt, Homo sapiens
  misc_RNA (1)...(19): siRNA sense strand
gaucagggaaaccaugaag

SEQ ID NO: 1136488 - RNA, 19 nt, Homo sapiens
  misc_RNA (1)...(19): siRNA sense strand
auaccaaagucugccacua

SEQ ID NO: 1136489 - RNA, 19 nt, Homo sapiens
  misc_RNA (1)...(19): siRNA sense strand
ggggugacgucccuuguga

SEQ ID NO: 1136490 - RNA, 19 nt, Homo sapiens
  misc_RNA (1)...(19): siRNA sense strand
ucagggaaaccaugaagag

SEQ ID NO: 1136491 - RNA, 19 nt, Homo sapiens
  misc_RNA (1)...(19): siRNA sense strand
ccaccgcaacgacaucaug

SEQ ID NO: 1136492 - RNA, 19 nt, Homo sapiens
  misc_RNA (1)...(19): siRNA sense strand
ggugacgucccuugugaca

SEQ ID NO: 1136493 - RNA, 19 nt, Homo sapiens
  misc_RNA (1)...(19): siRNA sense strand
gcacacagaugaugaaaug

SEQ ID NO: 1136494 - RNA, 19 nt, Homo sapiens
  misc_RNA (1)...(19): siRNA sense strand
ggaauucaaugauguguau

SEQ ID NO: 1136495 - RNA, 19 nt, Homo sapiens
  misc_RNA (1)...(19): siRNA sense strand
gaacugcgguuacuuaaac

SEQ ID NO: 1136496 - RNA, 19 nt, Homo sapiens
  misc_RNA (1)...(19): siRNA sense strand
caaggucucuggaggaauu

SEQ ID NO: 1136497 - RNA, 19 nt, Homo sapiens
  misc_RNA (1)...(19): siRNA sense strand
gucagaagcuuacagauga

SEQ ID NO: 1136498 - RNA, 19 nt, Homo sapiens
  misc_RNA (1)...(19): siRNA sense strand
gggcagaucugaacaacau

SEQ ID NO: 1136499 - RNA, 19 nt, Homo sapiens
  misc_RNA (1)...(19): siRNA sense strand
gaaaagaaccuacagagaa

SEQ ID NO: 1136500 - RNA, 19 nt, Homo sapiens
  misc_RNA (1)...(19): siRNA sense strand
acauucagcugacauaauu

SEQ ID NO: 1136501 - RNA, 19 nt, Homo sapiens
  misc_RNA (1)...(19): siRNA sense strand
caaauucuccgaggucuaa

SEQ ID NO: 1136502 - RNA, 19 nt, Homo sapiens
  misc_RNA (1)...(19): siRNA sense strand
gaagcucuccagaccauuu

SEQ ID NO: 1136503 - RNA, 19 nt, Homo sapiens
  misc_RNA (1)...(19): siRNA sense strand
gcuuacagaugaccauguu

SEQ ID NO: 1136504 - RNA, 19 nt, Homo sapiens
  misc_RNA (1)...(19): siRNA sense strand
ugaacuggaugcauuacaa

SEQ ID NO: 1136505 - RNA, 19 nt, Homo sapiens
  misc_RNA (1)...(19): siRNA sense strand
uaaucuagcugugaaugaa

SEQ ID NO: 1136506 - RNA, 19 nt, Homo sapiens
  misc_RNA (1)...(19): siRNA sense strand
agagaacugcgguuacuua

SEQ ID NO: 1136507 - RNA, 19 nt, Homo sapiens
  misc_RNA (1)...(19): siRNA sense strand
gagaacugcgguuacuuaa

SEQ ID NO: 1136508 - RNA, 19 nt, Homo sapiens
  misc_RNA (1)...(19): siRNA sense strand
ggcaggagcugaacaagac

SEQ ID NO: 1136509 - RNA, 19 nt, Homo sapiens
  misc_RNA (1)...(19): siRNA sense strand
ccagacaguugauauuugg

SEQ ID NO: 1136510 - RNA, 19 nt, Homo sapiens
  misc_RNA (1)...(19): siRNA sense strand
cuacagagaacugcgguua

SEQ ID NO: 1136511 - RNA, 19 nt, Homo sapiens
  misc_RNA (1)...(19): siRNA sense strand
ucagugggaugcauaaugg

SEQ ID NO: 1136512 - RNA, 19 nt, Homo sapiens
  misc_RNA (1)...(19): siRNA sense strand
ucuccgaggucuaaaguau

SEQ ID NO: 1136513 - RNA, 19 nt, Homo sapiens
  misc_RNA (1)...(19): siRNA sense strand
gagcugaagauucuggauu

SEQ ID NO: 1136514 - RNA, 19 nt, Homo sapiens
  misc_RNA (1)...(19): siRNA sense strand
cauaauggccgagcuguug

SEQ ID NO: 1136515 - RNA, 19 nt, Homo sapiens
  misc_RNA (1)...(19): siRNA sense strand
gcagaucugaacaacauug

SEQ ID NO: 1136516 - RNA, 19 nt, Homo sapiens
  misc_RNA (1)...(19): siRNA sense strand
cagaugaccauguucaguu

SEQ ID NO: 1136517 - RNA, 19 nt, Homo sapiens
  misc_RNA (1)...(19): siRNA sense strand
gaccauguucaguuccuua

SEQ ID NO: 1136518 - RNA, 19 nt, Homo sapiens
  misc_RNA (1)...(19): siRNA sense strand
ccauuucaguccaucauuc

SEQ ID NO: 1136519 - RNA, 19 nt, Homo sapiens
  misc_RNA (1)...(19): siRNA sense strand
gcgguuacuuaaacauaug

SEQ ID NO: 1136520 - RNA, 19 nt, Homo sapiens
  misc_RNA (1)...(19): siRNA sense strand
gagcugaacaagacaaucu

SEQ ID NO: 1136521 - RNA, 19 nt, Homo sapiens
  misc_RNA (1)...(19): siRNA sense strand
ccuaaaaccuaguaaucua

SEQ ID NO: 1136522 - RNA, 19 nt, Homo sapiens
  misc_RNA (1)...(19): siRNA sense strand
guaaucuagcugugaauga

SEQ ID NO: 1136523 - RNA, 19 nt, Homo sapiens
  misc_RNA (1)...(19): siRNA sense strand
cauguucaguuccuuaucu

SEQ ID NO: 1136524 - RNA, 19 nt, Homo sapiens
  misc_RNA (1)...(19): siRNA sense strand
gccgagcuguugacuggaa

SEQ ID NO: 1136525 - RNA, 19 nt, Homo sapiens
  misc_RNA (1)...(19): siRNA sense strand
aaaugugauuggucuguug

SEQ ID NO: 1136526 - RNA, 19 nt, Homo sapiens
  misc_RNA (1)...(19): siRNA sense strand
acugugagcugaagauucu

SEQ ID NO: 1136527 - RNA, 19 nt, Homo sapiens
  misc_RNA (1)...(19): siRNA sense strand
uccgaggucuaaaguauau

SEQ ID NO: 1136528 - RNA, 19 nt, Homo sapiens
  misc_RNA (1)...(19): siRNA sense strand
uuccuuaucuaccaaauuc

SEQ ID NO: 1136529 - RNA, 19 nt, Homo sapiens
  misc_RNA (1)...(19): siRNA sense strand
aagaagcucuccagaccau

SEQ ID NO: 1136530 - RNA, 19 nt, Homo sapiens
  misc_RNA (1)...(19): siRNA sense strand
agcugaagauucuggauuu

SEQ ID NO: 1136531 - RNA, 19 nt, Homo sapiens
  misc_RNA (1)...(19): siRNA sense strand
uggaggaauucaaugaugu

SEQ ID NO: 1136532 - RNA, 19 nt, Homo sapiens
  misc_RNA (1)...(19): siRNA sense strand
guccaucauucaugcgaaa

SEQ ID NO: 1136533 - RNA, 19 nt, Homo sapiens
  misc_RNA (1)...(19): siRNA sense strand
gugaaaugucagaagcuua

SEQ ID NO: 1136534 - RNA, 19 nt, Homo sapiens
  misc_RNA (1)...(19): siRNA sense strand
ugucagaagcuuacagaug

SEQ ID NO: 1136535 - RNA, 19 nt, Homo sapiens
  misc_RNA (1)...(19): siRNA sense strand
ggaggaauucaaugaugug

SEQ ID NO: 1136536 - RNA, 19 nt, Homo sapiens
  misc_RNA (1)...(19): siRNA sense strand
cacagaugaugaaaugaca

SEQ ID NO: 1136537 - RNA, 19 nt, Homo sapiens
  misc_RNA (1)...(19): siRNA sense strand
acagagaacugcgguuacu

SEQ ID NO: 1136538 - RNA, 19 nt, Homo sapiens
  misc_RNA (1)...(19): siRNA sense strand
cuccugagaucaugcugaa

SEQ ID NO: 1136539 - RNA, 19 nt, Homo sapiens
  misc_RNA (1)...(19): siRNA sense strand
cuggaggaauucaaugaug

SEQ ID NO: 1136540 - RNA, 19 nt, Homo sapiens
  misc_RNA (1)...(19): siRNA sense strand
ugaaaugucagaagcuuac

SEQ ID NO: 1136541 - RNA, 19 nt, Homo sapiens
  misc_RNA (1)...(19): siRNA sense strand
gcauaauggccgagcuguu

SEQ ID NO: 1136542 - RNA, 19 nt, Homo sapiens
  misc_RNA (1)...(19): siRNA sense strand
gaacuggaugcauuacaac

SEQ ID NO: 1136543 - RNA, 19 nt, Homo sapiens
  misc_RNA (1)...(19): siRNA sense strand
agaugaccauguucaguuc

SEQ ID NO: 1136544 - RNA, 19 nt, Homo sapiens
  misc_RNA (1)...(19): siRNA sense strand
aaccagacaguugauauuu

SEQ ID NO: 1136545 - RNA, 19 nt, Homo sapiens
  misc_RNA (1)...(19): siRNA sense strand
accagacaguugauauuug

SEQ ID NO: 1136546 - RNA, 19 nt, Homo sapiens
  misc_RNA (1)...(19): siRNA sense strand
ugugaaaugucagaagcuu

SEQ ID NO: 1136547 - RNA, 19 nt, Homo sapiens
  misc_RNA (1)...(19): siRNA sense strand
caggcuacguggccacuag

SEQ ID NO: 1136548 - RNA, 19 nt, Homo sapiens
  misc_RNA (1)...(19): siRNA sense strand
uauacauucagcugacaua

SEQ ID NO: 1136549 - RNA, 19 nt, Homo sapiens
  misc_RNA (1)...(19): siRNA sense strand
uuacagaugaccauguuca

SEQ ID NO: 1136550 - RNA, 19 nt, Homo sapiens
  misc_RNA (1)...(19): siRNA sense strand
ugaagacugugagcugaag

SEQ ID NO: 1136551 - RNA, 19 nt, Homo sapiens
  misc_RNA (1)...(19): siRNA sense strand
ugcgguuacuuaaacauau

SEQ ID NO: 1136552 - RNA, 19 nt, Homo sapiens
  misc_RNA (1)...(19): siRNA sense strand
ugcaaggucucuggaggaa

SEQ ID NO: 1136553 - RNA, 19 nt, Homo sapiens
  misc_RNA (1)...(19): siRNA sense strand
gguuacguguggcagugaa

SEQ ID NO: 1136554 - RNA, 19 nt, Homo sapiens
  misc_RNA (1)...(19): siRNA sense strand
aggagaggcccacguucua

SEQ ID NO: 1136555 - RNA, 19 nt, Homo sapiens
  misc_RNA (1)...(19): siRNA sense strand
gcauuacaaccagacaguu

SEQ ID NO: 1136556 - RNA, 19 nt, Homo sapiens
  misc_RNA (1)...(19): siRNA sense strand
ucaguuccuuaucuaccaa

SEQ ID NO: 1136557 - RNA, 19 nt, Homo sapiens
  misc_RNA (1)...(19): siRNA sense strand
cggcaggagcugaacaaga

SEQ ID NO: 1136558 - RNA, 19 nt, Homo sapiens
  misc_RNA (1)...(19): siRNA sense strand
aaaagaaccuacagagaac

SEQ ID NO: 1136559 - RNA, 19 nt, Homo sapiens
  misc_RNA (1)...(19): siRNA sense strand
gaagacugugagcugaaga

SEQ ID NO: 1136560 - RNA, 19 nt, Homo sapiens
  misc_RNA (1)...(19): siRNA sense strand
ccaaauucuccgaggucua

SEQ ID NO: 1136561 - RNA, 19 nt, Homo sapiens
  misc_RNA (1)...(19): siRNA sense strand
ggagaggcccacguucuac

SEQ ID NO: 1136562 - RNA, 19 nt, Homo sapiens
  misc_RNA (1)...(19): siRNA sense strand
ccagaccauuucaguccau

SEQ ID NO: 1136563 - RNA, 19 nt, Homo sapiens
  misc_RNA (1)...(19): siRNA sense strand
caguugauauuuggucagu

SEQ ID NO: 1136564 - RNA, 19 nt, Homo sapiens
  misc_RNA (1)...(19): siRNA sense strand
gcacacagaugaugaaaug

SEQ ID NO: 1136565 - RNA, 19 nt, Homo sapiens
  misc_RNA (1)...(19): siRNA sense strand
ggaauucaaugauguguau

SEQ ID NO: 1136566 - RNA, 19 nt, Homo sapiens
  misc_RNA (1)...(19): siRNA sense strand
gaacugcgguuacuuaaac

SEQ ID NO: 1136567 - RNA, 19 nt, Homo sapiens
  misc_RNA (1)...(19): siRNA sense strand
caaggucucuggaggaauu

SEQ ID NO: 1136568 - RNA, 19 nt, Homo sapiens
  misc_RNA (1)...(19): siRNA sense strand
gucagaagcuuacagauga

SEQ ID NO: 1136569 - RNA, 19 nt, Homo sapiens
  misc_RNA (1)...(19): siRNA sense strand
gggcagaucugaacaacau

SEQ ID NO: 1136570 - RNA, 19 nt, Homo sapiens
  misc_RNA (1)...(19): siRNA sense strand
gaaaagaaccuacagagaa

SEQ ID NO: 1136571 - RNA, 19 nt, Homo sapiens
  misc_RNA (1)...(19): siRNA sense strand
acauucagcugacauaauu

SEQ ID NO: 1136572 - RNA, 19 nt, Homo sapiens
  misc_RNA (1)...(19): siRNA sense strand
caaauucuccgaggucuaa

SEQ ID NO: 1136573 - RNA, 19 nt, Homo sapiens
  misc_RNA (1)...(19): siRNA sense strand
gaagcucuccagaccauuu

SEQ ID NO: 1136574 - RNA, 19 nt, Homo sapiens
  misc_RNA (1)...(19): siRNA sense strand
gcuuacagaugaccauguu

SEQ ID NO: 1136575 - RNA, 19 nt, Homo sapiens
  misc_RNA (1)...(19): siRNA sense strand
ugaacuggaugcauuacaa

SEQ ID NO: 1136576 - RNA, 19 nt, Homo sapiens
  misc_RNA (1)...(19): siRNA sense strand
uaaucuagcugugaaugaa

SEQ ID NO: 1136577 - RNA, 19 nt, Homo sapiens
  misc_RNA (1)...(19): siRNA sense strand
agagaacugcgguuacuua

SEQ ID NO: 1136578 - RNA, 19 nt, Homo sapiens
  misc_RNA (1)...(19): siRNA sense strand
gagaacugcgguuacuuaa

SEQ ID NO: 1136579 - RNA, 19 nt, Homo sapiens
  misc_RNA (1)...(19): siRNA sense strand
ggcaggagcugaacaagac

SEQ ID NO: 1136580 - RNA, 19 nt, Homo sapiens
  misc_RNA (1)...(19): siRNA sense strand
ccagacaguugauauuugg

SEQ ID NO: 1136581 - RNA, 19 nt, Homo sapiens
  misc_RNA (1)...(19): siRNA sense strand
cuacagagaacugcgguua

SEQ ID NO: 1136582 - RNA, 19 nt, Homo sapiens
  misc_RNA (1)...(19): siRNA sense strand
ucagugggaugcauaaugg

SEQ ID NO: 1136583 - RNA, 19 nt, Homo sapiens
  misc_RNA (1)...(19): siRNA sense strand
ucuccgaggucuaaaguau

SEQ ID NO: 1136584 - RNA, 19 nt, Homo sapiens
  misc_RNA (1)...(19): siRNA sense strand
gagcugaagauucuggauu

SEQ ID NO: 1136585 - RNA, 19 nt, Homo sapiens
  misc_RNA (1)...(19): siRNA sense strand
cauaauggccgagcuguug

SEQ ID NO: 1136586 - RNA, 19 nt, Homo sapiens
  misc_RNA (1)...(19): siRNA sense strand
gcagaucugaacaacauug

SEQ ID NO: 1136587 - RNA, 19 nt, Homo sapiens
  misc_RNA (1)...(19): siRNA sense strand
cagaugaccauguucaguu

SEQ ID NO: 1136588 - RNA, 19 nt, Homo sapiens
  misc_RNA (1)...(19): siRNA sense strand
gaccauguucaguuccuua

SEQ ID NO: 1136589 - RNA, 19 nt, Homo sapiens
  misc_RNA (1)...(19): siRNA sense strand
ccauuucaguccaucauuc

SEQ ID NO: 1136590 - RNA, 19 nt, Homo sapiens
  misc_RNA (1)...(19): siRNA sense strand
gcgguuacuuaaacauaug

SEQ ID NO: 1136591 - RNA, 19 nt, Homo sapiens
  misc_RNA (1)...(19): siRNA sense strand
gagcugaacaagacaaucu

SEQ ID NO: 1136592 - RNA, 19 nt, Homo sapiens
  misc_RNA (1)...(19): siRNA sense strand
ccuaaaaccuaguaaucua

SEQ ID NO: 1136593 - RNA, 19 nt, Homo sapiens
  misc_RNA (1)...(19): siRNA sense strand
guaaucuagcugugaauga

SEQ ID NO: 1136594 - RNA, 19 nt, Homo sapiens
  misc_RNA (1)...(19): siRNA sense strand
cauguucaguuccuuaucu

SEQ ID NO: 1136595 - RNA, 19 nt, Homo sapiens
  misc_RNA (1)...(19): siRNA sense strand
gccgagcuguugacuggaa

SEQ ID NO: 1136596 - RNA, 19 nt, Homo sapiens
  misc_RNA (1)...(19): siRNA sense strand
aaaugugauuggucuguug

SEQ ID NO: 1136597 - RNA, 19 nt, Homo sapiens
  misc_RNA (1)...(19): siRNA sense strand
acugugagcugaagauucu

SEQ ID NO: 1136598 - RNA, 19 nt, Homo sapiens
  misc_RNA (1)...(19): siRNA sense strand
uccgaggucuaaaguauau

SEQ ID NO: 1136599 - RNA, 19 nt, Homo sapiens
  misc_RNA (1)...(19): siRNA sense strand
uuccuuaucuaccaaauuc

SEQ ID NO: 1136600 - RNA, 19 nt, Homo sapiens
  misc_RNA (1)...(19): siRNA sense strand
aagaagcucuccagaccau

SEQ ID NO: 1136601 - RNA, 19 nt, Homo sapiens
  misc_RNA (1)...(19): siRNA sense strand
agcugaagauucuggauuu

SEQ ID NO: 1136602 - RNA, 19 nt, Homo sapiens
  misc_RNA (1)...(19): siRNA sense strand
uggaggaauucaaugaugu

SEQ ID NO: 1136603 - RNA, 19 nt, Homo sapiens
  misc_RNA (1)...(19): siRNA sense strand
guccaucauucaugcgaaa

SEQ ID NO: 1136604 - RNA, 19 nt, Homo sapiens
  misc_RNA (1)...(19): siRNA sense strand
gugaaaugucagaagcuua

SEQ ID NO: 1136605 - RNA, 19 nt, Homo sapiens
  misc_RNA (1)...(19): siRNA sense strand
ugucagaagcuuacagaug

SEQ ID NO: 1136606 - RNA, 19 nt, Homo sapiens
  misc_RNA (1)...(19): siRNA sense strand
ggaggaauucaaugaugug

SEQ ID NO: 1136607 - RNA, 19 nt, Homo sapiens
  misc_RNA (1)...(19): siRNA sense strand
cacagaugaugaaaugaca

SEQ ID NO: 1136608 - RNA, 19 nt, Homo sapiens
  misc_RNA (1)...(19): siRNA sense strand
acagagaacugcgguuacu

SEQ ID NO: 1136609 - RNA, 19 nt, Homo sapiens
  misc_RNA (1)...(19): siRNA sense strand
cuccugagaucaugcugaa

SEQ ID NO: 1136610 - RNA, 19 nt, Homo sapiens
  misc_RNA (1)...(19): siRNA sense strand
cuggaggaauucaaugaug

SEQ ID NO: 1136611 - RNA, 19 nt, Homo sapiens
  misc_RNA (1)...(19): siRNA sense strand
ugaaaugucagaagcuuac

SEQ ID NO: 1136612 - RNA, 19 nt, Homo sapiens
  misc_RNA (1)...(19): siRNA sense strand
gcauaauggccgagcuguu

SEQ ID NO: 1136613 - RNA, 19 nt, Homo sapiens
  misc_RNA (1)...(19): siRNA sense strand
gaacuggaugcauuacaac

SEQ ID NO: 1136614 - RNA, 19 nt, Homo sapiens
  misc_RNA (1)...(19): siRNA sense strand
agaugaccauguucaguuc

SEQ ID NO: 1136615 - RNA, 19 nt, Homo sapiens
  misc_RNA (1)...(19): siRNA sense strand
aaccagacaguugauauuu

SEQ ID NO: 1136616 - RNA, 19 nt, Homo sapiens
  misc_RNA (1)...(19): siRNA sense strand
accagacaguugauauuug

SEQ ID NO: 1136617 - RNA, 19 nt, Homo sapiens
  misc_RNA (1)...(19): siRNA sense strand
ugugaaaugucagaagcuu

SEQ ID NO: 1136618 - RNA, 19 nt, Homo sapiens
  misc_RNA (1)...(19): siRNA sense strand
caggcuacguggccacuag

SEQ ID NO: 1136619 - RNA, 19 nt, Homo sapiens
  misc_RNA (1)...(19): siRNA sense strand
uauacauucagcugacaua

SEQ ID NO: 1136620 - RNA, 19 nt, Homo sapiens
  misc_RNA (1)...(19): siRNA sense strand
uuacagaugaccauguuca

SEQ ID NO: 1136621 - RNA, 19 nt, Homo sapiens
  misc_RNA (1)...(19): siRNA sense strand
ugaagacugugagcugaag

SEQ ID NO: 1136622 - RNA, 19 nt, Homo sapiens
  misc_RNA (1)...(19): siRNA sense strand
ugcgguuacuuaaacauau

SEQ ID NO: 1136623 - RNA, 19 nt, Homo sapiens
  misc_RNA (1)...(19): siRNA sense strand
ugcaaggucucuggaggaa

SEQ ID NO: 1136624 - RNA, 19 nt, Homo sapiens
  misc_RNA (1)...(19): siRNA sense strand
gguuacguguggcagugaa

SEQ ID NO: 1136625 - RNA, 19 nt, Homo sapiens
  misc_RNA (1)...(19): siRNA sense strand
aggagaggcccacguucua

SEQ ID NO: 1136626 - RNA, 19 nt, Homo sapiens
  misc_RNA (1)...(19): siRNA sense strand
gcauuacaaccagacaguu

SEQ ID NO: 1136627 - RNA, 19 nt, Homo sapiens
  misc_RNA (1)...(19): siRNA sense strand
ucaguuccuuaucuaccaa

SEQ ID NO: 1136628 - RNA, 19 nt, Homo sapiens
  misc_RNA (1)...(19): siRNA sense strand
cggcaggagcugaacaaga

SEQ ID NO: 1136629 - RNA, 19 nt, Homo sapiens
  misc_RNA (1)...(19): siRNA sense strand
aaaagaaccuacagagaac

SEQ ID NO: 1136630 - RNA, 19 nt, Homo sapiens
  misc_RNA (1)...(19): siRNA sense strand
gaagacugugagcugaaga

SEQ ID NO: 1136631 - RNA, 19 nt, Homo sapiens
  misc_RNA (1)...(19): siRNA sense strand
ccaaauucuccgaggucua

SEQ ID NO: 1136632 - RNA, 19 nt, Homo sapiens
  misc_RNA (1)...(19): siRNA sense strand
ggagaggcccacguucuac

SEQ ID NO: 1136633 - RNA, 19 nt, Homo sapiens
  misc_RNA (1)...(19): siRNA sense strand
ccagaccauuucaguccau

SEQ ID NO: 1136634 - RNA, 19 nt, Homo sapiens
  misc_RNA (1)...(19): siRNA sense strand
caguugauauuuggucagu

SEQ ID NO: 1136635 - RNA, 19 nt, Homo sapiens
  misc_RNA (1)...(19): siRNA sense strand
gcacacagaugaugaaaug

SEQ ID NO: 1136636 - RNA, 19 nt, Homo sapiens
  misc_RNA (1)...(19): siRNA sense strand
ggaauucaaugauguguau

SEQ ID NO: 1136637 - RNA, 19 nt, Homo sapiens
  misc_RNA (1)...(19): siRNA sense strand
gaacugcgguuacuuaaac

SEQ ID NO: 1136638 - RNA, 19 nt, Homo sapiens
  misc_RNA (1)...(19): siRNA sense strand
caaggucucuggaggaauu

SEQ ID NO: 1136639 - RNA, 19 nt, Homo sapiens
  misc_RNA (1)...(19): siRNA sense strand
gucagaagcuuacagauga

SEQ ID NO: 1136640 - RNA, 19 nt, Homo sapiens
  misc_RNA (1)...(19): siRNA sense strand
gggcagaucugaacaacau

SEQ ID NO: 1136641 - RNA, 19 nt, Homo sapiens
  misc_RNA (1)...(19): siRNA sense strand
gaaaagaaccuacagagaa

SEQ ID NO: 1136642 - RNA, 19 nt, Homo sapiens
  misc_RNA (1)...(19): siRNA sense strand
acauucagcugacauaauu

SEQ ID NO: 1136643 - RNA, 19 nt, Homo sapiens
  misc_RNA (1)...(19): siRNA sense strand
caaauucuccgaggucuaa

SEQ ID NO: 1136644 - RNA, 19 nt, Homo sapiens
  misc_RNA (1)...(19): siRNA sense strand
gaagcucuccagaccauuu

SEQ ID NO: 1136645 - RNA, 19 nt, Homo sapiens
  misc_RNA (1)...(19): siRNA sense strand
gcuuacagaugaccauguu

SEQ ID NO: 1136646 - RNA, 19 nt, Homo sapiens
  misc_RNA (1)...(19): siRNA sense strand
ugaacuggaugcauuacaa

SEQ ID NO: 1136647 - RNA, 19 nt, Homo sapiens
  misc_RNA (1)...(19): siRNA sense strand
uaaucuagcugugaaugaa

SEQ ID NO: 1136648 - RNA, 19 nt, Homo sapiens
  misc_RNA (1)...(19): siRNA sense strand
agagaacugcgguuacuua

SEQ ID NO: 1136649 - RNA, 19 nt, Homo sapiens
  misc_RNA (1)...(19): siRNA sense strand
gagaacugcgguuacuuaa

SEQ ID NO: 1136650 - RNA, 19 nt, Homo sapiens
  misc_RNA (1)...(19): siRNA sense strand
ggcaggagcugaacaagac

SEQ ID NO: 1136651 - RNA, 19 nt, Homo sapiens
  misc_RNA (1)...(19): siRNA sense strand
ccagacaguugauauuugg

SEQ ID NO: 1136652 - RNA, 19 nt, Homo sapiens
  misc_RNA (1)...(19): siRNA sense strand
cuacagagaacugcgguua

SEQ ID NO: 1136653 - RNA, 19 nt, Homo sapiens
  misc_RNA (1)...(19): siRNA sense strand
ucagugggaugcauaaugg

SEQ ID NO: 1136654 - RNA, 19 nt, Homo sapiens
  misc_RNA (1)...(19): siRNA sense strand
ucuccgaggucuaaaguau

SEQ ID NO: 1136655 - RNA, 19 nt, Homo sapiens
  misc_RNA (1)...(19): siRNA sense strand
gagcugaagauucuggauu

SEQ ID NO: 1136656 - RNA, 19 nt, Homo sapiens
  misc_RNA (1)...(19): siRNA sense strand
cauaauggccgagcuguug

SEQ ID NO: 1136657 - RNA, 19 nt, Homo sapiens
  misc_RNA (1)...(19): siRNA sense strand
gcagaucugaacaacauug

SEQ ID NO: 1136658 - RNA, 19 nt, Homo sapiens
  misc_RNA (1)...(19): siRNA sense strand
cagaugaccauguucaguu

SEQ ID NO: 1136659 - RNA, 19 nt, Homo sapiens
  misc_RNA (1)...(19): siRNA sense strand
gaccauguucaguuccuua

SEQ ID NO: 1136660 - RNA, 19 nt, Homo sapiens
  misc_RNA (1)...(19): siRNA sense strand
ccauuucaguccaucauuc

SEQ ID NO: 1136661 - RNA, 19 nt, Homo sapiens
  misc_RNA (1)...(19): siRNA sense strand
gcgguuacuuaaacauaug

SEQ ID NO: 1136662 - RNA, 19 nt, Homo sapiens
  misc_RNA (1)...(19): siRNA sense strand
gagcugaacaagacaaucu

SEQ ID NO: 1136663 - RNA, 19 nt, Homo sapiens
  misc_RNA (1)...(19): siRNA sense strand
ccuaaaaccuaguaaucua

SEQ ID NO: 1136664 - RNA, 19 nt, Homo sapiens
  misc_RNA (1)...(19): siRNA sense strand
guaaucuagcugugaauga

SEQ ID NO: 1136665 - RNA, 19 nt, Homo sapiens
  misc_RNA (1)...(19): siRNA sense strand
cauguucaguuccuuaucu

SEQ ID NO: 1136666 - RNA, 19 nt, Homo sapiens
  misc_RNA (1)...(19): siRNA sense strand
gccgagcuguugacuggaa

SEQ ID NO: 1136667 - RNA, 19 nt, Homo sapiens
  misc_RNA (1)...(19): siRNA sense strand
aaaugugauuggucuguug

SEQ ID NO: 1136668 - RNA, 19 nt, Homo sapiens
  misc_RNA (1)...(19): siRNA sense strand
acugugagcugaagauucu

SEQ ID NO: 1136669 - RNA, 19 nt, Homo sapiens
  misc_RNA (1)...(19): siRNA sense strand
uccgaggucuaaaguauau

SEQ ID NO: 1136670 - RNA, 19 nt, Homo sapiens
  misc_RNA (1)...(19): siRNA sense strand
uuccuuaucuaccaaauuc

SEQ ID NO: 1136671 - RNA, 19 nt, Homo sapiens
  misc_RNA (1)...(19): siRNA sense strand
aagaagcucuccagaccau

SEQ ID NO: 1136672 - RNA, 19 nt, Homo sapiens
  misc_RNA (1)...(19): siRNA sense strand
agcugaagauucuggauuu

SEQ ID NO: 1136673 - RNA, 19 nt, Homo sapiens
  misc_RNA (1)...(19): siRNA sense strand
uggaggaauucaaugaugu

SEQ ID NO: 1136674 - RNA, 19 nt, Homo sapiens
  misc_RNA (1)...(19): siRNA sense strand
guccaucauucaugcgaaa

SEQ ID NO: 1136675 - RNA, 19 nt, Homo sapiens
  misc_RNA (1)...(19): siRNA sense strand
gugaaaugucagaagcuua

SEQ ID NO: 1136676 - RNA, 19 nt, Homo sapiens
  misc_RNA (1)...(19): siRNA sense strand
ugucagaagcuuacagaug

SEQ ID NO: 1136677 - RNA, 19 nt, Homo sapiens
  misc_RNA (1)...(19): siRNA sense strand
ggaggaauucaaugaugug

SEQ ID NO: 1136678 - RNA, 19 nt, Homo sapiens
  misc_RNA (1)...(19): siRNA sense strand
cacagaugaugaaaugaca

SEQ ID NO: 1136679 - RNA, 19 nt, Homo sapiens
  misc_RNA (1)...(19): siRNA sense strand
acagagaacugcgguuacu

SEQ ID NO: 1136680 - RNA, 19 nt, Homo sapiens
  misc_RNA (1)...(19): siRNA sense strand
cuccugagaucaugcugaa

SEQ ID NO: 1136681 - RNA, 19 nt, Homo sapiens
  misc_RNA (1)...(19): siRNA sense strand
cuggaggaauucaaugaug

SEQ ID NO: 1136682 - RNA, 19 nt, Homo sapiens
  misc_RNA (1)...(19): siRNA sense strand
ugaaaugucagaagcuuac

SEQ ID NO: 1136683 - RNA, 19 nt, Homo sapiens
  misc_RNA (1)...(19): siRNA sense strand
gcauaauggccgagcuguu

SEQ ID NO: 1136684 - RNA, 19 nt, Homo sapiens
  misc_RNA (1)...(19): siRNA sense strand
gaacuggaugcauuacaac

SEQ ID NO: 1136685 - RNA, 19 nt, Homo sapiens
  misc_RNA (1)...(19): siRNA sense strand
agaugaccauguucaguuc

SEQ ID NO: 1136686 - RNA, 19 nt, Homo sapiens
  misc_RNA (1)...(19): siRNA sense strand
aaccagacaguugauauuu

SEQ ID NO: 1136687 - RNA, 19 nt, Homo sapiens
  misc_RNA (1)...(19): siRNA sense strand
accagacaguugauauuug

SEQ ID NO: 1136688 - RNA, 19 nt, Homo sapiens
  misc_RNA (1)...(19): siRNA sense strand
ugugaaaugucagaagcuu

SEQ ID NO: 1136689 - RNA, 19 nt, Homo sapiens
  misc_RNA (1)...(19): siRNA sense strand
caggcuacguggccacuag

SEQ ID NO: 1136690 - RNA, 19 nt, Homo sapiens
  misc_RNA (1)...(19): siRNA sense strand
uauacauucagcugacaua

SEQ ID NO: 1136691 - RNA, 19 nt, Homo sapiens
  misc_RNA (1)...(19): siRNA sense strand
uuacagaugaccauguuca

SEQ ID NO: 1136692 - RNA, 19 nt, Homo sapiens
  misc_RNA (1)...(19): siRNA sense strand
ugaagacugugagcugaag

SEQ ID NO: 1136693 - RNA, 19 nt, Homo sapiens
  misc_RNA (1)...(19): siRNA sense strand
ugcgguuacuuaaacauau

SEQ ID NO: 1136694 - RNA, 19 nt, Homo sapiens
  misc_RNA (1)...(19): siRNA sense strand
ugcaaggucucuggaggaa

SEQ ID NO: 1136695 - RNA, 19 nt, Homo sapiens
  misc_RNA (1)...(19): siRNA sense strand
gguuacguguggcagugaa

SEQ ID NO: 1136696 - RNA, 19 nt, Homo sapiens
  misc_RNA (1)...(19): siRNA sense strand
aggagaggcccacguucua

SEQ ID NO: 1136697 - RNA, 19 nt, Homo sapiens
  misc_RNA (1)...(19): siRNA sense strand
gcauuacaaccagacaguu

SEQ ID NO: 1136698 - RNA, 19 nt, Homo sapiens
  misc_RNA (1)...(19): siRNA sense strand
ucaguuccuuaucuaccaa

SEQ ID NO: 1136699 - RNA, 19 nt, Homo sapiens
  misc_RNA (1)...(19): siRNA sense strand
cggcaggagcugaacaaga

SEQ ID NO: 1136700 - RNA, 19 nt, Homo sapiens
  misc_RNA (1)...(19): siRNA sense strand
aaaagaaccuacagagaac

SEQ ID NO: 1136701 - RNA, 19 nt, Homo sapiens
  misc_RNA (1)...(19): siRNA sense strand
gaagacugugagcugaaga

SEQ ID NO: 1136702 - RNA, 19 nt, Homo sapiens
  misc_RNA (1)...(19): siRNA sense strand
ccaaauucuccgaggucua

SEQ ID NO: 1136703 - RNA, 19 nt, Homo sapiens
  misc_RNA (1)...(19): siRNA sense strand
ggagaggcccacguucuac

SEQ ID NO: 1136704 - RNA, 19 nt, Homo sapiens
  misc_RNA (1)...(19): siRNA sense strand
ccagaccauuucaguccau

SEQ ID NO: 1136705 - RNA, 19 nt, Homo sapiens
  misc_RNA (1)...(19): siRNA sense strand
caguugauauuuggucagu

SEQ ID NO: 1136706 - RNA, 19 nt, Homo sapiens
  misc_RNA (1)...(19): siRNA sense strand
gcacacagaugaugaaaug

SEQ ID NO: 1136707 - RNA, 19 nt, Homo sapiens
  misc_RNA (1)...(19): siRNA sense strand
ggaauucaaugauguguau

SEQ ID NO: 1136708 - RNA, 19 nt, Homo sapiens
  misc_RNA (1)...(19): siRNA sense strand
gaacugcgguuacuuaaac

SEQ ID NO: 1136709 - RNA, 19 nt, Homo sapiens
  misc_RNA (1)...(19): siRNA sense strand
caaggucucuggaggaauu

SEQ ID NO: 1136710 - RNA, 19 nt, Homo sapiens
  misc_RNA (1)...(19): siRNA sense strand
gucagaagcuuacagauga

SEQ ID NO: 1136711 - RNA, 19 nt, Homo sapiens
  misc_RNA (1)...(19): siRNA sense strand
gggcagaucugaacaacau

SEQ ID NO: 1136712 - RNA, 19 nt, Homo sapiens
  misc_RNA (1)...(19): siRNA sense strand
gaaaagaaccuacagagaa

SEQ ID NO: 1136713 - RNA, 19 nt, Homo sapiens
  misc_RNA (1)...(19): siRNA sense strand
acauucagcugacauaauu

SEQ ID NO: 1136714 - RNA, 19 nt, Homo sapiens
  misc_RNA (1)...(19): siRNA sense strand
caaauucuccgaggucuaa

SEQ ID NO: 1136715 - RNA, 19 nt, Homo sapiens
  misc_RNA (1)...(19): siRNA sense strand
gaagcucuccagaccauuu

SEQ ID NO: 1136716 - RNA, 19 nt, Homo sapiens
  misc_RNA (1)...(19): siRNA sense strand
gcuuacagaugaccauguu

SEQ ID NO: 1136717 - RNA, 19 nt, Homo sapiens
  misc_RNA (1)...(19): siRNA sense strand
ugaacuggaugcauuacaa

SEQ ID NO: 1136718 - RNA, 19 nt, Homo sapiens
  misc_RNA (1)...(19): siRNA sense strand
uaaucuagcugugaaugaa

SEQ ID NO: 1136719 - RNA, 19 nt, Homo sapiens
  misc_RNA (1)...(19): siRNA sense strand
agagaacugcgguuacuua

SEQ ID NO: 1136720 - RNA, 19 nt, Homo sapiens
  misc_RNA (1)...(19): siRNA sense strand
gagaacugcgguuacuuaa

SEQ ID NO: 1136721 - RNA, 19 nt, Homo sapiens
  misc_RNA (1)...(19): siRNA sense strand
ggcaggagcugaacaagac

SEQ ID NO: 1136722 - RNA, 19 nt, Homo sapiens
  misc_RNA (1)...(19): siRNA sense strand
ccagacaguugauauuugg

SEQ ID NO: 1136723 - RNA, 19 nt, Homo sapiens
  misc_RNA (1)...(19): siRNA sense strand
cuacagagaacugcgguua

SEQ ID NO: 1136724 - RNA, 19 nt, Homo sapiens
  misc_RNA (1)...(19): siRNA sense strand
ucagugggaugcauaaugg

SEQ ID NO: 1136725 - RNA, 19 nt, Homo sapiens
  misc_RNA (1)...(19): siRNA sense strand
ucuccgaggucuaaaguau

SEQ ID NO: 1136726 - RNA, 19 nt, Homo sapiens
  misc_RNA (1)...(19): siRNA sense strand
gagcugaagauucuggauu

SEQ ID NO: 1136727 - RNA, 19 nt, Homo sapiens
  misc_RNA (1)...(19): siRNA sense strand
cauaauggccgagcuguug

SEQ ID NO: 1136728 - RNA, 19 nt, Homo sapiens
  misc_RNA (1)...(19): siRNA sense strand
gcagaucugaacaacauug

SEQ ID NO: 1136729 - RNA, 19 nt, Homo sapiens
  misc_RNA (1)...(19): siRNA sense strand
cagaugaccauguucaguu

SEQ ID NO: 1136730 - RNA, 19 nt, Homo sapiens
  misc_RNA (1)...(19): siRNA sense strand
gaccauguucaguuccuua

SEQ ID NO: 1136731 - RNA, 19 nt, Homo sapiens
  misc_RNA (1)...(19): siRNA sense strand
ccauuucaguccaucauuc

SEQ ID NO: 1136732 - RNA, 19 nt, Homo sapiens
  misc_RNA (1)...(19): siRNA sense strand
gcgguuacuuaaacauaug

SEQ ID NO: 1136733 - RNA, 19 nt, Homo sapiens
  misc_RNA (1)...(19): siRNA sense strand
gagcugaacaagacaaucu

SEQ ID NO: 1136734 - RNA, 19 nt, Homo sapiens
  misc_RNA (1)...(19): siRNA sense strand
ccuaaaaccuaguaaucua

SEQ ID NO: 1136735 - RNA, 19 nt, Homo sapiens
  misc_RNA (1)...(19): siRNA sense strand
guaaucuagcugugaauga

SEQ ID NO: 1136736 - RNA, 19 nt, Homo sapiens
  misc_RNA (1)...(19): siRNA sense strand
cauguucaguuccuuaucu

SEQ ID NO: 1136737 - RNA, 19 nt, Homo sapiens
  misc_RNA (1)...(19): siRNA sense strand
gccgagcuguugacuggaa

SEQ ID NO: 1136738 - RNA, 19 nt, Homo sapiens
  misc_RNA (1)...(19): siRNA sense strand
aaaugugauuggucuguug

SEQ ID NO: 1136739 - RNA, 19 nt, Homo sapiens
  misc_RNA (1)...(19): siRNA sense strand
acugugagcugaagauucu

SEQ ID NO: 1136740 - RNA, 19 nt, Homo sapiens
  misc_RNA (1)...(19): siRNA sense strand
uccgaggucuaaaguauau

SEQ ID NO: 1136741 - RNA, 19 nt, Homo sapiens
  misc_RNA (1)...(19): siRNA sense strand
uuccuuaucuaccaaauuc

SEQ ID NO: 1136742 - RNA, 19 nt, Homo sapiens
  misc_RNA (1)...(19): siRNA sense strand
aagaagcucuccagaccau

SEQ ID NO: 1136743 - RNA, 19 nt, Homo sapiens
  misc_RNA (1)...(19): siRNA sense strand
agcugaagauucuggauuu

SEQ ID NO: 1136744 - RNA, 19 nt, Homo sapiens
  misc_RNA (1)...(19): siRNA sense strand
uggaggaauucaaugaugu

SEQ ID NO: 1136745 - RNA, 19 nt, Homo sapiens
  misc_RNA (1)...(19): siRNA sense strand
guccaucauucaugcgaaa

SEQ ID NO: 1136746 - RNA, 19 nt, Homo sapiens
  misc_RNA (1)...(19): siRNA sense strand
gugaaaugucagaagcuua

SEQ ID NO: 1136747 - RNA, 19 nt, Homo sapiens
  misc_RNA (1)...(19): siRNA sense strand
ugucagaagcuuacagaug

SEQ ID NO: 1136748 - RNA, 19 nt, Homo sapiens
  misc_RNA (1)...(19): siRNA sense strand
ggaggaauucaaugaugug

SEQ ID NO: 1136749 - RNA, 19 nt, Homo sapiens
  misc_RNA (1)...(19): siRNA sense strand
cacagaugaugaaaugaca

SEQ ID NO: 1136750 - RNA, 19 nt, Homo sapiens
  misc_RNA (1)...(19): siRNA sense strand
acagagaacugcgguuacu

SEQ ID NO: 1136751 - RNA, 19 nt, Homo sapiens
  misc_RNA (1)...(19): siRNA sense strand
cuccugagaucaugcugaa

SEQ ID NO: 1136752 - RNA, 19 nt, Homo sapiens
  misc_RNA (1)...(19): siRNA sense strand
cuggaggaauucaaugaug

SEQ ID NO: 1136753 - RNA, 19 nt, Homo sapiens
  misc_RNA (1)...(19): siRNA sense strand
ugaaaugucagaagcuuac

SEQ ID NO: 1136754 - RNA, 19 nt, Homo sapiens
  misc_RNA (1)...(19): siRNA sense strand
gcauaauggccgagcuguu

SEQ ID NO: 1136755 - RNA, 19 nt, Homo sapiens
  misc_RNA (1)...(19): siRNA sense strand
gaacuggaugcauuacaac

SEQ ID NO: 1136756 - RNA, 19 nt, Homo sapiens
  misc_RNA (1)...(19): siRNA sense strand
agaugaccauguucaguuc

SEQ ID NO: 1136757 - RNA, 19 nt, Homo sapiens
  misc_RNA (1)...(19): siRNA sense strand
aaccagacaguugauauuu

SEQ ID NO: 1136758 - RNA, 19 nt, Homo sapiens
  misc_RNA (1)...(19): siRNA sense strand
accagacaguugauauuug

SEQ ID NO: 1136759 - RNA, 19 nt, Homo sapiens
  misc_RNA (1)...(19): siRNA sense strand
ugugaaaugucagaagcuu

SEQ ID NO: 1136760 - RNA, 19 nt, Homo sapiens
  misc_RNA (1)...(19): siRNA sense strand
caggcuacguggccacuag

SEQ ID NO: 1136761 - RNA, 19 nt, Homo sapiens
  misc_RNA (1)...(19): siRNA sense strand
uauacauucagcugacaua

SEQ ID NO: 1136762 - RNA, 19 nt, Homo sapiens
  misc_RNA (1)...(19): siRNA sense strand
uuacagaugaccauguuca

SEQ ID NO: 1136763 - RNA, 19 nt, Homo sapiens
  misc_RNA (1)...(19): siRNA sense strand
ugaagacugugagcugaag

SEQ ID NO: 1136764 - RNA, 19 nt, Homo sapiens
  misc_RNA (1)...(19): siRNA sense strand
ugcgguuacuuaaacauau

SEQ ID NO: 1136765 - RNA, 19 nt, Homo sapiens
  misc_RNA (1)...(19): siRNA sense strand
ugcaaggucucuggaggaa

SEQ ID NO: 1136766 - RNA, 19 nt, Homo sapiens
  misc_RNA (1)...(19): siRNA sense strand
gguuacguguggcagugaa

SEQ ID NO: 1136767 - RNA, 19 nt, Homo sapiens
  misc_RNA (1)...(19): siRNA sense strand
aggagaggcccacguucua

SEQ ID NO: 1136768 - RNA, 19 nt, Homo sapiens
  misc_RNA (1)...(19): siRNA sense strand
gcauuacaaccagacaguu

SEQ ID NO: 1136769 - RNA, 19 nt, Homo sapiens
  misc_RNA (1)...(19): siRNA sense strand
ucaguuccuuaucuaccaa

SEQ ID NO: 1136770 - RNA, 19 nt, Homo sapiens
  misc_RNA (1)...(19): siRNA sense strand
cggcaggagcugaacaaga

SEQ ID NO: 1136771 - RNA, 19 nt, Homo sapiens
  misc_RNA (1)...(19): siRNA sense strand
aaaagaaccuacagagaac

SEQ ID NO: 1136772 - RNA, 19 nt, Homo sapiens
  misc_RNA (1)...(19): siRNA sense strand
gaagacugugagcugaaga

SEQ ID NO: 1136773 - RNA, 19 nt, Homo sapiens
  misc_RNA (1)...(19): siRNA sense strand
ccaaauucuccgaggucua

SEQ ID NO: 1136774 - RNA, 19 nt, Homo sapiens
  misc_RNA (1)...(19): siRNA sense strand
ggagaggcccacguucuac

SEQ ID NO: 1136775 - RNA, 19 nt, Homo sapiens
  misc_RNA (1)...(19): siRNA sense strand
ccagaccauuucaguccau

SEQ ID NO: 1136776 - RNA, 19 nt, Homo sapiens
  misc_RNA (1)...(19): siRNA sense strand
caguugauauuuggucagu

SEQ ID NO: 1136777 - RNA, 19 nt, Homo sapiens
  misc_RNA (1)...(19): siRNA sense strand
gcacacagaugaugaaaug

SEQ ID NO: 1136778 - RNA, 19 nt, Homo sapiens
  misc_RNA (1)...(19): siRNA sense strand
ggaauucaaugauguguau

SEQ ID NO: 1136779 - RNA, 19 nt, Homo sapiens
  misc_RNA (1)...(19): siRNA sense strand
gaacugcgguuacuuaaac

SEQ ID NO: 1136780 - RNA, 19 nt, Homo sapiens
  misc_RNA (1)...(19): siRNA sense strand
caaggucucuggaggaauu

SEQ ID NO: 1136781 - RNA, 19 nt, Homo sapiens
  misc_RNA (1)...(19): siRNA sense strand
gucagaagcuuacagauga

SEQ ID NO: 1136782 - RNA, 19 nt, Homo sapiens
  misc_RNA (1)...(19): siRNA sense strand
gggcagaucugaacaacau

SEQ ID NO: 1136783 - RNA, 19 nt, Homo sapiens
  misc_RNA (1)...(19): siRNA sense strand
gaaaagaaccuacagagaa

SEQ ID NO: 1136784 - RNA, 19 nt, Homo sapiens
  misc_RNA (1)...(19): siRNA sense strand
acauucagcugacauaauu

SEQ ID NO: 1136785 - RNA, 19 nt, Homo sapiens
  misc_RNA (1)...(19): siRNA sense strand
caaauucuccgaggucuaa

SEQ ID NO: 1136786 - RNA, 19 nt, Homo sapiens
  misc_RNA (1)...(19): siRNA sense strand
gaagcucuccagaccauuu

SEQ ID NO: 1136787 - RNA, 19 nt, Homo sapiens
  misc_RNA (1)...(19): siRNA sense strand
gcuuacagaugaccauguu

SEQ ID NO: 1136788 - RNA, 19 nt, Homo sapiens
  misc_RNA (1)...(19): siRNA sense strand
ugaacuggaugcauuacaa

SEQ ID NO: 1136789 - RNA, 19 nt, Homo sapiens
  misc_RNA (1)...(19): siRNA sense strand
uaaucuagcugugaaugaa

SEQ ID NO: 1136790 - RNA, 19 nt, Homo sapiens
  misc_RNA (1)...(19): siRNA sense strand
agagaacugcgguuacuua

SEQ ID NO: 1136791 - RNA, 19 nt, Homo sapiens
  misc_RNA (1)...(19): siRNA sense strand
gagaacugcgguuacuuaa

SEQ ID NO: 1136792 - RNA, 19 nt, Homo sapiens
  misc_RNA (1)...(19): siRNA sense strand
ggcaggagcugaacaagac

SEQ ID NO: 1136793 - RNA, 19 nt, Homo sapiens
  misc_RNA (1)...(19): siRNA sense strand
ccagacaguugauauuugg

SEQ ID NO: 1136794 - RNA, 19 nt, Homo sapiens
  misc_RNA (1)...(19): siRNA sense strand
cuacagagaacugcgguua

SEQ ID NO: 1136795 - RNA, 19 nt, Homo sapiens
  misc_RNA (1)...(19): siRNA sense strand
ucagugggaugcauaaugg

SEQ ID NO: 1136796 - RNA, 19 nt, Homo sapiens
  misc_RNA (1)...(19): siRNA sense strand
ucuccgaggucuaaaguau

SEQ ID NO: 1136797 - RNA, 19 nt, Homo sapiens
  misc_RNA (1)...(19): siRNA sense strand
gagcugaagauucuggauu

SEQ ID NO: 1136798 - RNA, 19 nt, Homo sapiens
  misc_RNA (1)...(19): siRNA sense strand
cauaauggccgagcuguug

SEQ ID NO: 1136799 - RNA, 19 nt, Homo sapiens
  misc_RNA (1)...(19): siRNA sense strand
gcagaucugaacaacauug

SEQ ID NO: 1136800 - RNA, 19 nt, Homo sapiens
  misc_RNA (1)...(19): siRNA sense strand
cagaugaccauguucaguu

SEQ ID NO: 1136801 - RNA, 19 nt, Homo sapiens
  misc_RNA (1)...(19): siRNA sense strand
gaccauguucaguuccuua

SEQ ID NO: 1136802 - RNA, 19 nt, Homo sapiens
  misc_RNA (1)...(19): siRNA sense strand
ccauuucaguccaucauuc

SEQ ID NO: 1136803 - RNA, 19 nt, Homo sapiens
  misc_RNA (1)...(19): siRNA sense strand
gcgguuacuuaaacauaug

SEQ ID NO: 1136804 - RNA, 19 nt, Homo sapiens
  misc_RNA (1)...(19): siRNA sense strand
gagcugaacaagacaaucu

SEQ ID NO: 1136805 - RNA, 19 nt, Homo sapiens
  misc_RNA (1)...(19): siRNA sense strand
ccuaaaaccuaguaaucua

SEQ ID NO: 1136806 - RNA, 19 nt, Homo sapiens
  misc_RNA (1)...(19): siRNA sense strand
guaaucuagcugugaauga

SEQ ID NO: 1136807 - RNA, 19 nt, Homo sapiens
  misc_RNA (1)...(19): siRNA sense strand
cauguucaguuccuuaucu

SEQ ID NO: 1136808 - RNA, 19 nt, Homo sapiens
  misc_RNA (1)...(19): siRNA sense strand
gccgagcuguugacuggaa

SEQ ID NO: 1136809 - RNA, 19 nt, Homo sapiens
  misc_RNA (1)...(19): siRNA sense strand
aaaugugauuggucuguug

SEQ ID NO: 1136810 - RNA, 19 nt, Homo sapiens
  misc_RNA (1)...(19): siRNA sense strand
acugugagcugaagauucu

SEQ ID NO: 1136811 - RNA, 19 nt, Homo sapiens
  misc_RNA (1)...(19): siRNA sense strand
uccgaggucuaaaguauau

SEQ ID NO: 1136812 - RNA, 19 nt, Homo sapiens
  misc_RNA (1)...(19): siRNA sense strand
uuccuuaucuaccaaauuc

SEQ ID NO: 1136813 - RNA, 19 nt, Homo sapiens
  misc_RNA (1)...(19): siRNA sense strand
aagaagcucuccagaccau

SEQ ID NO: 1136814 - RNA, 19 nt, Homo sapiens
  misc_RNA (1)...(19): siRNA sense strand
agcugaagauucuggauuu

SEQ ID NO: 1136815 - RNA, 19 nt, Homo sapiens
  misc_RNA (1)...(19): siRNA sense strand
uggaggaauucaaugaugu

SEQ ID NO: 1136816 - RNA, 19 nt, Homo sapiens
  misc_RNA (1)...(19): siRNA sense strand
guccaucauucaugcgaaa

SEQ ID NO: 1136817 - RNA, 19 nt, Homo sapiens
  misc_RNA (1)...(19): siRNA sense strand
gugaaaugucagaagcuua

SEQ ID NO: 1136818 - RNA, 19 nt, Homo sapiens
  misc_RNA (1)...(19): siRNA sense strand
ugucagaagcuuacagaug

SEQ ID NO: 1136819 - RNA, 19 nt, Homo sapiens
  misc_RNA (1)...(19): siRNA sense strand
ggaggaauucaaugaugug

SEQ ID NO: 1136820 - RNA, 19 nt, Homo sapiens
  misc_RNA (1)...(19): siRNA sense strand
cacagaugaugaaaugaca

SEQ ID NO: 1136821 - RNA, 19 nt, Homo sapiens
  misc_RNA (1)...(19): siRNA sense strand
acagagaacugcgguuacu

SEQ ID NO: 1136822 - RNA, 19 nt, Homo sapiens
  misc_RNA (1)...(19): siRNA sense strand
cuccugagaucaugcugaa

SEQ ID NO: 1136823 - RNA, 19 nt, Homo sapiens
  misc_RNA (1)...(19): siRNA sense strand
cuggaggaauucaaugaug

SEQ ID NO: 1136824 - RNA, 19 nt, Homo sapiens
  misc_RNA (1)...(19): siRNA sense strand
ugaaaugucagaagcuuac

SEQ ID NO: 1136825 - RNA, 19 nt, Homo sapiens
  misc_RNA (1)...(19): siRNA sense strand
gcauaauggccgagcuguu

SEQ ID NO: 1136826 - RNA, 19 nt, Homo sapiens
  misc_RNA (1)...(19): siRNA sense strand
gaacuggaugcauuacaac

SEQ ID NO: 1136827 - RNA, 19 nt, Homo sapiens
  misc_RNA (1)...(19): siRNA sense strand
agaugaccauguucaguuc

SEQ ID NO: 1136828 - RNA, 19 nt, Homo sapiens
  misc_RNA (1)...(19): siRNA sense strand
aaccagacaguugauauuu

SEQ ID NO: 1136829 - RNA, 19 nt, Homo sapiens
  misc_RNA (1)...(19): siRNA sense strand
accagacaguugauauuug

SEQ ID NO: 1136830 - RNA, 19 nt, Homo sapiens
  misc_RNA (1)...(19): siRNA sense strand
ugugaaaugucagaagcuu

SEQ ID NO: 1136831 - RNA, 19 nt, Homo sapiens
  misc_RNA (1)...(19): siRNA sense strand
caggcuacguggccacuag

SEQ ID NO: 1136832 - RNA, 19 nt, Homo sapiens
  misc_RNA (1)...(19): siRNA sense strand
uauacauucagcugacaua

SEQ ID NO: 1136833 - RNA, 19 nt, Homo sapiens
  misc_RNA (1)...(19): siRNA sense strand
uuacagaugaccauguuca

SEQ ID NO: 1136834 - RNA, 19 nt, Homo sapiens
  misc_RNA (1)...(19): siRNA sense strand
ugaagacugugagcugaag

SEQ ID NO: 1136835 - RNA, 19 nt, Homo sapiens
  misc_RNA (1)...(19): siRNA sense strand
ugcgguuacuuaaacauau

SEQ ID NO: 1136836 - RNA, 19 nt, Homo sapiens
  misc_RNA (1)...(19): siRNA sense strand
ugcaaggucucuggaggaa

SEQ ID NO: 1136837 - RNA, 19 nt, Homo sapiens
  misc_RNA (1)...(19): siRNA sense strand
gguuacguguggcagugaa

SEQ ID NO: 1136838 - RNA, 19 nt, Homo sapiens
  misc_RNA (1)...(19): siRNA sense strand
aggagaggcccacguucua

SEQ ID NO: 1136839 - RNA, 19 nt, Homo sapiens
  misc_RNA (1)...(19): siRNA sense strand
gcauuacaaccagacaguu

SEQ ID NO: 1136840 - RNA, 19 nt, Homo sapiens
  misc_RNA (1)...(19): siRNA sense strand
ucaguuccuuaucuaccaa

SEQ ID NO: 1136841 - RNA, 19 nt, Homo sapiens
  misc_RNA (1)...(19): siRNA sense strand
cggcaggagcugaacaaga

SEQ ID NO: 1136842 - RNA, 19 nt, Homo sapiens
  misc_RNA (1)...(19): siRNA sense strand
aaaagaaccuacagagaac

SEQ ID NO: 1136843 - RNA, 19 nt, Homo sapiens
  misc_RNA (1)...(19): siRNA sense strand
gaagacugugagcugaaga

SEQ ID NO: 1136844 - RNA, 19 nt, Homo sapiens
  misc_RNA (1)...(19): siRNA sense strand
ccaaauucuccgaggucua

SEQ ID NO: 1136845 - RNA, 19 nt, Homo sapiens
  misc_RNA (1)...(19): siRNA sense strand
ggagaggcccacguucuac

SEQ ID NO: 1136846 - RNA, 19 nt, Homo sapiens
  misc_RNA (1)...(19): siRNA sense strand
ccagaccauuucaguccau

SEQ ID NO: 1136847 - RNA, 19 nt, Homo sapiens
  misc_RNA (1)...(19): siRNA sense strand
caguugauauuuggucagu

SEQ ID NO: 1136848 - RNA, 19 nt, Homo sapiens
  misc_RNA (1)...(19): siRNA sense strand
gcacacagaugaugaaaug

SEQ ID NO: 1136849 - RNA, 19 nt, Homo sapiens
  misc_RNA (1)...(19): siRNA sense strand
ggaauucaaugauguguau

SEQ ID NO: 1136850 - RNA, 19 nt, Homo sapiens
  misc_RNA (1)...(19): siRNA sense strand
gaacugcgguuacuuaaac

SEQ ID NO: 1136851 - RNA, 19 nt, Homo sapiens
  misc_RNA (1)...(19): siRNA sense strand
caaggucucuggaggaauu

SEQ ID NO: 1136852 - RNA, 19 nt, Homo sapiens
  misc_RNA (1)...(19): siRNA sense strand
gucagaagcuuacagauga

SEQ ID NO: 1136853 - RNA, 19 nt, Homo sapiens
  misc_RNA (1)...(19): siRNA sense strand
gggcagaucugaacaacau

SEQ ID NO: 1136854 - RNA, 19 nt, Homo sapiens
  misc_RNA (1)...(19): siRNA sense strand
gaaaagaaccuacagagaa

SEQ ID NO: 1136855 - RNA, 19 nt, Homo sapiens
  misc_RNA (1)...(19): siRNA sense strand
acauucagcugacauaauu

SEQ ID NO: 1136856 - RNA, 19 nt, Homo sapiens
  misc_RNA (1)...(19): siRNA sense strand
caaauucuccgaggucuaa

SEQ ID NO: 1136857 - RNA, 19 nt, Homo sapiens
  misc_RNA (1)...(19): siRNA sense strand
gaagcucuccagaccauuu

SEQ ID NO: 1136858 - RNA, 19 nt, Homo sapiens
  misc_RNA (1)...(19): siRNA sense strand
gcuuacagaugaccauguu

SEQ ID NO: 1136859 - RNA, 19 nt, Homo sapiens
  misc_RNA (1)...(19): siRNA sense strand
ugaacuggaugcauuacaa

SEQ ID NO: 1136860 - RNA, 19 nt, Homo sapiens
  misc_RNA (1)...(19): siRNA sense strand
uaaucuagcugugaaugaa

SEQ ID NO: 1136861 - RNA, 19 nt, Homo sapiens
  misc_RNA (1)...(19): siRNA sense strand
agagaacugcgguuacuua

SEQ ID NO: 1136862 - RNA, 19 nt, Homo sapiens
  misc_RNA (1)...(19): siRNA sense strand
gagaacugcgguuacuuaa

SEQ ID NO: 1136863 - RNA, 19 nt, Homo sapiens
  misc_RNA (1)...(19): siRNA sense strand
ggcaggagcugaacaagac

SEQ ID NO: 1136864 - RNA, 19 nt, Homo sapiens
  misc_RNA (1)...(19): siRNA sense strand
ccagacaguugauauuugg

SEQ ID NO: 1136865 - RNA, 19 nt, Homo sapiens
  misc_RNA (1)...(19): siRNA sense strand
cuacagagaacugcgguua

SEQ ID NO: 1136866 - RNA, 19 nt, Homo sapiens
  misc_RNA (1)...(19): siRNA sense strand
ucagugggaugcauaaugg

SEQ ID NO: 1136867 - RNA, 19 nt, Homo sapiens
  misc_RNA (1)...(19): siRNA sense strand
ucuccgaggucuaaaguau

SEQ ID NO: 1136868 - RNA, 19 nt, Homo sapiens
  misc_RNA (1)...(19): siRNA sense strand
gagcugaagauucuggauu

SEQ ID NO: 1136869 - RNA, 19 nt, Homo sapiens
  misc_RNA (1)...(19): siRNA sense strand
cauaauggccgagcuguug

SEQ ID NO: 1136870 - RNA, 19 nt, Homo sapiens
  misc_RNA (1)...(19): siRNA sense strand
gcagaucugaacaacauug

SEQ ID NO: 1136871 - RNA, 19 nt, Homo sapiens
  misc_RNA (1)...(19): siRNA sense strand
cagaugaccauguucaguu

SEQ ID NO: 1136872 - RNA, 19 nt, Homo sapiens
  misc_RNA (1)...(19): siRNA sense strand
gaccauguucaguuccuua

SEQ ID NO: 1136873 - RNA, 19 nt, Homo sapiens
  misc_RNA (1)...(19): siRNA sense strand
ccauuucaguccaucauuc

SEQ ID NO: 1136874 - RNA, 19 nt, Homo sapiens
  misc_RNA (1)...(19): siRNA sense strand
gcgguuacuuaaacauaug

SEQ ID NO: 1136875 - RNA, 19 nt, Homo sapiens
  misc_RNA (1)...(19): siRNA sense strand
gagcugaacaagacaaucu

SEQ ID NO: 1136876 - RNA, 19 nt, Homo sapiens
  misc_RNA (1)...(19): siRNA sense strand
ccuaaaaccuaguaaucua

SEQ ID NO: 1136877 - RNA, 19 nt, Homo sapiens
  misc_RNA (1)...(19): siRNA sense strand
guaaucuagcugugaauga

SEQ ID NO: 1136878 - RNA, 19 nt, Homo sapiens
  misc_RNA (1)...(19): siRNA sense strand
cauguucaguuccuuaucu

SEQ ID NO: 1136879 - RNA, 19 nt, Homo sapiens
  misc_RNA (1)...(19): siRNA sense strand
gccgagcuguugacuggaa

SEQ ID NO: 1136880 - RNA, 19 nt, Homo sapiens
  misc_RNA (1)...(19): siRNA sense strand
aaaugugauuggucuguug

SEQ ID NO: 1136881 - RNA, 19 nt, Homo sapiens
  misc_RNA (1)...(19): siRNA sense strand
acugugagcugaagauucu

SEQ ID NO: 1136882 - RNA, 19 nt, Homo sapiens
  misc_RNA (1)...(19): siRNA sense strand
uccgaggucuaaaguauau

SEQ ID NO: 1136883 - RNA, 19 nt, Homo sapiens
  misc_RNA (1)...(19): siRNA sense strand
uuccuuaucuaccaaauuc

SEQ ID NO: 1136884 - RNA, 19 nt, Homo sapiens
  misc_RNA (1)...(19): siRNA sense strand
aagaagcucuccagaccau

SEQ ID NO: 1136885 - RNA, 19 nt, Homo sapiens
  misc_RNA (1)...(19): siRNA sense strand
agcugaagauucuggauuu

SEQ ID NO: 1136886 - RNA, 19 nt, Homo sapiens
  misc_RNA (1)...(19): siRNA sense strand
uggaggaauucaaugaugu

SEQ ID NO: 1136887 - RNA, 19 nt, Homo sapiens
  misc_RNA (1)...(19): siRNA sense strand
guccaucauucaugcgaaa

SEQ ID NO: 1136888 - RNA, 19 nt, Homo sapiens
  misc_RNA (1)...(19): siRNA sense strand
gugaaaugucagaagcuua

SEQ ID NO: 1136889 - RNA, 19 nt, Homo sapiens
  misc_RNA (1)...(19): siRNA sense strand
ugucagaagcuuacagaug

SEQ ID NO: 1136890 - RNA, 19 nt, Homo sapiens
  misc_RNA (1)...(19): siRNA sense strand
ggaggaauucaaugaugug

SEQ ID NO: 1136891 - RNA, 19 nt, Homo sapiens
  misc_RNA (1)...(19): siRNA sense strand
cacagaugaugaaaugaca

SEQ ID NO: 1136892 - RNA, 19 nt, Homo sapiens
  misc_RNA (1)...(19): siRNA sense strand
acagagaacugcgguuacu

SEQ ID NO: 1136893 - RNA, 19 nt, Homo sapiens
  misc_RNA (1)...(19): siRNA sense strand
cuccugagaucaugcugaa

SEQ ID NO: 1136894 - RNA, 19 nt, Homo sapiens
  misc_RNA (1)...(19): siRNA sense strand
cuggaggaauucaaugaug

SEQ ID NO: 1136895 - RNA, 19 nt, Homo sapiens
  misc_RNA (1)...(19): siRNA sense strand
ugaaaugucagaagcuuac

SEQ ID NO: 1136896 - RNA, 19 nt, Homo sapiens
  misc_RNA (1)...(19): siRNA sense strand
gcauaauggccgagcuguu

SEQ ID NO: 1136897 - RNA, 19 nt, Homo sapiens
  misc_RNA (1)...(19): siRNA sense strand
gaacuggaugcauuacaac

SEQ ID NO: 1136898 - RNA, 19 nt, Homo sapiens
  misc_RNA (1)...(19): siRNA sense strand
agaugaccauguucaguuc

SEQ ID NO: 1136899 - RNA, 19 nt, Homo sapiens
  misc_RNA (1)...(19): siRNA sense strand
aaccagacaguugauauuu

SEQ ID NO: 1136900 - RNA, 19 nt, Homo sapiens
  misc_RNA (1)...(19): siRNA sense strand
accagacaguugauauuug

SEQ ID NO: 1136901 - RNA, 19 nt, Homo sapiens
  misc_RNA (1)...(19): siRNA sense strand
ugugaaaugucagaagcuu

SEQ ID NO: 1136902 - RNA, 19 nt, Homo sapiens
  misc_RNA (1)...(19): siRNA sense strand
caggcuacguggccacuag

SEQ ID NO: 1136903 - RNA, 19 nt, Homo sapiens
  misc_RNA (1)...(19): siRNA sense strand
uauacauucagcugacaua

SEQ ID NO: 1136904 - RNA, 19 nt, Homo sapiens
  misc_RNA (1)...(19): siRNA sense strand
uuacagaugaccauguuca

SEQ ID NO: 1136905 - RNA, 19 nt, Homo sapiens
  misc_RNA (1)...(19): siRNA sense strand
ugaagacugugagcugaag

SEQ ID NO: 1136906 - RNA, 19 nt, Homo sapiens
  misc_RNA (1)...(19): siRNA sense strand
ugcgguuacuuaaacauau

SEQ ID NO: 1136907 - RNA, 19 nt, Homo sapiens
  misc_RNA (1)...(19): siRNA sense strand
ugcaaggucucuggaggaa

SEQ ID NO: 1136908 - RNA, 19 nt, Homo sapiens
  misc_RNA (1)...(19): siRNA sense strand
gguuacguguggcagugaa

SEQ ID NO: 1136909 - RNA, 19 nt, Homo sapiens
  misc_RNA (1)...(19): siRNA sense strand
aggagaggcccacguucua

SEQ ID NO: 1136910 - RNA, 19 nt, Homo sapiens
  misc_RNA (1)...(19): siRNA sense strand
gcauuacaaccagacaguu

SEQ ID NO: 1136911 - RNA, 19 nt, Homo sapiens
  misc_RNA (1)...(19): siRNA sense strand
ucaguuccuuaucuaccaa

SEQ ID NO: 1136912 - RNA, 19 nt, Homo sapiens
  misc_RNA (1)...(19): siRNA sense strand
cggcaggagcugaacaaga

SEQ ID NO: 1136913 - RNA, 19 nt, Homo sapiens
  misc_RNA (1)...(19): siRNA sense strand
aaaagaaccuacagagaac

SEQ ID NO: 1136914 - RNA, 19 nt, Homo sapiens
  misc_RNA (1)...(19): siRNA sense strand
gaagacugugagcugaaga

SEQ ID NO: 1136915 - RNA, 19 nt, Homo sapiens
  misc_RNA (1)...(19): siRNA sense strand
ccaaauucuccgaggucua

SEQ ID NO: 1136916 - RNA, 19 nt, Homo sapiens
  misc_RNA (1)...(19): siRNA sense strand
ggagaggcccacguucuac

SEQ ID NO: 1136917 - RNA, 19 nt, Homo sapiens
  misc_RNA (1)...(19): siRNA sense strand
ccagaccauuucaguccau

SEQ ID NO: 1136918 - RNA, 19 nt, Homo sapiens
  misc_RNA (1)...(19): siRNA sense strand
caguugauauuuggucagu

SEQ ID NO: 1136919 - RNA, 19 nt, Homo sapiens
  misc_RNA (1)...(19): siRNA sense strand
gcacacagaugaugaaaug

SEQ ID NO: 1136920 - RNA, 19 nt, Homo sapiens
  misc_RNA (1)...(19): siRNA sense strand
ggaauucaaugauguguau

SEQ ID NO: 1136921 - RNA, 19 nt, Homo sapiens
  misc_RNA (1)...(19): siRNA sense strand
gaacugcgguuacuuaaac

SEQ ID NO: 1136922 - RNA, 19 nt, Homo sapiens
  misc_RNA (1)...(19): siRNA sense strand
caaggucucuggaggaauu

SEQ ID NO: 1136923 - RNA, 19 nt, Homo sapiens
  misc_RNA (1)...(19): siRNA sense strand
gucagaagcuuacagauga

SEQ ID NO: 1136924 - RNA, 19 nt, Homo sapiens
  misc_RNA (1)...(19): siRNA sense strand
gggcagaucugaacaacau

SEQ ID NO: 1136925 - RNA, 19 nt, Homo sapiens
  misc_RNA (1)...(19): siRNA sense strand
gaaaagaaccuacagagaa

SEQ ID NO: 1136926 - RNA, 19 nt, Homo sapiens
  misc_RNA (1)...(19): siRNA sense strand
acauucagcugacauaauu

SEQ ID NO: 1136927 - RNA, 19 nt, Homo sapiens
  misc_RNA (1)...(19): siRNA sense strand
caaauucuccgaggucuaa

SEQ ID NO: 1136928 - RNA, 19 nt, Homo sapiens
  misc_RNA (1)...(19): siRNA sense strand
gaagcucuccagaccauuu

SEQ ID NO: 1136929 - RNA, 19 nt, Homo sapiens
  misc_RNA (1)...(19): siRNA sense strand
gcuuacagaugaccauguu

SEQ ID NO: 1136930 - RNA, 19 nt, Homo sapiens
  misc_RNA (1)...(19): siRNA sense strand
ugaacuggaugcauuacaa

SEQ ID NO: 1136931 - RNA, 19 nt, Homo sapiens
  misc_RNA (1)...(19): siRNA sense strand
uaaucuagcugugaaugaa

SEQ ID NO: 1136932 - RNA, 19 nt, Homo sapiens
  misc_RNA (1)...(19): siRNA sense strand
agagaacugcgguuacuua

SEQ ID NO: 1136933 - RNA, 19 nt, Homo sapiens
  misc_RNA (1)...(19): siRNA sense strand
gagaacugcgguuacuuaa

SEQ ID NO: 1136934 - RNA, 19 nt, Homo sapiens
  misc_RNA (1)...(19): siRNA sense strand
ggcaggagcugaacaagac

SEQ ID NO: 1136935 - RNA, 19 nt, Homo sapiens
  misc_RNA (1)...(19): siRNA sense strand
ccagacaguugauauuugg

SEQ ID NO: 1136936 - RNA, 19 nt, Homo sapiens
  misc_RNA (1)...(19): siRNA sense strand
cuacagagaacugcgguua

SEQ ID NO: 1136937 - RNA, 19 nt, Homo sapiens
  misc_RNA (1)...(19): siRNA sense strand
ucagugggaugcauaaugg

SEQ ID NO: 1136938 - RNA, 19 nt, Homo sapiens
  misc_RNA (1)...(19): siRNA sense strand
ucuccgaggucuaaaguau

SEQ ID NO: 1136939 - RNA, 19 nt, Homo sapiens
  misc_RNA (1)...(19): siRNA sense strand
gagcugaagauucuggauu

SEQ ID NO: 1136940 - RNA, 19 nt, Homo sapiens
  misc_RNA (1)...(19): siRNA sense strand
cauaauggccgagcuguug

SEQ ID NO: 1136941 - RNA, 19 nt, Homo sapiens
  misc_RNA (1)...(19): siRNA sense strand
gcagaucugaacaacauug

SEQ ID NO: 1136942 - RNA, 19 nt, Homo sapiens
  misc_RNA (1)...(19): siRNA sense strand
cagaugaccauguucaguu

SEQ ID NO: 1136943 - RNA, 19 nt, Homo sapiens
  misc_RNA (1)...(19): siRNA sense strand
gaccauguucaguuccuua

SEQ ID NO: 1136944 - RNA, 19 nt, Homo sapiens
  misc_RNA (1)...(19): siRNA sense strand
ccauuucaguccaucauuc

SEQ ID NO: 1136945 - RNA, 19 nt, Homo sapiens
  misc_RNA (1)...(19): siRNA sense strand
gcgguuacuuaaacauaug

SEQ ID NO: 1136946 - RNA, 19 nt, Homo sapiens
  misc_RNA (1)...(19): siRNA sense strand
gagcugaacaagacaaucu

SEQ ID NO: 1136947 - RNA, 19 nt, Homo sapiens
  misc_RNA (1)...(19): siRNA sense strand
ccuaaaaccuaguaaucua

SEQ ID NO: 1136948 - RNA, 19 nt, Homo sapiens
  misc_RNA (1)...(19): siRNA sense strand
guaaucuagcugugaauga

SEQ ID NO: 1136949 - RNA, 19 nt, Homo sapiens
  misc_RNA (1)...(19): siRNA sense strand
cauguucaguuccuuaucu

SEQ ID NO: 1136950 - RNA, 19 nt, Homo sapiens
  misc_RNA (1)...(19): siRNA sense strand
gccgagcuguugacuggaa

SEQ ID NO: 1136951 - RNA, 19 nt, Homo sapiens
  misc_RNA (1)...(19): siRNA sense strand
aaaugugauuggucuguug

SEQ ID NO: 1136952 - RNA, 19 nt, Homo sapiens
  misc_RNA (1)...(19): siRNA sense strand
acugugagcugaagauucu

SEQ ID NO: 1136953 - RNA, 19 nt, Homo sapiens
  misc_RNA (1)...(19): siRNA sense strand
uccgaggucuaaaguauau

SEQ ID NO: 1136954 - RNA, 19 nt, Homo sapiens
  misc_RNA (1)...(19): siRNA sense strand
uuccuuaucuaccaaauuc

SEQ ID NO: 1136955 - RNA, 19 nt, Homo sapiens
  misc_RNA (1)...(19): siRNA sense strand
aagaagcucuccagaccau

SEQ ID NO: 1136956 - RNA, 19 nt, Homo sapiens
  misc_RNA (1)...(19): siRNA sense strand
agcugaagauucuggauuu

SEQ ID NO: 1136957 - RNA, 19 nt, Homo sapiens
  misc_RNA (1)...(19): siRNA sense strand
uggaggaauucaaugaugu

SEQ ID NO: 1136958 - RNA, 19 nt, Homo sapiens
  misc_RNA (1)...(19): siRNA sense strand
guccaucauucaugcgaaa

SEQ ID NO: 1136959 - RNA, 19 nt, Homo sapiens
  misc_RNA (1)...(19): siRNA sense strand
gugaaaugucagaagcuua

SEQ ID NO: 1136960 - RNA, 19 nt, Homo sapiens
  misc_RNA (1)...(19): siRNA sense strand
ugucagaagcuuacagaug

SEQ ID NO: 1136961 - RNA, 19 nt, Homo sapiens
  misc_RNA (1)...(19): siRNA sense strand
ggaggaauucaaugaugug

SEQ ID NO: 1136962 - RNA, 19 nt, Homo sapiens
  misc_RNA (1)...(19): siRNA sense strand
cacagaugaugaaaugaca

SEQ ID NO: 1136963 - RNA, 19 nt, Homo sapiens
  misc_RNA (1)...(19): siRNA sense strand
acagagaacugcgguuacu

SEQ ID NO: 1136964 - RNA, 19 nt, Homo sapiens
  misc_RNA (1)...(19): siRNA sense strand
cuccugagaucaugcugaa

SEQ ID NO: 1136965 - RNA, 19 nt, Homo sapiens
  misc_RNA (1)...(19): siRNA sense strand
cuggaggaauucaaugaug

SEQ ID NO: 1136966 - RNA, 19 nt, Homo sapiens
  misc_RNA (1)...(19): siRNA sense strand
ugaaaugucagaagcuuac

SEQ ID NO: 1136967 - RNA, 19 nt, Homo sapiens
  misc_RNA (1)...(19): siRNA sense strand
gcauaauggccgagcuguu

SEQ ID NO: 1136968 - RNA, 19 nt, Homo sapiens
  misc_RNA (1)...(19): siRNA sense strand
gaacuggaugcauuacaac

SEQ ID NO: 1136969 - RNA, 19 nt, Homo sapiens
  misc_RNA (1)...(19): siRNA sense strand
agaugaccauguucaguuc

SEQ ID NO: 1136970 - RNA, 19 nt, Homo sapiens
  misc_RNA (1)...(19): siRNA sense strand
aaccagacaguugauauuu

SEQ ID NO: 1136971 - RNA, 19 nt, Homo sapiens
  misc_RNA (1)...(19): siRNA sense strand
accagacaguugauauuug

SEQ ID NO: 1136972 - RNA, 19 nt, Homo sapiens
  misc_RNA (1)...(19): siRNA sense strand
ugugaaaugucagaagcuu

SEQ ID NO: 1136973 - RNA, 19 nt, Homo sapiens
  misc_RNA (1)...(19): siRNA sense strand
caggcuacguggccacuag

SEQ ID NO: 1136974 - RNA, 19 nt, Homo sapiens
  misc_RNA (1)...(19): siRNA sense strand
uauacauucagcugacaua

SEQ ID NO: 1136975 - RNA, 19 nt, Homo sapiens
  misc_RNA (1)...(19): siRNA sense strand
uuacagaugaccauguuca

SEQ ID NO: 1136976 - RNA, 19 nt, Homo sapiens
  misc_RNA (1)...(19): siRNA sense strand
ugaagacugugagcugaag

SEQ ID NO: 1136977 - RNA, 19 nt, Homo sapiens
  misc_RNA (1)...(19): siRNA sense strand
ugcgguuacuuaaacauau

SEQ ID NO: 1136978 - RNA, 19 nt, Homo sapiens
  misc_RNA (1)...(19): siRNA sense strand
ugcaaggucucuggaggaa

SEQ ID NO: 1136979 - RNA, 19 nt, Homo sapiens
  misc_RNA (1)...(19): siRNA sense strand
gguuacguguggcagugaa

SEQ ID NO: 1136980 - RNA, 19 nt, Homo sapiens
  misc_RNA (1)...(19): siRNA sense strand
aggagaggcccacguucua

SEQ ID NO: 1136981 - RNA, 19 nt, Homo sapiens
  misc_RNA (1)...(19): siRNA sense strand
gcauuacaaccagacaguu

SEQ ID NO: 1136982 - RNA, 19 nt, Homo sapiens
  misc_RNA (1)...(19): siRNA sense strand
ucaguuccuuaucuaccaa

SEQ ID NO: 1136983 - RNA, 19 nt, Homo sapiens
  misc_RNA (1)...(19): siRNA sense strand
cggcaggagcugaacaaga

SEQ ID NO: 1136984 - RNA, 19 nt, Homo sapiens
  misc_RNA (1)...(19): siRNA sense strand
aaaagaaccuacagagaac

SEQ ID NO: 1136985 - RNA, 19 nt, Homo sapiens
  misc_RNA (1)...(19): siRNA sense strand
gaagacugugagcugaaga

SEQ ID NO: 1136986 - RNA, 19 nt, Homo sapiens
  misc_RNA (1)...(19): siRNA sense strand
ccaaauucuccgaggucua

SEQ ID NO: 1136987 - RNA, 19 nt, Homo sapiens
  misc_RNA (1)...(19): siRNA sense strand
ggagaggcccacguucuac

SEQ ID NO: 1136988 - RNA, 19 nt, Homo sapiens
  misc_RNA (1)...(19): siRNA sense strand
ccagaccauuucaguccau

SEQ ID NO: 1136989 - RNA, 19 nt, Homo sapiens
  misc_RNA (1)...(19): siRNA sense strand
caguugauauuuggucagu

SEQ ID NO: 1136990 - RNA, 19 nt, Homo sapiens
  misc_RNA (1)...(19): siRNA sense strand
gcacacagaugaugaaaug

SEQ ID NO: 1136991 - RNA, 19 nt, Homo sapiens
  misc_RNA (1)...(19): siRNA sense strand
ggaauucaaugauguguau

SEQ ID NO: 1136992 - RNA, 19 nt, Homo sapiens
  misc_RNA (1)...(19): siRNA sense strand
gaacugcgguuacuuaaac

SEQ ID NO: 1136993 - RNA, 19 nt, Homo sapiens
  misc_RNA (1)...(19): siRNA sense strand
caaggucucuggaggaauu

SEQ ID NO: 1136994 - RNA, 19 nt, Homo sapiens
  misc_RNA (1)...(19): siRNA sense strand
gucagaagcuuacagauga

SEQ ID NO: 1136995 - RNA, 19 nt, Homo sapiens
  misc_RNA (1)...(19): siRNA sense strand
gggcagaucugaacaacau

SEQ ID NO: 1136996 - RNA, 19 nt, Homo sapiens
  misc_RNA (1)...(19): siRNA sense strand
gaaaagaaccuacagagaa

SEQ ID NO: 1136997 - RNA, 19 nt, Homo sapiens
  misc_RNA (1)...(19): siRNA sense strand
acauucagcugacauaauu

SEQ ID NO: 1136998 - RNA, 19 nt, Homo sapiens
  misc_RNA (1)...(19): siRNA sense strand
caaauucuccgaggucuaa

SEQ ID NO: 1136999 - RNA, 19 nt, Homo sapiens
  misc_RNA (1)...(19): siRNA sense strand
gaagcucuccagaccauuu

SEQ ID NO: 1137000 - RNA, 19 nt, Homo sapiens
  misc_RNA (1)...(19): siRNA sense strand
gcuuacagaugaccauguu

SEQ ID NO: 1137001 - RNA, 19 nt, Homo sapiens
  misc_RNA (1)...(19): siRNA sense strand
ugaacuggaugcauuacaa

SEQ ID NO: 1137002 - RNA, 19 nt, Homo sapiens
  misc_RNA (1)...(19): siRNA sense strand
uaaucuagcugugaaugaa

SEQ ID NO: 1137003 - RNA, 19 nt, Homo sapiens
  misc_RNA (1)...(19): siRNA sense strand
agagaacugcgguuacuua

SEQ ID NO: 1137004 - RNA, 19 nt, Homo sapiens
  misc_RNA (1)...(19): siRNA sense strand
gagaacugcgguuacuuaa

SEQ ID NO: 1137005 - RNA, 19 nt, Homo sapiens
  misc_RNA (1)...(19): siRNA sense strand
ggcaggagcugaacaagac

SEQ ID NO: 1137006 - RNA, 19 nt, Homo sapiens
  misc_RNA (1)...(19): siRNA sense strand
ccagacaguugauauuugg

SEQ ID NO: 1137007 - RNA, 19 nt, Homo sapiens
  misc_RNA (1)...(19): siRNA sense strand
cuacagagaacugcgguua

SEQ ID NO: 1137008 - RNA, 19 nt, Homo sapiens
  misc_RNA (1)...(19): siRNA sense strand
ucagugggaugcauaaugg

SEQ ID NO: 1137009 - RNA, 19 nt, Homo sapiens
  misc_RNA (1)...(19): siRNA sense strand
ucuccgaggucuaaaguau

SEQ ID NO: 1137010 - RNA, 19 nt, Homo sapiens
  misc_RNA (1)...(19): siRNA sense strand
gagcugaagauucuggauu

SEQ ID NO: 1137011 - RNA, 19 nt, Homo sapiens
  misc_RNA (1)...(19): siRNA sense strand
cauaauggccgagcuguug

SEQ ID NO: 1137012 - RNA, 19 nt, Homo sapiens
  misc_RNA (1)...(19): siRNA sense strand
gcagaucugaacaacauug

SEQ ID NO: 1137013 - RNA, 19 nt, Homo sapiens
  misc_RNA (1)...(19): siRNA sense strand
cagaugaccauguucaguu

SEQ ID NO: 1137014 - RNA, 19 nt, Homo sapiens
  misc_RNA (1)...(19): siRNA sense strand
gaccauguucaguuccuua

SEQ ID NO: 1137015 - RNA, 19 nt, Homo sapiens
  misc_RNA (1)...(19): siRNA sense strand
ccauuucaguccaucauuc

SEQ ID NO: 1137016 - RNA, 19 nt, Homo sapiens
  misc_RNA (1)...(19): siRNA sense strand
gcgguuacuuaaacauaug

SEQ ID NO: 1137017 - RNA, 19 nt, Homo sapiens
  misc_RNA (1)...(19): siRNA sense strand
gagcugaacaagacaaucu

SEQ ID NO: 1137018 - RNA, 19 nt, Homo sapiens
  misc_RNA (1)...(19): siRNA sense strand
ccuaaaaccuaguaaucua

SEQ ID NO: 1137019 - RNA, 19 nt, Homo sapiens
  misc_RNA (1)...(19): siRNA sense strand
guaaucuagcugugaauga

SEQ ID NO: 1137020 - RNA, 19 nt, Homo sapiens
  misc_RNA (1)...(19): siRNA sense strand
cauguucaguuccuuaucu

SEQ ID NO: 1137021 - RNA, 19 nt, Homo sapiens
  misc_RNA (1)...(19): siRNA sense strand
gccgagcuguugacuggaa

SEQ ID NO: 1137022 - RNA, 19 nt, Homo sapiens
  misc_RNA (1)...(19): siRNA sense strand
aaaugugauuggucuguug

SEQ ID NO: 1137023 - RNA, 19 nt, Homo sapiens
  misc_RNA (1)...(19): siRNA sense strand
acugugagcugaagauucu

SEQ ID NO: 1137024 - RNA, 19 nt, Homo sapiens
  misc_RNA (1)...(19): siRNA sense strand
uccgaggucuaaaguauau

SEQ ID NO: 1137025 - RNA, 19 nt, Homo sapiens
  misc_RNA (1)...(19): siRNA sense strand
uuccuuaucuaccaaauuc

SEQ ID NO: 1137026 - RNA, 19 nt, Homo sapiens
  misc_RNA (1)...(19): siRNA sense strand
aagaagcucuccagaccau

SEQ ID NO: 1137027 - RNA, 19 nt, Homo sapiens
  misc_RNA (1)...(19): siRNA sense strand
agcugaagauucuggauuu

SEQ ID NO: 1137028 - RNA, 19 nt, Homo sapiens
  misc_RNA (1)...(19): siRNA sense strand
uggaggaauucaaugaugu

SEQ ID NO: 1137029 - RNA, 19 nt, Homo sapiens
  misc_RNA (1)...(19): siRNA sense strand
guccaucauucaugcgaaa

SEQ ID NO: 1137030 - RNA, 19 nt, Homo sapiens
  misc_RNA (1)...(19): siRNA sense strand
gugaaaugucagaagcuua

SEQ ID NO: 1137031 - RNA, 19 nt, Homo sapiens
  misc_RNA (1)...(19): siRNA sense strand
ugucagaagcuuacagaug

SEQ ID NO: 1137032 - RNA, 19 nt, Homo sapiens
  misc_RNA (1)...(19): siRNA sense strand
ggaggaauucaaugaugug

SEQ ID NO: 1137033 - RNA, 19 nt, Homo sapiens
  misc_RNA (1)...(19): siRNA sense strand
cacagaugaugaaaugaca

SEQ ID NO: 1137034 - RNA, 19 nt, Homo sapiens
  misc_RNA (1)...(19): siRNA sense strand
acagagaacugcgguuacu

SEQ ID NO: 1137035 - RNA, 19 nt, Homo sapiens
  misc_RNA (1)...(19): siRNA sense strand
cuccugagaucaugcugaa

SEQ ID NO: 1137036 - RNA, 19 nt, Homo sapiens
  misc_RNA (1)...(19): siRNA sense strand
cuggaggaauucaaugaug

SEQ ID NO: 1137037 - RNA, 19 nt, Homo sapiens
  misc_RNA (1)...(19): siRNA sense strand
ugaaaugucagaagcuuac

SEQ ID NO: 1137038 - RNA, 19 nt, Homo sapiens
  misc_RNA (1)...(19): siRNA sense strand
gcauaauggccgagcuguu

SEQ ID NO: 1137039 - RNA, 19 nt, Homo sapiens
  misc_RNA (1)...(19): siRNA sense strand
gaacuggaugcauuacaac

SEQ ID NO: 1137040 - RNA, 19 nt, Homo sapiens
  misc_RNA (1)...(19): siRNA sense strand
agaugaccauguucaguuc

SEQ ID NO: 1137041 - RNA, 19 nt, Homo sapiens
  misc_RNA (1)...(19): siRNA sense strand
aaccagacaguugauauuu

SEQ ID NO: 1137042 - RNA, 19 nt, Homo sapiens
  misc_RNA (1)...(19): siRNA sense strand
accagacaguugauauuug

SEQ ID NO: 1137043 - RNA, 19 nt, Homo sapiens
  misc_RNA (1)...(19): siRNA sense strand
ugugaaaugucagaagcuu

SEQ ID NO: 1137044 - RNA, 19 nt, Homo sapiens
  misc_RNA (1)...(19): siRNA sense strand
caggcuacguggccacuag

SEQ ID NO: 1137045 - RNA, 19 nt, Homo sapiens
  misc_RNA (1)...(19): siRNA sense strand
uauacauucagcugacaua

SEQ ID NO: 1137046 - RNA, 19 nt, Homo sapiens
  misc_RNA (1)...(19): siRNA sense strand
uuacagaugaccauguuca

SEQ ID NO: 1137047 - RNA, 19 nt, Homo sapiens
  misc_RNA (1)...(19): siRNA sense strand
ugaagacugugagcugaag

SEQ ID NO: 1137048 - RNA, 19 nt, Homo sapiens
  misc_RNA (1)...(19): siRNA sense strand
ugcgguuacuuaaacauau

SEQ ID NO: 1137049 - RNA, 19 nt, Homo sapiens
  misc_RNA (1)...(19): siRNA sense strand
ugcaaggucucuggaggaa

SEQ ID NO: 1137050 - RNA, 19 nt, Homo sapiens
  misc_RNA (1)...(19): siRNA sense strand
gguuacguguggcagugaa

SEQ ID NO: 1137051 - RNA, 19 nt, Homo sapiens
  misc_RNA (1)...(19): siRNA sense strand
aggagaggcccacguucua

SEQ ID NO: 1137052 - RNA, 19 nt, Homo sapiens
  misc_RNA (1)...(19): siRNA sense strand
gcauuacaaccagacaguu

SEQ ID NO: 1137053 - RNA, 19 nt, Homo sapiens
  misc_RNA (1)...(19): siRNA sense strand
ucaguuccuuaucuaccaa

SEQ ID NO: 1137054 - RNA, 19 nt, Homo sapiens
  misc_RNA (1)...(19): siRNA sense strand
cggcaggagcugaacaaga

SEQ ID NO: 1137055 - RNA, 19 nt, Homo sapiens
  misc_RNA (1)...(19): siRNA sense strand
aaaagaaccuacagagaac

SEQ ID NO: 1137056 - RNA, 19 nt, Homo sapiens
  misc_RNA (1)...(19): siRNA sense strand
gaagacugugagcugaaga

SEQ ID NO: 1137057 - RNA, 19 nt, Homo sapiens
  misc_RNA (1)...(19): siRNA sense strand
ccaaauucuccgaggucua

SEQ ID NO: 1137058 - RNA, 19 nt, Homo sapiens
  misc_RNA (1)...(19): siRNA sense strand
ggagaggcccacguucuac

SEQ ID NO: 1137059 - RNA, 19 nt, Homo sapiens
  misc_RNA (1)...(19): siRNA sense strand
ccagaccauuucaguccau

SEQ ID NO: 1137060 - RNA, 19 nt, Homo sapiens
  misc_RNA (1)...(19): siRNA sense strand
caguugauauuuggucagu

SEQ ID NO: 1137061 - RNA, 19 nt, Homo sapiens
  misc_RNA (1)...(19): siRNA sense strand
gcacacagaugaugaaaug

SEQ ID NO: 1137062 - RNA, 19 nt, Homo sapiens
  misc_RNA (1)...(19): siRNA sense strand
ggaauucaaugauguguau

SEQ ID NO: 1137063 - RNA, 19 nt, Homo sapiens
  misc_RNA (1)...(19): siRNA sense strand
gaacugcgguuacuuaaac

SEQ ID NO: 1137064 - RNA, 19 nt, Homo sapiens
  misc_RNA (1)...(19): siRNA sense strand
caaggucucuggaggaauu

SEQ ID NO: 1137065 - RNA, 19 nt, Homo sapiens
  misc_RNA (1)...(19): siRNA sense strand
gucagaagcuuacagauga

SEQ ID NO: 1137066 - RNA, 19 nt, Homo sapiens
  misc_RNA (1)...(19): siRNA sense strand
gggcagaucugaacaacau

SEQ ID NO: 1137067 - RNA, 19 nt, Homo sapiens
  misc_RNA (1)...(19): siRNA sense strand
gaaaagaaccuacagagaa

SEQ ID NO: 1137068 - RNA, 19 nt, Homo sapiens
  misc_RNA (1)...(19): siRNA sense strand
acauucagcugacauaauu

SEQ ID NO: 1137069 - RNA, 19 nt, Homo sapiens
  misc_RNA (1)...(19): siRNA sense strand
caaauucuccgaggucuaa

SEQ ID NO: 1137070 - RNA, 19 nt, Homo sapiens
  misc_RNA (1)...(19): siRNA sense strand
gaagcucuccagaccauuu

SEQ ID NO: 1137071 - RNA, 19 nt, Homo sapiens
  misc_RNA (1)...(19): siRNA sense strand
gcuuacagaugaccauguu

SEQ ID NO: 1137072 - RNA, 19 nt, Homo sapiens
  misc_RNA (1)...(19): siRNA sense strand
ugaacuggaugcauuacaa

SEQ ID NO: 1137073 - RNA, 19 nt, Homo sapiens
  misc_RNA (1)...(19): siRNA sense strand
uaaucuagcugugaaugaa

SEQ ID NO: 1137074 - RNA, 19 nt, Homo sapiens
  misc_RNA (1)...(19): siRNA sense strand
agagaacugcgguuacuua

SEQ ID NO: 1137075 - RNA, 19 nt, Homo sapiens
  misc_RNA (1)...(19): siRNA sense strand
gagaacugcgguuacuuaa

SEQ ID NO: 1137076 - RNA, 19 nt, Homo sapiens
  misc_RNA (1)...(19): siRNA sense strand
ggcaggagcugaacaagac

SEQ ID NO: 1137077 - RNA, 19 nt, Homo sapiens
  misc_RNA (1)...(19): siRNA sense strand
ccagacaguugauauuugg

SEQ ID NO: 1137078 - RNA, 19 nt, Homo sapiens
  misc_RNA (1)...(19): siRNA sense strand
cuacagagaacugcgguua

SEQ ID NO: 1137079 - RNA, 19 nt, Homo sapiens
  misc_RNA (1)...(19): siRNA sense strand
ucagugggaugcauaaugg

SEQ ID NO: 1137080 - RNA, 19 nt, Homo sapiens
  misc_RNA (1)...(19): siRNA sense strand
ucuccgaggucuaaaguau

SEQ ID NO: 1137081 - RNA, 19 nt, Homo sapiens
  misc_RNA (1)...(19): siRNA sense strand
gagcugaagauucuggauu

SEQ ID NO: 1137082 - RNA, 19 nt, Homo sapiens
  misc_RNA (1)...(19): siRNA sense strand
cauaauggccgagcuguug

SEQ ID NO: 1137083 - RNA, 19 nt, Homo sapiens
  misc_RNA (1)...(19): siRNA sense strand
gcagaucugaacaacauug

SEQ ID NO: 1137084 - RNA, 19 nt, Homo sapiens
  misc_RNA (1)...(19): siRNA sense strand
cagaugaccauguucaguu

SEQ ID NO: 1137085 - RNA, 19 nt, Homo sapiens
  misc_RNA (1)...(19): siRNA sense strand
gaccauguucaguuccuua

SEQ ID NO: 1137086 - RNA, 19 nt, Homo sapiens
  misc_RNA (1)...(19): siRNA sense strand
ccauuucaguccaucauuc

SEQ ID NO: 1137087 - RNA, 19 nt, Homo sapiens
  misc_RNA (1)...(19): siRNA sense strand
gcgguuacuuaaacauaug

SEQ ID NO: 1137088 - RNA, 19 nt, Homo sapiens
  misc_RNA (1)...(19): siRNA sense strand
gagcugaacaagacaaucu

SEQ ID NO: 1137089 - RNA, 19 nt, Homo sapiens
  misc_RNA (1)...(19): siRNA sense strand
ccuaaaaccuaguaaucua

SEQ ID NO: 1137090 - RNA, 19 nt, Homo sapiens
  misc_RNA (1)...(19): siRNA sense strand
guaaucuagcugugaauga

SEQ ID NO: 1137091 - RNA, 19 nt, Homo sapiens
  misc_RNA (1)...(19): siRNA sense strand
cauguucaguuccuuaucu

SEQ ID NO: 1137092 - RNA, 19 nt, Homo sapiens
  misc_RNA (1)...(19): siRNA sense strand
gccgagcuguugacuggaa

SEQ ID NO: 1137093 - RNA, 19 nt, Homo sapiens
  misc_RNA (1)...(19): siRNA sense strand
aaaugugauuggucuguug

SEQ ID NO: 1137094 - RNA, 19 nt, Homo sapiens
  misc_RNA (1)...(19): siRNA sense strand
acugugagcugaagauucu

SEQ ID NO: 1137095 - RNA, 19 nt, Homo sapiens
  misc_RNA (1)...(19): siRNA sense strand
uccgaggucuaaaguauau

SEQ ID NO: 1137096 - RNA, 19 nt, Homo sapiens
  misc_RNA (1)...(19): siRNA sense strand
uuccuuaucuaccaaauuc

SEQ ID NO: 1137097 - RNA, 19 nt, Homo sapiens
  misc_RNA (1)...(19): siRNA sense strand
aagaagcucuccagaccau

SEQ ID NO: 1137098 - RNA, 19 nt, Homo sapiens
  misc_RNA (1)...(19): siRNA sense strand
agcugaagauucuggauuu

SEQ ID NO: 1137099 - RNA, 19 nt, Homo sapiens
  misc_RNA (1)...(19): siRNA sense strand
uggaggaauucaaugaugu

SEQ ID NO: 1137100 - RNA, 19 nt, Homo sapiens
  misc_RNA (1)...(19): siRNA sense strand
guccaucauucaugcgaaa

SEQ ID NO: 1137101 - RNA, 19 nt, Homo sapiens
  misc_RNA (1)...(19): siRNA sense strand
gugaaaugucagaagcuua

SEQ ID NO: 1137102 - RNA, 19 nt, Homo sapiens
  misc_RNA (1)...(19): siRNA sense strand
ugucagaagcuuacagaug

SEQ ID NO: 1137103 - RNA, 19 nt, Homo sapiens
  misc_RNA (1)...(19): siRNA sense strand
ggaggaauucaaugaugug

SEQ ID NO: 1137104 - RNA, 19 nt, Homo sapiens
  misc_RNA (1)...(19): siRNA sense strand
cacagaugaugaaaugaca

SEQ ID NO: 1137105 - RNA, 19 nt, Homo sapiens
  misc_RNA (1)...(19): siRNA sense strand
acagagaacugcgguuacu

SEQ ID NO: 1137106 - RNA, 19 nt, Homo sapiens
  misc_RNA (1)...(19): siRNA sense strand
cuccugagaucaugcugaa

SEQ ID NO: 1137107 - RNA, 19 nt, Homo sapiens
  misc_RNA (1)...(19): siRNA sense strand
cuggaggaauucaaugaug

SEQ ID NO: 1137108 - RNA, 19 nt, Homo sapiens
  misc_RNA (1)...(19): siRNA sense strand
ugaaaugucagaagcuuac

SEQ ID NO: 1137109 - RNA, 19 nt, Homo sapiens
  misc_RNA (1)...(19): siRNA sense strand
gcauaauggccgagcuguu

SEQ ID NO: 1137110 - RNA, 19 nt, Homo sapiens
  misc_RNA (1)...(19): siRNA sense strand
gaacuggaugcauuacaac

SEQ ID NO: 1137111 - RNA, 19 nt, Homo sapiens
  misc_RNA (1)...(19): siRNA sense strand
agaugaccauguucaguuc

SEQ ID NO: 1137112 - RNA, 19 nt, Homo sapiens
  misc_RNA (1)...(19): siRNA sense strand
aaccagacaguugauauuu

SEQ ID NO: 1137113 - RNA, 19 nt, Homo sapiens
  misc_RNA (1)...(19): siRNA sense strand
accagacaguugauauuug

SEQ ID NO: 1137114 - RNA, 19 nt, Homo sapiens
  misc_RNA (1)...(19): siRNA sense strand
ugugaaaugucagaagcuu

SEQ ID NO: 1137115 - RNA, 19 nt, Homo sapiens
  misc_RNA (1)...(19): siRNA sense strand
caggcuacguggccacuag

SEQ ID NO: 1137116 - RNA, 19 nt, Homo sapiens
  misc_RNA (1)...(19): siRNA sense strand
uauacauucagcugacaua

SEQ ID NO: 1137117 - RNA, 19 nt, Homo sapiens
  misc_RNA (1)...(19): siRNA sense strand
uuacagaugaccauguuca

SEQ ID NO: 1137118 - RNA, 19 nt, Homo sapiens
  misc_RNA (1)...(19): siRNA sense strand
ugaagacugugagcugaag

SEQ ID NO: 1137119 - RNA, 19 nt, Homo sapiens
  misc_RNA (1)...(19): siRNA sense strand
ugcgguuacuuaaacauau

SEQ ID NO: 1137120 - RNA, 19 nt, Homo sapiens
  misc_RNA (1)...(19): siRNA sense strand
ugcaaggucucuggaggaa

SEQ ID NO: 1137121 - RNA, 19 nt, Homo sapiens
  misc_RNA (1)...(19): siRNA sense strand
gguuacguguggcagugaa

SEQ ID NO: 1137122 - RNA, 19 nt, Homo sapiens
  misc_RNA (1)...(19): siRNA sense strand
aggagaggcccacguucua

SEQ ID NO: 1137123 - RNA, 19 nt, Homo sapiens
  misc_RNA (1)...(19): siRNA sense strand
gcauuacaaccagacaguu

SEQ ID NO: 1137124 - RNA, 19 nt, Homo sapiens
  misc_RNA (1)...(19): siRNA sense strand
ucaguuccuuaucuaccaa

SEQ ID NO: 1137125 - RNA, 19 nt, Homo sapiens
  misc_RNA (1)...(19): siRNA sense strand
cggcaggagcugaacaaga

SEQ ID NO: 1137126 - RNA, 19 nt, Homo sapiens
  misc_RNA (1)...(19): siRNA sense strand
aaaagaaccuacagagaac

SEQ ID NO: 1137127 - RNA, 19 nt, Homo sapiens
  misc_RNA (1)...(19): siRNA sense strand
gaagacugugagcugaaga

SEQ ID NO: 1137128 - RNA, 19 nt, Homo sapiens
  misc_RNA (1)...(19): siRNA sense strand
ccaaauucuccgaggucua

SEQ ID NO: 1137129 - RNA, 19 nt, Homo sapiens
  misc_RNA (1)...(19): siRNA sense strand
ggagaggcccacguucuac

SEQ ID NO: 1137130 - RNA, 19 nt, Homo sapiens
  misc_RNA (1)...(19): siRNA sense strand
ccagaccauuucaguccau

SEQ ID NO: 1137131 - RNA, 19 nt, Homo sapiens
  misc_RNA (1)...(19): siRNA sense strand
caguugauauuuggucagu

SEQ ID NO: 1137132 - RNA, 19 nt, Homo sapiens
  misc_RNA (1)...(19): siRNA sense strand
gcacacagaugaugaaaug

SEQ ID NO: 1137133 - RNA, 19 nt, Homo sapiens
  misc_RNA (1)...(19): siRNA sense strand
ggaauucaaugauguguau

SEQ ID NO: 1137134 - RNA, 19 nt, Homo sapiens
  misc_RNA (1)...(19): siRNA sense strand
gaacugcgguuacuuaaac

SEQ ID NO: 1137135 - RNA, 19 nt, Homo sapiens
  misc_RNA (1)...(19): siRNA sense strand
caaggucucuggaggaauu

SEQ ID NO: 1137136 - RNA, 19 nt, Homo sapiens
  misc_RNA (1)...(19): siRNA sense strand
gucagaagcuuacagauga

SEQ ID NO: 1137137 - RNA, 19 nt, Homo sapiens
  misc_RNA (1)...(19): siRNA sense strand
gggcagaucugaacaacau

SEQ ID NO: 1137138 - RNA, 19 nt, Homo sapiens
  misc_RNA (1)...(19): siRNA sense strand
gaaaagaaccuacagagaa

SEQ ID NO: 1137139 - RNA, 19 nt, Homo sapiens
  misc_RNA (1)...(19): siRNA sense strand
acauucagcugacauaauu

SEQ ID NO: 1137140 - RNA, 19 nt, Homo sapiens
  misc_RNA (1)...(19): siRNA sense strand
caaauucuccgaggucuaa

SEQ ID NO: 1137141 - RNA, 19 nt, Homo sapiens
  misc_RNA (1)...(19): siRNA sense strand
gaagcucuccagaccauuu

SEQ ID NO: 1137142 - RNA, 19 nt, Homo sapiens
  misc_RNA (1)...(19): siRNA sense strand
gcuuacagaugaccauguu

SEQ ID NO: 1137143 - RNA, 19 nt, Homo sapiens
  misc_RNA (1)...(19): siRNA sense strand
ugaacuggaugcauuacaa

SEQ ID NO: 1137144 - RNA, 19 nt, Homo sapiens
  misc_RNA (1)...(19): siRNA sense strand
uaaucuagcugugaaugaa

SEQ ID NO: 1137145 - RNA, 19 nt, Homo sapiens
  misc_RNA (1)...(19): siRNA sense strand
agagaacugcgguuacuua

SEQ ID NO: 1137146 - RNA, 19 nt, Homo sapiens
  misc_RNA (1)...(19): siRNA sense strand
gagaacugcgguuacuuaa

SEQ ID NO: 1137147 - RNA, 19 nt, Homo sapiens
  misc_RNA (1)...(19): siRNA sense strand
ggcaggagcugaacaagac

SEQ ID NO: 1137148 - RNA, 19 nt, Homo sapiens
  misc_RNA (1)...(19): siRNA sense strand
ccagacaguugauauuugg

SEQ ID NO: 1137149 - RNA, 19 nt, Homo sapiens
  misc_RNA (1)...(19): siRNA sense strand
cuacagagaacugcgguua

SEQ ID NO: 1137150 - RNA, 19 nt, Homo sapiens
  misc_RNA (1)...(19): siRNA sense strand
ucagugggaugcauaaugg

SEQ ID NO: 1137151 - RNA, 19 nt, Homo sapiens
  misc_RNA (1)...(19): siRNA sense strand
ucuccgaggucuaaaguau

SEQ ID NO: 1137152 - RNA, 19 nt, Homo sapiens
  misc_RNA (1)...(19): siRNA sense strand
gagcugaagauucuggauu

SEQ ID NO: 1137153 - RNA, 19 nt, Homo sapiens
  misc_RNA (1)...(19): siRNA sense strand
cauaauggccgagcuguug

SEQ ID NO: 1137154 - RNA, 19 nt, Homo sapiens
  misc_RNA (1)...(19): siRNA sense strand
gcagaucugaacaacauug

SEQ ID NO: 1137155 - RNA, 19 nt, Homo sapiens
  misc_RNA (1)...(19): siRNA sense strand
cagaugaccauguucaguu

SEQ ID NO: 1137156 - RNA, 19 nt, Homo sapiens
  misc_RNA (1)...(19): siRNA sense strand
gaccauguucaguuccuua

SEQ ID NO: 1137157 - RNA, 19 nt, Homo sapiens
  misc_RNA (1)...(19): siRNA sense strand
ccauuucaguccaucauuc

SEQ ID NO: 1137158 - RNA, 19 nt, Homo sapiens
  misc_RNA (1)...(19): siRNA sense strand
gcgguuacuuaaacauaug

SEQ ID NO: 1137159 - RNA, 19 nt, Homo sapiens
  misc_RNA (1)...(19): siRNA sense strand
gagcugaacaagacaaucu

SEQ ID NO: 1137160 - RNA, 19 nt, Homo sapiens
  misc_RNA (1)...(19): siRNA sense strand
ccuaaaaccuaguaaucua

SEQ ID NO: 1137161 - RNA, 19 nt, Homo sapiens
  misc_RNA (1)...(19): siRNA sense strand
guaaucuagcugugaauga

SEQ ID NO: 1137162 - RNA, 19 nt, Homo sapiens
  misc_RNA (1)...(19): siRNA sense strand
cauguucaguuccuuaucu

SEQ ID NO: 1137163 - RNA, 19 nt, Homo sapiens
  misc_RNA (1)...(19): siRNA sense strand
gccgagcuguugacuggaa

SEQ ID NO: 1137164 - RNA, 19 nt, Homo sapiens
  misc_RNA (1)...(19): siRNA sense strand
aaaugugauuggucuguug

SEQ ID NO: 1137165 - RNA, 19 nt, Homo sapiens
  misc_RNA (1)...(19): siRNA sense strand
acugugagcugaagauucu

SEQ ID NO: 1137166 - RNA, 19 nt, Homo sapiens
  misc_RNA (1)...(19): siRNA sense strand
uccgaggucuaaaguauau

SEQ ID NO: 1137167 - RNA, 19 nt, Homo sapiens
  misc_RNA (1)...(19): siRNA sense strand
uuccuuaucuaccaaauuc

SEQ ID NO: 1137168 - RNA, 19 nt, Homo sapiens
  misc_RNA (1)...(19): siRNA sense strand
aagaagcucuccagaccau

SEQ ID NO: 1137169 - RNA, 19 nt, Homo sapiens
  misc_RNA (1)...(19): siRNA sense strand
agcugaagauucuggauuu

SEQ ID NO: 1137170 - RNA, 19 nt, Homo sapiens
  misc_RNA (1)...(19): siRNA sense strand
uggaggaauucaaugaugu

SEQ ID NO: 1137171 - RNA, 19 nt, Homo sapiens
  misc_RNA (1)...(19): siRNA sense strand
guccaucauucaugcgaaa

SEQ ID NO: 1137172 - RNA, 19 nt, Homo sapiens
  misc_RNA (1)...(19): siRNA sense strand
gugaaaugucagaagcuua

SEQ ID NO: 1137173 - RNA, 19 nt, Homo sapiens
  misc_RNA (1)...(19): siRNA sense strand
ugucagaagcuuacagaug

SEQ ID NO: 1137174 - RNA, 19 nt, Homo sapiens
  misc_RNA (1)...(19): siRNA sense strand
ggaggaauucaaugaugug

SEQ ID NO: 1137175 - RNA, 19 nt, Homo sapiens
  misc_RNA (1)...(19): siRNA sense strand
cacagaugaugaaaugaca

SEQ ID NO: 1137176 - RNA, 19 nt, Homo sapiens
  misc_RNA (1)...(19): siRNA sense strand
acagagaacugcgguuacu

SEQ ID NO: 1137177 - RNA, 19 nt, Homo sapiens
  misc_RNA (1)...(19): siRNA sense strand
cuccugagaucaugcugaa

SEQ ID NO: 1137178 - RNA, 19 nt, Homo sapiens
  misc_RNA (1)...(19): siRNA sense strand
cuggaggaauucaaugaug

SEQ ID NO: 1137179 - RNA, 19 nt, Homo sapiens
  misc_RNA (1)...(19): siRNA sense strand
ugaaaugucagaagcuuac

SEQ ID NO: 1137180 - RNA, 19 nt, Homo sapiens
  misc_RNA (1)...(19): siRNA sense strand
gcauaauggccgagcuguu

SEQ ID NO: 1137181 - RNA, 19 nt, Homo sapiens
  misc_RNA (1)...(19): siRNA sense strand
gaacuggaugcauuacaac

SEQ ID NO: 1137182 - RNA, 19 nt, Homo sapiens
  misc_RNA (1)...(19): siRNA sense strand
agaugaccauguucaguuc

SEQ ID NO: 1137183 - RNA, 19 nt, Homo sapiens
  misc_RNA (1)...(19): siRNA sense strand
aaccagacaguugauauuu

SEQ ID NO: 1137184 - RNA, 19 nt, Homo sapiens
  misc_RNA (1)...(19): siRNA sense strand
accagacaguugauauuug

SEQ ID NO: 1137185 - RNA, 19 nt, Homo sapiens
  misc_RNA (1)...(19): siRNA sense strand
ugugaaaugucagaagcuu

SEQ ID NO: 1137186 - RNA, 19 nt, Homo sapiens
  misc_RNA (1)...(19): siRNA sense strand
caggcuacguggccacuag

SEQ ID NO: 1137187 - RNA, 19 nt, Homo sapiens
  misc_RNA (1)...(19): siRNA sense strand
uauacauucagcugacaua

SEQ ID NO: 1137188 - RNA, 19 nt, Homo sapiens
  misc_RNA (1)...(19): siRNA sense strand
uuacagaugaccauguuca

SEQ ID NO: 1137189 - RNA, 19 nt, Homo sapiens
  misc_RNA (1)...(19): siRNA sense strand
ugaagacugugagcugaag

SEQ ID NO: 1137190 - RNA, 19 nt, Homo sapiens
  misc_RNA (1)...(19): siRNA sense strand
ugcgguuacuuaaacauau

SEQ ID NO: 1137191 - RNA, 19 nt, Homo sapiens
  misc_RNA (1)...(19): siRNA sense strand
ugcaaggucucuggaggaa

SEQ ID NO: 1137192 - RNA, 19 nt, Homo sapiens
  misc_RNA (1)...(19): siRNA sense strand
gguuacguguggcagugaa

SEQ ID NO: 1137193 - RNA, 19 nt, Homo sapiens
  misc_RNA (1)...(19): siRNA sense strand
aggagaggcccacguucua

SEQ ID NO: 1137194 - RNA, 19 nt, Homo sapiens
  misc_RNA (1)...(19): siRNA sense strand
gcauuacaaccagacaguu

SEQ ID NO: 1137195 - RNA, 19 nt, Homo sapiens
  misc_RNA (1)...(19): siRNA sense strand
ucaguuccuuaucuaccaa

SEQ ID NO: 1137196 - RNA, 19 nt, Homo sapiens
  misc_RNA (1)...(19): siRNA sense strand
cggcaggagcugaacaaga

SEQ ID NO: 1137197 - RNA, 19 nt, Homo sapiens
  misc_RNA (1)...(19): siRNA sense strand
aaaagaaccuacagagaac

SEQ ID NO: 1137198 - RNA, 19 nt, Homo sapiens
  misc_RNA (1)...(19): siRNA sense strand
gaagacugugagcugaaga

SEQ ID NO: 1137199 - RNA, 19 nt, Homo sapiens
  misc_RNA (1)...(19): siRNA sense strand
ccaaauucuccgaggucua

SEQ ID NO: 1137200 - RNA, 19 nt, Homo sapiens
  misc_RNA (1)...(19): siRNA sense strand
ggagaggcccacguucuac

SEQ ID NO: 1137201 - RNA, 19 nt, Homo sapiens
  misc_RNA (1)...(19): siRNA sense strand
ccagaccauuucaguccau

SEQ ID NO: 1137202 - RNA, 19 nt, Homo sapiens
  misc_RNA (1)...(19): siRNA sense strand
caguugauauuuggucagu

SEQ ID NO: 1137203 - RNA, 19 nt, Homo sapiens
  misc_RNA (1)...(19): siRNA sense strand
gcacacagaugaugaaaug

SEQ ID NO: 1137204 - RNA, 19 nt, Homo sapiens
  misc_RNA (1)...(19): siRNA sense strand
ggaauucaaugauguguau

SEQ ID NO: 1137205 - RNA, 19 nt, Homo sapiens
  misc_RNA (1)...(19): siRNA sense strand
gaacugcgguuacuuaaac

SEQ ID NO: 1137206 - RNA, 19 nt, Homo sapiens
  misc_RNA (1)...(19): siRNA sense strand
caaggucucuggaggaauu

SEQ ID NO: 1137207 - RNA, 19 nt, Homo sapiens
  misc_RNA (1)...(19): siRNA sense strand
gucagaagcuuacagauga

SEQ ID NO: 1137208 - RNA, 19 nt, Homo sapiens
  misc_RNA (1)...(19): siRNA sense strand
gggcagaucugaacaacau

SEQ ID NO: 1137209 - RNA, 19 nt, Homo sapiens
  misc_RNA (1)...(19): siRNA sense strand
gaaaagaaccuacagagaa

SEQ ID NO: 1137210 - RNA, 19 nt, Homo sapiens
  misc_RNA (1)...(19): siRNA sense strand
acauucagcugacauaauu

SEQ ID NO: 1137211 - RNA, 19 nt, Homo sapiens
  misc_RNA (1)...(19): siRNA sense strand
caaauucuccgaggucuaa

SEQ ID NO: 1137212 - RNA, 19 nt, Homo sapiens
  misc_RNA (1)...(19): siRNA sense strand
gaagcucuccagaccauuu

SEQ ID NO: 1137213 - RNA, 19 nt, Homo sapiens
  misc_RNA (1)...(19): siRNA sense strand
gcuuacagaugaccauguu

SEQ ID NO: 1137214 - RNA, 19 nt, Homo sapiens
  misc_RNA (1)...(19): siRNA sense strand
ugaacuggaugcauuacaa

SEQ ID NO: 1137215 - RNA, 19 nt, Homo sapiens
  misc_RNA (1)...(19): siRNA sense strand
uaaucuagcugugaaugaa

SEQ ID NO: 1137216 - RNA, 19 nt, Homo sapiens
  misc_RNA (1)...(19): siRNA sense strand
agagaacugcgguuacuua

SEQ ID NO: 1137217 - RNA, 19 nt, Homo sapiens
  misc_RNA (1)...(19): siRNA sense strand
gagaacugcgguuacuuaa

SEQ ID NO: 1137218 - RNA, 19 nt, Homo sapiens
  misc_RNA (1)...(19): siRNA sense strand
ggcaggagcugaacaagac

SEQ ID NO: 1137219 - RNA, 19 nt, Homo sapiens
  misc_RNA (1)...(19): siRNA sense strand
ccagacaguugauauuugg

SEQ ID NO: 1137220 - RNA, 19 nt, Homo sapiens
  misc_RNA (1)...(19): siRNA sense strand
cuacagagaacugcgguua

SEQ ID NO: 1137221 - RNA, 19 nt, Homo sapiens
  misc_RNA (1)...(19): siRNA sense strand
ucagugggaugcauaaugg

SEQ ID NO: 1137222 - RNA, 19 nt, Homo sapiens
  misc_RNA (1)...(19): siRNA sense strand
ucuccgaggucuaaaguau

SEQ ID NO: 1137223 - RNA, 19 nt, Homo sapiens
  misc_RNA (1)...(19): siRNA sense strand
gagcugaagauucuggauu

SEQ ID NO: 1137224 - RNA, 19 nt, Homo sapiens
  misc_RNA (1)...(19): siRNA sense strand
cauaauggccgagcuguug

SEQ ID NO: 1137225 - RNA, 19 nt, Homo sapiens
  misc_RNA (1)...(19): siRNA sense strand
gcagaucugaacaacauug

SEQ ID NO: 1137226 - RNA, 19 nt, Homo sapiens
  misc_RNA (1)...(19): siRNA sense strand
cagaugaccauguucaguu

SEQ ID NO: 1137227 - RNA, 19 nt, Homo sapiens
  misc_RNA (1)...(19): siRNA sense strand
gaccauguucaguuccuua

SEQ ID NO: 1137228 - RNA, 19 nt, Homo sapiens
  misc_RNA (1)...(19): siRNA sense strand
ccauuucaguccaucauuc

SEQ ID NO: 1137229 - RNA, 19 nt, Homo sapiens
  misc_RNA (1)...(19): siRNA sense strand
gcgguuacuuaaacauaug

SEQ ID NO: 1137230 - RNA, 19 nt, Homo sapiens
  misc_RNA (1)...(19): siRNA sense strand
gagcugaacaagacaaucu

SEQ ID NO: 1137231 - RNA, 19 nt, Homo sapiens
  misc_RNA (1)...(19): siRNA sense strand
ccuaaaaccuaguaaucua

SEQ ID NO: 1137232 - RNA, 19 nt, Homo sapiens
  misc_RNA (1)...(19): siRNA sense strand
guaaucuagcugugaauga

SEQ ID NO: 1137233 - RNA, 19 nt, Homo sapiens
  misc_RNA (1)...(19): siRNA sense strand
cauguucaguuccuuaucu

SEQ ID NO: 1137234 - RNA, 19 nt, Homo sapiens
  misc_RNA (1)...(19): siRNA sense strand
gccgagcuguugacuggaa

SEQ ID NO: 1137235 - RNA, 19 nt, Homo sapiens
  misc_RNA (1)...(19): siRNA sense strand
aaaugugauuggucuguug

SEQ ID NO: 1137236 - RNA, 19 nt, Homo sapiens
  misc_RNA (1)...(19): siRNA sense strand
acugugagcugaagauucu

SEQ ID NO: 1137237 - RNA, 19 nt, Homo sapiens
  misc_RNA (1)...(19): siRNA sense strand
uccgaggucuaaaguauau

SEQ ID NO: 1137238 - RNA, 19 nt, Homo sapiens
  misc_RNA (1)...(19): siRNA sense strand
uuccuuaucuaccaaauuc

SEQ ID NO: 1137239 - RNA, 19 nt, Homo sapiens
  misc_RNA (1)...(19): siRNA sense strand
aagaagcucuccagaccau

SEQ ID NO: 1137240 - RNA, 19 nt, Homo sapiens
  misc_RNA (1)...(19): siRNA sense strand
agcugaagauucuggauuu

SEQ ID NO: 1137241 - RNA, 19 nt, Homo sapiens
  misc_RNA (1)...(19): siRNA sense strand
uggaggaauucaaugaugu

SEQ ID NO: 1137242 - RNA, 19 nt, Homo sapiens
  misc_RNA (1)...(19): siRNA sense strand
guccaucauucaugcgaaa

SEQ ID NO: 1137243 - RNA, 19 nt, Homo sapiens
  misc_RNA (1)...(19): siRNA sense strand
gugaaaugucagaagcuua

SEQ ID NO: 1137244 - RNA, 19 nt, Homo sapiens
  misc_RNA (1)...(19): siRNA sense strand
ugucagaagcuuacagaug

SEQ ID NO: 1137245 - RNA, 19 nt, Homo sapiens
  misc_RNA (1)...(19): siRNA sense strand
ggaggaauucaaugaugug

SEQ ID NO: 1137246 - RNA, 19 nt, Homo sapiens
  misc_RNA (1)...(19): siRNA sense strand
cacagaugaugaaaugaca

SEQ ID NO: 1137247 - RNA, 19 nt, Homo sapiens
  misc_RNA (1)...(19): siRNA sense strand
acagagaacugcgguuacu

SEQ ID NO: 1137248 - RNA, 19 nt, Homo sapiens
  misc_RNA (1)...(19): siRNA sense strand
cuccugagaucaugcugaa

SEQ ID NO: 1137249 - RNA, 19 nt, Homo sapiens
  misc_RNA (1)...(19): siRNA sense strand
cuggaggaauucaaugaug

SEQ ID NO: 1137250 - RNA, 19 nt, Homo sapiens
  misc_RNA (1)...(19): siRNA sense strand
ugaaaugucagaagcuuac

SEQ ID NO: 1137251 - RNA, 19 nt, Homo sapiens
  misc_RNA (1)...(19): siRNA sense strand
gcauaauggccgagcuguu

SEQ ID NO: 1137252 - RNA, 19 nt, Homo sapiens
  misc_RNA (1)...(19): siRNA sense strand
gaacuggaugcauuacaac

SEQ ID NO: 1137253 - RNA, 19 nt, Homo sapiens
  misc_RNA (1)...(19): siRNA sense strand
agaugaccauguucaguuc

SEQ ID NO: 1137254 - RNA, 19 nt, Homo sapiens
  misc_RNA (1)...(19): siRNA sense strand
aaccagacaguugauauuu

SEQ ID NO: 1137255 - RNA, 19 nt, Homo sapiens
  misc_RNA (1)...(19): siRNA sense strand
accagacaguugauauuug

SEQ ID NO: 1137256 - RNA, 19 nt, Homo sapiens
  misc_RNA (1)...(19): siRNA sense strand
ugugaaaugucagaagcuu

SEQ ID NO: 1137257 - RNA, 19 nt, Homo sapiens
  misc_RNA (1)...(19): siRNA sense strand
caggcuacguggccacuag

SEQ ID NO: 1137258 - RNA, 19 nt, Homo sapiens
  misc_RNA (1)...(19): siRNA sense strand
uauacauucagcugacaua

SEQ ID NO: 1137259 - RNA, 19 nt, Homo sapiens
  misc_RNA (1)...(19): siRNA sense strand
uuacagaugaccauguuca

SEQ ID NO: 1137260 - RNA, 19 nt, Homo sapiens
  misc_RNA (1)...(19): siRNA sense strand
ugaagacugugagcugaag

SEQ ID NO: 1137261 - RNA, 19 nt, Homo sapiens
  misc_RNA (1)...(19): siRNA sense strand
ugcgguuacuuaaacauau

SEQ ID NO: 1137262 - RNA, 19 nt, Homo sapiens
  misc_RNA (1)...(19): siRNA sense strand
ugcaaggucucuggaggaa

SEQ ID NO: 1137263 - RNA, 19 nt, Homo sapiens
  misc_RNA (1)...(19): siRNA sense strand
gguuacguguggcagugaa

SEQ ID NO: 1137264 - RNA, 19 nt, Homo sapiens
  misc_RNA (1)...(19): siRNA sense strand
aggagaggcccacguucua

SEQ ID NO: 1137265 - RNA, 19 nt, Homo sapiens
  misc_RNA (1)...(19): siRNA sense strand
gcauuacaaccagacaguu

SEQ ID NO: 1137266 - RNA, 19 nt, Homo sapiens
  misc_RNA (1)...(19): siRNA sense strand
ucaguuccuuaucuaccaa

SEQ ID NO: 1137267 - RNA, 19 nt, Homo sapiens
  misc_RNA (1)...(19): siRNA sense strand
cggcaggagcugaacaaga

SEQ ID NO: 1137268 - RNA, 19 nt, Homo sapiens
  misc_RNA (1)...(19): siRNA sense strand
aaaagaaccuacagagaac

SEQ ID NO: 1137269 - RNA, 19 nt, Homo sapiens
  misc_RNA (1)...(19): siRNA sense strand
gaagacugugagcugaaga

SEQ ID NO: 1137270 - RNA, 19 nt, Homo sapiens
  misc_RNA (1)...(19): siRNA sense strand
ccaaauucuccgaggucua

SEQ ID NO: 1137271 - RNA, 19 nt, Homo sapiens
  misc_RNA (1)...(19): siRNA sense strand
ggagaggcccacguucuac

SEQ ID NO: 1137272 - RNA, 19 nt, Homo sapiens
  misc_RNA (1)...(19): siRNA sense strand
ccagaccauuucaguccau

SEQ ID NO: 1137273 - RNA, 19 nt, Homo sapiens
  misc_RNA (1)...(19): siRNA sense strand
caguugauauuuggucagu

SEQ ID NO: 1137274 - RNA, 19 nt, Homo sapiens
  misc_RNA (1)...(19): siRNA sense strand
gcacacagaugaugaaaug

SEQ ID NO: 1137275 - RNA, 19 nt, Homo sapiens
  misc_RNA (1)...(19): siRNA sense strand
ggaauucaaugauguguau

SEQ ID NO: 1137276 - RNA, 19 nt, Homo sapiens
  misc_RNA (1)...(19): siRNA sense strand
gaacugcgguuacuuaaac

SEQ ID NO: 1137277 - RNA, 19 nt, Homo sapiens
  misc_RNA (1)...(19): siRNA sense strand
caaggucucuggaggaauu

SEQ ID NO: 1137278 - RNA, 19 nt, Homo sapiens
  misc_RNA (1)...(19): siRNA sense strand
gucagaagcuuacagauga

SEQ ID NO: 1137279 - RNA, 19 nt, Homo sapiens
  misc_RNA (1)...(19): siRNA sense strand
gggcagaucugaacaacau

SEQ ID NO: 1137280 - RNA, 19 nt, Homo sapiens
  misc_RNA (1)...(19): siRNA sense strand
gaaaagaaccuacagagaa

SEQ ID NO: 1137281 - RNA, 19 nt, Homo sapiens
  misc_RNA (1)...(19): siRNA sense strand
acauucagcugacauaauu

SEQ ID NO: 1137282 - RNA, 19 nt, Homo sapiens
  misc_RNA (1)...(19): siRNA sense strand
caaauucuccgaggucuaa

SEQ ID NO: 1137283 - RNA, 19 nt, Homo sapiens
  misc_RNA (1)...(19): siRNA sense strand
gaagcucuccagaccauuu

SEQ ID NO: 1137284 - RNA, 19 nt, Homo sapiens
  misc_RNA (1)...(19): siRNA sense strand
gcuuacagaugaccauguu

SEQ ID NO: 1137285 - RNA, 19 nt, Homo sapiens
  misc_RNA (1)...(19): siRNA sense strand
ugaacuggaugcauuacaa

SEQ ID NO: 1137286 - RNA, 19 nt, Homo sapiens
  misc_RNA (1)...(19): siRNA sense strand
uaaucuagcugugaaugaa

SEQ ID NO: 1137287 - RNA, 19 nt, Homo sapiens
  misc_RNA (1)...(19): siRNA sense strand
agagaacugcgguuacuua

SEQ ID NO: 1137288 - RNA, 19 nt, Homo sapiens
  misc_RNA (1)...(19): siRNA sense strand
gagaacugcgguuacuuaa

SEQ ID NO: 1137289 - RNA, 19 nt, Homo sapiens
  misc_RNA (1)...(19): siRNA sense strand
ggcaggagcugaacaagac

SEQ ID NO: 1137290 - RNA, 19 nt, Homo sapiens
  misc_RNA (1)...(19): siRNA sense strand
ccagacaguugauauuugg

SEQ ID NO: 1137291 - RNA, 19 nt, Homo sapiens
  misc_RNA (1)...(19): siRNA sense strand
cuacagagaacugcgguua

SEQ ID NO: 1137292 - RNA, 19 nt, Homo sapiens
  misc_RNA (1)...(19): siRNA sense strand
ucagugggaugcauaaugg

SEQ ID NO: 1137293 - RNA, 19 nt, Homo sapiens
  misc_RNA (1)...(19): siRNA sense strand
ucuccgaggucuaaaguau

SEQ ID NO: 1137294 - RNA, 19 nt, Homo sapiens
  misc_RNA (1)...(19): siRNA sense strand
gagcugaagauucuggauu

SEQ ID NO: 1137295 - RNA, 19 nt, Homo sapiens
  misc_RNA (1)...(19): siRNA sense strand
cauaauggccgagcuguug

SEQ ID NO: 1137296 - RNA, 19 nt, Homo sapiens
  misc_RNA (1)...(19): siRNA sense strand
gcagaucugaacaacauug

SEQ ID NO: 1137297 - RNA, 19 nt, Homo sapiens
  misc_RNA (1)...(19): siRNA sense strand
cagaugaccauguucaguu

SEQ ID NO: 1137298 - RNA, 19 nt, Homo sapiens
  misc_RNA (1)...(19): siRNA sense strand
gaccauguucaguuccuua

SEQ ID NO: 1137299 - RNA, 19 nt, Homo sapiens
  misc_RNA (1)...(19): siRNA sense strand
ccauuucaguccaucauuc

SEQ ID NO: 1137300 - RNA, 19 nt, Homo sapiens
  misc_RNA (1)...(19): siRNA sense strand
gcgguuacuuaaacauaug

SEQ ID NO: 1137301 - RNA, 19 nt, Homo sapiens
  misc_RNA (1)...(19): siRNA sense strand
gagcugaacaagacaaucu

SEQ ID NO: 1137302 - RNA, 19 nt, Homo sapiens
  misc_RNA (1)...(19): siRNA sense strand
ccuaaaaccuaguaaucua

SEQ ID NO: 1137303 - RNA, 19 nt, Homo sapiens
  misc_RNA (1)...(19): siRNA sense strand
guaaucuagcugugaauga

SEQ ID NO: 1137304 - RNA, 19 nt, Homo sapiens
  misc_RNA (1)...(19): siRNA sense strand
cauguucaguuccuuaucu

SEQ ID NO: 1137305 - RNA, 19 nt, Homo sapiens
  misc_RNA (1)...(19): siRNA sense strand
gccgagcuguugacuggaa

SEQ ID NO: 1137306 - RNA, 19 nt, Homo sapiens
  misc_RNA (1)...(19): siRNA sense strand
aaaugugauuggucuguug

SEQ ID NO: 1137307 - RNA, 19 nt, Homo sapiens
  misc_RNA (1)...(19): siRNA sense strand
acugugagcugaagauucu

SEQ ID NO: 1137308 - RNA, 19 nt, Homo sapiens
  misc_RNA (1)...(19): siRNA sense strand
uccgaggucuaaaguauau

SEQ ID NO: 1137309 - RNA, 19 nt, Homo sapiens
  misc_RNA (1)...(19): siRNA sense strand
uuccuuaucuaccaaauuc

SEQ ID NO: 1137310 - RNA, 19 nt, Homo sapiens
  misc_RNA (1)...(19): siRNA sense strand
aagaagcucuccagaccau

SEQ ID NO: 1137311 - RNA, 19 nt, Homo sapiens
  misc_RNA (1)...(19): siRNA sense strand
agcugaagauucuggauuu

SEQ ID NO: 1137312 - RNA, 19 nt, Homo sapiens
  misc_RNA (1)...(19): siRNA sense strand
uggaggaauucaaugaugu

SEQ ID NO: 1137313 - RNA, 19 nt, Homo sapiens
  misc_RNA (1)...(19): siRNA sense strand
guccaucauucaugcgaaa

SEQ ID NO: 1137314 - RNA, 19 nt, Homo sapiens
  misc_RNA (1)...(19): siRNA sense strand
gugaaaugucagaagcuua

SEQ ID NO: 1137315 - RNA, 19 nt, Homo sapiens
  misc_RNA (1)...(19): siRNA sense strand
ugucagaagcuuacagaug

SEQ ID NO: 1137316 - RNA, 19 nt, Homo sapiens
  misc_RNA (1)...(19): siRNA sense strand
ggaggaauucaaugaugug

SEQ ID NO: 1137317 - RNA, 19 nt, Homo sapiens
  misc_RNA (1)...(19): siRNA sense strand
cacagaugaugaaaugaca

SEQ ID NO: 1137318 - RNA, 19 nt, Homo sapiens
  misc_RNA (1)...(19): siRNA sense strand
acagagaacugcgguuacu

SEQ ID NO: 1137319 - RNA, 19 nt, Homo sapiens
  misc_RNA (1)...(19): siRNA sense strand
cuccugagaucaugcugaa

SEQ ID NO: 1137320 - RNA, 19 nt, Homo sapiens
  misc_RNA (1)...(19): siRNA sense strand
cuggaggaauucaaugaug

SEQ ID NO: 1137321 - RNA, 19 nt, Homo sapiens
  misc_RNA (1)...(19): siRNA sense strand
ugaaaugucagaagcuuac

SEQ ID NO: 1137322 - RNA, 19 nt, Homo sapiens
  misc_RNA (1)...(19): siRNA sense strand
gcauaauggccgagcuguu

SEQ ID NO: 1137323 - RNA, 19 nt, Homo sapiens
  misc_RNA (1)...(19): siRNA sense strand
gaacuggaugcauuacaac

SEQ ID NO: 1137324 - RNA, 19 nt, Homo sapiens
  misc_RNA (1)...(19): siRNA sense strand
agaugaccauguucaguuc

SEQ ID NO: 1137325 - RNA, 19 nt, Homo sapiens
  misc_RNA (1)...(19): siRNA sense strand
aaccagacaguugauauuu

SEQ ID NO: 1137326 - RNA, 19 nt, Homo sapiens
  misc_RNA (1)...(19): siRNA sense strand
accagacaguugauauuug

SEQ ID NO: 1137327 - RNA, 19 nt, Homo sapiens
  misc_RNA (1)...(19): siRNA sense strand
ugugaaaugucagaagcuu

SEQ ID NO: 1137328 - RNA, 19 nt, Homo sapiens
  misc_RNA (1)...(19): siRNA sense strand
caggcuacguggccacuag

SEQ ID NO: 1137329 - RNA, 19 nt, Homo sapiens
  misc_RNA (1)...(19): siRNA sense strand
uauacauucagcugacaua

SEQ ID NO: 1137330 - RNA, 19 nt, Homo sapiens
  misc_RNA (1)...(19): siRNA sense strand
uuacagaugaccauguuca

SEQ ID NO: 1137331 - RNA, 19 nt, Homo sapiens
  misc_RNA (1)...(19): siRNA sense strand
ugaagacugugagcugaag

SEQ ID NO: 1137332 - RNA, 19 nt, Homo sapiens
  misc_RNA (1)...(19): siRNA sense strand
ugcgguuacuuaaacauau

SEQ ID NO: 1137333 - RNA, 19 nt, Homo sapiens
  misc_RNA (1)...(19): siRNA sense strand
ugcaaggucucuggaggaa

SEQ ID NO: 1137334 - RNA, 19 nt, Homo sapiens
  misc_RNA (1)...(19): siRNA sense strand
gguuacguguggcagugaa

SEQ ID NO: 1137335 - RNA, 19 nt, Homo sapiens
  misc_RNA (1)...(19): siRNA sense strand
aggagaggcccacguucua

SEQ ID NO: 1137336 - RNA, 19 nt, Homo sapiens
  misc_RNA (1)...(19): siRNA sense strand
gcauuacaaccagacaguu

SEQ ID NO: 1137337 - RNA, 19 nt, Homo sapiens
  misc_RNA (1)...(19): siRNA sense strand
ucaguuccuuaucuaccaa

SEQ ID NO: 1137338 - RNA, 19 nt, Homo sapiens
  misc_RNA (1)...(19): siRNA sense strand
cggcaggagcugaacaaga

SEQ ID NO: 1137339 - RNA, 19 nt, Homo sapiens
  misc_RNA (1)...(19): siRNA sense strand
aaaagaaccuacagagaac

SEQ ID NO: 1137340 - RNA, 19 nt, Homo sapiens
  misc_RNA (1)...(19): siRNA sense strand
gaagacugugagcugaaga

SEQ ID NO: 1137341 - RNA, 19 nt, Homo sapiens
  misc_RNA (1)...(19): siRNA sense strand
ccaaauucuccgaggucua

SEQ ID NO: 1137342 - RNA, 19 nt, Homo sapiens
  misc_RNA (1)...(19): siRNA sense strand
ggagaggcccacguucuac

SEQ ID NO: 1137343 - RNA, 19 nt, Homo sapiens
  misc_RNA (1)...(19): siRNA sense strand
ccagaccauuucaguccau

SEQ ID NO: 1137344 - RNA, 19 nt, Homo sapiens
  misc_RNA (1)...(19): siRNA sense strand
caguugauauuuggucagu

SEQ ID NO: 1137345 - RNA, 19 nt, Homo sapiens
  misc_RNA (1)...(19): siRNA sense strand
gcaaaucacugaaguacua

SEQ ID NO: 1137346 - RNA, 19 nt, Homo sapiens
  misc_RNA (1)...(19): siRNA sense strand
gaaaguguguucagaauca

SEQ ID NO: 1137347 - RNA, 19 nt, Homo sapiens
  misc_RNA (1)...(19): siRNA sense strand
gaacuuauuugguugaaug

SEQ ID NO: 1137348 - RNA, 19 nt, Homo sapiens
  misc_RNA (1)...(19): siRNA sense strand
ggaaagagaugauuugcau

SEQ ID NO: 1137349 - RNA, 19 nt, Homo sapiens
  misc_RNA (1)...(19): siRNA sense strand
ccaaagaagcuacugauua

SEQ ID NO: 1137350 - RNA, 19 nt, Homo sapiens
  misc_RNA (1)...(19): siRNA sense strand
gaaggacuaugaauuacaa

SEQ ID NO: 1137351 - RNA, 19 nt, Homo sapiens
  misc_RNA (1)...(19): siRNA sense strand
agacaaagcucaugauauc

SEQ ID NO: 1137352 - RNA, 19 nt, Homo sapiens
  misc_RNA (1)...(19): siRNA sense strand
cagcagaucucauuauuca

SEQ ID NO: 1137353 - RNA, 19 nt, Homo sapiens
  misc_RNA (1)...(19): siRNA sense strand
caaagaagcuacugauuac

SEQ ID NO: 1137354 - RNA, 19 nt, Homo sapiens
  misc_RNA (1)...(19): siRNA sense strand
gaacaugaaccaagucuau

SEQ ID NO: 1137355 - RNA, 19 nt, Homo sapiens
  misc_RNA (1)...(19): siRNA sense strand
caagaggaaucaguuuaua

SEQ ID NO: 1137356 - RNA, 19 nt, Homo sapiens
  misc_RNA (1)...(19): siRNA sense strand
caaaugacagcaccucuua

SEQ ID NO: 1137357 - RNA, 19 nt, Homo sapiens
  misc_RNA (1)...(19): siRNA sense strand
caaagacgaugaauguguu

SEQ ID NO: 1137358 - RNA, 19 nt, Homo sapiens
  misc_RNA (1)...(19): siRNA sense strand
uaaauuugcuggugauuca

SEQ ID NO: 1137359 - RNA, 19 nt, Homo sapiens
  misc_RNA (1)...(19): siRNA sense strand
agaaauugcuggguauaua

SEQ ID NO: 1137360 - RNA, 19 nt, Homo sapiens
  misc_RNA (1)...(19): siRNA sense strand
aggaaucacucaaaguuua

SEQ ID NO: 1137361 - RNA, 19 nt, Homo sapiens
  misc_RNA (1)...(19): siRNA sense strand
gaacagacaaagcucauga

SEQ ID NO: 1137362 - RNA, 19 nt, Homo sapiens
  misc_RNA (1)...(19): siRNA sense strand
gguauauacuugaauguga

SEQ ID NO: 1137363 - RNA, 19 nt, Homo sapiens
  misc_RNA (1)...(19): siRNA sense strand
uaaaucaguucaggagaua

SEQ ID NO: 1137364 - RNA, 19 nt, Homo sapiens
  misc_RNA (1)...(19): siRNA sense strand
gaauuugaaucuagucuca

SEQ ID NO: 1137365 - RNA, 19 nt, Homo sapiens
  misc_RNA (1)...(19): siRNA sense strand
gaaauuauggccuuaagga

SEQ ID NO: 1137366 - RNA, 19 nt, Homo sapiens
  misc_RNA (1)...(19): siRNA sense strand
ccaggcagaucaauuggua

SEQ ID NO: 1137367 - RNA, 19 nt, Homo sapiens
  misc_RNA (1)...(19): siRNA sense strand
aaacuaaacugugugaaga

SEQ ID NO: 1137368 - RNA, 19 nt, Homo sapiens
  misc_RNA (1)...(19): siRNA sense strand
caauguggcuucaauaaag

SEQ ID NO: 1137369 - RNA, 19 nt, Homo sapiens
  misc_RNA (1)...(19): siRNA sense strand
uaaacugacuuaugcagaa

SEQ ID NO: 1137370 - RNA, 19 nt, Homo sapiens
  misc_RNA (1)...(19): siRNA sense strand
agaagcuacugauuacuua

SEQ ID NO: 1137371 - RNA, 19 nt, Homo sapiens
  misc_RNA (1)...(19): siRNA sense strand
gcagaacaguacucagcua

SEQ ID NO: 1137372 - RNA, 19 nt, Homo sapiens
  misc_RNA (1)...(19): siRNA sense strand
ugaagaagaagcaguuaua

SEQ ID NO: 1137373 - RNA, 19 nt, Homo sapiens
  misc_RNA (1)...(19): siRNA sense strand
uagcaaaccuaaugggaaa

SEQ ID NO: 1137374 - RNA, 19 nt, Homo sapiens
  misc_RNA (1)...(19): siRNA sense strand
gaguagagccaaauucauu

SEQ ID NO: 1137375 - RNA, 19 nt, Homo sapiens
  misc_RNA (1)...(19): siRNA sense strand
gaauugagcaacaguauca

SEQ ID NO: 1137376 - RNA, 19 nt, Homo sapiens
  misc_RNA (1)...(19): siRNA sense strand
caacugaagccaaggaauu

SEQ ID NO: 1137377 - RNA, 19 nt, Homo sapiens
  misc_RNA (1)...(19): siRNA sense strand
gaauuggguugaugagaug

SEQ ID NO: 1137378 - RNA, 19 nt, Homo sapiens
  misc_RNA (1)...(19): siRNA sense strand
ggagugcaguuucagaaug

SEQ ID NO: 1137379 - RNA, 19 nt, Homo sapiens
  misc_RNA (1)...(19): siRNA sense strand
caugguagauucacaacaa

SEQ ID NO: 1137380 - RNA, 19 nt, Homo sapiens
  misc_RNA (1)...(19): siRNA sense strand
gcaauggagaucugaagua

SEQ ID NO: 1137381 - RNA, 19 nt, Homo sapiens
  misc_RNA (1)...(19): siRNA sense strand
uaaacugugugaagaagaa

SEQ ID NO: 1137382 - RNA, 19 nt, Homo sapiens
  misc_RNA (1)...(19): siRNA sense strand
ccaggaaucccaagucuuu

SEQ ID NO: 1137383 - RNA, 19 nt, Homo sapiens
  misc_RNA (1)...(19): siRNA sense strand
ucccuaaccucuucuagua

SEQ ID NO: 1137384 - RNA, 19 nt, Homo sapiens
  misc_RNA (1)...(19): siRNA sense strand
gaacaggagaaacuaaaga

SEQ ID NO: 1137385 - RNA, 19 nt, Homo sapiens
  misc_RNA (1)...(19): siRNA sense strand
cagaauguccugacucuuu

SEQ ID NO: 1137386 - RNA, 19 nt, Homo sapiens
  misc_RNA (1)...(19): siRNA sense strand
gagcaacaguaucagaaug

SEQ ID NO: 1137387 - RNA, 19 nt, Homo sapiens
  misc_RNA (1)...(19): siRNA sense strand
caggauuaguuccaaauuu

SEQ ID NO: 1137388 - RNA, 19 nt, Homo sapiens
  misc_RNA (1)...(19): siRNA sense strand
gcagaucaauugguacaga

SEQ ID NO: 1137389 - RNA, 19 nt, Homo sapiens
  misc_RNA (1)...(19): siRNA sense strand
gaccuaaggacucgauaua

SEQ ID NO: 1137390 - RNA, 19 nt, Homo sapiens
  misc_RNA (1)...(19): siRNA sense strand
gcaauguggcuucaauaaa

SEQ ID NO: 1137391 - RNA, 19 nt, Homo sapiens
  misc_RNA (1)...(19): siRNA sense strand
ccaaauucauugcaaacuu

SEQ ID NO: 1137392 - RNA, 19 nt, Homo sapiens
  misc_RNA (1)...(19): siRNA sense strand
guacucagcuacagugaag

SEQ ID NO: 1137393 - RNA, 19 nt, Homo sapiens
  misc_RNA (1)...(19): siRNA sense strand
gcagauugacaacagguua

SEQ ID NO: 1137394 - RNA, 19 nt, Homo sapiens
  misc_RNA (1)...(19): siRNA sense strand
ugggaacaaucacaaauaa

SEQ ID NO: 1137395 - RNA, 19 nt, Homo sapiens
  misc_RNA (1)...(19): siRNA sense strand
gcaagaggaaucaguuuau

SEQ ID NO: 1137396 - RNA, 19 nt, Homo sapiens
  misc_RNA (1)...(19): siRNA sense strand
gagugcaguuucagaauga

SEQ ID NO: 1137397 - RNA, 19 nt, Homo sapiens
  misc_RNA (1)...(19): siRNA sense strand
gagcagcuacuucuagaaa

SEQ ID NO: 1137398 - RNA, 19 nt, Homo sapiens
  misc_RNA (1)...(19): siRNA sense strand
guacagauucuuauugaug

SEQ ID NO: 1137399 - RNA, 19 nt, Homo sapiens
  misc_RNA (1)...(19): siRNA sense strand
gaaccaagucuauucuaug

SEQ ID NO: 1137400 - RNA, 19 nt, Homo sapiens
  misc_RNA (1)...(19): siRNA sense strand
ggaacaaucacaaauaagu

SEQ ID NO: 1137401 - RNA, 19 nt, Homo sapiens
  misc_RNA (1)...(19): siRNA sense strand
ggaaucaguuuauaaucuc

SEQ ID NO: 1137402 - RNA, 19 nt, Homo sapiens
  misc_RNA (1)...(19): siRNA sense strand
gcaguauuaucaagaacuu

SEQ ID NO: 1137403 - RNA, 19 nt, Homo sapiens
  misc_RNA (1)...(19): siRNA sense strand
guugaaagccauuuagaaa

SEQ ID NO: 1137404 - RNA, 19 nt, Homo sapiens
  misc_RNA (1)...(19): siRNA sense strand
gcucagauuugccaagugu

SEQ ID NO: 1137405 - RNA, 19 nt, Homo sapiens
  misc_RNA (1)...(19): siRNA sense strand
gagccaaauucauugcaaa

SEQ ID NO: 1137406 - RNA, 19 nt, Homo sapiens
  misc_RNA (1)...(19): siRNA sense strand
gcaaaacucuugaauacau

SEQ ID NO: 1137407 - RNA, 19 nt, Homo sapiens
  misc_RNA (1)...(19): siRNA sense strand
gagaugauuugcaugaaag

SEQ ID NO: 1137408 - RNA, 19 nt, Homo sapiens
  misc_RNA (1)...(19): siRNA sense strand
uuacaaagacgaugaaugu

SEQ ID NO: 1137409 - RNA, 19 nt, Homo sapiens
  misc_RNA (1)...(19): siRNA sense strand
ugagagaacuugaucaaaa

SEQ ID NO: 1137410 - RNA, 19 nt, Homo sapiens
  misc_RNA (1)...(19): siRNA sense strand
gaaacuaaacugugugaag

SEQ ID NO: 1137411 - RNA, 19 nt, Homo sapiens
  misc_RNA (1)...(19): siRNA sense strand
ggaaucacucaaaguuuaa

SEQ ID NO: 1137412 - RNA, 19 nt, Homo sapiens
  misc_RNA (1)...(19): siRNA sense strand
gaacaguacucagcuacag

SEQ ID NO: 1137413 - RNA, 19 nt, Homo sapiens
  misc_RNA (1)...(19): siRNA sense strand
gaacaaucacaaauaagug

SEQ ID NO: 1137414 - RNA, 19 nt, Homo sapiens
  misc_RNA (1)...(19): siRNA sense strand
gaaguacagcugugauaga

SEQ ID NO: 1137415 - RNA, 19 nt, Homo sapiens
  misc_RNA (1)...(19): siRNA sense strand
gcuuaugacuggagugaga

SEQ ID NO: 1137416 - RNA, 19 nt, Homo sapiens
  misc_RNA (1)...(19): siRNA sense strand
gacagcaccucuuaaacug

SEQ ID NO: 1137417 - RNA, 19 nt, Homo sapiens
  misc_RNA (1)...(19): siRNA sense strand
gggcugacccagaguuuaa

SEQ ID NO: 1137418 - RNA, 19 nt, Homo sapiens
  misc_RNA (1)...(19): siRNA sense strand
gaaaaccccuucuaaaguc

SEQ ID NO: 1137419 - RNA, 19 nt, Homo sapiens
  misc_RNA (1)...(19): siRNA sense strand
agugaaggacuaugaauua

SEQ ID NO: 1137420 - RNA, 19 nt, Homo sapiens
  misc_RNA (1)...(19): siRNA sense strand
gaaacuacucagagaaaga

SEQ ID NO: 1137421 - RNA, 19 nt, Homo sapiens
  misc_RNA (1)...(19): siRNA sense strand
uggaacgacuuaaagauga

SEQ ID NO: 1137422 - RNA, 19 nt, Homo sapiens
  misc_RNA (1)...(19): siRNA sense strand
cuacaucucugaaguucga

SEQ ID NO: 1137423 - RNA, 19 nt, Homo sapiens
  misc_RNA (1)...(19): siRNA sense strand
gagagaaacaccaacauag

SEQ ID NO: 1137424 - RNA, 19 nt, Homo sapiens
  misc_RNA (1)...(19): siRNA sense strand
ugaauuggguugaugagau

SEQ ID NO: 1137425 - RNA, 19 nt, Homo sapiens
  misc_RNA (1)...(19): siRNA sense strand
gaaauuuguucaggaucuu

SEQ ID NO: 1137426 - RNA, 19 nt, Homo sapiens
  misc_RNA (1)...(19): siRNA sense strand
aaauuucaguucaggagua

SEQ ID NO: 1137427 - RNA, 19 nt, Homo sapiens
  misc_RNA (1)...(19): siRNA sense strand
caaauaagugugaggaguu

SEQ ID NO: 1137428 - RNA, 19 nt, Homo sapiens
  misc_RNA (1)...(19): siRNA sense strand
uaacacaacuggaaaagga

SEQ ID NO: 1137429 - RNA, 19 nt, Homo sapiens
  misc_RNA (1)...(19): siRNA sense strand
gagauaaccauuuacaaag

SEQ ID NO: 1137430 - RNA, 19 nt, Homo sapiens
  misc_RNA (1)...(19): siRNA sense strand
ucaaagcuaucugugacua

SEQ ID NO: 1137431 - RNA, 19 nt, Homo sapiens
  misc_RNA (1)...(19): siRNA sense strand
aaacuucuauuccgaucaa

SEQ ID NO: 1137432 - RNA, 19 nt, Homo sapiens
  misc_RNA (1)...(19): siRNA sense strand
ugagagaaacaccaacaua

SEQ ID NO: 1137433 - RNA, 19 nt, Homo sapiens
  misc_RNA (1)...(19): siRNA sense strand
caaagaagcuaaaaucagu

SEQ ID NO: 1137434 - RNA, 19 nt, Homo sapiens
  misc_RNA (1)...(19): siRNA sense strand
aggaggaaguugcuuauga

SEQ ID NO: 1137435 - RNA, 19 nt, Homo sapiens
  misc_RNA (1)...(19): siRNA sense strand
aggagaaacuaaagaaaga

SEQ ID NO: 1137436 - RNA, 19 nt, Homo sapiens
  misc_RNA (1)...(19): siRNA sense strand
gaagaucggcugauuagac

SEQ ID NO: 1137437 - RNA, 19 nt, Homo sapiens
  misc_RNA (1)...(19): siRNA sense strand
gauauaacacaacuggaaa

SEQ ID NO: 1137438 - RNA, 19 nt, Homo sapiens
  misc_RNA (1)...(19): siRNA sense strand
guacagcaaaggacgcaua

SEQ ID NO: 1137439 - RNA, 19 nt, Homo sapiens
  misc_RNA (1)...(19): siRNA sense strand
gaggaugaguugcagaaag

SEQ ID NO: 1137440 - RNA, 19 nt, Homo sapiens
  misc_RNA (1)...(19): siRNA sense strand
caauggagaucugaaguag

SEQ ID NO: 1137441 - RNA, 19 nt, Homo sapiens
  misc_RNA (1)...(19): siRNA sense strand
ugaaccaagucuauucuau

SEQ ID NO: 1137442 - RNA, 19 nt, Homo sapiens
  misc_RNA (1)...(19): siRNA sense strand
cuacagacaaauugagaua

SEQ ID NO: 1137443 - RNA, 19 nt, Homo sapiens
  misc_RNA (1)...(19): siRNA sense strand
gcaguggagcuggaucuua

SEQ ID NO: 1137444 - RNA, 19 nt, Homo sapiens
  misc_RNA (1)...(19): siRNA sense strand
ucacucucaugacacaaua

SEQ ID NO: 1137445 - RNA, 19 nt, Homo sapiens
  misc_RNA (1)...(19): siRNA sense strand
gcaaaucacugaaguacua

SEQ ID NO: 1137446 - RNA, 19 nt, Homo sapiens
  misc_RNA (1)...(19): siRNA sense strand
gaaaguguguucagaauca

SEQ ID NO: 1137447 - RNA, 19 nt, Homo sapiens
  misc_RNA (1)...(19): siRNA sense strand
gaacuuauuugguugaaug

SEQ ID NO: 1137448 - RNA, 19 nt, Homo sapiens
  misc_RNA (1)...(19): siRNA sense strand
ggaaagagaugauuugcau

SEQ ID NO: 1137449 - RNA, 19 nt, Homo sapiens
  misc_RNA (1)...(19): siRNA sense strand
ccaaagaagcuacugauua

SEQ ID NO: 1137450 - RNA, 19 nt, Homo sapiens
  misc_RNA (1)...(19): siRNA sense strand
gaaggacuaugaauuacaa

SEQ ID NO: 1137451 - RNA, 19 nt, Homo sapiens
  misc_RNA (1)...(19): siRNA sense strand
agacaaagcucaugauauc

SEQ ID NO: 1137452 - RNA, 19 nt, Homo sapiens
  misc_RNA (1)...(19): siRNA sense strand
cagcagaucucauuauuca

SEQ ID NO: 1137453 - RNA, 19 nt, Homo sapiens
  misc_RNA (1)...(19): siRNA sense strand
caaagaagcuacugauuac

SEQ ID NO: 1137454 - RNA, 19 nt, Homo sapiens
  misc_RNA (1)...(19): siRNA sense strand
gaacaugaaccaagucuau

SEQ ID NO: 1137455 - RNA, 19 nt, Homo sapiens
  misc_RNA (1)...(19): siRNA sense strand
caagaggaaucaguuuaua

SEQ ID NO: 1137456 - RNA, 19 nt, Homo sapiens
  misc_RNA (1)...(19): siRNA sense strand
caaaugacagcaccucuua

SEQ ID NO: 1137457 - RNA, 19 nt, Homo sapiens
  misc_RNA (1)...(19): siRNA sense strand
caaagacgaugaauguguu

SEQ ID NO: 1137458 - RNA, 19 nt, Homo sapiens
  misc_RNA (1)...(19): siRNA sense strand
uaaauuugcuggugauuca

SEQ ID NO: 1137459 - RNA, 19 nt, Homo sapiens
  misc_RNA (1)...(19): siRNA sense strand
agaaauugcuggguauaua

SEQ ID NO: 1137460 - RNA, 19 nt, Homo sapiens
  misc_RNA (1)...(19): siRNA sense strand
aggaaucacucaaaguuua

SEQ ID NO: 1137461 - RNA, 19 nt, Homo sapiens
  misc_RNA (1)...(19): siRNA sense strand
gaacagacaaagcucauga

SEQ ID NO: 1137462 - RNA, 19 nt, Homo sapiens
  misc_RNA (1)...(19): siRNA sense strand
gguauauacuugaauguga

SEQ ID NO: 1137463 - RNA, 19 nt, Homo sapiens
  misc_RNA (1)...(19): siRNA sense strand
uaaaucaguucaggagaua

SEQ ID NO: 1137464 - RNA, 19 nt, Homo sapiens
  misc_RNA (1)...(19): siRNA sense strand
gaauuugaaucuagucuca

SEQ ID NO: 1137465 - RNA, 19 nt, Homo sapiens
  misc_RNA (1)...(19): siRNA sense strand
gaaauuauggccuuaagga

SEQ ID NO: 1137466 - RNA, 19 nt, Homo sapiens
  misc_RNA (1)...(19): siRNA sense strand
ccaggcagaucaauuggua

SEQ ID NO: 1137467 - RNA, 19 nt, Homo sapiens
  misc_RNA (1)...(19): siRNA sense strand
aaacuaaacugugugaaga

SEQ ID NO: 1137468 - RNA, 19 nt, Homo sapiens
  misc_RNA (1)...(19): siRNA sense strand
caauguggcuucaauaaag

SEQ ID NO: 1137469 - RNA, 19 nt, Homo sapiens
  misc_RNA (1)...(19): siRNA sense strand
uaaacugacuuaugcagaa

SEQ ID NO: 1137470 - RNA, 19 nt, Homo sapiens
  misc_RNA (1)...(19): siRNA sense strand
agaagcuacugauuacuua

SEQ ID NO: 1137471 - RNA, 19 nt, Homo sapiens
  misc_RNA (1)...(19): siRNA sense strand
gcagaacaguacucagcua

SEQ ID NO: 1137472 - RNA, 19 nt, Homo sapiens
  misc_RNA (1)...(19): siRNA sense strand
ugaagaagaagcaguuaua

SEQ ID NO: 1137473 - RNA, 19 nt, Homo sapiens
  misc_RNA (1)...(19): siRNA sense strand
uagcaaaccuaaugggaaa

SEQ ID NO: 1137474 - RNA, 19 nt, Homo sapiens
  misc_RNA (1)...(19): siRNA sense strand
gaguagagccaaauucauu

SEQ ID NO: 1137475 - RNA, 19 nt, Homo sapiens
  misc_RNA (1)...(19): siRNA sense strand
gaauugagcaacaguauca

SEQ ID NO: 1137476 - RNA, 19 nt, Homo sapiens
  misc_RNA (1)...(19): siRNA sense strand
caacugaagccaaggaauu

SEQ ID NO: 1137477 - RNA, 19 nt, Homo sapiens
  misc_RNA (1)...(19): siRNA sense strand
gaauuggguugaugagaug

SEQ ID NO: 1137478 - RNA, 19 nt, Homo sapiens
  misc_RNA (1)...(19): siRNA sense strand
ggagugcaguuucagaaug

SEQ ID NO: 1137479 - RNA, 19 nt, Homo sapiens
  misc_RNA (1)...(19): siRNA sense strand
caugguagauucacaacaa

SEQ ID NO: 1137480 - RNA, 19 nt, Homo sapiens
  misc_RNA (1)...(19): siRNA sense strand
gcaauggagaucugaagua

SEQ ID NO: 1137481 - RNA, 19 nt, Homo sapiens
  misc_RNA (1)...(19): siRNA sense strand
uaaacugugugaagaagaa

SEQ ID NO: 1137482 - RNA, 19 nt, Homo sapiens
  misc_RNA (1)...(19): siRNA sense strand
ccaggaaucccaagucuuu

SEQ ID NO: 1137483 - RNA, 19 nt, Homo sapiens
  misc_RNA (1)...(19): siRNA sense strand
ucccuaaccucuucuagua

SEQ ID NO: 1137484 - RNA, 19 nt, Homo sapiens
  misc_RNA (1)...(19): siRNA sense strand
gaacaggagaaacuaaaga

SEQ ID NO: 1137485 - RNA, 19 nt, Homo sapiens
  misc_RNA (1)...(19): siRNA sense strand
cagaauguccugacucuuu

SEQ ID NO: 1137486 - RNA, 19 nt, Homo sapiens
  misc_RNA (1)...(19): siRNA sense strand
gagcaacaguaucagaaug

SEQ ID NO: 1137487 - RNA, 19 nt, Homo sapiens
  misc_RNA (1)...(19): siRNA sense strand
caggauuaguuccaaauuu

SEQ ID NO: 1137488 - RNA, 19 nt, Homo sapiens
  misc_RNA (1)...(19): siRNA sense strand
gcagaucaauugguacaga

SEQ ID NO: 1137489 - RNA, 19 nt, Homo sapiens
  misc_RNA (1)...(19): siRNA sense strand
gaccuaaggacucgauaua

SEQ ID NO: 1137490 - RNA, 19 nt, Homo sapiens
  misc_RNA (1)...(19): siRNA sense strand
gcaauguggcuucaauaaa

SEQ ID NO: 1137491 - RNA, 19 nt, Homo sapiens
  misc_RNA (1)...(19): siRNA sense strand
ccaaauucauugcaaacuu

SEQ ID NO: 1137492 - RNA, 19 nt, Homo sapiens
  misc_RNA (1)...(19): siRNA sense strand
guacucagcuacagugaag

SEQ ID NO: 1137493 - RNA, 19 nt, Homo sapiens
  misc_RNA (1)...(19): siRNA sense strand
gcagauugacaacagguua

SEQ ID NO: 1137494 - RNA, 19 nt, Homo sapiens
  misc_RNA (1)...(19): siRNA sense strand
ugggaacaaucacaaauaa

SEQ ID NO: 1137495 - RNA, 19 nt, Homo sapiens
  misc_RNA (1)...(19): siRNA sense strand
gcaagaggaaucaguuuau

SEQ ID NO: 1137496 - RNA, 19 nt, Homo sapiens
  misc_RNA (1)...(19): siRNA sense strand
gagugcaguuucagaauga

SEQ ID NO: 1137497 - RNA, 19 nt, Homo sapiens
  misc_RNA (1)...(19): siRNA sense strand
gagcagcuacuucuagaaa

SEQ ID NO: 1137498 - RNA, 19 nt, Homo sapiens
  misc_RNA (1)...(19): siRNA sense strand
guacagauucuuauugaug

SEQ ID NO: 1137499 - RNA, 19 nt, Homo sapiens
  misc_RNA (1)...(19): siRNA sense strand
gaaccaagucuauucuaug

SEQ ID NO: 1137500 - RNA, 19 nt, Homo sapiens
  misc_RNA (1)...(19): siRNA sense strand
ggaacaaucacaaauaagu

SEQ ID NO: 1137501 - RNA, 19 nt, Homo sapiens
  misc_RNA (1)...(19): siRNA sense strand
ggaaucaguuuauaaucuc

SEQ ID NO: 1137502 - RNA, 19 nt, Homo sapiens
  misc_RNA (1)...(19): siRNA sense strand
gcaguauuaucaagaacuu

SEQ ID NO: 1137503 - RNA, 19 nt, Homo sapiens
  misc_RNA (1)...(19): siRNA sense strand
guugaaagccauuuagaaa

SEQ ID NO: 1137504 - RNA, 19 nt, Homo sapiens
  misc_RNA (1)...(19): siRNA sense strand
gcucagauuugccaagugu

SEQ ID NO: 1137505 - RNA, 19 nt, Homo sapiens
  misc_RNA (1)...(19): siRNA sense strand
gagccaaauucauugcaaa

SEQ ID NO: 1137506 - RNA, 19 nt, Homo sapiens
  misc_RNA (1)...(19): siRNA sense strand
gcaaaacucuugaauacau

SEQ ID NO: 1137507 - RNA, 19 nt, Homo sapiens
  misc_RNA (1)...(19): siRNA sense strand
gagaugauuugcaugaaag

SEQ ID NO: 1137508 - RNA, 19 nt, Homo sapiens
  misc_RNA (1)...(19): siRNA sense strand
uuacaaagacgaugaaugu

SEQ ID NO: 1137509 - RNA, 19 nt, Homo sapiens
  misc_RNA (1)...(19): siRNA sense strand
ugagagaacuugaucaaaa

SEQ ID NO: 1137510 - RNA, 19 nt, Homo sapiens
  misc_RNA (1)...(19): siRNA sense strand
gaaacuaaacugugugaag

SEQ ID NO: 1137511 - RNA, 19 nt, Homo sapiens
  misc_RNA (1)...(19): siRNA sense strand
ggaaucacucaaaguuuaa

SEQ ID NO: 1137512 - RNA, 19 nt, Homo sapiens
  misc_RNA (1)...(19): siRNA sense strand
gaacaguacucagcuacag

SEQ ID NO: 1137513 - RNA, 19 nt, Homo sapiens
  misc_RNA (1)...(19): siRNA sense strand
gaacaaucacaaauaagug

SEQ ID NO: 1137514 - RNA, 19 nt, Homo sapiens
  misc_RNA (1)...(19): siRNA sense strand
gaaguacagcugugauaga

SEQ ID NO: 1137515 - RNA, 19 nt, Homo sapiens
  misc_RNA (1)...(19): siRNA sense strand
gcuuaugacuggagugaga

SEQ ID NO: 1137516 - RNA, 19 nt, Homo sapiens
  misc_RNA (1)...(19): siRNA sense strand
gacagcaccucuuaaacug

SEQ ID NO: 1137517 - RNA, 19 nt, Homo sapiens
  misc_RNA (1)...(19): siRNA sense strand
gggcugacccagaguuuaa

SEQ ID NO: 1137518 - RNA, 19 nt, Homo sapiens
  misc_RNA (1)...(19): siRNA sense strand
gaaaaccccuucuaaaguc

SEQ ID NO: 1137519 - RNA, 19 nt, Homo sapiens
  misc_RNA (1)...(19): siRNA sense strand
agugaaggacuaugaauua

SEQ ID NO: 1137520 - RNA, 19 nt, Homo sapiens
  misc_RNA (1)...(19): siRNA sense strand
gaaacuacucagagaaaga

SEQ ID NO: 1137521 - RNA, 19 nt, Homo sapiens
  misc_RNA (1)...(19): siRNA sense strand
uggaacgacuuaaagauga

SEQ ID NO: 1137522 - RNA, 19 nt, Homo sapiens
  misc_RNA (1)...(19): siRNA sense strand
cuacaucucugaaguucga

SEQ ID NO: 1137523 - RNA, 19 nt, Homo sapiens
  misc_RNA (1)...(19): siRNA sense strand
gagagaaacaccaacauag

SEQ ID NO: 1137524 - RNA, 19 nt, Homo sapiens
  misc_RNA (1)...(19): siRNA sense strand
ugaauuggguugaugagau

SEQ ID NO: 1137525 - RNA, 19 nt, Homo sapiens
  misc_RNA (1)...(19): siRNA sense strand
gaaauuuguucaggaucuu

SEQ ID NO: 1137526 - RNA, 19 nt, Homo sapiens
  misc_RNA (1)...(19): siRNA sense strand
aaauuucaguucaggagua

SEQ ID NO: 1137527 - RNA, 19 nt, Homo sapiens
  misc_RNA (1)...(19): siRNA sense strand
caaauaagugugaggaguu

SEQ ID NO: 1137528 - RNA, 19 nt, Homo sapiens
  misc_RNA (1)...(19): siRNA sense strand
uaacacaacuggaaaagga

SEQ ID NO: 1137529 - RNA, 19 nt, Homo sapiens
  misc_RNA (1)...(19): siRNA sense strand
gagauaaccauuuacaaag

SEQ ID NO: 1137530 - RNA, 19 nt, Homo sapiens
  misc_RNA (1)...(19): siRNA sense strand
ucaaagcuaucugugacua

SEQ ID NO: 1137531 - RNA, 19 nt, Homo sapiens
  misc_RNA (1)...(19): siRNA sense strand
aaacuucuauuccgaucaa

SEQ ID NO: 1137532 - RNA, 19 nt, Homo sapiens
  misc_RNA (1)...(19): siRNA sense strand
ugagagaaacaccaacaua

SEQ ID NO: 1137533 - RNA, 19 nt, Homo sapiens
  misc_RNA (1)...(19): siRNA sense strand
caaagaagcuaaaaucagu

SEQ ID NO: 1137534 - RNA, 19 nt, Homo sapiens
  misc_RNA (1)...(19): siRNA sense strand
aggaggaaguugcuuauga

SEQ ID NO: 1137535 - RNA, 19 nt, Homo sapiens
  misc_RNA (1)...(19): siRNA sense strand
aggagaaacuaaagaaaga

SEQ ID NO: 1137536 - RNA, 19 nt, Homo sapiens
  misc_RNA (1)...(19): siRNA sense strand
gaagaucggcugauuagac

SEQ ID NO: 1137537 - RNA, 19 nt, Homo sapiens
  misc_RNA (1)...(19): siRNA sense strand
gauauaacacaacuggaaa

SEQ ID NO: 1137538 - RNA, 19 nt, Homo sapiens
  misc_RNA (1)...(19): siRNA sense strand
guacagcaaaggacgcaua

SEQ ID NO: 1137539 - RNA, 19 nt, Homo sapiens
  misc_RNA (1)...(19): siRNA sense strand
gaggaugaguugcagaaag

SEQ ID NO: 1137540 - RNA, 19 nt, Homo sapiens
  misc_RNA (1)...(19): siRNA sense strand
caauggagaucugaaguag

SEQ ID NO: 1137541 - RNA, 19 nt, Homo sapiens
  misc_RNA (1)...(19): siRNA sense strand
ugaaccaagucuauucuau

SEQ ID NO: 1137542 - RNA, 19 nt, Homo sapiens
  misc_RNA (1)...(19): siRNA sense strand
cuacagacaaauugagaua

SEQ ID NO: 1137543 - RNA, 19 nt, Homo sapiens
  misc_RNA (1)...(19): siRNA sense strand
gcaguggagcuggaucuua

SEQ ID NO: 1137544 - RNA, 19 nt, Homo sapiens
  misc_RNA (1)...(19): siRNA sense strand
ucacucucaugacacaaua

SEQ ID NO: 1137545 - RNA, 19 nt, Homo sapiens
  misc_RNA (1)...(19): siRNA sense strand
gcaaaucacugaaguacua

SEQ ID NO: 1137546 - RNA, 19 nt, Homo sapiens
  misc_RNA (1)...(19): siRNA sense strand
gaaaguguguucagaauca

SEQ ID NO: 1137547 - RNA, 19 nt, Homo sapiens
  misc_RNA (1)...(19): siRNA sense strand
gaacuuauuugguugaaug

SEQ ID NO: 1137548 - RNA, 19 nt, Homo sapiens
  misc_RNA (1)...(19): siRNA sense strand
ggaaagagaugauuugcau

SEQ ID NO: 1137549 - RNA, 19 nt, Homo sapiens
  misc_RNA (1)...(19): siRNA sense strand
ccaaagaagcuacugauua

SEQ ID NO: 1137550 - RNA, 19 nt, Homo sapiens
  misc_RNA (1)...(19): siRNA sense strand
gaaggacuaugaauuacaa

SEQ ID NO: 1137551 - RNA, 19 nt, Homo sapiens
  misc_RNA (1)...(19): siRNA sense strand
agacaaagcucaugauauc

SEQ ID NO: 1137552 - RNA, 19 nt, Homo sapiens
  misc_RNA (1)...(19): siRNA sense strand
cagcagaucucauuauuca

SEQ ID NO: 1137553 - RNA, 19 nt, Homo sapiens
  misc_RNA (1)...(19): siRNA sense strand
caaagaagcuacugauuac

SEQ ID NO: 1137554 - RNA, 19 nt, Homo sapiens
  misc_RNA (1)...(19): siRNA sense strand
gaacaugaaccaagucuau

SEQ ID NO: 1137555 - RNA, 19 nt, Homo sapiens
  misc_RNA (1)...(19): siRNA sense strand
caagaggaaucaguuuaua

SEQ ID NO: 1137556 - RNA, 19 nt, Homo sapiens
  misc_RNA (1)...(19): siRNA sense strand
caaaugacagcaccucuua

SEQ ID NO: 1137557 - RNA, 19 nt, Homo sapiens
  misc_RNA (1)...(19): siRNA sense strand
caaagacgaugaauguguu

SEQ ID NO: 1137558 - RNA, 19 nt, Homo sapiens
  misc_RNA (1)...(19): siRNA sense strand
uaaauuugcuggugauuca

SEQ ID NO: 1137559 - RNA, 19 nt, Homo sapiens
  misc_RNA (1)...(19): siRNA sense strand
agaaauugcuggguauaua

SEQ ID NO: 1137560 - RNA, 19 nt, Homo sapiens
  misc_RNA (1)...(19): siRNA sense strand
aggaaucacucaaaguuua

SEQ ID NO: 1137561 - RNA, 19 nt, Homo sapiens
  misc_RNA (1)...(19): siRNA sense strand
gaacagacaaagcucauga

SEQ ID NO: 1137562 - RNA, 19 nt, Homo sapiens
  misc_RNA (1)...(19): siRNA sense strand
gguauauacuugaauguga

SEQ ID NO: 1137563 - RNA, 19 nt, Homo sapiens
  misc_RNA (1)...(19): siRNA sense strand
uaaaucaguucaggagaua

SEQ ID NO: 1137564 - RNA, 19 nt, Homo sapiens
  misc_RNA (1)...(19): siRNA sense strand
gaauuugaaucuagucuca

SEQ ID NO: 1137565 - RNA, 19 nt, Homo sapiens
  misc_RNA (1)...(19): siRNA sense strand
gaaauuauggccuuaagga

SEQ ID NO: 1137566 - RNA, 19 nt, Homo sapiens
  misc_RNA (1)...(19): siRNA sense strand
ccaggcagaucaauuggua

SEQ ID NO: 1137567 - RNA, 19 nt, Homo sapiens
  misc_RNA (1)...(19): siRNA sense strand
aaacuaaacugugugaaga

SEQ ID NO: 1137568 - RNA, 19 nt, Homo sapiens
  misc_RNA (1)...(19): siRNA sense strand
caauguggcuucaauaaag

SEQ ID NO: 1137569 - RNA, 19 nt, Homo sapiens
  misc_RNA (1)...(19): siRNA sense strand
uaaacugacuuaugcagaa

SEQ ID NO: 1137570 - RNA, 19 nt, Homo sapiens
  misc_RNA (1)...(19): siRNA sense strand
agaagcuacugauuacuua

SEQ ID NO: 1137571 - RNA, 19 nt, Homo sapiens
  misc_RNA (1)...(19): siRNA sense strand
gcagaacaguacucagcua

SEQ ID NO: 1137572 - RNA, 19 nt, Homo sapiens
  misc_RNA (1)...(19): siRNA sense strand
ugaagaagaagcaguuaua

SEQ ID NO: 1137573 - RNA, 19 nt, Homo sapiens
  misc_RNA (1)...(19): siRNA sense strand
uagcaaaccuaaugggaaa

SEQ ID NO: 1137574 - RNA, 19 nt, Homo sapiens
  misc_RNA (1)...(19): siRNA sense strand
gaguagagccaaauucauu

SEQ ID NO: 1137575 - RNA, 19 nt, Homo sapiens
  misc_RNA (1)...(19): siRNA sense strand
gaauugagcaacaguauca

SEQ ID NO: 1137576 - RNA, 19 nt, Homo sapiens
  misc_RNA (1)...(19): siRNA sense strand
caacugaagccaaggaauu

SEQ ID NO: 1137577 - RNA, 19 nt, Homo sapiens
  misc_RNA (1)...(19): siRNA sense strand
gaauuggguugaugagaug

SEQ ID NO: 1137578 - RNA, 19 nt, Homo sapiens
  misc_RNA (1)...(19): siRNA sense strand
ggagugcaguuucagaaug

SEQ ID NO: 1137579 - RNA, 19 nt, Homo sapiens
  misc_RNA (1)...(19): siRNA sense strand
caugguagauucacaacaa

SEQ ID NO: 1137580 - RNA, 19 nt, Homo sapiens
  misc_RNA (1)...(19): siRNA sense strand
gcaauggagaucugaagua

SEQ ID NO: 1137581 - RNA, 19 nt, Homo sapiens
  misc_RNA (1)...(19): siRNA sense strand
uaaacugugugaagaagaa

SEQ ID NO: 1137582 - RNA, 19 nt, Homo sapiens
  misc_RNA (1)...(19): siRNA sense strand
ccaggaaucccaagucuuu

SEQ ID NO: 1137583 - RNA, 19 nt, Homo sapiens
  misc_RNA (1)...(19): siRNA sense strand
ucccuaaccucuucuagua

SEQ ID NO: 1137584 - RNA, 19 nt, Homo sapiens
  misc_RNA (1)...(19): siRNA sense strand
gaacaggagaaacuaaaga

SEQ ID NO: 1137585 - RNA, 19 nt, Homo sapiens
  misc_RNA (1)...(19): siRNA sense strand
cagaauguccugacucuuu

SEQ ID NO: 1137586 - RNA, 19 nt, Homo sapiens
  misc_RNA (1)...(19): siRNA sense strand
gagcaacaguaucagaaug

SEQ ID NO: 1137587 - RNA, 19 nt, Homo sapiens
  misc_RNA (1)...(19): siRNA sense strand
caggauuaguuccaaauuu

SEQ ID NO: 1137588 - RNA, 19 nt, Homo sapiens
  misc_RNA (1)...(19): siRNA sense strand
gcagaucaauugguacaga

SEQ ID NO: 1137589 - RNA, 19 nt, Homo sapiens
  misc_RNA (1)...(19): siRNA sense strand
gaccuaaggacucgauaua

SEQ ID NO: 1137590 - RNA, 19 nt, Homo sapiens
  misc_RNA (1)...(19): siRNA sense strand
gcaauguggcuucaauaaa

SEQ ID NO: 1137591 - RNA, 19 nt, Homo sapiens
  misc_RNA (1)...(19): siRNA sense strand
ccaaauucauugcaaacuu

SEQ ID NO: 1137592 - RNA, 19 nt, Homo sapiens
  misc_RNA (1)...(19): siRNA sense strand
guacucagcuacagugaag

SEQ ID NO: 1137593 - RNA, 19 nt, Homo sapiens
  misc_RNA (1)...(19): siRNA sense strand
gcagauugacaacagguua

SEQ ID NO: 1137594 - RNA, 19 nt, Homo sapiens
  misc_RNA (1)...(19): siRNA sense strand
ugggaacaaucacaaauaa

SEQ ID NO: 1137595 - RNA, 19 nt, Homo sapiens
  misc_RNA (1)...(19): siRNA sense strand
gcaagaggaaucaguuuau

SEQ ID NO: 1137596 - RNA, 19 nt, Homo sapiens
  misc_RNA (1)...(19): siRNA sense strand
gagugcaguuucagaauga

SEQ ID NO: 1137597 - RNA, 19 nt, Homo sapiens
  misc_RNA (1)...(19): siRNA sense strand
gagcagcuacuucuagaaa

SEQ ID NO: 1137598 - RNA, 19 nt, Homo sapiens
  misc_RNA (1)...(19): siRNA sense strand
guacagauucuuauugaug

SEQ ID NO: 1137599 - RNA, 19 nt, Homo sapiens
  misc_RNA (1)...(19): siRNA sense strand
gaaccaagucuauucuaug

SEQ ID NO: 1137600 - RNA, 19 nt, Homo sapiens
  misc_RNA (1)...(19): siRNA sense strand
ggaacaaucacaaauaagu

SEQ ID NO: 1137601 - RNA, 19 nt, Homo sapiens
  misc_RNA (1)...(19): siRNA sense strand
ggaaucaguuuauaaucuc

SEQ ID NO: 1137602 - RNA, 19 nt, Homo sapiens
  misc_RNA (1)...(19): siRNA sense strand
gcaguauuaucaagaacuu

SEQ ID NO: 1137603 - RNA, 19 nt, Homo sapiens
  misc_RNA (1)...(19): siRNA sense strand
guugaaagccauuuagaaa

SEQ ID NO: 1137604 - RNA, 19 nt, Homo sapiens
  misc_RNA (1)...(19): siRNA sense strand
gcucagauuugccaagugu

SEQ ID NO: 1137605 - RNA, 19 nt, Homo sapiens
  misc_RNA (1)...(19): siRNA sense strand
gagccaaauucauugcaaa

SEQ ID NO: 1137606 - RNA, 19 nt, Homo sapiens
  misc_RNA (1)...(19): siRNA sense strand
gcaaaacucuugaauacau

SEQ ID NO: 1137607 - RNA, 19 nt, Homo sapiens
  misc_RNA (1)...(19): siRNA sense strand
gagaugauuugcaugaaag

SEQ ID NO: 1137608 - RNA, 19 nt, Homo sapiens
  misc_RNA (1)...(19): siRNA sense strand
uuacaaagacgaugaaugu

SEQ ID NO: 1137609 - RNA, 19 nt, Homo sapiens
  misc_RNA (1)...(19): siRNA sense strand
ugagagaacuugaucaaaa

SEQ ID NO: 1137610 - RNA, 19 nt, Homo sapiens
  misc_RNA (1)...(19): siRNA sense strand
gaaacuaaacugugugaag

SEQ ID NO: 1137611 - RNA, 19 nt, Homo sapiens
  misc_RNA (1)...(19): siRNA sense strand
ggaaucacucaaaguuuaa

SEQ ID NO: 1137612 - RNA, 19 nt, Homo sapiens
  misc_RNA (1)...(19): siRNA sense strand
gaacaguacucagcuacag

SEQ ID NO: 1137613 - RNA, 19 nt, Homo sapiens
  misc_RNA (1)...(19): siRNA sense strand
gaacaaucacaaauaagug

SEQ ID NO: 1137614 - RNA, 19 nt, Homo sapiens
  misc_RNA (1)...(19): siRNA sense strand
gaaguacagcugugauaga

SEQ ID NO: 1137615 - RNA, 19 nt, Homo sapiens
  misc_RNA (1)...(19): siRNA sense strand
gcuuaugacuggagugaga

SEQ ID NO: 1137616 - RNA, 19 nt, Homo sapiens
  misc_RNA (1)...(19): siRNA sense strand
gacagcaccucuuaaacug

SEQ ID NO: 1137617 - RNA, 19 nt, Homo sapiens
  misc_RNA (1)...(19): siRNA sense strand
gggcugacccagaguuuaa

SEQ ID NO: 1137618 - RNA, 19 nt, Homo sapiens
  misc_RNA (1)...(19): siRNA sense strand
gaaaaccccuucuaaaguc

SEQ ID NO: 1137619 - RNA, 19 nt, Homo sapiens
  misc_RNA (1)...(19): siRNA sense strand
agugaaggacuaugaauua

SEQ ID NO: 1137620 - RNA, 19 nt, Homo sapiens
  misc_RNA (1)...(19): siRNA sense strand
gaaacuacucagagaaaga

SEQ ID NO: 1137621 - RNA, 19 nt, Homo sapiens
  misc_RNA (1)...(19): siRNA sense strand
uggaacgacuuaaagauga

SEQ ID NO: 1137622 - RNA, 19 nt, Homo sapiens
  misc_RNA (1)...(19): siRNA sense strand
cuacaucucugaaguucga

SEQ ID NO: 1137623 - RNA, 19 nt, Homo sapiens
  misc_RNA (1)...(19): siRNA sense strand
gagagaaacaccaacauag

SEQ ID NO: 1137624 - RNA, 19 nt, Homo sapiens
  misc_RNA (1)...(19): siRNA sense strand
ugaauuggguugaugagau

SEQ ID NO: 1137625 - RNA, 19 nt, Homo sapiens
  misc_RNA (1)...(19): siRNA sense strand
gaaauuuguucaggaucuu

SEQ ID NO: 1137626 - RNA, 19 nt, Homo sapiens
  misc_RNA (1)...(19): siRNA sense strand
aaauuucaguucaggagua

SEQ ID NO: 1137627 - RNA, 19 nt, Homo sapiens
  misc_RNA (1)...(19): siRNA sense strand
caaauaagugugaggaguu

SEQ ID NO: 1137628 - RNA, 19 nt, Homo sapiens
  misc_RNA (1)...(19): siRNA sense strand
uaacacaacuggaaaagga

SEQ ID NO: 1137629 - RNA, 19 nt, Homo sapiens
  misc_RNA (1)...(19): siRNA sense strand
gagauaaccauuuacaaag

SEQ ID NO: 1137630 - RNA, 19 nt, Homo sapiens
  misc_RNA (1)...(19): siRNA sense strand
ucaaagcuaucugugacua

SEQ ID NO: 1137631 - RNA, 19 nt, Homo sapiens
  misc_RNA (1)...(19): siRNA sense strand
aaacuucuauuccgaucaa

SEQ ID NO: 1137632 - RNA, 19 nt, Homo sapiens
  misc_RNA (1)...(19): siRNA sense strand
ugagagaaacaccaacaua

SEQ ID NO: 1137633 - RNA, 19 nt, Homo sapiens
  misc_RNA (1)...(19): siRNA sense strand
caaagaagcuaaaaucagu

SEQ ID NO: 1137634 - RNA, 19 nt, Homo sapiens
  misc_RNA (1)...(19): siRNA sense strand
aggaggaaguugcuuauga

SEQ ID NO: 1137635 - RNA, 19 nt, Homo sapiens
  misc_RNA (1)...(19): siRNA sense strand
aggagaaacuaaagaaaga

SEQ ID NO: 1137636 - RNA, 19 nt, Homo sapiens
  misc_RNA (1)...(19): siRNA sense strand
gaagaucggcugauuagac

SEQ ID NO: 1137637 - RNA, 19 nt, Homo sapiens
  misc_RNA (1)...(19): siRNA sense strand
gauauaacacaacuggaaa

SEQ ID NO: 1137638 - RNA, 19 nt, Homo sapiens
  misc_RNA (1)...(19): siRNA sense strand
guacagcaaaggacgcaua

SEQ ID NO: 1137639 - RNA, 19 nt, Homo sapiens
  misc_RNA (1)...(19): siRNA sense strand
gaggaugaguugcagaaag

SEQ ID NO: 1137640 - RNA, 19 nt, Homo sapiens
  misc_RNA (1)...(19): siRNA sense strand
caauggagaucugaaguag

SEQ ID NO: 1137641 - RNA, 19 nt, Homo sapiens
  misc_RNA (1)...(19): siRNA sense strand
ugaaccaagucuauucuau

SEQ ID NO: 1137642 - RNA, 19 nt, Homo sapiens
  misc_RNA (1)...(19): siRNA sense strand
cuacagacaaauugagaua

SEQ ID NO: 1137643 - RNA, 19 nt, Homo sapiens
  misc_RNA (1)...(19): siRNA sense strand
gcaguggagcuggaucuua

SEQ ID NO: 1137644 - RNA, 19 nt, Homo sapiens
  misc_RNA (1)...(19): siRNA sense strand
ucacucucaugacacaaua

SEQ ID NO: 1137645 - RNA, 19 nt, Homo sapiens
  misc_RNA (1)...(19): siRNA sense strand
gcaaaucacugaaguacua

SEQ ID NO: 1137646 - RNA, 19 nt, Homo sapiens
  misc_RNA (1)...(19): siRNA sense strand
gaaaguguguucagaauca

SEQ ID NO: 1137647 - RNA, 19 nt, Homo sapiens
  misc_RNA (1)...(19): siRNA sense strand
gaacuuauuugguugaaug

SEQ ID NO: 1137648 - RNA, 19 nt, Homo sapiens
  misc_RNA (1)...(19): siRNA sense strand
ggaaagagaugauuugcau

SEQ ID NO: 1137649 - RNA, 19 nt, Homo sapiens
  misc_RNA (1)...(19): siRNA sense strand
ccaaagaagcuacugauua

SEQ ID NO: 1137650 - RNA, 19 nt, Homo sapiens
  misc_RNA (1)...(19): siRNA sense strand
gaaggacuaugaauuacaa

SEQ ID NO: 1137651 - RNA, 19 nt, Homo sapiens
  misc_RNA (1)...(19): siRNA sense strand
agacaaagcucaugauauc

SEQ ID NO: 1137652 - RNA, 19 nt, Homo sapiens
  misc_RNA (1)...(19): siRNA sense strand
cagcagaucucauuauuca

SEQ ID NO: 1137653 - RNA, 19 nt, Homo sapiens
  misc_RNA (1)...(19): siRNA sense strand
caaagaagcuacugauuac

SEQ ID NO: 1137654 - RNA, 19 nt, Homo sapiens
  misc_RNA (1)...(19): siRNA sense strand
gaacaugaaccaagucuau

SEQ ID NO: 1137655 - RNA, 19 nt, Homo sapiens
  misc_RNA (1)...(19): siRNA sense strand
caagaggaaucaguuuaua

SEQ ID NO: 1137656 - RNA, 19 nt, Homo sapiens
  misc_RNA (1)...(19): siRNA sense strand
caaaugacagcaccucuua

SEQ ID NO: 1137657 - RNA, 19 nt, Homo sapiens
  misc_RNA (1)...(19): siRNA sense strand
caaagacgaugaauguguu

SEQ ID NO: 1137658 - RNA, 19 nt, Homo sapiens
  misc_RNA (1)...(19): siRNA sense strand
uaaauuugcuggugauuca

SEQ ID NO: 1137659 - RNA, 19 nt, Homo sapiens
  misc_RNA (1)...(19): siRNA sense strand
agaaauugcuggguauaua

SEQ ID NO: 1137660 - RNA, 19 nt, Homo sapiens
  misc_RNA (1)...(19): siRNA sense strand
aggaaucacucaaaguuua

SEQ ID NO: 1137661 - RNA, 19 nt, Homo sapiens
  misc_RNA (1)...(19): siRNA sense strand
gaacagacaaagcucauga

SEQ ID NO: 1137662 - RNA, 19 nt, Homo sapiens
  misc_RNA (1)...(19): siRNA sense strand
gguauauacuugaauguga

SEQ ID NO: 1137663 - RNA, 19 nt, Homo sapiens
  misc_RNA (1)...(19): siRNA sense strand
uaaaucaguucaggagaua

SEQ ID NO: 1137664 - RNA, 19 nt, Homo sapiens
  misc_RNA (1)...(19): siRNA sense strand
gaauuugaaucuagucuca

SEQ ID NO: 1137665 - RNA, 19 nt, Homo sapiens
  misc_RNA (1)...(19): siRNA sense strand
gaaauuauggccuuaagga

SEQ ID NO: 1137666 - RNA, 19 nt, Homo sapiens
  misc_RNA (1)...(19): siRNA sense strand
ccaggcagaucaauuggua

SEQ ID NO: 1137667 - RNA, 19 nt, Homo sapiens
  misc_RNA (1)...(19): siRNA sense strand
aaacuaaacugugugaaga

SEQ ID NO: 1137668 - RNA, 19 nt, Homo sapiens
  misc_RNA (1)...(19): siRNA sense strand
caauguggcuucaauaaag

SEQ ID NO: 1137669 - RNA, 19 nt, Homo sapiens
  misc_RNA (1)...(19): siRNA sense strand
uaaacugacuuaugcagaa

SEQ ID NO: 1137670 - RNA, 19 nt, Homo sapiens
  misc_RNA (1)...(19): siRNA sense strand
agaagcuacugauuacuua

SEQ ID NO: 1137671 - RNA, 19 nt, Homo sapiens
  misc_RNA (1)...(19): siRNA sense strand
gcagaacaguacucagcua

SEQ ID NO: 1137672 - RNA, 19 nt, Homo sapiens
  misc_RNA (1)...(19): siRNA sense strand
ugaagaagaagcaguuaua

SEQ ID NO: 1137673 - RNA, 19 nt, Homo sapiens
  misc_RNA (1)...(19): siRNA sense strand
uagcaaaccuaaugggaaa

SEQ ID NO: 1137674 - RNA, 19 nt, Homo sapiens
  misc_RNA (1)...(19): siRNA sense strand
gaguagagccaaauucauu

SEQ ID NO: 1137675 - RNA, 19 nt, Homo sapiens
  misc_RNA (1)...(19): siRNA sense strand
gaauugagcaacaguauca

SEQ ID NO: 1137676 - RNA, 19 nt, Homo sapiens
  misc_RNA (1)...(19): siRNA sense strand
caacugaagccaaggaauu

SEQ ID NO: 1137677 - RNA, 19 nt, Homo sapiens
  misc_RNA (1)...(19): siRNA sense strand
gaauuggguugaugagaug

SEQ ID NO: 1137678 - RNA, 19 nt, Homo sapiens
  misc_RNA (1)...(19): siRNA sense strand
ggagugcaguuucagaaug

SEQ ID NO: 1137679 - RNA, 19 nt, Homo sapiens
  misc_RNA (1)...(19): siRNA sense strand
caugguagauucacaacaa

SEQ ID NO: 1137680 - RNA, 19 nt, Homo sapiens
  misc_RNA (1)...(19): siRNA sense strand
gcaauggagaucugaagua

SEQ ID NO: 1137681 - RNA, 19 nt, Homo sapiens
  misc_RNA (1)...(19): siRNA sense strand
uaaacugugugaagaagaa

SEQ ID NO: 1137682 - RNA, 19 nt, Homo sapiens
  misc_RNA (1)...(19): siRNA sense strand
ccaggaaucccaagucuuu

SEQ ID NO: 1137683 - RNA, 19 nt, Homo sapiens
  misc_RNA (1)...(19): siRNA sense strand
ucccuaaccucuucuagua

SEQ ID NO: 1137684 - RNA, 19 nt, Homo sapiens
  misc_RNA (1)...(19): siRNA sense strand
gaacaggagaaacuaaaga

SEQ ID NO: 1137685 - RNA, 19 nt, Homo sapiens
  misc_RNA (1)...(19): siRNA sense strand
cagaauguccugacucuuu

SEQ ID NO: 1137686 - RNA, 19 nt, Homo sapiens
  misc_RNA (1)...(19): siRNA sense strand
gagcaacaguaucagaaug

SEQ ID NO: 1137687 - RNA, 19 nt, Homo sapiens
  misc_RNA (1)...(19): siRNA sense strand
caggauuaguuccaaauuu

SEQ ID NO: 1137688 - RNA, 19 nt, Homo sapiens
  misc_RNA (1)...(19): siRNA sense strand
gcagaucaauugguacaga

SEQ ID NO: 1137689 - RNA, 19 nt, Homo sapiens
  misc_RNA (1)...(19): siRNA sense strand
gaccuaaggacucgauaua

SEQ ID NO: 1137690 - RNA, 19 nt, Homo sapiens
  misc_RNA (1)...(19): siRNA sense strand
gcaauguggcuucaauaaa

SEQ ID NO: 1137691 - RNA, 19 nt, Homo sapiens
  misc_RNA (1)...(19): siRNA sense strand
ccaaauucauugcaaacuu

SEQ ID NO: 1137692 - RNA, 19 nt, Homo sapiens
  misc_RNA (1)...(19): siRNA sense strand
guacucagcuacagugaag

SEQ ID NO: 1137693 - RNA, 19 nt, Homo sapiens
  misc_RNA (1)...(19): siRNA sense strand
gcagauugacaacagguua

SEQ ID NO: 1137694 - RNA, 19 nt, Homo sapiens
  misc_RNA (1)...(19): siRNA sense strand
ugggaacaaucacaaauaa

SEQ ID NO: 1137695 - RNA, 19 nt, Homo sapiens
  misc_RNA (1)...(19): siRNA sense strand
gcaagaggaaucaguuuau

SEQ ID NO: 1137696 - RNA, 19 nt, Homo sapiens
  misc_RNA (1)...(19): siRNA sense strand
gagugcaguuucagaauga

SEQ ID NO: 1137697 - RNA, 19 nt, Homo sapiens
  misc_RNA (1)...(19): siRNA sense strand
gagcagcuacuucuagaaa

SEQ ID NO: 1137698 - RNA, 19 nt, Homo sapiens
  misc_RNA (1)...(19): siRNA sense strand
guacagauucuuauugaug

SEQ ID NO: 1137699 - RNA, 19 nt, Homo sapiens
  misc_RNA (1)...(19): siRNA sense strand
gaaccaagucuauucuaug

SEQ ID NO: 1137700 - RNA, 19 nt, Homo sapiens
  misc_RNA (1)...(19): siRNA sense strand
ggaacaaucacaaauaagu

SEQ ID NO: 1137701 - RNA, 19 nt, Homo sapiens
  misc_RNA (1)...(19): siRNA sense strand
ggaaucaguuuauaaucuc

SEQ ID NO: 1137702 - RNA, 19 nt, Homo sapiens
  misc_RNA (1)...(19): siRNA sense strand
gcaguauuaucaagaacuu

SEQ ID NO: 1137703 - RNA, 19 nt, Homo sapiens
  misc_RNA (1)...(19): siRNA sense strand
guugaaagccauuuagaaa

SEQ ID NO: 1137704 - RNA, 19 nt, Homo sapiens
  misc_RNA (1)...(19): siRNA sense strand
gcucagauuugccaagugu

SEQ ID NO: 1137705 - RNA, 19 nt, Homo sapiens
  misc_RNA (1)...(19): siRNA sense strand
gagccaaauucauugcaaa

SEQ ID NO: 1137706 - RNA, 19 nt, Homo sapiens
  misc_RNA (1)...(19): siRNA sense strand
gcaaaacucuugaauacau

SEQ ID NO: 1137707 - RNA, 19 nt, Homo sapiens
  misc_RNA (1)...(19): siRNA sense strand
gagaugauuugcaugaaag

SEQ ID NO: 1137708 - RNA, 19 nt, Homo sapiens
  misc_RNA (1)...(19): siRNA sense strand
uuacaaagacgaugaaugu

SEQ ID NO: 1137709 - RNA, 19 nt, Homo sapiens
  misc_RNA (1)...(19): siRNA sense strand
ugagagaacuugaucaaaa

SEQ ID NO: 1137710 - RNA, 19 nt, Homo sapiens
  misc_RNA (1)...(19): siRNA sense strand
gaaacuaaacugugugaag

SEQ ID NO: 1137711 - RNA, 19 nt, Homo sapiens
  misc_RNA (1)...(19): siRNA sense strand
ggaaucacucaaaguuuaa

SEQ ID NO: 1137712 - RNA, 19 nt, Homo sapiens
  misc_RNA (1)...(19): siRNA sense strand
gaacaguacucagcuacag

SEQ ID NO: 1137713 - RNA, 19 nt, Homo sapiens
  misc_RNA (1)...(19): siRNA sense strand
gaacaaucacaaauaagug

SEQ ID NO: 1137714 - RNA, 19 nt, Homo sapiens
  misc_RNA (1)...(19): siRNA sense strand
gaaguacagcugugauaga

SEQ ID NO: 1137715 - RNA, 19 nt, Homo sapiens
  misc_RNA (1)...(19): siRNA sense strand
gcuuaugacuggagugaga

SEQ ID NO: 1137716 - RNA, 19 nt, Homo sapiens
  misc_RNA (1)...(19): siRNA sense strand
gacagcaccucuuaaacug

SEQ ID NO: 1137717 - RNA, 19 nt, Homo sapiens
  misc_RNA (1)...(19): siRNA sense strand
gggcugacccagaguuuaa

SEQ ID NO: 1137718 - RNA, 19 nt, Homo sapiens
  misc_RNA (1)...(19): siRNA sense strand
gaaaaccccuucuaaaguc

SEQ ID NO: 1137719 - RNA, 19 nt, Homo sapiens
  misc_RNA (1)...(19): siRNA sense strand
agugaaggacuaugaauua

SEQ ID NO: 1137720 - RNA, 19 nt, Homo sapiens
  misc_RNA (1)...(19): siRNA sense strand
gaaacuacucagagaaaga

SEQ ID NO: 1137721 - RNA, 19 nt, Homo sapiens
  misc_RNA (1)...(19): siRNA sense strand
uggaacgacuuaaagauga

SEQ ID NO: 1137722 - RNA, 19 nt, Homo sapiens
  misc_RNA (1)...(19): siRNA sense strand
cuacaucucugaaguucga

SEQ ID NO: 1137723 - RNA, 19 nt, Homo sapiens
  misc_RNA (1)...(19): siRNA sense strand
gagagaaacaccaacauag

SEQ ID NO: 1137724 - RNA, 19 nt, Homo sapiens
  misc_RNA (1)...(19): siRNA sense strand
ugaauuggguugaugagau

SEQ ID NO: 1137725 - RNA, 19 nt, Homo sapiens
  misc_RNA (1)...(19): siRNA sense strand
gaaauuuguucaggaucuu

SEQ ID NO: 1137726 - RNA, 19 nt, Homo sapiens
  misc_RNA (1)...(19): siRNA sense strand
aaauuucaguucaggagua

SEQ ID NO: 1137727 - RNA, 19 nt, Homo sapiens
  misc_RNA (1)...(19): siRNA sense strand
caaauaagugugaggaguu

SEQ ID NO: 1137728 - RNA, 19 nt, Homo sapiens
  misc_RNA (1)...(19): siRNA sense strand
uaacacaacuggaaaagga

SEQ ID NO: 1137729 - RNA, 19 nt, Homo sapiens
  misc_RNA (1)...(19): siRNA sense strand
gagauaaccauuuacaaag

SEQ ID NO: 1137730 - RNA, 19 nt, Homo sapiens
  misc_RNA (1)...(19): siRNA sense strand
ucaaagcuaucugugacua

SEQ ID NO: 1137731 - RNA, 19 nt, Homo sapiens
  misc_RNA (1)...(19): siRNA sense strand
aaacuucuauuccgaucaa

SEQ ID NO: 1137732 - RNA, 19 nt, Homo sapiens
  misc_RNA (1)...(19): siRNA sense strand
ugagagaaacaccaacaua

SEQ ID NO: 1137733 - RNA, 19 nt, Homo sapiens
  misc_RNA (1)...(19): siRNA sense strand
caaagaagcuaaaaucagu

SEQ ID NO: 1137734 - RNA, 19 nt, Homo sapiens
  misc_RNA (1)...(19): siRNA sense strand
aggaggaaguugcuuauga

SEQ ID NO: 1137735 - RNA, 19 nt, Homo sapiens
  misc_RNA (1)...(19): siRNA sense strand
aggagaaacuaaagaaaga

SEQ ID NO: 1137736 - RNA, 19 nt, Homo sapiens
  misc_RNA (1)...(19): siRNA sense strand
gaagaucggcugauuagac

SEQ ID NO: 1137737 - RNA, 19 nt, Homo sapiens
  misc_RNA (1)...(19): siRNA sense strand
gauauaacacaacuggaaa

SEQ ID NO: 1137738 - RNA, 19 nt, Homo sapiens
  misc_RNA (1)...(19): siRNA sense strand
guacagcaaaggacgcaua

SEQ ID NO: 1137739 - RNA, 19 nt, Homo sapiens
  misc_RNA (1)...(19): siRNA sense strand
gaggaugaguugcagaaag

SEQ ID NO: 1137740 - RNA, 19 nt, Homo sapiens
  misc_RNA (1)...(19): siRNA sense strand
caauggagaucugaaguag

SEQ ID NO: 1137741 - RNA, 19 nt, Homo sapiens
  misc_RNA (1)...(19): siRNA sense strand
ugaaccaagucuauucuau

SEQ ID NO: 1137742 - RNA, 19 nt, Homo sapiens
  misc_RNA (1)...(19): siRNA sense strand
cuacagacaaauugagaua

SEQ ID NO: 1137743 - RNA, 19 nt, Homo sapiens
  misc_RNA (1)...(19): siRNA sense strand
gcaguggagcuggaucuua

SEQ ID NO: 1137744 - RNA, 19 nt, Homo sapiens
  misc_RNA (1)...(19): siRNA sense strand
ucacucucaugacacaaua

SEQ ID NO: 1137745 - RNA, 19 nt, Homo sapiens
  misc_RNA (1)...(19): siRNA sense strand
ggacaaagagggauuauga

SEQ ID NO: 1137746 - RNA, 19 nt, Homo sapiens
  misc_RNA (1)...(19): siRNA sense strand
ggaacuaggucucagcuuu

SEQ ID NO: 1137747 - RNA, 19 nt, Homo sapiens
  misc_RNA (1)...(19): siRNA sense strand
gugcagagcuguaguauca

SEQ ID NO: 1137748 - RNA, 19 nt, Homo sapiens
  misc_RNA (1)...(19): siRNA sense strand
gaggagaccuggccaucua

SEQ ID NO: 1137749 - RNA, 19 nt, Homo sapiens
  misc_RNA (1)...(19): siRNA sense strand
gauacucccucucagcuaa

SEQ ID NO: 1137750 - RNA, 19 nt, Homo sapiens
  misc_RNA (1)...(19): siRNA sense strand
gaagauggacgguauuuca

SEQ ID NO: 1137751 - RNA, 19 nt, Homo sapiens
  misc_RNA (1)...(19): siRNA sense strand
gcagugagguuggcuguga

SEQ ID NO: 1137752 - RNA, 19 nt, Homo sapiens
  misc_RNA (1)...(19): siRNA sense strand
gcagagggacccacaguuu

SEQ ID NO: 1137753 - RNA, 19 nt, Homo sapiens
  misc_RNA (1)...(19): siRNA sense strand
cugcaaauauggauacuuu

SEQ ID NO: 1137754 - RNA, 19 nt, Homo sapiens
  misc_RNA (1)...(19): siRNA sense strand
uaccauagcaggacgauua

SEQ ID NO: 1137755 - RNA, 19 nt, Homo sapiens
  misc_RNA (1)...(19): siRNA sense strand
caagacauguacugaauuc

SEQ ID NO: 1137756 - RNA, 19 nt, Homo sapiens
  misc_RNA (1)...(19): siRNA sense strand
aaagagggauuaugacuuc

SEQ ID NO: 1137757 - RNA, 19 nt, Homo sapiens
  misc_RNA (1)...(19): siRNA sense strand
ggagagacguacagcaugu

SEQ ID NO: 1137758 - RNA, 19 nt, Homo sapiens
  misc_RNA (1)...(19): siRNA sense strand
ccagguaaauugaaagaau

SEQ ID NO: 1137759 - RNA, 19 nt, Homo sapiens
  misc_RNA (1)...(19): siRNA sense strand
gcagugcgcuccaucuaca

SEQ ID NO: 1137760 - RNA, 19 nt, Homo sapiens
  misc_RNA (1)...(19): siRNA sense strand
gaacgcuaaugacuggaaa

SEQ ID NO: 1137761 - RNA, 19 nt, Homo sapiens
  misc_RNA (1)...(19): siRNA sense strand
gauacuuucugaaugaaga

SEQ ID NO: 1137762 - RNA, 19 nt, Homo sapiens
  misc_RNA (1)...(19): siRNA sense strand
guacugaauuccauaacug

SEQ ID NO: 1137763 - RNA, 19 nt, Homo sapiens
  misc_RNA (1)...(19): siRNA sense strand
ggacaugguugaagcaaaa

SEQ ID NO: 1137764 - RNA, 19 nt, Homo sapiens
  misc_RNA (1)...(19): siRNA sense strand
ccaacaggcuauuugauca

SEQ ID NO: 1137765 - RNA, 19 nt, Homo sapiens
  misc_RNA (1)...(19): siRNA sense strand
gcagaaagcggaaagaaac

SEQ ID NO: 1137766 - RNA, 19 nt, Homo sapiens
  misc_RNA (1)...(19): siRNA sense strand
gcacagaccgacaaaucaa

SEQ ID NO: 1137767 - RNA, 19 nt, Homo sapiens
  misc_RNA (1)...(19): siRNA sense strand
ccacugcaaugacuguuug

SEQ ID NO: 1137768 - RNA, 19 nt, Homo sapiens
  misc_RNA (1)...(19): siRNA sense strand
gagcacagaccgacaaauc

SEQ ID NO: 1137769 - RNA, 19 nt, Homo sapiens
  misc_RNA (1)...(19): siRNA sense strand
guacggauucaucaacaua

SEQ ID NO: 1137770 - RNA, 19 nt, Homo sapiens
  misc_RNA (1)...(19): siRNA sense strand
ugacaugaauaucgaagga

SEQ ID NO: 1137771 - RNA, 19 nt, Homo sapiens
  misc_RNA (1)...(19): siRNA sense strand
gaccacugcuccugugaug

SEQ ID NO: 1137772 - RNA, 19 nt, Homo sapiens
  misc_RNA (1)...(19): siRNA sense strand
guggguaucucuuagacuu

SEQ ID NO: 1137773 - RNA, 19 nt, Homo sapiens
  misc_RNA (1)...(19): siRNA sense strand
gcuucaggcugcucggaua

SEQ ID NO: 1137774 - RNA, 19 nt, Homo sapiens
  misc_RNA (1)...(19): siRNA sense strand
gcaaggaugcaacggaaga

SEQ ID NO: 1137775 - RNA, 19 nt, Homo sapiens
  misc_RNA (1)...(19): siRNA sense strand
gcacagagggcuacuucau

SEQ ID NO: 1137776 - RNA, 19 nt, Homo sapiens
  misc_RNA (1)...(19): siRNA sense strand
gaccagaccacugcaauga

SEQ ID NO: 1137777 - RNA, 19 nt, Homo sapiens
  misc_RNA (1)...(19): siRNA sense strand
gcugaugggugcauuaacu

SEQ ID NO: 1137778 - RNA, 19 nt, Homo sapiens
  misc_RNA (1)...(19): siRNA sense strand
cgaaggagccuggaagaga

SEQ ID NO: 1137779 - RNA, 19 nt, Homo sapiens
  misc_RNA (1)...(19): siRNA sense strand
uguacaagcugcccuagug

SEQ ID NO: 1137780 - RNA, 19 nt, Homo sapiens
  misc_RNA (1)...(19): siRNA sense strand
gcaaauauggauacuuucu

SEQ ID NO: 1137781 - RNA, 19 nt, Homo sapiens
  misc_RNA (1)...(19): siRNA sense strand
aagaagcgcugcaggaagu

SEQ ID NO: 1137782 - RNA, 19 nt, Homo sapiens
  misc_RNA (1)...(19): siRNA sense strand
cauauucaccaaccaauga

SEQ ID NO: 1137783 - RNA, 19 nt, Homo sapiens
  misc_RNA (1)...(19): siRNA sense strand
cagguaaauugaaagaaug

SEQ ID NO: 1137784 - RNA, 19 nt, Homo sapiens
  misc_RNA (1)...(19): siRNA sense strand
cccagcacgugcacauuua

SEQ ID NO: 1137785 - RNA, 19 nt, Homo sapiens
  misc_RNA (1)...(19): siRNA sense strand
gcaagacauguacugaauu

SEQ ID NO: 1137786 - RNA, 19 nt, Homo sapiens
  misc_RNA (1)...(19): siRNA sense strand
gauccaacagcaaguggua

SEQ ID NO: 1137787 - RNA, 19 nt, Homo sapiens
  misc_RNA (1)...(19): siRNA sense strand
ccauaacuguacagaaugu

SEQ ID NO: 1137788 - RNA, 19 nt, Homo sapiens
  misc_RNA (1)...(19): siRNA sense strand
gcggaaagaaaccuuggua

SEQ ID NO: 1137789 - RNA, 19 nt, Homo sapiens
  misc_RNA (1)...(19): siRNA sense strand
caaagagggauuaugacuu

SEQ ID NO: 1137790 - RNA, 19 nt, Homo sapiens
  misc_RNA (1)...(19): siRNA sense strand
uuccauaacuguacagaau

SEQ ID NO: 1137791 - RNA, 19 nt, Homo sapiens
  misc_RNA (1)...(19): siRNA sense strand
ggaguccuacgauaagaaa

SEQ ID NO: 1137792 - RNA, 19 nt, Homo sapiens
  misc_RNA (1)...(19): siRNA sense strand
gaaagaaaccuugguaccu

SEQ ID NO: 1137793 - RNA, 19 nt, Homo sapiens
  misc_RNA (1)...(19): siRNA sense strand
aaccaaagguggaauggau

SEQ ID NO: 1137794 - RNA, 19 nt, Homo sapiens
  misc_RNA (1)...(19): siRNA sense strand
uuaggaaugugucaaaugg

SEQ ID NO: 1137795 - RNA, 19 nt, Homo sapiens
  misc_RNA (1)...(19): siRNA sense strand
gagcugaugggugcauuaa

SEQ ID NO: 1137796 - RNA, 19 nt, Homo sapiens
  misc_RNA (1)...(19): siRNA sense strand
ucaagacaauccgcccuaa

SEQ ID NO: 1137797 - RNA, 19 nt, Homo sapiens
  misc_RNA (1)...(19): siRNA sense strand
gagagaacccauccagauc

SEQ ID NO: 1137798 - RNA, 19 nt, Homo sapiens
  misc_RNA (1)...(19): siRNA sense strand
gacccacaguuucauuuca

SEQ ID NO: 1137799 - RNA, 19 nt, Homo sapiens
  misc_RNA (1)...(19): siRNA sense strand
ggacuacuaccacuucuac

SEQ ID NO: 1137800 - RNA, 19 nt, Homo sapiens
  misc_RNA (1)...(19): siRNA sense strand
ggagagcacagaccgacaa

SEQ ID NO: 1137801 - RNA, 19 nt, Homo sapiens
  misc_RNA (1)...(19): siRNA sense strand
gagaacccauccagaucug

SEQ ID NO: 1137802 - RNA, 19 nt, Homo sapiens
  misc_RNA (1)...(19): siRNA sense strand
ugagagaacccauccagau

SEQ ID NO: 1137803 - RNA, 19 nt, Homo sapiens
  misc_RNA (1)...(19): siRNA sense strand
ugcaagacauguacugaau

SEQ ID NO: 1137804 - RNA, 19 nt, Homo sapiens
  misc_RNA (1)...(19): siRNA sense strand
caacugugaguccugcuuu

SEQ ID NO: 1137805 - RNA, 19 nt, Homo sapiens
  misc_RNA (1)...(19): siRNA sense strand
caaccgccaugucaacuac

SEQ ID NO: 1137806 - RNA, 19 nt, Homo sapiens
  misc_RNA (1)...(19): siRNA sense strand
gaagccaauccguuucuga

SEQ ID NO: 1137807 - RNA, 19 nt, Homo sapiens
  misc_RNA (1)...(19): siRNA sense strand
acgaugcucuggcaaguug

SEQ ID NO: 1137808 - RNA, 19 nt, Homo sapiens
  misc_RNA (1)...(19): siRNA sense strand
ugugauaucaguuguuuga

SEQ ID NO: 1137809 - RNA, 19 nt, Homo sapiens
  misc_RNA (1)...(19): siRNA sense strand
guuacucacugcccugaug

SEQ ID NO: 1137810 - RNA, 19 nt, Homo sapiens
  misc_RNA (1)...(19): siRNA sense strand
cagcuaaggaacuuuaaga

SEQ ID NO: 1137811 - RNA, 19 nt, Homo sapiens
  misc_RNA (1)...(19): siRNA sense strand
caucaacauaggacagaua

SEQ ID NO: 1137812 - RNA, 19 nt, Homo sapiens
  misc_RNA (1)...(19): siRNA sense strand
gcaaguacggauucaucaa

SEQ ID NO: 1137813 - RNA, 19 nt, Homo sapiens
  misc_RNA (1)...(19): siRNA sense strand
gaacuaggucucagcuuuu

SEQ ID NO: 1137814 - RNA, 19 nt, Homo sapiens
  misc_RNA (1)...(19): siRNA sense strand
gaauguagggauggguuaa

SEQ ID NO: 1137815 - RNA, 19 nt, Homo sapiens
  misc_RNA (1)...(19): siRNA sense strand
gacauguacugaauuccau

SEQ ID NO: 1137816 - RNA, 19 nt, Homo sapiens
  misc_RNA (1)...(19): siRNA sense strand
uauggauacuuucugaaug

SEQ ID NO: 1137817 - RNA, 19 nt, Homo sapiens
  misc_RNA (1)...(19): siRNA sense strand
gggaguucaugaccauuca

SEQ ID NO: 1137818 - RNA, 19 nt, Homo sapiens
  misc_RNA (1)...(19): siRNA sense strand
uaaggugagccaucuuuau

SEQ ID NO: 1137819 - RNA, 19 nt, Homo sapiens
  misc_RNA (1)...(19): siRNA sense strand
ggagcugaugggugcauua

SEQ ID NO: 1137820 - RNA, 19 nt, Homo sapiens
  misc_RNA (1)...(19): siRNA sense strand
ugccggaaaugcagugaaa

SEQ ID NO: 1137821 - RNA, 19 nt, Homo sapiens
  misc_RNA (1)...(19): siRNA sense strand
auggauacuuucugaauga

SEQ ID NO: 1137822 - RNA, 19 nt, Homo sapiens
  misc_RNA (1)...(19): siRNA sense strand
gaacauuguggucacuauc

SEQ ID NO: 1137823 - RNA, 19 nt, Homo sapiens
  misc_RNA (1)...(19): siRNA sense strand
ucucuuagacuuaggaaug

SEQ ID NO: 1137824 - RNA, 19 nt, Homo sapiens
  misc_RNA (1)...(19): siRNA sense strand
ggaauggauccaacagcaa

SEQ ID NO: 1137825 - RNA, 19 nt, Homo sapiens
  misc_RNA (1)...(19): siRNA sense strand
ggugcucugucuccuguga

SEQ ID NO: 1137826 - RNA, 19 nt, Homo sapiens
  misc_RNA (1)...(19): siRNA sense strand
uacuaccacuucuaccaua

SEQ ID NO: 1137827 - RNA, 19 nt, Homo sapiens
  misc_RNA (1)...(19): siRNA sense strand
ggaccagaccacugcaaug

SEQ ID NO: 1137828 - RNA, 19 nt, Homo sapiens
  misc_RNA (1)...(19): siRNA sense strand
uaagacuccagguaaauug

SEQ ID NO: 1137829 - RNA, 19 nt, Homo sapiens
  misc_RNA (1)...(19): siRNA sense strand
cgggacauuugaacgcuaa

SEQ ID NO: 1137830 - RNA, 19 nt, Homo sapiens
  misc_RNA (1)...(19): siRNA sense strand
guacagcauguuauuguca

SEQ ID NO: 1137831 - RNA, 19 nt, Homo sapiens
  misc_RNA (1)...(19): siRNA sense strand
agacguacagcauguuauu

SEQ ID NO: 1137832 - RNA, 19 nt, Homo sapiens
  misc_RNA (1)...(19): siRNA sense strand
gcacagucggaauugcuuu

SEQ ID NO: 1137833 - RNA, 19 nt, Homo sapiens
  misc_RNA (1)...(19): siRNA sense strand
cccaaugccucguuaugau

SEQ ID NO: 1137834 - RNA, 19 nt, Homo sapiens
  misc_RNA (1)...(19): siRNA sense strand
acuggguccuugaaguuua

SEQ ID NO: 1137835 - RNA, 19 nt, Homo sapiens
  misc_RNA (1)...(19): siRNA sense strand
ugacuggguccuugaaguu

SEQ ID NO: 1137836 - RNA, 19 nt, Homo sapiens
  misc_RNA (1)...(19): siRNA sense strand
gaaagcggaaagaaaccuu

SEQ ID NO: 1137837 - RNA, 19 nt, Homo sapiens
  misc_RNA (1)...(19): siRNA sense strand
cagucuaccuauuucaaug

SEQ ID NO: 1137838 - RNA, 19 nt, Homo sapiens
  misc_RNA (1)...(19): siRNA sense strand
ccagaccacugcaaugacu

SEQ ID NO: 1137839 - RNA, 19 nt, Homo sapiens
  misc_RNA (1)...(19): siRNA sense strand
gacuccagguaaauugaaa

SEQ ID NO: 1137840 - RNA, 19 nt, Homo sapiens
  misc_RNA (1)...(19): siRNA sense strand
ccuggaagccaauccguuu

SEQ ID NO: 1137841 - RNA, 19 nt, Homo sapiens
  misc_RNA (1)...(19): siRNA sense strand
aaucaucacuacagaucug

SEQ ID NO: 1137842 - RNA, 19 nt, Homo sapiens
  misc_RNA (1)...(19): siRNA sense strand
gugcagccauauucaccaa

SEQ ID NO: 1137843 - RNA, 19 nt, Homo sapiens
  misc_RNA (1)...(19): siRNA sense strand
ucucagcuaaggaacuuua

SEQ ID NO: 1137844 - RNA, 19 nt, Homo sapiens
  misc_RNA (1)...(19): siRNA sense strand
gccaacaggcuauuugauc

SEQ ID NO: 1137845 - RNA, 19 nt, Homo sapiens
  misc_RNA (1)...(19): siRNA sense strand
ccacaggccucucuucaca

SEQ ID NO: 1137846 - RNA, 19 nt, Homo sapiens
  misc_RNA (1)...(19): siRNA sense strand
ggccgugucuucuuacuug

SEQ ID NO: 1137847 - RNA, 19 nt, Homo sapiens
  misc_RNA (1)...(19): siRNA sense strand
cacaggccgugucuucuua

SEQ ID NO: 1137848 - RNA, 19 nt, Homo sapiens
  misc_RNA (1)...(19): siRNA sense strand
agaguugucuucaggcuuu

SEQ ID NO: 1137849 - RNA, 19 nt, Homo sapiens
  misc_RNA (1)...(19): siRNA sense strand
accuggagcugccucauua

SEQ ID NO: 1137850 - RNA, 19 nt, Homo sapiens
  misc_RNA (1)...(19): siRNA sense strand
ggaguugccugaugguaac

SEQ ID NO: 1137851 - RNA, 19 nt, Homo sapiens
  misc_RNA (1)...(19): siRNA sense strand
gcagagcgagagaauaugu

SEQ ID NO: 1137852 - RNA, 19 nt, Homo sapiens
  misc_RNA (1)...(19): siRNA sense strand
gaccuggaguugccugaug

SEQ ID NO: 1137853 - RNA, 19 nt, Homo sapiens
  misc_RNA (1)...(19): siRNA sense strand
ucacauuucugacaguuac

SEQ ID NO: 1137854 - RNA, 19 nt, Homo sapiens
  misc_RNA (1)...(19): siRNA sense strand
acauuuggcugugauggua

SEQ ID NO: 1137855 - RNA, 19 nt, Homo sapiens
  misc_RNA (1)...(19): siRNA sense strand
gcaggacauuuggcuguga

SEQ ID NO: 1137856 - RNA, 19 nt, Homo sapiens
  misc_RNA (1)...(19): siRNA sense strand
gugaagauggucauucuga

SEQ ID NO: 1137857 - RNA, 19 nt, Homo sapiens
  misc_RNA (1)...(19): siRNA sense strand
uggcagagcgagagaauau

SEQ ID NO: 1137858 - RNA, 19 nt, Homo sapiens
  misc_RNA (1)...(19): siRNA sense strand
ggacgauggugaggagauc

SEQ ID NO: 1137859 - RNA, 19 nt, Homo sapiens
  misc_RNA (1)...(19): siRNA sense strand
caccauugcccaugagauu

SEQ ID NO: 1137860 - RNA, 19 nt, Homo sapiens
  misc_RNA (1)...(19): siRNA sense strand
gagucaccauugcccauga

SEQ ID NO: 1137861 - RNA, 19 nt, Homo sapiens
  misc_RNA (1)...(19): siRNA sense strand
gaugggacccgguguaugc

SEQ ID NO: 1137862 - RNA, 19 nt, Homo sapiens
  misc_RNA (1)...(19): siRNA sense strand
gauggacucccagcaggua

SEQ ID NO: 1137863 - RNA, 19 nt, Homo sapiens
  misc_RNA (1)...(19): siRNA sense strand
ccacaggccgugucuucuu

SEQ ID NO: 1137864 - RNA, 19 nt, Homo sapiens
  misc_RNA (1)...(19): siRNA sense strand
ccugaccagugucuacauu

SEQ ID NO: 1137865 - RNA, 19 nt, Homo sapiens
  misc_RNA (1)...(19): siRNA sense strand
ggacaggugccaggugugu

SEQ ID NO: 1137866 - RNA, 19 nt, Homo sapiens
  misc_RNA (1)...(19): siRNA sense strand
gaccugggagucaccauug

SEQ ID NO: 1137867 - RNA, 19 nt, Homo sapiens
  misc_RNA (1)...(19): siRNA sense strand
gaguucaugucgcaacagu

SEQ ID NO: 1137868 - RNA, 19 nt, Homo sapiens
  misc_RNA (1)...(19): siRNA sense strand
gcuaugugcucaccaaccu

SEQ ID NO: 1137869 - RNA, 19 nt, Homo sapiens
  misc_RNA (1)...(19): siRNA sense strand
ugcggaggauccuguauug

SEQ ID NO: 1137870 - RNA, 19 nt, Homo sapiens
  misc_RNA (1)...(19): siRNA sense strand
agacccagcuggaguucau

SEQ ID NO: 1137871 - RNA, 19 nt, Homo sapiens
  misc_RNA (1)...(19): siRNA sense strand
ccacggaagggcucuuuca

SEQ ID NO: 1137872 - RNA, 19 nt, Homo sapiens
  misc_RNA (1)...(19): siRNA sense strand
ugucguggcugggaagaug

SEQ ID NO: 1137873 - RNA, 19 nt, Homo sapiens
  misc_RNA (1)...(19): siRNA sense strand
caugggcgcuggucuagcu

SEQ ID NO: 1137874 - RNA, 19 nt, Homo sapiens
  misc_RNA (1)...(19): siRNA sense strand
cggaggauccuguauugug

SEQ ID NO: 1137875 - RNA, 19 nt, Homo sapiens
  misc_RNA (1)...(19): siRNA sense strand
gaucggagggcgcuauguc

SEQ ID NO: 1137876 - RNA, 19 nt, Homo sapiens
  misc_RNA (1)...(19): siRNA sense strand
ccacuggggugcugcugua

SEQ ID NO: 1137877 - RNA, 19 nt, Homo sapiens
  misc_RNA (1)...(19): siRNA sense strand
gugcggaggauccuguauu

SEQ ID NO: 1137878 - RNA, 19 nt, Homo sapiens
  misc_RNA (1)...(19): siRNA sense strand
uggaguugccugaugguaa

SEQ ID NO: 1137879 - RNA, 19 nt, Homo sapiens
  misc_RNA (1)...(19): siRNA sense strand
gugcaugggcgcuggucua

SEQ ID NO: 1137880 - RNA, 19 nt, Homo sapiens
  misc_RNA (1)...(19): siRNA sense strand
cagacccgcuggaccaaag

SEQ ID NO: 1137881 - RNA, 19 nt, Homo sapiens
  misc_RNA (1)...(19): siRNA sense strand
gcccagcucaugcacauca

SEQ ID NO: 1137882 - RNA, 19 nt, Homo sapiens
  misc_RNA (1)...(19): siRNA sense strand
gaauguggcguggagaagu

SEQ ID NO: 1137883 - RNA, 19 nt, Homo sapiens
  misc_RNA (1)...(19): siRNA sense strand
ggguggagccagaccauca

SEQ ID NO: 1137884 - RNA, 19 nt, Homo sapiens
  misc_RNA (1)...(19): siRNA sense strand
cagaauguggcguggagaa

SEQ ID NO: 1137885 - RNA, 19 nt, Homo sapiens
  misc_RNA (1)...(19): siRNA sense strand
ggauggucgugucgaguac

SEQ ID NO: 1137886 - RNA, 19 nt, Homo sapiens
  misc_RNA (1)...(19): siRNA sense strand
acaggccucucuucacaca

SEQ ID NO: 1137887 - RNA, 19 nt, Homo sapiens
  misc_RNA (1)...(19): siRNA sense strand
gggcagcugcaggacauuu

SEQ ID NO: 1137888 - RNA, 19 nt, Homo sapiens
  misc_RNA (1)...(19): siRNA sense strand
acucaggccugcgagaaga

SEQ ID NO: 1137889 - RNA, 19 nt, Homo sapiens
  misc_RNA (1)...(19): siRNA sense strand
gcccuggugcucccuuaaa

SEQ ID NO: 1137890 - RNA, 19 nt, Homo sapiens
  misc_RNA (1)...(19): siRNA sense strand
agaagacccagcuggaguu

SEQ ID NO: 1137891 - RNA, 19 nt, Homo sapiens
  misc_RNA (1)...(19): siRNA sense strand
caaccugaccagugucuac

SEQ ID NO: 1137892 - RNA, 19 nt, Homo sapiens
  misc_RNA (1)...(19): siRNA sense strand
ggaggacacagagcgcuau

SEQ ID NO: 1137893 - RNA, 19 nt, Homo sapiens
  misc_RNA (1)...(19): siRNA sense strand
gcucaccaaccucaacauc

SEQ ID NO: 1137894 - RNA, 19 nt, Homo sapiens
  misc_RNA (1)...(19): siRNA sense strand
uguguggccuggcaagcaa

SEQ ID NO: 1137895 - RNA, 19 nt, Homo sapiens
  misc_RNA (1)...(19): siRNA sense strand
ugaccagugucuacauugc

SEQ ID NO: 1137896 - RNA, 19 nt, Homo sapiens
  misc_RNA (1)...(19): siRNA sense strand
gaagacccagcuggaguuc

SEQ ID NO: 1137897 - RNA, 19 nt, Homo sapiens
  misc_RNA (1)...(19): siRNA sense strand
ggaggcggcagugcaacaa

SEQ ID NO: 1137898 - RNA, 19 nt, Homo sapiens
  misc_RNA (1)...(19): siRNA sense strand
aauguggcguggagaagug

SEQ ID NO: 1137899 - RNA, 19 nt, Homo sapiens
  misc_RNA (1)...(19): siRNA sense strand
uggugaagauggucauucu

SEQ ID NO: 1137900 - RNA, 19 nt, Homo sapiens
  misc_RNA (1)...(19): siRNA sense strand
cgaccugggagucaccauu

SEQ ID NO: 1137901 - RNA, 19 nt, Homo sapiens
  misc_RNA (1)...(19): siRNA sense strand
ccaggugggaggugucaga

SEQ ID NO: 1137902 - RNA, 19 nt, Homo sapiens
  misc_RNA (1)...(19): siRNA sense strand
caaccacaggccucucuuc

SEQ ID NO: 1137903 - RNA, 19 nt, Homo sapiens
  misc_RNA (1)...(19): siRNA sense strand
ccucguuccucuccuggau

SEQ ID NO: 1137904 - RNA, 19 nt, Homo sapiens
  misc_RNA (1)...(19): siRNA sense strand
caggacauuuggcugugau

SEQ ID NO: 1137905 - RNA, 19 nt, Homo sapiens
  misc_RNA (1)...(19): siRNA sense strand
ccacaggccucucuucaca

SEQ ID NO: 1137906 - RNA, 19 nt, Homo sapiens
  misc_RNA (1)...(19): siRNA sense strand
ggccgugucuucuuacuug

SEQ ID NO: 1137907 - RNA, 19 nt, Homo sapiens
  misc_RNA (1)...(19): siRNA sense strand
cacaggccgugucuucuua

SEQ ID NO: 1137908 - RNA, 19 nt, Homo sapiens
  misc_RNA (1)...(19): siRNA sense strand
agaguugucuucaggcuuu

SEQ ID NO: 1137909 - RNA, 19 nt, Homo sapiens
  misc_RNA (1)...(19): siRNA sense strand
accuggagcugccucauua

SEQ ID NO: 1137910 - RNA, 19 nt, Homo sapiens
  misc_RNA (1)...(19): siRNA sense strand
ggaguugccugaugguaac

SEQ ID NO: 1137911 - RNA, 19 nt, Homo sapiens
  misc_RNA (1)...(19): siRNA sense strand
gcagagcgagagaauaugu

SEQ ID NO: 1137912 - RNA, 19 nt, Homo sapiens
  misc_RNA (1)...(19): siRNA sense strand
gaccuggaguugccugaug

SEQ ID NO: 1137913 - RNA, 19 nt, Homo sapiens
  misc_RNA (1)...(19): siRNA sense strand
ucacauuucugacaguuac

SEQ ID NO: 1137914 - RNA, 19 nt, Homo sapiens
  misc_RNA (1)...(19): siRNA sense strand
acauuuggcugugauggua

SEQ ID NO: 1137915 - RNA, 19 nt, Homo sapiens
  misc_RNA (1)...(19): siRNA sense strand
gcaggacauuuggcuguga

SEQ ID NO: 1137916 - RNA, 19 nt, Homo sapiens
  misc_RNA (1)...(19): siRNA sense strand
gugaagauggucauucuga

SEQ ID NO: 1137917 - RNA, 19 nt, Homo sapiens
  misc_RNA (1)...(19): siRNA sense strand
uggcagagcgagagaauau

SEQ ID NO: 1137918 - RNA, 19 nt, Homo sapiens
  misc_RNA (1)...(19): siRNA sense strand
ggacgauggugaggagauc

SEQ ID NO: 1137919 - RNA, 19 nt, Homo sapiens
  misc_RNA (1)...(19): siRNA sense strand
caccauugcccaugagauu

SEQ ID NO: 1137920 - RNA, 19 nt, Homo sapiens
  misc_RNA (1)...(19): siRNA sense strand
gagucaccauugcccauga

SEQ ID NO: 1137921 - RNA, 19 nt, Homo sapiens
  misc_RNA (1)...(19): siRNA sense strand
gaugggacccgguguaugc

SEQ ID NO: 1137922 - RNA, 19 nt, Homo sapiens
  misc_RNA (1)...(19): siRNA sense strand
gauggacucccagcaggua

SEQ ID NO: 1137923 - RNA, 19 nt, Homo sapiens
  misc_RNA (1)...(19): siRNA sense strand
ccacaggccgugucuucuu

SEQ ID NO: 1137924 - RNA, 19 nt, Homo sapiens
  misc_RNA (1)...(19): siRNA sense strand
ccugaccagugucuacauu

SEQ ID NO: 1137925 - RNA, 19 nt, Homo sapiens
  misc_RNA (1)...(19): siRNA sense strand
ggacaggugccaggugugu

SEQ ID NO: 1137926 - RNA, 19 nt, Homo sapiens
  misc_RNA (1)...(19): siRNA sense strand
gaccugggagucaccauug

SEQ ID NO: 1137927 - RNA, 19 nt, Homo sapiens
  misc_RNA (1)...(19): siRNA sense strand
gaguucaugucgcaacagu

SEQ ID NO: 1137928 - RNA, 19 nt, Homo sapiens
  misc_RNA (1)...(19): siRNA sense strand
gcuaugugcucaccaaccu

SEQ ID NO: 1137929 - RNA, 19 nt, Homo sapiens
  misc_RNA (1)...(19): siRNA sense strand
ugcggaggauccuguauug

SEQ ID NO: 1137930 - RNA, 19 nt, Homo sapiens
  misc_RNA (1)...(19): siRNA sense strand
agacccagcuggaguucau

SEQ ID NO: 1137931 - RNA, 19 nt, Homo sapiens
  misc_RNA (1)...(19): siRNA sense strand
ccacggaagggcucuuuca

SEQ ID NO: 1137932 - RNA, 19 nt, Homo sapiens
  misc_RNA (1)...(19): siRNA sense strand
ugucguggcugggaagaug

SEQ ID NO: 1137933 - RNA, 19 nt, Homo sapiens
  misc_RNA (1)...(19): siRNA sense strand
caugggcgcuggucuagcu

SEQ ID NO: 1137934 - RNA, 19 nt, Homo sapiens
  misc_RNA (1)...(19): siRNA sense strand
cggaggauccuguauugug

SEQ ID NO: 1137935 - RNA, 19 nt, Homo sapiens
  misc_RNA (1)...(19): siRNA sense strand
gaucggagggcgcuauguc

SEQ ID NO: 1137936 - RNA, 19 nt, Homo sapiens
  misc_RNA (1)...(19): siRNA sense strand
ccacuggggugcugcugua

SEQ ID NO: 1137937 - RNA, 19 nt, Homo sapiens
  misc_RNA (1)...(19): siRNA sense strand
gugcggaggauccuguauu

SEQ ID NO: 1137938 - RNA, 19 nt, Homo sapiens
  misc_RNA (1)...(19): siRNA sense strand
uggaguugccugaugguaa

SEQ ID NO: 1137939 - RNA, 19 nt, Homo sapiens
  misc_RNA (1)...(19): siRNA sense strand
gugcaugggcgcuggucua

SEQ ID NO: 1137940 - RNA, 19 nt, Homo sapiens
  misc_RNA (1)...(19): siRNA sense strand
cagacccgcuggaccaaag

SEQ ID NO: 1137941 - RNA, 19 nt, Homo sapiens
  misc_RNA (1)...(19): siRNA sense strand
gcccagcucaugcacauca

SEQ ID NO: 1137942 - RNA, 19 nt, Homo sapiens
  misc_RNA (1)...(19): siRNA sense strand
gaauguggcguggagaagu

SEQ ID NO: 1137943 - RNA, 19 nt, Homo sapiens
  misc_RNA (1)...(19): siRNA sense strand
ggguggagccagaccauca

SEQ ID NO: 1137944 - RNA, 19 nt, Homo sapiens
  misc_RNA (1)...(19): siRNA sense strand
cagaauguggcguggagaa

SEQ ID NO: 1137945 - RNA, 19 nt, Homo sapiens
  misc_RNA (1)...(19): siRNA sense strand
ggauggucgugucgaguac

SEQ ID NO: 1137946 - RNA, 19 nt, Homo sapiens
  misc_RNA (1)...(19): siRNA sense strand
acaggccucucuucacaca

SEQ ID NO: 1137947 - RNA, 19 nt, Homo sapiens
  misc_RNA (1)...(19): siRNA sense strand
gggcagcugcaggacauuu

SEQ ID NO: 1137948 - RNA, 19 nt, Homo sapiens
  misc_RNA (1)...(19): siRNA sense strand
acucaggccugcgagaaga

SEQ ID NO: 1137949 - RNA, 19 nt, Homo sapiens
  misc_RNA (1)...(19): siRNA sense strand
gcccuggugcucccuuaaa

SEQ ID NO: 1137950 - RNA, 19 nt, Homo sapiens
  misc_RNA (1)...(19): siRNA sense strand
agaagacccagcuggaguu

SEQ ID NO: 1137951 - RNA, 19 nt, Homo sapiens
  misc_RNA (1)...(19): siRNA sense strand
caaccugaccagugucuac

SEQ ID NO: 1137952 - RNA, 19 nt, Homo sapiens
  misc_RNA (1)...(19): siRNA sense strand
ggaggacacagagcgcuau

SEQ ID NO: 1137953 - RNA, 19 nt, Homo sapiens
  misc_RNA (1)...(19): siRNA sense strand
gcucaccaaccucaacauc

SEQ ID NO: 1137954 - RNA, 19 nt, Homo sapiens
  misc_RNA (1)...(19): siRNA sense strand
uguguggccuggcaagcaa

SEQ ID NO: 1137955 - RNA, 19 nt, Homo sapiens
  misc_RNA (1)...(19): siRNA sense strand
ugaccagugucuacauugc

SEQ ID NO: 1137956 - RNA, 19 nt, Homo sapiens
  misc_RNA (1)...(19): siRNA sense strand
gaagacccagcuggaguuc

SEQ ID NO: 1137957 - RNA, 19 nt, Homo sapiens
  misc_RNA (1)...(19): siRNA sense strand
ggaggcggcagugcaacaa

SEQ ID NO: 1137958 - RNA, 19 nt, Homo sapiens
  misc_RNA (1)...(19): siRNA sense strand
aauguggcguggagaagug

SEQ ID NO: 1137959 - RNA, 19 nt, Homo sapiens
  misc_RNA (1)...(19): siRNA sense strand
uggugaagauggucauucu

SEQ ID NO: 1137960 - RNA, 19 nt, Homo sapiens
  misc_RNA (1)...(19): siRNA sense strand
cgaccugggagucaccauu

SEQ ID NO: 1137961 - RNA, 19 nt, Homo sapiens
  misc_RNA (1)...(19): siRNA sense strand
ccaggugggaggugucaga

SEQ ID NO: 1137962 - RNA, 19 nt, Homo sapiens
  misc_RNA (1)...(19): siRNA sense strand
caaccacaggccucucuuc

SEQ ID NO: 1137963 - RNA, 19 nt, Homo sapiens
  misc_RNA (1)...(19): siRNA sense strand
ccucguuccucuccuggau

SEQ ID NO: 1137964 - RNA, 19 nt, Homo sapiens
  misc_RNA (1)...(19): siRNA sense strand
caggacauuuggcugugau

SEQ ID NO: 1137965 - RNA, 19 nt, Homo sapiens
  misc_RNA (1)...(19): siRNA sense strand
ccacaggccucucuucaca

SEQ ID NO: 1137966 - RNA, 19 nt, Homo sapiens
  misc_RNA (1)...(19): siRNA sense strand
ggccgugucuucuuacuug

SEQ ID NO: 1137967 - RNA, 19 nt, Homo sapiens
  misc_RNA (1)...(19): siRNA sense strand
cacaggccgugucuucuua

SEQ ID NO: 1137968 - RNA, 19 nt, Homo sapiens
  misc_RNA (1)...(19): siRNA sense strand
agaguugucuucaggcuuu

SEQ ID NO: 1137969 - RNA, 19 nt, Homo sapiens
  misc_RNA (1)...(19): siRNA sense strand
accuggagcugccucauua

SEQ ID NO: 1137970 - RNA, 19 nt, Homo sapiens
  misc_RNA (1)...(19): siRNA sense strand
ggaguugccugaugguaac

SEQ ID NO: 1137971 - RNA, 19 nt, Homo sapiens
  misc_RNA (1)...(19): siRNA sense strand
gcagagcgagagaauaugu

SEQ ID NO: 1137972 - RNA, 19 nt, Homo sapiens
  misc_RNA (1)...(19): siRNA sense strand
gaccuggaguugccugaug

SEQ ID NO: 1137973 - RNA, 19 nt, Homo sapiens
  misc_RNA (1)...(19): siRNA sense strand
ucacauuucugacaguuac

SEQ ID NO: 1137974 - RNA, 19 nt, Homo sapiens
  misc_RNA (1)...(19): siRNA sense strand
acauuuggcugugauggua

SEQ ID NO: 1137975 - RNA, 19 nt, Homo sapiens
  misc_RNA (1)...(19): siRNA sense strand
gcaggacauuuggcuguga

SEQ ID NO: 1137976 - RNA, 19 nt, Homo sapiens
  misc_RNA (1)...(19): siRNA sense strand
gugaagauggucauucuga

SEQ ID NO: 1137977 - RNA, 19 nt, Homo sapiens
  misc_RNA (1)...(19): siRNA sense strand
uggcagagcgagagaauau

SEQ ID NO: 1137978 - RNA, 19 nt, Homo sapiens
  misc_RNA (1)...(19): siRNA sense strand
ggacgauggugaggagauc

SEQ ID NO: 1137979 - RNA, 19 nt, Homo sapiens
  misc_RNA (1)...(19): siRNA sense strand
caccauugcccaugagauu

SEQ ID NO: 1137980 - RNA, 19 nt, Homo sapiens
  misc_RNA (1)...(19): siRNA sense strand
gagucaccauugcccauga

SEQ ID NO: 1137981 - RNA, 19 nt, Homo sapiens
  misc_RNA (1)...(19): siRNA sense strand
gaugggacccgguguaugc

SEQ ID NO: 1137982 - RNA, 19 nt, Homo sapiens
  misc_RNA (1)...(19): siRNA sense strand
gauggacucccagcaggua

SEQ ID NO: 1137983 - RNA, 19 nt, Homo sapiens
  misc_RNA (1)...(19): siRNA sense strand
ccacaggccgugucuucuu

SEQ ID NO: 1137984 - RNA, 19 nt, Homo sapiens
  misc_RNA (1)...(19): siRNA sense strand
ccugaccagugucuacauu

SEQ ID NO: 1137985 - RNA, 19 nt, Homo sapiens
  misc_RNA (1)...(19): siRNA sense strand
ggacaggugccaggugugu

SEQ ID NO: 1137986 - RNA, 19 nt, Homo sapiens
  misc_RNA (1)...(19): siRNA sense strand
gaccugggagucaccauug

SEQ ID NO: 1137987 - RNA, 19 nt, Homo sapiens
  misc_RNA (1)...(19): siRNA sense strand
gaguucaugucgcaacagu

SEQ ID NO: 1137988 - RNA, 19 nt, Homo sapiens
  misc_RNA (1)...(19): siRNA sense strand
gcuaugugcucaccaaccu

SEQ ID NO: 1137989 - RNA, 19 nt, Homo sapiens
  misc_RNA (1)...(19): siRNA sense strand
ugcggaggauccuguauug

SEQ ID NO: 1137990 - RNA, 19 nt, Homo sapiens
  misc_RNA (1)...(19): siRNA sense strand
agacccagcuggaguucau

SEQ ID NO: 1137991 - RNA, 19 nt, Homo sapiens
  misc_RNA (1)...(19): siRNA sense strand
ccacggaagggcucuuuca

SEQ ID NO: 1137992 - RNA, 19 nt, Homo sapiens
  misc_RNA (1)...(19): siRNA sense strand
ugucguggcugggaagaug

SEQ ID NO: 1137993 - RNA, 19 nt, Homo sapiens
  misc_RNA (1)...(19): siRNA sense strand
caugggcgcuggucuagcu

SEQ ID NO: 1137994 - RNA, 19 nt, Homo sapiens
  misc_RNA (1)...(19): siRNA sense strand
cggaggauccuguauugug

SEQ ID NO: 1137995 - RNA, 19 nt, Homo sapiens
  misc_RNA (1)...(19): siRNA sense strand
gaucggagggcgcuauguc

SEQ ID NO: 1137996 - RNA, 19 nt, Homo sapiens
  misc_RNA (1)...(19): siRNA sense strand
ccacuggggugcugcugua

SEQ ID NO: 1137997 - RNA, 19 nt, Homo sapiens
  misc_RNA (1)...(19): siRNA sense strand
gugcggaggauccuguauu

SEQ ID NO: 1137998 - RNA, 19 nt, Homo sapiens
  misc_RNA (1)...(19): siRNA sense strand
uggaguugccugaugguaa

SEQ ID NO: 1137999 - RNA, 19 nt, Homo sapiens
  misc_RNA (1)...(19): siRNA sense strand
gugcaugggcgcuggucua

SEQ ID NO: 1138000 - RNA, 19 nt, Homo sapiens
  misc_RNA (1)...(19): siRNA sense strand
cagacccgcuggaccaaag

SEQ ID NO: 1138001 - RNA, 19 nt, Homo sapiens
  misc_RNA (1)...(19): siRNA sense strand
gcccagcucaugcacauca

SEQ ID NO: 1138002 - RNA, 19 nt, Homo sapiens
  misc_RNA (1)...(19): siRNA sense strand
gaauguggcguggagaagu

SEQ ID NO: 1138003 - RNA, 19 nt, Homo sapiens
  misc_RNA (1)...(19): siRNA sense strand
ggguggagccagaccauca

SEQ ID NO: 1138004 - RNA, 19 nt, Homo sapiens
  misc_RNA (1)...(19): siRNA sense strand
cagaauguggcguggagaa

SEQ ID NO: 1138005 - RNA, 19 nt, Homo sapiens
  misc_RNA (1)...(19): siRNA sense strand
ggauggucgugucgaguac

SEQ ID NO: 1138006 - RNA, 19 nt, Homo sapiens
  misc_RNA (1)...(19): siRNA sense strand
acaggccucucuucacaca

SEQ ID NO: 1138007 - RNA, 19 nt, Homo sapiens
  misc_RNA (1)...(19): siRNA sense strand
gggcagcugcaggacauuu

SEQ ID NO: 1138008 - RNA, 19 nt, Homo sapiens
  misc_RNA (1)...(19): siRNA sense strand
acucaggccugcgagaaga

SEQ ID NO: 1138009 - RNA, 19 nt, Homo sapiens
  misc_RNA (1)...(19): siRNA sense strand
gcccuggugcucccuuaaa

SEQ ID NO: 1138010 - RNA, 19 nt, Homo sapiens
  misc_RNA (1)...(19): siRNA sense strand
agaagacccagcuggaguu

SEQ ID NO: 1138011 - RNA, 19 nt, Homo sapiens
  misc_RNA (1)...(19): siRNA sense strand
caaccugaccagugucuac

SEQ ID NO: 1138012 - RNA, 19 nt, Homo sapiens
  misc_RNA (1)...(19): siRNA sense strand
ggaggacacagagcgcuau

SEQ ID NO: 1138013 - RNA, 19 nt, Homo sapiens
  misc_RNA (1)...(19): siRNA sense strand
gcucaccaaccucaacauc

SEQ ID NO: 1138014 - RNA, 19 nt, Homo sapiens
  misc_RNA (1)...(19): siRNA sense strand
uguguggccuggcaagcaa

SEQ ID NO: 1138015 - RNA, 19 nt, Homo sapiens
  misc_RNA (1)...(19): siRNA sense strand
ugaccagugucuacauugc

SEQ ID NO: 1138016 - RNA, 19 nt, Homo sapiens
  misc_RNA (1)...(19): siRNA sense strand
gaagacccagcuggaguuc

SEQ ID NO: 1138017 - RNA, 19 nt, Homo sapiens
  misc_RNA (1)...(19): siRNA sense strand
ggaggcggcagugcaacaa

SEQ ID NO: 1138018 - RNA, 19 nt, Homo sapiens
  misc_RNA (1)...(19): siRNA sense strand
aauguggcguggagaagug

SEQ ID NO: 1138019 - RNA, 19 nt, Homo sapiens
  misc_RNA (1)...(19): siRNA sense strand
uggugaagauggucauucu

SEQ ID NO: 1138020 - RNA, 19 nt, Homo sapiens
  misc_RNA (1)...(19): siRNA sense strand
cgaccugggagucaccauu

SEQ ID NO: 1138021 - RNA, 19 nt, Homo sapiens
  misc_RNA (1)...(19): siRNA sense strand
ccaggugggaggugucaga

SEQ ID NO: 1138022 - RNA, 19 nt, Homo sapiens
  misc_RNA (1)...(19): siRNA sense strand
caaccacaggccucucuuc

SEQ ID NO: 1138023 - RNA, 19 nt, Homo sapiens
  misc_RNA (1)...(19): siRNA sense strand
ccucguuccucuccuggau

SEQ ID NO: 1138024 - RNA, 19 nt, Homo sapiens
  misc_RNA (1)...(19): siRNA sense strand
caggacauuuggcugugau

SEQ ID NO: 1138025 - RNA, 19 nt, Homo sapiens
  misc_RNA (1)...(19): siRNA sense strand
ggccgugucuucuuacuug

SEQ ID NO: 1138026 - RNA, 19 nt, Homo sapiens
  misc_RNA (1)...(19): siRNA sense strand
cacaggccgugucuucuua

SEQ ID NO: 1138027 - RNA, 19 nt, Homo sapiens
  misc_RNA (1)...(19): siRNA sense strand
agaguugucuucaggcuuu

SEQ ID NO: 1138028 - RNA, 19 nt, Homo sapiens
  misc_RNA (1)...(19): siRNA sense strand
accuggagcugccucauua

SEQ ID NO: 1138029 - RNA, 19 nt, Homo sapiens
  misc_RNA (1)...(19): siRNA sense strand
ggaguugccugaugguaac

SEQ ID NO: 1138030 - RNA, 19 nt, Homo sapiens
  misc_RNA (1)...(19): siRNA sense strand
gaccuggaguugccugaug

SEQ ID NO: 1138031 - RNA, 19 nt, Homo sapiens
  misc_RNA (1)...(19): siRNA sense strand
gugaagauggucauucuga

SEQ ID NO: 1138032 - RNA, 19 nt, Homo sapiens
  misc_RNA (1)...(19): siRNA sense strand
caccauugcccaugagauu

SEQ ID NO: 1138033 - RNA, 19 nt, Homo sapiens
  misc_RNA (1)...(19): siRNA sense strand
gagucaccauugcccauga

SEQ ID NO: 1138034 - RNA, 19 nt, Homo sapiens
  misc_RNA (1)...(19): siRNA sense strand
ccacaggccgugucuucuu

SEQ ID NO: 1138035 - RNA, 19 nt, Homo sapiens
  misc_RNA (1)...(19): siRNA sense strand
gaccugggagucaccauug

SEQ ID NO: 1138036 - RNA, 19 nt, Homo sapiens
  misc_RNA (1)...(19): siRNA sense strand
gcuaugugcucaccaaccu

SEQ ID NO: 1138037 - RNA, 19 nt, Homo sapiens
  misc_RNA (1)...(19): siRNA sense strand
uggaguugccugaugguaa

SEQ ID NO: 1138038 - RNA, 19 nt, Homo sapiens
  misc_RNA (1)...(19): siRNA sense strand
ggguggagccagaccauca

SEQ ID NO: 1138039 - RNA, 19 nt, Homo sapiens
  misc_RNA (1)...(19): siRNA sense strand
gcccuggugcucccuuaaa

SEQ ID NO: 1138040 - RNA, 19 nt, Homo sapiens
  misc_RNA (1)...(19): siRNA sense strand
ggaggacacagagcgcuau

SEQ ID NO: 1138041 - RNA, 19 nt, Homo sapiens
  misc_RNA (1)...(19): siRNA sense strand
gcucaccaaccucaacauc

SEQ ID NO: 1138042 - RNA, 19 nt, Homo sapiens
  misc_RNA (1)...(19): siRNA sense strand
uggugaagauggucauucu

SEQ ID NO: 1138043 - RNA, 19 nt, Homo sapiens
  misc_RNA (1)...(19): siRNA sense strand
cgaccugggagucaccauu

SEQ ID NO: 1138044 - RNA, 19 nt, Homo sapiens
  misc_RNA (1)...(19): siRNA sense strand
ccacaggccucucuucaca

SEQ ID NO: 1138045 - RNA, 19 nt, Homo sapiens
  misc_RNA (1)...(19): siRNA sense strand
ggccgugucuucuuacuug

SEQ ID NO: 1138046 - RNA, 19 nt, Homo sapiens
  misc_RNA (1)...(19): siRNA sense strand
cacaggccgugucuucuua

SEQ ID NO: 1138047 - RNA, 19 nt, Homo sapiens
  misc_RNA (1)...(19): siRNA sense strand
agaguugucuucaggcuuu

SEQ ID NO: 1138048 - RNA, 19 nt, Homo sapiens
  misc_RNA (1)...(19): siRNA sense strand
accuggagcugccucauua

SEQ ID NO: 1138049 - RNA, 19 nt, Homo sapiens
  misc_RNA (1)...(19): siRNA sense strand
ggaguugccugaugguaac

SEQ ID NO: 1138050 - RNA, 19 nt, Homo sapiens
  misc_RNA (1)...(19): siRNA sense strand
gcagagcgagagaauaugu

SEQ ID NO: 1138051 - RNA, 19 nt, Homo sapiens
  misc_RNA (1)...(19): siRNA sense strand
gaccuggaguugccugaug

SEQ ID NO: 1138052 - RNA, 19 nt, Homo sapiens
  misc_RNA (1)...(19): siRNA sense strand
ucacauuucugacaguuac

SEQ ID NO: 1138053 - RNA, 19 nt, Homo sapiens
  misc_RNA (1)...(19): siRNA sense strand
acauuuggcugugauggua

SEQ ID NO: 1138054 - RNA, 19 nt, Homo sapiens
  misc_RNA (1)...(19): siRNA sense strand
gcaggacauuuggcuguga

SEQ ID NO: 1138055 - RNA, 19 nt, Homo sapiens
  misc_RNA (1)...(19): siRNA sense strand
gugaagauggucauucuga

SEQ ID NO: 1138056 - RNA, 19 nt, Homo sapiens
  misc_RNA (1)...(19): siRNA sense strand
uggcagagcgagagaauau

SEQ ID NO: 1138057 - RNA, 19 nt, Homo sapiens
  misc_RNA (1)...(19): siRNA sense strand
ggacgauggugaggagauc

SEQ ID NO: 1138058 - RNA, 19 nt, Homo sapiens
  misc_RNA (1)...(19): siRNA sense strand
caccauugcccaugagauu

SEQ ID NO: 1138059 - RNA, 19 nt, Homo sapiens
  misc_RNA (1)...(19): siRNA sense strand
gagucaccauugcccauga

SEQ ID NO: 1138060 - RNA, 19 nt, Homo sapiens
  misc_RNA (1)...(19): siRNA sense strand
gaugggacccgguguaugc

SEQ ID NO: 1138061 - RNA, 19 nt, Homo sapiens
  misc_RNA (1)...(19): siRNA sense strand
gauggacucccagcaggua

SEQ ID NO: 1138062 - RNA, 19 nt, Homo sapiens
  misc_RNA (1)...(19): siRNA sense strand
ccacaggccgugucuucuu

SEQ ID NO: 1138063 - RNA, 19 nt, Homo sapiens
  misc_RNA (1)...(19): siRNA sense strand
ccugaccagugucuacauu

SEQ ID NO: 1138064 - RNA, 19 nt, Homo sapiens
  misc_RNA (1)...(19): siRNA sense strand
ggacaggugccaggugugu

SEQ ID NO: 1138065 - RNA, 19 nt, Homo sapiens
  misc_RNA (1)...(19): siRNA sense strand
gaccugggagucaccauug

SEQ ID NO: 1138066 - RNA, 19 nt, Homo sapiens
  misc_RNA (1)...(19): siRNA sense strand
gaguucaugucgcaacagu

SEQ ID NO: 1138067 - RNA, 19 nt, Homo sapiens
  misc_RNA (1)...(19): siRNA sense strand
gcuaugugcucaccaaccu

SEQ ID NO: 1138068 - RNA, 19 nt, Homo sapiens
  misc_RNA (1)...(19): siRNA sense strand
ugcggaggauccuguauug

SEQ ID NO: 1138069 - RNA, 19 nt, Homo sapiens
  misc_RNA (1)...(19): siRNA sense strand
agacccagcuggaguucau

SEQ ID NO: 1138070 - RNA, 19 nt, Homo sapiens
  misc_RNA (1)...(19): siRNA sense strand
ccacggaagggcucuuuca

SEQ ID NO: 1138071 - RNA, 19 nt, Homo sapiens
  misc_RNA (1)...(19): siRNA sense strand
ugucguggcugggaagaug

SEQ ID NO: 1138072 - RNA, 19 nt, Homo sapiens
  misc_RNA (1)...(19): siRNA sense strand
caugggcgcuggucuagcu

SEQ ID NO: 1138073 - RNA, 19 nt, Homo sapiens
  misc_RNA (1)...(19): siRNA sense strand
cggaggauccuguauugug

SEQ ID NO: 1138074 - RNA, 19 nt, Homo sapiens
  misc_RNA (1)...(19): siRNA sense strand
gaucggagggcgcuauguc

SEQ ID NO: 1138075 - RNA, 19 nt, Homo sapiens
  misc_RNA (1)...(19): siRNA sense strand
ccacuggggugcugcugua

SEQ ID NO: 1138076 - RNA, 19 nt, Homo sapiens
  misc_RNA (1)...(19): siRNA sense strand
gugcggaggauccuguauu

SEQ ID NO: 1138077 - RNA, 19 nt, Homo sapiens
  misc_RNA (1)...(19): siRNA sense strand
uggaguugccugaugguaa

SEQ ID NO: 1138078 - RNA, 19 nt, Homo sapiens
  misc_RNA (1)...(19): siRNA sense strand
gugcaugggcgcuggucua

SEQ ID NO: 1138079 - RNA, 19 nt, Homo sapiens
  misc_RNA (1)...(19): siRNA sense strand
cagacccgcuggaccaaag

SEQ ID NO: 1138080 - RNA, 19 nt, Homo sapiens
  misc_RNA (1)...(19): siRNA sense strand
gcccagcucaugcacauca

SEQ ID NO: 1138081 - RNA, 19 nt, Homo sapiens
  misc_RNA (1)...(19): siRNA sense strand
gaauguggcguggagaagu

SEQ ID NO: 1138082 - RNA, 19 nt, Homo sapiens
  misc_RNA (1)...(19): siRNA sense strand
ggguggagccagaccauca

SEQ ID NO: 1138083 - RNA, 19 nt, Homo sapiens
  misc_RNA (1)...(19): siRNA sense strand
cagaauguggcguggagaa

SEQ ID NO: 1138084 - RNA, 19 nt, Homo sapiens
  misc_RNA (1)...(19): siRNA sense strand
ggauggucgugucgaguac

SEQ ID NO: 1138085 - RNA, 19 nt, Homo sapiens
  misc_RNA (1)...(19): siRNA sense strand
acaggccucucuucacaca

SEQ ID NO: 1138086 - RNA, 19 nt, Homo sapiens
  misc_RNA (1)...(19): siRNA sense strand
gggcagcugcaggacauuu

SEQ ID NO: 1138087 - RNA, 19 nt, Homo sapiens
  misc_RNA (1)...(19): siRNA sense strand
acucaggccugcgagaaga

SEQ ID NO: 1138088 - RNA, 19 nt, Homo sapiens
  misc_RNA (1)...(19): siRNA sense strand
gcccuggugcucccuuaaa

SEQ ID NO: 1138089 - RNA, 19 nt, Homo sapiens
  misc_RNA (1)...(19): siRNA sense strand
agaagacccagcuggaguu

SEQ ID NO: 1138090 - RNA, 19 nt, Homo sapiens
  misc_RNA (1)...(19): siRNA sense strand
caaccugaccagugucuac

SEQ ID NO: 1138091 - RNA, 19 nt, Homo sapiens
  misc_RNA (1)...(19): siRNA sense strand
ggaggacacagagcgcuau

SEQ ID NO: 1138092 - RNA, 19 nt, Homo sapiens
  misc_RNA (1)...(19): siRNA sense strand
gcucaccaaccucaacauc

SEQ ID NO: 1138093 - RNA, 19 nt, Homo sapiens
  misc_RNA (1)...(19): siRNA sense strand
uguguggccuggcaagcaa

SEQ ID NO: 1138094 - RNA, 19 nt, Homo sapiens
  misc_RNA (1)...(19): siRNA sense strand
ugaccagugucuacauugc

SEQ ID NO: 1138095 - RNA, 19 nt, Homo sapiens
  misc_RNA (1)...(19): siRNA sense strand
gaagacccagcuggaguuc

SEQ ID NO: 1138096 - RNA, 19 nt, Homo sapiens
  misc_RNA (1)...(19): siRNA sense strand
ggaggcggcagugcaacaa

SEQ ID NO: 1138097 - RNA, 19 nt, Homo sapiens
  misc_RNA (1)...(19): siRNA sense strand
aauguggcguggagaagug

SEQ ID NO: 1138098 - RNA, 19 nt, Homo sapiens
  misc_RNA (1)...(19): siRNA sense strand
uggugaagauggucauucu

SEQ ID NO: 1138099 - RNA, 19 nt, Homo sapiens
  misc_RNA (1)...(19): siRNA sense strand
cgaccugggagucaccauu

SEQ ID NO: 1138100 - RNA, 19 nt, Homo sapiens
  misc_RNA (1)...(19): siRNA sense strand
ccaggugggaggugucaga

SEQ ID NO: 1138101 - RNA, 19 nt, Homo sapiens
  misc_RNA (1)...(19): siRNA sense strand
caaccacaggccucucuuc

SEQ ID NO: 1138102 - RNA, 19 nt, Homo sapiens
  misc_RNA (1)...(19): siRNA sense strand
ccucguuccucuccuggau

SEQ ID NO: 1138103 - RNA, 19 nt, Homo sapiens
  misc_RNA (1)...(19): siRNA sense strand
caggacauuuggcugugau

SEQ ID NO: 1138104 - RNA, 19 nt, Homo sapiens
  misc_RNA (1)...(19): siRNA sense strand
ccacaggccucucuucaca

SEQ ID NO: 1138105 - RNA, 19 nt, Homo sapiens
  misc_RNA (1)...(19): siRNA sense strand
ggccgugucuucuuacuug

SEQ ID NO: 1138106 - RNA, 19 nt, Homo sapiens
  misc_RNA (1)...(19): siRNA sense strand
cacaggccgugucuucuua

SEQ ID NO: 1138107 - RNA, 19 nt, Homo sapiens
  misc_RNA (1)...(19): siRNA sense strand
agaguugucuucaggcuuu

SEQ ID NO: 1138108 - RNA, 19 nt, Homo sapiens
  misc_RNA (1)...(19): siRNA sense strand
accuggagcugccucauua

SEQ ID NO: 1138109 - RNA, 19 nt, Homo sapiens
  misc_RNA (1)...(19): siRNA sense strand
ggaguugccugaugguaac

SEQ ID NO: 1138110 - RNA, 19 nt, Homo sapiens
  misc_RNA (1)...(19): siRNA sense strand
gcagagcgagagaauaugu

SEQ ID NO: 1138111 - RNA, 19 nt, Homo sapiens
  misc_RNA (1)...(19): siRNA sense strand
gaccuggaguugccugaug

SEQ ID NO: 1138112 - RNA, 19 nt, Homo sapiens
  misc_RNA (1)...(19): siRNA sense strand
ucacauuucugacaguuac

SEQ ID NO: 1138113 - RNA, 19 nt, Homo sapiens
  misc_RNA (1)...(19): siRNA sense strand
acauuuggcugugauggua

SEQ ID NO: 1138114 - RNA, 19 nt, Homo sapiens
  misc_RNA (1)...(19): siRNA sense strand
gcaggacauuuggcuguga

SEQ ID NO: 1138115 - RNA, 19 nt, Homo sapiens
  misc_RNA (1)...(19): siRNA sense strand
gugaagauggucauucuga

SEQ ID NO: 1138116 - RNA, 19 nt, Homo sapiens
  misc_RNA (1)...(19): siRNA sense strand
uggcagagcgagagaauau

SEQ ID NO: 1138117 - RNA, 19 nt, Homo sapiens
  misc_RNA (1)...(19): siRNA sense strand
ggacgauggugaggagauc

SEQ ID NO: 1138118 - RNA, 19 nt, Homo sapiens
  misc_RNA (1)...(19): siRNA sense strand
caccauugcccaugagauu

SEQ ID NO: 1138119 - RNA, 19 nt, Homo sapiens
  misc_RNA (1)...(19): siRNA sense strand
gagucaccauugcccauga

SEQ ID NO: 1138120 - RNA, 19 nt, Homo sapiens
  misc_RNA (1)...(19): siRNA sense strand
gaugggacccgguguaugc

SEQ ID NO: 1138121 - RNA, 19 nt, Homo sapiens
  misc_RNA (1)...(19): siRNA sense strand
gauggacucccagcaggua

SEQ ID NO: 1138122 - RNA, 19 nt, Homo sapiens
  misc_RNA (1)...(19): siRNA sense strand
ccacaggccgugucuucuu

SEQ ID NO: 1138123 - RNA, 19 nt, Homo sapiens
  misc_RNA (1)...(19): siRNA sense strand
ccugaccagugucuacauu

SEQ ID NO: 1138124 - RNA, 19 nt, Homo sapiens
  misc_RNA (1)...(19): siRNA sense strand
ggacaggugccaggugugu

SEQ ID NO: 1138125 - RNA, 19 nt, Homo sapiens
  misc_RNA (1)...(19): siRNA sense strand
gaccugggagucaccauug

SEQ ID NO: 1138126 - RNA, 19 nt, Homo sapiens
  misc_RNA (1)...(19): siRNA sense strand
gaguucaugucgcaacagu

SEQ ID NO: 1138127 - RNA, 19 nt, Homo sapiens
  misc_RNA (1)...(19): siRNA sense strand
gcuaugugcucaccaaccu

SEQ ID NO: 1138128 - RNA, 19 nt, Homo sapiens
  misc_RNA (1)...(19): siRNA sense strand
ugcggaggauccuguauug

SEQ ID NO: 1138129 - RNA, 19 nt, Homo sapiens
  misc_RNA (1)...(19): siRNA sense strand
agacccagcuggaguucau

SEQ ID NO: 1138130 - RNA, 19 nt, Homo sapiens
  misc_RNA (1)...(19): siRNA sense strand
ccacggaagggcucuuuca

SEQ ID NO: 1138131 - RNA, 19 nt, Homo sapiens
  misc_RNA (1)...(19): siRNA sense strand
ugucguggcugggaagaug

SEQ ID NO: 1138132 - RNA, 19 nt, Homo sapiens
  misc_RNA (1)...(19): siRNA sense strand
caugggcgcuggucuagcu

SEQ ID NO: 1138133 - RNA, 19 nt, Homo sapiens
  misc_RNA (1)...(19): siRNA sense strand
cggaggauccuguauugug

SEQ ID NO: 1138134 - RNA, 19 nt, Homo sapiens
  misc_RNA (1)...(19): siRNA sense strand
gaucggagggcgcuauguc

SEQ ID NO: 1138135 - RNA, 19 nt, Homo sapiens
  misc_RNA (1)...(19): siRNA sense strand
ccacuggggugcugcugua

SEQ ID NO: 1138136 - RNA, 19 nt, Homo sapiens
  misc_RNA (1)...(19): siRNA sense strand
gugcggaggauccuguauu

SEQ ID NO: 1138137 - RNA, 19 nt, Homo sapiens
  misc_RNA (1)...(19): siRNA sense strand
uggaguugccugaugguaa

SEQ ID NO: 1138138 - RNA, 19 nt, Homo sapiens
  misc_RNA (1)...(19): siRNA sense strand
gugcaugggcgcuggucua

SEQ ID NO: 1138139 - RNA, 19 nt, Homo sapiens
  misc_RNA (1)...(19): siRNA sense strand
cagacccgcuggaccaaag

SEQ ID NO: 1138140 - RNA, 19 nt, Homo sapiens
  misc_RNA (1)...(19): siRNA sense strand
gcccagcucaugcacauca

SEQ ID NO: 1138141 - RNA, 19 nt, Homo sapiens
  misc_RNA (1)...(19): siRNA sense strand
gaauguggcguggagaagu

SEQ ID NO: 1138142 - RNA, 19 nt, Homo sapiens
  misc_RNA (1)...(19): siRNA sense strand
ggguggagccagaccauca

SEQ ID NO: 1138143 - RNA, 19 nt, Homo sapiens
  misc_RNA (1)...(19): siRNA sense strand
cagaauguggcguggagaa

SEQ ID NO: 1138144 - RNA, 19 nt, Homo sapiens
  misc_RNA (1)...(19): siRNA sense strand
ggauggucgugucgaguac

SEQ ID NO: 1138145 - RNA, 19 nt, Homo sapiens
  misc_RNA (1)...(19): siRNA sense strand
acaggccucucuucacaca

SEQ ID NO: 1138146 - RNA, 19 nt, Homo sapiens
  misc_RNA (1)...(19): siRNA sense strand
gggcagcugcaggacauuu

SEQ ID NO: 1138147 - RNA, 19 nt, Homo sapiens
  misc_RNA (1)...(19): siRNA sense strand
acucaggccugcgagaaga

SEQ ID NO: 1138148 - RNA, 19 nt, Homo sapiens
  misc_RNA (1)...(19): siRNA sense strand
gcccuggugcucccuuaaa

SEQ ID NO: 1138149 - RNA, 19 nt, Homo sapiens
  misc_RNA (1)...(19): siRNA sense strand
agaagacccagcuggaguu

SEQ ID NO: 1138150 - RNA, 19 nt, Homo sapiens
  misc_RNA (1)...(19): siRNA sense strand
caaccugaccagugucuac

SEQ ID NO: 1138151 - RNA, 19 nt, Homo sapiens
  misc_RNA (1)...(19): siRNA sense strand
ggaggacacagagcgcuau

SEQ ID NO: 1138152 - RNA, 19 nt, Homo sapiens
  misc_RNA (1)...(19): siRNA sense strand
gcucaccaaccucaacauc

SEQ ID NO: 1138153 - RNA, 19 nt, Homo sapiens
  misc_RNA (1)...(19): siRNA sense strand
uguguggccuggcaagcaa

SEQ ID NO: 1138154 - RNA, 19 nt, Homo sapiens
  misc_RNA (1)...(19): siRNA sense strand
ugaccagugucuacauugc

SEQ ID NO: 1138155 - RNA, 19 nt, Homo sapiens
  misc_RNA (1)...(19): siRNA sense strand
gaagacccagcuggaguuc

SEQ ID NO: 1138156 - RNA, 19 nt, Homo sapiens
  misc_RNA (1)...(19): siRNA sense strand
ggaggcggcagugcaacaa

SEQ ID NO: 1138157 - RNA, 19 nt, Homo sapiens
  misc_RNA (1)...(19): siRNA sense strand
aauguggcguggagaagug

SEQ ID NO: 1138158 - RNA, 19 nt, Homo sapiens
  misc_RNA (1)...(19): siRNA sense strand
uggugaagauggucauucu

SEQ ID NO: 1138159 - RNA, 19 nt, Homo sapiens
  misc_RNA (1)...(19): siRNA sense strand
cgaccugggagucaccauu

SEQ ID NO: 1138160 - RNA, 19 nt, Homo sapiens
  misc_RNA (1)...(19): siRNA sense strand
ccaggugggaggugucaga

SEQ ID NO: 1138161 - RNA, 19 nt, Homo sapiens
  misc_RNA (1)...(19): siRNA sense strand
caaccacaggccucucuuc

SEQ ID NO: 1138162 - RNA, 19 nt, Homo sapiens
  misc_RNA (1)...(19): siRNA sense strand
ccucguuccucuccuggau

SEQ ID NO: 1138163 - RNA, 19 nt, Homo sapiens
  misc_RNA (1)...(19): siRNA sense strand
caggacauuuggcugugau

SEQ ID NO: 1138164 - RNA, 19 nt, Homo sapiens
  misc_RNA (1)...(19): siRNA sense strand
ccacaggccucucuucaca

SEQ ID NO: 1138165 - RNA, 19 nt, Homo sapiens
  misc_RNA (1)...(19): siRNA sense strand
ggccgugucuucuuacuug

SEQ ID NO: 1138166 - RNA, 19 nt, Homo sapiens
  misc_RNA (1)...(19): siRNA sense strand
cacaggccgugucuucuua

SEQ ID NO: 1138167 - RNA, 19 nt, Homo sapiens
  misc_RNA (1)...(19): siRNA sense strand
agaguugucuucaggcuuu

SEQ ID NO: 1138168 - RNA, 19 nt, Homo sapiens
  misc_RNA (1)...(19): siRNA sense strand
accuggagcugccucauua

SEQ ID NO: 1138169 - RNA, 19 nt, Homo sapiens
  misc_RNA (1)...(19): siRNA sense strand
ggaguugccugaugguaac

SEQ ID NO: 1138170 - RNA, 19 nt, Homo sapiens
  misc_RNA (1)...(19): siRNA sense strand
gcagagcgagagaauaugu

SEQ ID NO: 1138171 - RNA, 19 nt, Homo sapiens
  misc_RNA (1)...(19): siRNA sense strand
gaccuggaguugccugaug

SEQ ID NO: 1138172 - RNA, 19 nt, Homo sapiens
  misc_RNA (1)...(19): siRNA sense strand
ucacauuucugacaguuac

SEQ ID NO: 1138173 - RNA, 19 nt, Homo sapiens
  misc_RNA (1)...(19): siRNA sense strand
acauuuggcugugauggua

SEQ ID NO: 1138174 - RNA, 19 nt, Homo sapiens
  misc_RNA (1)...(19): siRNA sense strand
gcaggacauuuggcuguga

SEQ ID NO: 1138175 - RNA, 19 nt, Homo sapiens
  misc_RNA (1)...(19): siRNA sense strand
gugaagauggucauucuga

SEQ ID NO: 1138176 - RNA, 19 nt, Homo sapiens
  misc_RNA (1)...(19): siRNA sense strand
uggcagagcgagagaauau

SEQ ID NO: 1138177 - RNA, 19 nt, Homo sapiens
  misc_RNA (1)...(19): siRNA sense strand
ggacgauggugaggagauc

SEQ ID NO: 1138178 - RNA, 19 nt, Homo sapiens
  misc_RNA (1)...(19): siRNA sense strand
caccauugcccaugagauu

SEQ ID NO: 1138179 - RNA, 19 nt, Homo sapiens
  misc_RNA (1)...(19): siRNA sense strand
gagucaccauugcccauga

SEQ ID NO: 1138180 - RNA, 19 nt, Homo sapiens
  misc_RNA (1)...(19): siRNA sense strand
gaugggacccgguguaugc

SEQ ID NO: 1138181 - RNA, 19 nt, Homo sapiens
  misc_RNA (1)...(19): siRNA sense strand
gauggacucccagcaggua

SEQ ID NO: 1138182 - RNA, 19 nt, Homo sapiens
  misc_RNA (1)...(19): siRNA sense strand
ccacaggccgugucuucuu

SEQ ID NO: 1138183 - RNA, 19 nt, Homo sapiens
  misc_RNA (1)...(19): siRNA sense strand
ccugaccagugucuacauu

SEQ ID NO: 1138184 - RNA, 19 nt, Homo sapiens
  misc_RNA (1)...(19): siRNA sense strand
ggacaggugccaggugugu

SEQ ID NO: 1138185 - RNA, 19 nt, Homo sapiens
  misc_RNA (1)...(19): siRNA sense strand
gaccugggagucaccauug

SEQ ID NO: 1138186 - RNA, 19 nt, Homo sapiens
  misc_RNA (1)...(19): siRNA sense strand
gaguucaugucgcaacagu

SEQ ID NO: 1138187 - RNA, 19 nt, Homo sapiens
  misc_RNA (1)...(19): siRNA sense strand
gcuaugugcucaccaaccu

SEQ ID NO: 1138188 - RNA, 19 nt, Homo sapiens
  misc_RNA (1)...(19): siRNA sense strand
ugcggaggauccuguauug

SEQ ID NO: 1138189 - RNA, 19 nt, Homo sapiens
  misc_RNA (1)...(19): siRNA sense strand
agacccagcuggaguucau

SEQ ID NO: 1138190 - RNA, 19 nt, Homo sapiens
  misc_RNA (1)...(19): siRNA sense strand
ccacggaagggcucuuuca

SEQ ID NO: 1138191 - RNA, 19 nt, Homo sapiens
  misc_RNA (1)...(19): siRNA sense strand
ugucguggcugggaagaug

SEQ ID NO: 1138192 - RNA, 19 nt, Homo sapiens
  misc_RNA (1)...(19): siRNA sense strand
caugggcgcuggucuagcu

SEQ ID NO: 1138193 - RNA, 19 nt, Homo sapiens
  misc_RNA (1)...(19): siRNA sense strand
cggaggauccuguauugug

SEQ ID NO: 1138194 - RNA, 19 nt, Homo sapiens
  misc_RNA (1)...(19): siRNA sense strand
gaucggagggcgcuauguc

SEQ ID NO: 1138195 - RNA, 19 nt, Homo sapiens
  misc_RNA (1)...(19): siRNA sense strand
ccacuggggugcugcugua

SEQ ID NO: 1138196 - RNA, 19 nt, Homo sapiens
  misc_RNA (1)...(19): siRNA sense strand
gugcggaggauccuguauu

SEQ ID NO: 1138197 - RNA, 19 nt, Homo sapiens
  misc_RNA (1)...(19): siRNA sense strand
uggaguugccugaugguaa

SEQ ID NO: 1138198 - RNA, 19 nt, Homo sapiens
  misc_RNA (1)...(19): siRNA sense strand
gugcaugggcgcuggucua

SEQ ID NO: 1138199 - RNA, 19 nt, Homo sapiens
  misc_RNA (1)...(19): siRNA sense strand
cagacccgcuggaccaaag

SEQ ID NO: 1138200 - RNA, 19 nt, Homo sapiens
  misc_RNA (1)...(19): siRNA sense strand
gcccagcucaugcacauca

SEQ ID NO: 1138201 - RNA, 19 nt, Homo sapiens
  misc_RNA (1)...(19): siRNA sense strand
gaauguggcguggagaagu

SEQ ID NO: 1138202 - RNA, 19 nt, Homo sapiens
  misc_RNA (1)...(19): siRNA sense strand
ggguggagccagaccauca

SEQ ID NO: 1138203 - RNA, 19 nt, Homo sapiens
  misc_RNA (1)...(19): siRNA sense strand
cagaauguggcguggagaa

SEQ ID NO: 1138204 - RNA, 19 nt, Homo sapiens
  misc_RNA (1)...(19): siRNA sense strand
ggauggucgugucgaguac

SEQ ID NO: 1138205 - RNA, 19 nt, Homo sapiens
  misc_RNA (1)...(19): siRNA sense strand
acaggccucucuucacaca

SEQ ID NO: 1138206 - RNA, 19 nt, Homo sapiens
  misc_RNA (1)...(19): siRNA sense strand
gggcagcugcaggacauuu

SEQ ID NO: 1138207 - RNA, 19 nt, Homo sapiens
  misc_RNA (1)...(19): siRNA sense strand
acucaggccugcgagaaga

SEQ ID NO: 1138208 - RNA, 19 nt, Homo sapiens
  misc_RNA (1)...(19): siRNA sense strand
gcccuggugcucccuuaaa

SEQ ID NO: 1138209 - RNA, 19 nt, Homo sapiens
  misc_RNA (1)...(19): siRNA sense strand
agaagacccagcuggaguu

SEQ ID NO: 1138210 - RNA, 19 nt, Homo sapiens
  misc_RNA (1)...(19): siRNA sense strand
caaccugaccagugucuac

SEQ ID NO: 1138211 - RNA, 19 nt, Homo sapiens
  misc_RNA (1)...(19): siRNA sense strand
ggaggacacagagcgcuau

SEQ ID NO: 1138212 - RNA, 19 nt, Homo sapiens
  misc_RNA (1)...(19): siRNA sense strand
gcucaccaaccucaacauc

SEQ ID NO: 1138213 - RNA, 19 nt, Homo sapiens
  misc_RNA (1)...(19): siRNA sense strand
uguguggccuggcaagcaa

SEQ ID NO: 1138214 - RNA, 19 nt, Homo sapiens
  misc_RNA (1)...(19): siRNA sense strand
ugaccagugucuacauugc

SEQ ID NO: 1138215 - RNA, 19 nt, Homo sapiens
  misc_RNA (1)...(19): siRNA sense strand
gaagacccagcuggaguuc

SEQ ID NO: 1138216 - RNA, 19 nt, Homo sapiens
  misc_RNA (1)...(19): siRNA sense strand
ggaggcggcagugcaacaa

SEQ ID NO: 1138217 - RNA, 19 nt, Homo sapiens
  misc_RNA (1)...(19): siRNA sense strand
aauguggcguggagaagug

SEQ ID NO: 1138218 - RNA, 19 nt, Homo sapiens
  misc_RNA (1)...(19): siRNA sense strand
uggugaagauggucauucu

SEQ ID NO: 1138219 - RNA, 19 nt, Homo sapiens
  misc_RNA (1)...(19): siRNA sense strand
cgaccugggagucaccauu

SEQ ID NO: 1138220 - RNA, 19 nt, Homo sapiens
  misc_RNA (1)...(19): siRNA sense strand
ccaggugggaggugucaga

SEQ ID NO: 1138221 - RNA, 19 nt, Homo sapiens
  misc_RNA (1)...(19): siRNA sense strand
caaccacaggccucucuuc

SEQ ID NO: 1138222 - RNA, 19 nt, Homo sapiens
  misc_RNA (1)...(19): siRNA sense strand
ccucguuccucuccuggau

SEQ ID NO: 1138223 - RNA, 19 nt, Homo sapiens
  misc_RNA (1)...(19): siRNA sense strand
caggacauuuggcugugau

SEQ ID NO: 1138224 - RNA, 19 nt, Homo sapiens
  misc_RNA (1)...(19): siRNA sense strand
ggccgugucuucuuacuug

SEQ ID NO: 1138225 - RNA, 19 nt, Homo sapiens
  misc_RNA (1)...(19): siRNA sense strand
cacaggccgugucuucuua

SEQ ID NO: 1138226 - RNA, 19 nt, Homo sapiens
  misc_RNA (1)...(19): siRNA sense strand
agaguugucuucaggcuuu

SEQ ID NO: 1138227 - RNA, 19 nt, Homo sapiens
  misc_RNA (1)...(19): siRNA sense strand
accuggagcugccucauua

SEQ ID NO: 1138228 - RNA, 19 nt, Homo sapiens
  misc_RNA (1)...(19): siRNA sense strand
ggaguugccugaugguaac

SEQ ID NO: 1138229 - RNA, 19 nt, Homo sapiens
  misc_RNA (1)...(19): siRNA sense strand
gaccuggaguugccugaug

SEQ ID NO: 1138230 - RNA, 19 nt, Homo sapiens
  misc_RNA (1)...(19): siRNA sense strand
gugaagauggucauucuga

SEQ ID NO: 1138231 - RNA, 19 nt, Homo sapiens
  misc_RNA (1)...(19): siRNA sense strand
caccauugcccaugagauu

SEQ ID NO: 1138232 - RNA, 19 nt, Homo sapiens
  misc_RNA (1)...(19): siRNA sense strand
gagucaccauugcccauga

SEQ ID NO: 1138233 - RNA, 19 nt, Homo sapiens
  misc_RNA (1)...(19): siRNA sense strand
ccacaggccgugucuucuu

SEQ ID NO: 1138234 - RNA, 19 nt, Homo sapiens
  misc_RNA (1)...(19): siRNA sense strand
gaccugggagucaccauug

SEQ ID NO: 1138235 - RNA, 19 nt, Homo sapiens
  misc_RNA (1)...(19): siRNA sense strand
gcuaugugcucaccaaccu

SEQ ID NO: 1138236 - RNA, 19 nt, Homo sapiens
  misc_RNA (1)...(19): siRNA sense strand
uggaguugccugaugguaa

SEQ ID NO: 1138237 - RNA, 19 nt, Homo sapiens
  misc_RNA (1)...(19): siRNA sense strand
ggguggagccagaccauca

SEQ ID NO: 1138238 - RNA, 19 nt, Homo sapiens
  misc_RNA (1)...(19): siRNA sense strand
gcccuggugcucccuuaaa

SEQ ID NO: 1138239 - RNA, 19 nt, Homo sapiens
  misc_RNA (1)...(19): siRNA sense strand
ggaggacacagagcgcuau

SEQ ID NO: 1138240 - RNA, 19 nt, Homo sapiens
  misc_RNA (1)...(19): siRNA sense strand
gcucaccaaccucaacauc

SEQ ID NO: 1138241 - RNA, 19 nt, Homo sapiens
  misc_RNA (1)...(19): siRNA sense strand
uggugaagauggucauucu

SEQ ID NO: 1138242 - RNA, 19 nt, Homo sapiens
  misc_RNA (1)...(19): siRNA sense strand
cgaccugggagucaccauu

SEQ ID NO: 1138243 - RNA, 19 nt, Homo sapiens
  misc_RNA (1)...(19): siRNA sense strand
ccacaggccucucuucaca

SEQ ID NO: 1138244 - RNA, 19 nt, Homo sapiens
  misc_RNA (1)...(19): siRNA sense strand
ggccgugucuucuuacuug

SEQ ID NO: 1138245 - RNA, 19 nt, Homo sapiens
  misc_RNA (1)...(19): siRNA sense strand
cacaggccgugucuucuua

SEQ ID NO: 1138246 - RNA, 19 nt, Homo sapiens
  misc_RNA (1)...(19): siRNA sense strand
agaguugucuucaggcuuu

SEQ ID NO: 1138247 - RNA, 19 nt, Homo sapiens
  misc_RNA (1)...(19): siRNA sense strand
accuggagcugccucauua

SEQ ID NO: 1138248 - RNA, 19 nt, Homo sapiens
  misc_RNA (1)...(19): siRNA sense strand
ggaguugccugaugguaac

SEQ ID NO: 1138249 - RNA, 19 nt, Homo sapiens
  misc_RNA (1)...(19): siRNA sense strand
gcagagcgagagaauaugu

SEQ ID NO: 1138250 - RNA, 19 nt, Homo sapiens
  misc_RNA (1)...(19): siRNA sense strand
gaccuggaguugccugaug

SEQ ID NO: 1138251 - RNA, 19 nt, Homo sapiens
  misc_RNA (1)...(19): siRNA sense strand
ucacauuucugacaguuac

SEQ ID NO: 1138252 - RNA, 19 nt, Homo sapiens
  misc_RNA (1)...(19): siRNA sense strand
acauuuggcugugauggua

SEQ ID NO: 1138253 - RNA, 19 nt, Homo sapiens
  misc_RNA (1)...(19): siRNA sense strand
gcaggacauuuggcuguga

SEQ ID NO: 1138254 - RNA, 19 nt, Homo sapiens
  misc_RNA (1)...(19): siRNA sense strand
gugaagauggucauucuga

SEQ ID NO: 1138255 - RNA, 19 nt, Homo sapiens
  misc_RNA (1)...(19): siRNA sense strand
uggcagagcgagagaauau

SEQ ID NO: 1138256 - RNA, 19 nt, Homo sapiens
  misc_RNA (1)...(19): siRNA sense strand
ggacgauggugaggagauc

SEQ ID NO: 1138257 - RNA, 19 nt, Homo sapiens
  misc_RNA (1)...(19): siRNA sense strand
caccauugcccaugagauu

SEQ ID NO: 1138258 - RNA, 19 nt, Homo sapiens
  misc_RNA (1)...(19): siRNA sense strand
gagucaccauugcccauga

SEQ ID NO: 1138259 - RNA, 19 nt, Homo sapiens
  misc_RNA (1)...(19): siRNA sense strand
gaugggacccgguguaugc

SEQ ID NO: 1138260 - RNA, 19 nt, Homo sapiens
  misc_RNA (1)...(19): siRNA sense strand
gauggacucccagcaggua

SEQ ID NO: 1138261 - RNA, 19 nt, Homo sapiens
  misc_RNA (1)...(19): siRNA sense strand
ccacaggccgugucuucuu

SEQ ID NO: 1138262 - RNA, 19 nt, Homo sapiens
  misc_RNA (1)...(19): siRNA sense strand
ccugaccagugucuacauu

SEQ ID NO: 1138263 - RNA, 19 nt, Homo sapiens
  misc_RNA (1)...(19): siRNA sense strand
ggacaggugccaggugugu

SEQ ID NO: 1138264 - RNA, 19 nt, Homo sapiens
  misc_RNA (1)...(19): siRNA sense strand
gaccugggagucaccauug

SEQ ID NO: 1138265 - RNA, 19 nt, Homo sapiens
  misc_RNA (1)...(19): siRNA sense strand
gaguucaugucgcaacagu

SEQ ID NO: 1138266 - RNA, 19 nt, Homo sapiens
  misc_RNA (1)...(19): siRNA sense strand
gcuaugugcucaccaaccu

SEQ ID NO: 1138267 - RNA, 19 nt, Homo sapiens
  misc_RNA (1)...(19): siRNA sense strand
ugcggaggauccuguauug

SEQ ID NO: 1138268 - RNA, 19 nt, Homo sapiens
  misc_RNA (1)...(19): siRNA sense strand
agacccagcuggaguucau

SEQ ID NO: 1138269 - RNA, 19 nt, Homo sapiens
  misc_RNA (1)...(19): siRNA sense strand
ccacggaagggcucuuuca

SEQ ID NO: 1138270 - RNA, 19 nt, Homo sapiens
  misc_RNA (1)...(19): siRNA sense strand
ugucguggcugggaagaug

SEQ ID NO: 1138271 - RNA, 19 nt, Homo sapiens
  misc_RNA (1)...(19): siRNA sense strand
caugggcgcuggucuagcu

SEQ ID NO: 1138272 - RNA, 19 nt, Homo sapiens
  misc_RNA (1)...(19): siRNA sense strand
cggaggauccuguauugug

SEQ ID NO: 1138273 - RNA, 19 nt, Homo sapiens
  misc_RNA (1)...(19): siRNA sense strand
gaucggagggcgcuauguc

SEQ ID NO: 1138274 - RNA, 19 nt, Homo sapiens
  misc_RNA (1)...(19): siRNA sense strand
ccacuggggugcugcugua

SEQ ID NO: 1138275 - RNA, 19 nt, Homo sapiens
  misc_RNA (1)...(19): siRNA sense strand
gugcggaggauccuguauu

SEQ ID NO: 1138276 - RNA, 19 nt, Homo sapiens
  misc_RNA (1)...(19): siRNA sense strand
uggaguugccugaugguaa

SEQ ID NO: 1138277 - RNA, 19 nt, Homo sapiens
  misc_RNA (1)...(19): siRNA sense strand
gugcaugggcgcuggucua

SEQ ID NO: 1138278 - RNA, 19 nt, Homo sapiens
  misc_RNA (1)...(19): siRNA sense strand
cagacccgcuggaccaaag

SEQ ID NO: 1138279 - RNA, 19 nt, Homo sapiens
  misc_RNA (1)...(19): siRNA sense strand
gcccagcucaugcacauca

SEQ ID NO: 1138280 - RNA, 19 nt, Homo sapiens
  misc_RNA (1)...(19): siRNA sense strand
gaauguggcguggagaagu

SEQ ID NO: 1138281 - RNA, 19 nt, Homo sapiens
  misc_RNA (1)...(19): siRNA sense strand
ggguggagccagaccauca

SEQ ID NO: 1138282 - RNA, 19 nt, Homo sapiens
  misc_RNA (1)...(19): siRNA sense strand
cagaauguggcguggagaa

SEQ ID NO: 1138283 - RNA, 19 nt, Homo sapiens
  misc_RNA (1)...(19): siRNA sense strand
ggauggucgugucgaguac

SEQ ID NO: 1138284 - RNA, 19 nt, Homo sapiens
  misc_RNA (1)...(19): siRNA sense strand
acaggccucucuucacaca

SEQ ID NO: 1138285 - RNA, 19 nt, Homo sapiens
  misc_RNA (1)...(19): siRNA sense strand
gggcagcugcaggacauuu

SEQ ID NO: 1138286 - RNA, 19 nt, Homo sapiens
  misc_RNA (1)...(19): siRNA sense strand
acucaggccugcgagaaga

SEQ ID NO: 1138287 - RNA, 19 nt, Homo sapiens
  misc_RNA (1)...(19): siRNA sense strand
gcccuggugcucccuuaaa

SEQ ID NO: 1138288 - RNA, 19 nt, Homo sapiens
  misc_RNA (1)...(19): siRNA sense strand
agaagacccagcuggaguu

SEQ ID NO: 1138289 - RNA, 19 nt, Homo sapiens
  misc_RNA (1)...(19): siRNA sense strand
caaccugaccagugucuac

SEQ ID NO: 1138290 - RNA, 19 nt, Homo sapiens
  misc_RNA (1)...(19): siRNA sense strand
ggaggacacagagcgcuau

SEQ ID NO: 1138291 - RNA, 19 nt, Homo sapiens
  misc_RNA (1)...(19): siRNA sense strand
gcucaccaaccucaacauc

SEQ ID NO: 1138292 - RNA, 19 nt, Homo sapiens
  misc_RNA (1)...(19): siRNA sense strand
uguguggccuggcaagcaa

SEQ ID NO: 1138293 - RNA, 19 nt, Homo sapiens
  misc_RNA (1)...(19): siRNA sense strand
ugaccagugucuacauugc

SEQ ID NO: 1138294 - RNA, 19 nt, Homo sapiens
  misc_RNA (1)...(19): siRNA sense strand
gaagacccagcuggaguuc

SEQ ID NO: 1138295 - RNA, 19 nt, Homo sapiens
  misc_RNA (1)...(19): siRNA sense strand
ggaggcggcagugcaacaa

SEQ ID NO: 1138296 - RNA, 19 nt, Homo sapiens
  misc_RNA (1)...(19): siRNA sense strand
aauguggcguggagaagug

SEQ ID NO: 1138297 - RNA, 19 nt, Homo sapiens
  misc_RNA (1)...(19): siRNA sense strand
uggugaagauggucauucu

SEQ ID NO: 1138298 - RNA, 19 nt, Homo sapiens
  misc_RNA (1)...(19): siRNA sense strand
cgaccugggagucaccauu

SEQ ID NO: 1138299 - RNA, 19 nt, Homo sapiens
  misc_RNA (1)...(19): siRNA sense strand
ccaggugggaggugucaga

SEQ ID NO: 1138300 - RNA, 19 nt, Homo sapiens
  misc_RNA (1)...(19): siRNA sense strand
caaccacaggccucucuuc

SEQ ID NO: 1138301 - RNA, 19 nt, Homo sapiens
  misc_RNA (1)...(19): siRNA sense strand
ccucguuccucuccuggau

SEQ ID NO: 1138302 - RNA, 19 nt, Homo sapiens
  misc_RNA (1)...(19): siRNA sense strand
caggacauuuggcugugau

SEQ ID NO: 1138303 - RNA, 19 nt, Homo sapiens
  misc_RNA (1)...(19): siRNA sense strand
ccacaggccucucuucaca

SEQ ID NO: 1138304 - RNA, 19 nt, Homo sapiens
  misc_RNA (1)...(19): siRNA sense strand
ggccgugucuucuuacuug

SEQ ID NO: 1138305 - RNA, 19 nt, Homo sapiens
  misc_RNA (1)...(19): siRNA sense strand
cacaggccgugucuucuua

SEQ ID NO: 1138306 - RNA, 19 nt, Homo sapiens
  misc_RNA (1)...(19): siRNA sense strand
agaguugucuucaggcuuu

SEQ ID NO: 1138307 - RNA, 19 nt, Homo sapiens
  misc_RNA (1)...(19): siRNA sense strand
accuggagcugccucauua

SEQ ID NO: 1138308 - RNA, 19 nt, Homo sapiens
  misc_RNA (1)...(19): siRNA sense strand
ggaguugccugaugguaac

SEQ ID NO: 1138309 - RNA, 19 nt, Homo sapiens
  misc_RNA (1)...(19): siRNA sense strand
gcagagcgagagaauaugu

SEQ ID NO: 1138310 - RNA, 19 nt, Homo sapiens
  misc_RNA (1)...(19): siRNA sense strand
gaccuggaguugccugaug

SEQ ID NO: 1138311 - RNA, 19 nt, Homo sapiens
  misc_RNA (1)...(19): siRNA sense strand
ucacauuucugacaguuac

SEQ ID NO: 1138312 - RNA, 19 nt, Homo sapiens
  misc_RNA (1)...(19): siRNA sense strand
acauuuggcugugauggua

SEQ ID NO: 1138313 - RNA, 19 nt, Homo sapiens
  misc_RNA (1)...(19): siRNA sense strand
gcaggacauuuggcuguga

SEQ ID NO: 1138314 - RNA, 19 nt, Homo sapiens
  misc_RNA (1)...(19): siRNA sense strand
gugaagauggucauucuga

SEQ ID NO: 1138315 - RNA, 19 nt, Homo sapiens
  misc_RNA (1)...(19): siRNA sense strand
uggcagagcgagagaauau

SEQ ID NO: 1138316 - RNA, 19 nt, Homo sapiens
  misc_RNA (1)...(19): siRNA sense strand
ggacgauggugaggagauc

SEQ ID NO: 1138317 - RNA, 19 nt, Homo sapiens
  misc_RNA (1)...(19): siRNA sense strand
caccauugcccaugagauu

SEQ ID NO: 1138318 - RNA, 19 nt, Homo sapiens
  misc_RNA (1)...(19): siRNA sense strand
gagucaccauugcccauga

SEQ ID NO: 1138319 - RNA, 19 nt, Homo sapiens
  misc_RNA (1)...(19): siRNA sense strand
gaugggacccgguguaugc

SEQ ID NO: 1138320 - RNA, 19 nt, Homo sapiens
  misc_RNA (1)...(19): siRNA sense strand
gauggacucccagcaggua

SEQ ID NO: 1138321 - RNA, 19 nt, Homo sapiens
  misc_RNA (1)...(19): siRNA sense strand
ccacaggccgugucuucuu

SEQ ID NO: 1138322 - RNA, 19 nt, Homo sapiens
  misc_RNA (1)...(19): siRNA sense strand
ccugaccagugucuacauu

SEQ ID NO: 1138323 - RNA, 19 nt, Homo sapiens
  misc_RNA (1)...(19): siRNA sense strand
ggacaggugccaggugugu

SEQ ID NO: 1138324 - RNA, 19 nt, Homo sapiens
  misc_RNA (1)...(19): siRNA sense strand
gaccugggagucaccauug

SEQ ID NO: 1138325 - RNA, 19 nt, Homo sapiens
  misc_RNA (1)...(19): siRNA sense strand
gaguucaugucgcaacagu

SEQ ID NO: 1138326 - RNA, 19 nt, Homo sapiens
  misc_RNA (1)...(19): siRNA sense strand
gcuaugugcucaccaaccu

SEQ ID NO: 1138327 - RNA, 19 nt, Homo sapiens
  misc_RNA (1)...(19): siRNA sense strand
ugcggaggauccuguauug

SEQ ID NO: 1138328 - RNA, 19 nt, Homo sapiens
  misc_RNA (1)...(19): siRNA sense strand
agacccagcuggaguucau

SEQ ID NO: 1138329 - RNA, 19 nt, Homo sapiens
  misc_RNA (1)...(19): siRNA sense strand
ccacggaagggcucuuuca

SEQ ID NO: 1138330 - RNA, 19 nt, Homo sapiens
  misc_RNA (1)...(19): siRNA sense strand
ugucguggcugggaagaug

SEQ ID NO: 1138331 - RNA, 19 nt, Homo sapiens
  misc_RNA (1)...(19): siRNA sense strand
caugggcgcuggucuagcu

SEQ ID NO: 1138332 - RNA, 19 nt, Homo sapiens
  misc_RNA (1)...(19): siRNA sense strand
cggaggauccuguauugug

SEQ ID NO: 1138333 - RNA, 19 nt, Homo sapiens
  misc_RNA (1)...(19): siRNA sense strand
gaucggagggcgcuauguc

SEQ ID NO: 1138334 - RNA, 19 nt, Homo sapiens
  misc_RNA (1)...(19): siRNA sense strand
ccacuggggugcugcugua

SEQ ID NO: 1138335 - RNA, 19 nt, Homo sapiens
  misc_RNA (1)...(19): siRNA sense strand
gugcggaggauccuguauu

SEQ ID NO: 1138336 - RNA, 19 nt, Homo sapiens
  misc_RNA (1)...(19): siRNA sense strand
uggaguugccugaugguaa

SEQ ID NO: 1138337 - RNA, 19 nt, Homo sapiens
  misc_RNA (1)...(19): siRNA sense strand
gugcaugggcgcuggucua

SEQ ID NO: 1138338 - RNA, 19 nt, Homo sapiens
  misc_RNA (1)...(19): siRNA sense strand
cagacccgcuggaccaaag

SEQ ID NO: 1138339 - RNA, 19 nt, Homo sapiens
  misc_RNA (1)...(19): siRNA sense strand
gcccagcucaugcacauca

SEQ ID NO: 1138340 - RNA, 19 nt, Homo sapiens
  misc_RNA (1)...(19): siRNA sense strand
gaauguggcguggagaagu

SEQ ID NO: 1138341 - RNA, 19 nt, Homo sapiens
  misc_RNA (1)...(19): siRNA sense strand
ggguggagccagaccauca

SEQ ID NO: 1138342 - RNA, 19 nt, Homo sapiens
  misc_RNA (1)...(19): siRNA sense strand
cagaauguggcguggagaa

SEQ ID NO: 1138343 - RNA, 19 nt, Homo sapiens
  misc_RNA (1)...(19): siRNA sense strand
ggauggucgugucgaguac

SEQ ID NO: 1138344 - RNA, 19 nt, Homo sapiens
  misc_RNA (1)...(19): siRNA sense strand
acaggccucucuucacaca

SEQ ID NO: 1138345 - RNA, 19 nt, Homo sapiens
  misc_RNA (1)...(19): siRNA sense strand
gggcagcugcaggacauuu

SEQ ID NO: 1138346 - RNA, 19 nt, Homo sapiens
  misc_RNA (1)...(19): siRNA sense strand
acucaggccugcgagaaga

SEQ ID NO: 1138347 - RNA, 19 nt, Homo sapiens
  misc_RNA (1)...(19): siRNA sense strand
gcccuggugcucccuuaaa

SEQ ID NO: 1138348 - RNA, 19 nt, Homo sapiens
  misc_RNA (1)...(19): siRNA sense strand
agaagacccagcuggaguu

SEQ ID NO: 1138349 - RNA, 19 nt, Homo sapiens
  misc_RNA (1)...(19): siRNA sense strand
caaccugaccagugucuac

SEQ ID NO: 1138350 - RNA, 19 nt, Homo sapiens
  misc_RNA (1)...(19): siRNA sense strand
ggaggacacagagcgcuau

SEQ ID NO: 1138351 - RNA, 19 nt, Homo sapiens
  misc_RNA (1)...(19): siRNA sense strand
gcucaccaaccucaacauc

SEQ ID NO: 1138352 - RNA, 19 nt, Homo sapiens
  misc_RNA (1)...(19): siRNA sense strand
uguguggccuggcaagcaa

SEQ ID NO: 1138353 - RNA, 19 nt, Homo sapiens
  misc_RNA (1)...(19): siRNA sense strand
ugaccagugucuacauugc

SEQ ID NO: 1138354 - RNA, 19 nt, Homo sapiens
  misc_RNA (1)...(19): siRNA sense strand
gaagacccagcuggaguuc

SEQ ID NO: 1138355 - RNA, 19 nt, Homo sapiens
  misc_RNA (1)...(19): siRNA sense strand
ggaggcggcagugcaacaa

SEQ ID NO: 1138356 - RNA, 19 nt, Homo sapiens
  misc_RNA (1)...(19): siRNA sense strand
aauguggcguggagaagug

SEQ ID NO: 1138357 - RNA, 19 nt, Homo sapiens
  misc_RNA (1)...(19): siRNA sense strand
uggugaagauggucauucu

SEQ ID NO: 1138358 - RNA, 19 nt, Homo sapiens
  misc_RNA (1)...(19): siRNA sense strand
cgaccugggagucaccauu

SEQ ID NO: 1138359 - RNA, 19 nt, Homo sapiens
  misc_RNA (1)...(19): siRNA sense strand
ccaggugggaggugucaga

SEQ ID NO: 1138360 - RNA, 19 nt, Homo sapiens
  misc_RNA (1)...(19): siRNA sense strand
caaccacaggccucucuuc

SEQ ID NO: 1138361 - RNA, 19 nt, Homo sapiens
  misc_RNA (1)...(19): siRNA sense strand
ccucguuccucuccuggau

SEQ ID NO: 1138362 - RNA, 19 nt, Homo sapiens
  misc_RNA (1)...(19): siRNA sense strand
caggacauuuggcugugau

SEQ ID NO: 1138363 - RNA, 19 nt, Homo sapiens
  misc_RNA (1)...(19): siRNA sense strand
ccacaggccucucuucaca

SEQ ID NO: 1138364 - RNA, 19 nt, Homo sapiens
  misc_RNA (1)...(19): siRNA sense strand
ggccgugucuucuuacuug

SEQ ID NO: 1138365 - RNA, 19 nt, Homo sapiens
  misc_RNA (1)...(19): siRNA sense strand
cacaggccgugucuucuua

SEQ ID NO: 1138366 - RNA, 19 nt, Homo sapiens
  misc_RNA (1)...(19): siRNA sense strand
agaguugucuucaggcuuu

SEQ ID NO: 1138367 - RNA, 19 nt, Homo sapiens
  misc_RNA (1)...(19): siRNA sense strand
accuggagcugccucauua

SEQ ID NO: 1138368 - RNA, 19 nt, Homo sapiens
  misc_RNA (1)...(19): siRNA sense strand
ggaguugccugaugguaac

SEQ ID NO: 1138369 - RNA, 19 nt, Homo sapiens
  misc_RNA (1)...(19): siRNA sense strand
gcagagcgagagaauaugu

SEQ ID NO: 1138370 - RNA, 19 nt, Homo sapiens
  misc_RNA (1)...(19): siRNA sense strand
gaccuggaguugccugaug

SEQ ID NO: 1138371 - RNA, 19 nt, Homo sapiens
  misc_RNA (1)...(19): siRNA sense strand
ucacauuucugacaguuac

SEQ ID NO: 1138372 - RNA, 19 nt, Homo sapiens
  misc_RNA (1)...(19): siRNA sense strand
acauuuggcugugauggua

SEQ ID NO: 1138373 - RNA, 19 nt, Homo sapiens
  misc_RNA (1)...(19): siRNA sense strand
gcaggacauuuggcuguga

SEQ ID NO: 1138374 - RNA, 19 nt, Homo sapiens
  misc_RNA (1)...(19): siRNA sense strand
gugaagauggucauucuga

SEQ ID NO: 1138375 - RNA, 19 nt, Homo sapiens
  misc_RNA (1)...(19): siRNA sense strand
uggcagagcgagagaauau

SEQ ID NO: 1138376 - RNA, 19 nt, Homo sapiens
  misc_RNA (1)...(19): siRNA sense strand
ggacgauggugaggagauc

SEQ ID NO: 1138377 - RNA, 19 nt, Homo sapiens
  misc_RNA (1)...(19): siRNA sense strand
caccauugcccaugagauu

SEQ ID NO: 1138378 - RNA, 19 nt, Homo sapiens
  misc_RNA (1)...(19): siRNA sense strand
gagucaccauugcccauga

SEQ ID NO: 1138379 - RNA, 19 nt, Homo sapiens
  misc_RNA (1)...(19): siRNA sense strand
gaugggacccgguguaugc

SEQ ID NO: 1138380 - RNA, 19 nt, Homo sapiens
  misc_RNA (1)...(19): siRNA sense strand
gauggacucccagcaggua

SEQ ID NO: 1138381 - RNA, 19 nt, Homo sapiens
  misc_RNA (1)...(19): siRNA sense strand
ccacaggccgugucuucuu

SEQ ID NO: 1138382 - RNA, 19 nt, Homo sapiens
  misc_RNA (1)...(19): siRNA sense strand
ccugaccagugucuacauu

SEQ ID NO: 1138383 - RNA, 19 nt, Homo sapiens
  misc_RNA (1)...(19): siRNA sense strand
ggacaggugccaggugugu

SEQ ID NO: 1138384 - RNA, 19 nt, Homo sapiens
  misc_RNA (1)...(19): siRNA sense strand
gaccugggagucaccauug

SEQ ID NO: 1138385 - RNA, 19 nt, Homo sapiens
  misc_RNA (1)...(19): siRNA sense strand
gaguucaugucgcaacagu

SEQ ID NO: 1138386 - RNA, 19 nt, Homo sapiens
  misc_RNA (1)...(19): siRNA sense strand
gcuaugugcucaccaaccu

SEQ ID NO: 1138387 - RNA, 19 nt, Homo sapiens
  misc_RNA (1)...(19): siRNA sense strand
ugcggaggauccuguauug

SEQ ID NO: 1138388 - RNA, 19 nt, Homo sapiens
  misc_RNA (1)...(19): siRNA sense strand
agacccagcuggaguucau

SEQ ID NO: 1138389 - RNA, 19 nt, Homo sapiens
  misc_RNA (1)...(19): siRNA sense strand
ccacggaagggcucuuuca

SEQ ID NO: 1138390 - RNA, 19 nt, Homo sapiens
  misc_RNA (1)...(19): siRNA sense strand
ugucguggcugggaagaug

SEQ ID NO: 1138391 - RNA, 19 nt, Homo sapiens
  misc_RNA (1)...(19): siRNA sense strand
caugggcgcuggucuagcu

SEQ ID NO: 1138392 - RNA, 19 nt, Homo sapiens
  misc_RNA (1)...(19): siRNA sense strand
cggaggauccuguauugug

SEQ ID NO: 1138393 - RNA, 19 nt, Homo sapiens
  misc_RNA (1)...(19): siRNA sense strand
gaucggagggcgcuauguc

SEQ ID NO: 1138394 - RNA, 19 nt, Homo sapiens
  misc_RNA (1)...(19): siRNA sense strand
ccacuggggugcugcugua

SEQ ID NO: 1138395 - RNA, 19 nt, Homo sapiens
  misc_RNA (1)...(19): siRNA sense strand
gugcggaggauccuguauu

SEQ ID NO: 1138396 - RNA, 19 nt, Homo sapiens
  misc_RNA (1)...(19): siRNA sense strand
uggaguugccugaugguaa

SEQ ID NO: 1138397 - RNA, 19 nt, Homo sapiens
  misc_RNA (1)...(19): siRNA sense strand
gugcaugggcgcuggucua

SEQ ID NO: 1138398 - RNA, 19 nt, Homo sapiens
  misc_RNA (1)...(19): siRNA sense strand
cagacccgcuggaccaaag

SEQ ID NO: 1138399 - RNA, 19 nt, Homo sapiens
  misc_RNA (1)...(19): siRNA sense strand
gcccagcucaugcacauca

SEQ ID NO: 1138400 - RNA, 19 nt, Homo sapiens
  misc_RNA (1)...(19): siRNA sense strand
gaauguggcguggagaagu

SEQ ID NO: 1138401 - RNA, 19 nt, Homo sapiens
  misc_RNA (1)...(19): siRNA sense strand
ggguggagccagaccauca

SEQ ID NO: 1138402 - RNA, 19 nt, Homo sapiens
  misc_RNA (1)...(19): siRNA sense strand
cagaauguggcguggagaa

SEQ ID NO: 1138403 - RNA, 19 nt, Homo sapiens
  misc_RNA (1)...(19): siRNA sense strand
ggauggucgugucgaguac

SEQ ID NO: 1138404 - RNA, 19 nt, Homo sapiens
  misc_RNA (1)...(19): siRNA sense strand
acaggccucucuucacaca

SEQ ID NO: 1138405 - RNA, 19 nt, Homo sapiens
  misc_RNA (1)...(19): siRNA sense strand
gggcagcugcaggacauuu

SEQ ID NO: 1138406 - RNA, 19 nt, Homo sapiens
  misc_RNA (1)...(19): siRNA sense strand
acucaggccugcgagaaga

SEQ ID NO: 1138407 - RNA, 19 nt, Homo sapiens
  misc_RNA (1)...(19): siRNA sense strand
gcccuggugcucccuuaaa

SEQ ID NO: 1138408 - RNA, 19 nt, Homo sapiens
  misc_RNA (1)...(19): siRNA sense strand
agaagacccagcuggaguu

SEQ ID NO: 1138409 - RNA, 19 nt, Homo sapiens
  misc_RNA (1)...(19): siRNA sense strand
caaccugaccagugucuac

SEQ ID NO: 1138410 - RNA, 19 nt, Homo sapiens
  misc_RNA (1)...(19): siRNA sense strand
ggaggacacagagcgcuau

SEQ ID NO: 1138411 - RNA, 19 nt, Homo sapiens
  misc_RNA (1)...(19): siRNA sense strand
gcucaccaaccucaacauc

SEQ ID NO: 1138412 - RNA, 19 nt, Homo sapiens
  misc_RNA (1)...(19): siRNA sense strand
uguguggccuggcaagcaa

SEQ ID NO: 1138413 - RNA, 19 nt, Homo sapiens
  misc_RNA (1)...(19): siRNA sense strand
ugaccagugucuacauugc

SEQ ID NO: 1138414 - RNA, 19 nt, Homo sapiens
  misc_RNA (1)...(19): siRNA sense strand
gaagacccagcuggaguuc

SEQ ID NO: 1138415 - RNA, 19 nt, Homo sapiens
  misc_RNA (1)...(19): siRNA sense strand
ggaggcggcagugcaacaa

SEQ ID NO: 1138416 - RNA, 19 nt, Homo sapiens
  misc_RNA (1)...(19): siRNA sense strand
aauguggcguggagaagug

SEQ ID NO: 1138417 - RNA, 19 nt, Homo sapiens
  misc_RNA (1)...(19): siRNA sense strand
uggugaagauggucauucu

SEQ ID NO: 1138418 - RNA, 19 nt, Homo sapiens
  misc_RNA (1)...(19): siRNA sense strand
cgaccugggagucaccauu

SEQ ID NO: 1138419 - RNA, 19 nt, Homo sapiens
  misc_RNA (1)...(19): siRNA sense strand
ccaggugggaggugucaga

SEQ ID NO: 1138420 - RNA, 19 nt, Homo sapiens
  misc_RNA (1)...(19): siRNA sense strand
caaccacaggccucucuuc

SEQ ID NO: 1138421 - RNA, 19 nt, Homo sapiens
  misc_RNA (1)...(19): siRNA sense strand
ccucguuccucuccuggau

SEQ ID NO: 1138422 - RNA, 19 nt, Homo sapiens
  misc_RNA (1)...(19): siRNA sense strand
caggacauuuggcugugau

SEQ ID NO: 1138423 - RNA, 19 nt, Homo sapiens
  misc_RNA (1)...(19): siRNA sense strand
ggccgugucuucuuacuug

SEQ ID NO: 1138424 - RNA, 19 nt, Homo sapiens
  misc_RNA (1)...(19): siRNA sense strand
cacaggccgugucuucuua

SEQ ID NO: 1138425 - RNA, 19 nt, Homo sapiens
  misc_RNA (1)...(19): siRNA sense strand
agaguugucuucaggcuuu

SEQ ID NO: 1138426 - RNA, 19 nt, Homo sapiens
  misc_RNA (1)...(19): siRNA sense strand
accuggagcugccucauua

SEQ ID NO: 1138427 - RNA, 19 nt, Homo sapiens
  misc_RNA (1)...(19): siRNA sense strand
ggaguugccugaugguaac

SEQ ID NO: 1138428 - RNA, 19 nt, Homo sapiens
  misc_RNA (1)...(19): siRNA sense strand
gaccuggaguugccugaug

SEQ ID NO: 1138429 - RNA, 19 nt, Homo sapiens
  misc_RNA (1)...(19): siRNA sense strand
gugaagauggucauucuga

SEQ ID NO: 1138430 - RNA, 19 nt, Homo sapiens
  misc_RNA (1)...(19): siRNA sense strand
caccauugcccaugagauu

SEQ ID NO: 1138431 - RNA, 19 nt, Homo sapiens
  misc_RNA (1)...(19): siRNA sense strand
gagucaccauugcccauga

SEQ ID NO: 1138432 - RNA, 19 nt, Homo sapiens
  misc_RNA (1)...(19): siRNA sense strand
ccacaggccgugucuucuu

SEQ ID NO: 1138433 - RNA, 19 nt, Homo sapiens
  misc_RNA (1)...(19): siRNA sense strand
gaccugggagucaccauug

SEQ ID NO: 1138434 - RNA, 19 nt, Homo sapiens
  misc_RNA (1)...(19): siRNA sense strand
gcuaugugcucaccaaccu

SEQ ID NO: 1138435 - RNA, 19 nt, Homo sapiens
  misc_RNA (1)...(19): siRNA sense strand
uggaguugccugaugguaa

SEQ ID NO: 1138436 - RNA, 19 nt, Homo sapiens
  misc_RNA (1)...(19): siRNA sense strand
ggguggagccagaccauca

SEQ ID NO: 1138437 - RNA, 19 nt, Homo sapiens
  misc_RNA (1)...(19): siRNA sense strand
gcccuggugcucccuuaaa

SEQ ID NO: 1138438 - RNA, 19 nt, Homo sapiens
  misc_RNA (1)...(19): siRNA sense strand
ggaggacacagagcgcuau

SEQ ID NO: 1138439 - RNA, 19 nt, Homo sapiens
  misc_RNA (1)...(19): siRNA sense strand
gcucaccaaccucaacauc

SEQ ID NO: 1138440 - RNA, 19 nt, Homo sapiens
  misc_RNA (1)...(19): siRNA sense strand
uggugaagauggucauucu

SEQ ID NO: 1138441 - RNA, 19 nt, Homo sapiens
  misc_RNA (1)...(19): siRNA sense strand
cgaccugggagucaccauu

SEQ ID NO: 1138442 - RNA, 19 nt, Homo sapiens
  misc_RNA (1)...(19): siRNA sense strand
uaaaugaacccaagaagaa

SEQ ID NO: 1138443 - RNA, 19 nt, Homo sapiens
  misc_RNA (1)...(19): siRNA sense strand
ggacuugacuccuguugug

SEQ ID NO: 1138444 - RNA, 19 nt, Homo sapiens
  misc_RNA (1)...(19): siRNA sense strand
gaagaaauaugcaaaagag

SEQ ID NO: 1138445 - RNA, 19 nt, Homo sapiens
  misc_RNA (1)...(19): siRNA sense strand
guaaaugaacccaagaaga

SEQ ID NO: 1138446 - RNA, 19 nt, Homo sapiens
  misc_RNA (1)...(19): siRNA sense strand
cuauaacccugaagcugua

SEQ ID NO: 1138447 - RNA, 19 nt, Homo sapiens
  misc_RNA (1)...(19): siRNA sense strand
acaccuuccuugcugauuu

SEQ ID NO: 1138448 - RNA, 19 nt, Homo sapiens
  misc_RNA (1)...(19): siRNA sense strand
gcaggcgcaugcagaacuu

SEQ ID NO: 1138449 - RNA, 19 nt, Homo sapiens
  misc_RNA (1)...(19): siRNA sense strand
cgucagcagugaacaugaa

SEQ ID NO: 1138450 - RNA, 19 nt, Homo sapiens
  misc_RNA (1)...(19): siRNA sense strand
cccugaagcuguaaaugaa

SEQ ID NO: 1138451 - RNA, 19 nt, Homo sapiens
  misc_RNA (1)...(19): siRNA sense strand
ccaagaagaagaaauaugc

SEQ ID NO: 1138452 - RNA, 19 nt, Homo sapiens
  misc_RNA (1)...(19): siRNA sense strand
caccaaacccugcagucua

SEQ ID NO: 1138453 - RNA, 19 nt, Homo sapiens
  misc_RNA (1)...(19): siRNA sense strand
ggagcaggcgcaugcagaa

SEQ ID NO: 1138454 - RNA, 19 nt, Homo sapiens
  misc_RNA (1)...(19): siRNA sense strand
caaacccugcagucuauaa

SEQ ID NO: 1138455 - RNA, 19 nt, Homo sapiens
  misc_RNA (1)...(19): siRNA sense strand
caugaacccugcaccaaac

SEQ ID NO: 1138456 - RNA, 19 nt, Homo sapiens
  misc_RNA (1)...(19): siRNA sense strand
accaaacccugcagucuau

SEQ ID NO: 1138457 - RNA, 19 nt, Homo sapiens
  misc_RNA (1)...(19): siRNA sense strand
aacccaagaagaagaaaua

SEQ ID NO: 1138458 - RNA, 19 nt, Homo sapiens
  misc_RNA (1)...(19): siRNA sense strand
gcaguggucccagucaaga

SEQ ID NO: 1138459 - RNA, 19 nt, Homo sapiens
  misc_RNA (1)...(19): siRNA sense strand
gaacccaagaagaagaaau

SEQ ID NO: 1138460 - RNA, 19 nt, Homo sapiens
  misc_RNA (1)...(19): siRNA sense strand
caccuuccuugcugauuug

SEQ ID NO: 1138461 - RNA, 19 nt, Homo sapiens
  misc_RNA (1)...(19): siRNA sense strand
gcaccaaacccugcagucu

SEQ ID NO: 1138462 - RNA, 19 nt, Homo sapiens
  misc_RNA (1)...(19): siRNA sense strand
ggcaagaagcccacaccuu

SEQ ID NO: 1138463 - RNA, 19 nt, Homo sapiens
  misc_RNA (1)...(19): siRNA sense strand
acaugaacccugcaccaaa

SEQ ID NO: 1138464 - RNA, 19 nt, Homo sapiens
  misc_RNA (1)...(19): siRNA sense strand
augcagaacuuugccuuca

SEQ ID NO: 1138465 - RNA, 19 nt, Homo sapiens
  misc_RNA (1)...(19): siRNA sense strand
acccugaagcuguaaauga

SEQ ID NO: 1138466 - RNA, 19 nt, Homo sapiens
  misc_RNA (1)...(19): siRNA sense strand
guugugccgucagcaguga

SEQ ID NO: 1138467 - RNA, 19 nt, Homo sapiens
  misc_RNA (1)...(19): siRNA sense strand
caagaagaagaaauaugca

SEQ ID NO: 1138468 - RNA, 19 nt, Homo sapiens
  misc_RNA (1)...(19): siRNA sense strand
gaagagaguuuuccugaua

SEQ ID NO: 1138469 - RNA, 19 nt, Homo sapiens
  misc_RNA (1)...(19): siRNA sense strand
gagaaacccugauuugugu

SEQ ID NO: 1138470 - RNA, 19 nt, Homo sapiens
  misc_RNA (1)...(19): siRNA sense strand
caaaggagacaaacuaauu

SEQ ID NO: 1138471 - RNA, 19 nt, Homo sapiens
  misc_RNA (1)...(19): siRNA sense strand
uaaaugaacccaagaagaa

SEQ ID NO: 1138472 - RNA, 19 nt, Homo sapiens
  misc_RNA (1)...(19): siRNA sense strand
gagacaaacuaauugagaa

SEQ ID NO: 1138473 - RNA, 19 nt, Homo sapiens
  misc_RNA (1)...(19): siRNA sense strand
ggacuugacuccuguugug

SEQ ID NO: 1138474 - RNA, 19 nt, Homo sapiens
  misc_RNA (1)...(19): siRNA sense strand
ggagaaacccugauuugug

SEQ ID NO: 1138475 - RNA, 19 nt, Homo sapiens
  misc_RNA (1)...(19): siRNA sense strand
ggagggaaaucuggacauu

SEQ ID NO: 1138476 - RNA, 19 nt, Homo sapiens
  misc_RNA (1)...(19): siRNA sense strand
ggagacaaacuaauugaga

SEQ ID NO: 1138477 - RNA, 19 nt, Homo sapiens
  misc_RNA (1)...(19): siRNA sense strand
gaagaaauaugcaaaagag

SEQ ID NO: 1138478 - RNA, 19 nt, Homo sapiens
  misc_RNA (1)...(19): siRNA sense strand
guaaaugaacccaagaaga

SEQ ID NO: 1138479 - RNA, 19 nt, Homo sapiens
  misc_RNA (1)...(19): siRNA sense strand
aagcggauuucuacccuua

SEQ ID NO: 1138480 - RNA, 19 nt, Homo sapiens
  misc_RNA (1)...(19): siRNA sense strand
ggaaaucuggacauucaaa

SEQ ID NO: 1138481 - RNA, 19 nt, Homo sapiens
  misc_RNA (1)...(19): siRNA sense strand
cuauaacccugaagcugua

SEQ ID NO: 1138482 - RNA, 19 nt, Homo sapiens
  misc_RNA (1)...(19): siRNA sense strand
gaccaaagaggaagaggaa

SEQ ID NO: 1138483 - RNA, 19 nt, Homo sapiens
  misc_RNA (1)...(19): siRNA sense strand
ccacaagcaucugaagaga

SEQ ID NO: 1138484 - RNA, 19 nt, Homo sapiens
  misc_RNA (1)...(19): siRNA sense strand
gagaaacugauuauugaug

SEQ ID NO: 1138485 - RNA, 19 nt, Homo sapiens
  misc_RNA (1)...(19): siRNA sense strand
ccugauagaucucaacagu

SEQ ID NO: 1138486 - RNA, 19 nt, Homo sapiens
  misc_RNA (1)...(19): siRNA sense strand
gcucuagccucccgcuguu

SEQ ID NO: 1138487 - RNA, 19 nt, Homo sapiens
  misc_RNA (1)...(19): siRNA sense strand
acaccuuccuugcugauuu

SEQ ID NO: 1138488 - RNA, 19 nt, Homo sapiens
  misc_RNA (1)...(19): siRNA sense strand
acaagcaucugaagagagu

SEQ ID NO: 1138489 - RNA, 19 nt, Homo sapiens
  misc_RNA (1)...(19): siRNA sense strand
agggaaaucuggacauuca

SEQ ID NO: 1138490 - RNA, 19 nt, Homo sapiens
  misc_RNA (1)...(19): siRNA sense strand
ccaaagaggaagaggaaga

SEQ ID NO: 1138491 - RNA, 19 nt, Homo sapiens
  misc_RNA (1)...(19): siRNA sense strand
cgucagcagugaacaugaa

SEQ ID NO: 1138492 - RNA, 19 nt, Homo sapiens
  misc_RNA (1)...(19): siRNA sense strand
gcaggcgcaugcagaacuu

SEQ ID NO: 1138493 - RNA, 19 nt, Homo sapiens
  misc_RNA (1)...(19): siRNA sense strand
uuucuacccuuaccauuga

SEQ ID NO: 1138494 - RNA, 19 nt, Homo sapiens
  misc_RNA (1)...(19): siRNA sense strand
caaacuaauugagaaacug

SEQ ID NO: 1138495 - RNA, 19 nt, Homo sapiens
  misc_RNA (1)...(19): siRNA sense strand
ccaagaagaagaaauaugc

SEQ ID NO: 1138496 - RNA, 19 nt, Homo sapiens
  misc_RNA (1)...(19): siRNA sense strand
cccugaagcuguaaaugaa

SEQ ID NO: 1138497 - RNA, 19 nt, Homo sapiens
  misc_RNA (1)...(19): siRNA sense strand
gaaacccugauuuguguga

SEQ ID NO: 1138498 - RNA, 19 nt, Homo sapiens
  misc_RNA (1)...(19): siRNA sense strand
gaaacugauuauugaugag

SEQ ID NO: 1138499 - RNA, 19 nt, Homo sapiens
  misc_RNA (1)...(19): siRNA sense strand
guucaacacugcccacaac

SEQ ID NO: 1138500 - RNA, 19 nt, Homo sapiens
  misc_RNA (1)...(19): siRNA sense strand
caaagaggaagaggaagaa

SEQ ID NO: 1138501 - RNA, 19 nt, Homo sapiens
  misc_RNA (1)...(19): siRNA sense strand
agucaaaggagacaaacua

SEQ ID NO: 1138502 - RNA, 19 nt, Homo sapiens
  misc_RNA (1)...(19): siRNA sense strand
caccaaacccugcagucua

SEQ ID NO: 1138503 - RNA, 19 nt, Homo sapiens
  misc_RNA (1)...(19): siRNA sense strand
gaucaucaacccagaggau

SEQ ID NO: 1138504 - RNA, 19 nt, Homo sapiens
  misc_RNA (1)...(19): siRNA sense strand
caacacugcccacaacaag

SEQ ID NO: 1138505 - RNA, 19 nt, Homo sapiens
  misc_RNA (1)...(19): siRNA sense strand
aaaggagacaaacuaauug

SEQ ID NO: 1138506 - RNA, 19 nt, Homo sapiens
  misc_RNA (1)...(19): siRNA sense strand
caaacccugcagucuauaa

SEQ ID NO: 1138507 - RNA, 19 nt, Homo sapiens
  misc_RNA (1)...(19): siRNA sense strand
ggagcaggcgcaugcagaa

SEQ ID NO: 1138508 - RNA, 19 nt, Homo sapiens
  misc_RNA (1)...(19): siRNA sense strand
ugugugacuuuaccauuga

SEQ ID NO: 1138509 - RNA, 19 nt, Homo sapiens
  misc_RNA (1)...(19): siRNA sense strand
gggagaaacccugauuugu

SEQ ID NO: 1138510 - RNA, 19 nt, Homo sapiens
  misc_RNA (1)...(19): siRNA sense strand
accaaacccugcagucuau

SEQ ID NO: 1138511 - RNA, 19 nt, Homo sapiens
  misc_RNA (1)...(19): siRNA sense strand
caugaacccugcaccaaac

SEQ ID NO: 1138512 - RNA, 19 nt, Homo sapiens
  misc_RNA (1)...(19): siRNA sense strand
gacauucaaagaccaaaga

SEQ ID NO: 1138513 - RNA, 19 nt, Homo sapiens
  misc_RNA (1)...(19): siRNA sense strand
aacccaagaagaagaaaua

SEQ ID NO: 1138514 - RNA, 19 nt, Homo sapiens
  misc_RNA (1)...(19): siRNA sense strand
gcaguggucccagucaaga

SEQ ID NO: 1138515 - RNA, 19 nt, Homo sapiens
  misc_RNA (1)...(19): siRNA sense strand
ccauugaccaccagucuug

SEQ ID NO: 1138516 - RNA, 19 nt, Homo sapiens
  misc_RNA (1)...(19): siRNA sense strand
ccugauuugugugacuuua

SEQ ID NO: 1138517 - RNA, 19 nt, Homo sapiens
  misc_RNA (1)...(19): siRNA sense strand
guuggucgauucaggaaca

SEQ ID NO: 1138518 - RNA, 19 nt, Homo sapiens
  misc_RNA (1)...(19): siRNA sense strand
gcccacaacaagcggauuu

SEQ ID NO: 1138519 - RNA, 19 nt, Homo sapiens
  misc_RNA (1)...(19): siRNA sense strand
ucaggaacauggugcaaac

SEQ ID NO: 1138520 - RNA, 19 nt, Homo sapiens
  misc_RNA (1)...(19): siRNA sense strand
gaaaucuggacauucaaag

SEQ ID NO: 1138521 - RNA, 19 nt, Homo sapiens
  misc_RNA (1)...(19): siRNA sense strand
gaacccaagaagaagaaau

SEQ ID NO: 1138522 - RNA, 19 nt, Homo sapiens
  misc_RNA (1)...(19): siRNA sense strand
caccuuccuugcugauuug

SEQ ID NO: 1138523 - RNA, 19 nt, Homo sapiens
  misc_RNA (1)...(19): siRNA sense strand
gauuauugaugagaagaag

SEQ ID NO: 1138524 - RNA, 19 nt, Homo sapiens
  misc_RNA (1)...(19): siRNA sense strand
gucaaaggagacaaacuaa

SEQ ID NO: 1138525 - RNA, 19 nt, Homo sapiens
  misc_RNA (1)...(19): siRNA sense strand
gguccaugcugcacuuguc

SEQ ID NO: 1138526 - RNA, 19 nt, Homo sapiens
  misc_RNA (1)...(19): siRNA sense strand
gcaccaaacccugcagucu

SEQ ID NO: 1138527 - RNA, 19 nt, Homo sapiens
  misc_RNA (1)...(19): siRNA sense strand
cacaacaagcggauuucua

SEQ ID NO: 1138528 - RNA, 19 nt, Homo sapiens
  misc_RNA (1)...(19): siRNA sense strand
caaagaccaaagaggaaga

SEQ ID NO: 1138529 - RNA, 19 nt, Homo sapiens
  misc_RNA (1)...(19): siRNA sense strand
cagugaggaugaugagauc

SEQ ID NO: 1138530 - RNA, 19 nt, Homo sapiens
  misc_RNA (1)...(19): siRNA sense strand
acaacaagcggauuucuac

SEQ ID NO: 1138531 - RNA, 19 nt, Homo sapiens
  misc_RNA (1)...(19): siRNA sense strand
ggcaagaagcccacaccuu

SEQ ID NO: 1138532 - RNA, 19 nt, Homo sapiens
  misc_RNA (1)...(19): siRNA sense strand
gauguggaucccucaguug

SEQ ID NO: 1138533 - RNA, 19 nt, Homo sapiens
  misc_RNA (1)...(19): siRNA sense strand
gacauucagugaggaugau

SEQ ID NO: 1138534 - RNA, 19 nt, Homo sapiens
  misc_RNA (1)...(19): siRNA sense strand
ugacauucagugaggauga

SEQ ID NO: 1138535 - RNA, 19 nt, Homo sapiens
  misc_RNA (1)...(19): siRNA sense strand
acaugaacccugcaccaaa

SEQ ID NO: 1138536 - RNA, 19 nt, Homo sapiens
  misc_RNA (1)...(19): siRNA sense strand
ugggagaaacccugauuug

SEQ ID NO: 1138537 - RNA, 19 nt, Homo sapiens
  misc_RNA (1)...(19): siRNA sense strand
ucaaaggagacaaacuaau

SEQ ID NO: 1138538 - RNA, 19 nt, Homo sapiens
  misc_RNA (1)...(19): siRNA sense strand
uugugugacuuuaccauug

SEQ ID NO: 1138539 - RNA, 19 nt, Homo sapiens
  misc_RNA (1)...(19): siRNA sense strand
ucagugaggaugaugagau

SEQ ID NO: 1138540 - RNA, 19 nt, Homo sapiens
  misc_RNA (1)...(19): siRNA sense strand
augcagaacuuugccuuca

SEQ ID NO: 1138541 - RNA, 19 nt, Homo sapiens
  misc_RNA (1)...(19): siRNA sense strand
caacccagaggauguggau

SEQ ID NO: 1138542 - RNA, 19 nt, Homo sapiens
  misc_RNA (1)...(19): siRNA sense strand
acccugaagcuguaaauga

SEQ ID NO: 1138543 - RNA, 19 nt, Homo sapiens
  misc_RNA (1)...(19): siRNA sense strand
aagcaucugaagagaguuu

SEQ ID NO: 1138544 - RNA, 19 nt, Homo sapiens
  misc_RNA (1)...(19): siRNA sense strand
guugugccgucagcaguga

SEQ ID NO: 1138545 - RNA, 19 nt, Homo sapiens
  misc_RNA (1)...(19): siRNA sense strand
ggacauucaaagaccaaag

SEQ ID NO: 1138546 - RNA, 19 nt, Homo sapiens
  misc_RNA (1)...(19): siRNA sense strand
aaggagacaaacuaauuga

SEQ ID NO: 1138547 - RNA, 19 nt, Homo sapiens
  misc_RNA (1)...(19): siRNA sense strand
caagaagaagaaauaugca

SEQ ID NO: 1138548 - RNA, 19 nt, Homo sapiens
  misc_RNA (1)...(19): siRNA sense strand
gagggaaaucuggacauuc

SEQ ID NO: 1138549 - RNA, 19 nt, Homo sapiens
  misc_RNA (1)...(19): siRNA sense strand
ucaacacugcccacaacaa

SEQ ID NO: 1138550 - RNA, 19 nt, Homo sapiens
  misc_RNA (1)...(19): siRNA sense strand
ggauuucuacccuuaccau

SEQ ID NO: 1138551 - RNA, 19 nt, Homo sapiens
  misc_RNA (1)...(19): siRNA sense strand
uaaaugaacccaagaagaa

SEQ ID NO: 1138552 - RNA, 19 nt, Homo sapiens
  misc_RNA (1)...(19): siRNA sense strand
ggacuugacuccuguugug

SEQ ID NO: 1138553 - RNA, 19 nt, Homo sapiens
  misc_RNA (1)...(19): siRNA sense strand
ggagggaaaucuggacauu

SEQ ID NO: 1138554 - RNA, 19 nt, Homo sapiens
  misc_RNA (1)...(19): siRNA sense strand
gaagaaauaugcaaaagag

SEQ ID NO: 1138555 - RNA, 19 nt, Homo sapiens
  misc_RNA (1)...(19): siRNA sense strand
guaaaugaacccaagaaga

SEQ ID NO: 1138556 - RNA, 19 nt, Homo sapiens
  misc_RNA (1)...(19): siRNA sense strand
aagcggauuucuacccuua

SEQ ID NO: 1138557 - RNA, 19 nt, Homo sapiens
  misc_RNA (1)...(19): siRNA sense strand
ggaaaucuggacauucaaa

SEQ ID NO: 1138558 - RNA, 19 nt, Homo sapiens
  misc_RNA (1)...(19): siRNA sense strand
cuauaacccugaagcugua

SEQ ID NO: 1138559 - RNA, 19 nt, Homo sapiens
  misc_RNA (1)...(19): siRNA sense strand
gaccaaagaggaagaggaa

SEQ ID NO: 1138560 - RNA, 19 nt, Homo sapiens
  misc_RNA (1)...(19): siRNA sense strand
acaccuuccuugcugauuu

SEQ ID NO: 1138561 - RNA, 19 nt, Homo sapiens
  misc_RNA (1)...(19): siRNA sense strand
agggaaaucuggacauuca

SEQ ID NO: 1138562 - RNA, 19 nt, Homo sapiens
  misc_RNA (1)...(19): siRNA sense strand
ccaaagaggaagaggaaga

SEQ ID NO: 1138563 - RNA, 19 nt, Homo sapiens
  misc_RNA (1)...(19): siRNA sense strand
cgucagcagugaacaugaa

SEQ ID NO: 1138564 - RNA, 19 nt, Homo sapiens
  misc_RNA (1)...(19): siRNA sense strand
gcaggcgcaugcagaacuu

SEQ ID NO: 1138565 - RNA, 19 nt, Homo sapiens
  misc_RNA (1)...(19): siRNA sense strand
uuucuacccuuaccauuga

SEQ ID NO: 1138566 - RNA, 19 nt, Homo sapiens
  misc_RNA (1)...(19): siRNA sense strand
cccugaagcuguaaaugaa

SEQ ID NO: 1138567 - RNA, 19 nt, Homo sapiens
  misc_RNA (1)...(19): siRNA sense strand
ccaagaagaagaaauaugc

SEQ ID NO: 1138568 - RNA, 19 nt, Homo sapiens
  misc_RNA (1)...(19): siRNA sense strand
caaagaggaagaggaagaa

SEQ ID NO: 1138569 - RNA, 19 nt, Homo sapiens
  misc_RNA (1)...(19): siRNA sense strand
guucaacacugcccacaac

SEQ ID NO: 1138570 - RNA, 19 nt, Homo sapiens
  misc_RNA (1)...(19): siRNA sense strand
gaucaucaacccagaggau

SEQ ID NO: 1138571 - RNA, 19 nt, Homo sapiens
  misc_RNA (1)...(19): siRNA sense strand
caccaaacccugcagucua

SEQ ID NO: 1138572 - RNA, 19 nt, Homo sapiens
  misc_RNA (1)...(19): siRNA sense strand
ggagcaggcgcaugcagaa

SEQ ID NO: 1138573 - RNA, 19 nt, Homo sapiens
  misc_RNA (1)...(19): siRNA sense strand
caacacugcccacaacaag

SEQ ID NO: 1138574 - RNA, 19 nt, Homo sapiens
  misc_RNA (1)...(19): siRNA sense strand
caaacccugcagucuauaa

SEQ ID NO: 1138575 - RNA, 19 nt, Homo sapiens
  misc_RNA (1)...(19): siRNA sense strand
caugaacccugcaccaaac

SEQ ID NO: 1138576 - RNA, 19 nt, Homo sapiens
  misc_RNA (1)...(19): siRNA sense strand
accaaacccugcagucuau

SEQ ID NO: 1138577 - RNA, 19 nt, Homo sapiens
  misc_RNA (1)...(19): siRNA sense strand
gacauucaaagaccaaaga

SEQ ID NO: 1138578 - RNA, 19 nt, Homo sapiens
  misc_RNA (1)...(19): siRNA sense strand
aacccaagaagaagaaaua

SEQ ID NO: 1138579 - RNA, 19 nt, Homo sapiens
  misc_RNA (1)...(19): siRNA sense strand
gcaguggucccagucaaga

SEQ ID NO: 1138580 - RNA, 19 nt, Homo sapiens
  misc_RNA (1)...(19): siRNA sense strand
guuggucgauucaggaaca

SEQ ID NO: 1138581 - RNA, 19 nt, Homo sapiens
  misc_RNA (1)...(19): siRNA sense strand
gaaaucuggacauucaaag

SEQ ID NO: 1138582 - RNA, 19 nt, Homo sapiens
  misc_RNA (1)...(19): siRNA sense strand
gcccacaacaagcggauuu

SEQ ID NO: 1138583 - RNA, 19 nt, Homo sapiens
  misc_RNA (1)...(19): siRNA sense strand
ucaggaacauggugcaaac

SEQ ID NO: 1138584 - RNA, 19 nt, Homo sapiens
  misc_RNA (1)...(19): siRNA sense strand
gaacccaagaagaagaaau

SEQ ID NO: 1138585 - RNA, 19 nt, Homo sapiens
  misc_RNA (1)...(19): siRNA sense strand
caccuuccuugcugauuug

SEQ ID NO: 1138586 - RNA, 19 nt, Homo sapiens
  misc_RNA (1)...(19): siRNA sense strand
cacaacaagcggauuucua

SEQ ID NO: 1138587 - RNA, 19 nt, Homo sapiens
  misc_RNA (1)...(19): siRNA sense strand
gcaccaaacccugcagucu

SEQ ID NO: 1138588 - RNA, 19 nt, Homo sapiens
  misc_RNA (1)...(19): siRNA sense strand
caaagaccaaagaggaaga

SEQ ID NO: 1138589 - RNA, 19 nt, Homo sapiens
  misc_RNA (1)...(19): siRNA sense strand
cagugaggaugaugagauc

SEQ ID NO: 1138590 - RNA, 19 nt, Homo sapiens
  misc_RNA (1)...(19): siRNA sense strand
acaacaagcggauuucuac

SEQ ID NO: 1138591 - RNA, 19 nt, Homo sapiens
  misc_RNA (1)...(19): siRNA sense strand
ggcaagaagcccacaccuu

SEQ ID NO: 1138592 - RNA, 19 nt, Homo sapiens
  misc_RNA (1)...(19): siRNA sense strand
gauguggaucccucaguug

SEQ ID NO: 1138593 - RNA, 19 nt, Homo sapiens
  misc_RNA (1)...(19): siRNA sense strand
gacauucagugaggaugau

SEQ ID NO: 1138594 - RNA, 19 nt, Homo sapiens
  misc_RNA (1)...(19): siRNA sense strand
ugacauucagugaggauga

SEQ ID NO: 1138595 - RNA, 19 nt, Homo sapiens
  misc_RNA (1)...(19): siRNA sense strand
acaugaacccugcaccaaa

SEQ ID NO: 1138596 - RNA, 19 nt, Homo sapiens
  misc_RNA (1)...(19): siRNA sense strand
ucagugaggaugaugagau

SEQ ID NO: 1138597 - RNA, 19 nt, Homo sapiens
  misc_RNA (1)...(19): siRNA sense strand
augcagaacuuugccuuca

SEQ ID NO: 1138598 - RNA, 19 nt, Homo sapiens
  misc_RNA (1)...(19): siRNA sense strand
caacccagaggauguggau

SEQ ID NO: 1138599 - RNA, 19 nt, Homo sapiens
  misc_RNA (1)...(19): siRNA sense strand
acccugaagcuguaaauga

SEQ ID NO: 1138600 - RNA, 19 nt, Homo sapiens
  misc_RNA (1)...(19): siRNA sense strand
guugugccgucagcaguga

SEQ ID NO: 1138601 - RNA, 19 nt, Homo sapiens
  misc_RNA (1)...(19): siRNA sense strand
ggacauucaaagaccaaag

SEQ ID NO: 1138602 - RNA, 19 nt, Homo sapiens
  misc_RNA (1)...(19): siRNA sense strand
caagaagaagaaauaugca

SEQ ID NO: 1138603 - RNA, 19 nt, Homo sapiens
  misc_RNA (1)...(19): siRNA sense strand
gagggaaaucuggacauuc

SEQ ID NO: 1138604 - RNA, 19 nt, Homo sapiens
  misc_RNA (1)...(19): siRNA sense strand
ucaacacugcccacaacaa

SEQ ID NO: 1138605 - RNA, 19 nt, Homo sapiens
  misc_RNA (1)...(19): siRNA sense strand
ggauuucuacccuuaccau

SEQ ID NO: 1138606 - RNA, 19 nt, Homo sapiens
  misc_RNA (1)...(19): siRNA sense strand
acagaacacucauggauua

SEQ ID NO: 1138607 - RNA, 19 nt, Homo sapiens
  misc_RNA (1)...(19): siRNA sense strand
gaacacucauggauuaaga

SEQ ID NO: 1138608 - RNA, 19 nt, Homo sapiens
  misc_RNA (1)...(19): siRNA sense strand
ggaugacgauuguuuauca

SEQ ID NO: 1138609 - RNA, 19 nt, Homo sapiens
  misc_RNA (1)...(19): siRNA sense strand
gcacagaacacucauggau

SEQ ID NO: 1138610 - RNA, 19 nt, Homo sapiens
  misc_RNA (1)...(19): siRNA sense strand
acacauagcagauaaacuu

SEQ ID NO: 1138611 - RNA, 19 nt, Homo sapiens
  misc_RNA (1)...(19): siRNA sense strand
cagaugaacuucccauugg

SEQ ID NO: 1138612 - RNA, 19 nt, Homo sapiens
  misc_RNA (1)...(19): siRNA sense strand
gagcacaaacggaaacaau

SEQ ID NO: 1138613 - RNA, 19 nt, Homo sapiens
  misc_RNA (1)...(19): siRNA sense strand
gccagaggaugacgauugu

SEQ ID NO: 1138614 - RNA, 19 nt, Homo sapiens
  misc_RNA (1)...(19): siRNA sense strand
caggguauuuguaaagaug

SEQ ID NO: 1138615 - RNA, 19 nt, Homo sapiens
  misc_RNA (1)...(19): siRNA sense strand
ccagaugaacuucccauug

SEQ ID NO: 1138616 - RNA, 19 nt, Homo sapiens
  misc_RNA (1)...(19): siRNA sense strand
gcaggguauuuguaaagau

SEQ ID NO: 1138617 - RNA, 19 nt, Homo sapiens
  misc_RNA (1)...(19): siRNA sense strand
gaugacgauuguuuaucaa

SEQ ID NO: 1138618 - RNA, 19 nt, Homo sapiens
  misc_RNA (1)...(19): siRNA sense strand
cagaggaugacgauuguuu

SEQ ID NO: 1138619 - RNA, 19 nt, Homo sapiens
  misc_RNA (1)...(19): siRNA sense strand
gaggaugacgauuguuuau

SEQ ID NO: 1138620 - RNA, 19 nt, Homo sapiens
  misc_RNA (1)...(19): siRNA sense strand
ugggaugagugcagaauau

SEQ ID NO: 1138621 - RNA, 19 nt, Homo sapiens
  misc_RNA (1)...(19): siRNA sense strand
aggaacacauagcagauaa

SEQ ID NO: 1138622 - RNA, 19 nt, Homo sapiens
  misc_RNA (1)...(19): siRNA sense strand
gcacaaacggaaacaaugc

SEQ ID NO: 1138623 - RNA, 19 nt, Homo sapiens
  misc_RNA (1)...(19): siRNA sense strand
gaacacauagcagauaaac

SEQ ID NO: 1138624 - RNA, 19 nt, Homo sapiens
  misc_RNA (1)...(19): siRNA sense strand
gcacauggagcucuaaucc

SEQ ID NO: 1138625 - RNA, 19 nt, Homo sapiens
  misc_RNA (1)...(19): siRNA sense strand
ccucuugaagccauucuua

SEQ ID NO: 1138626 - RNA, 19 nt, Homo sapiens
  misc_RNA (1)...(19): siRNA sense strand
aaacggaaacaaugcaaug

SEQ ID NO: 1138627 - RNA, 19 nt, Homo sapiens
  misc_RNA (1)...(19): siRNA sense strand
gaagccauucuuacagaug

SEQ ID NO: 1138628 - RNA, 19 nt, Homo sapiens
  misc_RNA (1)...(19): siRNA sense strand
ggaacacauagcagauaaa

SEQ ID NO: 1138629 - RNA, 19 nt, Homo sapiens
  misc_RNA (1)...(19): siRNA sense strand
agaggaugacgauuguuua

SEQ ID NO: 1138630 - RNA, 19 nt, Homo sapiens
  misc_RNA (1)...(19): siRNA sense strand
aagccauucuuacagauga

SEQ ID NO: 1138631 - RNA, 19 nt, Homo sapiens
  misc_RNA (1)...(19): siRNA sense strand
uugaagccauucuuacaga

SEQ ID NO: 1138632 - RNA, 19 nt, Homo sapiens
  misc_RNA (1)...(19): siRNA sense strand
caggaacacauagcagaua

SEQ ID NO: 1138633 - RNA, 19 nt, Homo sapiens
  misc_RNA (1)...(19): siRNA sense strand
caugguuucucuugcaaca

SEQ ID NO: 1138634 - RNA, 19 nt, Homo sapiens
  misc_RNA (1)...(19): siRNA sense strand
ucaacgucaucuagaggaa

SEQ ID NO: 1138635 - RNA, 19 nt, Homo sapiens
  misc_RNA (1)...(19): siRNA sense strand
aagaugagcccagcagcua

SEQ ID NO: 1138636 - RNA, 19 nt, Homo sapiens
  misc_RNA (1)...(19): siRNA sense strand
caaacaggaacacauagca

SEQ ID NO: 1138637 - RNA, 19 nt, Homo sapiens
  misc_RNA (1)...(19): siRNA sense strand
cacagaacacucauggauu

SEQ ID NO: 1138638 - RNA, 19 nt, Homo sapiens
  misc_RNA (1)...(19): siRNA sense strand
caacuugcaaacagccauu

SEQ ID NO: 1138639 - RNA, 19 nt, Homo sapiens
  misc_RNA (1)...(19): siRNA sense strand
cgccagaggaugacgauug

SEQ ID NO: 1138640 - RNA, 19 nt, Homo sapiens
  misc_RNA (1)...(19): siRNA sense strand
aacgucaucuagaggaauu

SEQ ID NO: 1138641 - RNA, 19 nt, Homo sapiens
  misc_RNA (1)...(19): siRNA sense strand
gacgauuguuuaucaacgu

SEQ ID NO: 1138642 - RNA, 19 nt, Homo sapiens
  misc_RNA (1)...(19): siRNA sense strand
ugaagccauucuuacagau

SEQ ID NO: 1138643 - RNA, 19 nt, Homo sapiens
  misc_RNA (1)...(19): siRNA sense strand
cgcaggguauuuguaaaga

SEQ ID NO: 1138644 - RNA, 19 nt, Homo sapiens
  misc_RNA (1)...(19): siRNA sense strand
gaugagcccagcagcuaca

SEQ ID NO: 1138645 - RNA, 19 nt, Homo sapiens
  misc_RNA (1)...(19): siRNA sense strand
gcccagcagcuacacaugu

SEQ ID NO: 1138646 - RNA, 19 nt, Homo sapiens
  misc_RNA (1)...(19): siRNA sense strand
caaacggaaacaaugcaau

SEQ ID NO: 1138647 - RNA, 19 nt, Homo sapiens
  misc_RNA (1)...(19): siRNA sense strand
agaaagcgaacacggaagu

SEQ ID NO: 1138648 - RNA, 19 nt, Homo sapiens
  misc_RNA (1)...(19): siRNA sense strand
acacauguacaacuugcaa

SEQ ID NO: 1138649 - RNA, 19 nt, Homo sapiens
  misc_RNA (1)...(19): siRNA sense strand
gggaugagugcagaauaug

SEQ ID NO: 1138650 - RNA, 19 nt, Homo sapiens
  misc_RNA (1)...(19): siRNA sense strand
cagaacacucauggauuaa

SEQ ID NO: 1138651 - RNA, 19 nt, Homo sapiens
  misc_RNA (1)...(19): siRNA sense strand
ucuuacagaugaugaacca

SEQ ID NO: 1138652 - RNA, 19 nt, Homo sapiens
  misc_RNA (1)...(19): siRNA sense strand
gagcccagcagcuacacau

SEQ ID NO: 1138653 - RNA, 19 nt, Homo sapiens
  misc_RNA (1)...(19): siRNA sense strand
acagaacacucauggauua

SEQ ID NO: 1138654 - RNA, 19 nt, Homo sapiens
  misc_RNA (1)...(19): siRNA sense strand
gaacacucauggauuaaga

SEQ ID NO: 1138655 - RNA, 19 nt, Homo sapiens
  misc_RNA (1)...(19): siRNA sense strand
ggaugacgauuguuuauca

SEQ ID NO: 1138656 - RNA, 19 nt, Homo sapiens
  misc_RNA (1)...(19): siRNA sense strand
gcacagaacacucauggau

SEQ ID NO: 1138657 - RNA, 19 nt, Homo sapiens
  misc_RNA (1)...(19): siRNA sense strand
acacauagcagauaaacuu

SEQ ID NO: 1138658 - RNA, 19 nt, Homo sapiens
  misc_RNA (1)...(19): siRNA sense strand
cagaugaacuucccauugg

SEQ ID NO: 1138659 - RNA, 19 nt, Homo sapiens
  misc_RNA (1)...(19): siRNA sense strand
gagcacaaacggaaacaau

SEQ ID NO: 1138660 - RNA, 19 nt, Homo sapiens
  misc_RNA (1)...(19): siRNA sense strand
gccagaggaugacgauugu

SEQ ID NO: 1138661 - RNA, 19 nt, Homo sapiens
  misc_RNA (1)...(19): siRNA sense strand
caggguauuuguaaagaug

SEQ ID NO: 1138662 - RNA, 19 nt, Homo sapiens
  misc_RNA (1)...(19): siRNA sense strand
ccagaugaacuucccauug

SEQ ID NO: 1138663 - RNA, 19 nt, Homo sapiens
  misc_RNA (1)...(19): siRNA sense strand
gcaggguauuuguaaagau

SEQ ID NO: 1138664 - RNA, 19 nt, Homo sapiens
  misc_RNA (1)...(19): siRNA sense strand
gaugacgauuguuuaucaa

SEQ ID NO: 1138665 - RNA, 19 nt, Homo sapiens
  misc_RNA (1)...(19): siRNA sense strand
cagaggaugacgauuguuu

SEQ ID NO: 1138666 - RNA, 19 nt, Homo sapiens
  misc_RNA (1)...(19): siRNA sense strand
gaggaugacgauuguuuau

SEQ ID NO: 1138667 - RNA, 19 nt, Homo sapiens
  misc_RNA (1)...(19): siRNA sense strand
ugggaugagugcagaauau

SEQ ID NO: 1138668 - RNA, 19 nt, Homo sapiens
  misc_RNA (1)...(19): siRNA sense strand
aggaacacauagcagauaa

SEQ ID NO: 1138669 - RNA, 19 nt, Homo sapiens
  misc_RNA (1)...(19): siRNA sense strand
gcacaaacggaaacaaugc

SEQ ID NO: 1138670 - RNA, 19 nt, Homo sapiens
  misc_RNA (1)...(19): siRNA sense strand
gaacacauagcagauaaac

SEQ ID NO: 1138671 - RNA, 19 nt, Homo sapiens
  misc_RNA (1)...(19): siRNA sense strand
gcacauggagcucuaaucc

SEQ ID NO: 1138672 - RNA, 19 nt, Homo sapiens
  misc_RNA (1)...(19): siRNA sense strand
ccucuugaagccauucuua

SEQ ID NO: 1138673 - RNA, 19 nt, Homo sapiens
  misc_RNA (1)...(19): siRNA sense strand
aaacggaaacaaugcaaug

SEQ ID NO: 1138674 - RNA, 19 nt, Homo sapiens
  misc_RNA (1)...(19): siRNA sense strand
gaagccauucuuacagaug

SEQ ID NO: 1138675 - RNA, 19 nt, Homo sapiens
  misc_RNA (1)...(19): siRNA sense strand
ggaacacauagcagauaaa

SEQ ID NO: 1138676 - RNA, 19 nt, Homo sapiens
  misc_RNA (1)...(19): siRNA sense strand
agaggaugacgauuguuua

SEQ ID NO: 1138677 - RNA, 19 nt, Homo sapiens
  misc_RNA (1)...(19): siRNA sense strand
aagccauucuuacagauga

SEQ ID NO: 1138678 - RNA, 19 nt, Homo sapiens
  misc_RNA (1)...(19): siRNA sense strand
uugaagccauucuuacaga

SEQ ID NO: 1138679 - RNA, 19 nt, Homo sapiens
  misc_RNA (1)...(19): siRNA sense strand
caggaacacauagcagaua

SEQ ID NO: 1138680 - RNA, 19 nt, Homo sapiens
  misc_RNA (1)...(19): siRNA sense strand
caugguuucucuugcaaca

SEQ ID NO: 1138681 - RNA, 19 nt, Homo sapiens
  misc_RNA (1)...(19): siRNA sense strand
ucaacgucaucuagaggaa

SEQ ID NO: 1138682 - RNA, 19 nt, Homo sapiens
  misc_RNA (1)...(19): siRNA sense strand
aagaugagcccagcagcua

SEQ ID NO: 1138683 - RNA, 19 nt, Homo sapiens
  misc_RNA (1)...(19): siRNA sense strand
caaacaggaacacauagca

SEQ ID NO: 1138684 - RNA, 19 nt, Homo sapiens
  misc_RNA (1)...(19): siRNA sense strand
cacagaacacucauggauu

SEQ ID NO: 1138685 - RNA, 19 nt, Homo sapiens
  misc_RNA (1)...(19): siRNA sense strand
caacuugcaaacagccauu

SEQ ID NO: 1138686 - RNA, 19 nt, Homo sapiens
  misc_RNA (1)...(19): siRNA sense strand
cgccagaggaugacgauug

SEQ ID NO: 1138687 - RNA, 19 nt, Homo sapiens
  misc_RNA (1)...(19): siRNA sense strand
aacgucaucuagaggaauu

SEQ ID NO: 1138688 - RNA, 19 nt, Homo sapiens
  misc_RNA (1)...(19): siRNA sense strand
gacgauuguuuaucaacgu

SEQ ID NO: 1138689 - RNA, 19 nt, Homo sapiens
  misc_RNA (1)...(19): siRNA sense strand
ugaagccauucuuacagau

SEQ ID NO: 1138690 - RNA, 19 nt, Homo sapiens
  misc_RNA (1)...(19): siRNA sense strand
cgcaggguauuuguaaaga

SEQ ID NO: 1138691 - RNA, 19 nt, Homo sapiens
  misc_RNA (1)...(19): siRNA sense strand
gaugagcccagcagcuaca

SEQ ID NO: 1138692 - RNA, 19 nt, Homo sapiens
  misc_RNA (1)...(19): siRNA sense strand
gcccagcagcuacacaugu

SEQ ID NO: 1138693 - RNA, 19 nt, Homo sapiens
  misc_RNA (1)...(19): siRNA sense strand
caaacggaaacaaugcaau

SEQ ID NO: 1138694 - RNA, 19 nt, Homo sapiens
  misc_RNA (1)...(19): siRNA sense strand
agaaagcgaacacggaagu

SEQ ID NO: 1138695 - RNA, 19 nt, Homo sapiens
  misc_RNA (1)...(19): siRNA sense strand
acacauguacaacuugcaa

SEQ ID NO: 1138696 - RNA, 19 nt, Homo sapiens
  misc_RNA (1)...(19): siRNA sense strand
gggaugagugcagaauaug

SEQ ID NO: 1138697 - RNA, 19 nt, Homo sapiens
  misc_RNA (1)...(19): siRNA sense strand
cagaacacucauggauuaa

SEQ ID NO: 1138698 - RNA, 19 nt, Homo sapiens
  misc_RNA (1)...(19): siRNA sense strand
ucuuacagaugaugaacca

SEQ ID NO: 1138699 - RNA, 19 nt, Homo sapiens
  misc_RNA (1)...(19): siRNA sense strand
gagcccagcagcuacacau

SEQ ID NO: 1138700 - RNA, 19 nt, Homo sapiens
  misc_RNA (1)...(19): siRNA sense strand
acagaacacucauggauua

SEQ ID NO: 1138701 - RNA, 19 nt, Homo sapiens
  misc_RNA (1)...(19): siRNA sense strand
gaacacucauggauuaaga

SEQ ID NO: 1138702 - RNA, 19 nt, Homo sapiens
  misc_RNA (1)...(19): siRNA sense strand
ggaugacgauuguuuauca

SEQ ID NO: 1138703 - RNA, 19 nt, Homo sapiens
  misc_RNA (1)...(19): siRNA sense strand
gcacagaacacucauggau

SEQ ID NO: 1138704 - RNA, 19 nt, Homo sapiens
  misc_RNA (1)...(19): siRNA sense strand
acacauagcagauaaacuu

SEQ ID NO: 1138705 - RNA, 19 nt, Homo sapiens
  misc_RNA (1)...(19): siRNA sense strand
cagaugaacuucccauugg

SEQ ID NO: 1138706 - RNA, 19 nt, Homo sapiens
  misc_RNA (1)...(19): siRNA sense strand
gagcacaaacggaaacaau

SEQ ID NO: 1138707 - RNA, 19 nt, Homo sapiens
  misc_RNA (1)...(19): siRNA sense strand
gccagaggaugacgauugu

SEQ ID NO: 1138708 - RNA, 19 nt, Homo sapiens
  misc_RNA (1)...(19): siRNA sense strand
caggguauuuguaaagaug

SEQ ID NO: 1138709 - RNA, 19 nt, Homo sapiens
  misc_RNA (1)...(19): siRNA sense strand
ccagaugaacuucccauug

SEQ ID NO: 1138710 - RNA, 19 nt, Homo sapiens
  misc_RNA (1)...(19): siRNA sense strand
gcaggguauuuguaaagau

SEQ ID NO: 1138711 - RNA, 19 nt, Homo sapiens
  misc_RNA (1)...(19): siRNA sense strand
gaugacgauuguuuaucaa

SEQ ID NO: 1138712 - RNA, 19 nt, Homo sapiens
  misc_RNA (1)...(19): siRNA sense strand
cagaggaugacgauuguuu

SEQ ID NO: 1138713 - RNA, 19 nt, Homo sapiens
  misc_RNA (1)...(19): siRNA sense strand
gaggaugacgauuguuuau

SEQ ID NO: 1138714 - RNA, 19 nt, Homo sapiens
  misc_RNA (1)...(19): siRNA sense strand
ugggaugagugcagaauau

SEQ ID NO: 1138715 - RNA, 19 nt, Homo sapiens
  misc_RNA (1)...(19): siRNA sense strand
aggaacacauagcagauaa

SEQ ID NO: 1138716 - RNA, 19 nt, Homo sapiens
  misc_RNA (1)...(19): siRNA sense strand
gcacaaacggaaacaaugc

SEQ ID NO: 1138717 - RNA, 19 nt, Homo sapiens
  misc_RNA (1)...(19): siRNA sense strand
gaacacauagcagauaaac

SEQ ID NO: 1138718 - RNA, 19 nt, Homo sapiens
  misc_RNA (1)...(19): siRNA sense strand
gcacauggagcucuaaucc

SEQ ID NO: 1138719 - RNA, 19 nt, Homo sapiens
  misc_RNA (1)...(19): siRNA sense strand
ccucuugaagccauucuua

SEQ ID NO: 1138720 - RNA, 19 nt, Homo sapiens
  misc_RNA (1)...(19): siRNA sense strand
aaacggaaacaaugcaaug

SEQ ID NO: 1138721 - RNA, 19 nt, Homo sapiens
  misc_RNA (1)...(19): siRNA sense strand
gaagccauucuuacagaug

SEQ ID NO: 1138722 - RNA, 19 nt, Homo sapiens
  misc_RNA (1)...(19): siRNA sense strand
ggaacacauagcagauaaa

SEQ ID NO: 1138723 - RNA, 19 nt, Homo sapiens
  misc_RNA (1)...(19): siRNA sense strand
agaggaugacgauuguuua

SEQ ID NO: 1138724 - RNA, 19 nt, Homo sapiens
  misc_RNA (1)...(19): siRNA sense strand
aagccauucuuacagauga

SEQ ID NO: 1138725 - RNA, 19 nt, Homo sapiens
  misc_RNA (1)...(19): siRNA sense strand
uugaagccauucuuacaga

SEQ ID NO: 1138726 - RNA, 19 nt, Homo sapiens
  misc_RNA (1)...(19): siRNA sense strand
caggaacacauagcagaua

SEQ ID NO: 1138727 - RNA, 19 nt, Homo sapiens
  misc_RNA (1)...(19): siRNA sense strand
caugguuucucuugcaaca

SEQ ID NO: 1138728 - RNA, 19 nt, Homo sapiens
  misc_RNA (1)...(19): siRNA sense strand
ucaacgucaucuagaggaa

SEQ ID NO: 1138729 - RNA, 19 nt, Homo sapiens
  misc_RNA (1)...(19): siRNA sense strand
aagaugagcccagcagcua

SEQ ID NO: 1138730 - RNA, 19 nt, Homo sapiens
  misc_RNA (1)...(19): siRNA sense strand
caaacaggaacacauagca

SEQ ID NO: 1138731 - RNA, 19 nt, Homo sapiens
  misc_RNA (1)...(19): siRNA sense strand
cacagaacacucauggauu

SEQ ID NO: 1138732 - RNA, 19 nt, Homo sapiens
  misc_RNA (1)...(19): siRNA sense strand
caacuugcaaacagccauu

SEQ ID NO: 1138733 - RNA, 19 nt, Homo sapiens
  misc_RNA (1)...(19): siRNA sense strand
cgccagaggaugacgauug

SEQ ID NO: 1138734 - RNA, 19 nt, Homo sapiens
  misc_RNA (1)...(19): siRNA sense strand
aacgucaucuagaggaauu

SEQ ID NO: 1138735 - RNA, 19 nt, Homo sapiens
  misc_RNA (1)...(19): siRNA sense strand
gacgauuguuuaucaacgu

SEQ ID NO: 1138736 - RNA, 19 nt, Homo sapiens
  misc_RNA (1)...(19): siRNA sense strand
ugaagccauucuuacagau

SEQ ID NO: 1138737 - RNA, 19 nt, Homo sapiens
  misc_RNA (1)...(19): siRNA sense strand
cgcaggguauuuguaaaga

SEQ ID NO: 1138738 - RNA, 19 nt, Homo sapiens
  misc_RNA (1)...(19): siRNA sense strand
gaugagcccagcagcuaca

SEQ ID NO: 1138739 - RNA, 19 nt, Homo sapiens
  misc_RNA (1)...(19): siRNA sense strand
gcccagcagcuacacaugu

SEQ ID NO: 1138740 - RNA, 19 nt, Homo sapiens
  misc_RNA (1)...(19): siRNA sense strand
caaacggaaacaaugcaau

SEQ ID NO: 1138741 - RNA, 19 nt, Homo sapiens
  misc_RNA (1)...(19): siRNA sense strand
agaaagcgaacacggaagu

SEQ ID NO: 1138742 - RNA, 19 nt, Homo sapiens
  misc_RNA (1)...(19): siRNA sense strand
acacauguacaacuugcaa

SEQ ID NO: 1138743 - RNA, 19 nt, Homo sapiens
  misc_RNA (1)...(19): siRNA sense strand
gggaugagugcagaauaug

SEQ ID NO: 1138744 - RNA, 19 nt, Homo sapiens
  misc_RNA (1)...(19): siRNA sense strand
cagaacacucauggauuaa

SEQ ID NO: 1138745 - RNA, 19 nt, Homo sapiens
  misc_RNA (1)...(19): siRNA sense strand
ucuuacagaugaugaacca

SEQ ID NO: 1138746 - RNA, 19 nt, Homo sapiens
  misc_RNA (1)...(19): siRNA sense strand
gagcccagcagcuacacau

SEQ ID NO: 1138747 - RNA, 19 nt, Homo sapiens
  misc_RNA (1)...(19): siRNA sense strand
acagaacacucauggauua

SEQ ID NO: 1138748 - RNA, 19 nt, Homo sapiens
  misc_RNA (1)...(19): siRNA sense strand
gaacacucauggauuaaga

SEQ ID NO: 1138749 - RNA, 19 nt, Homo sapiens
  misc_RNA (1)...(19): siRNA sense strand
ggaugacgauuguuuauca

SEQ ID NO: 1138750 - RNA, 19 nt, Homo sapiens
  misc_RNA (1)...(19): siRNA sense strand
gcacagaacacucauggau

SEQ ID NO: 1138751 - RNA, 19 nt, Homo sapiens
  misc_RNA (1)...(19): siRNA sense strand
acacauagcagauaaacuu

SEQ ID NO: 1138752 - RNA, 19 nt, Homo sapiens
  misc_RNA (1)...(19): siRNA sense strand
cagaugaacuucccauugg

SEQ ID NO: 1138753 - RNA, 19 nt, Homo sapiens
  misc_RNA (1)...(19): siRNA sense strand
gagcacaaacggaaacaau

SEQ ID NO: 1138754 - RNA, 19 nt, Homo sapiens
  misc_RNA (1)...(19): siRNA sense strand
gccagaggaugacgauugu

SEQ ID NO: 1138755 - RNA, 19 nt, Homo sapiens
  misc_RNA (1)...(19): siRNA sense strand
caggguauuuguaaagaug

SEQ ID NO: 1138756 - RNA, 19 nt, Homo sapiens
  misc_RNA (1)...(19): siRNA sense strand
ccagaugaacuucccauug

SEQ ID NO: 1138757 - RNA, 19 nt, Homo sapiens
  misc_RNA (1)...(19): siRNA sense strand
gcaggguauuuguaaagau

SEQ ID NO: 1138758 - RNA, 19 nt, Homo sapiens
  misc_RNA (1)...(19): siRNA sense strand
gaugacgauuguuuaucaa

SEQ ID NO: 1138759 - RNA, 19 nt, Homo sapiens
  misc_RNA (1)...(19): siRNA sense strand
cagaggaugacgauuguuu

SEQ ID NO: 1138760 - RNA, 19 nt, Homo sapiens
  misc_RNA (1)...(19): siRNA sense strand
gaggaugacgauuguuuau

SEQ ID NO: 1138761 - RNA, 19 nt, Homo sapiens
  misc_RNA (1)...(19): siRNA sense strand
ugggaugagugcagaauau

SEQ ID NO: 1138762 - RNA, 19 nt, Homo sapiens
  misc_RNA (1)...(19): siRNA sense strand
aggaacacauagcagauaa

SEQ ID NO: 1138763 - RNA, 19 nt, Homo sapiens
  misc_RNA (1)...(19): siRNA sense strand
gcacaaacggaaacaaugc

SEQ ID NO: 1138764 - RNA, 19 nt, Homo sapiens
  misc_RNA (1)...(19): siRNA sense strand
gaacacauagcagauaaac

SEQ ID NO: 1138765 - RNA, 19 nt, Homo sapiens
  misc_RNA (1)...(19): siRNA sense strand
gcacauggagcucuaaucc

SEQ ID NO: 1138766 - RNA, 19 nt, Homo sapiens
  misc_RNA (1)...(19): siRNA sense strand
ccucuugaagccauucuua

SEQ ID NO: 1138767 - RNA, 19 nt, Homo sapiens
  misc_RNA (1)...(19): siRNA sense strand
aaacggaaacaaugcaaug

SEQ ID NO: 1138768 - RNA, 19 nt, Homo sapiens
  misc_RNA (1)...(19): siRNA sense strand
gaagccauucuuacagaug

SEQ ID NO: 1138769 - RNA, 19 nt, Homo sapiens
  misc_RNA (1)...(19): siRNA sense strand
ggaacacauagcagauaaa

SEQ ID NO: 1138770 - RNA, 19 nt, Homo sapiens
  misc_RNA (1)...(19): siRNA sense strand
agaggaugacgauuguuua

SEQ ID NO: 1138771 - RNA, 19 nt, Homo sapiens
  misc_RNA (1)...(19): siRNA sense strand
aagccauucuuacagauga

SEQ ID NO: 1138772 - RNA, 19 nt, Homo sapiens
  misc_RNA (1)...(19): siRNA sense strand
uugaagccauucuuacaga

SEQ ID NO: 1138773 - RNA, 19 nt, Homo sapiens
  misc_RNA (1)...(19): siRNA sense strand
caggaacacauagcagaua

SEQ ID NO: 1138774 - RNA, 19 nt, Homo sapiens
  misc_RNA (1)...(19): siRNA sense strand
caugguuucucuugcaaca

SEQ ID NO: 1138775 - RNA, 19 nt, Homo sapiens
  misc_RNA (1)...(19): siRNA sense strand
ucaacgucaucuagaggaa

SEQ ID NO: 1138776 - RNA, 19 nt, Homo sapiens
  misc_RNA (1)...(19): siRNA sense strand
aagaugagcccagcagcua

SEQ ID NO: 1138777 - RNA, 19 nt, Homo sapiens
  misc_RNA (1)...(19): siRNA sense strand
caaacaggaacacauagca

SEQ ID NO: 1138778 - RNA, 19 nt, Homo sapiens
  misc_RNA (1)...(19): siRNA sense strand
cacagaacacucauggauu

SEQ ID NO: 1138779 - RNA, 19 nt, Homo sapiens
  misc_RNA (1)...(19): siRNA sense strand
caacuugcaaacagccauu

SEQ ID NO: 1138780 - RNA, 19 nt, Homo sapiens
  misc_RNA (1)...(19): siRNA sense strand
cgccagaggaugacgauug

SEQ ID NO: 1138781 - RNA, 19 nt, Homo sapiens
  misc_RNA (1)...(19): siRNA sense strand
aacgucaucuagaggaauu

SEQ ID NO: 1138782 - RNA, 19 nt, Homo sapiens
  misc_RNA (1)...(19): siRNA sense strand
gacgauuguuuaucaacgu

SEQ ID NO: 1138783 - RNA, 19 nt, Homo sapiens
  misc_RNA (1)...(19): siRNA sense strand
ugaagccauucuuacagau

SEQ ID NO: 1138784 - RNA, 19 nt, Homo sapiens
  misc_RNA (1)...(19): siRNA sense strand
cgcaggguauuuguaaaga

SEQ ID NO: 1138785 - RNA, 19 nt, Homo sapiens
  misc_RNA (1)...(19): siRNA sense strand
gaugagcccagcagcuaca

SEQ ID NO: 1138786 - RNA, 19 nt, Homo sapiens
  misc_RNA (1)...(19): siRNA sense strand
gcccagcagcuacacaugu

SEQ ID NO: 1138787 - RNA, 19 nt, Homo sapiens
  misc_RNA (1)...(19): siRNA sense strand
caaacggaaacaaugcaau

SEQ ID NO: 1138788 - RNA, 19 nt, Homo sapiens
  misc_RNA (1)...(19): siRNA sense strand
agaaagcgaacacggaagu

SEQ ID NO: 1138789 - RNA, 19 nt, Homo sapiens
  misc_RNA (1)...(19): siRNA sense strand
acacauguacaacuugcaa

SEQ ID NO: 1138790 - RNA, 19 nt, Homo sapiens
  misc_RNA (1)...(19): siRNA sense strand
gggaugagugcagaauaug

SEQ ID NO: 1138791 - RNA, 19 nt, Homo sapiens
  misc_RNA (1)...(19): siRNA sense strand
cagaacacucauggauuaa

SEQ ID NO: 1138792 - RNA, 19 nt, Homo sapiens
  misc_RNA (1)...(19): siRNA sense strand
ucuuacagaugaugaacca

SEQ ID NO: 1138793 - RNA, 19 nt, Homo sapiens
  misc_RNA (1)...(19): siRNA sense strand
gagcccagcagcuacacau

SEQ ID NO: 1138794 - RNA, 19 nt, Homo sapiens
  misc_RNA (1)...(19): siRNA sense strand
ccacaggccucucuucaca

SEQ ID NO: 1138795 - RNA, 19 nt, Homo sapiens
  misc_RNA (1)...(19): siRNA sense strand
ggccgugucuucuuacuug

SEQ ID NO: 1138796 - RNA, 19 nt, Homo sapiens
  misc_RNA (1)...(19): siRNA sense strand
cacaggccgugucuucuua

SEQ ID NO: 1138797 - RNA, 19 nt, Homo sapiens
  misc_RNA (1)...(19): siRNA sense strand
agaguugucuucaggcuuu

SEQ ID NO: 1138798 - RNA, 19 nt, Homo sapiens
  misc_RNA (1)...(19): siRNA sense strand
accuggagcugccucauua

SEQ ID NO: 1138799 - RNA, 19 nt, Homo sapiens
  misc_RNA (1)...(19): siRNA sense strand
ggaguugccugaugguaac

SEQ ID NO: 1138800 - RNA, 19 nt, Homo sapiens
  misc_RNA (1)...(19): siRNA sense strand
gcagagcgagagaauaugu

SEQ ID NO: 1138801 - RNA, 19 nt, Homo sapiens
  misc_RNA (1)...(19): siRNA sense strand
gaccuggaguugccugaug

SEQ ID NO: 1138802 - RNA, 19 nt, Homo sapiens
  misc_RNA (1)...(19): siRNA sense strand
ucacauuucugacaguuac

SEQ ID NO: 1138803 - RNA, 19 nt, Homo sapiens
  misc_RNA (1)...(19): siRNA sense strand
acauuuggcugugauggua

SEQ ID NO: 1138804 - RNA, 19 nt, Homo sapiens
  misc_RNA (1)...(19): siRNA sense strand
gcaggacauuuggcuguga

SEQ ID NO: 1138805 - RNA, 19 nt, Homo sapiens
  misc_RNA (1)...(19): siRNA sense strand
gugaagauggucauucuga

SEQ ID NO: 1138806 - RNA, 19 nt, Homo sapiens
  misc_RNA (1)...(19): siRNA sense strand
uggcagagcgagagaauau

SEQ ID NO: 1138807 - RNA, 19 nt, Homo sapiens
  misc_RNA (1)...(19): siRNA sense strand
ggacgauggugaggagauc

SEQ ID NO: 1138808 - RNA, 19 nt, Homo sapiens
  misc_RNA (1)...(19): siRNA sense strand
caccauugcccaugagauu

SEQ ID NO: 1138809 - RNA, 19 nt, Homo sapiens
  misc_RNA (1)...(19): siRNA sense strand
gagucaccauugcccauga

SEQ ID NO: 1138810 - RNA, 19 nt, Homo sapiens
  misc_RNA (1)...(19): siRNA sense strand
gaugggacccgguguaugc

SEQ ID NO: 1138811 - RNA, 19 nt, Homo sapiens
  misc_RNA (1)...(19): siRNA sense strand
gauggacucccagcaggua

SEQ ID NO: 1138812 - RNA, 19 nt, Homo sapiens
  misc_RNA (1)...(19): siRNA sense strand
ccacaggccgugucuucuu

SEQ ID NO: 1138813 - RNA, 19 nt, Homo sapiens
  misc_RNA (1)...(19): siRNA sense strand
ccugaccagugucuacauu

SEQ ID NO: 1138814 - RNA, 19 nt, Homo sapiens
  misc_RNA (1)...(19): siRNA sense strand
ggacaggugccaggugugu

SEQ ID NO: 1138815 - RNA, 19 nt, Homo sapiens
  misc_RNA (1)...(19): siRNA sense strand
gaccugggagucaccauug

SEQ ID NO: 1138816 - RNA, 19 nt, Homo sapiens
  misc_RNA (1)...(19): siRNA sense strand
gaguucaugucgcaacagu

SEQ ID NO: 1138817 - RNA, 19 nt, Homo sapiens
  misc_RNA (1)...(19): siRNA sense strand
gcuaugugcucaccaaccu

SEQ ID NO: 1138818 - RNA, 19 nt, Homo sapiens
  misc_RNA (1)...(19): siRNA sense strand
ugcggaggauccuguauug

SEQ ID NO: 1138819 - RNA, 19 nt, Homo sapiens
  misc_RNA (1)...(19): siRNA sense strand
agacccagcuggaguucau

SEQ ID NO: 1138820 - RNA, 19 nt, Homo sapiens
  misc_RNA (1)...(19): siRNA sense strand
ccacggaagggcucuuuca

SEQ ID NO: 1138821 - RNA, 19 nt, Homo sapiens
  misc_RNA (1)...(19): siRNA sense strand
ugucguggcugggaagaug

SEQ ID NO: 1138822 - RNA, 19 nt, Homo sapiens
  misc_RNA (1)...(19): siRNA sense strand
caugggcgcuggucuagcu

SEQ ID NO: 1138823 - RNA, 19 nt, Homo sapiens
  misc_RNA (1)...(19): siRNA sense strand
cggaggauccuguauugug

SEQ ID NO: 1138824 - RNA, 19 nt, Homo sapiens
  misc_RNA (1)...(19): siRNA sense strand
gaucggagggcgcuauguc

SEQ ID NO: 1138825 - RNA, 19 nt, Homo sapiens
  misc_RNA (1)...(19): siRNA sense strand
ccacuggggugcugcugua

SEQ ID NO: 1138826 - RNA, 19 nt, Homo sapiens
  misc_RNA (1)...(19): siRNA sense strand
gugcggaggauccuguauu

SEQ ID NO: 1138827 - RNA, 19 nt, Homo sapiens
  misc_RNA (1)...(19): siRNA sense strand
uggaguugccugaugguaa

SEQ ID NO: 1138828 - RNA, 19 nt, Homo sapiens
  misc_RNA (1)...(19): siRNA sense strand
gugcaugggcgcuggucua

SEQ ID NO: 1138829 - RNA, 19 nt, Homo sapiens
  misc_RNA (1)...(19): siRNA sense strand
cagacccgcuggaccaaag

SEQ ID NO: 1138830 - RNA, 19 nt, Homo sapiens
  misc_RNA (1)...(19): siRNA sense strand
gcccagcucaugcacauca

SEQ ID NO: 1138831 - RNA, 19 nt, Homo sapiens
  misc_RNA (1)...(19): siRNA sense strand
gaauguggcguggagaagu

SEQ ID NO: 1138832 - RNA, 19 nt, Homo sapiens
  misc_RNA (1)...(19): siRNA sense strand
ggguggagccagaccauca

SEQ ID NO: 1138833 - RNA, 19 nt, Homo sapiens
  misc_RNA (1)...(19): siRNA sense strand
cagaauguggcguggagaa

SEQ ID NO: 1138834 - RNA, 19 nt, Homo sapiens
  misc_RNA (1)...(19): siRNA sense strand
ggauggucgugucgaguac

SEQ ID NO: 1138835 - RNA, 19 nt, Homo sapiens
  misc_RNA (1)...(19): siRNA sense strand
acaggccucucuucacaca

SEQ ID NO: 1138836 - RNA, 19 nt, Homo sapiens
  misc_RNA (1)...(19): siRNA sense strand
gggcagcugcaggacauuu

SEQ ID NO: 1138837 - RNA, 19 nt, Homo sapiens
  misc_RNA (1)...(19): siRNA sense strand
acucaggccugcgagaaga

SEQ ID NO: 1138838 - RNA, 19 nt, Homo sapiens
  misc_RNA (1)...(19): siRNA sense strand
gcccuggugcucccuuaaa

SEQ ID NO: 1138839 - RNA, 19 nt, Homo sapiens
  misc_RNA (1)...(19): siRNA sense strand
agaagacccagcuggaguu

SEQ ID NO: 1138840 - RNA, 19 nt, Homo sapiens
  misc_RNA (1)...(19): siRNA sense strand
caaccugaccagugucuac

SEQ ID NO: 1138841 - RNA, 19 nt, Homo sapiens
  misc_RNA (1)...(19): siRNA sense strand
ggaggacacagagcgcuau

SEQ ID NO: 1138842 - RNA, 19 nt, Homo sapiens
  misc_RNA (1)...(19): siRNA sense strand
gcucaccaaccucaacauc

SEQ ID NO: 1138843 - RNA, 19 nt, Homo sapiens
  misc_RNA (1)...(19): siRNA sense strand
uguguggccuggcaagcaa

SEQ ID NO: 1138844 - RNA, 19 nt, Homo sapiens
  misc_RNA (1)...(19): siRNA sense strand
ugaccagugucuacauugc

SEQ ID NO: 1138845 - RNA, 19 nt, Homo sapiens
  misc_RNA (1)...(19): siRNA sense strand
gaagacccagcuggaguuc

SEQ ID NO: 1138846 - RNA, 19 nt, Homo sapiens
  misc_RNA (1)...(19): siRNA sense strand
ggaggcggcagugcaacaa

SEQ ID NO: 1138847 - RNA, 19 nt, Homo sapiens
  misc_RNA (1)...(19): siRNA sense strand
aauguggcguggagaagug

SEQ ID NO: 1138848 - RNA, 19 nt, Homo sapiens
  misc_RNA (1)...(19): siRNA sense strand
uggugaagauggucauucu

SEQ ID NO: 1138849 - RNA, 19 nt, Homo sapiens
  misc_RNA (1)...(19): siRNA sense strand
cgaccugggagucaccauu

SEQ ID NO: 1138850 - RNA, 19 nt, Homo sapiens
  misc_RNA (1)...(19): siRNA sense strand
ccaggugggaggugucaga

SEQ ID NO: 1138851 - RNA, 19 nt, Homo sapiens
  misc_RNA (1)...(19): siRNA sense strand
caaccacaggccucucuuc

SEQ ID NO: 1138852 - RNA, 19 nt, Homo sapiens
  misc_RNA (1)...(19): siRNA sense strand
ccucguuccucuccuggau

SEQ ID NO: 1138853 - RNA, 19 nt, Homo sapiens
  misc_RNA (1)...(19): siRNA sense strand
caggacauuuggcugugau

SEQ ID NO: 1138854 - RNA, 19 nt, Homo sapiens
  misc_RNA (1)...(19): siRNA sense strand
ccacaggccucucuucaca

SEQ ID NO: 1138855 - RNA, 19 nt, Homo sapiens
  misc_RNA (1)...(19): siRNA sense strand
ggccgugucuucuuacuug

SEQ ID NO: 1138856 - RNA, 19 nt, Homo sapiens
  misc_RNA (1)...(19): siRNA sense strand
cacaggccgugucuucuua

SEQ ID NO: 1138857 - RNA, 19 nt, Homo sapiens
  misc_RNA (1)...(19): siRNA sense strand
agaguugucuucaggcuuu

SEQ ID NO: 1138858 - RNA, 19 nt, Homo sapiens
  misc_RNA (1)...(19): siRNA sense strand
accuggagcugccucauua

SEQ ID NO: 1138859 - RNA, 19 nt, Homo sapiens
  misc_RNA (1)...(19): siRNA sense strand
ggaguugccugaugguaac

SEQ ID NO: 1138860 - RNA, 19 nt, Homo sapiens
  misc_RNA (1)...(19): siRNA sense strand
gcagagcgagagaauaugu

SEQ ID NO: 1138861 - RNA, 19 nt, Homo sapiens
  misc_RNA (1)...(19): siRNA sense strand
gaccuggaguugccugaug

SEQ ID NO: 1138862 - RNA, 19 nt, Homo sapiens
  misc_RNA (1)...(19): siRNA sense strand
ucacauuucugacaguuac

SEQ ID NO: 1138863 - RNA, 19 nt, Homo sapiens
  misc_RNA (1)...(19): siRNA sense strand
acauuuggcugugauggua

SEQ ID NO: 1138864 - RNA, 19 nt, Homo sapiens
  misc_RNA (1)...(19): siRNA sense strand
gcaggacauuuggcuguga

SEQ ID NO: 1138865 - RNA, 19 nt, Homo sapiens
  misc_RNA (1)...(19): siRNA sense strand
gugaagauggucauucuga

SEQ ID NO: 1138866 - RNA, 19 nt, Homo sapiens
  misc_RNA (1)...(19): siRNA sense strand
uggcagagcgagagaauau

SEQ ID NO: 1138867 - RNA, 19 nt, Homo sapiens
  misc_RNA (1)...(19): siRNA sense strand
ggacgauggugaggagauc

SEQ ID NO: 1138868 - RNA, 19 nt, Homo sapiens
  misc_RNA (1)...(19): siRNA sense strand
caccauugcccaugagauu

SEQ ID NO: 1138869 - RNA, 19 nt, Homo sapiens
  misc_RNA (1)...(19): siRNA sense strand
gagucaccauugcccauga

SEQ ID NO: 1138870 - RNA, 19 nt, Homo sapiens
  misc_RNA (1)...(19): siRNA sense strand
gaugggacccgguguaugc

SEQ ID NO: 1138871 - RNA, 19 nt, Homo sapiens
  misc_RNA (1)...(19): siRNA sense strand
gauggacucccagcaggua

SEQ ID NO: 1138872 - RNA, 19 nt, Homo sapiens
  misc_RNA (1)...(19): siRNA sense strand
ccacaggccgugucuucuu

SEQ ID NO: 1138873 - RNA, 19 nt, Homo sapiens
  misc_RNA (1)...(19): siRNA sense strand
ccugaccagugucuacauu

SEQ ID NO: 1138874 - RNA, 19 nt, Homo sapiens
  misc_RNA (1)...(19): siRNA sense strand
ggacaggugccaggugugu

SEQ ID NO: 1138875 - RNA, 19 nt, Homo sapiens
  misc_RNA (1)...(19): siRNA sense strand
gaccugggagucaccauug

SEQ ID NO: 1138876 - RNA, 19 nt, Homo sapiens
  misc_RNA (1)...(19): siRNA sense strand
gaguucaugucgcaacagu

SEQ ID NO: 1138877 - RNA, 19 nt, Homo sapiens
  misc_RNA (1)...(19): siRNA sense strand
gcuaugugcucaccaaccu

SEQ ID NO: 1138878 - RNA, 19 nt, Homo sapiens
  misc_RNA (1)...(19): siRNA sense strand
ugcggaggauccuguauug

SEQ ID NO: 1138879 - RNA, 19 nt, Homo sapiens
  misc_RNA (1)...(19): siRNA sense strand
agacccagcuggaguucau

SEQ ID NO: 1138880 - RNA, 19 nt, Homo sapiens
  misc_RNA (1)...(19): siRNA sense strand
ccacggaagggcucuuuca

SEQ ID NO: 1138881 - RNA, 19 nt, Homo sapiens
  misc_RNA (1)...(19): siRNA sense strand
ugucguggcugggaagaug

SEQ ID NO: 1138882 - RNA, 19 nt, Homo sapiens
  misc_RNA (1)...(19): siRNA sense strand
caugggcgcuggucuagcu

SEQ ID NO: 1138883 - RNA, 19 nt, Homo sapiens
  misc_RNA (1)...(19): siRNA sense strand
cggaggauccuguauugug

SEQ ID NO: 1138884 - RNA, 19 nt, Homo sapiens
  misc_RNA (1)...(19): siRNA sense strand
gaucggagggcgcuauguc

SEQ ID NO: 1138885 - RNA, 19 nt, Homo sapiens
  misc_RNA (1)...(19): siRNA sense strand
ccacuggggugcugcugua

SEQ ID NO: 1138886 - RNA, 19 nt, Homo sapiens
  misc_RNA (1)...(19): siRNA sense strand
gugcggaggauccuguauu

SEQ ID NO: 1138887 - RNA, 19 nt, Homo sapiens
  misc_RNA (1)...(19): siRNA sense strand
uggaguugccugaugguaa

SEQ ID NO: 1138888 - RNA, 19 nt, Homo sapiens
  misc_RNA (1)...(19): siRNA sense strand
gugcaugggcgcuggucua

SEQ ID NO: 1138889 - RNA, 19 nt, Homo sapiens
  misc_RNA (1)...(19): siRNA sense strand
cagacccgcuggaccaaag

SEQ ID NO: 1138890 - RNA, 19 nt, Homo sapiens
  misc_RNA (1)...(19): siRNA sense strand
gcccagcucaugcacauca

SEQ ID NO: 1138891 - RNA, 19 nt, Homo sapiens
  misc_RNA (1)...(19): siRNA sense strand
gaauguggcguggagaagu

SEQ ID NO: 1138892 - RNA, 19 nt, Homo sapiens
  misc_RNA (1)...(19): siRNA sense strand
ggguggagccagaccauca

SEQ ID NO: 1138893 - RNA, 19 nt, Homo sapiens
  misc_RNA (1)...(19): siRNA sense strand
cagaauguggcguggagaa

SEQ ID NO: 1138894 - RNA, 19 nt, Homo sapiens
  misc_RNA (1)...(19): siRNA sense strand
ggauggucgugucgaguac

SEQ ID NO: 1138895 - RNA, 19 nt, Homo sapiens
  misc_RNA (1)...(19): siRNA sense strand
acaggccucucuucacaca

SEQ ID NO: 1138896 - RNA, 19 nt, Homo sapiens
  misc_RNA (1)...(19): siRNA sense strand
gggcagcugcaggacauuu

SEQ ID NO: 1138897 - RNA, 19 nt, Homo sapiens
  misc_RNA (1)...(19): siRNA sense strand
acucaggccugcgagaaga

SEQ ID NO: 1138898 - RNA, 19 nt, Homo sapiens
  misc_RNA (1)...(19): siRNA sense strand
gcccuggugcucccuuaaa

SEQ ID NO: 1138899 - RNA, 19 nt, Homo sapiens
  misc_RNA (1)...(19): siRNA sense strand
agaagacccagcuggaguu

SEQ ID NO: 1138900 - RNA, 19 nt, Homo sapiens
  misc_RNA (1)...(19): siRNA sense strand
caaccugaccagugucuac

SEQ ID NO: 1138901 - RNA, 19 nt, Homo sapiens
  misc_RNA (1)...(19): siRNA sense strand
ggaggacacagagcgcuau

SEQ ID NO: 1138902 - RNA, 19 nt, Homo sapiens
  misc_RNA (1)...(19): siRNA sense strand
gcucaccaaccucaacauc

SEQ ID NO: 1138903 - RNA, 19 nt, Homo sapiens
  misc_RNA (1)...(19): siRNA sense strand
uguguggccuggcaagcaa

SEQ ID NO: 1138904 - RNA, 19 nt, Homo sapiens
  misc_RNA (1)...(19): siRNA sense strand
ugaccagugucuacauugc

SEQ ID NO: 1138905 - RNA, 19 nt, Homo sapiens
  misc_RNA (1)...(19): siRNA sense strand
gaagacccagcuggaguuc

SEQ ID NO: 1138906 - RNA, 19 nt, Homo sapiens
  misc_RNA (1)...(19): siRNA sense strand
ggaggcggcagugcaacaa

SEQ ID NO: 1138907 - RNA, 19 nt, Homo sapiens
  misc_RNA (1)...(19): siRNA sense strand
aauguggcguggagaagug

SEQ ID NO: 1138908 - RNA, 19 nt, Homo sapiens
  misc_RNA (1)...(19): siRNA sense strand
uggugaagauggucauucu

SEQ ID NO: 1138909 - RNA, 19 nt, Homo sapiens
  misc_RNA (1)...(19): siRNA sense strand
cgaccugggagucaccauu

SEQ ID NO: 1138910 - RNA, 19 nt, Homo sapiens
  misc_RNA (1)...(19): siRNA sense strand
ccaggugggaggugucaga

SEQ ID NO: 1138911 - RNA, 19 nt, Homo sapiens
  misc_RNA (1)...(19): siRNA sense strand
caaccacaggccucucuuc

SEQ ID NO: 1138912 - RNA, 19 nt, Homo sapiens
  misc_RNA (1)...(19): siRNA sense strand
ccucguuccucuccuggau

SEQ ID NO: 1138913 - RNA, 19 nt, Homo sapiens
  misc_RNA (1)...(19): siRNA sense strand
caggacauuuggcugugau

SEQ ID NO: 1138914 - RNA, 19 nt, Homo sapiens
  misc_RNA (1)...(19): siRNA sense strand
ccacaggccucucuucaca

SEQ ID NO: 1138915 - RNA, 19 nt, Homo sapiens
  misc_RNA (1)...(19): siRNA sense strand
ggccgugucuucuuacuug

SEQ ID NO: 1138916 - RNA, 19 nt, Homo sapiens
  misc_RNA (1)...(19): siRNA sense strand
cacaggccgugucuucuua

SEQ ID NO: 1138917 - RNA, 19 nt, Homo sapiens
  misc_RNA (1)...(19): siRNA sense strand
agaguugucuucaggcuuu

SEQ ID NO: 1138918 - RNA, 19 nt, Homo sapiens
  misc_RNA (1)...(19): siRNA sense strand
accuggagcugccucauua

SEQ ID NO: 1138919 - RNA, 19 nt, Homo sapiens
  misc_RNA (1)...(19): siRNA sense strand
ggaguugccugaugguaac

SEQ ID NO: 1138920 - RNA, 19 nt, Homo sapiens
  misc_RNA (1)...(19): siRNA sense strand
gcagagcgagagaauaugu

SEQ ID NO: 1138921 - RNA, 19 nt, Homo sapiens
  misc_RNA (1)...(19): siRNA sense strand
gaccuggaguugccugaug

SEQ ID NO: 1138922 - RNA, 19 nt, Homo sapiens
  misc_RNA (1)...(19): siRNA sense strand
ucacauuucugacaguuac

SEQ ID NO: 1138923 - RNA, 19 nt, Homo sapiens
  misc_RNA (1)...(19): siRNA sense strand
acauuuggcugugauggua

SEQ ID NO: 1138924 - RNA, 19 nt, Homo sapiens
  misc_RNA (1)...(19): siRNA sense strand
gcaggacauuuggcuguga

SEQ ID NO: 1138925 - RNA, 19 nt, Homo sapiens
  misc_RNA (1)...(19): siRNA sense strand
gugaagauggucauucuga

SEQ ID NO: 1138926 - RNA, 19 nt, Homo sapiens
  misc_RNA (1)...(19): siRNA sense strand
uggcagagcgagagaauau

SEQ ID NO: 1138927 - RNA, 19 nt, Homo sapiens
  misc_RNA (1)...(19): siRNA sense strand
ggacgauggugaggagauc

SEQ ID NO: 1138928 - RNA, 19 nt, Homo sapiens
  misc_RNA (1)...(19): siRNA sense strand
caccauugcccaugagauu

SEQ ID NO: 1138929 - RNA, 19 nt, Homo sapiens
  misc_RNA (1)...(19): siRNA sense strand
gagucaccauugcccauga

SEQ ID NO: 1138930 - RNA, 19 nt, Homo sapiens
  misc_RNA (1)...(19): siRNA sense strand
gaugggacccgguguaugc

SEQ ID NO: 1138931 - RNA, 19 nt, Homo sapiens
  misc_RNA (1)...(19): siRNA sense strand
gauggacucccagcaggua

SEQ ID NO: 1138932 - RNA, 19 nt, Homo sapiens
  misc_RNA (1)...(19): siRNA sense strand
ccacaggccgugucuucuu

SEQ ID NO: 1138933 - RNA, 19 nt, Homo sapiens
  misc_RNA (1)...(19): siRNA sense strand
ccugaccagugucuacauu

SEQ ID NO: 1138934 - RNA, 19 nt, Homo sapiens
  misc_RNA (1)...(19): siRNA sense strand
ggacaggugccaggugugu

SEQ ID NO: 1138935 - RNA, 19 nt, Homo sapiens
  misc_RNA (1)...(19): siRNA sense strand
gaccugggagucaccauug

SEQ ID NO: 1138936 - RNA, 19 nt, Homo sapiens
  misc_RNA (1)...(19): siRNA sense strand
gaguucaugucgcaacagu

SEQ ID NO: 1138937 - RNA, 19 nt, Homo sapiens
  misc_RNA (1)...(19): siRNA sense strand
gcuaugugcucaccaaccu

SEQ ID NO: 1138938 - RNA, 19 nt, Homo sapiens
  misc_RNA (1)...(19): siRNA sense strand
ugcggaggauccuguauug

SEQ ID NO: 1138939 - RNA, 19 nt, Homo sapiens
  misc_RNA (1)...(19): siRNA sense strand
agacccagcuggaguucau

SEQ ID NO: 1138940 - RNA, 19 nt, Homo sapiens
  misc_RNA (1)...(19): siRNA sense strand
ccacggaagggcucuuuca

SEQ ID NO: 1138941 - RNA, 19 nt, Homo sapiens
  misc_RNA (1)...(19): siRNA sense strand
ugucguggcugggaagaug

SEQ ID NO: 1138942 - RNA, 19 nt, Homo sapiens
  misc_RNA (1)...(19): siRNA sense strand
caugggcgcuggucuagcu

SEQ ID NO: 1138943 - RNA, 19 nt, Homo sapiens
  misc_RNA (1)...(19): siRNA sense strand
cggaggauccuguauugug

SEQ ID NO: 1138944 - RNA, 19 nt, Homo sapiens
  misc_RNA (1)...(19): siRNA sense strand
gaucggagggcgcuauguc

SEQ ID NO: 1138945 - RNA, 19 nt, Homo sapiens
  misc_RNA (1)...(19): siRNA sense strand
ccacuggggugcugcugua

SEQ ID NO: 1138946 - RNA, 19 nt, Homo sapiens
  misc_RNA (1)...(19): siRNA sense strand
gugcggaggauccuguauu

SEQ ID NO: 1138947 - RNA, 19 nt, Homo sapiens
  misc_RNA (1)...(19): siRNA sense strand
uggaguugccugaugguaa

SEQ ID NO: 1138948 - RNA, 19 nt, Homo sapiens
  misc_RNA (1)...(19): siRNA sense strand
gugcaugggcgcuggucua

SEQ ID NO: 1138949 - RNA, 19 nt, Homo sapiens
  misc_RNA (1)...(19): siRNA sense strand
cagacccgcuggaccaaag

SEQ ID NO: 1138950 - RNA, 19 nt, Homo sapiens
  misc_RNA (1)...(19): siRNA sense strand
gcccagcucaugcacauca

SEQ ID NO: 1138951 - RNA, 19 nt, Homo sapiens
  misc_RNA (1)...(19): siRNA sense strand
gaauguggcguggagaagu

SEQ ID NO: 1138952 - RNA, 19 nt, Homo sapiens
  misc_RNA (1)...(19): siRNA sense strand
ggguggagccagaccauca

SEQ ID NO: 1138953 - RNA, 19 nt, Homo sapiens
  misc_RNA (1)...(19): siRNA sense strand
cagaauguggcguggagaa

SEQ ID NO: 1138954 - RNA, 19 nt, Homo sapiens
  misc_RNA (1)...(19): siRNA sense strand
ggauggucgugucgaguac

SEQ ID NO: 1138955 - RNA, 19 nt, Homo sapiens
  misc_RNA (1)...(19): siRNA sense strand
acaggccucucuucacaca

SEQ ID NO: 1138956 - RNA, 19 nt, Homo sapiens
  misc_RNA (1)...(19): siRNA sense strand
gggcagcugcaggacauuu

SEQ ID NO: 1138957 - RNA, 19 nt, Homo sapiens
  misc_RNA (1)...(19): siRNA sense strand
acucaggccugcgagaaga

SEQ ID NO: 1138958 - RNA, 19 nt, Homo sapiens
  misc_RNA (1)...(19): siRNA sense strand
gcccuggugcucccuuaaa

SEQ ID NO: 1138959 - RNA, 19 nt, Homo sapiens
  misc_RNA (1)...(19): siRNA sense strand
agaagacccagcuggaguu

SEQ ID NO: 1138960 - RNA, 19 nt, Homo sapiens
  misc_RNA (1)...(19): siRNA sense strand
caaccugaccagugucuac

SEQ ID NO: 1138961 - RNA, 19 nt, Homo sapiens
  misc_RNA (1)...(19): siRNA sense strand
ggaggacacagagcgcuau

SEQ ID NO: 1138962 - RNA, 19 nt, Homo sapiens
  misc_RNA (1)...(19): siRNA sense strand
gcucaccaaccucaacauc

SEQ ID NO: 1138963 - RNA, 19 nt, Homo sapiens
  misc_RNA (1)...(19): siRNA sense strand
uguguggccuggcaagcaa

SEQ ID NO: 1138964 - RNA, 19 nt, Homo sapiens
  misc_RNA (1)...(19): siRNA sense strand
ugaccagugucuacauugc

SEQ ID NO: 1138965 - RNA, 19 nt, Homo sapiens
  misc_RNA (1)...(19): siRNA sense strand
gaagacccagcuggaguuc

SEQ ID NO: 1138966 - RNA, 19 nt, Homo sapiens
  misc_RNA (1)...(19): siRNA sense strand
ggaggcggcagugcaacaa

SEQ ID NO: 1138967 - RNA, 19 nt, Homo sapiens
  misc_RNA (1)...(19): siRNA sense strand
aauguggcguggagaagug

SEQ ID NO: 1138968 - RNA, 19 nt, Homo sapiens
  misc_RNA (1)...(19): siRNA sense strand
uggugaagauggucauucu

SEQ ID NO: 1138969 - RNA, 19 nt, Homo sapiens
  misc_RNA (1)...(19): siRNA sense strand
cgaccugggagucaccauu

SEQ ID NO: 1138970 - RNA, 19 nt, Homo sapiens
  misc_RNA (1)...(19): siRNA sense strand
ccaggugggaggugucaga

SEQ ID NO: 1138971 - RNA, 19 nt, Homo sapiens
  misc_RNA (1)...(19): siRNA sense strand
caaccacaggccucucuuc

SEQ ID NO: 1138972 - RNA, 19 nt, Homo sapiens
  misc_RNA (1)...(19): siRNA sense strand
ccucguuccucuccuggau

SEQ ID NO: 1138973 - RNA, 19 nt, Homo sapiens
  misc_RNA (1)...(19): siRNA sense strand
caggacauuuggcugugau

SEQ ID NO: 1138974 - RNA, 19 nt, Homo sapiens
  misc_RNA (1)...(19): siRNA sense strand
ggccgugucuucuuacuug

SEQ ID NO: 1138975 - RNA, 19 nt, Homo sapiens
  misc_RNA (1)...(19): siRNA sense strand
cacaggccgugucuucuua

SEQ ID NO: 1138976 - RNA, 19 nt, Homo sapiens
  misc_RNA (1)...(19): siRNA sense strand
agaguugucuucaggcuuu

SEQ ID NO: 1138977 - RNA, 19 nt, Homo sapiens
  misc_RNA (1)...(19): siRNA sense strand
accuggagcugccucauua

SEQ ID NO: 1138978 - RNA, 19 nt, Homo sapiens
  misc_RNA (1)...(19): siRNA sense strand
ggaguugccugaugguaac

SEQ ID NO: 1138979 - RNA, 19 nt, Homo sapiens
  misc_RNA (1)...(19): siRNA sense strand
gaccuggaguugccugaug

SEQ ID NO: 1138980 - RNA, 19 nt, Homo sapiens
  misc_RNA (1)...(19): siRNA sense strand
gugaagauggucauucuga

SEQ ID NO: 1138981 - RNA, 19 nt, Homo sapiens
  misc_RNA (1)...(19): siRNA sense strand
caccauugcccaugagauu

SEQ ID NO: 1138982 - RNA, 19 nt, Homo sapiens
  misc_RNA (1)...(19): siRNA sense strand
gagucaccauugcccauga

SEQ ID NO: 1138983 - RNA, 19 nt, Homo sapiens
  misc_RNA (1)...(19): siRNA sense strand
ccacaggccgugucuucuu

SEQ ID NO: 1138984 - RNA, 19 nt, Homo sapiens
  misc_RNA (1)...(19): siRNA sense strand
gaccugggagucaccauug

SEQ ID NO: 1138985 - RNA, 19 nt, Homo sapiens
  misc_RNA (1)...(19): siRNA sense strand
gcuaugugcucaccaaccu

SEQ ID NO: 1138986 - RNA, 19 nt, Homo sapiens
  misc_RNA (1)...(19): siRNA sense strand
uggaguugccugaugguaa

SEQ ID NO: 1138987 - RNA, 19 nt, Homo sapiens
  misc_RNA (1)...(19): siRNA sense strand
ggguggagccagaccauca

SEQ ID NO: 1138988 - RNA, 19 nt, Homo sapiens
  misc_RNA (1)...(19): siRNA sense strand
gcccuggugcucccuuaaa

SEQ ID NO: 1138989 - RNA, 19 nt, Homo sapiens
  misc_RNA (1)...(19): siRNA sense strand
ggaggacacagagcgcuau

SEQ ID NO: 1138990 - RNA, 19 nt, Homo sapiens
  misc_RNA (1)...(19): siRNA sense strand
gcucaccaaccucaacauc

SEQ ID NO: 1138991 - RNA, 19 nt, Homo sapiens
  misc_RNA (1)...(19): siRNA sense strand
uggugaagauggucauucu

SEQ ID NO: 1138992 - RNA, 19 nt, Homo sapiens
  misc_RNA (1)...(19): siRNA sense strand
cgaccugggagucaccauu

SEQ ID NO: 1138993 - RNA, 19 nt, Homo sapiens
  misc_RNA (1)...(19): siRNA sense strand
acacggagcucaaggagaa

SEQ ID NO: 1138994 - RNA, 19 nt, Homo sapiens
  misc_RNA (1)...(19): siRNA sense strand
ucaaguaccugcuguuuac

SEQ ID NO: 1138995 - RNA, 19 nt, Homo sapiens
  misc_RNA (1)...(19): siRNA sense strand
gaccaugccuccaacaucu

SEQ ID NO: 1138996 - RNA, 19 nt, Homo sapiens
  misc_RNA (1)...(19): siRNA sense strand
ucacaggacuggcgagaca

SEQ ID NO: 1138997 - RNA, 19 nt, Homo sapiens
  misc_RNA (1)...(19): siRNA sense strand
gugcaggucuuuggcauga

SEQ ID NO: 1138998 - RNA, 19 nt, Homo sapiens
  misc_RNA (1)...(19): siRNA sense strand
gagaagaagacaacaugug

SEQ ID NO: 1138999 - RNA, 19 nt, Homo sapiens
  misc_RNA (1)...(19): siRNA sense strand
gcaggucuuuggcaugauc

SEQ ID NO: 1139000 - RNA, 19 nt, Homo sapiens
  misc_RNA (1)...(19): siRNA sense strand
caacauguggcaccguuug

SEQ ID NO: 1139001 - RNA, 19 nt, Homo sapiens
  misc_RNA (1)...(19): siRNA sense strand
ucaaggagaaccugaagga

SEQ ID NO: 1139002 - RNA, 19 nt, Homo sapiens
  misc_RNA (1)...(19): siRNA sense strand
ggaaccugcugcgccugua

SEQ ID NO: 1139003 - RNA, 19 nt, Homo sapiens
  misc_RNA (1)...(19): siRNA sense strand
ccucaagagugacuacauc

SEQ ID NO: 1139004 - RNA, 19 nt, Homo sapiens
  misc_RNA (1)...(19): siRNA sense strand
gcggcugcaucaccaaguu

SEQ ID NO: 1139005 - RNA, 19 nt, Homo sapiens
  misc_RNA (1)...(19): siRNA sense strand
gucucaagcuggagcacua

SEQ ID NO: 1139006 - RNA, 19 nt, Homo sapiens
  misc_RNA (1)...(19): siRNA sense strand
ugaaggacaccaugaccaa

SEQ ID NO: 1139007 - RNA, 19 nt, Homo sapiens
  misc_RNA (1)...(19): siRNA sense strand
agacggugguggcucuuug

SEQ ID NO: 1139008 - RNA, 19 nt, Homo sapiens
  misc_RNA (1)...(19): siRNA sense strand
caagcuggagcacuacuga

SEQ ID NO: 1139009 - RNA, 19 nt, Homo sapiens
  misc_RNA (1)...(19): siRNA sense strand
ccuccaacaucuacaaggu

SEQ ID NO: 1139010 - RNA, 19 nt, Homo sapiens
  misc_RNA (1)...(19): siRNA sense strand
gcaccguuugccucaagua

SEQ ID NO: 1139011 - RNA, 19 nt, Homo sapiens
  misc_RNA (1)...(19): siRNA sense strand
ccucaaguaccugcuguuu

SEQ ID NO: 1139012 - RNA, 19 nt, Homo sapiens
  misc_RNA (1)...(19): siRNA sense strand
ggagaucaucgcugguauc

SEQ ID NO: 1139013 - RNA, 19 nt, Homo sapiens
  misc_RNA (1)...(19): siRNA sense strand
cucaaguaccugcuguuua

SEQ ID NO: 1139014 - RNA, 19 nt, Homo sapiens
  misc_RNA (1)...(19): siRNA sense strand
ucuggacgcuggcccucaa

SEQ ID NO: 1139015 - RNA, 19 nt, Homo sapiens
  misc_RNA (1)...(19): siRNA sense strand
gaguucaacgagaagaaga

SEQ ID NO: 1139016 - RNA, 19 nt, Homo sapiens
  misc_RNA (1)...(19): siRNA sense strand
caaguuggagaccuucauc

SEQ ID NO: 1139017 - RNA, 19 nt, Homo sapiens
  misc_RNA (1)...(19): siRNA sense strand
aguaccugcuguuuaccua

SEQ ID NO: 1139018 - RNA, 19 nt, Homo sapiens
  misc_RNA (1)...(19): siRNA sense strand
gcucaaggagaaccugaag

SEQ ID NO: 1139019 - RNA, 19 nt, Homo sapiens
  misc_RNA (1)...(19): siRNA sense strand
cgcuggcccucaagaguga

SEQ ID NO: 1139020 - RNA, 19 nt, Homo sapiens
  misc_RNA (1)...(19): siRNA sense strand
acacggagcucaaggagaa

SEQ ID NO: 1139021 - RNA, 19 nt, Homo sapiens
  misc_RNA (1)...(19): siRNA sense strand
ucaaguaccugcuguuuac

SEQ ID NO: 1139022 - RNA, 19 nt, Homo sapiens
  misc_RNA (1)...(19): siRNA sense strand
gaccaugccuccaacaucu

SEQ ID NO: 1139023 - RNA, 19 nt, Homo sapiens
  misc_RNA (1)...(19): siRNA sense strand
ucacaggacuggcgagaca

SEQ ID NO: 1139024 - RNA, 19 nt, Homo sapiens
  misc_RNA (1)...(19): siRNA sense strand
gugcaggucuuuggcauga

SEQ ID NO: 1139025 - RNA, 19 nt, Homo sapiens
  misc_RNA (1)...(19): siRNA sense strand
gagaagaagacaacaugug

SEQ ID NO: 1139026 - RNA, 19 nt, Homo sapiens
  misc_RNA (1)...(19): siRNA sense strand
gcaggucuuuggcaugauc

SEQ ID NO: 1139027 - RNA, 19 nt, Homo sapiens
  misc_RNA (1)...(19): siRNA sense strand
caacauguggcaccguuug

SEQ ID NO: 1139028 - RNA, 19 nt, Homo sapiens
  misc_RNA (1)...(19): siRNA sense strand
ucaaggagaaccugaagga

SEQ ID NO: 1139029 - RNA, 19 nt, Homo sapiens
  misc_RNA (1)...(19): siRNA sense strand
ggaaccugcugcgccugua

SEQ ID NO: 1139030 - RNA, 19 nt, Homo sapiens
  misc_RNA (1)...(19): siRNA sense strand
ccucaagagugacuacauc

SEQ ID NO: 1139031 - RNA, 19 nt, Homo sapiens
  misc_RNA (1)...(19): siRNA sense strand
gcggcugcaucaccaaguu

SEQ ID NO: 1139032 - RNA, 19 nt, Homo sapiens
  misc_RNA (1)...(19): siRNA sense strand
gucucaagcuggagcacua

SEQ ID NO: 1139033 - RNA, 19 nt, Homo sapiens
  misc_RNA (1)...(19): siRNA sense strand
ugaaggacaccaugaccaa

SEQ ID NO: 1139034 - RNA, 19 nt, Homo sapiens
  misc_RNA (1)...(19): siRNA sense strand
agacggugguggcucuuug

SEQ ID NO: 1139035 - RNA, 19 nt, Homo sapiens
  misc_RNA (1)...(19): siRNA sense strand
caagcuggagcacuacuga

SEQ ID NO: 1139036 - RNA, 19 nt, Homo sapiens
  misc_RNA (1)...(19): siRNA sense strand
ccuccaacaucuacaaggu

SEQ ID NO: 1139037 - RNA, 19 nt, Homo sapiens
  misc_RNA (1)...(19): siRNA sense strand
gcaccguuugccucaagua

SEQ ID NO: 1139038 - RNA, 19 nt, Homo sapiens
  misc_RNA (1)...(19): siRNA sense strand
ccucaaguaccugcuguuu

SEQ ID NO: 1139039 - RNA, 19 nt, Homo sapiens
  misc_RNA (1)...(19): siRNA sense strand
ggagaucaucgcugguauc

SEQ ID NO: 1139040 - RNA, 19 nt, Homo sapiens
  misc_RNA (1)...(19): siRNA sense strand
cucaaguaccugcuguuua

SEQ ID NO: 1139041 - RNA, 19 nt, Homo sapiens
  misc_RNA (1)...(19): siRNA sense strand
ucuggacgcuggcccucaa

SEQ ID NO: 1139042 - RNA, 19 nt, Homo sapiens
  misc_RNA (1)...(19): siRNA sense strand
gaguucaacgagaagaaga

SEQ ID NO: 1139043 - RNA, 19 nt, Homo sapiens
  misc_RNA (1)...(19): siRNA sense strand
caaguuggagaccuucauc

SEQ ID NO: 1139044 - RNA, 19 nt, Homo sapiens
  misc_RNA (1)...(19): siRNA sense strand
aguaccugcuguuuaccua

SEQ ID NO: 1139045 - RNA, 19 nt, Homo sapiens
  misc_RNA (1)...(19): siRNA sense strand
gcucaaggagaaccugaag

SEQ ID NO: 1139046 - RNA, 19 nt, Homo sapiens
  misc_RNA (1)...(19): siRNA sense strand
cgcuggcccucaagaguga

SEQ ID NO: 1139047 - RNA, 19 nt, Homo sapiens
  misc_RNA (1)...(19): siRNA sense strand
ucacagagcugagaaacuu

SEQ ID NO: 1139048 - RNA, 19 nt, Homo sapiens
  misc_RNA (1)...(19): siRNA sense strand
ccaccucucuaccuuaaua

SEQ ID NO: 1139049 - RNA, 19 nt, Homo sapiens
  misc_RNA (1)...(19): siRNA sense strand
gagcuucaaugguguuauu

SEQ ID NO: 1139050 - RNA, 19 nt, Homo sapiens
  misc_RNA (1)...(19): siRNA sense strand
uagcaguucuggucuauaa

SEQ ID NO: 1139051 - RNA, 19 nt, Homo sapiens
  misc_RNA (1)...(19): siRNA sense strand
ugacaaaucugcucuagag

SEQ ID NO: 1139052 - RNA, 19 nt, Homo sapiens
  misc_RNA (1)...(19): siRNA sense strand
ccaugaagguuuccauaaa

SEQ ID NO: 1139053 - RNA, 19 nt, Homo sapiens
  misc_RNA (1)...(19): siRNA sense strand
gcucagaccuggcaguuuc

SEQ ID NO: 1139054 - RNA, 19 nt, Homo sapiens
  misc_RNA (1)...(19): siRNA sense strand
gcugguguaucuuugaaua

SEQ ID NO: 1139055 - RNA, 19 nt, Homo sapiens
  misc_RNA (1)...(19): siRNA sense strand
gaaaauggcuggcaauucu

SEQ ID NO: 1139056 - RNA, 19 nt, Homo sapiens
  misc_RNA (1)...(19): siRNA sense strand
gguaaggaaugagcuagua

SEQ ID NO: 1139057 - RNA, 19 nt, Homo sapiens
  misc_RNA (1)...(19): siRNA sense strand
cagaaugacuuugcuugua

SEQ ID NO: 1139058 - RNA, 19 nt, Homo sapiens
  misc_RNA (1)...(19): siRNA sense strand
ggaagcaacaucuaucuga

SEQ ID NO: 1139059 - RNA, 19 nt, Homo sapiens
  misc_RNA (1)...(19): siRNA sense strand
ccaaccaggugcauuuaaa

SEQ ID NO: 1139060 - RNA, 19 nt, Homo sapiens
  misc_RNA (1)...(19): siRNA sense strand
gaauaucaccugucagaug

SEQ ID NO: 1139061 - RNA, 19 nt, Homo sapiens
  misc_RNA (1)...(19): siRNA sense strand
aaagguugcuguucucaaa

SEQ ID NO: 1139062 - RNA, 19 nt, Homo sapiens
  misc_RNA (1)...(19): siRNA sense strand
gugcugaguuugaauauca

SEQ ID NO: 1139063 - RNA, 19 nt, Homo sapiens
  misc_RNA (1)...(19): siRNA sense strand
ggagacaaaucuagcaucu

SEQ ID NO: 1139064 - RNA, 19 nt, Homo sapiens
  misc_RNA (1)...(19): siRNA sense strand
gaugguaaaucauggaauc

SEQ ID NO: 1139065 - RNA, 19 nt, Homo sapiens
  misc_RNA (1)...(19): siRNA sense strand
guagaaauggcuugaguuu

SEQ ID NO: 1139066 - RNA, 19 nt, Homo sapiens
  misc_RNA (1)...(19): siRNA sense strand
ccaggugcauuuaaagaaa

SEQ ID NO: 1139067 - RNA, 19 nt, Homo sapiens
  misc_RNA (1)...(19): siRNA sense strand
ucauuuaccuugacauuuc

SEQ ID NO: 1139068 - RNA, 19 nt, Homo sapiens
  misc_RNA (1)...(19): siRNA sense strand
uggauacguuuccuuauaa

SEQ ID NO: 1139069 - RNA, 19 nt, Homo sapiens
  misc_RNA (1)...(19): siRNA sense strand
gugcaacaccuucagauaa

SEQ ID NO: 1139070 - RNA, 19 nt, Homo sapiens
  misc_RNA (1)...(19): siRNA sense strand
aauaucaccugucagauga

SEQ ID NO: 1139071 - RNA, 19 nt, Homo sapiens
  misc_RNA (1)...(19): siRNA sense strand
uagcauacuuagacuacua

SEQ ID NO: 1139072 - RNA, 19 nt, Homo sapiens
  misc_RNA (1)...(19): siRNA sense strand
gaaacucaaaucucucaaa

SEQ ID NO: 1139073 - RNA, 19 nt, Homo sapiens
  misc_RNA (1)...(19): siRNA sense strand
agacaaaucuagcaucucu

SEQ ID NO: 1139074 - RNA, 19 nt, Homo sapiens
  misc_RNA (1)...(19): siRNA sense strand
gaugaggacuggguaagga

SEQ ID NO: 1139075 - RNA, 19 nt, Homo sapiens
  misc_RNA (1)...(19): siRNA sense strand
guuuagaaguccaucguuu

SEQ ID NO: 1139076 - RNA, 19 nt, Homo sapiens
  misc_RNA (1)...(19): siRNA sense strand
gguggaaguugaacgaaug

SEQ ID NO: 1139077 - RNA, 19 nt, Homo sapiens
  misc_RNA (1)...(19): siRNA sense strand
caaguagucuagcuuucuu

SEQ ID NO: 1139078 - RNA, 19 nt, Homo sapiens
  misc_RNA (1)...(19): siRNA sense strand
uuggauacguuuccuuaua

SEQ ID NO: 1139079 - RNA, 19 nt, Homo sapiens
  misc_RNA (1)...(19): siRNA sense strand
uagagggccugugcaauuu

SEQ ID NO: 1139080 - RNA, 19 nt, Homo sapiens
  misc_RNA (1)...(19): siRNA sense strand
ggugugaaauccagacaau

SEQ ID NO: 1139081 - RNA, 19 nt, Homo sapiens
  misc_RNA (1)...(19): siRNA sense strand
gaaaccucauuuaccuuga

SEQ ID NO: 1139082 - RNA, 19 nt, Homo sapiens
  misc_RNA (1)...(19): siRNA sense strand
gggcuuagaacaacuagaa

SEQ ID NO: 1139083 - RNA, 19 nt, Homo sapiens
  misc_RNA (1)...(19): siRNA sense strand
caccagaguugcuuucaau

SEQ ID NO: 1139084 - RNA, 19 nt, Homo sapiens
  misc_RNA (1)...(19): siRNA sense strand
gcaugccugugcugaguuu

SEQ ID NO: 1139085 - RNA, 19 nt, Homo sapiens
  misc_RNA (1)...(19): siRNA sense strand
ugacuuugcuuguacuugu

SEQ ID NO: 1139086 - RNA, 19 nt, Homo sapiens
  misc_RNA (1)...(19): siRNA sense strand
aacaggaacuacagcauuu

SEQ ID NO: 1139087 - RNA, 19 nt, Homo sapiens
  misc_RNA (1)...(19): siRNA sense strand
gaaaugaaggaaacuugga

SEQ ID NO: 1139088 - RNA, 19 nt, Homo sapiens
  misc_RNA (1)...(19): siRNA sense strand
gccgaaaggugauuguugu

SEQ ID NO: 1139089 - RNA, 19 nt, Homo sapiens
  misc_RNA (1)...(19): siRNA sense strand
ugaaacaaaugagugaguu

SEQ ID NO: 1139090 - RNA, 19 nt, Homo sapiens
  misc_RNA (1)...(19): siRNA sense strand
cauugaagaauuccgauua

SEQ ID NO: 1139091 - RNA, 19 nt, Homo sapiens
  misc_RNA (1)...(19): siRNA sense strand
ccuacucaaucucucuuua

SEQ ID NO: 1139092 - RNA, 19 nt, Homo sapiens
  misc_RNA (1)...(19): siRNA sense strand
caacaaaggugggaaugcu

SEQ ID NO: 1139093 - RNA, 19 nt, Homo sapiens
  misc_RNA (1)...(19): siRNA sense strand
gauggcaacauuuagaauu

SEQ ID NO: 1139094 - RNA, 19 nt, Homo sapiens
  misc_RNA (1)...(19): siRNA sense strand
ucagaaaccucauuuaccu

SEQ ID NO: 1139095 - RNA, 19 nt, Homo sapiens
  misc_RNA (1)...(19): siRNA sense strand
uguaguaucuguuguagca

SEQ ID NO: 1139096 - RNA, 19 nt, Homo sapiens
  misc_RNA (1)...(19): siRNA sense strand
caacagcauuuaacucacu

SEQ ID NO: 1139097 - RNA, 19 nt, Homo sapiens
  misc_RNA (1)...(19): siRNA sense strand
gaaaacuuccuuccagaua

SEQ ID NO: 1139098 - RNA, 19 nt, Homo sapiens
  misc_RNA (1)...(19): siRNA sense strand
cuagagcacuuggaccuuu

SEQ ID NO: 1139099 - RNA, 19 nt, Homo sapiens
  misc_RNA (1)...(19): siRNA sense strand
gaacgaauggaaugugcaa

SEQ ID NO: 1139100 - RNA, 19 nt, Homo sapiens
  misc_RNA (1)...(19): siRNA sense strand
ucaauggcaucuucaaugg

SEQ ID NO: 1139101 - RNA, 19 nt, Homo sapiens
  misc_RNA (1)...(19): siRNA sense strand
cuagagggccugugcaauu

SEQ ID NO: 1139102 - RNA, 19 nt, Homo sapiens
  misc_RNA (1)...(19): siRNA sense strand
cuucauaagcugacuuuaa

SEQ ID NO: 1139103 - RNA, 19 nt, Homo sapiens
  misc_RNA (1)...(19): siRNA sense strand
gcugguaucaucuucauug

SEQ ID NO: 1139104 - RNA, 19 nt, Homo sapiens
  misc_RNA (1)...(19): siRNA sense strand
ucaccugucagaugaauaa

SEQ ID NO: 1139105 - RNA, 19 nt, Homo sapiens
  misc_RNA (1)...(19): siRNA sense strand
gaaguugaacgaauggaau

SEQ ID NO: 1139106 - RNA, 19 nt, Homo sapiens
  misc_RNA (1)...(19): siRNA sense strand
ucaaucacauaaugacuuc

SEQ ID NO: 1139107 - RNA, 19 nt, Homo sapiens
  misc_RNA (1)...(19): siRNA sense strand
gaagaauuccgauuagcau

SEQ ID NO: 1139108 - RNA, 19 nt, Homo sapiens
  misc_RNA (1)...(19): siRNA sense strand
gagggccugugcaauuuga

SEQ ID NO: 1139109 - RNA, 19 nt, Homo sapiens
  misc_RNA (1)...(19): siRNA sense strand
gguguaucuuugaauauga

SEQ ID NO: 1139110 - RNA, 19 nt, Homo sapiens
  misc_RNA (1)...(19): siRNA sense strand
ugaccaaucuagagcacuu

SEQ ID NO: 1139111 - RNA, 19 nt, Homo sapiens
  misc_RNA (1)...(19): siRNA sense strand
ggccauugcugccaacauc

SEQ ID NO: 1139112 - RNA, 19 nt, Homo sapiens
  misc_RNA (1)...(19): siRNA sense strand
aaacaggaacuacagcauu

SEQ ID NO: 1139113 - RNA, 19 nt, Homo sapiens
  misc_RNA (1)...(19): siRNA sense strand
ggacaguuucccacauuga

SEQ ID NO: 1139114 - RNA, 19 nt, Homo sapiens
  misc_RNA (1)...(19): siRNA sense strand
agaaguccaucguuugguu

SEQ ID NO: 1139115 - RNA, 19 nt, Homo sapiens
  misc_RNA (1)...(19): siRNA sense strand
uagaacaacuagaacaucu

SEQ ID NO: 1139116 - RNA, 19 nt, Homo sapiens
  misc_RNA (1)...(19): siRNA sense strand
ugaauaagaccaucauugg

SEQ ID NO: 1139117 - RNA, 19 nt, Homo sapiens
  misc_RNA (1)...(19): siRNA sense strand
uuucuaaucugaccaaucu

SEQ ID NO: 1139118 - RNA, 19 nt, Homo sapiens
  misc_RNA (1)...(19): siRNA sense strand
cagagccgcugguguaucu

SEQ ID NO: 1139119 - RNA, 19 nt, Homo sapiens
  misc_RNA (1)...(19): siRNA sense strand
guaaggaaugagcuaguaa

SEQ ID NO: 1139120 - RNA, 19 nt, Homo sapiens
  misc_RNA (1)...(19): siRNA sense strand
ggaaguugaacgaauggaa

SEQ ID NO: 1139121 - RNA, 19 nt, Homo sapiens
  misc_RNA (1)...(19): siRNA sense strand
caccagaguuuccugcaau

SEQ ID NO: 1139122 - RNA, 19 nt, Homo sapiens
  misc_RNA (1)...(19): siRNA sense strand
cauuggauacguuuccuua

SEQ ID NO: 1139123 - RNA, 19 nt, Homo sapiens
  misc_RNA (1)...(19): siRNA sense strand
uuucuggacuaucaaguuu

SEQ ID NO: 1139124 - RNA, 19 nt, Homo sapiens
  misc_RNA (1)...(19): siRNA sense strand
uaagccaccucucuaccuu

SEQ ID NO: 1139125 - RNA, 19 nt, Homo sapiens
  misc_RNA (1)...(19): siRNA sense strand
cauaagcugacuuuaagaa

SEQ ID NO: 1139126 - RNA, 19 nt, Homo sapiens
  misc_RNA (1)...(19): siRNA sense strand
ggaccucucucagugucaa

SEQ ID NO: 1139127 - RNA, 19 nt, Homo sapiens
  misc_RNA (1)...(19): siRNA sense strand
ugugaaauccagacaauug

SEQ ID NO: 1139128 - RNA, 19 nt, Homo sapiens
  misc_RNA (1)...(19): siRNA sense strand
gcacagacuugcggguucu

SEQ ID NO: 1139129 - RNA, 19 nt, Homo sapiens
  misc_RNA (1)...(19): siRNA sense strand
gcuucuugcuggcugcaua

SEQ ID NO: 1139130 - RNA, 19 nt, Homo sapiens
  misc_RNA (1)...(19): siRNA sense strand
caacuagaacaucuggauu

SEQ ID NO: 1139131 - RNA, 19 nt, Homo sapiens
  misc_RNA (1)...(19): siRNA sense strand
ccugaacccuaugaacuuu

SEQ ID NO: 1139132 - RNA, 19 nt, Homo sapiens
  misc_RNA (1)...(19): siRNA sense strand
ugaacccuaugaacuuuau

SEQ ID NO: 1139133 - RNA, 19 nt, Homo sapiens
  misc_RNA (1)...(19): siRNA sense strand
agaaugacuuugcuuguac

SEQ ID NO: 1139134 - RNA, 19 nt, Homo sapiens
  misc_RNA (1)...(19): siRNA sense strand
aaacuuccuuccagauauc

SEQ ID NO: 1139135 - RNA, 19 nt, Homo sapiens
  misc_RNA (1)...(19): siRNA sense strand
cuagaucucaguagaaaug

SEQ ID NO: 1139136 - RNA, 19 nt, Homo sapiens
  misc_RNA (1)...(19): siRNA sense strand
caguagaaauggcuugagu

SEQ ID NO: 1139137 - RNA, 19 nt, Homo sapiens
  misc_RNA (1)...(19): siRNA sense strand
uaugaugccuuuguuaucu

SEQ ID NO: 1139138 - RNA, 19 nt, Homo sapiens
  misc_RNA (1)...(19): siRNA sense strand
guuugaauaucaccuguca

SEQ ID NO: 1139139 - RNA, 19 nt, Homo sapiens
  misc_RNA (1)...(19): siRNA sense strand
gggcaugccugugcugagu

SEQ ID NO: 1139140 - RNA, 19 nt, Homo sapiens
  misc_RNA (1)...(19): siRNA sense strand
cuucagguacuaaauauga

SEQ ID NO: 1139141 - RNA, 19 nt, Homo sapiens
  misc_RNA (1)...(19): siRNA sense strand
ucacucagaaaccucauuu

SEQ ID NO: 1139142 - RNA, 19 nt, Homo sapiens
  misc_RNA (1)...(19): siRNA sense strand
uaccuugacauuucucaua

SEQ ID NO: 1139143 - RNA, 19 nt, Homo sapiens
  misc_RNA (1)...(19): siRNA sense strand
ggacuaucaaguuuacaga

SEQ ID NO: 1139144 - RNA, 19 nt, Homo sapiens
  misc_RNA (1)...(19): siRNA sense strand
caugaagguuuccauaaaa

SEQ ID NO: 1139145 - RNA, 19 nt, Homo sapiens
  misc_RNA (1)...(19): siRNA sense strand
ucagugugcuuguaguauc

SEQ ID NO: 1139146 - RNA, 19 nt, Homo sapiens
  misc_RNA (1)...(19): siRNA sense strand
gagccacaacaacuucuuu

SEQ ID NO: 1139147 - RNA, 19 nt, Homo sapiens
  misc_RNA (1)...(19): siRNA sense strand
ucacagagcugagaaacuu

SEQ ID NO: 1139148 - RNA, 19 nt, Homo sapiens
  misc_RNA (1)...(19): siRNA sense strand
ccaccucucuaccuuaaua

SEQ ID NO: 1139149 - RNA, 19 nt, Homo sapiens
  misc_RNA (1)...(19): siRNA sense strand
gagcuucaaugguguuauu

SEQ ID NO: 1139150 - RNA, 19 nt, Homo sapiens
  misc_RNA (1)...(19): siRNA sense strand
uagcaguucuggucuauaa

SEQ ID NO: 1139151 - RNA, 19 nt, Homo sapiens
  misc_RNA (1)...(19): siRNA sense strand
ugacaaaucugcucuagag

SEQ ID NO: 1139152 - RNA, 19 nt, Homo sapiens
  misc_RNA (1)...(19): siRNA sense strand
ccaugaagguuuccauaaa

SEQ ID NO: 1139153 - RNA, 19 nt, Homo sapiens
  misc_RNA (1)...(19): siRNA sense strand
gcucagaccuggcaguuuc

SEQ ID NO: 1139154 - RNA, 19 nt, Homo sapiens
  misc_RNA (1)...(19): siRNA sense strand
gcugguguaucuuugaaua

SEQ ID NO: 1139155 - RNA, 19 nt, Homo sapiens
  misc_RNA (1)...(19): siRNA sense strand
gaaaauggcuggcaauucu

SEQ ID NO: 1139156 - RNA, 19 nt, Homo sapiens
  misc_RNA (1)...(19): siRNA sense strand
gguaaggaaugagcuagua

SEQ ID NO: 1139157 - RNA, 19 nt, Homo sapiens
  misc_RNA (1)...(19): siRNA sense strand
cagaaugacuuugcuugua

SEQ ID NO: 1139158 - RNA, 19 nt, Homo sapiens
  misc_RNA (1)...(19): siRNA sense strand
ggaagcaacaucuaucuga

SEQ ID NO: 1139159 - RNA, 19 nt, Homo sapiens
  misc_RNA (1)...(19): siRNA sense strand
ccaaccaggugcauuuaaa

SEQ ID NO: 1139160 - RNA, 19 nt, Homo sapiens
  misc_RNA (1)...(19): siRNA sense strand
gaauaucaccugucagaug

SEQ ID NO: 1139161 - RNA, 19 nt, Homo sapiens
  misc_RNA (1)...(19): siRNA sense strand
aaagguugcuguucucaaa

SEQ ID NO: 1139162 - RNA, 19 nt, Homo sapiens
  misc_RNA (1)...(19): siRNA sense strand
gugcugaguuugaauauca

SEQ ID NO: 1139163 - RNA, 19 nt, Homo sapiens
  misc_RNA (1)...(19): siRNA sense strand
ggagacaaaucuagcaucu

SEQ ID NO: 1139164 - RNA, 19 nt, Homo sapiens
  misc_RNA (1)...(19): siRNA sense strand
gaugguaaaucauggaauc

SEQ ID NO: 1139165 - RNA, 19 nt, Homo sapiens
  misc_RNA (1)...(19): siRNA sense strand
guagaaauggcuugaguuu

SEQ ID NO: 1139166 - RNA, 19 nt, Homo sapiens
  misc_RNA (1)...(19): siRNA sense strand
ccaggugcauuuaaagaaa

SEQ ID NO: 1139167 - RNA, 19 nt, Homo sapiens
  misc_RNA (1)...(19): siRNA sense strand
ucauuuaccuugacauuuc

SEQ ID NO: 1139168 - RNA, 19 nt, Homo sapiens
  misc_RNA (1)...(19): siRNA sense strand
uggauacguuuccuuauaa

SEQ ID NO: 1139169 - RNA, 19 nt, Homo sapiens
  misc_RNA (1)...(19): siRNA sense strand
gugcaacaccuucagauaa

SEQ ID NO: 1139170 - RNA, 19 nt, Homo sapiens
  misc_RNA (1)...(19): siRNA sense strand
aauaucaccugucagauga

SEQ ID NO: 1139171 - RNA, 19 nt, Homo sapiens
  misc_RNA (1)...(19): siRNA sense strand
uagcauacuuagacuacua

SEQ ID NO: 1139172 - RNA, 19 nt, Homo sapiens
  misc_RNA (1)...(19): siRNA sense strand
gaaacucaaaucucucaaa

SEQ ID NO: 1139173 - RNA, 19 nt, Homo sapiens
  misc_RNA (1)...(19): siRNA sense strand
agacaaaucuagcaucucu

SEQ ID NO: 1139174 - RNA, 19 nt, Homo sapiens
  misc_RNA (1)...(19): siRNA sense strand
gaugaggacuggguaagga

SEQ ID NO: 1139175 - RNA, 19 nt, Homo sapiens
  misc_RNA (1)...(19): siRNA sense strand
guuuagaaguccaucguuu

SEQ ID NO: 1139176 - RNA, 19 nt, Homo sapiens
  misc_RNA (1)...(19): siRNA sense strand
gguggaaguugaacgaaug

SEQ ID NO: 1139177 - RNA, 19 nt, Homo sapiens
  misc_RNA (1)...(19): siRNA sense strand
caaguagucuagcuuucuu

SEQ ID NO: 1139178 - RNA, 19 nt, Homo sapiens
  misc_RNA (1)...(19): siRNA sense strand
uuggauacguuuccuuaua

SEQ ID NO: 1139179 - RNA, 19 nt, Homo sapiens
  misc_RNA (1)...(19): siRNA sense strand
uagagggccugugcaauuu

SEQ ID NO: 1139180 - RNA, 19 nt, Homo sapiens
  misc_RNA (1)...(19): siRNA sense strand
gggcuuagaacaacuagaa

SEQ ID NO: 1139181 - RNA, 19 nt, Homo sapiens
  misc_RNA (1)...(19): siRNA sense strand
ggugugaaauccagacaau

SEQ ID NO: 1139182 - RNA, 19 nt, Homo sapiens
  misc_RNA (1)...(19): siRNA sense strand
gaaaccucauuuaccuuga

SEQ ID NO: 1139183 - RNA, 19 nt, Homo sapiens
  misc_RNA (1)...(19): siRNA sense strand
caccagaguugcuuucaau

SEQ ID NO: 1139184 - RNA, 19 nt, Homo sapiens
  misc_RNA (1)...(19): siRNA sense strand
gcaugccugugcugaguuu

SEQ ID NO: 1139185 - RNA, 19 nt, Homo sapiens
  misc_RNA (1)...(19): siRNA sense strand
ugacuuugcuuguacuugu

SEQ ID NO: 1139186 - RNA, 19 nt, Homo sapiens
  misc_RNA (1)...(19): siRNA sense strand
aacaggaacuacagcauuu

SEQ ID NO: 1139187 - RNA, 19 nt, Homo sapiens
  misc_RNA (1)...(19): siRNA sense strand
gaaaugaaggaaacuugga

SEQ ID NO: 1139188 - RNA, 19 nt, Homo sapiens
  misc_RNA (1)...(19): siRNA sense strand
gccgaaaggugauuguugu

SEQ ID NO: 1139189 - RNA, 19 nt, Homo sapiens
  misc_RNA (1)...(19): siRNA sense strand
ugaaacaaaugagugaguu

SEQ ID NO: 1139190 - RNA, 19 nt, Homo sapiens
  misc_RNA (1)...(19): siRNA sense strand
cauugaagaauuccgauua

SEQ ID NO: 1139191 - RNA, 19 nt, Homo sapiens
  misc_RNA (1)...(19): siRNA sense strand
ccuacucaaucucucuuua

SEQ ID NO: 1139192 - RNA, 19 nt, Homo sapiens
  misc_RNA (1)...(19): siRNA sense strand
caacaaaggugggaaugcu

SEQ ID NO: 1139193 - RNA, 19 nt, Homo sapiens
  misc_RNA (1)...(19): siRNA sense strand
gauggcaacauuuagaauu

SEQ ID NO: 1139194 - RNA, 19 nt, Homo sapiens
  misc_RNA (1)...(19): siRNA sense strand
ucagaaaccucauuuaccu

SEQ ID NO: 1139195 - RNA, 19 nt, Homo sapiens
  misc_RNA (1)...(19): siRNA sense strand
uguaguaucuguuguagca

SEQ ID NO: 1139196 - RNA, 19 nt, Homo sapiens
  misc_RNA (1)...(19): siRNA sense strand
caacagcauuuaacucacu

SEQ ID NO: 1139197 - RNA, 19 nt, Homo sapiens
  misc_RNA (1)...(19): siRNA sense strand
gaaaacuuccuuccagaua

SEQ ID NO: 1139198 - RNA, 19 nt, Homo sapiens
  misc_RNA (1)...(19): siRNA sense strand
cuagagcacuuggaccuuu

SEQ ID NO: 1139199 - RNA, 19 nt, Homo sapiens
  misc_RNA (1)...(19): siRNA sense strand
gaacgaauggaaugugcaa

SEQ ID NO: 1139200 - RNA, 19 nt, Homo sapiens
  misc_RNA (1)...(19): siRNA sense strand
ucaauggcaucuucaaugg

SEQ ID NO: 1139201 - RNA, 19 nt, Homo sapiens
  misc_RNA (1)...(19): siRNA sense strand
cuagagggccugugcaauu

SEQ ID NO: 1139202 - RNA, 19 nt, Homo sapiens
  misc_RNA (1)...(19): siRNA sense strand
cuucauaagcugacuuuaa

SEQ ID NO: 1139203 - RNA, 19 nt, Homo sapiens
  misc_RNA (1)...(19): siRNA sense strand
gcugguaucaucuucauug

SEQ ID NO: 1139204 - RNA, 19 nt, Homo sapiens
  misc_RNA (1)...(19): siRNA sense strand
ucaccugucagaugaauaa

SEQ ID NO: 1139205 - RNA, 19 nt, Homo sapiens
  misc_RNA (1)...(19): siRNA sense strand
gaaguugaacgaauggaau

SEQ ID NO: 1139206 - RNA, 19 nt, Homo sapiens
  misc_RNA (1)...(19): siRNA sense strand
ucaaucacauaaugacuuc

SEQ ID NO: 1139207 - RNA, 19 nt, Homo sapiens
  misc_RNA (1)...(19): siRNA sense strand
gaagaauuccgauuagcau

SEQ ID NO: 1139208 - RNA, 19 nt, Homo sapiens
  misc_RNA (1)...(19): siRNA sense strand
gagggccugugcaauuuga

SEQ ID NO: 1139209 - RNA, 19 nt, Homo sapiens
  misc_RNA (1)...(19): siRNA sense strand
gguguaucuuugaauauga

SEQ ID NO: 1139210 - RNA, 19 nt, Homo sapiens
  misc_RNA (1)...(19): siRNA sense strand
ugaccaaucuagagcacuu

SEQ ID NO: 1139211 - RNA, 19 nt, Homo sapiens
  misc_RNA (1)...(19): siRNA sense strand
ggccauugcugccaacauc

SEQ ID NO: 1139212 - RNA, 19 nt, Homo sapiens
  misc_RNA (1)...(19): siRNA sense strand
aaacaggaacuacagcauu

SEQ ID NO: 1139213 - RNA, 19 nt, Homo sapiens
  misc_RNA (1)...(19): siRNA sense strand
ggacaguuucccacauuga

SEQ ID NO: 1139214 - RNA, 19 nt, Homo sapiens
  misc_RNA (1)...(19): siRNA sense strand
agaaguccaucguuugguu

SEQ ID NO: 1139215 - RNA, 19 nt, Homo sapiens
  misc_RNA (1)...(19): siRNA sense strand
uagaacaacuagaacaucu

SEQ ID NO: 1139216 - RNA, 19 nt, Homo sapiens
  misc_RNA (1)...(19): siRNA sense strand
ugaauaagaccaucauugg

SEQ ID NO: 1139217 - RNA, 19 nt, Homo sapiens
  misc_RNA (1)...(19): siRNA sense strand
uuucuaaucugaccaaucu

SEQ ID NO: 1139218 - RNA, 19 nt, Homo sapiens
  misc_RNA (1)...(19): siRNA sense strand
cagagccgcugguguaucu

SEQ ID NO: 1139219 - RNA, 19 nt, Homo sapiens
  misc_RNA (1)...(19): siRNA sense strand
guaaggaaugagcuaguaa

SEQ ID NO: 1139220 - RNA, 19 nt, Homo sapiens
  misc_RNA (1)...(19): siRNA sense strand
ggaaguugaacgaauggaa

SEQ ID NO: 1139221 - RNA, 19 nt, Homo sapiens
  misc_RNA (1)...(19): siRNA sense strand
caccagaguuuccugcaau

SEQ ID NO: 1139222 - RNA, 19 nt, Homo sapiens
  misc_RNA (1)...(19): siRNA sense strand
uaagccaccucucuaccuu

SEQ ID NO: 1139223 - RNA, 19 nt, Homo sapiens
  misc_RNA (1)...(19): siRNA sense strand
uuucuggacuaucaaguuu

SEQ ID NO: 1139224 - RNA, 19 nt, Homo sapiens
  misc_RNA (1)...(19): siRNA sense strand
cauuggauacguuuccuua

SEQ ID NO: 1139225 - RNA, 19 nt, Homo sapiens
  misc_RNA (1)...(19): siRNA sense strand
cauaagcugacuuuaagaa

SEQ ID NO: 1139226 - RNA, 19 nt, Homo sapiens
  misc_RNA (1)...(19): siRNA sense strand
ugugaaauccagacaauug

SEQ ID NO: 1139227 - RNA, 19 nt, Homo sapiens
  misc_RNA (1)...(19): siRNA sense strand
ggaccucucucagugucaa

SEQ ID NO: 1139228 - RNA, 19 nt, Homo sapiens
  misc_RNA (1)...(19): siRNA sense strand
gcacagacuugcggguucu

SEQ ID NO: 1139229 - RNA, 19 nt, Homo sapiens
  misc_RNA (1)...(19): siRNA sense strand
gcuucuugcuggcugcaua

SEQ ID NO: 1139230 - RNA, 19 nt, Homo sapiens
  misc_RNA (1)...(19): siRNA sense strand
caacuagaacaucuggauu

SEQ ID NO: 1139231 - RNA, 19 nt, Homo sapiens
  misc_RNA (1)...(19): siRNA sense strand
ccugaacccuaugaacuuu

SEQ ID NO: 1139232 - RNA, 19 nt, Homo sapiens
  misc_RNA (1)...(19): siRNA sense strand
ugaacccuaugaacuuuau

SEQ ID NO: 1139233 - RNA, 19 nt, Homo sapiens
  misc_RNA (1)...(19): siRNA sense strand
agaaugacuuugcuuguac

SEQ ID NO: 1139234 - RNA, 19 nt, Homo sapiens
  misc_RNA (1)...(19): siRNA sense strand
aaacuuccuuccagauauc

SEQ ID NO: 1139235 - RNA, 19 nt, Homo sapiens
  misc_RNA (1)...(19): siRNA sense strand
cuagaucucaguagaaaug

SEQ ID NO: 1139236 - RNA, 19 nt, Homo sapiens
  misc_RNA (1)...(19): siRNA sense strand
caguagaaauggcuugagu

SEQ ID NO: 1139237 - RNA, 19 nt, Homo sapiens
  misc_RNA (1)...(19): siRNA sense strand
uaugaugccuuuguuaucu

SEQ ID NO: 1139238 - RNA, 19 nt, Homo sapiens
  misc_RNA (1)...(19): siRNA sense strand
guuugaauaucaccuguca

SEQ ID NO: 1139239 - RNA, 19 nt, Homo sapiens
  misc_RNA (1)...(19): siRNA sense strand
gggcaugccugugcugagu

SEQ ID NO: 1139240 - RNA, 19 nt, Homo sapiens
  misc_RNA (1)...(19): siRNA sense strand
cuucagguacuaaauauga

SEQ ID NO: 1139241 - RNA, 19 nt, Homo sapiens
  misc_RNA (1)...(19): siRNA sense strand
ucacucagaaaccucauuu

SEQ ID NO: 1139242 - RNA, 19 nt, Homo sapiens
  misc_RNA (1)...(19): siRNA sense strand
gcauuccaauuugaaacaa

SEQ ID NO: 1139243 - RNA, 19 nt, Homo sapiens
  misc_RNA (1)...(19): siRNA sense strand
caugaagguuuccauaaaa

SEQ ID NO: 1139244 - RNA, 19 nt, Homo sapiens
  misc_RNA (1)...(19): siRNA sense strand
ucagugugcuuguaguauc

SEQ ID NO: 1139245 - RNA, 19 nt, Homo sapiens
  misc_RNA (1)...(19): siRNA sense strand
gagccacaacaacuucuuu

SEQ ID NO: 1139246 - RNA, 19 nt, Homo sapiens
  misc_RNA (1)...(19): siRNA sense strand
uaccuugacauuucucaua

SEQ ID NO: 1139247 - RNA, 19 nt, Homo sapiens
  misc_RNA (1)...(19): siRNA sense strand
ucacagagcugagaaacuu

SEQ ID NO: 1139248 - RNA, 19 nt, Homo sapiens
  misc_RNA (1)...(19): siRNA sense strand
ccaccucucuaccuuaaua

SEQ ID NO: 1139249 - RNA, 19 nt, Homo sapiens
  misc_RNA (1)...(19): siRNA sense strand
gagcuucaaugguguuauu

SEQ ID NO: 1139250 - RNA, 19 nt, Homo sapiens
  misc_RNA (1)...(19): siRNA sense strand
uagcaguucuggucuauaa

SEQ ID NO: 1139251 - RNA, 19 nt, Homo sapiens
  misc_RNA (1)...(19): siRNA sense strand
ugacaaaucugcucuagag

SEQ ID NO: 1139252 - RNA, 19 nt, Homo sapiens
  misc_RNA (1)...(19): siRNA sense strand
ccaugaagguuuccauaaa

SEQ ID NO: 1139253 - RNA, 19 nt, Homo sapiens
  misc_RNA (1)...(19): siRNA sense strand
gcucagaccuggcaguuuc

SEQ ID NO: 1139254 - RNA, 19 nt, Homo sapiens
  misc_RNA (1)...(19): siRNA sense strand
gcugguguaucuuugaaua

SEQ ID NO: 1139255 - RNA, 19 nt, Homo sapiens
  misc_RNA (1)...(19): siRNA sense strand
gaaaauggcuggcaauucu

SEQ ID NO: 1139256 - RNA, 19 nt, Homo sapiens
  misc_RNA (1)...(19): siRNA sense strand
gguaaggaaugagcuagua

SEQ ID NO: 1139257 - RNA, 19 nt, Homo sapiens
  misc_RNA (1)...(19): siRNA sense strand
cagaaugacuuugcuugua

SEQ ID NO: 1139258 - RNA, 19 nt, Homo sapiens
  misc_RNA (1)...(19): siRNA sense strand
ggaagcaacaucuaucuga

SEQ ID NO: 1139259 - RNA, 19 nt, Homo sapiens
  misc_RNA (1)...(19): siRNA sense strand
ccaaccaggugcauuuaaa

SEQ ID NO: 1139260 - RNA, 19 nt, Homo sapiens
  misc_RNA (1)...(19): siRNA sense strand
gaauaucaccugucagaug

SEQ ID NO: 1139261 - RNA, 19 nt, Homo sapiens
  misc_RNA (1)...(19): siRNA sense strand
aaagguugcuguucucaaa

SEQ ID NO: 1139262 - RNA, 19 nt, Homo sapiens
  misc_RNA (1)...(19): siRNA sense strand
gugcugaguuugaauauca

SEQ ID NO: 1139263 - RNA, 19 nt, Homo sapiens
  misc_RNA (1)...(19): siRNA sense strand
ggagacaaaucuagcaucu

SEQ ID NO: 1139264 - RNA, 19 nt, Homo sapiens
  misc_RNA (1)...(19): siRNA sense strand
gaugguaaaucauggaauc

SEQ ID NO: 1139265 - RNA, 19 nt, Homo sapiens
  misc_RNA (1)...(19): siRNA sense strand
guagaaauggcuugaguuu

SEQ ID NO: 1139266 - RNA, 19 nt, Homo sapiens
  misc_RNA (1)...(19): siRNA sense strand
ccaggugcauuuaaagaaa

SEQ ID NO: 1139267 - RNA, 19 nt, Homo sapiens
  misc_RNA (1)...(19): siRNA sense strand
ucauuuaccuugacauuuc

SEQ ID NO: 1139268 - RNA, 19 nt, Homo sapiens
  misc_RNA (1)...(19): siRNA sense strand
uggauacguuuccuuauaa

SEQ ID NO: 1139269 - RNA, 19 nt, Homo sapiens
  misc_RNA (1)...(19): siRNA sense strand
gugcaacaccuucagauaa

SEQ ID NO: 1139270 - RNA, 19 nt, Homo sapiens
  misc_RNA (1)...(19): siRNA sense strand
aauaucaccugucagauga

SEQ ID NO: 1139271 - RNA, 19 nt, Homo sapiens
  misc_RNA (1)...(19): siRNA sense strand
uagcauacuuagacuacua

SEQ ID NO: 1139272 - RNA, 19 nt, Homo sapiens
  misc_RNA (1)...(19): siRNA sense strand
gaaacucaaaucucucaaa

SEQ ID NO: 1139273 - RNA, 19 nt, Homo sapiens
  misc_RNA (1)...(19): siRNA sense strand
agacaaaucuagcaucucu

SEQ ID NO: 1139274 - RNA, 19 nt, Homo sapiens
  misc_RNA (1)...(19): siRNA sense strand
gaugaggacuggguaagga

SEQ ID NO: 1139275 - RNA, 19 nt, Homo sapiens
  misc_RNA (1)...(19): siRNA sense strand
guuuagaaguccaucguuu

SEQ ID NO: 1139276 - RNA, 19 nt, Homo sapiens
  misc_RNA (1)...(19): siRNA sense strand
gguggaaguugaacgaaug

SEQ ID NO: 1139277 - RNA, 19 nt, Homo sapiens
  misc_RNA (1)...(19): siRNA sense strand
caaguagucuagcuuucuu

SEQ ID NO: 1139278 - RNA, 19 nt, Homo sapiens
  misc_RNA (1)...(19): siRNA sense strand
uuggauacguuuccuuaua

SEQ ID NO: 1139279 - RNA, 19 nt, Homo sapiens
  misc_RNA (1)...(19): siRNA sense strand
uagagggccugugcaauuu

SEQ ID NO: 1139280 - RNA, 19 nt, Homo sapiens
  misc_RNA (1)...(19): siRNA sense strand
ggugugaaauccagacaau

SEQ ID NO: 1139281 - RNA, 19 nt, Homo sapiens
  misc_RNA (1)...(19): siRNA sense strand
gaaaccucauuuaccuuga

SEQ ID NO: 1139282 - RNA, 19 nt, Homo sapiens
  misc_RNA (1)...(19): siRNA sense strand
gggcuuagaacaacuagaa

SEQ ID NO: 1139283 - RNA, 19 nt, Homo sapiens
  misc_RNA (1)...(19): siRNA sense strand
caccagaguugcuuucaau

SEQ ID NO: 1139284 - RNA, 19 nt, Homo sapiens
  misc_RNA (1)...(19): siRNA sense strand
gcaugccugugcugaguuu

SEQ ID NO: 1139285 - RNA, 19 nt, Homo sapiens
  misc_RNA (1)...(19): siRNA sense strand
ugacuuugcuuguacuugu

SEQ ID NO: 1139286 - RNA, 19 nt, Homo sapiens
  misc_RNA (1)...(19): siRNA sense strand
aacaggaacuacagcauuu

SEQ ID NO: 1139287 - RNA, 19 nt, Homo sapiens
  misc_RNA (1)...(19): siRNA sense strand
gaaaugaaggaaacuugga

SEQ ID NO: 1139288 - RNA, 19 nt, Homo sapiens
  misc_RNA (1)...(19): siRNA sense strand
gccgaaaggugauuguugu

SEQ ID NO: 1139289 - RNA, 19 nt, Homo sapiens
  misc_RNA (1)...(19): siRNA sense strand
ugaaacaaaugagugaguu

SEQ ID NO: 1139290 - RNA, 19 nt, Homo sapiens
  misc_RNA (1)...(19): siRNA sense strand
cauugaagaauuccgauua

SEQ ID NO: 1139291 - RNA, 19 nt, Homo sapiens
  misc_RNA (1)...(19): siRNA sense strand
ccuacucaaucucucuuua

SEQ ID NO: 1139292 - RNA, 19 nt, Homo sapiens
  misc_RNA (1)...(19): siRNA sense strand
caacaaaggugggaaugcu

SEQ ID NO: 1139293 - RNA, 19 nt, Homo sapiens
  misc_RNA (1)...(19): siRNA sense strand
gauggcaacauuuagaauu

SEQ ID NO: 1139294 - RNA, 19 nt, Homo sapiens
  misc_RNA (1)...(19): siRNA sense strand
ucagaaaccucauuuaccu

SEQ ID NO: 1139295 - RNA, 19 nt, Homo sapiens
  misc_RNA (1)...(19): siRNA sense strand
uguaguaucuguuguagca

SEQ ID NO: 1139296 - RNA, 19 nt, Homo sapiens
  misc_RNA (1)...(19): siRNA sense strand
caacagcauuuaacucacu

SEQ ID NO: 1139297 - RNA, 19 nt, Homo sapiens
  misc_RNA (1)...(19): siRNA sense strand
gaaaacuuccuuccagaua

SEQ ID NO: 1139298 - RNA, 19 nt, Homo sapiens
  misc_RNA (1)...(19): siRNA sense strand
cuagagcacuuggaccuuu

SEQ ID NO: 1139299 - RNA, 19 nt, Homo sapiens
  misc_RNA (1)...(19): siRNA sense strand
gaacgaauggaaugugcaa

SEQ ID NO: 1139300 - RNA, 19 nt, Homo sapiens
  misc_RNA (1)...(19): siRNA sense strand
ucaauggcaucuucaaugg

SEQ ID NO: 1139301 - RNA, 19 nt, Homo sapiens
  misc_RNA (1)...(19): siRNA sense strand
cuagagggccugugcaauu

SEQ ID NO: 1139302 - RNA, 19 nt, Homo sapiens
  misc_RNA (1)...(19): siRNA sense strand
cuucauaagcugacuuuaa

SEQ ID NO: 1139303 - RNA, 19 nt, Homo sapiens
  misc_RNA (1)...(19): siRNA sense strand
gcugguaucaucuucauug

SEQ ID NO: 1139304 - RNA, 19 nt, Homo sapiens
  misc_RNA (1)...(19): siRNA sense strand
ucaccugucagaugaauaa

SEQ ID NO: 1139305 - RNA, 19 nt, Homo sapiens
  misc_RNA (1)...(19): siRNA sense strand
gaaguugaacgaauggaau

SEQ ID NO: 1139306 - RNA, 19 nt, Homo sapiens
  misc_RNA (1)...(19): siRNA sense strand
ucaaucacauaaugacuuc

SEQ ID NO: 1139307 - RNA, 19 nt, Homo sapiens
  misc_RNA (1)...(19): siRNA sense strand
gaagaauuccgauuagcau

SEQ ID NO: 1139308 - RNA, 19 nt, Homo sapiens
  misc_RNA (1)...(19): siRNA sense strand
gagggccugugcaauuuga

SEQ ID NO: 1139309 - RNA, 19 nt, Homo sapiens
  misc_RNA (1)...(19): siRNA sense strand
gguguaucuuugaauauga

SEQ ID NO: 1139310 - RNA, 19 nt, Homo sapiens
  misc_RNA (1)...(19): siRNA sense strand
ugaccaaucuagagcacuu

SEQ ID NO: 1139311 - RNA, 19 nt, Homo sapiens
  misc_RNA (1)...(19): siRNA sense strand
ggccauugcugccaacauc

SEQ ID NO: 1139312 - RNA, 19 nt, Homo sapiens
  misc_RNA (1)...(19): siRNA sense strand
aaacaggaacuacagcauu

SEQ ID NO: 1139313 - RNA, 19 nt, Homo sapiens
  misc_RNA (1)...(19): siRNA sense strand
ggacaguuucccacauuga

SEQ ID NO: 1139314 - RNA, 19 nt, Homo sapiens
  misc_RNA (1)...(19): siRNA sense strand
agaaguccaucguuugguu

SEQ ID NO: 1139315 - RNA, 19 nt, Homo sapiens
  misc_RNA (1)...(19): siRNA sense strand
uagaacaacuagaacaucu

SEQ ID NO: 1139316 - RNA, 19 nt, Homo sapiens
  misc_RNA (1)...(19): siRNA sense strand
ugaauaagaccaucauugg

SEQ ID NO: 1139317 - RNA, 19 nt, Homo sapiens
  misc_RNA (1)...(19): siRNA sense strand
uuucuaaucugaccaaucu

SEQ ID NO: 1139318 - RNA, 19 nt, Homo sapiens
  misc_RNA (1)...(19): siRNA sense strand
cagagccgcugguguaucu

SEQ ID NO: 1139319 - RNA, 19 nt, Homo sapiens
  misc_RNA (1)...(19): siRNA sense strand
guaaggaaugagcuaguaa

SEQ ID NO: 1139320 - RNA, 19 nt, Homo sapiens
  misc_RNA (1)...(19): siRNA sense strand
ggaaguugaacgaauggaa

SEQ ID NO: 1139321 - RNA, 19 nt, Homo sapiens
  misc_RNA (1)...(19): siRNA sense strand
caccagaguuuccugcaau

SEQ ID NO: 1139322 - RNA, 19 nt, Homo sapiens
  misc_RNA (1)...(19): siRNA sense strand
cauuggauacguuuccuua

SEQ ID NO: 1139323 - RNA, 19 nt, Homo sapiens
  misc_RNA (1)...(19): siRNA sense strand
uuucuggacuaucaaguuu

SEQ ID NO: 1139324 - RNA, 19 nt, Homo sapiens
  misc_RNA (1)...(19): siRNA sense strand
uaagccaccucucuaccuu

SEQ ID NO: 1139325 - RNA, 19 nt, Homo sapiens
  misc_RNA (1)...(19): siRNA sense strand
cauaagcugacuuuaagaa

SEQ ID NO: 1139326 - RNA, 19 nt, Homo sapiens
  misc_RNA (1)...(19): siRNA sense strand
ggaccucucucagugucaa

SEQ ID NO: 1139327 - RNA, 19 nt, Homo sapiens
  misc_RNA (1)...(19): siRNA sense strand
ugugaaauccagacaauug

SEQ ID NO: 1139328 - RNA, 19 nt, Homo sapiens
  misc_RNA (1)...(19): siRNA sense strand
gcacagacuugcggguucu

SEQ ID NO: 1139329 - RNA, 19 nt, Homo sapiens
  misc_RNA (1)...(19): siRNA sense strand
gcuucuugcuggcugcaua

SEQ ID NO: 1139330 - RNA, 19 nt, Homo sapiens
  misc_RNA (1)...(19): siRNA sense strand
caacuagaacaucuggauu

SEQ ID NO: 1139331 - RNA, 19 nt, Homo sapiens
  misc_RNA (1)...(19): siRNA sense strand
ccugaacccuaugaacuuu

SEQ ID NO: 1139332 - RNA, 19 nt, Homo sapiens
  misc_RNA (1)...(19): siRNA sense strand
ugaacccuaugaacuuuau

SEQ ID NO: 1139333 - RNA, 19 nt, Homo sapiens
  misc_RNA (1)...(19): siRNA sense strand
agaaugacuuugcuuguac

SEQ ID NO: 1139334 - RNA, 19 nt, Homo sapiens
  misc_RNA (1)...(19): siRNA sense strand
aaacuuccuuccagauauc

SEQ ID NO: 1139335 - RNA, 19 nt, Homo sapiens
  misc_RNA (1)...(19): siRNA sense strand
cuagaucucaguagaaaug

SEQ ID NO: 1139336 - RNA, 19 nt, Homo sapiens
  misc_RNA (1)...(19): siRNA sense strand
caguagaaauggcuugagu

SEQ ID NO: 1139337 - RNA, 19 nt, Homo sapiens
  misc_RNA (1)...(19): siRNA sense strand
uaugaugccuuuguuaucu

SEQ ID NO: 1139338 - RNA, 19 nt, Homo sapiens
  misc_RNA (1)...(19): siRNA sense strand
guuugaauaucaccuguca

SEQ ID NO: 1139339 - RNA, 19 nt, Homo sapiens
  misc_RNA (1)...(19): siRNA sense strand
gggcaugccugugcugagu

SEQ ID NO: 1139340 - RNA, 19 nt, Homo sapiens
  misc_RNA (1)...(19): siRNA sense strand
cuucagguacuaaauauga

SEQ ID NO: 1139341 - RNA, 19 nt, Homo sapiens
  misc_RNA (1)...(19): siRNA sense strand
ucacucagaaaccucauuu

SEQ ID NO: 1139342 - RNA, 19 nt, Homo sapiens
  misc_RNA (1)...(19): siRNA sense strand
uaccuugacauuucucaua

SEQ ID NO: 1139343 - RNA, 19 nt, Homo sapiens
  misc_RNA (1)...(19): siRNA sense strand
ggacuaucaaguuuacaga

SEQ ID NO: 1139344 - RNA, 19 nt, Homo sapiens
  misc_RNA (1)...(19): siRNA sense strand
caugaagguuuccauaaaa

SEQ ID NO: 1139345 - RNA, 19 nt, Homo sapiens
  misc_RNA (1)...(19): siRNA sense strand
ucagugugcuuguaguauc

SEQ ID NO: 1139346 - RNA, 19 nt, Homo sapiens
  misc_RNA (1)...(19): siRNA sense strand
gagccacaacaacuucuuu

SEQ ID NO: 1139347 - RNA, 19 nt, Homo sapiens
  misc_RNA (1)...(19): siRNA sense strand
ucacagagcugagaaacuu

SEQ ID NO: 1139348 - RNA, 19 nt, Homo sapiens
  misc_RNA (1)...(19): siRNA sense strand
gagcuucaaugguguuauu

SEQ ID NO: 1139349 - RNA, 19 nt, Homo sapiens
  misc_RNA (1)...(19): siRNA sense strand
uagcaguucuggucuauaa

SEQ ID NO: 1139350 - RNA, 19 nt, Homo sapiens
  misc_RNA (1)...(19): siRNA sense strand
ugacaaaucugcucuagag

SEQ ID NO: 1139351 - RNA, 19 nt, Homo sapiens
  misc_RNA (1)...(19): siRNA sense strand
ccaugaagguuuccauaaa

SEQ ID NO: 1139352 - RNA, 19 nt, Homo sapiens
  misc_RNA (1)...(19): siRNA sense strand
gcucagaccuggcaguuuc

SEQ ID NO: 1139353 - RNA, 19 nt, Homo sapiens
  misc_RNA (1)...(19): siRNA sense strand
gcugguguaucuuugaaua

SEQ ID NO: 1139354 - RNA, 19 nt, Homo sapiens
  misc_RNA (1)...(19): siRNA sense strand
gaaaauggcuggcaauucu

SEQ ID NO: 1139355 - RNA, 19 nt, Homo sapiens
  misc_RNA (1)...(19): siRNA sense strand
gguaaggaaugagcuagua

SEQ ID NO: 1139356 - RNA, 19 nt, Homo sapiens
  misc_RNA (1)...(19): siRNA sense strand
cagaaugacuuugcuugua

SEQ ID NO: 1139357 - RNA, 19 nt, Homo sapiens
  misc_RNA (1)...(19): siRNA sense strand
ggaagcaacaucuaucuga

SEQ ID NO: 1139358 - RNA, 19 nt, Homo sapiens
  misc_RNA (1)...(19): siRNA sense strand
ccaaccaggugcauuuaaa

SEQ ID NO: 1139359 - RNA, 19 nt, Homo sapiens
  misc_RNA (1)...(19): siRNA sense strand
gaauaucaccugucagaug

SEQ ID NO: 1139360 - RNA, 19 nt, Homo sapiens
  misc_RNA (1)...(19): siRNA sense strand
aaagguugcuguucucaaa

SEQ ID NO: 1139361 - RNA, 19 nt, Homo sapiens
  misc_RNA (1)...(19): siRNA sense strand
gugcugaguuugaauauca

SEQ ID NO: 1139362 - RNA, 19 nt, Homo sapiens
  misc_RNA (1)...(19): siRNA sense strand
guagaaauggcuugaguuu

SEQ ID NO: 1139363 - RNA, 19 nt, Homo sapiens
  misc_RNA (1)...(19): siRNA sense strand
gaugguaaaucauggaauc

SEQ ID NO: 1139364 - RNA, 19 nt, Homo sapiens
  misc_RNA (1)...(19): siRNA sense strand
ccaggugcauuuaaagaaa

SEQ ID NO: 1139365 - RNA, 19 nt, Homo sapiens
  misc_RNA (1)...(19): siRNA sense strand
ucauuuaccuugacauuuc

SEQ ID NO: 1139366 - RNA, 19 nt, Homo sapiens
  misc_RNA (1)...(19): siRNA sense strand
uggauacguuuccuuauaa

SEQ ID NO: 1139367 - RNA, 19 nt, Homo sapiens
  misc_RNA (1)...(19): siRNA sense strand
gugcaacaccuucagauaa

SEQ ID NO: 1139368 - RNA, 19 nt, Homo sapiens
  misc_RNA (1)...(19): siRNA sense strand
aauaucaccugucagauga

SEQ ID NO: 1139369 - RNA, 19 nt, Homo sapiens
  misc_RNA (1)...(19): siRNA sense strand
uagcauacuuagacuacua

SEQ ID NO: 1139370 - RNA, 19 nt, Homo sapiens
  misc_RNA (1)...(19): siRNA sense strand
gaaacucaaaucucucaaa

SEQ ID NO: 1139371 - RNA, 19 nt, Homo sapiens
  misc_RNA (1)...(19): siRNA sense strand
gaugaggacuggguaagga

SEQ ID NO: 1139372 - RNA, 19 nt, Homo sapiens
  misc_RNA (1)...(19): siRNA sense strand
guuuagaaguccaucguuu

SEQ ID NO: 1139373 - RNA, 19 nt, Homo sapiens
  misc_RNA (1)...(19): siRNA sense strand
gguggaaguugaacgaaug

SEQ ID NO: 1139374 - RNA, 19 nt, Homo sapiens
  misc_RNA (1)...(19): siRNA sense strand
caaguagucuagcuuucuu

SEQ ID NO: 1139375 - RNA, 19 nt, Homo sapiens
  misc_RNA (1)...(19): siRNA sense strand
uuggauacguuuccuuaua

SEQ ID NO: 1139376 - RNA, 19 nt, Homo sapiens
  misc_RNA (1)...(19): siRNA sense strand
uagagggccugugcaauuu

SEQ ID NO: 1139377 - RNA, 19 nt, Homo sapiens
  misc_RNA (1)...(19): siRNA sense strand
gggcuuagaacaacuagaa

SEQ ID NO: 1139378 - RNA, 19 nt, Homo sapiens
  misc_RNA (1)...(19): siRNA sense strand
gaaaccucauuuaccuuga

SEQ ID NO: 1139379 - RNA, 19 nt, Homo sapiens
  misc_RNA (1)...(19): siRNA sense strand
caccagaguugcuuucaau

SEQ ID NO: 1139380 - RNA, 19 nt, Homo sapiens
  misc_RNA (1)...(19): siRNA sense strand
gcaugccugugcugaguuu

SEQ ID NO: 1139381 - RNA, 19 nt, Homo sapiens
  misc_RNA (1)...(19): siRNA sense strand
ugacuuugcuuguacuugu

SEQ ID NO: 1139382 - RNA, 19 nt, Homo sapiens
  misc_RNA (1)...(19): siRNA sense strand
aacaggaacuacagcauuu

SEQ ID NO: 1139383 - RNA, 19 nt, Homo sapiens
  misc_RNA (1)...(19): siRNA sense strand
gaaaugaaggaaacuugga

SEQ ID NO: 1139384 - RNA, 19 nt, Homo sapiens
  misc_RNA (1)...(19): siRNA sense strand
gccgaaaggugauuguugu

SEQ ID NO: 1139385 - RNA, 19 nt, Homo sapiens
  misc_RNA (1)...(19): siRNA sense strand
ugaaacaaaugagugaguu

SEQ ID NO: 1139386 - RNA, 19 nt, Homo sapiens
  misc_RNA (1)...(19): siRNA sense strand
cauugaagaauuccgauua

SEQ ID NO: 1139387 - RNA, 19 nt, Homo sapiens
  misc_RNA (1)...(19): siRNA sense strand
ccuacucaaucucucuuua

SEQ ID NO: 1139388 - RNA, 19 nt, Homo sapiens
  misc_RNA (1)...(19): siRNA sense strand
caacaaaggugggaaugcu

SEQ ID NO: 1139389 - RNA, 19 nt, Homo sapiens
  misc_RNA (1)...(19): siRNA sense strand
gauggcaacauuuagaauu

SEQ ID NO: 1139390 - RNA, 19 nt, Homo sapiens
  misc_RNA (1)...(19): siRNA sense strand
ucagaaaccucauuuaccu

SEQ ID NO: 1139391 - RNA, 19 nt, Homo sapiens
  misc_RNA (1)...(19): siRNA sense strand
uguaguaucuguuguagca

SEQ ID NO: 1139392 - RNA, 19 nt, Homo sapiens
  misc_RNA (1)...(19): siRNA sense strand
caacagcauuuaacucacu

SEQ ID NO: 1139393 - RNA, 19 nt, Homo sapiens
  misc_RNA (1)...(19): siRNA sense strand
gaaaacuuccuuccagaua

SEQ ID NO: 1139394 - RNA, 19 nt, Homo sapiens
  misc_RNA (1)...(19): siRNA sense strand
cuagagggccugugcaauu

SEQ ID NO: 1139395 - RNA, 19 nt, Homo sapiens
  misc_RNA (1)...(19): siRNA sense strand
gaacgaauggaaugugcaa

SEQ ID NO: 1139396 - RNA, 19 nt, Homo sapiens
  misc_RNA (1)...(19): siRNA sense strand
ucaauggcaucuucaaugg

SEQ ID NO: 1139397 - RNA, 19 nt, Homo sapiens
  misc_RNA (1)...(19): siRNA sense strand
gaagaauuccgauuagcau

SEQ ID NO: 1139398 - RNA, 19 nt, Homo sapiens
  misc_RNA (1)...(19): siRNA sense strand
gcugguaucaucuucauug

SEQ ID NO: 1139399 - RNA, 19 nt, Homo sapiens
  misc_RNA (1)...(19): siRNA sense strand
ucaccugucagaugaauaa

SEQ ID NO: 1139400 - RNA, 19 nt, Homo sapiens
  misc_RNA (1)...(19): siRNA sense strand
gaaguugaacgaauggaau

SEQ ID NO: 1139401 - RNA, 19 nt, Homo sapiens
  misc_RNA (1)...(19): siRNA sense strand
ucaaucacauaaugacuuc

SEQ ID NO: 1139402 - RNA, 19 nt, Homo sapiens
  misc_RNA (1)...(19): siRNA sense strand
cuucauaagcugacuuuaa

SEQ ID NO: 1139403 - RNA, 19 nt, Homo sapiens
  misc_RNA (1)...(19): siRNA sense strand
gagggccugugcaauuuga

SEQ ID NO: 1139404 - RNA, 19 nt, Homo sapiens
  misc_RNA (1)...(19): siRNA sense strand
gguguaucuuugaauauga

SEQ ID NO: 1139405 - RNA, 19 nt, Homo sapiens
  misc_RNA (1)...(19): siRNA sense strand
agaaguccaucguuugguu

SEQ ID NO: 1139406 - RNA, 19 nt, Homo sapiens
  misc_RNA (1)...(19): siRNA sense strand
ggccauugcugccaacauc

SEQ ID NO: 1139407 - RNA, 19 nt, Homo sapiens
  misc_RNA (1)...(19): siRNA sense strand
aaacaggaacuacagcauu

SEQ ID NO: 1139408 - RNA, 19 nt, Homo sapiens
  misc_RNA (1)...(19): siRNA sense strand
ggacaguuucccacauuga

SEQ ID NO: 1139409 - RNA, 19 nt, Homo sapiens
  misc_RNA (1)...(19): siRNA sense strand
uagaacaacuagaacaucu

SEQ ID NO: 1139410 - RNA, 19 nt, Homo sapiens
  misc_RNA (1)...(19): siRNA sense strand
ugaauaagaccaucauugg

SEQ ID NO: 1139411 - RNA, 19 nt, Homo sapiens
  misc_RNA (1)...(19): siRNA sense strand
caccagaguuuccugcaau

SEQ ID NO: 1139412 - RNA, 19 nt, Homo sapiens
  misc_RNA (1)...(19): siRNA sense strand
cagagccgcugguguaucu

SEQ ID NO: 1139413 - RNA, 19 nt, Homo sapiens
  misc_RNA (1)...(19): siRNA sense strand
guaaggaaugagcuaguaa

SEQ ID NO: 1139414 - RNA, 19 nt, Homo sapiens
  misc_RNA (1)...(19): siRNA sense strand
ggaaguugaacgaauggaa

SEQ ID NO: 1139415 - RNA, 19 nt, Homo sapiens
  misc_RNA (1)...(19): siRNA sense strand
cauuggauacguuuccuua

SEQ ID NO: 1139416 - RNA, 19 nt, Homo sapiens
  misc_RNA (1)...(19): siRNA sense strand
cauaagcugacuuuaagaa

SEQ ID NO: 1139417 - RNA, 19 nt, Homo sapiens
  misc_RNA (1)...(19): siRNA sense strand
ggaccucucucagugucaa

SEQ ID NO: 1139418 - RNA, 19 nt, Homo sapiens
  misc_RNA (1)...(19): siRNA sense strand
ccugaacccuaugaacuuu

SEQ ID NO: 1139419 - RNA, 19 nt, Homo sapiens
  misc_RNA (1)...(19): siRNA sense strand
gcuucuugcuggcugcaua

SEQ ID NO: 1139420 - RNA, 19 nt, Homo sapiens
  misc_RNA (1)...(19): siRNA sense strand
caacuagaacaucuggauu

SEQ ID NO: 1139421 - RNA, 19 nt, Homo sapiens
  misc_RNA (1)...(19): siRNA sense strand
cuagaucucaguagaaaug

SEQ ID NO: 1139422 - RNA, 19 nt, Homo sapiens
  misc_RNA (1)...(19): siRNA sense strand
agaaugacuuugcuuguac

SEQ ID NO: 1139423 - RNA, 19 nt, Homo sapiens
  misc_RNA (1)...(19): siRNA sense strand
ugaacccuaugaacuuuau

SEQ ID NO: 1139424 - RNA, 19 nt, Homo sapiens
  misc_RNA (1)...(19): siRNA sense strand
aaacuuccuuccagauauc

SEQ ID NO: 1139425 - RNA, 19 nt, Homo sapiens
  misc_RNA (1)...(19): siRNA sense strand
caguagaaauggcuugagu

SEQ ID NO: 1139426 - RNA, 19 nt, Homo sapiens
  misc_RNA (1)...(19): siRNA sense strand
uaugaugccuuuguuaucu

SEQ ID NO: 1139427 - RNA, 19 nt, Homo sapiens
  misc_RNA (1)...(19): siRNA sense strand
guuugaauaucaccuguca

SEQ ID NO: 1139428 - RNA, 19 nt, Homo sapiens
  misc_RNA (1)...(19): siRNA sense strand
gggcaugccugugcugagu

SEQ ID NO: 1139429 - RNA, 19 nt, Homo sapiens
  misc_RNA (1)...(19): siRNA sense strand
cuucagguacuaaauauga

SEQ ID NO: 1139430 - RNA, 19 nt, Homo sapiens
  misc_RNA (1)...(19): siRNA sense strand
ucacucagaaaccucauuu

SEQ ID NO: 1139431 - RNA, 19 nt, Homo sapiens
  misc_RNA (1)...(19): siRNA sense strand
uacuuucacuuccaacaaa

SEQ ID NO: 1139432 - RNA, 19 nt, Homo sapiens
  misc_RNA (1)...(19): siRNA sense strand
uucauaagcugacuuuaag

SEQ ID NO: 1139433 - RNA, 19 nt, Homo sapiens
  misc_RNA (1)...(19): siRNA sense strand
caugaagguuuccauaaaa

SEQ ID NO: 1139434 - RNA, 19 nt, Homo sapiens
  misc_RNA (1)...(19): siRNA sense strand
ucagugugcuuguaguauc

SEQ ID NO: 1139435 - RNA, 19 nt, Homo sapiens
  misc_RNA (1)...(19): siRNA sense strand
uauccaaccaggugcauuu

SEQ ID NO: 1139436 - RNA, 19 nt, Homo sapiens
  misc_RNA (1)...(19): siRNA sense strand
gagccacaacaacuucuuu

SEQ ID NO: 1139437 - RNA, 19 nt, Homo sapiens
  misc_RNA (1)...(19): siRNA sense strand
uaccuugacauuucucaua

SEQ ID NO: 1139438 - RNA, 19 nt, Homo sapiens
  misc_RNA (1)...(19): siRNA sense strand
gcauuccaauuugaaacaa

SEQ ID NO: 1139439 - RNA, 19 nt, Homo sapiens
  misc_RNA (1)...(19): siRNA sense strand
gagugugacuauugaaagg

SEQ ID NO: 1139440 - RNA, 19 nt, Homo sapiens
  misc_RNA (1)...(19): siRNA sense strand
cuacagcauuuuccaagua

SEQ ID NO: 1139441 - RNA, 19 nt, Homo sapiens
  misc_RNA (1)...(19): siRNA sense strand
ggauacguuuccuuauaag

SEQ ID NO: 1139442 - RNA, 19 nt, Homo sapiens
  misc_RNA (1)...(19): siRNA sense strand
guuauuaccaugaguucaa

SEQ ID NO: 1139443 - RNA, 19 nt, Homo sapiens
  misc_RNA (1)...(19): siRNA sense strand
uucaaggucuggcugguuu

SEQ ID NO: 1139444 - RNA, 19 nt, Homo sapiens
  misc_RNA (1)...(19): siRNA sense strand
gguccucagugugcuugua

SEQ ID NO: 1139445 - RNA, 19 nt, Homo sapiens
  misc_RNA (1)...(19): siRNA sense strand
uaaauaugagccacaacaa

SEQ ID NO: 1139446 - RNA, 19 nt, Homo sapiens
  misc_RNA (1)...(19): siRNA sense strand
ucacuacagagacuuuauu

SEQ ID NO: 1139447 - RNA, 19 nt, Homo sapiens
  misc_RNA (1)...(19): siRNA sense strand
ucacagagcugagaaacuu

SEQ ID NO: 1139448 - RNA, 19 nt, Homo sapiens
  misc_RNA (1)...(19): siRNA sense strand
ccaccucucuaccuuaaua

SEQ ID NO: 1139449 - RNA, 19 nt, Homo sapiens
  misc_RNA (1)...(19): siRNA sense strand
gagcuucaaugguguuauu

SEQ ID NO: 1139450 - RNA, 19 nt, Homo sapiens
  misc_RNA (1)...(19): siRNA sense strand
uagcaguucuggucuauaa

SEQ ID NO: 1139451 - RNA, 19 nt, Homo sapiens
  misc_RNA (1)...(19): siRNA sense strand
ugacaaaucugcucuagag

SEQ ID NO: 1139452 - RNA, 19 nt, Homo sapiens
  misc_RNA (1)...(19): siRNA sense strand
ccaugaagguuuccauaaa

SEQ ID NO: 1139453 - RNA, 19 nt, Homo sapiens
  misc_RNA (1)...(19): siRNA sense strand
gcucagaccuggcaguuuc

SEQ ID NO: 1139454 - RNA, 19 nt, Homo sapiens
  misc_RNA (1)...(19): siRNA sense strand
gcugguguaucuuugaaua

SEQ ID NO: 1139455 - RNA, 19 nt, Homo sapiens
  misc_RNA (1)...(19): siRNA sense strand
gaaaauggcuggcaauucu

SEQ ID NO: 1139456 - RNA, 19 nt, Homo sapiens
  misc_RNA (1)...(19): siRNA sense strand
gguaaggaaugagcuagua

SEQ ID NO: 1139457 - RNA, 19 nt, Homo sapiens
  misc_RNA (1)...(19): siRNA sense strand
cagaaugacuuugcuugua

SEQ ID NO: 1139458 - RNA, 19 nt, Homo sapiens
  misc_RNA (1)...(19): siRNA sense strand
ggaagcaacaucuaucuga

SEQ ID NO: 1139459 - RNA, 19 nt, Homo sapiens
  misc_RNA (1)...(19): siRNA sense strand
ccaaccaggugcauuuaaa

SEQ ID NO: 1139460 - RNA, 19 nt, Homo sapiens
  misc_RNA (1)...(19): siRNA sense strand
gaauaucaccugucagaug

SEQ ID NO: 1139461 - RNA, 19 nt, Homo sapiens
  misc_RNA (1)...(19): siRNA sense strand
aaagguugcuguucucaaa

SEQ ID NO: 1139462 - RNA, 19 nt, Homo sapiens
  misc_RNA (1)...(19): siRNA sense strand
gugcugaguuugaauauca

SEQ ID NO: 1139463 - RNA, 19 nt, Homo sapiens
  misc_RNA (1)...(19): siRNA sense strand
ggagacaaaucuagcaucu

SEQ ID NO: 1139464 - RNA, 19 nt, Homo sapiens
  misc_RNA (1)...(19): siRNA sense strand
gaugguaaaucauggaauc

SEQ ID NO: 1139465 - RNA, 19 nt, Homo sapiens
  misc_RNA (1)...(19): siRNA sense strand
guagaaauggcuugaguuu

SEQ ID NO: 1139466 - RNA, 19 nt, Homo sapiens
  misc_RNA (1)...(19): siRNA sense strand
ccaggugcauuuaaagaaa

SEQ ID NO: 1139467 - RNA, 19 nt, Homo sapiens
  misc_RNA (1)...(19): siRNA sense strand
ucauuuaccuugacauuuc

SEQ ID NO: 1139468 - RNA, 19 nt, Homo sapiens
  misc_RNA (1)...(19): siRNA sense strand
uggauacguuuccuuauaa

SEQ ID NO: 1139469 - RNA, 19 nt, Homo sapiens
  misc_RNA (1)...(19): siRNA sense strand
gugcaacaccuucagauaa

SEQ ID NO: 1139470 - RNA, 19 nt, Homo sapiens
  misc_RNA (1)...(19): siRNA sense strand
aauaucaccugucagauga

SEQ ID NO: 1139471 - RNA, 19 nt, Homo sapiens
  misc_RNA (1)...(19): siRNA sense strand
uagcauacuuagacuacua

SEQ ID NO: 1139472 - RNA, 19 nt, Homo sapiens
  misc_RNA (1)...(19): siRNA sense strand
gaaacucaaaucucucaaa

SEQ ID NO: 1139473 - RNA, 19 nt, Homo sapiens
  misc_RNA (1)...(19): siRNA sense strand
agacaaaucuagcaucucu

SEQ ID NO: 1139474 - RNA, 19 nt, Homo sapiens
  misc_RNA (1)...(19): siRNA sense strand
gaugaggacuggguaagga

SEQ ID NO: 1139475 - RNA, 19 nt, Homo sapiens
  misc_RNA (1)...(19): siRNA sense strand
guuuagaaguccaucguuu

SEQ ID NO: 1139476 - RNA, 19 nt, Homo sapiens
  misc_RNA (1)...(19): siRNA sense strand
gguggaaguugaacgaaug

SEQ ID NO: 1139477 - RNA, 19 nt, Homo sapiens
  misc_RNA (1)...(19): siRNA sense strand
caaguagucuagcuuucuu

SEQ ID NO: 1139478 - RNA, 19 nt, Homo sapiens
  misc_RNA (1)...(19): siRNA sense strand
uuggauacguuuccuuaua

SEQ ID NO: 1139479 - RNA, 19 nt, Homo sapiens
  misc_RNA (1)...(19): siRNA sense strand
uagagggccugugcaauuu

SEQ ID NO: 1139480 - RNA, 19 nt, Homo sapiens
  misc_RNA (1)...(19): siRNA sense strand
ggugugaaauccagacaau

SEQ ID NO: 1139481 - RNA, 19 nt, Homo sapiens
  misc_RNA (1)...(19): siRNA sense strand
gaaaccucauuuaccuuga

SEQ ID NO: 1139482 - RNA, 19 nt, Homo sapiens
  misc_RNA (1)...(19): siRNA sense strand
gggcuuagaacaacuagaa

SEQ ID NO: 1139483 - RNA, 19 nt, Homo sapiens
  misc_RNA (1)...(19): siRNA sense strand
caccagaguugcuuucaau

SEQ ID NO: 1139484 - RNA, 19 nt, Homo sapiens
  misc_RNA (1)...(19): siRNA sense strand
gcaugccugugcugaguuu

SEQ ID NO: 1139485 - RNA, 19 nt, Homo sapiens
  misc_RNA (1)...(19): siRNA sense strand
ugacuuugcuuguacuugu

SEQ ID NO: 1139486 - RNA, 19 nt, Homo sapiens
  misc_RNA (1)...(19): siRNA sense strand
aacaggaacuacagcauuu

SEQ ID NO: 1139487 - RNA, 19 nt, Homo sapiens
  misc_RNA (1)...(19): siRNA sense strand
gaaaugaaggaaacuugga

SEQ ID NO: 1139488 - RNA, 19 nt, Homo sapiens
  misc_RNA (1)...(19): siRNA sense strand
gccgaaaggugauuguugu

SEQ ID NO: 1139489 - RNA, 19 nt, Homo sapiens
  misc_RNA (1)...(19): siRNA sense strand
ugaaacaaaugagugaguu

SEQ ID NO: 1139490 - RNA, 19 nt, Homo sapiens
  misc_RNA (1)...(19): siRNA sense strand
cauugaagaauuccgauua

SEQ ID NO: 1139491 - RNA, 19 nt, Homo sapiens
  misc_RNA (1)...(19): siRNA sense strand
ccuacucaaucucucuuua

SEQ ID NO: 1139492 - RNA, 19 nt, Homo sapiens
  misc_RNA (1)...(19): siRNA sense strand
caacaaaggugggaaugcu

SEQ ID NO: 1139493 - RNA, 19 nt, Homo sapiens
  misc_RNA (1)...(19): siRNA sense strand
gauggcaacauuuagaauu

SEQ ID NO: 1139494 - RNA, 19 nt, Homo sapiens
  misc_RNA (1)...(19): siRNA sense strand
ucagaaaccucauuuaccu

SEQ ID NO: 1139495 - RNA, 19 nt, Homo sapiens
  misc_RNA (1)...(19): siRNA sense strand
uguaguaucuguuguagca

SEQ ID NO: 1139496 - RNA, 19 nt, Homo sapiens
  misc_RNA (1)...(19): siRNA sense strand
caacagcauuuaacucacu

SEQ ID NO: 1139497 - RNA, 19 nt, Homo sapiens
  misc_RNA (1)...(19): siRNA sense strand
gaaaacuuccuuccagaua

SEQ ID NO: 1139498 - RNA, 19 nt, Homo sapiens
  misc_RNA (1)...(19): siRNA sense strand
cuagagcacuuggaccuuu

SEQ ID NO: 1139499 - RNA, 19 nt, Homo sapiens
  misc_RNA (1)...(19): siRNA sense strand
gaacgaauggaaugugcaa

SEQ ID NO: 1139500 - RNA, 19 nt, Homo sapiens
  misc_RNA (1)...(19): siRNA sense strand
ucaauggcaucuucaaugg

SEQ ID NO: 1139501 - RNA, 19 nt, Homo sapiens
  misc_RNA (1)...(19): siRNA sense strand
cuagagggccugugcaauu

SEQ ID NO: 1139502 - RNA, 19 nt, Homo sapiens
  misc_RNA (1)...(19): siRNA sense strand
cuucauaagcugacuuuaa

SEQ ID NO: 1139503 - RNA, 19 nt, Homo sapiens
  misc_RNA (1)...(19): siRNA sense strand
gcugguaucaucuucauug

SEQ ID NO: 1139504 - RNA, 19 nt, Homo sapiens
  misc_RNA (1)...(19): siRNA sense strand
ucaccugucagaugaauaa

SEQ ID NO: 1139505 - RNA, 19 nt, Homo sapiens
  misc_RNA (1)...(19): siRNA sense strand
gaaguugaacgaauggaau

SEQ ID NO: 1139506 - RNA, 19 nt, Homo sapiens
  misc_RNA (1)...(19): siRNA sense strand
ucaaucacauaaugacuuc

SEQ ID NO: 1139507 - RNA, 19 nt, Homo sapiens
  misc_RNA (1)...(19): siRNA sense strand
gaagaauuccgauuagcau

SEQ ID NO: 1139508 - RNA, 19 nt, Homo sapiens
  misc_RNA (1)...(19): siRNA sense strand
gagggccugugcaauuuga

SEQ ID NO: 1139509 - RNA, 19 nt, Homo sapiens
  misc_RNA (1)...(19): siRNA sense strand
gguguaucuuugaauauga

SEQ ID NO: 1139510 - RNA, 19 nt, Homo sapiens
  misc_RNA (1)...(19): siRNA sense strand
ugaccaaucuagagcacuu

SEQ ID NO: 1139511 - RNA, 19 nt, Homo sapiens
  misc_RNA (1)...(19): siRNA sense strand
ggccauugcugccaacauc

SEQ ID NO: 1139512 - RNA, 19 nt, Homo sapiens
  misc_RNA (1)...(19): siRNA sense strand
aaacaggaacuacagcauu

SEQ ID NO: 1139513 - RNA, 19 nt, Homo sapiens
  misc_RNA (1)...(19): siRNA sense strand
ggacaguuucccacauuga

SEQ ID NO: 1139514 - RNA, 19 nt, Homo sapiens
  misc_RNA (1)...(19): siRNA sense strand
agaaguccaucguuugguu

SEQ ID NO: 1139515 - RNA, 19 nt, Homo sapiens
  misc_RNA (1)...(19): siRNA sense strand
uagaacaacuagaacaucu

SEQ ID NO: 1139516 - RNA, 19 nt, Homo sapiens
  misc_RNA (1)...(19): siRNA sense strand
ugaauaagaccaucauugg

SEQ ID NO: 1139517 - RNA, 19 nt, Homo sapiens
  misc_RNA (1)...(19): siRNA sense strand
uuucuaaucugaccaaucu

SEQ ID NO: 1139518 - RNA, 19 nt, Homo sapiens
  misc_RNA (1)...(19): siRNA sense strand
cagagccgcugguguaucu

SEQ ID NO: 1139519 - RNA, 19 nt, Homo sapiens
  misc_RNA (1)...(19): siRNA sense strand
guaaggaaugagcuaguaa

SEQ ID NO: 1139520 - RNA, 19 nt, Homo sapiens
  misc_RNA (1)...(19): siRNA sense strand
ggaaguugaacgaauggaa

SEQ ID NO: 1139521 - RNA, 19 nt, Homo sapiens
  misc_RNA (1)...(19): siRNA sense strand
caccagaguuuccugcaau

SEQ ID NO: 1139522 - RNA, 19 nt, Homo sapiens
  misc_RNA (1)...(19): siRNA sense strand
cauuggauacguuuccuua

SEQ ID NO: 1139523 - RNA, 19 nt, Homo sapiens
  misc_RNA (1)...(19): siRNA sense strand
uuucuggacuaucaaguuu

SEQ ID NO: 1139524 - RNA, 19 nt, Homo sapiens
  misc_RNA (1)...(19): siRNA sense strand
uaagccaccucucuaccuu

SEQ ID NO: 1139525 - RNA, 19 nt, Homo sapiens
  misc_RNA (1)...(19): siRNA sense strand
cauaagcugacuuuaagaa

SEQ ID NO: 1139526 - RNA, 19 nt, Homo sapiens
  misc_RNA (1)...(19): siRNA sense strand
ggaccucucucagugucaa

SEQ ID NO: 1139527 - RNA, 19 nt, Homo sapiens
  misc_RNA (1)...(19): siRNA sense strand
ugugaaauccagacaauug

SEQ ID NO: 1139528 - RNA, 19 nt, Homo sapiens
  misc_RNA (1)...(19): siRNA sense strand
gcacagacuugcggguucu

SEQ ID NO: 1139529 - RNA, 19 nt, Homo sapiens
  misc_RNA (1)...(19): siRNA sense strand
gcuucuugcuggcugcaua

SEQ ID NO: 1139530 - RNA, 19 nt, Homo sapiens
  misc_RNA (1)...(19): siRNA sense strand
caacuagaacaucuggauu

SEQ ID NO: 1139531 - RNA, 19 nt, Homo sapiens
  misc_RNA (1)...(19): siRNA sense strand
ccugaacccuaugaacuuu

SEQ ID NO: 1139532 - RNA, 19 nt, Homo sapiens
  misc_RNA (1)...(19): siRNA sense strand
ugaacccuaugaacuuuau

SEQ ID NO: 1139533 - RNA, 19 nt, Homo sapiens
  misc_RNA (1)...(19): siRNA sense strand
agaaugacuuugcuuguac

SEQ ID NO: 1139534 - RNA, 19 nt, Homo sapiens
  misc_RNA (1)...(19): siRNA sense strand
aaacuuccuuccagauauc

SEQ ID NO: 1139535 - RNA, 19 nt, Homo sapiens
  misc_RNA (1)...(19): siRNA sense strand
cuagaucucaguagaaaug

SEQ ID NO: 1139536 - RNA, 19 nt, Homo sapiens
  misc_RNA (1)...(19): siRNA sense strand
caguagaaauggcuugagu

SEQ ID NO: 1139537 - RNA, 19 nt, Homo sapiens
  misc_RNA (1)...(19): siRNA sense strand
uaugaugccuuuguuaucu

SEQ ID NO: 1139538 - RNA, 19 nt, Homo sapiens
  misc_RNA (1)...(19): siRNA sense strand
guuugaauaucaccuguca

SEQ ID NO: 1139539 - RNA, 19 nt, Homo sapiens
  misc_RNA (1)...(19): siRNA sense strand
gggcaugccugugcugagu

SEQ ID NO: 1139540 - RNA, 19 nt, Homo sapiens
  misc_RNA (1)...(19): siRNA sense strand
cuucagguacuaaauauga

SEQ ID NO: 1139541 - RNA, 19 nt, Homo sapiens
  misc_RNA (1)...(19): siRNA sense strand
ucacucagaaaccucauuu

SEQ ID NO: 1139542 - RNA, 19 nt, Homo sapiens
  misc_RNA (1)...(19): siRNA sense strand
uaccuugacauuucucaua

SEQ ID NO: 1139543 - RNA, 19 nt, Homo sapiens
  misc_RNA (1)...(19): siRNA sense strand
ggacuaucaaguuuacaga

SEQ ID NO: 1139544 - RNA, 19 nt, Homo sapiens
  misc_RNA (1)...(19): siRNA sense strand
caugaagguuuccauaaaa

SEQ ID NO: 1139545 - RNA, 19 nt, Homo sapiens
  misc_RNA (1)...(19): siRNA sense strand
ucagugugcuuguaguauc

SEQ ID NO: 1139546 - RNA, 19 nt, Homo sapiens
  misc_RNA (1)...(19): siRNA sense strand
gagccacaacaacuucuuu

SEQ ID NO: 1139547 - RNA, 19 nt, Homo sapiens
  misc_RNA (1)...(19): siRNA sense strand
ucacagagcugagaaacuu

SEQ ID NO: 1139548 - RNA, 19 nt, Homo sapiens
  misc_RNA (1)...(19): siRNA sense strand
ccaccucucuaccuuaaua

SEQ ID NO: 1139549 - RNA, 19 nt, Homo sapiens
  misc_RNA (1)...(19): siRNA sense strand
gagcuucaaugguguuauu

SEQ ID NO: 1139550 - RNA, 19 nt, Homo sapiens
  misc_RNA (1)...(19): siRNA sense strand
uagcaguucuggucuauaa

SEQ ID NO: 1139551 - RNA, 19 nt, Homo sapiens
  misc_RNA (1)...(19): siRNA sense strand
ugacaaaucugcucuagag

SEQ ID NO: 1139552 - RNA, 19 nt, Homo sapiens
  misc_RNA (1)...(19): siRNA sense strand
ccaugaagguuuccauaaa

SEQ ID NO: 1139553 - RNA, 19 nt, Homo sapiens
  misc_RNA (1)...(19): siRNA sense strand
gcucagaccuggcaguuuc

SEQ ID NO: 1139554 - RNA, 19 nt, Homo sapiens
  misc_RNA (1)...(19): siRNA sense strand
gcugguguaucuuugaaua

SEQ ID NO: 1139555 - RNA, 19 nt, Homo sapiens
  misc_RNA (1)...(19): siRNA sense strand
gaaaauggcuggcaauucu

SEQ ID NO: 1139556 - RNA, 19 nt, Homo sapiens
  misc_RNA (1)...(19): siRNA sense strand
gguaaggaaugagcuagua

SEQ ID NO: 1139557 - RNA, 19 nt, Homo sapiens
  misc_RNA (1)...(19): siRNA sense strand
cagaaugacuuugcuugua

SEQ ID NO: 1139558 - RNA, 19 nt, Homo sapiens
  misc_RNA (1)...(19): siRNA sense strand
ggaagcaacaucuaucuga

SEQ ID NO: 1139559 - RNA, 19 nt, Homo sapiens
  misc_RNA (1)...(19): siRNA sense strand
ccaaccaggugcauuuaaa

SEQ ID NO: 1139560 - RNA, 19 nt, Homo sapiens
  misc_RNA (1)...(19): siRNA sense strand
gaauaucaccugucagaug

SEQ ID NO: 1139561 - RNA, 19 nt, Homo sapiens
  misc_RNA (1)...(19): siRNA sense strand
aaagguugcuguucucaaa

SEQ ID NO: 1139562 - RNA, 19 nt, Homo sapiens
  misc_RNA (1)...(19): siRNA sense strand
gugcugaguuugaauauca

SEQ ID NO: 1139563 - RNA, 19 nt, Homo sapiens
  misc_RNA (1)...(19): siRNA sense strand
ggagacaaaucuagcaucu

SEQ ID NO: 1139564 - RNA, 19 nt, Homo sapiens
  misc_RNA (1)...(19): siRNA sense strand
gaugguaaaucauggaauc

SEQ ID NO: 1139565 - RNA, 19 nt, Homo sapiens
  misc_RNA (1)...(19): siRNA sense strand
guagaaauggcuugaguuu

SEQ ID NO: 1139566 - RNA, 19 nt, Homo sapiens
  misc_RNA (1)...(19): siRNA sense strand
ccaggugcauuuaaagaaa

SEQ ID NO: 1139567 - RNA, 19 nt, Homo sapiens
  misc_RNA (1)...(19): siRNA sense strand
ucauuuaccuugacauuuc

SEQ ID NO: 1139568 - RNA, 19 nt, Homo sapiens
  misc_RNA (1)...(19): siRNA sense strand
uggauacguuuccuuauaa

SEQ ID NO: 1139569 - RNA, 19 nt, Homo sapiens
  misc_RNA (1)...(19): siRNA sense strand
gugcaacaccuucagauaa

SEQ ID NO: 1139570 - RNA, 19 nt, Homo sapiens
  misc_RNA (1)...(19): siRNA sense strand
aauaucaccugucagauga

SEQ ID NO: 1139571 - RNA, 19 nt, Homo sapiens
  misc_RNA (1)...(19): siRNA sense strand
uagcauacuuagacuacua

SEQ ID NO: 1139572 - RNA, 19 nt, Homo sapiens
  misc_RNA (1)...(19): siRNA sense strand
gaaacucaaaucucucaaa

SEQ ID NO: 1139573 - RNA, 19 nt, Homo sapiens
  misc_RNA (1)...(19): siRNA sense strand
agacaaaucuagcaucucu

SEQ ID NO: 1139574 - RNA, 19 nt, Homo sapiens
  misc_RNA (1)...(19): siRNA sense strand
gaugaggacuggguaagga

SEQ ID NO: 1139575 - RNA, 19 nt, Homo sapiens
  misc_RNA (1)...(19): siRNA sense strand
guuuagaaguccaucguuu

SEQ ID NO: 1139576 - RNA, 19 nt, Homo sapiens
  misc_RNA (1)...(19): siRNA sense strand
gguggaaguugaacgaaug

SEQ ID NO: 1139577 - RNA, 19 nt, Homo sapiens
  misc_RNA (1)...(19): siRNA sense strand
caaguagucuagcuuucuu

SEQ ID NO: 1139578 - RNA, 19 nt, Homo sapiens
  misc_RNA (1)...(19): siRNA sense strand
uuggauacguuuccuuaua

SEQ ID NO: 1139579 - RNA, 19 nt, Homo sapiens
  misc_RNA (1)...(19): siRNA sense strand
uagagggccugugcaauuu

SEQ ID NO: 1139580 - RNA, 19 nt, Homo sapiens
  misc_RNA (1)...(19): siRNA sense strand
gggcuuagaacaacuagaa

SEQ ID NO: 1139581 - RNA, 19 nt, Homo sapiens
  misc_RNA (1)...(19): siRNA sense strand
ggugugaaauccagacaau

SEQ ID NO: 1139582 - RNA, 19 nt, Homo sapiens
  misc_RNA (1)...(19): siRNA sense strand
gaaaccucauuuaccuuga

SEQ ID NO: 1139583 - RNA, 19 nt, Homo sapiens
  misc_RNA (1)...(19): siRNA sense strand
caccagaguugcuuucaau

SEQ ID NO: 1139584 - RNA, 19 nt, Homo sapiens
  misc_RNA (1)...(19): siRNA sense strand
gcaugccugugcugaguuu

SEQ ID NO: 1139585 - RNA, 19 nt, Homo sapiens
  misc_RNA (1)...(19): siRNA sense strand
ugacuuugcuuguacuugu

SEQ ID NO: 1139586 - RNA, 19 nt, Homo sapiens
  misc_RNA (1)...(19): siRNA sense strand
aacaggaacuacagcauuu

SEQ ID NO: 1139587 - RNA, 19 nt, Homo sapiens
  misc_RNA (1)...(19): siRNA sense strand
gaaaugaaggaaacuugga

SEQ ID NO: 1139588 - RNA, 19 nt, Homo sapiens
  misc_RNA (1)...(19): siRNA sense strand
gccgaaaggugauuguugu

SEQ ID NO: 1139589 - RNA, 19 nt, Homo sapiens
  misc_RNA (1)...(19): siRNA sense strand
ugaaacaaaugagugaguu

SEQ ID NO: 1139590 - RNA, 19 nt, Homo sapiens
  misc_RNA (1)...(19): siRNA sense strand
cauugaagaauuccgauua

SEQ ID NO: 1139591 - RNA, 19 nt, Homo sapiens
  misc_RNA (1)...(19): siRNA sense strand
ccuacucaaucucucuuua

SEQ ID NO: 1139592 - RNA, 19 nt, Homo sapiens
  misc_RNA (1)...(19): siRNA sense strand
caacaaaggugggaaugcu

SEQ ID NO: 1139593 - RNA, 19 nt, Homo sapiens
  misc_RNA (1)...(19): siRNA sense strand
gauggcaacauuuagaauu

SEQ ID NO: 1139594 - RNA, 19 nt, Homo sapiens
  misc_RNA (1)...(19): siRNA sense strand
ucagaaaccucauuuaccu

SEQ ID NO: 1139595 - RNA, 19 nt, Homo sapiens
  misc_RNA (1)...(19): siRNA sense strand
uguaguaucuguuguagca

SEQ ID NO: 1139596 - RNA, 19 nt, Homo sapiens
  misc_RNA (1)...(19): siRNA sense strand
caacagcauuuaacucacu

SEQ ID NO: 1139597 - RNA, 19 nt, Homo sapiens
  misc_RNA (1)...(19): siRNA sense strand
gaaaacuuccuuccagaua

SEQ ID NO: 1139598 - RNA, 19 nt, Homo sapiens
  misc_RNA (1)...(19): siRNA sense strand
cuagagcacuuggaccuuu

SEQ ID NO: 1139599 - RNA, 19 nt, Homo sapiens
  misc_RNA (1)...(19): siRNA sense strand
gaacgaauggaaugugcaa

SEQ ID NO: 1139600 - RNA, 19 nt, Homo sapiens
  misc_RNA (1)...(19): siRNA sense strand
ucaauggcaucuucaaugg

SEQ ID NO: 1139601 - RNA, 19 nt, Homo sapiens
  misc_RNA (1)...(19): siRNA sense strand
cuagagggccugugcaauu

SEQ ID NO: 1139602 - RNA, 19 nt, Homo sapiens
  misc_RNA (1)...(19): siRNA sense strand
cuucauaagcugacuuuaa

SEQ ID NO: 1139603 - RNA, 19 nt, Homo sapiens
  misc_RNA (1)...(19): siRNA sense strand
gcugguaucaucuucauug

SEQ ID NO: 1139604 - RNA, 19 nt, Homo sapiens
  misc_RNA (1)...(19): siRNA sense strand
ucaccugucagaugaauaa

SEQ ID NO: 1139605 - RNA, 19 nt, Homo sapiens
  misc_RNA (1)...(19): siRNA sense strand
gaaguugaacgaauggaau

SEQ ID NO: 1139606 - RNA, 19 nt, Homo sapiens
  misc_RNA (1)...(19): siRNA sense strand
ucaaucacauaaugacuuc

SEQ ID NO: 1139607 - RNA, 19 nt, Homo sapiens
  misc_RNA (1)...(19): siRNA sense strand
gaagaauuccgauuagcau

SEQ ID NO: 1139608 - RNA, 19 nt, Homo sapiens
  misc_RNA (1)...(19): siRNA sense strand
gagggccugugcaauuuga

SEQ ID NO: 1139609 - RNA, 19 nt, Homo sapiens
  misc_RNA (1)...(19): siRNA sense strand
gguguaucuuugaauauga

SEQ ID NO: 1139610 - RNA, 19 nt, Homo sapiens
  misc_RNA (1)...(19): siRNA sense strand
ugaccaaucuagagcacuu

SEQ ID NO: 1139611 - RNA, 19 nt, Homo sapiens
  misc_RNA (1)...(19): siRNA sense strand
ggccauugcugccaacauc

SEQ ID NO: 1139612 - RNA, 19 nt, Homo sapiens
  misc_RNA (1)...(19): siRNA sense strand
aaacaggaacuacagcauu

SEQ ID NO: 1139613 - RNA, 19 nt, Homo sapiens
  misc_RNA (1)...(19): siRNA sense strand
ggacaguuucccacauuga

SEQ ID NO: 1139614 - RNA, 19 nt, Homo sapiens
  misc_RNA (1)...(19): siRNA sense strand
agaaguccaucguuugguu

SEQ ID NO: 1139615 - RNA, 19 nt, Homo sapiens
  misc_RNA (1)...(19): siRNA sense strand
uagaacaacuagaacaucu

SEQ ID NO: 1139616 - RNA, 19 nt, Homo sapiens
  misc_RNA (1)...(19): siRNA sense strand
ugaauaagaccaucauugg

SEQ ID NO: 1139617 - RNA, 19 nt, Homo sapiens
  misc_RNA (1)...(19): siRNA sense strand
uuucuaaucugaccaaucu

SEQ ID NO: 1139618 - RNA, 19 nt, Homo sapiens
  misc_RNA (1)...(19): siRNA sense strand
cagagccgcugguguaucu

SEQ ID NO: 1139619 - RNA, 19 nt, Homo sapiens
  misc_RNA (1)...(19): siRNA sense strand
guaaggaaugagcuaguaa

SEQ ID NO: 1139620 - RNA, 19 nt, Homo sapiens
  misc_RNA (1)...(19): siRNA sense strand
ggaaguugaacgaauggaa

SEQ ID NO: 1139621 - RNA, 19 nt, Homo sapiens
  misc_RNA (1)...(19): siRNA sense strand
caccagaguuuccugcaau

SEQ ID NO: 1139622 - RNA, 19 nt, Homo sapiens
  misc_RNA (1)...(19): siRNA sense strand
uaagccaccucucuaccuu

SEQ ID NO: 1139623 - RNA, 19 nt, Homo sapiens
  misc_RNA (1)...(19): siRNA sense strand
uuucuggacuaucaaguuu

SEQ ID NO: 1139624 - RNA, 19 nt, Homo sapiens
  misc_RNA (1)...(19): siRNA sense strand
cauuggauacguuuccuua

SEQ ID NO: 1139625 - RNA, 19 nt, Homo sapiens
  misc_RNA (1)...(19): siRNA sense strand
cauaagcugacuuuaagaa

SEQ ID NO: 1139626 - RNA, 19 nt, Homo sapiens
  misc_RNA (1)...(19): siRNA sense strand
ugugaaauccagacaauug

SEQ ID NO: 1139627 - RNA, 19 nt, Homo sapiens
  misc_RNA (1)...(19): siRNA sense strand
ggaccucucucagugucaa

SEQ ID NO: 1139628 - RNA, 19 nt, Homo sapiens
  misc_RNA (1)...(19): siRNA sense strand
gcacagacuugcggguucu

SEQ ID NO: 1139629 - RNA, 19 nt, Homo sapiens
  misc_RNA (1)...(19): siRNA sense strand
gcuucuugcuggcugcaua

SEQ ID NO: 1139630 - RNA, 19 nt, Homo sapiens
  misc_RNA (1)...(19): siRNA sense strand
caacuagaacaucuggauu

SEQ ID NO: 1139631 - RNA, 19 nt, Homo sapiens
  misc_RNA (1)...(19): siRNA sense strand
ccugaacccuaugaacuuu

SEQ ID NO: 1139632 - RNA, 19 nt, Homo sapiens
  misc_RNA (1)...(19): siRNA sense strand
ugaacccuaugaacuuuau

SEQ ID NO: 1139633 - RNA, 19 nt, Homo sapiens
  misc_RNA (1)...(19): siRNA sense strand
agaaugacuuugcuuguac

SEQ ID NO: 1139634 - RNA, 19 nt, Homo sapiens
  misc_RNA (1)...(19): siRNA sense strand
aaacuuccuuccagauauc

SEQ ID NO: 1139635 - RNA, 19 nt, Homo sapiens
  misc_RNA (1)...(19): siRNA sense strand
cuagaucucaguagaaaug

SEQ ID NO: 1139636 - RNA, 19 nt, Homo sapiens
  misc_RNA (1)...(19): siRNA sense strand
caguagaaauggcuugagu

SEQ ID NO: 1139637 - RNA, 19 nt, Homo sapiens
  misc_RNA (1)...(19): siRNA sense strand
uaugaugccuuuguuaucu

SEQ ID NO: 1139638 - RNA, 19 nt, Homo sapiens
  misc_RNA (1)...(19): siRNA sense strand
guuugaauaucaccuguca

SEQ ID NO: 1139639 - RNA, 19 nt, Homo sapiens
  misc_RNA (1)...(19): siRNA sense strand
gggcaugccugugcugagu

SEQ ID NO: 1139640 - RNA, 19 nt, Homo sapiens
  misc_RNA (1)...(19): siRNA sense strand
cuucagguacuaaauauga

SEQ ID NO: 1139641 - RNA, 19 nt, Homo sapiens
  misc_RNA (1)...(19): siRNA sense strand
ucacucagaaaccucauuu

SEQ ID NO: 1139642 - RNA, 19 nt, Homo sapiens
  misc_RNA (1)...(19): siRNA sense strand
gcauuccaauuugaaacaa

SEQ ID NO: 1139643 - RNA, 19 nt, Homo sapiens
  misc_RNA (1)...(19): siRNA sense strand
caugaagguuuccauaaaa

SEQ ID NO: 1139644 - RNA, 19 nt, Homo sapiens
  misc_RNA (1)...(19): siRNA sense strand
ucagugugcuuguaguauc

SEQ ID NO: 1139645 - RNA, 19 nt, Homo sapiens
  misc_RNA (1)...(19): siRNA sense strand
gagccacaacaacuucuuu

SEQ ID NO: 1139646 - RNA, 19 nt, Homo sapiens
  misc_RNA (1)...(19): siRNA sense strand
uaccuugacauuucucaua

SEQ ID NO: 1139647 - RNA, 19 nt, Homo sapiens
  misc_RNA (1)...(19): siRNA sense strand
ucacagagcugagaaacuu

SEQ ID NO: 1139648 - RNA, 19 nt, Homo sapiens
  misc_RNA (1)...(19): siRNA sense strand
ccaccucucuaccuuaaua

SEQ ID NO: 1139649 - RNA, 19 nt, Homo sapiens
  misc_RNA (1)...(19): siRNA sense strand
gagcuucaaugguguuauu

SEQ ID NO: 1139650 - RNA, 19 nt, Homo sapiens
  misc_RNA (1)...(19): siRNA sense strand
uagcaguucuggucuauaa

SEQ ID NO: 1139651 - RNA, 19 nt, Homo sapiens
  misc_RNA (1)...(19): siRNA sense strand
ugacaaaucugcucuagag

SEQ ID NO: 1139652 - RNA, 19 nt, Homo sapiens
  misc_RNA (1)...(19): siRNA sense strand
ccaugaagguuuccauaaa

SEQ ID NO: 1139653 - RNA, 19 nt, Homo sapiens
  misc_RNA (1)...(19): siRNA sense strand
gcucagaccuggcaguuuc

SEQ ID NO: 1139654 - RNA, 19 nt, Homo sapiens
  misc_RNA (1)...(19): siRNA sense strand
gcugguguaucuuugaaua

SEQ ID NO: 1139655 - RNA, 19 nt, Homo sapiens
  misc_RNA (1)...(19): siRNA sense strand
gaaaauggcuggcaauucu

SEQ ID NO: 1139656 - RNA, 19 nt, Homo sapiens
  misc_RNA (1)...(19): siRNA sense strand
gguaaggaaugagcuagua

SEQ ID NO: 1139657 - RNA, 19 nt, Homo sapiens
  misc_RNA (1)...(19): siRNA sense strand
cagaaugacuuugcuugua

SEQ ID NO: 1139658 - RNA, 19 nt, Homo sapiens
  misc_RNA (1)...(19): siRNA sense strand
ggaagcaacaucuaucuga

SEQ ID NO: 1139659 - RNA, 19 nt, Homo sapiens
  misc_RNA (1)...(19): siRNA sense strand
ccaaccaggugcauuuaaa

SEQ ID NO: 1139660 - RNA, 19 nt, Homo sapiens
  misc_RNA (1)...(19): siRNA sense strand
gaauaucaccugucagaug

SEQ ID NO: 1139661 - RNA, 19 nt, Homo sapiens
  misc_RNA (1)...(19): siRNA sense strand
aaagguugcuguucucaaa

SEQ ID NO: 1139662 - RNA, 19 nt, Homo sapiens
  misc_RNA (1)...(19): siRNA sense strand
gugcugaguuugaauauca

SEQ ID NO: 1139663 - RNA, 19 nt, Homo sapiens
  misc_RNA (1)...(19): siRNA sense strand
ggagacaaaucuagcaucu

SEQ ID NO: 1139664 - RNA, 19 nt, Homo sapiens
  misc_RNA (1)...(19): siRNA sense strand
gaugguaaaucauggaauc

SEQ ID NO: 1139665 - RNA, 19 nt, Homo sapiens
  misc_RNA (1)...(19): siRNA sense strand
guagaaauggcuugaguuu

SEQ ID NO: 1139666 - RNA, 19 nt, Homo sapiens
  misc_RNA (1)...(19): siRNA sense strand
ccaggugcauuuaaagaaa

SEQ ID NO: 1139667 - RNA, 19 nt, Homo sapiens
  misc_RNA (1)...(19): siRNA sense strand
ucauuuaccuugacauuuc

SEQ ID NO: 1139668 - RNA, 19 nt, Homo sapiens
  misc_RNA (1)...(19): siRNA sense strand
uggauacguuuccuuauaa

SEQ ID NO: 1139669 - RNA, 19 nt, Homo sapiens
  misc_RNA (1)...(19): siRNA sense strand
gugcaacaccuucagauaa

SEQ ID NO: 1139670 - RNA, 19 nt, Homo sapiens
  misc_RNA (1)...(19): siRNA sense strand
aauaucaccugucagauga

SEQ ID NO: 1139671 - RNA, 19 nt, Homo sapiens
  misc_RNA (1)...(19): siRNA sense strand
uagcauacuuagacuacua

SEQ ID NO: 1139672 - RNA, 19 nt, Homo sapiens
  misc_RNA (1)...(19): siRNA sense strand
gaaacucaaaucucucaaa

SEQ ID NO: 1139673 - RNA, 19 nt, Homo sapiens
  misc_RNA (1)...(19): siRNA sense strand
agacaaaucuagcaucucu

SEQ ID NO: 1139674 - RNA, 19 nt, Homo sapiens
  misc_RNA (1)...(19): siRNA sense strand
gaugaggacuggguaagga

SEQ ID NO: 1139675 - RNA, 19 nt, Homo sapiens
  misc_RNA (1)...(19): siRNA sense strand
guuuagaaguccaucguuu

SEQ ID NO: 1139676 - RNA, 19 nt, Homo sapiens
  misc_RNA (1)...(19): siRNA sense strand
gguggaaguugaacgaaug

SEQ ID NO: 1139677 - RNA, 19 nt, Homo sapiens
  misc_RNA (1)...(19): siRNA sense strand
caaguagucuagcuuucuu

SEQ ID NO: 1139678 - RNA, 19 nt, Homo sapiens
  misc_RNA (1)...(19): siRNA sense strand
uuggauacguuuccuuaua

SEQ ID NO: 1139679 - RNA, 19 nt, Homo sapiens
  misc_RNA (1)...(19): siRNA sense strand
uagagggccugugcaauuu

SEQ ID NO: 1139680 - RNA, 19 nt, Homo sapiens
  misc_RNA (1)...(19): siRNA sense strand
ggugugaaauccagacaau

SEQ ID NO: 1139681 - RNA, 19 nt, Homo sapiens
  misc_RNA (1)...(19): siRNA sense strand
gaaaccucauuuaccuuga

SEQ ID NO: 1139682 - RNA, 19 nt, Homo sapiens
  misc_RNA (1)...(19): siRNA sense strand
gggcuuagaacaacuagaa

SEQ ID NO: 1139683 - RNA, 19 nt, Homo sapiens
  misc_RNA (1)...(19): siRNA sense strand
caccagaguugcuuucaau

SEQ ID NO: 1139684 - RNA, 19 nt, Homo sapiens
  misc_RNA (1)...(19): siRNA sense strand
gcaugccugugcugaguuu

SEQ ID NO: 1139685 - RNA, 19 nt, Homo sapiens
  misc_RNA (1)...(19): siRNA sense strand
ugacuuugcuuguacuugu

SEQ ID NO: 1139686 - RNA, 19 nt, Homo sapiens
  misc_RNA (1)...(19): siRNA sense strand
aacaggaacuacagcauuu

SEQ ID NO: 1139687 - RNA, 19 nt, Homo sapiens
  misc_RNA (1)...(19): siRNA sense strand
gaaaugaaggaaacuugga

SEQ ID NO: 1139688 - RNA, 19 nt, Homo sapiens
  misc_RNA (1)...(19): siRNA sense strand
gccgaaaggugauuguugu

SEQ ID NO: 1139689 - RNA, 19 nt, Homo sapiens
  misc_RNA (1)...(19): siRNA sense strand
ugaaacaaaugagugaguu

SEQ ID NO: 1139690 - RNA, 19 nt, Homo sapiens
  misc_RNA (1)...(19): siRNA sense strand
cauugaagaauuccgauua

SEQ ID NO: 1139691 - RNA, 19 nt, Homo sapiens
  misc_RNA (1)...(19): siRNA sense strand
ccuacucaaucucucuuua

SEQ ID NO: 1139692 - RNA, 19 nt, Homo sapiens
  misc_RNA (1)...(19): siRNA sense strand
caacaaaggugggaaugcu

SEQ ID NO: 1139693 - RNA, 19 nt, Homo sapiens
  misc_RNA (1)...(19): siRNA sense strand
gauggcaacauuuagaauu

SEQ ID NO: 1139694 - RNA, 19 nt, Homo sapiens
  misc_RNA (1)...(19): siRNA sense strand
ucagaaaccucauuuaccu

SEQ ID NO: 1139695 - RNA, 19 nt, Homo sapiens
  misc_RNA (1)...(19): siRNA sense strand
uguaguaucuguuguagca

SEQ ID NO: 1139696 - RNA, 19 nt, Homo sapiens
  misc_RNA (1)...(19): siRNA sense strand
caacagcauuuaacucacu

SEQ ID NO: 1139697 - RNA, 19 nt, Homo sapiens
  misc_RNA (1)...(19): siRNA sense strand
gaaaacuuccuuccagaua

SEQ ID NO: 1139698 - RNA, 19 nt, Homo sapiens
  misc_RNA (1)...(19): siRNA sense strand
cuagagcacuuggaccuuu

SEQ ID NO: 1139699 - RNA, 19 nt, Homo sapiens
  misc_RNA (1)...(19): siRNA sense strand
gaacgaauggaaugugcaa

SEQ ID NO: 1139700 - RNA, 19 nt, Homo sapiens
  misc_RNA (1)...(19): siRNA sense strand
ucaauggcaucuucaaugg

SEQ ID NO: 1139701 - RNA, 19 nt, Homo sapiens
  misc_RNA (1)...(19): siRNA sense strand
cuagagggccugugcaauu

SEQ ID NO: 1139702 - RNA, 19 nt, Homo sapiens
  misc_RNA (1)...(19): siRNA sense strand
cuucauaagcugacuuuaa

SEQ ID NO: 1139703 - RNA, 19 nt, Homo sapiens
  misc_RNA (1)...(19): siRNA sense strand
gcugguaucaucuucauug

SEQ ID NO: 1139704 - RNA, 19 nt, Homo sapiens
  misc_RNA (1)...(19): siRNA sense strand
ucaccugucagaugaauaa

SEQ ID NO: 1139705 - RNA, 19 nt, Homo sapiens
  misc_RNA (1)...(19): siRNA sense strand
gaaguugaacgaauggaau

SEQ ID NO: 1139706 - RNA, 19 nt, Homo sapiens
  misc_RNA (1)...(19): siRNA sense strand
ucaaucacauaaugacuuc

SEQ ID NO: 1139707 - RNA, 19 nt, Homo sapiens
  misc_RNA (1)...(19): siRNA sense strand
gaagaauuccgauuagcau

SEQ ID NO: 1139708 - RNA, 19 nt, Homo sapiens
  misc_RNA (1)...(19): siRNA sense strand
gagggccugugcaauuuga

SEQ ID NO: 1139709 - RNA, 19 nt, Homo sapiens
  misc_RNA (1)...(19): siRNA sense strand
gguguaucuuugaauauga

SEQ ID NO: 1139710 - RNA, 19 nt, Homo sapiens
  misc_RNA (1)...(19): siRNA sense strand
ugaccaaucuagagcacuu

SEQ ID NO: 1139711 - RNA, 19 nt, Homo sapiens
  misc_RNA (1)...(19): siRNA sense strand
ggccauugcugccaacauc

SEQ ID NO: 1139712 - RNA, 19 nt, Homo sapiens
  misc_RNA (1)...(19): siRNA sense strand
aaacaggaacuacagcauu

SEQ ID NO: 1139713 - RNA, 19 nt, Homo sapiens
  misc_RNA (1)...(19): siRNA sense strand
ggacaguuucccacauuga

SEQ ID NO: 1139714 - RNA, 19 nt, Homo sapiens
  misc_RNA (1)...(19): siRNA sense strand
agaaguccaucguuugguu

SEQ ID NO: 1139715 - RNA, 19 nt, Homo sapiens
  misc_RNA (1)...(19): siRNA sense strand
uagaacaacuagaacaucu

SEQ ID NO: 1139716 - RNA, 19 nt, Homo sapiens
  misc_RNA (1)...(19): siRNA sense strand
ugaauaagaccaucauugg

SEQ ID NO: 1139717 - RNA, 19 nt, Homo sapiens
  misc_RNA (1)...(19): siRNA sense strand
uuucuaaucugaccaaucu

SEQ ID NO: 1139718 - RNA, 19 nt, Homo sapiens
  misc_RNA (1)...(19): siRNA sense strand
cagagccgcugguguaucu

SEQ ID NO: 1139719 - RNA, 19 nt, Homo sapiens
  misc_RNA (1)...(19): siRNA sense strand
guaaggaaugagcuaguaa

SEQ ID NO: 1139720 - RNA, 19 nt, Homo sapiens
  misc_RNA (1)...(19): siRNA sense strand
ggaaguugaacgaauggaa

SEQ ID NO: 1139721 - RNA, 19 nt, Homo sapiens
  misc_RNA (1)...(19): siRNA sense strand
caccagaguuuccugcaau

SEQ ID NO: 1139722 - RNA, 19 nt, Homo sapiens
  misc_RNA (1)...(19): siRNA sense strand
cauuggauacguuuccuua

SEQ ID NO: 1139723 - RNA, 19 nt, Homo sapiens
  misc_RNA (1)...(19): siRNA sense strand
uuucuggacuaucaaguuu

SEQ ID NO: 1139724 - RNA, 19 nt, Homo sapiens
  misc_RNA (1)...(19): siRNA sense strand
uaagccaccucucuaccuu

SEQ ID NO: 1139725 - RNA, 19 nt, Homo sapiens
  misc_RNA (1)...(19): siRNA sense strand
cauaagcugacuuuaagaa

SEQ ID NO: 1139726 - RNA, 19 nt, Homo sapiens
  misc_RNA (1)...(19): siRNA sense strand
ggaccucucucagugucaa

SEQ ID NO: 1139727 - RNA, 19 nt, Homo sapiens
  misc_RNA (1)...(19): siRNA sense strand
ugugaaauccagacaauug

SEQ ID NO: 1139728 - RNA, 19 nt, Homo sapiens
  misc_RNA (1)...(19): siRNA sense strand
gcacagacuugcggguucu

SEQ ID NO: 1139729 - RNA, 19 nt, Homo sapiens
  misc_RNA (1)...(19): siRNA sense strand
gcuucuugcuggcugcaua

SEQ ID NO: 1139730 - RNA, 19 nt, Homo sapiens
  misc_RNA (1)...(19): siRNA sense strand
caacuagaacaucuggauu

SEQ ID NO: 1139731 - RNA, 19 nt, Homo sapiens
  misc_RNA (1)...(19): siRNA sense strand
ccugaacccuaugaacuuu

SEQ ID NO: 1139732 - RNA, 19 nt, Homo sapiens
  misc_RNA (1)...(19): siRNA sense strand
ugaacccuaugaacuuuau

SEQ ID NO: 1139733 - RNA, 19 nt, Homo sapiens
  misc_RNA (1)...(19): siRNA sense strand
agaaugacuuugcuuguac

SEQ ID NO: 1139734 - RNA, 19 nt, Homo sapiens
  misc_RNA (1)...(19): siRNA sense strand
aaacuuccuuccagauauc

SEQ ID NO: 1139735 - RNA, 19 nt, Homo sapiens
  misc_RNA (1)...(19): siRNA sense strand
cuagaucucaguagaaaug

SEQ ID NO: 1139736 - RNA, 19 nt, Homo sapiens
  misc_RNA (1)...(19): siRNA sense strand
caguagaaauggcuugagu

SEQ ID NO: 1139737 - RNA, 19 nt, Homo sapiens
  misc_RNA (1)...(19): siRNA sense strand
uaugaugccuuuguuaucu

SEQ ID NO: 1139738 - RNA, 19 nt, Homo sapiens
  misc_RNA (1)...(19): siRNA sense strand
guuugaauaucaccuguca

SEQ ID NO: 1139739 - RNA, 19 nt, Homo sapiens
  misc_RNA (1)...(19): siRNA sense strand
gggcaugccugugcugagu

SEQ ID NO: 1139740 - RNA, 19 nt, Homo sapiens
  misc_RNA (1)...(19): siRNA sense strand
cuucagguacuaaauauga

SEQ ID NO: 1139741 - RNA, 19 nt, Homo sapiens
  misc_RNA (1)...(19): siRNA sense strand
ucacucagaaaccucauuu

SEQ ID NO: 1139742 - RNA, 19 nt, Homo sapiens
  misc_RNA (1)...(19): siRNA sense strand
uaccuugacauuucucaua

SEQ ID NO: 1139743 - RNA, 19 nt, Homo sapiens
  misc_RNA (1)...(19): siRNA sense strand
ggacuaucaaguuuacaga

SEQ ID NO: 1139744 - RNA, 19 nt, Homo sapiens
  misc_RNA (1)...(19): siRNA sense strand
caugaagguuuccauaaaa

SEQ ID NO: 1139745 - RNA, 19 nt, Homo sapiens
  misc_RNA (1)...(19): siRNA sense strand
ucagugugcuuguaguauc

SEQ ID NO: 1139746 - RNA, 19 nt, Homo sapiens
  misc_RNA (1)...(19): siRNA sense strand
gagccacaacaacuucuuu

SEQ ID NO: 1139747 - RNA, 19 nt, Homo sapiens
  misc_RNA (1)...(19): siRNA sense strand
ucacagagcugagaaacuu

SEQ ID NO: 1139748 - RNA, 19 nt, Homo sapiens
  misc_RNA (1)...(19): siRNA sense strand
gagcuucaaugguguuauu

SEQ ID NO: 1139749 - RNA, 19 nt, Homo sapiens
  misc_RNA (1)...(19): siRNA sense strand
uagcaguucuggucuauaa

SEQ ID NO: 1139750 - RNA, 19 nt, Homo sapiens
  misc_RNA (1)...(19): siRNA sense strand
ugacaaaucugcucuagag

SEQ ID NO: 1139751 - RNA, 19 nt, Homo sapiens
  misc_RNA (1)...(19): siRNA sense strand
ccaugaagguuuccauaaa

SEQ ID NO: 1139752 - RNA, 19 nt, Homo sapiens
  misc_RNA (1)...(19): siRNA sense strand
gcucagaccuggcaguuuc

SEQ ID NO: 1139753 - RNA, 19 nt, Homo sapiens
  misc_RNA (1)...(19): siRNA sense strand
gcugguguaucuuugaaua

SEQ ID NO: 1139754 - RNA, 19 nt, Homo sapiens
  misc_RNA (1)...(19): siRNA sense strand
gaaaauggcuggcaauucu

SEQ ID NO: 1139755 - RNA, 19 nt, Homo sapiens
  misc_RNA (1)...(19): siRNA sense strand
gguaaggaaugagcuagua

SEQ ID NO: 1139756 - RNA, 19 nt, Homo sapiens
  misc_RNA (1)...(19): siRNA sense strand
cagaaugacuuugcuugua

SEQ ID NO: 1139757 - RNA, 19 nt, Homo sapiens
  misc_RNA (1)...(19): siRNA sense strand
ggaagcaacaucuaucuga

SEQ ID NO: 1139758 - RNA, 19 nt, Homo sapiens
  misc_RNA (1)...(19): siRNA sense strand
ccaaccaggugcauuuaaa

SEQ ID NO: 1139759 - RNA, 19 nt, Homo sapiens
  misc_RNA (1)...(19): siRNA sense strand
gaauaucaccugucagaug

SEQ ID NO: 1139760 - RNA, 19 nt, Homo sapiens
  misc_RNA (1)...(19): siRNA sense strand
aaagguugcuguucucaaa

SEQ ID NO: 1139761 - RNA, 19 nt, Homo sapiens
  misc_RNA (1)...(19): siRNA sense strand
gugcugaguuugaauauca

SEQ ID NO: 1139762 - RNA, 19 nt, Homo sapiens
  misc_RNA (1)...(19): siRNA sense strand
guagaaauggcuugaguuu

SEQ ID NO: 1139763 - RNA, 19 nt, Homo sapiens
  misc_RNA (1)...(19): siRNA sense strand
gaugguaaaucauggaauc

SEQ ID NO: 1139764 - RNA, 19 nt, Homo sapiens
  misc_RNA (1)...(19): siRNA sense strand
ccaggugcauuuaaagaaa

SEQ ID NO: 1139765 - RNA, 19 nt, Homo sapiens
  misc_RNA (1)...(19): siRNA sense strand
ucauuuaccuugacauuuc

SEQ ID NO: 1139766 - RNA, 19 nt, Homo sapiens
  misc_RNA (1)...(19): siRNA sense strand
uggauacguuuccuuauaa

SEQ ID NO: 1139767 - RNA, 19 nt, Homo sapiens
  misc_RNA (1)...(19): siRNA sense strand
gugcaacaccuucagauaa

SEQ ID NO: 1139768 - RNA, 19 nt, Homo sapiens
  misc_RNA (1)...(19): siRNA sense strand
aauaucaccugucagauga

SEQ ID NO: 1139769 - RNA, 19 nt, Homo sapiens
  misc_RNA (1)...(19): siRNA sense strand
uagcauacuuagacuacua

SEQ ID NO: 1139770 - RNA, 19 nt, Homo sapiens
  misc_RNA (1)...(19): siRNA sense strand
gaaacucaaaucucucaaa

SEQ ID NO: 1139771 - RNA, 19 nt, Homo sapiens
  misc_RNA (1)...(19): siRNA sense strand
gaugaggacuggguaagga

SEQ ID NO: 1139772 - RNA, 19 nt, Homo sapiens
  misc_RNA (1)...(19): siRNA sense strand
guuuagaaguccaucguuu

SEQ ID NO: 1139773 - RNA, 19 nt, Homo sapiens
  misc_RNA (1)...(19): siRNA sense strand
gguggaaguugaacgaaug

SEQ ID NO: 1139774 - RNA, 19 nt, Homo sapiens
  misc_RNA (1)...(19): siRNA sense strand
caaguagucuagcuuucuu

SEQ ID NO: 1139775 - RNA, 19 nt, Homo sapiens
  misc_RNA (1)...(19): siRNA sense strand
uuggauacguuuccuuaua

SEQ ID NO: 1139776 - RNA, 19 nt, Homo sapiens
  misc_RNA (1)...(19): siRNA sense strand
uagagggccugugcaauuu

SEQ ID NO: 1139777 - RNA, 19 nt, Homo sapiens
  misc_RNA (1)...(19): siRNA sense strand
gggcuuagaacaacuagaa

SEQ ID NO: 1139778 - RNA, 19 nt, Homo sapiens
  misc_RNA (1)...(19): siRNA sense strand
gaaaccucauuuaccuuga

SEQ ID NO: 1139779 - RNA, 19 nt, Homo sapiens
  misc_RNA (1)...(19): siRNA sense strand
caccagaguugcuuucaau

SEQ ID NO: 1139780 - RNA, 19 nt, Homo sapiens
  misc_RNA (1)...(19): siRNA sense strand
gcaugccugugcugaguuu

SEQ ID NO: 1139781 - RNA, 19 nt, Homo sapiens
  misc_RNA (1)...(19): siRNA sense strand
ugacuuugcuuguacuugu

SEQ ID NO: 1139782 - RNA, 19 nt, Homo sapiens
  misc_RNA (1)...(19): siRNA sense strand
aacaggaacuacagcauuu

SEQ ID NO: 1139783 - RNA, 19 nt, Homo sapiens
  misc_RNA (1)...(19): siRNA sense strand
gaaaugaaggaaacuugga

SEQ ID NO: 1139784 - RNA, 19 nt, Homo sapiens
  misc_RNA (1)...(19): siRNA sense strand
gccgaaaggugauuguugu

SEQ ID NO: 1139785 - RNA, 19 nt, Homo sapiens
  misc_RNA (1)...(19): siRNA sense strand
ugaaacaaaugagugaguu

SEQ ID NO: 1139786 - RNA, 19 nt, Homo sapiens
  misc_RNA (1)...(19): siRNA sense strand
cauugaagaauuccgauua

SEQ ID NO: 1139787 - RNA, 19 nt, Homo sapiens
  misc_RNA (1)...(19): siRNA sense strand
ccuacucaaucucucuuua

SEQ ID NO: 1139788 - RNA, 19 nt, Homo sapiens
  misc_RNA (1)...(19): siRNA sense strand
caacaaaggugggaaugcu

SEQ ID NO: 1139789 - RNA, 19 nt, Homo sapiens
  misc_RNA (1)...(19): siRNA sense strand
gauggcaacauuuagaauu

SEQ ID NO: 1139790 - RNA, 19 nt, Homo sapiens
  misc_RNA (1)...(19): siRNA sense strand
ucagaaaccucauuuaccu

SEQ ID NO: 1139791 - RNA, 19 nt, Homo sapiens
  misc_RNA (1)...(19): siRNA sense strand
uguaguaucuguuguagca

SEQ ID NO: 1139792 - RNA, 19 nt, Homo sapiens
  misc_RNA (1)...(19): siRNA sense strand
caacagcauuuaacucacu

SEQ ID NO: 1139793 - RNA, 19 nt, Homo sapiens
  misc_RNA (1)...(19): siRNA sense strand
gaaaacuuccuuccagaua

SEQ ID NO: 1139794 - RNA, 19 nt, Homo sapiens
  misc_RNA (1)...(19): siRNA sense strand
cuagagggccugugcaauu

SEQ ID NO: 1139795 - RNA, 19 nt, Homo sapiens
  misc_RNA (1)...(19): siRNA sense strand
gaacgaauggaaugugcaa

SEQ ID NO: 1139796 - RNA, 19 nt, Homo sapiens
  misc_RNA (1)...(19): siRNA sense strand
ucaauggcaucuucaaugg

SEQ ID NO: 1139797 - RNA, 19 nt, Homo sapiens
  misc_RNA (1)...(19): siRNA sense strand
gaagaauuccgauuagcau

SEQ ID NO: 1139798 - RNA, 19 nt, Homo sapiens
  misc_RNA (1)...(19): siRNA sense strand
gcugguaucaucuucauug

SEQ ID NO: 1139799 - RNA, 19 nt, Homo sapiens
  misc_RNA (1)...(19): siRNA sense strand
ucaccugucagaugaauaa

SEQ ID NO: 1139800 - RNA, 19 nt, Homo sapiens
  misc_RNA (1)...(19): siRNA sense strand
gaaguugaacgaauggaau

SEQ ID NO: 1139801 - RNA, 19 nt, Homo sapiens
  misc_RNA (1)...(19): siRNA sense strand
ucaaucacauaaugacuuc

SEQ ID NO: 1139802 - RNA, 19 nt, Homo sapiens
  misc_RNA (1)...(19): siRNA sense strand
cuucauaagcugacuuuaa

SEQ ID NO: 1139803 - RNA, 19 nt, Homo sapiens
  misc_RNA (1)...(19): siRNA sense strand
gagggccugugcaauuuga

SEQ ID NO: 1139804 - RNA, 19 nt, Homo sapiens
  misc_RNA (1)...(19): siRNA sense strand
gguguaucuuugaauauga

SEQ ID NO: 1139805 - RNA, 19 nt, Homo sapiens
  misc_RNA (1)...(19): siRNA sense strand
agaaguccaucguuugguu

SEQ ID NO: 1139806 - RNA, 19 nt, Homo sapiens
  misc_RNA (1)...(19): siRNA sense strand
ggccauugcugccaacauc

SEQ ID NO: 1139807 - RNA, 19 nt, Homo sapiens
  misc_RNA (1)...(19): siRNA sense strand
aaacaggaacuacagcauu

SEQ ID NO: 1139808 - RNA, 19 nt, Homo sapiens
  misc_RNA (1)...(19): siRNA sense strand
ggacaguuucccacauuga

SEQ ID NO: 1139809 - RNA, 19 nt, Homo sapiens
  misc_RNA (1)...(19): siRNA sense strand
uagaacaacuagaacaucu

SEQ ID NO: 1139810 - RNA, 19 nt, Homo sapiens
  misc_RNA (1)...(19): siRNA sense strand
ugaauaagaccaucauugg

SEQ ID NO: 1139811 - RNA, 19 nt, Homo sapiens
  misc_RNA (1)...(19): siRNA sense strand
caccagaguuuccugcaau

SEQ ID NO: 1139812 - RNA, 19 nt, Homo sapiens
  misc_RNA (1)...(19): siRNA sense strand
cagagccgcugguguaucu

SEQ ID NO: 1139813 - RNA, 19 nt, Homo sapiens
  misc_RNA (1)...(19): siRNA sense strand
guaaggaaugagcuaguaa

SEQ ID NO: 1139814 - RNA, 19 nt, Homo sapiens
  misc_RNA (1)...(19): siRNA sense strand
ggaaguugaacgaauggaa

SEQ ID NO: 1139815 - RNA, 19 nt, Homo sapiens
  misc_RNA (1)...(19): siRNA sense strand
cauuggauacguuuccuua

SEQ ID NO: 1139816 - RNA, 19 nt, Homo sapiens
  misc_RNA (1)...(19): siRNA sense strand
cauaagcugacuuuaagaa

SEQ ID NO: 1139817 - RNA, 19 nt, Homo sapiens
  misc_RNA (1)...(19): siRNA sense strand
ggaccucucucagugucaa

SEQ ID NO: 1139818 - RNA, 19 nt, Homo sapiens
  misc_RNA (1)...(19): siRNA sense strand
ccugaacccuaugaacuuu

SEQ ID NO: 1139819 - RNA, 19 nt, Homo sapiens
  misc_RNA (1)...(19): siRNA sense strand
gcuucuugcuggcugcaua

SEQ ID NO: 1139820 - RNA, 19 nt, Homo sapiens
  misc_RNA (1)...(19): siRNA sense strand
caacuagaacaucuggauu

SEQ ID NO: 1139821 - RNA, 19 nt, Homo sapiens
  misc_RNA (1)...(19): siRNA sense strand
cuagaucucaguagaaaug

SEQ ID NO: 1139822 - RNA, 19 nt, Homo sapiens
  misc_RNA (1)...(19): siRNA sense strand
agaaugacuuugcuuguac

SEQ ID NO: 1139823 - RNA, 19 nt, Homo sapiens
  misc_RNA (1)...(19): siRNA sense strand
ugaacccuaugaacuuuau

SEQ ID NO: 1139824 - RNA, 19 nt, Homo sapiens
  misc_RNA (1)...(19): siRNA sense strand
aaacuuccuuccagauauc

SEQ ID NO: 1139825 - RNA, 19 nt, Homo sapiens
  misc_RNA (1)...(19): siRNA sense strand
caguagaaauggcuugagu

SEQ ID NO: 1139826 - RNA, 19 nt, Homo sapiens
  misc_RNA (1)...(19): siRNA sense strand
uaugaugccuuuguuaucu

SEQ ID NO: 1139827 - RNA, 19 nt, Homo sapiens
  misc_RNA (1)...(19): siRNA sense strand
guuugaauaucaccuguca

SEQ ID NO: 1139828 - RNA, 19 nt, Homo sapiens
  misc_RNA (1)...(19): siRNA sense strand
gggcaugccugugcugagu

SEQ ID NO: 1139829 - RNA, 19 nt, Homo sapiens
  misc_RNA (1)...(19): siRNA sense strand
cuucagguacuaaauauga

SEQ ID NO: 1139830 - RNA, 19 nt, Homo sapiens
  misc_RNA (1)...(19): siRNA sense strand
ucacucagaaaccucauuu

SEQ ID NO: 1139831 - RNA, 19 nt, Homo sapiens
  misc_RNA (1)...(19): siRNA sense strand
uacuuucacuuccaacaaa

SEQ ID NO: 1139832 - RNA, 19 nt, Homo sapiens
  misc_RNA (1)...(19): siRNA sense strand
uucauaagcugacuuuaag

SEQ ID NO: 1139833 - RNA, 19 nt, Homo sapiens
  misc_RNA (1)...(19): siRNA sense strand
caugaagguuuccauaaaa

SEQ ID NO: 1139834 - RNA, 19 nt, Homo sapiens
  misc_RNA (1)...(19): siRNA sense strand
ucagugugcuuguaguauc

SEQ ID NO: 1139835 - RNA, 19 nt, Homo sapiens
  misc_RNA (1)...(19): siRNA sense strand
uauccaaccaggugcauuu

SEQ ID NO: 1139836 - RNA, 19 nt, Homo sapiens
  misc_RNA (1)...(19): siRNA sense strand
gagccacaacaacuucuuu

SEQ ID NO: 1139837 - RNA, 19 nt, Homo sapiens
  misc_RNA (1)...(19): siRNA sense strand
uaccuugacauuucucaua

SEQ ID NO: 1139838 - RNA, 19 nt, Homo sapiens
  misc_RNA (1)...(19): siRNA sense strand
gcauuccaauuugaaacaa

SEQ ID NO: 1139839 - RNA, 19 nt, Homo sapiens
  misc_RNA (1)...(19): siRNA sense strand
gagugugacuauugaaagg

SEQ ID NO: 1139840 - RNA, 19 nt, Homo sapiens
  misc_RNA (1)...(19): siRNA sense strand
cuacagcauuuuccaagua

SEQ ID NO: 1139841 - RNA, 19 nt, Homo sapiens
  misc_RNA (1)...(19): siRNA sense strand
ggauacguuuccuuauaag

SEQ ID NO: 1139842 - RNA, 19 nt, Homo sapiens
  misc_RNA (1)...(19): siRNA sense strand
guuauuaccaugaguucaa

SEQ ID NO: 1139843 - RNA, 19 nt, Homo sapiens
  misc_RNA (1)...(19): siRNA sense strand
uucaaggucuggcugguuu

SEQ ID NO: 1139844 - RNA, 19 nt, Homo sapiens
  misc_RNA (1)...(19): siRNA sense strand
gguccucagugugcuugua

SEQ ID NO: 1139845 - RNA, 19 nt, Homo sapiens
  misc_RNA (1)...(19): siRNA sense strand
uaaauaugagccacaacaa

SEQ ID NO: 1139846 - RNA, 19 nt, Homo sapiens
  misc_RNA (1)...(19): siRNA sense strand
ucacuacagagacuuuauu

SEQ ID NO: 1139847 - RNA, 19 nt, Homo sapiens
  misc_RNA (1)...(19): siRNA sense strand
gaacaucaguacuucauga

SEQ ID NO: 1139848 - RNA, 19 nt, Homo sapiens
  misc_RNA (1)...(19): siRNA sense strand
gcucaagauuggugacuuu

SEQ ID NO: 1139849 - RNA, 19 nt, Homo sapiens
  misc_RNA (1)...(19): siRNA sense strand
gcuuugaccuggaggaauu

SEQ ID NO: 1139850 - RNA, 19 nt, Homo sapiens
  misc_RNA (1)...(19): siRNA sense strand
gaacugugagcucaagauu

SEQ ID NO: 1139851 - RNA, 19 nt, Homo sapiens
  misc_RNA (1)...(19): siRNA sense strand
aaaccagucuuucgacaug

SEQ ID NO: 1139852 - RNA, 19 nt, Homo sapiens
  misc_RNA (1)...(19): siRNA sense strand
gcacucggcucaggucauc

SEQ ID NO: 1139853 - RNA, 19 nt, Homo sapiens
  misc_RNA (1)...(19): siRNA sense strand
ggugccaucucagacaaua

SEQ ID NO: 1139854 - RNA, 19 nt, Homo sapiens
  misc_RNA (1)...(19): siRNA sense strand
ugaccuggaggaauucuua

SEQ ID NO: 1139855 - RNA, 19 nt, Homo sapiens
  misc_RNA (1)...(19): siRNA sense strand
caagauuggugacuuuggu

SEQ ID NO: 1139856 - RNA, 19 nt, Homo sapiens
  misc_RNA (1)...(19): siRNA sense strand
ugacccagcagcuaucuaa

SEQ ID NO: 1139857 - RNA, 19 nt, Homo sapiens
  misc_RNA (1)...(19): siRNA sense strand
uggcuacgguguuggcuuu

SEQ ID NO: 1139858 - RNA, 19 nt, Homo sapiens
  misc_RNA (1)...(19): siRNA sense strand
gggccuauauccagagcuu

SEQ ID NO: 1139859 - RNA, 19 nt, Homo sapiens
  misc_RNA (1)...(19): siRNA sense strand
caaguaccaugauccugau

SEQ ID NO: 1139860 - RNA, 19 nt, Homo sapiens
  misc_RNA (1)...(19): siRNA sense strand
ggacuagugcucagugaca

SEQ ID NO: 1139861 - RNA, 19 nt, Homo sapiens
  misc_RNA (1)...(19): siRNA sense strand
aaagcgaccugcaccagau

SEQ ID NO: 1139862 - RNA, 19 nt, Homo sapiens
  misc_RNA (1)...(19): siRNA sense strand
ucugugggcugcaucuuug

SEQ ID NO: 1139863 - RNA, 19 nt, Homo sapiens
  misc_RNA (1)...(19): siRNA sense strand
guaccaugauccugaugau

SEQ ID NO: 1139864 - RNA, 19 nt, Homo sapiens
  misc_RNA (1)...(19): siRNA sense strand
uuggaacgcuggacucgaa

SEQ ID NO: 1139865 - RNA, 19 nt, Homo sapiens
  misc_RNA (1)...(19): siRNA sense strand
acugugagcucaagauugg

SEQ ID NO: 1139866 - RNA, 19 nt, Homo sapiens
  misc_RNA (1)...(19): siRNA sense strand
uggcugaaauugaggacuu

SEQ ID NO: 1139867 - RNA, 19 nt, Homo sapiens
  misc_RNA (1)...(19): siRNA sense strand
caccugaugucaaccuugu

SEQ ID NO: 1139868 - RNA, 19 nt, Homo sapiens
  misc_RNA (1)...(19): siRNA sense strand
gaguauacacaggcuauug

SEQ ID NO: 1139869 - RNA, 19 nt, Homo sapiens
  misc_RNA (1)...(19): siRNA sense strand
cauuguggcugaaauugag

SEQ ID NO: 1139870 - RNA, 19 nt, Homo sapiens
  misc_RNA (1)...(19): siRNA sense strand
gcuacgguguuggcuuuga

SEQ ID NO: 1139871 - RNA, 19 nt, Homo sapiens
  misc_RNA (1)...(19): siRNA sense strand
ccuuugacuuugccuuuga

SEQ ID NO: 1139872 - RNA, 19 nt, Homo sapiens
  misc_RNA (1)...(19): siRNA sense strand
ccaaggagcgggagaaacg

SEQ ID NO: 1139873 - RNA, 19 nt, Homo sapiens
  misc_RNA (1)...(19): siRNA sense strand
aagcugcccugcucaaguc

SEQ ID NO: 1139874 - RNA, 19 nt, Homo sapiens
  misc_RNA (1)...(19): siRNA sense strand
ggcaagaacgagccaagga

SEQ ID NO: 1139875 - RNA, 19 nt, Homo sapiens
  misc_RNA (1)...(19): siRNA sense strand
gcucagugacaaugacaga

SEQ ID NO: 1139876 - RNA, 19 nt, Homo sapiens
  misc_RNA (1)...(19): siRNA sense strand
gacuagugcucagugacaa

SEQ ID NO: 1139877 - RNA, 19 nt, Homo sapiens
  misc_RNA (1)...(19): siRNA sense strand
agagucaccugaugucaac

SEQ ID NO: 1139878 - RNA, 19 nt, Homo sapiens
  misc_RNA (1)...(19): siRNA sense strand
gaacgcuggacucgaaugg

SEQ ID NO: 1139879 - RNA, 19 nt, Homo sapiens
  misc_RNA (1)...(19): siRNA sense strand
cuucaugacugaguaugug

SEQ ID NO: 1139880 - RNA, 19 nt, Homo sapiens
  misc_RNA (1)...(19): siRNA sense strand
cccagcagcuaucuaaguc

SEQ ID NO: 1139881 - RNA, 19 nt, Homo sapiens
  misc_RNA (1)...(19): siRNA sense strand
gcccuuugacuuugccuuu

SEQ ID NO: 1139882 - RNA, 19 nt, Homo sapiens
  misc_RNA (1)...(19): siRNA sense strand
accaugauccugaugauga

SEQ ID NO: 1139883 - RNA, 19 nt, Homo sapiens
  misc_RNA (1)...(19): siRNA sense strand
ggaacacgugcgcuacuuc

SEQ ID NO: 1139884 - RNA, 19 nt, Homo sapiens
  misc_RNA (1)...(19): siRNA sense strand
acccuuuccuggccaagua

SEQ ID NO: 1139885 - RNA, 19 nt, Homo sapiens
  misc_RNA (1)...(19): siRNA sense strand
ggagcgggagcgaaaggaa

SEQ ID NO: 1139886 - RNA, 19 nt, Homo sapiens
  misc_RNA (1)...(19): siRNA sense strand
ccauuguggcugaaauuga

SEQ ID NO: 1139887 - RNA, 19 nt, Homo sapiens
  misc_RNA (1)...(19): siRNA sense strand
cugcccugcucaagucuuu

SEQ ID NO: 1139888 - RNA, 19 nt, Homo sapiens
  misc_RNA (1)...(19): siRNA sense strand
agauucagccucucucuca

SEQ ID NO: 1139889 - RNA, 19 nt, Homo sapiens
  misc_RNA (1)...(19): siRNA sense strand
cagagucaccugaugucaa

SEQ ID NO: 1139890 - RNA, 19 nt, Homo sapiens
  misc_RNA (1)...(19): siRNA sense strand
gaccuggaggaauucuuaa

SEQ ID NO: 1139891 - RNA, 19 nt, Homo sapiens
  misc_RNA (1)...(19): siRNA sense strand
gcuacuuccuguaccaacu

SEQ ID NO: 1139892 - RNA, 19 nt, Homo sapiens
  misc_RNA (1)...(19): siRNA sense strand
caggauggccaggcagauu

SEQ ID NO: 1139893 - RNA, 19 nt, Homo sapiens
  misc_RNA (1)...(19): siRNA sense strand
uggaggaauucuuaaacca

SEQ ID NO: 1139894 - RNA, 19 nt, Homo sapiens
  misc_RNA (1)...(19): siRNA sense strand
auugaggacuuccaugcaa

SEQ ID NO: 1139895 - RNA, 19 nt, Homo sapiens
  misc_RNA (1)...(19): siRNA sense strand
aguauacacaggcuauuga

SEQ ID NO: 1139896 - RNA, 19 nt, Homo sapiens
  misc_RNA (1)...(19): siRNA sense strand
gacaugggcguggcugaug

SEQ ID NO: 1139897 - RNA, 19 nt, Homo sapiens
  misc_RNA (1)...(19): siRNA sense strand
ccccaggaguuuugccuua

SEQ ID NO: 1139898 - RNA, 19 nt, Homo sapiens
  misc_RNA (1)...(19): siRNA sense strand
aaacuauguacaccagcua

SEQ ID NO: 1139899 - RNA, 19 nt, Homo sapiens
  misc_RNA (1)...(19): siRNA sense strand
uggaacacgugcgcuacuu

SEQ ID NO: 1139900 - RNA, 19 nt, Homo sapiens
  misc_RNA (1)...(19): siRNA sense strand
ggcugcaucuuuggugaga

SEQ ID NO: 1139901 - RNA, 19 nt, Homo sapiens
  misc_RNA (1)...(19): siRNA sense strand
gagccaaggagcgggagaa

SEQ ID NO: 1139902 - RNA, 19 nt, Homo sapiens
  misc_RNA (1)...(19): siRNA sense strand
ccaucucagacaauacuaa

SEQ ID NO: 1139903 - RNA, 19 nt, Homo sapiens
  misc_RNA (1)...(19): siRNA sense strand
ccaugauccugaugaugag

SEQ ID NO: 1139904 - RNA, 19 nt, Homo sapiens
  misc_RNA (1)...(19): siRNA sense strand
gaacaucaguacuucauga

SEQ ID NO: 1139905 - RNA, 19 nt, Homo sapiens
  misc_RNA (1)...(19): siRNA sense strand
gcucaagauuggugacuuu

SEQ ID NO: 1139906 - RNA, 19 nt, Homo sapiens
  misc_RNA (1)...(19): siRNA sense strand
gcuuugaccuggaggaauu

SEQ ID NO: 1139907 - RNA, 19 nt, Homo sapiens
  misc_RNA (1)...(19): siRNA sense strand
gaacugugagcucaagauu

SEQ ID NO: 1139908 - RNA, 19 nt, Homo sapiens
  misc_RNA (1)...(19): siRNA sense strand
aaaccagucuuucgacaug

SEQ ID NO: 1139909 - RNA, 19 nt, Homo sapiens
  misc_RNA (1)...(19): siRNA sense strand
gcacucggcucaggucauc

SEQ ID NO: 1139910 - RNA, 19 nt, Homo sapiens
  misc_RNA (1)...(19): siRNA sense strand
ggugccaucucagacaaua

SEQ ID NO: 1139911 - RNA, 19 nt, Homo sapiens
  misc_RNA (1)...(19): siRNA sense strand
ugaccuggaggaauucuua

SEQ ID NO: 1139912 - RNA, 19 nt, Homo sapiens
  misc_RNA (1)...(19): siRNA sense strand
caagauuggugacuuuggu

SEQ ID NO: 1139913 - RNA, 19 nt, Homo sapiens
  misc_RNA (1)...(19): siRNA sense strand
ugacccagcagcuaucuaa

SEQ ID NO: 1139914 - RNA, 19 nt, Homo sapiens
  misc_RNA (1)...(19): siRNA sense strand
uggcuacgguguuggcuuu

SEQ ID NO: 1139915 - RNA, 19 nt, Homo sapiens
  misc_RNA (1)...(19): siRNA sense strand
gggccuauauccagagcuu

SEQ ID NO: 1139916 - RNA, 19 nt, Homo sapiens
  misc_RNA (1)...(19): siRNA sense strand
caaguaccaugauccugau

SEQ ID NO: 1139917 - RNA, 19 nt, Homo sapiens
  misc_RNA (1)...(19): siRNA sense strand
aaagcgaccugcaccagau

SEQ ID NO: 1139918 - RNA, 19 nt, Homo sapiens
  misc_RNA (1)...(19): siRNA sense strand
ggacuagugcucagugaca

SEQ ID NO: 1139919 - RNA, 19 nt, Homo sapiens
  misc_RNA (1)...(19): siRNA sense strand
ucugugggcugcaucuuug

SEQ ID NO: 1139920 - RNA, 19 nt, Homo sapiens
  misc_RNA (1)...(19): siRNA sense strand
guaccaugauccugaugau

SEQ ID NO: 1139921 - RNA, 19 nt, Homo sapiens
  misc_RNA (1)...(19): siRNA sense strand
uuggaacgcuggacucgaa

SEQ ID NO: 1139922 - RNA, 19 nt, Homo sapiens
  misc_RNA (1)...(19): siRNA sense strand
acugugagcucaagauugg

SEQ ID NO: 1139923 - RNA, 19 nt, Homo sapiens
  misc_RNA (1)...(19): siRNA sense strand
uggcugaaauugaggacuu

SEQ ID NO: 1139924 - RNA, 19 nt, Homo sapiens
  misc_RNA (1)...(19): siRNA sense strand
caccugaugucaaccuugu

SEQ ID NO: 1139925 - RNA, 19 nt, Homo sapiens
  misc_RNA (1)...(19): siRNA sense strand
gaguauacacaggcuauug

SEQ ID NO: 1139926 - RNA, 19 nt, Homo sapiens
  misc_RNA (1)...(19): siRNA sense strand
cauuguggcugaaauugag

SEQ ID NO: 1139927 - RNA, 19 nt, Homo sapiens
  misc_RNA (1)...(19): siRNA sense strand
gcuacgguguuggcuuuga

SEQ ID NO: 1139928 - RNA, 19 nt, Homo sapiens
  misc_RNA (1)...(19): siRNA sense strand
ccuuugacuuugccuuuga

SEQ ID NO: 1139929 - RNA, 19 nt, Homo sapiens
  misc_RNA (1)...(19): siRNA sense strand
ccaaggagcgggagaaacg

SEQ ID NO: 1139930 - RNA, 19 nt, Homo sapiens
  misc_RNA (1)...(19): siRNA sense strand
aagcugcccugcucaaguc

SEQ ID NO: 1139931 - RNA, 19 nt, Homo sapiens
  misc_RNA (1)...(19): siRNA sense strand
ggcaagaacgagccaagga

SEQ ID NO: 1139932 - RNA, 19 nt, Homo sapiens
  misc_RNA (1)...(19): siRNA sense strand
gcucagugacaaugacaga

SEQ ID NO: 1139933 - RNA, 19 nt, Homo sapiens
  misc_RNA (1)...(19): siRNA sense strand
gacuagugcucagugacaa

SEQ ID NO: 1139934 - RNA, 19 nt, Homo sapiens
  misc_RNA (1)...(19): siRNA sense strand
agagucaccugaugucaac

SEQ ID NO: 1139935 - RNA, 19 nt, Homo sapiens
  misc_RNA (1)...(19): siRNA sense strand
gaacgcuggacucgaaugg

SEQ ID NO: 1139936 - RNA, 19 nt, Homo sapiens
  misc_RNA (1)...(19): siRNA sense strand
ggaacacgugcgcuacuuc

SEQ ID NO: 1139937 - RNA, 19 nt, Homo sapiens
  misc_RNA (1)...(19): siRNA sense strand
cccagcagcuaucuaaguc

SEQ ID NO: 1139938 - RNA, 19 nt, Homo sapiens
  misc_RNA (1)...(19): siRNA sense strand
gcccuuugacuuugccuuu

SEQ ID NO: 1139939 - RNA, 19 nt, Homo sapiens
  misc_RNA (1)...(19): siRNA sense strand
accaugauccugaugauga

SEQ ID NO: 1139940 - RNA, 19 nt, Homo sapiens
  misc_RNA (1)...(19): siRNA sense strand
acccuuuccuggccaagua

SEQ ID NO: 1139941 - RNA, 19 nt, Homo sapiens
  misc_RNA (1)...(19): siRNA sense strand
cuucaugacugaguaugug

SEQ ID NO: 1139942 - RNA, 19 nt, Homo sapiens
  misc_RNA (1)...(19): siRNA sense strand
ggagcgggagcgaaaggaa

SEQ ID NO: 1139943 - RNA, 19 nt, Homo sapiens
  misc_RNA (1)...(19): siRNA sense strand
ccauuguggcugaaauuga

SEQ ID NO: 1139944 - RNA, 19 nt, Homo sapiens
  misc_RNA (1)...(19): siRNA sense strand
cugcccugcucaagucuuu

SEQ ID NO: 1139945 - RNA, 19 nt, Homo sapiens
  misc_RNA (1)...(19): siRNA sense strand
agauucagccucucucuca

SEQ ID NO: 1139946 - RNA, 19 nt, Homo sapiens
  misc_RNA (1)...(19): siRNA sense strand
cagagucaccugaugucaa

SEQ ID NO: 1139947 - RNA, 19 nt, Homo sapiens
  misc_RNA (1)...(19): siRNA sense strand
gaccuggaggaauucuuaa

SEQ ID NO: 1139948 - RNA, 19 nt, Homo sapiens
  misc_RNA (1)...(19): siRNA sense strand
gcuacuuccuguaccaacu

SEQ ID NO: 1139949 - RNA, 19 nt, Homo sapiens
  misc_RNA (1)...(19): siRNA sense strand
caggauggccaggcagauu

SEQ ID NO: 1139950 - RNA, 19 nt, Homo sapiens
  misc_RNA (1)...(19): siRNA sense strand
uggaggaauucuuaaacca

SEQ ID NO: 1139951 - RNA, 19 nt, Homo sapiens
  misc_RNA (1)...(19): siRNA sense strand
auugaggacuuccaugcaa

SEQ ID NO: 1139952 - RNA, 19 nt, Homo sapiens
  misc_RNA (1)...(19): siRNA sense strand
aguauacacaggcuauuga

SEQ ID NO: 1139953 - RNA, 19 nt, Homo sapiens
  misc_RNA (1)...(19): siRNA sense strand
gacaugggcguggcugaug

SEQ ID NO: 1139954 - RNA, 19 nt, Homo sapiens
  misc_RNA (1)...(19): siRNA sense strand
ccccaggaguuuugccuua

SEQ ID NO: 1139955 - RNA, 19 nt, Homo sapiens
  misc_RNA (1)...(19): siRNA sense strand
uggaacacgugcgcuacuu

SEQ ID NO: 1139956 - RNA, 19 nt, Homo sapiens
  misc_RNA (1)...(19): siRNA sense strand
aaacuauguacaccagcua

SEQ ID NO: 1139957 - RNA, 19 nt, Homo sapiens
  misc_RNA (1)...(19): siRNA sense strand
ggcugcaucuuuggugaga

SEQ ID NO: 1139958 - RNA, 19 nt, Homo sapiens
  misc_RNA (1)...(19): siRNA sense strand
gagccaaggagcgggagaa

SEQ ID NO: 1139959 - RNA, 19 nt, Homo sapiens
  misc_RNA (1)...(19): siRNA sense strand
ccaucucagacaauacuaa

SEQ ID NO: 1139960 - RNA, 19 nt, Homo sapiens
  misc_RNA (1)...(19): siRNA sense strand
ccaugauccugaugaugag

SEQ ID NO: 1139961 - RNA, 19 nt, Homo sapiens
  misc_RNA (1)...(19): siRNA sense strand
gaacaucaguacuucauga

SEQ ID NO: 1139962 - RNA, 19 nt, Homo sapiens
  misc_RNA (1)...(19): siRNA sense strand
gcucaagauuggugacuuu

SEQ ID NO: 1139963 - RNA, 19 nt, Homo sapiens
  misc_RNA (1)...(19): siRNA sense strand
gcuuugaccuggaggaauu

SEQ ID NO: 1139964 - RNA, 19 nt, Homo sapiens
  misc_RNA (1)...(19): siRNA sense strand
gaacugugagcucaagauu

SEQ ID NO: 1139965 - RNA, 19 nt, Homo sapiens
  misc_RNA (1)...(19): siRNA sense strand
aaaccagucuuucgacaug

SEQ ID NO: 1139966 - RNA, 19 nt, Homo sapiens
  misc_RNA (1)...(19): siRNA sense strand
gcacucggcucaggucauc

SEQ ID NO: 1139967 - RNA, 19 nt, Homo sapiens
  misc_RNA (1)...(19): siRNA sense strand
ggugccaucucagacaaua

SEQ ID NO: 1139968 - RNA, 19 nt, Homo sapiens
  misc_RNA (1)...(19): siRNA sense strand
ugaccuggaggaauucuua

SEQ ID NO: 1139969 - RNA, 19 nt, Homo sapiens
  misc_RNA (1)...(19): siRNA sense strand
caagauuggugacuuuggu

SEQ ID NO: 1139970 - RNA, 19 nt, Homo sapiens
  misc_RNA (1)...(19): siRNA sense strand
ugacccagcagcuaucuaa

SEQ ID NO: 1139971 - RNA, 19 nt, Homo sapiens
  misc_RNA (1)...(19): siRNA sense strand
uggcuacgguguuggcuuu

SEQ ID NO: 1139972 - RNA, 19 nt, Homo sapiens
  misc_RNA (1)...(19): siRNA sense strand
gggccuauauccagagcuu

SEQ ID NO: 1139973 - RNA, 19 nt, Homo sapiens
  misc_RNA (1)...(19): siRNA sense strand
caaguaccaugauccugau

SEQ ID NO: 1139974 - RNA, 19 nt, Homo sapiens
  misc_RNA (1)...(19): siRNA sense strand
ggacuagugcucagugaca

SEQ ID NO: 1139975 - RNA, 19 nt, Homo sapiens
  misc_RNA (1)...(19): siRNA sense strand
aaagcgaccugcaccagau

SEQ ID NO: 1139976 - RNA, 19 nt, Homo sapiens
  misc_RNA (1)...(19): siRNA sense strand
ucugugggcugcaucuuug

SEQ ID NO: 1139977 - RNA, 19 nt, Homo sapiens
  misc_RNA (1)...(19): siRNA sense strand
guaccaugauccugaugau

SEQ ID NO: 1139978 - RNA, 19 nt, Homo sapiens
  misc_RNA (1)...(19): siRNA sense strand
uuggaacgcuggacucgaa

SEQ ID NO: 1139979 - RNA, 19 nt, Homo sapiens
  misc_RNA (1)...(19): siRNA sense strand
acugugagcucaagauugg

SEQ ID NO: 1139980 - RNA, 19 nt, Homo sapiens
  misc_RNA (1)...(19): siRNA sense strand
uggcugaaauugaggacuu

SEQ ID NO: 1139981 - RNA, 19 nt, Homo sapiens
  misc_RNA (1)...(19): siRNA sense strand
caccugaugucaaccuugu

SEQ ID NO: 1139982 - RNA, 19 nt, Homo sapiens
  misc_RNA (1)...(19): siRNA sense strand
gaguauacacaggcuauug

SEQ ID NO: 1139983 - RNA, 19 nt, Homo sapiens
  misc_RNA (1)...(19): siRNA sense strand
cauuguggcugaaauugag

SEQ ID NO: 1139984 - RNA, 19 nt, Homo sapiens
  misc_RNA (1)...(19): siRNA sense strand
gcuacgguguuggcuuuga

SEQ ID NO: 1139985 - RNA, 19 nt, Homo sapiens
  misc_RNA (1)...(19): siRNA sense strand
ccuuugacuuugccuuuga

SEQ ID NO: 1139986 - RNA, 19 nt, Homo sapiens
  misc_RNA (1)...(19): siRNA sense strand
ccaaggagcgggagaaacg

SEQ ID NO: 1139987 - RNA, 19 nt, Homo sapiens
  misc_RNA (1)...(19): siRNA sense strand
aagcugcccugcucaaguc

SEQ ID NO: 1139988 - RNA, 19 nt, Homo sapiens
  misc_RNA (1)...(19): siRNA sense strand
ggcaagaacgagccaagga

SEQ ID NO: 1139989 - RNA, 19 nt, Homo sapiens
  misc_RNA (1)...(19): siRNA sense strand
gcucagugacaaugacaga

SEQ ID NO: 1139990 - RNA, 19 nt, Homo sapiens
  misc_RNA (1)...(19): siRNA sense strand
gacuagugcucagugacaa

SEQ ID NO: 1139991 - RNA, 19 nt, Homo sapiens
  misc_RNA (1)...(19): siRNA sense strand
agagucaccugaugucaac

SEQ ID NO: 1139992 - RNA, 19 nt, Homo sapiens
  misc_RNA (1)...(19): siRNA sense strand
gaacgcuggacucgaaugg

SEQ ID NO: 1139993 - RNA, 19 nt, Homo sapiens
  misc_RNA (1)...(19): siRNA sense strand
cuucaugacugaguaugug

SEQ ID NO: 1139994 - RNA, 19 nt, Homo sapiens
  misc_RNA (1)...(19): siRNA sense strand
cccagcagcuaucuaaguc

SEQ ID NO: 1139995 - RNA, 19 nt, Homo sapiens
  misc_RNA (1)...(19): siRNA sense strand
gcccuuugacuuugccuuu

SEQ ID NO: 1139996 - RNA, 19 nt, Homo sapiens
  misc_RNA (1)...(19): siRNA sense strand
accaugauccugaugauga

SEQ ID NO: 1139997 - RNA, 19 nt, Homo sapiens
  misc_RNA (1)...(19): siRNA sense strand
ggaacacgugcgcuacuuc

SEQ ID NO: 1139998 - RNA, 19 nt, Homo sapiens
  misc_RNA (1)...(19): siRNA sense strand
acccuuuccuggccaagua

SEQ ID NO: 1139999 - RNA, 19 nt, Homo sapiens
  misc_RNA (1)...(19): siRNA sense strand
ggagcgggagcgaaaggaa

SEQ ID NO: 1140000 - RNA, 19 nt, Homo sapiens
  misc_RNA (1)...(19): siRNA sense strand
ccauuguggcugaaauuga

SEQ ID NO: 1140001 - RNA, 19 nt, Homo sapiens
  misc_RNA (1)...(19): siRNA sense strand
cugcccugcucaagucuuu

SEQ ID NO: 1140002 - RNA, 19 nt, Homo sapiens
  misc_RNA (1)...(19): siRNA sense strand
agauucagccucucucuca

SEQ ID NO: 1140003 - RNA, 19 nt, Homo sapiens
  misc_RNA (1)...(19): siRNA sense strand
cagagucaccugaugucaa

SEQ ID NO: 1140004 - RNA, 19 nt, Homo sapiens
  misc_RNA (1)...(19): siRNA sense strand
gaccuggaggaauucuuaa

SEQ ID NO: 1140005 - RNA, 19 nt, Homo sapiens
  misc_RNA (1)...(19): siRNA sense strand
gcuacuuccuguaccaacu

SEQ ID NO: 1140006 - RNA, 19 nt, Homo sapiens
  misc_RNA (1)...(19): siRNA sense strand
caggauggccaggcagauu

SEQ ID NO: 1140007 - RNA, 19 nt, Homo sapiens
  misc_RNA (1)...(19): siRNA sense strand
uggaggaauucuuaaacca

SEQ ID NO: 1140008 - RNA, 19 nt, Homo sapiens
  misc_RNA (1)...(19): siRNA sense strand
auugaggacuuccaugcaa

SEQ ID NO: 1140009 - RNA, 19 nt, Homo sapiens
  misc_RNA (1)...(19): siRNA sense strand
aguauacacaggcuauuga

SEQ ID NO: 1140010 - RNA, 19 nt, Homo sapiens
  misc_RNA (1)...(19): siRNA sense strand
gacaugggcguggcugaug

SEQ ID NO: 1140011 - RNA, 19 nt, Homo sapiens
  misc_RNA (1)...(19): siRNA sense strand
ccccaggaguuuugccuua

SEQ ID NO: 1140012 - RNA, 19 nt, Homo sapiens
  misc_RNA (1)...(19): siRNA sense strand
aaacuauguacaccagcua

SEQ ID NO: 1140013 - RNA, 19 nt, Homo sapiens
  misc_RNA (1)...(19): siRNA sense strand
uggaacacgugcgcuacuu

SEQ ID NO: 1140014 - RNA, 19 nt, Homo sapiens
  misc_RNA (1)...(19): siRNA sense strand
ggcugcaucuuuggugaga

SEQ ID NO: 1140015 - RNA, 19 nt, Homo sapiens
  misc_RNA (1)...(19): siRNA sense strand
gagccaaggagcgggagaa

SEQ ID NO: 1140016 - RNA, 19 nt, Homo sapiens
  misc_RNA (1)...(19): siRNA sense strand
ccaucucagacaauacuaa

SEQ ID NO: 1140017 - RNA, 19 nt, Homo sapiens
  misc_RNA (1)...(19): siRNA sense strand
ccaugauccugaugaugag

SEQ ID NO: 1140018 - RNA, 19 nt, Homo sapiens
  misc_RNA (1)...(19): siRNA sense strand
gaacaucaguacuucauga

SEQ ID NO: 1140019 - RNA, 19 nt, Homo sapiens
  misc_RNA (1)...(19): siRNA sense strand
gcucaagauuggugacuuu

SEQ ID NO: 1140020 - RNA, 19 nt, Homo sapiens
  misc_RNA (1)...(19): siRNA sense strand
gcuuugaccuggaggaauu

SEQ ID NO: 1140021 - RNA, 19 nt, Homo sapiens
  misc_RNA (1)...(19): siRNA sense strand
gaacugugagcucaagauu

SEQ ID NO: 1140022 - RNA, 19 nt, Homo sapiens
  misc_RNA (1)...(19): siRNA sense strand
aaaccagucuuucgacaug

SEQ ID NO: 1140023 - RNA, 19 nt, Homo sapiens
  misc_RNA (1)...(19): siRNA sense strand
gcacucggcucaggucauc

SEQ ID NO: 1140024 - RNA, 19 nt, Homo sapiens
  misc_RNA (1)...(19): siRNA sense strand
ggugccaucucagacaaua

SEQ ID NO: 1140025 - RNA, 19 nt, Homo sapiens
  misc_RNA (1)...(19): siRNA sense strand
ugaccuggaggaauucuua

SEQ ID NO: 1140026 - RNA, 19 nt, Homo sapiens
  misc_RNA (1)...(19): siRNA sense strand
caagauuggugacuuuggu

SEQ ID NO: 1140027 - RNA, 19 nt, Homo sapiens
  misc_RNA (1)...(19): siRNA sense strand
ugacccagcagcuaucuaa

SEQ ID NO: 1140028 - RNA, 19 nt, Homo sapiens
  misc_RNA (1)...(19): siRNA sense strand
uggcuacgguguuggcuuu

SEQ ID NO: 1140029 - RNA, 19 nt, Homo sapiens
  misc_RNA (1)...(19): siRNA sense strand
gggccuauauccagagcuu

SEQ ID NO: 1140030 - RNA, 19 nt, Homo sapiens
  misc_RNA (1)...(19): siRNA sense strand
caaguaccaugauccugau

SEQ ID NO: 1140031 - RNA, 19 nt, Homo sapiens
  misc_RNA (1)...(19): siRNA sense strand
ggacuagugcucagugaca

SEQ ID NO: 1140032 - RNA, 19 nt, Homo sapiens
  misc_RNA (1)...(19): siRNA sense strand
aaagcgaccugcaccagau

SEQ ID NO: 1140033 - RNA, 19 nt, Homo sapiens
  misc_RNA (1)...(19): siRNA sense strand
ucugugggcugcaucuuug

SEQ ID NO: 1140034 - RNA, 19 nt, Homo sapiens
  misc_RNA (1)...(19): siRNA sense strand
guaccaugauccugaugau

SEQ ID NO: 1140035 - RNA, 19 nt, Homo sapiens
  misc_RNA (1)...(19): siRNA sense strand
uuggaacgcuggacucgaa

SEQ ID NO: 1140036 - RNA, 19 nt, Homo sapiens
  misc_RNA (1)...(19): siRNA sense strand
acugugagcucaagauugg

SEQ ID NO: 1140037 - RNA, 19 nt, Homo sapiens
  misc_RNA (1)...(19): siRNA sense strand
uggcugaaauugaggacuu

SEQ ID NO: 1140038 - RNA, 19 nt, Homo sapiens
  misc_RNA (1)...(19): siRNA sense strand
caccugaugucaaccuugu

SEQ ID NO: 1140039 - RNA, 19 nt, Homo sapiens
  misc_RNA (1)...(19): siRNA sense strand
gaguauacacaggcuauug

SEQ ID NO: 1140040 - RNA, 19 nt, Homo sapiens
  misc_RNA (1)...(19): siRNA sense strand
cauuguggcugaaauugag

SEQ ID NO: 1140041 - RNA, 19 nt, Homo sapiens
  misc_RNA (1)...(19): siRNA sense strand
gcuacgguguuggcuuuga

SEQ ID NO: 1140042 - RNA, 19 nt, Homo sapiens
  misc_RNA (1)...(19): siRNA sense strand
ccuuugacuuugccuuuga

SEQ ID NO: 1140043 - RNA, 19 nt, Homo sapiens
  misc_RNA (1)...(19): siRNA sense strand
ccaaggagcgggagaaacg

SEQ ID NO: 1140044 - RNA, 19 nt, Homo sapiens
  misc_RNA (1)...(19): siRNA sense strand
aagcugcccugcucaaguc

SEQ ID NO: 1140045 - RNA, 19 nt, Homo sapiens
  misc_RNA (1)...(19): siRNA sense strand
ggcaagaacgagccaagga

SEQ ID NO: 1140046 - RNA, 19 nt, Homo sapiens
  misc_RNA (1)...(19): siRNA sense strand
gcucagugacaaugacaga

SEQ ID NO: 1140047 - RNA, 19 nt, Homo sapiens
  misc_RNA (1)...(19): siRNA sense strand
gacuagugcucagugacaa

SEQ ID NO: 1140048 - RNA, 19 nt, Homo sapiens
  misc_RNA (1)...(19): siRNA sense strand
agagucaccugaugucaac

SEQ ID NO: 1140049 - RNA, 19 nt, Homo sapiens
  misc_RNA (1)...(19): siRNA sense strand
gaacgcuggacucgaaugg

SEQ ID NO: 1140050 - RNA, 19 nt, Homo sapiens
  misc_RNA (1)...(19): siRNA sense strand
cuucaugacugaguaugug

SEQ ID NO: 1140051 - RNA, 19 nt, Homo sapiens
  misc_RNA (1)...(19): siRNA sense strand
cccagcagcuaucuaaguc

SEQ ID NO: 1140052 - RNA, 19 nt, Homo sapiens
  misc_RNA (1)...(19): siRNA sense strand
gcccuuugacuuugccuuu

SEQ ID NO: 1140053 - RNA, 19 nt, Homo sapiens
  misc_RNA (1)...(19): siRNA sense strand
accaugauccugaugauga

SEQ ID NO: 1140054 - RNA, 19 nt, Homo sapiens
  misc_RNA (1)...(19): siRNA sense strand
ggaacacgugcgcuacuuc

SEQ ID NO: 1140055 - RNA, 19 nt, Homo sapiens
  misc_RNA (1)...(19): siRNA sense strand
acccuuuccuggccaagua

SEQ ID NO: 1140056 - RNA, 19 nt, Homo sapiens
  misc_RNA (1)...(19): siRNA sense strand
ggagcgggagcgaaaggaa

SEQ ID NO: 1140057 - RNA, 19 nt, Homo sapiens
  misc_RNA (1)...(19): siRNA sense strand
ccauuguggcugaaauuga

SEQ ID NO: 1140058 - RNA, 19 nt, Homo sapiens
  misc_RNA (1)...(19): siRNA sense strand
cugcccugcucaagucuuu

SEQ ID NO: 1140059 - RNA, 19 nt, Homo sapiens
  misc_RNA (1)...(19): siRNA sense strand
agauucagccucucucuca

SEQ ID NO: 1140060 - RNA, 19 nt, Homo sapiens
  misc_RNA (1)...(19): siRNA sense strand
cagagucaccugaugucaa

SEQ ID NO: 1140061 - RNA, 19 nt, Homo sapiens
  misc_RNA (1)...(19): siRNA sense strand
gaccuggaggaauucuuaa

SEQ ID NO: 1140062 - RNA, 19 nt, Homo sapiens
  misc_RNA (1)...(19): siRNA sense strand
gcuacuuccuguaccaacu

SEQ ID NO: 1140063 - RNA, 19 nt, Homo sapiens
  misc_RNA (1)...(19): siRNA sense strand
caggauggccaggcagauu

SEQ ID NO: 1140064 - RNA, 19 nt, Homo sapiens
  misc_RNA (1)...(19): siRNA sense strand
uggaggaauucuuaaacca

SEQ ID NO: 1140065 - RNA, 19 nt, Homo sapiens
  misc_RNA (1)...(19): siRNA sense strand
auugaggacuuccaugcaa

SEQ ID NO: 1140066 - RNA, 19 nt, Homo sapiens
  misc_RNA (1)...(19): siRNA sense strand
aguauacacaggcuauuga

SEQ ID NO: 1140067 - RNA, 19 nt, Homo sapiens
  misc_RNA (1)...(19): siRNA sense strand
gacaugggcguggcugaug

SEQ ID NO: 1140068 - RNA, 19 nt, Homo sapiens
  misc_RNA (1)...(19): siRNA sense strand
ccccaggaguuuugccuua

SEQ ID NO: 1140069 - RNA, 19 nt, Homo sapiens
  misc_RNA (1)...(19): siRNA sense strand
aaacuauguacaccagcua

SEQ ID NO: 1140070 - RNA, 19 nt, Homo sapiens
  misc_RNA (1)...(19): siRNA sense strand
uggaacacgugcgcuacuu

SEQ ID NO: 1140071 - RNA, 19 nt, Homo sapiens
  misc_RNA (1)...(19): siRNA sense strand
ggcugcaucuuuggugaga

SEQ ID NO: 1140072 - RNA, 19 nt, Homo sapiens
  misc_RNA (1)...(19): siRNA sense strand
gagccaaggagcgggagaa

SEQ ID NO: 1140073 - RNA, 19 nt, Homo sapiens
  misc_RNA (1)...(19): siRNA sense strand
ccaucucagacaauacuaa

SEQ ID NO: 1140074 - RNA, 19 nt, Homo sapiens
  misc_RNA (1)...(19): siRNA sense strand
ccaugauccugaugaugag

SEQ ID NO: 1140075 - RNA, 19 nt, Homo sapiens
  misc_RNA (1)...(19): siRNA sense strand
gaacaucaguacuucauga

SEQ ID NO: 1140076 - RNA, 19 nt, Homo sapiens
  misc_RNA (1)...(19): siRNA sense strand
gcucaagauuggugacuuu

SEQ ID NO: 1140077 - RNA, 19 nt, Homo sapiens
  misc_RNA (1)...(19): siRNA sense strand
gcuuugaccuggaggaauu

SEQ ID NO: 1140078 - RNA, 19 nt, Homo sapiens
  misc_RNA (1)...(19): siRNA sense strand
gaacugugagcucaagauu

SEQ ID NO: 1140079 - RNA, 19 nt, Homo sapiens
  misc_RNA (1)...(19): siRNA sense strand
aaaccagucuuucgacaug

SEQ ID NO: 1140080 - RNA, 19 nt, Homo sapiens
  misc_RNA (1)...(19): siRNA sense strand
gcacucggcucaggucauc

SEQ ID NO: 1140081 - RNA, 19 nt, Homo sapiens
  misc_RNA (1)...(19): siRNA sense strand
ggugccaucucagacaaua

SEQ ID NO: 1140082 - RNA, 19 nt, Homo sapiens
  misc_RNA (1)...(19): siRNA sense strand
ugaccuggaggaauucuua

SEQ ID NO: 1140083 - RNA, 19 nt, Homo sapiens
  misc_RNA (1)...(19): siRNA sense strand
caagauuggugacuuuggu

SEQ ID NO: 1140084 - RNA, 19 nt, Homo sapiens
  misc_RNA (1)...(19): siRNA sense strand
ugacccagcagcuaucuaa

SEQ ID NO: 1140085 - RNA, 19 nt, Homo sapiens
  misc_RNA (1)...(19): siRNA sense strand
uggcuacgguguuggcuuu

SEQ ID NO: 1140086 - RNA, 19 nt, Homo sapiens
  misc_RNA (1)...(19): siRNA sense strand
gggccuauauccagagcuu

SEQ ID NO: 1140087 - RNA, 19 nt, Homo sapiens
  misc_RNA (1)...(19): siRNA sense strand
caaguaccaugauccugau

SEQ ID NO: 1140088 - RNA, 19 nt, Homo sapiens
  misc_RNA (1)...(19): siRNA sense strand
ggacuagugcucagugaca

SEQ ID NO: 1140089 - RNA, 19 nt, Homo sapiens
  misc_RNA (1)...(19): siRNA sense strand
aaagcgaccugcaccagau

SEQ ID NO: 1140090 - RNA, 19 nt, Homo sapiens
  misc_RNA (1)...(19): siRNA sense strand
ucugugggcugcaucuuug

SEQ ID NO: 1140091 - RNA, 19 nt, Homo sapiens
  misc_RNA (1)...(19): siRNA sense strand
guaccaugauccugaugau

SEQ ID NO: 1140092 - RNA, 19 nt, Homo sapiens
  misc_RNA (1)...(19): siRNA sense strand
uuggaacgcuggacucgaa

SEQ ID NO: 1140093 - RNA, 19 nt, Homo sapiens
  misc_RNA (1)...(19): siRNA sense strand
acugugagcucaagauugg

SEQ ID NO: 1140094 - RNA, 19 nt, Homo sapiens
  misc_RNA (1)...(19): siRNA sense strand
uggcugaaauugaggacuu

SEQ ID NO: 1140095 - RNA, 19 nt, Homo sapiens
  misc_RNA (1)...(19): siRNA sense strand
caccugaugucaaccuugu

SEQ ID NO: 1140096 - RNA, 19 nt, Homo sapiens
  misc_RNA (1)...(19): siRNA sense strand
gaguauacacaggcuauug

SEQ ID NO: 1140097 - RNA, 19 nt, Homo sapiens
  misc_RNA (1)...(19): siRNA sense strand
cauuguggcugaaauugag

SEQ ID NO: 1140098 - RNA, 19 nt, Homo sapiens
  misc_RNA (1)...(19): siRNA sense strand
gcuacgguguuggcuuuga

SEQ ID NO: 1140099 - RNA, 19 nt, Homo sapiens
  misc_RNA (1)...(19): siRNA sense strand
ccuuugacuuugccuuuga

SEQ ID NO: 1140100 - RNA, 19 nt, Homo sapiens
  misc_RNA (1)...(19): siRNA sense strand
ccaaggagcgggagaaacg

SEQ ID NO: 1140101 - RNA, 19 nt, Homo sapiens
  misc_RNA (1)...(19): siRNA sense strand
aagcugcccugcucaaguc

SEQ ID NO: 1140102 - RNA, 19 nt, Homo sapiens
  misc_RNA (1)...(19): siRNA sense strand
ggcaagaacgagccaagga

SEQ ID NO: 1140103 - RNA, 19 nt, Homo sapiens
  misc_RNA (1)...(19): siRNA sense strand
gcucagugacaaugacaga

SEQ ID NO: 1140104 - RNA, 19 nt, Homo sapiens
  misc_RNA (1)...(19): siRNA sense strand
gacuagugcucagugacaa

SEQ ID NO: 1140105 - RNA, 19 nt, Homo sapiens
  misc_RNA (1)...(19): siRNA sense strand
agagucaccugaugucaac

SEQ ID NO: 1140106 - RNA, 19 nt, Homo sapiens
  misc_RNA (1)...(19): siRNA sense strand
gaacgcuggacucgaaugg

SEQ ID NO: 1140107 - RNA, 19 nt, Homo sapiens
  misc_RNA (1)...(19): siRNA sense strand
cuucaugacugaguaugug

SEQ ID NO: 1140108 - RNA, 19 nt, Homo sapiens
  misc_RNA (1)...(19): siRNA sense strand
cccagcagcuaucuaaguc

SEQ ID NO: 1140109 - RNA, 19 nt, Homo sapiens
  misc_RNA (1)...(19): siRNA sense strand
gcccuuugacuuugccuuu

SEQ ID NO: 1140110 - RNA, 19 nt, Homo sapiens
  misc_RNA (1)...(19): siRNA sense strand
accaugauccugaugauga

SEQ ID NO: 1140111 - RNA, 19 nt, Homo sapiens
  misc_RNA (1)...(19): siRNA sense strand
ggaacacgugcgcuacuuc

SEQ ID NO: 1140112 - RNA, 19 nt, Homo sapiens
  misc_RNA (1)...(19): siRNA sense strand
acccuuuccuggccaagua

SEQ ID NO: 1140113 - RNA, 19 nt, Homo sapiens
  misc_RNA (1)...(19): siRNA sense strand
ggagcgggagcgaaaggaa

SEQ ID NO: 1140114 - RNA, 19 nt, Homo sapiens
  misc_RNA (1)...(19): siRNA sense strand
ccauuguggcugaaauuga

SEQ ID NO: 1140115 - RNA, 19 nt, Homo sapiens
  misc_RNA (1)...(19): siRNA sense strand
cugcccugcucaagucuuu

SEQ ID NO: 1140116 - RNA, 19 nt, Homo sapiens
  misc_RNA (1)...(19): siRNA sense strand
agauucagccucucucuca

SEQ ID NO: 1140117 - RNA, 19 nt, Homo sapiens
  misc_RNA (1)...(19): siRNA sense strand
cagagucaccugaugucaa

SEQ ID NO: 1140118 - RNA, 19 nt, Homo sapiens
  misc_RNA (1)...(19): siRNA sense strand
gaccuggaggaauucuuaa

SEQ ID NO: 1140119 - RNA, 19 nt, Homo sapiens
  misc_RNA (1)...(19): siRNA sense strand
gcuacuuccuguaccaacu

SEQ ID NO: 1140120 - RNA, 19 nt, Homo sapiens
  misc_RNA (1)...(19): siRNA sense strand
caggauggccaggcagauu

SEQ ID NO: 1140121 - RNA, 19 nt, Homo sapiens
  misc_RNA (1)...(19): siRNA sense strand
uggaggaauucuuaaacca

SEQ ID NO: 1140122 - RNA, 19 nt, Homo sapiens
  misc_RNA (1)...(19): siRNA sense strand
auugaggacuuccaugcaa

SEQ ID NO: 1140123 - RNA, 19 nt, Homo sapiens
  misc_RNA (1)...(19): siRNA sense strand
aguauacacaggcuauuga

SEQ ID NO: 1140124 - RNA, 19 nt, Homo sapiens
  misc_RNA (1)...(19): siRNA sense strand
gacaugggcguggcugaug

SEQ ID NO: 1140125 - RNA, 19 nt, Homo sapiens
  misc_RNA (1)...(19): siRNA sense strand
ccccaggaguuuugccuua

SEQ ID NO: 1140126 - RNA, 19 nt, Homo sapiens
  misc_RNA (1)...(19): siRNA sense strand
aaacuauguacaccagcua

SEQ ID NO: 1140127 - RNA, 19 nt, Homo sapiens
  misc_RNA (1)...(19): siRNA sense strand
uggaacacgugcgcuacuu

SEQ ID NO: 1140128 - RNA, 19 nt, Homo sapiens
  misc_RNA (1)...(19): siRNA sense strand
ggcugcaucuuuggugaga

SEQ ID NO: 1140129 - RNA, 19 nt, Homo sapiens
  misc_RNA (1)...(19): siRNA sense strand
gagccaaggagcgggagaa

SEQ ID NO: 1140130 - RNA, 19 nt, Homo sapiens
  misc_RNA (1)...(19): siRNA sense strand
ccaucucagacaauacuaa

SEQ ID NO: 1140131 - RNA, 19 nt, Homo sapiens
  misc_RNA (1)...(19): siRNA sense strand
ccaugauccugaugaugag

SEQ ID NO: 1140132 - RNA, 19 nt, Homo sapiens
  misc_RNA (1)...(19): siRNA sense strand
gaacaucaguacuucauga

SEQ ID NO: 1140133 - RNA, 19 nt, Homo sapiens
  misc_RNA (1)...(19): siRNA sense strand
gcucaagauuggugacuuu

SEQ ID NO: 1140134 - RNA, 19 nt, Homo sapiens
  misc_RNA (1)...(19): siRNA sense strand
gcuuugaccuggaggaauu

SEQ ID NO: 1140135 - RNA, 19 nt, Homo sapiens
  misc_RNA (1)...(19): siRNA sense strand
gaacugugagcucaagauu

SEQ ID NO: 1140136 - RNA, 19 nt, Homo sapiens
  misc_RNA (1)...(19): siRNA sense strand
aaaccagucuuucgacaug

SEQ ID NO: 1140137 - RNA, 19 nt, Homo sapiens
  misc_RNA (1)...(19): siRNA sense strand
gcacucggcucaggucauc

SEQ ID NO: 1140138 - RNA, 19 nt, Homo sapiens
  misc_RNA (1)...(19): siRNA sense strand
ggugccaucucagacaaua

SEQ ID NO: 1140139 - RNA, 19 nt, Homo sapiens
  misc_RNA (1)...(19): siRNA sense strand
ugaccuggaggaauucuua

SEQ ID NO: 1140140 - RNA, 19 nt, Homo sapiens
  misc_RNA (1)...(19): siRNA sense strand
caagauuggugacuuuggu

SEQ ID NO: 1140141 - RNA, 19 nt, Homo sapiens
  misc_RNA (1)...(19): siRNA sense strand
ugacccagcagcuaucuaa

SEQ ID NO: 1140142 - RNA, 19 nt, Homo sapiens
  misc_RNA (1)...(19): siRNA sense strand
uggcuacgguguuggcuuu

SEQ ID NO: 1140143 - RNA, 19 nt, Homo sapiens
  misc_RNA (1)...(19): siRNA sense strand
gggccuauauccagagcuu

SEQ ID NO: 1140144 - RNA, 19 nt, Homo sapiens
  misc_RNA (1)...(19): siRNA sense strand
caaguaccaugauccugau

SEQ ID NO: 1140145 - RNA, 19 nt, Homo sapiens
  misc_RNA (1)...(19): siRNA sense strand
aaagcgaccugcaccagau

SEQ ID NO: 1140146 - RNA, 19 nt, Homo sapiens
  misc_RNA (1)...(19): siRNA sense strand
ggacuagugcucagugaca

SEQ ID NO: 1140147 - RNA, 19 nt, Homo sapiens
  misc_RNA (1)...(19): siRNA sense strand
ucugugggcugcaucuuug

SEQ ID NO: 1140148 - RNA, 19 nt, Homo sapiens
  misc_RNA (1)...(19): siRNA sense strand
guaccaugauccugaugau

SEQ ID NO: 1140149 - RNA, 19 nt, Homo sapiens
  misc_RNA (1)...(19): siRNA sense strand
uuggaacgcuggacucgaa

SEQ ID NO: 1140150 - RNA, 19 nt, Homo sapiens
  misc_RNA (1)...(19): siRNA sense strand
acugugagcucaagauugg

SEQ ID NO: 1140151 - RNA, 19 nt, Homo sapiens
  misc_RNA (1)...(19): siRNA sense strand
uggcugaaauugaggacuu

SEQ ID NO: 1140152 - RNA, 19 nt, Homo sapiens
  misc_RNA (1)...(19): siRNA sense strand
caccugaugucaaccuugu

SEQ ID NO: 1140153 - RNA, 19 nt, Homo sapiens
  misc_RNA (1)...(19): siRNA sense strand
gaguauacacaggcuauug

SEQ ID NO: 1140154 - RNA, 19 nt, Homo sapiens
  misc_RNA (1)...(19): siRNA sense strand
cauuguggcugaaauugag

SEQ ID NO: 1140155 - RNA, 19 nt, Homo sapiens
  misc_RNA (1)...(19): siRNA sense strand
gcuacgguguuggcuuuga

SEQ ID NO: 1140156 - RNA, 19 nt, Homo sapiens
  misc_RNA (1)...(19): siRNA sense strand
ccuuugacuuugccuuuga

SEQ ID NO: 1140157 - RNA, 19 nt, Homo sapiens
  misc_RNA (1)...(19): siRNA sense strand
ccaaggagcgggagaaacg

SEQ ID NO: 1140158 - RNA, 19 nt, Homo sapiens
  misc_RNA (1)...(19): siRNA sense strand
aagcugcccugcucaaguc

SEQ ID NO: 1140159 - RNA, 19 nt, Homo sapiens
  misc_RNA (1)...(19): siRNA sense strand
ggcaagaacgagccaagga

SEQ ID NO: 1140160 - RNA, 19 nt, Homo sapiens
  misc_RNA (1)...(19): siRNA sense strand
gcucagugacaaugacaga

SEQ ID NO: 1140161 - RNA, 19 nt, Homo sapiens
  misc_RNA (1)...(19): siRNA sense strand
gacuagugcucagugacaa

SEQ ID NO: 1140162 - RNA, 19 nt, Homo sapiens
  misc_RNA (1)...(19): siRNA sense strand
agagucaccugaugucaac

SEQ ID NO: 1140163 - RNA, 19 nt, Homo sapiens
  misc_RNA (1)...(19): siRNA sense strand
gaacgcuggacucgaaugg

SEQ ID NO: 1140164 - RNA, 19 nt, Homo sapiens
  misc_RNA (1)...(19): siRNA sense strand
ggaacacgugcgcuacuuc

SEQ ID NO: 1140165 - RNA, 19 nt, Homo sapiens
  misc_RNA (1)...(19): siRNA sense strand
cccagcagcuaucuaaguc

SEQ ID NO: 1140166 - RNA, 19 nt, Homo sapiens
  misc_RNA (1)...(19): siRNA sense strand
gcccuuugacuuugccuuu

SEQ ID NO: 1140167 - RNA, 19 nt, Homo sapiens
  misc_RNA (1)...(19): siRNA sense strand
accaugauccugaugauga

SEQ ID NO: 1140168 - RNA, 19 nt, Homo sapiens
  misc_RNA (1)...(19): siRNA sense strand
acccuuuccuggccaagua

SEQ ID NO: 1140169 - RNA, 19 nt, Homo sapiens
  misc_RNA (1)...(19): siRNA sense strand
cuucaugacugaguaugug

SEQ ID NO: 1140170 - RNA, 19 nt, Homo sapiens
  misc_RNA (1)...(19): siRNA sense strand
ggagcgggagcgaaaggaa

SEQ ID NO: 1140171 - RNA, 19 nt, Homo sapiens
  misc_RNA (1)...(19): siRNA sense strand
ccauuguggcugaaauuga

SEQ ID NO: 1140172 - RNA, 19 nt, Homo sapiens
  misc_RNA (1)...(19): siRNA sense strand
cugcccugcucaagucuuu

SEQ ID NO: 1140173 - RNA, 19 nt, Homo sapiens
  misc_RNA (1)...(19): siRNA sense strand
agauucagccucucucuca

SEQ ID NO: 1140174 - RNA, 19 nt, Homo sapiens
  misc_RNA (1)...(19): siRNA sense strand
cagagucaccugaugucaa

SEQ ID NO: 1140175 - RNA, 19 nt, Homo sapiens
  misc_RNA (1)...(19): siRNA sense strand
gaccuggaggaauucuuaa

SEQ ID NO: 1140176 - RNA, 19 nt, Homo sapiens
  misc_RNA (1)...(19): siRNA sense strand
gcuacuuccuguaccaacu

SEQ ID NO: 1140177 - RNA, 19 nt, Homo sapiens
  misc_RNA (1)...(19): siRNA sense strand
caggauggccaggcagauu

SEQ ID NO: 1140178 - RNA, 19 nt, Homo sapiens
  misc_RNA (1)...(19): siRNA sense strand
uggaggaauucuuaaacca

SEQ ID NO: 1140179 - RNA, 19 nt, Homo sapiens
  misc_RNA (1)...(19): siRNA sense strand
auugaggacuuccaugcaa

SEQ ID NO: 1140180 - RNA, 19 nt, Homo sapiens
  misc_RNA (1)...(19): siRNA sense strand
aguauacacaggcuauuga

SEQ ID NO: 1140181 - RNA, 19 nt, Homo sapiens
  misc_RNA (1)...(19): siRNA sense strand
gacaugggcguggcugaug

SEQ ID NO: 1140182 - RNA, 19 nt, Homo sapiens
  misc_RNA (1)...(19): siRNA sense strand
ccccaggaguuuugccuua

SEQ ID NO: 1140183 - RNA, 19 nt, Homo sapiens
  misc_RNA (1)...(19): siRNA sense strand
uggaacacgugcgcuacuu

SEQ ID NO: 1140184 - RNA, 19 nt, Homo sapiens
  misc_RNA (1)...(19): siRNA sense strand
aaacuauguacaccagcua

SEQ ID NO: 1140185 - RNA, 19 nt, Homo sapiens
  misc_RNA (1)...(19): siRNA sense strand
ggcugcaucuuuggugaga

SEQ ID NO: 1140186 - RNA, 19 nt, Homo sapiens
  misc_RNA (1)...(19): siRNA sense strand
gagccaaggagcgggagaa

SEQ ID NO: 1140187 - RNA, 19 nt, Homo sapiens
  misc_RNA (1)...(19): siRNA sense strand
ccaucucagacaauacuaa

SEQ ID NO: 1140188 - RNA, 19 nt, Homo sapiens
  misc_RNA (1)...(19): siRNA sense strand
ccaugauccugaugaugag

SEQ ID NO: 1140189 - RNA, 19 nt, Homo sapiens
  misc_RNA (1)...(19): siRNA sense strand
gaacaucaguacuucauga

SEQ ID NO: 1140190 - RNA, 19 nt, Homo sapiens
  misc_RNA (1)...(19): siRNA sense strand
gcucaagauuggugacuuu

SEQ ID NO: 1140191 - RNA, 19 nt, Homo sapiens
  misc_RNA (1)...(19): siRNA sense strand
gcuuugaccuggaggaauu

SEQ ID NO: 1140192 - RNA, 19 nt, Homo sapiens
  misc_RNA (1)...(19): siRNA sense strand
gaacugugagcucaagauu

SEQ ID NO: 1140193 - RNA, 19 nt, Homo sapiens
  misc_RNA (1)...(19): siRNA sense strand
aaaccagucuuucgacaug

SEQ ID NO: 1140194 - RNA, 19 nt, Homo sapiens
  misc_RNA (1)...(19): siRNA sense strand
gcacucggcucaggucauc

SEQ ID NO: 1140195 - RNA, 19 nt, Homo sapiens
  misc_RNA (1)...(19): siRNA sense strand
ggugccaucucagacaaua

SEQ ID NO: 1140196 - RNA, 19 nt, Homo sapiens
  misc_RNA (1)...(19): siRNA sense strand
ugaccuggaggaauucuua

SEQ ID NO: 1140197 - RNA, 19 nt, Homo sapiens
  misc_RNA (1)...(19): siRNA sense strand
caagauuggugacuuuggu

SEQ ID NO: 1140198 - RNA, 19 nt, Homo sapiens
  misc_RNA (1)...(19): siRNA sense strand
ugacccagcagcuaucuaa

SEQ ID NO: 1140199 - RNA, 19 nt, Homo sapiens
  misc_RNA (1)...(19): siRNA sense strand
uggcuacgguguuggcuuu

SEQ ID NO: 1140200 - RNA, 19 nt, Homo sapiens
  misc_RNA (1)...(19): siRNA sense strand
gggccuauauccagagcuu

SEQ ID NO: 1140201 - RNA, 19 nt, Homo sapiens
  misc_RNA (1)...(19): siRNA sense strand
caaguaccaugauccugau

SEQ ID NO: 1140202 - RNA, 19 nt, Homo sapiens
  misc_RNA (1)...(19): siRNA sense strand
ggacuagugcucagugaca

SEQ ID NO: 1140203 - RNA, 19 nt, Homo sapiens
  misc_RNA (1)...(19): siRNA sense strand
aaagcgaccugcaccagau

SEQ ID NO: 1140204 - RNA, 19 nt, Homo sapiens
  misc_RNA (1)...(19): siRNA sense strand
ucugugggcugcaucuuug

SEQ ID NO: 1140205 - RNA, 19 nt, Homo sapiens
  misc_RNA (1)...(19): siRNA sense strand
guaccaugauccugaugau

SEQ ID NO: 1140206 - RNA, 19 nt, Homo sapiens
  misc_RNA (1)...(19): siRNA sense strand
uuggaacgcuggacucgaa

SEQ ID NO: 1140207 - RNA, 19 nt, Homo sapiens
  misc_RNA (1)...(19): siRNA sense strand
acugugagcucaagauugg

SEQ ID NO: 1140208 - RNA, 19 nt, Homo sapiens
  misc_RNA (1)...(19): siRNA sense strand
uggcugaaauugaggacuu

SEQ ID NO: 1140209 - RNA, 19 nt, Homo sapiens
  misc_RNA (1)...(19): siRNA sense strand
caccugaugucaaccuugu

SEQ ID NO: 1140210 - RNA, 19 nt, Homo sapiens
  misc_RNA (1)...(19): siRNA sense strand
gaguauacacaggcuauug

SEQ ID NO: 1140211 - RNA, 19 nt, Homo sapiens
  misc_RNA (1)...(19): siRNA sense strand
cauuguggcugaaauugag

SEQ ID NO: 1140212 - RNA, 19 nt, Homo sapiens
  misc_RNA (1)...(19): siRNA sense strand
gcuacgguguuggcuuuga

SEQ ID NO: 1140213 - RNA, 19 nt, Homo sapiens
  misc_RNA (1)...(19): siRNA sense strand
ccuuugacuuugccuuuga

SEQ ID NO: 1140214 - RNA, 19 nt, Homo sapiens
  misc_RNA (1)...(19): siRNA sense strand
ccaaggagcgggagaaacg

SEQ ID NO: 1140215 - RNA, 19 nt, Homo sapiens
  misc_RNA (1)...(19): siRNA sense strand
aagcugcccugcucaaguc

SEQ ID NO: 1140216 - RNA, 19 nt, Homo sapiens
  misc_RNA (1)...(19): siRNA sense strand
ggcaagaacgagccaagga

SEQ ID NO: 1140217 - RNA, 19 nt, Homo sapiens
  misc_RNA (1)...(19): siRNA sense strand
gcucagugacaaugacaga

SEQ ID NO: 1140218 - RNA, 19 nt, Homo sapiens
  misc_RNA (1)...(19): siRNA sense strand
gacuagugcucagugacaa

SEQ ID NO: 1140219 - RNA, 19 nt, Homo sapiens
  misc_RNA (1)...(19): siRNA sense strand
agagucaccugaugucaac

SEQ ID NO: 1140220 - RNA, 19 nt, Homo sapiens
  misc_RNA (1)...(19): siRNA sense strand
gaacgcuggacucgaaugg

SEQ ID NO: 1140221 - RNA, 19 nt, Homo sapiens
  misc_RNA (1)...(19): siRNA sense strand
cuucaugacugaguaugug

SEQ ID NO: 1140222 - RNA, 19 nt, Homo sapiens
  misc_RNA (1)...(19): siRNA sense strand
cccagcagcuaucuaaguc

SEQ ID NO: 1140223 - RNA, 19 nt, Homo sapiens
  misc_RNA (1)...(19): siRNA sense strand
gcccuuugacuuugccuuu

SEQ ID NO: 1140224 - RNA, 19 nt, Homo sapiens
  misc_RNA (1)...(19): siRNA sense strand
accaugauccugaugauga

SEQ ID NO: 1140225 - RNA, 19 nt, Homo sapiens
  misc_RNA (1)...(19): siRNA sense strand
ggaacacgugcgcuacuuc

SEQ ID NO: 1140226 - RNA, 19 nt, Homo sapiens
  misc_RNA (1)...(19): siRNA sense strand
acccuuuccuggccaagua

SEQ ID NO: 1140227 - RNA, 19 nt, Homo sapiens
  misc_RNA (1)...(19): siRNA sense strand
ggagcgggagcgaaaggaa

SEQ ID NO: 1140228 - RNA, 19 nt, Homo sapiens
  misc_RNA (1)...(19): siRNA sense strand
ccauuguggcugaaauuga

SEQ ID NO: 1140229 - RNA, 19 nt, Homo sapiens
  misc_RNA (1)...(19): siRNA sense strand
cugcccugcucaagucuuu

SEQ ID NO: 1140230 - RNA, 19 nt, Homo sapiens
  misc_RNA (1)...(19): siRNA sense strand
agauucagccucucucuca

SEQ ID NO: 1140231 - RNA, 19 nt, Homo sapiens
  misc_RNA (1)...(19): siRNA sense strand
cagagucaccugaugucaa

SEQ ID NO: 1140232 - RNA, 19 nt, Homo sapiens
  misc_RNA (1)...(19): siRNA sense strand
gaccuggaggaauucuuaa

SEQ ID NO: 1140233 - RNA, 19 nt, Homo sapiens
  misc_RNA (1)...(19): siRNA sense strand
gcuacuuccuguaccaacu

SEQ ID NO: 1140234 - RNA, 19 nt, Homo sapiens
  misc_RNA (1)...(19): siRNA sense strand
caggauggccaggcagauu

SEQ ID NO: 1140235 - RNA, 19 nt, Homo sapiens
  misc_RNA (1)...(19): siRNA sense strand
uggaggaauucuuaaacca

SEQ ID NO: 1140236 - RNA, 19 nt, Homo sapiens
  misc_RNA (1)...(19): siRNA sense strand
auugaggacuuccaugcaa

SEQ ID NO: 1140237 - RNA, 19 nt, Homo sapiens
  misc_RNA (1)...(19): siRNA sense strand
aguauacacaggcuauuga

SEQ ID NO: 1140238 - RNA, 19 nt, Homo sapiens
  misc_RNA (1)...(19): siRNA sense strand
gacaugggcguggcugaug

SEQ ID NO: 1140239 - RNA, 19 nt, Homo sapiens
  misc_RNA (1)...(19): siRNA sense strand
ccccaggaguuuugccuua

SEQ ID NO: 1140240 - RNA, 19 nt, Homo sapiens
  misc_RNA (1)...(19): siRNA sense strand
aaacuauguacaccagcua

SEQ ID NO: 1140241 - RNA, 19 nt, Homo sapiens
  misc_RNA (1)...(19): siRNA sense strand
uggaacacgugcgcuacuu

SEQ ID NO: 1140242 - RNA, 19 nt, Homo sapiens
  misc_RNA (1)...(19): siRNA sense strand
ggcugcaucuuuggugaga

SEQ ID NO: 1140243 - RNA, 19 nt, Homo sapiens
  misc_RNA (1)...(19): siRNA sense strand
gagccaaggagcgggagaa

SEQ ID NO: 1140244 - RNA, 19 nt, Homo sapiens
  misc_RNA (1)...(19): siRNA sense strand
ccaucucagacaauacuaa

SEQ ID NO: 1140245 - RNA, 19 nt, Homo sapiens
  misc_RNA (1)...(19): siRNA sense strand
ccaugauccugaugaugag

SEQ ID NO: 1140246 - RNA, 19 nt, Homo sapiens
  misc_RNA (1)...(19): siRNA sense strand
gaacaucaguacuucauga

SEQ ID NO: 1140247 - RNA, 19 nt, Homo sapiens
  misc_RNA (1)...(19): siRNA sense strand
gcucaagauuggugacuuu

SEQ ID NO: 1140248 - RNA, 19 nt, Homo sapiens
  misc_RNA (1)...(19): siRNA sense strand
gcuuugaccuggaggaauu

SEQ ID NO: 1140249 - RNA, 19 nt, Homo sapiens
  misc_RNA (1)...(19): siRNA sense strand
gaacugugagcucaagauu

SEQ ID NO: 1140250 - RNA, 19 nt, Homo sapiens
  misc_RNA (1)...(19): siRNA sense strand
aaaccagucuuucgacaug

SEQ ID NO: 1140251 - RNA, 19 nt, Homo sapiens
  misc_RNA (1)...(19): siRNA sense strand
gcacucggcucaggucauc

SEQ ID NO: 1140252 - RNA, 19 nt, Homo sapiens
  misc_RNA (1)...(19): siRNA sense strand
ggugccaucucagacaaua

SEQ ID NO: 1140253 - RNA, 19 nt, Homo sapiens
  misc_RNA (1)...(19): siRNA sense strand
ugaccuggaggaauucuua

SEQ ID NO: 1140254 - RNA, 19 nt, Homo sapiens
  misc_RNA (1)...(19): siRNA sense strand
caagauuggugacuuuggu

SEQ ID NO: 1140255 - RNA, 19 nt, Homo sapiens
  misc_RNA (1)...(19): siRNA sense strand
ugacccagcagcuaucuaa

SEQ ID NO: 1140256 - RNA, 19 nt, Homo sapiens
  misc_RNA (1)...(19): siRNA sense strand
uggcuacgguguuggcuuu

SEQ ID NO: 1140257 - RNA, 19 nt, Homo sapiens
  misc_RNA (1)...(19): siRNA sense strand
gggccuauauccagagcuu

SEQ ID NO: 1140258 - RNA, 19 nt, Homo sapiens
  misc_RNA (1)...(19): siRNA sense strand
caaguaccaugauccugau

SEQ ID NO: 1140259 - RNA, 19 nt, Homo sapiens
  misc_RNA (1)...(19): siRNA sense strand
ggacuagugcucagugaca

SEQ ID NO: 1140260 - RNA, 19 nt, Homo sapiens
  misc_RNA (1)...(19): siRNA sense strand
aaagcgaccugcaccagau

SEQ ID NO: 1140261 - RNA, 19 nt, Homo sapiens
  misc_RNA (1)...(19): siRNA sense strand
ucugugggcugcaucuuug

SEQ ID NO: 1140262 - RNA, 19 nt, Homo sapiens
  misc_RNA (1)...(19): siRNA sense strand
guaccaugauccugaugau

SEQ ID NO: 1140263 - RNA, 19 nt, Homo sapiens
  misc_RNA (1)...(19): siRNA sense strand
uuggaacgcuggacucgaa

SEQ ID NO: 1140264 - RNA, 19 nt, Homo sapiens
  misc_RNA (1)...(19): siRNA sense strand
acugugagcucaagauugg

SEQ ID NO: 1140265 - RNA, 19 nt, Homo sapiens
  misc_RNA (1)...(19): siRNA sense strand
uggcugaaauugaggacuu

SEQ ID NO: 1140266 - RNA, 19 nt, Homo sapiens
  misc_RNA (1)...(19): siRNA sense strand
caccugaugucaaccuugu

SEQ ID NO: 1140267 - RNA, 19 nt, Homo sapiens
  misc_RNA (1)...(19): siRNA sense strand
gaguauacacaggcuauug

SEQ ID NO: 1140268 - RNA, 19 nt, Homo sapiens
  misc_RNA (1)...(19): siRNA sense strand
cauuguggcugaaauugag

SEQ ID NO: 1140269 - RNA, 19 nt, Homo sapiens
  misc_RNA (1)...(19): siRNA sense strand
gcuacgguguuggcuuuga

SEQ ID NO: 1140270 - RNA, 19 nt, Homo sapiens
  misc_RNA (1)...(19): siRNA sense strand
ccuuugacuuugccuuuga

SEQ ID NO: 1140271 - RNA, 19 nt, Homo sapiens
  misc_RNA (1)...(19): siRNA sense strand
ccaaggagcgggagaaacg

SEQ ID NO: 1140272 - RNA, 19 nt, Homo sapiens
  misc_RNA (1)...(19): siRNA sense strand
aagcugcccugcucaaguc

SEQ ID NO: 1140273 - RNA, 19 nt, Homo sapiens
  misc_RNA (1)...(19): siRNA sense strand
ggcaagaacgagccaagga

SEQ ID NO: 1140274 - RNA, 19 nt, Homo sapiens
  misc_RNA (1)...(19): siRNA sense strand
gcucagugacaaugacaga

SEQ ID NO: 1140275 - RNA, 19 nt, Homo sapiens
  misc_RNA (1)...(19): siRNA sense strand
gacuagugcucagugacaa

SEQ ID NO: 1140276 - RNA, 19 nt, Homo sapiens
  misc_RNA (1)...(19): siRNA sense strand
agagucaccugaugucaac

SEQ ID NO: 1140277 - RNA, 19 nt, Homo sapiens
  misc_RNA (1)...(19): siRNA sense strand
gaacgcuggacucgaaugg

SEQ ID NO: 1140278 - RNA, 19 nt, Homo sapiens
  misc_RNA (1)...(19): siRNA sense strand
cuucaugacugaguaugug

SEQ ID NO: 1140279 - RNA, 19 nt, Homo sapiens
  misc_RNA (1)...(19): siRNA sense strand
cccagcagcuaucuaaguc

SEQ ID NO: 1140280 - RNA, 19 nt, Homo sapiens
  misc_RNA (1)...(19): siRNA sense strand
gcccuuugacuuugccuuu

SEQ ID NO: 1140281 - RNA, 19 nt, Homo sapiens
  misc_RNA (1)...(19): siRNA sense strand
accaugauccugaugauga

SEQ ID NO: 1140282 - RNA, 19 nt, Homo sapiens
  misc_RNA (1)...(19): siRNA sense strand
ggaacacgugcgcuacuuc

SEQ ID NO: 1140283 - RNA, 19 nt, Homo sapiens
  misc_RNA (1)...(19): siRNA sense strand
acccuuuccuggccaagua

SEQ ID NO: 1140284 - RNA, 19 nt, Homo sapiens
  misc_RNA (1)...(19): siRNA sense strand
ggagcgggagcgaaaggaa

SEQ ID NO: 1140285 - RNA, 19 nt, Homo sapiens
  misc_RNA (1)...(19): siRNA sense strand
ccauuguggcugaaauuga

SEQ ID NO: 1140286 - RNA, 19 nt, Homo sapiens
  misc_RNA (1)...(19): siRNA sense strand
cugcccugcucaagucuuu

SEQ ID NO: 1140287 - RNA, 19 nt, Homo sapiens
  misc_RNA (1)...(19): siRNA sense strand
agauucagccucucucuca

SEQ ID NO: 1140288 - RNA, 19 nt, Homo sapiens
  misc_RNA (1)...(19): siRNA sense strand
cagagucaccugaugucaa

SEQ ID NO: 1140289 - RNA, 19 nt, Homo sapiens
  misc_RNA (1)...(19): siRNA sense strand
gaccuggaggaauucuuaa

SEQ ID NO: 1140290 - RNA, 19 nt, Homo sapiens
  misc_RNA (1)...(19): siRNA sense strand
gcuacuuccuguaccaacu

SEQ ID NO: 1140291 - RNA, 19 nt, Homo sapiens
  misc_RNA (1)...(19): siRNA sense strand
caggauggccaggcagauu

SEQ ID NO: 1140292 - RNA, 19 nt, Homo sapiens
  misc_RNA (1)...(19): siRNA sense strand
uggaggaauucuuaaacca

SEQ ID NO: 1140293 - RNA, 19 nt, Homo sapiens
  misc_RNA (1)...(19): siRNA sense strand
auugaggacuuccaugcaa

SEQ ID NO: 1140294 - RNA, 19 nt, Homo sapiens
  misc_RNA (1)...(19): siRNA sense strand
aguauacacaggcuauuga

SEQ ID NO: 1140295 - RNA, 19 nt, Homo sapiens
  misc_RNA (1)...(19): siRNA sense strand
gacaugggcguggcugaug

SEQ ID NO: 1140296 - RNA, 19 nt, Homo sapiens
  misc_RNA (1)...(19): siRNA sense strand
ccccaggaguuuugccuua

SEQ ID NO: 1140297 - RNA, 19 nt, Homo sapiens
  misc_RNA (1)...(19): siRNA sense strand
aaacuauguacaccagcua

SEQ ID NO: 1140298 - RNA, 19 nt, Homo sapiens
  misc_RNA (1)...(19): siRNA sense strand
uggaacacgugcgcuacuu

SEQ ID NO: 1140299 - RNA, 19 nt, Homo sapiens
  misc_RNA (1)...(19): siRNA sense strand
ggcugcaucuuuggugaga

SEQ ID NO: 1140300 - RNA, 19 nt, Homo sapiens
  misc_RNA (1)...(19): siRNA sense strand
gagccaaggagcgggagaa

SEQ ID NO: 1140301 - RNA, 19 nt, Homo sapiens
  misc_RNA (1)...(19): siRNA sense strand
ccaucucagacaauacuaa

SEQ ID NO: 1140302 - RNA, 19 nt, Homo sapiens
  misc_RNA (1)...(19): siRNA sense strand
ccaugauccugaugaugag

SEQ ID NO: 1140303 - RNA, 19 nt, Homo sapiens
  misc_RNA (1)...(19): siRNA sense strand
gaacaucaguacuucauga

SEQ ID NO: 1140304 - RNA, 19 nt, Homo sapiens
  misc_RNA (1)...(19): siRNA sense strand
gcucaagauuggugacuuu

SEQ ID NO: 1140305 - RNA, 19 nt, Homo sapiens
  misc_RNA (1)...(19): siRNA sense strand
gcuuugaccuggaggaauu

SEQ ID NO: 1140306 - RNA, 19 nt, Homo sapiens
  misc_RNA (1)...(19): siRNA sense strand
gaacugugagcucaagauu

SEQ ID NO: 1140307 - RNA, 19 nt, Homo sapiens
  misc_RNA (1)...(19): siRNA sense strand
aaaccagucuuucgacaug

SEQ ID NO: 1140308 - RNA, 19 nt, Homo sapiens
  misc_RNA (1)...(19): siRNA sense strand
gcacucggcucaggucauc

SEQ ID NO: 1140309 - RNA, 19 nt, Homo sapiens
  misc_RNA (1)...(19): siRNA sense strand
ggugccaucucagacaaua

SEQ ID NO: 1140310 - RNA, 19 nt, Homo sapiens
  misc_RNA (1)...(19): siRNA sense strand
ugaccuggaggaauucuua

SEQ ID NO: 1140311 - RNA, 19 nt, Homo sapiens
  misc_RNA (1)...(19): siRNA sense strand
caagauuggugacuuuggu

SEQ ID NO: 1140312 - RNA, 19 nt, Homo sapiens
  misc_RNA (1)...(19): siRNA sense strand
ugacccagcagcuaucuaa

SEQ ID NO: 1140313 - RNA, 19 nt, Homo sapiens
  misc_RNA (1)...(19): siRNA sense strand
uggcuacgguguuggcuuu

SEQ ID NO: 1140314 - RNA, 19 nt, Homo sapiens
  misc_RNA (1)...(19): siRNA sense strand
gggccuauauccagagcuu

SEQ ID NO: 1140315 - RNA, 19 nt, Homo sapiens
  misc_RNA (1)...(19): siRNA sense strand
caaguaccaugauccugau

SEQ ID NO: 1140316 - RNA, 19 nt, Homo sapiens
  misc_RNA (1)...(19): siRNA sense strand
ggacuagugcucagugaca

SEQ ID NO: 1140317 - RNA, 19 nt, Homo sapiens
  misc_RNA (1)...(19): siRNA sense strand
aaagcgaccugcaccagau

SEQ ID NO: 1140318 - RNA, 19 nt, Homo sapiens
  misc_RNA (1)...(19): siRNA sense strand
ucugugggcugcaucuuug

SEQ ID NO: 1140319 - RNA, 19 nt, Homo sapiens
  misc_RNA (1)...(19): siRNA sense strand
guaccaugauccugaugau

SEQ ID NO: 1140320 - RNA, 19 nt, Homo sapiens
  misc_RNA (1)...(19): siRNA sense strand
uuggaacgcuggacucgaa

SEQ ID NO: 1140321 - RNA, 19 nt, Homo sapiens
  misc_RNA (1)...(19): siRNA sense strand
acugugagcucaagauugg

SEQ ID NO: 1140322 - RNA, 19 nt, Homo sapiens
  misc_RNA (1)...(19): siRNA sense strand
uggcugaaauugaggacuu

SEQ ID NO: 1140323 - RNA, 19 nt, Homo sapiens
  misc_RNA (1)...(19): siRNA sense strand
caccugaugucaaccuugu

SEQ ID NO: 1140324 - RNA, 19 nt, Homo sapiens
  misc_RNA (1)...(19): siRNA sense strand
gaguauacacaggcuauug

SEQ ID NO: 1140325 - RNA, 19 nt, Homo sapiens
  misc_RNA (1)...(19): siRNA sense strand
cauuguggcugaaauugag

SEQ ID NO: 1140326 - RNA, 19 nt, Homo sapiens
  misc_RNA (1)...(19): siRNA sense strand
gcuacgguguuggcuuuga

SEQ ID NO: 1140327 - RNA, 19 nt, Homo sapiens
  misc_RNA (1)...(19): siRNA sense strand
ccuuugacuuugccuuuga

SEQ ID NO: 1140328 - RNA, 19 nt, Homo sapiens
  misc_RNA (1)...(19): siRNA sense strand
ccaaggagcgggagaaacg

SEQ ID NO: 1140329 - RNA, 19 nt, Homo sapiens
  misc_RNA (1)...(19): siRNA sense strand
aagcugcccugcucaaguc

SEQ ID NO: 1140330 - RNA, 19 nt, Homo sapiens
  misc_RNA (1)...(19): siRNA sense strand
ggcaagaacgagccaagga

SEQ ID NO: 1140331 - RNA, 19 nt, Homo sapiens
  misc_RNA (1)...(19): siRNA sense strand
gcucagugacaaugacaga

SEQ ID NO: 1140332 - RNA, 19 nt, Homo sapiens
  misc_RNA (1)...(19): siRNA sense strand
gacuagugcucagugacaa

SEQ ID NO: 1140333 - RNA, 19 nt, Homo sapiens
  misc_RNA (1)...(19): siRNA sense strand
agagucaccugaugucaac

SEQ ID NO: 1140334 - RNA, 19 nt, Homo sapiens
  misc_RNA (1)...(19): siRNA sense strand
gaacgcuggacucgaaugg

SEQ ID NO: 1140335 - RNA, 19 nt, Homo sapiens
  misc_RNA (1)...(19): siRNA sense strand
cuucaugacugaguaugug

SEQ ID NO: 1140336 - RNA, 19 nt, Homo sapiens
  misc_RNA (1)...(19): siRNA sense strand
cccagcagcuaucuaaguc

SEQ ID NO: 1140337 - RNA, 19 nt, Homo sapiens
  misc_RNA (1)...(19): siRNA sense strand
gcccuuugacuuugccuuu

SEQ ID NO: 1140338 - RNA, 19 nt, Homo sapiens
  misc_RNA (1)...(19): siRNA sense strand
accaugauccugaugauga

SEQ ID NO: 1140339 - RNA, 19 nt, Homo sapiens
  misc_RNA (1)...(19): siRNA sense strand
ggaacacgugcgcuacuuc

SEQ ID NO: 1140340 - RNA, 19 nt, Homo sapiens
  misc_RNA (1)...(19): siRNA sense strand
acccuuuccuggccaagua

SEQ ID NO: 1140341 - RNA, 19 nt, Homo sapiens
  misc_RNA (1)...(19): siRNA sense strand
ggagcgggagcgaaaggaa

SEQ ID NO: 1140342 - RNA, 19 nt, Homo sapiens
  misc_RNA (1)...(19): siRNA sense strand
ccauuguggcugaaauuga

SEQ ID NO: 1140343 - RNA, 19 nt, Homo sapiens
  misc_RNA (1)...(19): siRNA sense strand
cugcccugcucaagucuuu

SEQ ID NO: 1140344 - RNA, 19 nt, Homo sapiens
  misc_RNA (1)...(19): siRNA sense strand
agauucagccucucucuca

SEQ ID NO: 1140345 - RNA, 19 nt, Homo sapiens
  misc_RNA (1)...(19): siRNA sense strand
cagagucaccugaugucaa

SEQ ID NO: 1140346 - RNA, 19 nt, Homo sapiens
  misc_RNA (1)...(19): siRNA sense strand
gaccuggaggaauucuuaa

SEQ ID NO: 1140347 - RNA, 19 nt, Homo sapiens
  misc_RNA (1)...(19): siRNA sense strand
gcuacuuccuguaccaacu

SEQ ID NO: 1140348 - RNA, 19 nt, Homo sapiens
  misc_RNA (1)...(19): siRNA sense strand
caggauggccaggcagauu

SEQ ID NO: 1140349 - RNA, 19 nt, Homo sapiens
  misc_RNA (1)...(19): siRNA sense strand
uggaggaauucuuaaacca

SEQ ID NO: 1140350 - RNA, 19 nt, Homo sapiens
  misc_RNA (1)...(19): siRNA sense strand
auugaggacuuccaugcaa

SEQ ID NO: 1140351 - RNA, 19 nt, Homo sapiens
  misc_RNA (1)...(19): siRNA sense strand
aguauacacaggcuauuga

SEQ ID NO: 1140352 - RNA, 19 nt, Homo sapiens
  misc_RNA (1)...(19): siRNA sense strand
gacaugggcguggcugaug

SEQ ID NO: 1140353 - RNA, 19 nt, Homo sapiens
  misc_RNA (1)...(19): siRNA sense strand
ccccaggaguuuugccuua

SEQ ID NO: 1140354 - RNA, 19 nt, Homo sapiens
  misc_RNA (1)...(19): siRNA sense strand
aaacuauguacaccagcua

SEQ ID NO: 1140355 - RNA, 19 nt, Homo sapiens
  misc_RNA (1)...(19): siRNA sense strand
uggaacacgugcgcuacuu

SEQ ID NO: 1140356 - RNA, 19 nt, Homo sapiens
  misc_RNA (1)...(19): siRNA sense strand
ggcugcaucuuuggugaga

SEQ ID NO: 1140357 - RNA, 19 nt, Homo sapiens
  misc_RNA (1)...(19): siRNA sense strand
gagccaaggagcgggagaa

SEQ ID NO: 1140358 - RNA, 19 nt, Homo sapiens
  misc_RNA (1)...(19): siRNA sense strand
ccaucucagacaauacuaa

SEQ ID NO: 1140359 - RNA, 19 nt, Homo sapiens
  misc_RNA (1)...(19): siRNA sense strand
ccaugauccugaugaugag

SEQ ID NO: 1140360 - RNA, 19 nt, Homo sapiens
  misc_RNA (1)...(19): siRNA sense strand
gaacaucaguacuucauga

SEQ ID NO: 1140361 - RNA, 19 nt, Homo sapiens
  misc_RNA (1)...(19): siRNA sense strand
gcucaagauuggugacuuu

SEQ ID NO: 1140362 - RNA, 19 nt, Homo sapiens
  misc_RNA (1)...(19): siRNA sense strand
gcuuugaccuggaggaauu

SEQ ID NO: 1140363 - RNA, 19 nt, Homo sapiens
  misc_RNA (1)...(19): siRNA sense strand
gaacugugagcucaagauu

SEQ ID NO: 1140364 - RNA, 19 nt, Homo sapiens
  misc_RNA (1)...(19): siRNA sense strand
aaaccagucuuucgacaug

SEQ ID NO: 1140365 - RNA, 19 nt, Homo sapiens
  misc_RNA (1)...(19): siRNA sense strand
gcacucggcucaggucauc

SEQ ID NO: 1140366 - RNA, 19 nt, Homo sapiens
  misc_RNA (1)...(19): siRNA sense strand
ggugccaucucagacaaua

SEQ ID NO: 1140367 - RNA, 19 nt, Homo sapiens
  misc_RNA (1)...(19): siRNA sense strand
ugaccuggaggaauucuua

SEQ ID NO: 1140368 - RNA, 19 nt, Homo sapiens
  misc_RNA (1)...(19): siRNA sense strand
caagauuggugacuuuggu

SEQ ID NO: 1140369 - RNA, 19 nt, Homo sapiens
  misc_RNA (1)...(19): siRNA sense strand
ugacccagcagcuaucuaa

SEQ ID NO: 1140370 - RNA, 19 nt, Homo sapiens
  misc_RNA (1)...(19): siRNA sense strand
uggcuacgguguuggcuuu

SEQ ID NO: 1140371 - RNA, 19 nt, Homo sapiens
  misc_RNA (1)...(19): siRNA sense strand
gggccuauauccagagcuu

SEQ ID NO: 1140372 - RNA, 19 nt, Homo sapiens
  misc_RNA (1)...(19): siRNA sense strand
caaguaccaugauccugau

SEQ ID NO: 1140373 - RNA, 19 nt, Homo sapiens
  misc_RNA (1)...(19): siRNA sense strand
aaagcgaccugcaccagau

SEQ ID NO: 1140374 - RNA, 19 nt, Homo sapiens
  misc_RNA (1)...(19): siRNA sense strand
ggacuagugcucagugaca

SEQ ID NO: 1140375 - RNA, 19 nt, Homo sapiens
  misc_RNA (1)...(19): siRNA sense strand
ucugugggcugcaucuuug

SEQ ID NO: 1140376 - RNA, 19 nt, Homo sapiens
  misc_RNA (1)...(19): siRNA sense strand
guaccaugauccugaugau

SEQ ID NO: 1140377 - RNA, 19 nt, Homo sapiens
  misc_RNA (1)...(19): siRNA sense strand
uuggaacgcuggacucgaa

SEQ ID NO: 1140378 - RNA, 19 nt, Homo sapiens
  misc_RNA (1)...(19): siRNA sense strand
acugugagcucaagauugg

SEQ ID NO: 1140379 - RNA, 19 nt, Homo sapiens
  misc_RNA (1)...(19): siRNA sense strand
uggcugaaauugaggacuu

SEQ ID NO: 1140380 - RNA, 19 nt, Homo sapiens
  misc_RNA (1)...(19): siRNA sense strand
caccugaugucaaccuugu

SEQ ID NO: 1140381 - RNA, 19 nt, Homo sapiens
  misc_RNA (1)...(19): siRNA sense strand
gaguauacacaggcuauug

SEQ ID NO: 1140382 - RNA, 19 nt, Homo sapiens
  misc_RNA (1)...(19): siRNA sense strand
cauuguggcugaaauugag

SEQ ID NO: 1140383 - RNA, 19 nt, Homo sapiens
  misc_RNA (1)...(19): siRNA sense strand
gcuacgguguuggcuuuga

SEQ ID NO: 1140384 - RNA, 19 nt, Homo sapiens
  misc_RNA (1)...(19): siRNA sense strand
ccuuugacuuugccuuuga

SEQ ID NO: 1140385 - RNA, 19 nt, Homo sapiens
  misc_RNA (1)...(19): siRNA sense strand
ccaaggagcgggagaaacg

SEQ ID NO: 1140386 - RNA, 19 nt, Homo sapiens
  misc_RNA (1)...(19): siRNA sense strand
aagcugcccugcucaaguc

SEQ ID NO: 1140387 - RNA, 19 nt, Homo sapiens
  misc_RNA (1)...(19): siRNA sense strand
ggcaagaacgagccaagga

SEQ ID NO: 1140388 - RNA, 19 nt, Homo sapiens
  misc_RNA (1)...(19): siRNA sense strand
gcucagugacaaugacaga

SEQ ID NO: 1140389 - RNA, 19 nt, Homo sapiens
  misc_RNA (1)...(19): siRNA sense strand
gacuagugcucagugacaa

SEQ ID NO: 1140390 - RNA, 19 nt, Homo sapiens
  misc_RNA (1)...(19): siRNA sense strand
agagucaccugaugucaac

SEQ ID NO: 1140391 - RNA, 19 nt, Homo sapiens
  misc_RNA (1)...(19): siRNA sense strand
gaacgcuggacucgaaugg

SEQ ID NO: 1140392 - RNA, 19 nt, Homo sapiens
  misc_RNA (1)...(19): siRNA sense strand
ggaacacgugcgcuacuuc

SEQ ID NO: 1140393 - RNA, 19 nt, Homo sapiens
  misc_RNA (1)...(19): siRNA sense strand
cccagcagcuaucuaaguc

SEQ ID NO: 1140394 - RNA, 19 nt, Homo sapiens
  misc_RNA (1)...(19): siRNA sense strand
gcccuuugacuuugccuuu

SEQ ID NO: 1140395 - RNA, 19 nt, Homo sapiens
  misc_RNA (1)...(19): siRNA sense strand
accaugauccugaugauga

SEQ ID NO: 1140396 - RNA, 19 nt, Homo sapiens
  misc_RNA (1)...(19): siRNA sense strand
acccuuuccuggccaagua

SEQ ID NO: 1140397 - RNA, 19 nt, Homo sapiens
  misc_RNA (1)...(19): siRNA sense strand
cuucaugacugaguaugug

SEQ ID NO: 1140398 - RNA, 19 nt, Homo sapiens
  misc_RNA (1)...(19): siRNA sense strand
ggagcgggagcgaaaggaa

SEQ ID NO: 1140399 - RNA, 19 nt, Homo sapiens
  misc_RNA (1)...(19): siRNA sense strand
ccauuguggcugaaauuga

SEQ ID NO: 1140400 - RNA, 19 nt, Homo sapiens
  misc_RNA (1)...(19): siRNA sense strand
cugcccugcucaagucuuu

SEQ ID NO: 1140401 - RNA, 19 nt, Homo sapiens
  misc_RNA (1)...(19): siRNA sense strand
agauucagccucucucuca

SEQ ID NO: 1140402 - RNA, 19 nt, Homo sapiens
  misc_RNA (1)...(19): siRNA sense strand
cagagucaccugaugucaa

SEQ ID NO: 1140403 - RNA, 19 nt, Homo sapiens
  misc_RNA (1)...(19): siRNA sense strand
gaccuggaggaauucuuaa

SEQ ID NO: 1140404 - RNA, 19 nt, Homo sapiens
  misc_RNA (1)...(19): siRNA sense strand
gcuacuuccuguaccaacu

SEQ ID NO: 1140405 - RNA, 19 nt, Homo sapiens
  misc_RNA (1)...(19): siRNA sense strand
caggauggccaggcagauu

SEQ ID NO: 1140406 - RNA, 19 nt, Homo sapiens
  misc_RNA (1)...(19): siRNA sense strand
uggaggaauucuuaaacca

SEQ ID NO: 1140407 - RNA, 19 nt, Homo sapiens
  misc_RNA (1)...(19): siRNA sense strand
auugaggacuuccaugcaa

SEQ ID NO: 1140408 - RNA, 19 nt, Homo sapiens
  misc_RNA (1)...(19): siRNA sense strand
aguauacacaggcuauuga

SEQ ID NO: 1140409 - RNA, 19 nt, Homo sapiens
  misc_RNA (1)...(19): siRNA sense strand
gacaugggcguggcugaug

SEQ ID NO: 1140410 - RNA, 19 nt, Homo sapiens
  misc_RNA (1)...(19): siRNA sense strand
ccccaggaguuuugccuua

SEQ ID NO: 1140411 - RNA, 19 nt, Homo sapiens
  misc_RNA (1)...(19): siRNA sense strand
uggaacacgugcgcuacuu

SEQ ID NO: 1140412 - RNA, 19 nt, Homo sapiens
  misc_RNA (1)...(19): siRNA sense strand
aaacuauguacaccagcua

SEQ ID NO: 1140413 - RNA, 19 nt, Homo sapiens
  misc_RNA (1)...(19): siRNA sense strand
ggcugcaucuuuggugaga

SEQ ID NO: 1140414 - RNA, 19 nt, Homo sapiens
  misc_RNA (1)...(19): siRNA sense strand
gagccaaggagcgggagaa

SEQ ID NO: 1140415 - RNA, 19 nt, Homo sapiens
  misc_RNA (1)...(19): siRNA sense strand
ccaucucagacaauacuaa

SEQ ID NO: 1140416 - RNA, 19 nt, Homo sapiens
  misc_RNA (1)...(19): siRNA sense strand
ccaugauccugaugaugag

SEQ ID NO: 1140417 - RNA, 19 nt, Homo sapiens
  misc_RNA (1)...(19): siRNA sense strand
gaacaucaguacuucauga

SEQ ID NO: 1140418 - RNA, 19 nt, Homo sapiens
  misc_RNA (1)...(19): siRNA sense strand
gcucaagauuggugacuuu

SEQ ID NO: 1140419 - RNA, 19 nt, Homo sapiens
  misc_RNA (1)...(19): siRNA sense strand
gcuuugaccuggaggaauu

SEQ ID NO: 1140420 - RNA, 19 nt, Homo sapiens
  misc_RNA (1)...(19): siRNA sense strand
gaacugugagcucaagauu

SEQ ID NO: 1140421 - RNA, 19 nt, Homo sapiens
  misc_RNA (1)...(19): siRNA sense strand
aaaccagucuuucgacaug

SEQ ID NO: 1140422 - RNA, 19 nt, Homo sapiens
  misc_RNA (1)...(19): siRNA sense strand
gcacucggcucaggucauc

SEQ ID NO: 1140423 - RNA, 19 nt, Homo sapiens
  misc_RNA (1)...(19): siRNA sense strand
ggugccaucucagacaaua

SEQ ID NO: 1140424 - RNA, 19 nt, Homo sapiens
  misc_RNA (1)...(19): siRNA sense strand
ugaccuggaggaauucuua

SEQ ID NO: 1140425 - RNA, 19 nt, Homo sapiens
  misc_RNA (1)...(19): siRNA sense strand
caagauuggugacuuuggu

SEQ ID NO: 1140426 - RNA, 19 nt, Homo sapiens
  misc_RNA (1)...(19): siRNA sense strand
ugacccagcagcuaucuaa

SEQ ID NO: 1140427 - RNA, 19 nt, Homo sapiens
  misc_RNA (1)...(19): siRNA sense strand
uggcuacgguguuggcuuu

SEQ ID NO: 1140428 - RNA, 19 nt, Homo sapiens
  misc_RNA (1)...(19): siRNA sense strand
gggccuauauccagagcuu

SEQ ID NO: 1140429 - RNA, 19 nt, Homo sapiens
  misc_RNA (1)...(19): siRNA sense strand
caaguaccaugauccugau

SEQ ID NO: 1140430 - RNA, 19 nt, Homo sapiens
  misc_RNA (1)...(19): siRNA sense strand
ggacuagugcucagugaca

SEQ ID NO: 1140431 - RNA, 19 nt, Homo sapiens
  misc_RNA (1)...(19): siRNA sense strand
aaagcgaccugcaccagau

SEQ ID NO: 1140432 - RNA, 19 nt, Homo sapiens
  misc_RNA (1)...(19): siRNA sense strand
ucugugggcugcaucuuug

SEQ ID NO: 1140433 - RNA, 19 nt, Homo sapiens
  misc_RNA (1)...(19): siRNA sense strand
guaccaugauccugaugau

SEQ ID NO: 1140434 - RNA, 19 nt, Homo sapiens
  misc_RNA (1)...(19): siRNA sense strand
uuggaacgcuggacucgaa

SEQ ID NO: 1140435 - RNA, 19 nt, Homo sapiens
  misc_RNA (1)...(19): siRNA sense strand
acugugagcucaagauugg

SEQ ID NO: 1140436 - RNA, 19 nt, Homo sapiens
  misc_RNA (1)...(19): siRNA sense strand
uggcugaaauugaggacuu

SEQ ID NO: 1140437 - RNA, 19 nt, Homo sapiens
  misc_RNA (1)...(19): siRNA sense strand
caccugaugucaaccuugu

SEQ ID NO: 1140438 - RNA, 19 nt, Homo sapiens
  misc_RNA (1)...(19): siRNA sense strand
gaguauacacaggcuauug

SEQ ID NO: 1140439 - RNA, 19 nt, Homo sapiens
  misc_RNA (1)...(19): siRNA sense strand
cauuguggcugaaauugag

SEQ ID NO: 1140440 - RNA, 19 nt, Homo sapiens
  misc_RNA (1)...(19): siRNA sense strand
gcuacgguguuggcuuuga

SEQ ID NO: 1140441 - RNA, 19 nt, Homo sapiens
  misc_RNA (1)...(19): siRNA sense strand
ccuuugacuuugccuuuga

SEQ ID NO: 1140442 - RNA, 19 nt, Homo sapiens
  misc_RNA (1)...(19): siRNA sense strand
ccaaggagcgggagaaacg

SEQ ID NO: 1140443 - RNA, 19 nt, Homo sapiens
  misc_RNA (1)...(19): siRNA sense strand
aagcugcccugcucaaguc

SEQ ID NO: 1140444 - RNA, 19 nt, Homo sapiens
  misc_RNA (1)...(19): siRNA sense strand
ggcaagaacgagccaagga

SEQ ID NO: 1140445 - RNA, 19 nt, Homo sapiens
  misc_RNA (1)...(19): siRNA sense strand
gcucagugacaaugacaga

SEQ ID NO: 1140446 - RNA, 19 nt, Homo sapiens
  misc_RNA (1)...(19): siRNA sense strand
gacuagugcucagugacaa

SEQ ID NO: 1140447 - RNA, 19 nt, Homo sapiens
  misc_RNA (1)...(19): siRNA sense strand
agagucaccugaugucaac

SEQ ID NO: 1140448 - RNA, 19 nt, Homo sapiens
  misc_RNA (1)...(19): siRNA sense strand
gaacgcuggacucgaaugg

SEQ ID NO: 1140449 - RNA, 19 nt, Homo sapiens
  misc_RNA (1)...(19): siRNA sense strand
cuucaugacugaguaugug

SEQ ID NO: 1140450 - RNA, 19 nt, Homo sapiens
  misc_RNA (1)...(19): siRNA sense strand
cccagcagcuaucuaaguc

SEQ ID NO: 1140451 - RNA, 19 nt, Homo sapiens
  misc_RNA (1)...(19): siRNA sense strand
gcccuuugacuuugccuuu

SEQ ID NO: 1140452 - RNA, 19 nt, Homo sapiens
  misc_RNA (1)...(19): siRNA sense strand
accaugauccugaugauga

SEQ ID NO: 1140453 - RNA, 19 nt, Homo sapiens
  misc_RNA (1)...(19): siRNA sense strand
ggaacacgugcgcuacuuc

SEQ ID NO: 1140454 - RNA, 19 nt, Homo sapiens
  misc_RNA (1)...(19): siRNA sense strand
acccuuuccuggccaagua

SEQ ID NO: 1140455 - RNA, 19 nt, Homo sapiens
  misc_RNA (1)...(19): siRNA sense strand
ggagcgggagcgaaaggaa

SEQ ID NO: 1140456 - RNA, 19 nt, Homo sapiens
  misc_RNA (1)...(19): siRNA sense strand
ccauuguggcugaaauuga

SEQ ID NO: 1140457 - RNA, 19 nt, Homo sapiens
  misc_RNA (1)...(19): siRNA sense strand
cugcccugcucaagucuuu

SEQ ID NO: 1140458 - RNA, 19 nt, Homo sapiens
  misc_RNA (1)...(19): siRNA sense strand
agauucagccucucucuca

SEQ ID NO: 1140459 - RNA, 19 nt, Homo sapiens
  misc_RNA (1)...(19): siRNA sense strand
cagagucaccugaugucaa

SEQ ID NO: 1140460 - RNA, 19 nt, Homo sapiens
  misc_RNA (1)...(19): siRNA sense strand
gaccuggaggaauucuuaa

SEQ ID NO: 1140461 - RNA, 19 nt, Homo sapiens
  misc_RNA (1)...(19): siRNA sense strand
gcuacuuccuguaccaacu

SEQ ID NO: 1140462 - RNA, 19 nt, Homo sapiens
  misc_RNA (1)...(19): siRNA sense strand
caggauggccaggcagauu

SEQ ID NO: 1140463 - RNA, 19 nt, Homo sapiens
  misc_RNA (1)...(19): siRNA sense strand
uggaggaauucuuaaacca

SEQ ID NO: 1140464 - RNA, 19 nt, Homo sapiens
  misc_RNA (1)...(19): siRNA sense strand
auugaggacuuccaugcaa

SEQ ID NO: 1140465 - RNA, 19 nt, Homo sapiens
  misc_RNA (1)...(19): siRNA sense strand
aguauacacaggcuauuga

SEQ ID NO: 1140466 - RNA, 19 nt, Homo sapiens
  misc_RNA (1)...(19): siRNA sense strand
gacaugggcguggcugaug

SEQ ID NO: 1140467 - RNA, 19 nt, Homo sapiens
  misc_RNA (1)...(19): siRNA sense strand
ccccaggaguuuugccuua

SEQ ID NO: 1140468 - RNA, 19 nt, Homo sapiens
  misc_RNA (1)...(19): siRNA sense strand
aaacuauguacaccagcua

SEQ ID NO: 1140469 - RNA, 19 nt, Homo sapiens
  misc_RNA (1)...(19): siRNA sense strand
uggaacacgugcgcuacuu

SEQ ID NO: 1140470 - RNA, 19 nt, Homo sapiens
  misc_RNA (1)...(19): siRNA sense strand
ggcugcaucuuuggugaga

SEQ ID NO: 1140471 - RNA, 19 nt, Homo sapiens
  misc_RNA (1)...(19): siRNA sense strand
gagccaaggagcgggagaa

SEQ ID NO: 1140472 - RNA, 19 nt, Homo sapiens
  misc_RNA (1)...(19): siRNA sense strand
ccaucucagacaauacuaa

SEQ ID NO: 1140473 - RNA, 19 nt, Homo sapiens
  misc_RNA (1)...(19): siRNA sense strand
ccaugauccugaugaugag

SEQ ID NO: 1140474 - RNA, 19 nt, Homo sapiens
  misc_RNA (1)...(19): siRNA sense strand
gaacaucaguacuucauga

SEQ ID NO: 1140475 - RNA, 19 nt, Homo sapiens
  misc_RNA (1)...(19): siRNA sense strand
gcucaagauuggugacuuu

SEQ ID NO: 1140476 - RNA, 19 nt, Homo sapiens
  misc_RNA (1)...(19): siRNA sense strand
gcuuugaccuggaggaauu

SEQ ID NO: 1140477 - RNA, 19 nt, Homo sapiens
  misc_RNA (1)...(19): siRNA sense strand
gaacugugagcucaagauu

SEQ ID NO: 1140478 - RNA, 19 nt, Homo sapiens
  misc_RNA (1)...(19): siRNA sense strand
aaaccagucuuucgacaug

SEQ ID NO: 1140479 - RNA, 19 nt, Homo sapiens
  misc_RNA (1)...(19): siRNA sense strand
gcacucggcucaggucauc

SEQ ID NO: 1140480 - RNA, 19 nt, Homo sapiens
  misc_RNA (1)...(19): siRNA sense strand
ggugccaucucagacaaua

SEQ ID NO: 1140481 - RNA, 19 nt, Homo sapiens
  misc_RNA (1)...(19): siRNA sense strand
ugaccuggaggaauucuua

SEQ ID NO: 1140482 - RNA, 19 nt, Homo sapiens
  misc_RNA (1)...(19): siRNA sense strand
caagauuggugacuuuggu

SEQ ID NO: 1140483 - RNA, 19 nt, Homo sapiens
  misc_RNA (1)...(19): siRNA sense strand
ugacccagcagcuaucuaa

SEQ ID NO: 1140484 - RNA, 19 nt, Homo sapiens
  misc_RNA (1)...(19): siRNA sense strand
uggcuacgguguuggcuuu

SEQ ID NO: 1140485 - RNA, 19 nt, Homo sapiens
  misc_RNA (1)...(19): siRNA sense strand
gggccuauauccagagcuu

SEQ ID NO: 1140486 - RNA, 19 nt, Homo sapiens
  misc_RNA (1)...(19): siRNA sense strand
caaguaccaugauccugau

SEQ ID NO: 1140487 - RNA, 19 nt, Homo sapiens
  misc_RNA (1)...(19): siRNA sense strand
ggacuagugcucagugaca

SEQ ID NO: 1140488 - RNA, 19 nt, Homo sapiens
  misc_RNA (1)...(19): siRNA sense strand
aaagcgaccugcaccagau

SEQ ID NO: 1140489 - RNA, 19 nt, Homo sapiens
  misc_RNA (1)...(19): siRNA sense strand
ucugugggcugcaucuuug

SEQ ID NO: 1140490 - RNA, 19 nt, Homo sapiens
  misc_RNA (1)...(19): siRNA sense strand
guaccaugauccugaugau

SEQ ID NO: 1140491 - RNA, 19 nt, Homo sapiens
  misc_RNA (1)...(19): siRNA sense strand
uuggaacgcuggacucgaa

SEQ ID NO: 1140492 - RNA, 19 nt, Homo sapiens
  misc_RNA (1)...(19): siRNA sense strand
acugugagcucaagauugg

SEQ ID NO: 1140493 - RNA, 19 nt, Homo sapiens
  misc_RNA (1)...(19): siRNA sense strand
uggcugaaauugaggacuu

SEQ ID NO: 1140494 - RNA, 19 nt, Homo sapiens
  misc_RNA (1)...(19): siRNA sense strand
caccugaugucaaccuugu

SEQ ID NO: 1140495 - RNA, 19 nt, Homo sapiens
  misc_RNA (1)...(19): siRNA sense strand
gaguauacacaggcuauug

SEQ ID NO: 1140496 - RNA, 19 nt, Homo sapiens
  misc_RNA (1)...(19): siRNA sense strand
cauuguggcugaaauugag

SEQ ID NO: 1140497 - RNA, 19 nt, Homo sapiens
  misc_RNA (1)...(19): siRNA sense strand
gcuacgguguuggcuuuga

SEQ ID NO: 1140498 - RNA, 19 nt, Homo sapiens
  misc_RNA (1)...(19): siRNA sense strand
ccuuugacuuugccuuuga

SEQ ID NO: 1140499 - RNA, 19 nt, Homo sapiens
  misc_RNA (1)...(19): siRNA sense strand
ccaaggagcgggagaaacg

SEQ ID NO: 1140500 - RNA, 19 nt, Homo sapiens
  misc_RNA (1)...(19): siRNA sense strand
aagcugcccugcucaaguc

SEQ ID NO: 1140501 - RNA, 19 nt, Homo sapiens
  misc_RNA (1)...(19): siRNA sense strand
ggcaagaacgagccaagga

SEQ ID NO: 1140502 - RNA, 19 nt, Homo sapiens
  misc_RNA (1)...(19): siRNA sense strand
gcucagugacaaugacaga

SEQ ID NO: 1140503 - RNA, 19 nt, Homo sapiens
  misc_RNA (1)...(19): siRNA sense strand
gacuagugcucagugacaa

SEQ ID NO: 1140504 - RNA, 19 nt, Homo sapiens
  misc_RNA (1)...(19): siRNA sense strand
agagucaccugaugucaac

SEQ ID NO: 1140505 - RNA, 19 nt, Homo sapiens
  misc_RNA (1)...(19): siRNA sense strand
gaacgcuggacucgaaugg

SEQ ID NO: 1140506 - RNA, 19 nt, Homo sapiens
  misc_RNA (1)...(19): siRNA sense strand
cuucaugacugaguaugug

SEQ ID NO: 1140507 - RNA, 19 nt, Homo sapiens
  misc_RNA (1)...(19): siRNA sense strand
cccagcagcuaucuaaguc

SEQ ID NO: 1140508 - RNA, 19 nt, Homo sapiens
  misc_RNA (1)...(19): siRNA sense strand
gcccuuugacuuugccuuu

SEQ ID NO: 1140509 - RNA, 19 nt, Homo sapiens
  misc_RNA (1)...(19): siRNA sense strand
accaugauccugaugauga

SEQ ID NO: 1140510 - RNA, 19 nt, Homo sapiens
  misc_RNA (1)...(19): siRNA sense strand
ggaacacgugcgcuacuuc

SEQ ID NO: 1140511 - RNA, 19 nt, Homo sapiens
  misc_RNA (1)...(19): siRNA sense strand
acccuuuccuggccaagua

SEQ ID NO: 1140512 - RNA, 19 nt, Homo sapiens
  misc_RNA (1)...(19): siRNA sense strand
ggagcgggagcgaaaggaa

SEQ ID NO: 1140513 - RNA, 19 nt, Homo sapiens
  misc_RNA (1)...(19): siRNA sense strand
ccauuguggcugaaauuga

SEQ ID NO: 1140514 - RNA, 19 nt, Homo sapiens
  misc_RNA (1)...(19): siRNA sense strand
cugcccugcucaagucuuu

SEQ ID NO: 1140515 - RNA, 19 nt, Homo sapiens
  misc_RNA (1)...(19): siRNA sense strand
agauucagccucucucuca

SEQ ID NO: 1140516 - RNA, 19 nt, Homo sapiens
  misc_RNA (1)...(19): siRNA sense strand
cagagucaccugaugucaa

SEQ ID NO: 1140517 - RNA, 19 nt, Homo sapiens
  misc_RNA (1)...(19): siRNA sense strand
gaccuggaggaauucuuaa

SEQ ID NO: 1140518 - RNA, 19 nt, Homo sapiens
  misc_RNA (1)...(19): siRNA sense strand
gcuacuuccuguaccaacu

SEQ ID NO: 1140519 - RNA, 19 nt, Homo sapiens
  misc_RNA (1)...(19): siRNA sense strand
caggauggccaggcagauu

SEQ ID NO: 1140520 - RNA, 19 nt, Homo sapiens
  misc_RNA (1)...(19): siRNA sense strand
uggaggaauucuuaaacca

SEQ ID NO: 1140521 - RNA, 19 nt, Homo sapiens
  misc_RNA (1)...(19): siRNA sense strand
auugaggacuuccaugcaa

SEQ ID NO: 1140522 - RNA, 19 nt, Homo sapiens
  misc_RNA (1)...(19): siRNA sense strand
aguauacacaggcuauuga

SEQ ID NO: 1140523 - RNA, 19 nt, Homo sapiens
  misc_RNA (1)...(19): siRNA sense strand
gacaugggcguggcugaug

SEQ ID NO: 1140524 - RNA, 19 nt, Homo sapiens
  misc_RNA (1)...(19): siRNA sense strand
ccccaggaguuuugccuua

SEQ ID NO: 1140525 - RNA, 19 nt, Homo sapiens
  misc_RNA (1)...(19): siRNA sense strand
aaacuauguacaccagcua

SEQ ID NO: 1140526 - RNA, 19 nt, Homo sapiens
  misc_RNA (1)...(19): siRNA sense strand
uggaacacgugcgcuacuu

SEQ ID NO: 1140527 - RNA, 19 nt, Homo sapiens
  misc_RNA (1)...(19): siRNA sense strand
ggcugcaucuuuggugaga

SEQ ID NO: 1140528 - RNA, 19 nt, Homo sapiens
  misc_RNA (1)...(19): siRNA sense strand
gagccaaggagcgggagaa

SEQ ID NO: 1140529 - RNA, 19 nt, Homo sapiens
  misc_RNA (1)...(19): siRNA sense strand
ccaucucagacaauacuaa

SEQ ID NO: 1140530 - RNA, 19 nt, Homo sapiens
  misc_RNA (1)...(19): siRNA sense strand
ccaugauccugaugaugag

SEQ ID NO: 1140531 - RNA, 19 nt, Homo sapiens
  misc_RNA (1)...(19): siRNA sense strand
gaacaucaguacuucauga

SEQ ID NO: 1140532 - RNA, 19 nt, Homo sapiens
  misc_RNA (1)...(19): siRNA sense strand
gcucaagauuggugacuuu

SEQ ID NO: 1140533 - RNA, 19 nt, Homo sapiens
  misc_RNA (1)...(19): siRNA sense strand
gcuuugaccuggaggaauu

SEQ ID NO: 1140534 - RNA, 19 nt, Homo sapiens
  misc_RNA (1)...(19): siRNA sense strand
gaacugugagcucaagauu

SEQ ID NO: 1140535 - RNA, 19 nt, Homo sapiens
  misc_RNA (1)...(19): siRNA sense strand
aaaccagucuuucgacaug

SEQ ID NO: 1140536 - RNA, 19 nt, Homo sapiens
  misc_RNA (1)...(19): siRNA sense strand
gcacucggcucaggucauc

SEQ ID NO: 1140537 - RNA, 19 nt, Homo sapiens
  misc_RNA (1)...(19): siRNA sense strand
ggugccaucucagacaaua

SEQ ID NO: 1140538 - RNA, 19 nt, Homo sapiens
  misc_RNA (1)...(19): siRNA sense strand
ugaccuggaggaauucuua

SEQ ID NO: 1140539 - RNA, 19 nt, Homo sapiens
  misc_RNA (1)...(19): siRNA sense strand
caagauuggugacuuuggu

SEQ ID NO: 1140540 - RNA, 19 nt, Homo sapiens
  misc_RNA (1)...(19): siRNA sense strand
ugacccagcagcuaucuaa

SEQ ID NO: 1140541 - RNA, 19 nt, Homo sapiens
  misc_RNA (1)...(19): siRNA sense strand
uggcuacgguguuggcuuu

SEQ ID NO: 1140542 - RNA, 19 nt, Homo sapiens
  misc_RNA (1)...(19): siRNA sense strand
gggccuauauccagagcuu

SEQ ID NO: 1140543 - RNA, 19 nt, Homo sapiens
  misc_RNA (1)...(19): siRNA sense strand
caaguaccaugauccugau

SEQ ID NO: 1140544 - RNA, 19 nt, Homo sapiens
  misc_RNA (1)...(19): siRNA sense strand
ggacuagugcucagugaca

SEQ ID NO: 1140545 - RNA, 19 nt, Homo sapiens
  misc_RNA (1)...(19): siRNA sense strand
aaagcgaccugcaccagau

SEQ ID NO: 1140546 - RNA, 19 nt, Homo sapiens
  misc_RNA (1)...(19): siRNA sense strand
ucugugggcugcaucuuug

SEQ ID NO: 1140547 - RNA, 19 nt, Homo sapiens
  misc_RNA (1)...(19): siRNA sense strand
guaccaugauccugaugau

SEQ ID NO: 1140548 - RNA, 19 nt, Homo sapiens
  misc_RNA (1)...(19): siRNA sense strand
uuggaacgcuggacucgaa

SEQ ID NO: 1140549 - RNA, 19 nt, Homo sapiens
  misc_RNA (1)...(19): siRNA sense strand
acugugagcucaagauugg

SEQ ID NO: 1140550 - RNA, 19 nt, Homo sapiens
  misc_RNA (1)...(19): siRNA sense strand
uggcugaaauugaggacuu

SEQ ID NO: 1140551 - RNA, 19 nt, Homo sapiens
  misc_RNA (1)...(19): siRNA sense strand
caccugaugucaaccuugu

SEQ ID NO: 1140552 - RNA, 19 nt, Homo sapiens
  misc_RNA (1)...(19): siRNA sense strand
gaguauacacaggcuauug

SEQ ID NO: 1140553 - RNA, 19 nt, Homo sapiens
  misc_RNA (1)...(19): siRNA sense strand
cauuguggcugaaauugag

SEQ ID NO: 1140554 - RNA, 19 nt, Homo sapiens
  misc_RNA (1)...(19): siRNA sense strand
gcuacgguguuggcuuuga

SEQ ID NO: 1140555 - RNA, 19 nt, Homo sapiens
  misc_RNA (1)...(19): siRNA sense strand
ccuuugacuuugccuuuga

SEQ ID NO: 1140556 - RNA, 19 nt, Homo sapiens
  misc_RNA (1)...(19): siRNA sense strand
ccaaggagcgggagaaacg

SEQ ID NO: 1140557 - RNA, 19 nt, Homo sapiens
  misc_RNA (1)...(19): siRNA sense strand
aagcugcccugcucaaguc

SEQ ID NO: 1140558 - RNA, 19 nt, Homo sapiens
  misc_RNA (1)...(19): siRNA sense strand
ggcaagaacgagccaagga

SEQ ID NO: 1140559 - RNA, 19 nt, Homo sapiens
  misc_RNA (1)...(19): siRNA sense strand
gcucagugacaaugacaga

SEQ ID NO: 1140560 - RNA, 19 nt, Homo sapiens
  misc_RNA (1)...(19): siRNA sense strand
gacuagugcucagugacaa

SEQ ID NO: 1140561 - RNA, 19 nt, Homo sapiens
  misc_RNA (1)...(19): siRNA sense strand
agagucaccugaugucaac

SEQ ID NO: 1140562 - RNA, 19 nt, Homo sapiens
  misc_RNA (1)...(19): siRNA sense strand
gaacgcuggacucgaaugg

SEQ ID NO: 1140563 - RNA, 19 nt, Homo sapiens
  misc_RNA (1)...(19): siRNA sense strand
cuucaugacugaguaugug

SEQ ID NO: 1140564 - RNA, 19 nt, Homo sapiens
  misc_RNA (1)...(19): siRNA sense strand
cccagcagcuaucuaaguc

SEQ ID NO: 1140565 - RNA, 19 nt, Homo sapiens
  misc_RNA (1)...(19): siRNA sense strand
gcccuuugacuuugccuuu

SEQ ID NO: 1140566 - RNA, 19 nt, Homo sapiens
  misc_RNA (1)...(19): siRNA sense strand
accaugauccugaugauga

SEQ ID NO: 1140567 - RNA, 19 nt, Homo sapiens
  misc_RNA (1)...(19): siRNA sense strand
ggaacacgugcgcuacuuc

SEQ ID NO: 1140568 - RNA, 19 nt, Homo sapiens
  misc_RNA (1)...(19): siRNA sense strand
acccuuuccuggccaagua

SEQ ID NO: 1140569 - RNA, 19 nt, Homo sapiens
  misc_RNA (1)...(19): siRNA sense strand
ggagcgggagcgaaaggaa

SEQ ID NO: 1140570 - RNA, 19 nt, Homo sapiens
  misc_RNA (1)...(19): siRNA sense strand
ccauuguggcugaaauuga

SEQ ID NO: 1140571 - RNA, 19 nt, Homo sapiens
  misc_RNA (1)...(19): siRNA sense strand
cugcccugcucaagucuuu

SEQ ID NO: 1140572 - RNA, 19 nt, Homo sapiens
  misc_RNA (1)...(19): siRNA sense strand
agauucagccucucucuca

SEQ ID NO: 1140573 - RNA, 19 nt, Homo sapiens
  misc_RNA (1)...(19): siRNA sense strand
cagagucaccugaugucaa

SEQ ID NO: 1140574 - RNA, 19 nt, Homo sapiens
  misc_RNA (1)...(19): siRNA sense strand
gaccuggaggaauucuuaa

SEQ ID NO: 1140575 - RNA, 19 nt, Homo sapiens
  misc_RNA (1)...(19): siRNA sense strand
gcuacuuccuguaccaacu

SEQ ID NO: 1140576 - RNA, 19 nt, Homo sapiens
  misc_RNA (1)...(19): siRNA sense strand
caggauggccaggcagauu

SEQ ID NO: 1140577 - RNA, 19 nt, Homo sapiens
  misc_RNA (1)...(19): siRNA sense strand
uggaggaauucuuaaacca

SEQ ID NO: 1140578 - RNA, 19 nt, Homo sapiens
  misc_RNA (1)...(19): siRNA sense strand
auugaggacuuccaugcaa

SEQ ID NO: 1140579 - RNA, 19 nt, Homo sapiens
  misc_RNA (1)...(19): siRNA sense strand
aguauacacaggcuauuga

SEQ ID NO: 1140580 - RNA, 19 nt, Homo sapiens
  misc_RNA (1)...(19): siRNA sense strand
gacaugggcguggcugaug

SEQ ID NO: 1140581 - RNA, 19 nt, Homo sapiens
  misc_RNA (1)...(19): siRNA sense strand
ccccaggaguuuugccuua

SEQ ID NO: 1140582 - RNA, 19 nt, Homo sapiens
  misc_RNA (1)...(19): siRNA sense strand
aaacuauguacaccagcua

SEQ ID NO: 1140583 - RNA, 19 nt, Homo sapiens
  misc_RNA (1)...(19): siRNA sense strand
uggaacacgugcgcuacuu

SEQ ID NO: 1140584 - RNA, 19 nt, Homo sapiens
  misc_RNA (1)...(19): siRNA sense strand
ggcugcaucuuuggugaga

SEQ ID NO: 1140585 - RNA, 19 nt, Homo sapiens
  misc_RNA (1)...(19): siRNA sense strand
gagccaaggagcgggagaa

SEQ ID NO: 1140586 - RNA, 19 nt, Homo sapiens
  misc_RNA (1)...(19): siRNA sense strand
ccaucucagacaauacuaa

SEQ ID NO: 1140587 - RNA, 19 nt, Homo sapiens
  misc_RNA (1)...(19): siRNA sense strand
ccaugauccugaugaugag

SEQ ID NO: 1140588 - RNA, 19 nt, Homo sapiens
  misc_RNA (1)...(19): siRNA sense strand
gaacaucaguacuucauga

SEQ ID NO: 1140589 - RNA, 19 nt, Homo sapiens
  misc_RNA (1)...(19): siRNA sense strand
gcucaagauuggugacuuu

SEQ ID NO: 1140590 - RNA, 19 nt, Homo sapiens
  misc_RNA (1)...(19): siRNA sense strand
gcuuugaccuggaggaauu

SEQ ID NO: 1140591 - RNA, 19 nt, Homo sapiens
  misc_RNA (1)...(19): siRNA sense strand
gaacugugagcucaagauu

SEQ ID NO: 1140592 - RNA, 19 nt, Homo sapiens
  misc_RNA (1)...(19): siRNA sense strand
aaaccagucuuucgacaug

SEQ ID NO: 1140593 - RNA, 19 nt, Homo sapiens
  misc_RNA (1)...(19): siRNA sense strand
gcacucggcucaggucauc

SEQ ID NO: 1140594 - RNA, 19 nt, Homo sapiens
  misc_RNA (1)...(19): siRNA sense strand
ggugccaucucagacaaua

SEQ ID NO: 1140595 - RNA, 19 nt, Homo sapiens
  misc_RNA (1)...(19): siRNA sense strand
ugaccuggaggaauucuua

SEQ ID NO: 1140596 - RNA, 19 nt, Homo sapiens
  misc_RNA (1)...(19): siRNA sense strand
caagauuggugacuuuggu

SEQ ID NO: 1140597 - RNA, 19 nt, Homo sapiens
  misc_RNA (1)...(19): siRNA sense strand
ugacccagcagcuaucuaa

SEQ ID NO: 1140598 - RNA, 19 nt, Homo sapiens
  misc_RNA (1)...(19): siRNA sense strand
uggcuacgguguuggcuuu

SEQ ID NO: 1140599 - RNA, 19 nt, Homo sapiens
  misc_RNA (1)...(19): siRNA sense strand
gggccuauauccagagcuu

SEQ ID NO: 1140600 - RNA, 19 nt, Homo sapiens
  misc_RNA (1)...(19): siRNA sense strand
caaguaccaugauccugau

SEQ ID NO: 1140601 - RNA, 19 nt, Homo sapiens
  misc_RNA (1)...(19): siRNA sense strand
aaagcgaccugcaccagau

SEQ ID NO: 1140602 - RNA, 19 nt, Homo sapiens
  misc_RNA (1)...(19): siRNA sense strand
ggacuagugcucagugaca

SEQ ID NO: 1140603 - RNA, 19 nt, Homo sapiens
  misc_RNA (1)...(19): siRNA sense strand
ucugugggcugcaucuuug

SEQ ID NO: 1140604 - RNA, 19 nt, Homo sapiens
  misc_RNA (1)...(19): siRNA sense strand
guaccaugauccugaugau

SEQ ID NO: 1140605 - RNA, 19 nt, Homo sapiens
  misc_RNA (1)...(19): siRNA sense strand
uuggaacgcuggacucgaa

SEQ ID NO: 1140606 - RNA, 19 nt, Homo sapiens
  misc_RNA (1)...(19): siRNA sense strand
acugugagcucaagauugg

SEQ ID NO: 1140607 - RNA, 19 nt, Homo sapiens
  misc_RNA (1)...(19): siRNA sense strand
uggcugaaauugaggacuu

SEQ ID NO: 1140608 - RNA, 19 nt, Homo sapiens
  misc_RNA (1)...(19): siRNA sense strand
caccugaugucaaccuugu

SEQ ID NO: 1140609 - RNA, 19 nt, Homo sapiens
  misc_RNA (1)...(19): siRNA sense strand
gaguauacacaggcuauug

SEQ ID NO: 1140610 - RNA, 19 nt, Homo sapiens
  misc_RNA (1)...(19): siRNA sense strand
cauuguggcugaaauugag

SEQ ID NO: 1140611 - RNA, 19 nt, Homo sapiens
  misc_RNA (1)...(19): siRNA sense strand
gcuacgguguuggcuuuga

SEQ ID NO: 1140612 - RNA, 19 nt, Homo sapiens
  misc_RNA (1)...(19): siRNA sense strand
ccuuugacuuugccuuuga

SEQ ID NO: 1140613 - RNA, 19 nt, Homo sapiens
  misc_RNA (1)...(19): siRNA sense strand
ccaaggagcgggagaaacg

SEQ ID NO: 1140614 - RNA, 19 nt, Homo sapiens
  misc_RNA (1)...(19): siRNA sense strand
aagcugcccugcucaaguc

SEQ ID NO: 1140615 - RNA, 19 nt, Homo sapiens
  misc_RNA (1)...(19): siRNA sense strand
ggcaagaacgagccaagga

SEQ ID NO: 1140616 - RNA, 19 nt, Homo sapiens
  misc_RNA (1)...(19): siRNA sense strand
gcucagugacaaugacaga

SEQ ID NO: 1140617 - RNA, 19 nt, Homo sapiens
  misc_RNA (1)...(19): siRNA sense strand
gacuagugcucagugacaa

SEQ ID NO: 1140618 - RNA, 19 nt, Homo sapiens
  misc_RNA (1)...(19): siRNA sense strand
agagucaccugaugucaac

SEQ ID NO: 1140619 - RNA, 19 nt, Homo sapiens
  misc_RNA (1)...(19): siRNA sense strand
gaacgcuggacucgaaugg

SEQ ID NO: 1140620 - RNA, 19 nt, Homo sapiens
  misc_RNA (1)...(19): siRNA sense strand
ggaacacgugcgcuacuuc

SEQ ID NO: 1140621 - RNA, 19 nt, Homo sapiens
  misc_RNA (1)...(19): siRNA sense strand
cccagcagcuaucuaaguc

SEQ ID NO: 1140622 - RNA, 19 nt, Homo sapiens
  misc_RNA (1)...(19): siRNA sense strand
gcccuuugacuuugccuuu

SEQ ID NO: 1140623 - RNA, 19 nt, Homo sapiens
  misc_RNA (1)...(19): siRNA sense strand
accaugauccugaugauga

SEQ ID NO: 1140624 - RNA, 19 nt, Homo sapiens
  misc_RNA (1)...(19): siRNA sense strand
acccuuuccuggccaagua

SEQ ID NO: 1140625 - RNA, 19 nt, Homo sapiens
  misc_RNA (1)...(19): siRNA sense strand
cuucaugacugaguaugug

SEQ ID NO: 1140626 - RNA, 19 nt, Homo sapiens
  misc_RNA (1)...(19): siRNA sense strand
ggagcgggagcgaaaggaa

SEQ ID NO: 1140627 - RNA, 19 nt, Homo sapiens
  misc_RNA (1)...(19): siRNA sense strand
ccauuguggcugaaauuga

SEQ ID NO: 1140628 - RNA, 19 nt, Homo sapiens
  misc_RNA (1)...(19): siRNA sense strand
cugcccugcucaagucuuu

SEQ ID NO: 1140629 - RNA, 19 nt, Homo sapiens
  misc_RNA (1)...(19): siRNA sense strand
agauucagccucucucuca

SEQ ID NO: 1140630 - RNA, 19 nt, Homo sapiens
  misc_RNA (1)...(19): siRNA sense strand
cagagucaccugaugucaa

SEQ ID NO: 1140631 - RNA, 19 nt, Homo sapiens
  misc_RNA (1)...(19): siRNA sense strand
gaccuggaggaauucuuaa

SEQ ID NO: 1140632 - RNA, 19 nt, Homo sapiens
  misc_RNA (1)...(19): siRNA sense strand
gcuacuuccuguaccaacu

SEQ ID NO: 1140633 - RNA, 19 nt, Homo sapiens
  misc_RNA (1)...(19): siRNA sense strand
caggauggccaggcagauu

SEQ ID NO: 1140634 - RNA, 19 nt, Homo sapiens
  misc_RNA (1)...(19): siRNA sense strand
uggaggaauucuuaaacca

SEQ ID NO: 1140635 - RNA, 19 nt, Homo sapiens
  misc_RNA (1)...(19): siRNA sense strand
auugaggacuuccaugcaa

SEQ ID NO: 1140636 - RNA, 19 nt, Homo sapiens
  misc_RNA (1)...(19): siRNA sense strand
aguauacacaggcuauuga

SEQ ID NO: 1140637 - RNA, 19 nt, Homo sapiens
  misc_RNA (1)...(19): siRNA sense strand
gacaugggcguggcugaug

SEQ ID NO: 1140638 - RNA, 19 nt, Homo sapiens
  misc_RNA (1)...(19): siRNA sense strand
ccccaggaguuuugccuua

SEQ ID NO: 1140639 - RNA, 19 nt, Homo sapiens
  misc_RNA (1)...(19): siRNA sense strand
uggaacacgugcgcuacuu

SEQ ID NO: 1140640 - RNA, 19 nt, Homo sapiens
  misc_RNA (1)...(19): siRNA sense strand
aaacuauguacaccagcua

SEQ ID NO: 1140641 - RNA, 19 nt, Homo sapiens
  misc_RNA (1)...(19): siRNA sense strand
ggcugcaucuuuggugaga

SEQ ID NO: 1140642 - RNA, 19 nt, Homo sapiens
  misc_RNA (1)...(19): siRNA sense strand
gagccaaggagcgggagaa

SEQ ID NO: 1140643 - RNA, 19 nt, Homo sapiens
  misc_RNA (1)...(19): siRNA sense strand
ccaucucagacaauacuaa

SEQ ID NO: 1140644 - RNA, 19 nt, Homo sapiens
  misc_RNA (1)...(19): siRNA sense strand
ccaugauccugaugaugag

SEQ ID NO: 1140645 - RNA, 19 nt, Homo sapiens
  misc_RNA (1)...(19): siRNA sense strand
gaacaucaguacuucauga

SEQ ID NO: 1140646 - RNA, 19 nt, Homo sapiens
  misc_RNA (1)...(19): siRNA sense strand
gcucaagauuggugacuuu

SEQ ID NO: 1140647 - RNA, 19 nt, Homo sapiens
  misc_RNA (1)...(19): siRNA sense strand
gcuuugaccuggaggaauu

SEQ ID NO: 1140648 - RNA, 19 nt, Homo sapiens
  misc_RNA (1)...(19): siRNA sense strand
gaacugugagcucaagauu

SEQ ID NO: 1140649 - RNA, 19 nt, Homo sapiens
  misc_RNA (1)...(19): siRNA sense strand
aaaccagucuuucgacaug

SEQ ID NO: 1140650 - RNA, 19 nt, Homo sapiens
  misc_RNA (1)...(19): siRNA sense strand
gcacucggcucaggucauc

SEQ ID NO: 1140651 - RNA, 19 nt, Homo sapiens
  misc_RNA (1)...(19): siRNA sense strand
ggugccaucucagacaaua

SEQ ID NO: 1140652 - RNA, 19 nt, Homo sapiens
  misc_RNA (1)...(19): siRNA sense strand
ugaccuggaggaauucuua

SEQ ID NO: 1140653 - RNA, 19 nt, Homo sapiens
  misc_RNA (1)...(19): siRNA sense strand
caagauuggugacuuuggu

SEQ ID NO: 1140654 - RNA, 19 nt, Homo sapiens
  misc_RNA (1)...(19): siRNA sense strand
ugacccagcagcuaucuaa

SEQ ID NO: 1140655 - RNA, 19 nt, Homo sapiens
  misc_RNA (1)...(19): siRNA sense strand
uggcuacgguguuggcuuu

SEQ ID NO: 1140656 - RNA, 19 nt, Homo sapiens
  misc_RNA (1)...(19): siRNA sense strand
gggccuauauccagagcuu

SEQ ID NO: 1140657 - RNA, 19 nt, Homo sapiens
  misc_RNA (1)...(19): siRNA sense strand
caaguaccaugauccugau

SEQ ID NO: 1140658 - RNA, 19 nt, Homo sapiens
  misc_RNA (1)...(19): siRNA sense strand
ggacuagugcucagugaca

SEQ ID NO: 1140659 - RNA, 19 nt, Homo sapiens
  misc_RNA (1)...(19): siRNA sense strand
aaagcgaccugcaccagau

SEQ ID NO: 1140660 - RNA, 19 nt, Homo sapiens
  misc_RNA (1)...(19): siRNA sense strand
ucugugggcugcaucuuug

SEQ ID NO: 1140661 - RNA, 19 nt, Homo sapiens
  misc_RNA (1)...(19): siRNA sense strand
guaccaugauccugaugau

SEQ ID NO: 1140662 - RNA, 19 nt, Homo sapiens
  misc_RNA (1)...(19): siRNA sense strand
uuggaacgcuggacucgaa

SEQ ID NO: 1140663 - RNA, 19 nt, Homo sapiens
  misc_RNA (1)...(19): siRNA sense strand
acugugagcucaagauugg

SEQ ID NO: 1140664 - RNA, 19 nt, Homo sapiens
  misc_RNA (1)...(19): siRNA sense strand
uggcugaaauugaggacuu

SEQ ID NO: 1140665 - RNA, 19 nt, Homo sapiens
  misc_RNA (1)...(19): siRNA sense strand
caccugaugucaaccuugu

SEQ ID NO: 1140666 - RNA, 19 nt, Homo sapiens
  misc_RNA (1)...(19): siRNA sense strand
gaguauacacaggcuauug

SEQ ID NO: 1140667 - RNA, 19 nt, Homo sapiens
  misc_RNA (1)...(19): siRNA sense strand
cauuguggcugaaauugag

SEQ ID NO: 1140668 - RNA, 19 nt, Homo sapiens
  misc_RNA (1)...(19): siRNA sense strand
gcuacgguguuggcuuuga

SEQ ID NO: 1140669 - RNA, 19 nt, Homo sapiens
  misc_RNA (1)...(19): siRNA sense strand
ccuuugacuuugccuuuga

SEQ ID NO: 1140670 - RNA, 19 nt, Homo sapiens
  misc_RNA (1)...(19): siRNA sense strand
ccaaggagcgggagaaacg

SEQ ID NO: 1140671 - RNA, 19 nt, Homo sapiens
  misc_RNA (1)...(19): siRNA sense strand
aagcugcccugcucaaguc

SEQ ID NO: 1140672 - RNA, 19 nt, Homo sapiens
  misc_RNA (1)...(19): siRNA sense strand
ggcaagaacgagccaagga

SEQ ID NO: 1140673 - RNA, 19 nt, Homo sapiens
  misc_RNA (1)...(19): siRNA sense strand
gcucagugacaaugacaga

SEQ ID NO: 1140674 - RNA, 19 nt, Homo sapiens
  misc_RNA (1)...(19): siRNA sense strand
gacuagugcucagugacaa

SEQ ID NO: 1140675 - RNA, 19 nt, Homo sapiens
  misc_RNA (1)...(19): siRNA sense strand
agagucaccugaugucaac

SEQ ID NO: 1140676 - RNA, 19 nt, Homo sapiens
  misc_RNA (1)...(19): siRNA sense strand
gaacgcuggacucgaaugg

SEQ ID NO: 1140677 - RNA, 19 nt, Homo sapiens
  misc_RNA (1)...(19): siRNA sense strand
cuucaugacugaguaugug

SEQ ID NO: 1140678 - RNA, 19 nt, Homo sapiens
  misc_RNA (1)...(19): siRNA sense strand
cccagcagcuaucuaaguc

SEQ ID NO: 1140679 - RNA, 19 nt, Homo sapiens
  misc_RNA (1)...(19): siRNA sense strand
gcccuuugacuuugccuuu

SEQ ID NO: 1140680 - RNA, 19 nt, Homo sapiens
  misc_RNA (1)...(19): siRNA sense strand
accaugauccugaugauga

SEQ ID NO: 1140681 - RNA, 19 nt, Homo sapiens
  misc_RNA (1)...(19): siRNA sense strand
ggaacacgugcgcuacuuc

SEQ ID NO: 1140682 - RNA, 19 nt, Homo sapiens
  misc_RNA (1)...(19): siRNA sense strand
acccuuuccuggccaagua

SEQ ID NO: 1140683 - RNA, 19 nt, Homo sapiens
  misc_RNA (1)...(19): siRNA sense strand
ggagcgggagcgaaaggaa

SEQ ID NO: 1140684 - RNA, 19 nt, Homo sapiens
  misc_RNA (1)...(19): siRNA sense strand
ccauuguggcugaaauuga

SEQ ID NO: 1140685 - RNA, 19 nt, Homo sapiens
  misc_RNA (1)...(19): siRNA sense strand
cugcccugcucaagucuuu

SEQ ID NO: 1140686 - RNA, 19 nt, Homo sapiens
  misc_RNA (1)...(19): siRNA sense strand
agauucagccucucucuca

SEQ ID NO: 1140687 - RNA, 19 nt, Homo sapiens
  misc_RNA (1)...(19): siRNA sense strand
cagagucaccugaugucaa

SEQ ID NO: 1140688 - RNA, 19 nt, Homo sapiens
  misc_RNA (1)...(19): siRNA sense strand
gaccuggaggaauucuuaa

SEQ ID NO: 1140689 - RNA, 19 nt, Homo sapiens
  misc_RNA (1)...(19): siRNA sense strand
gcuacuuccuguaccaacu

SEQ ID NO: 1140690 - RNA, 19 nt, Homo sapiens
  misc_RNA (1)...(19): siRNA sense strand
caggauggccaggcagauu

SEQ ID NO: 1140691 - RNA, 19 nt, Homo sapiens
  misc_RNA (1)...(19): siRNA sense strand
uggaggaauucuuaaacca

SEQ ID NO: 1140692 - RNA, 19 nt, Homo sapiens
  misc_RNA (1)...(19): siRNA sense strand
auugaggacuuccaugcaa

SEQ ID NO: 1140693 - RNA, 19 nt, Homo sapiens
  misc_RNA (1)...(19): siRNA sense strand
aguauacacaggcuauuga

SEQ ID NO: 1140694 - RNA, 19 nt, Homo sapiens
  misc_RNA (1)...(19): siRNA sense strand
gacaugggcguggcugaug

SEQ ID NO: 1140695 - RNA, 19 nt, Homo sapiens
  misc_RNA (1)...(19): siRNA sense strand
ccccaggaguuuugccuua

SEQ ID NO: 1140696 - RNA, 19 nt, Homo sapiens
  misc_RNA (1)...(19): siRNA sense strand
aaacuauguacaccagcua

SEQ ID NO: 1140697 - RNA, 19 nt, Homo sapiens
  misc_RNA (1)...(19): siRNA sense strand
uggaacacgugcgcuacuu

SEQ ID NO: 1140698 - RNA, 19 nt, Homo sapiens
  misc_RNA (1)...(19): siRNA sense strand
ggcugcaucuuuggugaga

SEQ ID NO: 1140699 - RNA, 19 nt, Homo sapiens
  misc_RNA (1)...(19): siRNA sense strand
gagccaaggagcgggagaa

SEQ ID NO: 1140700 - RNA, 19 nt, Homo sapiens
  misc_RNA (1)...(19): siRNA sense strand
ccaucucagacaauacuaa

SEQ ID NO: 1140701 - RNA, 19 nt, Homo sapiens
  misc_RNA (1)...(19): siRNA sense strand
ccaugauccugaugaugag

SEQ ID NO: 1140702 - RNA, 19 nt, Homo sapiens
  misc_RNA (1)...(19): siRNA sense strand
gaacaucaguacuucauga

SEQ ID NO: 1140703 - RNA, 19 nt, Homo sapiens
  misc_RNA (1)...(19): siRNA sense strand
gcucaagauuggugacuuu

SEQ ID NO: 1140704 - RNA, 19 nt, Homo sapiens
  misc_RNA (1)...(19): siRNA sense strand
gcuuugaccuggaggaauu

SEQ ID NO: 1140705 - RNA, 19 nt, Homo sapiens
  misc_RNA (1)...(19): siRNA sense strand
gaacugugagcucaagauu

SEQ ID NO: 1140706 - RNA, 19 nt, Homo sapiens
  misc_RNA (1)...(19): siRNA sense strand
aaaccagucuuucgacaug

SEQ ID NO: 1140707 - RNA, 19 nt, Homo sapiens
  misc_RNA (1)...(19): siRNA sense strand
gcacucggcucaggucauc

SEQ ID NO: 1140708 - RNA, 19 nt, Homo sapiens
  misc_RNA (1)...(19): siRNA sense strand
ggugccaucucagacaaua

SEQ ID NO: 1140709 - RNA, 19 nt, Homo sapiens
  misc_RNA (1)...(19): siRNA sense strand
ugaccuggaggaauucuua

SEQ ID NO: 1140710 - RNA, 19 nt, Homo sapiens
  misc_RNA (1)...(19): siRNA sense strand
caagauuggugacuuuggu

SEQ ID NO: 1140711 - RNA, 19 nt, Homo sapiens
  misc_RNA (1)...(19): siRNA sense strand
ugacccagcagcuaucuaa

SEQ ID NO: 1140712 - RNA, 19 nt, Homo sapiens
  misc_RNA (1)...(19): siRNA sense strand
uggcuacgguguuggcuuu

SEQ ID NO: 1140713 - RNA, 19 nt, Homo sapiens
  misc_RNA (1)...(19): siRNA sense strand
gggccuauauccagagcuu

SEQ ID NO: 1140714 - RNA, 19 nt, Homo sapiens
  misc_RNA (1)...(19): siRNA sense strand
caaguaccaugauccugau

SEQ ID NO: 1140715 - RNA, 19 nt, Homo sapiens
  misc_RNA (1)...(19): siRNA sense strand
ggacuagugcucagugaca

SEQ ID NO: 1140716 - RNA, 19 nt, Homo sapiens
  misc_RNA (1)...(19): siRNA sense strand
aaagcgaccugcaccagau

SEQ ID NO: 1140717 - RNA, 19 nt, Homo sapiens
  misc_RNA (1)...(19): siRNA sense strand
ucugugggcugcaucuuug

SEQ ID NO: 1140718 - RNA, 19 nt, Homo sapiens
  misc_RNA (1)...(19): siRNA sense strand
guaccaugauccugaugau

SEQ ID NO: 1140719 - RNA, 19 nt, Homo sapiens
  misc_RNA (1)...(19): siRNA sense strand
uuggaacgcuggacucgaa

SEQ ID NO: 1140720 - RNA, 19 nt, Homo sapiens
  misc_RNA (1)...(19): siRNA sense strand
acugugagcucaagauugg

SEQ ID NO: 1140721 - RNA, 19 nt, Homo sapiens
  misc_RNA (1)...(19): siRNA sense strand
uggcugaaauugaggacuu

SEQ ID NO: 1140722 - RNA, 19 nt, Homo sapiens
  misc_RNA (1)...(19): siRNA sense strand
caccugaugucaaccuugu

SEQ ID NO: 1140723 - RNA, 19 nt, Homo sapiens
  misc_RNA (1)...(19): siRNA sense strand
gaguauacacaggcuauug

SEQ ID NO: 1140724 - RNA, 19 nt, Homo sapiens
  misc_RNA (1)...(19): siRNA sense strand
cauuguggcugaaauugag

SEQ ID NO: 1140725 - RNA, 19 nt, Homo sapiens
  misc_RNA (1)...(19): siRNA sense strand
gcuacgguguuggcuuuga

SEQ ID NO: 1140726 - RNA, 19 nt, Homo sapiens
  misc_RNA (1)...(19): siRNA sense strand
ccuuugacuuugccuuuga

SEQ ID NO: 1140727 - RNA, 19 nt, Homo sapiens
  misc_RNA (1)...(19): siRNA sense strand
ccaaggagcgggagaaacg

SEQ ID NO: 1140728 - RNA, 19 nt, Homo sapiens
  misc_RNA (1)...(19): siRNA sense strand
aagcugcccugcucaaguc

SEQ ID NO: 1140729 - RNA, 19 nt, Homo sapiens
  misc_RNA (1)...(19): siRNA sense strand
ggcaagaacgagccaagga

SEQ ID NO: 1140730 - RNA, 19 nt, Homo sapiens
  misc_RNA (1)...(19): siRNA sense strand
gcucagugacaaugacaga

SEQ ID NO: 1140731 - RNA, 19 nt, Homo sapiens
  misc_RNA (1)...(19): siRNA sense strand
gacuagugcucagugacaa

SEQ ID NO: 1140732 - RNA, 19 nt, Homo sapiens
  misc_RNA (1)...(19): siRNA sense strand
agagucaccugaugucaac

SEQ ID NO: 1140733 - RNA, 19 nt, Homo sapiens
  misc_RNA (1)...(19): siRNA sense strand
gaacgcuggacucgaaugg

SEQ ID NO: 1140734 - RNA, 19 nt, Homo sapiens
  misc_RNA (1)...(19): siRNA sense strand
cuucaugacugaguaugug

SEQ ID NO: 1140735 - RNA, 19 nt, Homo sapiens
  misc_RNA (1)...(19): siRNA sense strand
cccagcagcuaucuaaguc

SEQ ID NO: 1140736 - RNA, 19 nt, Homo sapiens
  misc_RNA (1)...(19): siRNA sense strand
gcccuuugacuuugccuuu

SEQ ID NO: 1140737 - RNA, 19 nt, Homo sapiens
  misc_RNA (1)...(19): siRNA sense strand
accaugauccugaugauga

SEQ ID NO: 1140738 - RNA, 19 nt, Homo sapiens
  misc_RNA (1)...(19): siRNA sense strand
ggaacacgugcgcuacuuc

SEQ ID NO: 1140739 - RNA, 19 nt, Homo sapiens
  misc_RNA (1)...(19): siRNA sense strand
acccuuuccuggccaagua

SEQ ID NO: 1140740 - RNA, 19 nt, Homo sapiens
  misc_RNA (1)...(19): siRNA sense strand
ggagcgggagcgaaaggaa

SEQ ID NO: 1140741 - RNA, 19 nt, Homo sapiens
  misc_RNA (1)...(19): siRNA sense strand
ccauuguggcugaaauuga

SEQ ID NO: 1140742 - RNA, 19 nt, Homo sapiens
  misc_RNA (1)...(19): siRNA sense strand
cugcccugcucaagucuuu

SEQ ID NO: 1140743 - RNA, 19 nt, Homo sapiens
  misc_RNA (1)...(19): siRNA sense strand
agauucagccucucucuca

SEQ ID NO: 1140744 - RNA, 19 nt, Homo sapiens
  misc_RNA (1)...(19): siRNA sense strand
cagagucaccugaugucaa

SEQ ID NO: 1140745 - RNA, 19 nt, Homo sapiens
  misc_RNA (1)...(19): siRNA sense strand
gaccuggaggaauucuuaa

SEQ ID NO: 1140746 - RNA, 19 nt, Homo sapiens
  misc_RNA (1)...(19): siRNA sense strand
gcuacuuccuguaccaacu

SEQ ID NO: 1140747 - RNA, 19 nt, Homo sapiens
  misc_RNA (1)...(19): siRNA sense strand
caggauggccaggcagauu

SEQ ID NO: 1140748 - RNA, 19 nt, Homo sapiens
  misc_RNA (1)...(19): siRNA sense strand
uggaggaauucuuaaacca

SEQ ID NO: 1140749 - RNA, 19 nt, Homo sapiens
  misc_RNA (1)...(19): siRNA sense strand
auugaggacuuccaugcaa

SEQ ID NO: 1140750 - RNA, 19 nt, Homo sapiens
  misc_RNA (1)...(19): siRNA sense strand
aguauacacaggcuauuga

SEQ ID NO: 1140751 - RNA, 19 nt, Homo sapiens
  misc_RNA (1)...(19): siRNA sense strand
gacaugggcguggcugaug

SEQ ID NO: 1140752 - RNA, 19 nt, Homo sapiens
  misc_RNA (1)...(19): siRNA sense strand
ccccaggaguuuugccuua

SEQ ID NO: 1140753 - RNA, 19 nt, Homo sapiens
  misc_RNA (1)...(19): siRNA sense strand
aaacuauguacaccagcua

SEQ ID NO: 1140754 - RNA, 19 nt, Homo sapiens
  misc_RNA (1)...(19): siRNA sense strand
uggaacacgugcgcuacuu

SEQ ID NO: 1140755 - RNA, 19 nt, Homo sapiens
  misc_RNA (1)...(19): siRNA sense strand
ggcugcaucuuuggugaga

SEQ ID NO: 1140756 - RNA, 19 nt, Homo sapiens
  misc_RNA (1)...(19): siRNA sense strand
gagccaaggagcgggagaa

SEQ ID NO: 1140757 - RNA, 19 nt, Homo sapiens
  misc_RNA (1)...(19): siRNA sense strand
ccaucucagacaauacuaa

SEQ ID NO: 1140758 - RNA, 19 nt, Homo sapiens
  misc_RNA (1)...(19): siRNA sense strand
ccaugauccugaugaugag

SEQ ID NO: 1140759 - RNA, 19 nt, Homo sapiens
  misc_RNA (1)...(19): siRNA sense strand
uaacauagcucgagaggua

SEQ ID NO: 1140760 - RNA, 19 nt, Homo sapiens
  misc_RNA (1)...(19): siRNA sense strand
gaacaccuuugcagaauaa

SEQ ID NO: 1140761 - RNA, 19 nt, Homo sapiens
  misc_RNA (1)...(19): siRNA sense strand
gaggaaauguuacaaauga

SEQ ID NO: 1140762 - RNA, 19 nt, Homo sapiens
  misc_RNA (1)...(19): siRNA sense strand
ugaugaagcucacagaaua

SEQ ID NO: 1140763 - RNA, 19 nt, Homo sapiens
  misc_RNA (1)...(19): siRNA sense strand
gaagagaugacauugauaa

SEQ ID NO: 1140764 - RNA, 19 nt, Homo sapiens
  misc_RNA (1)...(19): siRNA sense strand
ggaaagacuucaugcaguu

SEQ ID NO: 1140765 - RNA, 19 nt, Homo sapiens
  misc_RNA (1)...(19): siRNA sense strand
ggaaauggacccagaauau

SEQ ID NO: 1140766 - RNA, 19 nt, Homo sapiens
  misc_RNA (1)...(19): siRNA sense strand
gcacagaaaucuccaacau

SEQ ID NO: 1140767 - RNA, 19 nt, Homo sapiens
  misc_RNA (1)...(19): siRNA sense strand
gaagaaaccaguacgugua

SEQ ID NO: 1140768 - RNA, 19 nt, Homo sapiens
  misc_RNA (1)...(19): siRNA sense strand
gggagaagauuauagagaa

SEQ ID NO: 1140769 - RNA, 19 nt, Homo sapiens
  misc_RNA (1)...(19): siRNA sense strand
gaacuauacugaggaagaa

SEQ ID NO: 1140770 - RNA, 19 nt, Homo sapiens
  misc_RNA (1)...(19): siRNA sense strand
guaacacucugauuucauu

SEQ ID NO: 1140771 - RNA, 19 nt, Homo sapiens
  misc_RNA (1)...(19): siRNA sense strand
ggacauugaacaaaguuua

SEQ ID NO: 1140772 - RNA, 19 nt, Homo sapiens
  misc_RNA (1)...(19): siRNA sense strand
gcacagagcaagaagaaga

SEQ ID NO: 1140773 - RNA, 19 nt, Homo sapiens
  misc_RNA (1)...(19): siRNA sense strand
ggaacaccuuugcagaaua

SEQ ID NO: 1140774 - RNA, 19 nt, Homo sapiens
  misc_RNA (1)...(19): siRNA sense strand
agaagaagaugaagagcua

SEQ ID NO: 1140775 - RNA, 19 nt, Homo sapiens
  misc_RNA (1)...(19): siRNA sense strand
ugaauugguugaucucuuu

SEQ ID NO: 1140776 - RNA, 19 nt, Homo sapiens
  misc_RNA (1)...(19): siRNA sense strand
caacgagaaugguauacaa

SEQ ID NO: 1140777 - RNA, 19 nt, Homo sapiens
  misc_RNA (1)...(19): siRNA sense strand
gaagagaggauuguagaaa

SEQ ID NO: 1140778 - RNA, 19 nt, Homo sapiens
  misc_RNA (1)...(19): siRNA sense strand
gagaugacauugauaacau

SEQ ID NO: 1140779 - RNA, 19 nt, Homo sapiens
  misc_RNA (1)...(19): siRNA sense strand
ggcgauaccuggucauuga

SEQ ID NO: 1140780 - RNA, 19 nt, Homo sapiens
  misc_RNA (1)...(19): siRNA sense strand
ggagaagauuauagagaaa

SEQ ID NO: 1140781 - RNA, 19 nt, Homo sapiens
  misc_RNA (1)...(19): siRNA sense strand
gcagaugacuuugauucuu

SEQ ID NO: 1140782 - RNA, 19 nt, Homo sapiens
  misc_RNA (1)...(19): siRNA sense strand
gaaccugguccaccuuaua

SEQ ID NO: 1140783 - RNA, 19 nt, Homo sapiens
  misc_RNA (1)...(19): siRNA sense strand
cuaaagcgccuaaaucuga

SEQ ID NO: 1140784 - RNA, 19 nt, Homo sapiens
  misc_RNA (1)...(19): siRNA sense strand
gaagaaacgggcaacuaaa

SEQ ID NO: 1140785 - RNA, 19 nt, Homo sapiens
  misc_RNA (1)...(19): siRNA sense strand
aaagaagacugcagagaug

SEQ ID NO: 1140786 - RNA, 19 nt, Homo sapiens
  misc_RNA (1)...(19): siRNA sense strand
gagacucgauucaauuguu

SEQ ID NO: 1140787 - RNA, 19 nt, Homo sapiens
  misc_RNA (1)...(19): siRNA sense strand
ggacugaauugguugaucu

SEQ ID NO: 1140788 - RNA, 19 nt, Homo sapiens
  misc_RNA (1)...(19): siRNA sense strand
caacgaaggaucaguauca

SEQ ID NO: 1140789 - RNA, 19 nt, Homo sapiens
  misc_RNA (1)...(19): siRNA sense strand
gaugaagacauuacaacua

SEQ ID NO: 1140790 - RNA, 19 nt, Homo sapiens
  misc_RNA (1)...(19): siRNA sense strand
guugacagaugaagacauu

SEQ ID NO: 1140791 - RNA, 19 nt, Homo sapiens
  misc_RNA (1)...(19): siRNA sense strand
caacaaggaagacucauug

SEQ ID NO: 1140792 - RNA, 19 nt, Homo sapiens
  misc_RNA (1)...(19): siRNA sense strand
uuacacaacuggaugaaug

SEQ ID NO: 1140793 - RNA, 19 nt, Homo sapiens
  misc_RNA (1)...(19): siRNA sense strand
ugacuuugauucuugguuu

SEQ ID NO: 1140794 - RNA, 19 nt, Homo sapiens
  misc_RNA (1)...(19): siRNA sense strand
ggaaagagagagagcagaa

SEQ ID NO: 1140795 - RNA, 19 nt, Homo sapiens
  misc_RNA (1)...(19): siRNA sense strand
agaagagucugccaccuaa

SEQ ID NO: 1140796 - RNA, 19 nt, Homo sapiens
  misc_RNA (1)...(19): siRNA sense strand
gaagagcuacugucugaga

SEQ ID NO: 1140797 - RNA, 19 nt, Homo sapiens
  misc_RNA (1)...(19): siRNA sense strand
gauugaaccuccuaaacga

SEQ ID NO: 1140798 - RNA, 19 nt, Homo sapiens
  misc_RNA (1)...(19): siRNA sense strand
gagagugaguugacagaug

SEQ ID NO: 1140799 - RNA, 19 nt, Homo sapiens
  misc_RNA (1)...(19): siRNA sense strand
gagaagagucugccaccua

SEQ ID NO: 1140800 - RNA, 19 nt, Homo sapiens
  misc_RNA (1)...(19): siRNA sense strand
cagaugacuuugauucuug

SEQ ID NO: 1140801 - RNA, 19 nt, Homo sapiens
  misc_RNA (1)...(19): siRNA sense strand
gaaauggacccagaauaug

SEQ ID NO: 1140802 - RNA, 19 nt, Homo sapiens
  misc_RNA (1)...(19): siRNA sense strand
gaagcaagaauucaacgaa

SEQ ID NO: 1140803 - RNA, 19 nt, Homo sapiens
  misc_RNA (1)...(19): siRNA sense strand
ggaguauucagcuguauuu

SEQ ID NO: 1140804 - RNA, 19 nt, Homo sapiens
  misc_RNA (1)...(19): siRNA sense strand
agaaagagcugagauaaaa

SEQ ID NO: 1140805 - RNA, 19 nt, Homo sapiens
  misc_RNA (1)...(19): siRNA sense strand
guacguguauuccgucuca

SEQ ID NO: 1140806 - RNA, 19 nt, Homo sapiens
  misc_RNA (1)...(19): siRNA sense strand
ggaauuaaccuggcaagug

SEQ ID NO: 1140807 - RNA, 19 nt, Homo sapiens
  misc_RNA (1)...(19): siRNA sense strand
acagaaaucuccaacaucu

SEQ ID NO: 1140808 - RNA, 19 nt, Homo sapiens
  misc_RNA (1)...(19): siRNA sense strand
ugagaaauauggaagagau

SEQ ID NO: 1140809 - RNA, 19 nt, Homo sapiens
  misc_RNA (1)...(19): siRNA sense strand
guagaaagagcugagauaa

SEQ ID NO: 1140810 - RNA, 19 nt, Homo sapiens
  misc_RNA (1)...(19): siRNA sense strand
agaaagagaggauaaauuc

SEQ ID NO: 1140811 - RNA, 19 nt, Homo sapiens
  misc_RNA (1)...(19): siRNA sense strand
gaagaaagagaggauaaau

SEQ ID NO: 1140812 - RNA, 19 nt, Homo sapiens
  misc_RNA (1)...(19): siRNA sense strand
acaacuggaugaaugaauu

SEQ ID NO: 1140813 - RNA, 19 nt, Homo sapiens
  misc_RNA (1)...(19): siRNA sense strand
gaagacauuacaacuauuc

SEQ ID NO: 1140814 - RNA, 19 nt, Homo sapiens
  misc_RNA (1)...(19): siRNA sense strand
agacucgauucaauuguua

SEQ ID NO: 1140815 - RNA, 19 nt, Homo sapiens
  misc_RNA (1)...(19): siRNA sense strand
gaagcucacagaauaaaga

SEQ ID NO: 1140816 - RNA, 19 nt, Homo sapiens
  misc_RNA (1)...(19): siRNA sense strand
ggcaagugcugaugugguu

SEQ ID NO: 1140817 - RNA, 19 nt, Homo sapiens
  misc_RNA (1)...(19): siRNA sense strand
ggaacguugcaaugaauua

SEQ ID NO: 1140818 - RNA, 19 nt, Homo sapiens
  misc_RNA (1)...(19): siRNA sense strand
agagugaguugacagauga

SEQ ID NO: 1140819 - RNA, 19 nt, Homo sapiens
  misc_RNA (1)...(19): siRNA sense strand
gcaagaagaagaugaagag

SEQ ID NO: 1140820 - RNA, 19 nt, Homo sapiens
  misc_RNA (1)...(19): siRNA sense strand
cugaggaggucauggagua

SEQ ID NO: 1140821 - RNA, 19 nt, Homo sapiens
  misc_RNA (1)...(19): siRNA sense strand
agaagaaacgggcaacuaa

SEQ ID NO: 1140822 - RNA, 19 nt, Homo sapiens
  misc_RNA (1)...(19): siRNA sense strand
augaagagcuacugucuga

SEQ ID NO: 1140823 - RNA, 19 nt, Homo sapiens
  misc_RNA (1)...(19): siRNA sense strand
gcaaaggaaagaacuauac

SEQ ID NO: 1140824 - RNA, 19 nt, Homo sapiens
  misc_RNA (1)...(19): siRNA sense strand
cgaaggaucaguaucaaga

SEQ ID NO: 1140825 - RNA, 19 nt, Homo sapiens
  misc_RNA (1)...(19): siRNA sense strand
uggaagagaugacauugau

SEQ ID NO: 1140826 - RNA, 19 nt, Homo sapiens
  misc_RNA (1)...(19): siRNA sense strand
uuuauugccugaugucuuu

SEQ ID NO: 1140827 - RNA, 19 nt, Homo sapiens
  misc_RNA (1)...(19): siRNA sense strand
gauacaaggcuccauuuca

SEQ ID NO: 1140828 - RNA, 19 nt, Homo sapiens
  misc_RNA (1)...(19): siRNA sense strand
gcuggagacuaccgccaua

SEQ ID NO: 1140829 - RNA, 19 nt, Homo sapiens
  misc_RNA (1)...(19): siRNA sense strand
aaagaacuauacugaggaa

SEQ ID NO: 1140830 - RNA, 19 nt, Homo sapiens
  misc_RNA (1)...(19): siRNA sense strand
gcaaugaauuacaggacau

SEQ ID NO: 1140831 - RNA, 19 nt, Homo sapiens
  misc_RNA (1)...(19): siRNA sense strand
cccagaauaugaagagaaa

SEQ ID NO: 1140832 - RNA, 19 nt, Homo sapiens
  misc_RNA (1)...(19): siRNA sense strand
cgaaaguguuguaaucauc

SEQ ID NO: 1140833 - RNA, 19 nt, Homo sapiens
  misc_RNA (1)...(19): siRNA sense strand
agaauaaccugcaugaacu

SEQ ID NO: 1140834 - RNA, 19 nt, Homo sapiens
  misc_RNA (1)...(19): siRNA sense strand
acuaaccgcuugcuccuaa

SEQ ID NO: 1140835 - RNA, 19 nt, Homo sapiens
  misc_RNA (1)...(19): siRNA sense strand
caucuccacugaacaugaa

SEQ ID NO: 1140836 - RNA, 19 nt, Homo sapiens
  misc_RNA (1)...(19): siRNA sense strand
agauuugacugguuuauca

SEQ ID NO: 1140837 - RNA, 19 nt, Homo sapiens
  misc_RNA (1)...(19): siRNA sense strand
gaaaccaguacguguauuc

SEQ ID NO: 1140838 - RNA, 19 nt, Homo sapiens
  misc_RNA (1)...(19): siRNA sense strand
gagaagggcgagaagaaga

SEQ ID NO: 1140839 - RNA, 19 nt, Homo sapiens
  misc_RNA (1)...(19): siRNA sense strand
gcaaauucaucuuuaugcu

SEQ ID NO: 1140840 - RNA, 19 nt, Homo sapiens
  misc_RNA (1)...(19): siRNA sense strand
gaugaagcucacagaauaa

SEQ ID NO: 1140841 - RNA, 19 nt, Homo sapiens
  misc_RNA (1)...(19): siRNA sense strand
gaaauugaggaaagagaga

SEQ ID NO: 1140842 - RNA, 19 nt, Homo sapiens
  misc_RNA (1)...(19): siRNA sense strand
guuuagauuugacugguuu

SEQ ID NO: 1140843 - RNA, 19 nt, Homo sapiens
  misc_RNA (1)...(19): siRNA sense strand
caagauacaaggcuccauu

SEQ ID NO: 1140844 - RNA, 19 nt, Homo sapiens
  misc_RNA (1)...(19): siRNA sense strand
ucacacaggguuucacaaa

SEQ ID NO: 1140845 - RNA, 19 nt, Homo sapiens
  misc_RNA (1)...(19): siRNA sense strand
ggauaaauuccuagaagug

SEQ ID NO: 1140846 - RNA, 19 nt, Homo sapiens
  misc_RNA (1)...(19): siRNA sense strand
gcucacagaauaaagaaug

SEQ ID NO: 1140847 - RNA, 19 nt, Homo sapiens
  misc_RNA (1)...(19): siRNA sense strand
auacaaggcuccauuucau

SEQ ID NO: 1140848 - RNA, 19 nt, Homo sapiens
  misc_RNA (1)...(19): siRNA sense strand
ggaagagaugacauugaua

SEQ ID NO: 1140849 - RNA, 19 nt, Homo sapiens
  misc_RNA (1)...(19): siRNA sense strand
aaacuggacuaaacgagau

SEQ ID NO: 1140850 - RNA, 19 nt, Homo sapiens
  misc_RNA (1)...(19): siRNA sense strand
aaagauugauggagcugaa

SEQ ID NO: 1140851 - RNA, 19 nt, Homo sapiens
  misc_RNA (1)...(19): siRNA sense strand
uaaagcgccuaaaucugaa

SEQ ID NO: 1140852 - RNA, 19 nt, Homo sapiens
  misc_RNA (1)...(19): siRNA sense strand
agagaggauuguagaaaga

SEQ ID NO: 1140853 - RNA, 19 nt, Homo sapiens
  misc_RNA (1)...(19): siRNA sense strand
gaaagagagagagcagaaa

SEQ ID NO: 1140854 - RNA, 19 nt, Homo sapiens
  misc_RNA (1)...(19): siRNA sense strand
gaauuaagacaguguguac

SEQ ID NO: 1140855 - RNA, 19 nt, Homo sapiens
  misc_RNA (1)...(19): siRNA sense strand
gcaagaauucaacgaagga

SEQ ID NO: 1140856 - RNA, 19 nt, Homo sapiens
  misc_RNA (1)...(19): siRNA sense strand
ugauggagcugaaccucuu

SEQ ID NO: 1140857 - RNA, 19 nt, Homo sapiens
  misc_RNA (1)...(19): siRNA sense strand
cgcaguggaugccuacuuu

SEQ ID NO: 1140858 - RNA, 19 nt, Homo sapiens
  misc_RNA (1)...(19): siRNA sense strand
cauuacaacuauucuggaa

SEQ ID NO: 1140859 - RNA, 19 nt, Homo sapiens
  misc_RNA (1)...(19): siRNA sense strand
uaacauagcucgagaggua

SEQ ID NO: 1140860 - RNA, 19 nt, Homo sapiens
  misc_RNA (1)...(19): siRNA sense strand
gaacaccuuugcagaauaa

SEQ ID NO: 1140861 - RNA, 19 nt, Homo sapiens
  misc_RNA (1)...(19): siRNA sense strand
gaggaaauguuacaaauga

SEQ ID NO: 1140862 - RNA, 19 nt, Homo sapiens
  misc_RNA (1)...(19): siRNA sense strand
ugaugaagcucacagaaua

SEQ ID NO: 1140863 - RNA, 19 nt, Homo sapiens
  misc_RNA (1)...(19): siRNA sense strand
gaagagaugacauugauaa

SEQ ID NO: 1140864 - RNA, 19 nt, Homo sapiens
  misc_RNA (1)...(19): siRNA sense strand
ggaaagacuucaugcaguu

SEQ ID NO: 1140865 - RNA, 19 nt, Homo sapiens
  misc_RNA (1)...(19): siRNA sense strand
ggaaauggacccagaauau

SEQ ID NO: 1140866 - RNA, 19 nt, Homo sapiens
  misc_RNA (1)...(19): siRNA sense strand
gcacagaaaucuccaacau

SEQ ID NO: 1140867 - RNA, 19 nt, Homo sapiens
  misc_RNA (1)...(19): siRNA sense strand
gaagaaaccaguacgugua

SEQ ID NO: 1140868 - RNA, 19 nt, Homo sapiens
  misc_RNA (1)...(19): siRNA sense strand
gggagaagauuauagagaa

SEQ ID NO: 1140869 - RNA, 19 nt, Homo sapiens
  misc_RNA (1)...(19): siRNA sense strand
gaacuauacugaggaagaa

SEQ ID NO: 1140870 - RNA, 19 nt, Homo sapiens
  misc_RNA (1)...(19): siRNA sense strand
guaacacucugauuucauu

SEQ ID NO: 1140871 - RNA, 19 nt, Homo sapiens
  misc_RNA (1)...(19): siRNA sense strand
ggacauugaacaaaguuua

SEQ ID NO: 1140872 - RNA, 19 nt, Homo sapiens
  misc_RNA (1)...(19): siRNA sense strand
gcacagagcaagaagaaga

SEQ ID NO: 1140873 - RNA, 19 nt, Homo sapiens
  misc_RNA (1)...(19): siRNA sense strand
ggaacaccuuugcagaaua

SEQ ID NO: 1140874 - RNA, 19 nt, Homo sapiens
  misc_RNA (1)...(19): siRNA sense strand
agaagaagaugaagagcua

SEQ ID NO: 1140875 - RNA, 19 nt, Homo sapiens
  misc_RNA (1)...(19): siRNA sense strand
ugaauugguugaucucuuu

SEQ ID NO: 1140876 - RNA, 19 nt, Homo sapiens
  misc_RNA (1)...(19): siRNA sense strand
caacgagaaugguauacaa

SEQ ID NO: 1140877 - RNA, 19 nt, Homo sapiens
  misc_RNA (1)...(19): siRNA sense strand
gaagagaggauuguagaaa

SEQ ID NO: 1140878 - RNA, 19 nt, Homo sapiens
  misc_RNA (1)...(19): siRNA sense strand
gagaugacauugauaacau

SEQ ID NO: 1140879 - RNA, 19 nt, Homo sapiens
  misc_RNA (1)...(19): siRNA sense strand
ggcgauaccuggucauuga

SEQ ID NO: 1140880 - RNA, 19 nt, Homo sapiens
  misc_RNA (1)...(19): siRNA sense strand
ggagaagauuauagagaaa

SEQ ID NO: 1140881 - RNA, 19 nt, Homo sapiens
  misc_RNA (1)...(19): siRNA sense strand
gcagaugacuuugauucuu

SEQ ID NO: 1140882 - RNA, 19 nt, Homo sapiens
  misc_RNA (1)...(19): siRNA sense strand
gaaccugguccaccuuaua

SEQ ID NO: 1140883 - RNA, 19 nt, Homo sapiens
  misc_RNA (1)...(19): siRNA sense strand
cuaaagcgccuaaaucuga

SEQ ID NO: 1140884 - RNA, 19 nt, Homo sapiens
  misc_RNA (1)...(19): siRNA sense strand
gaagaaacgggcaacuaaa

SEQ ID NO: 1140885 - RNA, 19 nt, Homo sapiens
  misc_RNA (1)...(19): siRNA sense strand
aaagaagacugcagagaug

SEQ ID NO: 1140886 - RNA, 19 nt, Homo sapiens
  misc_RNA (1)...(19): siRNA sense strand
gagacucgauucaauuguu

SEQ ID NO: 1140887 - RNA, 19 nt, Homo sapiens
  misc_RNA (1)...(19): siRNA sense strand
ggacugaauugguugaucu

SEQ ID NO: 1140888 - RNA, 19 nt, Homo sapiens
  misc_RNA (1)...(19): siRNA sense strand
caacgaaggaucaguauca

SEQ ID NO: 1140889 - RNA, 19 nt, Homo sapiens
  misc_RNA (1)...(19): siRNA sense strand
gaugaagacauuacaacua

SEQ ID NO: 1140890 - RNA, 19 nt, Homo sapiens
  misc_RNA (1)...(19): siRNA sense strand
guugacagaugaagacauu

SEQ ID NO: 1140891 - RNA, 19 nt, Homo sapiens
  misc_RNA (1)...(19): siRNA sense strand
caacaaggaagacucauug

SEQ ID NO: 1140892 - RNA, 19 nt, Homo sapiens
  misc_RNA (1)...(19): siRNA sense strand
uuacacaacuggaugaaug

SEQ ID NO: 1140893 - RNA, 19 nt, Homo sapiens
  misc_RNA (1)...(19): siRNA sense strand
ugacuuugauucuugguuu

SEQ ID NO: 1140894 - RNA, 19 nt, Homo sapiens
  misc_RNA (1)...(19): siRNA sense strand
ggaaagagagagagcagaa

SEQ ID NO: 1140895 - RNA, 19 nt, Homo sapiens
  misc_RNA (1)...(19): siRNA sense strand
agaagagucugccaccuaa

SEQ ID NO: 1140896 - RNA, 19 nt, Homo sapiens
  misc_RNA (1)...(19): siRNA sense strand
gaagagcuacugucugaga

SEQ ID NO: 1140897 - RNA, 19 nt, Homo sapiens
  misc_RNA (1)...(19): siRNA sense strand
gauugaaccuccuaaacga

SEQ ID NO: 1140898 - RNA, 19 nt, Homo sapiens
  misc_RNA (1)...(19): siRNA sense strand
gagagugaguugacagaug

SEQ ID NO: 1140899 - RNA, 19 nt, Homo sapiens
  misc_RNA (1)...(19): siRNA sense strand
gagaagagucugccaccua

SEQ ID NO: 1140900 - RNA, 19 nt, Homo sapiens
  misc_RNA (1)...(19): siRNA sense strand
cagaugacuuugauucuug

SEQ ID NO: 1140901 - RNA, 19 nt, Homo sapiens
  misc_RNA (1)...(19): siRNA sense strand
gaaauggacccagaauaug

SEQ ID NO: 1140902 - RNA, 19 nt, Homo sapiens
  misc_RNA (1)...(19): siRNA sense strand
gaagcaagaauucaacgaa

SEQ ID NO: 1140903 - RNA, 19 nt, Homo sapiens
  misc_RNA (1)...(19): siRNA sense strand
ggaguauucagcuguauuu

SEQ ID NO: 1140904 - RNA, 19 nt, Homo sapiens
  misc_RNA (1)...(19): siRNA sense strand
agaaagagcugagauaaaa

SEQ ID NO: 1140905 - RNA, 19 nt, Homo sapiens
  misc_RNA (1)...(19): siRNA sense strand
guacguguauuccgucuca

SEQ ID NO: 1140906 - RNA, 19 nt, Homo sapiens
  misc_RNA (1)...(19): siRNA sense strand
ggaauuaaccuggcaagug

SEQ ID NO: 1140907 - RNA, 19 nt, Homo sapiens
  misc_RNA (1)...(19): siRNA sense strand
acagaaaucuccaacaucu

SEQ ID NO: 1140908 - RNA, 19 nt, Homo sapiens
  misc_RNA (1)...(19): siRNA sense strand
ugagaaauauggaagagau

SEQ ID NO: 1140909 - RNA, 19 nt, Homo sapiens
  misc_RNA (1)...(19): siRNA sense strand
guagaaagagcugagauaa

SEQ ID NO: 1140910 - RNA, 19 nt, Homo sapiens
  misc_RNA (1)...(19): siRNA sense strand
agaaagagaggauaaauuc

SEQ ID NO: 1140911 - RNA, 19 nt, Homo sapiens
  misc_RNA (1)...(19): siRNA sense strand
gaagaaagagaggauaaau

SEQ ID NO: 1140912 - RNA, 19 nt, Homo sapiens
  misc_RNA (1)...(19): siRNA sense strand
acaacuggaugaaugaauu

SEQ ID NO: 1140913 - RNA, 19 nt, Homo sapiens
  misc_RNA (1)...(19): siRNA sense strand
gaagacauuacaacuauuc

SEQ ID NO: 1140914 - RNA, 19 nt, Homo sapiens
  misc_RNA (1)...(19): siRNA sense strand
agacucgauucaauuguua

SEQ ID NO: 1140915 - RNA, 19 nt, Homo sapiens
  misc_RNA (1)...(19): siRNA sense strand
gaagcucacagaauaaaga

SEQ ID NO: 1140916 - RNA, 19 nt, Homo sapiens
  misc_RNA (1)...(19): siRNA sense strand
ggcaagugcugaugugguu

SEQ ID NO: 1140917 - RNA, 19 nt, Homo sapiens
  misc_RNA (1)...(19): siRNA sense strand
ggaacguugcaaugaauua

SEQ ID NO: 1140918 - RNA, 19 nt, Homo sapiens
  misc_RNA (1)...(19): siRNA sense strand
agagugaguugacagauga

SEQ ID NO: 1140919 - RNA, 19 nt, Homo sapiens
  misc_RNA (1)...(19): siRNA sense strand
gcaagaagaagaugaagag

SEQ ID NO: 1140920 - RNA, 19 nt, Homo sapiens
  misc_RNA (1)...(19): siRNA sense strand
cugaggaggucauggagua

SEQ ID NO: 1140921 - RNA, 19 nt, Homo sapiens
  misc_RNA (1)...(19): siRNA sense strand
agaagaaacgggcaacuaa

SEQ ID NO: 1140922 - RNA, 19 nt, Homo sapiens
  misc_RNA (1)...(19): siRNA sense strand
augaagagcuacugucuga

SEQ ID NO: 1140923 - RNA, 19 nt, Homo sapiens
  misc_RNA (1)...(19): siRNA sense strand
gcaaaggaaagaacuauac

SEQ ID NO: 1140924 - RNA, 19 nt, Homo sapiens
  misc_RNA (1)...(19): siRNA sense strand
cgaaggaucaguaucaaga

SEQ ID NO: 1140925 - RNA, 19 nt, Homo sapiens
  misc_RNA (1)...(19): siRNA sense strand
uggaagagaugacauugau

SEQ ID NO: 1140926 - RNA, 19 nt, Homo sapiens
  misc_RNA (1)...(19): siRNA sense strand
uuuauugccugaugucuuu

SEQ ID NO: 1140927 - RNA, 19 nt, Homo sapiens
  misc_RNA (1)...(19): siRNA sense strand
gauacaaggcuccauuuca

SEQ ID NO: 1140928 - RNA, 19 nt, Homo sapiens
  misc_RNA (1)...(19): siRNA sense strand
gcuggagacuaccgccaua

SEQ ID NO: 1140929 - RNA, 19 nt, Homo sapiens
  misc_RNA (1)...(19): siRNA sense strand
aaagaacuauacugaggaa

SEQ ID NO: 1140930 - RNA, 19 nt, Homo sapiens
  misc_RNA (1)...(19): siRNA sense strand
gcaaugaauuacaggacau

SEQ ID NO: 1140931 - RNA, 19 nt, Homo sapiens
  misc_RNA (1)...(19): siRNA sense strand
cccagaauaugaagagaaa

SEQ ID NO: 1140932 - RNA, 19 nt, Homo sapiens
  misc_RNA (1)...(19): siRNA sense strand
cgaaaguguuguaaucauc

SEQ ID NO: 1140933 - RNA, 19 nt, Homo sapiens
  misc_RNA (1)...(19): siRNA sense strand
agaauaaccugcaugaacu

SEQ ID NO: 1140934 - RNA, 19 nt, Homo sapiens
  misc_RNA (1)...(19): siRNA sense strand
acuaaccgcuugcuccuaa

SEQ ID NO: 1140935 - RNA, 19 nt, Homo sapiens
  misc_RNA (1)...(19): siRNA sense strand
caucuccacugaacaugaa

SEQ ID NO: 1140936 - RNA, 19 nt, Homo sapiens
  misc_RNA (1)...(19): siRNA sense strand
agauuugacugguuuauca

SEQ ID NO: 1140937 - RNA, 19 nt, Homo sapiens
  misc_RNA (1)...(19): siRNA sense strand
gaaaccaguacguguauuc

SEQ ID NO: 1140938 - RNA, 19 nt, Homo sapiens
  misc_RNA (1)...(19): siRNA sense strand
gagaagggcgagaagaaga

SEQ ID NO: 1140939 - RNA, 19 nt, Homo sapiens
  misc_RNA (1)...(19): siRNA sense strand
gcaaauucaucuuuaugcu

SEQ ID NO: 1140940 - RNA, 19 nt, Homo sapiens
  misc_RNA (1)...(19): siRNA sense strand
gaugaagcucacagaauaa

SEQ ID NO: 1140941 - RNA, 19 nt, Homo sapiens
  misc_RNA (1)...(19): siRNA sense strand
gaaauugaggaaagagaga

SEQ ID NO: 1140942 - RNA, 19 nt, Homo sapiens
  misc_RNA (1)...(19): siRNA sense strand
guuuagauuugacugguuu

SEQ ID NO: 1140943 - RNA, 19 nt, Homo sapiens
  misc_RNA (1)...(19): siRNA sense strand
caagauacaaggcuccauu

SEQ ID NO: 1140944 - RNA, 19 nt, Homo sapiens
  misc_RNA (1)...(19): siRNA sense strand
ucacacaggguuucacaaa

SEQ ID NO: 1140945 - RNA, 19 nt, Homo sapiens
  misc_RNA (1)...(19): siRNA sense strand
ggauaaauuccuagaagug

SEQ ID NO: 1140946 - RNA, 19 nt, Homo sapiens
  misc_RNA (1)...(19): siRNA sense strand
gcucacagaauaaagaaug

SEQ ID NO: 1140947 - RNA, 19 nt, Homo sapiens
  misc_RNA (1)...(19): siRNA sense strand
auacaaggcuccauuucau

SEQ ID NO: 1140948 - RNA, 19 nt, Homo sapiens
  misc_RNA (1)...(19): siRNA sense strand
ggaagagaugacauugaua

SEQ ID NO: 1140949 - RNA, 19 nt, Homo sapiens
  misc_RNA (1)...(19): siRNA sense strand
aaacuggacuaaacgagau

SEQ ID NO: 1140950 - RNA, 19 nt, Homo sapiens
  misc_RNA (1)...(19): siRNA sense strand
aaagauugauggagcugaa

SEQ ID NO: 1140951 - RNA, 19 nt, Homo sapiens
  misc_RNA (1)...(19): siRNA sense strand
uaaagcgccuaaaucugaa

SEQ ID NO: 1140952 - RNA, 19 nt, Homo sapiens
  misc_RNA (1)...(19): siRNA sense strand
agagaggauuguagaaaga

SEQ ID NO: 1140953 - RNA, 19 nt, Homo sapiens
  misc_RNA (1)...(19): siRNA sense strand
gaaagagagagagcagaaa

SEQ ID NO: 1140954 - RNA, 19 nt, Homo sapiens
  misc_RNA (1)...(19): siRNA sense strand
gaauuaagacaguguguac

SEQ ID NO: 1140955 - RNA, 19 nt, Homo sapiens
  misc_RNA (1)...(19): siRNA sense strand
gcaagaauucaacgaagga

SEQ ID NO: 1140956 - RNA, 19 nt, Homo sapiens
  misc_RNA (1)...(19): siRNA sense strand
ugauggagcugaaccucuu

SEQ ID NO: 1140957 - RNA, 19 nt, Homo sapiens
  misc_RNA (1)...(19): siRNA sense strand
cgcaguggaugccuacuuu

SEQ ID NO: 1140958 - RNA, 19 nt, Homo sapiens
  misc_RNA (1)...(19): siRNA sense strand
cauuacaacuauucuggaa

SEQ ID NO: 1140959 - RNA, 19 nt, Homo sapiens
  misc_RNA (1)...(19): siRNA sense strand
gaaaugugguggcuuguga

SEQ ID NO: 1140960 - RNA, 19 nt, Homo sapiens
  misc_RNA (1)...(19): siRNA sense strand
uggcacagguugcgaguua

SEQ ID NO: 1140961 - RNA, 19 nt, Homo sapiens
  misc_RNA (1)...(19): siRNA sense strand
gacagaagguggugugguu

SEQ ID NO: 1140962 - RNA, 19 nt, Homo sapiens
  misc_RNA (1)...(19): siRNA sense strand
gcacagguugcgaguuaua

SEQ ID NO: 1140963 - RNA, 19 nt, Homo sapiens
  misc_RNA (1)...(19): siRNA sense strand
ggacucagcaucauguaga

SEQ ID NO: 1140964 - RNA, 19 nt, Homo sapiens
  misc_RNA (1)...(19): siRNA sense strand
gaaucaacuucauggucua

SEQ ID NO: 1140965 - RNA, 19 nt, Homo sapiens
  misc_RNA (1)...(19): siRNA sense strand
gaaguggacccuguggaaa

SEQ ID NO: 1140966 - RNA, 19 nt, Homo sapiens
  misc_RNA (1)...(19): siRNA sense strand
gaugaaacgacuacaaagu

SEQ ID NO: 1140967 - RNA, 19 nt, Homo sapiens
  misc_RNA (1)...(19): siRNA sense strand
gcaucagaauggcaagguu

SEQ ID NO: 1140968 - RNA, 19 nt, Homo sapiens
  misc_RNA (1)...(19): siRNA sense strand
cucagagaaucuaugaaua

SEQ ID NO: 1140969 - RNA, 19 nt, Homo sapiens
  misc_RNA (1)...(19): siRNA sense strand
ccucagagaaucuaugaau

SEQ ID NO: 1140970 - RNA, 19 nt, Homo sapiens
  misc_RNA (1)...(19): siRNA sense strand
caaagugccaugacagaag

SEQ ID NO: 1140971 - RNA, 19 nt, Homo sapiens
  misc_RNA (1)...(19): siRNA sense strand
ugaaguggacccuguggaa

SEQ ID NO: 1140972 - RNA, 19 nt, Homo sapiens
  misc_RNA (1)...(19): siRNA sense strand
gaaccucagagaaucuaug

SEQ ID NO: 1140973 - RNA, 19 nt, Homo sapiens
  misc_RNA (1)...(19): siRNA sense strand
ucgaugaaacgacuacaaa

SEQ ID NO: 1140974 - RNA, 19 nt, Homo sapiens
  misc_RNA (1)...(19): siRNA sense strand
gaauggcaagguugugguu

SEQ ID NO: 1140975 - RNA, 19 nt, Homo sapiens
  misc_RNA (1)...(19): siRNA sense strand
gacucagcaucauguagaa

SEQ ID NO: 1140976 - RNA, 19 nt, Homo sapiens
  misc_RNA (1)...(19): siRNA sense strand
uauaaggacucagcaucau

SEQ ID NO: 1140977 - RNA, 19 nt, Homo sapiens
  misc_RNA (1)...(19): siRNA sense strand
gcacuuguggagcaucaga

SEQ ID NO: 1140978 - RNA, 19 nt, Homo sapiens
  misc_RNA (1)...(19): siRNA sense strand
uaaggacucagcaucaugu

SEQ ID NO: 1140979 - RNA, 19 nt, Homo sapiens
  misc_RNA (1)...(19): siRNA sense strand
ugugguggcuugugagagu

SEQ ID NO: 1140980 - RNA, 19 nt, Homo sapiens
  misc_RNA (1)...(19): siRNA sense strand
cuacgggaaccucagagaa

SEQ ID NO: 1140981 - RNA, 19 nt, Homo sapiens
  misc_RNA (1)...(19): siRNA sense strand
uuauaaggacucagcauca

SEQ ID NO: 1140982 - RNA, 19 nt, Homo sapiens
  misc_RNA (1)...(19): siRNA sense strand
gggaaccucagagaaucua

SEQ ID NO: 1140983 - RNA, 19 nt, Homo sapiens
  misc_RNA (1)...(19): siRNA sense strand
gcuggcacagagaugcuua

SEQ ID NO: 1140984 - RNA, 19 nt, Homo sapiens
  misc_RNA (1)...(19): siRNA sense strand
cgacuacaaagugccauga

SEQ ID NO: 1140985 - RNA, 19 nt, Homo sapiens
  misc_RNA (1)...(19): siRNA sense strand
uacaaagugccaugacaga

SEQ ID NO: 1140986 - RNA, 19 nt, Homo sapiens
  misc_RNA (1)...(19): siRNA sense strand
acuacaaagugccaugaca

SEQ ID NO: 1140987 - RNA, 19 nt, Homo sapiens
  misc_RNA (1)...(19): siRNA sense strand
acaaagugccaugacagaa

SEQ ID NO: 1140988 - RNA, 19 nt, Homo sapiens
  misc_RNA (1)...(19): siRNA sense strand
ucacagagcugagaaacuu

SEQ ID NO: 1140989 - RNA, 19 nt, Homo sapiens
  misc_RNA (1)...(19): siRNA sense strand
ccaccucucuaccuuaaua

SEQ ID NO: 1140990 - RNA, 19 nt, Homo sapiens
  misc_RNA (1)...(19): siRNA sense strand
gagcuucaaugguguuauu

SEQ ID NO: 1140991 - RNA, 19 nt, Homo sapiens
  misc_RNA (1)...(19): siRNA sense strand
uagcaguucuggucuauaa

SEQ ID NO: 1140992 - RNA, 19 nt, Homo sapiens
  misc_RNA (1)...(19): siRNA sense strand
ugacaaaucugcucuagag

SEQ ID NO: 1140993 - RNA, 19 nt, Homo sapiens
  misc_RNA (1)...(19): siRNA sense strand
ccaugaagguuuccauaaa

SEQ ID NO: 1140994 - RNA, 19 nt, Homo sapiens
  misc_RNA (1)...(19): siRNA sense strand
gcucagaccuggcaguuuc

SEQ ID NO: 1140995 - RNA, 19 nt, Homo sapiens
  misc_RNA (1)...(19): siRNA sense strand
gcugguguaucuuugaaua

SEQ ID NO: 1140996 - RNA, 19 nt, Homo sapiens
  misc_RNA (1)...(19): siRNA sense strand
gaaaauggcuggcaauucu

SEQ ID NO: 1140997 - RNA, 19 nt, Homo sapiens
  misc_RNA (1)...(19): siRNA sense strand
gguaaggaaugagcuagua

SEQ ID NO: 1140998 - RNA, 19 nt, Homo sapiens
  misc_RNA (1)...(19): siRNA sense strand
cagaaugacuuugcuugua

SEQ ID NO: 1140999 - RNA, 19 nt, Homo sapiens
  misc_RNA (1)...(19): siRNA sense strand
ggaagcaacaucuaucuga

SEQ ID NO: 1141000 - RNA, 19 nt, Homo sapiens
  misc_RNA (1)...(19): siRNA sense strand
ccaaccaggugcauuuaaa

SEQ ID NO: 1141001 - RNA, 19 nt, Homo sapiens
  misc_RNA (1)...(19): siRNA sense strand
gaauaucaccugucagaug

SEQ ID NO: 1141002 - RNA, 19 nt, Homo sapiens
  misc_RNA (1)...(19): siRNA sense strand
aaagguugcuguucucaaa

SEQ ID NO: 1141003 - RNA, 19 nt, Homo sapiens
  misc_RNA (1)...(19): siRNA sense strand
gugcugaguuugaauauca

SEQ ID NO: 1141004 - RNA, 19 nt, Homo sapiens
  misc_RNA (1)...(19): siRNA sense strand
ggagacaaaucuagcaucu

SEQ ID NO: 1141005 - RNA, 19 nt, Homo sapiens
  misc_RNA (1)...(19): siRNA sense strand
gaugguaaaucauggaauc

SEQ ID NO: 1141006 - RNA, 19 nt, Homo sapiens
  misc_RNA (1)...(19): siRNA sense strand
guagaaauggcuugaguuu

SEQ ID NO: 1141007 - RNA, 19 nt, Homo sapiens
  misc_RNA (1)...(19): siRNA sense strand
ccaggugcauuuaaagaaa

SEQ ID NO: 1141008 - RNA, 19 nt, Homo sapiens
  misc_RNA (1)...(19): siRNA sense strand
ucauuuaccuugacauuuc

SEQ ID NO: 1141009 - RNA, 19 nt, Homo sapiens
  misc_RNA (1)...(19): siRNA sense strand
uggauacguuuccuuauaa

SEQ ID NO: 1141010 - RNA, 19 nt, Homo sapiens
  misc_RNA (1)...(19): siRNA sense strand
gugcaacaccuucagauaa

SEQ ID NO: 1141011 - RNA, 19 nt, Homo sapiens
  misc_RNA (1)...(19): siRNA sense strand
aauaucaccugucagauga

SEQ ID NO: 1141012 - RNA, 19 nt, Homo sapiens
  misc_RNA (1)...(19): siRNA sense strand
uagcauacuuagacuacua

SEQ ID NO: 1141013 - RNA, 19 nt, Homo sapiens
  misc_RNA (1)...(19): siRNA sense strand
gaaacucaaaucucucaaa

SEQ ID NO: 1141014 - RNA, 19 nt, Homo sapiens
  misc_RNA (1)...(19): siRNA sense strand
agacaaaucuagcaucucu

SEQ ID NO: 1141015 - RNA, 19 nt, Homo sapiens
  misc_RNA (1)...(19): siRNA sense strand
gaugaggacuggguaagga

SEQ ID NO: 1141016 - RNA, 19 nt, Homo sapiens
  misc_RNA (1)...(19): siRNA sense strand
guuuagaaguccaucguuu

SEQ ID NO: 1141017 - RNA, 19 nt, Homo sapiens
  misc_RNA (1)...(19): siRNA sense strand
gguggaaguugaacgaaug

SEQ ID NO: 1141018 - RNA, 19 nt, Homo sapiens
  misc_RNA (1)...(19): siRNA sense strand
caaguagucuagcuuucuu

SEQ ID NO: 1141019 - RNA, 19 nt, Homo sapiens
  misc_RNA (1)...(19): siRNA sense strand
uuggauacguuuccuuaua

SEQ ID NO: 1141020 - RNA, 19 nt, Homo sapiens
  misc_RNA (1)...(19): siRNA sense strand
uagagggccugugcaauuu

SEQ ID NO: 1141021 - RNA, 19 nt, Homo sapiens
  misc_RNA (1)...(19): siRNA sense strand
ggugugaaauccagacaau

SEQ ID NO: 1141022 - RNA, 19 nt, Homo sapiens
  misc_RNA (1)...(19): siRNA sense strand
gaaaccucauuuaccuuga

SEQ ID NO: 1141023 - RNA, 19 nt, Homo sapiens
  misc_RNA (1)...(19): siRNA sense strand
gggcuuagaacaacuagaa

SEQ ID NO: 1141024 - RNA, 19 nt, Homo sapiens
  misc_RNA (1)...(19): siRNA sense strand
caccagaguugcuuucaau

SEQ ID NO: 1141025 - RNA, 19 nt, Homo sapiens
  misc_RNA (1)...(19): siRNA sense strand
gcaugccugugcugaguuu

SEQ ID NO: 1141026 - RNA, 19 nt, Homo sapiens
  misc_RNA (1)...(19): siRNA sense strand
ugacuuugcuuguacuugu

SEQ ID NO: 1141027 - RNA, 19 nt, Homo sapiens
  misc_RNA (1)...(19): siRNA sense strand
aacaggaacuacagcauuu

SEQ ID NO: 1141028 - RNA, 19 nt, Homo sapiens
  misc_RNA (1)...(19): siRNA sense strand
gaaaugaaggaaacuugga

SEQ ID NO: 1141029 - RNA, 19 nt, Homo sapiens
  misc_RNA (1)...(19): siRNA sense strand
gccgaaaggugauuguugu

SEQ ID NO: 1141030 - RNA, 19 nt, Homo sapiens
  misc_RNA (1)...(19): siRNA sense strand
ugaaacaaaugagugaguu

SEQ ID NO: 1141031 - RNA, 19 nt, Homo sapiens
  misc_RNA (1)...(19): siRNA sense strand
cauugaagaauuccgauua

SEQ ID NO: 1141032 - RNA, 19 nt, Homo sapiens
  misc_RNA (1)...(19): siRNA sense strand
ccuacucaaucucucuuua

SEQ ID NO: 1141033 - RNA, 19 nt, Homo sapiens
  misc_RNA (1)...(19): siRNA sense strand
caacaaaggugggaaugcu

SEQ ID NO: 1141034 - RNA, 19 nt, Homo sapiens
  misc_RNA (1)...(19): siRNA sense strand
gauggcaacauuuagaauu

SEQ ID NO: 1141035 - RNA, 19 nt, Homo sapiens
  misc_RNA (1)...(19): siRNA sense strand
ucagaaaccucauuuaccu

SEQ ID NO: 1141036 - RNA, 19 nt, Homo sapiens
  misc_RNA (1)...(19): siRNA sense strand
uguaguaucuguuguagca

SEQ ID NO: 1141037 - RNA, 19 nt, Homo sapiens
  misc_RNA (1)...(19): siRNA sense strand
caacagcauuuaacucacu

SEQ ID NO: 1141038 - RNA, 19 nt, Homo sapiens
  misc_RNA (1)...(19): siRNA sense strand
gaaaacuuccuuccagaua

SEQ ID NO: 1141039 - RNA, 19 nt, Homo sapiens
  misc_RNA (1)...(19): siRNA sense strand
cuagagcacuuggaccuuu

SEQ ID NO: 1141040 - RNA, 19 nt, Homo sapiens
  misc_RNA (1)...(19): siRNA sense strand
gaacgaauggaaugugcaa

SEQ ID NO: 1141041 - RNA, 19 nt, Homo sapiens
  misc_RNA (1)...(19): siRNA sense strand
ucaauggcaucuucaaugg

SEQ ID NO: 1141042 - RNA, 19 nt, Homo sapiens
  misc_RNA (1)...(19): siRNA sense strand
cuagagggccugugcaauu

SEQ ID NO: 1141043 - RNA, 19 nt, Homo sapiens
  misc_RNA (1)...(19): siRNA sense strand
cuucauaagcugacuuuaa

SEQ ID NO: 1141044 - RNA, 19 nt, Homo sapiens
  misc_RNA (1)...(19): siRNA sense strand
gcugguaucaucuucauug

SEQ ID NO: 1141045 - RNA, 19 nt, Homo sapiens
  misc_RNA (1)...(19): siRNA sense strand
ucaccugucagaugaauaa

SEQ ID NO: 1141046 - RNA, 19 nt, Homo sapiens
  misc_RNA (1)...(19): siRNA sense strand
gaaguugaacgaauggaau

SEQ ID NO: 1141047 - RNA, 19 nt, Homo sapiens
  misc_RNA (1)...(19): siRNA sense strand
ucaaucacauaaugacuuc

SEQ ID NO: 1141048 - RNA, 19 nt, Homo sapiens
  misc_RNA (1)...(19): siRNA sense strand
gaagaauuccgauuagcau

SEQ ID NO: 1141049 - RNA, 19 nt, Homo sapiens
  misc_RNA (1)...(19): siRNA sense strand
gagggccugugcaauuuga

SEQ ID NO: 1141050 - RNA, 19 nt, Homo sapiens
  misc_RNA (1)...(19): siRNA sense strand
gguguaucuuugaauauga

SEQ ID NO: 1141051 - RNA, 19 nt, Homo sapiens
  misc_RNA (1)...(19): siRNA sense strand
ugaccaaucuagagcacuu

SEQ ID NO: 1141052 - RNA, 19 nt, Homo sapiens
  misc_RNA (1)...(19): siRNA sense strand
ggccauugcugccaacauc

SEQ ID NO: 1141053 - RNA, 19 nt, Homo sapiens
  misc_RNA (1)...(19): siRNA sense strand
aaacaggaacuacagcauu

SEQ ID NO: 1141054 - RNA, 19 nt, Homo sapiens
  misc_RNA (1)...(19): siRNA sense strand
ggacaguuucccacauuga

SEQ ID NO: 1141055 - RNA, 19 nt, Homo sapiens
  misc_RNA (1)...(19): siRNA sense strand
agaaguccaucguuugguu

SEQ ID NO: 1141056 - RNA, 19 nt, Homo sapiens
  misc_RNA (1)...(19): siRNA sense strand
uagaacaacuagaacaucu

SEQ ID NO: 1141057 - RNA, 19 nt, Homo sapiens
  misc_RNA (1)...(19): siRNA sense strand
ugaauaagaccaucauugg

SEQ ID NO: 1141058 - RNA, 19 nt, Homo sapiens
  misc_RNA (1)...(19): siRNA sense strand
uuucuaaucugaccaaucu

SEQ ID NO: 1141059 - RNA, 19 nt, Homo sapiens
  misc_RNA (1)...(19): siRNA sense strand
cagagccgcugguguaucu

SEQ ID NO: 1141060 - RNA, 19 nt, Homo sapiens
  misc_RNA (1)...(19): siRNA sense strand
guaaggaaugagcuaguaa

SEQ ID NO: 1141061 - RNA, 19 nt, Homo sapiens
  misc_RNA (1)...(19): siRNA sense strand
ggaaguugaacgaauggaa

SEQ ID NO: 1141062 - RNA, 19 nt, Homo sapiens
  misc_RNA (1)...(19): siRNA sense strand
caccagaguuuccugcaau

SEQ ID NO: 1141063 - RNA, 19 nt, Homo sapiens
  misc_RNA (1)...(19): siRNA sense strand
cauuggauacguuuccuua

SEQ ID NO: 1141064 - RNA, 19 nt, Homo sapiens
  misc_RNA (1)...(19): siRNA sense strand
uuucuggacuaucaaguuu

SEQ ID NO: 1141065 - RNA, 19 nt, Homo sapiens
  misc_RNA (1)...(19): siRNA sense strand
uaagccaccucucuaccuu

SEQ ID NO: 1141066 - RNA, 19 nt, Homo sapiens
  misc_RNA (1)...(19): siRNA sense strand
cauaagcugacuuuaagaa

SEQ ID NO: 1141067 - RNA, 19 nt, Homo sapiens
  misc_RNA (1)...(19): siRNA sense strand
ggaccucucucagugucaa

SEQ ID NO: 1141068 - RNA, 19 nt, Homo sapiens
  misc_RNA (1)...(19): siRNA sense strand
ugugaaauccagacaauug

SEQ ID NO: 1141069 - RNA, 19 nt, Homo sapiens
  misc_RNA (1)...(19): siRNA sense strand
gcacagacuugcggguucu

SEQ ID NO: 1141070 - RNA, 19 nt, Homo sapiens
  misc_RNA (1)...(19): siRNA sense strand
gcuucuugcuggcugcaua

SEQ ID NO: 1141071 - RNA, 19 nt, Homo sapiens
  misc_RNA (1)...(19): siRNA sense strand
caacuagaacaucuggauu

SEQ ID NO: 1141072 - RNA, 19 nt, Homo sapiens
  misc_RNA (1)...(19): siRNA sense strand
ccugaacccuaugaacuuu

SEQ ID NO: 1141073 - RNA, 19 nt, Homo sapiens
  misc_RNA (1)...(19): siRNA sense strand
ugaacccuaugaacuuuau

SEQ ID NO: 1141074 - RNA, 19 nt, Homo sapiens
  misc_RNA (1)...(19): siRNA sense strand
agaaugacuuugcuuguac

SEQ ID NO: 1141075 - RNA, 19 nt, Homo sapiens
  misc_RNA (1)...(19): siRNA sense strand
aaacuuccuuccagauauc

SEQ ID NO: 1141076 - RNA, 19 nt, Homo sapiens
  misc_RNA (1)...(19): siRNA sense strand
cuagaucucaguagaaaug

SEQ ID NO: 1141077 - RNA, 19 nt, Homo sapiens
  misc_RNA (1)...(19): siRNA sense strand
caguagaaauggcuugagu

SEQ ID NO: 1141078 - RNA, 19 nt, Homo sapiens
  misc_RNA (1)...(19): siRNA sense strand
uaugaugccuuuguuaucu

SEQ ID NO: 1141079 - RNA, 19 nt, Homo sapiens
  misc_RNA (1)...(19): siRNA sense strand
guuugaauaucaccuguca

SEQ ID NO: 1141080 - RNA, 19 nt, Homo sapiens
  misc_RNA (1)...(19): siRNA sense strand
gggcaugccugugcugagu

SEQ ID NO: 1141081 - RNA, 19 nt, Homo sapiens
  misc_RNA (1)...(19): siRNA sense strand
cuucagguacuaaauauga

SEQ ID NO: 1141082 - RNA, 19 nt, Homo sapiens
  misc_RNA (1)...(19): siRNA sense strand
ucacucagaaaccucauuu

SEQ ID NO: 1141083 - RNA, 19 nt, Homo sapiens
  misc_RNA (1)...(19): siRNA sense strand
uaccuugacauuucucaua

SEQ ID NO: 1141084 - RNA, 19 nt, Homo sapiens
  misc_RNA (1)...(19): siRNA sense strand
ggacuaucaaguuuacaga

SEQ ID NO: 1141085 - RNA, 19 nt, Homo sapiens
  misc_RNA (1)...(19): siRNA sense strand
caugaagguuuccauaaaa

SEQ ID NO: 1141086 - RNA, 19 nt, Homo sapiens
  misc_RNA (1)...(19): siRNA sense strand
ucagugugcuuguaguauc

SEQ ID NO: 1141087 - RNA, 19 nt, Homo sapiens
  misc_RNA (1)...(19): siRNA sense strand
gagccacaacaacuucuuu

SEQ ID NO: 1141088 - RNA, 19 nt, Homo sapiens
  misc_RNA (1)...(19): siRNA sense strand
ucacagagcugagaaacuu

SEQ ID NO: 1141089 - RNA, 19 nt, Homo sapiens
  misc_RNA (1)...(19): siRNA sense strand
ccaccucucuaccuuaaua

SEQ ID NO: 1141090 - RNA, 19 nt, Homo sapiens
  misc_RNA (1)...(19): siRNA sense strand
gagcuucaaugguguuauu

SEQ ID NO: 1141091 - RNA, 19 nt, Homo sapiens
  misc_RNA (1)...(19): siRNA sense strand
uagcaguucuggucuauaa

SEQ ID NO: 1141092 - RNA, 19 nt, Homo sapiens
  misc_RNA (1)...(19): siRNA sense strand
ugacaaaucugcucuagag

SEQ ID NO: 1141093 - RNA, 19 nt, Homo sapiens
  misc_RNA (1)...(19): siRNA sense strand
ccaugaagguuuccauaaa

SEQ ID NO: 1141094 - RNA, 19 nt, Homo sapiens
  misc_RNA (1)...(19): siRNA sense strand
gcucagaccuggcaguuuc

SEQ ID NO: 1141095 - RNA, 19 nt, Homo sapiens
  misc_RNA (1)...(19): siRNA sense strand
gcugguguaucuuugaaua

SEQ ID NO: 1141096 - RNA, 19 nt, Homo sapiens
  misc_RNA (1)...(19): siRNA sense strand
gaaaauggcuggcaauucu

SEQ ID NO: 1141097 - RNA, 19 nt, Homo sapiens
  misc_RNA (1)...(19): siRNA sense strand
gguaaggaaugagcuagua

SEQ ID NO: 1141098 - RNA, 19 nt, Homo sapiens
  misc_RNA (1)...(19): siRNA sense strand
cagaaugacuuugcuugua

SEQ ID NO: 1141099 - RNA, 19 nt, Homo sapiens
  misc_RNA (1)...(19): siRNA sense strand
ggaagcaacaucuaucuga

SEQ ID NO: 1141100 - RNA, 19 nt, Homo sapiens
  misc_RNA (1)...(19): siRNA sense strand
ccaaccaggugcauuuaaa

SEQ ID NO: 1141101 - RNA, 19 nt, Homo sapiens
  misc_RNA (1)...(19): siRNA sense strand
gaauaucaccugucagaug

SEQ ID NO: 1141102 - RNA, 19 nt, Homo sapiens
  misc_RNA (1)...(19): siRNA sense strand
aaagguugcuguucucaaa

SEQ ID NO: 1141103 - RNA, 19 nt, Homo sapiens
  misc_RNA (1)...(19): siRNA sense strand
gugcugaguuugaauauca

SEQ ID NO: 1141104 - RNA, 19 nt, Homo sapiens
  misc_RNA (1)...(19): siRNA sense strand
ggagacaaaucuagcaucu

SEQ ID NO: 1141105 - RNA, 19 nt, Homo sapiens
  misc_RNA (1)...(19): siRNA sense strand
gaugguaaaucauggaauc

SEQ ID NO: 1141106 - RNA, 19 nt, Homo sapiens
  misc_RNA (1)...(19): siRNA sense strand
guagaaauggcuugaguuu

SEQ ID NO: 1141107 - RNA, 19 nt, Homo sapiens
  misc_RNA (1)...(19): siRNA sense strand
ccaggugcauuuaaagaaa

SEQ ID NO: 1141108 - RNA, 19 nt, Homo sapiens
  misc_RNA (1)...(19): siRNA sense strand
ucauuuaccuugacauuuc

SEQ ID NO: 1141109 - RNA, 19 nt, Homo sapiens
  misc_RNA (1)...(19): siRNA sense strand
uggauacguuuccuuauaa

SEQ ID NO: 1141110 - RNA, 19 nt, Homo sapiens
  misc_RNA (1)...(19): siRNA sense strand
gugcaacaccuucagauaa

SEQ ID NO: 1141111 - RNA, 19 nt, Homo sapiens
  misc_RNA (1)...(19): siRNA sense strand
aauaucaccugucagauga

SEQ ID NO: 1141112 - RNA, 19 nt, Homo sapiens
  misc_RNA (1)...(19): siRNA sense strand
uagcauacuuagacuacua

SEQ ID NO: 1141113 - RNA, 19 nt, Homo sapiens
  misc_RNA (1)...(19): siRNA sense strand
gaaacucaaaucucucaaa

SEQ ID NO: 1141114 - RNA, 19 nt, Homo sapiens
  misc_RNA (1)...(19): siRNA sense strand
agacaaaucuagcaucucu

SEQ ID NO: 1141115 - RNA, 19 nt, Homo sapiens
  misc_RNA (1)...(19): siRNA sense strand
gaugaggacuggguaagga

SEQ ID NO: 1141116 - RNA, 19 nt, Homo sapiens
  misc_RNA (1)...(19): siRNA sense strand
guuuagaaguccaucguuu

SEQ ID NO: 1141117 - RNA, 19 nt, Homo sapiens
  misc_RNA (1)...(19): siRNA sense strand
gguggaaguugaacgaaug

SEQ ID NO: 1141118 - RNA, 19 nt, Homo sapiens
  misc_RNA (1)...(19): siRNA sense strand
caaguagucuagcuuucuu

SEQ ID NO: 1141119 - RNA, 19 nt, Homo sapiens
  misc_RNA (1)...(19): siRNA sense strand
uuggauacguuuccuuaua

SEQ ID NO: 1141120 - RNA, 19 nt, Homo sapiens
  misc_RNA (1)...(19): siRNA sense strand
uagagggccugugcaauuu

SEQ ID NO: 1141121 - RNA, 19 nt, Homo sapiens
  misc_RNA (1)...(19): siRNA sense strand
gggcuuagaacaacuagaa

SEQ ID NO: 1141122 - RNA, 19 nt, Homo sapiens
  misc_RNA (1)...(19): siRNA sense strand
ggugugaaauccagacaau

SEQ ID NO: 1141123 - RNA, 19 nt, Homo sapiens
  misc_RNA (1)...(19): siRNA sense strand
gaaaccucauuuaccuuga

SEQ ID NO: 1141124 - RNA, 19 nt, Homo sapiens
  misc_RNA (1)...(19): siRNA sense strand
caccagaguugcuuucaau

SEQ ID NO: 1141125 - RNA, 19 nt, Homo sapiens
  misc_RNA (1)...(19): siRNA sense strand
gcaugccugugcugaguuu

SEQ ID NO: 1141126 - RNA, 19 nt, Homo sapiens
  misc_RNA (1)...(19): siRNA sense strand
ugacuuugcuuguacuugu

SEQ ID NO: 1141127 - RNA, 19 nt, Homo sapiens
  misc_RNA (1)...(19): siRNA sense strand
aacaggaacuacagcauuu

SEQ ID NO: 1141128 - RNA, 19 nt, Homo sapiens
  misc_RNA (1)...(19): siRNA sense strand
gaaaugaaggaaacuugga

SEQ ID NO: 1141129 - RNA, 19 nt, Homo sapiens
  misc_RNA (1)...(19): siRNA sense strand
gccgaaaggugauuguugu

SEQ ID NO: 1141130 - RNA, 19 nt, Homo sapiens
  misc_RNA (1)...(19): siRNA sense strand
ugaaacaaaugagugaguu

SEQ ID NO: 1141131 - RNA, 19 nt, Homo sapiens
  misc_RNA (1)...(19): siRNA sense strand
cauugaagaauuccgauua

SEQ ID NO: 1141132 - RNA, 19 nt, Homo sapiens
  misc_RNA (1)...(19): siRNA sense strand
ccuacucaaucucucuuua

SEQ ID NO: 1141133 - RNA, 19 nt, Homo sapiens
  misc_RNA (1)...(19): siRNA sense strand
caacaaaggugggaaugcu

SEQ ID NO: 1141134 - RNA, 19 nt, Homo sapiens
  misc_RNA (1)...(19): siRNA sense strand
gauggcaacauuuagaauu

SEQ ID NO: 1141135 - RNA, 19 nt, Homo sapiens
  misc_RNA (1)...(19): siRNA sense strand
ucagaaaccucauuuaccu

SEQ ID NO: 1141136 - RNA, 19 nt, Homo sapiens
  misc_RNA (1)...(19): siRNA sense strand
uguaguaucuguuguagca

SEQ ID NO: 1141137 - RNA, 19 nt, Homo sapiens
  misc_RNA (1)...(19): siRNA sense strand
caacagcauuuaacucacu

SEQ ID NO: 1141138 - RNA, 19 nt, Homo sapiens
  misc_RNA (1)...(19): siRNA sense strand
gaaaacuuccuuccagaua

SEQ ID NO: 1141139 - RNA, 19 nt, Homo sapiens
  misc_RNA (1)...(19): siRNA sense strand
cuagagcacuuggaccuuu

SEQ ID NO: 1141140 - RNA, 19 nt, Homo sapiens
  misc_RNA (1)...(19): siRNA sense strand
gaacgaauggaaugugcaa

SEQ ID NO: 1141141 - RNA, 19 nt, Homo sapiens
  misc_RNA (1)...(19): siRNA sense strand
ucaauggcaucuucaaugg

SEQ ID NO: 1141142 - RNA, 19 nt, Homo sapiens
  misc_RNA (1)...(19): siRNA sense strand
cuagagggccugugcaauu

SEQ ID NO: 1141143 - RNA, 19 nt, Homo sapiens
  misc_RNA (1)...(19): siRNA sense strand
cuucauaagcugacuuuaa

SEQ ID NO: 1141144 - RNA, 19 nt, Homo sapiens
  misc_RNA (1)...(19): siRNA sense strand
gcugguaucaucuucauug

SEQ ID NO: 1141145 - RNA, 19 nt, Homo sapiens
  misc_RNA (1)...(19): siRNA sense strand
ucaccugucagaugaauaa

SEQ ID NO: 1141146 - RNA, 19 nt, Homo sapiens
  misc_RNA (1)...(19): siRNA sense strand
gaaguugaacgaauggaau

SEQ ID NO: 1141147 - RNA, 19 nt, Homo sapiens
  misc_RNA (1)...(19): siRNA sense strand
ucaaucacauaaugacuuc

SEQ ID NO: 1141148 - RNA, 19 nt, Homo sapiens
  misc_RNA (1)...(19): siRNA sense strand
gaagaauuccgauuagcau

SEQ ID NO: 1141149 - RNA, 19 nt, Homo sapiens
  misc_RNA (1)...(19): siRNA sense strand
gagggccugugcaauuuga

SEQ ID NO: 1141150 - RNA, 19 nt, Homo sapiens
  misc_RNA (1)...(19): siRNA sense strand
gguguaucuuugaauauga

SEQ ID NO: 1141151 - RNA, 19 nt, Homo sapiens
  misc_RNA (1)...(19): siRNA sense strand
ugaccaaucuagagcacuu

SEQ ID NO: 1141152 - RNA, 19 nt, Homo sapiens
  misc_RNA (1)...(19): siRNA sense strand
ggccauugcugccaacauc

SEQ ID NO: 1141153 - RNA, 19 nt, Homo sapiens
  misc_RNA (1)...(19): siRNA sense strand
aaacaggaacuacagcauu

SEQ ID NO: 1141154 - RNA, 19 nt, Homo sapiens
  misc_RNA (1)...(19): siRNA sense strand
ggacaguuucccacauuga

SEQ ID NO: 1141155 - RNA, 19 nt, Homo sapiens
  misc_RNA (1)...(19): siRNA sense strand
agaaguccaucguuugguu

SEQ ID NO: 1141156 - RNA, 19 nt, Homo sapiens
  misc_RNA (1)...(19): siRNA sense strand
uagaacaacuagaacaucu

SEQ ID NO: 1141157 - RNA, 19 nt, Homo sapiens
  misc_RNA (1)...(19): siRNA sense strand
ugaauaagaccaucauugg

SEQ ID NO: 1141158 - RNA, 19 nt, Homo sapiens
  misc_RNA (1)...(19): siRNA sense strand
uuucuaaucugaccaaucu

SEQ ID NO: 1141159 - RNA, 19 nt, Homo sapiens
  misc_RNA (1)...(19): siRNA sense strand
cagagccgcugguguaucu

SEQ ID NO: 1141160 - RNA, 19 nt, Homo sapiens
  misc_RNA (1)...(19): siRNA sense strand
guaaggaaugagcuaguaa

SEQ ID NO: 1141161 - RNA, 19 nt, Homo sapiens
  misc_RNA (1)...(19): siRNA sense strand
ggaaguugaacgaauggaa

SEQ ID NO: 1141162 - RNA, 19 nt, Homo sapiens
  misc_RNA (1)...(19): siRNA sense strand
caccagaguuuccugcaau

SEQ ID NO: 1141163 - RNA, 19 nt, Homo sapiens
  misc_RNA (1)...(19): siRNA sense strand
uaagccaccucucuaccuu

SEQ ID NO: 1141164 - RNA, 19 nt, Homo sapiens
  misc_RNA (1)...(19): siRNA sense strand
uuucuggacuaucaaguuu

SEQ ID NO: 1141165 - RNA, 19 nt, Homo sapiens
  misc_RNA (1)...(19): siRNA sense strand
cauuggauacguuuccuua

SEQ ID NO: 1141166 - RNA, 19 nt, Homo sapiens
  misc_RNA (1)...(19): siRNA sense strand
cauaagcugacuuuaagaa

SEQ ID NO: 1141167 - RNA, 19 nt, Homo sapiens
  misc_RNA (1)...(19): siRNA sense strand
ugugaaauccagacaauug

SEQ ID NO: 1141168 - RNA, 19 nt, Homo sapiens
  misc_RNA (1)...(19): siRNA sense strand
ggaccucucucagugucaa

SEQ ID NO: 1141169 - RNA, 19 nt, Homo sapiens
  misc_RNA (1)...(19): siRNA sense strand
gcacagacuugcggguucu

SEQ ID NO: 1141170 - RNA, 19 nt, Homo sapiens
  misc_RNA (1)...(19): siRNA sense strand
gcuucuugcuggcugcaua

SEQ ID NO: 1141171 - RNA, 19 nt, Homo sapiens
  misc_RNA (1)...(19): siRNA sense strand
caacuagaacaucuggauu

SEQ ID NO: 1141172 - RNA, 19 nt, Homo sapiens
  misc_RNA (1)...(19): siRNA sense strand
ccugaacccuaugaacuuu

SEQ ID NO: 1141173 - RNA, 19 nt, Homo sapiens
  misc_RNA (1)...(19): siRNA sense strand
ugaacccuaugaacuuuau

SEQ ID NO: 1141174 - RNA, 19 nt, Homo sapiens
  misc_RNA (1)...(19): siRNA sense strand
agaaugacuuugcuuguac

SEQ ID NO: 1141175 - RNA, 19 nt, Homo sapiens
  misc_RNA (1)...(19): siRNA sense strand
aaacuuccuuccagauauc

SEQ ID NO: 1141176 - RNA, 19 nt, Homo sapiens
  misc_RNA (1)...(19): siRNA sense strand
cuagaucucaguagaaaug

SEQ ID NO: 1141177 - RNA, 19 nt, Homo sapiens
  misc_RNA (1)...(19): siRNA sense strand
caguagaaauggcuugagu

SEQ ID NO: 1141178 - RNA, 19 nt, Homo sapiens
  misc_RNA (1)...(19): siRNA sense strand
uaugaugccuuuguuaucu

SEQ ID NO: 1141179 - RNA, 19 nt, Homo sapiens
  misc_RNA (1)...(19): siRNA sense strand
guuugaauaucaccuguca

SEQ ID NO: 1141180 - RNA, 19 nt, Homo sapiens
  misc_RNA (1)...(19): siRNA sense strand
gggcaugccugugcugagu

SEQ ID NO: 1141181 - RNA, 19 nt, Homo sapiens
  misc_RNA (1)...(19): siRNA sense strand
cuucagguacuaaauauga

SEQ ID NO: 1141182 - RNA, 19 nt, Homo sapiens
  misc_RNA (1)...(19): siRNA sense strand
ucacucagaaaccucauuu

SEQ ID NO: 1141183 - RNA, 19 nt, Homo sapiens
  misc_RNA (1)...(19): siRNA sense strand
gcauuccaauuugaaacaa

SEQ ID NO: 1141184 - RNA, 19 nt, Homo sapiens
  misc_RNA (1)...(19): siRNA sense strand
caugaagguuuccauaaaa

SEQ ID NO: 1141185 - RNA, 19 nt, Homo sapiens
  misc_RNA (1)...(19): siRNA sense strand
ucagugugcuuguaguauc

SEQ ID NO: 1141186 - RNA, 19 nt, Homo sapiens
  misc_RNA (1)...(19): siRNA sense strand
gagccacaacaacuucuuu

SEQ ID NO: 1141187 - RNA, 19 nt, Homo sapiens
  misc_RNA (1)...(19): siRNA sense strand
uaccuugacauuucucaua

SEQ ID NO: 1141188 - RNA, 19 nt, Homo sapiens
  misc_RNA (1)...(19): siRNA sense strand
ucacagagcugagaaacuu

SEQ ID NO: 1141189 - RNA, 19 nt, Homo sapiens
  misc_RNA (1)...(19): siRNA sense strand
ccaccucucuaccuuaaua

SEQ ID NO: 1141190 - RNA, 19 nt, Homo sapiens
  misc_RNA (1)...(19): siRNA sense strand
gagcuucaaugguguuauu

SEQ ID NO: 1141191 - RNA, 19 nt, Homo sapiens
  misc_RNA (1)...(19): siRNA sense strand
uagcaguucuggucuauaa

SEQ ID NO: 1141192 - RNA, 19 nt, Homo sapiens
  misc_RNA (1)...(19): siRNA sense strand
ugacaaaucugcucuagag

SEQ ID NO: 1141193 - RNA, 19 nt, Homo sapiens
  misc_RNA (1)...(19): siRNA sense strand
ccaugaagguuuccauaaa

SEQ ID NO: 1141194 - RNA, 19 nt, Homo sapiens
  misc_RNA (1)...(19): siRNA sense strand
gcucagaccuggcaguuuc

SEQ ID NO: 1141195 - RNA, 19 nt, Homo sapiens
  misc_RNA (1)...(19): siRNA sense strand
gcugguguaucuuugaaua

SEQ ID NO: 1141196 - RNA, 19 nt, Homo sapiens
  misc_RNA (1)...(19): siRNA sense strand
gaaaauggcuggcaauucu

SEQ ID NO: 1141197 - RNA, 19 nt, Homo sapiens
  misc_RNA (1)...(19): siRNA sense strand
gguaaggaaugagcuagua

SEQ ID NO: 1141198 - RNA, 19 nt, Homo sapiens
  misc_RNA (1)...(19): siRNA sense strand
cagaaugacuuugcuugua

SEQ ID NO: 1141199 - RNA, 19 nt, Homo sapiens
  misc_RNA (1)...(19): siRNA sense strand
ggaagcaacaucuaucuga

SEQ ID NO: 1141200 - RNA, 19 nt, Homo sapiens
  misc_RNA (1)...(19): siRNA sense strand
ccaaccaggugcauuuaaa

SEQ ID NO: 1141201 - RNA, 19 nt, Homo sapiens
  misc_RNA (1)...(19): siRNA sense strand
gaauaucaccugucagaug

SEQ ID NO: 1141202 - RNA, 19 nt, Homo sapiens
  misc_RNA (1)...(19): siRNA sense strand
aaagguugcuguucucaaa

SEQ ID NO: 1141203 - RNA, 19 nt, Homo sapiens
  misc_RNA (1)...(19): siRNA sense strand
gugcugaguuugaauauca

SEQ ID NO: 1141204 - RNA, 19 nt, Homo sapiens
  misc_RNA (1)...(19): siRNA sense strand
ggagacaaaucuagcaucu

SEQ ID NO: 1141205 - RNA, 19 nt, Homo sapiens
  misc_RNA (1)...(19): siRNA sense strand
gaugguaaaucauggaauc

SEQ ID NO: 1141206 - RNA, 19 nt, Homo sapiens
  misc_RNA (1)...(19): siRNA sense strand
guagaaauggcuugaguuu

SEQ ID NO: 1141207 - RNA, 19 nt, Homo sapiens
  misc_RNA (1)...(19): siRNA sense strand
ccaggugcauuuaaagaaa

SEQ ID NO: 1141208 - RNA, 19 nt, Homo sapiens
  misc_RNA (1)...(19): siRNA sense strand
ucauuuaccuugacauuuc

SEQ ID NO: 1141209 - RNA, 19 nt, Homo sapiens
  misc_RNA (1)...(19): siRNA sense strand
uggauacguuuccuuauaa

SEQ ID NO: 1141210 - RNA, 19 nt, Homo sapiens
  misc_RNA (1)...(19): siRNA sense strand
gugcaacaccuucagauaa

SEQ ID NO: 1141211 - RNA, 19 nt, Homo sapiens
  misc_RNA (1)...(19): siRNA sense strand
aauaucaccugucagauga

SEQ ID NO: 1141212 - RNA, 19 nt, Homo sapiens
  misc_RNA (1)...(19): siRNA sense strand
uagcauacuuagacuacua

SEQ ID NO: 1141213 - RNA, 19 nt, Homo sapiens
  misc_RNA (1)...(19): siRNA sense strand
gaaacucaaaucucucaaa

SEQ ID NO: 1141214 - RNA, 19 nt, Homo sapiens
  misc_RNA (1)...(19): siRNA sense strand
agacaaaucuagcaucucu

SEQ ID NO: 1141215 - RNA, 19 nt, Homo sapiens
  misc_RNA (1)...(19): siRNA sense strand
gaugaggacuggguaagga

SEQ ID NO: 1141216 - RNA, 19 nt, Homo sapiens
  misc_RNA (1)...(19): siRNA sense strand
guuuagaaguccaucguuu

SEQ ID NO: 1141217 - RNA, 19 nt, Homo sapiens
  misc_RNA (1)...(19): siRNA sense strand
gguggaaguugaacgaaug

SEQ ID NO: 1141218 - RNA, 19 nt, Homo sapiens
  misc_RNA (1)...(19): siRNA sense strand
caaguagucuagcuuucuu

SEQ ID NO: 1141219 - RNA, 19 nt, Homo sapiens
  misc_RNA (1)...(19): siRNA sense strand
uuggauacguuuccuuaua

SEQ ID NO: 1141220 - RNA, 19 nt, Homo sapiens
  misc_RNA (1)...(19): siRNA sense strand
uagagggccugugcaauuu

SEQ ID NO: 1141221 - RNA, 19 nt, Homo sapiens
  misc_RNA (1)...(19): siRNA sense strand
ggugugaaauccagacaau

SEQ ID NO: 1141222 - RNA, 19 nt, Homo sapiens
  misc_RNA (1)...(19): siRNA sense strand
gaaaccucauuuaccuuga

SEQ ID NO: 1141223 - RNA, 19 nt, Homo sapiens
  misc_RNA (1)...(19): siRNA sense strand
gggcuuagaacaacuagaa

SEQ ID NO: 1141224 - RNA, 19 nt, Homo sapiens
  misc_RNA (1)...(19): siRNA sense strand
caccagaguugcuuucaau

SEQ ID NO: 1141225 - RNA, 19 nt, Homo sapiens
  misc_RNA (1)...(19): siRNA sense strand
gcaugccugugcugaguuu

SEQ ID NO: 1141226 - RNA, 19 nt, Homo sapiens
  misc_RNA (1)...(19): siRNA sense strand
ugacuuugcuuguacuugu

SEQ ID NO: 1141227 - RNA, 19 nt, Homo sapiens
  misc_RNA (1)...(19): siRNA sense strand
aacaggaacuacagcauuu

SEQ ID NO: 1141228 - RNA, 19 nt, Homo sapiens
  misc_RNA (1)...(19): siRNA sense strand
gaaaugaaggaaacuugga

SEQ ID NO: 1141229 - RNA, 19 nt, Homo sapiens
  misc_RNA (1)...(19): siRNA sense strand
gccgaaaggugauuguugu

SEQ ID NO: 1141230 - RNA, 19 nt, Homo sapiens
  misc_RNA (1)...(19): siRNA sense strand
ugaaacaaaugagugaguu

SEQ ID NO: 1141231 - RNA, 19 nt, Homo sapiens
  misc_RNA (1)...(19): siRNA sense strand
cauugaagaauuccgauua

SEQ ID NO: 1141232 - RNA, 19 nt, Homo sapiens
  misc_RNA (1)...(19): siRNA sense strand
ccuacucaaucucucuuua

SEQ ID NO: 1141233 - RNA, 19 nt, Homo sapiens
  misc_RNA (1)...(19): siRNA sense strand
caacaaaggugggaaugcu

SEQ ID NO: 1141234 - RNA, 19 nt, Homo sapiens
  misc_RNA (1)...(19): siRNA sense strand
gauggcaacauuuagaauu

SEQ ID NO: 1141235 - RNA, 19 nt, Homo sapiens
  misc_RNA (1)...(19): siRNA sense strand
ucagaaaccucauuuaccu

SEQ ID NO: 1141236 - RNA, 19 nt, Homo sapiens
  misc_RNA (1)...(19): siRNA sense strand
uguaguaucuguuguagca

SEQ ID NO: 1141237 - RNA, 19 nt, Homo sapiens
  misc_RNA (1)...(19): siRNA sense strand
caacagcauuuaacucacu

SEQ ID NO: 1141238 - RNA, 19 nt, Homo sapiens
  misc_RNA (1)...(19): siRNA sense strand
gaaaacuuccuuccagaua

SEQ ID NO: 1141239 - RNA, 19 nt, Homo sapiens
  misc_RNA (1)...(19): siRNA sense strand
cuagagcacuuggaccuuu

SEQ ID NO: 1141240 - RNA, 19 nt, Homo sapiens
  misc_RNA (1)...(19): siRNA sense strand
gaacgaauggaaugugcaa

SEQ ID NO: 1141241 - RNA, 19 nt, Homo sapiens
  misc_RNA (1)...(19): siRNA sense strand
ucaauggcaucuucaaugg

SEQ ID NO: 1141242 - RNA, 19 nt, Homo sapiens
  misc_RNA (1)...(19): siRNA sense strand
cuagagggccugugcaauu

SEQ ID NO: 1141243 - RNA, 19 nt, Homo sapiens
  misc_RNA (1)...(19): siRNA sense strand
cuucauaagcugacuuuaa

SEQ ID NO: 1141244 - RNA, 19 nt, Homo sapiens
  misc_RNA (1)...(19): siRNA sense strand
gcugguaucaucuucauug

SEQ ID NO: 1141245 - RNA, 19 nt, Homo sapiens
  misc_RNA (1)...(19): siRNA sense strand
ucaccugucagaugaauaa

SEQ ID NO: 1141246 - RNA, 19 nt, Homo sapiens
  misc_RNA (1)...(19): siRNA sense strand
gaaguugaacgaauggaau

SEQ ID NO: 1141247 - RNA, 19 nt, Homo sapiens
  misc_RNA (1)...(19): siRNA sense strand
ucaaucacauaaugacuuc

SEQ ID NO: 1141248 - RNA, 19 nt, Homo sapiens
  misc_RNA (1)...(19): siRNA sense strand
gaagaauuccgauuagcau

SEQ ID NO: 1141249 - RNA, 19 nt, Homo sapiens
  misc_RNA (1)...(19): siRNA sense strand
gagggccugugcaauuuga

SEQ ID NO: 1141250 - RNA, 19 nt, Homo sapiens
  misc_RNA (1)...(19): siRNA sense strand
gguguaucuuugaauauga

SEQ ID NO: 1141251 - RNA, 19 nt, Homo sapiens
  misc_RNA (1)...(19): siRNA sense strand
ugaccaaucuagagcacuu

SEQ ID NO: 1141252 - RNA, 19 nt, Homo sapiens
  misc_RNA (1)...(19): siRNA sense strand
ggccauugcugccaacauc

SEQ ID NO: 1141253 - RNA, 19 nt, Homo sapiens
  misc_RNA (1)...(19): siRNA sense strand
aaacaggaacuacagcauu

SEQ ID NO: 1141254 - RNA, 19 nt, Homo sapiens
  misc_RNA (1)...(19): siRNA sense strand
ggacaguuucccacauuga

SEQ ID NO: 1141255 - RNA, 19 nt, Homo sapiens
  misc_RNA (1)...(19): siRNA sense strand
agaaguccaucguuugguu

SEQ ID NO: 1141256 - RNA, 19 nt, Homo sapiens
  misc_RNA (1)...(19): siRNA sense strand
uagaacaacuagaacaucu

SEQ ID NO: 1141257 - RNA, 19 nt, Homo sapiens
  misc_RNA (1)...(19): siRNA sense strand
ugaauaagaccaucauugg

SEQ ID NO: 1141258 - RNA, 19 nt, Homo sapiens
  misc_RNA (1)...(19): siRNA sense strand
uuucuaaucugaccaaucu

SEQ ID NO: 1141259 - RNA, 19 nt, Homo sapiens
  misc_RNA (1)...(19): siRNA sense strand
cagagccgcugguguaucu

SEQ ID NO: 1141260 - RNA, 19 nt, Homo sapiens
  misc_RNA (1)...(19): siRNA sense strand
guaaggaaugagcuaguaa

SEQ ID NO: 1141261 - RNA, 19 nt, Homo sapiens
  misc_RNA (1)...(19): siRNA sense strand
ggaaguugaacgaauggaa

SEQ ID NO: 1141262 - RNA, 19 nt, Homo sapiens
  misc_RNA (1)...(19): siRNA sense strand
caccagaguuuccugcaau

SEQ ID NO: 1141263 - RNA, 19 nt, Homo sapiens
  misc_RNA (1)...(19): siRNA sense strand
cauuggauacguuuccuua

SEQ ID NO: 1141264 - RNA, 19 nt, Homo sapiens
  misc_RNA (1)...(19): siRNA sense strand
uuucuggacuaucaaguuu

SEQ ID NO: 1141265 - RNA, 19 nt, Homo sapiens
  misc_RNA (1)...(19): siRNA sense strand
uaagccaccucucuaccuu

SEQ ID NO: 1141266 - RNA, 19 nt, Homo sapiens
  misc_RNA (1)...(19): siRNA sense strand
cauaagcugacuuuaagaa

SEQ ID NO: 1141267 - RNA, 19 nt, Homo sapiens
  misc_RNA (1)...(19): siRNA sense strand
ggaccucucucagugucaa

SEQ ID NO: 1141268 - RNA, 19 nt, Homo sapiens
  misc_RNA (1)...(19): siRNA sense strand
ugugaaauccagacaauug

SEQ ID NO: 1141269 - RNA, 19 nt, Homo sapiens
  misc_RNA (1)...(19): siRNA sense strand
gcacagacuugcggguucu

SEQ ID NO: 1141270 - RNA, 19 nt, Homo sapiens
  misc_RNA (1)...(19): siRNA sense strand
gcuucuugcuggcugcaua

SEQ ID NO: 1141271 - RNA, 19 nt, Homo sapiens
  misc_RNA (1)...(19): siRNA sense strand
caacuagaacaucuggauu

SEQ ID NO: 1141272 - RNA, 19 nt, Homo sapiens
  misc_RNA (1)...(19): siRNA sense strand
ccugaacccuaugaacuuu

SEQ ID NO: 1141273 - RNA, 19 nt, Homo sapiens
  misc_RNA (1)...(19): siRNA sense strand
ugaacccuaugaacuuuau

SEQ ID NO: 1141274 - RNA, 19 nt, Homo sapiens
  misc_RNA (1)...(19): siRNA sense strand
agaaugacuuugcuuguac

SEQ ID NO: 1141275 - RNA, 19 nt, Homo sapiens
  misc_RNA (1)...(19): siRNA sense strand
aaacuuccuuccagauauc

SEQ ID NO: 1141276 - RNA, 19 nt, Homo sapiens
  misc_RNA (1)...(19): siRNA sense strand
cuagaucucaguagaaaug

SEQ ID NO: 1141277 - RNA, 19 nt, Homo sapiens
  misc_RNA (1)...(19): siRNA sense strand
caguagaaauggcuugagu

SEQ ID NO: 1141278 - RNA, 19 nt, Homo sapiens
  misc_RNA (1)...(19): siRNA sense strand
uaugaugccuuuguuaucu

SEQ ID NO: 1141279 - RNA, 19 nt, Homo sapiens
  misc_RNA (1)...(19): siRNA sense strand
guuugaauaucaccuguca

SEQ ID NO: 1141280 - RNA, 19 nt, Homo sapiens
  misc_RNA (1)...(19): siRNA sense strand
gggcaugccugugcugagu

SEQ ID NO: 1141281 - RNA, 19 nt, Homo sapiens
  misc_RNA (1)...(19): siRNA sense strand
cuucagguacuaaauauga

SEQ ID NO: 1141282 - RNA, 19 nt, Homo sapiens
  misc_RNA (1)...(19): siRNA sense strand
ucacucagaaaccucauuu

SEQ ID NO: 1141283 - RNA, 19 nt, Homo sapiens
  misc_RNA (1)...(19): siRNA sense strand
uaccuugacauuucucaua

SEQ ID NO: 1141284 - RNA, 19 nt, Homo sapiens
  misc_RNA (1)...(19): siRNA sense strand
ggacuaucaaguuuacaga

SEQ ID NO: 1141285 - RNA, 19 nt, Homo sapiens
  misc_RNA (1)...(19): siRNA sense strand
caugaagguuuccauaaaa

SEQ ID NO: 1141286 - RNA, 19 nt, Homo sapiens
  misc_RNA (1)...(19): siRNA sense strand
ucagugugcuuguaguauc

SEQ ID NO: 1141287 - RNA, 19 nt, Homo sapiens
  misc_RNA (1)...(19): siRNA sense strand
gagccacaacaacuucuuu

SEQ ID NO: 1141288 - RNA, 19 nt, Homo sapiens
  misc_RNA (1)...(19): siRNA sense strand
ucacagagcugagaaacuu

SEQ ID NO: 1141289 - RNA, 19 nt, Homo sapiens
  misc_RNA (1)...(19): siRNA sense strand
gagcuucaaugguguuauu

SEQ ID NO: 1141290 - RNA, 19 nt, Homo sapiens
  misc_RNA (1)...(19): siRNA sense strand
uagcaguucuggucuauaa

SEQ ID NO: 1141291 - RNA, 19 nt, Homo sapiens
  misc_RNA (1)...(19): siRNA sense strand
ugacaaaucugcucuagag

SEQ ID NO: 1141292 - RNA, 19 nt, Homo sapiens
  misc_RNA (1)...(19): siRNA sense strand
ccaugaagguuuccauaaa

SEQ ID NO: 1141293 - RNA, 19 nt, Homo sapiens
  misc_RNA (1)...(19): siRNA sense strand
gcucagaccuggcaguuuc

SEQ ID NO: 1141294 - RNA, 19 nt, Homo sapiens
  misc_RNA (1)...(19): siRNA sense strand
gcugguguaucuuugaaua

SEQ ID NO: 1141295 - RNA, 19 nt, Homo sapiens
  misc_RNA (1)...(19): siRNA sense strand
gaaaauggcuggcaauucu

SEQ ID NO: 1141296 - RNA, 19 nt, Homo sapiens
  misc_RNA (1)...(19): siRNA sense strand
gguaaggaaugagcuagua

SEQ ID NO: 1141297 - RNA, 19 nt, Homo sapiens
  misc_RNA (1)...(19): siRNA sense strand
cagaaugacuuugcuugua

SEQ ID NO: 1141298 - RNA, 19 nt, Homo sapiens
  misc_RNA (1)...(19): siRNA sense strand
ggaagcaacaucuaucuga

SEQ ID NO: 1141299 - RNA, 19 nt, Homo sapiens
  misc_RNA (1)...(19): siRNA sense strand
ccaaccaggugcauuuaaa

SEQ ID NO: 1141300 - RNA, 19 nt, Homo sapiens
  misc_RNA (1)...(19): siRNA sense strand
gaauaucaccugucagaug

SEQ ID NO: 1141301 - RNA, 19 nt, Homo sapiens
  misc_RNA (1)...(19): siRNA sense strand
aaagguugcuguucucaaa

SEQ ID NO: 1141302 - RNA, 19 nt, Homo sapiens
  misc_RNA (1)...(19): siRNA sense strand
gugcugaguuugaauauca

SEQ ID NO: 1141303 - RNA, 19 nt, Homo sapiens
  misc_RNA (1)...(19): siRNA sense strand
guagaaauggcuugaguuu

SEQ ID NO: 1141304 - RNA, 19 nt, Homo sapiens
  misc_RNA (1)...(19): siRNA sense strand
gaugguaaaucauggaauc

SEQ ID NO: 1141305 - RNA, 19 nt, Homo sapiens
  misc_RNA (1)...(19): siRNA sense strand
ccaggugcauuuaaagaaa

SEQ ID NO: 1141306 - RNA, 19 nt, Homo sapiens
  misc_RNA (1)...(19): siRNA sense strand
ucauuuaccuugacauuuc

SEQ ID NO: 1141307 - RNA, 19 nt, Homo sapiens
  misc_RNA (1)...(19): siRNA sense strand
uggauacguuuccuuauaa

SEQ ID NO: 1141308 - RNA, 19 nt, Homo sapiens
  misc_RNA (1)...(19): siRNA sense strand
gugcaacaccuucagauaa

SEQ ID NO: 1141309 - RNA, 19 nt, Homo sapiens
  misc_RNA (1)...(19): siRNA sense strand
aauaucaccugucagauga

SEQ ID NO: 1141310 - RNA, 19 nt, Homo sapiens
  misc_RNA (1)...(19): siRNA sense strand
uagcauacuuagacuacua

SEQ ID NO: 1141311 - RNA, 19 nt, Homo sapiens
  misc_RNA (1)...(19): siRNA sense strand
gaaacucaaaucucucaaa

SEQ ID NO: 1141312 - RNA, 19 nt, Homo sapiens
  misc_RNA (1)...(19): siRNA sense strand
gaugaggacuggguaagga

SEQ ID NO: 1141313 - RNA, 19 nt, Homo sapiens
  misc_RNA (1)...(19): siRNA sense strand
guuuagaaguccaucguuu

SEQ ID NO: 1141314 - RNA, 19 nt, Homo sapiens
  misc_RNA (1)...(19): siRNA sense strand
gguggaaguugaacgaaug

SEQ ID NO: 1141315 - RNA, 19 nt, Homo sapiens
  misc_RNA (1)...(19): siRNA sense strand
caaguagucuagcuuucuu

SEQ ID NO: 1141316 - RNA, 19 nt, Homo sapiens
  misc_RNA (1)...(19): siRNA sense strand
uuggauacguuuccuuaua

SEQ ID NO: 1141317 - RNA, 19 nt, Homo sapiens
  misc_RNA (1)...(19): siRNA sense strand
uagagggccugugcaauuu

SEQ ID NO: 1141318 - RNA, 19 nt, Homo sapiens
  misc_RNA (1)...(19): siRNA sense strand
gggcuuagaacaacuagaa

SEQ ID NO: 1141319 - RNA, 19 nt, Homo sapiens
  misc_RNA (1)...(19): siRNA sense strand
gaaaccucauuuaccuuga

SEQ ID NO: 1141320 - RNA, 19 nt, Homo sapiens
  misc_RNA (1)...(19): siRNA sense strand
caccagaguugcuuucaau

SEQ ID NO: 1141321 - RNA, 19 nt, Homo sapiens
  misc_RNA (1)...(19): siRNA sense strand
gcaugccugugcugaguuu

SEQ ID NO: 1141322 - RNA, 19 nt, Homo sapiens
  misc_RNA (1)...(19): siRNA sense strand
ugacuuugcuuguacuugu

SEQ ID NO: 1141323 - RNA, 19 nt, Homo sapiens
  misc_RNA (1)...(19): siRNA sense strand
aacaggaacuacagcauuu

SEQ ID NO: 1141324 - RNA, 19 nt, Homo sapiens
  misc_RNA (1)...(19): siRNA sense strand
gaaaugaaggaaacuugga

SEQ ID NO: 1141325 - RNA, 19 nt, Homo sapiens
  misc_RNA (1)...(19): siRNA sense strand
gccgaaaggugauuguugu

SEQ ID NO: 1141326 - RNA, 19 nt, Homo sapiens
  misc_RNA (1)...(19): siRNA sense strand
ugaaacaaaugagugaguu

SEQ ID NO: 1141327 - RNA, 19 nt, Homo sapiens
  misc_RNA (1)...(19): siRNA sense strand
cauugaagaauuccgauua

SEQ ID NO: 1141328 - RNA, 19 nt, Homo sapiens
  misc_RNA (1)...(19): siRNA sense strand
ccuacucaaucucucuuua

SEQ ID NO: 1141329 - RNA, 19 nt, Homo sapiens
  misc_RNA (1)...(19): siRNA sense strand
caacaaaggugggaaugcu

SEQ ID NO: 1141330 - RNA, 19 nt, Homo sapiens
  misc_RNA (1)...(19): siRNA sense strand
gauggcaacauuuagaauu

SEQ ID NO: 1141331 - RNA, 19 nt, Homo sapiens
  misc_RNA (1)...(19): siRNA sense strand
ucagaaaccucauuuaccu

SEQ ID NO: 1141332 - RNA, 19 nt, Homo sapiens
  misc_RNA (1)...(19): siRNA sense strand
uguaguaucuguuguagca

SEQ ID NO: 1141333 - RNA, 19 nt, Homo sapiens
  misc_RNA (1)...(19): siRNA sense strand
caacagcauuuaacucacu

SEQ ID NO: 1141334 - RNA, 19 nt, Homo sapiens
  misc_RNA (1)...(19): siRNA sense strand
gaaaacuuccuuccagaua

SEQ ID NO: 1141335 - RNA, 19 nt, Homo sapiens
  misc_RNA (1)...(19): siRNA sense strand
cuagagggccugugcaauu

SEQ ID NO: 1141336 - RNA, 19 nt, Homo sapiens
  misc_RNA (1)...(19): siRNA sense strand
gaacgaauggaaugugcaa

SEQ ID NO: 1141337 - RNA, 19 nt, Homo sapiens
  misc_RNA (1)...(19): siRNA sense strand
ucaauggcaucuucaaugg

SEQ ID NO: 1141338 - RNA, 19 nt, Homo sapiens
  misc_RNA (1)...(19): siRNA sense strand
gaagaauuccgauuagcau

SEQ ID NO: 1141339 - RNA, 19 nt, Homo sapiens
  misc_RNA (1)...(19): siRNA sense strand
gcugguaucaucuucauug

SEQ ID NO: 1141340 - RNA, 19 nt, Homo sapiens
  misc_RNA (1)...(19): siRNA sense strand
ucaccugucagaugaauaa

SEQ ID NO: 1141341 - RNA, 19 nt, Homo sapiens
  misc_RNA (1)...(19): siRNA sense strand
gaaguugaacgaauggaau

SEQ ID NO: 1141342 - RNA, 19 nt, Homo sapiens
  misc_RNA (1)...(19): siRNA sense strand
ucaaucacauaaugacuuc

SEQ ID NO: 1141343 - RNA, 19 nt, Homo sapiens
  misc_RNA (1)...(19): siRNA sense strand
cuucauaagcugacuuuaa

SEQ ID NO: 1141344 - RNA, 19 nt, Homo sapiens
  misc_RNA (1)...(19): siRNA sense strand
gagggccugugcaauuuga

SEQ ID NO: 1141345 - RNA, 19 nt, Homo sapiens
  misc_RNA (1)...(19): siRNA sense strand
gguguaucuuugaauauga

SEQ ID NO: 1141346 - RNA, 19 nt, Homo sapiens
  misc_RNA (1)...(19): siRNA sense strand
agaaguccaucguuugguu

SEQ ID NO: 1141347 - RNA, 19 nt, Homo sapiens
  misc_RNA (1)...(19): siRNA sense strand
ggccauugcugccaacauc

SEQ ID NO: 1141348 - RNA, 19 nt, Homo sapiens
  misc_RNA (1)...(19): siRNA sense strand
aaacaggaacuacagcauu

SEQ ID NO: 1141349 - RNA, 19 nt, Homo sapiens
  misc_RNA (1)...(19): siRNA sense strand
ggacaguuucccacauuga

SEQ ID NO: 1141350 - RNA, 19 nt, Homo sapiens
  misc_RNA (1)...(19): siRNA sense strand
uagaacaacuagaacaucu

SEQ ID NO: 1141351 - RNA, 19 nt, Homo sapiens
  misc_RNA (1)...(19): siRNA sense strand
ugaauaagaccaucauugg

SEQ ID NO: 1141352 - RNA, 19 nt, Homo sapiens
  misc_RNA (1)...(19): siRNA sense strand
caccagaguuuccugcaau

SEQ ID NO: 1141353 - RNA, 19 nt, Homo sapiens
  misc_RNA (1)...(19): siRNA sense strand
cagagccgcugguguaucu

SEQ ID NO: 1141354 - RNA, 19 nt, Homo sapiens
  misc_RNA (1)...(19): siRNA sense strand
guaaggaaugagcuaguaa

SEQ ID NO: 1141355 - RNA, 19 nt, Homo sapiens
  misc_RNA (1)...(19): siRNA sense strand
ggaaguugaacgaauggaa

SEQ ID NO: 1141356 - RNA, 19 nt, Homo sapiens
  misc_RNA (1)...(19): siRNA sense strand
cauuggauacguuuccuua

SEQ ID NO: 1141357 - RNA, 19 nt, Homo sapiens
  misc_RNA (1)...(19): siRNA sense strand
cauaagcugacuuuaagaa

SEQ ID NO: 1141358 - RNA, 19 nt, Homo sapiens
  misc_RNA (1)...(19): siRNA sense strand
ggaccucucucagugucaa

SEQ ID NO: 1141359 - RNA, 19 nt, Homo sapiens
  misc_RNA (1)...(19): siRNA sense strand
ccugaacccuaugaacuuu

SEQ ID NO: 1141360 - RNA, 19 nt, Homo sapiens
  misc_RNA (1)...(19): siRNA sense strand
gcuucuugcuggcugcaua

SEQ ID NO: 1141361 - RNA, 19 nt, Homo sapiens
  misc_RNA (1)...(19): siRNA sense strand
caacuagaacaucuggauu

SEQ ID NO: 1141362 - RNA, 19 nt, Homo sapiens
  misc_RNA (1)...(19): siRNA sense strand
cuagaucucaguagaaaug

SEQ ID NO: 1141363 - RNA, 19 nt, Homo sapiens
  misc_RNA (1)...(19): siRNA sense strand
agaaugacuuugcuuguac

SEQ ID NO: 1141364 - RNA, 19 nt, Homo sapiens
  misc_RNA (1)...(19): siRNA sense strand
ugaacccuaugaacuuuau

SEQ ID NO: 1141365 - RNA, 19 nt, Homo sapiens
  misc_RNA (1)...(19): siRNA sense strand
aaacuuccuuccagauauc

SEQ ID NO: 1141366 - RNA, 19 nt, Homo sapiens
  misc_RNA (1)...(19): siRNA sense strand
caguagaaauggcuugagu

SEQ ID NO: 1141367 - RNA, 19 nt, Homo sapiens
  misc_RNA (1)...(19): siRNA sense strand
uaugaugccuuuguuaucu

SEQ ID NO: 1141368 - RNA, 19 nt, Homo sapiens
  misc_RNA (1)...(19): siRNA sense strand
guuugaauaucaccuguca

SEQ ID NO: 1141369 - RNA, 19 nt, Homo sapiens
  misc_RNA (1)...(19): siRNA sense strand
gggcaugccugugcugagu

SEQ ID NO: 1141370 - RNA, 19 nt, Homo sapiens
  misc_RNA (1)...(19): siRNA sense strand
cuucagguacuaaauauga

SEQ ID NO: 1141371 - RNA, 19 nt, Homo sapiens
  misc_RNA (1)...(19): siRNA sense strand
ucacucagaaaccucauuu

SEQ ID NO: 1141372 - RNA, 19 nt, Homo sapiens
  misc_RNA (1)...(19): siRNA sense strand
uacuuucacuuccaacaaa

SEQ ID NO: 1141373 - RNA, 19 nt, Homo sapiens
  misc_RNA (1)...(19): siRNA sense strand
uucauaagcugacuuuaag

SEQ ID NO: 1141374 - RNA, 19 nt, Homo sapiens
  misc_RNA (1)...(19): siRNA sense strand
caugaagguuuccauaaaa

SEQ ID NO: 1141375 - RNA, 19 nt, Homo sapiens
  misc_RNA (1)...(19): siRNA sense strand
ucagugugcuuguaguauc

SEQ ID NO: 1141376 - RNA, 19 nt, Homo sapiens
  misc_RNA (1)...(19): siRNA sense strand
uauccaaccaggugcauuu

SEQ ID NO: 1141377 - RNA, 19 nt, Homo sapiens
  misc_RNA (1)...(19): siRNA sense strand
gagccacaacaacuucuuu

SEQ ID NO: 1141378 - RNA, 19 nt, Homo sapiens
  misc_RNA (1)...(19): siRNA sense strand
uaccuugacauuucucaua

SEQ ID NO: 1141379 - RNA, 19 nt, Homo sapiens
  misc_RNA (1)...(19): siRNA sense strand
gcauuccaauuugaaacaa

SEQ ID NO: 1141380 - RNA, 19 nt, Homo sapiens
  misc_RNA (1)...(19): siRNA sense strand
gagugugacuauugaaagg

SEQ ID NO: 1141381 - RNA, 19 nt, Homo sapiens
  misc_RNA (1)...(19): siRNA sense strand
cuacagcauuuuccaagua

SEQ ID NO: 1141382 - RNA, 19 nt, Homo sapiens
  misc_RNA (1)...(19): siRNA sense strand
ggauacguuuccuuauaag

SEQ ID NO: 1141383 - RNA, 19 nt, Homo sapiens
  misc_RNA (1)...(19): siRNA sense strand
guuauuaccaugaguucaa

SEQ ID NO: 1141384 - RNA, 19 nt, Homo sapiens
  misc_RNA (1)...(19): siRNA sense strand
uucaaggucuggcugguuu

SEQ ID NO: 1141385 - RNA, 19 nt, Homo sapiens
  misc_RNA (1)...(19): siRNA sense strand
gguccucagugugcuugua

SEQ ID NO: 1141386 - RNA, 19 nt, Homo sapiens
  misc_RNA (1)...(19): siRNA sense strand
uaaauaugagccacaacaa

SEQ ID NO: 1141387 - RNA, 19 nt, Homo sapiens
  misc_RNA (1)...(19): siRNA sense strand
ucacuacagagacuuuauu

SEQ ID NO: 1141388 - RNA, 19 nt, Homo sapiens
  misc_RNA (1)...(19): siRNA sense strand
gcauagaagugaucaauaa

SEQ ID NO: 1141389 - RNA, 19 nt, Homo sapiens
  misc_RNA (1)...(19): siRNA sense strand
cgacauaacuuacgacaaa

SEQ ID NO: 1141390 - RNA, 19 nt, Homo sapiens
  misc_RNA (1)...(19): siRNA sense strand
gacaugaucuuuaacagua

SEQ ID NO: 1141391 - RNA, 19 nt, Homo sapiens
  misc_RNA (1)...(19): siRNA sense strand
ggaagugacucaagaaguu

SEQ ID NO: 1141392 - RNA, 19 nt, Homo sapiens
  misc_RNA (1)...(19): siRNA sense strand
ggacagaaauuggaaauag

SEQ ID NO: 1141393 - RNA, 19 nt, Homo sapiens
  misc_RNA (1)...(19): siRNA sense strand
gaacaaaucacuauaaguc

SEQ ID NO: 1141394 - RNA, 19 nt, Homo sapiens
  misc_RNA (1)...(19): siRNA sense strand
acaaguagauccagaguuu

SEQ ID NO: 1141395 - RNA, 19 nt, Homo sapiens
  misc_RNA (1)...(19): siRNA sense strand
guacagaaguugaagugaa

SEQ ID NO: 1141396 - RNA, 19 nt, Homo sapiens
  misc_RNA (1)...(19): siRNA sense strand
cagaagagguugaugaaga

SEQ ID NO: 1141397 - RNA, 19 nt, Homo sapiens
  misc_RNA (1)...(19): siRNA sense strand
caacugaaggcuauuguua

SEQ ID NO: 1141398 - RNA, 19 nt, Homo sapiens
  misc_RNA (1)...(19): siRNA sense strand
ugagguugaugccuuauua

SEQ ID NO: 1141399 - RNA, 19 nt, Homo sapiens
  misc_RNA (1)...(19): siRNA sense strand
ggaaauagaacgacuggaa

SEQ ID NO: 1141400 - RNA, 19 nt, Homo sapiens
  misc_RNA (1)...(19): siRNA sense strand
gagacucaguauucauuua

SEQ ID NO: 1141401 - RNA, 19 nt, Homo sapiens
  misc_RNA (1)...(19): siRNA sense strand
gacaaaugaugauugauga

SEQ ID NO: 1141402 - RNA, 19 nt, Homo sapiens
  misc_RNA (1)...(19): siRNA sense strand
gaaagaaugugagcguaga

SEQ ID NO: 1141403 - RNA, 19 nt, Homo sapiens
  misc_RNA (1)...(19): siRNA sense strand
uaacccaucuguucaagaa

SEQ ID NO: 1141404 - RNA, 19 nt, Homo sapiens
  misc_RNA (1)...(19): siRNA sense strand
ugaaacaacugaaggcuau

SEQ ID NO: 1141405 - RNA, 19 nt, Homo sapiens
  misc_RNA (1)...(19): siRNA sense strand
caaccgaaauggagacuau

SEQ ID NO: 1141406 - RNA, 19 nt, Homo sapiens
  misc_RNA (1)...(19): siRNA sense strand
gaucaagaguguugcauag

SEQ ID NO: 1141407 - RNA, 19 nt, Homo sapiens
  misc_RNA (1)...(19): siRNA sense strand
gaaacgacauaacuuacga

SEQ ID NO: 1141408 - RNA, 19 nt, Homo sapiens
  misc_RNA (1)...(19): siRNA sense strand
agaaggaacucuuugaugu

SEQ ID NO: 1141409 - RNA, 19 nt, Homo sapiens
  misc_RNA (1)...(19): siRNA sense strand
gaaauagaacgacuggaaa

SEQ ID NO: 1141410 - RNA, 19 nt, Homo sapiens
  misc_RNA (1)...(19): siRNA sense strand
gauugaagccuuagagaaa

SEQ ID NO: 1141411 - RNA, 19 nt, Homo sapiens
  misc_RNA (1)...(19): siRNA sense strand
uaagagagaaccaaaugua

SEQ ID NO: 1141412 - RNA, 19 nt, Homo sapiens
  misc_RNA (1)...(19): siRNA sense strand
gauaagaaccauaacaugu

SEQ ID NO: 1141413 - RNA, 19 nt, Homo sapiens
  misc_RNA (1)...(19): siRNA sense strand
ccaaacagcuggagaugca

SEQ ID NO: 1141414 - RNA, 19 nt, Homo sapiens
  misc_RNA (1)...(19): siRNA sense strand
agaauaaacucuggguuaa

SEQ ID NO: 1141415 - RNA, 19 nt, Homo sapiens
  misc_RNA (1)...(19): siRNA sense strand
guacaagaauucugcaaag

SEQ ID NO: 1141416 - RNA, 19 nt, Homo sapiens
  misc_RNA (1)...(19): siRNA sense strand
ccacugggcuuuccugauc

SEQ ID NO: 1141417 - RNA, 19 nt, Homo sapiens
  misc_RNA (1)...(19): siRNA sense strand
ugaaggcuauuguuacuga

SEQ ID NO: 1141418 - RNA, 19 nt, Homo sapiens
  misc_RNA (1)...(19): siRNA sense strand
caagggaaacuaaaugaaa

SEQ ID NO: 1141419 - RNA, 19 nt, Homo sapiens
  misc_RNA (1)...(19): siRNA sense strand
ucaagaguguugcauagaa

SEQ ID NO: 1141420 - RNA, 19 nt, Homo sapiens
  misc_RNA (1)...(19): siRNA sense strand
acagauggguagaucauaa

SEQ ID NO: 1141421 - RNA, 19 nt, Homo sapiens
  misc_RNA (1)...(19): siRNA sense strand
uggaagaggugccguuuga

SEQ ID NO: 1141422 - RNA, 19 nt, Homo sapiens
  misc_RNA (1)...(19): siRNA sense strand
gacagaaauuggaaauaga

SEQ ID NO: 1141423 - RNA, 19 nt, Homo sapiens
  misc_RNA (1)...(19): siRNA sense strand
uggacaaucuguucaguuu

SEQ ID NO: 1141424 - RNA, 19 nt, Homo sapiens
  misc_RNA (1)...(19): siRNA sense strand
uaauacaacuguucagcuu

SEQ ID NO: 1141425 - RNA, 19 nt, Homo sapiens
  misc_RNA (1)...(19): siRNA sense strand
gggaacagauuacgugaag

SEQ ID NO: 1141426 - RNA, 19 nt, Homo sapiens
  misc_RNA (1)...(19): siRNA sense strand
guauggaacuaacaagaug

SEQ ID NO: 1141427 - RNA, 19 nt, Homo sapiens
  misc_RNA (1)...(19): siRNA sense strand
ccucuaacaugcaaacuga

SEQ ID NO: 1141428 - RNA, 19 nt, Homo sapiens
  misc_RNA (1)...(19): siRNA sense strand
gaaauggagacuauaagga

SEQ ID NO: 1141429 - RNA, 19 nt, Homo sapiens
  misc_RNA (1)...(19): siRNA sense strand
agagaaacgacauaacuua

SEQ ID NO: 1141430 - RNA, 19 nt, Homo sapiens
  misc_RNA (1)...(19): siRNA sense strand
gagcagaagggaacagauu

SEQ ID NO: 1141431 - RNA, 19 nt, Homo sapiens
  misc_RNA (1)...(19): siRNA sense strand
ggaugcagauggagacaau

SEQ ID NO: 1141432 - RNA, 19 nt, Homo sapiens
  misc_RNA (1)...(19): siRNA sense strand
gaagauaagaaccauaaca

SEQ ID NO: 1141433 - RNA, 19 nt, Homo sapiens
  misc_RNA (1)...(19): siRNA sense strand
gcuaaucccuuggucaaug

SEQ ID NO: 1141434 - RNA, 19 nt, Homo sapiens
  misc_RNA (1)...(19): siRNA sense strand
gaaggaacucuuugauguu

SEQ ID NO: 1141435 - RNA, 19 nt, Homo sapiens
  misc_RNA (1)...(19): siRNA sense strand
gauccagaguuugcagaua

SEQ ID NO: 1141436 - RNA, 19 nt, Homo sapiens
  misc_RNA (1)...(19): siRNA sense strand
ggcugaagauuaugaagaa

SEQ ID NO: 1141437 - RNA, 19 nt, Homo sapiens
  misc_RNA (1)...(19): siRNA sense strand
guuuggacaugaucuuuaa

SEQ ID NO: 1141438 - RNA, 19 nt, Homo sapiens
  misc_RNA (1)...(19): siRNA sense strand
caguaucuguugcaaauga

SEQ ID NO: 1141439 - RNA, 19 nt, Homo sapiens
  misc_RNA (1)...(19): siRNA sense strand
ggagacagauggguagauc

SEQ ID NO: 1141440 - RNA, 19 nt, Homo sapiens
  misc_RNA (1)...(19): siRNA sense strand
guauggauguccuaagaga

SEQ ID NO: 1141441 - RNA, 19 nt, Homo sapiens
  misc_RNA (1)...(19): siRNA sense strand
gaaguugaagugaaaucua

SEQ ID NO: 1141442 - RNA, 19 nt, Homo sapiens
  misc_RNA (1)...(19): siRNA sense strand
gcuacagacucaaccgaaa

SEQ ID NO: 1141443 - RNA, 19 nt, Homo sapiens
  misc_RNA (1)...(19): siRNA sense strand
uacagaaguugaagugaaa

SEQ ID NO: 1141444 - RNA, 19 nt, Homo sapiens
  misc_RNA (1)...(19): siRNA sense strand
gugaagauaagaaccauaa

SEQ ID NO: 1141445 - RNA, 19 nt, Homo sapiens
  misc_RNA (1)...(19): siRNA sense strand
gauaggaauaguauggaua

SEQ ID NO: 1141446 - RNA, 19 nt, Homo sapiens
  misc_RNA (1)...(19): siRNA sense strand
gacaaucuguucaguuuac

SEQ ID NO: 1141447 - RNA, 19 nt, Homo sapiens
  misc_RNA (1)...(19): siRNA sense strand
ggacaaucuguucaguuua

SEQ ID NO: 1141448 - RNA, 19 nt, Homo sapiens
  misc_RNA (1)...(19): siRNA sense strand
gaucagaacgcaccaccaa

SEQ ID NO: 1141449 - RNA, 19 nt, Homo sapiens
  misc_RNA (1)...(19): siRNA sense strand
ugacagaaacgacaaugaa

SEQ ID NO: 1141450 - RNA, 19 nt, Homo sapiens
  misc_RNA (1)...(19): siRNA sense strand
gaugaucucaggacagaaa

SEQ ID NO: 1141451 - RNA, 19 nt, Homo sapiens
  misc_RNA (1)...(19): siRNA sense strand
ccaaaccuccacaaucuaa

SEQ ID NO: 1141452 - RNA, 19 nt, Homo sapiens
  misc_RNA (1)...(19): siRNA sense strand
aagcaagaaucaccaaaug

SEQ ID NO: 1141453 - RNA, 19 nt, Homo sapiens
  misc_RNA (1)...(19): siRNA sense strand
ccggaaaccuaccgugaaa

SEQ ID NO: 1141454 - RNA, 19 nt, Homo sapiens
  misc_RNA (1)...(19): siRNA sense strand
gaaauuggaaauagaacga

SEQ ID NO: 1141455 - RNA, 19 nt, Homo sapiens
  misc_RNA (1)...(19): siRNA sense strand
gcuaauacccauuugaauc

SEQ ID NO: 1141456 - RNA, 19 nt, Homo sapiens
  misc_RNA (1)...(19): siRNA sense strand
gaauaaacucuggguuaaa

SEQ ID NO: 1141457 - RNA, 19 nt, Homo sapiens
  misc_RNA (1)...(19): siRNA sense strand
cgacaaaugaugauugaug

SEQ ID NO: 1141458 - RNA, 19 nt, Homo sapiens
  misc_RNA (1)...(19): siRNA sense strand
aaaguuaacccaucuguuc

SEQ ID NO: 1141459 - RNA, 19 nt, Homo sapiens
  misc_RNA (1)...(19): siRNA sense strand
ggaccgauguagaaacaag

SEQ ID NO: 1141460 - RNA, 19 nt, Homo sapiens
  misc_RNA (1)...(19): siRNA sense strand
ugaauggaccgauguagaa

SEQ ID NO: 1141461 - RNA, 19 nt, Homo sapiens
  misc_RNA (1)...(19): siRNA sense strand
ugacaaacgcagauuagaa

SEQ ID NO: 1141462 - RNA, 19 nt, Homo sapiens
  misc_RNA (1)...(19): siRNA sense strand
uaaggagacucaguauuca

SEQ ID NO: 1141463 - RNA, 19 nt, Homo sapiens
  misc_RNA (1)...(19): siRNA sense strand
gcuaagaacauguauggau

SEQ ID NO: 1141464 - RNA, 19 nt, Homo sapiens
  misc_RNA (1)...(19): siRNA sense strand
gaagaggugccguuugauc

SEQ ID NO: 1141465 - RNA, 19 nt, Homo sapiens
  misc_RNA (1)...(19): siRNA sense strand
gcagauaugauaacuguac

SEQ ID NO: 1141466 - RNA, 19 nt, Homo sapiens
  misc_RNA (1)...(19): siRNA sense strand
ggagauugaaacuaaacua

SEQ ID NO: 1141467 - RNA, 19 nt, Homo sapiens
  misc_RNA (1)...(19): siRNA sense strand
gaagugggagaaagaaugu

SEQ ID NO: 1141468 - RNA, 19 nt, Homo sapiens
  misc_RNA (1)...(19): siRNA sense strand
aacaggaacuugaaacuca

SEQ ID NO: 1141469 - RNA, 19 nt, Homo sapiens
  misc_RNA (1)...(19): siRNA sense strand
gcaagggaaacuaaaugaa

SEQ ID NO: 1141470 - RNA, 19 nt, Homo sapiens
  misc_RNA (1)...(19): siRNA sense strand
aaagagacguauugcuaau

SEQ ID NO: 1141471 - RNA, 19 nt, Homo sapiens
  misc_RNA (1)...(19): siRNA sense strand
uagugucuaugguguauuu

SEQ ID NO: 1141472 - RNA, 19 nt, Homo sapiens
  misc_RNA (1)...(19): siRNA sense strand
ggaacucuuugauguugug

SEQ ID NO: 1141473 - RNA, 19 nt, Homo sapiens
  misc_RNA (1)...(19): siRNA sense strand
uaacuuacgacaaaugaug

SEQ ID NO: 1141474 - RNA, 19 nt, Homo sapiens
  misc_RNA (1)...(19): siRNA sense strand
ugaaguagcaagaccugua

SEQ ID NO: 1141475 - RNA, 19 nt, Homo sapiens
  misc_RNA (1)...(19): siRNA sense strand
acgugaagcugguaauauu

SEQ ID NO: 1141476 - RNA, 19 nt, Homo sapiens
  misc_RNA (1)...(19): siRNA sense strand
ggacaugaucuuuaacagu

SEQ ID NO: 1141477 - RNA, 19 nt, Homo sapiens
  misc_RNA (1)...(19): siRNA sense strand
ucagaacgcaccaccaauu

SEQ ID NO: 1141478 - RNA, 19 nt, Homo sapiens
  misc_RNA (1)...(19): siRNA sense strand
gagaagcuaugcccaaucc

SEQ ID NO: 1141479 - RNA, 19 nt, Homo sapiens
  misc_RNA (1)...(19): siRNA sense strand
gcacucacaccacccagaa

SEQ ID NO: 1141480 - RNA, 19 nt, Homo sapiens
  misc_RNA (1)...(19): siRNA sense strand
ggauauacagugugagguu

SEQ ID NO: 1141481 - RNA, 19 nt, Homo sapiens
  misc_RNA (1)...(19): siRNA sense strand
gaagcuaugcccaauccaa

SEQ ID NO: 1141482 - RNA, 19 nt, Homo sapiens
  misc_RNA (1)...(19): siRNA sense strand
ugaggaagauaaacgcaau

SEQ ID NO: 1141483 - RNA, 19 nt, Homo sapiens
  misc_RNA (1)...(19): siRNA sense strand
ccaaauguauggaacuaac

SEQ ID NO: 1141484 - RNA, 19 nt, Homo sapiens
  misc_RNA (1)...(19): siRNA sense strand
ggcaauaugugguuuaacg

SEQ ID NO: 1141485 - RNA, 19 nt, Homo sapiens
  misc_RNA (1)...(19): siRNA sense strand
uagcuaagugugagaagua

SEQ ID NO: 1141486 - RNA, 19 nt, Homo sapiens
  misc_RNA (1)...(19): siRNA sense strand
caagaguguugcauagaag

SEQ ID NO: 1141487 - RNA, 19 nt, Homo sapiens
  misc_RNA (1)...(19): siRNA sense strand
uacgacaaaugaugauuga

SEQ ID NO: 1141488 - RNA, 19 nt, Homo sapiens
  misc_RNA (1)...(19): siRNA sense strand
gcauagaagugaucaauaa

SEQ ID NO: 1141489 - RNA, 19 nt, Homo sapiens
  misc_RNA (1)...(19): siRNA sense strand
cgacauaacuuacgacaaa

SEQ ID NO: 1141490 - RNA, 19 nt, Homo sapiens
  misc_RNA (1)...(19): siRNA sense strand
gacaugaucuuuaacagua

SEQ ID NO: 1141491 - RNA, 19 nt, Homo sapiens
  misc_RNA (1)...(19): siRNA sense strand
ggaagugacucaagaaguu

SEQ ID NO: 1141492 - RNA, 19 nt, Homo sapiens
  misc_RNA (1)...(19): siRNA sense strand
ggacagaaauuggaaauag

SEQ ID NO: 1141493 - RNA, 19 nt, Homo sapiens
  misc_RNA (1)...(19): siRNA sense strand
gaacaaaucacuauaaguc

SEQ ID NO: 1141494 - RNA, 19 nt, Homo sapiens
  misc_RNA (1)...(19): siRNA sense strand
acaaguagauccagaguuu

SEQ ID NO: 1141495 - RNA, 19 nt, Homo sapiens
  misc_RNA (1)...(19): siRNA sense strand
guacagaaguugaagugaa

SEQ ID NO: 1141496 - RNA, 19 nt, Homo sapiens
  misc_RNA (1)...(19): siRNA sense strand
cagaagagguugaugaaga

SEQ ID NO: 1141497 - RNA, 19 nt, Homo sapiens
  misc_RNA (1)...(19): siRNA sense strand
caacugaaggcuauuguua

SEQ ID NO: 1141498 - RNA, 19 nt, Homo sapiens
  misc_RNA (1)...(19): siRNA sense strand
ugagguugaugccuuauua

SEQ ID NO: 1141499 - RNA, 19 nt, Homo sapiens
  misc_RNA (1)...(19): siRNA sense strand
ggaaauagaacgacuggaa

SEQ ID NO: 1141500 - RNA, 19 nt, Homo sapiens
  misc_RNA (1)...(19): siRNA sense strand
gagacucaguauucauuua

SEQ ID NO: 1141501 - RNA, 19 nt, Homo sapiens
  misc_RNA (1)...(19): siRNA sense strand
gacaaaugaugauugauga

SEQ ID NO: 1141502 - RNA, 19 nt, Homo sapiens
  misc_RNA (1)...(19): siRNA sense strand
gaaagaaugugagcguaga

SEQ ID NO: 1141503 - RNA, 19 nt, Homo sapiens
  misc_RNA (1)...(19): siRNA sense strand
uaacccaucuguucaagaa

SEQ ID NO: 1141504 - RNA, 19 nt, Homo sapiens
  misc_RNA (1)...(19): siRNA sense strand
ugaaacaacugaaggcuau

SEQ ID NO: 1141505 - RNA, 19 nt, Homo sapiens
  misc_RNA (1)...(19): siRNA sense strand
caaccgaaauggagacuau

SEQ ID NO: 1141506 - RNA, 19 nt, Homo sapiens
  misc_RNA (1)...(19): siRNA sense strand
gaucaagaguguugcauag

SEQ ID NO: 1141507 - RNA, 19 nt, Homo sapiens
  misc_RNA (1)...(19): siRNA sense strand
gaaacgacauaacuuacga

SEQ ID NO: 1141508 - RNA, 19 nt, Homo sapiens
  misc_RNA (1)...(19): siRNA sense strand
agaaggaacucuuugaugu

SEQ ID NO: 1141509 - RNA, 19 nt, Homo sapiens
  misc_RNA (1)...(19): siRNA sense strand
gaaauagaacgacuggaaa

SEQ ID NO: 1141510 - RNA, 19 nt, Homo sapiens
  misc_RNA (1)...(19): siRNA sense strand
gauugaagccuuagagaaa

SEQ ID NO: 1141511 - RNA, 19 nt, Homo sapiens
  misc_RNA (1)...(19): siRNA sense strand
uaagagagaaccaaaugua

SEQ ID NO: 1141512 - RNA, 19 nt, Homo sapiens
  misc_RNA (1)...(19): siRNA sense strand
gauaagaaccauaacaugu

SEQ ID NO: 1141513 - RNA, 19 nt, Homo sapiens
  misc_RNA (1)...(19): siRNA sense strand
ccaaacagcuggagaugca

SEQ ID NO: 1141514 - RNA, 19 nt, Homo sapiens
  misc_RNA (1)...(19): siRNA sense strand
agaauaaacucuggguuaa

SEQ ID NO: 1141515 - RNA, 19 nt, Homo sapiens
  misc_RNA (1)...(19): siRNA sense strand
guacaagaauucugcaaag

SEQ ID NO: 1141516 - RNA, 19 nt, Homo sapiens
  misc_RNA (1)...(19): siRNA sense strand
ccacugggcuuuccugauc

SEQ ID NO: 1141517 - RNA, 19 nt, Homo sapiens
  misc_RNA (1)...(19): siRNA sense strand
ugaaggcuauuguuacuga

SEQ ID NO: 1141518 - RNA, 19 nt, Homo sapiens
  misc_RNA (1)...(19): siRNA sense strand
caagggaaacuaaaugaaa

SEQ ID NO: 1141519 - RNA, 19 nt, Homo sapiens
  misc_RNA (1)...(19): siRNA sense strand
ucaagaguguugcauagaa

SEQ ID NO: 1141520 - RNA, 19 nt, Homo sapiens
  misc_RNA (1)...(19): siRNA sense strand
acagauggguagaucauaa

SEQ ID NO: 1141521 - RNA, 19 nt, Homo sapiens
  misc_RNA (1)...(19): siRNA sense strand
uggaagaggugccguuuga

SEQ ID NO: 1141522 - RNA, 19 nt, Homo sapiens
  misc_RNA (1)...(19): siRNA sense strand
gacagaaauuggaaauaga

SEQ ID NO: 1141523 - RNA, 19 nt, Homo sapiens
  misc_RNA (1)...(19): siRNA sense strand
uggacaaucuguucaguuu

SEQ ID NO: 1141524 - RNA, 19 nt, Homo sapiens
  misc_RNA (1)...(19): siRNA sense strand
uaauacaacuguucagcuu

SEQ ID NO: 1141525 - RNA, 19 nt, Homo sapiens
  misc_RNA (1)...(19): siRNA sense strand
gggaacagauuacgugaag

SEQ ID NO: 1141526 - RNA, 19 nt, Homo sapiens
  misc_RNA (1)...(19): siRNA sense strand
guauggaacuaacaagaug

SEQ ID NO: 1141527 - RNA, 19 nt, Homo sapiens
  misc_RNA (1)...(19): siRNA sense strand
ccucuaacaugcaaacuga

SEQ ID NO: 1141528 - RNA, 19 nt, Homo sapiens
  misc_RNA (1)...(19): siRNA sense strand
gaaauggagacuauaagga

SEQ ID NO: 1141529 - RNA, 19 nt, Homo sapiens
  misc_RNA (1)...(19): siRNA sense strand
agagaaacgacauaacuua

SEQ ID NO: 1141530 - RNA, 19 nt, Homo sapiens
  misc_RNA (1)...(19): siRNA sense strand
gagcagaagggaacagauu

SEQ ID NO: 1141531 - RNA, 19 nt, Homo sapiens
  misc_RNA (1)...(19): siRNA sense strand
ggaugcagauggagacaau

SEQ ID NO: 1141532 - RNA, 19 nt, Homo sapiens
  misc_RNA (1)...(19): siRNA sense strand
gaagauaagaaccauaaca

SEQ ID NO: 1141533 - RNA, 19 nt, Homo sapiens
  misc_RNA (1)...(19): siRNA sense strand
gcuaaucccuuggucaaug

SEQ ID NO: 1141534 - RNA, 19 nt, Homo sapiens
  misc_RNA (1)...(19): siRNA sense strand
gaaggaacucuuugauguu

SEQ ID NO: 1141535 - RNA, 19 nt, Homo sapiens
  misc_RNA (1)...(19): siRNA sense strand
gauccagaguuugcagaua

SEQ ID NO: 1141536 - RNA, 19 nt, Homo sapiens
  misc_RNA (1)...(19): siRNA sense strand
ggcugaagauuaugaagaa

SEQ ID NO: 1141537 - RNA, 19 nt, Homo sapiens
  misc_RNA (1)...(19): siRNA sense strand
guuuggacaugaucuuuaa

SEQ ID NO: 1141538 - RNA, 19 nt, Homo sapiens
  misc_RNA (1)...(19): siRNA sense strand
caguaucuguugcaaauga

SEQ ID NO: 1141539 - RNA, 19 nt, Homo sapiens
  misc_RNA (1)...(19): siRNA sense strand
ggagacagauggguagauc

SEQ ID NO: 1141540 - RNA, 19 nt, Homo sapiens
  misc_RNA (1)...(19): siRNA sense strand
guauggauguccuaagaga

SEQ ID NO: 1141541 - RNA, 19 nt, Homo sapiens
  misc_RNA (1)...(19): siRNA sense strand
gaaguugaagugaaaucua

SEQ ID NO: 1141542 - RNA, 19 nt, Homo sapiens
  misc_RNA (1)...(19): siRNA sense strand
gcuacagacucaaccgaaa

SEQ ID NO: 1141543 - RNA, 19 nt, Homo sapiens
  misc_RNA (1)...(19): siRNA sense strand
uacagaaguugaagugaaa

SEQ ID NO: 1141544 - RNA, 19 nt, Homo sapiens
  misc_RNA (1)...(19): siRNA sense strand
gugaagauaagaaccauaa

SEQ ID NO: 1141545 - RNA, 19 nt, Homo sapiens
  misc_RNA (1)...(19): siRNA sense strand
gauaggaauaguauggaua

SEQ ID NO: 1141546 - RNA, 19 nt, Homo sapiens
  misc_RNA (1)...(19): siRNA sense strand
gacaaucuguucaguuuac

SEQ ID NO: 1141547 - RNA, 19 nt, Homo sapiens
  misc_RNA (1)...(19): siRNA sense strand
ggacaaucuguucaguuua

SEQ ID NO: 1141548 - RNA, 19 nt, Homo sapiens
  misc_RNA (1)...(19): siRNA sense strand
gaucagaacgcaccaccaa

SEQ ID NO: 1141549 - RNA, 19 nt, Homo sapiens
  misc_RNA (1)...(19): siRNA sense strand
ugacagaaacgacaaugaa

SEQ ID NO: 1141550 - RNA, 19 nt, Homo sapiens
  misc_RNA (1)...(19): siRNA sense strand
gaugaucucaggacagaaa

SEQ ID NO: 1141551 - RNA, 19 nt, Homo sapiens
  misc_RNA (1)...(19): siRNA sense strand
ccaaaccuccacaaucuaa

SEQ ID NO: 1141552 - RNA, 19 nt, Homo sapiens
  misc_RNA (1)...(19): siRNA sense strand
aagcaagaaucaccaaaug

SEQ ID NO: 1141553 - RNA, 19 nt, Homo sapiens
  misc_RNA (1)...(19): siRNA sense strand
ccggaaaccuaccgugaaa

SEQ ID NO: 1141554 - RNA, 19 nt, Homo sapiens
  misc_RNA (1)...(19): siRNA sense strand
gaaauuggaaauagaacga

SEQ ID NO: 1141555 - RNA, 19 nt, Homo sapiens
  misc_RNA (1)...(19): siRNA sense strand
gcuaauacccauuugaauc

SEQ ID NO: 1141556 - RNA, 19 nt, Homo sapiens
  misc_RNA (1)...(19): siRNA sense strand
gaauaaacucuggguuaaa

SEQ ID NO: 1141557 - RNA, 19 nt, Homo sapiens
  misc_RNA (1)...(19): siRNA sense strand
cgacaaaugaugauugaug

SEQ ID NO: 1141558 - RNA, 19 nt, Homo sapiens
  misc_RNA (1)...(19): siRNA sense strand
aaaguuaacccaucuguuc

SEQ ID NO: 1141559 - RNA, 19 nt, Homo sapiens
  misc_RNA (1)...(19): siRNA sense strand
ggaccgauguagaaacaag

SEQ ID NO: 1141560 - RNA, 19 nt, Homo sapiens
  misc_RNA (1)...(19): siRNA sense strand
ugaauggaccgauguagaa

SEQ ID NO: 1141561 - RNA, 19 nt, Homo sapiens
  misc_RNA (1)...(19): siRNA sense strand
ugacaaacgcagauuagaa

SEQ ID NO: 1141562 - RNA, 19 nt, Homo sapiens
  misc_RNA (1)...(19): siRNA sense strand
uaaggagacucaguauuca

SEQ ID NO: 1141563 - RNA, 19 nt, Homo sapiens
  misc_RNA (1)...(19): siRNA sense strand
gcuaagaacauguauggau

SEQ ID NO: 1141564 - RNA, 19 nt, Homo sapiens
  misc_RNA (1)...(19): siRNA sense strand
gaagaggugccguuugauc

SEQ ID NO: 1141565 - RNA, 19 nt, Homo sapiens
  misc_RNA (1)...(19): siRNA sense strand
gcagauaugauaacuguac

SEQ ID NO: 1141566 - RNA, 19 nt, Homo sapiens
  misc_RNA (1)...(19): siRNA sense strand
ggagauugaaacuaaacua

SEQ ID NO: 1141567 - RNA, 19 nt, Homo sapiens
  misc_RNA (1)...(19): siRNA sense strand
gaagugggagaaagaaugu

SEQ ID NO: 1141568 - RNA, 19 nt, Homo sapiens
  misc_RNA (1)...(19): siRNA sense strand
aacaggaacuugaaacuca

SEQ ID NO: 1141569 - RNA, 19 nt, Homo sapiens
  misc_RNA (1)...(19): siRNA sense strand
gcaagggaaacuaaaugaa

SEQ ID NO: 1141570 - RNA, 19 nt, Homo sapiens
  misc_RNA (1)...(19): siRNA sense strand
aaagagacguauugcuaau

SEQ ID NO: 1141571 - RNA, 19 nt, Homo sapiens
  misc_RNA (1)...(19): siRNA sense strand
uagugucuaugguguauuu

SEQ ID NO: 1141572 - RNA, 19 nt, Homo sapiens
  misc_RNA (1)...(19): siRNA sense strand
ggaacucuuugauguugug

SEQ ID NO: 1141573 - RNA, 19 nt, Homo sapiens
  misc_RNA (1)...(19): siRNA sense strand
uaacuuacgacaaaugaug

SEQ ID NO: 1141574 - RNA, 19 nt, Homo sapiens
  misc_RNA (1)...(19): siRNA sense strand
ugaaguagcaagaccugua

SEQ ID NO: 1141575 - RNA, 19 nt, Homo sapiens
  misc_RNA (1)...(19): siRNA sense strand
acgugaagcugguaauauu

SEQ ID NO: 1141576 - RNA, 19 nt, Homo sapiens
  misc_RNA (1)...(19): siRNA sense strand
ggacaugaucuuuaacagu

SEQ ID NO: 1141577 - RNA, 19 nt, Homo sapiens
  misc_RNA (1)...(19): siRNA sense strand
ucagaacgcaccaccaauu

SEQ ID NO: 1141578 - RNA, 19 nt, Homo sapiens
  misc_RNA (1)...(19): siRNA sense strand
gagaagcuaugcccaaucc

SEQ ID NO: 1141579 - RNA, 19 nt, Homo sapiens
  misc_RNA (1)...(19): siRNA sense strand
gcacucacaccacccagaa

SEQ ID NO: 1141580 - RNA, 19 nt, Homo sapiens
  misc_RNA (1)...(19): siRNA sense strand
ggauauacagugugagguu

SEQ ID NO: 1141581 - RNA, 19 nt, Homo sapiens
  misc_RNA (1)...(19): siRNA sense strand
gaagcuaugcccaauccaa

SEQ ID NO: 1141582 - RNA, 19 nt, Homo sapiens
  misc_RNA (1)...(19): siRNA sense strand
ugaggaagauaaacgcaau

SEQ ID NO: 1141583 - RNA, 19 nt, Homo sapiens
  misc_RNA (1)...(19): siRNA sense strand
ccaaauguauggaacuaac

SEQ ID NO: 1141584 - RNA, 19 nt, Homo sapiens
  misc_RNA (1)...(19): siRNA sense strand
ggcaauaugugguuuaacg

SEQ ID NO: 1141585 - RNA, 19 nt, Homo sapiens
  misc_RNA (1)...(19): siRNA sense strand
uagcuaagugugagaagua

SEQ ID NO: 1141586 - RNA, 19 nt, Homo sapiens
  misc_RNA (1)...(19): siRNA sense strand
caagaguguugcauagaag

SEQ ID NO: 1141587 - RNA, 19 nt, Homo sapiens
  misc_RNA (1)...(19): siRNA sense strand
uacgacaaaugaugauuga

SEQ ID NO: 1141588 - RNA, 19 nt, Homo sapiens
  misc_RNA (1)...(19): siRNA sense strand
ggcaugaucuucaguauga

SEQ ID NO: 1141589 - RNA, 19 nt, Homo sapiens
  misc_RNA (1)...(19): siRNA sense strand
gacaauaaauuccacauca

SEQ ID NO: 1141590 - RNA, 19 nt, Homo sapiens
  misc_RNA (1)...(19): siRNA sense strand
ccacaaggaugaggugauu

SEQ ID NO: 1141591 - RNA, 19 nt, Homo sapiens
  misc_RNA (1)...(19): siRNA sense strand
ggauuuaacuucaucuucu

SEQ ID NO: 1141592 - RNA, 19 nt, Homo sapiens
  misc_RNA (1)...(19): siRNA sense strand
gcugaaagccauccacuau

SEQ ID NO: 1141593 - RNA, 19 nt, Homo sapiens
  misc_RNA (1)...(19): siRNA sense strand
gauauucccacaaggauga

SEQ ID NO: 1141594 - RNA, 19 nt, Homo sapiens
  misc_RNA (1)...(19): siRNA sense strand
caagaaggacguacucgaa

SEQ ID NO: 1141595 - RNA, 19 nt, Homo sapiens
  misc_RNA (1)...(19): siRNA sense strand
gcguugaacugcugugguu

SEQ ID NO: 1141596 - RNA, 19 nt, Homo sapiens
  misc_RNA (1)...(19): siRNA sense strand
uuaaggaaguccaggaguu

SEQ ID NO: 1141597 - RNA, 19 nt, Homo sapiens
  misc_RNA (1)...(19): siRNA sense strand
acaggagucuauauucuga

SEQ ID NO: 1141598 - RNA, 19 nt, Homo sapiens
  misc_RNA (1)...(19): siRNA sense strand
aggaugaggugauuaagga

SEQ ID NO: 1141599 - RNA, 19 nt, Homo sapiens
  misc_RNA (1)...(19): siRNA sense strand
ugaaagccauccacuaugc

SEQ ID NO: 1141600 - RNA, 19 nt, Homo sapiens
  misc_RNA (1)...(19): siRNA sense strand
uggaacaguuuaucucaga

SEQ ID NO: 1141601 - RNA, 19 nt, Homo sapiens
  misc_RNA (1)...(19): siRNA sense strand
gugaaguccuguccugaug

SEQ ID NO: 1141602 - RNA, 19 nt, Homo sapiens
  misc_RNA (1)...(19): siRNA sense strand
cuacacaggagucuauauu

SEQ ID NO: 1141603 - RNA, 19 nt, Homo sapiens
  misc_RNA (1)...(19): siRNA sense strand
ggucuucgacaauaaauuc

SEQ ID NO: 1141604 - RNA, 19 nt, Homo sapiens
  misc_RNA (1)...(19): siRNA sense strand
acacaggagucuauauucu

SEQ ID NO: 1141605 - RNA, 19 nt, Homo sapiens
  misc_RNA (1)...(19): siRNA sense strand
acaaggaugaggugauuaa

SEQ ID NO: 1141606 - RNA, 19 nt, Homo sapiens
  misc_RNA (1)...(19): siRNA sense strand
uaaggaaguccaggaguuu

SEQ ID NO: 1141607 - RNA, 19 nt, Homo sapiens
  misc_RNA (1)...(19): siRNA sense strand
uaccugcuguucggauuua

SEQ ID NO: 1141608 - RNA, 19 nt, Homo sapiens
  misc_RNA (1)...(19): siRNA sense strand
gauuuaacuucaucuucug

SEQ ID NO: 1141609 - RNA, 19 nt, Homo sapiens
  misc_RNA (1)...(19): siRNA sense strand
gcauugccguggucaugau

SEQ ID NO: 1141610 - RNA, 19 nt, Homo sapiens
  misc_RNA (1)...(19): siRNA sense strand
gcagugggcaucggcauug

SEQ ID NO: 1141611 - RNA, 19 nt, Homo sapiens
  misc_RNA (1)...(19): siRNA sense strand
ggugauauucgccauugaa

SEQ ID NO: 1141612 - RNA, 19 nt, Homo sapiens
  misc_RNA (1)...(19): siRNA sense strand
caauaaauuccacaucauc

SEQ ID NO: 1141613 - RNA, 19 nt, Homo sapiens
  misc_RNA (1)...(19): siRNA sense strand
caaggacaccuacaacaag

SEQ ID NO: 1141614 - RNA, 19 nt, Homo sapiens
  misc_RNA (1)...(19): siRNA sense strand
acaaggacaccuacaacaa

SEQ ID NO: 1141615 - RNA, 19 nt, Homo sapiens
  misc_RNA (1)...(19): siRNA sense strand
guucuucggcuuccucuug

SEQ ID NO: 1141616 - RNA, 19 nt, Homo sapiens
  misc_RNA (1)...(19): siRNA sense strand
gaacaguuuaucucagaca

SEQ ID NO: 1141617 - RNA, 19 nt, Homo sapiens
  misc_RNA (1)...(19): siRNA sense strand
caucaaauaccugcuguuc

SEQ ID NO: 1141618 - RNA, 19 nt, Homo sapiens
  misc_RNA (1)...(19): siRNA sense strand
acaacaagcugaaaaccaa

SEQ ID NO: 1141619 - RNA, 19 nt, Homo sapiens
  misc_RNA (1)...(19): siRNA sense strand
ccaagugcaucaaauaccu

SEQ ID NO: 1141620 - RNA, 19 nt, Homo sapiens
  misc_RNA (1)...(19): siRNA sense strand
guucggauuuaacuucauc

SEQ ID NO: 1141621 - RNA, 19 nt, Homo sapiens
  misc_RNA (1)...(19): siRNA sense strand
gacuauggcuccgauucga

SEQ ID NO: 1141622 - RNA, 19 nt, Homo sapiens
  misc_RNA (1)...(19): siRNA sense strand
gcaggaaccgcgagauggu

SEQ ID NO: 1141623 - RNA, 19 nt, Homo sapiens
  misc_RNA (1)...(19): siRNA sense strand
gcuguucggauuuaacuuc

SEQ ID NO: 1141624 - RNA, 19 nt, Homo sapiens
  misc_RNA (1)...(19): siRNA sense strand
aagaaggacguacucgaaa

SEQ ID NO: 1141625 - RNA, 19 nt, Homo sapiens
  misc_RNA (1)...(19): siRNA sense strand
caguuuaucucagacaucu

SEQ ID NO: 1141626 - RNA, 19 nt, Homo sapiens
  misc_RNA (1)...(19): siRNA sense strand
gaucuugugcugugcuauc

SEQ ID NO: 1141627 - RNA, 19 nt, Homo sapiens
  misc_RNA (1)...(19): siRNA sense strand
gugauauucgccauugaaa

SEQ ID NO: 1141628 - RNA, 19 nt, Homo sapiens
  misc_RNA (1)...(19): siRNA sense strand
ucaaaggaggcaccaagug

SEQ ID NO: 1141629 - RNA, 19 nt, Homo sapiens
  misc_RNA (1)...(19): siRNA sense strand
agaaggacguacucgaaac

SEQ ID NO: 1141630 - RNA, 19 nt, Homo sapiens
  misc_RNA (1)...(19): siRNA sense strand
gcugugcuauccgcaggaa

SEQ ID NO: 1141631 - RNA, 19 nt, Homo sapiens
  misc_RNA (1)...(19): siRNA sense strand
aauaccugcuguucggauu

SEQ ID NO: 1141632 - RNA, 19 nt, Homo sapiens
  misc_RNA (1)...(19): siRNA sense strand
gccguggucaugauauuug

SEQ ID NO: 1141633 - RNA, 19 nt, Homo sapiens
  misc_RNA (1)...(19): siRNA sense strand
ggacuauggcuccgauucg

SEQ ID NO: 1141634 - RNA, 19 nt, Homo sapiens
  misc_RNA (1)...(19): siRNA sense strand
cgagcaagaaacuaauaau

SEQ ID NO: 1141635 - RNA, 19 nt, Homo sapiens
  misc_RNA (1)...(19): siRNA sense strand
cgacaauaaauuccacauc

SEQ ID NO: 1141636 - RNA, 19 nt, Homo sapiens
  misc_RNA (1)...(19): siRNA sense strand
guugaacugcugugguuug

SEQ ID NO: 1141637 - RNA, 19 nt, Homo sapiens
  misc_RNA (1)...(19): siRNA sense strand
ucgagcaagaaacuaauaa

SEQ ID NO: 1141638 - RNA, 19 nt, Homo sapiens
  misc_RNA (1)...(19): siRNA sense strand
gauauuuggcaugaucuuc

SEQ ID NO: 1141639 - RNA, 19 nt, Homo sapiens
  misc_RNA (1)...(19): siRNA sense strand
ggaugaggugauuaaggaa

SEQ ID NO: 1141640 - RNA, 19 nt, Homo sapiens
  misc_RNA (1)...(19): siRNA sense strand
gaagaaauguggauaaaga

SEQ ID NO: 1141641 - RNA, 19 nt, Homo sapiens
  misc_RNA (1)...(19): siRNA sense strand
ggacuuaaaugaagaagaa

SEQ ID NO: 1141642 - RNA, 19 nt, Homo sapiens
  misc_RNA (1)...(19): siRNA sense strand
ggaaagaauuaccagaaua

SEQ ID NO: 1141643 - RNA, 19 nt, Homo sapiens
  misc_RNA (1)...(19): siRNA sense strand
gaaaggaggugcuaagaca

SEQ ID NO: 1141644 - RNA, 19 nt, Homo sapiens
  misc_RNA (1)...(19): siRNA sense strand
gcacuucgguuacucaauu

SEQ ID NO: 1141645 - RNA, 19 nt, Homo sapiens
  misc_RNA (1)...(19): siRNA sense strand
ccgcauagcucauaggaua

SEQ ID NO: 1141646 - RNA, 19 nt, Homo sapiens
  misc_RNA (1)...(19): siRNA sense strand
gaagaaggcugaggagaau

SEQ ID NO: 1141647 - RNA, 19 nt, Homo sapiens
  misc_RNA (1)...(19): siRNA sense strand
gaaacagucugcccuccua

SEQ ID NO: 1141648 - RNA, 19 nt, Homo sapiens
  misc_RNA (1)...(19): siRNA sense strand
ggaaaugaauccugguuau

SEQ ID NO: 1141649 - RNA, 19 nt, Homo sapiens
  misc_RNA (1)...(19): siRNA sense strand
ggaugacgcugaaguagaa

SEQ ID NO: 1141650 - RNA, 19 nt, Homo sapiens
  misc_RNA (1)...(19): siRNA sense strand
caaauucaauguccucuug

SEQ ID NO: 1141651 - RNA, 19 nt, Homo sapiens
  misc_RNA (1)...(19): siRNA sense strand
ccauugcacucaucacuua

SEQ ID NO: 1141652 - RNA, 19 nt, Homo sapiens
  misc_RNA (1)...(19): siRNA sense strand
caacuugaacggaaucuua

SEQ ID NO: 1141653 - RNA, 19 nt, Homo sapiens
  misc_RNA (1)...(19): siRNA sense strand
gaacguggaucagaaagug

SEQ ID NO: 1141654 - RNA, 19 nt, Homo sapiens
  misc_RNA (1)...(19): siRNA sense strand
ggaagaggaugaggaagaa

SEQ ID NO: 1141655 - RNA, 19 nt, Homo sapiens
  misc_RNA (1)...(19): siRNA sense strand
caaagcagaugaacgcuau

SEQ ID NO: 1141656 - RNA, 19 nt, Homo sapiens
  misc_RNA (1)...(19): siRNA sense strand
uaaggagacugaagaaaga

SEQ ID NO: 1141657 - RNA, 19 nt, Homo sapiens
  misc_RNA (1)...(19): siRNA sense strand
gcaggaaaccgaagagaaa

SEQ ID NO: 1141658 - RNA, 19 nt, Homo sapiens
  misc_RNA (1)...(19): siRNA sense strand
gagaaacugucaccaaauc

SEQ ID NO: 1141659 - RNA, 19 nt, Homo sapiens
  misc_RNA (1)...(19): siRNA sense strand
gaagaggaaguacggcuua

SEQ ID NO: 1141660 - RNA, 19 nt, Homo sapiens
  misc_RNA (1)...(19): siRNA sense strand
caacacagccaagguuaua

SEQ ID NO: 1141661 - RNA, 19 nt, Homo sapiens
  misc_RNA (1)...(19): siRNA sense strand
ccaagugucucccauccua

SEQ ID NO: 1141662 - RNA, 19 nt, Homo sapiens
  misc_RNA (1)...(19): siRNA sense strand
gugaaaggguggacuuaaa

SEQ ID NO: 1141663 - RNA, 19 nt, Homo sapiens
  misc_RNA (1)...(19): siRNA sense strand
gaugagagcagccagauga

SEQ ID NO: 1141664 - RNA, 19 nt, Homo sapiens
  misc_RNA (1)...(19): siRNA sense strand
ccaaagcaguggcaacuug

SEQ ID NO: 1141665 - RNA, 19 nt, Homo sapiens
  misc_RNA (1)...(19): siRNA sense strand
gcagaccgaugaguaugua

SEQ ID NO: 1141666 - RNA, 19 nt, Homo sapiens
  misc_RNA (1)...(19): siRNA sense strand
gaagugggacggaugauga

SEQ ID NO: 1141667 - RNA, 19 nt, Homo sapiens
  misc_RNA (1)...(19): siRNA sense strand
ggaaauggaagaggaagua

SEQ ID NO: 1141668 - RNA, 19 nt, Homo sapiens
  misc_RNA (1)...(19): siRNA sense strand
gcacucaucacuuaucuga

SEQ ID NO: 1141669 - RNA, 19 nt, Homo sapiens
  misc_RNA (1)...(19): siRNA sense strand
gaagagagugauucugauu

SEQ ID NO: 1141670 - RNA, 19 nt, Homo sapiens
  misc_RNA (1)...(19): siRNA sense strand
ccaaauagcgaagaaguuu

SEQ ID NO: 1141671 - RNA, 19 nt, Homo sapiens
  misc_RNA (1)...(19): siRNA sense strand
ggaugaacgugaacaguca

SEQ ID NO: 1141672 - RNA, 19 nt, Homo sapiens
  misc_RNA (1)...(19): siRNA sense strand
ggaagaggaagaugaagaa

SEQ ID NO: 1141673 - RNA, 19 nt, Homo sapiens
  misc_RNA (1)...(19): siRNA sense strand
gagcugcccuccuggauca

SEQ ID NO: 1141674 - RNA, 19 nt, Homo sapiens
  misc_RNA (1)...(19): siRNA sense strand
ggacgaaggccaccgaaug

SEQ ID NO: 1141675 - RNA, 19 nt, Homo sapiens
  misc_RNA (1)...(19): siRNA sense strand
gcaaagauucgguggaaau

SEQ ID NO: 1141676 - RNA, 19 nt, Homo sapiens
  misc_RNA (1)...(19): siRNA sense strand
ggccugggcuuaaaucuuc

SEQ ID NO: 1141677 - RNA, 19 nt, Homo sapiens
  misc_RNA (1)...(19): siRNA sense strand
cagccaagguuauauguca

SEQ ID NO: 1141678 - RNA, 19 nt, Homo sapiens
  misc_RNA (1)...(19): siRNA sense strand
ggaagagagugaggaugaa

SEQ ID NO: 1141679 - RNA, 19 nt, Homo sapiens
  misc_RNA (1)...(19): siRNA sense strand
uaaaggaaaggauucguaa

SEQ ID NO: 1141680 - RNA, 19 nt, Homo sapiens
  misc_RNA (1)...(19): siRNA sense strand
gaaagaauuaccagaauac

SEQ ID NO: 1141681 - RNA, 19 nt, Homo sapiens
  misc_RNA (1)...(19): siRNA sense strand
gaagaaagaaguugaaucc

SEQ ID NO: 1141682 - RNA, 19 nt, Homo sapiens
  misc_RNA (1)...(19): siRNA sense strand
agaauaagcucccugaacu

SEQ ID NO: 1141683 - RNA, 19 nt, Homo sapiens
  misc_RNA (1)...(19): siRNA sense strand
aaagagagcagaagaagga

SEQ ID NO: 1141684 - RNA, 19 nt, Homo sapiens
  misc_RNA (1)...(19): siRNA sense strand
gaggaaacgccgucagaaa

SEQ ID NO: 1141685 - RNA, 19 nt, Homo sapiens
  misc_RNA (1)...(19): siRNA sense strand
caaccacccauauauguuu

SEQ ID NO: 1141686 - RNA, 19 nt, Homo sapiens
  misc_RNA (1)...(19): siRNA sense strand
aaucuuagccgaugaaaug

SEQ ID NO: 1141687 - RNA, 19 nt, Homo sapiens
  misc_RNA (1)...(19): siRNA sense strand
gaaagaccauacagaccau

SEQ ID NO: 1141688 - RNA, 19 nt, Homo sapiens
  misc_RNA (1)...(19): siRNA sense strand
ggaggaagaggaagaugaa

SEQ ID NO: 1141689 - RNA, 19 nt, Homo sapiens
  misc_RNA (1)...(19): siRNA sense strand
ugaggaagaagaugaagua

SEQ ID NO: 1141690 - RNA, 19 nt, Homo sapiens
  misc_RNA (1)...(19): siRNA sense strand
caccuaggcuauucaaaug

SEQ ID NO: 1141691 - RNA, 19 nt, Homo sapiens
  misc_RNA (1)...(19): siRNA sense strand
uggaauaugugaucaagug

SEQ ID NO: 1141692 - RNA, 19 nt, Homo sapiens
  misc_RNA (1)...(19): siRNA sense strand
ggaccccgcugcagaauaa

SEQ ID NO: 1141693 - RNA, 19 nt, Homo sapiens
  misc_RNA (1)...(19): siRNA sense strand
ccgagaagcuggagaagca

SEQ ID NO: 1141694 - RNA, 19 nt, Homo sapiens
  misc_RNA (1)...(19): siRNA sense strand
gcaaugaagaggaggaaga

SEQ ID NO: 1141695 - RNA, 19 nt, Homo sapiens
  misc_RNA (1)...(19): siRNA sense strand
ggaagccaguggauuucaa

SEQ ID NO: 1141696 - RNA, 19 nt, Homo sapiens
  misc_RNA (1)...(19): siRNA sense strand
ugacaucucucaugaccau

SEQ ID NO: 1141697 - RNA, 19 nt, Homo sapiens
  misc_RNA (1)...(19): siRNA sense strand
ggacauaugaauuugacaa

SEQ ID NO: 1141698 - RNA, 19 nt, Homo sapiens
  misc_RNA (1)...(19): siRNA sense strand
gagagaaugcggcgacuga

SEQ ID NO: 1141699 - RNA, 19 nt, Homo sapiens
  misc_RNA (1)...(19): siRNA sense strand
gugaagagagugauucuga

SEQ ID NO: 1141700 - RNA, 19 nt, Homo sapiens
  misc_RNA (1)...(19): siRNA sense strand
ggagcaggaugaacgugaa

SEQ ID NO: 1141701 - RNA, 19 nt, Homo sapiens
  misc_RNA (1)...(19): siRNA sense strand
ccaaagaggaagagaguga

SEQ ID NO: 1141702 - RNA, 19 nt, Homo sapiens
  misc_RNA (1)...(19): siRNA sense strand
cugcuuugcugaagaaauu

SEQ ID NO: 1141703 - RNA, 19 nt, Homo sapiens
  misc_RNA (1)...(19): siRNA sense strand
ugguuucccuguauaauaa

SEQ ID NO: 1141704 - RNA, 19 nt, Homo sapiens
  misc_RNA (1)...(19): siRNA sense strand
caaagcaaccguggaacua

SEQ ID NO: 1141705 - RNA, 19 nt, Homo sapiens
  misc_RNA (1)...(19): siRNA sense strand
cugagaaacugucaccaaa

SEQ ID NO: 1141706 - RNA, 19 nt, Homo sapiens
  misc_RNA (1)...(19): siRNA sense strand
caucgaagacggcaauuug

SEQ ID NO: 1141707 - RNA, 19 nt, Homo sapiens
  misc_RNA (1)...(19): siRNA sense strand
gaucaacacagccaagguu

SEQ ID NO: 1141708 - RNA, 19 nt, Homo sapiens
  misc_RNA (1)...(19): siRNA sense strand
agucugcccuccuaauuaa

SEQ ID NO: 1141709 - RNA, 19 nt, Homo sapiens
  misc_RNA (1)...(19): siRNA sense strand
gaaaugaauccugguuaug

SEQ ID NO: 1141710 - RNA, 19 nt, Homo sapiens
  misc_RNA (1)...(19): siRNA sense strand
agagagugauucugauuau

SEQ ID NO: 1141711 - RNA, 19 nt, Homo sapiens
  misc_RNA (1)...(19): siRNA sense strand
gaaaggguggacuuaaaug

SEQ ID NO: 1141712 - RNA, 19 nt, Homo sapiens
  misc_RNA (1)...(19): siRNA sense strand
gaaggccaccgaaugaaga

SEQ ID NO: 1141713 - RNA, 19 nt, Homo sapiens
  misc_RNA (1)...(19): siRNA sense strand
caaagauucgguggaaaua

SEQ ID NO: 1141714 - RNA, 19 nt, Homo sapiens
  misc_RNA (1)...(19): siRNA sense strand
agacguggaugaugaauac

SEQ ID NO: 1141715 - RNA, 19 nt, Homo sapiens
  misc_RNA (1)...(19): siRNA sense strand
aaagaaagacaggcguuua

SEQ ID NO: 1141716 - RNA, 19 nt, Homo sapiens
  misc_RNA (1)...(19): siRNA sense strand
ucgauacugugauaaacua

SEQ ID NO: 1141717 - RNA, 19 nt, Homo sapiens
  misc_RNA (1)...(19): siRNA sense strand
auacaguggucaucuuuga

SEQ ID NO: 1141718 - RNA, 19 nt, Homo sapiens
  misc_RNA (1)...(19): siRNA sense strand
gacgaaggccaccgaauga

SEQ ID NO: 1141719 - RNA, 19 nt, Homo sapiens
  misc_RNA (1)...(19): siRNA sense strand
gaauccugguuaugaaguu

SEQ ID NO: 1141720 - RNA, 19 nt, Homo sapiens
  misc_RNA (1)...(19): siRNA sense strand
ggaggaggaggaagaagaa

SEQ ID NO: 1141721 - RNA, 19 nt, Homo sapiens
  misc_RNA (1)...(19): siRNA sense strand
gaggaaguacggcuuaaga

SEQ ID NO: 1141722 - RNA, 19 nt, Homo sapiens
  misc_RNA (1)...(19): siRNA sense strand
gaauacagcaugcaguaca

SEQ ID NO: 1141723 - RNA, 19 nt, Homo sapiens
  misc_RNA (1)...(19): siRNA sense strand
gagcgggaauacagacuuc

SEQ ID NO: 1141724 - RNA, 19 nt, Homo sapiens
  misc_RNA (1)...(19): siRNA sense strand
gaagagagugaggaugaaa

SEQ ID NO: 1141725 - RNA, 19 nt, Homo sapiens
  misc_RNA (1)...(19): siRNA sense strand
ugaacacuauuaugcaguu

SEQ ID NO: 1141726 - RNA, 19 nt, Homo sapiens
  misc_RNA (1)...(19): siRNA sense strand
ccaaagagaagaagaagag

SEQ ID NO: 1141727 - RNA, 19 nt, Homo sapiens
  misc_RNA (1)...(19): siRNA sense strand
ggaaacgccgucagaaaca

SEQ ID NO: 1141728 - RNA, 19 nt, Homo sapiens
  misc_RNA (1)...(19): siRNA sense strand
ccacacccaucuccauuag

SEQ ID NO: 1141729 - RNA, 19 nt, Homo sapiens
  misc_RNA (1)...(19): siRNA sense strand
agaggaagaugaagaagag

SEQ ID NO: 1141730 - RNA, 19 nt, Homo sapiens
  misc_RNA (1)...(19): siRNA sense strand
uuaggaagccaguggauuu

SEQ ID NO: 1141731 - RNA, 19 nt, Homo sapiens
  misc_RNA (1)...(19): siRNA sense strand
uaaggaugacgcugaagua

SEQ ID NO: 1141732 - RNA, 19 nt, Homo sapiens
  misc_RNA (1)...(19): siRNA sense strand
gaugagacucugaaccaaa

SEQ ID NO: 1141733 - RNA, 19 nt, Homo sapiens
  misc_RNA (1)...(19): siRNA sense strand
aauaugugaucaaguguga

SEQ ID NO: 1141734 - RNA, 19 nt, Homo sapiens
  misc_RNA (1)...(19): siRNA sense strand
ggccuggaauggaugguuu

SEQ ID NO: 1141735 - RNA, 19 nt, Homo sapiens
  misc_RNA (1)...(19): siRNA sense strand
uagccaaucugaccaaucu

SEQ ID NO: 1141736 - RNA, 19 nt, Homo sapiens
  misc_RNA (1)...(19): siRNA sense strand
gagaggaaacgccgucaga

SEQ ID NO: 1141737 - RNA, 19 nt, Homo sapiens
  misc_RNA (1)...(19): siRNA sense strand
gagaagcagcagaagauug

SEQ ID NO: 1141738 - RNA, 19 nt, Homo sapiens
  misc_RNA (1)...(19): siRNA sense strand
gcucucaacuccaaagcau

SEQ ID NO: 1141739 - RNA, 19 nt, Homo sapiens
  misc_RNA (1)...(19): siRNA sense strand
gcgaugaggagcaggauga

SEQ ID NO: 1141740 - RNA, 19 nt, Homo sapiens
  misc_RNA (1)...(19): siRNA sense strand
gaagaaauguggauaaaga

SEQ ID NO: 1141741 - RNA, 19 nt, Homo sapiens
  misc_RNA (1)...(19): siRNA sense strand
ggacuuaaaugaagaagaa

SEQ ID NO: 1141742 - RNA, 19 nt, Homo sapiens
  misc_RNA (1)...(19): siRNA sense strand
ggaaagaauuaccagaaua

SEQ ID NO: 1141743 - RNA, 19 nt, Homo sapiens
  misc_RNA (1)...(19): siRNA sense strand
gaaaggaggugcuaagaca

SEQ ID NO: 1141744 - RNA, 19 nt, Homo sapiens
  misc_RNA (1)...(19): siRNA sense strand
gcacuucgguuacucaauu

SEQ ID NO: 1141745 - RNA, 19 nt, Homo sapiens
  misc_RNA (1)...(19): siRNA sense strand
ccgcauagcucauaggaua

SEQ ID NO: 1141746 - RNA, 19 nt, Homo sapiens
  misc_RNA (1)...(19): siRNA sense strand
gaagaaggcugaggagaau

SEQ ID NO: 1141747 - RNA, 19 nt, Homo sapiens
  misc_RNA (1)...(19): siRNA sense strand
gaaacagucugcccuccua

SEQ ID NO: 1141748 - RNA, 19 nt, Homo sapiens
  misc_RNA (1)...(19): siRNA sense strand
ggaaaugaauccugguuau

SEQ ID NO: 1141749 - RNA, 19 nt, Homo sapiens
  misc_RNA (1)...(19): siRNA sense strand
ggaugacgcugaaguagaa

SEQ ID NO: 1141750 - RNA, 19 nt, Homo sapiens
  misc_RNA (1)...(19): siRNA sense strand
caaauucaauguccucuug

SEQ ID NO: 1141751 - RNA, 19 nt, Homo sapiens
  misc_RNA (1)...(19): siRNA sense strand
ccauugcacucaucacuua

SEQ ID NO: 1141752 - RNA, 19 nt, Homo sapiens
  misc_RNA (1)...(19): siRNA sense strand
caacuugaacggaaucuua

SEQ ID NO: 1141753 - RNA, 19 nt, Homo sapiens
  misc_RNA (1)...(19): siRNA sense strand
gaacguggaucagaaagug

SEQ ID NO: 1141754 - RNA, 19 nt, Homo sapiens
  misc_RNA (1)...(19): siRNA sense strand
ggaagaggaugaggaagaa

SEQ ID NO: 1141755 - RNA, 19 nt, Homo sapiens
  misc_RNA (1)...(19): siRNA sense strand
caaagcagaugaacgcuau

SEQ ID NO: 1141756 - RNA, 19 nt, Homo sapiens
  misc_RNA (1)...(19): siRNA sense strand
uaaggagacugaagaaaga

SEQ ID NO: 1141757 - RNA, 19 nt, Homo sapiens
  misc_RNA (1)...(19): siRNA sense strand
gcaggaaaccgaagagaaa

SEQ ID NO: 1141758 - RNA, 19 nt, Homo sapiens
  misc_RNA (1)...(19): siRNA sense strand
gagaaacugucaccaaauc

SEQ ID NO: 1141759 - RNA, 19 nt, Homo sapiens
  misc_RNA (1)...(19): siRNA sense strand
gaagaggaaguacggcuua

SEQ ID NO: 1141760 - RNA, 19 nt, Homo sapiens
  misc_RNA (1)...(19): siRNA sense strand
caacacagccaagguuaua

SEQ ID NO: 1141761 - RNA, 19 nt, Homo sapiens
  misc_RNA (1)...(19): siRNA sense strand
ccaagugucucccauccua

SEQ ID NO: 1141762 - RNA, 19 nt, Homo sapiens
  misc_RNA (1)...(19): siRNA sense strand
gugaaaggguggacuuaaa

SEQ ID NO: 1141763 - RNA, 19 nt, Homo sapiens
  misc_RNA (1)...(19): siRNA sense strand
gaugagagcagccagauga

SEQ ID NO: 1141764 - RNA, 19 nt, Homo sapiens
  misc_RNA (1)...(19): siRNA sense strand
ccaaagcaguggcaacuug

SEQ ID NO: 1141765 - RNA, 19 nt, Homo sapiens
  misc_RNA (1)...(19): siRNA sense strand
gcagaccgaugaguaugua

SEQ ID NO: 1141766 - RNA, 19 nt, Homo sapiens
  misc_RNA (1)...(19): siRNA sense strand
gaagugggacggaugauga

SEQ ID NO: 1141767 - RNA, 19 nt, Homo sapiens
  misc_RNA (1)...(19): siRNA sense strand
ggaaauggaagaggaagua

SEQ ID NO: 1141768 - RNA, 19 nt, Homo sapiens
  misc_RNA (1)...(19): siRNA sense strand
gcacucaucacuuaucuga

SEQ ID NO: 1141769 - RNA, 19 nt, Homo sapiens
  misc_RNA (1)...(19): siRNA sense strand
gaagagagugauucugauu

SEQ ID NO: 1141770 - RNA, 19 nt, Homo sapiens
  misc_RNA (1)...(19): siRNA sense strand
ccaaauagcgaagaaguuu

SEQ ID NO: 1141771 - RNA, 19 nt, Homo sapiens
  misc_RNA (1)...(19): siRNA sense strand
ggaugaacgugaacaguca

SEQ ID NO: 1141772 - RNA, 19 nt, Homo sapiens
  misc_RNA (1)...(19): siRNA sense strand
ggaagaggaagaugaagaa

SEQ ID NO: 1141773 - RNA, 19 nt, Homo sapiens
  misc_RNA (1)...(19): siRNA sense strand
gagcugcccuccuggauca

SEQ ID NO: 1141774 - RNA, 19 nt, Homo sapiens
  misc_RNA (1)...(19): siRNA sense strand
ggacgaaggccaccgaaug

SEQ ID NO: 1141775 - RNA, 19 nt, Homo sapiens
  misc_RNA (1)...(19): siRNA sense strand
gcaaagauucgguggaaau

SEQ ID NO: 1141776 - RNA, 19 nt, Homo sapiens
  misc_RNA (1)...(19): siRNA sense strand
ggccugggcuuaaaucuuc

SEQ ID NO: 1141777 - RNA, 19 nt, Homo sapiens
  misc_RNA (1)...(19): siRNA sense strand
cagccaagguuauauguca

SEQ ID NO: 1141778 - RNA, 19 nt, Homo sapiens
  misc_RNA (1)...(19): siRNA sense strand
ggaagagagugaggaugaa

SEQ ID NO: 1141779 - RNA, 19 nt, Homo sapiens
  misc_RNA (1)...(19): siRNA sense strand
uaaaggaaaggauucguaa

SEQ ID NO: 1141780 - RNA, 19 nt, Homo sapiens
  misc_RNA (1)...(19): siRNA sense strand
gaaagaauuaccagaauac

SEQ ID NO: 1141781 - RNA, 19 nt, Homo sapiens
  misc_RNA (1)...(19): siRNA sense strand
gaagaaagaaguugaaucc

SEQ ID NO: 1141782 - RNA, 19 nt, Homo sapiens
  misc_RNA (1)...(19): siRNA sense strand
agaauaagcucccugaacu

SEQ ID NO: 1141783 - RNA, 19 nt, Homo sapiens
  misc_RNA (1)...(19): siRNA sense strand
aaagagagcagaagaagga

SEQ ID NO: 1141784 - RNA, 19 nt, Homo sapiens
  misc_RNA (1)...(19): siRNA sense strand
gaggaaacgccgucagaaa

SEQ ID NO: 1141785 - RNA, 19 nt, Homo sapiens
  misc_RNA (1)...(19): siRNA sense strand
caaccacccauauauguuu

SEQ ID NO: 1141786 - RNA, 19 nt, Homo sapiens
  misc_RNA (1)...(19): siRNA sense strand
aaucuuagccgaugaaaug

SEQ ID NO: 1141787 - RNA, 19 nt, Homo sapiens
  misc_RNA (1)...(19): siRNA sense strand
gaaagaccauacagaccau

SEQ ID NO: 1141788 - RNA, 19 nt, Homo sapiens
  misc_RNA (1)...(19): siRNA sense strand
ggaggaagaggaagaugaa

SEQ ID NO: 1141789 - RNA, 19 nt, Homo sapiens
  misc_RNA (1)...(19): siRNA sense strand
ugaggaagaagaugaagua

SEQ ID NO: 1141790 - RNA, 19 nt, Homo sapiens
  misc_RNA (1)...(19): siRNA sense strand
caccuaggcuauucaaaug

SEQ ID NO: 1141791 - RNA, 19 nt, Homo sapiens
  misc_RNA (1)...(19): siRNA sense strand
uggaauaugugaucaagug

SEQ ID NO: 1141792 - RNA, 19 nt, Homo sapiens
  misc_RNA (1)...(19): siRNA sense strand
ggaccccgcugcagaauaa

SEQ ID NO: 1141793 - RNA, 19 nt, Homo sapiens
  misc_RNA (1)...(19): siRNA sense strand
ccgagaagcuggagaagca

SEQ ID NO: 1141794 - RNA, 19 nt, Homo sapiens
  misc_RNA (1)...(19): siRNA sense strand
gcaaugaagaggaggaaga

SEQ ID NO: 1141795 - RNA, 19 nt, Homo sapiens
  misc_RNA (1)...(19): siRNA sense strand
ggaagccaguggauuucaa

SEQ ID NO: 1141796 - RNA, 19 nt, Homo sapiens
  misc_RNA (1)...(19): siRNA sense strand
ugacaucucucaugaccau

SEQ ID NO: 1141797 - RNA, 19 nt, Homo sapiens
  misc_RNA (1)...(19): siRNA sense strand
ggacauaugaauuugacaa

SEQ ID NO: 1141798 - RNA, 19 nt, Homo sapiens
  misc_RNA (1)...(19): siRNA sense strand
gagagaaugcggcgacuga

SEQ ID NO: 1141799 - RNA, 19 nt, Homo sapiens
  misc_RNA (1)...(19): siRNA sense strand
gugaagagagugauucuga

SEQ ID NO: 1141800 - RNA, 19 nt, Homo sapiens
  misc_RNA (1)...(19): siRNA sense strand
ggagcaggaugaacgugaa

SEQ ID NO: 1141801 - RNA, 19 nt, Homo sapiens
  misc_RNA (1)...(19): siRNA sense strand
ccaaagaggaagagaguga

SEQ ID NO: 1141802 - RNA, 19 nt, Homo sapiens
  misc_RNA (1)...(19): siRNA sense strand
cugcuuugcugaagaaauu

SEQ ID NO: 1141803 - RNA, 19 nt, Homo sapiens
  misc_RNA (1)...(19): siRNA sense strand
ugguuucccuguauaauaa

SEQ ID NO: 1141804 - RNA, 19 nt, Homo sapiens
  misc_RNA (1)...(19): siRNA sense strand
caaagcaaccguggaacua

SEQ ID NO: 1141805 - RNA, 19 nt, Homo sapiens
  misc_RNA (1)...(19): siRNA sense strand
cugagaaacugucaccaaa

SEQ ID NO: 1141806 - RNA, 19 nt, Homo sapiens
  misc_RNA (1)...(19): siRNA sense strand
caucgaagacggcaauuug

SEQ ID NO: 1141807 - RNA, 19 nt, Homo sapiens
  misc_RNA (1)...(19): siRNA sense strand
gaucaacacagccaagguu

SEQ ID NO: 1141808 - RNA, 19 nt, Homo sapiens
  misc_RNA (1)...(19): siRNA sense strand
agucugcccuccuaauuaa

SEQ ID NO: 1141809 - RNA, 19 nt, Homo sapiens
  misc_RNA (1)...(19): siRNA sense strand
gaaaugaauccugguuaug

SEQ ID NO: 1141810 - RNA, 19 nt, Homo sapiens
  misc_RNA (1)...(19): siRNA sense strand
agagagugauucugauuau

SEQ ID NO: 1141811 - RNA, 19 nt, Homo sapiens
  misc_RNA (1)...(19): siRNA sense strand
gaaaggguggacuuaaaug

SEQ ID NO: 1141812 - RNA, 19 nt, Homo sapiens
  misc_RNA (1)...(19): siRNA sense strand
gaaggccaccgaaugaaga

SEQ ID NO: 1141813 - RNA, 19 nt, Homo sapiens
  misc_RNA (1)...(19): siRNA sense strand
caaagauucgguggaaaua

SEQ ID NO: 1141814 - RNA, 19 nt, Homo sapiens
  misc_RNA (1)...(19): siRNA sense strand
agacguggaugaugaauac

SEQ ID NO: 1141815 - RNA, 19 nt, Homo sapiens
  misc_RNA (1)...(19): siRNA sense strand
aaagaaagacaggcguuua

SEQ ID NO: 1141816 - RNA, 19 nt, Homo sapiens
  misc_RNA (1)...(19): siRNA sense strand
ucgauacugugauaaacua

SEQ ID NO: 1141817 - RNA, 19 nt, Homo sapiens
  misc_RNA (1)...(19): siRNA sense strand
auacaguggucaucuuuga

SEQ ID NO: 1141818 - RNA, 19 nt, Homo sapiens
  misc_RNA (1)...(19): siRNA sense strand
gacgaaggccaccgaauga

SEQ ID NO: 1141819 - RNA, 19 nt, Homo sapiens
  misc_RNA (1)...(19): siRNA sense strand
gaauccugguuaugaaguu

SEQ ID NO: 1141820 - RNA, 19 nt, Homo sapiens
  misc_RNA (1)...(19): siRNA sense strand
ggaggaggaggaagaagaa

SEQ ID NO: 1141821 - RNA, 19 nt, Homo sapiens
  misc_RNA (1)...(19): siRNA sense strand
gaggaaguacggcuuaaga

SEQ ID NO: 1141822 - RNA, 19 nt, Homo sapiens
  misc_RNA (1)...(19): siRNA sense strand
gaauacagcaugcaguaca

SEQ ID NO: 1141823 - RNA, 19 nt, Homo sapiens
  misc_RNA (1)...(19): siRNA sense strand
gagcgggaauacagacuuc

SEQ ID NO: 1141824 - RNA, 19 nt, Homo sapiens
  misc_RNA (1)...(19): siRNA sense strand
gaagagagugaggaugaaa

SEQ ID NO: 1141825 - RNA, 19 nt, Homo sapiens
  misc_RNA (1)...(19): siRNA sense strand
ugaacacuauuaugcaguu

SEQ ID NO: 1141826 - RNA, 19 nt, Homo sapiens
  misc_RNA (1)...(19): siRNA sense strand
ccaaagagaagaagaagag

SEQ ID NO: 1141827 - RNA, 19 nt, Homo sapiens
  misc_RNA (1)...(19): siRNA sense strand
ggaaacgccgucagaaaca

SEQ ID NO: 1141828 - RNA, 19 nt, Homo sapiens
  misc_RNA (1)...(19): siRNA sense strand
ccacacccaucuccauuag

SEQ ID NO: 1141829 - RNA, 19 nt, Homo sapiens
  misc_RNA (1)...(19): siRNA sense strand
agaggaagaugaagaagag

SEQ ID NO: 1141830 - RNA, 19 nt, Homo sapiens
  misc_RNA (1)...(19): siRNA sense strand
uuaggaagccaguggauuu

SEQ ID NO: 1141831 - RNA, 19 nt, Homo sapiens
  misc_RNA (1)...(19): siRNA sense strand
uaaggaugacgcugaagua

SEQ ID NO: 1141832 - RNA, 19 nt, Homo sapiens
  misc_RNA (1)...(19): siRNA sense strand
gaugagacucugaaccaaa

SEQ ID NO: 1141833 - RNA, 19 nt, Homo sapiens
  misc_RNA (1)...(19): siRNA sense strand
aauaugugaucaaguguga

SEQ ID NO: 1141834 - RNA, 19 nt, Homo sapiens
  misc_RNA (1)...(19): siRNA sense strand
ggccuggaauggaugguuu

SEQ ID NO: 1141835 - RNA, 19 nt, Homo sapiens
  misc_RNA (1)...(19): siRNA sense strand
uagccaaucugaccaaucu

SEQ ID NO: 1141836 - RNA, 19 nt, Homo sapiens
  misc_RNA (1)...(19): siRNA sense strand
gagaggaaacgccgucaga

SEQ ID NO: 1141837 - RNA, 19 nt, Homo sapiens
  misc_RNA (1)...(19): siRNA sense strand
gagaagcagcagaagauug

SEQ ID NO: 1141838 - RNA, 19 nt, Homo sapiens
  misc_RNA (1)...(19): siRNA sense strand
gcucucaacuccaaagcau

SEQ ID NO: 1141839 - RNA, 19 nt, Homo sapiens
  misc_RNA (1)...(19): siRNA sense strand
gcgaugaggagcaggauga

SEQ ID NO: 1141840 - RNA, 19 nt, Homo sapiens
  misc_RNA (1)...(19): siRNA sense strand
gaagaaauguggauaaaga

SEQ ID NO: 1141841 - RNA, 19 nt, Homo sapiens
  misc_RNA (1)...(19): siRNA sense strand
ggacuuaaaugaagaagaa

SEQ ID NO: 1141842 - RNA, 19 nt, Homo sapiens
  misc_RNA (1)...(19): siRNA sense strand
ggaaagaauuaccagaaua

SEQ ID NO: 1141843 - RNA, 19 nt, Homo sapiens
  misc_RNA (1)...(19): siRNA sense strand
gaaaggaggugcuaagaca

SEQ ID NO: 1141844 - RNA, 19 nt, Homo sapiens
  misc_RNA (1)...(19): siRNA sense strand
gcacuucgguuacucaauu

SEQ ID NO: 1141845 - RNA, 19 nt, Homo sapiens
  misc_RNA (1)...(19): siRNA sense strand
ccgcauagcucauaggaua

SEQ ID NO: 1141846 - RNA, 19 nt, Homo sapiens
  misc_RNA (1)...(19): siRNA sense strand
gaagaaggcugaggagaau

SEQ ID NO: 1141847 - RNA, 19 nt, Homo sapiens
  misc_RNA (1)...(19): siRNA sense strand
gaaacagucugcccuccua

SEQ ID NO: 1141848 - RNA, 19 nt, Homo sapiens
  misc_RNA (1)...(19): siRNA sense strand
ggaaaugaauccugguuau

SEQ ID NO: 1141849 - RNA, 19 nt, Homo sapiens
  misc_RNA (1)...(19): siRNA sense strand
ggaugacgcugaaguagaa

SEQ ID NO: 1141850 - RNA, 19 nt, Homo sapiens
  misc_RNA (1)...(19): siRNA sense strand
caaauucaauguccucuug

SEQ ID NO: 1141851 - RNA, 19 nt, Homo sapiens
  misc_RNA (1)...(19): siRNA sense strand
ccauugcacucaucacuua

SEQ ID NO: 1141852 - RNA, 19 nt, Homo sapiens
  misc_RNA (1)...(19): siRNA sense strand
caacuugaacggaaucuua

SEQ ID NO: 1141853 - RNA, 19 nt, Homo sapiens
  misc_RNA (1)...(19): siRNA sense strand
gaacguggaucagaaagug

SEQ ID NO: 1141854 - RNA, 19 nt, Homo sapiens
  misc_RNA (1)...(19): siRNA sense strand
ggaagaggaugaggaagaa

SEQ ID NO: 1141855 - RNA, 19 nt, Homo sapiens
  misc_RNA (1)...(19): siRNA sense strand
caaagcagaugaacgcuau

SEQ ID NO: 1141856 - RNA, 19 nt, Homo sapiens
  misc_RNA (1)...(19): siRNA sense strand
uaaggagacugaagaaaga

SEQ ID NO: 1141857 - RNA, 19 nt, Homo sapiens
  misc_RNA (1)...(19): siRNA sense strand
gcaggaaaccgaagagaaa

SEQ ID NO: 1141858 - RNA, 19 nt, Homo sapiens
  misc_RNA (1)...(19): siRNA sense strand
gagaaacugucaccaaauc

SEQ ID NO: 1141859 - RNA, 19 nt, Homo sapiens
  misc_RNA (1)...(19): siRNA sense strand
gaagaggaaguacggcuua

SEQ ID NO: 1141860 - RNA, 19 nt, Homo sapiens
  misc_RNA (1)...(19): siRNA sense strand
caacacagccaagguuaua

SEQ ID NO: 1141861 - RNA, 19 nt, Homo sapiens
  misc_RNA (1)...(19): siRNA sense strand
ccaagugucucccauccua

SEQ ID NO: 1141862 - RNA, 19 nt, Homo sapiens
  misc_RNA (1)...(19): siRNA sense strand
gugaaaggguggacuuaaa

SEQ ID NO: 1141863 - RNA, 19 nt, Homo sapiens
  misc_RNA (1)...(19): siRNA sense strand
gaugagagcagccagauga

SEQ ID NO: 1141864 - RNA, 19 nt, Homo sapiens
  misc_RNA (1)...(19): siRNA sense strand
ccaaagcaguggcaacuug

SEQ ID NO: 1141865 - RNA, 19 nt, Homo sapiens
  misc_RNA (1)...(19): siRNA sense strand
gcagaccgaugaguaugua

SEQ ID NO: 1141866 - RNA, 19 nt, Homo sapiens
  misc_RNA (1)...(19): siRNA sense strand
gaagugggacggaugauga

SEQ ID NO: 1141867 - RNA, 19 nt, Homo sapiens
  misc_RNA (1)...(19): siRNA sense strand
ggaaauggaagaggaagua

SEQ ID NO: 1141868 - RNA, 19 nt, Homo sapiens
  misc_RNA (1)...(19): siRNA sense strand
gcacucaucacuuaucuga

SEQ ID NO: 1141869 - RNA, 19 nt, Homo sapiens
  misc_RNA (1)...(19): siRNA sense strand
gaagagagugauucugauu

SEQ ID NO: 1141870 - RNA, 19 nt, Homo sapiens
  misc_RNA (1)...(19): siRNA sense strand
ccaaauagcgaagaaguuu

SEQ ID NO: 1141871 - RNA, 19 nt, Homo sapiens
  misc_RNA (1)...(19): siRNA sense strand
ggaugaacgugaacaguca

SEQ ID NO: 1141872 - RNA, 19 nt, Homo sapiens
  misc_RNA (1)...(19): siRNA sense strand
ggaagaggaagaugaagaa

SEQ ID NO: 1141873 - RNA, 19 nt, Homo sapiens
  misc_RNA (1)...(19): siRNA sense strand
gagcugcccuccuggauca

SEQ ID NO: 1141874 - RNA, 19 nt, Homo sapiens
  misc_RNA (1)...(19): siRNA sense strand
ggacgaaggccaccgaaug

SEQ ID NO: 1141875 - RNA, 19 nt, Homo sapiens
  misc_RNA (1)...(19): siRNA sense strand
gcaaagauucgguggaaau

SEQ ID NO: 1141876 - RNA, 19 nt, Homo sapiens
  misc_RNA (1)...(19): siRNA sense strand
ggccugggcuuaaaucuuc

SEQ ID NO: 1141877 - RNA, 19 nt, Homo sapiens
  misc_RNA (1)...(19): siRNA sense strand
cagccaagguuauauguca

SEQ ID NO: 1141878 - RNA, 19 nt, Homo sapiens
  misc_RNA (1)...(19): siRNA sense strand
ggaagagagugaggaugaa

SEQ ID NO: 1141879 - RNA, 19 nt, Homo sapiens
  misc_RNA (1)...(19): siRNA sense strand
uaaaggaaaggauucguaa

SEQ ID NO: 1141880 - RNA, 19 nt, Homo sapiens
  misc_RNA (1)...(19): siRNA sense strand
gaaagaauuaccagaauac

SEQ ID NO: 1141881 - RNA, 19 nt, Homo sapiens
  misc_RNA (1)...(19): siRNA sense strand
gaagaaagaaguugaaucc

SEQ ID NO: 1141882 - RNA, 19 nt, Homo sapiens
  misc_RNA (1)...(19): siRNA sense strand
agaauaagcucccugaacu

SEQ ID NO: 1141883 - RNA, 19 nt, Homo sapiens
  misc_RNA (1)...(19): siRNA sense strand
aaagagagcagaagaagga

SEQ ID NO: 1141884 - RNA, 19 nt, Homo sapiens
  misc_RNA (1)...(19): siRNA sense strand
gaggaaacgccgucagaaa

SEQ ID NO: 1141885 - RNA, 19 nt, Homo sapiens
  misc_RNA (1)...(19): siRNA sense strand
caaccacccauauauguuu

SEQ ID NO: 1141886 - RNA, 19 nt, Homo sapiens
  misc_RNA (1)...(19): siRNA sense strand
aaucuuagccgaugaaaug

SEQ ID NO: 1141887 - RNA, 19 nt, Homo sapiens
  misc_RNA (1)...(19): siRNA sense strand
gaaagaccauacagaccau

SEQ ID NO: 1141888 - RNA, 19 nt, Homo sapiens
  misc_RNA (1)...(19): siRNA sense strand
ggaggaagaggaagaugaa

SEQ ID NO: 1141889 - RNA, 19 nt, Homo sapiens
  misc_RNA (1)...(19): siRNA sense strand
ugaggaagaagaugaagua

SEQ ID NO: 1141890 - RNA, 19 nt, Homo sapiens
  misc_RNA (1)...(19): siRNA sense strand
caccuaggcuauucaaaug

SEQ ID NO: 1141891 - RNA, 19 nt, Homo sapiens
  misc_RNA (1)...(19): siRNA sense strand
uggaauaugugaucaagug

SEQ ID NO: 1141892 - RNA, 19 nt, Homo sapiens
  misc_RNA (1)...(19): siRNA sense strand
ggaccccgcugcagaauaa

SEQ ID NO: 1141893 - RNA, 19 nt, Homo sapiens
  misc_RNA (1)...(19): siRNA sense strand
ccgagaagcuggagaagca

SEQ ID NO: 1141894 - RNA, 19 nt, Homo sapiens
  misc_RNA (1)...(19): siRNA sense strand
gcaaugaagaggaggaaga

SEQ ID NO: 1141895 - RNA, 19 nt, Homo sapiens
  misc_RNA (1)...(19): siRNA sense strand
ggaagccaguggauuucaa

SEQ ID NO: 1141896 - RNA, 19 nt, Homo sapiens
  misc_RNA (1)...(19): siRNA sense strand
ugacaucucucaugaccau

SEQ ID NO: 1141897 - RNA, 19 nt, Homo sapiens
  misc_RNA (1)...(19): siRNA sense strand
ggacauaugaauuugacaa

SEQ ID NO: 1141898 - RNA, 19 nt, Homo sapiens
  misc_RNA (1)...(19): siRNA sense strand
gagagaaugcggcgacuga

SEQ ID NO: 1141899 - RNA, 19 nt, Homo sapiens
  misc_RNA (1)...(19): siRNA sense strand
gugaagagagugauucuga

SEQ ID NO: 1141900 - RNA, 19 nt, Homo sapiens
  misc_RNA (1)...(19): siRNA sense strand
ggagcaggaugaacgugaa

SEQ ID NO: 1141901 - RNA, 19 nt, Homo sapiens
  misc_RNA (1)...(19): siRNA sense strand
ccaaagaggaagagaguga

SEQ ID NO: 1141902 - RNA, 19 nt, Homo sapiens
  misc_RNA (1)...(19): siRNA sense strand
cugcuuugcugaagaaauu

SEQ ID NO: 1141903 - RNA, 19 nt, Homo sapiens
  misc_RNA (1)...(19): siRNA sense strand
ugguuucccuguauaauaa

SEQ ID NO: 1141904 - RNA, 19 nt, Homo sapiens
  misc_RNA (1)...(19): siRNA sense strand
caaagcaaccguggaacua

SEQ ID NO: 1141905 - RNA, 19 nt, Homo sapiens
  misc_RNA (1)...(19): siRNA sense strand
cugagaaacugucaccaaa

SEQ ID NO: 1141906 - RNA, 19 nt, Homo sapiens
  misc_RNA (1)...(19): siRNA sense strand
caucgaagacggcaauuug

SEQ ID NO: 1141907 - RNA, 19 nt, Homo sapiens
  misc_RNA (1)...(19): siRNA sense strand
gaucaacacagccaagguu

SEQ ID NO: 1141908 - RNA, 19 nt, Homo sapiens
  misc_RNA (1)...(19): siRNA sense strand
agucugcccuccuaauuaa

SEQ ID NO: 1141909 - RNA, 19 nt, Homo sapiens
  misc_RNA (1)...(19): siRNA sense strand
gaaaugaauccugguuaug

SEQ ID NO: 1141910 - RNA, 19 nt, Homo sapiens
  misc_RNA (1)...(19): siRNA sense strand
agagagugauucugauuau

SEQ ID NO: 1141911 - RNA, 19 nt, Homo sapiens
  misc_RNA (1)...(19): siRNA sense strand
gaaaggguggacuuaaaug

SEQ ID NO: 1141912 - RNA, 19 nt, Homo sapiens
  misc_RNA (1)...(19): siRNA sense strand
gaaggccaccgaaugaaga

SEQ ID NO: 1141913 - RNA, 19 nt, Homo sapiens
  misc_RNA (1)...(19): siRNA sense strand
caaagauucgguggaaaua

SEQ ID NO: 1141914 - RNA, 19 nt, Homo sapiens
  misc_RNA (1)...(19): siRNA sense strand
agacguggaugaugaauac

SEQ ID NO: 1141915 - RNA, 19 nt, Homo sapiens
  misc_RNA (1)...(19): siRNA sense strand
aaagaaagacaggcguuua

SEQ ID NO: 1141916 - RNA, 19 nt, Homo sapiens
  misc_RNA (1)...(19): siRNA sense strand
ucgauacugugauaaacua

SEQ ID NO: 1141917 - RNA, 19 nt, Homo sapiens
  misc_RNA (1)...(19): siRNA sense strand
auacaguggucaucuuuga

SEQ ID NO: 1141918 - RNA, 19 nt, Homo sapiens
  misc_RNA (1)...(19): siRNA sense strand
gacgaaggccaccgaauga

SEQ ID NO: 1141919 - RNA, 19 nt, Homo sapiens
  misc_RNA (1)...(19): siRNA sense strand
gaauccugguuaugaaguu

SEQ ID NO: 1141920 - RNA, 19 nt, Homo sapiens
  misc_RNA (1)...(19): siRNA sense strand
ggaggaggaggaagaagaa

SEQ ID NO: 1141921 - RNA, 19 nt, Homo sapiens
  misc_RNA (1)...(19): siRNA sense strand
gaggaaguacggcuuaaga

SEQ ID NO: 1141922 - RNA, 19 nt, Homo sapiens
  misc_RNA (1)...(19): siRNA sense strand
gaauacagcaugcaguaca

SEQ ID NO: 1141923 - RNA, 19 nt, Homo sapiens
  misc_RNA (1)...(19): siRNA sense strand
gagcgggaauacagacuuc

SEQ ID NO: 1141924 - RNA, 19 nt, Homo sapiens
  misc_RNA (1)...(19): siRNA sense strand
gaagagagugaggaugaaa

SEQ ID NO: 1141925 - RNA, 19 nt, Homo sapiens
  misc_RNA (1)...(19): siRNA sense strand
ugaacacuauuaugcaguu

SEQ ID NO: 1141926 - RNA, 19 nt, Homo sapiens
  misc_RNA (1)...(19): siRNA sense strand
ccaaagagaagaagaagag

SEQ ID NO: 1141927 - RNA, 19 nt, Homo sapiens
  misc_RNA (1)...(19): siRNA sense strand
ggaaacgccgucagaaaca

SEQ ID NO: 1141928 - RNA, 19 nt, Homo sapiens
  misc_RNA (1)...(19): siRNA sense strand
ccacacccaucuccauuag

SEQ ID NO: 1141929 - RNA, 19 nt, Homo sapiens
  misc_RNA (1)...(19): siRNA sense strand
agaggaagaugaagaagag

SEQ ID NO: 1141930 - RNA, 19 nt, Homo sapiens
  misc_RNA (1)...(19): siRNA sense strand
uuaggaagccaguggauuu

SEQ ID NO: 1141931 - RNA, 19 nt, Homo sapiens
  misc_RNA (1)...(19): siRNA sense strand
uaaggaugacgcugaagua

SEQ ID NO: 1141932 - RNA, 19 nt, Homo sapiens
  misc_RNA (1)...(19): siRNA sense strand
gaugagacucugaaccaaa

SEQ ID NO: 1141933 - RNA, 19 nt, Homo sapiens
  misc_RNA (1)...(19): siRNA sense strand
aauaugugaucaaguguga

SEQ ID NO: 1141934 - RNA, 19 nt, Homo sapiens
  misc_RNA (1)...(19): siRNA sense strand
ggccuggaauggaugguuu

SEQ ID NO: 1141935 - RNA, 19 nt, Homo sapiens
  misc_RNA (1)...(19): siRNA sense strand
uagccaaucugaccaaucu

SEQ ID NO: 1141936 - RNA, 19 nt, Homo sapiens
  misc_RNA (1)...(19): siRNA sense strand
gagaggaaacgccgucaga

SEQ ID NO: 1141937 - RNA, 19 nt, Homo sapiens
  misc_RNA (1)...(19): siRNA sense strand
gagaagcagcagaagauug

SEQ ID NO: 1141938 - RNA, 19 nt, Homo sapiens
  misc_RNA (1)...(19): siRNA sense strand
gcucucaacuccaaagcau

SEQ ID NO: 1141939 - RNA, 19 nt, Homo sapiens
  misc_RNA (1)...(19): siRNA sense strand
gcgaugaggagcaggauga

SEQ ID NO: 1141940 - RNA, 19 nt, Homo sapiens
  misc_RNA (1)...(19): siRNA sense strand
gaagaaauguggauaaaga

SEQ ID NO: 1141941 - RNA, 19 nt, Homo sapiens
  misc_RNA (1)...(19): siRNA sense strand
ggacuuaaaugaagaagaa

SEQ ID NO: 1141942 - RNA, 19 nt, Homo sapiens
  misc_RNA (1)...(19): siRNA sense strand
ggaaagaauuaccagaaua

SEQ ID NO: 1141943 - RNA, 19 nt, Homo sapiens
  misc_RNA (1)...(19): siRNA sense strand
gaaaggaggugcuaagaca

SEQ ID NO: 1141944 - RNA, 19 nt, Homo sapiens
  misc_RNA (1)...(19): siRNA sense strand
gcacuucgguuacucaauu

SEQ ID NO: 1141945 - RNA, 19 nt, Homo sapiens
  misc_RNA (1)...(19): siRNA sense strand
ccgcauagcucauaggaua

SEQ ID NO: 1141946 - RNA, 19 nt, Homo sapiens
  misc_RNA (1)...(19): siRNA sense strand
gaagaaggcugaggagaau

SEQ ID NO: 1141947 - RNA, 19 nt, Homo sapiens
  misc_RNA (1)...(19): siRNA sense strand
gaaacagucugcccuccua

SEQ ID NO: 1141948 - RNA, 19 nt, Homo sapiens
  misc_RNA (1)...(19): siRNA sense strand
ggaaaugaauccugguuau

SEQ ID NO: 1141949 - RNA, 19 nt, Homo sapiens
  misc_RNA (1)...(19): siRNA sense strand
ggaugacgcugaaguagaa

SEQ ID NO: 1141950 - RNA, 19 nt, Homo sapiens
  misc_RNA (1)...(19): siRNA sense strand
caaauucaauguccucuug

SEQ ID NO: 1141951 - RNA, 19 nt, Homo sapiens
  misc_RNA (1)...(19): siRNA sense strand
ccauugcacucaucacuua

SEQ ID NO: 1141952 - RNA, 19 nt, Homo sapiens
  misc_RNA (1)...(19): siRNA sense strand
caacuugaacggaaucuua

SEQ ID NO: 1141953 - RNA, 19 nt, Homo sapiens
  misc_RNA (1)...(19): siRNA sense strand
gaacguggaucagaaagug

SEQ ID NO: 1141954 - RNA, 19 nt, Homo sapiens
  misc_RNA (1)...(19): siRNA sense strand
ggaagaggaugaggaagaa

SEQ ID NO: 1141955 - RNA, 19 nt, Homo sapiens
  misc_RNA (1)...(19): siRNA sense strand
caaagcagaugaacgcuau

SEQ ID NO: 1141956 - RNA, 19 nt, Homo sapiens
  misc_RNA (1)...(19): siRNA sense strand
uaaggagacugaagaaaga

SEQ ID NO: 1141957 - RNA, 19 nt, Homo sapiens
  misc_RNA (1)...(19): siRNA sense strand
gcaggaaaccgaagagaaa

SEQ ID NO: 1141958 - RNA, 19 nt, Homo sapiens
  misc_RNA (1)...(19): siRNA sense strand
gagaaacugucaccaaauc

SEQ ID NO: 1141959 - RNA, 19 nt, Homo sapiens
  misc_RNA (1)...(19): siRNA sense strand
gaagaggaaguacggcuua

SEQ ID NO: 1141960 - RNA, 19 nt, Homo sapiens
  misc_RNA (1)...(19): siRNA sense strand
caacacagccaagguuaua

SEQ ID NO: 1141961 - RNA, 19 nt, Homo sapiens
  misc_RNA (1)...(19): siRNA sense strand
ccaagugucucccauccua

SEQ ID NO: 1141962 - RNA, 19 nt, Homo sapiens
  misc_RNA (1)...(19): siRNA sense strand
gugaaaggguggacuuaaa

SEQ ID NO: 1141963 - RNA, 19 nt, Homo sapiens
  misc_RNA (1)...(19): siRNA sense strand
gaugagagcagccagauga

SEQ ID NO: 1141964 - RNA, 19 nt, Homo sapiens
  misc_RNA (1)...(19): siRNA sense strand
ccaaagcaguggcaacuug

SEQ ID NO: 1141965 - RNA, 19 nt, Homo sapiens
  misc_RNA (1)...(19): siRNA sense strand
gcagaccgaugaguaugua

SEQ ID NO: 1141966 - RNA, 19 nt, Homo sapiens
  misc_RNA (1)...(19): siRNA sense strand
gaagugggacggaugauga

SEQ ID NO: 1141967 - RNA, 19 nt, Homo sapiens
  misc_RNA (1)...(19): siRNA sense strand
ggaaauggaagaggaagua

SEQ ID NO: 1141968 - RNA, 19 nt, Homo sapiens
  misc_RNA (1)...(19): siRNA sense strand
gcacucaucacuuaucuga

SEQ ID NO: 1141969 - RNA, 19 nt, Homo sapiens
  misc_RNA (1)...(19): siRNA sense strand
gaagagagugauucugauu

SEQ ID NO: 1141970 - RNA, 19 nt, Homo sapiens
  misc_RNA (1)...(19): siRNA sense strand
ccaaauagcgaagaaguuu

SEQ ID NO: 1141971 - RNA, 19 nt, Homo sapiens
  misc_RNA (1)...(19): siRNA sense strand
ggaugaacgugaacaguca

SEQ ID NO: 1141972 - RNA, 19 nt, Homo sapiens
  misc_RNA (1)...(19): siRNA sense strand
ggaagaggaagaugaagaa

SEQ ID NO: 1141973 - RNA, 19 nt, Homo sapiens
  misc_RNA (1)...(19): siRNA sense strand
gagcugcccuccuggauca

SEQ ID NO: 1141974 - RNA, 19 nt, Homo sapiens
  misc_RNA (1)...(19): siRNA sense strand
ggacgaaggccaccgaaug

SEQ ID NO: 1141975 - RNA, 19 nt, Homo sapiens
  misc_RNA (1)...(19): siRNA sense strand
gcaaagauucgguggaaau

SEQ ID NO: 1141976 - RNA, 19 nt, Homo sapiens
  misc_RNA (1)...(19): siRNA sense strand
ggccugggcuuaaaucuuc

SEQ ID NO: 1141977 - RNA, 19 nt, Homo sapiens
  misc_RNA (1)...(19): siRNA sense strand
cagccaagguuauauguca

SEQ ID NO: 1141978 - RNA, 19 nt, Homo sapiens
  misc_RNA (1)...(19): siRNA sense strand
ggaagagagugaggaugaa

SEQ ID NO: 1141979 - RNA, 19 nt, Homo sapiens
  misc_RNA (1)...(19): siRNA sense strand
uaaaggaaaggauucguaa

SEQ ID NO: 1141980 - RNA, 19 nt, Homo sapiens
  misc_RNA (1)...(19): siRNA sense strand
gaaagaauuaccagaauac

SEQ ID NO: 1141981 - RNA, 19 nt, Homo sapiens
  misc_RNA (1)...(19): siRNA sense strand
gaagaaagaaguugaaucc

SEQ ID NO: 1141982 - RNA, 19 nt, Homo sapiens
  misc_RNA (1)...(19): siRNA sense strand
agaauaagcucccugaacu

SEQ ID NO: 1141983 - RNA, 19 nt, Homo sapiens
  misc_RNA (1)...(19): siRNA sense strand
aaagagagcagaagaagga

SEQ ID NO: 1141984 - RNA, 19 nt, Homo sapiens
  misc_RNA (1)...(19): siRNA sense strand
gaggaaacgccgucagaaa

SEQ ID NO: 1141985 - RNA, 19 nt, Homo sapiens
  misc_RNA (1)...(19): siRNA sense strand
caaccacccauauauguuu

SEQ ID NO: 1141986 - RNA, 19 nt, Homo sapiens
  misc_RNA (1)...(19): siRNA sense strand
aaucuuagccgaugaaaug

SEQ ID NO: 1141987 - RNA, 19 nt, Homo sapiens
  misc_RNA (1)...(19): siRNA sense strand
gaaagaccauacagaccau

SEQ ID NO: 1141988 - RNA, 19 nt, Homo sapiens
  misc_RNA (1)...(19): siRNA sense strand
ggaggaagaggaagaugaa

SEQ ID NO: 1141989 - RNA, 19 nt, Homo sapiens
  misc_RNA (1)...(19): siRNA sense strand
ugaggaagaagaugaagua

SEQ ID NO: 1141990 - RNA, 19 nt, Homo sapiens
  misc_RNA (1)...(19): siRNA sense strand
caccuaggcuauucaaaug

SEQ ID NO: 1141991 - RNA, 19 nt, Homo sapiens
  misc_RNA (1)...(19): siRNA sense strand
uggaauaugugaucaagug

SEQ ID NO: 1141992 - RNA, 19 nt, Homo sapiens
  misc_RNA (1)...(19): siRNA sense strand
ggaccccgcugcagaauaa

SEQ ID NO: 1141993 - RNA, 19 nt, Homo sapiens
  misc_RNA (1)...(19): siRNA sense strand
ccgagaagcuggagaagca

SEQ ID NO: 1141994 - RNA, 19 nt, Homo sapiens
  misc_RNA (1)...(19): siRNA sense strand
gcaaugaagaggaggaaga

SEQ ID NO: 1141995 - RNA, 19 nt, Homo sapiens
  misc_RNA (1)...(19): siRNA sense strand
ggaagccaguggauuucaa

SEQ ID NO: 1141996 - RNA, 19 nt, Homo sapiens
  misc_RNA (1)...(19): siRNA sense strand
ugacaucucucaugaccau

SEQ ID NO: 1141997 - RNA, 19 nt, Homo sapiens
  misc_RNA (1)...(19): siRNA sense strand
ggacauaugaauuugacaa

SEQ ID NO: 1141998 - RNA, 19 nt, Homo sapiens
  misc_RNA (1)...(19): siRNA sense strand
gagagaaugcggcgacuga

SEQ ID NO: 1141999 - RNA, 19 nt, Homo sapiens
  misc_RNA (1)...(19): siRNA sense strand
gugaagagagugauucuga

SEQ ID NO: 1142000 - RNA, 19 nt, Homo sapiens
  misc_RNA (1)...(19): siRNA sense strand
ggagcaggaugaacgugaa

SEQ ID NO: 1142001 - RNA, 19 nt, Homo sapiens
  misc_RNA (1)...(19): siRNA sense strand
ccaaagaggaagagaguga

SEQ ID NO: 1142002 - RNA, 19 nt, Homo sapiens
  misc_RNA (1)...(19): siRNA sense strand
cugcuuugcugaagaaauu

SEQ ID NO: 1142003 - RNA, 19 nt, Homo sapiens
  misc_RNA (1)...(19): siRNA sense strand
ugguuucccuguauaauaa

SEQ ID NO: 1142004 - RNA, 19 nt, Homo sapiens
  misc_RNA (1)...(19): siRNA sense strand
caaagcaaccguggaacua

SEQ ID NO: 1142005 - RNA, 19 nt, Homo sapiens
  misc_RNA (1)...(19): siRNA sense strand
cugagaaacugucaccaaa

SEQ ID NO: 1142006 - RNA, 19 nt, Homo sapiens
  misc_RNA (1)...(19): siRNA sense strand
caucgaagacggcaauuug

SEQ ID NO: 1142007 - RNA, 19 nt, Homo sapiens
  misc_RNA (1)...(19): siRNA sense strand
gaucaacacagccaagguu

SEQ ID NO: 1142008 - RNA, 19 nt, Homo sapiens
  misc_RNA (1)...(19): siRNA sense strand
agucugcccuccuaauuaa

SEQ ID NO: 1142009 - RNA, 19 nt, Homo sapiens
  misc_RNA (1)...(19): siRNA sense strand
gaaaugaauccugguuaug

SEQ ID NO: 1142010 - RNA, 19 nt, Homo sapiens
  misc_RNA (1)...(19): siRNA sense strand
agagagugauucugauuau

SEQ ID NO: 1142011 - RNA, 19 nt, Homo sapiens
  misc_RNA (1)...(19): siRNA sense strand
gaaaggguggacuuaaaug

SEQ ID NO: 1142012 - RNA, 19 nt, Homo sapiens
  misc_RNA (1)...(19): siRNA sense strand
gaaggccaccgaaugaaga

SEQ ID NO: 1142013 - RNA, 19 nt, Homo sapiens
  misc_RNA (1)...(19): siRNA sense strand
caaagauucgguggaaaua

SEQ ID NO: 1142014 - RNA, 19 nt, Homo sapiens
  misc_RNA (1)...(19): siRNA sense strand
agacguggaugaugaauac

SEQ ID NO: 1142015 - RNA, 19 nt, Homo sapiens
  misc_RNA (1)...(19): siRNA sense strand
aaagaaagacaggcguuua

SEQ ID NO: 1142016 - RNA, 19 nt, Homo sapiens
  misc_RNA (1)...(19): siRNA sense strand
ucgauacugugauaaacua

SEQ ID NO: 1142017 - RNA, 19 nt, Homo sapiens
  misc_RNA (1)...(19): siRNA sense strand
auacaguggucaucuuuga

SEQ ID NO: 1142018 - RNA, 19 nt, Homo sapiens
  misc_RNA (1)...(19): siRNA sense strand
gacgaaggccaccgaauga

SEQ ID NO: 1142019 - RNA, 19 nt, Homo sapiens
  misc_RNA (1)...(19): siRNA sense strand
gaauccugguuaugaaguu

SEQ ID NO: 1142020 - RNA, 19 nt, Homo sapiens
  misc_RNA (1)...(19): siRNA sense strand
ggaggaggaggaagaagaa

SEQ ID NO: 1142021 - RNA, 19 nt, Homo sapiens
  misc_RNA (1)...(19): siRNA sense strand
gaggaaguacggcuuaaga

SEQ ID NO: 1142022 - RNA, 19 nt, Homo sapiens
  misc_RNA (1)...(19): siRNA sense strand
gaauacagcaugcaguaca

SEQ ID NO: 1142023 - RNA, 19 nt, Homo sapiens
  misc_RNA (1)...(19): siRNA sense strand
gagcgggaauacagacuuc

SEQ ID NO: 1142024 - RNA, 19 nt, Homo sapiens
  misc_RNA (1)...(19): siRNA sense strand
gaagagagugaggaugaaa

SEQ ID NO: 1142025 - RNA, 19 nt, Homo sapiens
  misc_RNA (1)...(19): siRNA sense strand
ugaacacuauuaugcaguu

SEQ ID NO: 1142026 - RNA, 19 nt, Homo sapiens
  misc_RNA (1)...(19): siRNA sense strand
ccaaagagaagaagaagag

SEQ ID NO: 1142027 - RNA, 19 nt, Homo sapiens
  misc_RNA (1)...(19): siRNA sense strand
ggaaacgccgucagaaaca

SEQ ID NO: 1142028 - RNA, 19 nt, Homo sapiens
  misc_RNA (1)...(19): siRNA sense strand
ccacacccaucuccauuag

SEQ ID NO: 1142029 - RNA, 19 nt, Homo sapiens
  misc_RNA (1)...(19): siRNA sense strand
agaggaagaugaagaagag

SEQ ID NO: 1142030 - RNA, 19 nt, Homo sapiens
  misc_RNA (1)...(19): siRNA sense strand
uuaggaagccaguggauuu

SEQ ID NO: 1142031 - RNA, 19 nt, Homo sapiens
  misc_RNA (1)...(19): siRNA sense strand
uaaggaugacgcugaagua

SEQ ID NO: 1142032 - RNA, 19 nt, Homo sapiens
  misc_RNA (1)...(19): siRNA sense strand
gaugagacucugaaccaaa

SEQ ID NO: 1142033 - RNA, 19 nt, Homo sapiens
  misc_RNA (1)...(19): siRNA sense strand
aauaugugaucaaguguga

SEQ ID NO: 1142034 - RNA, 19 nt, Homo sapiens
  misc_RNA (1)...(19): siRNA sense strand
ggccuggaauggaugguuu

SEQ ID NO: 1142035 - RNA, 19 nt, Homo sapiens
  misc_RNA (1)...(19): siRNA sense strand
uagccaaucugaccaaucu

SEQ ID NO: 1142036 - RNA, 19 nt, Homo sapiens
  misc_RNA (1)...(19): siRNA sense strand
gagaggaaacgccgucaga

SEQ ID NO: 1142037 - RNA, 19 nt, Homo sapiens
  misc_RNA (1)...(19): siRNA sense strand
gagaagcagcagaagauug

SEQ ID NO: 1142038 - RNA, 19 nt, Homo sapiens
  misc_RNA (1)...(19): siRNA sense strand
gcucucaacuccaaagcau

SEQ ID NO: 1142039 - RNA, 19 nt, Homo sapiens
  misc_RNA (1)...(19): siRNA sense strand
gcgaugaggagcaggauga

SEQ ID NO: 1142040 - RNA, 19 nt, Homo sapiens
  misc_RNA (1)...(19): siRNA sense strand
ggagcuagaucaugaaaga

SEQ ID NO: 1142041 - RNA, 19 nt, Homo sapiens
  misc_RNA (1)...(19): siRNA sense strand
gagaaacucuucccugaug

SEQ ID NO: 1142042 - RNA, 19 nt, Homo sapiens
  misc_RNA (1)...(19): siRNA sense strand
ucacaguccugaaacgaua

SEQ ID NO: 1142043 - RNA, 19 nt, Homo sapiens
  misc_RNA (1)...(19): siRNA sense strand
ugaaagaaauguugcaauc

SEQ ID NO: 1142044 - RNA, 19 nt, Homo sapiens
  misc_RNA (1)...(19): siRNA sense strand
gauuggagauucuacauuc

SEQ ID NO: 1142045 - RNA, 19 nt, Homo sapiens
  misc_RNA (1)...(19): siRNA sense strand
agaaaucccuagaagaauu

SEQ ID NO: 1142046 - RNA, 19 nt, Homo sapiens
  misc_RNA (1)...(19): siRNA sense strand
ggauauagcuuugagaaac

SEQ ID NO: 1142047 - RNA, 19 nt, Homo sapiens
  misc_RNA (1)...(19): siRNA sense strand
gaagcuaagccgaccauuu

SEQ ID NO: 1142048 - RNA, 19 nt, Homo sapiens
  misc_RNA (1)...(19): siRNA sense strand
gaacacaacaaacuuaaag

SEQ ID NO: 1142049 - RNA, 19 nt, Homo sapiens
  misc_RNA (1)...(19): siRNA sense strand
gcucauggaugcaaaucuu

SEQ ID NO: 1142050 - RNA, 19 nt, Homo sapiens
  misc_RNA (1)...(19): siRNA sense strand
acagagagcuaguucuuau

SEQ ID NO: 1142051 - RNA, 19 nt, Homo sapiens
  misc_RNA (1)...(19): siRNA sense strand
gaagcaagcgugacaacaa

SEQ ID NO: 1142052 - RNA, 19 nt, Homo sapiens
  misc_RNA (1)...(19): siRNA sense strand
ccacagaaaucccuagaag

SEQ ID NO: 1142053 - RNA, 19 nt, Homo sapiens
  misc_RNA (1)...(19): siRNA sense strand
cucaggagcucaaggaaua

SEQ ID NO: 1142054 - RNA, 19 nt, Homo sapiens
  misc_RNA (1)...(19): siRNA sense strand
gaugacgccuuauguagug

SEQ ID NO: 1142055 - RNA, 19 nt, Homo sapiens
  misc_RNA (1)...(19): siRNA sense strand
gaucaguggaauaaaguua

SEQ ID NO: 1142056 - RNA, 19 nt, Homo sapiens
  misc_RNA (1)...(19): siRNA sense strand
ugaaagggaacacacaaua

SEQ ID NO: 1142057 - RNA, 19 nt, Homo sapiens
  misc_RNA (1)...(19): siRNA sense strand
acagaaaucccuagaagaa

SEQ ID NO: 1142058 - RNA, 19 nt, Homo sapiens
  misc_RNA (1)...(19): siRNA sense strand
gacaagcaguuagaugaaa

SEQ ID NO: 1142059 - RNA, 19 nt, Homo sapiens
  misc_RNA (1)...(19): siRNA sense strand
ggaacaccauguccugaau

SEQ ID NO: 1142060 - RNA, 19 nt, Homo sapiens
  misc_RNA (1)...(19): siRNA sense strand
caccaaagaucccugacaa

SEQ ID NO: 1142061 - RNA, 19 nt, Homo sapiens
  misc_RNA (1)...(19): siRNA sense strand
agauggagcuagaucauga

SEQ ID NO: 1142062 - RNA, 19 nt, Homo sapiens
  misc_RNA (1)...(19): siRNA sense strand
aaccaagaauggaguuaua

SEQ ID NO: 1142063 - RNA, 19 nt, Homo sapiens
  misc_RNA (1)...(19): siRNA sense strand
gaaagggaacacacaauag

SEQ ID NO: 1142064 - RNA, 19 nt, Homo sapiens
  misc_RNA (1)...(19): siRNA sense strand
ggaacgaguuuuaugauga

SEQ ID NO: 1142065 - RNA, 19 nt, Homo sapiens
  misc_RNA (1)...(19): siRNA sense strand
gcaagcgugacaacaauuu

SEQ ID NO: 1142066 - RNA, 19 nt, Homo sapiens
  misc_RNA (1)...(19): siRNA sense strand
ucagaacacaacaaacuua

SEQ ID NO: 1142067 - RNA, 19 nt, Homo sapiens
  misc_RNA (1)...(19): siRNA sense strand
gaaaacagaccuaaauaug

SEQ ID NO: 1142068 - RNA, 19 nt, Homo sapiens
  misc_RNA (1)...(19): siRNA sense strand
gaaauguugcaaucaagaa

SEQ ID NO: 1142069 - RNA, 19 nt, Homo sapiens
  misc_RNA (1)...(19): siRNA sense strand
cuagaagaauuucaagaug

SEQ ID NO: 1142070 - RNA, 19 nt, Homo sapiens
  misc_RNA (1)...(19): siRNA sense strand
gaaagaaauguugcaauca

SEQ ID NO: 1142071 - RNA, 19 nt, Homo sapiens
  misc_RNA (1)...(19): siRNA sense strand
aaacagaccuaaauaugcu

SEQ ID NO: 1142072 - RNA, 19 nt, Homo sapiens
  misc_RNA (1)...(19): siRNA sense strand
gacuuaaagcccaguaaua

SEQ ID NO: 1142073 - RNA, 19 nt, Homo sapiens
  misc_RNA (1)...(19): siRNA sense strand
gcccaguaauauaguagua

SEQ ID NO: 1142074 - RNA, 19 nt, Homo sapiens
  misc_RNA (1)...(19): siRNA sense strand
gaggagagaaccaagaaug

SEQ ID NO: 1142075 - RNA, 19 nt, Homo sapiens
  misc_RNA (1)...(19): siRNA sense strand
caacacccguacaucaaug

SEQ ID NO: 1142076 - RNA, 19 nt, Homo sapiens
  misc_RNA (1)...(19): siRNA sense strand
agagcuaguucuuaugaaa

SEQ ID NO: 1142077 - RNA, 19 nt, Homo sapiens
  misc_RNA (1)...(19): siRNA sense strand
ggcaugggcuacaaggaaa

SEQ ID NO: 1142078 - RNA, 19 nt, Homo sapiens
  misc_RNA (1)...(19): siRNA sense strand
ggaaucaagcaccuucauu

SEQ ID NO: 1142079 - RNA, 19 nt, Homo sapiens
  misc_RNA (1)...(19): siRNA sense strand
uguccuaccuucucuauca

SEQ ID NO: 1142080 - RNA, 19 nt, Homo sapiens
  misc_RNA (1)...(19): siRNA sense strand
ggaauaguaugcgcagcuu

SEQ ID NO: 1142081 - RNA, 19 nt, Homo sapiens
  misc_RNA (1)...(19): siRNA sense strand
gaacaccauguccugaauu

SEQ ID NO: 1142082 - RNA, 19 nt, Homo sapiens
  misc_RNA (1)...(19): siRNA sense strand
gaagaaacugcaaccaaca

SEQ ID NO: 1142083 - RNA, 19 nt, Homo sapiens
  misc_RNA (1)...(19): siRNA sense strand
gaaccaagaauggaguuau

SEQ ID NO: 1142084 - RNA, 19 nt, Homo sapiens
  misc_RNA (1)...(19): siRNA sense strand
ccaaaaugcugguaauaga

SEQ ID NO: 1142085 - RNA, 19 nt, Homo sapiens
  misc_RNA (1)...(19): siRNA sense strand
gauauagcuuugagaaacu

SEQ ID NO: 1142086 - RNA, 19 nt, Homo sapiens
  misc_RNA (1)...(19): siRNA sense strand
gcuagaucaugaaagaaug

SEQ ID NO: 1142087 - RNA, 19 nt, Homo sapiens
  misc_RNA (1)...(19): siRNA sense strand
ggacuuaaagcccaguaau

SEQ ID NO: 1142088 - RNA, 19 nt, Homo sapiens
  misc_RNA (1)...(19): siRNA sense strand
gaagcuccaccaccaaaga

SEQ ID NO: 1142089 - RNA, 19 nt, Homo sapiens
  misc_RNA (1)...(19): siRNA sense strand
guccugaauucaugaagaa

SEQ ID NO: 1142090 - RNA, 19 nt, Homo sapiens
  misc_RNA (1)...(19): siRNA sense strand
gagagcuaguucuuaugaa

SEQ ID NO: 1142091 - RNA, 19 nt, Homo sapiens
  misc_RNA (1)...(19): siRNA sense strand
uagaagaguggaaagaauu

SEQ ID NO: 1142092 - RNA, 19 nt, Homo sapiens
  misc_RNA (1)...(19): siRNA sense strand
ggacugcaggaacgaguuu

SEQ ID NO: 1142093 - RNA, 19 nt, Homo sapiens
  misc_RNA (1)...(19): siRNA sense strand
aagcuaagccgaccauuuc

SEQ ID NO: 1142094 - RNA, 19 nt, Homo sapiens
  misc_RNA (1)...(19): siRNA sense strand
ggagagaaccaagaaugga

SEQ ID NO: 1142095 - RNA, 19 nt, Homo sapiens
  misc_RNA (1)...(19): siRNA sense strand
ugacucagaacacaacaaa

SEQ ID NO: 1142096 - RNA, 19 nt, Homo sapiens
  misc_RNA (1)...(19): siRNA sense strand
ugauugcacuuugaagauu

SEQ ID NO: 1142097 - RNA, 19 nt, Homo sapiens
  misc_RNA (1)...(19): siRNA sense strand
gccaagugauucagaugga

SEQ ID NO: 1142098 - RNA, 19 nt, Homo sapiens
  misc_RNA (1)...(19): siRNA sense strand
aaagggaacacacaauaga

SEQ ID NO: 1142099 - RNA, 19 nt, Homo sapiens
  misc_RNA (1)...(19): siRNA sense strand
cagaacacaacaaacuuaa

SEQ ID NO: 1142100 - RNA, 19 nt, Homo sapiens
  misc_RNA (1)...(19): siRNA sense strand
gaauaguaugcgcagcuua

SEQ ID NO: 1142101 - RNA, 19 nt, Homo sapiens
  misc_RNA (1)...(19): siRNA sense strand
cuuaaagcccaguaauaua

SEQ ID NO: 1142102 - RNA, 19 nt, Homo sapiens
  misc_RNA (1)...(19): siRNA sense strand
uaucagaugcuguguggaa

SEQ ID NO: 1142103 - RNA, 19 nt, Homo sapiens
  misc_RNA (1)...(19): siRNA sense strand
uuaaagcccaguaauauag

SEQ ID NO: 1142104 - RNA, 19 nt, Homo sapiens
  misc_RNA (1)...(19): siRNA sense strand
gaacacacaauagaagagu

SEQ ID NO: 1142105 - RNA, 19 nt, Homo sapiens
  misc_RNA (1)...(19): siRNA sense strand
ucaggcaagggauuuguua

SEQ ID NO: 1142106 - RNA, 19 nt, Homo sapiens
  misc_RNA (1)...(19): siRNA sense strand
gaccuaaauaugcuggaua

SEQ ID NO: 1142107 - RNA, 19 nt, Homo sapiens
  misc_RNA (1)...(19): siRNA sense strand
cuacagagagcuaguucuu

SEQ ID NO: 1142108 - RNA, 19 nt, Homo sapiens
  misc_RNA (1)...(19): siRNA sense strand
gaugaaagggaacacacaa

SEQ ID NO: 1142109 - RNA, 19 nt, Homo sapiens
  misc_RNA (1)...(19): siRNA sense strand
gauugcacuuugaagauuc

SEQ ID NO: 1142110 - RNA, 19 nt, Homo sapiens
  misc_RNA (1)...(19): siRNA sense strand
aagcaagcgugacaacaau

SEQ ID NO: 1142111 - RNA, 19 nt, Homo sapiens
  misc_RNA (1)...(19): siRNA sense strand
guguagagauuggagauuc

SEQ ID NO: 1142112 - RNA, 19 nt, Homo sapiens
  misc_RNA (1)...(19): siRNA sense strand
aaagcccaguaauauagua

SEQ ID NO: 1142113 - RNA, 19 nt, Homo sapiens
  misc_RNA (1)...(19): siRNA sense strand
uaugaugacgccuuaugua

SEQ ID NO: 1142114 - RNA, 19 nt, Homo sapiens
  misc_RNA (1)...(19): siRNA sense strand
gagcuaguucuuaugaaau

SEQ ID NO: 1142115 - RNA, 19 nt, Homo sapiens
  misc_RNA (1)...(19): siRNA sense strand
uaugaugccauucuugaaa

SEQ ID NO: 1142116 - RNA, 19 nt, Homo sapiens
  misc_RNA (1)...(19): siRNA sense strand
ugauucagauggagcuaga

SEQ ID NO: 1142117 - RNA, 19 nt, Homo sapiens
  misc_RNA (1)...(19): siRNA sense strand
gaagaguggaaagaauuga

SEQ ID NO: 1142118 - RNA, 19 nt, Homo sapiens
  misc_RNA (1)...(19): siRNA sense strand
auagaagaguggaaagaau

SEQ ID NO: 1142119 - RNA, 19 nt, Homo sapiens
  misc_RNA (1)...(19): siRNA sense strand
ggacuuacguugaaaacag

SEQ ID NO: 1142120 - RNA, 19 nt, Homo sapiens
  misc_RNA (1)...(19): siRNA sense strand
cagaugcuguguggaauca

SEQ ID NO: 1142121 - RNA, 19 nt, Homo sapiens
  misc_RNA (1)...(19): siRNA sense strand
agagagcuaguucuuauga

SEQ ID NO: 1142122 - RNA, 19 nt, Homo sapiens
  misc_RNA (1)...(19): siRNA sense strand
gggaacacacaauagaaga

SEQ ID NO: 1142123 - RNA, 19 nt, Homo sapiens
  misc_RNA (1)...(19): siRNA sense strand
ugacaagcaguuagaugaa

SEQ ID NO: 1142124 - RNA, 19 nt, Homo sapiens
  misc_RNA (1)...(19): siRNA sense strand
caaagaucccugacaagca

SEQ ID NO: 1142125 - RNA, 19 nt, Homo sapiens
  misc_RNA (1)...(19): siRNA sense strand
caauagaagaguggaaaga

SEQ ID NO: 1142126 - RNA, 19 nt, Homo sapiens
  misc_RNA (1)...(19): siRNA sense strand
ccuagaagaauuucaagau

SEQ ID NO: 1142127 - RNA, 19 nt, Homo sapiens
  misc_RNA (1)...(19): siRNA sense strand
cagaagcuccaccaccaaa

SEQ ID NO: 1142128 - RNA, 19 nt, Homo sapiens
  misc_RNA (1)...(19): siRNA sense strand
gaacagcuuggaacaccau

SEQ ID NO: 1142129 - RNA, 19 nt, Homo sapiens
  misc_RNA (1)...(19): siRNA sense strand
gaugcuguguggaaucaag

SEQ ID NO: 1142130 - RNA, 19 nt, Homo sapiens
  misc_RNA (1)...(19): siRNA sense strand
agaguggaaagaauugaua

SEQ ID NO: 1142131 - RNA, 19 nt, Homo sapiens
  misc_RNA (1)...(19): siRNA sense strand
caaccaacaguaaggacuu

SEQ ID NO: 1142132 - RNA, 19 nt, Homo sapiens
  misc_RNA (1)...(19): siRNA sense strand
uaauuggccuuuugaaugu

SEQ ID NO: 1142133 - RNA, 19 nt, Homo sapiens
  misc_RNA (1)...(19): siRNA sense strand
cuaaaaggaucucuguaga

SEQ ID NO: 1142134 - RNA, 19 nt, Homo sapiens
  misc_RNA (1)...(19): siRNA sense strand
gcaggaacgaguuuuauga

SEQ ID NO: 1142135 - RNA, 19 nt, Homo sapiens
  misc_RNA (1)...(19): siRNA sense strand
ggagcucaaggaauaguau

SEQ ID NO: 1142136 - RNA, 19 nt, Homo sapiens
  misc_RNA (1)...(19): siRNA sense strand
agaugaagcucuccaacac

SEQ ID NO: 1142137 - RNA, 19 nt, Homo sapiens
  misc_RNA (1)...(19): siRNA sense strand
gcagaagcuccaccaccaa

SEQ ID NO: 1142138 - RNA, 19 nt, Homo sapiens
  misc_RNA (1)...(19): siRNA sense strand
acuuaaagcccaguaauau

SEQ ID NO: 1142139 - RNA, 19 nt, Homo sapiens
  misc_RNA (1)...(19): siRNA sense strand
cugacaagcaguuagauga

SEQ ID NO: 1142140 - RNA, 19 nt, Homo sapiens
  misc_RNA (1)...(19): siRNA sense strand
ggagcuagaucaugaaaga

SEQ ID NO: 1142141 - RNA, 19 nt, Homo sapiens
  misc_RNA (1)...(19): siRNA sense strand
gagaaacucuucccugaug

SEQ ID NO: 1142142 - RNA, 19 nt, Homo sapiens
  misc_RNA (1)...(19): siRNA sense strand
ucacaguccugaaacgaua

SEQ ID NO: 1142143 - RNA, 19 nt, Homo sapiens
  misc_RNA (1)...(19): siRNA sense strand
ugaaagaaauguugcaauc

SEQ ID NO: 1142144 - RNA, 19 nt, Homo sapiens
  misc_RNA (1)...(19): siRNA sense strand
gauuggagauucuacauuc

SEQ ID NO: 1142145 - RNA, 19 nt, Homo sapiens
  misc_RNA (1)...(19): siRNA sense strand
agaaaucccuagaagaauu

SEQ ID NO: 1142146 - RNA, 19 nt, Homo sapiens
  misc_RNA (1)...(19): siRNA sense strand
ggauauagcuuugagaaac

SEQ ID NO: 1142147 - RNA, 19 nt, Homo sapiens
  misc_RNA (1)...(19): siRNA sense strand
gaagcuaagccgaccauuu

SEQ ID NO: 1142148 - RNA, 19 nt, Homo sapiens
  misc_RNA (1)...(19): siRNA sense strand
gaacacaacaaacuuaaag

SEQ ID NO: 1142149 - RNA, 19 nt, Homo sapiens
  misc_RNA (1)...(19): siRNA sense strand
gcucauggaugcaaaucuu

SEQ ID NO: 1142150 - RNA, 19 nt, Homo sapiens
  misc_RNA (1)...(19): siRNA sense strand
acagagagcuaguucuuau

SEQ ID NO: 1142151 - RNA, 19 nt, Homo sapiens
  misc_RNA (1)...(19): siRNA sense strand
gaagcaagcgugacaacaa

SEQ ID NO: 1142152 - RNA, 19 nt, Homo sapiens
  misc_RNA (1)...(19): siRNA sense strand
ccacagaaaucccuagaag

SEQ ID NO: 1142153 - RNA, 19 nt, Homo sapiens
  misc_RNA (1)...(19): siRNA sense strand
cucaggagcucaaggaaua

SEQ ID NO: 1142154 - RNA, 19 nt, Homo sapiens
  misc_RNA (1)...(19): siRNA sense strand
gaugacgccuuauguagug

SEQ ID NO: 1142155 - RNA, 19 nt, Homo sapiens
  misc_RNA (1)...(19): siRNA sense strand
gaucaguggaauaaaguua

SEQ ID NO: 1142156 - RNA, 19 nt, Homo sapiens
  misc_RNA (1)...(19): siRNA sense strand
ugaaagggaacacacaaua

SEQ ID NO: 1142157 - RNA, 19 nt, Homo sapiens
  misc_RNA (1)...(19): siRNA sense strand
acagaaaucccuagaagaa

SEQ ID NO: 1142158 - RNA, 19 nt, Homo sapiens
  misc_RNA (1)...(19): siRNA sense strand
gacaagcaguuagaugaaa

SEQ ID NO: 1142159 - RNA, 19 nt, Homo sapiens
  misc_RNA (1)...(19): siRNA sense strand
ggaacaccauguccugaau

SEQ ID NO: 1142160 - RNA, 19 nt, Homo sapiens
  misc_RNA (1)...(19): siRNA sense strand
caccaaagaucccugacaa

SEQ ID NO: 1142161 - RNA, 19 nt, Homo sapiens
  misc_RNA (1)...(19): siRNA sense strand
agauggagcuagaucauga

SEQ ID NO: 1142162 - RNA, 19 nt, Homo sapiens
  misc_RNA (1)...(19): siRNA sense strand
aaccaagaauggaguuaua

SEQ ID NO: 1142163 - RNA, 19 nt, Homo sapiens
  misc_RNA (1)...(19): siRNA sense strand
gaaagggaacacacaauag

SEQ ID NO: 1142164 - RNA, 19 nt, Homo sapiens
  misc_RNA (1)...(19): siRNA sense strand
ggaacgaguuuuaugauga

SEQ ID NO: 1142165 - RNA, 19 nt, Homo sapiens
  misc_RNA (1)...(19): siRNA sense strand
gcaagcgugacaacaauuu

SEQ ID NO: 1142166 - RNA, 19 nt, Homo sapiens
  misc_RNA (1)...(19): siRNA sense strand
ucagaacacaacaaacuua

SEQ ID NO: 1142167 - RNA, 19 nt, Homo sapiens
  misc_RNA (1)...(19): siRNA sense strand
gaaaacagaccuaaauaug

SEQ ID NO: 1142168 - RNA, 19 nt, Homo sapiens
  misc_RNA (1)...(19): siRNA sense strand
gaaauguugcaaucaagaa

SEQ ID NO: 1142169 - RNA, 19 nt, Homo sapiens
  misc_RNA (1)...(19): siRNA sense strand
cuagaagaauuucaagaug

SEQ ID NO: 1142170 - RNA, 19 nt, Homo sapiens
  misc_RNA (1)...(19): siRNA sense strand
gaaagaaauguugcaauca

SEQ ID NO: 1142171 - RNA, 19 nt, Homo sapiens
  misc_RNA (1)...(19): siRNA sense strand
aaacagaccuaaauaugcu

SEQ ID NO: 1142172 - RNA, 19 nt, Homo sapiens
  misc_RNA (1)...(19): siRNA sense strand
gacuuaaagcccaguaaua

SEQ ID NO: 1142173 - RNA, 19 nt, Homo sapiens
  misc_RNA (1)...(19): siRNA sense strand
gcccaguaauauaguagua

SEQ ID NO: 1142174 - RNA, 19 nt, Homo sapiens
  misc_RNA (1)...(19): siRNA sense strand
gaggagagaaccaagaaug

SEQ ID NO: 1142175 - RNA, 19 nt, Homo sapiens
  misc_RNA (1)...(19): siRNA sense strand
caacacccguacaucaaug

SEQ ID NO: 1142176 - RNA, 19 nt, Homo sapiens
  misc_RNA (1)...(19): siRNA sense strand
agagcuaguucuuaugaaa

SEQ ID NO: 1142177 - RNA, 19 nt, Homo sapiens
  misc_RNA (1)...(19): siRNA sense strand
ggcaugggcuacaaggaaa

SEQ ID NO: 1142178 - RNA, 19 nt, Homo sapiens
  misc_RNA (1)...(19): siRNA sense strand
ggaaucaagcaccuucauu

SEQ ID NO: 1142179 - RNA, 19 nt, Homo sapiens
  misc_RNA (1)...(19): siRNA sense strand
uguccuaccuucucuauca

SEQ ID NO: 1142180 - RNA, 19 nt, Homo sapiens
  misc_RNA (1)...(19): siRNA sense strand
ggaauaguaugcgcagcuu

SEQ ID NO: 1142181 - RNA, 19 nt, Homo sapiens
  misc_RNA (1)...(19): siRNA sense strand
gaacaccauguccugaauu

SEQ ID NO: 1142182 - RNA, 19 nt, Homo sapiens
  misc_RNA (1)...(19): siRNA sense strand
gaagaaacugcaaccaaca

SEQ ID NO: 1142183 - RNA, 19 nt, Homo sapiens
  misc_RNA (1)...(19): siRNA sense strand
gaaccaagaauggaguuau

SEQ ID NO: 1142184 - RNA, 19 nt, Homo sapiens
  misc_RNA (1)...(19): siRNA sense strand
ccaaaaugcugguaauaga

SEQ ID NO: 1142185 - RNA, 19 nt, Homo sapiens
  misc_RNA (1)...(19): siRNA sense strand
gauauagcuuugagaaacu

SEQ ID NO: 1142186 - RNA, 19 nt, Homo sapiens
  misc_RNA (1)...(19): siRNA sense strand
gcuagaucaugaaagaaug

SEQ ID NO: 1142187 - RNA, 19 nt, Homo sapiens
  misc_RNA (1)...(19): siRNA sense strand
ggacuuaaagcccaguaau

SEQ ID NO: 1142188 - RNA, 19 nt, Homo sapiens
  misc_RNA (1)...(19): siRNA sense strand
gaagcuccaccaccaaaga

SEQ ID NO: 1142189 - RNA, 19 nt, Homo sapiens
  misc_RNA (1)...(19): siRNA sense strand
guccugaauucaugaagaa

SEQ ID NO: 1142190 - RNA, 19 nt, Homo sapiens
  misc_RNA (1)...(19): siRNA sense strand
gagagcuaguucuuaugaa

SEQ ID NO: 1142191 - RNA, 19 nt, Homo sapiens
  misc_RNA (1)...(19): siRNA sense strand
uagaagaguggaaagaauu

SEQ ID NO: 1142192 - RNA, 19 nt, Homo sapiens
  misc_RNA (1)...(19): siRNA sense strand
ggacugcaggaacgaguuu

SEQ ID NO: 1142193 - RNA, 19 nt, Homo sapiens
  misc_RNA (1)...(19): siRNA sense strand
aagcuaagccgaccauuuc

SEQ ID NO: 1142194 - RNA, 19 nt, Homo sapiens
  misc_RNA (1)...(19): siRNA sense strand
ggagagaaccaagaaugga

SEQ ID NO: 1142195 - RNA, 19 nt, Homo sapiens
  misc_RNA (1)...(19): siRNA sense strand
ugacucagaacacaacaaa

SEQ ID NO: 1142196 - RNA, 19 nt, Homo sapiens
  misc_RNA (1)...(19): siRNA sense strand
ugauugcacuuugaagauu

SEQ ID NO: 1142197 - RNA, 19 nt, Homo sapiens
  misc_RNA (1)...(19): siRNA sense strand
gccaagugauucagaugga

SEQ ID NO: 1142198 - RNA, 19 nt, Homo sapiens
  misc_RNA (1)...(19): siRNA sense strand
aaagggaacacacaauaga

SEQ ID NO: 1142199 - RNA, 19 nt, Homo sapiens
  misc_RNA (1)...(19): siRNA sense strand
cagaacacaacaaacuuaa

SEQ ID NO: 1142200 - RNA, 19 nt, Homo sapiens
  misc_RNA (1)...(19): siRNA sense strand
gaauaguaugcgcagcuua

SEQ ID NO: 1142201 - RNA, 19 nt, Homo sapiens
  misc_RNA (1)...(19): siRNA sense strand
cuuaaagcccaguaauaua

SEQ ID NO: 1142202 - RNA, 19 nt, Homo sapiens
  misc_RNA (1)...(19): siRNA sense strand
uaucagaugcuguguggaa

SEQ ID NO: 1142203 - RNA, 19 nt, Homo sapiens
  misc_RNA (1)...(19): siRNA sense strand
uuaaagcccaguaauauag

SEQ ID NO: 1142204 - RNA, 19 nt, Homo sapiens
  misc_RNA (1)...(19): siRNA sense strand
gaacacacaauagaagagu

SEQ ID NO: 1142205 - RNA, 19 nt, Homo sapiens
  misc_RNA (1)...(19): siRNA sense strand
ucaggcaagggauuuguua

SEQ ID NO: 1142206 - RNA, 19 nt, Homo sapiens
  misc_RNA (1)...(19): siRNA sense strand
gaccuaaauaugcuggaua

SEQ ID NO: 1142207 - RNA, 19 nt, Homo sapiens
  misc_RNA (1)...(19): siRNA sense strand
cuacagagagcuaguucuu

SEQ ID NO: 1142208 - RNA, 19 nt, Homo sapiens
  misc_RNA (1)...(19): siRNA sense strand
gaugaaagggaacacacaa

SEQ ID NO: 1142209 - RNA, 19 nt, Homo sapiens
  misc_RNA (1)...(19): siRNA sense strand
gauugcacuuugaagauuc

SEQ ID NO: 1142210 - RNA, 19 nt, Homo sapiens
  misc_RNA (1)...(19): siRNA sense strand
aagcaagcgugacaacaau

SEQ ID NO: 1142211 - RNA, 19 nt, Homo sapiens
  misc_RNA (1)...(19): siRNA sense strand
guguagagauuggagauuc

SEQ ID NO: 1142212 - RNA, 19 nt, Homo sapiens
  misc_RNA (1)...(19): siRNA sense strand
aaagcccaguaauauagua

SEQ ID NO: 1142213 - RNA, 19 nt, Homo sapiens
  misc_RNA (1)...(19): siRNA sense strand
uaugaugacgccuuaugua

SEQ ID NO: 1142214 - RNA, 19 nt, Homo sapiens
  misc_RNA (1)...(19): siRNA sense strand
gagcuaguucuuaugaaau

SEQ ID NO: 1142215 - RNA, 19 nt, Homo sapiens
  misc_RNA (1)...(19): siRNA sense strand
uaugaugccauucuugaaa

SEQ ID NO: 1142216 - RNA, 19 nt, Homo sapiens
  misc_RNA (1)...(19): siRNA sense strand
ugauucagauggagcuaga

SEQ ID NO: 1142217 - RNA, 19 nt, Homo sapiens
  misc_RNA (1)...(19): siRNA sense strand
gaagaguggaaagaauuga

SEQ ID NO: 1142218 - RNA, 19 nt, Homo sapiens
  misc_RNA (1)...(19): siRNA sense strand
auagaagaguggaaagaau

SEQ ID NO: 1142219 - RNA, 19 nt, Homo sapiens
  misc_RNA (1)...(19): siRNA sense strand
ggacuuacguugaaaacag

SEQ ID NO: 1142220 - RNA, 19 nt, Homo sapiens
  misc_RNA (1)...(19): siRNA sense strand
cagaugcuguguggaauca

SEQ ID NO: 1142221 - RNA, 19 nt, Homo sapiens
  misc_RNA (1)...(19): siRNA sense strand
agagagcuaguucuuauga

SEQ ID NO: 1142222 - RNA, 19 nt, Homo sapiens
  misc_RNA (1)...(19): siRNA sense strand
gggaacacacaauagaaga

SEQ ID NO: 1142223 - RNA, 19 nt, Homo sapiens
  misc_RNA (1)...(19): siRNA sense strand
ugacaagcaguuagaugaa

SEQ ID NO: 1142224 - RNA, 19 nt, Homo sapiens
  misc_RNA (1)...(19): siRNA sense strand
caaagaucccugacaagca

SEQ ID NO: 1142225 - RNA, 19 nt, Homo sapiens
  misc_RNA (1)...(19): siRNA sense strand
caauagaagaguggaaaga

SEQ ID NO: 1142226 - RNA, 19 nt, Homo sapiens
  misc_RNA (1)...(19): siRNA sense strand
ccuagaagaauuucaagau

SEQ ID NO: 1142227 - RNA, 19 nt, Homo sapiens
  misc_RNA (1)...(19): siRNA sense strand
cagaagcuccaccaccaaa

SEQ ID NO: 1142228 - RNA, 19 nt, Homo sapiens
  misc_RNA (1)...(19): siRNA sense strand
gaacagcuuggaacaccau

SEQ ID NO: 1142229 - RNA, 19 nt, Homo sapiens
  misc_RNA (1)...(19): siRNA sense strand
gaugcuguguggaaucaag

SEQ ID NO: 1142230 - RNA, 19 nt, Homo sapiens
  misc_RNA (1)...(19): siRNA sense strand
agaguggaaagaauugaua

SEQ ID NO: 1142231 - RNA, 19 nt, Homo sapiens
  misc_RNA (1)...(19): siRNA sense strand
caaccaacaguaaggacuu

SEQ ID NO: 1142232 - RNA, 19 nt, Homo sapiens
  misc_RNA (1)...(19): siRNA sense strand
uaauuggccuuuugaaugu

SEQ ID NO: 1142233 - RNA, 19 nt, Homo sapiens
  misc_RNA (1)...(19): siRNA sense strand
cuaaaaggaucucuguaga

SEQ ID NO: 1142234 - RNA, 19 nt, Homo sapiens
  misc_RNA (1)...(19): siRNA sense strand
gcaggaacgaguuuuauga

SEQ ID NO: 1142235 - RNA, 19 nt, Homo sapiens
  misc_RNA (1)...(19): siRNA sense strand
ggagcucaaggaauaguau

SEQ ID NO: 1142236 - RNA, 19 nt, Homo sapiens
  misc_RNA (1)...(19): siRNA sense strand
agaugaagcucuccaacac

SEQ ID NO: 1142237 - RNA, 19 nt, Homo sapiens
  misc_RNA (1)...(19): siRNA sense strand
gcagaagcuccaccaccaa

SEQ ID NO: 1142238 - RNA, 19 nt, Homo sapiens
  misc_RNA (1)...(19): siRNA sense strand
acuuaaagcccaguaauau

SEQ ID NO: 1142239 - RNA, 19 nt, Homo sapiens
  misc_RNA (1)...(19): siRNA sense strand
cugacaagcaguuagauga

SEQ ID NO: 1142240 - RNA, 19 nt, Homo sapiens
  misc_RNA (1)...(19): siRNA sense strand
ggagcuagaucaugaaaga

SEQ ID NO: 1142241 - RNA, 19 nt, Homo sapiens
  misc_RNA (1)...(19): siRNA sense strand
gagaaacucuucccugaug

SEQ ID NO: 1142242 - RNA, 19 nt, Homo sapiens
  misc_RNA (1)...(19): siRNA sense strand
ucacaguccugaaacgaua

SEQ ID NO: 1142243 - RNA, 19 nt, Homo sapiens
  misc_RNA (1)...(19): siRNA sense strand
ugaaagaaauguugcaauc

SEQ ID NO: 1142244 - RNA, 19 nt, Homo sapiens
  misc_RNA (1)...(19): siRNA sense strand
gauuggagauucuacauuc

SEQ ID NO: 1142245 - RNA, 19 nt, Homo sapiens
  misc_RNA (1)...(19): siRNA sense strand
agaaaucccuagaagaauu

SEQ ID NO: 1142246 - RNA, 19 nt, Homo sapiens
  misc_RNA (1)...(19): siRNA sense strand
ggauauagcuuugagaaac

SEQ ID NO: 1142247 - RNA, 19 nt, Homo sapiens
  misc_RNA (1)...(19): siRNA sense strand
gaagcuaagccgaccauuu

SEQ ID NO: 1142248 - RNA, 19 nt, Homo sapiens
  misc_RNA (1)...(19): siRNA sense strand
gaacacaacaaacuuaaag

SEQ ID NO: 1142249 - RNA, 19 nt, Homo sapiens
  misc_RNA (1)...(19): siRNA sense strand
gcucauggaugcaaaucuu

SEQ ID NO: 1142250 - RNA, 19 nt, Homo sapiens
  misc_RNA (1)...(19): siRNA sense strand
acagagagcuaguucuuau

SEQ ID NO: 1142251 - RNA, 19 nt, Homo sapiens
  misc_RNA (1)...(19): siRNA sense strand
gaagcaagcgugacaacaa

SEQ ID NO: 1142252 - RNA, 19 nt, Homo sapiens
  misc_RNA (1)...(19): siRNA sense strand
ucaaugaugugucuucaau

SEQ ID NO: 1142253 - RNA, 19 nt, Homo sapiens
  misc_RNA (1)...(19): siRNA sense strand
ccacagaaaucccuagaag

SEQ ID NO: 1142254 - RNA, 19 nt, Homo sapiens
  misc_RNA (1)...(19): siRNA sense strand
cucaggagcucaaggaaua

SEQ ID NO: 1142255 - RNA, 19 nt, Homo sapiens
  misc_RNA (1)...(19): siRNA sense strand
gaugacgccuuauguagug

SEQ ID NO: 1142256 - RNA, 19 nt, Homo sapiens
  misc_RNA (1)...(19): siRNA sense strand
gaucaguggaauaaaguua

SEQ ID NO: 1142257 - RNA, 19 nt, Homo sapiens
  misc_RNA (1)...(19): siRNA sense strand
ugaaagggaacacacaaua

SEQ ID NO: 1142258 - RNA, 19 nt, Homo sapiens
  misc_RNA (1)...(19): siRNA sense strand
acagaaaucccuagaagaa

SEQ ID NO: 1142259 - RNA, 19 nt, Homo sapiens
  misc_RNA (1)...(19): siRNA sense strand
gacaagcaguuagaugaaa

SEQ ID NO: 1142260 - RNA, 19 nt, Homo sapiens
  misc_RNA (1)...(19): siRNA sense strand
ggaacaccauguccugaau

SEQ ID NO: 1142261 - RNA, 19 nt, Homo sapiens
  misc_RNA (1)...(19): siRNA sense strand
caccaaagaucccugacaa

SEQ ID NO: 1142262 - RNA, 19 nt, Homo sapiens
  misc_RNA (1)...(19): siRNA sense strand
agauggagcuagaucauga

SEQ ID NO: 1142263 - RNA, 19 nt, Homo sapiens
  misc_RNA (1)...(19): siRNA sense strand
aaccaagaauggaguuaua

SEQ ID NO: 1142264 - RNA, 19 nt, Homo sapiens
  misc_RNA (1)...(19): siRNA sense strand
gaaagggaacacacaauag

SEQ ID NO: 1142265 - RNA, 19 nt, Homo sapiens
  misc_RNA (1)...(19): siRNA sense strand
ggaacgaguuuuaugauga

SEQ ID NO: 1142266 - RNA, 19 nt, Homo sapiens
  misc_RNA (1)...(19): siRNA sense strand
gcaagcgugacaacaauuu

SEQ ID NO: 1142267 - RNA, 19 nt, Homo sapiens
  misc_RNA (1)...(19): siRNA sense strand
ucagaacacaacaaacuua

SEQ ID NO: 1142268 - RNA, 19 nt, Homo sapiens
  misc_RNA (1)...(19): siRNA sense strand
gaaaacagaccuaaauaug

SEQ ID NO: 1142269 - RNA, 19 nt, Homo sapiens
  misc_RNA (1)...(19): siRNA sense strand
gaaauguugcaaucaagaa

SEQ ID NO: 1142270 - RNA, 19 nt, Homo sapiens
  misc_RNA (1)...(19): siRNA sense strand
cuagaagaauuucaagaug

SEQ ID NO: 1142271 - RNA, 19 nt, Homo sapiens
  misc_RNA (1)...(19): siRNA sense strand
gaaagaaauguugcaauca

SEQ ID NO: 1142272 - RNA, 19 nt, Homo sapiens
  misc_RNA (1)...(19): siRNA sense strand
aaacagaccuaaauaugcu

SEQ ID NO: 1142273 - RNA, 19 nt, Homo sapiens
  misc_RNA (1)...(19): siRNA sense strand
gacuuaaagcccaguaaua

SEQ ID NO: 1142274 - RNA, 19 nt, Homo sapiens
  misc_RNA (1)...(19): siRNA sense strand
gcccaguaauauaguagua

SEQ ID NO: 1142275 - RNA, 19 nt, Homo sapiens
  misc_RNA (1)...(19): siRNA sense strand
gaggagagaaccaagaaug

SEQ ID NO: 1142276 - RNA, 19 nt, Homo sapiens
  misc_RNA (1)...(19): siRNA sense strand
caacacccguacaucaaug

SEQ ID NO: 1142277 - RNA, 19 nt, Homo sapiens
  misc_RNA (1)...(19): siRNA sense strand
agagcuaguucuuaugaaa

SEQ ID NO: 1142278 - RNA, 19 nt, Homo sapiens
  misc_RNA (1)...(19): siRNA sense strand
ggcaugggcuacaaggaaa

SEQ ID NO: 1142279 - RNA, 19 nt, Homo sapiens
  misc_RNA (1)...(19): siRNA sense strand
ggaaucaagcaccuucauu

SEQ ID NO: 1142280 - RNA, 19 nt, Homo sapiens
  misc_RNA (1)...(19): siRNA sense strand
uguccuaccuucucuauca

SEQ ID NO: 1142281 - RNA, 19 nt, Homo sapiens
  misc_RNA (1)...(19): siRNA sense strand
ggaauaguaugcgcagcuu

SEQ ID NO: 1142282 - RNA, 19 nt, Homo sapiens
  misc_RNA (1)...(19): siRNA sense strand
gaacaccauguccugaauu

SEQ ID NO: 1142283 - RNA, 19 nt, Homo sapiens
  misc_RNA (1)...(19): siRNA sense strand
gaagaaacugcaaccaaca

SEQ ID NO: 1142284 - RNA, 19 nt, Homo sapiens
  misc_RNA (1)...(19): siRNA sense strand
ccucugggcugcuguagau

SEQ ID NO: 1142285 - RNA, 19 nt, Homo sapiens
  misc_RNA (1)...(19): siRNA sense strand
gaaccaagaauggaguuau

SEQ ID NO: 1142286 - RNA, 19 nt, Homo sapiens
  misc_RNA (1)...(19): siRNA sense strand
ccaaaaugcugguaauaga

SEQ ID NO: 1142287 - RNA, 19 nt, Homo sapiens
  misc_RNA (1)...(19): siRNA sense strand
gauauagcuuugagaaacu

SEQ ID NO: 1142288 - RNA, 19 nt, Homo sapiens
  misc_RNA (1)...(19): siRNA sense strand
gcuagaucaugaaagaaug

SEQ ID NO: 1142289 - RNA, 19 nt, Homo sapiens
  misc_RNA (1)...(19): siRNA sense strand
ugaugugucuucaauguca

SEQ ID NO: 1142290 - RNA, 19 nt, Homo sapiens
  misc_RNA (1)...(19): siRNA sense strand
ggacuuaaagcccaguaau

SEQ ID NO: 1142291 - RNA, 19 nt, Homo sapiens
  misc_RNA (1)...(19): siRNA sense strand
gaagcuccaccaccaaaga

SEQ ID NO: 1142292 - RNA, 19 nt, Homo sapiens
  misc_RNA (1)...(19): siRNA sense strand
guccugaauucaugaagaa

SEQ ID NO: 1142293 - RNA, 19 nt, Homo sapiens
  misc_RNA (1)...(19): siRNA sense strand
gagagcuaguucuuaugaa

SEQ ID NO: 1142294 - RNA, 19 nt, Homo sapiens
  misc_RNA (1)...(19): siRNA sense strand
aaugaugugucuucaaugu

SEQ ID NO: 1142295 - RNA, 19 nt, Homo sapiens
  misc_RNA (1)...(19): siRNA sense strand
uagaagaguggaaagaauu

SEQ ID NO: 1142296 - RNA, 19 nt, Homo sapiens
  misc_RNA (1)...(19): siRNA sense strand
ggacugcaggaacgaguuu

SEQ ID NO: 1142297 - RNA, 19 nt, Homo sapiens
  misc_RNA (1)...(19): siRNA sense strand
gugcagcagugaucaaugg

SEQ ID NO: 1142298 - RNA, 19 nt, Homo sapiens
  misc_RNA (1)...(19): siRNA sense strand
aagcuaagccgaccauuuc

SEQ ID NO: 1142299 - RNA, 19 nt, Homo sapiens
  misc_RNA (1)...(19): siRNA sense strand
ggagagaaccaagaaugga

SEQ ID NO: 1142300 - RNA, 19 nt, Homo sapiens
  misc_RNA (1)...(19): siRNA sense strand
ugacucagaacacaacaaa

SEQ ID NO: 1142301 - RNA, 19 nt, Homo sapiens
  misc_RNA (1)...(19): siRNA sense strand
ugauugcacuuugaagauu

SEQ ID NO: 1142302 - RNA, 19 nt, Homo sapiens
  misc_RNA (1)...(19): siRNA sense strand
gccaagugauucagaugga

SEQ ID NO: 1142303 - RNA, 19 nt, Homo sapiens
  misc_RNA (1)...(19): siRNA sense strand
aaagggaacacacaauaga

SEQ ID NO: 1142304 - RNA, 19 nt, Homo sapiens
  misc_RNA (1)...(19): siRNA sense strand
gaauaguaugcgcagcuua

SEQ ID NO: 1142305 - RNA, 19 nt, Homo sapiens
  misc_RNA (1)...(19): siRNA sense strand
cagaacacaacaaacuuaa

SEQ ID NO: 1142306 - RNA, 19 nt, Homo sapiens
  misc_RNA (1)...(19): siRNA sense strand
cuuaaagcccaguaauaua

SEQ ID NO: 1142307 - RNA, 19 nt, Homo sapiens
  misc_RNA (1)...(19): siRNA sense strand
uaucagaugcuguguggaa

SEQ ID NO: 1142308 - RNA, 19 nt, Homo sapiens
  misc_RNA (1)...(19): siRNA sense strand
uuaaagcccaguaauauag

SEQ ID NO: 1142309 - RNA, 19 nt, Homo sapiens
  misc_RNA (1)...(19): siRNA sense strand
caucgucgucugucaauga

SEQ ID NO: 1142310 - RNA, 19 nt, Homo sapiens
  misc_RNA (1)...(19): siRNA sense strand
gaacacacaauagaagagu

SEQ ID NO: 1142311 - RNA, 19 nt, Homo sapiens
  misc_RNA (1)...(19): siRNA sense strand
ucaggcaagggauuuguua

SEQ ID NO: 1142312 - RNA, 19 nt, Homo sapiens
  misc_RNA (1)...(19): siRNA sense strand
gaccuaaauaugcuggaua

SEQ ID NO: 1142313 - RNA, 19 nt, Homo sapiens
  misc_RNA (1)...(19): siRNA sense strand
cuacagagagcuaguucuu

SEQ ID NO: 1142314 - RNA, 19 nt, Homo sapiens
  misc_RNA (1)...(19): siRNA sense strand
gaugaaagggaacacacaa

SEQ ID NO: 1142315 - RNA, 19 nt, Homo sapiens
  misc_RNA (1)...(19): siRNA sense strand
guguagagauuggagauuc

SEQ ID NO: 1142316 - RNA, 19 nt, Homo sapiens
  misc_RNA (1)...(19): siRNA sense strand
gauugcacuuugaagauuc

SEQ ID NO: 1142317 - RNA, 19 nt, Homo sapiens
  misc_RNA (1)...(19): siRNA sense strand
aagcaagcgugacaacaau

SEQ ID NO: 1142318 - RNA, 19 nt, Homo sapiens
  misc_RNA (1)...(19): siRNA sense strand
aaagcccaguaauauagua

SEQ ID NO: 1142319 - RNA, 19 nt, Homo sapiens
  misc_RNA (1)...(19): siRNA sense strand
uaugaugacgccuuaugua

SEQ ID NO: 1142320 - RNA, 19 nt, Homo sapiens
  misc_RNA (1)...(19): siRNA sense strand
gagcuaguucuuaugaaau

SEQ ID NO: 1142321 - RNA, 19 nt, Homo sapiens
  misc_RNA (1)...(19): siRNA sense strand
ugucuucaaugucaacaga

SEQ ID NO: 1142322 - RNA, 19 nt, Homo sapiens
  misc_RNA (1)...(19): siRNA sense strand
uaugaugccauucuugaaa

SEQ ID NO: 1142323 - RNA, 19 nt, Homo sapiens
  misc_RNA (1)...(19): siRNA sense strand
ugauucagauggagcuaga

SEQ ID NO: 1142324 - RNA, 19 nt, Homo sapiens
  misc_RNA (1)...(19): siRNA sense strand
gaagaguggaaagaauuga

SEQ ID NO: 1142325 - RNA, 19 nt, Homo sapiens
  misc_RNA (1)...(19): siRNA sense strand
auagaagaguggaaagaau

SEQ ID NO: 1142326 - RNA, 19 nt, Homo sapiens
  misc_RNA (1)...(19): siRNA sense strand
ggacuuacguugaaaacag

SEQ ID NO: 1142327 - RNA, 19 nt, Homo sapiens
  misc_RNA (1)...(19): siRNA sense strand
cagaugcuguguggaauca

SEQ ID NO: 1142328 - RNA, 19 nt, Homo sapiens
  misc_RNA (1)...(19): siRNA sense strand
agagagcuaguucuuauga

SEQ ID NO: 1142329 - RNA, 19 nt, Homo sapiens
  misc_RNA (1)...(19): siRNA sense strand
gggaacacacaauagaaga

SEQ ID NO: 1142330 - RNA, 19 nt, Homo sapiens
  misc_RNA (1)...(19): siRNA sense strand
ugacaagcaguuagaugaa

SEQ ID NO: 1142331 - RNA, 19 nt, Homo sapiens
  misc_RNA (1)...(19): siRNA sense strand
caaagaucccugacaagca

SEQ ID NO: 1142332 - RNA, 19 nt, Homo sapiens
  misc_RNA (1)...(19): siRNA sense strand
caauagaagaguggaaaga

SEQ ID NO: 1142333 - RNA, 19 nt, Homo sapiens
  misc_RNA (1)...(19): siRNA sense strand
gucaacagauccgacuuug

SEQ ID NO: 1142334 - RNA, 19 nt, Homo sapiens
  misc_RNA (1)...(19): siRNA sense strand
cgucgucugucaaugaugu

SEQ ID NO: 1142335 - RNA, 19 nt, Homo sapiens
  misc_RNA (1)...(19): siRNA sense strand
gcucucagcauccaucauc

SEQ ID NO: 1142336 - RNA, 19 nt, Homo sapiens
  misc_RNA (1)...(19): siRNA sense strand
ccuagaagaauuucaagau

SEQ ID NO: 1142337 - RNA, 19 nt, Homo sapiens
  misc_RNA (1)...(19): siRNA sense strand
cagaagcuccaccaccaaa

SEQ ID NO: 1142338 - RNA, 19 nt, Homo sapiens
  misc_RNA (1)...(19): siRNA sense strand
gaacagcuuggaacaccau

SEQ ID NO: 1142339 - RNA, 19 nt, Homo sapiens
  misc_RNA (1)...(19): siRNA sense strand
agaguggaaagaauugaua

SEQ ID NO: 1142340 - RNA, 19 nt, Homo sapiens
  misc_RNA (1)...(19): siRNA sense strand
ggagcuagaucaugaaaga

SEQ ID NO: 1142341 - RNA, 19 nt, Homo sapiens
  misc_RNA (1)...(19): siRNA sense strand
gagaaacucuucccugaug

SEQ ID NO: 1142342 - RNA, 19 nt, Homo sapiens
  misc_RNA (1)...(19): siRNA sense strand
ucacaguccugaaacgaua

SEQ ID NO: 1142343 - RNA, 19 nt, Homo sapiens
  misc_RNA (1)...(19): siRNA sense strand
ugaaagaaauguugcaauc

SEQ ID NO: 1142344 - RNA, 19 nt, Homo sapiens
  misc_RNA (1)...(19): siRNA sense strand
gauuggagauucuacauuc

SEQ ID NO: 1142345 - RNA, 19 nt, Homo sapiens
  misc_RNA (1)...(19): siRNA sense strand
agaaaucccuagaagaauu

SEQ ID NO: 1142346 - RNA, 19 nt, Homo sapiens
  misc_RNA (1)...(19): siRNA sense strand
ggauauagcuuugagaaac

SEQ ID NO: 1142347 - RNA, 19 nt, Homo sapiens
  misc_RNA (1)...(19): siRNA sense strand
gaagcuaagccgaccauuu

SEQ ID NO: 1142348 - RNA, 19 nt, Homo sapiens
  misc_RNA (1)...(19): siRNA sense strand
gaacacaacaaacuuaaag

SEQ ID NO: 1142349 - RNA, 19 nt, Homo sapiens
  misc_RNA (1)...(19): siRNA sense strand
gcucauggaugcaaaucuu

SEQ ID NO: 1142350 - RNA, 19 nt, Homo sapiens
  misc_RNA (1)...(19): siRNA sense strand
acagagagcuaguucuuau

SEQ ID NO: 1142351 - RNA, 19 nt, Homo sapiens
  misc_RNA (1)...(19): siRNA sense strand
gaagcaagcgugacaacaa

SEQ ID NO: 1142352 - RNA, 19 nt, Homo sapiens
  misc_RNA (1)...(19): siRNA sense strand
ucaaugaugugucuucaau

SEQ ID NO: 1142353 - RNA, 19 nt, Homo sapiens
  misc_RNA (1)...(19): siRNA sense strand
ccacagaaaucccuagaag

SEQ ID NO: 1142354 - RNA, 19 nt, Homo sapiens
  misc_RNA (1)...(19): siRNA sense strand
cucaggagcucaaggaaua

SEQ ID NO: 1142355 - RNA, 19 nt, Homo sapiens
  misc_RNA (1)...(19): siRNA sense strand
gaugacgccuuauguagug

SEQ ID NO: 1142356 - RNA, 19 nt, Homo sapiens
  misc_RNA (1)...(19): siRNA sense strand
gaucaguggaauaaaguua

SEQ ID NO: 1142357 - RNA, 19 nt, Homo sapiens
  misc_RNA (1)...(19): siRNA sense strand
ugaaagggaacacacaaua

SEQ ID NO: 1142358 - RNA, 19 nt, Homo sapiens
  misc_RNA (1)...(19): siRNA sense strand
acagaaaucccuagaagaa

SEQ ID NO: 1142359 - RNA, 19 nt, Homo sapiens
  misc_RNA (1)...(19): siRNA sense strand
gacaagcaguuagaugaaa

SEQ ID NO: 1142360 - RNA, 19 nt, Homo sapiens
  misc_RNA (1)...(19): siRNA sense strand
ggaacaccauguccugaau

SEQ ID NO: 1142361 - RNA, 19 nt, Homo sapiens
  misc_RNA (1)...(19): siRNA sense strand
caccaaagaucccugacaa

SEQ ID NO: 1142362 - RNA, 19 nt, Homo sapiens
  misc_RNA (1)...(19): siRNA sense strand
agauggagcuagaucauga

SEQ ID NO: 1142363 - RNA, 19 nt, Homo sapiens
  misc_RNA (1)...(19): siRNA sense strand
aaccaagaauggaguuaua

SEQ ID NO: 1142364 - RNA, 19 nt, Homo sapiens
  misc_RNA (1)...(19): siRNA sense strand
gaaagggaacacacaauag

SEQ ID NO: 1142365 - RNA, 19 nt, Homo sapiens
  misc_RNA (1)...(19): siRNA sense strand
ggaacgaguuuuaugauga

SEQ ID NO: 1142366 - RNA, 19 nt, Homo sapiens
  misc_RNA (1)...(19): siRNA sense strand
gcaagcgugacaacaauuu

SEQ ID NO: 1142367 - RNA, 19 nt, Homo sapiens
  misc_RNA (1)...(19): siRNA sense strand
ucagaacacaacaaacuua

SEQ ID NO: 1142368 - RNA, 19 nt, Homo sapiens
  misc_RNA (1)...(19): siRNA sense strand
gaaaacagaccuaaauaug

SEQ ID NO: 1142369 - RNA, 19 nt, Homo sapiens
  misc_RNA (1)...(19): siRNA sense strand
gaaauguugcaaucaagaa

SEQ ID NO: 1142370 - RNA, 19 nt, Homo sapiens
  misc_RNA (1)...(19): siRNA sense strand
cuagaagaauuucaagaug

SEQ ID NO: 1142371 - RNA, 19 nt, Homo sapiens
  misc_RNA (1)...(19): siRNA sense strand
gaaagaaauguugcaauca

SEQ ID NO: 1142372 - RNA, 19 nt, Homo sapiens
  misc_RNA (1)...(19): siRNA sense strand
aaacagaccuaaauaugcu

SEQ ID NO: 1142373 - RNA, 19 nt, Homo sapiens
  misc_RNA (1)...(19): siRNA sense strand
gacuuaaagcccaguaaua

SEQ ID NO: 1142374 - RNA, 19 nt, Homo sapiens
  misc_RNA (1)...(19): siRNA sense strand
gcccaguaauauaguagua

SEQ ID NO: 1142375 - RNA, 19 nt, Homo sapiens
  misc_RNA (1)...(19): siRNA sense strand
gaggagagaaccaagaaug

SEQ ID NO: 1142376 - RNA, 19 nt, Homo sapiens
  misc_RNA (1)...(19): siRNA sense strand
caacacccguacaucaaug

SEQ ID NO: 1142377 - RNA, 19 nt, Homo sapiens
  misc_RNA (1)...(19): siRNA sense strand
agagcuaguucuuaugaaa

SEQ ID NO: 1142378 - RNA, 19 nt, Homo sapiens
  misc_RNA (1)...(19): siRNA sense strand
ggcaugggcuacaaggaaa

SEQ ID NO: 1142379 - RNA, 19 nt, Homo sapiens
  misc_RNA (1)...(19): siRNA sense strand
ggaaucaagcaccuucauu

SEQ ID NO: 1142380 - RNA, 19 nt, Homo sapiens
  misc_RNA (1)...(19): siRNA sense strand
uguccuaccuucucuauca

SEQ ID NO: 1142381 - RNA, 19 nt, Homo sapiens
  misc_RNA (1)...(19): siRNA sense strand
ggaauaguaugcgcagcuu

SEQ ID NO: 1142382 - RNA, 19 nt, Homo sapiens
  misc_RNA (1)...(19): siRNA sense strand
gaacaccauguccugaauu

SEQ ID NO: 1142383 - RNA, 19 nt, Homo sapiens
  misc_RNA (1)...(19): siRNA sense strand
gaagaaacugcaaccaaca

SEQ ID NO: 1142384 - RNA, 19 nt, Homo sapiens
  misc_RNA (1)...(19): siRNA sense strand
ccucugggcugcuguagau

SEQ ID NO: 1142385 - RNA, 19 nt, Homo sapiens
  misc_RNA (1)...(19): siRNA sense strand
gaaccaagaauggaguuau

SEQ ID NO: 1142386 - RNA, 19 nt, Homo sapiens
  misc_RNA (1)...(19): siRNA sense strand
ccaaaaugcugguaauaga

SEQ ID NO: 1142387 - RNA, 19 nt, Homo sapiens
  misc_RNA (1)...(19): siRNA sense strand
gauauagcuuugagaaacu

SEQ ID NO: 1142388 - RNA, 19 nt, Homo sapiens
  misc_RNA (1)...(19): siRNA sense strand
gcuagaucaugaaagaaug

SEQ ID NO: 1142389 - RNA, 19 nt, Homo sapiens
  misc_RNA (1)...(19): siRNA sense strand
ugaugugucuucaauguca

SEQ ID NO: 1142390 - RNA, 19 nt, Homo sapiens
  misc_RNA (1)...(19): siRNA sense strand
ggacuuaaagcccaguaau

SEQ ID NO: 1142391 - RNA, 19 nt, Homo sapiens
  misc_RNA (1)...(19): siRNA sense strand
gaagcuccaccaccaaaga

SEQ ID NO: 1142392 - RNA, 19 nt, Homo sapiens
  misc_RNA (1)...(19): siRNA sense strand
guccugaauucaugaagaa

SEQ ID NO: 1142393 - RNA, 19 nt, Homo sapiens
  misc_RNA (1)...(19): siRNA sense strand
gagagcuaguucuuaugaa

SEQ ID NO: 1142394 - RNA, 19 nt, Homo sapiens
  misc_RNA (1)...(19): siRNA sense strand
aaugaugugucuucaaugu

SEQ ID NO: 1142395 - RNA, 19 nt, Homo sapiens
  misc_RNA (1)...(19): siRNA sense strand
uagaagaguggaaagaauu

SEQ ID NO: 1142396 - RNA, 19 nt, Homo sapiens
  misc_RNA (1)...(19): siRNA sense strand
ggacugcaggaacgaguuu

SEQ ID NO: 1142397 - RNA, 19 nt, Homo sapiens
  misc_RNA (1)...(19): siRNA sense strand
gugcagcagugaucaaugg

SEQ ID NO: 1142398 - RNA, 19 nt, Homo sapiens
  misc_RNA (1)...(19): siRNA sense strand
aagcuaagccgaccauuuc

SEQ ID NO: 1142399 - RNA, 19 nt, Homo sapiens
  misc_RNA (1)...(19): siRNA sense strand
ggagagaaccaagaaugga

SEQ ID NO: 1142400 - RNA, 19 nt, Homo sapiens
  misc_RNA (1)...(19): siRNA sense strand
ugacucagaacacaacaaa

SEQ ID NO: 1142401 - RNA, 19 nt, Homo sapiens
  misc_RNA (1)...(19): siRNA sense strand
ugauugcacuuugaagauu

SEQ ID NO: 1142402 - RNA, 19 nt, Homo sapiens
  misc_RNA (1)...(19): siRNA sense strand
gccaagugauucagaugga

SEQ ID NO: 1142403 - RNA, 19 nt, Homo sapiens
  misc_RNA (1)...(19): siRNA sense strand
aaagggaacacacaauaga

SEQ ID NO: 1142404 - RNA, 19 nt, Homo sapiens
  misc_RNA (1)...(19): siRNA sense strand
gaauaguaugcgcagcuua

SEQ ID NO: 1142405 - RNA, 19 nt, Homo sapiens
  misc_RNA (1)...(19): siRNA sense strand
cagaacacaacaaacuuaa

SEQ ID NO: 1142406 - RNA, 19 nt, Homo sapiens
  misc_RNA (1)...(19): siRNA sense strand
cuuaaagcccaguaauaua

SEQ ID NO: 1142407 - RNA, 19 nt, Homo sapiens
  misc_RNA (1)...(19): siRNA sense strand
uaucagaugcuguguggaa

SEQ ID NO: 1142408 - RNA, 19 nt, Homo sapiens
  misc_RNA (1)...(19): siRNA sense strand
uuaaagcccaguaauauag

SEQ ID NO: 1142409 - RNA, 19 nt, Homo sapiens
  misc_RNA (1)...(19): siRNA sense strand
caucgucgucugucaauga

SEQ ID NO: 1142410 - RNA, 19 nt, Homo sapiens
  misc_RNA (1)...(19): siRNA sense strand
gaacacacaauagaagagu

SEQ ID NO: 1142411 - RNA, 19 nt, Homo sapiens
  misc_RNA (1)...(19): siRNA sense strand
ucaggcaagggauuuguua

SEQ ID NO: 1142412 - RNA, 19 nt, Homo sapiens
  misc_RNA (1)...(19): siRNA sense strand
gaccuaaauaugcuggaua

SEQ ID NO: 1142413 - RNA, 19 nt, Homo sapiens
  misc_RNA (1)...(19): siRNA sense strand
cuacagagagcuaguucuu

SEQ ID NO: 1142414 - RNA, 19 nt, Homo sapiens
  misc_RNA (1)...(19): siRNA sense strand
gaugaaagggaacacacaa

SEQ ID NO: 1142415 - RNA, 19 nt, Homo sapiens
  misc_RNA (1)...(19): siRNA sense strand
guguagagauuggagauuc

SEQ ID NO: 1142416 - RNA, 19 nt, Homo sapiens
  misc_RNA (1)...(19): siRNA sense strand
gauugcacuuugaagauuc

SEQ ID NO: 1142417 - RNA, 19 nt, Homo sapiens
  misc_RNA (1)...(19): siRNA sense strand
aagcaagcgugacaacaau

SEQ ID NO: 1142418 - RNA, 19 nt, Homo sapiens
  misc_RNA (1)...(19): siRNA sense strand
aaagcccaguaauauagua

SEQ ID NO: 1142419 - RNA, 19 nt, Homo sapiens
  misc_RNA (1)...(19): siRNA sense strand
uaugaugacgccuuaugua

SEQ ID NO: 1142420 - RNA, 19 nt, Homo sapiens
  misc_RNA (1)...(19): siRNA sense strand
gagcuaguucuuaugaaau

SEQ ID NO: 1142421 - RNA, 19 nt, Homo sapiens
  misc_RNA (1)...(19): siRNA sense strand
ugucuucaaugucaacaga

SEQ ID NO: 1142422 - RNA, 19 nt, Homo sapiens
  misc_RNA (1)...(19): siRNA sense strand
uaugaugccauucuugaaa

SEQ ID NO: 1142423 - RNA, 19 nt, Homo sapiens
  misc_RNA (1)...(19): siRNA sense strand
ugauucagauggagcuaga

SEQ ID NO: 1142424 - RNA, 19 nt, Homo sapiens
  misc_RNA (1)...(19): siRNA sense strand
gaagaguggaaagaauuga

SEQ ID NO: 1142425 - RNA, 19 nt, Homo sapiens
  misc_RNA (1)...(19): siRNA sense strand
auagaagaguggaaagaau

SEQ ID NO: 1142426 - RNA, 19 nt, Homo sapiens
  misc_RNA (1)...(19): siRNA sense strand
ggacuuacguugaaaacag

SEQ ID NO: 1142427 - RNA, 19 nt, Homo sapiens
  misc_RNA (1)...(19): siRNA sense strand
cagaugcuguguggaauca

SEQ ID NO: 1142428 - RNA, 19 nt, Homo sapiens
  misc_RNA (1)...(19): siRNA sense strand
agagagcuaguucuuauga

SEQ ID NO: 1142429 - RNA, 19 nt, Homo sapiens
  misc_RNA (1)...(19): siRNA sense strand
gggaacacacaauagaaga

SEQ ID NO: 1142430 - RNA, 19 nt, Homo sapiens
  misc_RNA (1)...(19): siRNA sense strand
ugacaagcaguuagaugaa

SEQ ID NO: 1142431 - RNA, 19 nt, Homo sapiens
  misc_RNA (1)...(19): siRNA sense strand
caaagaucccugacaagca

SEQ ID NO: 1142432 - RNA, 19 nt, Homo sapiens
  misc_RNA (1)...(19): siRNA sense strand
caauagaagaguggaaaga

SEQ ID NO: 1142433 - RNA, 19 nt, Homo sapiens
  misc_RNA (1)...(19): siRNA sense strand
gucaacagauccgacuuug

SEQ ID NO: 1142434 - RNA, 19 nt, Homo sapiens
  misc_RNA (1)...(19): siRNA sense strand
cgucgucugucaaugaugu

SEQ ID NO: 1142435 - RNA, 19 nt, Homo sapiens
  misc_RNA (1)...(19): siRNA sense strand
gcucucagcauccaucauc

SEQ ID NO: 1142436 - RNA, 19 nt, Homo sapiens
  misc_RNA (1)...(19): siRNA sense strand
ccuagaagaauuucaagau

SEQ ID NO: 1142437 - RNA, 19 nt, Homo sapiens
  misc_RNA (1)...(19): siRNA sense strand
cagaagcuccaccaccaaa

SEQ ID NO: 1142438 - RNA, 19 nt, Homo sapiens
  misc_RNA (1)...(19): siRNA sense strand
gaacagcuuggaacaccau

SEQ ID NO: 1142439 - RNA, 19 nt, Homo sapiens
  misc_RNA (1)...(19): siRNA sense strand
agaguggaaagaauugaua

SEQ ID NO: 1142440 - RNA, 19 nt, Homo sapiens
  misc_RNA (1)...(19): siRNA sense strand
acagaacacucauggauua

SEQ ID NO: 1142441 - RNA, 19 nt, Homo sapiens
  misc_RNA (1)...(19): siRNA sense strand
gaacacucauggauuaaga

SEQ ID NO: 1142442 - RNA, 19 nt, Homo sapiens
  misc_RNA (1)...(19): siRNA sense strand
ggaugacgauuguuuauca

SEQ ID NO: 1142443 - RNA, 19 nt, Homo sapiens
  misc_RNA (1)...(19): siRNA sense strand
gcacagaacacucauggau

SEQ ID NO: 1142444 - RNA, 19 nt, Homo sapiens
  misc_RNA (1)...(19): siRNA sense strand
acacauagcagauaaacuu

SEQ ID NO: 1142445 - RNA, 19 nt, Homo sapiens
  misc_RNA (1)...(19): siRNA sense strand
cagaugaacuucccauugg

SEQ ID NO: 1142446 - RNA, 19 nt, Homo sapiens
  misc_RNA (1)...(19): siRNA sense strand
gagcacaaacggaaacaau

SEQ ID NO: 1142447 - RNA, 19 nt, Homo sapiens
  misc_RNA (1)...(19): siRNA sense strand
gccagaggaugacgauugu

SEQ ID NO: 1142448 - RNA, 19 nt, Homo sapiens
  misc_RNA (1)...(19): siRNA sense strand
caggguauuuguaaagaug

SEQ ID NO: 1142449 - RNA, 19 nt, Homo sapiens
  misc_RNA (1)...(19): siRNA sense strand
ccagaugaacuucccauug

SEQ ID NO: 1142450 - RNA, 19 nt, Homo sapiens
  misc_RNA (1)...(19): siRNA sense strand
gcaggguauuuguaaagau

SEQ ID NO: 1142451 - RNA, 19 nt, Homo sapiens
  misc_RNA (1)...(19): siRNA sense strand
gaugacgauuguuuaucaa

SEQ ID NO: 1142452 - RNA, 19 nt, Homo sapiens
  misc_RNA (1)...(19): siRNA sense strand
cagaggaugacgauuguuu

SEQ ID NO: 1142453 - RNA, 19 nt, Homo sapiens
  misc_RNA (1)...(19): siRNA sense strand
gaggaugacgauuguuuau

SEQ ID NO: 1142454 - RNA, 19 nt, Homo sapiens
  misc_RNA (1)...(19): siRNA sense strand
ugggaugagugcagaauau

SEQ ID NO: 1142455 - RNA, 19 nt, Homo sapiens
  misc_RNA (1)...(19): siRNA sense strand
aggaacacauagcagauaa

SEQ ID NO: 1142456 - RNA, 19 nt, Homo sapiens
  misc_RNA (1)...(19): siRNA sense strand
gcacaaacggaaacaaugc

SEQ ID NO: 1142457 - RNA, 19 nt, Homo sapiens
  misc_RNA (1)...(19): siRNA sense strand
gaacacauagcagauaaac

SEQ ID NO: 1142458 - RNA, 19 nt, Homo sapiens
  misc_RNA (1)...(19): siRNA sense strand
gcacauggagcucuaaucc

SEQ ID NO: 1142459 - RNA, 19 nt, Homo sapiens
  misc_RNA (1)...(19): siRNA sense strand
ccucuugaagccauucuua

SEQ ID NO: 1142460 - RNA, 19 nt, Homo sapiens
  misc_RNA (1)...(19): siRNA sense strand
aaacggaaacaaugcaaug

SEQ ID NO: 1142461 - RNA, 19 nt, Homo sapiens
  misc_RNA (1)...(19): siRNA sense strand
gaagccauucuuacagaug

SEQ ID NO: 1142462 - RNA, 19 nt, Homo sapiens
  misc_RNA (1)...(19): siRNA sense strand
ggaacacauagcagauaaa

SEQ ID NO: 1142463 - RNA, 19 nt, Homo sapiens
  misc_RNA (1)...(19): siRNA sense strand
agaggaugacgauuguuua

SEQ ID NO: 1142464 - RNA, 19 nt, Homo sapiens
  misc_RNA (1)...(19): siRNA sense strand
aagccauucuuacagauga

SEQ ID NO: 1142465 - RNA, 19 nt, Homo sapiens
  misc_RNA (1)...(19): siRNA sense strand
uugaagccauucuuacaga

SEQ ID NO: 1142466 - RNA, 19 nt, Homo sapiens
  misc_RNA (1)...(19): siRNA sense strand
caggaacacauagcagaua

SEQ ID NO: 1142467 - RNA, 19 nt, Homo sapiens
  misc_RNA (1)...(19): siRNA sense strand
caugguuucucuugcaaca

SEQ ID NO: 1142468 - RNA, 19 nt, Homo sapiens
  misc_RNA (1)...(19): siRNA sense strand
ucaacgucaucuagaggaa

SEQ ID NO: 1142469 - RNA, 19 nt, Homo sapiens
  misc_RNA (1)...(19): siRNA sense strand
aagaugagcccagcagcua

SEQ ID NO: 1142470 - RNA, 19 nt, Homo sapiens
  misc_RNA (1)...(19): siRNA sense strand
caaacaggaacacauagca

SEQ ID NO: 1142471 - RNA, 19 nt, Homo sapiens
  misc_RNA (1)...(19): siRNA sense strand
cacagaacacucauggauu

SEQ ID NO: 1142472 - RNA, 19 nt, Homo sapiens
  misc_RNA (1)...(19): siRNA sense strand
caacuugcaaacagccauu

SEQ ID NO: 1142473 - RNA, 19 nt, Homo sapiens
  misc_RNA (1)...(19): siRNA sense strand
cgccagaggaugacgauug

SEQ ID NO: 1142474 - RNA, 19 nt, Homo sapiens
  misc_RNA (1)...(19): siRNA sense strand
aacgucaucuagaggaauu

SEQ ID NO: 1142475 - RNA, 19 nt, Homo sapiens
  misc_RNA (1)...(19): siRNA sense strand
gacgauuguuuaucaacgu

SEQ ID NO: 1142476 - RNA, 19 nt, Homo sapiens
  misc_RNA (1)...(19): siRNA sense strand
ugaagccauucuuacagau

SEQ ID NO: 1142477 - RNA, 19 nt, Homo sapiens
  misc_RNA (1)...(19): siRNA sense strand
cgcaggguauuuguaaaga

SEQ ID NO: 1142478 - RNA, 19 nt, Homo sapiens
  misc_RNA (1)...(19): siRNA sense strand
gaugagcccagcagcuaca

SEQ ID NO: 1142479 - RNA, 19 nt, Homo sapiens
  misc_RNA (1)...(19): siRNA sense strand
gcccagcagcuacacaugu

SEQ ID NO: 1142480 - RNA, 19 nt, Homo sapiens
  misc_RNA (1)...(19): siRNA sense strand
caaacggaaacaaugcaau

SEQ ID NO: 1142481 - RNA, 19 nt, Homo sapiens
  misc_RNA (1)...(19): siRNA sense strand
agaaagcgaacacggaagu

SEQ ID NO: 1142482 - RNA, 19 nt, Homo sapiens
  misc_RNA (1)...(19): siRNA sense strand
acacauguacaacuugcaa

SEQ ID NO: 1142483 - RNA, 19 nt, Homo sapiens
  misc_RNA (1)...(19): siRNA sense strand
gggaugagugcagaauaug

SEQ ID NO: 1142484 - RNA, 19 nt, Homo sapiens
  misc_RNA (1)...(19): siRNA sense strand
cagaacacucauggauuaa

SEQ ID NO: 1142485 - RNA, 19 nt, Homo sapiens
  misc_RNA (1)...(19): siRNA sense strand
ucuuacagaugaugaacca

SEQ ID NO: 1142486 - RNA, 19 nt, Homo sapiens
  misc_RNA (1)...(19): siRNA sense strand
gagcccagcagcuacacau

SEQ ID NO: 1142487 - RNA, 19 nt, Homo sapiens
  misc_RNA (1)...(19): siRNA sense strand
acagaacacucauggauua

SEQ ID NO: 1142488 - RNA, 19 nt, Homo sapiens
  misc_RNA (1)...(19): siRNA sense strand
gaacacucauggauuaaga

SEQ ID NO: 1142489 - RNA, 19 nt, Homo sapiens
  misc_RNA (1)...(19): siRNA sense strand
ggaugacgauuguuuauca

SEQ ID NO: 1142490 - RNA, 19 nt, Homo sapiens
  misc_RNA (1)...(19): siRNA sense strand
gcacagaacacucauggau

SEQ ID NO: 1142491 - RNA, 19 nt, Homo sapiens
  misc_RNA (1)...(19): siRNA sense strand
acacauagcagauaaacuu

SEQ ID NO: 1142492 - RNA, 19 nt, Homo sapiens
  misc_RNA (1)...(19): siRNA sense strand
cagaugaacuucccauugg

SEQ ID NO: 1142493 - RNA, 19 nt, Homo sapiens
  misc_RNA (1)...(19): siRNA sense strand
gagcacaaacggaaacaau

SEQ ID NO: 1142494 - RNA, 19 nt, Homo sapiens
  misc_RNA (1)...(19): siRNA sense strand
gccagaggaugacgauugu

SEQ ID NO: 1142495 - RNA, 19 nt, Homo sapiens
  misc_RNA (1)...(19): siRNA sense strand
caggguauuuguaaagaug

SEQ ID NO: 1142496 - RNA, 19 nt, Homo sapiens
  misc_RNA (1)...(19): siRNA sense strand
ccagaugaacuucccauug

SEQ ID NO: 1142497 - RNA, 19 nt, Homo sapiens
  misc_RNA (1)...(19): siRNA sense strand
gcaggguauuuguaaagau

SEQ ID NO: 1142498 - RNA, 19 nt, Homo sapiens
  misc_RNA (1)...(19): siRNA sense strand
gaugacgauuguuuaucaa

SEQ ID NO: 1142499 - RNA, 19 nt, Homo sapiens
  misc_RNA (1)...(19): siRNA sense strand
cagaggaugacgauuguuu

SEQ ID NO: 1142500 - RNA, 19 nt, Homo sapiens
  misc_RNA (1)...(19): siRNA sense strand
gaggaugacgauuguuuau

SEQ ID NO: 1142501 - RNA, 19 nt, Homo sapiens
  misc_RNA (1)...(19): siRNA sense strand
ugggaugagugcagaauau

SEQ ID NO: 1142502 - RNA, 19 nt, Homo sapiens
  misc_RNA (1)...(19): siRNA sense strand
aggaacacauagcagauaa

SEQ ID NO: 1142503 - RNA, 19 nt, Homo sapiens
  misc_RNA (1)...(19): siRNA sense strand
gcacaaacggaaacaaugc

SEQ ID NO: 1142504 - RNA, 19 nt, Homo sapiens
  misc_RNA (1)...(19): siRNA sense strand
gaacacauagcagauaaac

SEQ ID NO: 1142505 - RNA, 19 nt, Homo sapiens
  misc_RNA (1)...(19): siRNA sense strand
gcacauggagcucuaaucc

SEQ ID NO: 1142506 - RNA, 19 nt, Homo sapiens
  misc_RNA (1)...(19): siRNA sense strand
ccucuugaagccauucuua

SEQ ID NO: 1142507 - RNA, 19 nt, Homo sapiens
  misc_RNA (1)...(19): siRNA sense strand
aaacggaaacaaugcaaug

SEQ ID NO: 1142508 - RNA, 19 nt, Homo sapiens
  misc_RNA (1)...(19): siRNA sense strand
gaagccauucuuacagaug

SEQ ID NO: 1142509 - RNA, 19 nt, Homo sapiens
  misc_RNA (1)...(19): siRNA sense strand
ggaacacauagcagauaaa

SEQ ID NO: 1142510 - RNA, 19 nt, Homo sapiens
  misc_RNA (1)...(19): siRNA sense strand
agaggaugacgauuguuua

SEQ ID NO: 1142511 - RNA, 19 nt, Homo sapiens
  misc_RNA (1)...(19): siRNA sense strand
aagccauucuuacagauga

SEQ ID NO: 1142512 - RNA, 19 nt, Homo sapiens
  misc_RNA (1)...(19): siRNA sense strand
uugaagccauucuuacaga

SEQ ID NO: 1142513 - RNA, 19 nt, Homo sapiens
  misc_RNA (1)...(19): siRNA sense strand
caggaacacauagcagaua

SEQ ID NO: 1142514 - RNA, 19 nt, Homo sapiens
  misc_RNA (1)...(19): siRNA sense strand
caugguuucucuugcaaca

SEQ ID NO: 1142515 - RNA, 19 nt, Homo sapiens
  misc_RNA (1)...(19): siRNA sense strand
ucaacgucaucuagaggaa

SEQ ID NO: 1142516 - RNA, 19 nt, Homo sapiens
  misc_RNA (1)...(19): siRNA sense strand
aagaugagcccagcagcua

SEQ ID NO: 1142517 - RNA, 19 nt, Homo sapiens
  misc_RNA (1)...(19): siRNA sense strand
caaacaggaacacauagca

SEQ ID NO: 1142518 - RNA, 19 nt, Homo sapiens
  misc_RNA (1)...(19): siRNA sense strand
cacagaacacucauggauu

SEQ ID NO: 1142519 - RNA, 19 nt, Homo sapiens
  misc_RNA (1)...(19): siRNA sense strand
caacuugcaaacagccauu

SEQ ID NO: 1142520 - RNA, 19 nt, Homo sapiens
  misc_RNA (1)...(19): siRNA sense strand
cgccagaggaugacgauug

SEQ ID NO: 1142521 - RNA, 19 nt, Homo sapiens
  misc_RNA (1)...(19): siRNA sense strand
aacgucaucuagaggaauu

SEQ ID NO: 1142522 - RNA, 19 nt, Homo sapiens
  misc_RNA (1)...(19): siRNA sense strand
gacgauuguuuaucaacgu

SEQ ID NO: 1142523 - RNA, 19 nt, Homo sapiens
  misc_RNA (1)...(19): siRNA sense strand
ugaagccauucuuacagau

SEQ ID NO: 1142524 - RNA, 19 nt, Homo sapiens
  misc_RNA (1)...(19): siRNA sense strand
cgcaggguauuuguaaaga

SEQ ID NO: 1142525 - RNA, 19 nt, Homo sapiens
  misc_RNA (1)...(19): siRNA sense strand
gaugagcccagcagcuaca

SEQ ID NO: 1142526 - RNA, 19 nt, Homo sapiens
  misc_RNA (1)...(19): siRNA sense strand
gcccagcagcuacacaugu

SEQ ID NO: 1142527 - RNA, 19 nt, Homo sapiens
  misc_RNA (1)...(19): siRNA sense strand
caaacggaaacaaugcaau

SEQ ID NO: 1142528 - RNA, 19 nt, Homo sapiens
  misc_RNA (1)...(19): siRNA sense strand
agaaagcgaacacggaagu

SEQ ID NO: 1142529 - RNA, 19 nt, Homo sapiens
  misc_RNA (1)...(19): siRNA sense strand
acacauguacaacuugcaa

SEQ ID NO: 1142530 - RNA, 19 nt, Homo sapiens
  misc_RNA (1)...(19): siRNA sense strand
gggaugagugcagaauaug

SEQ ID NO: 1142531 - RNA, 19 nt, Homo sapiens
  misc_RNA (1)...(19): siRNA sense strand
cagaacacucauggauuaa

SEQ ID NO: 1142532 - RNA, 19 nt, Homo sapiens
  misc_RNA (1)...(19): siRNA sense strand
ucuuacagaugaugaacca

SEQ ID NO: 1142533 - RNA, 19 nt, Homo sapiens
  misc_RNA (1)...(19): siRNA sense strand
gagcccagcagcuacacau

SEQ ID NO: 1142534 - RNA, 19 nt, Homo sapiens
  misc_RNA (1)...(19): siRNA sense strand
acagaacacucauggauua

SEQ ID NO: 1142535 - RNA, 19 nt, Homo sapiens
  misc_RNA (1)...(19): siRNA sense strand
gaacacucauggauuaaga

SEQ ID NO: 1142536 - RNA, 19 nt, Homo sapiens
  misc_RNA (1)...(19): siRNA sense strand
ggaugacgauuguuuauca

SEQ ID NO: 1142537 - RNA, 19 nt, Homo sapiens
  misc_RNA (1)...(19): siRNA sense strand
gcacagaacacucauggau

SEQ ID NO: 1142538 - RNA, 19 nt, Homo sapiens
  misc_RNA (1)...(19): siRNA sense strand
acacauagcagauaaacuu

SEQ ID NO: 1142539 - RNA, 19 nt, Homo sapiens
  misc_RNA (1)...(19): siRNA sense strand
cagaugaacuucccauugg

SEQ ID NO: 1142540 - RNA, 19 nt, Homo sapiens
  misc_RNA (1)...(19): siRNA sense strand
gagcacaaacggaaacaau

SEQ ID NO: 1142541 - RNA, 19 nt, Homo sapiens
  misc_RNA (1)...(19): siRNA sense strand
gccagaggaugacgauugu

SEQ ID NO: 1142542 - RNA, 19 nt, Homo sapiens
  misc_RNA (1)...(19): siRNA sense strand
caggguauuuguaaagaug

SEQ ID NO: 1142543 - RNA, 19 nt, Homo sapiens
  misc_RNA (1)...(19): siRNA sense strand
ccagaugaacuucccauug

SEQ ID NO: 1142544 - RNA, 19 nt, Homo sapiens
  misc_RNA (1)...(19): siRNA sense strand
gcaggguauuuguaaagau

SEQ ID NO: 1142545 - RNA, 19 nt, Homo sapiens
  misc_RNA (1)...(19): siRNA sense strand
gaugacgauuguuuaucaa

SEQ ID NO: 1142546 - RNA, 19 nt, Homo sapiens
  misc_RNA (1)...(19): siRNA sense strand
cagaggaugacgauuguuu

SEQ ID NO: 1142547 - RNA, 19 nt, Homo sapiens
  misc_RNA (1)...(19): siRNA sense strand
gaggaugacgauuguuuau

SEQ ID NO: 1142548 - RNA, 19 nt, Homo sapiens
  misc_RNA (1)...(19): siRNA sense strand
ugggaugagugcagaauau

SEQ ID NO: 1142549 - RNA, 19 nt, Homo sapiens
  misc_RNA (1)...(19): siRNA sense strand
aggaacacauagcagauaa

SEQ ID NO: 1142550 - RNA, 19 nt, Homo sapiens
  misc_RNA (1)...(19): siRNA sense strand
gcacaaacggaaacaaugc

SEQ ID NO: 1142551 - RNA, 19 nt, Homo sapiens
  misc_RNA (1)...(19): siRNA sense strand
gaacacauagcagauaaac

SEQ ID NO: 1142552 - RNA, 19 nt, Homo sapiens
  misc_RNA (1)...(19): siRNA sense strand
gcacauggagcucuaaucc

SEQ ID NO: 1142553 - RNA, 19 nt, Homo sapiens
  misc_RNA (1)...(19): siRNA sense strand
ccucuugaagccauucuua

SEQ ID NO: 1142554 - RNA, 19 nt, Homo sapiens
  misc_RNA (1)...(19): siRNA sense strand
aaacggaaacaaugcaaug

SEQ ID NO: 1142555 - RNA, 19 nt, Homo sapiens
  misc_RNA (1)...(19): siRNA sense strand
gaagccauucuuacagaug

SEQ ID NO: 1142556 - RNA, 19 nt, Homo sapiens
  misc_RNA (1)...(19): siRNA sense strand
ggaacacauagcagauaaa

SEQ ID NO: 1142557 - RNA, 19 nt, Homo sapiens
  misc_RNA (1)...(19): siRNA sense strand
agaggaugacgauuguuua

SEQ ID NO: 1142558 - RNA, 19 nt, Homo sapiens
  misc_RNA (1)...(19): siRNA sense strand
aagccauucuuacagauga

SEQ ID NO: 1142559 - RNA, 19 nt, Homo sapiens
  misc_RNA (1)...(19): siRNA sense strand
uugaagccauucuuacaga

SEQ ID NO: 1142560 - RNA, 19 nt, Homo sapiens
  misc_RNA (1)...(19): siRNA sense strand
caggaacacauagcagaua

SEQ ID NO: 1142561 - RNA, 19 nt, Homo sapiens
  misc_RNA (1)...(19): siRNA sense strand
caugguuucucuugcaaca

SEQ ID NO: 1142562 - RNA, 19 nt, Homo sapiens
  misc_RNA (1)...(19): siRNA sense strand
ucaacgucaucuagaggaa

SEQ ID NO: 1142563 - RNA, 19 nt, Homo sapiens
  misc_RNA (1)...(19): siRNA sense strand
aagaugagcccagcagcua

SEQ ID NO: 1142564 - RNA, 19 nt, Homo sapiens
  misc_RNA (1)...(19): siRNA sense strand
caaacaggaacacauagca

SEQ ID NO: 1142565 - RNA, 19 nt, Homo sapiens
  misc_RNA (1)...(19): siRNA sense strand
cacagaacacucauggauu

SEQ ID NO: 1142566 - RNA, 19 nt, Homo sapiens
  misc_RNA (1)...(19): siRNA sense strand
caacuugcaaacagccauu

SEQ ID NO: 1142567 - RNA, 19 nt, Homo sapiens
  misc_RNA (1)...(19): siRNA sense strand
cgccagaggaugacgauug

SEQ ID NO: 1142568 - RNA, 19 nt, Homo sapiens
  misc_RNA (1)...(19): siRNA sense strand
aacgucaucuagaggaauu

SEQ ID NO: 1142569 - RNA, 19 nt, Homo sapiens
  misc_RNA (1)...(19): siRNA sense strand
gacgauuguuuaucaacgu

SEQ ID NO: 1142570 - RNA, 19 nt, Homo sapiens
  misc_RNA (1)...(19): siRNA sense strand
ugaagccauucuuacagau

SEQ ID NO: 1142571 - RNA, 19 nt, Homo sapiens
  misc_RNA (1)...(19): siRNA sense strand
cgcaggguauuuguaaaga

SEQ ID NO: 1142572 - RNA, 19 nt, Homo sapiens
  misc_RNA (1)...(19): siRNA sense strand
gaugagcccagcagcuaca

SEQ ID NO: 1142573 - RNA, 19 nt, Homo sapiens
  misc_RNA (1)...(19): siRNA sense strand
gcccagcagcuacacaugu

SEQ ID NO: 1142574 - RNA, 19 nt, Homo sapiens
  misc_RNA (1)...(19): siRNA sense strand
caaacggaaacaaugcaau

SEQ ID NO: 1142575 - RNA, 19 nt, Homo sapiens
  misc_RNA (1)...(19): siRNA sense strand
agaaagcgaacacggaagu

SEQ ID NO: 1142576 - RNA, 19 nt, Homo sapiens
  misc_RNA (1)...(19): siRNA sense strand
acacauguacaacuugcaa

SEQ ID NO: 1142577 - RNA, 19 nt, Homo sapiens
  misc_RNA (1)...(19): siRNA sense strand
gggaugagugcagaauaug

SEQ ID NO: 1142578 - RNA, 19 nt, Homo sapiens
  misc_RNA (1)...(19): siRNA sense strand
cagaacacucauggauuaa

SEQ ID NO: 1142579 - RNA, 19 nt, Homo sapiens
  misc_RNA (1)...(19): siRNA sense strand
ucuuacagaugaugaacca

SEQ ID NO: 1142580 - RNA, 19 nt, Homo sapiens
  misc_RNA (1)...(19): siRNA sense strand
gagcccagcagcuacacau

SEQ ID NO: 1142581 - RNA, 19 nt, Homo sapiens
  misc_RNA (1)...(19): siRNA sense strand
acagaacacucauggauua

SEQ ID NO: 1142582 - RNA, 19 nt, Homo sapiens
  misc_RNA (1)...(19): siRNA sense strand
gaacacucauggauuaaga

SEQ ID NO: 1142583 - RNA, 19 nt, Homo sapiens
  misc_RNA (1)...(19): siRNA sense strand
ggaugacgauuguuuauca

SEQ ID NO: 1142584 - RNA, 19 nt, Homo sapiens
  misc_RNA (1)...(19): siRNA sense strand
gcacagaacacucauggau

SEQ ID NO: 1142585 - RNA, 19 nt, Homo sapiens
  misc_RNA (1)...(19): siRNA sense strand
acacauagcagauaaacuu

SEQ ID NO: 1142586 - RNA, 19 nt, Homo sapiens
  misc_RNA (1)...(19): siRNA sense strand
cagaugaacuucccauugg

SEQ ID NO: 1142587 - RNA, 19 nt, Homo sapiens
  misc_RNA (1)...(19): siRNA sense strand
gagcacaaacggaaacaau

SEQ ID NO: 1142588 - RNA, 19 nt, Homo sapiens
  misc_RNA (1)...(19): siRNA sense strand
gccagaggaugacgauugu

SEQ ID NO: 1142589 - RNA, 19 nt, Homo sapiens
  misc_RNA (1)...(19): siRNA sense strand
caggguauuuguaaagaug

SEQ ID NO: 1142590 - RNA, 19 nt, Homo sapiens
  misc_RNA (1)...(19): siRNA sense strand
ccagaugaacuucccauug

SEQ ID NO: 1142591 - RNA, 19 nt, Homo sapiens
  misc_RNA (1)...(19): siRNA sense strand
gcaggguauuuguaaagau

SEQ ID NO: 1142592 - RNA, 19 nt, Homo sapiens
  misc_RNA (1)...(19): siRNA sense strand
gaugacgauuguuuaucaa

SEQ ID NO: 1142593 - RNA, 19 nt, Homo sapiens
  misc_RNA (1)...(19): siRNA sense strand
cagaggaugacgauuguuu

SEQ ID NO: 1142594 - RNA, 19 nt, Homo sapiens
  misc_RNA (1)...(19): siRNA sense strand
gaggaugacgauuguuuau

SEQ ID NO: 1142595 - RNA, 19 nt, Homo sapiens
  misc_RNA (1)...(19): siRNA sense strand
ugggaugagugcagaauau

SEQ ID NO: 1142596 - RNA, 19 nt, Homo sapiens
  misc_RNA (1)...(19): siRNA sense strand
aggaacacauagcagauaa

SEQ ID NO: 1142597 - RNA, 19 nt, Homo sapiens
  misc_RNA (1)...(19): siRNA sense strand
gcacaaacggaaacaaugc

SEQ ID NO: 1142598 - RNA, 19 nt, Homo sapiens
  misc_RNA (1)...(19): siRNA sense strand
gaacacauagcagauaaac

SEQ ID NO: 1142599 - RNA, 19 nt, Homo sapiens
  misc_RNA (1)...(19): siRNA sense strand
gcacauggagcucuaaucc

SEQ ID NO: 1142600 - RNA, 19 nt, Homo sapiens
  misc_RNA (1)...(19): siRNA sense strand
ccucuugaagccauucuua

SEQ ID NO: 1142601 - RNA, 19 nt, Homo sapiens
  misc_RNA (1)...(19): siRNA sense strand
aaacggaaacaaugcaaug

SEQ ID NO: 1142602 - RNA, 19 nt, Homo sapiens
  misc_RNA (1)...(19): siRNA sense strand
gaagccauucuuacagaug

SEQ ID NO: 1142603 - RNA, 19 nt, Homo sapiens
  misc_RNA (1)...(19): siRNA sense strand
ggaacacauagcagauaaa

SEQ ID NO: 1142604 - RNA, 19 nt, Homo sapiens
  misc_RNA (1)...(19): siRNA sense strand
agaggaugacgauuguuua

SEQ ID NO: 1142605 - RNA, 19 nt, Homo sapiens
  misc_RNA (1)...(19): siRNA sense strand
aagccauucuuacagauga

SEQ ID NO: 1142606 - RNA, 19 nt, Homo sapiens
  misc_RNA (1)...(19): siRNA sense strand
uugaagccauucuuacaga

SEQ ID NO: 1142607 - RNA, 19 nt, Homo sapiens
  misc_RNA (1)...(19): siRNA sense strand
caggaacacauagcagaua

SEQ ID NO: 1142608 - RNA, 19 nt, Homo sapiens
  misc_RNA (1)...(19): siRNA sense strand
caugguuucucuugcaaca

SEQ ID NO: 1142609 - RNA, 19 nt, Homo sapiens
  misc_RNA (1)...(19): siRNA sense strand
ucaacgucaucuagaggaa

SEQ ID NO: 1142610 - RNA, 19 nt, Homo sapiens
  misc_RNA (1)...(19): siRNA sense strand
aagaugagcccagcagcua

SEQ ID NO: 1142611 - RNA, 19 nt, Homo sapiens
  misc_RNA (1)...(19): siRNA sense strand
caaacaggaacacauagca

SEQ ID NO: 1142612 - RNA, 19 nt, Homo sapiens
  misc_RNA (1)...(19): siRNA sense strand
cacagaacacucauggauu

SEQ ID NO: 1142613 - RNA, 19 nt, Homo sapiens
  misc_RNA (1)...(19): siRNA sense strand
caacuugcaaacagccauu

SEQ ID NO: 1142614 - RNA, 19 nt, Homo sapiens
  misc_RNA (1)...(19): siRNA sense strand
cgccagaggaugacgauug

SEQ ID NO: 1142615 - RNA, 19 nt, Homo sapiens
  misc_RNA (1)...(19): siRNA sense strand
aacgucaucuagaggaauu

SEQ ID NO: 1142616 - RNA, 19 nt, Homo sapiens
  misc_RNA (1)...(19): siRNA sense strand
gacgauuguuuaucaacgu

SEQ ID NO: 1142617 - RNA, 19 nt, Homo sapiens
  misc_RNA (1)...(19): siRNA sense strand
ugaagccauucuuacagau

SEQ ID NO: 1142618 - RNA, 19 nt, Homo sapiens
  misc_RNA (1)...(19): siRNA sense strand
cgcaggguauuuguaaaga

SEQ ID NO: 1142619 - RNA, 19 nt, Homo sapiens
  misc_RNA (1)...(19): siRNA sense strand
gaugagcccagcagcuaca

SEQ ID NO: 1142620 - RNA, 19 nt, Homo sapiens
  misc_RNA (1)...(19): siRNA sense strand
gcccagcagcuacacaugu

SEQ ID NO: 1142621 - RNA, 19 nt, Homo sapiens
  misc_RNA (1)...(19): siRNA sense strand
caaacggaaacaaugcaau

SEQ ID NO: 1142622 - RNA, 19 nt, Homo sapiens
  misc_RNA (1)...(19): siRNA sense strand
agaaagcgaacacggaagu

SEQ ID NO: 1142623 - RNA, 19 nt, Homo sapiens
  misc_RNA (1)...(19): siRNA sense strand
acacauguacaacuugcaa

SEQ ID NO: 1142624 - RNA, 19 nt, Homo sapiens
  misc_RNA (1)...(19): siRNA sense strand
gggaugagugcagaauaug

SEQ ID NO: 1142625 - RNA, 19 nt, Homo sapiens
  misc_RNA (1)...(19): siRNA sense strand
cagaacacucauggauuaa

SEQ ID NO: 1142626 - RNA, 19 nt, Homo sapiens
  misc_RNA (1)...(19): siRNA sense strand
ucuuacagaugaugaacca

SEQ ID NO: 1142627 - RNA, 19 nt, Homo sapiens
  misc_RNA (1)...(19): siRNA sense strand
gagcccagcagcuacacau

SEQ ID NO: 1142628 - RNA, 19 nt, Homo sapiens
  misc_RNA (1)...(19): siRNA sense strand
acagaacacucauggauua

SEQ ID NO: 1142629 - RNA, 19 nt, Homo sapiens
  misc_RNA (1)...(19): siRNA sense strand
gaacacucauggauuaaga

SEQ ID NO: 1142630 - RNA, 19 nt, Homo sapiens
  misc_RNA (1)...(19): siRNA sense strand
ggaugacgauuguuuauca

SEQ ID NO: 1142631 - RNA, 19 nt, Homo sapiens
  misc_RNA (1)...(19): siRNA sense strand
gcacagaacacucauggau

SEQ ID NO: 1142632 - RNA, 19 nt, Homo sapiens
  misc_RNA (1)...(19): siRNA sense strand
acacauagcagauaaacuu

SEQ ID NO: 1142633 - RNA, 19 nt, Homo sapiens
  misc_RNA (1)...(19): siRNA sense strand
cagaugaacuucccauugg

SEQ ID NO: 1142634 - RNA, 19 nt, Homo sapiens
  misc_RNA (1)...(19): siRNA sense strand
gagcacaaacggaaacaau

SEQ ID NO: 1142635 - RNA, 19 nt, Homo sapiens
  misc_RNA (1)...(19): siRNA sense strand
gccagaggaugacgauugu

SEQ ID NO: 1142636 - RNA, 19 nt, Homo sapiens
  misc_RNA (1)...(19): siRNA sense strand
caggguauuuguaaagaug

SEQ ID NO: 1142637 - RNA, 19 nt, Homo sapiens
  misc_RNA (1)...(19): siRNA sense strand
ccagaugaacuucccauug

SEQ ID NO: 1142638 - RNA, 19 nt, Homo sapiens
  misc_RNA (1)...(19): siRNA sense strand
gcaggguauuuguaaagau

SEQ ID NO: 1142639 - RNA, 19 nt, Homo sapiens
  misc_RNA (1)...(19): siRNA sense strand
gaugacgauuguuuaucaa

SEQ ID NO: 1142640 - RNA, 19 nt, Homo sapiens
  misc_RNA (1)...(19): siRNA sense strand
cagaggaugacgauuguuu

SEQ ID NO: 1142641 - RNA, 19 nt, Homo sapiens
  misc_RNA (1)...(19): siRNA sense strand
gaggaugacgauuguuuau

SEQ ID NO: 1142642 - RNA, 19 nt, Homo sapiens
  misc_RNA (1)...(19): siRNA sense strand
ugggaugagugcagaauau

SEQ ID NO: 1142643 - RNA, 19 nt, Homo sapiens
  misc_RNA (1)...(19): siRNA sense strand
aggaacacauagcagauaa

SEQ ID NO: 1142644 - RNA, 19 nt, Homo sapiens
  misc_RNA (1)...(19): siRNA sense strand
gcacaaacggaaacaaugc

SEQ ID NO: 1142645 - RNA, 19 nt, Homo sapiens
  misc_RNA (1)...(19): siRNA sense strand
gaacacauagcagauaaac

SEQ ID NO: 1142646 - RNA, 19 nt, Homo sapiens
  misc_RNA (1)...(19): siRNA sense strand
gcacauggagcucuaaucc

SEQ ID NO: 1142647 - RNA, 19 nt, Homo sapiens
  misc_RNA (1)...(19): siRNA sense strand
ccucuugaagccauucuua

SEQ ID NO: 1142648 - RNA, 19 nt, Homo sapiens
  misc_RNA (1)...(19): siRNA sense strand
aaacggaaacaaugcaaug

SEQ ID NO: 1142649 - RNA, 19 nt, Homo sapiens
  misc_RNA (1)...(19): siRNA sense strand
gaagccauucuuacagaug

SEQ ID NO: 1142650 - RNA, 19 nt, Homo sapiens
  misc_RNA (1)...(19): siRNA sense strand
ggaacacauagcagauaaa

SEQ ID NO: 1142651 - RNA, 19 nt, Homo sapiens
  misc_RNA (1)...(19): siRNA sense strand
agaggaugacgauuguuua

SEQ ID NO: 1142652 - RNA, 19 nt, Homo sapiens
  misc_RNA (1)...(19): siRNA sense strand
aagccauucuuacagauga

SEQ ID NO: 1142653 - RNA, 19 nt, Homo sapiens
  misc_RNA (1)...(19): siRNA sense strand
uugaagccauucuuacaga

SEQ ID NO: 1142654 - RNA, 19 nt, Homo sapiens
  misc_RNA (1)...(19): siRNA sense strand
caggaacacauagcagaua

SEQ ID NO: 1142655 - RNA, 19 nt, Homo sapiens
  misc_RNA (1)...(19): siRNA sense strand
caugguuucucuugcaaca

SEQ ID NO: 1142656 - RNA, 19 nt, Homo sapiens
  misc_RNA (1)...(19): siRNA sense strand
ucaacgucaucuagaggaa

SEQ ID NO: 1142657 - RNA, 19 nt, Homo sapiens
  misc_RNA (1)...(19): siRNA sense strand
aagaugagcccagcagcua

SEQ ID NO: 1142658 - RNA, 19 nt, Homo sapiens
  misc_RNA (1)...(19): siRNA sense strand
caaacaggaacacauagca

SEQ ID NO: 1142659 - RNA, 19 nt, Homo sapiens
  misc_RNA (1)...(19): siRNA sense strand
cacagaacacucauggauu

SEQ ID NO: 1142660 - RNA, 19 nt, Homo sapiens
  misc_RNA (1)...(19): siRNA sense strand
caacuugcaaacagccauu

SEQ ID NO: 1142661 - RNA, 19 nt, Homo sapiens
  misc_RNA (1)...(19): siRNA sense strand
cgccagaggaugacgauug

SEQ ID NO: 1142662 - RNA, 19 nt, Homo sapiens
  misc_RNA (1)...(19): siRNA sense strand
aacgucaucuagaggaauu

SEQ ID NO: 1142663 - RNA, 19 nt, Homo sapiens
  misc_RNA (1)...(19): siRNA sense strand
gacgauuguuuaucaacgu

SEQ ID NO: 1142664 - RNA, 19 nt, Homo sapiens
  misc_RNA (1)...(19): siRNA sense strand
ugaagccauucuuacagau

SEQ ID NO: 1142665 - RNA, 19 nt, Homo sapiens
  misc_RNA (1)...(19): siRNA sense strand
cgcaggguauuuguaaaga

SEQ ID NO: 1142666 - RNA, 19 nt, Homo sapiens
  misc_RNA (1)...(19): siRNA sense strand
gaugagcccagcagcuaca

SEQ ID NO: 1142667 - RNA, 19 nt, Homo sapiens
  misc_RNA (1)...(19): siRNA sense strand
gcccagcagcuacacaugu

SEQ ID NO: 1142668 - RNA, 19 nt, Homo sapiens
  misc_RNA (1)...(19): siRNA sense strand
caaacggaaacaaugcaau

SEQ ID NO: 1142669 - RNA, 19 nt, Homo sapiens
  misc_RNA (1)...(19): siRNA sense strand
agaaagcgaacacggaagu

SEQ ID NO: 1142670 - RNA, 19 nt, Homo sapiens
  misc_RNA (1)...(19): siRNA sense strand
acacauguacaacuugcaa

SEQ ID NO: 1142671 - RNA, 19 nt, Homo sapiens
  misc_RNA (1)...(19): siRNA sense strand
gggaugagugcagaauaug

SEQ ID NO: 1142672 - RNA, 19 nt, Homo sapiens
  misc_RNA (1)...(19): siRNA sense strand
cagaacacucauggauuaa

SEQ ID NO: 1142673 - RNA, 19 nt, Homo sapiens
  misc_RNA (1)...(19): siRNA sense strand
ucuuacagaugaugaacca

SEQ ID NO: 1142674 - RNA, 19 nt, Homo sapiens
  misc_RNA (1)...(19): siRNA sense strand
gagcccagcagcuacacau

SEQ ID NO: 1142675 - RNA, 19 nt, Homo sapiens
  misc_RNA (1)...(19): siRNA sense strand
acagaacacucauggauua

SEQ ID NO: 1142676 - RNA, 19 nt, Homo sapiens
  misc_RNA (1)...(19): siRNA sense strand
gaacacucauggauuaaga

SEQ ID NO: 1142677 - RNA, 19 nt, Homo sapiens
  misc_RNA (1)...(19): siRNA sense strand
ggaugacgauuguuuauca

SEQ ID NO: 1142678 - RNA, 19 nt, Homo sapiens
  misc_RNA (1)...(19): siRNA sense strand
gcacagaacacucauggau

SEQ ID NO: 1142679 - RNA, 19 nt, Homo sapiens
  misc_RNA (1)...(19): siRNA sense strand
acacauagcagauaaacuu

SEQ ID NO: 1142680 - RNA, 19 nt, Homo sapiens
  misc_RNA (1)...(19): siRNA sense strand
cagaugaacuucccauugg

SEQ ID NO: 1142681 - RNA, 19 nt, Homo sapiens
  misc_RNA (1)...(19): siRNA sense strand
gagcacaaacggaaacaau

SEQ ID NO: 1142682 - RNA, 19 nt, Homo sapiens
  misc_RNA (1)...(19): siRNA sense strand
gccagaggaugacgauugu

SEQ ID NO: 1142683 - RNA, 19 nt, Homo sapiens
  misc_RNA (1)...(19): siRNA sense strand
caggguauuuguaaagaug

SEQ ID NO: 1142684 - RNA, 19 nt, Homo sapiens
  misc_RNA (1)...(19): siRNA sense strand
ccagaugaacuucccauug

SEQ ID NO: 1142685 - RNA, 19 nt, Homo sapiens
  misc_RNA (1)...(19): siRNA sense strand
gcaggguauuuguaaagau

SEQ ID NO: 1142686 - RNA, 19 nt, Homo sapiens
  misc_RNA (1)...(19): siRNA sense strand
gaugacgauuguuuaucaa

SEQ ID NO: 1142687 - RNA, 19 nt, Homo sapiens
  misc_RNA (1)...(19): siRNA sense strand
cagaggaugacgauuguuu

SEQ ID NO: 1142688 - RNA, 19 nt, Homo sapiens
  misc_RNA (1)...(19): siRNA sense strand
gaggaugacgauuguuuau

SEQ ID NO: 1142689 - RNA, 19 nt, Homo sapiens
  misc_RNA (1)...(19): siRNA sense strand
ugggaugagugcagaauau

SEQ ID NO: 1142690 - RNA, 19 nt, Homo sapiens
  misc_RNA (1)...(19): siRNA sense strand
aggaacacauagcagauaa

SEQ ID NO: 1142691 - RNA, 19 nt, Homo sapiens
  misc_RNA (1)...(19): siRNA sense strand
gcacaaacggaaacaaugc

SEQ ID NO: 1142692 - RNA, 19 nt, Homo sapiens
  misc_RNA (1)...(19): siRNA sense strand
gaacacauagcagauaaac

SEQ ID NO: 1142693 - RNA, 19 nt, Homo sapiens
  misc_RNA (1)...(19): siRNA sense strand
gcacauggagcucuaaucc

SEQ ID NO: 1142694 - RNA, 19 nt, Homo sapiens
  misc_RNA (1)...(19): siRNA sense strand
ccucuugaagccauucuua

SEQ ID NO: 1142695 - RNA, 19 nt, Homo sapiens
  misc_RNA (1)...(19): siRNA sense strand
aaacggaaacaaugcaaug

SEQ ID NO: 1142696 - RNA, 19 nt, Homo sapiens
  misc_RNA (1)...(19): siRNA sense strand
gaagccauucuuacagaug

SEQ ID NO: 1142697 - RNA, 19 nt, Homo sapiens
  misc_RNA (1)...(19): siRNA sense strand
ggaacacauagcagauaaa

SEQ ID NO: 1142698 - RNA, 19 nt, Homo sapiens
  misc_RNA (1)...(19): siRNA sense strand
agaggaugacgauuguuua

SEQ ID NO: 1142699 - RNA, 19 nt, Homo sapiens
  misc_RNA (1)...(19): siRNA sense strand
aagccauucuuacagauga

SEQ ID NO: 1142700 - RNA, 19 nt, Homo sapiens
  misc_RNA (1)...(19): siRNA sense strand
uugaagccauucuuacaga

SEQ ID NO: 1142701 - RNA, 19 nt, Homo sapiens
  misc_RNA (1)...(19): siRNA sense strand
caggaacacauagcagaua

SEQ ID NO: 1142702 - RNA, 19 nt, Homo sapiens
  misc_RNA (1)...(19): siRNA sense strand
caugguuucucuugcaaca

SEQ ID NO: 1142703 - RNA, 19 nt, Homo sapiens
  misc_RNA (1)...(19): siRNA sense strand
ucaacgucaucuagaggaa

SEQ ID NO: 1142704 - RNA, 19 nt, Homo sapiens
  misc_RNA (1)...(19): siRNA sense strand
aagaugagcccagcagcua

SEQ ID NO: 1142705 - RNA, 19 nt, Homo sapiens
  misc_RNA (1)...(19): siRNA sense strand
caaacaggaacacauagca

SEQ ID NO: 1142706 - RNA, 19 nt, Homo sapiens
  misc_RNA (1)...(19): siRNA sense strand
cacagaacacucauggauu

SEQ ID NO: 1142707 - RNA, 19 nt, Homo sapiens
  misc_RNA (1)...(19): siRNA sense strand
caacuugcaaacagccauu

SEQ ID NO: 1142708 - RNA, 19 nt, Homo sapiens
  misc_RNA (1)...(19): siRNA sense strand
cgccagaggaugacgauug

SEQ ID NO: 1142709 - RNA, 19 nt, Homo sapiens
  misc_RNA (1)...(19): siRNA sense strand
aacgucaucuagaggaauu

SEQ ID NO: 1142710 - RNA, 19 nt, Homo sapiens
  misc_RNA (1)...(19): siRNA sense strand
gacgauuguuuaucaacgu

SEQ ID NO: 1142711 - RNA, 19 nt, Homo sapiens
  misc_RNA (1)...(19): siRNA sense strand
ugaagccauucuuacagau

SEQ ID NO: 1142712 - RNA, 19 nt, Homo sapiens
  misc_RNA (1)...(19): siRNA sense strand
cgcaggguauuuguaaaga

SEQ ID NO: 1142713 - RNA, 19 nt, Homo sapiens
  misc_RNA (1)...(19): siRNA sense strand
gaugagcccagcagcuaca

SEQ ID NO: 1142714 - RNA, 19 nt, Homo sapiens
  misc_RNA (1)...(19): siRNA sense strand
gcccagcagcuacacaugu

SEQ ID NO: 1142715 - RNA, 19 nt, Homo sapiens
  misc_RNA (1)...(19): siRNA sense strand
caaacggaaacaaugcaau

SEQ ID NO: 1142716 - RNA, 19 nt, Homo sapiens
  misc_RNA (1)...(19): siRNA sense strand
agaaagcgaacacggaagu

SEQ ID NO: 1142717 - RNA, 19 nt, Homo sapiens
  misc_RNA (1)...(19): siRNA sense strand
acacauguacaacuugcaa

SEQ ID NO: 1142718 - RNA, 19 nt, Homo sapiens
  misc_RNA (1)...(19): siRNA sense strand
gggaugagugcagaauaug

SEQ ID NO: 1142719 - RNA, 19 nt, Homo sapiens
  misc_RNA (1)...(19): siRNA sense strand
cagaacacucauggauuaa

SEQ ID NO: 1142720 - RNA, 19 nt, Homo sapiens
  misc_RNA (1)...(19): siRNA sense strand
ucuuacagaugaugaacca

SEQ ID NO: 1142721 - RNA, 19 nt, Homo sapiens
  misc_RNA (1)...(19): siRNA sense strand
gagcccagcagcuacacau

SEQ ID NO: 1142722 - RNA, 19 nt, Homo sapiens
  misc_RNA (1)...(19): siRNA sense strand
acagaacacucauggauua

SEQ ID NO: 1142723 - RNA, 19 nt, Homo sapiens
  misc_RNA (1)...(19): siRNA sense strand
gaacacucauggauuaaga

SEQ ID NO: 1142724 - RNA, 19 nt, Homo sapiens
  misc_RNA (1)...(19): siRNA sense strand
ggaugacgauuguuuauca

SEQ ID NO: 1142725 - RNA, 19 nt, Homo sapiens
  misc_RNA (1)...(19): siRNA sense strand
gcacagaacacucauggau

SEQ ID NO: 1142726 - RNA, 19 nt, Homo sapiens
  misc_RNA (1)...(19): siRNA sense strand
acacauagcagauaaacuu

SEQ ID NO: 1142727 - RNA, 19 nt, Homo sapiens
  misc_RNA (1)...(19): siRNA sense strand
cagaugaacuucccauugg

SEQ ID NO: 1142728 - RNA, 19 nt, Homo sapiens
  misc_RNA (1)...(19): siRNA sense strand
gagcacaaacggaaacaau

SEQ ID NO: 1142729 - RNA, 19 nt, Homo sapiens
  misc_RNA (1)...(19): siRNA sense strand
gccagaggaugacgauugu

SEQ ID NO: 1142730 - RNA, 19 nt, Homo sapiens
  misc_RNA (1)...(19): siRNA sense strand
caggguauuuguaaagaug

SEQ ID NO: 1142731 - RNA, 19 nt, Homo sapiens
  misc_RNA (1)...(19): siRNA sense strand
ccagaugaacuucccauug

SEQ ID NO: 1142732 - RNA, 19 nt, Homo sapiens
  misc_RNA (1)...(19): siRNA sense strand
gcaggguauuuguaaagau

SEQ ID NO: 1142733 - RNA, 19 nt, Homo sapiens
  misc_RNA (1)...(19): siRNA sense strand
gaugacgauuguuuaucaa

SEQ ID NO: 1142734 - RNA, 19 nt, Homo sapiens
  misc_RNA (1)...(19): siRNA sense strand
cagaggaugacgauuguuu

SEQ ID NO: 1142735 - RNA, 19 nt, Homo sapiens
  misc_RNA (1)...(19): siRNA sense strand
gaggaugacgauuguuuau

SEQ ID NO: 1142736 - RNA, 19 nt, Homo sapiens
  misc_RNA (1)...(19): siRNA sense strand
ugggaugagugcagaauau

SEQ ID NO: 1142737 - RNA, 19 nt, Homo sapiens
  misc_RNA (1)...(19): siRNA sense strand
aggaacacauagcagauaa

SEQ ID NO: 1142738 - RNA, 19 nt, Homo sapiens
  misc_RNA (1)...(19): siRNA sense strand
gcacaaacggaaacaaugc

SEQ ID NO: 1142739 - RNA, 19 nt, Homo sapiens
  misc_RNA (1)...(19): siRNA sense strand
gaacacauagcagauaaac

SEQ ID NO: 1142740 - RNA, 19 nt, Homo sapiens
  misc_RNA (1)...(19): siRNA sense strand
gcacauggagcucuaaucc

SEQ ID NO: 1142741 - RNA, 19 nt, Homo sapiens
  misc_RNA (1)...(19): siRNA sense strand
ccucuugaagccauucuua

SEQ ID NO: 1142742 - RNA, 19 nt, Homo sapiens
  misc_RNA (1)...(19): siRNA sense strand
aaacggaaacaaugcaaug

SEQ ID NO: 1142743 - RNA, 19 nt, Homo sapiens
  misc_RNA (1)...(19): siRNA sense strand
gaagccauucuuacagaug

SEQ ID NO: 1142744 - RNA, 19 nt, Homo sapiens
  misc_RNA (1)...(19): siRNA sense strand
ggaacacauagcagauaaa

SEQ ID NO: 1142745 - RNA, 19 nt, Homo sapiens
  misc_RNA (1)...(19): siRNA sense strand
agaggaugacgauuguuua

SEQ ID NO: 1142746 - RNA, 19 nt, Homo sapiens
  misc_RNA (1)...(19): siRNA sense strand
aagccauucuuacagauga

SEQ ID NO: 1142747 - RNA, 19 nt, Homo sapiens
  misc_RNA (1)...(19): siRNA sense strand
uugaagccauucuuacaga

SEQ ID NO: 1142748 - RNA, 19 nt, Homo sapiens
  misc_RNA (1)...(19): siRNA sense strand
caggaacacauagcagaua

SEQ ID NO: 1142749 - RNA, 19 nt, Homo sapiens
  misc_RNA (1)...(19): siRNA sense strand
caugguuucucuugcaaca

SEQ ID NO: 1142750 - RNA, 19 nt, Homo sapiens
  misc_RNA (1)...(19): siRNA sense strand
ucaacgucaucuagaggaa

SEQ ID NO: 1142751 - RNA, 19 nt, Homo sapiens
  misc_RNA (1)...(19): siRNA sense strand
aagaugagcccagcagcua

SEQ ID NO: 1142752 - RNA, 19 nt, Homo sapiens
  misc_RNA (1)...(19): siRNA sense strand
caaacaggaacacauagca

SEQ ID NO: 1142753 - RNA, 19 nt, Homo sapiens
  misc_RNA (1)...(19): siRNA sense strand
cacagaacacucauggauu

SEQ ID NO: 1142754 - RNA, 19 nt, Homo sapiens
  misc_RNA (1)...(19): siRNA sense strand
caacuugcaaacagccauu

SEQ ID NO: 1142755 - RNA, 19 nt, Homo sapiens
  misc_RNA (1)...(19): siRNA sense strand
cgccagaggaugacgauug

SEQ ID NO: 1142756 - RNA, 19 nt, Homo sapiens
  misc_RNA (1)...(19): siRNA sense strand
aacgucaucuagaggaauu

SEQ ID NO: 1142757 - RNA, 19 nt, Homo sapiens
  misc_RNA (1)...(19): siRNA sense strand
gacgauuguuuaucaacgu

SEQ ID NO: 1142758 - RNA, 19 nt, Homo sapiens
  misc_RNA (1)...(19): siRNA sense strand
ugaagccauucuuacagau

SEQ ID NO: 1142759 - RNA, 19 nt, Homo sapiens
  misc_RNA (1)...(19): siRNA sense strand
cgcaggguauuuguaaaga

SEQ ID NO: 1142760 - RNA, 19 nt, Homo sapiens
  misc_RNA (1)...(19): siRNA sense strand
gaugagcccagcagcuaca

SEQ ID NO: 1142761 - RNA, 19 nt, Homo sapiens
  misc_RNA (1)...(19): siRNA sense strand
gcccagcagcuacacaugu

SEQ ID NO: 1142762 - RNA, 19 nt, Homo sapiens
  misc_RNA (1)...(19): siRNA sense strand
caaacggaaacaaugcaau

SEQ ID NO: 1142763 - RNA, 19 nt, Homo sapiens
  misc_RNA (1)...(19): siRNA sense strand
agaaagcgaacacggaagu

SEQ ID NO: 1142764 - RNA, 19 nt, Homo sapiens
  misc_RNA (1)...(19): siRNA sense strand
acacauguacaacuugcaa

SEQ ID NO: 1142765 - RNA, 19 nt, Homo sapiens
  misc_RNA (1)...(19): siRNA sense strand
gggaugagugcagaauaug

SEQ ID NO: 1142766 - RNA, 19 nt, Homo sapiens
  misc_RNA (1)...(19): siRNA sense strand
cagaacacucauggauuaa

SEQ ID NO: 1142767 - RNA, 19 nt, Homo sapiens
  misc_RNA (1)...(19): siRNA sense strand
ucuuacagaugaugaacca

SEQ ID NO: 1142768 - RNA, 19 nt, Homo sapiens
  misc_RNA (1)...(19): siRNA sense strand
gagcccagcagcuacacau

SEQ ID NO: 1142769 - RNA, 19 nt, Homo sapiens
  misc_RNA (1)...(19): siRNA sense strand
acagaacacucauggauua

SEQ ID NO: 1142770 - RNA, 19 nt, Homo sapiens
  misc_RNA (1)...(19): siRNA sense strand
gaacacucauggauuaaga

SEQ ID NO: 1142771 - RNA, 19 nt, Homo sapiens
  misc_RNA (1)...(19): siRNA sense strand
ggaugacgauuguuuauca

SEQ ID NO: 1142772 - RNA, 19 nt, Homo sapiens
  misc_RNA (1)...(19): siRNA sense strand
gcacagaacacucauggau

SEQ ID NO: 1142773 - RNA, 19 nt, Homo sapiens
  misc_RNA (1)...(19): siRNA sense strand
acacauagcagauaaacuu

SEQ ID NO: 1142774 - RNA, 19 nt, Homo sapiens
  misc_RNA (1)...(19): siRNA sense strand
cagaugaacuucccauugg

SEQ ID NO: 1142775 - RNA, 19 nt, Homo sapiens
  misc_RNA (1)...(19): siRNA sense strand
gagcacaaacggaaacaau

SEQ ID NO: 1142776 - RNA, 19 nt, Homo sapiens
  misc_RNA (1)...(19): siRNA sense strand
gccagaggaugacgauugu

SEQ ID NO: 1142777 - RNA, 19 nt, Homo sapiens
  misc_RNA (1)...(19): siRNA sense strand
caggguauuuguaaagaug

SEQ ID NO: 1142778 - RNA, 19 nt, Homo sapiens
  misc_RNA (1)...(19): siRNA sense strand
ccagaugaacuucccauug

SEQ ID NO: 1142779 - RNA, 19 nt, Homo sapiens
  misc_RNA (1)...(19): siRNA sense strand
gcaggguauuuguaaagau

SEQ ID NO: 1142780 - RNA, 19 nt, Homo sapiens
  misc_RNA (1)...(19): siRNA sense strand
gaugacgauuguuuaucaa

SEQ ID NO: 1142781 - RNA, 19 nt, Homo sapiens
  misc_RNA (1)...(19): siRNA sense strand
cagaggaugacgauuguuu

SEQ ID NO: 1142782 - RNA, 19 nt, Homo sapiens
  misc_RNA (1)...(19): siRNA sense strand
gaggaugacgauuguuuau

SEQ ID NO: 1142783 - RNA, 19 nt, Homo sapiens
  misc_RNA (1)...(19): siRNA sense strand
ugggaugagugcagaauau

SEQ ID NO: 1142784 - RNA, 19 nt, Homo sapiens
  misc_RNA (1)...(19): siRNA sense strand
aggaacacauagcagauaa

SEQ ID NO: 1142785 - RNA, 19 nt, Homo sapiens
  misc_RNA (1)...(19): siRNA sense strand
gcacaaacggaaacaaugc

SEQ ID NO: 1142786 - RNA, 19 nt, Homo sapiens
  misc_RNA (1)...(19): siRNA sense strand
gaacacauagcagauaaac

SEQ ID NO: 1142787 - RNA, 19 nt, Homo sapiens
  misc_RNA (1)...(19): siRNA sense strand
gcacauggagcucuaaucc

SEQ ID NO: 1142788 - RNA, 19 nt, Homo sapiens
  misc_RNA (1)...(19): siRNA sense strand
ccucuugaagccauucuua

SEQ ID NO: 1142789 - RNA, 19 nt, Homo sapiens
  misc_RNA (1)...(19): siRNA sense strand
aaacggaaacaaugcaaug

SEQ ID NO: 1142790 - RNA, 19 nt, Homo sapiens
  misc_RNA (1)...(19): siRNA sense strand
gaagccauucuuacagaug

SEQ ID NO: 1142791 - RNA, 19 nt, Homo sapiens
  misc_RNA (1)...(19): siRNA sense strand
ggaacacauagcagauaaa

SEQ ID NO: 1142792 - RNA, 19 nt, Homo sapiens
  misc_RNA (1)...(19): siRNA sense strand
agaggaugacgauuguuua

SEQ ID NO: 1142793 - RNA, 19 nt, Homo sapiens
  misc_RNA (1)...(19): siRNA sense strand
aagccauucuuacagauga

SEQ ID NO: 1142794 - RNA, 19 nt, Homo sapiens
  misc_RNA (1)...(19): siRNA sense strand
uugaagccauucuuacaga

SEQ ID NO: 1142795 - RNA, 19 nt, Homo sapiens
  misc_RNA (1)...(19): siRNA sense strand
caggaacacauagcagaua

SEQ ID NO: 1142796 - RNA, 19 nt, Homo sapiens
  misc_RNA (1)...(19): siRNA sense strand
caugguuucucuugcaaca

SEQ ID NO: 1142797 - RNA, 19 nt, Homo sapiens
  misc_RNA (1)...(19): siRNA sense strand
ucaacgucaucuagaggaa

SEQ ID NO: 1142798 - RNA, 19 nt, Homo sapiens
  misc_RNA (1)...(19): siRNA sense strand
aagaugagcccagcagcua

SEQ ID NO: 1142799 - RNA, 19 nt, Homo sapiens
  misc_RNA (1)...(19): siRNA sense strand
caaacaggaacacauagca

SEQ ID NO: 1142800 - RNA, 19 nt, Homo sapiens
  misc_RNA (1)...(19): siRNA sense strand
cacagaacacucauggauu

SEQ ID NO: 1142801 - RNA, 19 nt, Homo sapiens
  misc_RNA (1)...(19): siRNA sense strand
caacuugcaaacagccauu

SEQ ID NO: 1142802 - RNA, 19 nt, Homo sapiens
  misc_RNA (1)...(19): siRNA sense strand
cgccagaggaugacgauug

SEQ ID NO: 1142803 - RNA, 19 nt, Homo sapiens
  misc_RNA (1)...(19): siRNA sense strand
aacgucaucuagaggaauu

SEQ ID NO: 1142804 - RNA, 19 nt, Homo sapiens
  misc_RNA (1)...(19): siRNA sense strand
gacgauuguuuaucaacgu

SEQ ID NO: 1142805 - RNA, 19 nt, Homo sapiens
  misc_RNA (1)...(19): siRNA sense strand
ugaagccauucuuacagau

SEQ ID NO: 1142806 - RNA, 19 nt, Homo sapiens
  misc_RNA (1)...(19): siRNA sense strand
cgcaggguauuuguaaaga

SEQ ID NO: 1142807 - RNA, 19 nt, Homo sapiens
  misc_RNA (1)...(19): siRNA sense strand
gaugagcccagcagcuaca

SEQ ID NO: 1142808 - RNA, 19 nt, Homo sapiens
  misc_RNA (1)...(19): siRNA sense strand
gcccagcagcuacacaugu

SEQ ID NO: 1142809 - RNA, 19 nt, Homo sapiens
  misc_RNA (1)...(19): siRNA sense strand
caaacggaaacaaugcaau

SEQ ID NO: 1142810 - RNA, 19 nt, Homo sapiens
  misc_RNA (1)...(19): siRNA sense strand
agaaagcgaacacggaagu

SEQ ID NO: 1142811 - RNA, 19 nt, Homo sapiens
  misc_RNA (1)...(19): siRNA sense strand
acacauguacaacuugcaa

SEQ ID NO: 1142812 - RNA, 19 nt, Homo sapiens
  misc_RNA (1)...(19): siRNA sense strand
gggaugagugcagaauaug

SEQ ID NO: 1142813 - RNA, 19 nt, Homo sapiens
  misc_RNA (1)...(19): siRNA sense strand
cagaacacucauggauuaa

SEQ ID NO: 1142814 - RNA, 19 nt, Homo sapiens
  misc_RNA (1)...(19): siRNA sense strand
ucuuacagaugaugaacca

SEQ ID NO: 1142815 - RNA, 19 nt, Homo sapiens
  misc_RNA (1)...(19): siRNA sense strand
gagcccagcagcuacacau

SEQ ID NO: 1142816 - RNA, 19 nt, Homo sapiens
  misc_RNA (1)...(19): siRNA sense strand
ggagcuagaucaugaaaga

SEQ ID NO: 1142817 - RNA, 19 nt, Homo sapiens
  misc_RNA (1)...(19): siRNA sense strand
gagaaacucuucccugaug

SEQ ID NO: 1142818 - RNA, 19 nt, Homo sapiens
  misc_RNA (1)...(19): siRNA sense strand
ucacaguccugaaacgaua

SEQ ID NO: 1142819 - RNA, 19 nt, Homo sapiens
  misc_RNA (1)...(19): siRNA sense strand
ugaaagaaauguugcaauc

SEQ ID NO: 1142820 - RNA, 19 nt, Homo sapiens
  misc_RNA (1)...(19): siRNA sense strand
gauuggagauucuacauuc

SEQ ID NO: 1142821 - RNA, 19 nt, Homo sapiens
  misc_RNA (1)...(19): siRNA sense strand
agaaaucccuagaagaauu

SEQ ID NO: 1142822 - RNA, 19 nt, Homo sapiens
  misc_RNA (1)...(19): siRNA sense strand
ggauauagcuuugagaaac

SEQ ID NO: 1142823 - RNA, 19 nt, Homo sapiens
  misc_RNA (1)...(19): siRNA sense strand
gaagcuaagccgaccauuu

SEQ ID NO: 1142824 - RNA, 19 nt, Homo sapiens
  misc_RNA (1)...(19): siRNA sense strand
gaacacaacaaacuuaaag

SEQ ID NO: 1142825 - RNA, 19 nt, Homo sapiens
  misc_RNA (1)...(19): siRNA sense strand
gcucauggaugcaaaucuu

SEQ ID NO: 1142826 - RNA, 19 nt, Homo sapiens
  misc_RNA (1)...(19): siRNA sense strand
acagagagcuaguucuuau

SEQ ID NO: 1142827 - RNA, 19 nt, Homo sapiens
  misc_RNA (1)...(19): siRNA sense strand
gaagcaagcgugacaacaa

SEQ ID NO: 1142828 - RNA, 19 nt, Homo sapiens
  misc_RNA (1)...(19): siRNA sense strand
ccacagaaaucccuagaag

SEQ ID NO: 1142829 - RNA, 19 nt, Homo sapiens
  misc_RNA (1)...(19): siRNA sense strand
cucaggagcucaaggaaua

SEQ ID NO: 1142830 - RNA, 19 nt, Homo sapiens
  misc_RNA (1)...(19): siRNA sense strand
gaugacgccuuauguagug

SEQ ID NO: 1142831 - RNA, 19 nt, Homo sapiens
  misc_RNA (1)...(19): siRNA sense strand
gaucaguggaauaaaguua

SEQ ID NO: 1142832 - RNA, 19 nt, Homo sapiens
  misc_RNA (1)...(19): siRNA sense strand
ugaaagggaacacacaaua

SEQ ID NO: 1142833 - RNA, 19 nt, Homo sapiens
  misc_RNA (1)...(19): siRNA sense strand
acagaaaucccuagaagaa

SEQ ID NO: 1142834 - RNA, 19 nt, Homo sapiens
  misc_RNA (1)...(19): siRNA sense strand
gacaagcaguuagaugaaa

SEQ ID NO: 1142835 - RNA, 19 nt, Homo sapiens
  misc_RNA (1)...(19): siRNA sense strand
ggaacaccauguccugaau

SEQ ID NO: 1142836 - RNA, 19 nt, Homo sapiens
  misc_RNA (1)...(19): siRNA sense strand
caccaaagaucccugacaa

SEQ ID NO: 1142837 - RNA, 19 nt, Homo sapiens
  misc_RNA (1)...(19): siRNA sense strand
agauggagcuagaucauga

SEQ ID NO: 1142838 - RNA, 19 nt, Homo sapiens
  misc_RNA (1)...(19): siRNA sense strand
aaccaagaauggaguuaua

SEQ ID NO: 1142839 - RNA, 19 nt, Homo sapiens
  misc_RNA (1)...(19): siRNA sense strand
gaaagggaacacacaauag

SEQ ID NO: 1142840 - RNA, 19 nt, Homo sapiens
  misc_RNA (1)...(19): siRNA sense strand
ggaacgaguuuuaugauga

SEQ ID NO: 1142841 - RNA, 19 nt, Homo sapiens
  misc_RNA (1)...(19): siRNA sense strand
gcaagcgugacaacaauuu

SEQ ID NO: 1142842 - RNA, 19 nt, Homo sapiens
  misc_RNA (1)...(19): siRNA sense strand
ucagaacacaacaaacuua

SEQ ID NO: 1142843 - RNA, 19 nt, Homo sapiens
  misc_RNA (1)...(19): siRNA sense strand
gaaaacagaccuaaauaug

SEQ ID NO: 1142844 - RNA, 19 nt, Homo sapiens
  misc_RNA (1)...(19): siRNA sense strand
gaaauguugcaaucaagaa

SEQ ID NO: 1142845 - RNA, 19 nt, Homo sapiens
  misc_RNA (1)...(19): siRNA sense strand
cuagaagaauuucaagaug

SEQ ID NO: 1142846 - RNA, 19 nt, Homo sapiens
  misc_RNA (1)...(19): siRNA sense strand
gaaagaaauguugcaauca

SEQ ID NO: 1142847 - RNA, 19 nt, Homo sapiens
  misc_RNA (1)...(19): siRNA sense strand
aaacagaccuaaauaugcu

SEQ ID NO: 1142848 - RNA, 19 nt, Homo sapiens
  misc_RNA (1)...(19): siRNA sense strand
gacuuaaagcccaguaaua

SEQ ID NO: 1142849 - RNA, 19 nt, Homo sapiens
  misc_RNA (1)...(19): siRNA sense strand
gcccaguaauauaguagua

SEQ ID NO: 1142850 - RNA, 19 nt, Homo sapiens
  misc_RNA (1)...(19): siRNA sense strand
gaggagagaaccaagaaug

SEQ ID NO: 1142851 - RNA, 19 nt, Homo sapiens
  misc_RNA (1)...(19): siRNA sense strand
caacacccguacaucaaug

SEQ ID NO: 1142852 - RNA, 19 nt, Homo sapiens
  misc_RNA (1)...(19): siRNA sense strand
agagcuaguucuuaugaaa

SEQ ID NO: 1142853 - RNA, 19 nt, Homo sapiens
  misc_RNA (1)...(19): siRNA sense strand
ggcaugggcuacaaggaaa

SEQ ID NO: 1142854 - RNA, 19 nt, Homo sapiens
  misc_RNA (1)...(19): siRNA sense strand
ggaaucaagcaccuucauu

SEQ ID NO: 1142855 - RNA, 19 nt, Homo sapiens
  misc_RNA (1)...(19): siRNA sense strand
uguccuaccuucucuauca

SEQ ID NO: 1142856 - RNA, 19 nt, Homo sapiens
  misc_RNA (1)...(19): siRNA sense strand
ggaauaguaugcgcagcuu

SEQ ID NO: 1142857 - RNA, 19 nt, Homo sapiens
  misc_RNA (1)...(19): siRNA sense strand
gaacaccauguccugaauu

SEQ ID NO: 1142858 - RNA, 19 nt, Homo sapiens
  misc_RNA (1)...(19): siRNA sense strand
gaagaaacugcaaccaaca

SEQ ID NO: 1142859 - RNA, 19 nt, Homo sapiens
  misc_RNA (1)...(19): siRNA sense strand
gaaccaagaauggaguuau

SEQ ID NO: 1142860 - RNA, 19 nt, Homo sapiens
  misc_RNA (1)...(19): siRNA sense strand
ccaaaaugcugguaauaga

SEQ ID NO: 1142861 - RNA, 19 nt, Homo sapiens
  misc_RNA (1)...(19): siRNA sense strand
gauauagcuuugagaaacu

SEQ ID NO: 1142862 - RNA, 19 nt, Homo sapiens
  misc_RNA (1)...(19): siRNA sense strand
gcuagaucaugaaagaaug

SEQ ID NO: 1142863 - RNA, 19 nt, Homo sapiens
  misc_RNA (1)...(19): siRNA sense strand
ggacuuaaagcccaguaau

SEQ ID NO: 1142864 - RNA, 19 nt, Homo sapiens
  misc_RNA (1)...(19): siRNA sense strand
gaagcuccaccaccaaaga

SEQ ID NO: 1142865 - RNA, 19 nt, Homo sapiens
  misc_RNA (1)...(19): siRNA sense strand
guccugaauucaugaagaa

SEQ ID NO: 1142866 - RNA, 19 nt, Homo sapiens
  misc_RNA (1)...(19): siRNA sense strand
gagagcuaguucuuaugaa

SEQ ID NO: 1142867 - RNA, 19 nt, Homo sapiens
  misc_RNA (1)...(19): siRNA sense strand
uagaagaguggaaagaauu

SEQ ID NO: 1142868 - RNA, 19 nt, Homo sapiens
  misc_RNA (1)...(19): siRNA sense strand
ggacugcaggaacgaguuu

SEQ ID NO: 1142869 - RNA, 19 nt, Homo sapiens
  misc_RNA (1)...(19): siRNA sense strand
aagcuaagccgaccauuuc

SEQ ID NO: 1142870 - RNA, 19 nt, Homo sapiens
  misc_RNA (1)...(19): siRNA sense strand
ggagagaaccaagaaugga

SEQ ID NO: 1142871 - RNA, 19 nt, Homo sapiens
  misc_RNA (1)...(19): siRNA sense strand
ugacucagaacacaacaaa

SEQ ID NO: 1142872 - RNA, 19 nt, Homo sapiens
  misc_RNA (1)...(19): siRNA sense strand
ugauugcacuuugaagauu

SEQ ID NO: 1142873 - RNA, 19 nt, Homo sapiens
  misc_RNA (1)...(19): siRNA sense strand
gccaagugauucagaugga

SEQ ID NO: 1142874 - RNA, 19 nt, Homo sapiens
  misc_RNA (1)...(19): siRNA sense strand
aaagggaacacacaauaga

SEQ ID NO: 1142875 - RNA, 19 nt, Homo sapiens
  misc_RNA (1)...(19): siRNA sense strand
cagaacacaacaaacuuaa

SEQ ID NO: 1142876 - RNA, 19 nt, Homo sapiens
  misc_RNA (1)...(19): siRNA sense strand
gaauaguaugcgcagcuua

SEQ ID NO: 1142877 - RNA, 19 nt, Homo sapiens
  misc_RNA (1)...(19): siRNA sense strand
cuuaaagcccaguaauaua

SEQ ID NO: 1142878 - RNA, 19 nt, Homo sapiens
  misc_RNA (1)...(19): siRNA sense strand
uaucagaugcuguguggaa

SEQ ID NO: 1142879 - RNA, 19 nt, Homo sapiens
  misc_RNA (1)...(19): siRNA sense strand
uuaaagcccaguaauauag

SEQ ID NO: 1142880 - RNA, 19 nt, Homo sapiens
  misc_RNA (1)...(19): siRNA sense strand
gaacacacaauagaagagu

SEQ ID NO: 1142881 - RNA, 19 nt, Homo sapiens
  misc_RNA (1)...(19): siRNA sense strand
ucaggcaagggauuuguua

SEQ ID NO: 1142882 - RNA, 19 nt, Homo sapiens
  misc_RNA (1)...(19): siRNA sense strand
gaccuaaauaugcuggaua

SEQ ID NO: 1142883 - RNA, 19 nt, Homo sapiens
  misc_RNA (1)...(19): siRNA sense strand
cuacagagagcuaguucuu

SEQ ID NO: 1142884 - RNA, 19 nt, Homo sapiens
  misc_RNA (1)...(19): siRNA sense strand
gaugaaagggaacacacaa

SEQ ID NO: 1142885 - RNA, 19 nt, Homo sapiens
  misc_RNA (1)...(19): siRNA sense strand
gauugcacuuugaagauuc

SEQ ID NO: 1142886 - RNA, 19 nt, Homo sapiens
  misc_RNA (1)...(19): siRNA sense strand
aagcaagcgugacaacaau

SEQ ID NO: 1142887 - RNA, 19 nt, Homo sapiens
  misc_RNA (1)...(19): siRNA sense strand
guguagagauuggagauuc

SEQ ID NO: 1142888 - RNA, 19 nt, Homo sapiens
  misc_RNA (1)...(19): siRNA sense strand
aaagcccaguaauauagua

SEQ ID NO: 1142889 - RNA, 19 nt, Homo sapiens
  misc_RNA (1)...(19): siRNA sense strand
uaugaugacgccuuaugua

SEQ ID NO: 1142890 - RNA, 19 nt, Homo sapiens
  misc_RNA (1)...(19): siRNA sense strand
gagcuaguucuuaugaaau

SEQ ID NO: 1142891 - RNA, 19 nt, Homo sapiens
  misc_RNA (1)...(19): siRNA sense strand
uaugaugccauucuugaaa

SEQ ID NO: 1142892 - RNA, 19 nt, Homo sapiens
  misc_RNA (1)...(19): siRNA sense strand
ugauucagauggagcuaga

SEQ ID NO: 1142893 - RNA, 19 nt, Homo sapiens
  misc_RNA (1)...(19): siRNA sense strand
gaagaguggaaagaauuga

SEQ ID NO: 1142894 - RNA, 19 nt, Homo sapiens
  misc_RNA (1)...(19): siRNA sense strand
auagaagaguggaaagaau

SEQ ID NO: 1142895 - RNA, 19 nt, Homo sapiens
  misc_RNA (1)...(19): siRNA sense strand
ggacuuacguugaaaacag

SEQ ID NO: 1142896 - RNA, 19 nt, Homo sapiens
  misc_RNA (1)...(19): siRNA sense strand
cagaugcuguguggaauca

SEQ ID NO: 1142897 - RNA, 19 nt, Homo sapiens
  misc_RNA (1)...(19): siRNA sense strand
agagagcuaguucuuauga

SEQ ID NO: 1142898 - RNA, 19 nt, Homo sapiens
  misc_RNA (1)...(19): siRNA sense strand
gggaacacacaauagaaga

SEQ ID NO: 1142899 - RNA, 19 nt, Homo sapiens
  misc_RNA (1)...(19): siRNA sense strand
ugacaagcaguuagaugaa

SEQ ID NO: 1142900 - RNA, 19 nt, Homo sapiens
  misc_RNA (1)...(19): siRNA sense strand
caaagaucccugacaagca

SEQ ID NO: 1142901 - RNA, 19 nt, Homo sapiens
  misc_RNA (1)...(19): siRNA sense strand
caauagaagaguggaaaga

SEQ ID NO: 1142902 - RNA, 19 nt, Homo sapiens
  misc_RNA (1)...(19): siRNA sense strand
ccuagaagaauuucaagau

SEQ ID NO: 1142903 - RNA, 19 nt, Homo sapiens
  misc_RNA (1)...(19): siRNA sense strand
cagaagcuccaccaccaaa

SEQ ID NO: 1142904 - RNA, 19 nt, Homo sapiens
  misc_RNA (1)...(19): siRNA sense strand
gaacagcuuggaacaccau

SEQ ID NO: 1142905 - RNA, 19 nt, Homo sapiens
  misc_RNA (1)...(19): siRNA sense strand
gaugcuguguggaaucaag

SEQ ID NO: 1142906 - RNA, 19 nt, Homo sapiens
  misc_RNA (1)...(19): siRNA sense strand
agaguggaaagaauugaua

SEQ ID NO: 1142907 - RNA, 19 nt, Homo sapiens
  misc_RNA (1)...(19): siRNA sense strand
caaccaacaguaaggacuu

SEQ ID NO: 1142908 - RNA, 19 nt, Homo sapiens
  misc_RNA (1)...(19): siRNA sense strand
uaauuggccuuuugaaugu

SEQ ID NO: 1142909 - RNA, 19 nt, Homo sapiens
  misc_RNA (1)...(19): siRNA sense strand
cuaaaaggaucucuguaga

SEQ ID NO: 1142910 - RNA, 19 nt, Homo sapiens
  misc_RNA (1)...(19): siRNA sense strand
gcaggaacgaguuuuauga

SEQ ID NO: 1142911 - RNA, 19 nt, Homo sapiens
  misc_RNA (1)...(19): siRNA sense strand
ggagcucaaggaauaguau

SEQ ID NO: 1142912 - RNA, 19 nt, Homo sapiens
  misc_RNA (1)...(19): siRNA sense strand
agaugaagcucuccaacac

SEQ ID NO: 1142913 - RNA, 19 nt, Homo sapiens
  misc_RNA (1)...(19): siRNA sense strand
gcagaagcuccaccaccaa

SEQ ID NO: 1142914 - RNA, 19 nt, Homo sapiens
  misc_RNA (1)...(19): siRNA sense strand
acuuaaagcccaguaauau

SEQ ID NO: 1142915 - RNA, 19 nt, Homo sapiens
  misc_RNA (1)...(19): siRNA sense strand
cugacaagcaguuagauga

SEQ ID NO: 1142916 - RNA, 19 nt, Homo sapiens
  misc_RNA (1)...(19): siRNA sense strand
ggagcuagaucaugaaaga

SEQ ID NO: 1142917 - RNA, 19 nt, Homo sapiens
  misc_RNA (1)...(19): siRNA sense strand
gagaaacucuucccugaug

SEQ ID NO: 1142918 - RNA, 19 nt, Homo sapiens
  misc_RNA (1)...(19): siRNA sense strand
ucacaguccugaaacgaua

SEQ ID NO: 1142919 - RNA, 19 nt, Homo sapiens
  misc_RNA (1)...(19): siRNA sense strand
ugaaagaaauguugcaauc

SEQ ID NO: 1142920 - RNA, 19 nt, Homo sapiens
  misc_RNA (1)...(19): siRNA sense strand
gauuggagauucuacauuc

SEQ ID NO: 1142921 - RNA, 19 nt, Homo sapiens
  misc_RNA (1)...(19): siRNA sense strand
agaaaucccuagaagaauu

SEQ ID NO: 1142922 - RNA, 19 nt, Homo sapiens
  misc_RNA (1)...(19): siRNA sense strand
ggauauagcuuugagaaac

SEQ ID NO: 1142923 - RNA, 19 nt, Homo sapiens
  misc_RNA (1)...(19): siRNA sense strand
gaagcuaagccgaccauuu

SEQ ID NO: 1142924 - RNA, 19 nt, Homo sapiens
  misc_RNA (1)...(19): siRNA sense strand
gaacacaacaaacuuaaag

SEQ ID NO: 1142925 - RNA, 19 nt, Homo sapiens
  misc_RNA (1)...(19): siRNA sense strand
gcucauggaugcaaaucuu

SEQ ID NO: 1142926 - RNA, 19 nt, Homo sapiens
  misc_RNA (1)...(19): siRNA sense strand
acagagagcuaguucuuau

SEQ ID NO: 1142927 - RNA, 19 nt, Homo sapiens
  misc_RNA (1)...(19): siRNA sense strand
gaagcaagcgugacaacaa

SEQ ID NO: 1142928 - RNA, 19 nt, Homo sapiens
  misc_RNA (1)...(19): siRNA sense strand
ccacagaaaucccuagaag

SEQ ID NO: 1142929 - RNA, 19 nt, Homo sapiens
  misc_RNA (1)...(19): siRNA sense strand
cucaggagcucaaggaaua

SEQ ID NO: 1142930 - RNA, 19 nt, Homo sapiens
  misc_RNA (1)...(19): siRNA sense strand
gaugacgccuuauguagug

SEQ ID NO: 1142931 - RNA, 19 nt, Homo sapiens
  misc_RNA (1)...(19): siRNA sense strand
gaucaguggaauaaaguua

SEQ ID NO: 1142932 - RNA, 19 nt, Homo sapiens
  misc_RNA (1)...(19): siRNA sense strand
ugaaagggaacacacaaua

SEQ ID NO: 1142933 - RNA, 19 nt, Homo sapiens
  misc_RNA (1)...(19): siRNA sense strand
acagaaaucccuagaagaa

SEQ ID NO: 1142934 - RNA, 19 nt, Homo sapiens
  misc_RNA (1)...(19): siRNA sense strand
gacaagcaguuagaugaaa

SEQ ID NO: 1142935 - RNA, 19 nt, Homo sapiens
  misc_RNA (1)...(19): siRNA sense strand
ggaacaccauguccugaau

SEQ ID NO: 1142936 - RNA, 19 nt, Homo sapiens
  misc_RNA (1)...(19): siRNA sense strand
caccaaagaucccugacaa

SEQ ID NO: 1142937 - RNA, 19 nt, Homo sapiens
  misc_RNA (1)...(19): siRNA sense strand
agauggagcuagaucauga

SEQ ID NO: 1142938 - RNA, 19 nt, Homo sapiens
  misc_RNA (1)...(19): siRNA sense strand
aaccaagaauggaguuaua

SEQ ID NO: 1142939 - RNA, 19 nt, Homo sapiens
  misc_RNA (1)...(19): siRNA sense strand
gaaagggaacacacaauag

SEQ ID NO: 1142940 - RNA, 19 nt, Homo sapiens
  misc_RNA (1)...(19): siRNA sense strand
ggaacgaguuuuaugauga

SEQ ID NO: 1142941 - RNA, 19 nt, Homo sapiens
  misc_RNA (1)...(19): siRNA sense strand
gcaagcgugacaacaauuu

SEQ ID NO: 1142942 - RNA, 19 nt, Homo sapiens
  misc_RNA (1)...(19): siRNA sense strand
ucagaacacaacaaacuua

SEQ ID NO: 1142943 - RNA, 19 nt, Homo sapiens
  misc_RNA (1)...(19): siRNA sense strand
gaaaacagaccuaaauaug

SEQ ID NO: 1142944 - RNA, 19 nt, Homo sapiens
  misc_RNA (1)...(19): siRNA sense strand
gaaauguugcaaucaagaa

SEQ ID NO: 1142945 - RNA, 19 nt, Homo sapiens
  misc_RNA (1)...(19): siRNA sense strand
cuagaagaauuucaagaug

SEQ ID NO: 1142946 - RNA, 19 nt, Homo sapiens
  misc_RNA (1)...(19): siRNA sense strand
gaaagaaauguugcaauca

SEQ ID NO: 1142947 - RNA, 19 nt, Homo sapiens
  misc_RNA (1)...(19): siRNA sense strand
aaacagaccuaaauaugcu

SEQ ID NO: 1142948 - RNA, 19 nt, Homo sapiens
  misc_RNA (1)...(19): siRNA sense strand
gacuuaaagcccaguaaua

SEQ ID NO: 1142949 - RNA, 19 nt, Homo sapiens
  misc_RNA (1)...(19): siRNA sense strand
gcccaguaauauaguagua

SEQ ID NO: 1142950 - RNA, 19 nt, Homo sapiens
  misc_RNA (1)...(19): siRNA sense strand
gaggagagaaccaagaaug

SEQ ID NO: 1142951 - RNA, 19 nt, Homo sapiens
  misc_RNA (1)...(19): siRNA sense strand
caacacccguacaucaaug

SEQ ID NO: 1142952 - RNA, 19 nt, Homo sapiens
  misc_RNA (1)...(19): siRNA sense strand
agagcuaguucuuaugaaa

SEQ ID NO: 1142953 - RNA, 19 nt, Homo sapiens
  misc_RNA (1)...(19): siRNA sense strand
ggcaugggcuacaaggaaa

SEQ ID NO: 1142954 - RNA, 19 nt, Homo sapiens
  misc_RNA (1)...(19): siRNA sense strand
ggaaucaagcaccuucauu

SEQ ID NO: 1142955 - RNA, 19 nt, Homo sapiens
  misc_RNA (1)...(19): siRNA sense strand
uguccuaccuucucuauca

SEQ ID NO: 1142956 - RNA, 19 nt, Homo sapiens
  misc_RNA (1)...(19): siRNA sense strand
ggaauaguaugcgcagcuu

SEQ ID NO: 1142957 - RNA, 19 nt, Homo sapiens
  misc_RNA (1)...(19): siRNA sense strand
gaacaccauguccugaauu

SEQ ID NO: 1142958 - RNA, 19 nt, Homo sapiens
  misc_RNA (1)...(19): siRNA sense strand
gaagaaacugcaaccaaca

SEQ ID NO: 1142959 - RNA, 19 nt, Homo sapiens
  misc_RNA (1)...(19): siRNA sense strand
gaaccaagaauggaguuau

SEQ ID NO: 1142960 - RNA, 19 nt, Homo sapiens
  misc_RNA (1)...(19): siRNA sense strand
ccaaaaugcugguaauaga

SEQ ID NO: 1142961 - RNA, 19 nt, Homo sapiens
  misc_RNA (1)...(19): siRNA sense strand
gauauagcuuugagaaacu

SEQ ID NO: 1142962 - RNA, 19 nt, Homo sapiens
  misc_RNA (1)...(19): siRNA sense strand
gcuagaucaugaaagaaug

SEQ ID NO: 1142963 - RNA, 19 nt, Homo sapiens
  misc_RNA (1)...(19): siRNA sense strand
ggacuuaaagcccaguaau

SEQ ID NO: 1142964 - RNA, 19 nt, Homo sapiens
  misc_RNA (1)...(19): siRNA sense strand
gaagcuccaccaccaaaga

SEQ ID NO: 1142965 - RNA, 19 nt, Homo sapiens
  misc_RNA (1)...(19): siRNA sense strand
guccugaauucaugaagaa

SEQ ID NO: 1142966 - RNA, 19 nt, Homo sapiens
  misc_RNA (1)...(19): siRNA sense strand
gagagcuaguucuuaugaa

SEQ ID NO: 1142967 - RNA, 19 nt, Homo sapiens
  misc_RNA (1)...(19): siRNA sense strand
uagaagaguggaaagaauu

SEQ ID NO: 1142968 - RNA, 19 nt, Homo sapiens
  misc_RNA (1)...(19): siRNA sense strand
ggacugcaggaacgaguuu

SEQ ID NO: 1142969 - RNA, 19 nt, Homo sapiens
  misc_RNA (1)...(19): siRNA sense strand
aagcuaagccgaccauuuc

SEQ ID NO: 1142970 - RNA, 19 nt, Homo sapiens
  misc_RNA (1)...(19): siRNA sense strand
ggagagaaccaagaaugga

SEQ ID NO: 1142971 - RNA, 19 nt, Homo sapiens
  misc_RNA (1)...(19): siRNA sense strand
ugacucagaacacaacaaa

SEQ ID NO: 1142972 - RNA, 19 nt, Homo sapiens
  misc_RNA (1)...(19): siRNA sense strand
ugauugcacuuugaagauu

SEQ ID NO: 1142973 - RNA, 19 nt, Homo sapiens
  misc_RNA (1)...(19): siRNA sense strand
gccaagugauucagaugga

SEQ ID NO: 1142974 - RNA, 19 nt, Homo sapiens
  misc_RNA (1)...(19): siRNA sense strand
aaagggaacacacaauaga

SEQ ID NO: 1142975 - RNA, 19 nt, Homo sapiens
  misc_RNA (1)...(19): siRNA sense strand
cagaacacaacaaacuuaa

SEQ ID NO: 1142976 - RNA, 19 nt, Homo sapiens
  misc_RNA (1)...(19): siRNA sense strand
gaauaguaugcgcagcuua

SEQ ID NO: 1142977 - RNA, 19 nt, Homo sapiens
  misc_RNA (1)...(19): siRNA sense strand
cuuaaagcccaguaauaua

SEQ ID NO: 1142978 - RNA, 19 nt, Homo sapiens
  misc_RNA (1)...(19): siRNA sense strand
uaucagaugcuguguggaa

SEQ ID NO: 1142979 - RNA, 19 nt, Homo sapiens
  misc_RNA (1)...(19): siRNA sense strand
uuaaagcccaguaauauag

SEQ ID NO: 1142980 - RNA, 19 nt, Homo sapiens
  misc_RNA (1)...(19): siRNA sense strand
gaacacacaauagaagagu

SEQ ID NO: 1142981 - RNA, 19 nt, Homo sapiens
  misc_RNA (1)...(19): siRNA sense strand
ucaggcaagggauuuguua

SEQ ID NO: 1142982 - RNA, 19 nt, Homo sapiens
  misc_RNA (1)...(19): siRNA sense strand
gaccuaaauaugcuggaua

SEQ ID NO: 1142983 - RNA, 19 nt, Homo sapiens
  misc_RNA (1)...(19): siRNA sense strand
cuacagagagcuaguucuu

SEQ ID NO: 1142984 - RNA, 19 nt, Homo sapiens
  misc_RNA (1)...(19): siRNA sense strand
gaugaaagggaacacacaa

SEQ ID NO: 1142985 - RNA, 19 nt, Homo sapiens
  misc_RNA (1)...(19): siRNA sense strand
gauugcacuuugaagauuc

SEQ ID NO: 1142986 - RNA, 19 nt, Homo sapiens
  misc_RNA (1)...(19): siRNA sense strand
aagcaagcgugacaacaau

SEQ ID NO: 1142987 - RNA, 19 nt, Homo sapiens
  misc_RNA (1)...(19): siRNA sense strand
guguagagauuggagauuc

SEQ ID NO: 1142988 - RNA, 19 nt, Homo sapiens
  misc_RNA (1)...(19): siRNA sense strand
aaagcccaguaauauagua

SEQ ID NO: 1142989 - RNA, 19 nt, Homo sapiens
  misc_RNA (1)...(19): siRNA sense strand
uaugaugacgccuuaugua

SEQ ID NO: 1142990 - RNA, 19 nt, Homo sapiens
  misc_RNA (1)...(19): siRNA sense strand
gagcuaguucuuaugaaau

SEQ ID NO: 1142991 - RNA, 19 nt, Homo sapiens
  misc_RNA (1)...(19): siRNA sense strand
uaugaugccauucuugaaa

SEQ ID NO: 1142992 - RNA, 19 nt, Homo sapiens
  misc_RNA (1)...(19): siRNA sense strand
ugauucagauggagcuaga

SEQ ID NO: 1142993 - RNA, 19 nt, Homo sapiens
  misc_RNA (1)...(19): siRNA sense strand
gaagaguggaaagaauuga

SEQ ID NO: 1142994 - RNA, 19 nt, Homo sapiens
  misc_RNA (1)...(19): siRNA sense strand
auagaagaguggaaagaau

SEQ ID NO: 1142995 - RNA, 19 nt, Homo sapiens
  misc_RNA (1)...(19): siRNA sense strand
ggacuuacguugaaaacag

SEQ ID NO: 1142996 - RNA, 19 nt, Homo sapiens
  misc_RNA (1)...(19): siRNA sense strand
cagaugcuguguggaauca

SEQ ID NO: 1142997 - RNA, 19 nt, Homo sapiens
  misc_RNA (1)...(19): siRNA sense strand
agagagcuaguucuuauga

SEQ ID NO: 1142998 - RNA, 19 nt, Homo sapiens
  misc_RNA (1)...(19): siRNA sense strand
gggaacacacaauagaaga

SEQ ID NO: 1142999 - RNA, 19 nt, Homo sapiens
  misc_RNA (1)...(19): siRNA sense strand
ugacaagcaguuagaugaa

SEQ ID NO: 1143000 - RNA, 19 nt, Homo sapiens
  misc_RNA (1)...(19): siRNA sense strand
caaagaucccugacaagca

SEQ ID NO: 1143001 - RNA, 19 nt, Homo sapiens
  misc_RNA (1)...(19): siRNA sense strand
caauagaagaguggaaaga

SEQ ID NO: 1143002 - RNA, 19 nt, Homo sapiens
  misc_RNA (1)...(19): siRNA sense strand
ccuagaagaauuucaagau

SEQ ID NO: 1143003 - RNA, 19 nt, Homo sapiens
  misc_RNA (1)...(19): siRNA sense strand
cagaagcuccaccaccaaa

SEQ ID NO: 1143004 - RNA, 19 nt, Homo sapiens
  misc_RNA (1)...(19): siRNA sense strand
gaacagcuuggaacaccau

SEQ ID NO: 1143005 - RNA, 19 nt, Homo sapiens
  misc_RNA (1)...(19): siRNA sense strand
gaugcuguguggaaucaag

SEQ ID NO: 1143006 - RNA, 19 nt, Homo sapiens
  misc_RNA (1)...(19): siRNA sense strand
agaguggaaagaauugaua

SEQ ID NO: 1143007 - RNA, 19 nt, Homo sapiens
  misc_RNA (1)...(19): siRNA sense strand
caaccaacaguaaggacuu

SEQ ID NO: 1143008 - RNA, 19 nt, Homo sapiens
  misc_RNA (1)...(19): siRNA sense strand
uaauuggccuuuugaaugu

SEQ ID NO: 1143009 - RNA, 19 nt, Homo sapiens
  misc_RNA (1)...(19): siRNA sense strand
cuaaaaggaucucuguaga

SEQ ID NO: 1143010 - RNA, 19 nt, Homo sapiens
  misc_RNA (1)...(19): siRNA sense strand
gcaggaacgaguuuuauga

SEQ ID NO: 1143011 - RNA, 19 nt, Homo sapiens
  misc_RNA (1)...(19): siRNA sense strand
ggagcucaaggaauaguau

SEQ ID NO: 1143012 - RNA, 19 nt, Homo sapiens
  misc_RNA (1)...(19): siRNA sense strand
agaugaagcucuccaacac

SEQ ID NO: 1143013 - RNA, 19 nt, Homo sapiens
  misc_RNA (1)...(19): siRNA sense strand
gcagaagcuccaccaccaa

SEQ ID NO: 1143014 - RNA, 19 nt, Homo sapiens
  misc_RNA (1)...(19): siRNA sense strand
acuuaaagcccaguaauau

SEQ ID NO: 1143015 - RNA, 19 nt, Homo sapiens
  misc_RNA (1)...(19): siRNA sense strand
cugacaagcaguuagauga

SEQ ID NO: 1143016 - RNA, 19 nt, Homo sapiens
  misc_RNA (1)...(19): siRNA sense strand
ggagcuagaucaugaaaga

SEQ ID NO: 1143017 - RNA, 19 nt, Homo sapiens
  misc_RNA (1)...(19): siRNA sense strand
gagaaacucuucccugaug

SEQ ID NO: 1143018 - RNA, 19 nt, Homo sapiens
  misc_RNA (1)...(19): siRNA sense strand
ucacaguccugaaacgaua

SEQ ID NO: 1143019 - RNA, 19 nt, Homo sapiens
  misc_RNA (1)...(19): siRNA sense strand
ugaaagaaauguugcaauc

SEQ ID NO: 1143020 - RNA, 19 nt, Homo sapiens
  misc_RNA (1)...(19): siRNA sense strand
gauuggagauucuacauuc

SEQ ID NO: 1143021 - RNA, 19 nt, Homo sapiens
  misc_RNA (1)...(19): siRNA sense strand
agaaaucccuagaagaauu

SEQ ID NO: 1143022 - RNA, 19 nt, Homo sapiens
  misc_RNA (1)...(19): siRNA sense strand
ggauauagcuuugagaaac

SEQ ID NO: 1143023 - RNA, 19 nt, Homo sapiens
  misc_RNA (1)...(19): siRNA sense strand
gaagcuaagccgaccauuu

SEQ ID NO: 1143024 - RNA, 19 nt, Homo sapiens
  misc_RNA (1)...(19): siRNA sense strand
gaacacaacaaacuuaaag

SEQ ID NO: 1143025 - RNA, 19 nt, Homo sapiens
  misc_RNA (1)...(19): siRNA sense strand
gcucauggaugcaaaucuu

SEQ ID NO: 1143026 - RNA, 19 nt, Homo sapiens
  misc_RNA (1)...(19): siRNA sense strand
acagagagcuaguucuuau

SEQ ID NO: 1143027 - RNA, 19 nt, Homo sapiens
  misc_RNA (1)...(19): siRNA sense strand
gaagcaagcgugacaacaa

SEQ ID NO: 1143028 - RNA, 19 nt, Homo sapiens
  misc_RNA (1)...(19): siRNA sense strand
ucaaugaugugucuucaau

SEQ ID NO: 1143029 - RNA, 19 nt, Homo sapiens
  misc_RNA (1)...(19): siRNA sense strand
ccacagaaaucccuagaag

SEQ ID NO: 1143030 - RNA, 19 nt, Homo sapiens
  misc_RNA (1)...(19): siRNA sense strand
cucaggagcucaaggaaua

SEQ ID NO: 1143031 - RNA, 19 nt, Homo sapiens
  misc_RNA (1)...(19): siRNA sense strand
gaugacgccuuauguagug

SEQ ID NO: 1143032 - RNA, 19 nt, Homo sapiens
  misc_RNA (1)...(19): siRNA sense strand
gaucaguggaauaaaguua

SEQ ID NO: 1143033 - RNA, 19 nt, Homo sapiens
  misc_RNA (1)...(19): siRNA sense strand
ugaaagggaacacacaaua

SEQ ID NO: 1143034 - RNA, 19 nt, Homo sapiens
  misc_RNA (1)...(19): siRNA sense strand
acagaaaucccuagaagaa

SEQ ID NO: 1143035 - RNA, 19 nt, Homo sapiens
  misc_RNA (1)...(19): siRNA sense strand
gacaagcaguuagaugaaa

SEQ ID NO: 1143036 - RNA, 19 nt, Homo sapiens
  misc_RNA (1)...(19): siRNA sense strand
ggaacaccauguccugaau

SEQ ID NO: 1143037 - RNA, 19 nt, Homo sapiens
  misc_RNA (1)...(19): siRNA sense strand
caccaaagaucccugacaa

SEQ ID NO: 1143038 - RNA, 19 nt, Homo sapiens
  misc_RNA (1)...(19): siRNA sense strand
agauggagcuagaucauga

SEQ ID NO: 1143039 - RNA, 19 nt, Homo sapiens
  misc_RNA (1)...(19): siRNA sense strand
aaccaagaauggaguuaua

SEQ ID NO: 1143040 - RNA, 19 nt, Homo sapiens
  misc_RNA (1)...(19): siRNA sense strand
gaaagggaacacacaauag

SEQ ID NO: 1143041 - RNA, 19 nt, Homo sapiens
  misc_RNA (1)...(19): siRNA sense strand
ggaacgaguuuuaugauga

SEQ ID NO: 1143042 - RNA, 19 nt, Homo sapiens
  misc_RNA (1)...(19): siRNA sense strand
gcaagcgugacaacaauuu

SEQ ID NO: 1143043 - RNA, 19 nt, Homo sapiens
  misc_RNA (1)...(19): siRNA sense strand
ucagaacacaacaaacuua

SEQ ID NO: 1143044 - RNA, 19 nt, Homo sapiens
  misc_RNA (1)...(19): siRNA sense strand
gaaaacagaccuaaauaug

SEQ ID NO: 1143045 - RNA, 19 nt, Homo sapiens
  misc_RNA (1)...(19): siRNA sense strand
gaaauguugcaaucaagaa

SEQ ID NO: 1143046 - RNA, 19 nt, Homo sapiens
  misc_RNA (1)...(19): siRNA sense strand
cuagaagaauuucaagaug

SEQ ID NO: 1143047 - RNA, 19 nt, Homo sapiens
  misc_RNA (1)...(19): siRNA sense strand
gaaagaaauguugcaauca

SEQ ID NO: 1143048 - RNA, 19 nt, Homo sapiens
  misc_RNA (1)...(19): siRNA sense strand
aaacagaccuaaauaugcu

SEQ ID NO: 1143049 - RNA, 19 nt, Homo sapiens
  misc_RNA (1)...(19): siRNA sense strand
gacuuaaagcccaguaaua

SEQ ID NO: 1143050 - RNA, 19 nt, Homo sapiens
  misc_RNA (1)...(19): siRNA sense strand
gcccaguaauauaguagua

SEQ ID NO: 1143051 - RNA, 19 nt, Homo sapiens
  misc_RNA (1)...(19): siRNA sense strand
gaggagagaaccaagaaug

SEQ ID NO: 1143052 - RNA, 19 nt, Homo sapiens
  misc_RNA (1)...(19): siRNA sense strand
caacacccguacaucaaug

SEQ ID NO: 1143053 - RNA, 19 nt, Homo sapiens
  misc_RNA (1)...(19): siRNA sense strand
agagcuaguucuuaugaaa

SEQ ID NO: 1143054 - RNA, 19 nt, Homo sapiens
  misc_RNA (1)...(19): siRNA sense strand
ggcaugggcuacaaggaaa

SEQ ID NO: 1143055 - RNA, 19 nt, Homo sapiens
  misc_RNA (1)...(19): siRNA sense strand
ggaaucaagcaccuucauu

SEQ ID NO: 1143056 - RNA, 19 nt, Homo sapiens
  misc_RNA (1)...(19): siRNA sense strand
uguccuaccuucucuauca

SEQ ID NO: 1143057 - RNA, 19 nt, Homo sapiens
  misc_RNA (1)...(19): siRNA sense strand
ggaauaguaugcgcagcuu

SEQ ID NO: 1143058 - RNA, 19 nt, Homo sapiens
  misc_RNA (1)...(19): siRNA sense strand
gaacaccauguccugaauu

SEQ ID NO: 1143059 - RNA, 19 nt, Homo sapiens
  misc_RNA (1)...(19): siRNA sense strand
gaagaaacugcaaccaaca

SEQ ID NO: 1143060 - RNA, 19 nt, Homo sapiens
  misc_RNA (1)...(19): siRNA sense strand
ccucugggcugcuguagau

SEQ ID NO: 1143061 - RNA, 19 nt, Homo sapiens
  misc_RNA (1)...(19): siRNA sense strand
gaaccaagaauggaguuau

SEQ ID NO: 1143062 - RNA, 19 nt, Homo sapiens
  misc_RNA (1)...(19): siRNA sense strand
ccaaaaugcugguaauaga

SEQ ID NO: 1143063 - RNA, 19 nt, Homo sapiens
  misc_RNA (1)...(19): siRNA sense strand
gauauagcuuugagaaacu

SEQ ID NO: 1143064 - RNA, 19 nt, Homo sapiens
  misc_RNA (1)...(19): siRNA sense strand
gcuagaucaugaaagaaug

SEQ ID NO: 1143065 - RNA, 19 nt, Homo sapiens
  misc_RNA (1)...(19): siRNA sense strand
ugaugugucuucaauguca

SEQ ID NO: 1143066 - RNA, 19 nt, Homo sapiens
  misc_RNA (1)...(19): siRNA sense strand
ggacuuaaagcccaguaau

SEQ ID NO: 1143067 - RNA, 19 nt, Homo sapiens
  misc_RNA (1)...(19): siRNA sense strand
gaagcuccaccaccaaaga

SEQ ID NO: 1143068 - RNA, 19 nt, Homo sapiens
  misc_RNA (1)...(19): siRNA sense strand
guccugaauucaugaagaa

SEQ ID NO: 1143069 - RNA, 19 nt, Homo sapiens
  misc_RNA (1)...(19): siRNA sense strand
gagagcuaguucuuaugaa

SEQ ID NO: 1143070 - RNA, 19 nt, Homo sapiens
  misc_RNA (1)...(19): siRNA sense strand
aaugaugugucuucaaugu

SEQ ID NO: 1143071 - RNA, 19 nt, Homo sapiens
  misc_RNA (1)...(19): siRNA sense strand
uagaagaguggaaagaauu

SEQ ID NO: 1143072 - RNA, 19 nt, Homo sapiens
  misc_RNA (1)...(19): siRNA sense strand
ggacugcaggaacgaguuu

SEQ ID NO: 1143073 - RNA, 19 nt, Homo sapiens
  misc_RNA (1)...(19): siRNA sense strand
gugcagcagugaucaaugg

SEQ ID NO: 1143074 - RNA, 19 nt, Homo sapiens
  misc_RNA (1)...(19): siRNA sense strand
aagcuaagccgaccauuuc

SEQ ID NO: 1143075 - RNA, 19 nt, Homo sapiens
  misc_RNA (1)...(19): siRNA sense strand
ggagagaaccaagaaugga

SEQ ID NO: 1143076 - RNA, 19 nt, Homo sapiens
  misc_RNA (1)...(19): siRNA sense strand
ugacucagaacacaacaaa

SEQ ID NO: 1143077 - RNA, 19 nt, Homo sapiens
  misc_RNA (1)...(19): siRNA sense strand
ugauugcacuuugaagauu

SEQ ID NO: 1143078 - RNA, 19 nt, Homo sapiens
  misc_RNA (1)...(19): siRNA sense strand
gccaagugauucagaugga

SEQ ID NO: 1143079 - RNA, 19 nt, Homo sapiens
  misc_RNA (1)...(19): siRNA sense strand
aaagggaacacacaauaga

SEQ ID NO: 1143080 - RNA, 19 nt, Homo sapiens
  misc_RNA (1)...(19): siRNA sense strand
gaauaguaugcgcagcuua

SEQ ID NO: 1143081 - RNA, 19 nt, Homo sapiens
  misc_RNA (1)...(19): siRNA sense strand
cagaacacaacaaacuuaa

SEQ ID NO: 1143082 - RNA, 19 nt, Homo sapiens
  misc_RNA (1)...(19): siRNA sense strand
cuuaaagcccaguaauaua

SEQ ID NO: 1143083 - RNA, 19 nt, Homo sapiens
  misc_RNA (1)...(19): siRNA sense strand
uaucagaugcuguguggaa

SEQ ID NO: 1143084 - RNA, 19 nt, Homo sapiens
  misc_RNA (1)...(19): siRNA sense strand
uuaaagcccaguaauauag

SEQ ID NO: 1143085 - RNA, 19 nt, Homo sapiens
  misc_RNA (1)...(19): siRNA sense strand
caucgucgucugucaauga

SEQ ID NO: 1143086 - RNA, 19 nt, Homo sapiens
  misc_RNA (1)...(19): siRNA sense strand
gaacacacaauagaagagu

SEQ ID NO: 1143087 - RNA, 19 nt, Homo sapiens
  misc_RNA (1)...(19): siRNA sense strand
ucaggcaagggauuuguua

SEQ ID NO: 1143088 - RNA, 19 nt, Homo sapiens
  misc_RNA (1)...(19): siRNA sense strand
gaccuaaauaugcuggaua

SEQ ID NO: 1143089 - RNA, 19 nt, Homo sapiens
  misc_RNA (1)...(19): siRNA sense strand
cuacagagagcuaguucuu

SEQ ID NO: 1143090 - RNA, 19 nt, Homo sapiens
  misc_RNA (1)...(19): siRNA sense strand
gaugaaagggaacacacaa

SEQ ID NO: 1143091 - RNA, 19 nt, Homo sapiens
  misc_RNA (1)...(19): siRNA sense strand
guguagagauuggagauuc

SEQ ID NO: 1143092 - RNA, 19 nt, Homo sapiens
  misc_RNA (1)...(19): siRNA sense strand
gauugcacuuugaagauuc

SEQ ID NO: 1143093 - RNA, 19 nt, Homo sapiens
  misc_RNA (1)...(19): siRNA sense strand
aagcaagcgugacaacaau

SEQ ID NO: 1143094 - RNA, 19 nt, Homo sapiens
  misc_RNA (1)...(19): siRNA sense strand
aaagcccaguaauauagua

SEQ ID NO: 1143095 - RNA, 19 nt, Homo sapiens
  misc_RNA (1)...(19): siRNA sense strand
uaugaugacgccuuaugua

SEQ ID NO: 1143096 - RNA, 19 nt, Homo sapiens
  misc_RNA (1)...(19): siRNA sense strand
gagcuaguucuuaugaaau

SEQ ID NO: 1143097 - RNA, 19 nt, Homo sapiens
  misc_RNA (1)...(19): siRNA sense strand
ugucuucaaugucaacaga

SEQ ID NO: 1143098 - RNA, 19 nt, Homo sapiens
  misc_RNA (1)...(19): siRNA sense strand
uaugaugccauucuugaaa

SEQ ID NO: 1143099 - RNA, 19 nt, Homo sapiens
  misc_RNA (1)...(19): siRNA sense strand
ugauucagauggagcuaga

SEQ ID NO: 1143100 - RNA, 19 nt, Homo sapiens
  misc_RNA (1)...(19): siRNA sense strand
gaagaguggaaagaauuga

SEQ ID NO: 1143101 - RNA, 19 nt, Homo sapiens
  misc_RNA (1)...(19): siRNA sense strand
auagaagaguggaaagaau

SEQ ID NO: 1143102 - RNA, 19 nt, Homo sapiens
  misc_RNA (1)...(19): siRNA sense strand
ggacuuacguugaaaacag

SEQ ID NO: 1143103 - RNA, 19 nt, Homo sapiens
  misc_RNA (1)...(19): siRNA sense strand
cagaugcuguguggaauca

SEQ ID NO: 1143104 - RNA, 19 nt, Homo sapiens
  misc_RNA (1)...(19): siRNA sense strand
agagagcuaguucuuauga

SEQ ID NO: 1143105 - RNA, 19 nt, Homo sapiens
  misc_RNA (1)...(19): siRNA sense strand
gggaacacacaauagaaga

SEQ ID NO: 1143106 - RNA, 19 nt, Homo sapiens
  misc_RNA (1)...(19): siRNA sense strand
ugacaagcaguuagaugaa

SEQ ID NO: 1143107 - RNA, 19 nt, Homo sapiens
  misc_RNA (1)...(19): siRNA sense strand
caaagaucccugacaagca

SEQ ID NO: 1143108 - RNA, 19 nt, Homo sapiens
  misc_RNA (1)...(19): siRNA sense strand
caauagaagaguggaaaga

SEQ ID NO: 1143109 - RNA, 19 nt, Homo sapiens
  misc_RNA (1)...(19): siRNA sense strand
gucaacagauccgacuuug

SEQ ID NO: 1143110 - RNA, 19 nt, Homo sapiens
  misc_RNA (1)...(19): siRNA sense strand
cgucgucugucaaugaugu

SEQ ID NO: 1143111 - RNA, 19 nt, Homo sapiens
  misc_RNA (1)...(19): siRNA sense strand
gcucucagcauccaucauc

SEQ ID NO: 1143112 - RNA, 19 nt, Homo sapiens
  misc_RNA (1)...(19): siRNA sense strand
ccuagaagaauuucaagau

SEQ ID NO: 1143113 - RNA, 19 nt, Homo sapiens
  misc_RNA (1)...(19): siRNA sense strand
cagaagcuccaccaccaaa

SEQ ID NO: 1143114 - RNA, 19 nt, Homo sapiens
  misc_RNA (1)...(19): siRNA sense strand
gaacagcuuggaacaccau

SEQ ID NO: 1143115 - RNA, 19 nt, Homo sapiens
  misc_RNA (1)...(19): siRNA sense strand
agaguggaaagaauugaua

SEQ ID NO: 1143116 - RNA, 19 nt, Homo sapiens
  misc_RNA (1)...(19): siRNA sense strand
ggagcuagaucaugaaaga

SEQ ID NO: 1143117 - RNA, 19 nt, Homo sapiens
  misc_RNA (1)...(19): siRNA sense strand
gagaaacucuucccugaug

SEQ ID NO: 1143118 - RNA, 19 nt, Homo sapiens
  misc_RNA (1)...(19): siRNA sense strand
ucacaguccugaaacgaua

SEQ ID NO: 1143119 - RNA, 19 nt, Homo sapiens
  misc_RNA (1)...(19): siRNA sense strand
ugaaagaaauguugcaauc

SEQ ID NO: 1143120 - RNA, 19 nt, Homo sapiens
  misc_RNA (1)...(19): siRNA sense strand
gauuggagauucuacauuc

SEQ ID NO: 1143121 - RNA, 19 nt, Homo sapiens
  misc_RNA (1)...(19): siRNA sense strand
agaaaucccuagaagaauu

SEQ ID NO: 1143122 - RNA, 19 nt, Homo sapiens
  misc_RNA (1)...(19): siRNA sense strand
ggauauagcuuugagaaac

SEQ ID NO: 1143123 - RNA, 19 nt, Homo sapiens
  misc_RNA (1)...(19): siRNA sense strand
gaagcuaagccgaccauuu

SEQ ID NO: 1143124 - RNA, 19 nt, Homo sapiens
  misc_RNA (1)...(19): siRNA sense strand
gaacacaacaaacuuaaag

SEQ ID NO: 1143125 - RNA, 19 nt, Homo sapiens
  misc_RNA (1)...(19): siRNA sense strand
gcucauggaugcaaaucuu

SEQ ID NO: 1143126 - RNA, 19 nt, Homo sapiens
  misc_RNA (1)...(19): siRNA sense strand
acagagagcuaguucuuau

SEQ ID NO: 1143127 - RNA, 19 nt, Homo sapiens
  misc_RNA (1)...(19): siRNA sense strand
gaagcaagcgugacaacaa

SEQ ID NO: 1143128 - RNA, 19 nt, Homo sapiens
  misc_RNA (1)...(19): siRNA sense strand
ucaaugaugugucuucaau

SEQ ID NO: 1143129 - RNA, 19 nt, Homo sapiens
  misc_RNA (1)...(19): siRNA sense strand
ccacagaaaucccuagaag

SEQ ID NO: 1143130 - RNA, 19 nt, Homo sapiens
  misc_RNA (1)...(19): siRNA sense strand
cucaggagcucaaggaaua

SEQ ID NO: 1143131 - RNA, 19 nt, Homo sapiens
  misc_RNA (1)...(19): siRNA sense strand
gaugacgccuuauguagug

SEQ ID NO: 1143132 - RNA, 19 nt, Homo sapiens
  misc_RNA (1)...(19): siRNA sense strand
gaucaguggaauaaaguua

SEQ ID NO: 1143133 - RNA, 19 nt, Homo sapiens
  misc_RNA (1)...(19): siRNA sense strand
ugaaagggaacacacaaua

SEQ ID NO: 1143134 - RNA, 19 nt, Homo sapiens
  misc_RNA (1)...(19): siRNA sense strand
acagaaaucccuagaagaa

SEQ ID NO: 1143135 - RNA, 19 nt, Homo sapiens
  misc_RNA (1)...(19): siRNA sense strand
gacaagcaguuagaugaaa

SEQ ID NO: 1143136 - RNA, 19 nt, Homo sapiens
  misc_RNA (1)...(19): siRNA sense strand
ggaacaccauguccugaau

SEQ ID NO: 1143137 - RNA, 19 nt, Homo sapiens
  misc_RNA (1)...(19): siRNA sense strand
caccaaagaucccugacaa

SEQ ID NO: 1143138 - RNA, 19 nt, Homo sapiens
  misc_RNA (1)...(19): siRNA sense strand
agauggagcuagaucauga

SEQ ID NO: 1143139 - RNA, 19 nt, Homo sapiens
  misc_RNA (1)...(19): siRNA sense strand
aaccaagaauggaguuaua

SEQ ID NO: 1143140 - RNA, 19 nt, Homo sapiens
  misc_RNA (1)...(19): siRNA sense strand
gaaagggaacacacaauag

SEQ ID NO: 1143141 - RNA, 19 nt, Homo sapiens
  misc_RNA (1)...(19): siRNA sense strand
ggaacgaguuuuaugauga

SEQ ID NO: 1143142 - RNA, 19 nt, Homo sapiens
  misc_RNA (1)...(19): siRNA sense strand
gcaagcgugacaacaauuu

SEQ ID NO: 1143143 - RNA, 19 nt, Homo sapiens
  misc_RNA (1)...(19): siRNA sense strand
ucagaacacaacaaacuua

SEQ ID NO: 1143144 - RNA, 19 nt, Homo sapiens
  misc_RNA (1)...(19): siRNA sense strand
gaaaacagaccuaaauaug

SEQ ID NO: 1143145 - RNA, 19 nt, Homo sapiens
  misc_RNA (1)...(19): siRNA sense strand
gaaauguugcaaucaagaa

SEQ ID NO: 1143146 - RNA, 19 nt, Homo sapiens
  misc_RNA (1)...(19): siRNA sense strand
cuagaagaauuucaagaug

SEQ ID NO: 1143147 - RNA, 19 nt, Homo sapiens
  misc_RNA (1)...(19): siRNA sense strand
gaaagaaauguugcaauca

SEQ ID NO: 1143148 - RNA, 19 nt, Homo sapiens
  misc_RNA (1)...(19): siRNA sense strand
aaacagaccuaaauaugcu

SEQ ID NO: 1143149 - RNA, 19 nt, Homo sapiens
  misc_RNA (1)...(19): siRNA sense strand
gacuuaaagcccaguaaua

SEQ ID NO: 1143150 - RNA, 19 nt, Homo sapiens
  misc_RNA (1)...(19): siRNA sense strand
gcccaguaauauaguagua

SEQ ID NO: 1143151 - RNA, 19 nt, Homo sapiens
  misc_RNA (1)...(19): siRNA sense strand
gaggagagaaccaagaaug

SEQ ID NO: 1143152 - RNA, 19 nt, Homo sapiens
  misc_RNA (1)...(19): siRNA sense strand
caacacccguacaucaaug

SEQ ID NO: 1143153 - RNA, 19 nt, Homo sapiens
  misc_RNA (1)...(19): siRNA sense strand
agagcuaguucuuaugaaa

SEQ ID NO: 1143154 - RNA, 19 nt, Homo sapiens
  misc_RNA (1)...(19): siRNA sense strand
ggcaugggcuacaaggaaa

SEQ ID NO: 1143155 - RNA, 19 nt, Homo sapiens
  misc_RNA (1)...(19): siRNA sense strand
ggaaucaagcaccuucauu

SEQ ID NO: 1143156 - RNA, 19 nt, Homo sapiens
  misc_RNA (1)...(19): siRNA sense strand
uguccuaccuucucuauca

SEQ ID NO: 1143157 - RNA, 19 nt, Homo sapiens
  misc_RNA (1)...(19): siRNA sense strand
ggaauaguaugcgcagcuu

SEQ ID NO: 1143158 - RNA, 19 nt, Homo sapiens
  misc_RNA (1)...(19): siRNA sense strand
gaacaccauguccugaauu

SEQ ID NO: 1143159 - RNA, 19 nt, Homo sapiens
  misc_RNA (1)...(19): siRNA sense strand
gaagaaacugcaaccaaca

SEQ ID NO: 1143160 - RNA, 19 nt, Homo sapiens
  misc_RNA (1)...(19): siRNA sense strand
ccucugggcugcuguagau

SEQ ID NO: 1143161 - RNA, 19 nt, Homo sapiens
  misc_RNA (1)...(19): siRNA sense strand
gaaccaagaauggaguuau

SEQ ID NO: 1143162 - RNA, 19 nt, Homo sapiens
  misc_RNA (1)...(19): siRNA sense strand
ccaaaaugcugguaauaga

SEQ ID NO: 1143163 - RNA, 19 nt, Homo sapiens
  misc_RNA (1)...(19): siRNA sense strand
gauauagcuuugagaaacu

SEQ ID NO: 1143164 - RNA, 19 nt, Homo sapiens
  misc_RNA (1)...(19): siRNA sense strand
gcuagaucaugaaagaaug

SEQ ID NO: 1143165 - RNA, 19 nt, Homo sapiens
  misc_RNA (1)...(19): siRNA sense strand
ugaugugucuucaauguca

SEQ ID NO: 1143166 - RNA, 19 nt, Homo sapiens
  misc_RNA (1)...(19): siRNA sense strand
ggacuuaaagcccaguaau

SEQ ID NO: 1143167 - RNA, 19 nt, Homo sapiens
  misc_RNA (1)...(19): siRNA sense strand
gaagcuccaccaccaaaga

SEQ ID NO: 1143168 - RNA, 19 nt, Homo sapiens
  misc_RNA (1)...(19): siRNA sense strand
guccugaauucaugaagaa

SEQ ID NO: 1143169 - RNA, 19 nt, Homo sapiens
  misc_RNA (1)...(19): siRNA sense strand
gagagcuaguucuuaugaa

SEQ ID NO: 1143170 - RNA, 19 nt, Homo sapiens
  misc_RNA (1)...(19): siRNA sense strand
aaugaugugucuucaaugu

SEQ ID NO: 1143171 - RNA, 19 nt, Homo sapiens
  misc_RNA (1)...(19): siRNA sense strand
uagaagaguggaaagaauu

SEQ ID NO: 1143172 - RNA, 19 nt, Homo sapiens
  misc_RNA (1)...(19): siRNA sense strand
ggacugcaggaacgaguuu

SEQ ID NO: 1143173 - RNA, 19 nt, Homo sapiens
  misc_RNA (1)...(19): siRNA sense strand
gugcagcagugaucaaugg

SEQ ID NO: 1143174 - RNA, 19 nt, Homo sapiens
  misc_RNA (1)...(19): siRNA sense strand
aagcuaagccgaccauuuc

SEQ ID NO: 1143175 - RNA, 19 nt, Homo sapiens
  misc_RNA (1)...(19): siRNA sense strand
ggagagaaccaagaaugga

SEQ ID NO: 1143176 - RNA, 19 nt, Homo sapiens
  misc_RNA (1)...(19): siRNA sense strand
ugacucagaacacaacaaa

SEQ ID NO: 1143177 - RNA, 19 nt, Homo sapiens
  misc_RNA (1)...(19): siRNA sense strand
ugauugcacuuugaagauu

SEQ ID NO: 1143178 - RNA, 19 nt, Homo sapiens
  misc_RNA (1)...(19): siRNA sense strand
gccaagugauucagaugga

SEQ ID NO: 1143179 - RNA, 19 nt, Homo sapiens
  misc_RNA (1)...(19): siRNA sense strand
aaagggaacacacaauaga

SEQ ID NO: 1143180 - RNA, 19 nt, Homo sapiens
  misc_RNA (1)...(19): siRNA sense strand
gaauaguaugcgcagcuua

SEQ ID NO: 1143181 - RNA, 19 nt, Homo sapiens
  misc_RNA (1)...(19): siRNA sense strand
cagaacacaacaaacuuaa

SEQ ID NO: 1143182 - RNA, 19 nt, Homo sapiens
  misc_RNA (1)...(19): siRNA sense strand
cuuaaagcccaguaauaua

SEQ ID NO: 1143183 - RNA, 19 nt, Homo sapiens
  misc_RNA (1)...(19): siRNA sense strand
uaucagaugcuguguggaa

SEQ ID NO: 1143184 - RNA, 19 nt, Homo sapiens
  misc_RNA (1)...(19): siRNA sense strand
uuaaagcccaguaauauag

SEQ ID NO: 1143185 - RNA, 19 nt, Homo sapiens
  misc_RNA (1)...(19): siRNA sense strand
caucgucgucugucaauga

SEQ ID NO: 1143186 - RNA, 19 nt, Homo sapiens
  misc_RNA (1)...(19): siRNA sense strand
gaacacacaauagaagagu

SEQ ID NO: 1143187 - RNA, 19 nt, Homo sapiens
  misc_RNA (1)...(19): siRNA sense strand
ucaggcaagggauuuguua

SEQ ID NO: 1143188 - RNA, 19 nt, Homo sapiens
  misc_RNA (1)...(19): siRNA sense strand
gaccuaaauaugcuggaua

SEQ ID NO: 1143189 - RNA, 19 nt, Homo sapiens
  misc_RNA (1)...(19): siRNA sense strand
cuacagagagcuaguucuu

SEQ ID NO: 1143190 - RNA, 19 nt, Homo sapiens
  misc_RNA (1)...(19): siRNA sense strand
gaugaaagggaacacacaa

SEQ ID NO: 1143191 - RNA, 19 nt, Homo sapiens
  misc_RNA (1)...(19): siRNA sense strand
guguagagauuggagauuc

SEQ ID NO: 1143192 - RNA, 19 nt, Homo sapiens
  misc_RNA (1)...(19): siRNA sense strand
gauugcacuuugaagauuc

SEQ ID NO: 1143193 - RNA, 19 nt, Homo sapiens
  misc_RNA (1)...(19): siRNA sense strand
aagcaagcgugacaacaau

SEQ ID NO: 1143194 - RNA, 19 nt, Homo sapiens
  misc_RNA (1)...(19): siRNA sense strand
aaagcccaguaauauagua

SEQ ID NO: 1143195 - RNA, 19 nt, Homo sapiens
  misc_RNA (1)...(19): siRNA sense strand
uaugaugacgccuuaugua

SEQ ID NO: 1143196 - RNA, 19 nt, Homo sapiens
  misc_RNA (1)...(19): siRNA sense strand
gagcuaguucuuaugaaau

SEQ ID NO: 1143197 - RNA, 19 nt, Homo sapiens
  misc_RNA (1)...(19): siRNA sense strand
ugucuucaaugucaacaga

SEQ ID NO: 1143198 - RNA, 19 nt, Homo sapiens
  misc_RNA (1)...(19): siRNA sense strand
uaugaugccauucuugaaa

SEQ ID NO: 1143199 - RNA, 19 nt, Homo sapiens
  misc_RNA (1)...(19): siRNA sense strand
ugauucagauggagcuaga

SEQ ID NO: 1143200 - RNA, 19 nt, Homo sapiens
  misc_RNA (1)...(19): siRNA sense strand
gaagaguggaaagaauuga

SEQ ID NO: 1143201 - RNA, 19 nt, Homo sapiens
  misc_RNA (1)...(19): siRNA sense strand
auagaagaguggaaagaau

SEQ ID NO: 1143202 - RNA, 19 nt, Homo sapiens
  misc_RNA (1)...(19): siRNA sense strand
ggacuuacguugaaaacag

SEQ ID NO: 1143203 - RNA, 19 nt, Homo sapiens
  misc_RNA (1)...(19): siRNA sense strand
cagaugcuguguggaauca

SEQ ID NO: 1143204 - RNA, 19 nt, Homo sapiens
  misc_RNA (1)...(19): siRNA sense strand
agagagcuaguucuuauga

SEQ ID NO: 1143205 - RNA, 19 nt, Homo sapiens
  misc_RNA (1)...(19): siRNA sense strand
gggaacacacaauagaaga

SEQ ID NO: 1143206 - RNA, 19 nt, Homo sapiens
  misc_RNA (1)...(19): siRNA sense strand
ugacaagcaguuagaugaa

SEQ ID NO: 1143207 - RNA, 19 nt, Homo sapiens
  misc_RNA (1)...(19): siRNA sense strand
caaagaucccugacaagca

SEQ ID NO: 1143208 - RNA, 19 nt, Homo sapiens
  misc_RNA (1)...(19): siRNA sense strand
caauagaagaguggaaaga

SEQ ID NO: 1143209 - RNA, 19 nt, Homo sapiens
  misc_RNA (1)...(19): siRNA sense strand
gucaacagauccgacuuug

SEQ ID NO: 1143210 - RNA, 19 nt, Homo sapiens
  misc_RNA (1)...(19): siRNA sense strand
cgucgucugucaaugaugu

SEQ ID NO: 1143211 - RNA, 19 nt, Homo sapiens
  misc_RNA (1)...(19): siRNA sense strand
gcucucagcauccaucauc

SEQ ID NO: 1143212 - RNA, 19 nt, Homo sapiens
  misc_RNA (1)...(19): siRNA sense strand
ccuagaagaauuucaagau

SEQ ID NO: 1143213 - RNA, 19 nt, Homo sapiens
  misc_RNA (1)...(19): siRNA sense strand
cagaagcuccaccaccaaa

SEQ ID NO: 1143214 - RNA, 19 nt, Homo sapiens
  misc_RNA (1)...(19): siRNA sense strand
gaacagcuuggaacaccau

SEQ ID NO: 1143215 - RNA, 19 nt, Homo sapiens
  misc_RNA (1)...(19): siRNA sense strand
agaguggaaagaauugaua

SEQ ID NO: 1143216 - RNA, 19 nt, Homo sapiens
  misc_RNA (1)...(19): siRNA sense strand
gcaaagaacuuccaccauu

SEQ ID NO: 1143217 - RNA, 19 nt, Homo sapiens
  misc_RNA (1)...(19): siRNA sense strand
uaaaggagauaguccauua

SEQ ID NO: 1143218 - RNA, 19 nt, Homo sapiens
  misc_RNA (1)...(19): siRNA sense strand
gaacaacacugaucaucug

SEQ ID NO: 1143219 - RNA, 19 nt, Homo sapiens
  misc_RNA (1)...(19): siRNA sense strand
ggagauaguccauuacaua

SEQ ID NO: 1143220 - RNA, 19 nt, Homo sapiens
  misc_RNA (1)...(19): siRNA sense strand
ccagaugacuuucuaacua

SEQ ID NO: 1143221 - RNA, 19 nt, Homo sapiens
  misc_RNA (1)...(19): siRNA sense strand
gaagcaggaucuccaacua

SEQ ID NO: 1143222 - RNA, 19 nt, Homo sapiens
  misc_RNA (1)...(19): siRNA sense strand
gcagaccucuuccuauuga

SEQ ID NO: 1143223 - RNA, 19 nt, Homo sapiens
  misc_RNA (1)...(19): siRNA sense strand
aaagaagaaucccaacaua

SEQ ID NO: 1143224 - RNA, 19 nt, Homo sapiens
  misc_RNA (1)...(19): siRNA sense strand
caauuugccuggauucuuu

SEQ ID NO: 1143225 - RNA, 19 nt, Homo sapiens
  misc_RNA (1)...(19): siRNA sense strand
gauagagaaugguggcaua

SEQ ID NO: 1143226 - RNA, 19 nt, Homo sapiens
  misc_RNA (1)...(19): siRNA sense strand
caacauuccugucuuuaau

SEQ ID NO: 1143227 - RNA, 19 nt, Homo sapiens
  misc_RNA (1)...(19): siRNA sense strand
gaagaucagugcuuugaca

SEQ ID NO: 1143228 - RNA, 19 nt, Homo sapiens
  misc_RNA (1)...(19): siRNA sense strand
gaaccggccuuacuuucaa

SEQ ID NO: 1143229 - RNA, 19 nt, Homo sapiens
  misc_RNA (1)...(19): siRNA sense strand
gaugaggaaugugcaauuu

SEQ ID NO: 1143230 - RNA, 19 nt, Homo sapiens
  misc_RNA (1)...(19): siRNA sense strand
ggaccaagcuauaguaugc

SEQ ID NO: 1143231 - RNA, 19 nt, Homo sapiens
  misc_RNA (1)...(19): siRNA sense strand
gcagaaaugauauacauga

SEQ ID NO: 1143232 - RNA, 19 nt, Homo sapiens
  misc_RNA (1)...(19): siRNA sense strand
ggaaguacuugcagacugu

SEQ ID NO: 1143233 - RNA, 19 nt, Homo sapiens
  misc_RNA (1)...(19): siRNA sense strand
gcaagaaguuaucaucaca

SEQ ID NO: 1143234 - RNA, 19 nt, Homo sapiens
  misc_RNA (1)...(19): siRNA sense strand
gaugacaacugaacagcuu

SEQ ID NO: 1143235 - RNA, 19 nt, Homo sapiens
  misc_RNA (1)...(19): siRNA sense strand
caaagaacuuccaccauuc

SEQ ID NO: 1143236 - RNA, 19 nt, Homo sapiens
  misc_RNA (1)...(19): siRNA sense strand
gaaagaagauggguuuuga

SEQ ID NO: 1143237 - RNA, 19 nt, Homo sapiens
  misc_RNA (1)...(19): siRNA sense strand
gcaggagccuuuggaacua

SEQ ID NO: 1143238 - RNA, 19 nt, Homo sapiens
  misc_RNA (1)...(19): siRNA sense strand
aaaggacucuguugaagaa

SEQ ID NO: 1143239 - RNA, 19 nt, Homo sapiens
  misc_RNA (1)...(19): siRNA sense strand
gaaaugauacaccugaaga

SEQ ID NO: 1143240 - RNA, 19 nt, Homo sapiens
  misc_RNA (1)...(19): siRNA sense strand
uauagaagauguggcauuu

SEQ ID NO: 1143241 - RNA, 19 nt, Homo sapiens
  misc_RNA (1)...(19): siRNA sense strand
gagaaggaccgaccagaaa

SEQ ID NO: 1143242 - RNA, 19 nt, Homo sapiens
  misc_RNA (1)...(19): siRNA sense strand
gaaagaagaaucccaacau

SEQ ID NO: 1143243 - RNA, 19 nt, Homo sapiens
  misc_RNA (1)...(19): siRNA sense strand
agaaguagauuccguuuua

SEQ ID NO: 1143244 - RNA, 19 nt, Homo sapiens
  misc_RNA (1)...(19): siRNA sense strand
ggaaccagcugaggcuauu

SEQ ID NO: 1143245 - RNA, 19 nt, Homo sapiens
  misc_RNA (1)...(19): siRNA sense strand
ggaguugguuugaaucugu

SEQ ID NO: 1143246 - RNA, 19 nt, Homo sapiens
  misc_RNA (1)...(19): siRNA sense strand
gaaggcagagccacuauug

SEQ ID NO: 1143247 - RNA, 19 nt, Homo sapiens
  misc_RNA (1)...(19): siRNA sense strand
gcaggaucuucuaagguua

SEQ ID NO: 1143248 - RNA, 19 nt, Homo sapiens
  misc_RNA (1)...(19): siRNA sense strand
gaggagagaccaagaacaa

SEQ ID NO: 1143249 - RNA, 19 nt, Homo sapiens
  misc_RNA (1)...(19): siRNA sense strand
caaaugcagugucuuccaa

SEQ ID NO: 1143250 - RNA, 19 nt, Homo sapiens
  misc_RNA (1)...(19): siRNA sense strand
gaagagagaaagauuuauc

SEQ ID NO: 1143251 - RNA, 19 nt, Homo sapiens
  misc_RNA (1)...(19): siRNA sense strand
ggacuuaggcguuuacagu

SEQ ID NO: 1143252 - RNA, 19 nt, Homo sapiens
  misc_RNA (1)...(19): siRNA sense strand
ggacaugccauacgaaauc

SEQ ID NO: 1143253 - RNA, 19 nt, Homo sapiens
  misc_RNA (1)...(19): siRNA sense strand
caagagggauccaguuugg

SEQ ID NO: 1143254 - RNA, 19 nt, Homo sapiens
  misc_RNA (1)...(19): siRNA sense strand
agaagaaucccaacauaaa

SEQ ID NO: 1143255 - RNA, 19 nt, Homo sapiens
  misc_RNA (1)...(19): siRNA sense strand
caaauuuguugccauacuu

SEQ ID NO: 1143256 - RNA, 19 nt, Homo sapiens
  misc_RNA (1)...(19): siRNA sense strand
gcauuaacuucaucuguuc

SEQ ID NO: 1143257 - RNA, 19 nt, Homo sapiens
  misc_RNA (1)...(19): siRNA sense strand
caaguuggccauuuaaaga

SEQ ID NO: 1143258 - RNA, 19 nt, Homo sapiens
  misc_RNA (1)...(19): siRNA sense strand
acacgggaguaguuaauaa

SEQ ID NO: 1143259 - RNA, 19 nt, Homo sapiens
  misc_RNA (1)...(19): siRNA sense strand
ggauuuguguuuacucguu

SEQ ID NO: 1143260 - RNA, 19 nt, Homo sapiens
  misc_RNA (1)...(19): siRNA sense strand
uuacaacauuccugucuuu

SEQ ID NO: 1143261 - RNA, 19 nt, Homo sapiens
  misc_RNA (1)...(19): siRNA sense strand
gcagauguccugggucuuu

SEQ ID NO: 1143262 - RNA, 19 nt, Homo sapiens
  misc_RNA (1)...(19): siRNA sense strand
guacuccaauccagaauuc

SEQ ID NO: 1143263 - RNA, 19 nt, Homo sapiens
  misc_RNA (1)...(19): siRNA sense strand
gauaguccauuacauagca

SEQ ID NO: 1143264 - RNA, 19 nt, Homo sapiens
  misc_RNA (1)...(19): siRNA sense strand
aaacuuggaggaaacaaua

SEQ ID NO: 1143265 - RNA, 19 nt, Homo sapiens
  misc_RNA (1)...(19): siRNA sense strand
uggcagaccucuuccuauu

SEQ ID NO: 1143266 - RNA, 19 nt, Homo sapiens
  misc_RNA (1)...(19): siRNA sense strand
gacaacaaauuggcacaaa

SEQ ID NO: 1143267 - RNA, 19 nt, Homo sapiens
  misc_RNA (1)...(19): siRNA sense strand
guaaaggacucuguugaag

SEQ ID NO: 1143268 - RNA, 19 nt, Homo sapiens
  misc_RNA (1)...(19): siRNA sense strand
caagugaauugccgcagaa

SEQ ID NO: 1143269 - RNA, 19 nt, Homo sapiens
  misc_RNA (1)...(19): siRNA sense strand
gagaaagauuuaucagucu

SEQ ID NO: 1143270 - RNA, 19 nt, Homo sapiens
  misc_RNA (1)...(19): siRNA sense strand
ugacuuagaaucagaaaga

SEQ ID NO: 1143271 - RNA, 19 nt, Homo sapiens
  misc_RNA (1)...(19): siRNA sense strand
gaucagugcuuugacagau

SEQ ID NO: 1143272 - RNA, 19 nt, Homo sapiens
  misc_RNA (1)...(19): siRNA sense strand
cguuuacagucccuaauua

SEQ ID NO: 1143273 - RNA, 19 nt, Homo sapiens
  misc_RNA (1)...(19): siRNA sense strand
caacuuucuuuccacguuu

SEQ ID NO: 1143274 - RNA, 19 nt, Homo sapiens
  misc_RNA (1)...(19): siRNA sense strand
gaagaaguagauuccguuu

SEQ ID NO: 1143275 - RNA, 19 nt, Homo sapiens
  misc_RNA (1)...(19): siRNA sense strand
ggucagaagcaagaaguua

SEQ ID NO: 1143276 - RNA, 19 nt, Homo sapiens
  misc_RNA (1)...(19): siRNA sense strand
cugaagaacugagaaagaa

SEQ ID NO: 1143277 - RNA, 19 nt, Homo sapiens
  misc_RNA (1)...(19): siRNA sense strand
gaugaagagagaaagauuu

SEQ ID NO: 1143278 - RNA, 19 nt, Homo sapiens
  misc_RNA (1)...(19): siRNA sense strand
ggaugaaggacaugccaua

SEQ ID NO: 1143279 - RNA, 19 nt, Homo sapiens
  misc_RNA (1)...(19): siRNA sense strand
ggaaacaauaccagugaaa

SEQ ID NO: 1143280 - RNA, 19 nt, Homo sapiens
  misc_RNA (1)...(19): siRNA sense strand
gauguuaucccuccagaug

SEQ ID NO: 1143281 - RNA, 19 nt, Homo sapiens
  misc_RNA (1)...(19): siRNA sense strand
cgggaguaguuaauaauaa

SEQ ID NO: 1143282 - RNA, 19 nt, Homo sapiens
  misc_RNA (1)...(19): siRNA sense strand
gaggaaacaauaccaguga

SEQ ID NO: 1143283 - RNA, 19 nt, Homo sapiens
  misc_RNA (1)...(19): siRNA sense strand
guauggaguucauggaaau

SEQ ID NO: 1143284 - RNA, 19 nt, Homo sapiens
  misc_RNA (1)...(19): siRNA sense strand
uaaagccucuggauuugug

SEQ ID NO: 1143285 - RNA, 19 nt, Homo sapiens
  misc_RNA (1)...(19): siRNA sense strand
ggagaugaaggaggacuua

SEQ ID NO: 1143286 - RNA, 19 nt, Homo sapiens
  misc_RNA (1)...(19): siRNA sense strand
ugaaggacaugccauacga

SEQ ID NO: 1143287 - RNA, 19 nt, Homo sapiens
  misc_RNA (1)...(19): siRNA sense strand
gacauccaguucaaagauu

SEQ ID NO: 1143288 - RNA, 19 nt, Homo sapiens
  misc_RNA (1)...(19): siRNA sense strand
acauuacacuuucagauga

SEQ ID NO: 1143289 - RNA, 19 nt, Homo sapiens
  misc_RNA (1)...(19): siRNA sense strand
ucagaaagaagauggguuu

SEQ ID NO: 1143290 - RNA, 19 nt, Homo sapiens
  misc_RNA (1)...(19): siRNA sense strand
cagaggaaauugaaacaag

SEQ ID NO: 1143291 - RNA, 19 nt, Homo sapiens
  misc_RNA (1)...(19): siRNA sense strand
agaauguccuccagaagaa

SEQ ID NO: 1143292 - RNA, 19 nt, Homo sapiens
  misc_RNA (1)...(19): siRNA sense strand
gcgaaaugacuuauacuau

SEQ ID NO: 1143293 - RNA, 19 nt, Homo sapiens
  misc_RNA (1)...(19): siRNA sense strand
gaagcaagaaguuaucauc

SEQ ID NO: 1143294 - RNA, 19 nt, Homo sapiens
  misc_RNA (1)...(19): siRNA sense strand
uauaaugcuucuguccuua

SEQ ID NO: 1143295 - RNA, 19 nt, Homo sapiens
  misc_RNA (1)...(19): siRNA sense strand
ggacauccaguucaaagau

SEQ ID NO: 1143296 - RNA, 19 nt, Homo sapiens
  misc_RNA (1)...(19): siRNA sense strand
gaagaacaaagacaagcaa

SEQ ID NO: 1143297 - RNA, 19 nt, Homo sapiens
  misc_RNA (1)...(19): siRNA sense strand
gcagauggacuaagcaaag

SEQ ID NO: 1143298 - RNA, 19 nt, Homo sapiens
  misc_RNA (1)...(19): siRNA sense strand
uaacgaugacucuaugaaa

SEQ ID NO: 1143299 - RNA, 19 nt, Homo sapiens
  misc_RNA (1)...(19): siRNA sense strand
uuacaacgagauccuaaua

SEQ ID NO: 1143300 - RNA, 19 nt, Homo sapiens
  misc_RNA (1)...(19): siRNA sense strand
ugccauacuuaccuucuua

SEQ ID NO: 1143301 - RNA, 19 nt, Homo sapiens
  misc_RNA (1)...(19): siRNA sense strand
acacuuagaagaacaaaga

SEQ ID NO: 1143302 - RNA, 19 nt, Homo sapiens
  misc_RNA (1)...(19): siRNA sense strand
agagaaugguggcauagaa

SEQ ID NO: 1143303 - RNA, 19 nt, Homo sapiens
  misc_RNA (1)...(19): siRNA sense strand
cagaugacuuucuaacuag

SEQ ID NO: 1143304 - RNA, 19 nt, Homo sapiens
  misc_RNA (1)...(19): siRNA sense strand
aaucagauguacacuugaa

SEQ ID NO: 1143305 - RNA, 19 nt, Homo sapiens
  misc_RNA (1)...(19): siRNA sense strand
ggaacagcgaaaugacuua

SEQ ID NO: 1143306 - RNA, 19 nt, Homo sapiens
  misc_RNA (1)...(19): siRNA sense strand
cagaucaguugaagaaaca

SEQ ID NO: 1143307 - RNA, 19 nt, Homo sapiens
  misc_RNA (1)...(19): siRNA sense strand
uaucauggacaacaaauug

SEQ ID NO: 1143308 - RNA, 19 nt, Homo sapiens
  misc_RNA (1)...(19): siRNA sense strand
agcaggaucuccaacuaua

SEQ ID NO: 1143309 - RNA, 19 nt, Homo sapiens
  misc_RNA (1)...(19): siRNA sense strand
cgcauugacugacuuaaga

SEQ ID NO: 1143310 - RNA, 19 nt, Homo sapiens
  misc_RNA (1)...(19): siRNA sense strand
gcacgcauugacugacuua

SEQ ID NO: 1143311 - RNA, 19 nt, Homo sapiens
  misc_RNA (1)...(19): siRNA sense strand
caacccaguauuucagaua

SEQ ID NO: 1143312 - RNA, 19 nt, Homo sapiens
  misc_RNA (1)...(19): siRNA sense strand
gagccacuauuggaaggua

SEQ ID NO: 1143313 - RNA, 19 nt, Homo sapiens
  misc_RNA (1)...(19): siRNA sense strand
aaaguuugguuguuucuca

SEQ ID NO: 1143314 - RNA, 19 nt, Homo sapiens
  misc_RNA (1)...(19): siRNA sense strand
acauccaguucaaagauua

SEQ ID NO: 1143315 - RNA, 19 nt, Homo sapiens
  misc_RNA (1)...(19): siRNA sense strand
ccacgccucucauauccaa

SEQ ID NO: 1143316 - RNA, 19 nt, Homo sapiens
  misc_RNA (1)...(19): siRNA sense strand
gcaaagaacuuccaccauu

SEQ ID NO: 1143317 - RNA, 19 nt, Homo sapiens
  misc_RNA (1)...(19): siRNA sense strand
uaaaggagauaguccauua

SEQ ID NO: 1143318 - RNA, 19 nt, Homo sapiens
  misc_RNA (1)...(19): siRNA sense strand
gaacaacacugaucaucug

SEQ ID NO: 1143319 - RNA, 19 nt, Homo sapiens
  misc_RNA (1)...(19): siRNA sense strand
ggagauaguccauuacaua

SEQ ID NO: 1143320 - RNA, 19 nt, Homo sapiens
  misc_RNA (1)...(19): siRNA sense strand
ccagaugacuuucuaacua

SEQ ID NO: 1143321 - RNA, 19 nt, Homo sapiens
  misc_RNA (1)...(19): siRNA sense strand
gaagcaggaucuccaacua

SEQ ID NO: 1143322 - RNA, 19 nt, Homo sapiens
  misc_RNA (1)...(19): siRNA sense strand
gcagaccucuuccuauuga

SEQ ID NO: 1143323 - RNA, 19 nt, Homo sapiens
  misc_RNA (1)...(19): siRNA sense strand
aaagaagaaucccaacaua

SEQ ID NO: 1143324 - RNA, 19 nt, Homo sapiens
  misc_RNA (1)...(19): siRNA sense strand
caauuugccuggauucuuu

SEQ ID NO: 1143325 - RNA, 19 nt, Homo sapiens
  misc_RNA (1)...(19): siRNA sense strand
gauagagaaugguggcaua

SEQ ID NO: 1143326 - RNA, 19 nt, Homo sapiens
  misc_RNA (1)...(19): siRNA sense strand
caacauuccugucuuuaau

SEQ ID NO: 1143327 - RNA, 19 nt, Homo sapiens
  misc_RNA (1)...(19): siRNA sense strand
gaagaucagugcuuugaca

SEQ ID NO: 1143328 - RNA, 19 nt, Homo sapiens
  misc_RNA (1)...(19): siRNA sense strand
gaaccggccuuacuuucaa

SEQ ID NO: 1143329 - RNA, 19 nt, Homo sapiens
  misc_RNA (1)...(19): siRNA sense strand
gaugaggaaugugcaauuu

SEQ ID NO: 1143330 - RNA, 19 nt, Homo sapiens
  misc_RNA (1)...(19): siRNA sense strand
ggaccaagcuauaguaugc

SEQ ID NO: 1143331 - RNA, 19 nt, Homo sapiens
  misc_RNA (1)...(19): siRNA sense strand
gcagaaaugauauacauga

SEQ ID NO: 1143332 - RNA, 19 nt, Homo sapiens
  misc_RNA (1)...(19): siRNA sense strand
ggaaguacuugcagacugu

SEQ ID NO: 1143333 - RNA, 19 nt, Homo sapiens
  misc_RNA (1)...(19): siRNA sense strand
gcaagaaguuaucaucaca

SEQ ID NO: 1143334 - RNA, 19 nt, Homo sapiens
  misc_RNA (1)...(19): siRNA sense strand
gaugacaacugaacagcuu

SEQ ID NO: 1143335 - RNA, 19 nt, Homo sapiens
  misc_RNA (1)...(19): siRNA sense strand
caaagaacuuccaccauuc

SEQ ID NO: 1143336 - RNA, 19 nt, Homo sapiens
  misc_RNA (1)...(19): siRNA sense strand
gaaagaagauggguuuuga

SEQ ID NO: 1143337 - RNA, 19 nt, Homo sapiens
  misc_RNA (1)...(19): siRNA sense strand
gcaggagccuuuggaacua

SEQ ID NO: 1143338 - RNA, 19 nt, Homo sapiens
  misc_RNA (1)...(19): siRNA sense strand
aaaggacucuguugaagaa

SEQ ID NO: 1143339 - RNA, 19 nt, Homo sapiens
  misc_RNA (1)...(19): siRNA sense strand
gaaaugauacaccugaaga

SEQ ID NO: 1143340 - RNA, 19 nt, Homo sapiens
  misc_RNA (1)...(19): siRNA sense strand
uauagaagauguggcauuu

SEQ ID NO: 1143341 - RNA, 19 nt, Homo sapiens
  misc_RNA (1)...(19): siRNA sense strand
gagaaggaccgaccagaaa

SEQ ID NO: 1143342 - RNA, 19 nt, Homo sapiens
  misc_RNA (1)...(19): siRNA sense strand
gaaagaagaaucccaacau

SEQ ID NO: 1143343 - RNA, 19 nt, Homo sapiens
  misc_RNA (1)...(19): siRNA sense strand
agaaguagauuccguuuua

SEQ ID NO: 1143344 - RNA, 19 nt, Homo sapiens
  misc_RNA (1)...(19): siRNA sense strand
ggaaccagcugaggcuauu

SEQ ID NO: 1143345 - RNA, 19 nt, Homo sapiens
  misc_RNA (1)...(19): siRNA sense strand
ggaguugguuugaaucugu

SEQ ID NO: 1143346 - RNA, 19 nt, Homo sapiens
  misc_RNA (1)...(19): siRNA sense strand
gaaggcagagccacuauug

SEQ ID NO: 1143347 - RNA, 19 nt, Homo sapiens
  misc_RNA (1)...(19): siRNA sense strand
gcaggaucuucuaagguua

SEQ ID NO: 1143348 - RNA, 19 nt, Homo sapiens
  misc_RNA (1)...(19): siRNA sense strand
gaggagagaccaagaacaa

SEQ ID NO: 1143349 - RNA, 19 nt, Homo sapiens
  misc_RNA (1)...(19): siRNA sense strand
caaaugcagugucuuccaa

SEQ ID NO: 1143350 - RNA, 19 nt, Homo sapiens
  misc_RNA (1)...(19): siRNA sense strand
gaagagagaaagauuuauc

SEQ ID NO: 1143351 - RNA, 19 nt, Homo sapiens
  misc_RNA (1)...(19): siRNA sense strand
ggacuuaggcguuuacagu

SEQ ID NO: 1143352 - RNA, 19 nt, Homo sapiens
  misc_RNA (1)...(19): siRNA sense strand
ggacaugccauacgaaauc

SEQ ID NO: 1143353 - RNA, 19 nt, Homo sapiens
  misc_RNA (1)...(19): siRNA sense strand
caagagggauccaguuugg

SEQ ID NO: 1143354 - RNA, 19 nt, Homo sapiens
  misc_RNA (1)...(19): siRNA sense strand
agaagaaucccaacauaaa

SEQ ID NO: 1143355 - RNA, 19 nt, Homo sapiens
  misc_RNA (1)...(19): siRNA sense strand
caaauuuguugccauacuu

SEQ ID NO: 1143356 - RNA, 19 nt, Homo sapiens
  misc_RNA (1)...(19): siRNA sense strand
gcauuaacuucaucuguuc

SEQ ID NO: 1143357 - RNA, 19 nt, Homo sapiens
  misc_RNA (1)...(19): siRNA sense strand
caaguuggccauuuaaaga

SEQ ID NO: 1143358 - RNA, 19 nt, Homo sapiens
  misc_RNA (1)...(19): siRNA sense strand
acacgggaguaguuaauaa

SEQ ID NO: 1143359 - RNA, 19 nt, Homo sapiens
  misc_RNA (1)...(19): siRNA sense strand
ggauuuguguuuacucguu

SEQ ID NO: 1143360 - RNA, 19 nt, Homo sapiens
  misc_RNA (1)...(19): siRNA sense strand
uuacaacauuccugucuuu

SEQ ID NO: 1143361 - RNA, 19 nt, Homo sapiens
  misc_RNA (1)...(19): siRNA sense strand
gcagauguccugggucuuu

SEQ ID NO: 1143362 - RNA, 19 nt, Homo sapiens
  misc_RNA (1)...(19): siRNA sense strand
guacuccaauccagaauuc

SEQ ID NO: 1143363 - RNA, 19 nt, Homo sapiens
  misc_RNA (1)...(19): siRNA sense strand
gauaguccauuacauagca

SEQ ID NO: 1143364 - RNA, 19 nt, Homo sapiens
  misc_RNA (1)...(19): siRNA sense strand
aaacuuggaggaaacaaua

SEQ ID NO: 1143365 - RNA, 19 nt, Homo sapiens
  misc_RNA (1)...(19): siRNA sense strand
uggcagaccucuuccuauu

SEQ ID NO: 1143366 - RNA, 19 nt, Homo sapiens
  misc_RNA (1)...(19): siRNA sense strand
gacaacaaauuggcacaaa

SEQ ID NO: 1143367 - RNA, 19 nt, Homo sapiens
  misc_RNA (1)...(19): siRNA sense strand
guaaaggacucuguugaag

SEQ ID NO: 1143368 - RNA, 19 nt, Homo sapiens
  misc_RNA (1)...(19): siRNA sense strand
caagugaauugccgcagaa

SEQ ID NO: 1143369 - RNA, 19 nt, Homo sapiens
  misc_RNA (1)...(19): siRNA sense strand
gagaaagauuuaucagucu

SEQ ID NO: 1143370 - RNA, 19 nt, Homo sapiens
  misc_RNA (1)...(19): siRNA sense strand
ugacuuagaaucagaaaga

SEQ ID NO: 1143371 - RNA, 19 nt, Homo sapiens
  misc_RNA (1)...(19): siRNA sense strand
gaucagugcuuugacagau

SEQ ID NO: 1143372 - RNA, 19 nt, Homo sapiens
  misc_RNA (1)...(19): siRNA sense strand
cguuuacagucccuaauua

SEQ ID NO: 1143373 - RNA, 19 nt, Homo sapiens
  misc_RNA (1)...(19): siRNA sense strand
caacuuucuuuccacguuu

SEQ ID NO: 1143374 - RNA, 19 nt, Homo sapiens
  misc_RNA (1)...(19): siRNA sense strand
gaagaaguagauuccguuu

SEQ ID NO: 1143375 - RNA, 19 nt, Homo sapiens
  misc_RNA (1)...(19): siRNA sense strand
ggucagaagcaagaaguua

SEQ ID NO: 1143376 - RNA, 19 nt, Homo sapiens
  misc_RNA (1)...(19): siRNA sense strand
cugaagaacugagaaagaa

SEQ ID NO: 1143377 - RNA, 19 nt, Homo sapiens
  misc_RNA (1)...(19): siRNA sense strand
gaugaagagagaaagauuu

SEQ ID NO: 1143378 - RNA, 19 nt, Homo sapiens
  misc_RNA (1)...(19): siRNA sense strand
ggaugaaggacaugccaua

SEQ ID NO: 1143379 - RNA, 19 nt, Homo sapiens
  misc_RNA (1)...(19): siRNA sense strand
ggaaacaauaccagugaaa

SEQ ID NO: 1143380 - RNA, 19 nt, Homo sapiens
  misc_RNA (1)...(19): siRNA sense strand
gauguuaucccuccagaug

SEQ ID NO: 1143381 - RNA, 19 nt, Homo sapiens
  misc_RNA (1)...(19): siRNA sense strand
cgggaguaguuaauaauaa

SEQ ID NO: 1143382 - RNA, 19 nt, Homo sapiens
  misc_RNA (1)...(19): siRNA sense strand
gaggaaacaauaccaguga

SEQ ID NO: 1143383 - RNA, 19 nt, Homo sapiens
  misc_RNA (1)...(19): siRNA sense strand
guauggaguucauggaaau

SEQ ID NO: 1143384 - RNA, 19 nt, Homo sapiens
  misc_RNA (1)...(19): siRNA sense strand
uaaagccucuggauuugug

SEQ ID NO: 1143385 - RNA, 19 nt, Homo sapiens
  misc_RNA (1)...(19): siRNA sense strand
ggagaugaaggaggacuua

SEQ ID NO: 1143386 - RNA, 19 nt, Homo sapiens
  misc_RNA (1)...(19): siRNA sense strand
ugaaggacaugccauacga

SEQ ID NO: 1143387 - RNA, 19 nt, Homo sapiens
  misc_RNA (1)...(19): siRNA sense strand
gacauccaguucaaagauu

SEQ ID NO: 1143388 - RNA, 19 nt, Homo sapiens
  misc_RNA (1)...(19): siRNA sense strand
acauuacacuuucagauga

SEQ ID NO: 1143389 - RNA, 19 nt, Homo sapiens
  misc_RNA (1)...(19): siRNA sense strand
ucagaaagaagauggguuu

SEQ ID NO: 1143390 - RNA, 19 nt, Homo sapiens
  misc_RNA (1)...(19): siRNA sense strand
cagaggaaauugaaacaag

SEQ ID NO: 1143391 - RNA, 19 nt, Homo sapiens
  misc_RNA (1)...(19): siRNA sense strand
agaauguccuccagaagaa

SEQ ID NO: 1143392 - RNA, 19 nt, Homo sapiens
  misc_RNA (1)...(19): siRNA sense strand
gcgaaaugacuuauacuau

SEQ ID NO: 1143393 - RNA, 19 nt, Homo sapiens
  misc_RNA (1)...(19): siRNA sense strand
gaagcaagaaguuaucauc

SEQ ID NO: 1143394 - RNA, 19 nt, Homo sapiens
  misc_RNA (1)...(19): siRNA sense strand
uauaaugcuucuguccuua

SEQ ID NO: 1143395 - RNA, 19 nt, Homo sapiens
  misc_RNA (1)...(19): siRNA sense strand
ggacauccaguucaaagau

SEQ ID NO: 1143396 - RNA, 19 nt, Homo sapiens
  misc_RNA (1)...(19): siRNA sense strand
gaagaacaaagacaagcaa

SEQ ID NO: 1143397 - RNA, 19 nt, Homo sapiens
  misc_RNA (1)...(19): siRNA sense strand
gcagauggacuaagcaaag

SEQ ID NO: 1143398 - RNA, 19 nt, Homo sapiens
  misc_RNA (1)...(19): siRNA sense strand
uaacgaugacucuaugaaa

SEQ ID NO: 1143399 - RNA, 19 nt, Homo sapiens
  misc_RNA (1)...(19): siRNA sense strand
uuacaacgagauccuaaua

SEQ ID NO: 1143400 - RNA, 19 nt, Homo sapiens
  misc_RNA (1)...(19): siRNA sense strand
ugccauacuuaccuucuua

SEQ ID NO: 1143401 - RNA, 19 nt, Homo sapiens
  misc_RNA (1)...(19): siRNA sense strand
acacuuagaagaacaaaga

SEQ ID NO: 1143402 - RNA, 19 nt, Homo sapiens
  misc_RNA (1)...(19): siRNA sense strand
agagaaugguggcauagaa

SEQ ID NO: 1143403 - RNA, 19 nt, Homo sapiens
  misc_RNA (1)...(19): siRNA sense strand
cagaugacuuucuaacuag

SEQ ID NO: 1143404 - RNA, 19 nt, Homo sapiens
  misc_RNA (1)...(19): siRNA sense strand
aaucagauguacacuugaa

SEQ ID NO: 1143405 - RNA, 19 nt, Homo sapiens
  misc_RNA (1)...(19): siRNA sense strand
ggaacagcgaaaugacuua

SEQ ID NO: 1143406 - RNA, 19 nt, Homo sapiens
  misc_RNA (1)...(19): siRNA sense strand
cagaucaguugaagaaaca

SEQ ID NO: 1143407 - RNA, 19 nt, Homo sapiens
  misc_RNA (1)...(19): siRNA sense strand
uaucauggacaacaaauug

SEQ ID NO: 1143408 - RNA, 19 nt, Homo sapiens
  misc_RNA (1)...(19): siRNA sense strand
agcaggaucuccaacuaua

SEQ ID NO: 1143409 - RNA, 19 nt, Homo sapiens
  misc_RNA (1)...(19): siRNA sense strand
cgcauugacugacuuaaga

SEQ ID NO: 1143410 - RNA, 19 nt, Homo sapiens
  misc_RNA (1)...(19): siRNA sense strand
gcacgcauugacugacuua

SEQ ID NO: 1143411 - RNA, 19 nt, Homo sapiens
  misc_RNA (1)...(19): siRNA sense strand
caacccaguauuucagaua

SEQ ID NO: 1143412 - RNA, 19 nt, Homo sapiens
  misc_RNA (1)...(19): siRNA sense strand
gagccacuauuggaaggua

SEQ ID NO: 1143413 - RNA, 19 nt, Homo sapiens
  misc_RNA (1)...(19): siRNA sense strand
aaaguuugguuguuucuca

SEQ ID NO: 1143414 - RNA, 19 nt, Homo sapiens
  misc_RNA (1)...(19): siRNA sense strand
acauccaguucaaagauua

SEQ ID NO: 1143415 - RNA, 19 nt, Homo sapiens
  misc_RNA (1)...(19): siRNA sense strand
ccacgccucucauauccaa

SEQ ID NO: 1143416 - RNA, 19 nt, Homo sapiens
  misc_RNA (1)...(19): siRNA sense strand
ggagcuagaucaugaaaga

SEQ ID NO: 1143417 - RNA, 19 nt, Homo sapiens
  misc_RNA (1)...(19): siRNA sense strand
gagaaacucuucccugaug

SEQ ID NO: 1143418 - RNA, 19 nt, Homo sapiens
  misc_RNA (1)...(19): siRNA sense strand
ucacaguccugaaacgaua

SEQ ID NO: 1143419 - RNA, 19 nt, Homo sapiens
  misc_RNA (1)...(19): siRNA sense strand
ugaaagaaauguugcaauc

SEQ ID NO: 1143420 - RNA, 19 nt, Homo sapiens
  misc_RNA (1)...(19): siRNA sense strand
gauuggagauucuacauuc

SEQ ID NO: 1143421 - RNA, 19 nt, Homo sapiens
  misc_RNA (1)...(19): siRNA sense strand
agaaaucccuagaagaauu

SEQ ID NO: 1143422 - RNA, 19 nt, Homo sapiens
  misc_RNA (1)...(19): siRNA sense strand
ggauauagcuuugagaaac

SEQ ID NO: 1143423 - RNA, 19 nt, Homo sapiens
  misc_RNA (1)...(19): siRNA sense strand
gaagcuaagccgaccauuu

SEQ ID NO: 1143424 - RNA, 19 nt, Homo sapiens
  misc_RNA (1)...(19): siRNA sense strand
gaacacaacaaacuuaaag

SEQ ID NO: 1143425 - RNA, 19 nt, Homo sapiens
  misc_RNA (1)...(19): siRNA sense strand
gcucauggaugcaaaucuu

SEQ ID NO: 1143426 - RNA, 19 nt, Homo sapiens
  misc_RNA (1)...(19): siRNA sense strand
acagagagcuaguucuuau

SEQ ID NO: 1143427 - RNA, 19 nt, Homo sapiens
  misc_RNA (1)...(19): siRNA sense strand
gaagcaagcgugacaacaa

SEQ ID NO: 1143428 - RNA, 19 nt, Homo sapiens
  misc_RNA (1)...(19): siRNA sense strand
ccacagaaaucccuagaag

SEQ ID NO: 1143429 - RNA, 19 nt, Homo sapiens
  misc_RNA (1)...(19): siRNA sense strand
cucaggagcucaaggaaua

SEQ ID NO: 1143430 - RNA, 19 nt, Homo sapiens
  misc_RNA (1)...(19): siRNA sense strand
gaugacgccuuauguagug

SEQ ID NO: 1143431 - RNA, 19 nt, Homo sapiens
  misc_RNA (1)...(19): siRNA sense strand
gaucaguggaauaaaguua

SEQ ID NO: 1143432 - RNA, 19 nt, Homo sapiens
  misc_RNA (1)...(19): siRNA sense strand
ugaaagggaacacacaaua

SEQ ID NO: 1143433 - RNA, 19 nt, Homo sapiens
  misc_RNA (1)...(19): siRNA sense strand
acagaaaucccuagaagaa

SEQ ID NO: 1143434 - RNA, 19 nt, Homo sapiens
  misc_RNA (1)...(19): siRNA sense strand
gacaagcaguuagaugaaa

SEQ ID NO: 1143435 - RNA, 19 nt, Homo sapiens
  misc_RNA (1)...(19): siRNA sense strand
ggaacaccauguccugaau

SEQ ID NO: 1143436 - RNA, 19 nt, Homo sapiens
  misc_RNA (1)...(19): siRNA sense strand
caccaaagaucccugacaa

SEQ ID NO: 1143437 - RNA, 19 nt, Homo sapiens
  misc_RNA (1)...(19): siRNA sense strand
agauggagcuagaucauga

SEQ ID NO: 1143438 - RNA, 19 nt, Homo sapiens
  misc_RNA (1)...(19): siRNA sense strand
aaccaagaauggaguuaua

SEQ ID NO: 1143439 - RNA, 19 nt, Homo sapiens
  misc_RNA (1)...(19): siRNA sense strand
gaaagggaacacacaauag

SEQ ID NO: 1143440 - RNA, 19 nt, Homo sapiens
  misc_RNA (1)...(19): siRNA sense strand
ggaacgaguuuuaugauga

SEQ ID NO: 1143441 - RNA, 19 nt, Homo sapiens
  misc_RNA (1)...(19): siRNA sense strand
gcaagcgugacaacaauuu

SEQ ID NO: 1143442 - RNA, 19 nt, Homo sapiens
  misc_RNA (1)...(19): siRNA sense strand
ucagaacacaacaaacuua

SEQ ID NO: 1143443 - RNA, 19 nt, Homo sapiens
  misc_RNA (1)...(19): siRNA sense strand
gaaaacagaccuaaauaug

SEQ ID NO: 1143444 - RNA, 19 nt, Homo sapiens
  misc_RNA (1)...(19): siRNA sense strand
gaaauguugcaaucaagaa

SEQ ID NO: 1143445 - RNA, 19 nt, Homo sapiens
  misc_RNA (1)...(19): siRNA sense strand
cuagaagaauuucaagaug

SEQ ID NO: 1143446 - RNA, 19 nt, Homo sapiens
  misc_RNA (1)...(19): siRNA sense strand
gaaagaaauguugcaauca

SEQ ID NO: 1143447 - RNA, 19 nt, Homo sapiens
  misc_RNA (1)...(19): siRNA sense strand
aaacagaccuaaauaugcu

SEQ ID NO: 1143448 - RNA, 19 nt, Homo sapiens
  misc_RNA (1)...(19): siRNA sense strand
gacuuaaagcccaguaaua

SEQ ID NO: 1143449 - RNA, 19 nt, Homo sapiens
  misc_RNA (1)...(19): siRNA sense strand
gcccaguaauauaguagua

SEQ ID NO: 1143450 - RNA, 19 nt, Homo sapiens
  misc_RNA (1)...(19): siRNA sense strand
gaggagagaaccaagaaug

SEQ ID NO: 1143451 - RNA, 19 nt, Homo sapiens
  misc_RNA (1)...(19): siRNA sense strand
caacacccguacaucaaug

SEQ ID NO: 1143452 - RNA, 19 nt, Homo sapiens
  misc_RNA (1)...(19): siRNA sense strand
agagcuaguucuuaugaaa

SEQ ID NO: 1143453 - RNA, 19 nt, Homo sapiens
  misc_RNA (1)...(19): siRNA sense strand
ggcaugggcuacaaggaaa

SEQ ID NO: 1143454 - RNA, 19 nt, Homo sapiens
  misc_RNA (1)...(19): siRNA sense strand
ggaaucaagcaccuucauu

SEQ ID NO: 1143455 - RNA, 19 nt, Homo sapiens
  misc_RNA (1)...(19): siRNA sense strand
uguccuaccuucucuauca

SEQ ID NO: 1143456 - RNA, 19 nt, Homo sapiens
  misc_RNA (1)...(19): siRNA sense strand
ggaauaguaugcgcagcuu

SEQ ID NO: 1143457 - RNA, 19 nt, Homo sapiens
  misc_RNA (1)...(19): siRNA sense strand
gaacaccauguccugaauu

SEQ ID NO: 1143458 - RNA, 19 nt, Homo sapiens
  misc_RNA (1)...(19): siRNA sense strand
gaagaaacugcaaccaaca

SEQ ID NO: 1143459 - RNA, 19 nt, Homo sapiens
  misc_RNA (1)...(19): siRNA sense strand
gaaccaagaauggaguuau

SEQ ID NO: 1143460 - RNA, 19 nt, Homo sapiens
  misc_RNA (1)...(19): siRNA sense strand
ccaaaaugcugguaauaga

SEQ ID NO: 1143461 - RNA, 19 nt, Homo sapiens
  misc_RNA (1)...(19): siRNA sense strand
gauauagcuuugagaaacu

SEQ ID NO: 1143462 - RNA, 19 nt, Homo sapiens
  misc_RNA (1)...(19): siRNA sense strand
gcuagaucaugaaagaaug

SEQ ID NO: 1143463 - RNA, 19 nt, Homo sapiens
  misc_RNA (1)...(19): siRNA sense strand
ggacuuaaagcccaguaau

SEQ ID NO: 1143464 - RNA, 19 nt, Homo sapiens
  misc_RNA (1)...(19): siRNA sense strand
gaagcuccaccaccaaaga

SEQ ID NO: 1143465 - RNA, 19 nt, Homo sapiens
  misc_RNA (1)...(19): siRNA sense strand
guccugaauucaugaagaa

SEQ ID NO: 1143466 - RNA, 19 nt, Homo sapiens
  misc_RNA (1)...(19): siRNA sense strand
gagagcuaguucuuaugaa

SEQ ID NO: 1143467 - RNA, 19 nt, Homo sapiens
  misc_RNA (1)...(19): siRNA sense strand
uagaagaguggaaagaauu

SEQ ID NO: 1143468 - RNA, 19 nt, Homo sapiens
  misc_RNA (1)...(19): siRNA sense strand
ggacugcaggaacgaguuu

SEQ ID NO: 1143469 - RNA, 19 nt, Homo sapiens
  misc_RNA (1)...(19): siRNA sense strand
aagcuaagccgaccauuuc

SEQ ID NO: 1143470 - RNA, 19 nt, Homo sapiens
  misc_RNA (1)...(19): siRNA sense strand
ggagagaaccaagaaugga

SEQ ID NO: 1143471 - RNA, 19 nt, Homo sapiens
  misc_RNA (1)...(19): siRNA sense strand
ugacucagaacacaacaaa

SEQ ID NO: 1143472 - RNA, 19 nt, Homo sapiens
  misc_RNA (1)...(19): siRNA sense strand
ugauugcacuuugaagauu

SEQ ID NO: 1143473 - RNA, 19 nt, Homo sapiens
  misc_RNA (1)...(19): siRNA sense strand
gccaagugauucagaugga

SEQ ID NO: 1143474 - RNA, 19 nt, Homo sapiens
  misc_RNA (1)...(19): siRNA sense strand
aaagggaacacacaauaga

SEQ ID NO: 1143475 - RNA, 19 nt, Homo sapiens
  misc_RNA (1)...(19): siRNA sense strand
cagaacacaacaaacuuaa

SEQ ID NO: 1143476 - RNA, 19 nt, Homo sapiens
  misc_RNA (1)...(19): siRNA sense strand
gaauaguaugcgcagcuua

SEQ ID NO: 1143477 - RNA, 19 nt, Homo sapiens
  misc_RNA (1)...(19): siRNA sense strand
cuuaaagcccaguaauaua

SEQ ID NO: 1143478 - RNA, 19 nt, Homo sapiens
  misc_RNA (1)...(19): siRNA sense strand
uaucagaugcuguguggaa

SEQ ID NO: 1143479 - RNA, 19 nt, Homo sapiens
  misc_RNA (1)...(19): siRNA sense strand
uuaaagcccaguaauauag

SEQ ID NO: 1143480 - RNA, 19 nt, Homo sapiens
  misc_RNA (1)...(19): siRNA sense strand
gaacacacaauagaagagu

SEQ ID NO: 1143481 - RNA, 19 nt, Homo sapiens
  misc_RNA (1)...(19): siRNA sense strand
ucaggcaagggauuuguua

SEQ ID NO: 1143482 - RNA, 19 nt, Homo sapiens
  misc_RNA (1)...(19): siRNA sense strand
gaccuaaauaugcuggaua

SEQ ID NO: 1143483 - RNA, 19 nt, Homo sapiens
  misc_RNA (1)...(19): siRNA sense strand
cuacagagagcuaguucuu

SEQ ID NO: 1143484 - RNA, 19 nt, Homo sapiens
  misc_RNA (1)...(19): siRNA sense strand
gaugaaagggaacacacaa

SEQ ID NO: 1143485 - RNA, 19 nt, Homo sapiens
  misc_RNA (1)...(19): siRNA sense strand
gauugcacuuugaagauuc

SEQ ID NO: 1143486 - RNA, 19 nt, Homo sapiens
  misc_RNA (1)...(19): siRNA sense strand
aagcaagcgugacaacaau

SEQ ID NO: 1143487 - RNA, 19 nt, Homo sapiens
  misc_RNA (1)...(19): siRNA sense strand
guguagagauuggagauuc

SEQ ID NO: 1143488 - RNA, 19 nt, Homo sapiens
  misc_RNA (1)...(19): siRNA sense strand
aaagcccaguaauauagua

SEQ ID NO: 1143489 - RNA, 19 nt, Homo sapiens
  misc_RNA (1)...(19): siRNA sense strand
uaugaugacgccuuaugua

SEQ ID NO: 1143490 - RNA, 19 nt, Homo sapiens
  misc_RNA (1)...(19): siRNA sense strand
gagcuaguucuuaugaaau

SEQ ID NO: 1143491 - RNA, 19 nt, Homo sapiens
  misc_RNA (1)...(19): siRNA sense strand
uaugaugccauucuugaaa

SEQ ID NO: 1143492 - RNA, 19 nt, Homo sapiens
  misc_RNA (1)...(19): siRNA sense strand
ugauucagauggagcuaga

SEQ ID NO: 1143493 - RNA, 19 nt, Homo sapiens
  misc_RNA (1)...(19): siRNA sense strand
gaagaguggaaagaauuga

SEQ ID NO: 1143494 - RNA, 19 nt, Homo sapiens
  misc_RNA (1)...(19): siRNA sense strand
auagaagaguggaaagaau

SEQ ID NO: 1143495 - RNA, 19 nt, Homo sapiens
  misc_RNA (1)...(19): siRNA sense strand
ggacuuacguugaaaacag

SEQ ID NO: 1143496 - RNA, 19 nt, Homo sapiens
  misc_RNA (1)...(19): siRNA sense strand
cagaugcuguguggaauca

SEQ ID NO: 1143497 - RNA, 19 nt, Homo sapiens
  misc_RNA (1)...(19): siRNA sense strand
agagagcuaguucuuauga

SEQ ID NO: 1143498 - RNA, 19 nt, Homo sapiens
  misc_RNA (1)...(19): siRNA sense strand
gggaacacacaauagaaga

SEQ ID NO: 1143499 - RNA, 19 nt, Homo sapiens
  misc_RNA (1)...(19): siRNA sense strand
ugacaagcaguuagaugaa

SEQ ID NO: 1143500 - RNA, 19 nt, Homo sapiens
  misc_RNA (1)...(19): siRNA sense strand
caaagaucccugacaagca

SEQ ID NO: 1143501 - RNA, 19 nt, Homo sapiens
  misc_RNA (1)...(19): siRNA sense strand
caauagaagaguggaaaga

SEQ ID NO: 1143502 - RNA, 19 nt, Homo sapiens
  misc_RNA (1)...(19): siRNA sense strand
ccuagaagaauuucaagau

SEQ ID NO: 1143503 - RNA, 19 nt, Homo sapiens
  misc_RNA (1)...(19): siRNA sense strand
cagaagcuccaccaccaaa

SEQ ID NO: 1143504 - RNA, 19 nt, Homo sapiens
  misc_RNA (1)...(19): siRNA sense strand
gaacagcuuggaacaccau

SEQ ID NO: 1143505 - RNA, 19 nt, Homo sapiens
  misc_RNA (1)...(19): siRNA sense strand
gaugcuguguggaaucaag

SEQ ID NO: 1143506 - RNA, 19 nt, Homo sapiens
  misc_RNA (1)...(19): siRNA sense strand
agaguggaaagaauugaua

SEQ ID NO: 1143507 - RNA, 19 nt, Homo sapiens
  misc_RNA (1)...(19): siRNA sense strand
caaccaacaguaaggacuu

SEQ ID NO: 1143508 - RNA, 19 nt, Homo sapiens
  misc_RNA (1)...(19): siRNA sense strand
uaauuggccuuuugaaugu

SEQ ID NO: 1143509 - RNA, 19 nt, Homo sapiens
  misc_RNA (1)...(19): siRNA sense strand
cuaaaaggaucucuguaga

SEQ ID NO: 1143510 - RNA, 19 nt, Homo sapiens
  misc_RNA (1)...(19): siRNA sense strand
gcaggaacgaguuuuauga

SEQ ID NO: 1143511 - RNA, 19 nt, Homo sapiens
  misc_RNA (1)...(19): siRNA sense strand
ggagcucaaggaauaguau

SEQ ID NO: 1143512 - RNA, 19 nt, Homo sapiens
  misc_RNA (1)...(19): siRNA sense strand
agaugaagcucuccaacac

SEQ ID NO: 1143513 - RNA, 19 nt, Homo sapiens
  misc_RNA (1)...(19): siRNA sense strand
gcagaagcuccaccaccaa

SEQ ID NO: 1143514 - RNA, 19 nt, Homo sapiens
  misc_RNA (1)...(19): siRNA sense strand
acuuaaagcccaguaauau

SEQ ID NO: 1143515 - RNA, 19 nt, Homo sapiens
  misc_RNA (1)...(19): siRNA sense strand
cugacaagcaguuagauga

SEQ ID NO: 1143516 - RNA, 19 nt, Homo sapiens
  misc_RNA (1)...(19): siRNA sense strand
ggagcuagaucaugaaaga

SEQ ID NO: 1143517 - RNA, 19 nt, Homo sapiens
  misc_RNA (1)...(19): siRNA sense strand
gagaaacucuucccugaug

SEQ ID NO: 1143518 - RNA, 19 nt, Homo sapiens
  misc_RNA (1)...(19): siRNA sense strand
ucacaguccugaaacgaua

SEQ ID NO: 1143519 - RNA, 19 nt, Homo sapiens
  misc_RNA (1)...(19): siRNA sense strand
ugaaagaaauguugcaauc

SEQ ID NO: 1143520 - RNA, 19 nt, Homo sapiens
  misc_RNA (1)...(19): siRNA sense strand
gauuggagauucuacauuc

SEQ ID NO: 1143521 - RNA, 19 nt, Homo sapiens
  misc_RNA (1)...(19): siRNA sense strand
agaaaucccuagaagaauu

SEQ ID NO: 1143522 - RNA, 19 nt, Homo sapiens
  misc_RNA (1)...(19): siRNA sense strand
ggauauagcuuugagaaac

SEQ ID NO: 1143523 - RNA, 19 nt, Homo sapiens
  misc_RNA (1)...(19): siRNA sense strand
gaagcuaagccgaccauuu

SEQ ID NO: 1143524 - RNA, 19 nt, Homo sapiens
  misc_RNA (1)...(19): siRNA sense strand
gaacacaacaaacuuaaag

SEQ ID NO: 1143525 - RNA, 19 nt, Homo sapiens
  misc_RNA (1)...(19): siRNA sense strand
gcucauggaugcaaaucuu

SEQ ID NO: 1143526 - RNA, 19 nt, Homo sapiens
  misc_RNA (1)...(19): siRNA sense strand
acagagagcuaguucuuau

SEQ ID NO: 1143527 - RNA, 19 nt, Homo sapiens
  misc_RNA (1)...(19): siRNA sense strand
gaagcaagcgugacaacaa

SEQ ID NO: 1143528 - RNA, 19 nt, Homo sapiens
  misc_RNA (1)...(19): siRNA sense strand
ccacagaaaucccuagaag

SEQ ID NO: 1143529 - RNA, 19 nt, Homo sapiens
  misc_RNA (1)...(19): siRNA sense strand
cucaggagcucaaggaaua

SEQ ID NO: 1143530 - RNA, 19 nt, Homo sapiens
  misc_RNA (1)...(19): siRNA sense strand
gaugacgccuuauguagug

SEQ ID NO: 1143531 - RNA, 19 nt, Homo sapiens
  misc_RNA (1)...(19): siRNA sense strand
gaucaguggaauaaaguua

SEQ ID NO: 1143532 - RNA, 19 nt, Homo sapiens
  misc_RNA (1)...(19): siRNA sense strand
ugaaagggaacacacaaua

SEQ ID NO: 1143533 - RNA, 19 nt, Homo sapiens
  misc_RNA (1)...(19): siRNA sense strand
acagaaaucccuagaagaa

SEQ ID NO: 1143534 - RNA, 19 nt, Homo sapiens
  misc_RNA (1)...(19): siRNA sense strand
gacaagcaguuagaugaaa

SEQ ID NO: 1143535 - RNA, 19 nt, Homo sapiens
  misc_RNA (1)...(19): siRNA sense strand
ggaacaccauguccugaau

SEQ ID NO: 1143536 - RNA, 19 nt, Homo sapiens
  misc_RNA (1)...(19): siRNA sense strand
caccaaagaucccugacaa

SEQ ID NO: 1143537 - RNA, 19 nt, Homo sapiens
  misc_RNA (1)...(19): siRNA sense strand
agauggagcuagaucauga

SEQ ID NO: 1143538 - RNA, 19 nt, Homo sapiens
  misc_RNA (1)...(19): siRNA sense strand
aaccaagaauggaguuaua

SEQ ID NO: 1143539 - RNA, 19 nt, Homo sapiens
  misc_RNA (1)...(19): siRNA sense strand
gaaagggaacacacaauag

SEQ ID NO: 1143540 - RNA, 19 nt, Homo sapiens
  misc_RNA (1)...(19): siRNA sense strand
ggaacgaguuuuaugauga

SEQ ID NO: 1143541 - RNA, 19 nt, Homo sapiens
  misc_RNA (1)...(19): siRNA sense strand
gcaagcgugacaacaauuu

SEQ ID NO: 1143542 - RNA, 19 nt, Homo sapiens
  misc_RNA (1)...(19): siRNA sense strand
ucagaacacaacaaacuua

SEQ ID NO: 1143543 - RNA, 19 nt, Homo sapiens
  misc_RNA (1)...(19): siRNA sense strand
gaaaacagaccuaaauaug

SEQ ID NO: 1143544 - RNA, 19 nt, Homo sapiens
  misc_RNA (1)...(19): siRNA sense strand
gaaauguugcaaucaagaa

SEQ ID NO: 1143545 - RNA, 19 nt, Homo sapiens
  misc_RNA (1)...(19): siRNA sense strand
cuagaagaauuucaagaug

SEQ ID NO: 1143546 - RNA, 19 nt, Homo sapiens
  misc_RNA (1)...(19): siRNA sense strand
gaaagaaauguugcaauca

SEQ ID NO: 1143547 - RNA, 19 nt, Homo sapiens
  misc_RNA (1)...(19): siRNA sense strand
aaacagaccuaaauaugcu

SEQ ID NO: 1143548 - RNA, 19 nt, Homo sapiens
  misc_RNA (1)...(19): siRNA sense strand
gacuuaaagcccaguaaua

SEQ ID NO: 1143549 - RNA, 19 nt, Homo sapiens
  misc_RNA (1)...(19): siRNA sense strand
gcccaguaauauaguagua

SEQ ID NO: 1143550 - RNA, 19 nt, Homo sapiens
  misc_RNA (1)...(19): siRNA sense strand
gaggagagaaccaagaaug

SEQ ID NO: 1143551 - RNA, 19 nt, Homo sapiens
  misc_RNA (1)...(19): siRNA sense strand
caacacccguacaucaaug

SEQ ID NO: 1143552 - RNA, 19 nt, Homo sapiens
  misc_RNA (1)...(19): siRNA sense strand
agagcuaguucuuaugaaa

SEQ ID NO: 1143553 - RNA, 19 nt, Homo sapiens
  misc_RNA (1)...(19): siRNA sense strand
ggcaugggcuacaaggaaa

SEQ ID NO: 1143554 - RNA, 19 nt, Homo sapiens
  misc_RNA (1)...(19): siRNA sense strand
ggaaucaagcaccuucauu

SEQ ID NO: 1143555 - RNA, 19 nt, Homo sapiens
  misc_RNA (1)...(19): siRNA sense strand
uguccuaccuucucuauca

SEQ ID NO: 1143556 - RNA, 19 nt, Homo sapiens
  misc_RNA (1)...(19): siRNA sense strand
ggaauaguaugcgcagcuu

SEQ ID NO: 1143557 - RNA, 19 nt, Homo sapiens
  misc_RNA (1)...(19): siRNA sense strand
gaacaccauguccugaauu

SEQ ID NO: 1143558 - RNA, 19 nt, Homo sapiens
  misc_RNA (1)...(19): siRNA sense strand
gaagaaacugcaaccaaca

SEQ ID NO: 1143559 - RNA, 19 nt, Homo sapiens
  misc_RNA (1)...(19): siRNA sense strand
gaaccaagaauggaguuau

SEQ ID NO: 1143560 - RNA, 19 nt, Homo sapiens
  misc_RNA (1)...(19): siRNA sense strand
ccaaaaugcugguaauaga

SEQ ID NO: 1143561 - RNA, 19 nt, Homo sapiens
  misc_RNA (1)...(19): siRNA sense strand
gauauagcuuugagaaacu

SEQ ID NO: 1143562 - RNA, 19 nt, Homo sapiens
  misc_RNA (1)...(19): siRNA sense strand
gcuagaucaugaaagaaug

SEQ ID NO: 1143563 - RNA, 19 nt, Homo sapiens
  misc_RNA (1)...(19): siRNA sense strand
ggacuuaaagcccaguaau

SEQ ID NO: 1143564 - RNA, 19 nt, Homo sapiens
  misc_RNA (1)...(19): siRNA sense strand
gaagcuccaccaccaaaga

SEQ ID NO: 1143565 - RNA, 19 nt, Homo sapiens
  misc_RNA (1)...(19): siRNA sense strand
guccugaauucaugaagaa

SEQ ID NO: 1143566 - RNA, 19 nt, Homo sapiens
  misc_RNA (1)...(19): siRNA sense strand
gagagcuaguucuuaugaa

SEQ ID NO: 1143567 - RNA, 19 nt, Homo sapiens
  misc_RNA (1)...(19): siRNA sense strand
uagaagaguggaaagaauu

SEQ ID NO: 1143568 - RNA, 19 nt, Homo sapiens
  misc_RNA (1)...(19): siRNA sense strand
ggacugcaggaacgaguuu

SEQ ID NO: 1143569 - RNA, 19 nt, Homo sapiens
  misc_RNA (1)...(19): siRNA sense strand
aagcuaagccgaccauuuc

SEQ ID NO: 1143570 - RNA, 19 nt, Homo sapiens
  misc_RNA (1)...(19): siRNA sense strand
ggagagaaccaagaaugga

SEQ ID NO: 1143571 - RNA, 19 nt, Homo sapiens
  misc_RNA (1)...(19): siRNA sense strand
ugacucagaacacaacaaa

SEQ ID NO: 1143572 - RNA, 19 nt, Homo sapiens
  misc_RNA (1)...(19): siRNA sense strand
ugauugcacuuugaagauu

SEQ ID NO: 1143573 - RNA, 19 nt, Homo sapiens
  misc_RNA (1)...(19): siRNA sense strand
gccaagugauucagaugga

SEQ ID NO: 1143574 - RNA, 19 nt, Homo sapiens
  misc_RNA (1)...(19): siRNA sense strand
aaagggaacacacaauaga

SEQ ID NO: 1143575 - RNA, 19 nt, Homo sapiens
  misc_RNA (1)...(19): siRNA sense strand
cagaacacaacaaacuuaa

SEQ ID NO: 1143576 - RNA, 19 nt, Homo sapiens
  misc_RNA (1)...(19): siRNA sense strand
gaauaguaugcgcagcuua

SEQ ID NO: 1143577 - RNA, 19 nt, Homo sapiens
  misc_RNA (1)...(19): siRNA sense strand
cuuaaagcccaguaauaua

SEQ ID NO: 1143578 - RNA, 19 nt, Homo sapiens
  misc_RNA (1)...(19): siRNA sense strand
uaucagaugcuguguggaa

SEQ ID NO: 1143579 - RNA, 19 nt, Homo sapiens
  misc_RNA (1)...(19): siRNA sense strand
uuaaagcccaguaauauag

SEQ ID NO: 1143580 - RNA, 19 nt, Homo sapiens
  misc_RNA (1)...(19): siRNA sense strand
gaacacacaauagaagagu

SEQ ID NO: 1143581 - RNA, 19 nt, Homo sapiens
  misc_RNA (1)...(19): siRNA sense strand
ucaggcaagggauuuguua

SEQ ID NO: 1143582 - RNA, 19 nt, Homo sapiens
  misc_RNA (1)...(19): siRNA sense strand
gaccuaaauaugcuggaua

SEQ ID NO: 1143583 - RNA, 19 nt, Homo sapiens
  misc_RNA (1)...(19): siRNA sense strand
cuacagagagcuaguucuu

SEQ ID NO: 1143584 - RNA, 19 nt, Homo sapiens
  misc_RNA (1)...(19): siRNA sense strand
gaugaaagggaacacacaa

SEQ ID NO: 1143585 - RNA, 19 nt, Homo sapiens
  misc_RNA (1)...(19): siRNA sense strand
gauugcacuuugaagauuc

SEQ ID NO: 1143586 - RNA, 19 nt, Homo sapiens
  misc_RNA (1)...(19): siRNA sense strand
aagcaagcgugacaacaau

SEQ ID NO: 1143587 - RNA, 19 nt, Homo sapiens
  misc_RNA (1)...(19): siRNA sense strand
guguagagauuggagauuc

SEQ ID NO: 1143588 - RNA, 19 nt, Homo sapiens
  misc_RNA (1)...(19): siRNA sense strand
aaagcccaguaauauagua

SEQ ID NO: 1143589 - RNA, 19 nt, Homo sapiens
  misc_RNA (1)...(19): siRNA sense strand
uaugaugacgccuuaugua

SEQ ID NO: 1143590 - RNA, 19 nt, Homo sapiens
  misc_RNA (1)...(19): siRNA sense strand
gagcuaguucuuaugaaau

SEQ ID NO: 1143591 - RNA, 19 nt, Homo sapiens
  misc_RNA (1)...(19): siRNA sense strand
uaugaugccauucuugaaa

SEQ ID NO: 1143592 - RNA, 19 nt, Homo sapiens
  misc_RNA (1)...(19): siRNA sense strand
ugauucagauggagcuaga

SEQ ID NO: 1143593 - RNA, 19 nt, Homo sapiens
  misc_RNA (1)...(19): siRNA sense strand
gaagaguggaaagaauuga

SEQ ID NO: 1143594 - RNA, 19 nt, Homo sapiens
  misc_RNA (1)...(19): siRNA sense strand
auagaagaguggaaagaau

SEQ ID NO: 1143595 - RNA, 19 nt, Homo sapiens
  misc_RNA (1)...(19): siRNA sense strand
ggacuuacguugaaaacag

SEQ ID NO: 1143596 - RNA, 19 nt, Homo sapiens
  misc_RNA (1)...(19): siRNA sense strand
cagaugcuguguggaauca

SEQ ID NO: 1143597 - RNA, 19 nt, Homo sapiens
  misc_RNA (1)...(19): siRNA sense strand
agagagcuaguucuuauga

SEQ ID NO: 1143598 - RNA, 19 nt, Homo sapiens
  misc_RNA (1)...(19): siRNA sense strand
gggaacacacaauagaaga

SEQ ID NO: 1143599 - RNA, 19 nt, Homo sapiens
  misc_RNA (1)...(19): siRNA sense strand
ugacaagcaguuagaugaa

SEQ ID NO: 1143600 - RNA, 19 nt, Homo sapiens
  misc_RNA (1)...(19): siRNA sense strand
caaagaucccugacaagca

SEQ ID NO: 1143601 - RNA, 19 nt, Homo sapiens
  misc_RNA (1)...(19): siRNA sense strand
caauagaagaguggaaaga

SEQ ID NO: 1143602 - RNA, 19 nt, Homo sapiens
  misc_RNA (1)...(19): siRNA sense strand
ccuagaagaauuucaagau

SEQ ID NO: 1143603 - RNA, 19 nt, Homo sapiens
  misc_RNA (1)...(19): siRNA sense strand
cagaagcuccaccaccaaa

SEQ ID NO: 1143604 - RNA, 19 nt, Homo sapiens
  misc_RNA (1)...(19): siRNA sense strand
gaacagcuuggaacaccau

SEQ ID NO: 1143605 - RNA, 19 nt, Homo sapiens
  misc_RNA (1)...(19): siRNA sense strand
gaugcuguguggaaucaag

SEQ ID NO: 1143606 - RNA, 19 nt, Homo sapiens
  misc_RNA (1)...(19): siRNA sense strand
agaguggaaagaauugaua

SEQ ID NO: 1143607 - RNA, 19 nt, Homo sapiens
  misc_RNA (1)...(19): siRNA sense strand
caaccaacaguaaggacuu

SEQ ID NO: 1143608 - RNA, 19 nt, Homo sapiens
  misc_RNA (1)...(19): siRNA sense strand
uaauuggccuuuugaaugu

SEQ ID NO: 1143609 - RNA, 19 nt, Homo sapiens
  misc_RNA (1)...(19): siRNA sense strand
cuaaaaggaucucuguaga

SEQ ID NO: 1143610 - RNA, 19 nt, Homo sapiens
  misc_RNA (1)...(19): siRNA sense strand
gcaggaacgaguuuuauga

SEQ ID NO: 1143611 - RNA, 19 nt, Homo sapiens
  misc_RNA (1)...(19): siRNA sense strand
ggagcucaaggaauaguau

SEQ ID NO: 1143612 - RNA, 19 nt, Homo sapiens
  misc_RNA (1)...(19): siRNA sense strand
agaugaagcucuccaacac

SEQ ID NO: 1143613 - RNA, 19 nt, Homo sapiens
  misc_RNA (1)...(19): siRNA sense strand
gcagaagcuccaccaccaa

SEQ ID NO: 1143614 - RNA, 19 nt, Homo sapiens
  misc_RNA (1)...(19): siRNA sense strand
acuuaaagcccaguaauau

SEQ ID NO: 1143615 - RNA, 19 nt, Homo sapiens
  misc_RNA (1)...(19): siRNA sense strand
cugacaagcaguuagauga

SEQ ID NO: 1143616 - RNA, 19 nt, Homo sapiens
  misc_RNA (1)...(19): siRNA sense strand
ggagcuagaucaugaaaga

SEQ ID NO: 1143617 - RNA, 19 nt, Homo sapiens
  misc_RNA (1)...(19): siRNA sense strand
gagaaacucuucccugaug

SEQ ID NO: 1143618 - RNA, 19 nt, Homo sapiens
  misc_RNA (1)...(19): siRNA sense strand
ucacaguccugaaacgaua

SEQ ID NO: 1143619 - RNA, 19 nt, Homo sapiens
  misc_RNA (1)...(19): siRNA sense strand
ugaaagaaauguugcaauc

SEQ ID NO: 1143620 - RNA, 19 nt, Homo sapiens
  misc_RNA (1)...(19): siRNA sense strand
gauuggagauucuacauuc

SEQ ID NO: 1143621 - RNA, 19 nt, Homo sapiens
  misc_RNA (1)...(19): siRNA sense strand
agaaaucccuagaagaauu

SEQ ID NO: 1143622 - RNA, 19 nt, Homo sapiens
  misc_RNA (1)...(19): siRNA sense strand
ggauauagcuuugagaaac

SEQ ID NO: 1143623 - RNA, 19 nt, Homo sapiens
  misc_RNA (1)...(19): siRNA sense strand
gaagcuaagccgaccauuu

SEQ ID NO: 1143624 - RNA, 19 nt, Homo sapiens
  misc_RNA (1)...(19): siRNA sense strand
gaacacaacaaacuuaaag

SEQ ID NO: 1143625 - RNA, 19 nt, Homo sapiens
  misc_RNA (1)...(19): siRNA sense strand
gcucauggaugcaaaucuu

SEQ ID NO: 1143626 - RNA, 19 nt, Homo sapiens
  misc_RNA (1)...(19): siRNA sense strand
acagagagcuaguucuuau

SEQ ID NO: 1143627 - RNA, 19 nt, Homo sapiens
  misc_RNA (1)...(19): siRNA sense strand
gaagcaagcgugacaacaa

SEQ ID NO: 1143628 - RNA, 19 nt, Homo sapiens
  misc_RNA (1)...(19): siRNA sense strand
ucaaugaugugucuucaau

SEQ ID NO: 1143629 - RNA, 19 nt, Homo sapiens
  misc_RNA (1)...(19): siRNA sense strand
ccacagaaaucccuagaag

SEQ ID NO: 1143630 - RNA, 19 nt, Homo sapiens
  misc_RNA (1)...(19): siRNA sense strand
cucaggagcucaaggaaua

SEQ ID NO: 1143631 - RNA, 19 nt, Homo sapiens
  misc_RNA (1)...(19): siRNA sense strand
gaugacgccuuauguagug

SEQ ID NO: 1143632 - RNA, 19 nt, Homo sapiens
  misc_RNA (1)...(19): siRNA sense strand
gaucaguggaauaaaguua

SEQ ID NO: 1143633 - RNA, 19 nt, Homo sapiens
  misc_RNA (1)...(19): siRNA sense strand
ugaaagggaacacacaaua

SEQ ID NO: 1143634 - RNA, 19 nt, Homo sapiens
  misc_RNA (1)...(19): siRNA sense strand
acagaaaucccuagaagaa

SEQ ID NO: 1143635 - RNA, 19 nt, Homo sapiens
  misc_RNA (1)...(19): siRNA sense strand
gacaagcaguuagaugaaa

SEQ ID NO: 1143636 - RNA, 19 nt, Homo sapiens
  misc_RNA (1)...(19): siRNA sense strand
ggaacaccauguccugaau

SEQ ID NO: 1143637 - RNA, 19 nt, Homo sapiens
  misc_RNA (1)...(19): siRNA sense strand
caccaaagaucccugacaa

SEQ ID NO: 1143638 - RNA, 19 nt, Homo sapiens
  misc_RNA (1)...(19): siRNA sense strand
agauggagcuagaucauga

SEQ ID NO: 1143639 - RNA, 19 nt, Homo sapiens
  misc_RNA (1)...(19): siRNA sense strand
aaccaagaauggaguuaua

SEQ ID NO: 1143640 - RNA, 19 nt, Homo sapiens
  misc_RNA (1)...(19): siRNA sense strand
gaaagggaacacacaauag

SEQ ID NO: 1143641 - RNA, 19 nt, Homo sapiens
  misc_RNA (1)...(19): siRNA sense strand
ggaacgaguuuuaugauga

SEQ ID NO: 1143642 - RNA, 19 nt, Homo sapiens
  misc_RNA (1)...(19): siRNA sense strand
gcaagcgugacaacaauuu

SEQ ID NO: 1143643 - RNA, 19 nt, Homo sapiens
  misc_RNA (1)...(19): siRNA sense strand
ucagaacacaacaaacuua

SEQ ID NO: 1143644 - RNA, 19 nt, Homo sapiens
  misc_RNA (1)...(19): siRNA sense strand
gaaaacagaccuaaauaug

SEQ ID NO: 1143645 - RNA, 19 nt, Homo sapiens
  misc_RNA (1)...(19): siRNA sense strand
gaaauguugcaaucaagaa

SEQ ID NO: 1143646 - RNA, 19 nt, Homo sapiens
  misc_RNA (1)...(19): siRNA sense strand
cuagaagaauuucaagaug

SEQ ID NO: 1143647 - RNA, 19 nt, Homo sapiens
  misc_RNA (1)...(19): siRNA sense strand
gaaagaaauguugcaauca

SEQ ID NO: 1143648 - RNA, 19 nt, Homo sapiens
  misc_RNA (1)...(19): siRNA sense strand
aaacagaccuaaauaugcu

SEQ ID NO: 1143649 - RNA, 19 nt, Homo sapiens
  misc_RNA (1)...(19): siRNA sense strand
gacuuaaagcccaguaaua

SEQ ID NO: 1143650 - RNA, 19 nt, Homo sapiens
  misc_RNA (1)...(19): siRNA sense strand
gcccaguaauauaguagua

SEQ ID NO: 1143651 - RNA, 19 nt, Homo sapiens
  misc_RNA (1)...(19): siRNA sense strand
gaggagagaaccaagaaug

SEQ ID NO: 1143652 - RNA, 19 nt, Homo sapiens
  misc_RNA (1)...(19): siRNA sense strand
caacacccguacaucaaug

SEQ ID NO: 1143653 - RNA, 19 nt, Homo sapiens
  misc_RNA (1)...(19): siRNA sense strand
agagcuaguucuuaugaaa

SEQ ID NO: 1143654 - RNA, 19 nt, Homo sapiens
  misc_RNA (1)...(19): siRNA sense strand
ggcaugggcuacaaggaaa

SEQ ID NO: 1143655 - RNA, 19 nt, Homo sapiens
  misc_RNA (1)...(19): siRNA sense strand
ggaaucaagcaccuucauu

SEQ ID NO: 1143656 - RNA, 19 nt, Homo sapiens
  misc_RNA (1)...(19): siRNA sense strand
uguccuaccuucucuauca

SEQ ID NO: 1143657 - RNA, 19 nt, Homo sapiens
  misc_RNA (1)...(19): siRNA sense strand
ggaauaguaugcgcagcuu

SEQ ID NO: 1143658 - RNA, 19 nt, Homo sapiens
  misc_RNA (1)...(19): siRNA sense strand
gaacaccauguccugaauu

SEQ ID NO: 1143659 - RNA, 19 nt, Homo sapiens
  misc_RNA (1)...(19): siRNA sense strand
gaagaaacugcaaccaaca

SEQ ID NO: 1143660 - RNA, 19 nt, Homo sapiens
  misc_RNA (1)...(19): siRNA sense strand
ccucugggcugcuguagau

SEQ ID NO: 1143661 - RNA, 19 nt, Homo sapiens
  misc_RNA (1)...(19): siRNA sense strand
gaaccaagaauggaguuau

SEQ ID NO: 1143662 - RNA, 19 nt, Homo sapiens
  misc_RNA (1)...(19): siRNA sense strand
ccaaaaugcugguaauaga

SEQ ID NO: 1143663 - RNA, 19 nt, Homo sapiens
  misc_RNA (1)...(19): siRNA sense strand
gauauagcuuugagaaacu

SEQ ID NO: 1143664 - RNA, 19 nt, Homo sapiens
  misc_RNA (1)...(19): siRNA sense strand
gcuagaucaugaaagaaug

SEQ ID NO: 1143665 - RNA, 19 nt, Homo sapiens
  misc_RNA (1)...(19): siRNA sense strand
ugaugugucuucaauguca

SEQ ID NO: 1143666 - RNA, 19 nt, Homo sapiens
  misc_RNA (1)...(19): siRNA sense strand
ggacuuaaagcccaguaau

SEQ ID NO: 1143667 - RNA, 19 nt, Homo sapiens
  misc_RNA (1)...(19): siRNA sense strand
gaagcuccaccaccaaaga

SEQ ID NO: 1143668 - RNA, 19 nt, Homo sapiens
  misc_RNA (1)...(19): siRNA sense strand
guccugaauucaugaagaa

SEQ ID NO: 1143669 - RNA, 19 nt, Homo sapiens
  misc_RNA (1)...(19): siRNA sense strand
gagagcuaguucuuaugaa

SEQ ID NO: 1143670 - RNA, 19 nt, Homo sapiens
  misc_RNA (1)...(19): siRNA sense strand
aaugaugugucuucaaugu

SEQ ID NO: 1143671 - RNA, 19 nt, Homo sapiens
  misc_RNA (1)...(19): siRNA sense strand
uagaagaguggaaagaauu

SEQ ID NO: 1143672 - RNA, 19 nt, Homo sapiens
  misc_RNA (1)...(19): siRNA sense strand
ggacugcaggaacgaguuu

SEQ ID NO: 1143673 - RNA, 19 nt, Homo sapiens
  misc_RNA (1)...(19): siRNA sense strand
gugcagcagugaucaaugg

SEQ ID NO: 1143674 - RNA, 19 nt, Homo sapiens
  misc_RNA (1)...(19): siRNA sense strand
aagcuaagccgaccauuuc

SEQ ID NO: 1143675 - RNA, 19 nt, Homo sapiens
  misc_RNA (1)...(19): siRNA sense strand
ggagagaaccaagaaugga

SEQ ID NO: 1143676 - RNA, 19 nt, Homo sapiens
  misc_RNA (1)...(19): siRNA sense strand
ugacucagaacacaacaaa

SEQ ID NO: 1143677 - RNA, 19 nt, Homo sapiens
  misc_RNA (1)...(19): siRNA sense strand
ugauugcacuuugaagauu

SEQ ID NO: 1143678 - RNA, 19 nt, Homo sapiens
  misc_RNA (1)...(19): siRNA sense strand
gccaagugauucagaugga

SEQ ID NO: 1143679 - RNA, 19 nt, Homo sapiens
  misc_RNA (1)...(19): siRNA sense strand
aaagggaacacacaauaga

SEQ ID NO: 1143680 - RNA, 19 nt, Homo sapiens
  misc_RNA (1)...(19): siRNA sense strand
gaauaguaugcgcagcuua

SEQ ID NO: 1143681 - RNA, 19 nt, Homo sapiens
  misc_RNA (1)...(19): siRNA sense strand
cagaacacaacaaacuuaa

SEQ ID NO: 1143682 - RNA, 19 nt, Homo sapiens
  misc_RNA (1)...(19): siRNA sense strand
cuuaaagcccaguaauaua

SEQ ID NO: 1143683 - RNA, 19 nt, Homo sapiens
  misc_RNA (1)...(19): siRNA sense strand
uaucagaugcuguguggaa

SEQ ID NO: 1143684 - RNA, 19 nt, Homo sapiens
  misc_RNA (1)...(19): siRNA sense strand
uuaaagcccaguaauauag

SEQ ID NO: 1143685 - RNA, 19 nt, Homo sapiens
  misc_RNA (1)...(19): siRNA sense strand
caucgucgucugucaauga

SEQ ID NO: 1143686 - RNA, 19 nt, Homo sapiens
  misc_RNA (1)...(19): siRNA sense strand
gaacacacaauagaagagu

SEQ ID NO: 1143687 - RNA, 19 nt, Homo sapiens
  misc_RNA (1)...(19): siRNA sense strand
ucaggcaagggauuuguua

SEQ ID NO: 1143688 - RNA, 19 nt, Homo sapiens
  misc_RNA (1)...(19): siRNA sense strand
gaccuaaauaugcuggaua

SEQ ID NO: 1143689 - RNA, 19 nt, Homo sapiens
  misc_RNA (1)...(19): siRNA sense strand
cuacagagagcuaguucuu

SEQ ID NO: 1143690 - RNA, 19 nt, Homo sapiens
  misc_RNA (1)...(19): siRNA sense strand
gaugaaagggaacacacaa

SEQ ID NO: 1143691 - RNA, 19 nt, Homo sapiens
  misc_RNA (1)...(19): siRNA sense strand
guguagagauuggagauuc

SEQ ID NO: 1143692 - RNA, 19 nt, Homo sapiens
  misc_RNA (1)...(19): siRNA sense strand
gauugcacuuugaagauuc

SEQ ID NO: 1143693 - RNA, 19 nt, Homo sapiens
  misc_RNA (1)...(19): siRNA sense strand
aagcaagcgugacaacaau

SEQ ID NO: 1143694 - RNA, 19 nt, Homo sapiens
  misc_RNA (1)...(19): siRNA sense strand
aaagcccaguaauauagua

SEQ ID NO: 1143695 - RNA, 19 nt, Homo sapiens
  misc_RNA (1)...(19): siRNA sense strand
uaugaugacgccuuaugua

SEQ ID NO: 1143696 - RNA, 19 nt, Homo sapiens
  misc_RNA (1)...(19): siRNA sense strand
gagcuaguucuuaugaaau

SEQ ID NO: 1143697 - RNA, 19 nt, Homo sapiens
  misc_RNA (1)...(19): siRNA sense strand
ugucuucaaugucaacaga

SEQ ID NO: 1143698 - RNA, 19 nt, Homo sapiens
  misc_RNA (1)...(19): siRNA sense strand
uaugaugccauucuugaaa

SEQ ID NO: 1143699 - RNA, 19 nt, Homo sapiens
  misc_RNA (1)...(19): siRNA sense strand
ugauucagauggagcuaga

SEQ ID NO: 1143700 - RNA, 19 nt, Homo sapiens
  misc_RNA (1)...(19): siRNA sense strand
gaagaguggaaagaauuga

SEQ ID NO: 1143701 - RNA, 19 nt, Homo sapiens
  misc_RNA (1)...(19): siRNA sense strand
auagaagaguggaaagaau

SEQ ID NO: 1143702 - RNA, 19 nt, Homo sapiens
  misc_RNA (1)...(19): siRNA sense strand
ggacuuacguugaaaacag

SEQ ID NO: 1143703 - RNA, 19 nt, Homo sapiens
  misc_RNA (1)...(19): siRNA sense strand
cagaugcuguguggaauca

SEQ ID NO: 1143704 - RNA, 19 nt, Homo sapiens
  misc_RNA (1)...(19): siRNA sense strand
agagagcuaguucuuauga

SEQ ID NO: 1143705 - RNA, 19 nt, Homo sapiens
  misc_RNA (1)...(19): siRNA sense strand
gggaacacacaauagaaga

SEQ ID NO: 1143706 - RNA, 19 nt, Homo sapiens
  misc_RNA (1)...(19): siRNA sense strand
ugacaagcaguuagaugaa

SEQ ID NO: 1143707 - RNA, 19 nt, Homo sapiens
  misc_RNA (1)...(19): siRNA sense strand
caaagaucccugacaagca

SEQ ID NO: 1143708 - RNA, 19 nt, Homo sapiens
  misc_RNA (1)...(19): siRNA sense strand
caauagaagaguggaaaga

SEQ ID NO: 1143709 - RNA, 19 nt, Homo sapiens
  misc_RNA (1)...(19): siRNA sense strand
gucaacagauccgacuuug

SEQ ID NO: 1143710 - RNA, 19 nt, Homo sapiens
  misc_RNA (1)...(19): siRNA sense strand
cgucgucugucaaugaugu

SEQ ID NO: 1143711 - RNA, 19 nt, Homo sapiens
  misc_RNA (1)...(19): siRNA sense strand
gcucucagcauccaucauc

SEQ ID NO: 1143712 - RNA, 19 nt, Homo sapiens
  misc_RNA (1)...(19): siRNA sense strand
ccuagaagaauuucaagau

SEQ ID NO: 1143713 - RNA, 19 nt, Homo sapiens
  misc_RNA (1)...(19): siRNA sense strand
cagaagcuccaccaccaaa

SEQ ID NO: 1143714 - RNA, 19 nt, Homo sapiens
  misc_RNA (1)...(19): siRNA sense strand
gaacagcuuggaacaccau

SEQ ID NO: 1143715 - RNA, 19 nt, Homo sapiens
  misc_RNA (1)...(19): siRNA sense strand
agaguggaaagaauugaua

SEQ ID NO: 1143716 - RNA, 19 nt, Homo sapiens
  misc_RNA (1)...(19): siRNA sense strand
ggagcuagaucaugaaaga

SEQ ID NO: 1143717 - RNA, 19 nt, Homo sapiens
  misc_RNA (1)...(19): siRNA sense strand
gagaaacucuucccugaug

SEQ ID NO: 1143718 - RNA, 19 nt, Homo sapiens
  misc_RNA (1)...(19): siRNA sense strand
ucacaguccugaaacgaua

SEQ ID NO: 1143719 - RNA, 19 nt, Homo sapiens
  misc_RNA (1)...(19): siRNA sense strand
ugaaagaaauguugcaauc

SEQ ID NO: 1143720 - RNA, 19 nt, Homo sapiens
  misc_RNA (1)...(19): siRNA sense strand
gauuggagauucuacauuc

SEQ ID NO: 1143721 - RNA, 19 nt, Homo sapiens
  misc_RNA (1)...(19): siRNA sense strand
agaaaucccuagaagaauu

SEQ ID NO: 1143722 - RNA, 19 nt, Homo sapiens
  misc_RNA (1)...(19): siRNA sense strand
ggauauagcuuugagaaac

SEQ ID NO: 1143723 - RNA, 19 nt, Homo sapiens
  misc_RNA (1)...(19): siRNA sense strand
gaagcuaagccgaccauuu

SEQ ID NO: 1143724 - RNA, 19 nt, Homo sapiens
  misc_RNA (1)...(19): siRNA sense strand
gaacacaacaaacuuaaag

SEQ ID NO: 1143725 - RNA, 19 nt, Homo sapiens
  misc_RNA (1)...(19): siRNA sense strand
gcucauggaugcaaaucuu

SEQ ID NO: 1143726 - RNA, 19 nt, Homo sapiens
  misc_RNA (1)...(19): siRNA sense strand
acagagagcuaguucuuau

SEQ ID NO: 1143727 - RNA, 19 nt, Homo sapiens
  misc_RNA (1)...(19): siRNA sense strand
gaagcaagcgugacaacaa

SEQ ID NO: 1143728 - RNA, 19 nt, Homo sapiens
  misc_RNA (1)...(19): siRNA sense strand
ucaaugaugugucuucaau

SEQ ID NO: 1143729 - RNA, 19 nt, Homo sapiens
  misc_RNA (1)...(19): siRNA sense strand
ccacagaaaucccuagaag

SEQ ID NO: 1143730 - RNA, 19 nt, Homo sapiens
  misc_RNA (1)...(19): siRNA sense strand
cucaggagcucaaggaaua

SEQ ID NO: 1143731 - RNA, 19 nt, Homo sapiens
  misc_RNA (1)...(19): siRNA sense strand
gaugacgccuuauguagug

SEQ ID NO: 1143732 - RNA, 19 nt, Homo sapiens
  misc_RNA (1)...(19): siRNA sense strand
gaucaguggaauaaaguua

SEQ ID NO: 1143733 - RNA, 19 nt, Homo sapiens
  misc_RNA (1)...(19): siRNA sense strand
ugaaagggaacacacaaua

SEQ ID NO: 1143734 - RNA, 19 nt, Homo sapiens
  misc_RNA (1)...(19): siRNA sense strand
acagaaaucccuagaagaa

SEQ ID NO: 1143735 - RNA, 19 nt, Homo sapiens
  misc_RNA (1)...(19): siRNA sense strand
gacaagcaguuagaugaaa

SEQ ID NO: 1143736 - RNA, 19 nt, Homo sapiens
  misc_RNA (1)...(19): siRNA sense strand
ggaacaccauguccugaau

SEQ ID NO: 1143737 - RNA, 19 nt, Homo sapiens
  misc_RNA (1)...(19): siRNA sense strand
caccaaagaucccugacaa

SEQ ID NO: 1143738 - RNA, 19 nt, Homo sapiens
  misc_RNA (1)...(19): siRNA sense strand
agauggagcuagaucauga

SEQ ID NO: 1143739 - RNA, 19 nt, Homo sapiens
  misc_RNA (1)...(19): siRNA sense strand
aaccaagaauggaguuaua

SEQ ID NO: 1143740 - RNA, 19 nt, Homo sapiens
  misc_RNA (1)...(19): siRNA sense strand
gaaagggaacacacaauag

SEQ ID NO: 1143741 - RNA, 19 nt, Homo sapiens
  misc_RNA (1)...(19): siRNA sense strand
ggaacgaguuuuaugauga

SEQ ID NO: 1143742 - RNA, 19 nt, Homo sapiens
  misc_RNA (1)...(19): siRNA sense strand
gcaagcgugacaacaauuu

SEQ ID NO: 1143743 - RNA, 19 nt, Homo sapiens
  misc_RNA (1)...(19): siRNA sense strand
ucagaacacaacaaacuua

SEQ ID NO: 1143744 - RNA, 19 nt, Homo sapiens
  misc_RNA (1)...(19): siRNA sense strand
gaaaacagaccuaaauaug

SEQ ID NO: 1143745 - RNA, 19 nt, Homo sapiens
  misc_RNA (1)...(19): siRNA sense strand
gaaauguugcaaucaagaa

SEQ ID NO: 1143746 - RNA, 19 nt, Homo sapiens
  misc_RNA (1)...(19): siRNA sense strand
cuagaagaauuucaagaug

SEQ ID NO: 1143747 - RNA, 19 nt, Homo sapiens
  misc_RNA (1)...(19): siRNA sense strand
gaaagaaauguugcaauca

SEQ ID NO: 1143748 - RNA, 19 nt, Homo sapiens
  misc_RNA (1)...(19): siRNA sense strand
aaacagaccuaaauaugcu

SEQ ID NO: 1143749 - RNA, 19 nt, Homo sapiens
  misc_RNA (1)...(19): siRNA sense strand
gacuuaaagcccaguaaua

SEQ ID NO: 1143750 - RNA, 19 nt, Homo sapiens
  misc_RNA (1)...(19): siRNA sense strand
gcccaguaauauaguagua

SEQ ID NO: 1143751 - RNA, 19 nt, Homo sapiens
  misc_RNA (1)...(19): siRNA sense strand
gaggagagaaccaagaaug

SEQ ID NO: 1143752 - RNA, 19 nt, Homo sapiens
  misc_RNA (1)...(19): siRNA sense strand
caacacccguacaucaaug

SEQ ID NO: 1143753 - RNA, 19 nt, Homo sapiens
  misc_RNA (1)...(19): siRNA sense strand
agagcuaguucuuaugaaa

SEQ ID NO: 1143754 - RNA, 19 nt, Homo sapiens
  misc_RNA (1)...(19): siRNA sense strand
ggcaugggcuacaaggaaa

SEQ ID NO: 1143755 - RNA, 19 nt, Homo sapiens
  misc_RNA (1)...(19): siRNA sense strand
ggaaucaagcaccuucauu

SEQ ID NO: 1143756 - RNA, 19 nt, Homo sapiens
  misc_RNA (1)...(19): siRNA sense strand
uguccuaccuucucuauca

SEQ ID NO: 1143757 - RNA, 19 nt, Homo sapiens
  misc_RNA (1)...(19): siRNA sense strand
ggaauaguaugcgcagcuu

SEQ ID NO: 1143758 - RNA, 19 nt, Homo sapiens
  misc_RNA (1)...(19): siRNA sense strand
gaacaccauguccugaauu

SEQ ID NO: 1143759 - RNA, 19 nt, Homo sapiens
  misc_RNA (1)...(19): siRNA sense strand
gaagaaacugcaaccaaca

SEQ ID NO: 1143760 - RNA, 19 nt, Homo sapiens
  misc_RNA (1)...(19): siRNA sense strand
ccucugggcugcuguagau

SEQ ID NO: 1143761 - RNA, 19 nt, Homo sapiens
  misc_RNA (1)...(19): siRNA sense strand
gaaccaagaauggaguuau

SEQ ID NO: 1143762 - RNA, 19 nt, Homo sapiens
  misc_RNA (1)...(19): siRNA sense strand
ccaaaaugcugguaauaga

SEQ ID NO: 1143763 - RNA, 19 nt, Homo sapiens
  misc_RNA (1)...(19): siRNA sense strand
gauauagcuuugagaaacu

SEQ ID NO: 1143764 - RNA, 19 nt, Homo sapiens
  misc_RNA (1)...(19): siRNA sense strand
gcuagaucaugaaagaaug

SEQ ID NO: 1143765 - RNA, 19 nt, Homo sapiens
  misc_RNA (1)...(19): siRNA sense strand
ugaugugucuucaauguca

SEQ ID NO: 1143766 - RNA, 19 nt, Homo sapiens
  misc_RNA (1)...(19): siRNA sense strand
ggacuuaaagcccaguaau

SEQ ID NO: 1143767 - RNA, 19 nt, Homo sapiens
  misc_RNA (1)...(19): siRNA sense strand
gaagcuccaccaccaaaga

SEQ ID NO: 1143768 - RNA, 19 nt, Homo sapiens
  misc_RNA (1)...(19): siRNA sense strand
guccugaauucaugaagaa

SEQ ID NO: 1143769 - RNA, 19 nt, Homo sapiens
  misc_RNA (1)...(19): siRNA sense strand
gagagcuaguucuuaugaa

SEQ ID NO: 1143770 - RNA, 19 nt, Homo sapiens
  misc_RNA (1)...(19): siRNA sense strand
aaugaugugucuucaaugu

SEQ ID NO: 1143771 - RNA, 19 nt, Homo sapiens
  misc_RNA (1)...(19): siRNA sense strand
uagaagaguggaaagaauu

SEQ ID NO: 1143772 - RNA, 19 nt, Homo sapiens
  misc_RNA (1)...(19): siRNA sense strand
ggacugcaggaacgaguuu

SEQ ID NO: 1143773 - RNA, 19 nt, Homo sapiens
  misc_RNA (1)...(19): siRNA sense strand
gugcagcagugaucaaugg

SEQ ID NO: 1143774 - RNA, 19 nt, Homo sapiens
  misc_RNA (1)...(19): siRNA sense strand
aagcuaagccgaccauuuc

SEQ ID NO: 1143775 - RNA, 19 nt, Homo sapiens
  misc_RNA (1)...(19): siRNA sense strand
ggagagaaccaagaaugga

SEQ ID NO: 1143776 - RNA, 19 nt, Homo sapiens
  misc_RNA (1)...(19): siRNA sense strand
ugacucagaacacaacaaa

SEQ ID NO: 1143777 - RNA, 19 nt, Homo sapiens
  misc_RNA (1)...(19): siRNA sense strand
ugauugcacuuugaagauu

SEQ ID NO: 1143778 - RNA, 19 nt, Homo sapiens
  misc_RNA (1)...(19): siRNA sense strand
gccaagugauucagaugga

SEQ ID NO: 1143779 - RNA, 19 nt, Homo sapiens
  misc_RNA (1)...(19): siRNA sense strand
aaagggaacacacaauaga

SEQ ID NO: 1143780 - RNA, 19 nt, Homo sapiens
  misc_RNA (1)...(19): siRNA sense strand
gaauaguaugcgcagcuua

SEQ ID NO: 1143781 - RNA, 19 nt, Homo sapiens
  misc_RNA (1)...(19): siRNA sense strand
cagaacacaacaaacuuaa

SEQ ID NO: 1143782 - RNA, 19 nt, Homo sapiens
  misc_RNA (1)...(19): siRNA sense strand
cuuaaagcccaguaauaua

SEQ ID NO: 1143783 - RNA, 19 nt, Homo sapiens
  misc_RNA (1)...(19): siRNA sense strand
uaucagaugcuguguggaa

SEQ ID NO: 1143784 - RNA, 19 nt, Homo sapiens
  misc_RNA (1)...(19): siRNA sense strand
uuaaagcccaguaauauag

SEQ ID NO: 1143785 - RNA, 19 nt, Homo sapiens
  misc_RNA (1)...(19): siRNA sense strand
caucgucgucugucaauga

SEQ ID NO: 1143786 - RNA, 19 nt, Homo sapiens
  misc_RNA (1)...(19): siRNA sense strand
gaacacacaauagaagagu

SEQ ID NO: 1143787 - RNA, 19 nt, Homo sapiens
  misc_RNA (1)...(19): siRNA sense strand
ucaggcaagggauuuguua

SEQ ID NO: 1143788 - RNA, 19 nt, Homo sapiens
  misc_RNA (1)...(19): siRNA sense strand
gaccuaaauaugcuggaua

SEQ ID NO: 1143789 - RNA, 19 nt, Homo sapiens
  misc_RNA (1)...(19): siRNA sense strand
cuacagagagcuaguucuu

SEQ ID NO: 1143790 - RNA, 19 nt, Homo sapiens
  misc_RNA (1)...(19): siRNA sense strand
gaugaaagggaacacacaa

SEQ ID NO: 1143791 - RNA, 19 nt, Homo sapiens
  misc_RNA (1)...(19): siRNA sense strand
guguagagauuggagauuc

SEQ ID NO: 1143792 - RNA, 19 nt, Homo sapiens
  misc_RNA (1)...(19): siRNA sense strand
gauugcacuuugaagauuc

SEQ ID NO: 1143793 - RNA, 19 nt, Homo sapiens
  misc_RNA (1)...(19): siRNA sense strand
aagcaagcgugacaacaau

SEQ ID NO: 1143794 - RNA, 19 nt, Homo sapiens
  misc_RNA (1)...(19): siRNA sense strand
aaagcccaguaauauagua

SEQ ID NO: 1143795 - RNA, 19 nt, Homo sapiens
  misc_RNA (1)...(19): siRNA sense strand
uaugaugacgccuuaugua

SEQ ID NO: 1143796 - RNA, 19 nt, Homo sapiens
  misc_RNA (1)...(19): siRNA sense strand
gagcuaguucuuaugaaau

SEQ ID NO: 1143797 - RNA, 19 nt, Homo sapiens
  misc_RNA (1)...(19): siRNA sense strand
ugucuucaaugucaacaga

SEQ ID NO: 1143798 - RNA, 19 nt, Homo sapiens
  misc_RNA (1)...(19): siRNA sense strand
uaugaugccauucuugaaa

SEQ ID NO: 1143799 - RNA, 19 nt, Homo sapiens
  misc_RNA (1)...(19): siRNA sense strand
ugauucagauggagcuaga

SEQ ID NO: 1143800 - RNA, 19 nt, Homo sapiens
  misc_RNA (1)...(19): siRNA sense strand
gaagaguggaaagaauuga

SEQ ID NO: 1143801 - RNA, 19 nt, Homo sapiens
  misc_RNA (1)...(19): siRNA sense strand
auagaagaguggaaagaau

SEQ ID NO: 1143802 - RNA, 19 nt, Homo sapiens
  misc_RNA (1)...(19): siRNA sense strand
ggacuuacguugaaaacag

SEQ ID NO: 1143803 - RNA, 19 nt, Homo sapiens
  misc_RNA (1)...(19): siRNA sense strand
cagaugcuguguggaauca

SEQ ID NO: 1143804 - RNA, 19 nt, Homo sapiens
  misc_RNA (1)...(19): siRNA sense strand
agagagcuaguucuuauga

SEQ ID NO: 1143805 - RNA, 19 nt, Homo sapiens
  misc_RNA (1)...(19): siRNA sense strand
gggaacacacaauagaaga

SEQ ID NO: 1143806 - RNA, 19 nt, Homo sapiens
  misc_RNA (1)...(19): siRNA sense strand
ugacaagcaguuagaugaa

SEQ ID NO: 1143807 - RNA, 19 nt, Homo sapiens
  misc_RNA (1)...(19): siRNA sense strand
caaagaucccugacaagca

SEQ ID NO: 1143808 - RNA, 19 nt, Homo sapiens
  misc_RNA (1)...(19): siRNA sense strand
caauagaagaguggaaaga

SEQ ID NO: 1143809 - RNA, 19 nt, Homo sapiens
  misc_RNA (1)...(19): siRNA sense strand
gucaacagauccgacuuug

SEQ ID NO: 1143810 - RNA, 19 nt, Homo sapiens
  misc_RNA (1)...(19): siRNA sense strand
cgucgucugucaaugaugu

SEQ ID NO: 1143811 - RNA, 19 nt, Homo sapiens
  misc_RNA (1)...(19): siRNA sense strand
gcucucagcauccaucauc

SEQ ID NO: 1143812 - RNA, 19 nt, Homo sapiens
  misc_RNA (1)...(19): siRNA sense strand
ccuagaagaauuucaagau

SEQ ID NO: 1143813 - RNA, 19 nt, Homo sapiens
  misc_RNA (1)...(19): siRNA sense strand
cagaagcuccaccaccaaa

SEQ ID NO: 1143814 - RNA, 19 nt, Homo sapiens
  misc_RNA (1)...(19): siRNA sense strand
gaacagcuuggaacaccau

SEQ ID NO: 1143815 - RNA, 19 nt, Homo sapiens
  misc_RNA (1)...(19): siRNA sense strand
agaguggaaagaauugaua

SEQ ID NO: 1143816 - RNA, 19 nt, Homo sapiens
  misc_RNA (1)...(19): siRNA sense strand
gaacauauaugaccaaauc

SEQ ID NO: 1143817 - RNA, 19 nt, Homo sapiens
  misc_RNA (1)...(19): siRNA sense strand
gcaagugaguugaagauuu

SEQ ID NO: 1143818 - RNA, 19 nt, Homo sapiens
  misc_RNA (1)...(19): siRNA sense strand
gcaaacaaaucaaagguau

SEQ ID NO: 1143819 - RNA, 19 nt, Homo sapiens
  misc_RNA (1)...(19): siRNA sense strand
aaacaagcaucagaucuua

SEQ ID NO: 1143820 - RNA, 19 nt, Homo sapiens
  misc_RNA (1)...(19): siRNA sense strand
ccacugggcauauaaauuu

SEQ ID NO: 1143821 - RNA, 19 nt, Homo sapiens
  misc_RNA (1)...(19): siRNA sense strand
cgaguauuaucuagucuua

SEQ ID NO: 1143822 - RNA, 19 nt, Homo sapiens
  misc_RNA (1)...(19): siRNA sense strand
uaguagagauggugaaauu

SEQ ID NO: 1143823 - RNA, 19 nt, Homo sapiens
  misc_RNA (1)...(19): siRNA sense strand
gaaagaaaccaccaaacga

SEQ ID NO: 1143824 - RNA, 19 nt, Homo sapiens
  misc_RNA (1)...(19): siRNA sense strand
gagcuuauaguccacaaua

SEQ ID NO: 1143825 - RNA, 19 nt, Homo sapiens
  misc_RNA (1)...(19): siRNA sense strand
gaaacagaacaaucagaua

SEQ ID NO: 1143826 - RNA, 19 nt, Homo sapiens
  misc_RNA (1)...(19): siRNA sense strand
caucagaucuuagucuuau

SEQ ID NO: 1143827 - RNA, 19 nt, Homo sapiens
  misc_RNA (1)...(19): siRNA sense strand
gaaagauucagauaaguug

SEQ ID NO: 1143828 - RNA, 19 nt, Homo sapiens
  misc_RNA (1)...(19): siRNA sense strand
ggaaugagaccauguugga

SEQ ID NO: 1143829 - RNA, 19 nt, Homo sapiens
  misc_RNA (1)...(19): siRNA sense strand
ucacuuagguuuaguagag

SEQ ID NO: 1143830 - RNA, 19 nt, Homo sapiens
  misc_RNA (1)...(19): siRNA sense strand
acaaggagaucccacaaug

SEQ ID NO: 1143831 - RNA, 19 nt, Homo sapiens
  misc_RNA (1)...(19): siRNA sense strand
gaucuucacuggacacaag

SEQ ID NO: 1143832 - RNA, 19 nt, Homo sapiens
  misc_RNA (1)...(19): siRNA sense strand
guaaauuuguucugcguau

SEQ ID NO: 1143833 - RNA, 19 nt, Homo sapiens
  misc_RNA (1)...(19): siRNA sense strand
ucagauaaguuggauaaga

SEQ ID NO: 1143834 - RNA, 19 nt, Homo sapiens
  misc_RNA (1)...(19): siRNA sense strand
cagauaaguuggauaagau

SEQ ID NO: 1143835 - RNA, 19 nt, Homo sapiens
  misc_RNA (1)...(19): siRNA sense strand
uuugaugguuggagaauua

SEQ ID NO: 1143836 - RNA, 19 nt, Homo sapiens
  misc_RNA (1)...(19): siRNA sense strand
gagaucaggaauguuauua

SEQ ID NO: 1143837 - RNA, 19 nt, Homo sapiens
  misc_RNA (1)...(19): siRNA sense strand
gcaucagguucaauggaua

SEQ ID NO: 1143838 - RNA, 19 nt, Homo sapiens
  misc_RNA (1)...(19): siRNA sense strand
caagugaguugaagauuuu

SEQ ID NO: 1143839 - RNA, 19 nt, Homo sapiens
  misc_RNA (1)...(19): siRNA sense strand
ggaauguuauuaccaggau

SEQ ID NO: 1143840 - RNA, 19 nt, Homo sapiens
  misc_RNA (1)...(19): siRNA sense strand
ggacacaagggaccaauuc

SEQ ID NO: 1143841 - RNA, 19 nt, Homo sapiens
  misc_RNA (1)...(19): siRNA sense strand
gaugggaugccgcguagua

SEQ ID NO: 1143842 - RNA, 19 nt, Homo sapiens
  misc_RNA (1)...(19): siRNA sense strand
ggaugucacugaugauucu

SEQ ID NO: 1143843 - RNA, 19 nt, Homo sapiens
  misc_RNA (1)...(19): siRNA sense strand
cuaucagccuuuaagaaua

SEQ ID NO: 1143844 - RNA, 19 nt, Homo sapiens
  misc_RNA (1)...(19): siRNA sense strand
caaacaagcaucagaucuu

SEQ ID NO: 1143845 - RNA, 19 nt, Homo sapiens
  misc_RNA (1)...(19): siRNA sense strand
gagcaccucuacauugaca

SEQ ID NO: 1143846 - RNA, 19 nt, Homo sapiens
  misc_RNA (1)...(19): siRNA sense strand
cagaugaugucuuagaaag

SEQ ID NO: 1143847 - RNA, 19 nt, Homo sapiens
  misc_RNA (1)...(19): siRNA sense strand
gaaucccucuuccugaguu

SEQ ID NO: 1143848 - RNA, 19 nt, Homo sapiens
  misc_RNA (1)...(19): siRNA sense strand
uaaacgagaggcaaacaaa

SEQ ID NO: 1143849 - RNA, 19 nt, Homo sapiens
  misc_RNA (1)...(19): siRNA sense strand
ggagguggcggucaagcua

SEQ ID NO: 1143850 - RNA, 19 nt, Homo sapiens
  misc_RNA (1)...(19): siRNA sense strand
ccacaauguaugaagaaua

SEQ ID NO: 1143851 - RNA, 19 nt, Homo sapiens
  misc_RNA (1)...(19): siRNA sense strand
gaugugaauuguaccagau

SEQ ID NO: 1143852 - RNA, 19 nt, Homo sapiens
  misc_RNA (1)...(19): siRNA sense strand
guaguaagcaacagauaga

SEQ ID NO: 1143853 - RNA, 19 nt, Homo sapiens
  misc_RNA (1)...(19): siRNA sense strand
gcacauguacuuggagcua

SEQ ID NO: 1143854 - RNA, 19 nt, Homo sapiens
  misc_RNA (1)...(19): siRNA sense strand
acaaucaacaugagaauga

SEQ ID NO: 1143855 - RNA, 19 nt, Homo sapiens
  misc_RNA (1)...(19): siRNA sense strand
ggguaaaguuggaaguguu

SEQ ID NO: 1143856 - RNA, 19 nt, Homo sapiens
  misc_RNA (1)...(19): siRNA sense strand
gaaaacagcaagugaguug

SEQ ID NO: 1143857 - RNA, 19 nt, Homo sapiens
  misc_RNA (1)...(19): siRNA sense strand
ggaugaccuacgaguauua

SEQ ID NO: 1143858 - RNA, 19 nt, Homo sapiens
  misc_RNA (1)...(19): siRNA sense strand
aaggagaucccacaaugua

SEQ ID NO: 1143859 - RNA, 19 nt, Homo sapiens
  misc_RNA (1)...(19): siRNA sense strand
gauggcagagugcuucuuu

SEQ ID NO: 1143860 - RNA, 19 nt, Homo sapiens
  misc_RNA (1)...(19): siRNA sense strand
ccucuacauugacaucuuu

SEQ ID NO: 1143861 - RNA, 19 nt, Homo sapiens
  misc_RNA (1)...(19): siRNA sense strand
gagcuagucuacaaucaac

SEQ ID NO: 1143862 - RNA, 19 nt, Homo sapiens
  misc_RNA (1)...(19): siRNA sense strand
ggagaucccacaauguaug

SEQ ID NO: 1143863 - RNA, 19 nt, Homo sapiens
  misc_RNA (1)...(19): siRNA sense strand
gggacguccugaaugguaa

SEQ ID NO: 1143864 - RNA, 19 nt, Homo sapiens
  misc_RNA (1)...(19): siRNA sense strand
agaggcaucuucaggagaa

SEQ ID NO: 1143865 - RNA, 19 nt, Homo sapiens
  misc_RNA (1)...(19): siRNA sense strand
gaaguuccauggagaucag

SEQ ID NO: 1143866 - RNA, 19 nt, Homo sapiens
  misc_RNA (1)...(19): siRNA sense strand
ccauggagaucaggaaugu

SEQ ID NO: 1143867 - RNA, 19 nt, Homo sapiens
  misc_RNA (1)...(19): siRNA sense strand
gagaggcaaacaaaucaaa

SEQ ID NO: 1143868 - RNA, 19 nt, Homo sapiens
  misc_RNA (1)...(19): siRNA sense strand
ggagaucaggaauguuauu

SEQ ID NO: 1143869 - RNA, 19 nt, Homo sapiens
  misc_RNA (1)...(19): siRNA sense strand
gaccaaaucaacaccaguu

SEQ ID NO: 1143870 - RNA, 19 nt, Homo sapiens
  misc_RNA (1)...(19): siRNA sense strand
guaccagauuccauccaaa

SEQ ID NO: 1143871 - RNA, 19 nt, Homo sapiens
  misc_RNA (1)...(19): siRNA sense strand
gcaucagaucuuagucuua

SEQ ID NO: 1143872 - RNA, 19 nt, Homo sapiens
  misc_RNA (1)...(19): siRNA sense strand
gaaauugagguaccuuugg

SEQ ID NO: 1143873 - RNA, 19 nt, Homo sapiens
  misc_RNA (1)...(19): siRNA sense strand
cuacgaguauuaucuaguc

SEQ ID NO: 1143874 - RNA, 19 nt, Homo sapiens
  misc_RNA (1)...(19): siRNA sense strand
gggaacauauaugaccaaa

SEQ ID NO: 1143875 - RNA, 19 nt, Homo sapiens
  misc_RNA (1)...(19): siRNA sense strand
aggagcaccucuacauuga

SEQ ID NO: 1143876 - RNA, 19 nt, Homo sapiens
  misc_RNA (1)...(19): siRNA sense strand
cacaagggaccaauucauu

SEQ ID NO: 1143877 - RNA, 19 nt, Homo sapiens
  misc_RNA (1)...(19): siRNA sense strand
gaucaggaauguuauuacc

SEQ ID NO: 1143878 - RNA, 19 nt, Homo sapiens
  misc_RNA (1)...(19): siRNA sense strand
ggcaucagguucaauggau

SEQ ID NO: 1143879 - RNA, 19 nt, Homo sapiens
  misc_RNA (1)...(19): siRNA sense strand
gaagaaggaaaaccuaaaa

SEQ ID NO: 1143880 - RNA, 19 nt, Homo sapiens
  misc_RNA (1)...(19): siRNA sense strand
aaauugagguaccuuugga

SEQ ID NO: 1143881 - RNA, 19 nt, Homo sapiens
  misc_RNA (1)...(19): siRNA sense strand
caggagcaccucuacauug

SEQ ID NO: 1143882 - RNA, 19 nt, Homo sapiens
  misc_RNA (1)...(19): siRNA sense strand
gaccuacgaguauuaucua

SEQ ID NO: 1143883 - RNA, 19 nt, Homo sapiens
  misc_RNA (1)...(19): siRNA sense strand
caaucaacaugagaaugaa

SEQ ID NO: 1143884 - RNA, 19 nt, Homo sapiens
  misc_RNA (1)...(19): siRNA sense strand
gaaguguugcuguggaaga

SEQ ID NO: 1143885 - RNA, 19 nt, Homo sapiens
  misc_RNA (1)...(19): siRNA sense strand
caggaugaccuacgaguau

SEQ ID NO: 1143886 - RNA, 19 nt, Homo sapiens
  misc_RNA (1)...(19): siRNA sense strand
ggagcuagucuacaaucaa

SEQ ID NO: 1143887 - RNA, 19 nt, Homo sapiens
  misc_RNA (1)...(19): siRNA sense strand
agacggagguggcggucaa

SEQ ID NO: 1143888 - RNA, 19 nt, Homo sapiens
  misc_RNA (1)...(19): siRNA sense strand
agaauucacaggaguuauu

SEQ ID NO: 1143889 - RNA, 19 nt, Homo sapiens
  misc_RNA (1)...(19): siRNA sense strand
cacugggcauauaaauuua

SEQ ID NO: 1143890 - RNA, 19 nt, Homo sapiens
  misc_RNA (1)...(19): siRNA sense strand
cagguucaauggauaauac

SEQ ID NO: 1143891 - RNA, 19 nt, Homo sapiens
  misc_RNA (1)...(19): siRNA sense strand
gauauuggacaugguuuga

SEQ ID NO: 1143892 - RNA, 19 nt, Homo sapiens
  misc_RNA (1)...(19): siRNA sense strand
ggcaaacaaaucaaaggua

SEQ ID NO: 1143893 - RNA, 19 nt, Homo sapiens
  misc_RNA (1)...(19): siRNA sense strand
gagaucccacaauguauga

SEQ ID NO: 1143894 - RNA, 19 nt, Homo sapiens
  misc_RNA (1)...(19): siRNA sense strand
gaauucacaggaguuauug

SEQ ID NO: 1143895 - RNA, 19 nt, Homo sapiens
  misc_RNA (1)...(19): siRNA sense strand
auuaugggaugcuaucaaa

SEQ ID NO: 1143896 - RNA, 19 nt, Homo sapiens
  misc_RNA (1)...(19): siRNA sense strand
aaugguaacuguguaagga

SEQ ID NO: 1143897 - RNA, 19 nt, Homo sapiens
  misc_RNA (1)...(19): siRNA sense strand
cagauuccauccaaauucu

SEQ ID NO: 1143898 - RNA, 19 nt, Homo sapiens
  misc_RNA (1)...(19): siRNA sense strand
agaccacuaucagccuuua

SEQ ID NO: 1143899 - RNA, 19 nt, Homo sapiens
  misc_RNA (1)...(19): siRNA sense strand
caacaaggagaucccacaa

SEQ ID NO: 1143900 - RNA, 19 nt, Homo sapiens
  misc_RNA (1)...(19): siRNA sense strand
gauuccauccaaauucuaa

SEQ ID NO: 1143901 - RNA, 19 nt, Homo sapiens
  misc_RNA (1)...(19): siRNA sense strand
aaacagcaagugaguugaa

SEQ ID NO: 1143902 - RNA, 19 nt, Homo sapiens
  misc_RNA (1)...(19): siRNA sense strand
gagaaacagaacaaucaga

SEQ ID NO: 1143903 - RNA, 19 nt, Homo sapiens
  misc_RNA (1)...(19): siRNA sense strand
gaacacaugaaagggaaug

SEQ ID NO: 1143904 - RNA, 19 nt, Homo sapiens
  misc_RNA (1)...(19): siRNA sense strand
auggagaucaggaauguua

SEQ ID NO: 1143905 - RNA, 19 nt, Homo sapiens
  misc_RNA (1)...(19): siRNA sense strand
uauuggacaugguuugaug

SEQ ID NO: 1143906 - RNA, 19 nt, Homo sapiens
  misc_RNA (1)...(19): siRNA sense strand
ggaccaauucauuccuuga

SEQ ID NO: 1143907 - RNA, 19 nt, Homo sapiens
  misc_RNA (1)...(19): siRNA sense strand
gucagaguguggucgguaa

SEQ ID NO: 1143908 - RNA, 19 nt, Homo sapiens
  misc_RNA (1)...(19): siRNA sense strand
gggagaaaaugaagaagga

SEQ ID NO: 1143909 - RNA, 19 nt, Homo sapiens
  misc_RNA (1)...(19): siRNA sense strand
guauuucccgugacucgua

SEQ ID NO: 1143910 - RNA, 19 nt, Homo sapiens
  misc_RNA (1)...(19): siRNA sense strand
gaacagaaucccucuuccu

SEQ ID NO: 1143911 - RNA, 19 nt, Homo sapiens
  misc_RNA (1)...(19): siRNA sense strand
ugagaauucacaggaguua

SEQ ID NO: 1143912 - RNA, 19 nt, Homo sapiens
  misc_RNA (1)...(19): siRNA sense strand
caucagguucaauggauaa

SEQ ID NO: 1143913 - RNA, 19 nt, Homo sapiens
  misc_RNA (1)...(19): siRNA sense strand
auacuauaguggacugaaa

SEQ ID NO: 1143914 - RNA, 19 nt, Homo sapiens
  misc_RNA (1)...(19): siRNA sense strand
ccaauucauuccuugacau

SEQ ID NO: 1143915 - RNA, 19 nt, Homo sapiens
  misc_RNA (1)...(19): siRNA sense strand
ccagauuccauccaaauuc

SEQ ID NO: 1143916 - RNA, 19 nt, Homo sapiens
  misc_RNA (1)...(19): siRNA sense strand
gaacauauaugaccaaauc

SEQ ID NO: 1143917 - RNA, 19 nt, Homo sapiens
  misc_RNA (1)...(19): siRNA sense strand
gcaagugaguugaagauuu

SEQ ID NO: 1143918 - RNA, 19 nt, Homo sapiens
  misc_RNA (1)...(19): siRNA sense strand
gcaaacaaaucaaagguau

SEQ ID NO: 1143919 - RNA, 19 nt, Homo sapiens
  misc_RNA (1)...(19): siRNA sense strand
aaacaagcaucagaucuua

SEQ ID NO: 1143920 - RNA, 19 nt, Homo sapiens
  misc_RNA (1)...(19): siRNA sense strand
ccacugggcauauaaauuu

SEQ ID NO: 1143921 - RNA, 19 nt, Homo sapiens
  misc_RNA (1)...(19): siRNA sense strand
cgaguauuaucuagucuua

SEQ ID NO: 1143922 - RNA, 19 nt, Homo sapiens
  misc_RNA (1)...(19): siRNA sense strand
uaguagagauggugaaauu

SEQ ID NO: 1143923 - RNA, 19 nt, Homo sapiens
  misc_RNA (1)...(19): siRNA sense strand
gaaagaaaccaccaaacga

SEQ ID NO: 1143924 - RNA, 19 nt, Homo sapiens
  misc_RNA (1)...(19): siRNA sense strand
gagcuuauaguccacaaua

SEQ ID NO: 1143925 - RNA, 19 nt, Homo sapiens
  misc_RNA (1)...(19): siRNA sense strand
gaaacagaacaaucagaua

SEQ ID NO: 1143926 - RNA, 19 nt, Homo sapiens
  misc_RNA (1)...(19): siRNA sense strand
caucagaucuuagucuuau

SEQ ID NO: 1143927 - RNA, 19 nt, Homo sapiens
  misc_RNA (1)...(19): siRNA sense strand
gaaagauucagauaaguug

SEQ ID NO: 1143928 - RNA, 19 nt, Homo sapiens
  misc_RNA (1)...(19): siRNA sense strand
ggaaugagaccauguugga

SEQ ID NO: 1143929 - RNA, 19 nt, Homo sapiens
  misc_RNA (1)...(19): siRNA sense strand
ucacuuagguuuaguagag

SEQ ID NO: 1143930 - RNA, 19 nt, Homo sapiens
  misc_RNA (1)...(19): siRNA sense strand
acaaggagaucccacaaug

SEQ ID NO: 1143931 - RNA, 19 nt, Homo sapiens
  misc_RNA (1)...(19): siRNA sense strand
gaucuucacuggacacaag

SEQ ID NO: 1143932 - RNA, 19 nt, Homo sapiens
  misc_RNA (1)...(19): siRNA sense strand
guaaauuuguucugcguau

SEQ ID NO: 1143933 - RNA, 19 nt, Homo sapiens
  misc_RNA (1)...(19): siRNA sense strand
ucagauaaguuggauaaga

SEQ ID NO: 1143934 - RNA, 19 nt, Homo sapiens
  misc_RNA (1)...(19): siRNA sense strand
cagauaaguuggauaagau

SEQ ID NO: 1143935 - RNA, 19 nt, Homo sapiens
  misc_RNA (1)...(19): siRNA sense strand
uuugaugguuggagaauua

SEQ ID NO: 1143936 - RNA, 19 nt, Homo sapiens
  misc_RNA (1)...(19): siRNA sense strand
gagaucaggaauguuauua

SEQ ID NO: 1143937 - RNA, 19 nt, Homo sapiens
  misc_RNA (1)...(19): siRNA sense strand
gcaucagguucaauggaua

SEQ ID NO: 1143938 - RNA, 19 nt, Homo sapiens
  misc_RNA (1)...(19): siRNA sense strand
caagugaguugaagauuuu

SEQ ID NO: 1143939 - RNA, 19 nt, Homo sapiens
  misc_RNA (1)...(19): siRNA sense strand
ggaauguuauuaccaggau

SEQ ID NO: 1143940 - RNA, 19 nt, Homo sapiens
  misc_RNA (1)...(19): siRNA sense strand
ggacacaagggaccaauuc

SEQ ID NO: 1143941 - RNA, 19 nt, Homo sapiens
  misc_RNA (1)...(19): siRNA sense strand
gaugggaugccgcguagua

SEQ ID NO: 1143942 - RNA, 19 nt, Homo sapiens
  misc_RNA (1)...(19): siRNA sense strand
ggaugucacugaugauucu

SEQ ID NO: 1143943 - RNA, 19 nt, Homo sapiens
  misc_RNA (1)...(19): siRNA sense strand
cuaucagccuuuaagaaua

SEQ ID NO: 1143944 - RNA, 19 nt, Homo sapiens
  misc_RNA (1)...(19): siRNA sense strand
caaacaagcaucagaucuu

SEQ ID NO: 1143945 - RNA, 19 nt, Homo sapiens
  misc_RNA (1)...(19): siRNA sense strand
gagcaccucuacauugaca

SEQ ID NO: 1143946 - RNA, 19 nt, Homo sapiens
  misc_RNA (1)...(19): siRNA sense strand
cagaugaugucuuagaaag

SEQ ID NO: 1143947 - RNA, 19 nt, Homo sapiens
  misc_RNA (1)...(19): siRNA sense strand
gaaucccucuuccugaguu

SEQ ID NO: 1143948 - RNA, 19 nt, Homo sapiens
  misc_RNA (1)...(19): siRNA sense strand
uaaacgagaggcaaacaaa

SEQ ID NO: 1143949 - RNA, 19 nt, Homo sapiens
  misc_RNA (1)...(19): siRNA sense strand
ggagguggcggucaagcua

SEQ ID NO: 1143950 - RNA, 19 nt, Homo sapiens
  misc_RNA (1)...(19): siRNA sense strand
ccacaauguaugaagaaua

SEQ ID NO: 1143951 - RNA, 19 nt, Homo sapiens
  misc_RNA (1)...(19): siRNA sense strand
gaugugaauuguaccagau

SEQ ID NO: 1143952 - RNA, 19 nt, Homo sapiens
  misc_RNA (1)...(19): siRNA sense strand
guaguaagcaacagauaga

SEQ ID NO: 1143953 - RNA, 19 nt, Homo sapiens
  misc_RNA (1)...(19): siRNA sense strand
gcacauguacuuggagcua

SEQ ID NO: 1143954 - RNA, 19 nt, Homo sapiens
  misc_RNA (1)...(19): siRNA sense strand
acaaucaacaugagaauga

SEQ ID NO: 1143955 - RNA, 19 nt, Homo sapiens
  misc_RNA (1)...(19): siRNA sense strand
ggguaaaguuggaaguguu

SEQ ID NO: 1143956 - RNA, 19 nt, Homo sapiens
  misc_RNA (1)...(19): siRNA sense strand
gaaaacagcaagugaguug

SEQ ID NO: 1143957 - RNA, 19 nt, Homo sapiens
  misc_RNA (1)...(19): siRNA sense strand
ggaugaccuacgaguauua

SEQ ID NO: 1143958 - RNA, 19 nt, Homo sapiens
  misc_RNA (1)...(19): siRNA sense strand
aaggagaucccacaaugua

SEQ ID NO: 1143959 - RNA, 19 nt, Homo sapiens
  misc_RNA (1)...(19): siRNA sense strand
gauggcagagugcuucuuu

SEQ ID NO: 1143960 - RNA, 19 nt, Homo sapiens
  misc_RNA (1)...(19): siRNA sense strand
ccucuacauugacaucuuu

SEQ ID NO: 1143961 - RNA, 19 nt, Homo sapiens
  misc_RNA (1)...(19): siRNA sense strand
gagcuagucuacaaucaac

SEQ ID NO: 1143962 - RNA, 19 nt, Homo sapiens
  misc_RNA (1)...(19): siRNA sense strand
ggagaucccacaauguaug

SEQ ID NO: 1143963 - RNA, 19 nt, Homo sapiens
  misc_RNA (1)...(19): siRNA sense strand
gggacguccugaaugguaa

SEQ ID NO: 1143964 - RNA, 19 nt, Homo sapiens
  misc_RNA (1)...(19): siRNA sense strand
agaggcaucuucaggagaa

SEQ ID NO: 1143965 - RNA, 19 nt, Homo sapiens
  misc_RNA (1)...(19): siRNA sense strand
gaaguuccauggagaucag

SEQ ID NO: 1143966 - RNA, 19 nt, Homo sapiens
  misc_RNA (1)...(19): siRNA sense strand
ccauggagaucaggaaugu

SEQ ID NO: 1143967 - RNA, 19 nt, Homo sapiens
  misc_RNA (1)...(19): siRNA sense strand
gagaggcaaacaaaucaaa

SEQ ID NO: 1143968 - RNA, 19 nt, Homo sapiens
  misc_RNA (1)...(19): siRNA sense strand
ggagaucaggaauguuauu

SEQ ID NO: 1143969 - RNA, 19 nt, Homo sapiens
  misc_RNA (1)...(19): siRNA sense strand
gaccaaaucaacaccaguu

SEQ ID NO: 1143970 - RNA, 19 nt, Homo sapiens
  misc_RNA (1)...(19): siRNA sense strand
guaccagauuccauccaaa

SEQ ID NO: 1143971 - RNA, 19 nt, Homo sapiens
  misc_RNA (1)...(19): siRNA sense strand
gcaucagaucuuagucuua

SEQ ID NO: 1143972 - RNA, 19 nt, Homo sapiens
  misc_RNA (1)...(19): siRNA sense strand
gaaauugagguaccuuugg

SEQ ID NO: 1143973 - RNA, 19 nt, Homo sapiens
  misc_RNA (1)...(19): siRNA sense strand
cuacgaguauuaucuaguc

SEQ ID NO: 1143974 - RNA, 19 nt, Homo sapiens
  misc_RNA (1)...(19): siRNA sense strand
gggaacauauaugaccaaa

SEQ ID NO: 1143975 - RNA, 19 nt, Homo sapiens
  misc_RNA (1)...(19): siRNA sense strand
aggagcaccucuacauuga

SEQ ID NO: 1143976 - RNA, 19 nt, Homo sapiens
  misc_RNA (1)...(19): siRNA sense strand
cacaagggaccaauucauu

SEQ ID NO: 1143977 - RNA, 19 nt, Homo sapiens
  misc_RNA (1)...(19): siRNA sense strand
gaucaggaauguuauuacc

SEQ ID NO: 1143978 - RNA, 19 nt, Homo sapiens
  misc_RNA (1)...(19): siRNA sense strand
ggcaucagguucaauggau

SEQ ID NO: 1143979 - RNA, 19 nt, Homo sapiens
  misc_RNA (1)...(19): siRNA sense strand
gaagaaggaaaaccuaaaa

SEQ ID NO: 1143980 - RNA, 19 nt, Homo sapiens
  misc_RNA (1)...(19): siRNA sense strand
aaauugagguaccuuugga

SEQ ID NO: 1143981 - RNA, 19 nt, Homo sapiens
  misc_RNA (1)...(19): siRNA sense strand
caggagcaccucuacauug

SEQ ID NO: 1143982 - RNA, 19 nt, Homo sapiens
  misc_RNA (1)...(19): siRNA sense strand
gaccuacgaguauuaucua

SEQ ID NO: 1143983 - RNA, 19 nt, Homo sapiens
  misc_RNA (1)...(19): siRNA sense strand
caaucaacaugagaaugaa

SEQ ID NO: 1143984 - RNA, 19 nt, Homo sapiens
  misc_RNA (1)...(19): siRNA sense strand
gaaguguugcuguggaaga

SEQ ID NO: 1143985 - RNA, 19 nt, Homo sapiens
  misc_RNA (1)...(19): siRNA sense strand
caggaugaccuacgaguau

SEQ ID NO: 1143986 - RNA, 19 nt, Homo sapiens
  misc_RNA (1)...(19): siRNA sense strand
ggagcuagucuacaaucaa

SEQ ID NO: 1143987 - RNA, 19 nt, Homo sapiens
  misc_RNA (1)...(19): siRNA sense strand
agacggagguggcggucaa

SEQ ID NO: 1143988 - RNA, 19 nt, Homo sapiens
  misc_RNA (1)...(19): siRNA sense strand
agaauucacaggaguuauu

SEQ ID NO: 1143989 - RNA, 19 nt, Homo sapiens
  misc_RNA (1)...(19): siRNA sense strand
cacugggcauauaaauuua

SEQ ID NO: 1143990 - RNA, 19 nt, Homo sapiens
  misc_RNA (1)...(19): siRNA sense strand
cagguucaauggauaauac

SEQ ID NO: 1143991 - RNA, 19 nt, Homo sapiens
  misc_RNA (1)...(19): siRNA sense strand
gauauuggacaugguuuga

SEQ ID NO: 1143992 - RNA, 19 nt, Homo sapiens
  misc_RNA (1)...(19): siRNA sense strand
ggcaaacaaaucaaaggua

SEQ ID NO: 1143993 - RNA, 19 nt, Homo sapiens
  misc_RNA (1)...(19): siRNA sense strand
gagaucccacaauguauga

SEQ ID NO: 1143994 - RNA, 19 nt, Homo sapiens
  misc_RNA (1)...(19): siRNA sense strand
gaauucacaggaguuauug

SEQ ID NO: 1143995 - RNA, 19 nt, Homo sapiens
  misc_RNA (1)...(19): siRNA sense strand
auuaugggaugcuaucaaa

SEQ ID NO: 1143996 - RNA, 19 nt, Homo sapiens
  misc_RNA (1)...(19): siRNA sense strand
aaugguaacuguguaagga

SEQ ID NO: 1143997 - RNA, 19 nt, Homo sapiens
  misc_RNA (1)...(19): siRNA sense strand
cagauuccauccaaauucu

SEQ ID NO: 1143998 - RNA, 19 nt, Homo sapiens
  misc_RNA (1)...(19): siRNA sense strand
agaccacuaucagccuuua

SEQ ID NO: 1143999 - RNA, 19 nt, Homo sapiens
  misc_RNA (1)...(19): siRNA sense strand
caacaaggagaucccacaa

SEQ ID NO: 1144000 - RNA, 19 nt, Homo sapiens
  misc_RNA (1)...(19): siRNA sense strand
gauuccauccaaauucuaa

SEQ ID NO: 1144001 - RNA, 19 nt, Homo sapiens
  misc_RNA (1)...(19): siRNA sense strand
aaacagcaagugaguugaa

SEQ ID NO: 1144002 - RNA, 19 nt, Homo sapiens
  misc_RNA (1)...(19): siRNA sense strand
gagaaacagaacaaucaga

SEQ ID NO: 1144003 - RNA, 19 nt, Homo sapiens
  misc_RNA (1)...(19): siRNA sense strand
gaacacaugaaagggaaug

SEQ ID NO: 1144004 - RNA, 19 nt, Homo sapiens
  misc_RNA (1)...(19): siRNA sense strand
auggagaucaggaauguua

SEQ ID NO: 1144005 - RNA, 19 nt, Homo sapiens
  misc_RNA (1)...(19): siRNA sense strand
uauuggacaugguuugaug

SEQ ID NO: 1144006 - RNA, 19 nt, Homo sapiens
  misc_RNA (1)...(19): siRNA sense strand
ggaccaauucauuccuuga

SEQ ID NO: 1144007 - RNA, 19 nt, Homo sapiens
  misc_RNA (1)...(19): siRNA sense strand
gucagaguguggucgguaa

SEQ ID NO: 1144008 - RNA, 19 nt, Homo sapiens
  misc_RNA (1)...(19): siRNA sense strand
gggagaaaaugaagaagga

SEQ ID NO: 1144009 - RNA, 19 nt, Homo sapiens
  misc_RNA (1)...(19): siRNA sense strand
guauuucccgugacucgua

SEQ ID NO: 1144010 - RNA, 19 nt, Homo sapiens
  misc_RNA (1)...(19): siRNA sense strand
gaacagaaucccucuuccu

SEQ ID NO: 1144011 - RNA, 19 nt, Homo sapiens
  misc_RNA (1)...(19): siRNA sense strand
ugagaauucacaggaguua

SEQ ID NO: 1144012 - RNA, 19 nt, Homo sapiens
  misc_RNA (1)...(19): siRNA sense strand
caucagguucaauggauaa

SEQ ID NO: 1144013 - RNA, 19 nt, Homo sapiens
  misc_RNA (1)...(19): siRNA sense strand
auacuauaguggacugaaa

SEQ ID NO: 1144014 - RNA, 19 nt, Homo sapiens
  misc_RNA (1)...(19): siRNA sense strand
ccaauucauuccuugacau

SEQ ID NO: 1144015 - RNA, 19 nt, Homo sapiens
  misc_RNA (1)...(19): siRNA sense strand
ccagauuccauccaaauuc

SEQ ID NO: 1144016 - RNA, 19 nt, Homo sapiens
  misc_RNA (1)...(19): siRNA sense strand
ccaguggacuugucaauaa

SEQ ID NO: 1144017 - RNA, 19 nt, Homo sapiens
  misc_RNA (1)...(19): siRNA sense strand
gaacaagggucuccaaacg

SEQ ID NO: 1144018 - RNA, 19 nt, Homo sapiens
  misc_RNA (1)...(19): siRNA sense strand
gaccuuagauagcguuaau

SEQ ID NO: 1144019 - RNA, 19 nt, Homo sapiens
  misc_RNA (1)...(19): siRNA sense strand
gaaaugugaacaacacuau

SEQ ID NO: 1144020 - RNA, 19 nt, Homo sapiens
  misc_RNA (1)...(19): siRNA sense strand
gaugaugaccugccaaaug

SEQ ID NO: 1144021 - RNA, 19 nt, Homo sapiens
  misc_RNA (1)...(19): siRNA sense strand
ccaaaugugaccuuagaua

SEQ ID NO: 1144022 - RNA, 19 nt, Homo sapiens
  misc_RNA (1)...(19): siRNA sense strand
aaacagagcuuuuggaauc

SEQ ID NO: 1144023 - RNA, 19 nt, Homo sapiens
  misc_RNA (1)...(19): siRNA sense strand
ccaugaauuuacagucuaa

SEQ ID NO: 1144024 - RNA, 19 nt, Homo sapiens
  misc_RNA (1)...(19): siRNA sense strand
ggaggacucguuaucugua

SEQ ID NO: 1144025 - RNA, 19 nt, Homo sapiens
  misc_RNA (1)...(19): siRNA sense strand
ggaaaugugaacaacacua

SEQ ID NO: 1144026 - RNA, 19 nt, Homo sapiens
  misc_RNA (1)...(19): siRNA sense strand
guagaucacuuccaaacac

SEQ ID NO: 1144027 - RNA, 19 nt, Homo sapiens
  misc_RNA (1)...(19): siRNA sense strand
gagaggccauggcaaagca

SEQ ID NO: 1144028 - RNA, 19 nt, Homo sapiens
  misc_RNA (1)...(19): siRNA sense strand
cuccaaacguccacaacua

SEQ ID NO: 1144029 - RNA, 19 nt, Homo sapiens
  misc_RNA (1)...(19): siRNA sense strand
caaaugugaccuuagauag

SEQ ID NO: 1144030 - RNA, 19 nt, Homo sapiens
  misc_RNA (1)...(19): siRNA sense strand
cuaacaaacugagucaugu

SEQ ID NO: 1144031 - RNA, 19 nt, Homo sapiens
  misc_RNA (1)...(19): siRNA sense strand
caacaccuuugagaacaga

SEQ ID NO: 1144032 - RNA, 19 nt, Homo sapiens
  misc_RNA (1)...(19): siRNA sense strand
caagucccaugaauuuaca

SEQ ID NO: 1144033 - RNA, 19 nt, Homo sapiens
  misc_RNA (1)...(19): siRNA sense strand
gaucacuuccaaacacaaa

SEQ ID NO: 1144034 - RNA, 19 nt, Homo sapiens
  misc_RNA (1)...(19): siRNA sense strand
ugccaaaugugaccuuaga

SEQ ID NO: 1144035 - RNA, 19 nt, Homo sapiens
  misc_RNA (1)...(19): siRNA sense strand
caguggacuugucaauaaa

SEQ ID NO: 1144036 - RNA, 19 nt, Homo sapiens
  misc_RNA (1)...(19): siRNA sense strand
augaugaccugccaaaugu

SEQ ID NO: 1144037 - RNA, 19 nt, Homo sapiens
  misc_RNA (1)...(19): siRNA sense strand
gcaucugccuccucaccuu

SEQ ID NO: 1144038 - RNA, 19 nt, Homo sapiens
  misc_RNA (1)...(19): siRNA sense strand
aaagugacagugaugauga

SEQ ID NO: 1144039 - RNA, 19 nt, Homo sapiens
  misc_RNA (1)...(19): siRNA sense strand
gaugaccugccaaauguga

SEQ ID NO: 1144040 - RNA, 19 nt, Homo sapiens
  misc_RNA (1)...(19): siRNA sense strand
gaggacucguuaucuguag

SEQ ID NO: 1144041 - RNA, 19 nt, Homo sapiens
  misc_RNA (1)...(19): siRNA sense strand
gccaguggacuugucaaua

SEQ ID NO: 1144042 - RNA, 19 nt, Homo sapiens
  misc_RNA (1)...(19): siRNA sense strand
aagaauaucaacaccuuug

SEQ ID NO: 1144043 - RNA, 19 nt, Homo sapiens
  misc_RNA (1)...(19): siRNA sense strand
ugacagugaugaugaugac

SEQ ID NO: 1144044 - RNA, 19 nt, Homo sapiens
  misc_RNA (1)...(19): siRNA sense strand
cccaugaauuuacagucua

SEQ ID NO: 1144045 - RNA, 19 nt, Homo sapiens
  misc_RNA (1)...(19): siRNA sense strand
uaucacaucaguaucuuca

SEQ ID NO: 1144046 - RNA, 19 nt, Homo sapiens
  misc_RNA (1)...(19): siRNA sense strand
gaucuacggcccuuuccau

SEQ ID NO: 1144047 - RNA, 19 nt, Homo sapiens
  misc_RNA (1)...(19): siRNA sense strand
uagauagcguuaaugaaac

SEQ ID NO: 1144048 - RNA, 19 nt, Homo sapiens
  misc_RNA (1)...(19): siRNA sense strand
ccuuagauagcguuaauga

SEQ ID NO: 1144049 - RNA, 19 nt, Homo sapiens
  misc_RNA (1)...(19): siRNA sense strand
acagaauguuaaugcuuga

SEQ ID NO: 1144050 - RNA, 19 nt, Homo sapiens
  misc_RNA (1)...(19): siRNA sense strand
aaugugaacaacacuauug

SEQ ID NO: 1144051 - RNA, 19 nt, Homo sapiens
  misc_RNA (1)...(19): siRNA sense strand
uuccauagccagagcagua

SEQ ID NO: 1144052 - RNA, 19 nt, Homo sapiens
  misc_RNA (1)...(19): siRNA sense strand
ccggaggacucguuaucug

SEQ ID NO: 1144053 - RNA, 19 nt, Homo sapiens
  misc_RNA (1)...(19): siRNA sense strand
guuaucacaucaguaucuu

SEQ ID NO: 1144054 - RNA, 19 nt, Homo sapiens
  misc_RNA (1)...(19): siRNA sense strand
uagaucacuuccaaacaca

SEQ ID NO: 1144055 - RNA, 19 nt, Homo sapiens
  misc_RNA (1)...(19): siRNA sense strand
ucaagucccaugaauuuac

SEQ ID NO: 1144056 - RNA, 19 nt, Homo sapiens
  misc_RNA (1)...(19): siRNA sense strand
aggccuaucucccagacaa

SEQ ID NO: 1144057 - RNA, 19 nt, Homo sapiens
  misc_RNA (1)...(19): siRNA sense strand
ucuaacaaacugagucaug

SEQ ID NO: 1144058 - RNA, 19 nt, Homo sapiens
  misc_RNA (1)...(19): siRNA sense strand
cuacggcccuuuccauagc

SEQ ID NO: 1144059 - RNA, 19 nt, Homo sapiens
  misc_RNA (1)...(19): siRNA sense strand
ugggagaggccauggcaaa

SEQ ID NO: 1144060 - RNA, 19 nt, Homo sapiens
  misc_RNA (1)...(19): siRNA sense strand
caaacugagucauguucac

SEQ ID NO: 1144061 - RNA, 19 nt, Homo sapiens
  misc_RNA (1)...(19): siRNA sense strand
guggacuugucaauaaaca

SEQ ID NO: 1144062 - RNA, 19 nt, Homo sapiens
  misc_RNA (1)...(19): siRNA sense strand
ccugccaaaugugaccuua

SEQ ID NO: 1144063 - RNA, 19 nt, Homo sapiens
  misc_RNA (1)...(19): siRNA sense strand
uaucuucagcgucaucuuc

SEQ ID NO: 1144064 - RNA, 19 nt, Homo sapiens
  misc_RNA (1)...(19): siRNA sense strand
ggccauggcaaagcacaaa

SEQ ID NO: 1144065 - RNA, 19 nt, Homo sapiens
  misc_RNA (1)...(19): siRNA sense strand
ucccaugaauuuacagucu

SEQ ID NO: 1144066 - RNA, 19 nt, Homo sapiens
  misc_RNA (1)...(19): siRNA sense strand
caucuucgucaacaguauu

SEQ ID NO: 1144067 - RNA, 19 nt, Homo sapiens
  misc_RNA (1)...(19): siRNA sense strand
ccaaacguccacaacuauc

SEQ ID NO: 1144068 - RNA, 19 nt, Homo sapiens
  misc_RNA (1)...(19): siRNA sense strand
gaugggaugccggcaguca

SEQ ID NO: 1144069 - RNA, 19 nt, Homo sapiens
  misc_RNA (1)...(19): siRNA sense strand
guuaaugaaacuggaucua

SEQ ID NO: 1144070 - RNA, 19 nt, Homo sapiens
  misc_RNA (1)...(19): siRNA sense strand
cuaucucccagacaaagua

SEQ ID NO: 1144071 - RNA, 19 nt, Homo sapiens
  misc_RNA (1)...(19): siRNA sense strand
ccaguggacuugucaauaa

SEQ ID NO: 1144072 - RNA, 19 nt, Homo sapiens
  misc_RNA (1)...(19): siRNA sense strand
gaacaagggucuccaaacg

SEQ ID NO: 1144073 - RNA, 19 nt, Homo sapiens
  misc_RNA (1)...(19): siRNA sense strand
gaccuuagauagcguuaau

SEQ ID NO: 1144074 - RNA, 19 nt, Homo sapiens
  misc_RNA (1)...(19): siRNA sense strand
gaaaugugaacaacacuau

SEQ ID NO: 1144075 - RNA, 19 nt, Homo sapiens
  misc_RNA (1)...(19): siRNA sense strand
gaugaugaccugccaaaug

SEQ ID NO: 1144076 - RNA, 19 nt, Homo sapiens
  misc_RNA (1)...(19): siRNA sense strand
ccaaaugugaccuuagaua

SEQ ID NO: 1144077 - RNA, 19 nt, Homo sapiens
  misc_RNA (1)...(19): siRNA sense strand
aaacagagcuuuuggaauc

SEQ ID NO: 1144078 - RNA, 19 nt, Homo sapiens
  misc_RNA (1)...(19): siRNA sense strand
ccaugaauuuacagucuaa

SEQ ID NO: 1144079 - RNA, 19 nt, Homo sapiens
  misc_RNA (1)...(19): siRNA sense strand
ggaggacucguuaucugua

SEQ ID NO: 1144080 - RNA, 19 nt, Homo sapiens
  misc_RNA (1)...(19): siRNA sense strand
ggaaaugugaacaacacua

SEQ ID NO: 1144081 - RNA, 19 nt, Homo sapiens
  misc_RNA (1)...(19): siRNA sense strand
guagaucacuuccaaacac

SEQ ID NO: 1144082 - RNA, 19 nt, Homo sapiens
  misc_RNA (1)...(19): siRNA sense strand
gagaggccauggcaaagca

SEQ ID NO: 1144083 - RNA, 19 nt, Homo sapiens
  misc_RNA (1)...(19): siRNA sense strand
cuccaaacguccacaacua

SEQ ID NO: 1144084 - RNA, 19 nt, Homo sapiens
  misc_RNA (1)...(19): siRNA sense strand
caaaugugaccuuagauag

SEQ ID NO: 1144085 - RNA, 19 nt, Homo sapiens
  misc_RNA (1)...(19): siRNA sense strand
cuaacaaacugagucaugu

SEQ ID NO: 1144086 - RNA, 19 nt, Homo sapiens
  misc_RNA (1)...(19): siRNA sense strand
caacaccuuugagaacaga

SEQ ID NO: 1144087 - RNA, 19 nt, Homo sapiens
  misc_RNA (1)...(19): siRNA sense strand
caagucccaugaauuuaca

SEQ ID NO: 1144088 - RNA, 19 nt, Homo sapiens
  misc_RNA (1)...(19): siRNA sense strand
gaucacuuccaaacacaaa

SEQ ID NO: 1144089 - RNA, 19 nt, Homo sapiens
  misc_RNA (1)...(19): siRNA sense strand
ugccaaaugugaccuuaga

SEQ ID NO: 1144090 - RNA, 19 nt, Homo sapiens
  misc_RNA (1)...(19): siRNA sense strand
caguggacuugucaauaaa

SEQ ID NO: 1144091 - RNA, 19 nt, Homo sapiens
  misc_RNA (1)...(19): siRNA sense strand
augaugaccugccaaaugu

SEQ ID NO: 1144092 - RNA, 19 nt, Homo sapiens
  misc_RNA (1)...(19): siRNA sense strand
gcaucugccuccucaccuu

SEQ ID NO: 1144093 - RNA, 19 nt, Homo sapiens
  misc_RNA (1)...(19): siRNA sense strand
aaagugacagugaugauga

SEQ ID NO: 1144094 - RNA, 19 nt, Homo sapiens
  misc_RNA (1)...(19): siRNA sense strand
gaugaccugccaaauguga

SEQ ID NO: 1144095 - RNA, 19 nt, Homo sapiens
  misc_RNA (1)...(19): siRNA sense strand
gaggacucguuaucuguag

SEQ ID NO: 1144096 - RNA, 19 nt, Homo sapiens
  misc_RNA (1)...(19): siRNA sense strand
gccaguggacuugucaaua

SEQ ID NO: 1144097 - RNA, 19 nt, Homo sapiens
  misc_RNA (1)...(19): siRNA sense strand
aagaauaucaacaccuuug

SEQ ID NO: 1144098 - RNA, 19 nt, Homo sapiens
  misc_RNA (1)...(19): siRNA sense strand
ugacagugaugaugaugac

SEQ ID NO: 1144099 - RNA, 19 nt, Homo sapiens
  misc_RNA (1)...(19): siRNA sense strand
cccaugaauuuacagucua

SEQ ID NO: 1144100 - RNA, 19 nt, Homo sapiens
  misc_RNA (1)...(19): siRNA sense strand
uaucacaucaguaucuuca

SEQ ID NO: 1144101 - RNA, 19 nt, Homo sapiens
  misc_RNA (1)...(19): siRNA sense strand
gaucuacggcccuuuccau

SEQ ID NO: 1144102 - RNA, 19 nt, Homo sapiens
  misc_RNA (1)...(19): siRNA sense strand
uagauagcguuaaugaaac

SEQ ID NO: 1144103 - RNA, 19 nt, Homo sapiens
  misc_RNA (1)...(19): siRNA sense strand
ccuuagauagcguuaauga

SEQ ID NO: 1144104 - RNA, 19 nt, Homo sapiens
  misc_RNA (1)...(19): siRNA sense strand
acagaauguuaaugcuuga

SEQ ID NO: 1144105 - RNA, 19 nt, Homo sapiens
  misc_RNA (1)...(19): siRNA sense strand
aaugugaacaacacuauug

SEQ ID NO: 1144106 - RNA, 19 nt, Homo sapiens
  misc_RNA (1)...(19): siRNA sense strand
uuccauagccagagcagua

SEQ ID NO: 1144107 - RNA, 19 nt, Homo sapiens
  misc_RNA (1)...(19): siRNA sense strand
ccggaggacucguuaucug

SEQ ID NO: 1144108 - RNA, 19 nt, Homo sapiens
  misc_RNA (1)...(19): siRNA sense strand
guuaucacaucaguaucuu

SEQ ID NO: 1144109 - RNA, 19 nt, Homo sapiens
  misc_RNA (1)...(19): siRNA sense strand
uagaucacuuccaaacaca

SEQ ID NO: 1144110 - RNA, 19 nt, Homo sapiens
  misc_RNA (1)...(19): siRNA sense strand
ucaagucccaugaauuuac

SEQ ID NO: 1144111 - RNA, 19 nt, Homo sapiens
  misc_RNA (1)...(19): siRNA sense strand
aggccuaucucccagacaa

SEQ ID NO: 1144112 - RNA, 19 nt, Homo sapiens
  misc_RNA (1)...(19): siRNA sense strand
ucuaacaaacugagucaug

SEQ ID NO: 1144113 - RNA, 19 nt, Homo sapiens
  misc_RNA (1)...(19): siRNA sense strand
cuacggcccuuuccauagc

SEQ ID NO: 1144114 - RNA, 19 nt, Homo sapiens
  misc_RNA (1)...(19): siRNA sense strand
ugggagaggccauggcaaa

SEQ ID NO: 1144115 - RNA, 19 nt, Homo sapiens
  misc_RNA (1)...(19): siRNA sense strand
caaacugagucauguucac

SEQ ID NO: 1144116 - RNA, 19 nt, Homo sapiens
  misc_RNA (1)...(19): siRNA sense strand
guggacuugucaauaaaca

SEQ ID NO: 1144117 - RNA, 19 nt, Homo sapiens
  misc_RNA (1)...(19): siRNA sense strand
ccugccaaaugugaccuua

SEQ ID NO: 1144118 - RNA, 19 nt, Homo sapiens
  misc_RNA (1)...(19): siRNA sense strand
uaucuucagcgucaucuuc

SEQ ID NO: 1144119 - RNA, 19 nt, Homo sapiens
  misc_RNA (1)...(19): siRNA sense strand
ggccauggcaaagcacaaa

SEQ ID NO: 1144120 - RNA, 19 nt, Homo sapiens
  misc_RNA (1)...(19): siRNA sense strand
ucccaugaauuuacagucu

SEQ ID NO: 1144121 - RNA, 19 nt, Homo sapiens
  misc_RNA (1)...(19): siRNA sense strand
caucuucgucaacaguauu

SEQ ID NO: 1144122 - RNA, 19 nt, Homo sapiens
  misc_RNA (1)...(19): siRNA sense strand
ccaaacguccacaacuauc

SEQ ID NO: 1144123 - RNA, 19 nt, Homo sapiens
  misc_RNA (1)...(19): siRNA sense strand
gaugggaugccggcaguca

SEQ ID NO: 1144124 - RNA, 19 nt, Homo sapiens
  misc_RNA (1)...(19): siRNA sense strand
guuaaugaaacuggaucua

SEQ ID NO: 1144125 - RNA, 19 nt, Homo sapiens
  misc_RNA (1)...(19): siRNA sense strand
cuaucucccagacaaagua

SEQ ID NO: 1144126 - RNA, 19 nt, Homo sapiens
  misc_RNA (1)...(19): siRNA sense strand
gaacaagugucacaauuac

SEQ ID NO: 1144127 - RNA, 19 nt, Homo sapiens
  misc_RNA (1)...(19): siRNA sense strand
ggaacaagugucacaauua

SEQ ID NO: 1144128 - RNA, 19 nt, Homo sapiens
  misc_RNA (1)...(19): siRNA sense strand
caaucgaccuuuacugaaa

SEQ ID NO: 1144129 - RNA, 19 nt, Homo sapiens
  misc_RNA (1)...(19): siRNA sense strand
gaaagucacaaccaauaaa

SEQ ID NO: 1144130 - RNA, 19 nt, Homo sapiens
  misc_RNA (1)...(19): siRNA sense strand
ggaaagucacaaccaauaa

SEQ ID NO: 1144131 - RNA, 19 nt, Homo sapiens
  misc_RNA (1)...(19): siRNA sense strand
ccacauugccuuacugaaa

SEQ ID NO: 1144132 - RNA, 19 nt, Homo sapiens
  misc_RNA (1)...(19): siRNA sense strand
aaagaaauguucgccauga

SEQ ID NO: 1144133 - RNA, 19 nt, Homo sapiens
  misc_RNA (1)...(19): siRNA sense strand
caauaaaugucuggaacaa

SEQ ID NO: 1144134 - RNA, 19 nt, Homo sapiens
  misc_RNA (1)...(19): siRNA sense strand
gaaacucagauaaaugcua

SEQ ID NO: 1144135 - RNA, 19 nt, Homo sapiens
  misc_RNA (1)...(19): siRNA sense strand
aaaggaaagucacaaccaa

SEQ ID NO: 1144136 - RNA, 19 nt, Homo sapiens
  misc_RNA (1)...(19): siRNA sense strand
uggaacaagugucacaauu

SEQ ID NO: 1144137 - RNA, 19 nt, Homo sapiens
  misc_RNA (1)...(19): siRNA sense strand
ucgcuucaaucgaccuuua

SEQ ID NO: 1144138 - RNA, 19 nt, Homo sapiens
  misc_RNA (1)...(19): siRNA sense strand
auaaaugucuggaacaagu

SEQ ID NO: 1144139 - RNA, 19 nt, Homo sapiens
  misc_RNA (1)...(19): siRNA sense strand
cacauugccuuacugaaau

SEQ ID NO: 1144140 - RNA, 19 nt, Homo sapiens
  misc_RNA (1)...(19): siRNA sense strand
gaccuuuacugaaacaaca

SEQ ID NO: 1144141 - RNA, 19 nt, Homo sapiens
  misc_RNA (1)...(19): siRNA sense strand
gcaaugaagaagaggagaa

SEQ ID NO: 1144142 - RNA, 19 nt, Homo sapiens
  misc_RNA (1)...(19): siRNA sense strand
aggaaagucacaaccaaua

SEQ ID NO: 1144143 - RNA, 19 nt, Homo sapiens
  misc_RNA (1)...(19): siRNA sense strand
agaaauguucgccaugaaa

SEQ ID NO: 1144144 - RNA, 19 nt, Homo sapiens
  misc_RNA (1)...(19): siRNA sense strand
caaugaagaagaggagaaa

SEQ ID NO: 1144145 - RNA, 19 nt, Homo sapiens
  misc_RNA (1)...(19): siRNA sense strand
aagaaauguucgccaugaa

SEQ ID NO: 1144146 - RNA, 19 nt, Homo sapiens
  misc_RNA (1)...(19): siRNA sense strand
acaagugucacaauuacaa

SEQ ID NO: 1144147 - RNA, 19 nt, Homo sapiens
  misc_RNA (1)...(19): siRNA sense strand
cuacucaggcaaugaagaa

SEQ ID NO: 1144148 - RNA, 19 nt, Homo sapiens
  misc_RNA (1)...(19): siRNA sense strand
gaaauguucgccaugaaaa

SEQ ID NO: 1144149 - RNA, 19 nt, Homo sapiens
  misc_RNA (1)...(19): siRNA sense strand
uaaaugcuacucaggcaau

SEQ ID NO: 1144150 - RNA, 19 nt, Homo sapiens
  misc_RNA (1)...(19): siRNA sense strand
ucaaucgaccuuuacugaa

SEQ ID NO: 1144151 - RNA, 19 nt, Homo sapiens
  misc_RNA (1)...(19): siRNA sense strand
ugucacaauuacaaggauu

SEQ ID NO: 1144152 - RNA, 19 nt, Homo sapiens
  misc_RNA (1)...(19): siRNA sense strand
acugaaauccagagccuaa

SEQ ID NO: 1144153 - RNA, 19 nt, Homo sapiens
  misc_RNA (1)...(19): siRNA sense strand
ccaauaaaugucuggaaca

SEQ ID NO: 1144154 - RNA, 19 nt, Homo sapiens
  misc_RNA (1)...(19): siRNA sense strand
agucacaaccaauaaaugu

SEQ ID NO: 1144155 - RNA, 19 nt, Homo sapiens
  misc_RNA (1)...(19): siRNA sense strand
ucacaaccaauaaaugucu

SEQ ID NO: 1144156 - RNA, 19 nt, Homo sapiens
  misc_RNA (1)...(19): siRNA sense strand
cggaaacucagauaaaugc

SEQ ID NO: 1144157 - RNA, 19 nt, Homo sapiens
  misc_RNA (1)...(19): siRNA sense strand
uucaaucgaccuuuacuga

SEQ ID NO: 1144158 - RNA, 19 nt, Homo sapiens
  misc_RNA (1)...(19): siRNA sense strand
auucggaaacucagauaaa

SEQ ID NO: 1144159 - RNA, 19 nt, Homo sapiens
  misc_RNA (1)...(19): siRNA sense strand
uucggaaacucagauaaau

SEQ ID NO: 1144160 - RNA, 19 nt, Homo sapiens
  misc_RNA (1)...(19): siRNA sense strand
gaacaagugucacaauuac

SEQ ID NO: 1144161 - RNA, 19 nt, Homo sapiens
  misc_RNA (1)...(19): siRNA sense strand
ggaacaagugucacaauua

SEQ ID NO: 1144162 - RNA, 19 nt, Homo sapiens
  misc_RNA (1)...(19): siRNA sense strand
caaucgaccuuuacugaaa

SEQ ID NO: 1144163 - RNA, 19 nt, Homo sapiens
  misc_RNA (1)...(19): siRNA sense strand
gaaagucacaaccaauaaa

SEQ ID NO: 1144164 - RNA, 19 nt, Homo sapiens
  misc_RNA (1)...(19): siRNA sense strand
ggaaagucacaaccaauaa

SEQ ID NO: 1144165 - RNA, 19 nt, Homo sapiens
  misc_RNA (1)...(19): siRNA sense strand
caauaaaugucuggaacaa

SEQ ID NO: 1144166 - RNA, 19 nt, Homo sapiens
  misc_RNA (1)...(19): siRNA sense strand
gaaacucagauaaaugcua

SEQ ID NO: 1144167 - RNA, 19 nt, Homo sapiens
  misc_RNA (1)...(19): siRNA sense strand
aaaggaaagucacaaccaa

SEQ ID NO: 1144168 - RNA, 19 nt, Homo sapiens
  misc_RNA (1)...(19): siRNA sense strand
uggaacaagugucacaauu

SEQ ID NO: 1144169 - RNA, 19 nt, Homo sapiens
  misc_RNA (1)...(19): siRNA sense strand
ucgcuucaaucgaccuuua

SEQ ID NO: 1144170 - RNA, 19 nt, Homo sapiens
  misc_RNA (1)...(19): siRNA sense strand
auaaaugucuggaacaagu

SEQ ID NO: 1144171 - RNA, 19 nt, Homo sapiens
  misc_RNA (1)...(19): siRNA sense strand
gaccuuuacugaaacaaca

SEQ ID NO: 1144172 - RNA, 19 nt, Homo sapiens
  misc_RNA (1)...(19): siRNA sense strand
gcaaugaagaagaggagaa

SEQ ID NO: 1144173 - RNA, 19 nt, Homo sapiens
  misc_RNA (1)...(19): siRNA sense strand
aggaaagucacaaccaaua

SEQ ID NO: 1144174 - RNA, 19 nt, Homo sapiens
  misc_RNA (1)...(19): siRNA sense strand
caaugaagaagaggagaaa

SEQ ID NO: 1144175 - RNA, 19 nt, Homo sapiens
  misc_RNA (1)...(19): siRNA sense strand
cuacucaggcaaugaagaa

SEQ ID NO: 1144176 - RNA, 19 nt, Homo sapiens
  misc_RNA (1)...(19): siRNA sense strand
acaagugucacaauuacaa

SEQ ID NO: 1144177 - RNA, 19 nt, Homo sapiens
  misc_RNA (1)...(19): siRNA sense strand
uaaaugcuacucaggcaau

SEQ ID NO: 1144178 - RNA, 19 nt, Homo sapiens
  misc_RNA (1)...(19): siRNA sense strand
ucaaucgaccuuuacugaa

SEQ ID NO: 1144179 - RNA, 19 nt, Homo sapiens
  misc_RNA (1)...(19): siRNA sense strand
ugucacaauuacaaggauu

SEQ ID NO: 1144180 - RNA, 19 nt, Homo sapiens
  misc_RNA (1)...(19): siRNA sense strand
ccaauaaaugucuggaaca

SEQ ID NO: 1144181 - RNA, 19 nt, Homo sapiens
  misc_RNA (1)...(19): siRNA sense strand
agucacaaccaauaaaugu

SEQ ID NO: 1144182 - RNA, 19 nt, Homo sapiens
  misc_RNA (1)...(19): siRNA sense strand
ucacaaccaauaaaugucu

SEQ ID NO: 1144183 - RNA, 19 nt, Homo sapiens
  misc_RNA (1)...(19): siRNA sense strand
cggaaacucagauaaaugc

SEQ ID NO: 1144184 - RNA, 19 nt, Homo sapiens
  misc_RNA (1)...(19): siRNA sense strand
uucaaucgaccuuuacuga

SEQ ID NO: 1144185 - RNA, 19 nt, Homo sapiens
  misc_RNA (1)...(19): siRNA sense strand
uucggaaacucagauaaau

SEQ ID NO: 1144186 - RNA, 19 nt, Homo sapiens
  misc_RNA (1)...(19): siRNA sense strand
auucggaaacucagauaaa

SEQ ID NO: 1144187 - RNA, 19 nt, Homo sapiens
  misc_RNA (1)...(19): siRNA sense strand
aggaggagcuggacucuua

SEQ ID NO: 1144188 - RNA, 19 nt, Homo sapiens
  misc_RNA (1)...(19): siRNA sense strand
gcaaagaccagcaggaaga

SEQ ID NO: 1144189 - RNA, 19 nt, Homo sapiens
  misc_RNA (1)...(19): siRNA sense strand
ggugguggcuggugaagaa

SEQ ID NO: 1144190 - RNA, 19 nt, Homo sapiens
  misc_RNA (1)...(19): siRNA sense strand
ggacggagcggcuacauuc

SEQ ID NO: 1144191 - RNA, 19 nt, Homo sapiens
  misc_RNA (1)...(19): siRNA sense strand
cagcagagccauuuacuug

SEQ ID NO: 1144192 - RNA, 19 nt, Homo sapiens
  misc_RNA (1)...(19): siRNA sense strand
gaagaagaaauuugggaaa

SEQ ID NO: 1144193 - RNA, 19 nt, Homo sapiens
  misc_RNA (1)...(19): siRNA sense strand
ucagaugacuggcaacuuc

SEQ ID NO: 1144194 - RNA, 19 nt, Homo sapiens
  misc_RNA (1)...(19): siRNA sense strand
gcagagccauuuacuugca

SEQ ID NO: 1144195 - RNA, 19 nt, Homo sapiens
  misc_RNA (1)...(19): siRNA sense strand
uaagggacauugagcuguu

SEQ ID NO: 1144196 - RNA, 19 nt, Homo sapiens
  misc_RNA (1)...(19): siRNA sense strand
caacccacauucucagaug

SEQ ID NO: 1144197 - RNA, 19 nt, Homo sapiens
  misc_RNA (1)...(19): siRNA sense strand
guacacauccucuucaagu

SEQ ID NO: 1144198 - RNA, 19 nt, Homo sapiens
  misc_RNA (1)...(19): siRNA sense strand
agaaggcucuggaggaaga

SEQ ID NO: 1144199 - RNA, 19 nt, Homo sapiens
  misc_RNA (1)...(19): siRNA sense strand
gccaagcacccuuaggaua

SEQ ID NO: 1144200 - RNA, 19 nt, Homo sapiens
  misc_RNA (1)...(19): siRNA sense strand
aggaagagcuggagcaaag

SEQ ID NO: 1144201 - RNA, 19 nt, Homo sapiens
  misc_RNA (1)...(19): siRNA sense strand
guuccaaugcuucgacuua

SEQ ID NO: 1144202 - RNA, 19 nt, Homo sapiens
  misc_RNA (1)...(19): siRNA sense strand
gaaaggccgcucccuaugg

SEQ ID NO: 1144203 - RNA, 19 nt, Homo sapiens
  misc_RNA (1)...(19): siRNA sense strand
ggaaaggccgcucccuaug

SEQ ID NO: 1144204 - RNA, 19 nt, Homo sapiens
  misc_RNA (1)...(19): siRNA sense strand
gcaggaagaagaaauuugg

SEQ ID NO: 1144205 - RNA, 19 nt, Homo sapiens
  misc_RNA (1)...(19): siRNA sense strand
ccacaccagugcccgagaa

SEQ ID NO: 1144206 - RNA, 19 nt, Homo sapiens
  misc_RNA (1)...(19): siRNA sense strand
ccagcuacuucgcauaaga

SEQ ID NO: 1144207 - RNA, 19 nt, Homo sapiens
  misc_RNA (1)...(19): siRNA sense strand
gagcacagccucccaccau

SEQ ID NO: 1144208 - RNA, 19 nt, Homo sapiens
  misc_RNA (1)...(19): siRNA sense strand
cccagaaccucaccucaga

SEQ ID NO: 1144209 - RNA, 19 nt, Homo sapiens
  misc_RNA (1)...(19): siRNA sense strand
gguggcuggugaagaauga

SEQ ID NO: 1144210 - RNA, 19 nt, Homo sapiens
  misc_RNA (1)...(19): siRNA sense strand
ugcagaagcuguucgagau

SEQ ID NO: 1144211 - RNA, 19 nt, Homo sapiens
  misc_RNA (1)...(19): siRNA sense strand
aaaggccgcucccuaugga

SEQ ID NO: 1144212 - RNA, 19 nt, Homo sapiens
  misc_RNA (1)...(19): siRNA sense strand
gcugaaccauguccuaagg

SEQ ID NO: 1144213 - RNA, 19 nt, Homo sapiens
  misc_RNA (1)...(19): siRNA sense strand
ugucuaagcccaccugaga

SEQ ID NO: 1144214 - RNA, 19 nt, Homo sapiens
  misc_RNA (1)...(19): siRNA sense strand
ggagaaggcccaggcaaag

SEQ ID NO: 1144215 - RNA, 19 nt, Homo sapiens
  misc_RNA (1)...(19): siRNA sense strand
gaaccaagugccuuuacuc

SEQ ID NO: 1144216 - RNA, 19 nt, Homo sapiens
  misc_RNA (1)...(19): siRNA sense strand
gagaaggcccaggcaaaga

SEQ ID NO: 1144217 - RNA, 19 nt, Homo sapiens
  misc_RNA (1)...(19): siRNA sense strand
aggaagugcugaaccaugu

SEQ ID NO: 1144218 - RNA, 19 nt, Homo sapiens
  misc_RNA (1)...(19): siRNA sense strand
gcacaggguggagcacuug

SEQ ID NO: 1144219 - RNA, 19 nt, Homo sapiens
  misc_RNA (1)...(19): siRNA sense strand
gcggcuacauuccaagcaa

SEQ ID NO: 1144220 - RNA, 19 nt, Homo sapiens
  misc_RNA (1)...(19): siRNA sense strand
guggagcacuugaugacau

SEQ ID NO: 1144221 - RNA, 19 nt, Homo sapiens
  misc_RNA (1)...(19): siRNA sense strand
ggacauugagcuguucaug

SEQ ID NO: 1144222 - RNA, 19 nt, Homo sapiens
  misc_RNA (1)...(19): siRNA sense strand
ccaagcacccuuaggauac

SEQ ID NO: 1144223 - RNA, 19 nt, Homo sapiens
  misc_RNA (1)...(19): siRNA sense strand
uaagcccaccugagaguaa

SEQ ID NO: 1144224 - RNA, 19 nt, Homo sapiens
  misc_RNA (1)...(19): siRNA sense strand
gcuaucaaccugcuacagu

SEQ ID NO: 1144225 - RNA, 19 nt, Homo sapiens
  misc_RNA (1)...(19): siRNA sense strand
ccagcaggaagaagaaauu

SEQ ID NO: 1144226 - RNA, 19 nt, Homo sapiens
  misc_RNA (1)...(19): siRNA sense strand
gcauccaggccaugaaugu

SEQ ID NO: 1144227 - RNA, 19 nt, Homo sapiens
  misc_RNA (1)...(19): siRNA sense strand
cagccaagcacccuuagga

SEQ ID NO: 1144228 - RNA, 19 nt, Homo sapiens
  misc_RNA (1)...(19): siRNA sense strand
gcagcagagccauuuacuu

SEQ ID NO: 1144229 - RNA, 19 nt, Homo sapiens
  misc_RNA (1)...(19): siRNA sense strand
ccaugaauguggcgcucaa

SEQ ID NO: 1144230 - RNA, 19 nt, Homo sapiens
  misc_RNA (1)...(19): siRNA sense strand
cauaagaccuggggagcua

SEQ ID NO: 1144231 - RNA, 19 nt, Homo sapiens
  misc_RNA (1)...(19): siRNA sense strand
gcagaagcuguucgagaug

SEQ ID NO: 1144232 - RNA, 19 nt, Homo sapiens
  misc_RNA (1)...(19): siRNA sense strand
uggaaaggccgcucccuau

SEQ ID NO: 1144233 - RNA, 19 nt, Homo sapiens
  misc_RNA (1)...(19): siRNA sense strand
gcucguacacauccucuuc

SEQ ID NO: 1144234 - RNA, 19 nt, Homo sapiens
  misc_RNA (1)...(19): siRNA sense strand
cgagaaccaagugccuuua

SEQ ID NO: 1144235 - RNA, 19 nt, Homo sapiens
  misc_RNA (1)...(19): siRNA sense strand
caaagaccagcaggaagaa

SEQ ID NO: 1144236 - RNA, 19 nt, Homo sapiens
  misc_RNA (1)...(19): siRNA sense strand
ggaggaagagcuggagcaa

SEQ ID NO: 1144237 - RNA, 19 nt, Homo sapiens
  misc_RNA (1)...(19): siRNA sense strand
gggcagagcgacugaagac

SEQ ID NO: 1144238 - RNA, 19 nt, Homo sapiens
  misc_RNA (1)...(19): siRNA sense strand
caccugagaguaaccuuug

SEQ ID NO: 1144239 - RNA, 19 nt, Homo sapiens
  misc_RNA (1)...(19): siRNA sense strand
cagcaggaagaagaaauuu

SEQ ID NO: 1144240 - RNA, 19 nt, Homo sapiens
  misc_RNA (1)...(19): siRNA sense strand
gugcugaaccauguccuaa

SEQ ID NO: 1144241 - RNA, 19 nt, Homo sapiens
  misc_RNA (1)...(19): siRNA sense strand
gaggaagagcuggagcaaa

SEQ ID NO: 1144242 - RNA, 19 nt, Homo sapiens
  misc_RNA (1)...(19): siRNA sense strand
cggagcggcuacauuccaa

SEQ ID NO: 1144243 - RNA, 19 nt, Homo sapiens
  misc_RNA (1)...(19): siRNA sense strand
cuaccaacccacauucuca

SEQ ID NO: 1144244 - RNA, 19 nt, Homo sapiens
  misc_RNA (1)...(19): siRNA sense strand
ccuagcagcccaagugauc

SEQ ID NO: 1144245 - RNA, 19 nt, Homo sapiens
  misc_RNA (1)...(19): siRNA sense strand
uggagaaggcccaggcaaa

SEQ ID NO: 1144246 - RNA, 19 nt, Homo sapiens
  misc_RNA (1)...(19): siRNA sense strand
ccgagaaccaagugccuuu

SEQ ID NO: 1144247 - RNA, 19 nt, Homo sapiens
  misc_RNA (1)...(19): siRNA sense strand
ccaccugagaguaaccuuu

SEQ ID NO: 1144248 - RNA, 19 nt, Homo sapiens
  misc_RNA (1)...(19): siRNA sense strand
ccgaggaugccuugcagaa

SEQ ID NO: 1144249 - RNA, 19 nt, Homo sapiens
  misc_RNA (1)...(19): siRNA sense strand
uggagcacuugaugacaug

SEQ ID NO: 1144250 - RNA, 19 nt, Homo sapiens
  misc_RNA (1)...(19): siRNA sense strand
gagccagcuacuucgcaua

SEQ ID NO: 1144251 - RNA, 19 nt, Homo sapiens
  misc_RNA (1)...(19): siRNA sense strand
ggagcaggcacgcuaucug

SEQ ID NO: 1144252 - RNA, 19 nt, Homo sapiens
  misc_RNA (1)...(19): siRNA sense strand
gagaaccaagugccuuuac

SEQ ID NO: 1144253 - RNA, 19 nt, Homo sapiens
  misc_RNA (1)...(19): siRNA sense strand
gaaggaugcuggggauaag

SEQ ID NO: 1144254 - RNA, 19 nt, Homo sapiens
  misc_RNA (1)...(19): siRNA sense strand
gggacggagcggcuacauu

SEQ ID NO: 1144255 - RNA, 19 nt, Homo sapiens
  misc_RNA (1)...(19): siRNA sense strand
ccagcagcagagccauuua

SEQ ID NO: 1144256 - RNA, 19 nt, Homo sapiens
  misc_RNA (1)...(19): siRNA sense strand
gacagcauccaggccauga

SEQ ID NO: 1144257 - RNA, 19 nt, Homo sapiens
  misc_RNA (1)...(19): siRNA sense strand
ugaagaccagccugcagaa

SEQ ID NO: 1144258 - RNA, 19 nt, Homo sapiens
  misc_RNA (1)...(19): siRNA sense strand
ggccugaagaggucacaga

SEQ ID NO: 1144259 - RNA, 19 nt, Homo sapiens
  misc_RNA (1)...(19): siRNA sense strand
cagcauccaggccaugaau

SEQ ID NO: 1144260 - RNA, 19 nt, Homo sapiens
  misc_RNA (1)...(19): siRNA sense strand
gaagaccagccugcagaag

SEQ ID NO: 1144261 - RNA, 19 nt, Homo sapiens
  misc_RNA (1)...(19): siRNA sense strand
aggaggagcuggacucuua

SEQ ID NO: 1144262 - RNA, 19 nt, Homo sapiens
  misc_RNA (1)...(19): siRNA sense strand
gcaaagaccagcaggaaga

SEQ ID NO: 1144263 - RNA, 19 nt, Homo sapiens
  misc_RNA (1)...(19): siRNA sense strand
ggugguggcuggugaagaa

SEQ ID NO: 1144264 - RNA, 19 nt, Homo sapiens
  misc_RNA (1)...(19): siRNA sense strand
ggacggagcggcuacauuc

SEQ ID NO: 1144265 - RNA, 19 nt, Homo sapiens
  misc_RNA (1)...(19): siRNA sense strand
cagcagagccauuuacuug

SEQ ID NO: 1144266 - RNA, 19 nt, Homo sapiens
  misc_RNA (1)...(19): siRNA sense strand
gaagaagaaauuugggaaa

SEQ ID NO: 1144267 - RNA, 19 nt, Homo sapiens
  misc_RNA (1)...(19): siRNA sense strand
ucagaugacuggcaacuuc

SEQ ID NO: 1144268 - RNA, 19 nt, Homo sapiens
  misc_RNA (1)...(19): siRNA sense strand
gcagagccauuuacuugca

SEQ ID NO: 1144269 - RNA, 19 nt, Homo sapiens
  misc_RNA (1)...(19): siRNA sense strand
uaagggacauugagcuguu

SEQ ID NO: 1144270 - RNA, 19 nt, Homo sapiens
  misc_RNA (1)...(19): siRNA sense strand
caacccacauucucagaug

SEQ ID NO: 1144271 - RNA, 19 nt, Homo sapiens
  misc_RNA (1)...(19): siRNA sense strand
guacacauccucuucaagu

SEQ ID NO: 1144272 - RNA, 19 nt, Homo sapiens
  misc_RNA (1)...(19): siRNA sense strand
agaaggcucuggaggaaga

SEQ ID NO: 1144273 - RNA, 19 nt, Homo sapiens
  misc_RNA (1)...(19): siRNA sense strand
gccaagcacccuuaggaua

SEQ ID NO: 1144274 - RNA, 19 nt, Homo sapiens
  misc_RNA (1)...(19): siRNA sense strand
aggaagagcuggagcaaag

SEQ ID NO: 1144275 - RNA, 19 nt, Homo sapiens
  misc_RNA (1)...(19): siRNA sense strand
guuccaaugcuucgacuua

SEQ ID NO: 1144276 - RNA, 19 nt, Homo sapiens
  misc_RNA (1)...(19): siRNA sense strand
gaaaggccgcucccuaugg

SEQ ID NO: 1144277 - RNA, 19 nt, Homo sapiens
  misc_RNA (1)...(19): siRNA sense strand
ggaaaggccgcucccuaug

SEQ ID NO: 1144278 - RNA, 19 nt, Homo sapiens
  misc_RNA (1)...(19): siRNA sense strand
gcaggaagaagaaauuugg

SEQ ID NO: 1144279 - RNA, 19 nt, Homo sapiens
  misc_RNA (1)...(19): siRNA sense strand
ccacaccagugcccgagaa

SEQ ID NO: 1144280 - RNA, 19 nt, Homo sapiens
  misc_RNA (1)...(19): siRNA sense strand
ccagcuacuucgcauaaga

SEQ ID NO: 1144281 - RNA, 19 nt, Homo sapiens
  misc_RNA (1)...(19): siRNA sense strand
gagcacagccucccaccau

SEQ ID NO: 1144282 - RNA, 19 nt, Homo sapiens
  misc_RNA (1)...(19): siRNA sense strand
cccagaaccucaccucaga

SEQ ID NO: 1144283 - RNA, 19 nt, Homo sapiens
  misc_RNA (1)...(19): siRNA sense strand
gguggcuggugaagaauga

SEQ ID NO: 1144284 - RNA, 19 nt, Homo sapiens
  misc_RNA (1)...(19): siRNA sense strand
ugcagaagcuguucgagau

SEQ ID NO: 1144285 - RNA, 19 nt, Homo sapiens
  misc_RNA (1)...(19): siRNA sense strand
aaaggccgcucccuaugga

SEQ ID NO: 1144286 - RNA, 19 nt, Homo sapiens
  misc_RNA (1)...(19): siRNA sense strand
gcugaaccauguccuaagg

SEQ ID NO: 1144287 - RNA, 19 nt, Homo sapiens
  misc_RNA (1)...(19): siRNA sense strand
ugucuaagcccaccugaga

SEQ ID NO: 1144288 - RNA, 19 nt, Homo sapiens
  misc_RNA (1)...(19): siRNA sense strand
ggagaaggcccaggcaaag

SEQ ID NO: 1144289 - RNA, 19 nt, Homo sapiens
  misc_RNA (1)...(19): siRNA sense strand
gaaccaagugccuuuacuc

SEQ ID NO: 1144290 - RNA, 19 nt, Homo sapiens
  misc_RNA (1)...(19): siRNA sense strand
gagaaggcccaggcaaaga

SEQ ID NO: 1144291 - RNA, 19 nt, Homo sapiens
  misc_RNA (1)...(19): siRNA sense strand
aggaagugcugaaccaugu

SEQ ID NO: 1144292 - RNA, 19 nt, Homo sapiens
  misc_RNA (1)...(19): siRNA sense strand
gcacaggguggagcacuug

SEQ ID NO: 1144293 - RNA, 19 nt, Homo sapiens
  misc_RNA (1)...(19): siRNA sense strand
gcggcuacauuccaagcaa

SEQ ID NO: 1144294 - RNA, 19 nt, Homo sapiens
  misc_RNA (1)...(19): siRNA sense strand
guggagcacuugaugacau

SEQ ID NO: 1144295 - RNA, 19 nt, Homo sapiens
  misc_RNA (1)...(19): siRNA sense strand
ggacauugagcuguucaug

SEQ ID NO: 1144296 - RNA, 19 nt, Homo sapiens
  misc_RNA (1)...(19): siRNA sense strand
ccaagcacccuuaggauac

SEQ ID NO: 1144297 - RNA, 19 nt, Homo sapiens
  misc_RNA (1)...(19): siRNA sense strand
uaagcccaccugagaguaa

SEQ ID NO: 1144298 - RNA, 19 nt, Homo sapiens
  misc_RNA (1)...(19): siRNA sense strand
gcuaucaaccugcuacagu

SEQ ID NO: 1144299 - RNA, 19 nt, Homo sapiens
  misc_RNA (1)...(19): siRNA sense strand
ccagcaggaagaagaaauu

SEQ ID NO: 1144300 - RNA, 19 nt, Homo sapiens
  misc_RNA (1)...(19): siRNA sense strand
gcauccaggccaugaaugu

SEQ ID NO: 1144301 - RNA, 19 nt, Homo sapiens
  misc_RNA (1)...(19): siRNA sense strand
cagccaagcacccuuagga

SEQ ID NO: 1144302 - RNA, 19 nt, Homo sapiens
  misc_RNA (1)...(19): siRNA sense strand
gcagcagagccauuuacuu

SEQ ID NO: 1144303 - RNA, 19 nt, Homo sapiens
  misc_RNA (1)...(19): siRNA sense strand
ccaugaauguggcgcucaa

SEQ ID NO: 1144304 - RNA, 19 nt, Homo sapiens
  misc_RNA (1)...(19): siRNA sense strand
cauaagaccuggggagcua

SEQ ID NO: 1144305 - RNA, 19 nt, Homo sapiens
  misc_RNA (1)...(19): siRNA sense strand
gcagaagcuguucgagaug

SEQ ID NO: 1144306 - RNA, 19 nt, Homo sapiens
  misc_RNA (1)...(19): siRNA sense strand
uggaaaggccgcucccuau

SEQ ID NO: 1144307 - RNA, 19 nt, Homo sapiens
  misc_RNA (1)...(19): siRNA sense strand
gcucguacacauccucuuc

SEQ ID NO: 1144308 - RNA, 19 nt, Homo sapiens
  misc_RNA (1)...(19): siRNA sense strand
cgagaaccaagugccuuua

SEQ ID NO: 1144309 - RNA, 19 nt, Homo sapiens
  misc_RNA (1)...(19): siRNA sense strand
caaagaccagcaggaagaa

SEQ ID NO: 1144310 - RNA, 19 nt, Homo sapiens
  misc_RNA (1)...(19): siRNA sense strand
ggaggaagagcuggagcaa

SEQ ID NO: 1144311 - RNA, 19 nt, Homo sapiens
  misc_RNA (1)...(19): siRNA sense strand
gggcagagcgacugaagac

SEQ ID NO: 1144312 - RNA, 19 nt, Homo sapiens
  misc_RNA (1)...(19): siRNA sense strand
caccugagaguaaccuuug

SEQ ID NO: 1144313 - RNA, 19 nt, Homo sapiens
  misc_RNA (1)...(19): siRNA sense strand
cagcaggaagaagaaauuu

SEQ ID NO: 1144314 - RNA, 19 nt, Homo sapiens
  misc_RNA (1)...(19): siRNA sense strand
gugcugaaccauguccuaa

SEQ ID NO: 1144315 - RNA, 19 nt, Homo sapiens
  misc_RNA (1)...(19): siRNA sense strand
gaggaagagcuggagcaaa

SEQ ID NO: 1144316 - RNA, 19 nt, Homo sapiens
  misc_RNA (1)...(19): siRNA sense strand
cggagcggcuacauuccaa

SEQ ID NO: 1144317 - RNA, 19 nt, Homo sapiens
  misc_RNA (1)...(19): siRNA sense strand
cuaccaacccacauucuca

SEQ ID NO: 1144318 - RNA, 19 nt, Homo sapiens
  misc_RNA (1)...(19): siRNA sense strand
ccuagcagcccaagugauc

SEQ ID NO: 1144319 - RNA, 19 nt, Homo sapiens
  misc_RNA (1)...(19): siRNA sense strand
uggagaaggcccaggcaaa

SEQ ID NO: 1144320 - RNA, 19 nt, Homo sapiens
  misc_RNA (1)...(19): siRNA sense strand
ccgagaaccaagugccuuu

SEQ ID NO: 1144321 - RNA, 19 nt, Homo sapiens
  misc_RNA (1)...(19): siRNA sense strand
ccaccugagaguaaccuuu

SEQ ID NO: 1144322 - RNA, 19 nt, Homo sapiens
  misc_RNA (1)...(19): siRNA sense strand
ccgaggaugccuugcagaa

SEQ ID NO: 1144323 - RNA, 19 nt, Homo sapiens
  misc_RNA (1)...(19): siRNA sense strand
uggagcacuugaugacaug

SEQ ID NO: 1144324 - RNA, 19 nt, Homo sapiens
  misc_RNA (1)...(19): siRNA sense strand
gagccagcuacuucgcaua

SEQ ID NO: 1144325 - RNA, 19 nt, Homo sapiens
  misc_RNA (1)...(19): siRNA sense strand
ggagcaggcacgcuaucug

SEQ ID NO: 1144326 - RNA, 19 nt, Homo sapiens
  misc_RNA (1)...(19): siRNA sense strand
gagaaccaagugccuuuac

SEQ ID NO: 1144327 - RNA, 19 nt, Homo sapiens
  misc_RNA (1)...(19): siRNA sense strand
gaaggaugcuggggauaag

SEQ ID NO: 1144328 - RNA, 19 nt, Homo sapiens
  misc_RNA (1)...(19): siRNA sense strand
gggacggagcggcuacauu

SEQ ID NO: 1144329 - RNA, 19 nt, Homo sapiens
  misc_RNA (1)...(19): siRNA sense strand
ccagcagcagagccauuua

SEQ ID NO: 1144330 - RNA, 19 nt, Homo sapiens
  misc_RNA (1)...(19): siRNA sense strand
gacagcauccaggccauga

SEQ ID NO: 1144331 - RNA, 19 nt, Homo sapiens
  misc_RNA (1)...(19): siRNA sense strand
ugaagaccagccugcagaa

SEQ ID NO: 1144332 - RNA, 19 nt, Homo sapiens
  misc_RNA (1)...(19): siRNA sense strand
ggccugaagaggucacaga

SEQ ID NO: 1144333 - RNA, 19 nt, Homo sapiens
  misc_RNA (1)...(19): siRNA sense strand
cagcauccaggccaugaau

SEQ ID NO: 1144334 - RNA, 19 nt, Homo sapiens
  misc_RNA (1)...(19): siRNA sense strand
gaagaccagccugcagaag

SEQ ID NO: 1144335 - RNA, 19 nt, Homo sapiens
  misc_RNA (1)...(19): siRNA sense strand
aggaggagcuggacucuua

SEQ ID NO: 1144336 - RNA, 19 nt, Homo sapiens
  misc_RNA (1)...(19): siRNA sense strand
gcaaagaccagcaggaaga

SEQ ID NO: 1144337 - RNA, 19 nt, Homo sapiens
  misc_RNA (1)...(19): siRNA sense strand
ggugguggcuggugaagaa

SEQ ID NO: 1144338 - RNA, 19 nt, Homo sapiens
  misc_RNA (1)...(19): siRNA sense strand
ggacggagcggcuacauuc

SEQ ID NO: 1144339 - RNA, 19 nt, Homo sapiens
  misc_RNA (1)...(19): siRNA sense strand
cagcagagccauuuacuug

SEQ ID NO: 1144340 - RNA, 19 nt, Homo sapiens
  misc_RNA (1)...(19): siRNA sense strand
gaagaagaaauuugggaaa

SEQ ID NO: 1144341 - RNA, 19 nt, Homo sapiens
  misc_RNA (1)...(19): siRNA sense strand
ucagaugacuggcaacuuc

SEQ ID NO: 1144342 - RNA, 19 nt, Homo sapiens
  misc_RNA (1)...(19): siRNA sense strand
gcagagccauuuacuugca

SEQ ID NO: 1144343 - RNA, 19 nt, Homo sapiens
  misc_RNA (1)...(19): siRNA sense strand
uaagggacauugagcuguu

SEQ ID NO: 1144344 - RNA, 19 nt, Homo sapiens
  misc_RNA (1)...(19): siRNA sense strand
caacccacauucucagaug

SEQ ID NO: 1144345 - RNA, 19 nt, Homo sapiens
  misc_RNA (1)...(19): siRNA sense strand
guacacauccucuucaagu

SEQ ID NO: 1144346 - RNA, 19 nt, Homo sapiens
  misc_RNA (1)...(19): siRNA sense strand
agaaggcucuggaggaaga

SEQ ID NO: 1144347 - RNA, 19 nt, Homo sapiens
  misc_RNA (1)...(19): siRNA sense strand
gccaagcacccuuaggaua

SEQ ID NO: 1144348 - RNA, 19 nt, Homo sapiens
  misc_RNA (1)...(19): siRNA sense strand
aggaagagcuggagcaaag

SEQ ID NO: 1144349 - RNA, 19 nt, Homo sapiens
  misc_RNA (1)...(19): siRNA sense strand
guuccaaugcuucgacuua

SEQ ID NO: 1144350 - RNA, 19 nt, Homo sapiens
  misc_RNA (1)...(19): siRNA sense strand
gaaaggccgcucccuaugg

SEQ ID NO: 1144351 - RNA, 19 nt, Homo sapiens
  misc_RNA (1)...(19): siRNA sense strand
ggaaaggccgcucccuaug

SEQ ID NO: 1144352 - RNA, 19 nt, Homo sapiens
  misc_RNA (1)...(19): siRNA sense strand
gcaggaagaagaaauuugg

SEQ ID NO: 1144353 - RNA, 19 nt, Homo sapiens
  misc_RNA (1)...(19): siRNA sense strand
ccacaccagugcccgagaa

SEQ ID NO: 1144354 - RNA, 19 nt, Homo sapiens
  misc_RNA (1)...(19): siRNA sense strand
ccagcuacuucgcauaaga

SEQ ID NO: 1144355 - RNA, 19 nt, Homo sapiens
  misc_RNA (1)...(19): siRNA sense strand
gagcacagccucccaccau

SEQ ID NO: 1144356 - RNA, 19 nt, Homo sapiens
  misc_RNA (1)...(19): siRNA sense strand
cccagaaccucaccucaga

SEQ ID NO: 1144357 - RNA, 19 nt, Homo sapiens
  misc_RNA (1)...(19): siRNA sense strand
gguggcuggugaagaauga

SEQ ID NO: 1144358 - RNA, 19 nt, Homo sapiens
  misc_RNA (1)...(19): siRNA sense strand
ugcagaagcuguucgagau

SEQ ID NO: 1144359 - RNA, 19 nt, Homo sapiens
  misc_RNA (1)...(19): siRNA sense strand
aaaggccgcucccuaugga

SEQ ID NO: 1144360 - RNA, 19 nt, Homo sapiens
  misc_RNA (1)...(19): siRNA sense strand
gcugaaccauguccuaagg

SEQ ID NO: 1144361 - RNA, 19 nt, Homo sapiens
  misc_RNA (1)...(19): siRNA sense strand
ugucuaagcccaccugaga

SEQ ID NO: 1144362 - RNA, 19 nt, Homo sapiens
  misc_RNA (1)...(19): siRNA sense strand
ggagaaggcccaggcaaag

SEQ ID NO: 1144363 - RNA, 19 nt, Homo sapiens
  misc_RNA (1)...(19): siRNA sense strand
gaaccaagugccuuuacuc

SEQ ID NO: 1144364 - RNA, 19 nt, Homo sapiens
  misc_RNA (1)...(19): siRNA sense strand
gagaaggcccaggcaaaga

SEQ ID NO: 1144365 - RNA, 19 nt, Homo sapiens
  misc_RNA (1)...(19): siRNA sense strand
aggaagugcugaaccaugu

SEQ ID NO: 1144366 - RNA, 19 nt, Homo sapiens
  misc_RNA (1)...(19): siRNA sense strand
gcacaggguggagcacuug

SEQ ID NO: 1144367 - RNA, 19 nt, Homo sapiens
  misc_RNA (1)...(19): siRNA sense strand
gcggcuacauuccaagcaa

SEQ ID NO: 1144368 - RNA, 19 nt, Homo sapiens
  misc_RNA (1)...(19): siRNA sense strand
guggagcacuugaugacau

SEQ ID NO: 1144369 - RNA, 19 nt, Homo sapiens
  misc_RNA (1)...(19): siRNA sense strand
ggacauugagcuguucaug

SEQ ID NO: 1144370 - RNA, 19 nt, Homo sapiens
  misc_RNA (1)...(19): siRNA sense strand
ccaagcacccuuaggauac

SEQ ID NO: 1144371 - RNA, 19 nt, Homo sapiens
  misc_RNA (1)...(19): siRNA sense strand
uaagcccaccugagaguaa

SEQ ID NO: 1144372 - RNA, 19 nt, Homo sapiens
  misc_RNA (1)...(19): siRNA sense strand
gcuaucaaccugcuacagu

SEQ ID NO: 1144373 - RNA, 19 nt, Homo sapiens
  misc_RNA (1)...(19): siRNA sense strand
ccagcaggaagaagaaauu

SEQ ID NO: 1144374 - RNA, 19 nt, Homo sapiens
  misc_RNA (1)...(19): siRNA sense strand
gcauccaggccaugaaugu

SEQ ID NO: 1144375 - RNA, 19 nt, Homo sapiens
  misc_RNA (1)...(19): siRNA sense strand
cagccaagcacccuuagga

SEQ ID NO: 1144376 - RNA, 19 nt, Homo sapiens
  misc_RNA (1)...(19): siRNA sense strand
gcagcagagccauuuacuu

SEQ ID NO: 1144377 - RNA, 19 nt, Homo sapiens
  misc_RNA (1)...(19): siRNA sense strand
ccaugaauguggcgcucaa

SEQ ID NO: 1144378 - RNA, 19 nt, Homo sapiens
  misc_RNA (1)...(19): siRNA sense strand
cauaagaccuggggagcua

SEQ ID NO: 1144379 - RNA, 19 nt, Homo sapiens
  misc_RNA (1)...(19): siRNA sense strand
gcagaagcuguucgagaug

SEQ ID NO: 1144380 - RNA, 19 nt, Homo sapiens
  misc_RNA (1)...(19): siRNA sense strand
uggaaaggccgcucccuau

SEQ ID NO: 1144381 - RNA, 19 nt, Homo sapiens
  misc_RNA (1)...(19): siRNA sense strand
gcucguacacauccucuuc

SEQ ID NO: 1144382 - RNA, 19 nt, Homo sapiens
  misc_RNA (1)...(19): siRNA sense strand
cgagaaccaagugccuuua

SEQ ID NO: 1144383 - RNA, 19 nt, Homo sapiens
  misc_RNA (1)...(19): siRNA sense strand
caaagaccagcaggaagaa

SEQ ID NO: 1144384 - RNA, 19 nt, Homo sapiens
  misc_RNA (1)...(19): siRNA sense strand
ggaggaagagcuggagcaa

SEQ ID NO: 1144385 - RNA, 19 nt, Homo sapiens
  misc_RNA (1)...(19): siRNA sense strand
gggcagagcgacugaagac

SEQ ID NO: 1144386 - RNA, 19 nt, Homo sapiens
  misc_RNA (1)...(19): siRNA sense strand
caccugagaguaaccuuug

SEQ ID NO: 1144387 - RNA, 19 nt, Homo sapiens
  misc_RNA (1)...(19): siRNA sense strand
cagcaggaagaagaaauuu

SEQ ID NO: 1144388 - RNA, 19 nt, Homo sapiens
  misc_RNA (1)...(19): siRNA sense strand
gugcugaaccauguccuaa

SEQ ID NO: 1144389 - RNA, 19 nt, Homo sapiens
  misc_RNA (1)...(19): siRNA sense strand
gaggaagagcuggagcaaa

SEQ ID NO: 1144390 - RNA, 19 nt, Homo sapiens
  misc_RNA (1)...(19): siRNA sense strand
cggagcggcuacauuccaa

SEQ ID NO: 1144391 - RNA, 19 nt, Homo sapiens
  misc_RNA (1)...(19): siRNA sense strand
cuaccaacccacauucuca

SEQ ID NO: 1144392 - RNA, 19 nt, Homo sapiens
  misc_RNA (1)...(19): siRNA sense strand
ccuagcagcccaagugauc

SEQ ID NO: 1144393 - RNA, 19 nt, Homo sapiens
  misc_RNA (1)...(19): siRNA sense strand
uggagaaggcccaggcaaa

SEQ ID NO: 1144394 - RNA, 19 nt, Homo sapiens
  misc_RNA (1)...(19): siRNA sense strand
ccgagaaccaagugccuuu

SEQ ID NO: 1144395 - RNA, 19 nt, Homo sapiens
  misc_RNA (1)...(19): siRNA sense strand
ccaccugagaguaaccuuu

SEQ ID NO: 1144396 - RNA, 19 nt, Homo sapiens
  misc_RNA (1)...(19): siRNA sense strand
ccgaggaugccuugcagaa

SEQ ID NO: 1144397 - RNA, 19 nt, Homo sapiens
  misc_RNA (1)...(19): siRNA sense strand
uggagcacuugaugacaug

SEQ ID NO: 1144398 - RNA, 19 nt, Homo sapiens
  misc_RNA (1)...(19): siRNA sense strand
gagccagcuacuucgcaua

SEQ ID NO: 1144399 - RNA, 19 nt, Homo sapiens
  misc_RNA (1)...(19): siRNA sense strand
ggagcaggcacgcuaucug

SEQ ID NO: 1144400 - RNA, 19 nt, Homo sapiens
  misc_RNA (1)...(19): siRNA sense strand
gagaaccaagugccuuuac

SEQ ID NO: 1144401 - RNA, 19 nt, Homo sapiens
  misc_RNA (1)...(19): siRNA sense strand
gaaggaugcuggggauaag

SEQ ID NO: 1144402 - RNA, 19 nt, Homo sapiens
  misc_RNA (1)...(19): siRNA sense strand
gggacggagcggcuacauu

SEQ ID NO: 1144403 - RNA, 19 nt, Homo sapiens
  misc_RNA (1)...(19): siRNA sense strand
ccagcagcagagccauuua

SEQ ID NO: 1144404 - RNA, 19 nt, Homo sapiens
  misc_RNA (1)...(19): siRNA sense strand
gacagcauccaggccauga

SEQ ID NO: 1144405 - RNA, 19 nt, Homo sapiens
  misc_RNA (1)...(19): siRNA sense strand
ugaagaccagccugcagaa

SEQ ID NO: 1144406 - RNA, 19 nt, Homo sapiens
  misc_RNA (1)...(19): siRNA sense strand
ggccugaagaggucacaga

SEQ ID NO: 1144407 - RNA, 19 nt, Homo sapiens
  misc_RNA (1)...(19): siRNA sense strand
cagcauccaggccaugaau

SEQ ID NO: 1144408 - RNA, 19 nt, Homo sapiens
  misc_RNA (1)...(19): siRNA sense strand
gaagaccagccugcagaag

SEQ ID NO: 1144409 - RNA, 19 nt, Homo sapiens
  misc_RNA (1)...(19): siRNA sense strand
gaacugcacuuagaacuua

SEQ ID NO: 1144410 - RNA, 19 nt, Homo sapiens
  misc_RNA (1)...(19): siRNA sense strand
gaagguuucuggccuauuu

SEQ ID NO: 1144411 - RNA, 19 nt, Homo sapiens
  misc_RNA (1)...(19): siRNA sense strand
acaagaaccuggaggauua

SEQ ID NO: 1144412 - RNA, 19 nt, Homo sapiens
  misc_RNA (1)...(19): siRNA sense strand
gaagaucgaugcaaacugu

SEQ ID NO: 1144413 - RNA, 19 nt, Homo sapiens
  misc_RNA (1)...(19): siRNA sense strand
uaucagcugugcaauauua

SEQ ID NO: 1144414 - RNA, 19 nt, Homo sapiens
  misc_RNA (1)...(19): siRNA sense strand
gcacaacuuugguaugauu

SEQ ID NO: 1144415 - RNA, 19 nt, Homo sapiens
  misc_RNA (1)...(19): siRNA sense strand
gccaguaucucaagaaauu

SEQ ID NO: 1144416 - RNA, 19 nt, Homo sapiens
  misc_RNA (1)...(19): siRNA sense strand
gacaggaacugcacuuaga

SEQ ID NO: 1144417 - RNA, 19 nt, Homo sapiens
  misc_RNA (1)...(19): siRNA sense strand
gggcacaacuuugguauga

SEQ ID NO: 1144418 - RNA, 19 nt, Homo sapiens
  misc_RNA (1)...(19): siRNA sense strand
gaaguuguaccaucaauga

SEQ ID NO: 1144419 - RNA, 19 nt, Homo sapiens
  misc_RNA (1)...(19): siRNA sense strand
gaucaugccaucuuacuaa

SEQ ID NO: 1144420 - RNA, 19 nt, Homo sapiens
  misc_RNA (1)...(19): siRNA sense strand
ccacauacauucucacagu

SEQ ID NO: 1144421 - RNA, 19 nt, Homo sapiens
  misc_RNA (1)...(19): siRNA sense strand
uaucagggauuuaucagaa

SEQ ID NO: 1144422 - RNA, 19 nt, Homo sapiens
  misc_RNA (1)...(19): siRNA sense strand
cagaaaggcugaaggcaau

SEQ ID NO: 1144423 - RNA, 19 nt, Homo sapiens
  misc_RNA (1)...(19): siRNA sense strand
gaauauaacagcaaaccuu

SEQ ID NO: 1144424 - RNA, 19 nt, Homo sapiens
  misc_RNA (1)...(19): siRNA sense strand
gggaugugaucaugaacua

SEQ ID NO: 1144425 - RNA, 19 nt, Homo sapiens
  misc_RNA (1)...(19): siRNA sense strand
guauaaauauccggacaaa

SEQ ID NO: 1144426 - RNA, 19 nt, Homo sapiens
  misc_RNA (1)...(19): siRNA sense strand
gaaccuggaggauuauuga

SEQ ID NO: 1144427 - RNA, 19 nt, Homo sapiens
  misc_RNA (1)...(19): siRNA sense strand
caccaucgcucaugaguca

SEQ ID NO: 1144428 - RNA, 19 nt, Homo sapiens
  misc_RNA (1)...(19): siRNA sense strand
guucgaagccucagucaaa

SEQ ID NO: 1144429 - RNA, 19 nt, Homo sapiens
  misc_RNA (1)...(19): siRNA sense strand
agaggaagaucgaugcaaa

SEQ ID NO: 1144430 - RNA, 19 nt, Homo sapiens
  misc_RNA (1)...(19): siRNA sense strand
gaaagaauggcaagagaca

SEQ ID NO: 1144431 - RNA, 19 nt, Homo sapiens
  misc_RNA (1)...(19): siRNA sense strand
gagccuaauucuucuggaa

SEQ ID NO: 1144432 - RNA, 19 nt, Homo sapiens
  misc_RNA (1)...(19): siRNA sense strand
gccgaaagauccagugugu

SEQ ID NO: 1144433 - RNA, 19 nt, Homo sapiens
  misc_RNA (1)...(19): siRNA sense strand
caaacuaccaggacagauu

SEQ ID NO: 1144434 - RNA, 19 nt, Homo sapiens
  misc_RNA (1)...(19): siRNA sense strand
aagcaggacaguauaaaua

SEQ ID NO: 1144435 - RNA, 19 nt, Homo sapiens
  misc_RNA (1)...(19): siRNA sense strand
gaacuccaccagccacaaa

SEQ ID NO: 1144436 - RNA, 19 nt, Homo sapiens
  misc_RNA (1)...(19): siRNA sense strand
ucaagucaauuccucauuc

SEQ ID NO: 1144437 - RNA, 19 nt, Homo sapiens
  misc_RNA (1)...(19): siRNA sense strand
ggaagaaugaaccauguga

SEQ ID NO: 1144438 - RNA, 19 nt, Homo sapiens
  misc_RNA (1)...(19): siRNA sense strand
uugcaaaggugauaauuca

SEQ ID NO: 1144439 - RNA, 19 nt, Homo sapiens
  misc_RNA (1)...(19): siRNA sense strand
cugcaaggcugagaacuuu

SEQ ID NO: 1144440 - RNA, 19 nt, Homo sapiens
  misc_RNA (1)...(19): siRNA sense strand
ucaacagugugcagaauau

SEQ ID NO: 1144441 - RNA, 19 nt, Homo sapiens
  misc_RNA (1)...(19): siRNA sense strand
caggagagacacugcaaua

SEQ ID NO: 1144442 - RNA, 19 nt, Homo sapiens
  misc_RNA (1)...(19): siRNA sense strand
ucagccgggucauauauuu

SEQ ID NO: 1144443 - RNA, 19 nt, Homo sapiens
  misc_RNA (1)...(19): siRNA sense strand
ggacgacgcaagaaauaug

SEQ ID NO: 1144444 - RNA, 19 nt, Homo sapiens
  misc_RNA (1)...(19): siRNA sense strand
caagcaagcaggacaguau

SEQ ID NO: 1144445 - RNA, 19 nt, Homo sapiens
  misc_RNA (1)...(19): siRNA sense strand
gcugagaacuuugaauuuu

SEQ ID NO: 1144446 - RNA, 19 nt, Homo sapiens
  misc_RNA (1)...(19): siRNA sense strand
gcaggacaguauaaauauc

SEQ ID NO: 1144447 - RNA, 19 nt, Homo sapiens
  misc_RNA (1)...(19): siRNA sense strand
ggugugagaccaaguuuau

SEQ ID NO: 1144448 - RNA, 19 nt, Homo sapiens
  misc_RNA (1)...(19): siRNA sense strand
gcaaggcugagaacuuuga

SEQ ID NO: 1144449 - RNA, 19 nt, Homo sapiens
  misc_RNA (1)...(19): siRNA sense strand
guuuguggcuugaguaugu

SEQ ID NO: 1144450 - RNA, 19 nt, Homo sapiens
  misc_RNA (1)...(19): siRNA sense strand
uauuaacccuugcaaugaa

SEQ ID NO: 1144451 - RNA, 19 nt, Homo sapiens
  misc_RNA (1)...(19): siRNA sense strand
ggaguaucgugcagucaga

SEQ ID NO: 1144452 - RNA, 19 nt, Homo sapiens
  misc_RNA (1)...(19): siRNA sense strand
ggaauuauccugguuacuc

SEQ ID NO: 1144453 - RNA, 19 nt, Homo sapiens
  misc_RNA (1)...(19): siRNA sense strand
gcaauguccggcaaaguga

SEQ ID NO: 1144454 - RNA, 19 nt, Homo sapiens
  misc_RNA (1)...(19): siRNA sense strand
uaaauauccggacaaacua

SEQ ID NO: 1144455 - RNA, 19 nt, Homo sapiens
  misc_RNA (1)...(19): siRNA sense strand
ccaguggaaugugcucuaa

SEQ ID NO: 1144456 - RNA, 19 nt, Homo sapiens
  misc_RNA (1)...(19): siRNA sense strand
ggacaggaacugcacuuag

SEQ ID NO: 1144457 - RNA, 19 nt, Homo sapiens
  misc_RNA (1)...(19): siRNA sense strand
agggauagcuuggaaguau

SEQ ID NO: 1144458 - RNA, 19 nt, Homo sapiens
  misc_RNA (1)...(19): siRNA sense strand
gcaagcaggacaguauaaa

SEQ ID NO: 1144459 - RNA, 19 nt, Homo sapiens
  misc_RNA (1)...(19): siRNA sense strand
ccacagaggacaccuaucu

SEQ ID NO: 1144460 - RNA, 19 nt, Homo sapiens
  misc_RNA (1)...(19): siRNA sense strand
cauucucucuguccaguaa

SEQ ID NO: 1144461 - RNA, 19 nt, Homo sapiens
  misc_RNA (1)...(19): siRNA sense strand
ggaccacguuugaauacca

SEQ ID NO: 1144462 - RNA, 19 nt, Homo sapiens
  misc_RNA (1)...(19): siRNA sense strand
caaccagcauaaagcaaau

SEQ ID NO: 1144463 - RNA, 19 nt, Homo sapiens
  misc_RNA (1)...(19): siRNA sense strand
gagagacacugcaauaacc

SEQ ID NO: 1144464 - RNA, 19 nt, Homo sapiens
  misc_RNA (1)...(19): siRNA sense strand
gcggauuaaaugaugauua

SEQ ID NO: 1144465 - RNA, 19 nt, Homo sapiens
  misc_RNA (1)...(19): siRNA sense strand
cggauuaaaugaugauuac

SEQ ID NO: 1144466 - RNA, 19 nt, Homo sapiens
  misc_RNA (1)...(19): siRNA sense strand
ucacuuuauuguccaggua

SEQ ID NO: 1144467 - RNA, 19 nt, Homo sapiens
  misc_RNA (1)...(19): siRNA sense strand
ggugauaauucaacuugca

SEQ ID NO: 1144468 - RNA, 19 nt, Homo sapiens
  misc_RNA (1)...(19): siRNA sense strand
gaacuagugggaugugauc

SEQ ID NO: 1144469 - RNA, 19 nt, Homo sapiens
  misc_RNA (1)...(19): siRNA sense strand
accagucucugaauaguuu

SEQ ID NO: 1144470 - RNA, 19 nt, Homo sapiens
  misc_RNA (1)...(19): siRNA sense strand
guggugagccuaauucuuc

SEQ ID NO: 1144471 - RNA, 19 nt, Homo sapiens
  misc_RNA (1)...(19): siRNA sense strand
ggaacugcacuuagaacuu

SEQ ID NO: 1144472 - RNA, 19 nt, Homo sapiens
  misc_RNA (1)...(19): siRNA sense strand
gguggagguuacauaaaug

SEQ ID NO: 1144473 - RNA, 19 nt, Homo sapiens
  misc_RNA (1)...(19): siRNA sense strand
aauauuaacccuugcaaug

SEQ ID NO: 1144474 - RNA, 19 nt, Homo sapiens
  misc_RNA (1)...(19): siRNA sense strand
uuuaucagcugugcaauau

SEQ ID NO: 1144475 - RNA, 19 nt, Homo sapiens
  misc_RNA (1)...(19): siRNA sense strand
ggagagacacugcaauaac

SEQ ID NO: 1144476 - RNA, 19 nt, Homo sapiens
  misc_RNA (1)...(19): siRNA sense strand
ggacuuggccuugccuuca

SEQ ID NO: 1144477 - RNA, 19 nt, Homo sapiens
  misc_RNA (1)...(19): siRNA sense strand
gaacaagaaccuggaggau

SEQ ID NO: 1144478 - RNA, 19 nt, Homo sapiens
  misc_RNA (1)...(19): siRNA sense strand
ucacaguaaugaagguuuc

SEQ ID NO: 1144479 - RNA, 19 nt, Homo sapiens
  misc_RNA (1)...(19): siRNA sense strand
cacauacauucucacagua

SEQ ID NO: 1144480 - RNA, 19 nt, Homo sapiens
  misc_RNA (1)...(19): siRNA sense strand
ggacagcagaggagaagau

SEQ ID NO: 1144481 - RNA, 19 nt, Homo sapiens
  misc_RNA (1)...(19): siRNA sense strand
gaaaagauggugcuucaga

SEQ ID NO: 1144482 - RNA, 19 nt, Homo sapiens
  misc_RNA (1)...(19): siRNA sense strand
uggcuugucagguuuaaua

SEQ ID NO: 1144483 - RNA, 19 nt, Homo sapiens
  misc_RNA (1)...(19): siRNA sense strand
gcucaacagugugcagaau

SEQ ID NO: 1144484 - RNA, 19 nt, Homo sapiens
  misc_RNA (1)...(19): siRNA sense strand
aaacuaccaggacagauuu

SEQ ID NO: 1144485 - RNA, 19 nt, Homo sapiens
  misc_RNA (1)...(19): siRNA sense strand
uggaaagaauggcaagaga

SEQ ID NO: 1144486 - RNA, 19 nt, Homo sapiens
  misc_RNA (1)...(19): siRNA sense strand
acagaggacaccuaucuaa

SEQ ID NO: 1144487 - RNA, 19 nt, Homo sapiens
  misc_RNA (1)...(19): siRNA sense strand
cuuaagcccucggcgauuu

SEQ ID NO: 1144488 - RNA, 19 nt, Homo sapiens
  misc_RNA (1)...(19): siRNA sense strand
cgccagggcccacaaauga

SEQ ID NO: 1144489 - RNA, 19 nt, Homo sapiens
  misc_RNA (1)...(19): siRNA sense strand
cagcauaaagcaaaugaau

SEQ ID NO: 1144490 - RNA, 19 nt, Homo sapiens
  misc_RNA (1)...(19): siRNA sense strand
gccagcggauuaaaugaug

SEQ ID NO: 1144491 - RNA, 19 nt, Homo sapiens
  misc_RNA (1)...(19): siRNA sense strand
ggcauauucuguccagguu

SEQ ID NO: 1144492 - RNA, 19 nt, Homo sapiens
  misc_RNA (1)...(19): siRNA sense strand
ccuggaggauuauugauca

SEQ ID NO: 1144493 - RNA, 19 nt, Homo sapiens
  misc_RNA (1)...(19): siRNA sense strand
ggagcgagguauggauuag

SEQ ID NO: 1144494 - RNA, 19 nt, Homo sapiens
  misc_RNA (1)...(19): siRNA sense strand
gccauuugcuugcgagauc

SEQ ID NO: 1144495 - RNA, 19 nt, Homo sapiens
  misc_RNA (1)...(19): siRNA sense strand
auaaaggccuguaccucaa

SEQ ID NO: 1144496 - RNA, 19 nt, Homo sapiens
  misc_RNA (1)...(19): siRNA sense strand
caaaggugauaauucaacu

SEQ ID NO: 1144497 - RNA, 19 nt, Homo sapiens
  misc_RNA (1)...(19): siRNA sense strand
caacagugugcagaauaua

SEQ ID NO: 1144498 - RNA, 19 nt, Homo sapiens
  misc_RNA (1)...(19): siRNA sense strand
uaccgaaguuguaccauca

SEQ ID NO: 1144499 - RNA, 19 nt, Homo sapiens
  misc_RNA (1)...(19): siRNA sense strand
uaccaggacagauuuauga

SEQ ID NO: 1144500 - RNA, 19 nt, Homo sapiens
  misc_RNA (1)...(19): siRNA sense strand
gaagcaguguugcauucuc

SEQ ID NO: 1144501 - RNA, 19 nt, Homo sapiens
  misc_RNA (1)...(19): siRNA sense strand
caagucaauuccucauucu

SEQ ID NO: 1144502 - RNA, 19 nt, Homo sapiens
  misc_RNA (1)...(19): siRNA sense strand
ugguggagguuacauaaau

SEQ ID NO: 1144503 - RNA, 19 nt, Homo sapiens
  misc_RNA (1)...(19): siRNA sense strand
gcaaaggugauaauucaac

SEQ ID NO: 1144504 - RNA, 19 nt, Homo sapiens
  misc_RNA (1)...(19): siRNA sense strand
ugugaaggauauuugcaaa

SEQ ID NO: 1144505 - RNA, 19 nt, Homo sapiens
  misc_RNA (1)...(19): siRNA sense strand
acaagaaaaugguggaaaa

SEQ ID NO: 1144506 - RNA, 19 nt, Homo sapiens
  misc_RNA (1)...(19): siRNA sense strand
gaaaggcugaaggcaauau

SEQ ID NO: 1144507 - RNA, 19 nt, Homo sapiens
  misc_RNA (1)...(19): siRNA sense strand
ugaaccaugugacacucua

SEQ ID NO: 1144508 - RNA, 19 nt, Homo sapiens
  misc_RNA (1)...(19): siRNA sense strand
aaagaugggacuauuggaa

SEQ ID NO: 1144509 - RNA, 19 nt, Homo sapiens
  misc_RNA (1)...(19): siRNA sense strand
gcgcggaccuggaacauua

SEQ ID NO: 1144510 - RNA, 19 nt, Homo sapiens
  misc_RNA (1)...(19): siRNA sense strand
agaagaagcugaacaaagu

SEQ ID NO: 1144511 - RNA, 19 nt, Homo sapiens
  misc_RNA (1)...(19): siRNA sense strand
gaagagauucgacaagugu

SEQ ID NO: 1144512 - RNA, 19 nt, Homo sapiens
  misc_RNA (1)...(19): siRNA sense strand
gagaagcugcucugucauu

SEQ ID NO: 1144513 - RNA, 19 nt, Homo sapiens
  misc_RNA (1)...(19): siRNA sense strand
gacacaaccucaacaagca

SEQ ID NO: 1144514 - RNA, 19 nt, Homo sapiens
  misc_RNA (1)...(19): siRNA sense strand
ugacuggacucuucaccaa

SEQ ID NO: 1144515 - RNA, 19 nt, Homo sapiens
  misc_RNA (1)...(19): siRNA sense strand
caauggcacuggcuacuuc

SEQ ID NO: 1144516 - RNA, 19 nt, Homo sapiens
  misc_RNA (1)...(19): siRNA sense strand
gaacaaagugagugacaag

SEQ ID NO: 1144517 - RNA, 19 nt, Homo sapiens
  misc_RNA (1)...(19): siRNA sense strand
cgacuggacccggacauua

SEQ ID NO: 1144518 - RNA, 19 nt, Homo sapiens
  misc_RNA (1)...(19): siRNA sense strand
gcuccaagcccuguccuua

SEQ ID NO: 1144519 - RNA, 19 nt, Homo sapiens
  misc_RNA (1)...(19): siRNA sense strand
cagaggcgcucacucaagu

SEQ ID NO: 1144520 - RNA, 19 nt, Homo sapiens
  misc_RNA (1)...(19): siRNA sense strand
acaacuaccuggcucugaa

SEQ ID NO: 1144521 - RNA, 19 nt, Homo sapiens
  misc_RNA (1)...(19): siRNA sense strand
ucaaggugcugcuucuuag

SEQ ID NO: 1144522 - RNA, 19 nt, Homo sapiens
  misc_RNA (1)...(19): siRNA sense strand
gaacagccaaggcaaguac

SEQ ID NO: 1144523 - RNA, 19 nt, Homo sapiens
  misc_RNA (1)...(19): siRNA sense strand
gucaaggugcugcuucuua

SEQ ID NO: 1144524 - RNA, 19 nt, Homo sapiens
  misc_RNA (1)...(19): siRNA sense strand
gacuggacccggacauuaa

SEQ ID NO: 1144525 - RNA, 19 nt, Homo sapiens
  misc_RNA (1)...(19): siRNA sense strand
gacaauaagagcugcaaga

SEQ ID NO: 1144526 - RNA, 19 nt, Homo sapiens
  misc_RNA (1)...(19): siRNA sense strand
gaaauaccgauccugcaau

SEQ ID NO: 1144527 - RNA, 19 nt, Homo sapiens
  misc_RNA (1)...(19): siRNA sense strand
cugcgacgcugcuucuauu

SEQ ID NO: 1144528 - RNA, 19 nt, Homo sapiens
  misc_RNA (1)...(19): siRNA sense strand
gaaccugggcuccaagaag

SEQ ID NO: 1144529 - RNA, 19 nt, Homo sapiens
  misc_RNA (1)...(19): siRNA sense strand
ggacacugccauccucuuc

SEQ ID NO: 1144530 - RNA, 19 nt, Homo sapiens
  misc_RNA (1)...(19): siRNA sense strand
aagaagagauucgacaagu

SEQ ID NO: 1144531 - RNA, 19 nt, Homo sapiens
  misc_RNA (1)...(19): siRNA sense strand
aaccugggcuccaagaaga

SEQ ID NO: 1144532 - RNA, 19 nt, Homo sapiens
  misc_RNA (1)...(19): siRNA sense strand
ccaagcguuucgugucuau

SEQ ID NO: 1144533 - RNA, 19 nt, Homo sapiens
  misc_RNA (1)...(19): siRNA sense strand
gaagcugcucugucauuga

SEQ ID NO: 1144534 - RNA, 19 nt, Homo sapiens
  misc_RNA (1)...(19): siRNA sense strand
gcagaagaagcugaacaaa

SEQ ID NO: 1144535 - RNA, 19 nt, Homo sapiens
  misc_RNA (1)...(19): siRNA sense strand
ccaaaugggaucccuaugg

SEQ ID NO: 1144536 - RNA, 19 nt, Homo sapiens
  misc_RNA (1)...(19): siRNA sense strand
cagaagaagcugaacaaag

SEQ ID NO: 1144537 - RNA, 19 nt, Homo sapiens
  misc_RNA (1)...(19): siRNA sense strand
ccuucuaucugcccaaaga

SEQ ID NO: 1144538 - RNA, 19 nt, Homo sapiens
  misc_RNA (1)...(19): siRNA sense strand
ugaaauaccgauccugcaa

SEQ ID NO: 1144539 - RNA, 19 nt, Homo sapiens
  misc_RNA (1)...(19): siRNA sense strand
cgacgcugcuucuauucug

SEQ ID NO: 1144540 - RNA, 19 nt, Homo sapiens
  misc_RNA (1)...(19): siRNA sense strand
agaagagauucgacaagug

SEQ ID NO: 1144541 - RNA, 19 nt, Homo sapiens
  misc_RNA (1)...(19): siRNA sense strand
gcacuggcuacuucuaugu

SEQ ID NO: 1144542 - RNA, 19 nt, Homo sapiens
  misc_RNA (1)...(19): siRNA sense strand
gaagaagcugaacaaagug

SEQ ID NO: 1144543 - RNA, 19 nt, Homo sapiens
  misc_RNA (1)...(19): siRNA sense strand
aaauaccgauccugcaauc

SEQ ID NO: 1144544 - RNA, 19 nt, Homo sapiens
  misc_RNA (1)...(19): siRNA sense strand
ugaacaaagugagugacaa

SEQ ID NO: 1144545 - RNA, 19 nt, Homo sapiens
  misc_RNA (1)...(19): siRNA sense strand
ccaagaagagauucgacaa

SEQ ID NO: 1144546 - RNA, 19 nt, Homo sapiens
  misc_RNA (1)...(19): siRNA sense strand
guccuuacaugcaguacug

SEQ ID NO: 1144547 - RNA, 19 nt, Homo sapiens
  misc_RNA (1)...(19): siRNA sense strand
acgagucaauggucaaguu

SEQ ID NO: 1144548 - RNA, 19 nt, Homo sapiens
  misc_RNA (1)...(19): siRNA sense strand
acaauaagagcugcaagaa

SEQ ID NO: 1144549 - RNA, 19 nt, Homo sapiens
  misc_RNA (1)...(19): siRNA sense strand
gcaccaaccggcucacucu

SEQ ID NO: 1144550 - RNA, 19 nt, Homo sapiens
  misc_RNA (1)...(19): siRNA sense strand
agaagcugcucugucauug

SEQ ID NO: 1144551 - RNA, 19 nt, Homo sapiens
  misc_RNA (1)...(19): siRNA sense strand
ggcagaagaagcugaacaa

SEQ ID NO: 1144552 - RNA, 19 nt, Homo sapiens
  misc_RNA (1)...(19): siRNA sense strand
caagcccuguccuuacaug

SEQ ID NO: 1144553 - RNA, 19 nt, Homo sapiens
  misc_RNA (1)...(19): siRNA sense strand
ggcacuggcuacuucuaug

SEQ ID NO: 1144554 - RNA, 19 nt, Homo sapiens
  misc_RNA (1)...(19): siRNA sense strand
ggagagacacaaccucaac

SEQ ID NO: 1144555 - RNA, 19 nt, Homo sapiens
  misc_RNA (1)...(19): siRNA sense strand
gacccucugucuugcacaa

SEQ ID NO: 1144556 - RNA, 19 nt, Homo sapiens
  misc_RNA (1)...(19): siRNA sense strand
gccaagcguuucgugucua

SEQ ID NO: 1144557 - RNA, 19 nt, Homo sapiens
  misc_RNA (1)...(19): siRNA sense strand
gcaucaaggcuggcuguga

SEQ ID NO: 1144558 - RNA, 19 nt, Homo sapiens
  misc_RNA (1)...(19): siRNA sense strand
gaugguuccugggccaaau

SEQ ID NO: 1144559 - RNA, 19 nt, Homo sapiens
  misc_RNA (1)...(19): siRNA sense strand
gccggaugcucaguucuug

SEQ ID NO: 1144560 - RNA, 19 nt, Homo sapiens
  misc_RNA (1)...(19): siRNA sense strand
caaguacuccggcgugucu

SEQ ID NO: 1144561 - RNA, 19 nt, Homo sapiens
  misc_RNA (1)...(19): siRNA sense strand
caagaagagauucgacaag

SEQ ID NO: 1144562 - RNA, 19 nt, Homo sapiens
  misc_RNA (1)...(19): siRNA sense strand
ggaccuggaacauuaucug

SEQ ID NO: 1144563 - RNA, 19 nt, Homo sapiens
  misc_RNA (1)...(19): siRNA sense strand
caauaagagcugcaagaag

SEQ ID NO: 1144564 - RNA, 19 nt, Homo sapiens
  misc_RNA (1)...(19): siRNA sense strand
cagcucagccuccggaaag

SEQ ID NO: 1144565 - RNA, 19 nt, Homo sapiens
  misc_RNA (1)...(19): siRNA sense strand
ggccaaaugggaucccuau

SEQ ID NO: 1144566 - RNA, 19 nt, Homo sapiens
  misc_RNA (1)...(19): siRNA sense strand
gaaggccaagggacagaug

SEQ ID NO: 1144567 - RNA, 19 nt, Homo sapiens
  misc_RNA (1)...(19): siRNA sense strand
uccaagcccuguccuuaca

SEQ ID NO: 1144568 - RNA, 19 nt, Homo sapiens
  misc_RNA (1)...(19): siRNA sense strand
ugauguggguaccaugugu

SEQ ID NO: 1144569 - RNA, 19 nt, Homo sapiens
  misc_RNA (1)...(19): siRNA sense strand
gaucggggaugacaacuac

SEQ ID NO: 1144570 - RNA, 19 nt, Homo sapiens
  misc_RNA (1)...(19): siRNA sense strand
aagcugcucugucauugag

SEQ ID NO: 1144571 - RNA, 19 nt, Homo sapiens
  misc_RNA (1)...(19): siRNA sense strand
gagagacacaaccucaaca

SEQ ID NO: 1144572 - RNA, 19 nt, Homo sapiens
  misc_RNA (1)...(19): siRNA sense strand
ggacaagugcaagcucauc

SEQ ID NO: 1144573 - RNA, 19 nt, Homo sapiens
  misc_RNA (1)...(19): siRNA sense strand
ggagcagugugaggcuuuc

SEQ ID NO: 1144574 - RNA, 19 nt, Homo sapiens
  misc_RNA (1)...(19): siRNA sense strand
gaagcugaacaaagugagu

SEQ ID NO: 1144575 - RNA, 19 nt, Homo sapiens
  misc_RNA (1)...(19): siRNA sense strand
gcgagggagugagggugaa

SEQ ID NO: 1144576 - RNA, 19 nt, Homo sapiens
  misc_RNA (1)...(19): siRNA sense strand
uuucagaggcgcucacuca

SEQ ID NO: 1144577 - RNA, 19 nt, Homo sapiens
  misc_RNA (1)...(19): siRNA sense strand
gguccgcuacuccuucuau

SEQ ID NO: 1144578 - RNA, 19 nt, Homo sapiens
  misc_RNA (1)...(19): siRNA sense strand
gacgccggaugcucaguuc

SEQ ID NO: 1144579 - RNA, 19 nt, Homo sapiens
  misc_RNA (1)...(19): siRNA sense strand
gagacacaaccucaacaag

SEQ ID NO: 1144580 - RNA, 19 nt, Homo sapiens
  misc_RNA (1)...(19): siRNA sense strand
ggaaccugggcuccaagaa

SEQ ID NO: 1144581 - RNA, 19 nt, Homo sapiens
  misc_RNA (1)...(19): siRNA sense strand
ugacuccaccuccgucugu

SEQ ID NO: 1144582 - RNA, 19 nt, Homo sapiens
  misc_RNA (1)...(19): siRNA sense strand
gagcugggccacguguuca

SEQ ID NO: 1144583 - RNA, 19 nt, Homo sapiens
  misc_RNA (1)...(19): siRNA sense strand
cuaccuggcucugaagaac

SEQ ID NO: 1144584 - RNA, 19 nt, Homo sapiens
  misc_RNA (1)...(19): siRNA sense strand
caaggugcugcuucuuaga

SEQ ID NO: 1144585 - RNA, 19 nt, Homo sapiens
  misc_RNA (1)...(19): siRNA sense strand
gacaacuaccuggcucuga

SEQ ID NO: 1144586 - RNA, 19 nt, Homo sapiens
  misc_RNA (1)...(19): siRNA sense strand
ccaugacaaugugaaaguc

SEQ ID NO: 1144587 - RNA, 19 nt, Homo sapiens
  misc_RNA (1)...(19): siRNA sense strand
gcugauguggguaccaugu

SEQ ID NO: 1144588 - RNA, 19 nt, Homo sapiens
  misc_RNA (1)...(19): siRNA sense strand
gaacagaagaggcagauua

SEQ ID NO: 1144589 - RNA, 19 nt, Homo sapiens
  misc_RNA (1)...(19): siRNA sense strand
gaggauagccguaauguuu

SEQ ID NO: 1144590 - RNA, 19 nt, Homo sapiens
  misc_RNA (1)...(19): siRNA sense strand
ggacacaacuuuggcauga

SEQ ID NO: 1144591 - RNA, 19 nt, Homo sapiens
  misc_RNA (1)...(19): siRNA sense strand
ggacuggccuucaccauug

SEQ ID NO: 1144592 - RNA, 19 nt, Homo sapiens
  misc_RNA (1)...(19): siRNA sense strand
cauaagcgcucucuucuga

SEQ ID NO: 1144593 - RNA, 19 nt, Homo sapiens
  misc_RNA (1)...(19): siRNA sense strand
gcaaugcccucagaaggua

SEQ ID NO: 1144594 - RNA, 19 nt, Homo sapiens
  misc_RNA (1)...(19): siRNA sense strand
caaagccugugaaggaaua

SEQ ID NO: 1144595 - RNA, 19 nt, Homo sapiens
  misc_RNA (1)...(19): siRNA sense strand
ggaaggaaaugugagacua

SEQ ID NO: 1144596 - RNA, 19 nt, Homo sapiens
  misc_RNA (1)...(19): siRNA sense strand
gccaguaucuacacaaauu

SEQ ID NO: 1144597 - RNA, 19 nt, Homo sapiens
  misc_RNA (1)...(19): siRNA sense strand
ggaaaugugagacuaaauu

SEQ ID NO: 1144598 - RNA, 19 nt, Homo sapiens
  misc_RNA (1)...(19): siRNA sense strand
caugguaucugcuuuauuc

SEQ ID NO: 1144599 - RNA, 19 nt, Homo sapiens
  misc_RNA (1)...(19): siRNA sense strand
ggacuucuguuucuaucaa

SEQ ID NO: 1144600 - RNA, 19 nt, Homo sapiens
  misc_RNA (1)...(19): siRNA sense strand
gcuggugccuugcaaagua

SEQ ID NO: 1144601 - RNA, 19 nt, Homo sapiens
  misc_RNA (1)...(19): siRNA sense strand
gcgauuacgugucccauga

SEQ ID NO: 1144602 - RNA, 19 nt, Homo sapiens
  misc_RNA (1)...(19): siRNA sense strand
caacaugguaucugcuuua

SEQ ID NO: 1144603 - RNA, 19 nt, Homo sapiens
  misc_RNA (1)...(19): siRNA sense strand
gguaucugcuuuauucaaa

SEQ ID NO: 1144604 - RNA, 19 nt, Homo sapiens
  misc_RNA (1)...(19): siRNA sense strand
ggaggaaacaucaacauug

SEQ ID NO: 1144605 - RNA, 19 nt, Homo sapiens
  misc_RNA (1)...(19): siRNA sense strand
gaucaggacuuaugcaaac

SEQ ID NO: 1144606 - RNA, 19 nt, Homo sapiens
  misc_RNA (1)...(19): siRNA sense strand
acaaguauccugagaaauu

SEQ ID NO: 1144607 - RNA, 19 nt, Homo sapiens
  misc_RNA (1)...(19): siRNA sense strand
gaaggaaaugugagacuaa

SEQ ID NO: 1144608 - RNA, 19 nt, Homo sapiens
  misc_RNA (1)...(19): siRNA sense strand
caucaacauugcaauugua

SEQ ID NO: 1144609 - RNA, 19 nt, Homo sapiens
  misc_RNA (1)...(19): siRNA sense strand
ugacuggucuggauauaug

SEQ ID NO: 1144610 - RNA, 19 nt, Homo sapiens
  misc_RNA (1)...(19): siRNA sense strand
caugggagcuggcacauca

SEQ ID NO: 1144611 - RNA, 19 nt, Homo sapiens
  misc_RNA (1)...(19): siRNA sense strand
gcagaccacaccuuaagua

SEQ ID NO: 1144612 - RNA, 19 nt, Homo sapiens
  misc_RNA (1)...(19): siRNA sense strand
caaguauccugagaaauug

SEQ ID NO: 1144613 - RNA, 19 nt, Homo sapiens
  misc_RNA (1)...(19): siRNA sense strand
caaccaguauuaucacaug

SEQ ID NO: 1144614 - RNA, 19 nt, Homo sapiens
  misc_RNA (1)...(19): siRNA sense strand
aguagaagaucaggacuua

SEQ ID NO: 1144615 - RNA, 19 nt, Homo sapiens
  misc_RNA (1)...(19): siRNA sense strand
gaggacagugugugaaaua

SEQ ID NO: 1144616 - RNA, 19 nt, Homo sapiens
  misc_RNA (1)...(19): siRNA sense strand
ccuaguggcuccuggcuuu

SEQ ID NO: 1144617 - RNA, 19 nt, Homo sapiens
  misc_RNA (1)...(19): siRNA sense strand
ggaaagacaggcacuaagu

SEQ ID NO: 1144618 - RNA, 19 nt, Homo sapiens
  misc_RNA (1)...(19): siRNA sense strand
uaacucagccugcacgauu

SEQ ID NO: 1144619 - RNA, 19 nt, Homo sapiens
  misc_RNA (1)...(19): siRNA sense strand
uaaguggaauguguaguaa

SEQ ID NO: 1144620 - RNA, 19 nt, Homo sapiens
  misc_RNA (1)...(19): siRNA sense strand
ggaagaaugagcccuguga

SEQ ID NO: 1144621 - RNA, 19 nt, Homo sapiens
  misc_RNA (1)...(19): siRNA sense strand
ccacgcagaccacaccuua

SEQ ID NO: 1144622 - RNA, 19 nt, Homo sapiens
  misc_RNA (1)...(19): siRNA sense strand
gaggaaacaucaacauugc

SEQ ID NO: 1144623 - RNA, 19 nt, Homo sapiens
  misc_RNA (1)...(19): siRNA sense strand
ggaaggaacccggguguug

SEQ ID NO: 1144624 - RNA, 19 nt, Homo sapiens
  misc_RNA (1)...(19): siRNA sense strand
gaucugaugcuguugaaga

SEQ ID NO: 1144625 - RNA, 19 nt, Homo sapiens
  misc_RNA (1)...(19): siRNA sense strand
ccauagaaaugaagaacug

SEQ ID NO: 1144626 - RNA, 19 nt, Homo sapiens
  misc_RNA (1)...(19): siRNA sense strand
cuacagagaccugaaguuu

SEQ ID NO: 1144627 - RNA, 19 nt, Homo sapiens
  misc_RNA (1)...(19): siRNA sense strand
acacaacuuuggcaugauu

SEQ ID NO: 1144628 - RNA, 19 nt, Homo sapiens
  misc_RNA (1)...(19): siRNA sense strand
uaugcaaacucuacuguau

SEQ ID NO: 1144629 - RNA, 19 nt, Homo sapiens
  misc_RNA (1)...(19): siRNA sense strand
ccaggagaauuauaugaug

SEQ ID NO: 1144630 - RNA, 19 nt, Homo sapiens
  misc_RNA (1)...(19): siRNA sense strand
cuacacaaauuucuaagca

SEQ ID NO: 1144631 - RNA, 19 nt, Homo sapiens
  misc_RNA (1)...(19): siRNA sense strand
guggaagacgcaagaaaua

SEQ ID NO: 1144632 - RNA, 19 nt, Homo sapiens
  misc_RNA (1)...(19): siRNA sense strand
ggaaacaucaacauugcaa

SEQ ID NO: 1144633 - RNA, 19 nt, Homo sapiens
  misc_RNA (1)...(19): siRNA sense strand
agaggcagauuacuuccua

SEQ ID NO: 1144634 - RNA, 19 nt, Homo sapiens
  misc_RNA (1)...(19): siRNA sense strand
gacagugugugaaauaugg

SEQ ID NO: 1144635 - RNA, 19 nt, Homo sapiens
  misc_RNA (1)...(19): siRNA sense strand
gaccacaccuuaaguagcu

SEQ ID NO: 1144636 - RNA, 19 nt, Homo sapiens
  misc_RNA (1)...(19): siRNA sense strand
gauuacgugucccaugaaa

SEQ ID NO: 1144637 - RNA, 19 nt, Homo sapiens
  misc_RNA (1)...(19): siRNA sense strand
ugugaaauauggugaugaa

SEQ ID NO: 1144638 - RNA, 19 nt, Homo sapiens
  misc_RNA (1)...(19): siRNA sense strand
gaaaugaacgucucuaccu

SEQ ID NO: 1144639 - RNA, 19 nt, Homo sapiens
  misc_RNA (1)...(19): siRNA sense strand
ggauagccguaauguuugu

SEQ ID NO: 1144640 - RNA, 19 nt, Homo sapiens
  misc_RNA (1)...(19): siRNA sense strand
gugcagacguugggaaaga

SEQ ID NO: 1144641 - RNA, 19 nt, Homo sapiens
  misc_RNA (1)...(19): siRNA sense strand
ggaguauccgcaucuauga

SEQ ID NO: 1144642 - RNA, 19 nt, Homo sapiens
  misc_RNA (1)...(19): siRNA sense strand
gcagcugcacgauuaauga

SEQ ID NO: 1144643 - RNA, 19 nt, Homo sapiens
  misc_RNA (1)...(19): siRNA sense strand
gcugcacgauuaaugaaga

SEQ ID NO: 1144644 - RNA, 19 nt, Homo sapiens
  misc_RNA (1)...(19): siRNA sense strand
cuucacaccucucauggaa

SEQ ID NO: 1144645 - RNA, 19 nt, Homo sapiens
  misc_RNA (1)...(19): siRNA sense strand
uacagacgguccuauaaug

SEQ ID NO: 1144646 - RNA, 19 nt, Homo sapiens
  misc_RNA (1)...(19): siRNA sense strand
guauagaugggauauguga

SEQ ID NO: 1144647 - RNA, 19 nt, Homo sapiens
  misc_RNA (1)...(19): siRNA sense strand
gcacaacagcagacgauuc

SEQ ID NO: 1144648 - RNA, 19 nt, Homo sapiens
  misc_RNA (1)...(19): siRNA sense strand
gcaauuguaggucugauuc

SEQ ID NO: 1144649 - RNA, 19 nt, Homo sapiens
  misc_RNA (1)...(19): siRNA sense strand
ggaagacgcaagaaauaca

SEQ ID NO: 1144650 - RNA, 19 nt, Homo sapiens
  misc_RNA (1)...(19): siRNA sense strand
cagaagaggcagauuacuu

SEQ ID NO: 1144651 - RNA, 19 nt, Homo sapiens
  misc_RNA (1)...(19): siRNA sense strand
gagagagggcugcuacaga

SEQ ID NO: 1144652 - RNA, 19 nt, Homo sapiens
  misc_RNA (1)...(19): siRNA sense strand
cguaauguuuguauagaug

SEQ ID NO: 1144653 - RNA, 19 nt, Homo sapiens
  misc_RNA (1)...(19): siRNA sense strand
gccuuacacucaaguagaa

SEQ ID NO: 1144654 - RNA, 19 nt, Homo sapiens
  misc_RNA (1)...(19): siRNA sense strand
gccaaagccugugaaggaa

SEQ ID NO: 1144655 - RNA, 19 nt, Homo sapiens
  misc_RNA (1)...(19): siRNA sense strand
gcagcagaaggcacaauuu

SEQ ID NO: 1144656 - RNA, 19 nt, Homo sapiens
  misc_RNA (1)...(19): siRNA sense strand
auaaugagcccgagaacuu

SEQ ID NO: 1144657 - RNA, 19 nt, Homo sapiens
  misc_RNA (1)...(19): siRNA sense strand
gcacuacuuucgacuacag

SEQ ID NO: 1144658 - RNA, 19 nt, Homo sapiens
  misc_RNA (1)...(19): siRNA sense strand
gaaagacaggcacuaaguc

SEQ ID NO: 1144659 - RNA, 19 nt, Homo sapiens
  misc_RNA (1)...(19): siRNA sense strand
ggacuuaugcaaacucuac

SEQ ID NO: 1144660 - RNA, 19 nt, Homo sapiens
  misc_RNA (1)...(19): siRNA sense strand
ucaaggcucuuugcgauca

SEQ ID NO: 1144661 - RNA, 19 nt, Homo sapiens
  misc_RNA (1)...(19): siRNA sense strand
uagaagaucaggacuuaug

SEQ ID NO: 1144662 - RNA, 19 nt, Homo sapiens
  misc_RNA (1)...(19): siRNA sense strand
caacagcagacgauucaga

SEQ ID NO: 1144663 - RNA, 19 nt, Homo sapiens
  misc_RNA (1)...(19): siRNA sense strand
ggaggacagugugugaaau

SEQ ID NO: 1144664 - RNA, 19 nt, Homo sapiens
  misc_RNA (1)...(19): siRNA sense strand
gagaagggaacaugugcaa

SEQ ID NO: 1144665 - RNA, 19 nt, Homo sapiens
  misc_RNA (1)...(19): siRNA sense strand
uaaugagcccgagaacuua

SEQ ID NO: 1144666 - RNA, 19 nt, Homo sapiens
  misc_RNA (1)...(19): siRNA sense strand
gaagggaacaugugcaaaa

SEQ ID NO: 1144667 - RNA, 19 nt, Homo sapiens
  misc_RNA (1)...(19): siRNA sense strand
cagcagaaggcacaauuug

SEQ ID NO: 1144668 - RNA, 19 nt, Homo sapiens
  misc_RNA (1)...(19): siRNA sense strand
gcccuguggugccaucgua

SEQ ID NO: 1144669 - RNA, 19 nt, Homo sapiens
  misc_RNA (1)...(19): siRNA sense strand
ggacagugugugaaauaug

SEQ ID NO: 1144670 - RNA, 19 nt, Homo sapiens
  misc_RNA (1)...(19): siRNA sense strand
ucacaccucucauggaaac

SEQ ID NO: 1144671 - RNA, 19 nt, Homo sapiens
  misc_RNA (1)...(19): siRNA sense strand
gacuacagacgguccuaua

SEQ ID NO: 1144672 - RNA, 19 nt, Homo sapiens
  misc_RNA (1)...(19): siRNA sense strand
gucucuaccuccuacauuu

SEQ ID NO: 1144673 - RNA, 19 nt, Homo sapiens
  misc_RNA (1)...(19): siRNA sense strand
cagaugaguauaagucuug

SEQ ID NO: 1144674 - RNA, 19 nt, Homo sapiens
  misc_RNA (1)...(19): siRNA sense strand
gaaaugaagaacugaacgu

SEQ ID NO: 1144675 - RNA, 19 nt, Homo sapiens
  misc_RNA (1)...(19): siRNA sense strand
guggaagccuuacacucaa

SEQ ID NO: 1144676 - RNA, 19 nt, Homo sapiens
  misc_RNA (1)...(19): siRNA sense strand
gggaggacagugugugaaa

SEQ ID NO: 1144677 - RNA, 19 nt, Homo sapiens
  misc_RNA (1)...(19): siRNA sense strand
gcaaacacacagugcaagu

SEQ ID NO: 1144678 - RNA, 19 nt, Homo sapiens
  misc_RNA (1)...(19): siRNA sense strand
ucaacaugguaucugcuuu

SEQ ID NO: 1144679 - RNA, 19 nt, Homo sapiens
  misc_RNA (1)...(19): siRNA sense strand
gaggacuucuguuucuauc

SEQ ID NO: 1144680 - RNA, 19 nt, Homo sapiens
  misc_RNA (1)...(19): siRNA sense strand
acaauguccuuggaucuga

SEQ ID NO: 1144681 - RNA, 19 nt, Homo sapiens
  misc_RNA (1)...(19): siRNA sense strand
gagcacaacagcagacgau

SEQ ID NO: 1144682 - RNA, 19 nt, Homo sapiens
  misc_RNA (1)...(19): siRNA sense strand
auaaguggaauguguagua

SEQ ID NO: 1144683 - RNA, 19 nt, Homo sapiens
  misc_RNA (1)...(19): siRNA sense strand
gguugagucucuucaccuu

SEQ ID NO: 1144684 - RNA, 19 nt, Homo sapiens
  misc_RNA (1)...(19): siRNA sense strand
aguggaauguguaguaaau

SEQ ID NO: 1144685 - RNA, 19 nt, Homo sapiens
  misc_RNA (1)...(19): siRNA sense strand
acacucaaguagaagauca

SEQ ID NO: 1144686 - RNA, 19 nt, Homo sapiens
  misc_RNA (1)...(19): siRNA sense strand
aaggaaaugugagacuaaa

SEQ ID NO: 1144687 - RNA, 19 nt, Homo sapiens
  misc_RNA (1)...(19): siRNA sense strand
ggagaauuauaugaugcaa

SEQ ID NO: 1144688 - RNA, 19 nt, Homo sapiens
  misc_RNA (1)...(19): siRNA sense strand
gcacaaacuuuucuaauga

SEQ ID NO: 1144689 - RNA, 19 nt, Homo sapiens
  misc_RNA (1)...(19): siRNA sense strand
caaagucaauuccaugaag

SEQ ID NO: 1144690 - RNA, 19 nt, Homo sapiens
  misc_RNA (1)...(19): siRNA sense strand
gguguuugcuucagaaugu

SEQ ID NO: 1144691 - RNA, 19 nt, Homo sapiens
  misc_RNA (1)...(19): siRNA sense strand
gaauguauacagaagauga

SEQ ID NO: 1144692 - RNA, 19 nt, Homo sapiens
  misc_RNA (1)...(19): siRNA sense strand
ucucuaagcuugaauacuc

SEQ ID NO: 1144693 - RNA, 19 nt, Homo sapiens
  misc_RNA (1)...(19): siRNA sense strand
ucaaauccguggacuacga

SEQ ID NO: 1144694 - RNA, 19 nt, Homo sapiens
  misc_RNA (1)...(19): siRNA sense strand
gcaggguguuugcuucaga

SEQ ID NO: 1144695 - RNA, 19 nt, Homo sapiens
  misc_RNA (1)...(19): siRNA sense strand
cagaauguauacagaagau

SEQ ID NO: 1144696 - RNA, 19 nt, Homo sapiens
  misc_RNA (1)...(19): siRNA sense strand
ggugaagaauaccagcaaa

SEQ ID NO: 1144697 - RNA, 19 nt, Homo sapiens
  misc_RNA (1)...(19): siRNA sense strand
gacaaagucaauuccauga

SEQ ID NO: 1144698 - RNA, 19 nt, Homo sapiens
  misc_RNA (1)...(19): siRNA sense strand
gcauugaccgcacaaacuu

SEQ ID NO: 1144699 - RNA, 19 nt, Homo sapiens
  misc_RNA (1)...(19): siRNA sense strand
gaagagugcaggguguuug

SEQ ID NO: 1144700 - RNA, 19 nt, Homo sapiens
  misc_RNA (1)...(19): siRNA sense strand
ggaagagugcaggguguuu

SEQ ID NO: 1144701 - RNA, 19 nt, Homo sapiens
  misc_RNA (1)...(19): siRNA sense strand
cagaagacaaagucaauuc

SEQ ID NO: 1144702 - RNA, 19 nt, Homo sapiens
  misc_RNA (1)...(19): siRNA sense strand
gaagacaaagucaauucca

SEQ ID NO: 1144703 - RNA, 19 nt, Homo sapiens
  misc_RNA (1)...(19): siRNA sense strand
gaagaugaagcuaggaaaa

SEQ ID NO: 1144704 - RNA, 19 nt, Homo sapiens
  misc_RNA (1)...(19): siRNA sense strand
gugguuggcugggugaaga

SEQ ID NO: 1144705 - RNA, 19 nt, Homo sapiens
  misc_RNA (1)...(19): siRNA sense strand
agaugaagcuaggaaaaua

SEQ ID NO: 1144706 - RNA, 19 nt, Homo sapiens
  misc_RNA (1)...(19): siRNA sense strand
aaagucaauuccaugaagu

SEQ ID NO: 1144707 - RNA, 19 nt, Homo sapiens
  misc_RNA (1)...(19): siRNA sense strand
gcuucagaauguauacaga

SEQ ID NO: 1144708 - RNA, 19 nt, Homo sapiens
  misc_RNA (1)...(19): siRNA sense strand
gccagaagacaaagucaau

SEQ ID NO: 1144709 - RNA, 19 nt, Homo sapiens
  misc_RNA (1)...(19): siRNA sense strand
caggguguuugcuucagaa

SEQ ID NO: 1144710 - RNA, 19 nt, Homo sapiens
  misc_RNA (1)...(19): siRNA sense strand
cagcaaaggcaccgugaca

SEQ ID NO: 1144711 - RNA, 19 nt, Homo sapiens
  misc_RNA (1)...(19): siRNA sense strand
cagaagaugaagcuaggaa

SEQ ID NO: 1144712 - RNA, 19 nt, Homo sapiens
  misc_RNA (1)...(19): siRNA sense strand
ccagaagacaaagucaauu

SEQ ID NO: 1144713 - RNA, 19 nt, Homo sapiens
  misc_RNA (1)...(19): siRNA sense strand
aagacaaagucaauuccau

SEQ ID NO: 1144714 - RNA, 19 nt, Homo sapiens
  misc_RNA (1)...(19): siRNA sense strand
aaccaucucuaagcuugaa

SEQ ID NO: 1144715 - RNA, 19 nt, Homo sapiens
  misc_RNA (1)...(19): siRNA sense strand
ccaucucuaagcuugaaua

SEQ ID NO: 1144716 - RNA, 19 nt, Homo sapiens
  misc_RNA (1)...(19): siRNA sense strand
guuggaagcccuaguucuc

SEQ ID NO: 1144717 - RNA, 19 nt, Homo sapiens
  misc_RNA (1)...(19): siRNA sense strand
cgcacaaacuuuucuaaug

SEQ ID NO: 1144718 - RNA, 19 nt, Homo sapiens
  misc_RNA (1)...(19): siRNA sense strand
gggugaagaauaccagcaa

SEQ ID NO: 1144719 - RNA, 19 nt, Homo sapiens
  misc_RNA (1)...(19): siRNA sense strand
acaaagucaauuccaugaa

SEQ ID NO: 1144720 - RNA, 19 nt, Homo sapiens
  misc_RNA (1)...(19): siRNA sense strand
ggccagaagacaaagucaa

SEQ ID NO: 1144721 - RNA, 19 nt, Homo sapiens
  misc_RNA (1)...(19): siRNA sense strand
ggaaauaccagcccaggaa

SEQ ID NO: 1144722 - RNA, 19 nt, Homo sapiens
  misc_RNA (1)...(19): siRNA sense strand
gcaggacaccgacauggaa

SEQ ID NO: 1144723 - RNA, 19 nt, Homo sapiens
  misc_RNA (1)...(19): siRNA sense strand
caccaaggguccaguuuca

SEQ ID NO: 1144724 - RNA, 19 nt, Homo sapiens
  misc_RNA (1)...(19): siRNA sense strand
ggguccaguuucagucuuu

SEQ ID NO: 1144725 - RNA, 19 nt, Homo sapiens
  misc_RNA (1)...(19): siRNA sense strand
ccaaggguccaguuucagu

SEQ ID NO: 1144726 - RNA, 19 nt, Homo sapiens
  misc_RNA (1)...(19): siRNA sense strand
gaagcagcagggucaccaa

SEQ ID NO: 1144727 - RNA, 19 nt, Homo sapiens
  misc_RNA (1)...(19): siRNA sense strand
ucaccaaggguccaguuuc

SEQ ID NO: 1144728 - RNA, 19 nt, Homo sapiens
  misc_RNA (1)...(19): siRNA sense strand
gguccaguuucagucuuug

SEQ ID NO: 1144729 - RNA, 19 nt, Homo sapiens
  misc_RNA (1)...(19): siRNA sense strand
ggaaauaccagcccaggaa

SEQ ID NO: 1144730 - RNA, 19 nt, Homo sapiens
  misc_RNA (1)...(19): siRNA sense strand
gcaggacaccgacauggaa

SEQ ID NO: 1144731 - RNA, 19 nt, Homo sapiens
  misc_RNA (1)...(19): siRNA sense strand
caccaaggguccaguuuca

SEQ ID NO: 1144732 - RNA, 19 nt, Homo sapiens
  misc_RNA (1)...(19): siRNA sense strand
ggguccaguuucagucuuu

SEQ ID NO: 1144733 - RNA, 19 nt, Homo sapiens
  misc_RNA (1)...(19): siRNA sense strand
ccaaggguccaguuucagu

SEQ ID NO: 1144734 - RNA, 19 nt, Homo sapiens
  misc_RNA (1)...(19): siRNA sense strand
gaagcagcagggucaccaa

SEQ ID NO: 1144735 - RNA, 19 nt, Homo sapiens
  misc_RNA (1)...(19): siRNA sense strand
ucaccaaggguccaguuuc

SEQ ID NO: 1144736 - RNA, 19 nt, Homo sapiens
  misc_RNA (1)...(19): siRNA sense strand
gguccaguuucagucuuug

SEQ ID NO: 1144737 - RNA, 19 nt, Homo sapiens
  misc_RNA (1)...(19): siRNA sense strand
cgaccaagauuauggaauu

SEQ ID NO: 1144738 - RNA, 19 nt, Homo sapiens
  misc_RNA (1)...(19): siRNA sense strand
gcagaaacauggagcaucu

SEQ ID NO: 1144739 - RNA, 19 nt, Homo sapiens
  misc_RNA (1)...(19): siRNA sense strand
ggagacacauccugcaaga

SEQ ID NO: 1144740 - RNA, 19 nt, Homo sapiens
  misc_RNA (1)...(19): siRNA sense strand
gcacaacuguucgcuaugu

SEQ ID NO: 1144741 - RNA, 19 nt, Homo sapiens
  misc_RNA (1)...(19): siRNA sense strand
gaacaugguauacaauaug

SEQ ID NO: 1144742 - RNA, 19 nt, Homo sapiens
  misc_RNA (1)...(19): siRNA sense strand
ccacaacucuggugaacga

SEQ ID NO: 1144743 - RNA, 19 nt, Homo sapiens
  misc_RNA (1)...(19): siRNA sense strand
gcagggacuucuaugcaaa

SEQ ID NO: 1144744 - RNA, 19 nt, Homo sapiens
  misc_RNA (1)...(19): siRNA sense strand
ggacuucuaugcaaacaag

SEQ ID NO: 1144745 - RNA, 19 nt, Homo sapiens
  misc_RNA (1)...(19): siRNA sense strand
gguggaugcugcuguguuu

SEQ ID NO: 1144746 - RNA, 19 nt, Homo sapiens
  misc_RNA (1)...(19): siRNA sense strand
ggaggugugugcagugcua

SEQ ID NO: 1144747 - RNA, 19 nt, Homo sapiens
  misc_RNA (1)...(19): siRNA sense strand
ccacgacgaugaccacuca

SEQ ID NO: 1144748 - RNA, 19 nt, Homo sapiens
  misc_RNA (1)...(19): siRNA sense strand
gagaugaccuugaaaacuu

SEQ ID NO: 1144749 - RNA, 19 nt, Homo sapiens
  misc_RNA (1)...(19): siRNA sense strand
uggaauugcuuacuuagga

SEQ ID NO: 1144750 - RNA, 19 nt, Homo sapiens
  misc_RNA (1)...(19): siRNA sense strand
gaagaaaggccugcugaca

SEQ ID NO: 1144751 - RNA, 19 nt, Homo sapiens
  misc_RNA (1)...(19): siRNA sense strand
gaacccaagugaccucucu

SEQ ID NO: 1144752 - RNA, 19 nt, Homo sapiens
  misc_RNA (1)...(19): siRNA sense strand
aaacauggagcaucuaaug

SEQ ID NO: 1144753 - RNA, 19 nt, Homo sapiens
  misc_RNA (1)...(19): siRNA sense strand
gcaggacucuuuguucauc

SEQ ID NO: 1144754 - RNA, 19 nt, Homo sapiens
  misc_RNA (1)...(19): siRNA sense strand
cgcgauaccucggcaauaa

SEQ ID NO: 1144755 - RNA, 19 nt, Homo sapiens
  misc_RNA (1)...(19): siRNA sense strand
caucgggucugcagccaaa

SEQ ID NO: 1144756 - RNA, 19 nt, Homo sapiens
  misc_RNA (1)...(19): siRNA sense strand
ugacagccguggugguuga

SEQ ID NO: 1144757 - RNA, 19 nt, Homo sapiens
  misc_RNA (1)...(19): siRNA sense strand
cagccgagaugaccuugaa

SEQ ID NO: 1144758 - RNA, 19 nt, Homo sapiens
  misc_RNA (1)...(19): siRNA sense strand
gaccaagcuuguccugcua

SEQ ID NO: 1144759 - RNA, 19 nt, Homo sapiens
  misc_RNA (1)...(19): siRNA sense strand
ccaagggucugcccagcuu

SEQ ID NO: 1144760 - RNA, 19 nt, Homo sapiens
  misc_RNA (1)...(19): siRNA sense strand
gcaugaaccacgacgauga

SEQ ID NO: 1144761 - RNA, 19 nt, Homo sapiens
  misc_RNA (1)...(19): siRNA sense strand
ggucucaauuuggccuuua

SEQ ID NO: 1144762 - RNA, 19 nt, Homo sapiens
  misc_RNA (1)...(19): siRNA sense strand
ggccacaacuugggcauga

SEQ ID NO: 1144763 - RNA, 19 nt, Homo sapiens
  misc_RNA (1)...(19): siRNA sense strand
caagggaccaaccaaacua

SEQ ID NO: 1144764 - RNA, 19 nt, Homo sapiens
  misc_RNA (1)...(19): siRNA sense strand
gcucugaccuacaaaugca

SEQ ID NO: 1144765 - RNA, 19 nt, Homo sapiens
  misc_RNA (1)...(19): siRNA sense strand
gcacuugaugguguuguua

SEQ ID NO: 1144766 - RNA, 19 nt, Homo sapiens
  misc_RNA (1)...(19): siRNA sense strand
uguuggaauugcuuacuua

SEQ ID NO: 1144767 - RNA, 19 nt, Homo sapiens
  misc_RNA (1)...(19): siRNA sense strand
aaucaaagcgaaccagaaa

SEQ ID NO: 1144768 - RNA, 19 nt, Homo sapiens
  misc_RNA (1)...(19): siRNA sense strand
gauaagccaugugaacucu

SEQ ID NO: 1144769 - RNA, 19 nt, Homo sapiens
  misc_RNA (1)...(19): siRNA sense strand
ccgcaggacucuuuguuca

SEQ ID NO: 1144770 - RNA, 19 nt, Homo sapiens
  misc_RNA (1)...(19): siRNA sense strand
gacaacgucccgcuaaguu

SEQ ID NO: 1144771 - RNA, 19 nt, Homo sapiens
  misc_RNA (1)...(19): siRNA sense strand
gaaccaucgucucguguac

SEQ ID NO: 1144772 - RNA, 19 nt, Homo sapiens
  misc_RNA (1)...(19): siRNA sense strand
gcuggcaggucccacauca

SEQ ID NO: 1144773 - RNA, 19 nt, Homo sapiens
  misc_RNA (1)...(19): siRNA sense strand
gauccuguuuggcaugaau

SEQ ID NO: 1144774 - RNA, 19 nt, Homo sapiens
  misc_RNA (1)...(19): siRNA sense strand
gccaggacaugcgguggua

SEQ ID NO: 1144775 - RNA, 19 nt, Homo sapiens
  misc_RNA (1)...(19): siRNA sense strand
ggacgagaacaucugauca

SEQ ID NO: 1144776 - RNA, 19 nt, Homo sapiens
  misc_RNA (1)...(19): siRNA sense strand
aggcacaacuguucgcuau

SEQ ID NO: 1144777 - RNA, 19 nt, Homo sapiens
  misc_RNA (1)...(19): siRNA sense strand
cauggagcaucuaaugugu

SEQ ID NO: 1144778 - RNA, 19 nt, Homo sapiens
  misc_RNA (1)...(19): siRNA sense strand
ccgccgagcugugcuucua

SEQ ID NO: 1144779 - RNA, 19 nt, Homo sapiens
  misc_RNA (1)...(19): siRNA sense strand
gaccaagauuauggaauuc

SEQ ID NO: 1144780 - RNA, 19 nt, Homo sapiens
  misc_RNA (1)...(19): siRNA sense strand
caaacuaccgcugcacuug

SEQ ID NO: 1144781 - RNA, 19 nt, Homo sapiens
  misc_RNA (1)...(19): siRNA sense strand
cgagaccaguggacgguau

SEQ ID NO: 1144782 - RNA, 19 nt, Homo sapiens
  misc_RNA (1)...(19): siRNA sense strand
gcagugccagauccuguuu

SEQ ID NO: 1144783 - RNA, 19 nt, Homo sapiens
  misc_RNA (1)...(19): siRNA sense strand
ccgcuaaguuguccauugg

SEQ ID NO: 1144784 - RNA, 19 nt, Homo sapiens
  misc_RNA (1)...(19): siRNA sense strand
cauuaugaauacacuguuc

SEQ ID NO: 1144785 - RNA, 19 nt, Homo sapiens
  misc_RNA (1)...(19): siRNA sense strand
ccaagauuauggaauucau

SEQ ID NO: 1144786 - RNA, 19 nt, Homo sapiens
  misc_RNA (1)...(19): siRNA sense strand
guuguuauuucacgaccaa

SEQ ID NO: 1144787 - RNA, 19 nt, Homo sapiens
  misc_RNA (1)...(19): siRNA sense strand
caucugaucaggcgcaaau

SEQ ID NO: 1144788 - RNA, 19 nt, Homo sapiens
  misc_RNA (1)...(19): siRNA sense strand
cagaagccagcacacagua

SEQ ID NO: 1144789 - RNA, 19 nt, Homo sapiens
  misc_RNA (1)...(19): siRNA sense strand
cuggagagcuucugucacu

SEQ ID NO: 1144790 - RNA, 19 nt, Homo sapiens
  misc_RNA (1)...(19): siRNA sense strand
acaaagaugaaccguguga

SEQ ID NO: 1144791 - RNA, 19 nt, Homo sapiens
  misc_RNA (1)...(19): siRNA sense strand
agaaacauggagcaucuaa

SEQ ID NO: 1144792 - RNA, 19 nt, Homo sapiens
  misc_RNA (1)...(19): siRNA sense strand
gacaauggucucaauuugg

SEQ ID NO: 1144793 - RNA, 19 nt, Homo sapiens
  misc_RNA (1)...(19): siRNA sense strand
aaacuaccgcugcacuuga

SEQ ID NO: 1144794 - RNA, 19 nt, Homo sapiens
  misc_RNA (1)...(19): siRNA sense strand
gaaacauggagcaucuaau

SEQ ID NO: 1144795 - RNA, 19 nt, Homo sapiens
  misc_RNA (1)...(19): siRNA sense strand
uaagccaugugaacucuac

SEQ ID NO: 1144796 - RNA, 19 nt, Homo sapiens
  misc_RNA (1)...(19): siRNA sense strand
gugcuaagaggaagugugu

SEQ ID NO: 1144797 - RNA, 19 nt, Homo sapiens
  misc_RNA (1)...(19): siRNA sense strand
gagaccaguggacgguaua

SEQ ID NO: 1144798 - RNA, 19 nt, Homo sapiens
  misc_RNA (1)...(19): siRNA sense strand
uugcugcucugaccuacaa

SEQ ID NO: 1144799 - RNA, 19 nt, Homo sapiens
  misc_RNA (1)...(19): siRNA sense strand
ucaggcagaggaaauguga

SEQ ID NO: 1144800 - RNA, 19 nt, Homo sapiens
  misc_RNA (1)...(19): siRNA sense strand
acgccgacauggugcagua

SEQ ID NO: 1144801 - RNA, 19 nt, Homo sapiens
  misc_RNA (1)...(19): siRNA sense strand
gaaccucugccaggacaug

SEQ ID NO: 1144802 - RNA, 19 nt, Homo sapiens
  misc_RNA (1)...(19): siRNA sense strand
ucaacaagaccacaacucu

SEQ ID NO: 1144803 - RNA, 19 nt, Homo sapiens
  misc_RNA (1)...(19): siRNA sense strand
cagauccuguuuggcauga

SEQ ID NO: 1144804 - RNA, 19 nt, Homo sapiens
  misc_RNA (1)...(19): siRNA sense strand
gcgcgauaccucggcaaua

SEQ ID NO: 1144805 - RNA, 19 nt, Homo sapiens
  misc_RNA (1)...(19): siRNA sense strand
gcagaacgaggaguaugga

SEQ ID NO: 1144806 - RNA, 19 nt, Homo sapiens
  misc_RNA (1)...(19): siRNA sense strand
ggcgcgaccuguaccuuca

SEQ ID NO: 1144807 - RNA, 19 nt, Homo sapiens
  misc_RNA (1)...(19): siRNA sense strand
gguaagggguccaucaaca

SEQ ID NO: 1144808 - RNA, 19 nt, Homo sapiens
  misc_RNA (1)...(19): siRNA sense strand
ccguggugguugacgauaa

SEQ ID NO: 1144809 - RNA, 19 nt, Homo sapiens
  misc_RNA (1)...(19): siRNA sense strand
caccaacucacaagggaaa

SEQ ID NO: 1144810 - RNA, 19 nt, Homo sapiens
  misc_RNA (1)...(19): siRNA sense strand
uugaugguguuguuauuuc

SEQ ID NO: 1144811 - RNA, 19 nt, Homo sapiens
  misc_RNA (1)...(19): siRNA sense strand
ggaugcugcuguguuugug

SEQ ID NO: 1144812 - RNA, 19 nt, Homo sapiens
  misc_RNA (1)...(19): siRNA sense strand
gguccgaaggugcaacuug

SEQ ID NO: 1144813 - RNA, 19 nt, Homo sapiens
  misc_RNA (1)...(19): siRNA sense strand
aaagaugaaccgugugaca

SEQ ID NO: 1144814 - RNA, 19 nt, Homo sapiens
  misc_RNA (1)...(19): siRNA sense strand
uaagaggaagugugugcuu

SEQ ID NO: 1144815 - RNA, 19 nt, Homo sapiens
  misc_RNA (1)...(19): siRNA sense strand
cccauucaguggacgagaa

SEQ ID NO: 1144816 - RNA, 19 nt, Homo sapiens
  misc_RNA (1)...(19): siRNA sense strand
uauuucacgaccaagauua

SEQ ID NO: 1144817 - RNA, 19 nt, Homo sapiens
  misc_RNA (1)...(19): siRNA sense strand
ugaugguguuguuauuuca

SEQ ID NO: 1144818 - RNA, 19 nt, Homo sapiens
  misc_RNA (1)...(19): siRNA sense strand
gcagaggaaaugugacaac

SEQ ID NO: 1144819 - RNA, 19 nt, Homo sapiens
  misc_RNA (1)...(19): siRNA sense strand
gagcaugugcagccgaaca

SEQ ID NO: 1144820 - RNA, 19 nt, Homo sapiens
  misc_RNA (1)...(19): siRNA sense strand
gaaaggccggaacccaagu

SEQ ID NO: 1144821 - RNA, 19 nt, Homo sapiens
  misc_RNA (1)...(19): siRNA sense strand
gggcaugaaccacgacgau

SEQ ID NO: 1144822 - RNA, 19 nt, Homo sapiens
  misc_RNA (1)...(19): siRNA sense strand
ccuuuaccaucgcccauga

SEQ ID NO: 1144823 - RNA, 19 nt, Homo sapiens
  misc_RNA (1)...(19): siRNA sense strand
ccggagaguuccagauugc

SEQ ID NO: 1144824 - RNA, 19 nt, Homo sapiens
  misc_RNA (1)...(19): siRNA sense strand
gacgauaagccaugugaac

SEQ ID NO: 1144825 - RNA, 19 nt, Homo sapiens
  misc_RNA (1)...(19): siRNA sense strand
uggcaggucccacaucaug

SEQ ID NO: 1144826 - RNA, 19 nt, Homo sapiens
  misc_RNA (1)...(19): siRNA sense strand
caacgagcagugccagauc

SEQ ID NO: 1144827 - RNA, 19 nt, Homo sapiens
  misc_RNA (1)...(19): siRNA sense strand
gaccugcagggacuucuau

SEQ ID NO: 1144828 - RNA, 19 nt, Homo sapiens
  misc_RNA (1)...(19): siRNA sense strand
gcucugcaagguucuaaca

SEQ ID NO: 1144829 - RNA, 19 nt, Homo sapiens
  misc_RNA (1)...(19): siRNA sense strand
cccgcuaaguuguccauug

SEQ ID NO: 1144830 - RNA, 19 nt, Homo sapiens
  misc_RNA (1)...(19): siRNA sense strand
ccaaacuaccgcugcacuu

SEQ ID NO: 1144831 - RNA, 19 nt, Homo sapiens
  misc_RNA (1)...(19): siRNA sense strand
gugcugcugcugcugguuu

SEQ ID NO: 1144832 - RNA, 19 nt, Homo sapiens
  misc_RNA (1)...(19): siRNA sense strand
agugugugcuugccgaaga

SEQ ID NO: 1144833 - RNA, 19 nt, Homo sapiens
  misc_RNA (1)...(19): siRNA sense strand
aggcgcaaaugguccuuga

SEQ ID NO: 1144834 - RNA, 19 nt, Homo sapiens
  misc_RNA (1)...(19): siRNA sense strand
gcguguaccagcugcagaa

SEQ ID NO: 1144835 - RNA, 19 nt, Homo sapiens
  misc_RNA (1)...(19): siRNA sense strand
ccagaagccagcacacagu

SEQ ID NO: 1144836 - RNA, 19 nt, Homo sapiens
  misc_RNA (1)...(19): siRNA sense strand
ccaagggaccaaccaaacu

SEQ ID NO: 1144837 - RNA, 19 nt, Homo sapiens
  misc_RNA (1)...(19): siRNA sense strand
gaacagauuuacccauuug

SEQ ID NO: 1144838 - RNA, 19 nt, Homo sapiens
  misc_RNA (1)...(19): siRNA sense strand
ggaaggagcaaauguaauu

SEQ ID NO: 1144839 - RNA, 19 nt, Homo sapiens
  misc_RNA (1)...(19): siRNA sense strand
gaagauugcuuuggaagga

SEQ ID NO: 1144840 - RNA, 19 nt, Homo sapiens
  misc_RNA (1)...(19): siRNA sense strand
gcauuggacauucuaauua

SEQ ID NO: 1144841 - RNA, 19 nt, Homo sapiens
  misc_RNA (1)...(19): siRNA sense strand
ggaacagauuuacccauuu

SEQ ID NO: 1144842 - RNA, 19 nt, Homo sapiens
  misc_RNA (1)...(19): siRNA sense strand
uaacagggcccaauguaaa

SEQ ID NO: 1144843 - RNA, 19 nt, Homo sapiens
  misc_RNA (1)...(19): siRNA sense strand
uaaggaagauugcuuugga

SEQ ID NO: 1144844 - RNA, 19 nt, Homo sapiens
  misc_RNA (1)...(19): siRNA sense strand
gaaauccguuugccagaau

SEQ ID NO: 1144845 - RNA, 19 nt, Homo sapiens
  misc_RNA (1)...(19): siRNA sense strand
gaagaagaagcuaaauuug

SEQ ID NO: 1144846 - RNA, 19 nt, Homo sapiens
  misc_RNA (1)...(19): siRNA sense strand
gaaagcaggaaagaaauuu

SEQ ID NO: 1144847 - RNA, 19 nt, Homo sapiens
  misc_RNA (1)...(19): siRNA sense strand
agacagugauguugcauug

SEQ ID NO: 1144848 - RNA, 19 nt, Homo sapiens
  misc_RNA (1)...(19): siRNA sense strand
agagcuacauuacagauuu

SEQ ID NO: 1144849 - RNA, 19 nt, Homo sapiens
  misc_RNA (1)...(19): siRNA sense strand
agaagaagcuaaauuuggu

SEQ ID NO: 1144850 - RNA, 19 nt, Homo sapiens
  misc_RNA (1)...(19): siRNA sense strand
guaacagggcccaauguaa

SEQ ID NO: 1144851 - RNA, 19 nt, Homo sapiens
  misc_RNA (1)...(19): siRNA sense strand
uggaacagauuuacccauu

SEQ ID NO: 1144852 - RNA, 19 nt, Homo sapiens
  misc_RNA (1)...(19): siRNA sense strand
ucuaagagcuacauuacag

SEQ ID NO: 1144853 - RNA, 19 nt, Homo sapiens
  misc_RNA (1)...(19): siRNA sense strand
gauuuacccauuuguguuu

SEQ ID NO: 1144854 - RNA, 19 nt, Homo sapiens
  misc_RNA (1)...(19): siRNA sense strand
ugaaauccguuugccagaa

SEQ ID NO: 1144855 - RNA, 19 nt, Homo sapiens
  misc_RNA (1)...(19): siRNA sense strand
gagcaacaagugaagaaga

SEQ ID NO: 1144856 - RNA, 19 nt, Homo sapiens
  misc_RNA (1)...(19): siRNA sense strand
acaaauguagucuguguuu

SEQ ID NO: 1144857 - RNA, 19 nt, Homo sapiens
  misc_RNA (1)...(19): siRNA sense strand
uguguaacaugccauuuga

SEQ ID NO: 1144858 - RNA, 19 nt, Homo sapiens
  misc_RNA (1)...(19): siRNA sense strand
aaaccuagaauuacagcua

SEQ ID NO: 1144859 - RNA, 19 nt, Homo sapiens
  misc_RNA (1)...(19): siRNA sense strand
gugaagaagaagcuaaauu

SEQ ID NO: 1144860 - RNA, 19 nt, Homo sapiens
  misc_RNA (1)...(19): siRNA sense strand
ugccagaauucacaaagaa

SEQ ID NO: 1144861 - RNA, 19 nt, Homo sapiens
  misc_RNA (1)...(19): siRNA sense strand
caagugaagaagaagcuaa

SEQ ID NO: 1144862 - RNA, 19 nt, Homo sapiens
  misc_RNA (1)...(19): siRNA sense strand
acagugauguugcauugga

SEQ ID NO: 1144863 - RNA, 19 nt, Homo sapiens
  misc_RNA (1)...(19): siRNA sense strand
uuauaaacgugauguugga

SEQ ID NO: 1144864 - RNA, 19 nt, Homo sapiens
  misc_RNA (1)...(19): siRNA sense strand
ugaaagcaggaaagaaauu

SEQ ID NO: 1144865 - RNA, 19 nt, Homo sapiens
  misc_RNA (1)...(19): siRNA sense strand
aacaggaaguaucacagua

SEQ ID NO: 1144866 - RNA, 19 nt, Homo sapiens
  misc_RNA (1)...(19): siRNA sense strand
caacaggaaguaucacagu

SEQ ID NO: 1144867 - RNA, 19 nt, Homo sapiens
  misc_RNA (1)...(19): siRNA sense strand
uuugaaagcaggaaagaaa

SEQ ID NO: 1144868 - RNA, 19 nt, Homo sapiens
  misc_RNA (1)...(19): siRNA sense strand
acaggaaguaucacaguaa

SEQ ID NO: 1144869 - RNA, 19 nt, Homo sapiens
  misc_RNA (1)...(19): siRNA sense strand
agcaacaagugaagaagaa

SEQ ID NO: 1144870 - RNA, 19 nt, Homo sapiens
  misc_RNA (1)...(19): siRNA sense strand
uguaaaggcuguugcuacu

SEQ ID NO: 1144871 - RNA, 19 nt, Homo sapiens
  misc_RNA (1)...(19): siRNA sense strand
ggaaguaucacaguaacag

SEQ ID NO: 1144872 - RNA, 19 nt, Homo sapiens
  misc_RNA (1)...(19): siRNA sense strand
uguaacaugccauuugaaa

SEQ ID NO: 1144873 - RNA, 19 nt, Homo sapiens
  misc_RNA (1)...(19): siRNA sense strand
cauuggacauucuaauuac

SEQ ID NO: 1144874 - RNA, 19 nt, Homo sapiens
  misc_RNA (1)...(19): siRNA sense strand
gaacuucauccugcugugu

SEQ ID NO: 1144875 - RNA, 19 nt, Homo sapiens
  misc_RNA (1)...(19): siRNA sense strand
gagcuacauuacagauuuu

SEQ ID NO: 1144876 - RNA, 19 nt, Homo sapiens
  misc_RNA (1)...(19): siRNA sense strand
auagaccucaugccaguua

SEQ ID NO: 1144877 - RNA, 19 nt, Homo sapiens
  misc_RNA (1)...(19): siRNA sense strand
ggaugcagacagugauguu

SEQ ID NO: 1144878 - RNA, 19 nt, Homo sapiens
  misc_RNA (1)...(19): siRNA sense strand
aagaagaagcuaaauuugg

SEQ ID NO: 1144879 - RNA, 19 nt, Homo sapiens
  misc_RNA (1)...(19): siRNA sense strand
aaggaagauugcuuuggaa

SEQ ID NO: 1144880 - RNA, 19 nt, Homo sapiens
  misc_RNA (1)...(19): siRNA sense strand
uaaacgugauguuggaaaa

SEQ ID NO: 1144881 - RNA, 19 nt, Homo sapiens
  misc_RNA (1)...(19): siRNA sense strand
cagauuuacccauuugugu

SEQ ID NO: 1144882 - RNA, 19 nt, Homo sapiens
  misc_RNA (1)...(19): siRNA sense strand
uaagagcuacauuacagau

SEQ ID NO: 1144883 - RNA, 19 nt, Homo sapiens
  misc_RNA (1)...(19): siRNA sense strand
guguguaacaugccauuug

SEQ ID NO: 1144884 - RNA, 19 nt, Homo sapiens
  misc_RNA (1)...(19): siRNA sense strand
aaagaacaauagaccucau

SEQ ID NO: 1144885 - RNA, 19 nt, Homo sapiens
  misc_RNA (1)...(19): siRNA sense strand
ccagaauucacaaagaaca

SEQ ID NO: 1144886 - RNA, 19 nt, Homo sapiens
  misc_RNA (1)...(19): siRNA sense strand
aguaacagggcccaaugua

SEQ ID NO: 1144887 - RNA, 19 nt, Homo sapiens
  misc_RNA (1)...(19): siRNA sense strand
caggaaguaucacaguaac

SEQ ID NO: 1144888 - RNA, 19 nt, Homo sapiens
  misc_RNA (1)...(19): siRNA sense strand
uugccagaauucacaaaga

SEQ ID NO: 1144889 - RNA, 19 nt, Homo sapiens
  misc_RNA (1)...(19): siRNA sense strand
caaauguagucuguguuuu

SEQ ID NO: 1144890 - RNA, 19 nt, Homo sapiens
  misc_RNA (1)...(19): siRNA sense strand
uuggaaggagcaaauguaa

SEQ ID NO: 1144891 - RNA, 19 nt, Homo sapiens
  misc_RNA (1)...(19): siRNA sense strand
ccauuuguguuugaaagca

SEQ ID NO: 1144892 - RNA, 19 nt, Homo sapiens
  misc_RNA (1)...(19): siRNA sense strand
ugcauuggacauucuaauu

SEQ ID NO: 1144893 - RNA, 19 nt, Homo sapiens
  misc_RNA (1)...(19): siRNA sense strand
cagaauucacaaagaacaa

SEQ ID NO: 1144894 - RNA, 19 nt, Homo sapiens
  misc_RNA (1)...(19): siRNA sense strand
ccaacuacaucgacauuua

SEQ ID NO: 1144895 - RNA, 19 nt, Homo sapiens
  misc_RNA (1)...(19): siRNA sense strand
uuggaaaccuggaagauua

SEQ ID NO: 1144896 - RNA, 19 nt, Homo sapiens
  misc_RNA (1)...(19): siRNA sense strand
ugaaauggcuccagcaaca

SEQ ID NO: 1144897 - RNA, 19 nt, Homo sapiens
  misc_RNA (1)...(19): siRNA sense strand
ggacggcgaugucacagau

SEQ ID NO: 1144898 - RNA, 19 nt, Homo sapiens
  misc_RNA (1)...(19): siRNA sense strand
gaagcaaacagccaguuaa

SEQ ID NO: 1144899 - RNA, 19 nt, Homo sapiens
  misc_RNA (1)...(19): siRNA sense strand
gaacggcaaugauuaugac

SEQ ID NO: 1144900 - RNA, 19 nt, Homo sapiens
  misc_RNA (1)...(19): siRNA sense strand
gcgagcgacuggaaaguga

SEQ ID NO: 1144901 - RNA, 19 nt, Homo sapiens
  misc_RNA (1)...(19): siRNA sense strand
ccucacaccuuccucagaa

SEQ ID NO: 1144902 - RNA, 19 nt, Homo sapiens
  misc_RNA (1)...(19): siRNA sense strand
gauaugaugccagcaauga

SEQ ID NO: 1144903 - RNA, 19 nt, Homo sapiens
  misc_RNA (1)...(19): siRNA sense strand
ugacccaucuccacgauau

SEQ ID NO: 1144904 - RNA, 19 nt, Homo sapiens
  misc_RNA (1)...(19): siRNA sense strand
caacaggaagugaaacgaa

SEQ ID NO: 1144905 - RNA, 19 nt, Homo sapiens
  misc_RNA (1)...(19): siRNA sense strand
gaaagcgagcgacuggaaa

SEQ ID NO: 1144906 - RNA, 19 nt, Homo sapiens
  misc_RNA (1)...(19): siRNA sense strand
gcaaacagccaguuaaccu

SEQ ID NO: 1144907 - RNA, 19 nt, Homo sapiens
  misc_RNA (1)...(19): siRNA sense strand
agagacaggugcgaaguga

SEQ ID NO: 1144908 - RNA, 19 nt, Homo sapiens
  misc_RNA (1)...(19): siRNA sense strand
gacgugaacggcaaugauu

SEQ ID NO: 1144909 - RNA, 19 nt, Homo sapiens
  misc_RNA (1)...(19): siRNA sense strand
gaugauggcauagagagaa

SEQ ID NO: 1144910 - RNA, 19 nt, Homo sapiens
  misc_RNA (1)...(19): siRNA sense strand
cagauguggucgaggcaaa

SEQ ID NO: 1144911 - RNA, 19 nt, Homo sapiens
  misc_RNA (1)...(19): siRNA sense strand
agaagcaaacagccaguua

SEQ ID NO: 1144912 - RNA, 19 nt, Homo sapiens
  misc_RNA (1)...(19): siRNA sense strand
caaagucgcugggcaucag

SEQ ID NO: 1144913 - RNA, 19 nt, Homo sapiens
  misc_RNA (1)...(19): siRNA sense strand
gaaacgaagggugaagaga

SEQ ID NO: 1144914 - RNA, 19 nt, Homo sapiens
  misc_RNA (1)...(19): siRNA sense strand
caucagacccaacuacauc

SEQ ID NO: 1144915 - RNA, 19 nt, Homo sapiens
  misc_RNA (1)...(19): siRNA sense strand
ugaaagcgagcgacuggaa

SEQ ID NO: 1144916 - RNA, 19 nt, Homo sapiens
  misc_RNA (1)...(19): siRNA sense strand
gaagagacaggugcgaagu

SEQ ID NO: 1144917 - RNA, 19 nt, Homo sapiens
  misc_RNA (1)...(19): siRNA sense strand
caucaucgccuuggcucua

SEQ ID NO: 1144918 - RNA, 19 nt, Homo sapiens
  misc_RNA (1)...(19): siRNA sense strand
ccuggaagauuacuaccau

SEQ ID NO: 1144919 - RNA, 19 nt, Homo sapiens
  misc_RNA (1)...(19): siRNA sense strand
uuucgaguauggcauuaaa

SEQ ID NO: 1144920 - RNA, 19 nt, Homo sapiens
  misc_RNA (1)...(19): siRNA sense strand
uaugaugccagcaaugaaa

SEQ ID NO: 1144921 - RNA, 19 nt, Homo sapiens
  misc_RNA (1)...(19): siRNA sense strand
gaaaccuggaagauuacua

SEQ ID NO: 1144922 - RNA, 19 nt, Homo sapiens
  misc_RNA (1)...(19): siRNA sense strand
cgccuuggcucuagaagca

SEQ ID NO: 1144923 - RNA, 19 nt, Homo sapiens
  misc_RNA (1)...(19): siRNA sense strand
gcaguggggccuuuuauga

SEQ ID NO: 1144924 - RNA, 19 nt, Homo sapiens
  misc_RNA (1)...(19): siRNA sense strand
uggaagauuacuaccauuu

SEQ ID NO: 1144925 - RNA, 19 nt, Homo sapiens
  misc_RNA (1)...(19): siRNA sense strand
cagcaaacaauuccuacug

SEQ ID NO: 1144926 - RNA, 19 nt, Homo sapiens
  misc_RNA (1)...(19): siRNA sense strand
cagcagcgccaccgagaau

SEQ ID NO: 1144927 - RNA, 19 nt, Homo sapiens
  misc_RNA (1)...(19): siRNA sense strand
ugaacggcaaugauuauga

SEQ ID NO: 1144928 - RNA, 19 nt, Homo sapiens
  misc_RNA (1)...(19): siRNA sense strand
caacuacaucgacauuuac

SEQ ID NO: 1144929 - RNA, 19 nt, Homo sapiens
  misc_RNA (1)...(19): siRNA sense strand
aaacacggcacucguugug

SEQ ID NO: 1144930 - RNA, 19 nt, Homo sapiens
  misc_RNA (1)...(19): siRNA sense strand
ggaagauuacuaccauuuu

SEQ ID NO: 1144931 - RNA, 19 nt, Homo sapiens
  misc_RNA (1)...(19): siRNA sense strand
caacuugggccagauugga

SEQ ID NO: 1144932 - RNA, 19 nt, Homo sapiens
  misc_RNA (1)...(19): siRNA sense strand
gaucugcgucagcgcugua

SEQ ID NO: 1144933 - RNA, 19 nt, Homo sapiens
  misc_RNA (1)...(19): siRNA sense strand
cgcaggcccuuuacuucaa

SEQ ID NO: 1144934 - RNA, 19 nt, Homo sapiens
  misc_RNA (1)...(19): siRNA sense strand
ccaacagcaucuacaccau

SEQ ID NO: 1144935 - RNA, 19 nt, Homo sapiens
  misc_RNA (1)...(19): siRNA sense strand
cuacaucgacauuuacagu

SEQ ID NO: 1144936 - RNA, 19 nt, Homo sapiens
  misc_RNA (1)...(19): siRNA sense strand
ccagcaacaggaagugaaa

SEQ ID NO: 1144937 - RNA, 19 nt, Homo sapiens
  misc_RNA (1)...(19): siRNA sense strand
gcuuucgaguauggcauua

SEQ ID NO: 1144938 - RNA, 19 nt, Homo sapiens
  misc_RNA (1)...(19): siRNA sense strand
aauaaacacggcacucguu

SEQ ID NO: 1144939 - RNA, 19 nt, Homo sapiens
  misc_RNA (1)...(19): siRNA sense strand
caaugauuaugacccaucu

SEQ ID NO: 1144940 - RNA, 19 nt, Homo sapiens
  misc_RNA (1)...(19): siRNA sense strand
caacaugugguaccugcau

SEQ ID NO: 1144941 - RNA, 19 nt, Homo sapiens
  misc_RNA (1)...(19): siRNA sense strand
gcaaagucgcugggcauca

SEQ ID NO: 1144942 - RNA, 19 nt, Homo sapiens
  misc_RNA (1)...(19): siRNA sense strand
ggugaaauggcuccagcaa

SEQ ID NO: 1144943 - RNA, 19 nt, Homo sapiens
  misc_RNA (1)...(19): siRNA sense strand
caaacaauuccuacugcau

SEQ ID NO: 1144944 - RNA, 19 nt, Homo sapiens
  misc_RNA (1)...(19): siRNA sense strand
uaucacagcaaaaccuuua

SEQ ID NO: 1144945 - RNA, 19 nt, Homo sapiens
  misc_RNA (1)...(19): siRNA sense strand
aacgaagggugaagagaca

SEQ ID NO: 1144946 - RNA, 19 nt, Homo sapiens
  misc_RNA (1)...(19): siRNA sense strand
gcaucagacccaacuacau

SEQ ID NO: 1144947 - RNA, 19 nt, Homo sapiens
  misc_RNA (1)...(19): siRNA sense strand
guacaaugccaaaauagga

SEQ ID NO: 1144948 - RNA, 19 nt, Homo sapiens
  misc_RNA (1)...(19): siRNA sense strand
gcaggcccuuuacuucaac

SEQ ID NO: 1144949 - RNA, 19 nt, Homo sapiens
  misc_RNA (1)...(19): siRNA sense strand
ccgcaggcccuuuacuuca

SEQ ID NO: 1144950 - RNA, 19 nt, Homo sapiens
  misc_RNA (1)...(19): siRNA sense strand
cgacgugaacggcaaugau

SEQ ID NO: 1144951 - RNA, 19 nt, Homo sapiens
  misc_RNA (1)...(19): siRNA sense strand
caccgagaauggcuacaag

SEQ ID NO: 1144952 - RNA, 19 nt, Homo sapiens
  misc_RNA (1)...(19): siRNA sense strand
cgugaacggcaaugauuau

SEQ ID NO: 1144953 - RNA, 19 nt, Homo sapiens
  misc_RNA (1)...(19): siRNA sense strand
gugacccgcaggcccuuua

SEQ ID NO: 1144954 - RNA, 19 nt, Homo sapiens
  misc_RNA (1)...(19): siRNA sense strand
ccuuggcucuagaagcaaa

SEQ ID NO: 1144955 - RNA, 19 nt, Homo sapiens
  misc_RNA (1)...(19): siRNA sense strand
gcaacaggaagugaaacga

SEQ ID NO: 1144956 - RNA, 19 nt, Homo sapiens
  misc_RNA (1)...(19): siRNA sense strand
ugcgauggcuacaccaaca

SEQ ID NO: 1144957 - RNA, 19 nt, Homo sapiens
  misc_RNA (1)...(19): siRNA sense strand
ccaccgagaauggcuacaa

SEQ ID NO: 1144958 - RNA, 19 nt, Homo sapiens
  misc_RNA (1)...(19): siRNA sense strand
ccaacuacaucgacauuua

SEQ ID NO: 1144959 - RNA, 19 nt, Homo sapiens
  misc_RNA (1)...(19): siRNA sense strand
uuggaaaccuggaagauua

SEQ ID NO: 1144960 - RNA, 19 nt, Homo sapiens
  misc_RNA (1)...(19): siRNA sense strand
ugaaauggcuccagcaaca

SEQ ID NO: 1144961 - RNA, 19 nt, Homo sapiens
  misc_RNA (1)...(19): siRNA sense strand
ggacggcgaugucacagau

SEQ ID NO: 1144962 - RNA, 19 nt, Homo sapiens
  misc_RNA (1)...(19): siRNA sense strand
gaagcaaacagccaguuaa

SEQ ID NO: 1144963 - RNA, 19 nt, Homo sapiens
  misc_RNA (1)...(19): siRNA sense strand
gaacggcaaugauuaugac

SEQ ID NO: 1144964 - RNA, 19 nt, Homo sapiens
  misc_RNA (1)...(19): siRNA sense strand
gcgagcgacuggaaaguga

SEQ ID NO: 1144965 - RNA, 19 nt, Homo sapiens
  misc_RNA (1)...(19): siRNA sense strand
ccucacaccuuccucagaa

SEQ ID NO: 1144966 - RNA, 19 nt, Homo sapiens
  misc_RNA (1)...(19): siRNA sense strand
gauaugaugccagcaauga

SEQ ID NO: 1144967 - RNA, 19 nt, Homo sapiens
  misc_RNA (1)...(19): siRNA sense strand
ugacccaucuccacgauau

SEQ ID NO: 1144968 - RNA, 19 nt, Homo sapiens
  misc_RNA (1)...(19): siRNA sense strand
caacaggaagugaaacgaa

SEQ ID NO: 1144969 - RNA, 19 nt, Homo sapiens
  misc_RNA (1)...(19): siRNA sense strand
gaaagcgagcgacuggaaa

SEQ ID NO: 1144970 - RNA, 19 nt, Homo sapiens
  misc_RNA (1)...(19): siRNA sense strand
gcaaacagccaguuaaccu

SEQ ID NO: 1144971 - RNA, 19 nt, Homo sapiens
  misc_RNA (1)...(19): siRNA sense strand
agagacaggugcgaaguga

SEQ ID NO: 1144972 - RNA, 19 nt, Homo sapiens
  misc_RNA (1)...(19): siRNA sense strand
gacgugaacggcaaugauu

SEQ ID NO: 1144973 - RNA, 19 nt, Homo sapiens
  misc_RNA (1)...(19): siRNA sense strand
gaugauggcauagagagaa

SEQ ID NO: 1144974 - RNA, 19 nt, Homo sapiens
  misc_RNA (1)...(19): siRNA sense strand
cagauguggucgaggcaaa

SEQ ID NO: 1144975 - RNA, 19 nt, Homo sapiens
  misc_RNA (1)...(19): siRNA sense strand
agaagcaaacagccaguua

SEQ ID NO: 1144976 - RNA, 19 nt, Homo sapiens
  misc_RNA (1)...(19): siRNA sense strand
caaagucgcugggcaucag

SEQ ID NO: 1144977 - RNA, 19 nt, Homo sapiens
  misc_RNA (1)...(19): siRNA sense strand
gaaacgaagggugaagaga

SEQ ID NO: 1144978 - RNA, 19 nt, Homo sapiens
  misc_RNA (1)...(19): siRNA sense strand
caucagacccaacuacauc

SEQ ID NO: 1144979 - RNA, 19 nt, Homo sapiens
  misc_RNA (1)...(19): siRNA sense strand
ugaaagcgagcgacuggaa

SEQ ID NO: 1144980 - RNA, 19 nt, Homo sapiens
  misc_RNA (1)...(19): siRNA sense strand
gaagagacaggugcgaagu

SEQ ID NO: 1144981 - RNA, 19 nt, Homo sapiens
  misc_RNA (1)...(19): siRNA sense strand
caucaucgccuuggcucua

SEQ ID NO: 1144982 - RNA, 19 nt, Homo sapiens
  misc_RNA (1)...(19): siRNA sense strand
ccuggaagauuacuaccau

SEQ ID NO: 1144983 - RNA, 19 nt, Homo sapiens
  misc_RNA (1)...(19): siRNA sense strand
uuucgaguauggcauuaaa

SEQ ID NO: 1144984 - RNA, 19 nt, Homo sapiens
  misc_RNA (1)...(19): siRNA sense strand
uaugaugccagcaaugaaa

SEQ ID NO: 1144985 - RNA, 19 nt, Homo sapiens
  misc_RNA (1)...(19): siRNA sense strand
gaaaccuggaagauuacua

SEQ ID NO: 1144986 - RNA, 19 nt, Homo sapiens
  misc_RNA (1)...(19): siRNA sense strand
cgccuuggcucuagaagca

SEQ ID NO: 1144987 - RNA, 19 nt, Homo sapiens
  misc_RNA (1)...(19): siRNA sense strand
gcaguggggccuuuuauga

SEQ ID NO: 1144988 - RNA, 19 nt, Homo sapiens
  misc_RNA (1)...(19): siRNA sense strand
uggaagauuacuaccauuu

SEQ ID NO: 1144989 - RNA, 19 nt, Homo sapiens
  misc_RNA (1)...(19): siRNA sense strand
cagcaaacaauuccuacug

SEQ ID NO: 1144990 - RNA, 19 nt, Homo sapiens
  misc_RNA (1)...(19): siRNA sense strand
cagcagcgccaccgagaau

SEQ ID NO: 1144991 - RNA, 19 nt, Homo sapiens
  misc_RNA (1)...(19): siRNA sense strand
ugaacggcaaugauuauga

SEQ ID NO: 1144992 - RNA, 19 nt, Homo sapiens
  misc_RNA (1)...(19): siRNA sense strand
caacuacaucgacauuuac

SEQ ID NO: 1144993 - RNA, 19 nt, Homo sapiens
  misc_RNA (1)...(19): siRNA sense strand
aaacacggcacucguugug

SEQ ID NO: 1144994 - RNA, 19 nt, Homo sapiens
  misc_RNA (1)...(19): siRNA sense strand
ggaagauuacuaccauuuu

SEQ ID NO: 1144995 - RNA, 19 nt, Homo sapiens
  misc_RNA (1)...(19): siRNA sense strand
caacuugggccagauugga

SEQ ID NO: 1144996 - RNA, 19 nt, Homo sapiens
  misc_RNA (1)...(19): siRNA sense strand
gaucugcgucagcgcugua

SEQ ID NO: 1144997 - RNA, 19 nt, Homo sapiens
  misc_RNA (1)...(19): siRNA sense strand
cgcaggcccuuuacuucaa

SEQ ID NO: 1144998 - RNA, 19 nt, Homo sapiens
  misc_RNA (1)...(19): siRNA sense strand
ccaacagcaucuacaccau

SEQ ID NO: 1144999 - RNA, 19 nt, Homo sapiens
  misc_RNA (1)...(19): siRNA sense strand
cuacaucgacauuuacagu

SEQ ID NO: 1145000 - RNA, 19 nt, Homo sapiens
  misc_RNA (1)...(19): siRNA sense strand
ccagcaacaggaagugaaa

SEQ ID NO: 1145001 - RNA, 19 nt, Homo sapiens
  misc_RNA (1)...(19): siRNA sense strand
gcuuucgaguauggcauua

SEQ ID NO: 1145002 - RNA, 19 nt, Homo sapiens
  misc_RNA (1)...(19): siRNA sense strand
aauaaacacggcacucguu

SEQ ID NO: 1145003 - RNA, 19 nt, Homo sapiens
  misc_RNA (1)...(19): siRNA sense strand
caaugauuaugacccaucu

SEQ ID NO: 1145004 - RNA, 19 nt, Homo sapiens
  misc_RNA (1)...(19): siRNA sense strand
caacaugugguaccugcau

SEQ ID NO: 1145005 - RNA, 19 nt, Homo sapiens
  misc_RNA (1)...(19): siRNA sense strand
gcaaagucgcugggcauca

SEQ ID NO: 1145006 - RNA, 19 nt, Homo sapiens
  misc_RNA (1)...(19): siRNA sense strand
ggugaaauggcuccagcaa

SEQ ID NO: 1145007 - RNA, 19 nt, Homo sapiens
  misc_RNA (1)...(19): siRNA sense strand
caaacaauuccuacugcau

SEQ ID NO: 1145008 - RNA, 19 nt, Homo sapiens
  misc_RNA (1)...(19): siRNA sense strand
uaucacagcaaaaccuuua

SEQ ID NO: 1145009 - RNA, 19 nt, Homo sapiens
  misc_RNA (1)...(19): siRNA sense strand
aacgaagggugaagagaca

SEQ ID NO: 1145010 - RNA, 19 nt, Homo sapiens
  misc_RNA (1)...(19): siRNA sense strand
gcaucagacccaacuacau

SEQ ID NO: 1145011 - RNA, 19 nt, Homo sapiens
  misc_RNA (1)...(19): siRNA sense strand
guacaaugccaaaauagga

SEQ ID NO: 1145012 - RNA, 19 nt, Homo sapiens
  misc_RNA (1)...(19): siRNA sense strand
gcaggcccuuuacuucaac

SEQ ID NO: 1145013 - RNA, 19 nt, Homo sapiens
  misc_RNA (1)...(19): siRNA sense strand
ccgcaggcccuuuacuuca

SEQ ID NO: 1145014 - RNA, 19 nt, Homo sapiens
  misc_RNA (1)...(19): siRNA sense strand
cgacgugaacggcaaugau

SEQ ID NO: 1145015 - RNA, 19 nt, Homo sapiens
  misc_RNA (1)...(19): siRNA sense strand
caccgagaauggcuacaag

SEQ ID NO: 1145016 - RNA, 19 nt, Homo sapiens
  misc_RNA (1)...(19): siRNA sense strand
cgugaacggcaaugauuau

SEQ ID NO: 1145017 - RNA, 19 nt, Homo sapiens
  misc_RNA (1)...(19): siRNA sense strand
gugacccgcaggcccuuua

SEQ ID NO: 1145018 - RNA, 19 nt, Homo sapiens
  misc_RNA (1)...(19): siRNA sense strand
ccuuggcucuagaagcaaa

SEQ ID NO: 1145019 - RNA, 19 nt, Homo sapiens
  misc_RNA (1)...(19): siRNA sense strand
gcaacaggaagugaaacga

SEQ ID NO: 1145020 - RNA, 19 nt, Homo sapiens
  misc_RNA (1)...(19): siRNA sense strand
ugcgauggcuacaccaaca

SEQ ID NO: 1145021 - RNA, 19 nt, Homo sapiens
  misc_RNA (1)...(19): siRNA sense strand
ccaccgagaauggcuacaa

SEQ ID NO: 1145022 - RNA, 19 nt, Homo sapiens
  misc_RNA (1)...(19): siRNA sense strand
ccaacuacaucgacauuua

SEQ ID NO: 1145023 - RNA, 19 nt, Homo sapiens
  misc_RNA (1)...(19): siRNA sense strand
uuggaaaccuggaagauua

SEQ ID NO: 1145024 - RNA, 19 nt, Homo sapiens
  misc_RNA (1)...(19): siRNA sense strand
ugaaauggcuccagcaaca

SEQ ID NO: 1145025 - RNA, 19 nt, Homo sapiens
  misc_RNA (1)...(19): siRNA sense strand
ggacggcgaugucacagau

SEQ ID NO: 1145026 - RNA, 19 nt, Homo sapiens
  misc_RNA (1)...(19): siRNA sense strand
gaagcaaacagccaguuaa

SEQ ID NO: 1145027 - RNA, 19 nt, Homo sapiens
  misc_RNA (1)...(19): siRNA sense strand
gaacggcaaugauuaugac

SEQ ID NO: 1145028 - RNA, 19 nt, Homo sapiens
  misc_RNA (1)...(19): siRNA sense strand
gcgagcgacuggaaaguga

SEQ ID NO: 1145029 - RNA, 19 nt, Homo sapiens
  misc_RNA (1)...(19): siRNA sense strand
ccucacaccuuccucagaa

SEQ ID NO: 1145030 - RNA, 19 nt, Homo sapiens
  misc_RNA (1)...(19): siRNA sense strand
gauaugaugccagcaauga

SEQ ID NO: 1145031 - RNA, 19 nt, Homo sapiens
  misc_RNA (1)...(19): siRNA sense strand
ugacccaucuccacgauau

SEQ ID NO: 1145032 - RNA, 19 nt, Homo sapiens
  misc_RNA (1)...(19): siRNA sense strand
caacaggaagugaaacgaa

SEQ ID NO: 1145033 - RNA, 19 nt, Homo sapiens
  misc_RNA (1)...(19): siRNA sense strand
gaaagcgagcgacuggaaa

SEQ ID NO: 1145034 - RNA, 19 nt, Homo sapiens
  misc_RNA (1)...(19): siRNA sense strand
gcaaacagccaguuaaccu

SEQ ID NO: 1145035 - RNA, 19 nt, Homo sapiens
  misc_RNA (1)...(19): siRNA sense strand
agagacaggugcgaaguga

SEQ ID NO: 1145036 - RNA, 19 nt, Homo sapiens
  misc_RNA (1)...(19): siRNA sense strand
gacgugaacggcaaugauu

SEQ ID NO: 1145037 - RNA, 19 nt, Homo sapiens
  misc_RNA (1)...(19): siRNA sense strand
gaugauggcauagagagaa

SEQ ID NO: 1145038 - RNA, 19 nt, Homo sapiens
  misc_RNA (1)...(19): siRNA sense strand
cagauguggucgaggcaaa

SEQ ID NO: 1145039 - RNA, 19 nt, Homo sapiens
  misc_RNA (1)...(19): siRNA sense strand
agaagcaaacagccaguua

SEQ ID NO: 1145040 - RNA, 19 nt, Homo sapiens
  misc_RNA (1)...(19): siRNA sense strand
caaagucgcugggcaucag

SEQ ID NO: 1145041 - RNA, 19 nt, Homo sapiens
  misc_RNA (1)...(19): siRNA sense strand
gaaacgaagggugaagaga

SEQ ID NO: 1145042 - RNA, 19 nt, Homo sapiens
  misc_RNA (1)...(19): siRNA sense strand
caucagacccaacuacauc

SEQ ID NO: 1145043 - RNA, 19 nt, Homo sapiens
  misc_RNA (1)...(19): siRNA sense strand
ugaaagcgagcgacuggaa

SEQ ID NO: 1145044 - RNA, 19 nt, Homo sapiens
  misc_RNA (1)...(19): siRNA sense strand
gaagagacaggugcgaagu

SEQ ID NO: 1145045 - RNA, 19 nt, Homo sapiens
  misc_RNA (1)...(19): siRNA sense strand
caucaucgccuuggcucua

SEQ ID NO: 1145046 - RNA, 19 nt, Homo sapiens
  misc_RNA (1)...(19): siRNA sense strand
ccuggaagauuacuaccau

SEQ ID NO: 1145047 - RNA, 19 nt, Homo sapiens
  misc_RNA (1)...(19): siRNA sense strand
uuucgaguauggcauuaaa

SEQ ID NO: 1145048 - RNA, 19 nt, Homo sapiens
  misc_RNA (1)...(19): siRNA sense strand
uaugaugccagcaaugaaa

SEQ ID NO: 1145049 - RNA, 19 nt, Homo sapiens
  misc_RNA (1)...(19): siRNA sense strand
gaaaccuggaagauuacua

SEQ ID NO: 1145050 - RNA, 19 nt, Homo sapiens
  misc_RNA (1)...(19): siRNA sense strand
cgccuuggcucuagaagca

SEQ ID NO: 1145051 - RNA, 19 nt, Homo sapiens
  misc_RNA (1)...(19): siRNA sense strand
gcaguggggccuuuuauga

SEQ ID NO: 1145052 - RNA, 19 nt, Homo sapiens
  misc_RNA (1)...(19): siRNA sense strand
uggaagauuacuaccauuu

SEQ ID NO: 1145053 - RNA, 19 nt, Homo sapiens
  misc_RNA (1)...(19): siRNA sense strand
cagcaaacaauuccuacug

SEQ ID NO: 1145054 - RNA, 19 nt, Homo sapiens
  misc_RNA (1)...(19): siRNA sense strand
cagcagcgccaccgagaau

SEQ ID NO: 1145055 - RNA, 19 nt, Homo sapiens
  misc_RNA (1)...(19): siRNA sense strand
ugaacggcaaugauuauga

SEQ ID NO: 1145056 - RNA, 19 nt, Homo sapiens
  misc_RNA (1)...(19): siRNA sense strand
caacuacaucgacauuuac

SEQ ID NO: 1145057 - RNA, 19 nt, Homo sapiens
  misc_RNA (1)...(19): siRNA sense strand
aaacacggcacucguugug

SEQ ID NO: 1145058 - RNA, 19 nt, Homo sapiens
  misc_RNA (1)...(19): siRNA sense strand
ggaagauuacuaccauuuu

SEQ ID NO: 1145059 - RNA, 19 nt, Homo sapiens
  misc_RNA (1)...(19): siRNA sense strand
caacuugggccagauugga

SEQ ID NO: 1145060 - RNA, 19 nt, Homo sapiens
  misc_RNA (1)...(19): siRNA sense strand
gaucugcgucagcgcugua

SEQ ID NO: 1145061 - RNA, 19 nt, Homo sapiens
  misc_RNA (1)...(19): siRNA sense strand
cgcaggcccuuuacuucaa

SEQ ID NO: 1145062 - RNA, 19 nt, Homo sapiens
  misc_RNA (1)...(19): siRNA sense strand
ccaacagcaucuacaccau

SEQ ID NO: 1145063 - RNA, 19 nt, Homo sapiens
  misc_RNA (1)...(19): siRNA sense strand
cuacaucgacauuuacagu

SEQ ID NO: 1145064 - RNA, 19 nt, Homo sapiens
  misc_RNA (1)...(19): siRNA sense strand
ccagcaacaggaagugaaa

SEQ ID NO: 1145065 - RNA, 19 nt, Homo sapiens
  misc_RNA (1)...(19): siRNA sense strand
gcuuucgaguauggcauua

SEQ ID NO: 1145066 - RNA, 19 nt, Homo sapiens
  misc_RNA (1)...(19): siRNA sense strand
aauaaacacggcacucguu

SEQ ID NO: 1145067 - RNA, 19 nt, Homo sapiens
  misc_RNA (1)...(19): siRNA sense strand
caaugauuaugacccaucu

SEQ ID NO: 1145068 - RNA, 19 nt, Homo sapiens
  misc_RNA (1)...(19): siRNA sense strand
caacaugugguaccugcau

SEQ ID NO: 1145069 - RNA, 19 nt, Homo sapiens
  misc_RNA (1)...(19): siRNA sense strand
gcaaagucgcugggcauca

SEQ ID NO: 1145070 - RNA, 19 nt, Homo sapiens
  misc_RNA (1)...(19): siRNA sense strand
ggugaaauggcuccagcaa

SEQ ID NO: 1145071 - RNA, 19 nt, Homo sapiens
  misc_RNA (1)...(19): siRNA sense strand
caaacaauuccuacugcau

SEQ ID NO: 1145072 - RNA, 19 nt, Homo sapiens
  misc_RNA (1)...(19): siRNA sense strand
uaucacagcaaaaccuuua

SEQ ID NO: 1145073 - RNA, 19 nt, Homo sapiens
  misc_RNA (1)...(19): siRNA sense strand
aacgaagggugaagagaca

SEQ ID NO: 1145074 - RNA, 19 nt, Homo sapiens
  misc_RNA (1)...(19): siRNA sense strand
gcaucagacccaacuacau

SEQ ID NO: 1145075 - RNA, 19 nt, Homo sapiens
  misc_RNA (1)...(19): siRNA sense strand
guacaaugccaaaauagga

SEQ ID NO: 1145076 - RNA, 19 nt, Homo sapiens
  misc_RNA (1)...(19): siRNA sense strand
gcaggcccuuuacuucaac

SEQ ID NO: 1145077 - RNA, 19 nt, Homo sapiens
  misc_RNA (1)...(19): siRNA sense strand
ccgcaggcccuuuacuuca

SEQ ID NO: 1145078 - RNA, 19 nt, Homo sapiens
  misc_RNA (1)...(19): siRNA sense strand
cgacgugaacggcaaugau

SEQ ID NO: 1145079 - RNA, 19 nt, Homo sapiens
  misc_RNA (1)...(19): siRNA sense strand
caccgagaauggcuacaag

SEQ ID NO: 1145080 - RNA, 19 nt, Homo sapiens
  misc_RNA (1)...(19): siRNA sense strand
cgugaacggcaaugauuau

SEQ ID NO: 1145081 - RNA, 19 nt, Homo sapiens
  misc_RNA (1)...(19): siRNA sense strand
gugacccgcaggcccuuua

SEQ ID NO: 1145082 - RNA, 19 nt, Homo sapiens
  misc_RNA (1)...(19): siRNA sense strand
ccuuggcucuagaagcaaa

SEQ ID NO: 1145083 - RNA, 19 nt, Homo sapiens
  misc_RNA (1)...(19): siRNA sense strand
gcaacaggaagugaaacga

SEQ ID NO: 1145084 - RNA, 19 nt, Homo sapiens
  misc_RNA (1)...(19): siRNA sense strand
ugcgauggcuacaccaaca

SEQ ID NO: 1145085 - RNA, 19 nt, Homo sapiens
  misc_RNA (1)...(19): siRNA sense strand
ccaccgagaauggcuacaa

SEQ ID NO: 1145086 - RNA, 19 nt, Homo sapiens
  misc_RNA (1)...(19): siRNA sense strand
ccaacuacaucgacauuua

SEQ ID NO: 1145087 - RNA, 19 nt, Homo sapiens
  misc_RNA (1)...(19): siRNA sense strand
uuggaaaccuggaagauua

SEQ ID NO: 1145088 - RNA, 19 nt, Homo sapiens
  misc_RNA (1)...(19): siRNA sense strand
ugaaauggcuccagcaaca

SEQ ID NO: 1145089 - RNA, 19 nt, Homo sapiens
  misc_RNA (1)...(19): siRNA sense strand
ggacggcgaugucacagau

SEQ ID NO: 1145090 - RNA, 19 nt, Homo sapiens
  misc_RNA (1)...(19): siRNA sense strand
gaagcaaacagccaguuaa

SEQ ID NO: 1145091 - RNA, 19 nt, Homo sapiens
  misc_RNA (1)...(19): siRNA sense strand
gaacggcaaugauuaugac

SEQ ID NO: 1145092 - RNA, 19 nt, Homo sapiens
  misc_RNA (1)...(19): siRNA sense strand
gcgagcgacuggaaaguga

SEQ ID NO: 1145093 - RNA, 19 nt, Homo sapiens
  misc_RNA (1)...(19): siRNA sense strand
ccucacaccuuccucagaa

SEQ ID NO: 1145094 - RNA, 19 nt, Homo sapiens
  misc_RNA (1)...(19): siRNA sense strand
gauaugaugccagcaauga

SEQ ID NO: 1145095 - RNA, 19 nt, Homo sapiens
  misc_RNA (1)...(19): siRNA sense strand
ugacccaucuccacgauau

SEQ ID NO: 1145096 - RNA, 19 nt, Homo sapiens
  misc_RNA (1)...(19): siRNA sense strand
caacaggaagugaaacgaa

SEQ ID NO: 1145097 - RNA, 19 nt, Homo sapiens
  misc_RNA (1)...(19): siRNA sense strand
gaaagcgagcgacuggaaa

SEQ ID NO: 1145098 - RNA, 19 nt, Homo sapiens
  misc_RNA (1)...(19): siRNA sense strand
gcaaacagccaguuaaccu

SEQ ID NO: 1145099 - RNA, 19 nt, Homo sapiens
  misc_RNA (1)...(19): siRNA sense strand
agagacaggugcgaaguga

SEQ ID NO: 1145100 - RNA, 19 nt, Homo sapiens
  misc_RNA (1)...(19): siRNA sense strand
gacgugaacggcaaugauu

SEQ ID NO: 1145101 - RNA, 19 nt, Homo sapiens
  misc_RNA (1)...(19): siRNA sense strand
gaugauggcauagagagaa

SEQ ID NO: 1145102 - RNA, 19 nt, Homo sapiens
  misc_RNA (1)...(19): siRNA sense strand
cagauguggucgaggcaaa

SEQ ID NO: 1145103 - RNA, 19 nt, Homo sapiens
  misc_RNA (1)...(19): siRNA sense strand
agaagcaaacagccaguua

SEQ ID NO: 1145104 - RNA, 19 nt, Homo sapiens
  misc_RNA (1)...(19): siRNA sense strand
caaagucgcugggcaucag

SEQ ID NO: 1145105 - RNA, 19 nt, Homo sapiens
  misc_RNA (1)...(19): siRNA sense strand
gaaacgaagggugaagaga

SEQ ID NO: 1145106 - RNA, 19 nt, Homo sapiens
  misc_RNA (1)...(19): siRNA sense strand
caucagacccaacuacauc

SEQ ID NO: 1145107 - RNA, 19 nt, Homo sapiens
  misc_RNA (1)...(19): siRNA sense strand
ugaaagcgagcgacuggaa

SEQ ID NO: 1145108 - RNA, 19 nt, Homo sapiens
  misc_RNA (1)...(19): siRNA sense strand
gaagagacaggugcgaagu

SEQ ID NO: 1145109 - RNA, 19 nt, Homo sapiens
  misc_RNA (1)...(19): siRNA sense strand
caucaucgccuuggcucua

SEQ ID NO: 1145110 - RNA, 19 nt, Homo sapiens
  misc_RNA (1)...(19): siRNA sense strand
ccuggaagauuacuaccau

SEQ ID NO: 1145111 - RNA, 19 nt, Homo sapiens
  misc_RNA (1)...(19): siRNA sense strand
uuucgaguauggcauuaaa

SEQ ID NO: 1145112 - RNA, 19 nt, Homo sapiens
  misc_RNA (1)...(19): siRNA sense strand
uaugaugccagcaaugaaa

SEQ ID NO: 1145113 - RNA, 19 nt, Homo sapiens
  misc_RNA (1)...(19): siRNA sense strand
gaaaccuggaagauuacua

SEQ ID NO: 1145114 - RNA, 19 nt, Homo sapiens
  misc_RNA (1)...(19): siRNA sense strand
cgccuuggcucuagaagca

SEQ ID NO: 1145115 - RNA, 19 nt, Homo sapiens
  misc_RNA (1)...(19): siRNA sense strand
gcaguggggccuuuuauga

SEQ ID NO: 1145116 - RNA, 19 nt, Homo sapiens
  misc_RNA (1)...(19): siRNA sense strand
uggaagauuacuaccauuu

SEQ ID NO: 1145117 - RNA, 19 nt, Homo sapiens
  misc_RNA (1)...(19): siRNA sense strand
cagcaaacaauuccuacug

SEQ ID NO: 1145118 - RNA, 19 nt, Homo sapiens
  misc_RNA (1)...(19): siRNA sense strand
cagcagcgccaccgagaau

SEQ ID NO: 1145119 - RNA, 19 nt, Homo sapiens
  misc_RNA (1)...(19): siRNA sense strand
ugaacggcaaugauuauga

SEQ ID NO: 1145120 - RNA, 19 nt, Homo sapiens
  misc_RNA (1)...(19): siRNA sense strand
caacuacaucgacauuuac

SEQ ID NO: 1145121 - RNA, 19 nt, Homo sapiens
  misc_RNA (1)...(19): siRNA sense strand
aaacacggcacucguugug

SEQ ID NO: 1145122 - RNA, 19 nt, Homo sapiens
  misc_RNA (1)...(19): siRNA sense strand
ggaagauuacuaccauuuu

SEQ ID NO: 1145123 - RNA, 19 nt, Homo sapiens
  misc_RNA (1)...(19): siRNA sense strand
caacuugggccagauugga

SEQ ID NO: 1145124 - RNA, 19 nt, Homo sapiens
  misc_RNA (1)...(19): siRNA sense strand
gaucugcgucagcgcugua

SEQ ID NO: 1145125 - RNA, 19 nt, Homo sapiens
  misc_RNA (1)...(19): siRNA sense strand
cgcaggcccuuuacuucaa

SEQ ID NO: 1145126 - RNA, 19 nt, Homo sapiens
  misc_RNA (1)...(19): siRNA sense strand
ccaacagcaucuacaccau

SEQ ID NO: 1145127 - RNA, 19 nt, Homo sapiens
  misc_RNA (1)...(19): siRNA sense strand
cuacaucgacauuuacagu

SEQ ID NO: 1145128 - RNA, 19 nt, Homo sapiens
  misc_RNA (1)...(19): siRNA sense strand
ccagcaacaggaagugaaa

SEQ ID NO: 1145129 - RNA, 19 nt, Homo sapiens
  misc_RNA (1)...(19): siRNA sense strand
gcuuucgaguauggcauua

SEQ ID NO: 1145130 - RNA, 19 nt, Homo sapiens
  misc_RNA (1)...(19): siRNA sense strand
aauaaacacggcacucguu

SEQ ID NO: 1145131 - RNA, 19 nt, Homo sapiens
  misc_RNA (1)...(19): siRNA sense strand
caaugauuaugacccaucu

SEQ ID NO: 1145132 - RNA, 19 nt, Homo sapiens
  misc_RNA (1)...(19): siRNA sense strand
caacaugugguaccugcau

SEQ ID NO: 1145133 - RNA, 19 nt, Homo sapiens
  misc_RNA (1)...(19): siRNA sense strand
gcaaagucgcugggcauca

SEQ ID NO: 1145134 - RNA, 19 nt, Homo sapiens
  misc_RNA (1)...(19): siRNA sense strand
ggugaaauggcuccagcaa

SEQ ID NO: 1145135 - RNA, 19 nt, Homo sapiens
  misc_RNA (1)...(19): siRNA sense strand
caaacaauuccuacugcau

SEQ ID NO: 1145136 - RNA, 19 nt, Homo sapiens
  misc_RNA (1)...(19): siRNA sense strand
uaucacagcaaaaccuuua

SEQ ID NO: 1145137 - RNA, 19 nt, Homo sapiens
  misc_RNA (1)...(19): siRNA sense strand
aacgaagggugaagagaca

SEQ ID NO: 1145138 - RNA, 19 nt, Homo sapiens
  misc_RNA (1)...(19): siRNA sense strand
gcaucagacccaacuacau

SEQ ID NO: 1145139 - RNA, 19 nt, Homo sapiens
  misc_RNA (1)...(19): siRNA sense strand
guacaaugccaaaauagga

SEQ ID NO: 1145140 - RNA, 19 nt, Homo sapiens
  misc_RNA (1)...(19): siRNA sense strand
gcaggcccuuuacuucaac

SEQ ID NO: 1145141 - RNA, 19 nt, Homo sapiens
  misc_RNA (1)...(19): siRNA sense strand
ccgcaggcccuuuacuuca

SEQ ID NO: 1145142 - RNA, 19 nt, Homo sapiens
  misc_RNA (1)...(19): siRNA sense strand
cgacgugaacggcaaugau

SEQ ID NO: 1145143 - RNA, 19 nt, Homo sapiens
  misc_RNA (1)...(19): siRNA sense strand
caccgagaauggcuacaag

SEQ ID NO: 1145144 - RNA, 19 nt, Homo sapiens
  misc_RNA (1)...(19): siRNA sense strand
cgugaacggcaaugauuau

SEQ ID NO: 1145145 - RNA, 19 nt, Homo sapiens
  misc_RNA (1)...(19): siRNA sense strand
gugacccgcaggcccuuua

SEQ ID NO: 1145146 - RNA, 19 nt, Homo sapiens
  misc_RNA (1)...(19): siRNA sense strand
ccuuggcucuagaagcaaa

SEQ ID NO: 1145147 - RNA, 19 nt, Homo sapiens
  misc_RNA (1)...(19): siRNA sense strand
gcaacaggaagugaaacga

SEQ ID NO: 1145148 - RNA, 19 nt, Homo sapiens
  misc_RNA (1)...(19): siRNA sense strand
ugcgauggcuacaccaaca

SEQ ID NO: 1145149 - RNA, 19 nt, Homo sapiens
  misc_RNA (1)...(19): siRNA sense strand
ccaccgagaauggcuacaa

SEQ ID NO: 1145150 - RNA, 19 nt, Homo sapiens
  misc_RNA (1)...(19): siRNA sense strand
ccaacuacaucgacauuua

SEQ ID NO: 1145151 - RNA, 19 nt, Homo sapiens
  misc_RNA (1)...(19): siRNA sense strand
uuggaaaccuggaagauua

SEQ ID NO: 1145152 - RNA, 19 nt, Homo sapiens
  misc_RNA (1)...(19): siRNA sense strand
ugaaauggcuccagcaaca

SEQ ID NO: 1145153 - RNA, 19 nt, Homo sapiens
  misc_RNA (1)...(19): siRNA sense strand
ggacggcgaugucacagau

SEQ ID NO: 1145154 - RNA, 19 nt, Homo sapiens
  misc_RNA (1)...(19): siRNA sense strand
gaagcaaacagccaguuaa

SEQ ID NO: 1145155 - RNA, 19 nt, Homo sapiens
  misc_RNA (1)...(19): siRNA sense strand
gaacggcaaugauuaugac

SEQ ID NO: 1145156 - RNA, 19 nt, Homo sapiens
  misc_RNA (1)...(19): siRNA sense strand
gcgagcgacuggaaaguga

SEQ ID NO: 1145157 - RNA, 19 nt, Homo sapiens
  misc_RNA (1)...(19): siRNA sense strand
ccucacaccuuccucagaa

SEQ ID NO: 1145158 - RNA, 19 nt, Homo sapiens
  misc_RNA (1)...(19): siRNA sense strand
gauaugaugccagcaauga

SEQ ID NO: 1145159 - RNA, 19 nt, Homo sapiens
  misc_RNA (1)...(19): siRNA sense strand
ugacccaucuccacgauau

SEQ ID NO: 1145160 - RNA, 19 nt, Homo sapiens
  misc_RNA (1)...(19): siRNA sense strand
caacaggaagugaaacgaa

SEQ ID NO: 1145161 - RNA, 19 nt, Homo sapiens
  misc_RNA (1)...(19): siRNA sense strand
gaaagcgagcgacuggaaa

SEQ ID NO: 1145162 - RNA, 19 nt, Homo sapiens
  misc_RNA (1)...(19): siRNA sense strand
gcaaacagccaguuaaccu

SEQ ID NO: 1145163 - RNA, 19 nt, Homo sapiens
  misc_RNA (1)...(19): siRNA sense strand
agagacaggugcgaaguga

SEQ ID NO: 1145164 - RNA, 19 nt, Homo sapiens
  misc_RNA (1)...(19): siRNA sense strand
gacgugaacggcaaugauu

SEQ ID NO: 1145165 - RNA, 19 nt, Homo sapiens
  misc_RNA (1)...(19): siRNA sense strand
gaugauggcauagagagaa

SEQ ID NO: 1145166 - RNA, 19 nt, Homo sapiens
  misc_RNA (1)...(19): siRNA sense strand
cagauguggucgaggcaaa

SEQ ID NO: 1145167 - RNA, 19 nt, Homo sapiens
  misc_RNA (1)...(19): siRNA sense strand
agaagcaaacagccaguua

SEQ ID NO: 1145168 - RNA, 19 nt, Homo sapiens
  misc_RNA (1)...(19): siRNA sense strand
caaagucgcugggcaucag

SEQ ID NO: 1145169 - RNA, 19 nt, Homo sapiens
  misc_RNA (1)...(19): siRNA sense strand
gaaacgaagggugaagaga

SEQ ID NO: 1145170 - RNA, 19 nt, Homo sapiens
  misc_RNA (1)...(19): siRNA sense strand
caucagacccaacuacauc

SEQ ID NO: 1145171 - RNA, 19 nt, Homo sapiens
  misc_RNA (1)...(19): siRNA sense strand
ugaaagcgagcgacuggaa

SEQ ID NO: 1145172 - RNA, 19 nt, Homo sapiens
  misc_RNA (1)...(19): siRNA sense strand
gaagagacaggugcgaagu

SEQ ID NO: 1145173 - RNA, 19 nt, Homo sapiens
  misc_RNA (1)...(19): siRNA sense strand
caucaucgccuuggcucua

SEQ ID NO: 1145174 - RNA, 19 nt, Homo sapiens
  misc_RNA (1)...(19): siRNA sense strand
ccuggaagauuacuaccau

SEQ ID NO: 1145175 - RNA, 19 nt, Homo sapiens
  misc_RNA (1)...(19): siRNA sense strand
uuucgaguauggcauuaaa

SEQ ID NO: 1145176 - RNA, 19 nt, Homo sapiens
  misc_RNA (1)...(19): siRNA sense strand
uaugaugccagcaaugaaa

SEQ ID NO: 1145177 - RNA, 19 nt, Homo sapiens
  misc_RNA (1)...(19): siRNA sense strand
gaaaccuggaagauuacua

SEQ ID NO: 1145178 - RNA, 19 nt, Homo sapiens
  misc_RNA (1)...(19): siRNA sense strand
cgccuuggcucuagaagca

SEQ ID NO: 1145179 - RNA, 19 nt, Homo sapiens
  misc_RNA (1)...(19): siRNA sense strand
gcaguggggccuuuuauga

SEQ ID NO: 1145180 - RNA, 19 nt, Homo sapiens
  misc_RNA (1)...(19): siRNA sense strand
uggaagauuacuaccauuu

SEQ ID NO: 1145181 - RNA, 19 nt, Homo sapiens
  misc_RNA (1)...(19): siRNA sense strand
cagcaaacaauuccuacug

SEQ ID NO: 1145182 - RNA, 19 nt, Homo sapiens
  misc_RNA (1)...(19): siRNA sense strand
cagcagcgccaccgagaau

SEQ ID NO: 1145183 - RNA, 19 nt, Homo sapiens
  misc_RNA (1)...(19): siRNA sense strand
ugaacggcaaugauuauga

SEQ ID NO: 1145184 - RNA, 19 nt, Homo sapiens
  misc_RNA (1)...(19): siRNA sense strand
caacuacaucgacauuuac

SEQ ID NO: 1145185 - RNA, 19 nt, Homo sapiens
  misc_RNA (1)...(19): siRNA sense strand
aaacacggcacucguugug

SEQ ID NO: 1145186 - RNA, 19 nt, Homo sapiens
  misc_RNA (1)...(19): siRNA sense strand
ggaagauuacuaccauuuu

SEQ ID NO: 1145187 - RNA, 19 nt, Homo sapiens
  misc_RNA (1)...(19): siRNA sense strand
caacuugggccagauugga

SEQ ID NO: 1145188 - RNA, 19 nt, Homo sapiens
  misc_RNA (1)...(19): siRNA sense strand
gaucugcgucagcgcugua

SEQ ID NO: 1145189 - RNA, 19 nt, Homo sapiens
  misc_RNA (1)...(19): siRNA sense strand
cgcaggcccuuuacuucaa

SEQ ID NO: 1145190 - RNA, 19 nt, Homo sapiens
  misc_RNA (1)...(19): siRNA sense strand
ccaacagcaucuacaccau

SEQ ID NO: 1145191 - RNA, 19 nt, Homo sapiens
  misc_RNA (1)...(19): siRNA sense strand
cuacaucgacauuuacagu

SEQ ID NO: 1145192 - RNA, 19 nt, Homo sapiens
  misc_RNA (1)...(19): siRNA sense strand
ccagcaacaggaagugaaa

SEQ ID NO: 1145193 - RNA, 19 nt, Homo sapiens
  misc_RNA (1)...(19): siRNA sense strand
gcuuucgaguauggcauua

SEQ ID NO: 1145194 - RNA, 19 nt, Homo sapiens
  misc_RNA (1)...(19): siRNA sense strand
aauaaacacggcacucguu

SEQ ID NO: 1145195 - RNA, 19 nt, Homo sapiens
  misc_RNA (1)...(19): siRNA sense strand
caaugauuaugacccaucu

SEQ ID NO: 1145196 - RNA, 19 nt, Homo sapiens
  misc_RNA (1)...(19): siRNA sense strand
caacaugugguaccugcau

SEQ ID NO: 1145197 - RNA, 19 nt, Homo sapiens
  misc_RNA (1)...(19): siRNA sense strand
gcaaagucgcugggcauca

SEQ ID NO: 1145198 - RNA, 19 nt, Homo sapiens
  misc_RNA (1)...(19): siRNA sense strand
ggugaaauggcuccagcaa

SEQ ID NO: 1145199 - RNA, 19 nt, Homo sapiens
  misc_RNA (1)...(19): siRNA sense strand
caaacaauuccuacugcau

SEQ ID NO: 1145200 - RNA, 19 nt, Homo sapiens
  misc_RNA (1)...(19): siRNA sense strand
uaucacagcaaaaccuuua

SEQ ID NO: 1145201 - RNA, 19 nt, Homo sapiens
  misc_RNA (1)...(19): siRNA sense strand
aacgaagggugaagagaca

SEQ ID NO: 1145202 - RNA, 19 nt, Homo sapiens
  misc_RNA (1)...(19): siRNA sense strand
gcaucagacccaacuacau

SEQ ID NO: 1145203 - RNA, 19 nt, Homo sapiens
  misc_RNA (1)...(19): siRNA sense strand
guacaaugccaaaauagga

SEQ ID NO: 1145204 - RNA, 19 nt, Homo sapiens
  misc_RNA (1)...(19): siRNA sense strand
gcaggcccuuuacuucaac

SEQ ID NO: 1145205 - RNA, 19 nt, Homo sapiens
  misc_RNA (1)...(19): siRNA sense strand
ccgcaggcccuuuacuuca

SEQ ID NO: 1145206 - RNA, 19 nt, Homo sapiens
  misc_RNA (1)...(19): siRNA sense strand
cgacgugaacggcaaugau

SEQ ID NO: 1145207 - RNA, 19 nt, Homo sapiens
  misc_RNA (1)...(19): siRNA sense strand
caccgagaauggcuacaag

SEQ ID NO: 1145208 - RNA, 19 nt, Homo sapiens
  misc_RNA (1)...(19): siRNA sense strand
cgugaacggcaaugauuau

SEQ ID NO: 1145209 - RNA, 19 nt, Homo sapiens
  misc_RNA (1)...(19): siRNA sense strand
gugacccgcaggcccuuua

SEQ ID NO: 1145210 - RNA, 19 nt, Homo sapiens
  misc_RNA (1)...(19): siRNA sense strand
ccuuggcucuagaagcaaa

SEQ ID NO: 1145211 - RNA, 19 nt, Homo sapiens
  misc_RNA (1)...(19): siRNA sense strand
gcaacaggaagugaaacga

SEQ ID NO: 1145212 - RNA, 19 nt, Homo sapiens
  misc_RNA (1)...(19): siRNA sense strand
ugcgauggcuacaccaaca

SEQ ID NO: 1145213 - RNA, 19 nt, Homo sapiens
  misc_RNA (1)...(19): siRNA sense strand
ccaccgagaauggcuacaa

SEQ ID NO: 1145214 - RNA, 19 nt, Homo sapiens
  misc_RNA (1)...(19): siRNA sense strand
ccaacuacaucgacauuua

SEQ ID NO: 1145215 - RNA, 19 nt, Homo sapiens
  misc_RNA (1)...(19): siRNA sense strand
uuggaaaccuggaagauua

SEQ ID NO: 1145216 - RNA, 19 nt, Homo sapiens
  misc_RNA (1)...(19): siRNA sense strand
ugaaauggcuccagcaaca

SEQ ID NO: 1145217 - RNA, 19 nt, Homo sapiens
  misc_RNA (1)...(19): siRNA sense strand
ggacggcgaugucacagau

SEQ ID NO: 1145218 - RNA, 19 nt, Homo sapiens
  misc_RNA (1)...(19): siRNA sense strand
gaagcaaacagccaguuaa

SEQ ID NO: 1145219 - RNA, 19 nt, Homo sapiens
  misc_RNA (1)...(19): siRNA sense strand
gaacggcaaugauuaugac

SEQ ID NO: 1145220 - RNA, 19 nt, Homo sapiens
  misc_RNA (1)...(19): siRNA sense strand
gcgagcgacuggaaaguga

SEQ ID NO: 1145221 - RNA, 19 nt, Homo sapiens
  misc_RNA (1)...(19): siRNA sense strand
ccucacaccuuccucagaa

SEQ ID NO: 1145222 - RNA, 19 nt, Homo sapiens
  misc_RNA (1)...(19): siRNA sense strand
gauaugaugccagcaauga

SEQ ID NO: 1145223 - RNA, 19 nt, Homo sapiens
  misc_RNA (1)...(19): siRNA sense strand
ugacccaucuccacgauau

SEQ ID NO: 1145224 - RNA, 19 nt, Homo sapiens
  misc_RNA (1)...(19): siRNA sense strand
caacaggaagugaaacgaa

SEQ ID NO: 1145225 - RNA, 19 nt, Homo sapiens
  misc_RNA (1)...(19): siRNA sense strand
gaaagcgagcgacuggaaa

SEQ ID NO: 1145226 - RNA, 19 nt, Homo sapiens
  misc_RNA (1)...(19): siRNA sense strand
gcaaacagccaguuaaccu

SEQ ID NO: 1145227 - RNA, 19 nt, Homo sapiens
  misc_RNA (1)...(19): siRNA sense strand
agagacaggugcgaaguga

SEQ ID NO: 1145228 - RNA, 19 nt, Homo sapiens
  misc_RNA (1)...(19): siRNA sense strand
gacgugaacggcaaugauu

SEQ ID NO: 1145229 - RNA, 19 nt, Homo sapiens
  misc_RNA (1)...(19): siRNA sense strand
gaugauggcauagagagaa

SEQ ID NO: 1145230 - RNA, 19 nt, Homo sapiens
  misc_RNA (1)...(19): siRNA sense strand
cagauguggucgaggcaaa

SEQ ID NO: 1145231 - RNA, 19 nt, Homo sapiens
  misc_RNA (1)...(19): siRNA sense strand
agaagcaaacagccaguua

SEQ ID NO: 1145232 - RNA, 19 nt, Homo sapiens
  misc_RNA (1)...(19): siRNA sense strand
caaagucgcugggcaucag

SEQ ID NO: 1145233 - RNA, 19 nt, Homo sapiens
  misc_RNA (1)...(19): siRNA sense strand
gaaacgaagggugaagaga

SEQ ID NO: 1145234 - RNA, 19 nt, Homo sapiens
  misc_RNA (1)...(19): siRNA sense strand
caucagacccaacuacauc

SEQ ID NO: 1145235 - RNA, 19 nt, Homo sapiens
  misc_RNA (1)...(19): siRNA sense strand
ugaaagcgagcgacuggaa

SEQ ID NO: 1145236 - RNA, 19 nt, Homo sapiens
  misc_RNA (1)...(19): siRNA sense strand
gaagagacaggugcgaagu

SEQ ID NO: 1145237 - RNA, 19 nt, Homo sapiens
  misc_RNA (1)...(19): siRNA sense strand
caucaucgccuuggcucua

SEQ ID NO: 1145238 - RNA, 19 nt, Homo sapiens
  misc_RNA (1)...(19): siRNA sense strand
ccuggaagauuacuaccau

SEQ ID NO: 1145239 - RNA, 19 nt, Homo sapiens
  misc_RNA (1)...(19): siRNA sense strand
uuucgaguauggcauuaaa

SEQ ID NO: 1145240 - RNA, 19 nt, Homo sapiens
  misc_RNA (1)...(19): siRNA sense strand
uaugaugccagcaaugaaa

SEQ ID NO: 1145241 - RNA, 19 nt, Homo sapiens
  misc_RNA (1)...(19): siRNA sense strand
gaaaccuggaagauuacua

SEQ ID NO: 1145242 - RNA, 19 nt, Homo sapiens
  misc_RNA (1)...(19): siRNA sense strand
cgccuuggcucuagaagca

SEQ ID NO: 1145243 - RNA, 19 nt, Homo sapiens
  misc_RNA (1)...(19): siRNA sense strand
gcaguggggccuuuuauga

SEQ ID NO: 1145244 - RNA, 19 nt, Homo sapiens
  misc_RNA (1)...(19): siRNA sense strand
uggaagauuacuaccauuu

SEQ ID NO: 1145245 - RNA, 19 nt, Homo sapiens
  misc_RNA (1)...(19): siRNA sense strand
cagcaaacaauuccuacug

SEQ ID NO: 1145246 - RNA, 19 nt, Homo sapiens
  misc_RNA (1)...(19): siRNA sense strand
cagcagcgccaccgagaau

SEQ ID NO: 1145247 - RNA, 19 nt, Homo sapiens
  misc_RNA (1)...(19): siRNA sense strand
ugaacggcaaugauuauga

SEQ ID NO: 1145248 - RNA, 19 nt, Homo sapiens
  misc_RNA (1)...(19): siRNA sense strand
caacuacaucgacauuuac

SEQ ID NO: 1145249 - RNA, 19 nt, Homo sapiens
  misc_RNA (1)...(19): siRNA sense strand
aaacacggcacucguugug

SEQ ID NO: 1145250 - RNA, 19 nt, Homo sapiens
  misc_RNA (1)...(19): siRNA sense strand
ggaagauuacuaccauuuu

SEQ ID NO: 1145251 - RNA, 19 nt, Homo sapiens
  misc_RNA (1)...(19): siRNA sense strand
caacuugggccagauugga

SEQ ID NO: 1145252 - RNA, 19 nt, Homo sapiens
  misc_RNA (1)...(19): siRNA sense strand
gaucugcgucagcgcugua

SEQ ID NO: 1145253 - RNA, 19 nt, Homo sapiens
  misc_RNA (1)...(19): siRNA sense strand
cgcaggcccuuuacuucaa

SEQ ID NO: 1145254 - RNA, 19 nt, Homo sapiens
  misc_RNA (1)...(19): siRNA sense strand
ccaacagcaucuacaccau

SEQ ID NO: 1145255 - RNA, 19 nt, Homo sapiens
  misc_RNA (1)...(19): siRNA sense strand
cuacaucgacauuuacagu

SEQ ID NO: 1145256 - RNA, 19 nt, Homo sapiens
  misc_RNA (1)...(19): siRNA sense strand
ccagcaacaggaagugaaa

SEQ ID NO: 1145257 - RNA, 19 nt, Homo sapiens
  misc_RNA (1)...(19): siRNA sense strand
gcuuucgaguauggcauua

SEQ ID NO: 1145258 - RNA, 19 nt, Homo sapiens
  misc_RNA (1)...(19): siRNA sense strand
aauaaacacggcacucguu

SEQ ID NO: 1145259 - RNA, 19 nt, Homo sapiens
  misc_RNA (1)...(19): siRNA sense strand
caaugauuaugacccaucu

SEQ ID NO: 1145260 - RNA, 19 nt, Homo sapiens
  misc_RNA (1)...(19): siRNA sense strand
caacaugugguaccugcau

SEQ ID NO: 1145261 - RNA, 19 nt, Homo sapiens
  misc_RNA (1)...(19): siRNA sense strand
gcaaagucgcugggcauca

SEQ ID NO: 1145262 - RNA, 19 nt, Homo sapiens
  misc_RNA (1)...(19): siRNA sense strand
ggugaaauggcuccagcaa

SEQ ID NO: 1145263 - RNA, 19 nt, Homo sapiens
  misc_RNA (1)...(19): siRNA sense strand
caaacaauuccuacugcau

SEQ ID NO: 1145264 - RNA, 19 nt, Homo sapiens
  misc_RNA (1)...(19): siRNA sense strand
uaucacagcaaaaccuuua

SEQ ID NO: 1145265 - RNA, 19 nt, Homo sapiens
  misc_RNA (1)...(19): siRNA sense strand
aacgaagggugaagagaca

SEQ ID NO: 1145266 - RNA, 19 nt, Homo sapiens
  misc_RNA (1)...(19): siRNA sense strand
gcaucagacccaacuacau

SEQ ID NO: 1145267 - RNA, 19 nt, Homo sapiens
  misc_RNA (1)...(19): siRNA sense strand
guacaaugccaaaauagga

SEQ ID NO: 1145268 - RNA, 19 nt, Homo sapiens
  misc_RNA (1)...(19): siRNA sense strand
gcaggcccuuuacuucaac

SEQ ID NO: 1145269 - RNA, 19 nt, Homo sapiens
  misc_RNA (1)...(19): siRNA sense strand
ccgcaggcccuuuacuuca

SEQ ID NO: 1145270 - RNA, 19 nt, Homo sapiens
  misc_RNA (1)...(19): siRNA sense strand
cgacgugaacggcaaugau

SEQ ID NO: 1145271 - RNA, 19 nt, Homo sapiens
  misc_RNA (1)...(19): siRNA sense strand
caccgagaauggcuacaag

SEQ ID NO: 1145272 - RNA, 19 nt, Homo sapiens
  misc_RNA (1)...(19): siRNA sense strand
cgugaacggcaaugauuau

SEQ ID NO: 1145273 - RNA, 19 nt, Homo sapiens
  misc_RNA (1)...(19): siRNA sense strand
gugacccgcaggcccuuua

SEQ ID NO: 1145274 - RNA, 19 nt, Homo sapiens
  misc_RNA (1)...(19): siRNA sense strand
ccuuggcucuagaagcaaa

SEQ ID NO: 1145275 - RNA, 19 nt, Homo sapiens
  misc_RNA (1)...(19): siRNA sense strand
gcaacaggaagugaaacga

SEQ ID NO: 1145276 - RNA, 19 nt, Homo sapiens
  misc_RNA (1)...(19): siRNA sense strand
ugcgauggcuacaccaaca

SEQ ID NO: 1145277 - RNA, 19 nt, Homo sapiens
  misc_RNA (1)...(19): siRNA sense strand
ccaccgagaauggcuacaa

SEQ ID NO: 1145278 - RNA, 19 nt, Homo sapiens
  misc_RNA (1)...(19): siRNA sense strand
ccaacuacaucgacauuua

SEQ ID NO: 1145279 - RNA, 19 nt, Homo sapiens
  misc_RNA (1)...(19): siRNA sense strand
uuggaaaccuggaagauua

SEQ ID NO: 1145280 - RNA, 19 nt, Homo sapiens
  misc_RNA (1)...(19): siRNA sense strand
ugaaauggcuccagcaaca

SEQ ID NO: 1145281 - RNA, 19 nt, Homo sapiens
  misc_RNA (1)...(19): siRNA sense strand
ggacggcgaugucacagau

SEQ ID NO: 1145282 - RNA, 19 nt, Homo sapiens
  misc_RNA (1)...(19): siRNA sense strand
gaagcaaacagccaguuaa

SEQ ID NO: 1145283 - RNA, 19 nt, Homo sapiens
  misc_RNA (1)...(19): siRNA sense strand
gaacggcaaugauuaugac

SEQ ID NO: 1145284 - RNA, 19 nt, Homo sapiens
  misc_RNA (1)...(19): siRNA sense strand
gcgagcgacuggaaaguga

SEQ ID NO: 1145285 - RNA, 19 nt, Homo sapiens
  misc_RNA (1)...(19): siRNA sense strand
ccucacaccuuccucagaa

SEQ ID NO: 1145286 - RNA, 19 nt, Homo sapiens
  misc_RNA (1)...(19): siRNA sense strand
gauaugaugccagcaauga

SEQ ID NO: 1145287 - RNA, 19 nt, Homo sapiens
  misc_RNA (1)...(19): siRNA sense strand
ugacccaucuccacgauau

SEQ ID NO: 1145288 - RNA, 19 nt, Homo sapiens
  misc_RNA (1)...(19): siRNA sense strand
caacaggaagugaaacgaa

SEQ ID NO: 1145289 - RNA, 19 nt, Homo sapiens
  misc_RNA (1)...(19): siRNA sense strand
gaaagcgagcgacuggaaa

SEQ ID NO: 1145290 - RNA, 19 nt, Homo sapiens
  misc_RNA (1)...(19): siRNA sense strand
gcaaacagccaguuaaccu

SEQ ID NO: 1145291 - RNA, 19 nt, Homo sapiens
  misc_RNA (1)...(19): siRNA sense strand
agagacaggugcgaaguga

SEQ ID NO: 1145292 - RNA, 19 nt, Homo sapiens
  misc_RNA (1)...(19): siRNA sense strand
gacgugaacggcaaugauu

SEQ ID NO: 1145293 - RNA, 19 nt, Homo sapiens
  misc_RNA (1)...(19): siRNA sense strand
gaugauggcauagagagaa

SEQ ID NO: 1145294 - RNA, 19 nt, Homo sapiens
  misc_RNA (1)...(19): siRNA sense strand
cagauguggucgaggcaaa

SEQ ID NO: 1145295 - RNA, 19 nt, Homo sapiens
  misc_RNA (1)...(19): siRNA sense strand
agaagcaaacagccaguua

SEQ ID NO: 1145296 - RNA, 19 nt, Homo sapiens
  misc_RNA (1)...(19): siRNA sense strand
caaagucgcugggcaucag

SEQ ID NO: 1145297 - RNA, 19 nt, Homo sapiens
  misc_RNA (1)...(19): siRNA sense strand
gaaacgaagggugaagaga

SEQ ID NO: 1145298 - RNA, 19 nt, Homo sapiens
  misc_RNA (1)...(19): siRNA sense strand
caucagacccaacuacauc

SEQ ID NO: 1145299 - RNA, 19 nt, Homo sapiens
  misc_RNA (1)...(19): siRNA sense strand
ugaaagcgagcgacuggaa

SEQ ID NO: 1145300 - RNA, 19 nt, Homo sapiens
  misc_RNA (1)...(19): siRNA sense strand
gaagagacaggugcgaagu

SEQ ID NO: 1145301 - RNA, 19 nt, Homo sapiens
  misc_RNA (1)...(19): siRNA sense strand
caucaucgccuuggcucua

SEQ ID NO: 1145302 - RNA, 19 nt, Homo sapiens
  misc_RNA (1)...(19): siRNA sense strand
ccuggaagauuacuaccau

SEQ ID NO: 1145303 - RNA, 19 nt, Homo sapiens
  misc_RNA (1)...(19): siRNA sense strand
uuucgaguauggcauuaaa

SEQ ID NO: 1145304 - RNA, 19 nt, Homo sapiens
  misc_RNA (1)...(19): siRNA sense strand
uaugaugccagcaaugaaa

SEQ ID NO: 1145305 - RNA, 19 nt, Homo sapiens
  misc_RNA (1)...(19): siRNA sense strand
gaaaccuggaagauuacua

SEQ ID NO: 1145306 - RNA, 19 nt, Homo sapiens
  misc_RNA (1)...(19): siRNA sense strand
cgccuuggcucuagaagca

SEQ ID NO: 1145307 - RNA, 19 nt, Homo sapiens
  misc_RNA (1)...(19): siRNA sense strand
gcaguggggccuuuuauga

SEQ ID NO: 1145308 - RNA, 19 nt, Homo sapiens
  misc_RNA (1)...(19): siRNA sense strand
uggaagauuacuaccauuu

SEQ ID NO: 1145309 - RNA, 19 nt, Homo sapiens
  misc_RNA (1)...(19): siRNA sense strand
cagcaaacaauuccuacug

SEQ ID NO: 1145310 - RNA, 19 nt, Homo sapiens
  misc_RNA (1)...(19): siRNA sense strand
cagcagcgccaccgagaau

SEQ ID NO: 1145311 - RNA, 19 nt, Homo sapiens
  misc_RNA (1)...(19): siRNA sense strand
ugaacggcaaugauuauga

SEQ ID NO: 1145312 - RNA, 19 nt, Homo sapiens
  misc_RNA (1)...(19): siRNA sense strand
caacuacaucgacauuuac

SEQ ID NO: 1145313 - RNA, 19 nt, Homo sapiens
  misc_RNA (1)...(19): siRNA sense strand
aaacacggcacucguugug

SEQ ID NO: 1145314 - RNA, 19 nt, Homo sapiens
  misc_RNA (1)...(19): siRNA sense strand
ggaagauuacuaccauuuu

SEQ ID NO: 1145315 - RNA, 19 nt, Homo sapiens
  misc_RNA (1)...(19): siRNA sense strand
caacuugggccagauugga

SEQ ID NO: 1145316 - RNA, 19 nt, Homo sapiens
  misc_RNA (1)...(19): siRNA sense strand
gaucugcgucagcgcugua

SEQ ID NO: 1145317 - RNA, 19 nt, Homo sapiens
  misc_RNA (1)...(19): siRNA sense strand
cgcaggcccuuuacuucaa

SEQ ID NO: 1145318 - RNA, 19 nt, Homo sapiens
  misc_RNA (1)...(19): siRNA sense strand
ccaacagcaucuacaccau

SEQ ID NO: 1145319 - RNA, 19 nt, Homo sapiens
  misc_RNA (1)...(19): siRNA sense strand
cuacaucgacauuuacagu

SEQ ID NO: 1145320 - RNA, 19 nt, Homo sapiens
  misc_RNA (1)...(19): siRNA sense strand
ccagcaacaggaagugaaa

SEQ ID NO: 1145321 - RNA, 19 nt, Homo sapiens
  misc_RNA (1)...(19): siRNA sense strand
gcuuucgaguauggcauua

SEQ ID NO: 1145322 - RNA, 19 nt, Homo sapiens
  misc_RNA (1)...(19): siRNA sense strand
aauaaacacggcacucguu

SEQ ID NO: 1145323 - RNA, 19 nt, Homo sapiens
  misc_RNA (1)...(19): siRNA sense strand
caaugauuaugacccaucu

SEQ ID NO: 1145324 - RNA, 19 nt, Homo sapiens
  misc_RNA (1)...(19): siRNA sense strand
caacaugugguaccugcau

SEQ ID NO: 1145325 - RNA, 19 nt, Homo sapiens
  misc_RNA (1)...(19): siRNA sense strand
gcaaagucgcugggcauca

SEQ ID NO: 1145326 - RNA, 19 nt, Homo sapiens
  misc_RNA (1)...(19): siRNA sense strand
ggugaaauggcuccagcaa

SEQ ID NO: 1145327 - RNA, 19 nt, Homo sapiens
  misc_RNA (1)...(19): siRNA sense strand
caaacaauuccuacugcau

SEQ ID NO: 1145328 - RNA, 19 nt, Homo sapiens
  misc_RNA (1)...(19): siRNA sense strand
uaucacagcaaaaccuuua

SEQ ID NO: 1145329 - RNA, 19 nt, Homo sapiens
  misc_RNA (1)...(19): siRNA sense strand
aacgaagggugaagagaca

SEQ ID NO: 1145330 - RNA, 19 nt, Homo sapiens
  misc_RNA (1)...(19): siRNA sense strand
gcaucagacccaacuacau

SEQ ID NO: 1145331 - RNA, 19 nt, Homo sapiens
  misc_RNA (1)...(19): siRNA sense strand
guacaaugccaaaauagga

SEQ ID NO: 1145332 - RNA, 19 nt, Homo sapiens
  misc_RNA (1)...(19): siRNA sense strand
gcaggcccuuuacuucaac

SEQ ID NO: 1145333 - RNA, 19 nt, Homo sapiens
  misc_RNA (1)...(19): siRNA sense strand
ccgcaggcccuuuacuuca

SEQ ID NO: 1145334 - RNA, 19 nt, Homo sapiens
  misc_RNA (1)...(19): siRNA sense strand
cgacgugaacggcaaugau

SEQ ID NO: 1145335 - RNA, 19 nt, Homo sapiens
  misc_RNA (1)...(19): siRNA sense strand
caccgagaauggcuacaag

SEQ ID NO: 1145336 - RNA, 19 nt, Homo sapiens
  misc_RNA (1)...(19): siRNA sense strand
cgugaacggcaaugauuau

SEQ ID NO: 1145337 - RNA, 19 nt, Homo sapiens
  misc_RNA (1)...(19): siRNA sense strand
gugacccgcaggcccuuua

SEQ ID NO: 1145338 - RNA, 19 nt, Homo sapiens
  misc_RNA (1)...(19): siRNA sense strand
ccuuggcucuagaagcaaa

SEQ ID NO: 1145339 - RNA, 19 nt, Homo sapiens
  misc_RNA (1)...(19): siRNA sense strand
gcaacaggaagugaaacga

SEQ ID NO: 1145340 - RNA, 19 nt, Homo sapiens
  misc_RNA (1)...(19): siRNA sense strand
ugcgauggcuacaccaaca

SEQ ID NO: 1145341 - RNA, 19 nt, Homo sapiens
  misc_RNA (1)...(19): siRNA sense strand
ccaccgagaauggcuacaa

SEQ ID NO: 1145342 - RNA, 19 nt, Homo sapiens
  misc_RNA (1)...(19): siRNA sense strand
ccaacuacaucgacauuua

SEQ ID NO: 1145343 - RNA, 19 nt, Homo sapiens
  misc_RNA (1)...(19): siRNA sense strand
uuggaaaccuggaagauua

SEQ ID NO: 1145344 - RNA, 19 nt, Homo sapiens
  misc_RNA (1)...(19): siRNA sense strand
ugaaauggcuccagcaaca

SEQ ID NO: 1145345 - RNA, 19 nt, Homo sapiens
  misc_RNA (1)...(19): siRNA sense strand
ggacggcgaugucacagau

SEQ ID NO: 1145346 - RNA, 19 nt, Homo sapiens
  misc_RNA (1)...(19): siRNA sense strand
gaagcaaacagccaguuaa

SEQ ID NO: 1145347 - RNA, 19 nt, Homo sapiens
  misc_RNA (1)...(19): siRNA sense strand
gaacggcaaugauuaugac

SEQ ID NO: 1145348 - RNA, 19 nt, Homo sapiens
  misc_RNA (1)...(19): siRNA sense strand
gcgagcgacuggaaaguga

SEQ ID NO: 1145349 - RNA, 19 nt, Homo sapiens
  misc_RNA (1)...(19): siRNA sense strand
ccucacaccuuccucagaa

SEQ ID NO: 1145350 - RNA, 19 nt, Homo sapiens
  misc_RNA (1)...(19): siRNA sense strand
gauaugaugccagcaauga

SEQ ID NO: 1145351 - RNA, 19 nt, Homo sapiens
  misc_RNA (1)...(19): siRNA sense strand
ugacccaucuccacgauau

SEQ ID NO: 1145352 - RNA, 19 nt, Homo sapiens
  misc_RNA (1)...(19): siRNA sense strand
caacaggaagugaaacgaa

SEQ ID NO: 1145353 - RNA, 19 nt, Homo sapiens
  misc_RNA (1)...(19): siRNA sense strand
gaaagcgagcgacuggaaa

SEQ ID NO: 1145354 - RNA, 19 nt, Homo sapiens
  misc_RNA (1)...(19): siRNA sense strand
gcaaacagccaguuaaccu

SEQ ID NO: 1145355 - RNA, 19 nt, Homo sapiens
  misc_RNA (1)...(19): siRNA sense strand
agagacaggugcgaaguga

SEQ ID NO: 1145356 - RNA, 19 nt, Homo sapiens
  misc_RNA (1)...(19): siRNA sense strand
gacgugaacggcaaugauu

SEQ ID NO: 1145357 - RNA, 19 nt, Homo sapiens
  misc_RNA (1)...(19): siRNA sense strand
gaugauggcauagagagaa

SEQ ID NO: 1145358 - RNA, 19 nt, Homo sapiens
  misc_RNA (1)...(19): siRNA sense strand
cagauguggucgaggcaaa

SEQ ID NO: 1145359 - RNA, 19 nt, Homo sapiens
  misc_RNA (1)...(19): siRNA sense strand
agaagcaaacagccaguua

SEQ ID NO: 1145360 - RNA, 19 nt, Homo sapiens
  misc_RNA (1)...(19): siRNA sense strand
caaagucgcugggcaucag

SEQ ID NO: 1145361 - RNA, 19 nt, Homo sapiens
  misc_RNA (1)...(19): siRNA sense strand
gaaacgaagggugaagaga

SEQ ID NO: 1145362 - RNA, 19 nt, Homo sapiens
  misc_RNA (1)...(19): siRNA sense strand
caucagacccaacuacauc

SEQ ID NO: 1145363 - RNA, 19 nt, Homo sapiens
  misc_RNA (1)...(19): siRNA sense strand
ugaaagcgagcgacuggaa

SEQ ID NO: 1145364 - RNA, 19 nt, Homo sapiens
  misc_RNA (1)...(19): siRNA sense strand
gaagagacaggugcgaagu

SEQ ID NO: 1145365 - RNA, 19 nt, Homo sapiens
  misc_RNA (1)...(19): siRNA sense strand
caucaucgccuuggcucua

SEQ ID NO: 1145366 - RNA, 19 nt, Homo sapiens
  misc_RNA (1)...(19): siRNA sense strand
ccuggaagauuacuaccau

SEQ ID NO: 1145367 - RNA, 19 nt, Homo sapiens
  misc_RNA (1)...(19): siRNA sense strand
uuucgaguauggcauuaaa

SEQ ID NO: 1145368 - RNA, 19 nt, Homo sapiens
  misc_RNA (1)...(19): siRNA sense strand
uaugaugccagcaaugaaa

SEQ ID NO: 1145369 - RNA, 19 nt, Homo sapiens
  misc_RNA (1)...(19): siRNA sense strand
gaaaccuggaagauuacua

SEQ ID NO: 1145370 - RNA, 19 nt, Homo sapiens
  misc_RNA (1)...(19): siRNA sense strand
cgccuuggcucuagaagca

SEQ ID NO: 1145371 - RNA, 19 nt, Homo sapiens
  misc_RNA (1)...(19): siRNA sense strand
gcaguggggccuuuuauga

SEQ ID NO: 1145372 - RNA, 19 nt, Homo sapiens
  misc_RNA (1)...(19): siRNA sense strand
uggaagauuacuaccauuu

SEQ ID NO: 1145373 - RNA, 19 nt, Homo sapiens
  misc_RNA (1)...(19): siRNA sense strand
cagcaaacaauuccuacug

SEQ ID NO: 1145374 - RNA, 19 nt, Homo sapiens
  misc_RNA (1)...(19): siRNA sense strand
cagcagcgccaccgagaau

SEQ ID NO: 1145375 - RNA, 19 nt, Homo sapiens
  misc_RNA (1)...(19): siRNA sense strand
ugaacggcaaugauuauga

SEQ ID NO: 1145376 - RNA, 19 nt, Homo sapiens
  misc_RNA (1)...(19): siRNA sense strand
caacuacaucgacauuuac

SEQ ID NO: 1145377 - RNA, 19 nt, Homo sapiens
  misc_RNA (1)...(19): siRNA sense strand
aaacacggcacucguugug

SEQ ID NO: 1145378 - RNA, 19 nt, Homo sapiens
  misc_RNA (1)...(19): siRNA sense strand
ggaagauuacuaccauuuu

SEQ ID NO: 1145379 - RNA, 19 nt, Homo sapiens
  misc_RNA (1)...(19): siRNA sense strand
caacuugggccagauugga

SEQ ID NO: 1145380 - RNA, 19 nt, Homo sapiens
  misc_RNA (1)...(19): siRNA sense strand
gaucugcgucagcgcugua

SEQ ID NO: 1145381 - RNA, 19 nt, Homo sapiens
  misc_RNA (1)...(19): siRNA sense strand
cgcaggcccuuuacuucaa

SEQ ID NO: 1145382 - RNA, 19 nt, Homo sapiens
  misc_RNA (1)...(19): siRNA sense strand
ccaacagcaucuacaccau

SEQ ID NO: 1145383 - RNA, 19 nt, Homo sapiens
  misc_RNA (1)...(19): siRNA sense strand
cuacaucgacauuuacagu

SEQ ID NO: 1145384 - RNA, 19 nt, Homo sapiens
  misc_RNA (1)...(19): siRNA sense strand
ccagcaacaggaagugaaa

SEQ ID NO: 1145385 - RNA, 19 nt, Homo sapiens
  misc_RNA (1)...(19): siRNA sense strand
gcuuucgaguauggcauua

SEQ ID NO: 1145386 - RNA, 19 nt, Homo sapiens
  misc_RNA (1)...(19): siRNA sense strand
aauaaacacggcacucguu

SEQ ID NO: 1145387 - RNA, 19 nt, Homo sapiens
  misc_RNA (1)...(19): siRNA sense strand
caaugauuaugacccaucu

SEQ ID NO: 1145388 - RNA, 19 nt, Homo sapiens
  misc_RNA (1)...(19): siRNA sense strand
caacaugugguaccugcau

SEQ ID NO: 1145389 - RNA, 19 nt, Homo sapiens
  misc_RNA (1)...(19): siRNA sense strand
gcaaagucgcugggcauca

SEQ ID NO: 1145390 - RNA, 19 nt, Homo sapiens
  misc_RNA (1)...(19): siRNA sense strand
ggugaaauggcuccagcaa

SEQ ID NO: 1145391 - RNA, 19 nt, Homo sapiens
  misc_RNA (1)...(19): siRNA sense strand
caaacaauuccuacugcau

SEQ ID NO: 1145392 - RNA, 19 nt, Homo sapiens
  misc_RNA (1)...(19): siRNA sense strand
uaucacagcaaaaccuuua

SEQ ID NO: 1145393 - RNA, 19 nt, Homo sapiens
  misc_RNA (1)...(19): siRNA sense strand
aacgaagggugaagagaca

SEQ ID NO: 1145394 - RNA, 19 nt, Homo sapiens
  misc_RNA (1)...(19): siRNA sense strand
gcaucagacccaacuacau

SEQ ID NO: 1145395 - RNA, 19 nt, Homo sapiens
  misc_RNA (1)...(19): siRNA sense strand
guacaaugccaaaauagga

SEQ ID NO: 1145396 - RNA, 19 nt, Homo sapiens
  misc_RNA (1)...(19): siRNA sense strand
gcaggcccuuuacuucaac

SEQ ID NO: 1145397 - RNA, 19 nt, Homo sapiens
  misc_RNA (1)...(19): siRNA sense strand
ccgcaggcccuuuacuuca

SEQ ID NO: 1145398 - RNA, 19 nt, Homo sapiens
  misc_RNA (1)...(19): siRNA sense strand
cgacgugaacggcaaugau

SEQ ID NO: 1145399 - RNA, 19 nt, Homo sapiens
  misc_RNA (1)...(19): siRNA sense strand
caccgagaauggcuacaag

SEQ ID NO: 1145400 - RNA, 19 nt, Homo sapiens
  misc_RNA (1)...(19): siRNA sense strand
cgugaacggcaaugauuau

SEQ ID NO: 1145401 - RNA, 19 nt, Homo sapiens
  misc_RNA (1)...(19): siRNA sense strand
gugacccgcaggcccuuua

SEQ ID NO: 1145402 - RNA, 19 nt, Homo sapiens
  misc_RNA (1)...(19): siRNA sense strand
ccuuggcucuagaagcaaa

SEQ ID NO: 1145403 - RNA, 19 nt, Homo sapiens
  misc_RNA (1)...(19): siRNA sense strand
gcaacaggaagugaaacga

SEQ ID NO: 1145404 - RNA, 19 nt, Homo sapiens
  misc_RNA (1)...(19): siRNA sense strand
ugcgauggcuacaccaaca

SEQ ID NO: 1145405 - RNA, 19 nt, Homo sapiens
  misc_RNA (1)...(19): siRNA sense strand
ccaccgagaauggcuacaa

SEQ ID NO: 1145406 - RNA, 19 nt, Homo sapiens
  misc_RNA (1)...(19): siRNA sense strand
gaaugcugcuucuaaauua

SEQ ID NO: 1145407 - RNA, 19 nt, Homo sapiens
  misc_RNA (1)...(19): siRNA sense strand
ccacugaacuggcuacuuu

SEQ ID NO: 1145408 - RNA, 19 nt, Homo sapiens
  misc_RNA (1)...(19): siRNA sense strand
guacaggaaugaacuuauu

SEQ ID NO: 1145409 - RNA, 19 nt, Homo sapiens
  misc_RNA (1)...(19): siRNA sense strand
caccagaccuacuaucuua

SEQ ID NO: 1145410 - RNA, 19 nt, Homo sapiens
  misc_RNA (1)...(19): siRNA sense strand
ucacuggacugguuugaua

SEQ ID NO: 1145411 - RNA, 19 nt, Homo sapiens
  misc_RNA (1)...(19): siRNA sense strand
gaacaagcaaggagucaua

SEQ ID NO: 1145412 - RNA, 19 nt, Homo sapiens
  misc_RNA (1)...(19): siRNA sense strand
gaggaaugcugcuucuaaa

SEQ ID NO: 1145413 - RNA, 19 nt, Homo sapiens
  misc_RNA (1)...(19): siRNA sense strand
ggaaugcugcuucuaaauu

SEQ ID NO: 1145414 - RNA, 19 nt, Homo sapiens
  misc_RNA (1)...(19): siRNA sense strand
ggaggaaugcugcuucuaa

SEQ ID NO: 1145415 - RNA, 19 nt, Homo sapiens
  misc_RNA (1)...(19): siRNA sense strand
gagcagcauugccaagaaa

SEQ ID NO: 1145416 - RNA, 19 nt, Homo sapiens
  misc_RNA (1)...(19): siRNA sense strand
gcagauggaggacagauuu

SEQ ID NO: 1145417 - RNA, 19 nt, Homo sapiens
  misc_RNA (1)...(19): siRNA sense strand
ggauacagaugugugguuu

SEQ ID NO: 1145418 - RNA, 19 nt, Homo sapiens
  misc_RNA (1)...(19): siRNA sense strand
gaucgugucuucaagcaau

SEQ ID NO: 1145419 - RNA, 19 nt, Homo sapiens
  misc_RNA (1)...(19): siRNA sense strand
gcgauucacuucagucaug

SEQ ID NO: 1145420 - RNA, 19 nt, Homo sapiens
  misc_RNA (1)...(19): siRNA sense strand
uaaauucuguggaugaugu

SEQ ID NO: 1145421 - RNA, 19 nt, Homo sapiens
  misc_RNA (1)...(19): siRNA sense strand
caaccugccuucagucuuc

SEQ ID NO: 1145422 - RNA, 19 nt, Homo sapiens
  misc_RNA (1)...(19): siRNA sense strand
gcaccgacauauguuugua

SEQ ID NO: 1145423 - RNA, 19 nt, Homo sapiens
  misc_RNA (1)...(19): siRNA sense strand
gaccuacuaucuuauuguu

SEQ ID NO: 1145424 - RNA, 19 nt, Homo sapiens
  misc_RNA (1)...(19): siRNA sense strand
gaauuaggauacagaugug

SEQ ID NO: 1145425 - RNA, 19 nt, Homo sapiens
  misc_RNA (1)...(19): siRNA sense strand
ggacagacccugcuuagac

SEQ ID NO: 1145426 - RNA, 19 nt, Homo sapiens
  misc_RNA (1)...(19): siRNA sense strand
uuacauggaucgugucuuc

SEQ ID NO: 1145427 - RNA, 19 nt, Homo sapiens
  misc_RNA (1)...(19): siRNA sense strand
ggacugguuugauaaugau

SEQ ID NO: 1145428 - RNA, 19 nt, Homo sapiens
  misc_RNA (1)...(19): siRNA sense strand
ccaguauugugucuaaauu

SEQ ID NO: 1145429 - RNA, 19 nt, Homo sapiens
  misc_RNA (1)...(19): siRNA sense strand
gauaagcgauucacuucag

SEQ ID NO: 1145430 - RNA, 19 nt, Homo sapiens
  misc_RNA (1)...(19): siRNA sense strand
gccaaggacuuauuguugu

SEQ ID NO: 1145431 - RNA, 19 nt, Homo sapiens
  misc_RNA (1)...(19): siRNA sense strand
ggccaagacaguccacuua

SEQ ID NO: 1145432 - RNA, 19 nt, Homo sapiens
  misc_RNA (1)...(19): siRNA sense strand
guuaauaagcaccgacaua

SEQ ID NO: 1145433 - RNA, 19 nt, Homo sapiens
  misc_RNA (1)...(19): siRNA sense strand
caagcaaggagucauauau

SEQ ID NO: 1145434 - RNA, 19 nt, Homo sapiens
  misc_RNA (1)...(19): siRNA sense strand
gagggaaucuggccaagac

SEQ ID NO: 1145435 - RNA, 19 nt, Homo sapiens
  misc_RNA (1)...(19): siRNA sense strand
cuucauaugauccaucuua

SEQ ID NO: 1145436 - RNA, 19 nt, Homo sapiens
  misc_RNA (1)...(19): siRNA sense strand
gauggcagcugcaacuuuu

SEQ ID NO: 1145437 - RNA, 19 nt, Homo sapiens
  misc_RNA (1)...(19): siRNA sense strand
gcuuagaccuuucaucacu

SEQ ID NO: 1145438 - RNA, 19 nt, Homo sapiens
  misc_RNA (1)...(19): siRNA sense strand
ugccuucagucuucaguua

SEQ ID NO: 1145439 - RNA, 19 nt, Homo sapiens
  misc_RNA (1)...(19): siRNA sense strand
gaagacuuggagacaguua

SEQ ID NO: 1145440 - RNA, 19 nt, Homo sapiens
  misc_RNA (1)...(19): siRNA sense strand
ccaagacaguccacuuaca

SEQ ID NO: 1145441 - RNA, 19 nt, Homo sapiens
  misc_RNA (1)...(19): siRNA sense strand
ggggugggcuuaucccuua

SEQ ID NO: 1145442 - RNA, 19 nt, Homo sapiens
  misc_RNA (1)...(19): siRNA sense strand
ggagacaguuauucaccau

SEQ ID NO: 1145443 - RNA, 19 nt, Homo sapiens
  misc_RNA (1)...(19): siRNA sense strand
gacaguuauucaccaugua

SEQ ID NO: 1145444 - RNA, 19 nt, Homo sapiens
  misc_RNA (1)...(19): siRNA sense strand
gcaccagaccuacuaucuu

SEQ ID NO: 1145445 - RNA, 19 nt, Homo sapiens
  misc_RNA (1)...(19): siRNA sense strand
aguaggaauuccaguauug

SEQ ID NO: 1145446 - RNA, 19 nt, Homo sapiens
  misc_RNA (1)...(19): siRNA sense strand
cuaaauccaucagagaguu

SEQ ID NO: 1145447 - RNA, 19 nt, Homo sapiens
  misc_RNA (1)...(19): siRNA sense strand
ggacuuauuguugugcuaa

SEQ ID NO: 1145448 - RNA, 19 nt, Homo sapiens
  misc_RNA (1)...(19): siRNA sense strand
cauaugauccaucuuagug

SEQ ID NO: 1145449 - RNA, 19 nt, Homo sapiens
  misc_RNA (1)...(19): siRNA sense strand
gaccuuucaucacuucgaa

SEQ ID NO: 1145450 - RNA, 19 nt, Homo sapiens
  misc_RNA (1)...(19): siRNA sense strand
ccaaggacuuauuguugug

SEQ ID NO: 1145451 - RNA, 19 nt, Homo sapiens
  misc_RNA (1)...(19): siRNA sense strand
uaugauccaucuuagugaa

SEQ ID NO: 1145452 - RNA, 19 nt, Homo sapiens
  misc_RNA (1)...(19): siRNA sense strand
ucacuucagucauguuugg

SEQ ID NO: 1145453 - RNA, 19 nt, Homo sapiens
  misc_RNA (1)...(19): siRNA sense strand
aauaagcaccgacauaugu

SEQ ID NO: 1145454 - RNA, 19 nt, Homo sapiens
  misc_RNA (1)...(19): siRNA sense strand
agacaguuauucaccaugu

SEQ ID NO: 1145455 - RNA, 19 nt, Homo sapiens
  misc_RNA (1)...(19): siRNA sense strand
uggacugguuugauaauga

SEQ ID NO: 1145456 - RNA, 19 nt, Homo sapiens
  misc_RNA (1)...(19): siRNA sense strand
caguaggaauuccaguauu

SEQ ID NO: 1145457 - RNA, 19 nt, Homo sapiens
  misc_RNA (1)...(19): siRNA sense strand
ggagucauauauccuucau

SEQ ID NO: 1145458 - RNA, 19 nt, Homo sapiens
  misc_RNA (1)...(19): siRNA sense strand
agaauuaggauacagaugu

SEQ ID NO: 1145459 - RNA, 19 nt, Homo sapiens
  misc_RNA (1)...(19): siRNA sense strand
cuucagucauguuuggaua

SEQ ID NO: 1145460 - RNA, 19 nt, Homo sapiens
  misc_RNA (1)...(19): siRNA sense strand
agauuucacuggacugguu

SEQ ID NO: 1145461 - RNA, 19 nt, Homo sapiens
  misc_RNA (1)...(19): siRNA sense strand
gguccuuacuucuuaugga

SEQ ID NO: 1145462 - RNA, 19 nt, Homo sapiens
  misc_RNA (1)...(19): siRNA sense strand
gauaccaaacaauugauga

SEQ ID NO: 1145463 - RNA, 19 nt, Homo sapiens
  misc_RNA (1)...(19): siRNA sense strand
gaagaauuaggauacagau

SEQ ID NO: 1145464 - RNA, 19 nt, Homo sapiens
  misc_RNA (1)...(19): siRNA sense strand
ugagcagcauugccaagaa

SEQ ID NO: 1145465 - RNA, 19 nt, Homo sapiens
  misc_RNA (1)...(19): siRNA sense strand
cuuugguccuuacuucuua

SEQ ID NO: 1145466 - RNA, 19 nt, Homo sapiens
  misc_RNA (1)...(19): siRNA sense strand
uuaauaagcaccgacauau

SEQ ID NO: 1145467 - RNA, 19 nt, Homo sapiens
  misc_RNA (1)...(19): siRNA sense strand
ccauggaccugcggauguu

SEQ ID NO: 1145468 - RNA, 19 nt, Homo sapiens
  misc_RNA (1)...(19): siRNA sense strand
ccagaccuacuaucuuauu

SEQ ID NO: 1145469 - RNA, 19 nt, Homo sapiens
  misc_RNA (1)...(19): siRNA sense strand
caagacaguccacuuacau

SEQ ID NO: 1145470 - RNA, 19 nt, Homo sapiens
  misc_RNA (1)...(19): siRNA sense strand
gaggacagacccugcuuag

SEQ ID NO: 1145471 - RNA, 19 nt, Homo sapiens
  misc_RNA (1)...(19): siRNA sense strand
ucgcuuaugccuucuacua

SEQ ID NO: 1145472 - RNA, 19 nt, Homo sapiens
  misc_RNA (1)...(19): siRNA sense strand
gaauuccaguauugugucu

SEQ ID NO: 1145473 - RNA, 19 nt, Homo sapiens
  misc_RNA (1)...(19): siRNA sense strand
cagaccuacuaucuuauug

SEQ ID NO: 1145474 - RNA, 19 nt, Homo sapiens
  misc_RNA (1)...(19): siRNA sense strand
gaugccagcaccagaccua

SEQ ID NO: 1145475 - RNA, 19 nt, Homo sapiens
  misc_RNA (1)...(19): siRNA sense strand
uaauaagcaccgacauaug

SEQ ID NO: 1145476 - RNA, 19 nt, Homo sapiens
  misc_RNA (1)...(19): siRNA sense strand
cgccaaggacuuauuguug

SEQ ID NO: 1145477 - RNA, 19 nt, Homo sapiens
  misc_RNA (1)...(19): siRNA sense strand
ugaagaauuaggauacaga

SEQ ID NO: 1145478 - RNA, 19 nt, Homo sapiens
  misc_RNA (1)...(19): siRNA sense strand
uaauguugcuuugguccuu

SEQ ID NO: 1145479 - RNA, 19 nt, Homo sapiens
  misc_RNA (1)...(19): siRNA sense strand
cuucagucuucaguuaaua

SEQ ID NO: 1145480 - RNA, 19 nt, Homo sapiens
  misc_RNA (1)...(19): siRNA sense strand
cgaggacagacccugcuua

SEQ ID NO: 1145481 - RNA, 19 nt, Homo sapiens
  misc_RNA (1)...(19): siRNA sense strand
ugcuaacacugaagacuug

SEQ ID NO: 1145482 - RNA, 19 nt, Homo sapiens
  misc_RNA (1)...(19): siRNA sense strand
uaaauccaucagagaguuu

SEQ ID NO: 1145483 - RNA, 19 nt, Homo sapiens
  misc_RNA (1)...(19): siRNA sense strand
ucaguaggaauuccaguau

SEQ ID NO: 1145484 - RNA, 19 nt, Homo sapiens
  misc_RNA (1)...(19): siRNA sense strand
gccagcaccagaccuacua

SEQ ID NO: 1145485 - RNA, 19 nt, Homo sapiens
  misc_RNA (1)...(19): siRNA sense strand
uaagcaccgacauauguuu

SEQ ID NO: 1145486 - RNA, 19 nt, Homo sapiens
  misc_RNA (1)...(19): siRNA sense strand
cugcuuagaccuuucauca

SEQ ID NO: 1145487 - RNA, 19 nt, Homo sapiens
  misc_RNA (1)...(19): siRNA sense strand
ggauaccaaacaauugaug

SEQ ID NO: 1145488 - RNA, 19 nt, Homo sapiens
  misc_RNA (1)...(19): siRNA sense strand
guacccuucugcuccuuuc

SEQ ID NO: 1145489 - RNA, 19 nt, Homo sapiens
  misc_RNA (1)...(19): siRNA sense strand
gugcuaacacugaagacuu

SEQ ID NO: 1145490 - RNA, 19 nt, Homo sapiens
  misc_RNA (1)...(19): siRNA sense strand
gcaguacaggaaugaacuu

SEQ ID NO: 1145491 - RNA, 19 nt, Homo sapiens
  misc_RNA (1)...(19): siRNA sense strand
acaagcaaggagucauaua

SEQ ID NO: 1145492 - RNA, 19 nt, Homo sapiens
  misc_RNA (1)...(19): siRNA sense strand
gagaguuugauaagcgauu

SEQ ID NO: 1145493 - RNA, 19 nt, Homo sapiens
  misc_RNA (1)...(19): siRNA sense strand
auuccaguauugugucuaa

SEQ ID NO: 1145494 - RNA, 19 nt, Homo sapiens
  misc_RNA (1)...(19): siRNA sense strand
gucaguaggaauuccagua

SEQ ID NO: 1145495 - RNA, 19 nt, Homo sapiens
  misc_RNA (1)...(19): siRNA sense strand
cugaagacuuggagacagu

SEQ ID NO: 1145496 - RNA, 19 nt, Homo sapiens
  misc_RNA (1)...(19): siRNA sense strand
ggaaucuggccaagacagu

SEQ ID NO: 1145497 - RNA, 19 nt, Homo sapiens
  misc_RNA (1)...(19): siRNA sense strand
ggagggaaucuggccaaga

SEQ ID NO: 1145498 - RNA, 19 nt, Homo sapiens
  misc_RNA (1)...(19): siRNA sense strand
aauguugcuuugguccuua

SEQ ID NO: 1145499 - RNA, 19 nt, Homo sapiens
  misc_RNA (1)...(19): siRNA sense strand
agucuucaguuaauaagca

SEQ ID NO: 1145500 - RNA, 19 nt, Homo sapiens
  misc_RNA (1)...(19): siRNA sense strand
agacuuggagacaguuauu

SEQ ID NO: 1145501 - RNA, 19 nt, Homo sapiens
  misc_RNA (1)...(19): siRNA sense strand
ugacgccaaggacuuauug

SEQ ID NO: 1145502 - RNA, 19 nt, Homo sapiens
  misc_RNA (1)...(19): siRNA sense strand
gcuaaauccaucagagagu

SEQ ID NO: 1145503 - RNA, 19 nt, Homo sapiens
  misc_RNA (1)...(19): siRNA sense strand
gaaggcuaaauccaucaga

SEQ ID NO: 1145504 - RNA, 19 nt, Homo sapiens
  misc_RNA (1)...(19): siRNA sense strand
ugauggcagcugcaacuuu

SEQ ID NO: 1145505 - RNA, 19 nt, Homo sapiens
  misc_RNA (1)...(19): siRNA sense strand
uuagaccuuucaucacuuc

SEQ ID NO: 1145506 - RNA, 19 nt, Homo sapiens
  misc_RNA (1)...(19): siRNA sense strand
caacuuugcucuccuccua

SEQ ID NO: 1145507 - RNA, 19 nt, Homo sapiens
  misc_RNA (1)...(19): siRNA sense strand
gcaccacguucaccagcua

SEQ ID NO: 1145508 - RNA, 19 nt, Homo sapiens
  misc_RNA (1)...(19): siRNA sense strand
gggaggaacuggccaugag

SEQ ID NO: 1145509 - RNA, 19 nt, Homo sapiens
  misc_RNA (1)...(19): siRNA sense strand
gcacuacccggacgucuuc

SEQ ID NO: 1145510 - RNA, 19 nt, Homo sapiens
  misc_RNA (1)...(19): siRNA sense strand
cagacgcgccucuagcaua

SEQ ID NO: 1145511 - RNA, 19 nt, Homo sapiens
  misc_RNA (1)...(19): siRNA sense strand
gugcaaggcuccccuaaga

SEQ ID NO: 1145512 - RNA, 19 nt, Homo sapiens
  misc_RNA (1)...(19): siRNA sense strand
gcuaccagcuggaggaacu

SEQ ID NO: 1145513 - RNA, 19 nt, Homo sapiens
  misc_RNA (1)...(19): siRNA sense strand
gcagacagacgcgccucua

SEQ ID NO: 1145514 - RNA, 19 nt, Homo sapiens
  misc_RNA (1)...(19): siRNA sense strand
agacgcgccucuagcauag

SEQ ID NO: 1145515 - RNA, 19 nt, Homo sapiens
  misc_RNA (1)...(19): siRNA sense strand
gggacacgcucaagaucag

SEQ ID NO: 1145516 - RNA, 19 nt, Homo sapiens
  misc_RNA (1)...(19): siRNA sense strand
ucacgcagcucaacauccu

SEQ ID NO: 1145517 - RNA, 19 nt, Homo sapiens
  misc_RNA (1)...(19): siRNA sense strand
ggacagcgugugccucucu

SEQ ID NO: 1145518 - RNA, 19 nt, Homo sapiens
  misc_RNA (1)...(19): siRNA sense strand
gggcaaggaggugugcuaa

SEQ ID NO: 1145519 - RNA, 19 nt, Homo sapiens
  misc_RNA (1)...(19): siRNA sense strand
guaaaucuccaacuuugcu

SEQ ID NO: 1145520 - RNA, 19 nt, Homo sapiens
  misc_RNA (1)...(19): siRNA sense strand
gcuggaggacgaagaagau

SEQ ID NO: 1145521 - RNA, 19 nt, Homo sapiens
  misc_RNA (1)...(19): siRNA sense strand
ccaugaggcuggacuugac

SEQ ID NO: 1145522 - RNA, 19 nt, Homo sapiens
  misc_RNA (1)...(19): siRNA sense strand
gacagacgcgccucuagca

SEQ ID NO: 1145523 - RNA, 19 nt, Homo sapiens
  misc_RNA (1)...(19): siRNA sense strand
cgagaggcccgagugcaaa

SEQ ID NO: 1145524 - RNA, 19 nt, Homo sapiens
  misc_RNA (1)...(19): siRNA sense strand
aagaugaggacgaggaaga

SEQ ID NO: 1145525 - RNA, 19 nt, Homo sapiens
  misc_RNA (1)...(19): siRNA sense strand
ggacgaggaagaggaacug

SEQ ID NO: 1145526 - RNA, 19 nt, Homo sapiens
  misc_RNA (1)...(19): siRNA sense strand
gcaagucguaccgcgagaa

SEQ ID NO: 1145527 - RNA, 19 nt, Homo sapiens
  misc_RNA (1)...(19): siRNA sense strand
gccaugaggcuggacuuga

SEQ ID NO: 1145528 - RNA, 19 nt, Homo sapiens
  misc_RNA (1)...(19): siRNA sense strand
ggaggacgaagaagaugag

SEQ ID NO: 1145529 - RNA, 19 nt, Homo sapiens
  misc_RNA (1)...(19): siRNA sense strand
cgacacccagcuuucauca

SEQ ID NO: 1145530 - RNA, 19 nt, Homo sapiens
  misc_RNA (1)...(19): siRNA sense strand
ugaggacgaggaagaggaa

SEQ ID NO: 1145531 - RNA, 19 nt, Homo sapiens
  misc_RNA (1)...(19): siRNA sense strand
ggacauugcugcaggagaa

SEQ ID NO: 1145532 - RNA, 19 nt, Homo sapiens
  misc_RNA (1)...(19): siRNA sense strand
caagauaccucucgcaugu

SEQ ID NO: 1145533 - RNA, 19 nt, Homo sapiens
  misc_RNA (1)...(19): siRNA sense strand
gagaagagguugccaucaa

SEQ ID NO: 1145534 - RNA, 19 nt, Homo sapiens
  misc_RNA (1)...(19): siRNA sense strand
ccacauaccugaauuucug

SEQ ID NO: 1145535 - RNA, 19 nt, Homo sapiens
  misc_RNA (1)...(19): siRNA sense strand
gaacaaucccgaagagaug

SEQ ID NO: 1145536 - RNA, 19 nt, Homo sapiens
  misc_RNA (1)...(19): siRNA sense strand
ccaucgaaguguuguguaa

SEQ ID NO: 1145537 - RNA, 19 nt, Homo sapiens
  misc_RNA (1)...(19): siRNA sense strand
aggcuacccuuccgaauuu

SEQ ID NO: 1145538 - RNA, 19 nt, Homo sapiens
  misc_RNA (1)...(19): siRNA sense strand
ccaccaagagacagaaaua

SEQ ID NO: 1145539 - RNA, 19 nt, Homo sapiens
  misc_RNA (1)...(19): siRNA sense strand
ccaguggucuucagucugu

SEQ ID NO: 1145540 - RNA, 19 nt, Homo sapiens
  misc_RNA (1)...(19): siRNA sense strand
caacacgcaccuuggaauu

SEQ ID NO: 1145541 - RNA, 19 nt, Homo sapiens
  misc_RNA (1)...(19): siRNA sense strand
cagaaauacgaaaggauua

SEQ ID NO: 1145542 - RNA, 19 nt, Homo sapiens
  misc_RNA (1)...(19): siRNA sense strand
acacgcaccuuggaauuga

SEQ ID NO: 1145543 - RNA, 19 nt, Homo sapiens
  misc_RNA (1)...(19): siRNA sense strand
gagagagagcggaaaguga

SEQ ID NO: 1145544 - RNA, 19 nt, Homo sapiens
  misc_RNA (1)...(19): siRNA sense strand
gagaggagcggcugagaca

SEQ ID NO: 1145545 - RNA, 19 nt, Homo sapiens
  misc_RNA (1)...(19): siRNA sense strand
caacuucugcuccaggaaa

SEQ ID NO: 1145546 - RNA, 19 nt, Homo sapiens
  misc_RNA (1)...(19): siRNA sense strand
gcugcuugcugaccaaaug

SEQ ID NO: 1145547 - RNA, 19 nt, Homo sapiens
  misc_RNA (1)...(19): siRNA sense strand
caagagacagaaauacgaa

SEQ ID NO: 1145548 - RNA, 19 nt, Homo sapiens
  misc_RNA (1)...(19): siRNA sense strand
agacagaaauacgaaagga

SEQ ID NO: 1145549 - RNA, 19 nt, Homo sapiens
  misc_RNA (1)...(19): siRNA sense strand
gcuacgugcuaauguacuu

SEQ ID NO: 1145550 - RNA, 19 nt, Homo sapiens
  misc_RNA (1)...(19): siRNA sense strand
ggagagagagcggaaagug

SEQ ID NO: 1145551 - RNA, 19 nt, Homo sapiens
  misc_RNA (1)...(19): siRNA sense strand
acagaaauacgaaaggauu

SEQ ID NO: 1145552 - RNA, 19 nt, Homo sapiens
  misc_RNA (1)...(19): siRNA sense strand
gaaaggauuagcgagaaga

SEQ ID NO: 1145553 - RNA, 19 nt, Homo sapiens
  misc_RNA (1)...(19): siRNA sense strand
gccagggcuucuccuauga

SEQ ID NO: 1145554 - RNA, 19 nt, Homo sapiens
  misc_RNA (1)...(19): siRNA sense strand
cgccagggcuucuccuaug

SEQ ID NO: 1145555 - RNA, 19 nt, Homo sapiens
  misc_RNA (1)...(19): siRNA sense strand
acccucagcuccacauuga

SEQ ID NO: 1145556 - RNA, 19 nt, Homo sapiens
  misc_RNA (1)...(19): siRNA sense strand
cuuccgaauuugccacaua

SEQ ID NO: 1145557 - RNA, 19 nt, Homo sapiens
  misc_RNA (1)...(19): siRNA sense strand
aaugaucagucgcaucgaa

SEQ ID NO: 1145558 - RNA, 19 nt, Homo sapiens
  misc_RNA (1)...(19): siRNA sense strand
ccaagagacagaaauacga

SEQ ID NO: 1145559 - RNA, 19 nt, Homo sapiens
  misc_RNA (1)...(19): siRNA sense strand
gaaggcugccaccaagaga

SEQ ID NO: 1145560 - RNA, 19 nt, Homo sapiens
  misc_RNA (1)...(19): siRNA sense strand
cgaaaggauuagcgagaag

SEQ ID NO: 1145561 - RNA, 19 nt, Homo sapiens
  misc_RNA (1)...(19): siRNA sense strand
ugaacaaucccgaagagau

SEQ ID NO: 1145562 - RNA, 19 nt, Homo sapiens
  misc_RNA (1)...(19): siRNA sense strand
ugggcuacgugcuaaugua

SEQ ID NO: 1145563 - RNA, 19 nt, Homo sapiens
  misc_RNA (1)...(19): siRNA sense strand
agaagagguugccaucaag

SEQ ID NO: 1145564 - RNA, 19 nt, Homo sapiens
  misc_RNA (1)...(19): siRNA sense strand
ucucugggcuacgugcuaa

SEQ ID NO: 1145565 - RNA, 19 nt, Homo sapiens
  misc_RNA (1)...(19): siRNA sense strand
gggcuucuccuaugacuac

SEQ ID NO: 1145566 - RNA, 19 nt, Homo sapiens
  misc_RNA (1)...(19): siRNA sense strand
acgaaaggauuagcgagaa

SEQ ID NO: 1145567 - RNA, 19 nt, Homo sapiens
  misc_RNA (1)...(19): siRNA sense strand
gagcggaaagugaguaugc

SEQ ID NO: 1145568 - RNA, 19 nt, Homo sapiens
  misc_RNA (1)...(19): siRNA sense strand
gcaaccugguguacaucau

SEQ ID NO: 1145569 - RNA, 19 nt, Homo sapiens
  misc_RNA (1)...(19): siRNA sense strand
caucaacacgcaccuugga

SEQ ID NO: 1145570 - RNA, 19 nt, Homo sapiens
  misc_RNA (1)...(19): siRNA sense strand
caggaaauucagccucaaa

SEQ ID NO: 1145571 - RNA, 19 nt, Homo sapiens
  misc_RNA (1)...(19): siRNA sense strand
ggagaagagguugccauca

SEQ ID NO: 1145572 - RNA, 19 nt, Homo sapiens
  misc_RNA (1)...(19): siRNA sense strand
ccucacaggccgacaagau

SEQ ID NO: 1145573 - RNA, 19 nt, Homo sapiens
  misc_RNA (1)...(19): siRNA sense strand
ugaucagucgcaucgaaua

SEQ ID NO: 1145574 - RNA, 19 nt, Homo sapiens
  misc_RNA (1)...(19): siRNA sense strand
gagagcggaaagugaguau

SEQ ID NO: 1145575 - RNA, 19 nt, Homo sapiens
  misc_RNA (1)...(19): siRNA sense strand
gagcugagagucgggaaca

SEQ ID NO: 1145576 - RNA, 19 nt, Homo sapiens
  misc_RNA (1)...(19): siRNA sense strand
gaucagucgcaucgaauac

SEQ ID NO: 1145577 - RNA, 19 nt, Homo sapiens
  misc_RNA (1)...(19): siRNA sense strand
ucagucgcaucgaauacau

SEQ ID NO: 1145578 - RNA, 19 nt, Homo sapiens
  misc_RNA (1)...(19): siRNA sense strand
cuaccucacacacggcuaa

SEQ ID NO: 1145579 - RNA, 19 nt, Homo sapiens
  misc_RNA (1)...(19): siRNA sense strand
gaggagcggcugagacacu

SEQ ID NO: 1145580 - RNA, 19 nt, Homo sapiens
  misc_RNA (1)...(19): siRNA sense strand
gcaccuuggaauugaacaa

SEQ ID NO: 1145581 - RNA, 19 nt, Homo sapiens
  misc_RNA (1)...(19): siRNA sense strand
ccaggaaauucagccucaa

SEQ ID NO: 1145582 - RNA, 19 nt, Homo sapiens
  misc_RNA (1)...(19): siRNA sense strand
cucacaggccgacaagaua

SEQ ID NO: 1145583 - RNA, 19 nt, Homo sapiens
  misc_RNA (1)...(19): siRNA sense strand
gaagggcaaccugguguac

SEQ ID NO: 1145584 - RNA, 19 nt, Homo sapiens
  misc_RNA (1)...(19): siRNA sense strand
gccagacaacuuccucaug

SEQ ID NO: 1145585 - RNA, 19 nt, Homo sapiens
  misc_RNA (1)...(19): siRNA sense strand
caucgaaguguuguguaaa

SEQ ID NO: 1145586 - RNA, 19 nt, Homo sapiens
  misc_RNA (1)...(19): siRNA sense strand
ucaacacgcaccuuggaau

SEQ ID NO: 1145587 - RNA, 19 nt, Homo sapiens
  misc_RNA (1)...(19): siRNA sense strand
caaccugguguacaucauc

SEQ ID NO: 1145588 - RNA, 19 nt, Homo sapiens
  misc_RNA (1)...(19): siRNA sense strand
gacagaaauacgaaaggau

SEQ ID NO: 1145589 - RNA, 19 nt, Homo sapiens
  misc_RNA (1)...(19): siRNA sense strand
gcgguacgccuccaucaac

SEQ ID NO: 1145590 - RNA, 19 nt, Homo sapiens
  misc_RNA (1)...(19): siRNA sense strand
ggacauugcugcaggagaa

SEQ ID NO: 1145591 - RNA, 19 nt, Homo sapiens
  misc_RNA (1)...(19): siRNA sense strand
caagauaccucucgcaugu

SEQ ID NO: 1145592 - RNA, 19 nt, Homo sapiens
  misc_RNA (1)...(19): siRNA sense strand
gagaagagguugccaucaa

SEQ ID NO: 1145593 - RNA, 19 nt, Homo sapiens
  misc_RNA (1)...(19): siRNA sense strand
ccacauaccugaauuucug

SEQ ID NO: 1145594 - RNA, 19 nt, Homo sapiens
  misc_RNA (1)...(19): siRNA sense strand
gaacaaucccgaagagaug

SEQ ID NO: 1145595 - RNA, 19 nt, Homo sapiens
  misc_RNA (1)...(19): siRNA sense strand
ccaucgaaguguuguguaa

SEQ ID NO: 1145596 - RNA, 19 nt, Homo sapiens
  misc_RNA (1)...(19): siRNA sense strand
aggcuacccuuccgaauuu

SEQ ID NO: 1145597 - RNA, 19 nt, Homo sapiens
  misc_RNA (1)...(19): siRNA sense strand
ccaccaagagacagaaaua

SEQ ID NO: 1145598 - RNA, 19 nt, Homo sapiens
  misc_RNA (1)...(19): siRNA sense strand
caacacgcaccuuggaauu

SEQ ID NO: 1145599 - RNA, 19 nt, Homo sapiens
  misc_RNA (1)...(19): siRNA sense strand
cagaaauacgaaaggauua

SEQ ID NO: 1145600 - RNA, 19 nt, Homo sapiens
  misc_RNA (1)...(19): siRNA sense strand
acacgcaccuuggaauuga

SEQ ID NO: 1145601 - RNA, 19 nt, Homo sapiens
  misc_RNA (1)...(19): siRNA sense strand
gagagagagcggaaaguga

SEQ ID NO: 1145602 - RNA, 19 nt, Homo sapiens
  misc_RNA (1)...(19): siRNA sense strand
gagaggagcggcugagaca

SEQ ID NO: 1145603 - RNA, 19 nt, Homo sapiens
  misc_RNA (1)...(19): siRNA sense strand
caacuucugcuccaggaaa

SEQ ID NO: 1145604 - RNA, 19 nt, Homo sapiens
  misc_RNA (1)...(19): siRNA sense strand
gcugcuugcugaccaaaug

SEQ ID NO: 1145605 - RNA, 19 nt, Homo sapiens
  misc_RNA (1)...(19): siRNA sense strand
caagagacagaaauacgaa

SEQ ID NO: 1145606 - RNA, 19 nt, Homo sapiens
  misc_RNA (1)...(19): siRNA sense strand
agacagaaauacgaaagga

SEQ ID NO: 1145607 - RNA, 19 nt, Homo sapiens
  misc_RNA (1)...(19): siRNA sense strand
gcuacgugcuaauguacuu

SEQ ID NO: 1145608 - RNA, 19 nt, Homo sapiens
  misc_RNA (1)...(19): siRNA sense strand
ggagagagagcggaaagug

SEQ ID NO: 1145609 - RNA, 19 nt, Homo sapiens
  misc_RNA (1)...(19): siRNA sense strand
acagaaauacgaaaggauu

SEQ ID NO: 1145610 - RNA, 19 nt, Homo sapiens
  misc_RNA (1)...(19): siRNA sense strand
gaaaggauuagcgagaaga

SEQ ID NO: 1145611 - RNA, 19 nt, Homo sapiens
  misc_RNA (1)...(19): siRNA sense strand
gccagggcuucuccuauga

SEQ ID NO: 1145612 - RNA, 19 nt, Homo sapiens
  misc_RNA (1)...(19): siRNA sense strand
cgccagggcuucuccuaug

SEQ ID NO: 1145613 - RNA, 19 nt, Homo sapiens
  misc_RNA (1)...(19): siRNA sense strand
acccucagcuccacauuga

SEQ ID NO: 1145614 - RNA, 19 nt, Homo sapiens
  misc_RNA (1)...(19): siRNA sense strand
cuuccgaauuugccacaua

SEQ ID NO: 1145615 - RNA, 19 nt, Homo sapiens
  misc_RNA (1)...(19): siRNA sense strand
aaugaucagucgcaucgaa

SEQ ID NO: 1145616 - RNA, 19 nt, Homo sapiens
  misc_RNA (1)...(19): siRNA sense strand
ccaagagacagaaauacga

SEQ ID NO: 1145617 - RNA, 19 nt, Homo sapiens
  misc_RNA (1)...(19): siRNA sense strand
gaaggcugccaccaagaga

SEQ ID NO: 1145618 - RNA, 19 nt, Homo sapiens
  misc_RNA (1)...(19): siRNA sense strand
cgaaaggauuagcgagaag

SEQ ID NO: 1145619 - RNA, 19 nt, Homo sapiens
  misc_RNA (1)...(19): siRNA sense strand
ugaacaaucccgaagagau

SEQ ID NO: 1145620 - RNA, 19 nt, Homo sapiens
  misc_RNA (1)...(19): siRNA sense strand
ugggcuacgugcuaaugua

SEQ ID NO: 1145621 - RNA, 19 nt, Homo sapiens
  misc_RNA (1)...(19): siRNA sense strand
agaagagguugccaucaag

SEQ ID NO: 1145622 - RNA, 19 nt, Homo sapiens
  misc_RNA (1)...(19): siRNA sense strand
ucucugggcuacgugcuaa

SEQ ID NO: 1145623 - RNA, 19 nt, Homo sapiens
  misc_RNA (1)...(19): siRNA sense strand
gggcuucuccuaugacuac

SEQ ID NO: 1145624 - RNA, 19 nt, Homo sapiens
  misc_RNA (1)...(19): siRNA sense strand
acgaaaggauuagcgagaa

SEQ ID NO: 1145625 - RNA, 19 nt, Homo sapiens
  misc_RNA (1)...(19): siRNA sense strand
gagcggaaagugaguaugc

SEQ ID NO: 1145626 - RNA, 19 nt, Homo sapiens
  misc_RNA (1)...(19): siRNA sense strand
gcaaccugguguacaucau

SEQ ID NO: 1145627 - RNA, 19 nt, Homo sapiens
  misc_RNA (1)...(19): siRNA sense strand
caucaacacgcaccuugga

SEQ ID NO: 1145628 - RNA, 19 nt, Homo sapiens
  misc_RNA (1)...(19): siRNA sense strand
caggaaauucagccucaaa

SEQ ID NO: 1145629 - RNA, 19 nt, Homo sapiens
  misc_RNA (1)...(19): siRNA sense strand
ggagaagagguugccauca

SEQ ID NO: 1145630 - RNA, 19 nt, Homo sapiens
  misc_RNA (1)...(19): siRNA sense strand
ccucacaggccgacaagau

SEQ ID NO: 1145631 - RNA, 19 nt, Homo sapiens
  misc_RNA (1)...(19): siRNA sense strand
ugaucagucgcaucgaaua

SEQ ID NO: 1145632 - RNA, 19 nt, Homo sapiens
  misc_RNA (1)...(19): siRNA sense strand
gagagcggaaagugaguau

SEQ ID NO: 1145633 - RNA, 19 nt, Homo sapiens
  misc_RNA (1)...(19): siRNA sense strand
gagcugagagucgggaaca

SEQ ID NO: 1145634 - RNA, 19 nt, Homo sapiens
  misc_RNA (1)...(19): siRNA sense strand
gaucagucgcaucgaauac

SEQ ID NO: 1145635 - RNA, 19 nt, Homo sapiens
  misc_RNA (1)...(19): siRNA sense strand
ucagucgcaucgaauacau

SEQ ID NO: 1145636 - RNA, 19 nt, Homo sapiens
  misc_RNA (1)...(19): siRNA sense strand
cuaccucacacacggcuaa

SEQ ID NO: 1145637 - RNA, 19 nt, Homo sapiens
  misc_RNA (1)...(19): siRNA sense strand
gaggagcggcugagacacu

SEQ ID NO: 1145638 - RNA, 19 nt, Homo sapiens
  misc_RNA (1)...(19): siRNA sense strand
gcaccuuggaauugaacaa

SEQ ID NO: 1145639 - RNA, 19 nt, Homo sapiens
  misc_RNA (1)...(19): siRNA sense strand
ccaggaaauucagccucaa

SEQ ID NO: 1145640 - RNA, 19 nt, Homo sapiens
  misc_RNA (1)...(19): siRNA sense strand
cucacaggccgacaagaua

SEQ ID NO: 1145641 - RNA, 19 nt, Homo sapiens
  misc_RNA (1)...(19): siRNA sense strand
gaagggcaaccugguguac

SEQ ID NO: 1145642 - RNA, 19 nt, Homo sapiens
  misc_RNA (1)...(19): siRNA sense strand
gccagacaacuuccucaug

SEQ ID NO: 1145643 - RNA, 19 nt, Homo sapiens
  misc_RNA (1)...(19): siRNA sense strand
caucgaaguguuguguaaa

SEQ ID NO: 1145644 - RNA, 19 nt, Homo sapiens
  misc_RNA (1)...(19): siRNA sense strand
ucaacacgcaccuuggaau

SEQ ID NO: 1145645 - RNA, 19 nt, Homo sapiens
  misc_RNA (1)...(19): siRNA sense strand
caaccugguguacaucauc

SEQ ID NO: 1145646 - RNA, 19 nt, Homo sapiens
  misc_RNA (1)...(19): siRNA sense strand
gacagaaauacgaaaggau

SEQ ID NO: 1145647 - RNA, 19 nt, Homo sapiens
  misc_RNA (1)...(19): siRNA sense strand
gcgguacgccuccaucaac

SEQ ID NO: 1145648 - RNA, 19 nt, Homo sapiens
  misc_RNA (1)...(19): siRNA sense strand
gcacagacauguacacaaa

SEQ ID NO: 1145649 - RNA, 19 nt, Homo sapiens
  misc_RNA (1)...(19): siRNA sense strand
ggaagaagcagccaaagua

SEQ ID NO: 1145650 - RNA, 19 nt, Homo sapiens
  misc_RNA (1)...(19): siRNA sense strand
gagaagcacuggaguauca

SEQ ID NO: 1145651 - RNA, 19 nt, Homo sapiens
  misc_RNA (1)...(19): siRNA sense strand
gaucaaauguuuccuagau

SEQ ID NO: 1145652 - RNA, 19 nt, Homo sapiens
  misc_RNA (1)...(19): siRNA sense strand
ggaagacuaugaaguaaau

SEQ ID NO: 1145653 - RNA, 19 nt, Homo sapiens
  misc_RNA (1)...(19): siRNA sense strand
ccaagacacugacagauga

SEQ ID NO: 1145654 - RNA, 19 nt, Homo sapiens
  misc_RNA (1)...(19): siRNA sense strand
gaacagacccaccacauca

SEQ ID NO: 1145655 - RNA, 19 nt, Homo sapiens
  misc_RNA (1)...(19): siRNA sense strand
gcaaugcaccgcucacuaa

SEQ ID NO: 1145656 - RNA, 19 nt, Homo sapiens
  misc_RNA (1)...(19): siRNA sense strand
gcuacuauccugacaguua

SEQ ID NO: 1145657 - RNA, 19 nt, Homo sapiens
  misc_RNA (1)...(19): siRNA sense strand
gaucaaacuucggcacuuu

SEQ ID NO: 1145658 - RNA, 19 nt, Homo sapiens
  misc_RNA (1)...(19): siRNA sense strand
uaagaaaggucccucaaca

SEQ ID NO: 1145659 - RNA, 19 nt, Homo sapiens
  misc_RNA (1)...(19): siRNA sense strand
gaagaagcagccaaaguaa

SEQ ID NO: 1145660 - RNA, 19 nt, Homo sapiens
  misc_RNA (1)...(19): siRNA sense strand
caagaaggaugaggagaaa

SEQ ID NO: 1145661 - RNA, 19 nt, Homo sapiens
  misc_RNA (1)...(19): siRNA sense strand
gaggaagacuaugaaguaa

SEQ ID NO: 1145662 - RNA, 19 nt, Homo sapiens
  misc_RNA (1)...(19): siRNA sense strand
gcacuuggcugcuguugag

SEQ ID NO: 1145663 - RNA, 19 nt, Homo sapiens
  misc_RNA (1)...(19): siRNA sense strand
gcaagaacuacaagaagua

SEQ ID NO: 1145664 - RNA, 19 nt, Homo sapiens
  misc_RNA (1)...(19): siRNA sense strand
ggaaagaaggcgacaguga

SEQ ID NO: 1145665 - RNA, 19 nt, Homo sapiens
  misc_RNA (1)...(19): siRNA sense strand
ucacuaaacugccgaucaa

SEQ ID NO: 1145666 - RNA, 19 nt, Homo sapiens
  misc_RNA (1)...(19): siRNA sense strand
uaaaggacauuaucaagag

SEQ ID NO: 1145667 - RNA, 19 nt, Homo sapiens
  misc_RNA (1)...(19): siRNA sense strand
gaagagggauaagcagguu

SEQ ID NO: 1145668 - RNA, 19 nt, Homo sapiens
  misc_RNA (1)...(19): siRNA sense strand
gcaaagagaaaccaacaga

SEQ ID NO: 1145669 - RNA, 19 nt, Homo sapiens
  misc_RNA (1)...(19): siRNA sense strand
ugaggaagacuaugaagua

SEQ ID NO: 1145670 - RNA, 19 nt, Homo sapiens
  misc_RNA (1)...(19): siRNA sense strand
cagcagcacuuccaacaga

SEQ ID NO: 1145671 - RNA, 19 nt, Homo sapiens
  misc_RNA (1)...(19): siRNA sense strand
caacaaaugcucaacuuuc

SEQ ID NO: 1145672 - RNA, 19 nt, Homo sapiens
  misc_RNA (1)...(19): siRNA sense strand
gcucaacuuuccugacaaa

SEQ ID NO: 1145673 - RNA, 19 nt, Homo sapiens
  misc_RNA (1)...(19): siRNA sense strand
gaaacuauaagaagaggaa

SEQ ID NO: 1145674 - RNA, 19 nt, Homo sapiens
  misc_RNA (1)...(19): siRNA sense strand
gagaagaggagcaagaaga

SEQ ID NO: 1145675 - RNA, 19 nt, Homo sapiens
  misc_RNA (1)...(19): siRNA sense strand
cuaggaagguucaugcaaa

SEQ ID NO: 1145676 - RNA, 19 nt, Homo sapiens
  misc_RNA (1)...(19): siRNA sense strand
ugacaaaggcaaagagaaa

SEQ ID NO: 1145677 - RNA, 19 nt, Homo sapiens
  misc_RNA (1)...(19): siRNA sense strand
gaacaguggggucuuauua

SEQ ID NO: 1145678 - RNA, 19 nt, Homo sapiens
  misc_RNA (1)...(19): siRNA sense strand
gaacagcccagauucagau

SEQ ID NO: 1145679 - RNA, 19 nt, Homo sapiens
  misc_RNA (1)...(19): siRNA sense strand
gaagaaggagcccaaggaa

SEQ ID NO: 1145680 - RNA, 19 nt, Homo sapiens
  misc_RNA (1)...(19): siRNA sense strand
aaagaugacuggaacaaag

SEQ ID NO: 1145681 - RNA, 19 nt, Homo sapiens
  misc_RNA (1)...(19): siRNA sense strand
caacagacaugcaaaacuu

SEQ ID NO: 1145682 - RNA, 19 nt, Homo sapiens
  misc_RNA (1)...(19): siRNA sense strand
gcaaacaugucagcaaugc

SEQ ID NO: 1145683 - RNA, 19 nt, Homo sapiens
  misc_RNA (1)...(19): siRNA sense strand
ccucaacaccuuacacuaa

SEQ ID NO: 1145684 - RNA, 19 nt, Homo sapiens
  misc_RNA (1)...(19): siRNA sense strand
ggcaagaacuacaagaagu

SEQ ID NO: 1145685 - RNA, 19 nt, Homo sapiens
  misc_RNA (1)...(19): siRNA sense strand
gcaaggaugaggaugagaa

SEQ ID NO: 1145686 - RNA, 19 nt, Homo sapiens
  misc_RNA (1)...(19): siRNA sense strand
gaaauugagcccaaacuac

SEQ ID NO: 1145687 - RNA, 19 nt, Homo sapiens
  misc_RNA (1)...(19): siRNA sense strand
uugaggagcuggagacuau

SEQ ID NO: 1145688 - RNA, 19 nt, Homo sapiens
  misc_RNA (1)...(19): siRNA sense strand
gagaaggaguccgagaaga

SEQ ID NO: 1145689 - RNA, 19 nt, Homo sapiens
  misc_RNA (1)...(19): siRNA sense strand
gaacaaaguguccgagcau

SEQ ID NO: 1145690 - RNA, 19 nt, Homo sapiens
  misc_RNA (1)...(19): siRNA sense strand
gcagcugccuacaaauuca

SEQ ID NO: 1145691 - RNA, 19 nt, Homo sapiens
  misc_RNA (1)...(19): siRNA sense strand
uggaggcacuggaaaugua

SEQ ID NO: 1145692 - RNA, 19 nt, Homo sapiens
  misc_RNA (1)...(19): siRNA sense strand
caaacuacuagggaaauua

SEQ ID NO: 1145693 - RNA, 19 nt, Homo sapiens
  misc_RNA (1)...(19): siRNA sense strand
gaggguccaugccuuccua

SEQ ID NO: 1145694 - RNA, 19 nt, Homo sapiens
  misc_RNA (1)...(19): siRNA sense strand
ggagaaggagccaaaggaa

SEQ ID NO: 1145695 - RNA, 19 nt, Homo sapiens
  misc_RNA (1)...(19): siRNA sense strand
ggaccgcaauguggaaaug

SEQ ID NO: 1145696 - RNA, 19 nt, Homo sapiens
  misc_RNA (1)...(19): siRNA sense strand
ugaaugaggaagacuauga

SEQ ID NO: 1145697 - RNA, 19 nt, Homo sapiens
  misc_RNA (1)...(19): siRNA sense strand
gcagaauaauugccugucu

SEQ ID NO: 1145698 - RNA, 19 nt, Homo sapiens
  misc_RNA (1)...(19): siRNA sense strand
gaaucuagaagaagaggaa

SEQ ID NO: 1145699 - RNA, 19 nt, Homo sapiens
  misc_RNA (1)...(19): siRNA sense strand
gaaaccaacagacaugcaa

SEQ ID NO: 1145700 - RNA, 19 nt, Homo sapiens
  misc_RNA (1)...(19): siRNA sense strand
ugaccgaccuggaugaaca

SEQ ID NO: 1145701 - RNA, 19 nt, Homo sapiens
  misc_RNA (1)...(19): siRNA sense strand
gaggugaacagcccagauu

SEQ ID NO: 1145702 - RNA, 19 nt, Homo sapiens
  misc_RNA (1)...(19): siRNA sense strand
gaaugaggaagacuaugaa

SEQ ID NO: 1145703 - RNA, 19 nt, Homo sapiens
  misc_RNA (1)...(19): siRNA sense strand
ccaagaaggaugaggagaa

SEQ ID NO: 1145704 - RNA, 19 nt, Homo sapiens
  misc_RNA (1)...(19): siRNA sense strand
caauaguguucaugccauu

SEQ ID NO: 1145705 - RNA, 19 nt, Homo sapiens
  misc_RNA (1)...(19): siRNA sense strand
ccaaacuacuagggaaauu

SEQ ID NO: 1145706 - RNA, 19 nt, Homo sapiens
  misc_RNA (1)...(19): siRNA sense strand
cagcgaggcucccaagaag

SEQ ID NO: 1145707 - RNA, 19 nt, Homo sapiens
  misc_RNA (1)...(19): siRNA sense strand
ccacagaugagaagaagga

SEQ ID NO: 1145708 - RNA, 19 nt, Homo sapiens
  misc_RNA (1)...(19): siRNA sense strand
ccaaaacagucaacacaaa

SEQ ID NO: 1145709 - RNA, 19 nt, Homo sapiens
  misc_RNA (1)...(19): siRNA sense strand
ucacugaggauaagaacaa

SEQ ID NO: 1145710 - RNA, 19 nt, Homo sapiens
  misc_RNA (1)...(19): siRNA sense strand
gaccucugcuucccaacaa

SEQ ID NO: 1145711 - RNA, 19 nt, Homo sapiens
  misc_RNA (1)...(19): siRNA sense strand
ucaaugaauggaugaauga

SEQ ID NO: 1145712 - RNA, 19 nt, Homo sapiens
  misc_RNA (1)...(19): siRNA sense strand
gaucccagcgagugaaauu

SEQ ID NO: 1145713 - RNA, 19 nt, Homo sapiens
  misc_RNA (1)...(19): siRNA sense strand
gaagauuucagccaagaca

SEQ ID NO: 1145714 - RNA, 19 nt, Homo sapiens
  misc_RNA (1)...(19): siRNA sense strand
caagaaguauauacaagcu

SEQ ID NO: 1145715 - RNA, 19 nt, Homo sapiens
  misc_RNA (1)...(19): siRNA sense strand
acauggagcagcugaagua

SEQ ID NO: 1145716 - RNA, 19 nt, Homo sapiens
  misc_RNA (1)...(19): siRNA sense strand
cagacaagccuuccacaug

SEQ ID NO: 1145717 - RNA, 19 nt, Homo sapiens
  misc_RNA (1)...(19): siRNA sense strand
gaggaaaggaagaucaaau

SEQ ID NO: 1145718 - RNA, 19 nt, Homo sapiens
  misc_RNA (1)...(19): siRNA sense strand
ccuacaaauucaagaguga

SEQ ID NO: 1145719 - RNA, 19 nt, Homo sapiens
  misc_RNA (1)...(19): siRNA sense strand
gcuacaauuucaggaagaa

SEQ ID NO: 1145720 - RNA, 19 nt, Homo sapiens
  misc_RNA (1)...(19): siRNA sense strand
gcguuacgauuuccagaau

SEQ ID NO: 1145721 - RNA, 19 nt, Homo sapiens
  misc_RNA (1)...(19): siRNA sense strand
guacaguugcuacaauuuc

SEQ ID NO: 1145722 - RNA, 19 nt, Homo sapiens
  misc_RNA (1)...(19): siRNA sense strand
uggcaaacaugucagcaau

SEQ ID NO: 1145723 - RNA, 19 nt, Homo sapiens
  misc_RNA (1)...(19): siRNA sense strand
ggaugaaugaggaagacua

SEQ ID NO: 1145724 - RNA, 19 nt, Homo sapiens
  misc_RNA (1)...(19): siRNA sense strand
ggacaccgacaccuucaau

SEQ ID NO: 1145725 - RNA, 19 nt, Homo sapiens
  misc_RNA (1)...(19): siRNA sense strand
ggaagguucaugcaaagug

SEQ ID NO: 1145726 - RNA, 19 nt, Homo sapiens
  misc_RNA (1)...(19): siRNA sense strand
gcaauguggaaauguuuau

SEQ ID NO: 1145727 - RNA, 19 nt, Homo sapiens
  misc_RNA (1)...(19): siRNA sense strand
caacaaacuccucccucaa

SEQ ID NO: 1145728 - RNA, 19 nt, Homo sapiens
  misc_RNA (1)...(19): siRNA sense strand
gcgagaagcacuggaguau

SEQ ID NO: 1145729 - RNA, 19 nt, Homo sapiens
  misc_RNA (1)...(19): siRNA sense strand
caaagaugacuggaacaaa

SEQ ID NO: 1145730 - RNA, 19 nt, Homo sapiens
  misc_RNA (1)...(19): siRNA sense strand
cacuggaaauguacaaaga

SEQ ID NO: 1145731 - RNA, 19 nt, Homo sapiens
  misc_RNA (1)...(19): siRNA sense strand
ccagguggaugcugagagu

SEQ ID NO: 1145732 - RNA, 19 nt, Homo sapiens
  misc_RNA (1)...(19): siRNA sense strand
ccaagacuccagagaucua

SEQ ID NO: 1145733 - RNA, 19 nt, Homo sapiens
  misc_RNA (1)...(19): siRNA sense strand
guccaagacuccagagauc

SEQ ID NO: 1145734 - RNA, 19 nt, Homo sapiens
  misc_RNA (1)...(19): siRNA sense strand
cuaaacugccgaucaaaug

SEQ ID NO: 1145735 - RNA, 19 nt, Homo sapiens
  misc_RNA (1)...(19): siRNA sense strand
gggcuacuauccugacagu

SEQ ID NO: 1145736 - RNA, 19 nt, Homo sapiens
  misc_RNA (1)...(19): siRNA sense strand
caaacuccucccucaauga

SEQ ID NO: 1145737 - RNA, 19 nt, Homo sapiens
  misc_RNA (1)...(19): siRNA sense strand
acaaacuccucccucaaug

SEQ ID NO: 1145738 - RNA, 19 nt, Homo sapiens
  misc_RNA (1)...(19): siRNA sense strand
ucuugcagcugccuacaaa

SEQ ID NO: 1145739 - RNA, 19 nt, Homo sapiens
  misc_RNA (1)...(19): siRNA sense strand
aaagagaaaccaacagaca

SEQ ID NO: 1145740 - RNA, 19 nt, Homo sapiens
  misc_RNA (1)...(19): siRNA sense strand
caacacaaagaaagacuca

SEQ ID NO: 1145741 - RNA, 19 nt, Homo sapiens
  misc_RNA (1)...(19): siRNA sense strand
gaugaaugaggaagacuau

SEQ ID NO: 1145742 - RNA, 19 nt, Homo sapiens
  misc_RNA (1)...(19): siRNA sense strand
gccaagacacugacagaug

SEQ ID NO: 1145743 - RNA, 19 nt, Homo sapiens
  misc_RNA (1)...(19): siRNA sense strand
gaaccacccaccaacaagu

SEQ ID NO: 1145744 - RNA, 19 nt, Homo sapiens
  misc_RNA (1)...(19): siRNA sense strand
ccaacaaaugcucaacuuu

SEQ ID NO: 1145745 - RNA, 19 nt, Homo sapiens
  misc_RNA (1)...(19): siRNA sense strand
ggaugaacaggaagaugaa

SEQ ID NO: 1145746 - RNA, 19 nt, Homo sapiens
  misc_RNA (1)...(19): siRNA sense strand
acacaaagaaagacucaga

SEQ ID NO: 1145747 - RNA, 19 nt, Homo sapiens
  misc_RNA (1)...(19): siRNA sense strand
cccaacaaaugcucaacuu

SEQ ID NO: 1145748 - RNA, 19 nt, Homo sapiens
  misc_RNA (1)...(19): siRNA sense strand
gcacagacauguacacaaa

SEQ ID NO: 1145749 - RNA, 19 nt, Homo sapiens
  misc_RNA (1)...(19): siRNA sense strand
ggaagaagcagccaaagua

SEQ ID NO: 1145750 - RNA, 19 nt, Homo sapiens
  misc_RNA (1)...(19): siRNA sense strand
gagaagcacuggaguauca

SEQ ID NO: 1145751 - RNA, 19 nt, Homo sapiens
  misc_RNA (1)...(19): siRNA sense strand
gaucaaauguuuccuagau

SEQ ID NO: 1145752 - RNA, 19 nt, Homo sapiens
  misc_RNA (1)...(19): siRNA sense strand
ggaagacuaugaaguaaau

SEQ ID NO: 1145753 - RNA, 19 nt, Homo sapiens
  misc_RNA (1)...(19): siRNA sense strand
ccaagacacugacagauga

SEQ ID NO: 1145754 - RNA, 19 nt, Homo sapiens
  misc_RNA (1)...(19): siRNA sense strand
gaacagacccaccacauca

SEQ ID NO: 1145755 - RNA, 19 nt, Homo sapiens
  misc_RNA (1)...(19): siRNA sense strand
gcaaugcaccgcucacuaa

SEQ ID NO: 1145756 - RNA, 19 nt, Homo sapiens
  misc_RNA (1)...(19): siRNA sense strand
gcuacuauccugacaguua

SEQ ID NO: 1145757 - RNA, 19 nt, Homo sapiens
  misc_RNA (1)...(19): siRNA sense strand
gaucaaacuucggcacuuu

SEQ ID NO: 1145758 - RNA, 19 nt, Homo sapiens
  misc_RNA (1)...(19): siRNA sense strand
uaagaaaggucccucaaca

SEQ ID NO: 1145759 - RNA, 19 nt, Homo sapiens
  misc_RNA (1)...(19): siRNA sense strand
gaagaagcagccaaaguaa

SEQ ID NO: 1145760 - RNA, 19 nt, Homo sapiens
  misc_RNA (1)...(19): siRNA sense strand
caagaaggaugaggagaaa

SEQ ID NO: 1145761 - RNA, 19 nt, Homo sapiens
  misc_RNA (1)...(19): siRNA sense strand
gaggaagacuaugaaguaa

SEQ ID NO: 1145762 - RNA, 19 nt, Homo sapiens
  misc_RNA (1)...(19): siRNA sense strand
gcacuuggcugcuguugag

SEQ ID NO: 1145763 - RNA, 19 nt, Homo sapiens
  misc_RNA (1)...(19): siRNA sense strand
gcaagaacuacaagaagua

SEQ ID NO: 1145764 - RNA, 19 nt, Homo sapiens
  misc_RNA (1)...(19): siRNA sense strand
ggaaagaaggcgacaguga

SEQ ID NO: 1145765 - RNA, 19 nt, Homo sapiens
  misc_RNA (1)...(19): siRNA sense strand
ucacuaaacugccgaucaa

SEQ ID NO: 1145766 - RNA, 19 nt, Homo sapiens
  misc_RNA (1)...(19): siRNA sense strand
uaaaggacauuaucaagag

SEQ ID NO: 1145767 - RNA, 19 nt, Homo sapiens
  misc_RNA (1)...(19): siRNA sense strand
gaagagggauaagcagguu

SEQ ID NO: 1145768 - RNA, 19 nt, Homo sapiens
  misc_RNA (1)...(19): siRNA sense strand
gcaaagagaaaccaacaga

SEQ ID NO: 1145769 - RNA, 19 nt, Homo sapiens
  misc_RNA (1)...(19): siRNA sense strand
ugaggaagacuaugaagua

SEQ ID NO: 1145770 - RNA, 19 nt, Homo sapiens
  misc_RNA (1)...(19): siRNA sense strand
cagcagcacuuccaacaga

SEQ ID NO: 1145771 - RNA, 19 nt, Homo sapiens
  misc_RNA (1)...(19): siRNA sense strand
caacaaaugcucaacuuuc

SEQ ID NO: 1145772 - RNA, 19 nt, Homo sapiens
  misc_RNA (1)...(19): siRNA sense strand
gcucaacuuuccugacaaa

SEQ ID NO: 1145773 - RNA, 19 nt, Homo sapiens
  misc_RNA (1)...(19): siRNA sense strand
gaaacuauaagaagaggaa

SEQ ID NO: 1145774 - RNA, 19 nt, Homo sapiens
  misc_RNA (1)...(19): siRNA sense strand
gagaagaggagcaagaaga

SEQ ID NO: 1145775 - RNA, 19 nt, Homo sapiens
  misc_RNA (1)...(19): siRNA sense strand
cuaggaagguucaugcaaa

SEQ ID NO: 1145776 - RNA, 19 nt, Homo sapiens
  misc_RNA (1)...(19): siRNA sense strand
ugacaaaggcaaagagaaa

SEQ ID NO: 1145777 - RNA, 19 nt, Homo sapiens
  misc_RNA (1)...(19): siRNA sense strand
gaacaguggggucuuauua

SEQ ID NO: 1145778 - RNA, 19 nt, Homo sapiens
  misc_RNA (1)...(19): siRNA sense strand
gaacagcccagauucagau

SEQ ID NO: 1145779 - RNA, 19 nt, Homo sapiens
  misc_RNA (1)...(19): siRNA sense strand
gaagaaggagcccaaggaa

SEQ ID NO: 1145780 - RNA, 19 nt, Homo sapiens
  misc_RNA (1)...(19): siRNA sense strand
aaagaugacuggaacaaag

SEQ ID NO: 1145781 - RNA, 19 nt, Homo sapiens
  misc_RNA (1)...(19): siRNA sense strand
caacagacaugcaaaacuu

SEQ ID NO: 1145782 - RNA, 19 nt, Homo sapiens
  misc_RNA (1)...(19): siRNA sense strand
gcaaacaugucagcaaugc

SEQ ID NO: 1145783 - RNA, 19 nt, Homo sapiens
  misc_RNA (1)...(19): siRNA sense strand
ccucaacaccuuacacuaa

SEQ ID NO: 1145784 - RNA, 19 nt, Homo sapiens
  misc_RNA (1)...(19): siRNA sense strand
ggcaagaacuacaagaagu

SEQ ID NO: 1145785 - RNA, 19 nt, Homo sapiens
  misc_RNA (1)...(19): siRNA sense strand
gcaaggaugaggaugagaa

SEQ ID NO: 1145786 - RNA, 19 nt, Homo sapiens
  misc_RNA (1)...(19): siRNA sense strand
gaaauugagcccaaacuac

SEQ ID NO: 1145787 - RNA, 19 nt, Homo sapiens
  misc_RNA (1)...(19): siRNA sense strand
uugaggagcuggagacuau

SEQ ID NO: 1145788 - RNA, 19 nt, Homo sapiens
  misc_RNA (1)...(19): siRNA sense strand
gagaaggaguccgagaaga

SEQ ID NO: 1145789 - RNA, 19 nt, Homo sapiens
  misc_RNA (1)...(19): siRNA sense strand
gaacaaaguguccgagcau

SEQ ID NO: 1145790 - RNA, 19 nt, Homo sapiens
  misc_RNA (1)...(19): siRNA sense strand
gcagcugccuacaaauuca

SEQ ID NO: 1145791 - RNA, 19 nt, Homo sapiens
  misc_RNA (1)...(19): siRNA sense strand
uggaggcacuggaaaugua

SEQ ID NO: 1145792 - RNA, 19 nt, Homo sapiens
  misc_RNA (1)...(19): siRNA sense strand
caaacuacuagggaaauua

SEQ ID NO: 1145793 - RNA, 19 nt, Homo sapiens
  misc_RNA (1)...(19): siRNA sense strand
gaggguccaugccuuccua

SEQ ID NO: 1145794 - RNA, 19 nt, Homo sapiens
  misc_RNA (1)...(19): siRNA sense strand
ggagaaggagccaaaggaa

SEQ ID NO: 1145795 - RNA, 19 nt, Homo sapiens
  misc_RNA (1)...(19): siRNA sense strand
ggaccgcaauguggaaaug

SEQ ID NO: 1145796 - RNA, 19 nt, Homo sapiens
  misc_RNA (1)...(19): siRNA sense strand
ugaaugaggaagacuauga

SEQ ID NO: 1145797 - RNA, 19 nt, Homo sapiens
  misc_RNA (1)...(19): siRNA sense strand
gcagaauaauugccugucu

SEQ ID NO: 1145798 - RNA, 19 nt, Homo sapiens
  misc_RNA (1)...(19): siRNA sense strand
gaaucuagaagaagaggaa

SEQ ID NO: 1145799 - RNA, 19 nt, Homo sapiens
  misc_RNA (1)...(19): siRNA sense strand
gaaaccaacagacaugcaa

SEQ ID NO: 1145800 - RNA, 19 nt, Homo sapiens
  misc_RNA (1)...(19): siRNA sense strand
ugaccgaccuggaugaaca

SEQ ID NO: 1145801 - RNA, 19 nt, Homo sapiens
  misc_RNA (1)...(19): siRNA sense strand
gaggugaacagcccagauu

SEQ ID NO: 1145802 - RNA, 19 nt, Homo sapiens
  misc_RNA (1)...(19): siRNA sense strand
gaaugaggaagacuaugaa

SEQ ID NO: 1145803 - RNA, 19 nt, Homo sapiens
  misc_RNA (1)...(19): siRNA sense strand
ccaagaaggaugaggagaa

SEQ ID NO: 1145804 - RNA, 19 nt, Homo sapiens
  misc_RNA (1)...(19): siRNA sense strand
caauaguguucaugccauu

SEQ ID NO: 1145805 - RNA, 19 nt, Homo sapiens
  misc_RNA (1)...(19): siRNA sense strand
ccaaacuacuagggaaauu

SEQ ID NO: 1145806 - RNA, 19 nt, Homo sapiens
  misc_RNA (1)...(19): siRNA sense strand
cagcgaggcucccaagaag

SEQ ID NO: 1145807 - RNA, 19 nt, Homo sapiens
  misc_RNA (1)...(19): siRNA sense strand
ccacagaugagaagaagga

SEQ ID NO: 1145808 - RNA, 19 nt, Homo sapiens
  misc_RNA (1)...(19): siRNA sense strand
ccaaaacagucaacacaaa

SEQ ID NO: 1145809 - RNA, 19 nt, Homo sapiens
  misc_RNA (1)...(19): siRNA sense strand
ucacugaggauaagaacaa

SEQ ID NO: 1145810 - RNA, 19 nt, Homo sapiens
  misc_RNA (1)...(19): siRNA sense strand
gaccucugcuucccaacaa

SEQ ID NO: 1145811 - RNA, 19 nt, Homo sapiens
  misc_RNA (1)...(19): siRNA sense strand
ucaaugaauggaugaauga

SEQ ID NO: 1145812 - RNA, 19 nt, Homo sapiens
  misc_RNA (1)...(19): siRNA sense strand
gaucccagcgagugaaauu

SEQ ID NO: 1145813 - RNA, 19 nt, Homo sapiens
  misc_RNA (1)...(19): siRNA sense strand
gaagauuucagccaagaca

SEQ ID NO: 1145814 - RNA, 19 nt, Homo sapiens
  misc_RNA (1)...(19): siRNA sense strand
caagaaguauauacaagcu

SEQ ID NO: 1145815 - RNA, 19 nt, Homo sapiens
  misc_RNA (1)...(19): siRNA sense strand
acauggagcagcugaagua

SEQ ID NO: 1145816 - RNA, 19 nt, Homo sapiens
  misc_RNA (1)...(19): siRNA sense strand
cagacaagccuuccacaug

SEQ ID NO: 1145817 - RNA, 19 nt, Homo sapiens
  misc_RNA (1)...(19): siRNA sense strand
gaggaaaggaagaucaaau

SEQ ID NO: 1145818 - RNA, 19 nt, Homo sapiens
  misc_RNA (1)...(19): siRNA sense strand
ccuacaaauucaagaguga

SEQ ID NO: 1145819 - RNA, 19 nt, Homo sapiens
  misc_RNA (1)...(19): siRNA sense strand
gcuacaauuucaggaagaa

SEQ ID NO: 1145820 - RNA, 19 nt, Homo sapiens
  misc_RNA (1)...(19): siRNA sense strand
gcguuacgauuuccagaau

SEQ ID NO: 1145821 - RNA, 19 nt, Homo sapiens
  misc_RNA (1)...(19): siRNA sense strand
guacaguugcuacaauuuc

SEQ ID NO: 1145822 - RNA, 19 nt, Homo sapiens
  misc_RNA (1)...(19): siRNA sense strand
uggcaaacaugucagcaau

SEQ ID NO: 1145823 - RNA, 19 nt, Homo sapiens
  misc_RNA (1)...(19): siRNA sense strand
ggaugaaugaggaagacua

SEQ ID NO: 1145824 - RNA, 19 nt, Homo sapiens
  misc_RNA (1)...(19): siRNA sense strand
ggacaccgacaccuucaau

SEQ ID NO: 1145825 - RNA, 19 nt, Homo sapiens
  misc_RNA (1)...(19): siRNA sense strand
ggaagguucaugcaaagug

SEQ ID NO: 1145826 - RNA, 19 nt, Homo sapiens
  misc_RNA (1)...(19): siRNA sense strand
gcaauguggaaauguuuau

SEQ ID NO: 1145827 - RNA, 19 nt, Homo sapiens
  misc_RNA (1)...(19): siRNA sense strand
caacaaacuccucccucaa

SEQ ID NO: 1145828 - RNA, 19 nt, Homo sapiens
  misc_RNA (1)...(19): siRNA sense strand
gcgagaagcacuggaguau

SEQ ID NO: 1145829 - RNA, 19 nt, Homo sapiens
  misc_RNA (1)...(19): siRNA sense strand
caaagaugacuggaacaaa

SEQ ID NO: 1145830 - RNA, 19 nt, Homo sapiens
  misc_RNA (1)...(19): siRNA sense strand
cacuggaaauguacaaaga

SEQ ID NO: 1145831 - RNA, 19 nt, Homo sapiens
  misc_RNA (1)...(19): siRNA sense strand
ccagguggaugcugagagu

SEQ ID NO: 1145832 - RNA, 19 nt, Homo sapiens
  misc_RNA (1)...(19): siRNA sense strand
ccaagacuccagagaucua

SEQ ID NO: 1145833 - RNA, 19 nt, Homo sapiens
  misc_RNA (1)...(19): siRNA sense strand
guccaagacuccagagauc

SEQ ID NO: 1145834 - RNA, 19 nt, Homo sapiens
  misc_RNA (1)...(19): siRNA sense strand
cuaaacugccgaucaaaug

SEQ ID NO: 1145835 - RNA, 19 nt, Homo sapiens
  misc_RNA (1)...(19): siRNA sense strand
gggcuacuauccugacagu

SEQ ID NO: 1145836 - RNA, 19 nt, Homo sapiens
  misc_RNA (1)...(19): siRNA sense strand
caaacuccucccucaauga

SEQ ID NO: 1145837 - RNA, 19 nt, Homo sapiens
  misc_RNA (1)...(19): siRNA sense strand
acaaacuccucccucaaug

SEQ ID NO: 1145838 - RNA, 19 nt, Homo sapiens
  misc_RNA (1)...(19): siRNA sense strand
ucuugcagcugccuacaaa

SEQ ID NO: 1145839 - RNA, 19 nt, Homo sapiens
  misc_RNA (1)...(19): siRNA sense strand
aaagagaaaccaacagaca

SEQ ID NO: 1145840 - RNA, 19 nt, Homo sapiens
  misc_RNA (1)...(19): siRNA sense strand
caacacaaagaaagacuca

SEQ ID NO: 1145841 - RNA, 19 nt, Homo sapiens
  misc_RNA (1)...(19): siRNA sense strand
gaugaaugaggaagacuau

SEQ ID NO: 1145842 - RNA, 19 nt, Homo sapiens
  misc_RNA (1)...(19): siRNA sense strand
gccaagacacugacagaug

SEQ ID NO: 1145843 - RNA, 19 nt, Homo sapiens
  misc_RNA (1)...(19): siRNA sense strand
gaaccacccaccaacaagu

SEQ ID NO: 1145844 - RNA, 19 nt, Homo sapiens
  misc_RNA (1)...(19): siRNA sense strand
ccaacaaaugcucaacuuu

SEQ ID NO: 1145845 - RNA, 19 nt, Homo sapiens
  misc_RNA (1)...(19): siRNA sense strand
ggaugaacaggaagaugaa

SEQ ID NO: 1145846 - RNA, 19 nt, Homo sapiens
  misc_RNA (1)...(19): siRNA sense strand
acacaaagaaagacucaga

SEQ ID NO: 1145847 - RNA, 19 nt, Homo sapiens
  misc_RNA (1)...(19): siRNA sense strand
cccaacaaaugcucaacuu

SEQ ID NO: 1145848 - RNA, 19 nt, Homo sapiens
  misc_RNA (1)...(19): siRNA sense strand
gcacagacauguacacaaa

SEQ ID NO: 1145849 - RNA, 19 nt, Homo sapiens
  misc_RNA (1)...(19): siRNA sense strand
ggaagaagcagccaaagua

SEQ ID NO: 1145850 - RNA, 19 nt, Homo sapiens
  misc_RNA (1)...(19): siRNA sense strand
gagaagcacuggaguauca

SEQ ID NO: 1145851 - RNA, 19 nt, Homo sapiens
  misc_RNA (1)...(19): siRNA sense strand
gaucaaauguuuccuagau

SEQ ID NO: 1145852 - RNA, 19 nt, Homo sapiens
  misc_RNA (1)...(19): siRNA sense strand
ggaagacuaugaaguaaau

SEQ ID NO: 1145853 - RNA, 19 nt, Homo sapiens
  misc_RNA (1)...(19): siRNA sense strand
ccaagacacugacagauga

SEQ ID NO: 1145854 - RNA, 19 nt, Homo sapiens
  misc_RNA (1)...(19): siRNA sense strand
gaacagacccaccacauca

SEQ ID NO: 1145855 - RNA, 19 nt, Homo sapiens
  misc_RNA (1)...(19): siRNA sense strand
gcaaugcaccgcucacuaa

SEQ ID NO: 1145856 - RNA, 19 nt, Homo sapiens
  misc_RNA (1)...(19): siRNA sense strand
gcuacuauccugacaguua

SEQ ID NO: 1145857 - RNA, 19 nt, Homo sapiens
  misc_RNA (1)...(19): siRNA sense strand
gaucaaacuucggcacuuu

SEQ ID NO: 1145858 - RNA, 19 nt, Homo sapiens
  misc_RNA (1)...(19): siRNA sense strand
uaagaaaggucccucaaca

SEQ ID NO: 1145859 - RNA, 19 nt, Homo sapiens
  misc_RNA (1)...(19): siRNA sense strand
gaagaagcagccaaaguaa

SEQ ID NO: 1145860 - RNA, 19 nt, Homo sapiens
  misc_RNA (1)...(19): siRNA sense strand
caagaaggaugaggagaaa

SEQ ID NO: 1145861 - RNA, 19 nt, Homo sapiens
  misc_RNA (1)...(19): siRNA sense strand
gaggaagacuaugaaguaa

SEQ ID NO: 1145862 - RNA, 19 nt, Homo sapiens
  misc_RNA (1)...(19): siRNA sense strand
gcacuuggcugcuguugag

SEQ ID NO: 1145863 - RNA, 19 nt, Homo sapiens
  misc_RNA (1)...(19): siRNA sense strand
gcaagaacuacaagaagua

SEQ ID NO: 1145864 - RNA, 19 nt, Homo sapiens
  misc_RNA (1)...(19): siRNA sense strand
ggaaagaaggcgacaguga

SEQ ID NO: 1145865 - RNA, 19 nt, Homo sapiens
  misc_RNA (1)...(19): siRNA sense strand
ucacuaaacugccgaucaa

SEQ ID NO: 1145866 - RNA, 19 nt, Homo sapiens
  misc_RNA (1)...(19): siRNA sense strand
uaaaggacauuaucaagag

SEQ ID NO: 1145867 - RNA, 19 nt, Homo sapiens
  misc_RNA (1)...(19): siRNA sense strand
gaagagggauaagcagguu

SEQ ID NO: 1145868 - RNA, 19 nt, Homo sapiens
  misc_RNA (1)...(19): siRNA sense strand
gcaaagagaaaccaacaga

SEQ ID NO: 1145869 - RNA, 19 nt, Homo sapiens
  misc_RNA (1)...(19): siRNA sense strand
ugaggaagacuaugaagua

SEQ ID NO: 1145870 - RNA, 19 nt, Homo sapiens
  misc_RNA (1)...(19): siRNA sense strand
cagcagcacuuccaacaga

SEQ ID NO: 1145871 - RNA, 19 nt, Homo sapiens
  misc_RNA (1)...(19): siRNA sense strand
caacaaaugcucaacuuuc

SEQ ID NO: 1145872 - RNA, 19 nt, Homo sapiens
  misc_RNA (1)...(19): siRNA sense strand
gcucaacuuuccugacaaa

SEQ ID NO: 1145873 - RNA, 19 nt, Homo sapiens
  misc_RNA (1)...(19): siRNA sense strand
gaaacuauaagaagaggaa

SEQ ID NO: 1145874 - RNA, 19 nt, Homo sapiens
  misc_RNA (1)...(19): siRNA sense strand
gagaagaggagcaagaaga

SEQ ID NO: 1145875 - RNA, 19 nt, Homo sapiens
  misc_RNA (1)...(19): siRNA sense strand
cuaggaagguucaugcaaa

SEQ ID NO: 1145876 - RNA, 19 nt, Homo sapiens
  misc_RNA (1)...(19): siRNA sense strand
ugacaaaggcaaagagaaa

SEQ ID NO: 1145877 - RNA, 19 nt, Homo sapiens
  misc_RNA (1)...(19): siRNA sense strand
gaacaguggggucuuauua

SEQ ID NO: 1145878 - RNA, 19 nt, Homo sapiens
  misc_RNA (1)...(19): siRNA sense strand
gaacagcccagauucagau

SEQ ID NO: 1145879 - RNA, 19 nt, Homo sapiens
  misc_RNA (1)...(19): siRNA sense strand
gaagaaggagcccaaggaa

SEQ ID NO: 1145880 - RNA, 19 nt, Homo sapiens
  misc_RNA (1)...(19): siRNA sense strand
aaagaugacuggaacaaag

SEQ ID NO: 1145881 - RNA, 19 nt, Homo sapiens
  misc_RNA (1)...(19): siRNA sense strand
caacagacaugcaaaacuu

SEQ ID NO: 1145882 - RNA, 19 nt, Homo sapiens
  misc_RNA (1)...(19): siRNA sense strand
gcaaacaugucagcaaugc

SEQ ID NO: 1145883 - RNA, 19 nt, Homo sapiens
  misc_RNA (1)...(19): siRNA sense strand
ccucaacaccuuacacuaa

SEQ ID NO: 1145884 - RNA, 19 nt, Homo sapiens
  misc_RNA (1)...(19): siRNA sense strand
ggcaagaacuacaagaagu

SEQ ID NO: 1145885 - RNA, 19 nt, Homo sapiens
  misc_RNA (1)...(19): siRNA sense strand
gcaaggaugaggaugagaa

SEQ ID NO: 1145886 - RNA, 19 nt, Homo sapiens
  misc_RNA (1)...(19): siRNA sense strand
gaaauugagcccaaacuac

SEQ ID NO: 1145887 - RNA, 19 nt, Homo sapiens
  misc_RNA (1)...(19): siRNA sense strand
uugaggagcuggagacuau

SEQ ID NO: 1145888 - RNA, 19 nt, Homo sapiens
  misc_RNA (1)...(19): siRNA sense strand
gagaaggaguccgagaaga

SEQ ID NO: 1145889 - RNA, 19 nt, Homo sapiens
  misc_RNA (1)...(19): siRNA sense strand
gaacaaaguguccgagcau

SEQ ID NO: 1145890 - RNA, 19 nt, Homo sapiens
  misc_RNA (1)...(19): siRNA sense strand
gcagcugccuacaaauuca

SEQ ID NO: 1145891 - RNA, 19 nt, Homo sapiens
  misc_RNA (1)...(19): siRNA sense strand
uggaggcacuggaaaugua

SEQ ID NO: 1145892 - RNA, 19 nt, Homo sapiens
  misc_RNA (1)...(19): siRNA sense strand
caaacuacuagggaaauua

SEQ ID NO: 1145893 - RNA, 19 nt, Homo sapiens
  misc_RNA (1)...(19): siRNA sense strand
gaggguccaugccuuccua

SEQ ID NO: 1145894 - RNA, 19 nt, Homo sapiens
  misc_RNA (1)...(19): siRNA sense strand
ggagaaggagccaaaggaa

SEQ ID NO: 1145895 - RNA, 19 nt, Homo sapiens
  misc_RNA (1)...(19): siRNA sense strand
ggaccgcaauguggaaaug

SEQ ID NO: 1145896 - RNA, 19 nt, Homo sapiens
  misc_RNA (1)...(19): siRNA sense strand
ugaaugaggaagacuauga

SEQ ID NO: 1145897 - RNA, 19 nt, Homo sapiens
  misc_RNA (1)...(19): siRNA sense strand
gcagaauaauugccugucu

SEQ ID NO: 1145898 - RNA, 19 nt, Homo sapiens
  misc_RNA (1)...(19): siRNA sense strand
gaaucuagaagaagaggaa

SEQ ID NO: 1145899 - RNA, 19 nt, Homo sapiens
  misc_RNA (1)...(19): siRNA sense strand
gaaaccaacagacaugcaa

SEQ ID NO: 1145900 - RNA, 19 nt, Homo sapiens
  misc_RNA (1)...(19): siRNA sense strand
ugaccgaccuggaugaaca

SEQ ID NO: 1145901 - RNA, 19 nt, Homo sapiens
  misc_RNA (1)...(19): siRNA sense strand
gaggugaacagcccagauu

SEQ ID NO: 1145902 - RNA, 19 nt, Homo sapiens
  misc_RNA (1)...(19): siRNA sense strand
gaaugaggaagacuaugaa

SEQ ID NO: 1145903 - RNA, 19 nt, Homo sapiens
  misc_RNA (1)...(19): siRNA sense strand
ccaagaaggaugaggagaa

SEQ ID NO: 1145904 - RNA, 19 nt, Homo sapiens
  misc_RNA (1)...(19): siRNA sense strand
caauaguguucaugccauu

SEQ ID NO: 1145905 - RNA, 19 nt, Homo sapiens
  misc_RNA (1)...(19): siRNA sense strand
ccaaacuacuagggaaauu

SEQ ID NO: 1145906 - RNA, 19 nt, Homo sapiens
  misc_RNA (1)...(19): siRNA sense strand
cagcgaggcucccaagaag

SEQ ID NO: 1145907 - RNA, 19 nt, Homo sapiens
  misc_RNA (1)...(19): siRNA sense strand
ccacagaugagaagaagga

SEQ ID NO: 1145908 - RNA, 19 nt, Homo sapiens
  misc_RNA (1)...(19): siRNA sense strand
ccaaaacagucaacacaaa

SEQ ID NO: 1145909 - RNA, 19 nt, Homo sapiens
  misc_RNA (1)...(19): siRNA sense strand
ucacugaggauaagaacaa

SEQ ID NO: 1145910 - RNA, 19 nt, Homo sapiens
  misc_RNA (1)...(19): siRNA sense strand
gaccucugcuucccaacaa

SEQ ID NO: 1145911 - RNA, 19 nt, Homo sapiens
  misc_RNA (1)...(19): siRNA sense strand
ucaaugaauggaugaauga

SEQ ID NO: 1145912 - RNA, 19 nt, Homo sapiens
  misc_RNA (1)...(19): siRNA sense strand
gaucccagcgagugaaauu

SEQ ID NO: 1145913 - RNA, 19 nt, Homo sapiens
  misc_RNA (1)...(19): siRNA sense strand
gaagauuucagccaagaca

SEQ ID NO: 1145914 - RNA, 19 nt, Homo sapiens
  misc_RNA (1)...(19): siRNA sense strand
caagaaguauauacaagcu

SEQ ID NO: 1145915 - RNA, 19 nt, Homo sapiens
  misc_RNA (1)...(19): siRNA sense strand
acauggagcagcugaagua

SEQ ID NO: 1145916 - RNA, 19 nt, Homo sapiens
  misc_RNA (1)...(19): siRNA sense strand
cagacaagccuuccacaug

SEQ ID NO: 1145917 - RNA, 19 nt, Homo sapiens
  misc_RNA (1)...(19): siRNA sense strand
gaggaaaggaagaucaaau

SEQ ID NO: 1145918 - RNA, 19 nt, Homo sapiens
  misc_RNA (1)...(19): siRNA sense strand
ccuacaaauucaagaguga

SEQ ID NO: 1145919 - RNA, 19 nt, Homo sapiens
  misc_RNA (1)...(19): siRNA sense strand
gcuacaauuucaggaagaa

SEQ ID NO: 1145920 - RNA, 19 nt, Homo sapiens
  misc_RNA (1)...(19): siRNA sense strand
gcguuacgauuuccagaau

SEQ ID NO: 1145921 - RNA, 19 nt, Homo sapiens
  misc_RNA (1)...(19): siRNA sense strand
guacaguugcuacaauuuc

SEQ ID NO: 1145922 - RNA, 19 nt, Homo sapiens
  misc_RNA (1)...(19): siRNA sense strand
uggcaaacaugucagcaau

SEQ ID NO: 1145923 - RNA, 19 nt, Homo sapiens
  misc_RNA (1)...(19): siRNA sense strand
ggaugaaugaggaagacua

SEQ ID NO: 1145924 - RNA, 19 nt, Homo sapiens
  misc_RNA (1)...(19): siRNA sense strand
ggacaccgacaccuucaau

SEQ ID NO: 1145925 - RNA, 19 nt, Homo sapiens
  misc_RNA (1)...(19): siRNA sense strand
ggaagguucaugcaaagug

SEQ ID NO: 1145926 - RNA, 19 nt, Homo sapiens
  misc_RNA (1)...(19): siRNA sense strand
gcaauguggaaauguuuau

SEQ ID NO: 1145927 - RNA, 19 nt, Homo sapiens
  misc_RNA (1)...(19): siRNA sense strand
caacaaacuccucccucaa

SEQ ID NO: 1145928 - RNA, 19 nt, Homo sapiens
  misc_RNA (1)...(19): siRNA sense strand
gcgagaagcacuggaguau

SEQ ID NO: 1145929 - RNA, 19 nt, Homo sapiens
  misc_RNA (1)...(19): siRNA sense strand
caaagaugacuggaacaaa

SEQ ID NO: 1145930 - RNA, 19 nt, Homo sapiens
  misc_RNA (1)...(19): siRNA sense strand
cacuggaaauguacaaaga

SEQ ID NO: 1145931 - RNA, 19 nt, Homo sapiens
  misc_RNA (1)...(19): siRNA sense strand
ccagguggaugcugagagu

SEQ ID NO: 1145932 - RNA, 19 nt, Homo sapiens
  misc_RNA (1)...(19): siRNA sense strand
ccaagacuccagagaucua

SEQ ID NO: 1145933 - RNA, 19 nt, Homo sapiens
  misc_RNA (1)...(19): siRNA sense strand
guccaagacuccagagauc

SEQ ID NO: 1145934 - RNA, 19 nt, Homo sapiens
  misc_RNA (1)...(19): siRNA sense strand
cuaaacugccgaucaaaug

SEQ ID NO: 1145935 - RNA, 19 nt, Homo sapiens
  misc_RNA (1)...(19): siRNA sense strand
gggcuacuauccugacagu

SEQ ID NO: 1145936 - RNA, 19 nt, Homo sapiens
  misc_RNA (1)...(19): siRNA sense strand
caaacuccucccucaauga

SEQ ID NO: 1145937 - RNA, 19 nt, Homo sapiens
  misc_RNA (1)...(19): siRNA sense strand
acaaacuccucccucaaug

SEQ ID NO: 1145938 - RNA, 19 nt, Homo sapiens
  misc_RNA (1)...(19): siRNA sense strand
ucuugcagcugccuacaaa

SEQ ID NO: 1145939 - RNA, 19 nt, Homo sapiens
  misc_RNA (1)...(19): siRNA sense strand
aaagagaaaccaacagaca

SEQ ID NO: 1145940 - RNA, 19 nt, Homo sapiens
  misc_RNA (1)...(19): siRNA sense strand
caacacaaagaaagacuca

SEQ ID NO: 1145941 - RNA, 19 nt, Homo sapiens
  misc_RNA (1)...(19): siRNA sense strand
gaugaaugaggaagacuau

SEQ ID NO: 1145942 - RNA, 19 nt, Homo sapiens
  misc_RNA (1)...(19): siRNA sense strand
gccaagacacugacagaug

SEQ ID NO: 1145943 - RNA, 19 nt, Homo sapiens
  misc_RNA (1)...(19): siRNA sense strand
gaaccacccaccaacaagu

SEQ ID NO: 1145944 - RNA, 19 nt, Homo sapiens
  misc_RNA (1)...(19): siRNA sense strand
ccaacaaaugcucaacuuu

SEQ ID NO: 1145945 - RNA, 19 nt, Homo sapiens
  misc_RNA (1)...(19): siRNA sense strand
ggaugaacaggaagaugaa

SEQ ID NO: 1145946 - RNA, 19 nt, Homo sapiens
  misc_RNA (1)...(19): siRNA sense strand
acacaaagaaagacucaga

SEQ ID NO: 1145947 - RNA, 19 nt, Homo sapiens
  misc_RNA (1)...(19): siRNA sense strand
cccaacaaaugcucaacuu

SEQ ID NO: 1145948 - RNA, 19 nt, Homo sapiens
  misc_RNA (1)...(19): siRNA sense strand
gcacagacauguacacaaa

SEQ ID NO: 1145949 - RNA, 19 nt, Homo sapiens
  misc_RNA (1)...(19): siRNA sense strand
ggaagaagcagccaaagua

SEQ ID NO: 1145950 - RNA, 19 nt, Homo sapiens
  misc_RNA (1)...(19): siRNA sense strand
gagaagcacuggaguauca

SEQ ID NO: 1145951 - RNA, 19 nt, Homo sapiens
  misc_RNA (1)...(19): siRNA sense strand
gaucaaauguuuccuagau

SEQ ID NO: 1145952 - RNA, 19 nt, Homo sapiens
  misc_RNA (1)...(19): siRNA sense strand
ggaagacuaugaaguaaau

SEQ ID NO: 1145953 - RNA, 19 nt, Homo sapiens
  misc_RNA (1)...(19): siRNA sense strand
ccaagacacugacagauga

SEQ ID NO: 1145954 - RNA, 19 nt, Homo sapiens
  misc_RNA (1)...(19): siRNA sense strand
gaacagacccaccacauca

SEQ ID NO: 1145955 - RNA, 19 nt, Homo sapiens
  misc_RNA (1)...(19): siRNA sense strand
gcaaugcaccgcucacuaa

SEQ ID NO: 1145956 - RNA, 19 nt, Homo sapiens
  misc_RNA (1)...(19): siRNA sense strand
gcuacuauccugacaguua

SEQ ID NO: 1145957 - RNA, 19 nt, Homo sapiens
  misc_RNA (1)...(19): siRNA sense strand
gaucaaacuucggcacuuu

SEQ ID NO: 1145958 - RNA, 19 nt, Homo sapiens
  misc_RNA (1)...(19): siRNA sense strand
uaagaaaggucccucaaca

SEQ ID NO: 1145959 - RNA, 19 nt, Homo sapiens
  misc_RNA (1)...(19): siRNA sense strand
gaagaagcagccaaaguaa

SEQ ID NO: 1145960 - RNA, 19 nt, Homo sapiens
  misc_RNA (1)...(19): siRNA sense strand
caagaaggaugaggagaaa

SEQ ID NO: 1145961 - RNA, 19 nt, Homo sapiens
  misc_RNA (1)...(19): siRNA sense strand
gaggaagacuaugaaguaa

SEQ ID NO: 1145962 - RNA, 19 nt, Homo sapiens
  misc_RNA (1)...(19): siRNA sense strand
gcacuuggcugcuguugag

SEQ ID NO: 1145963 - RNA, 19 nt, Homo sapiens
  misc_RNA (1)...(19): siRNA sense strand
gcaagaacuacaagaagua

SEQ ID NO: 1145964 - RNA, 19 nt, Homo sapiens
  misc_RNA (1)...(19): siRNA sense strand
ggaaagaaggcgacaguga

SEQ ID NO: 1145965 - RNA, 19 nt, Homo sapiens
  misc_RNA (1)...(19): siRNA sense strand
ucacuaaacugccgaucaa

SEQ ID NO: 1145966 - RNA, 19 nt, Homo sapiens
  misc_RNA (1)...(19): siRNA sense strand
uaaaggacauuaucaagag

SEQ ID NO: 1145967 - RNA, 19 nt, Homo sapiens
  misc_RNA (1)...(19): siRNA sense strand
gaagagggauaagcagguu

SEQ ID NO: 1145968 - RNA, 19 nt, Homo sapiens
  misc_RNA (1)...(19): siRNA sense strand
gcaaagagaaaccaacaga

SEQ ID NO: 1145969 - RNA, 19 nt, Homo sapiens
  misc_RNA (1)...(19): siRNA sense strand
ugaggaagacuaugaagua

SEQ ID NO: 1145970 - RNA, 19 nt, Homo sapiens
  misc_RNA (1)...(19): siRNA sense strand
cagcagcacuuccaacaga

SEQ ID NO: 1145971 - RNA, 19 nt, Homo sapiens
  misc_RNA (1)...(19): siRNA sense strand
caacaaaugcucaacuuuc

SEQ ID NO: 1145972 - RNA, 19 nt, Homo sapiens
  misc_RNA (1)...(19): siRNA sense strand
gcucaacuuuccugacaaa

SEQ ID NO: 1145973 - RNA, 19 nt, Homo sapiens
  misc_RNA (1)...(19): siRNA sense strand
gaaacuauaagaagaggaa

SEQ ID NO: 1145974 - RNA, 19 nt, Homo sapiens
  misc_RNA (1)...(19): siRNA sense strand
gagaagaggagcaagaaga

SEQ ID NO: 1145975 - RNA, 19 nt, Homo sapiens
  misc_RNA (1)...(19): siRNA sense strand
cuaggaagguucaugcaaa

SEQ ID NO: 1145976 - RNA, 19 nt, Homo sapiens
  misc_RNA (1)...(19): siRNA sense strand
ugacaaaggcaaagagaaa

SEQ ID NO: 1145977 - RNA, 19 nt, Homo sapiens
  misc_RNA (1)...(19): siRNA sense strand
gaacaguggggucuuauua

SEQ ID NO: 1145978 - RNA, 19 nt, Homo sapiens
  misc_RNA (1)...(19): siRNA sense strand
gaacagcccagauucagau

SEQ ID NO: 1145979 - RNA, 19 nt, Homo sapiens
  misc_RNA (1)...(19): siRNA sense strand
gaagaaggagcccaaggaa

SEQ ID NO: 1145980 - RNA, 19 nt, Homo sapiens
  misc_RNA (1)...(19): siRNA sense strand
aaagaugacuggaacaaag

SEQ ID NO: 1145981 - RNA, 19 nt, Homo sapiens
  misc_RNA (1)...(19): siRNA sense strand
caacagacaugcaaaacuu

SEQ ID NO: 1145982 - RNA, 19 nt, Homo sapiens
  misc_RNA (1)...(19): siRNA sense strand
gcaaacaugucagcaaugc

SEQ ID NO: 1145983 - RNA, 19 nt, Homo sapiens
  misc_RNA (1)...(19): siRNA sense strand
ccucaacaccuuacacuaa

SEQ ID NO: 1145984 - RNA, 19 nt, Homo sapiens
  misc_RNA (1)...(19): siRNA sense strand
ggcaagaacuacaagaagu

SEQ ID NO: 1145985 - RNA, 19 nt, Homo sapiens
  misc_RNA (1)...(19): siRNA sense strand
gcaaggaugaggaugagaa

SEQ ID NO: 1145986 - RNA, 19 nt, Homo sapiens
  misc_RNA (1)...(19): siRNA sense strand
gaaauugagcccaaacuac

SEQ ID NO: 1145987 - RNA, 19 nt, Homo sapiens
  misc_RNA (1)...(19): siRNA sense strand
uugaggagcuggagacuau

SEQ ID NO: 1145988 - RNA, 19 nt, Homo sapiens
  misc_RNA (1)...(19): siRNA sense strand
gagaaggaguccgagaaga

SEQ ID NO: 1145989 - RNA, 19 nt, Homo sapiens
  misc_RNA (1)...(19): siRNA sense strand
gaacaaaguguccgagcau

SEQ ID NO: 1145990 - RNA, 19 nt, Homo sapiens
  misc_RNA (1)...(19): siRNA sense strand
gcagcugccuacaaauuca

SEQ ID NO: 1145991 - RNA, 19 nt, Homo sapiens
  misc_RNA (1)...(19): siRNA sense strand
uggaggcacuggaaaugua

SEQ ID NO: 1145992 - RNA, 19 nt, Homo sapiens
  misc_RNA (1)...(19): siRNA sense strand
caaacuacuagggaaauua

SEQ ID NO: 1145993 - RNA, 19 nt, Homo sapiens
  misc_RNA (1)...(19): siRNA sense strand
gaggguccaugccuuccua

SEQ ID NO: 1145994 - RNA, 19 nt, Homo sapiens
  misc_RNA (1)...(19): siRNA sense strand
ggagaaggagccaaaggaa

SEQ ID NO: 1145995 - RNA, 19 nt, Homo sapiens
  misc_RNA (1)...(19): siRNA sense strand
ggaccgcaauguggaaaug

SEQ ID NO: 1145996 - RNA, 19 nt, Homo sapiens
  misc_RNA (1)...(19): siRNA sense strand
ugaaugaggaagacuauga

SEQ ID NO: 1145997 - RNA, 19 nt, Homo sapiens
  misc_RNA (1)...(19): siRNA sense strand
gcagaauaauugccugucu

SEQ ID NO: 1145998 - RNA, 19 nt, Homo sapiens
  misc_RNA (1)...(19): siRNA sense strand
gaaucuagaagaagaggaa

SEQ ID NO: 1145999 - RNA, 19 nt, Homo sapiens
  misc_RNA (1)...(19): siRNA sense strand
gaaaccaacagacaugcaa

SEQ ID NO: 1146000 - RNA, 19 nt, Homo sapiens
  misc_RNA (1)...(19): siRNA sense strand
ugaccgaccuggaugaaca

SEQ ID NO: 1146001 - RNA, 19 nt, Homo sapiens
  misc_RNA (1)...(19): siRNA sense strand
gaggugaacagcccagauu

SEQ ID NO: 1146002 - RNA, 19 nt, Homo sapiens
  misc_RNA (1)...(19): siRNA sense strand
gaaugaggaagacuaugaa

SEQ ID NO: 1146003 - RNA, 19 nt, Homo sapiens
  misc_RNA (1)...(19): siRNA sense strand
ccaagaaggaugaggagaa

SEQ ID NO: 1146004 - RNA, 19 nt, Homo sapiens
  misc_RNA (1)...(19): siRNA sense strand
caauaguguucaugccauu

SEQ ID NO: 1146005 - RNA, 19 nt, Homo sapiens
  misc_RNA (1)...(19): siRNA sense strand
ccaaacuacuagggaaauu

SEQ ID NO: 1146006 - RNA, 19 nt, Homo sapiens
  misc_RNA (1)...(19): siRNA sense strand
cagcgaggcucccaagaag

SEQ ID NO: 1146007 - RNA, 19 nt, Homo sapiens
  misc_RNA (1)...(19): siRNA sense strand
ccacagaugagaagaagga

SEQ ID NO: 1146008 - RNA, 19 nt, Homo sapiens
  misc_RNA (1)...(19): siRNA sense strand
ccaaaacagucaacacaaa

SEQ ID NO: 1146009 - RNA, 19 nt, Homo sapiens
  misc_RNA (1)...(19): siRNA sense strand
ucacugaggauaagaacaa

SEQ ID NO: 1146010 - RNA, 19 nt, Homo sapiens
  misc_RNA (1)...(19): siRNA sense strand
gaccucugcuucccaacaa

SEQ ID NO: 1146011 - RNA, 19 nt, Homo sapiens
  misc_RNA (1)...(19): siRNA sense strand
ucaaugaauggaugaauga

SEQ ID NO: 1146012 - RNA, 19 nt, Homo sapiens
  misc_RNA (1)...(19): siRNA sense strand
gaucccagcgagugaaauu

SEQ ID NO: 1146013 - RNA, 19 nt, Homo sapiens
  misc_RNA (1)...(19): siRNA sense strand
gaagauuucagccaagaca

SEQ ID NO: 1146014 - RNA, 19 nt, Homo sapiens
  misc_RNA (1)...(19): siRNA sense strand
caagaaguauauacaagcu

SEQ ID NO: 1146015 - RNA, 19 nt, Homo sapiens
  misc_RNA (1)...(19): siRNA sense strand
acauggagcagcugaagua

SEQ ID NO: 1146016 - RNA, 19 nt, Homo sapiens
  misc_RNA (1)...(19): siRNA sense strand
cagacaagccuuccacaug

SEQ ID NO: 1146017 - RNA, 19 nt, Homo sapiens
  misc_RNA (1)...(19): siRNA sense strand
gaggaaaggaagaucaaau

SEQ ID NO: 1146018 - RNA, 19 nt, Homo sapiens
  misc_RNA (1)...(19): siRNA sense strand
ccuacaaauucaagaguga

SEQ ID NO: 1146019 - RNA, 19 nt, Homo sapiens
  misc_RNA (1)...(19): siRNA sense strand
gcuacaauuucaggaagaa

SEQ ID NO: 1146020 - RNA, 19 nt, Homo sapiens
  misc_RNA (1)...(19): siRNA sense strand
gcguuacgauuuccagaau

SEQ ID NO: 1146021 - RNA, 19 nt, Homo sapiens
  misc_RNA (1)...(19): siRNA sense strand
guacaguugcuacaauuuc

SEQ ID NO: 1146022 - RNA, 19 nt, Homo sapiens
  misc_RNA (1)...(19): siRNA sense strand
uggcaaacaugucagcaau

SEQ ID NO: 1146023 - RNA, 19 nt, Homo sapiens
  misc_RNA (1)...(19): siRNA sense strand
ggaugaaugaggaagacua

SEQ ID NO: 1146024 - RNA, 19 nt, Homo sapiens
  misc_RNA (1)...(19): siRNA sense strand
ggacaccgacaccuucaau

SEQ ID NO: 1146025 - RNA, 19 nt, Homo sapiens
  misc_RNA (1)...(19): siRNA sense strand
ggaagguucaugcaaagug

SEQ ID NO: 1146026 - RNA, 19 nt, Homo sapiens
  misc_RNA (1)...(19): siRNA sense strand
gcaauguggaaauguuuau

SEQ ID NO: 1146027 - RNA, 19 nt, Homo sapiens
  misc_RNA (1)...(19): siRNA sense strand
caacaaacuccucccucaa

SEQ ID NO: 1146028 - RNA, 19 nt, Homo sapiens
  misc_RNA (1)...(19): siRNA sense strand
gcgagaagcacuggaguau

SEQ ID NO: 1146029 - RNA, 19 nt, Homo sapiens
  misc_RNA (1)...(19): siRNA sense strand
caaagaugacuggaacaaa

SEQ ID NO: 1146030 - RNA, 19 nt, Homo sapiens
  misc_RNA (1)...(19): siRNA sense strand
cacuggaaauguacaaaga

SEQ ID NO: 1146031 - RNA, 19 nt, Homo sapiens
  misc_RNA (1)...(19): siRNA sense strand
ccagguggaugcugagagu

SEQ ID NO: 1146032 - RNA, 19 nt, Homo sapiens
  misc_RNA (1)...(19): siRNA sense strand
ccaagacuccagagaucua

SEQ ID NO: 1146033 - RNA, 19 nt, Homo sapiens
  misc_RNA (1)...(19): siRNA sense strand
guccaagacuccagagauc

SEQ ID NO: 1146034 - RNA, 19 nt, Homo sapiens
  misc_RNA (1)...(19): siRNA sense strand
cuaaacugccgaucaaaug

SEQ ID NO: 1146035 - RNA, 19 nt, Homo sapiens
  misc_RNA (1)...(19): siRNA sense strand
gggcuacuauccugacagu

SEQ ID NO: 1146036 - RNA, 19 nt, Homo sapiens
  misc_RNA (1)...(19): siRNA sense strand
caaacuccucccucaauga

SEQ ID NO: 1146037 - RNA, 19 nt, Homo sapiens
  misc_RNA (1)...(19): siRNA sense strand
acaaacuccucccucaaug

SEQ ID NO: 1146038 - RNA, 19 nt, Homo sapiens
  misc_RNA (1)...(19): siRNA sense strand
ucuugcagcugccuacaaa

SEQ ID NO: 1146039 - RNA, 19 nt, Homo sapiens
  misc_RNA (1)...(19): siRNA sense strand
aaagagaaaccaacagaca

SEQ ID NO: 1146040 - RNA, 19 nt, Homo sapiens
  misc_RNA (1)...(19): siRNA sense strand
caacacaaagaaagacuca

SEQ ID NO: 1146041 - RNA, 19 nt, Homo sapiens
  misc_RNA (1)...(19): siRNA sense strand
gaugaaugaggaagacuau

SEQ ID NO: 1146042 - RNA, 19 nt, Homo sapiens
  misc_RNA (1)...(19): siRNA sense strand
gccaagacacugacagaug

SEQ ID NO: 1146043 - RNA, 19 nt, Homo sapiens
  misc_RNA (1)...(19): siRNA sense strand
gaaccacccaccaacaagu

SEQ ID NO: 1146044 - RNA, 19 nt, Homo sapiens
  misc_RNA (1)...(19): siRNA sense strand
ccaacaaaugcucaacuuu

SEQ ID NO: 1146045 - RNA, 19 nt, Homo sapiens
  misc_RNA (1)...(19): siRNA sense strand
ggaugaacaggaagaugaa

SEQ ID NO: 1146046 - RNA, 19 nt, Homo sapiens
  misc_RNA (1)...(19): siRNA sense strand
acacaaagaaagacucaga

SEQ ID NO: 1146047 - RNA, 19 nt, Homo sapiens
  misc_RNA (1)...(19): siRNA sense strand
cccaacaaaugcucaacuu

SEQ ID NO: 1146048 - RNA, 19 nt, Homo sapiens
  misc_RNA (1)...(19): siRNA sense strand
ggaaagagcuaauuuacaa

SEQ ID NO: 1146049 - RNA, 19 nt, Homo sapiens
  misc_RNA (1)...(19): siRNA sense strand
gcauucagcugguauaauu

SEQ ID NO: 1146050 - RNA, 19 nt, Homo sapiens
  misc_RNA (1)...(19): siRNA sense strand
gaaccaaacucaugcaaag

SEQ ID NO: 1146051 - RNA, 19 nt, Homo sapiens
  misc_RNA (1)...(19): siRNA sense strand
aaagagagcuuaucgugaa

SEQ ID NO: 1146052 - RNA, 19 nt, Homo sapiens
  misc_RNA (1)...(19): siRNA sense strand
caagauguguauuugguua

SEQ ID NO: 1146053 - RNA, 19 nt, Homo sapiens
  misc_RNA (1)...(19): siRNA sense strand
gaagaaagaagcaagaaug

SEQ ID NO: 1146054 - RNA, 19 nt, Homo sapiens
  misc_RNA (1)...(19): siRNA sense strand
cagcagaguucaugaagaa

SEQ ID NO: 1146055 - RNA, 19 nt, Homo sapiens
  misc_RNA (1)...(19): siRNA sense strand
acaaagaagucauggauug

SEQ ID NO: 1146056 - RNA, 19 nt, Homo sapiens
  misc_RNA (1)...(19): siRNA sense strand
ggagcuggaucaugaaaga

SEQ ID NO: 1146057 - RNA, 19 nt, Homo sapiens
  misc_RNA (1)...(19): siRNA sense strand
gguaugggcuacaaagaga

SEQ ID NO: 1146058 - RNA, 19 nt, Homo sapiens
  misc_RNA (1)...(19): siRNA sense strand
gcggaucucuguagacgaa

SEQ ID NO: 1146059 - RNA, 19 nt, Homo sapiens
  misc_RNA (1)...(19): siRNA sense strand
gaauggaaagagcuaauuu

SEQ ID NO: 1146060 - RNA, 19 nt, Homo sapiens
  misc_RNA (1)...(19): siRNA sense strand
gaucaguggaauaaaguua

SEQ ID NO: 1146061 - RNA, 19 nt, Homo sapiens
  misc_RNA (1)...(19): siRNA sense strand
gaagaaagagaacaugcaa

SEQ ID NO: 1146062 - RNA, 19 nt, Homo sapiens
  misc_RNA (1)...(19): siRNA sense strand
aaagagaacaugcaauuga

SEQ ID NO: 1146063 - RNA, 19 nt, Homo sapiens
  misc_RNA (1)...(19): siRNA sense strand
gcaagaaugguguuguaaa

SEQ ID NO: 1146064 - RNA, 19 nt, Homo sapiens
  misc_RNA (1)...(19): siRNA sense strand
cagaugcuuugugguauua

SEQ ID NO: 1146065 - RNA, 19 nt, Homo sapiens
  misc_RNA (1)...(19): siRNA sense strand
aaaguauccuggaaucaaa

SEQ ID NO: 1146066 - RNA, 19 nt, Homo sapiens
  misc_RNA (1)...(19): siRNA sense strand
agaaagagaacaugcaauu

SEQ ID NO: 1146067 - RNA, 19 nt, Homo sapiens
  misc_RNA (1)...(19): siRNA sense strand
aagcaagaaugguguugua

SEQ ID NO: 1146068 - RNA, 19 nt, Homo sapiens
  misc_RNA (1)...(19): siRNA sense strand
ugauacaguucuugggaua

SEQ ID NO: 1146069 - RNA, 19 nt, Homo sapiens
  misc_RNA (1)...(19): siRNA sense strand
gaaagagaacaugcaauug

SEQ ID NO: 1146070 - RNA, 19 nt, Homo sapiens
  misc_RNA (1)...(19): siRNA sense strand
cuagaagaauuucaagaug

SEQ ID NO: 1146071 - RNA, 19 nt, Homo sapiens
  misc_RNA (1)...(19): siRNA sense strand
acaaagagaacguugauau

SEQ ID NO: 1146072 - RNA, 19 nt, Homo sapiens
  misc_RNA (1)...(19): siRNA sense strand
caagaaugguguuguaaaa

SEQ ID NO: 1146073 - RNA, 19 nt, Homo sapiens
  misc_RNA (1)...(19): siRNA sense strand
gaacuuguccucuuaaaau

SEQ ID NO: 1146074 - RNA, 19 nt, Homo sapiens
  misc_RNA (1)...(19): siRNA sense strand
aagagaacaugcaauugaa

SEQ ID NO: 1146075 - RNA, 19 nt, Homo sapiens
  misc_RNA (1)...(19): siRNA sense strand
caaaguauccuggaaucaa

SEQ ID NO: 1146076 - RNA, 19 nt, Homo sapiens
  misc_RNA (1)...(19): siRNA sense strand
gagcuaauuuacaaagaag

SEQ ID NO: 1146077 - RNA, 19 nt, Homo sapiens
  misc_RNA (1)...(19): siRNA sense strand
gauuguuugugcugcauuu

SEQ ID NO: 1146078 - RNA, 19 nt, Homo sapiens
  misc_RNA (1)...(19): siRNA sense strand
gaacaugcaauugaagaau

SEQ ID NO: 1146079 - RNA, 19 nt, Homo sapiens
  misc_RNA (1)...(19): siRNA sense strand
ccagaugcuuugugguauu

SEQ ID NO: 1146080 - RNA, 19 nt, Homo sapiens
  misc_RNA (1)...(19): siRNA sense strand
gagcuuaucgugaacuugu

SEQ ID NO: 1146081 - RNA, 19 nt, Homo sapiens
  misc_RNA (1)...(19): siRNA sense strand
ggacagcgugcacuaacuu

SEQ ID NO: 1146082 - RNA, 19 nt, Homo sapiens
  misc_RNA (1)...(19): siRNA sense strand
gaauguccuaccuucuuua

SEQ ID NO: 1146083 - RNA, 19 nt, Homo sapiens
  misc_RNA (1)...(19): siRNA sense strand
gagaacaugcaauugaaga

SEQ ID NO: 1146084 - RNA, 19 nt, Homo sapiens
  misc_RNA (1)...(19): siRNA sense strand
ccaaacucaugcaaagaga

SEQ ID NO: 1146085 - RNA, 19 nt, Homo sapiens
  misc_RNA (1)...(19): siRNA sense strand
gaugcuuugugguauuaaa

SEQ ID NO: 1146086 - RNA, 19 nt, Homo sapiens
  misc_RNA (1)...(19): siRNA sense strand
agaagaauuucaagaugug

SEQ ID NO: 1146087 - RNA, 19 nt, Homo sapiens
  misc_RNA (1)...(19): siRNA sense strand
ggaagaaagaagcaagaau

SEQ ID NO: 1146088 - RNA, 19 nt, Homo sapiens
  misc_RNA (1)...(19): siRNA sense strand
uggaauuaauggaugcuaa

SEQ ID NO: 1146089 - RNA, 19 nt, Homo sapiens
  misc_RNA (1)...(19): siRNA sense strand
guauuaaacaucugcauuc

SEQ ID NO: 1146090 - RNA, 19 nt, Homo sapiens
  misc_RNA (1)...(19): siRNA sense strand
gguauuaaacaucugcauu

SEQ ID NO: 1146091 - RNA, 19 nt, Homo sapiens
  misc_RNA (1)...(19): siRNA sense strand
caacugugaggaauuaugu

SEQ ID NO: 1146092 - RNA, 19 nt, Homo sapiens
  misc_RNA (1)...(19): siRNA sense strand
aaacuucagccaacuguga

SEQ ID NO: 1146093 - RNA, 19 nt, Homo sapiens
  misc_RNA (1)...(19): siRNA sense strand
caaagagaacguugauauc

SEQ ID NO: 1146094 - RNA, 19 nt, Homo sapiens
  misc_RNA (1)...(19): siRNA sense strand
gaagucauccuggguaugg

SEQ ID NO: 1146095 - RNA, 19 nt, Homo sapiens
  misc_RNA (1)...(19): siRNA sense strand
agccaacugugaggaauua

SEQ ID NO: 1146096 - RNA, 19 nt, Homo sapiens
  misc_RNA (1)...(19): siRNA sense strand
gagagcuuaucgugaacuu

SEQ ID NO: 1146097 - RNA, 19 nt, Homo sapiens
  misc_RNA (1)...(19): siRNA sense strand
ggaagaaagagaacaugca

SEQ ID NO: 1146098 - RNA, 19 nt, Homo sapiens
  misc_RNA (1)...(19): siRNA sense strand
ugaagauccuugacuuugg

SEQ ID NO: 1146099 - RNA, 19 nt, Homo sapiens
  misc_RNA (1)...(19): siRNA sense strand
ucgugaacuuguccucuua

SEQ ID NO: 1146100 - RNA, 19 nt, Homo sapiens
  misc_RNA (1)...(19): siRNA sense strand
gugaacuuguccucuuaaa

SEQ ID NO: 1146101 - RNA, 19 nt, Homo sapiens
  misc_RNA (1)...(19): siRNA sense strand
ggaauuaugucgaaaacag

SEQ ID NO: 1146102 - RNA, 19 nt, Homo sapiens
  misc_RNA (1)...(19): siRNA sense strand
gaaacuaagccguccuuuu

SEQ ID NO: 1146103 - RNA, 19 nt, Homo sapiens
  misc_RNA (1)...(19): siRNA sense strand
uuucauccauguccacuga

SEQ ID NO: 1146104 - RNA, 19 nt, Homo sapiens
  misc_RNA (1)...(19): siRNA sense strand
gaaaacagaccaaaguauc

SEQ ID NO: 1146105 - RNA, 19 nt, Homo sapiens
  misc_RNA (1)...(19): siRNA sense strand
gaacaccaucagcagaguu

SEQ ID NO: 1146106 - RNA, 19 nt, Homo sapiens
  misc_RNA (1)...(19): siRNA sense strand
cagcugguauaauucauag

SEQ ID NO: 1146107 - RNA, 19 nt, Homo sapiens
  misc_RNA (1)...(19): siRNA sense strand
uaauggaugcuaacuuaug

SEQ ID NO: 1146108 - RNA, 19 nt, Homo sapiens
  misc_RNA (1)...(19): siRNA sense strand
agucauggauugggaagaa

SEQ ID NO: 1146109 - RNA, 19 nt, Homo sapiens
  misc_RNA (1)...(19): siRNA sense strand
gaagaauggaaagagcuaa

SEQ ID NO: 1146110 - RNA, 19 nt, Homo sapiens
  misc_RNA (1)...(19): siRNA sense strand
ugugaggaauuaugucgaa

SEQ ID NO: 1146111 - RNA, 19 nt, Homo sapiens
  misc_RNA (1)...(19): siRNA sense strand
agaccaaaguauccuggaa

SEQ ID NO: 1146112 - RNA, 19 nt, Homo sapiens
  misc_RNA (1)...(19): siRNA sense strand
gcuggaucaugaaagaaug

SEQ ID NO: 1146113 - RNA, 19 nt, Homo sapiens
  misc_RNA (1)...(19): siRNA sense strand
uuacaaagaagucauggau

SEQ ID NO: 1146114 - RNA, 19 nt, Homo sapiens
  misc_RNA (1)...(19): siRNA sense strand
acccauacaucacuguuug

SEQ ID NO: 1146115 - RNA, 19 nt, Homo sapiens
  misc_RNA (1)...(19): siRNA sense strand
acaagcggaucucuguaga

SEQ ID NO: 1146116 - RNA, 19 nt, Homo sapiens
  misc_RNA (1)...(19): siRNA sense strand
aaacaagucaagccagaga

SEQ ID NO: 1146117 - RNA, 19 nt, Homo sapiens
  misc_RNA (1)...(19): siRNA sense strand
aauggaugcuaacuuaugu

SEQ ID NO: 1146118 - RNA, 19 nt, Homo sapiens
  misc_RNA (1)...(19): siRNA sense strand
gcaacgccacuccuucuca

SEQ ID NO: 1146119 - RNA, 19 nt, Homo sapiens
  misc_RNA (1)...(19): siRNA sense strand
ucagcagaguucaugaaga

SEQ ID NO: 1146120 - RNA, 19 nt, Homo sapiens
  misc_RNA (1)...(19): siRNA sense strand
aagagaacguugauaucug

SEQ ID NO: 1146121 - RNA, 19 nt, Homo sapiens
  misc_RNA (1)...(19): siRNA sense strand
caucugcauucagcuggua

SEQ ID NO: 1146122 - RNA, 19 nt, Homo sapiens
  misc_RNA (1)...(19): siRNA sense strand
cccaccaccucaaauuuau

SEQ ID NO: 1146123 - RNA, 19 nt, Homo sapiens
  misc_RNA (1)...(19): siRNA sense strand
gacaagcggaucucuguag

SEQ ID NO: 1146124 - RNA, 19 nt, Homo sapiens
  misc_RNA (1)...(19): siRNA sense strand
gaccaaaguauccuggaau

SEQ ID NO: 1146125 - RNA, 19 nt, Homo sapiens
  misc_RNA (1)...(19): siRNA sense strand
ggaacaccaucagcagagu

SEQ ID NO: 1146126 - RNA, 19 nt, Homo sapiens
  misc_RNA (1)...(19): siRNA sense strand
aaagagaacguugauaucu

SEQ ID NO: 1146127 - RNA, 19 nt, Homo sapiens
  misc_RNA (1)...(19): siRNA sense strand
aaacuaagccguccuuuuc

SEQ ID NO: 1146128 - RNA, 19 nt, Homo sapiens
  misc_RNA (1)...(19): siRNA sense strand
uuugaagccuagcaacauu

SEQ ID NO: 1146129 - RNA, 19 nt, Homo sapiens
  misc_RNA (1)...(19): siRNA sense strand
ccaguuggaagaaagagaa

SEQ ID NO: 1146130 - RNA, 19 nt, Homo sapiens
  misc_RNA (1)...(19): siRNA sense strand
gauuggauauucccaucag

SEQ ID NO: 1146131 - RNA, 19 nt, Homo sapiens
  misc_RNA (1)...(19): siRNA sense strand
ugaagaauggaaagagcua

SEQ ID NO: 1146132 - RNA, 19 nt, Homo sapiens
  misc_RNA (1)...(19): siRNA sense strand
aacaugcaauugaagaaug

SEQ ID NO: 1146133 - RNA, 19 nt, Homo sapiens
  misc_RNA (1)...(19): siRNA sense strand
ucacuguccuaaaacguua

SEQ ID NO: 1146134 - RNA, 19 nt, Homo sapiens
  misc_RNA (1)...(19): siRNA sense strand
gaagcaagaaugguguugu

SEQ ID NO: 1146135 - RNA, 19 nt, Homo sapiens
  misc_RNA (1)...(19): siRNA sense strand
ugaaagaauguccuaccuu

SEQ ID NO: 1146136 - RNA, 19 nt, Homo sapiens
  misc_RNA (1)...(19): siRNA sense strand
gggaagaaagaagcaagaa

SEQ ID NO: 1146137 - RNA, 19 nt, Homo sapiens
  misc_RNA (1)...(19): siRNA sense strand
gcaauugaagaauggaaag

SEQ ID NO: 1146138 - RNA, 19 nt, Homo sapiens
  misc_RNA (1)...(19): siRNA sense strand
cuacaaagagaacguugau

SEQ ID NO: 1146139 - RNA, 19 nt, Homo sapiens
  misc_RNA (1)...(19): siRNA sense strand
uguccuaccuucuuuacca

SEQ ID NO: 1146140 - RNA, 19 nt, Homo sapiens
  misc_RNA (1)...(19): siRNA sense strand
ucagcugguauaauucaua

SEQ ID NO: 1146141 - RNA, 19 nt, Homo sapiens
  misc_RNA (1)...(19): siRNA sense strand
agaaugguguuguaaaaga

SEQ ID NO: 1146142 - RNA, 19 nt, Homo sapiens
  misc_RNA (1)...(19): siRNA sense strand
caucagcagaguucaugaa

SEQ ID NO: 1146143 - RNA, 19 nt, Homo sapiens
  misc_RNA (1)...(19): siRNA sense strand
gcuacaaagagaacguuga

SEQ ID NO: 1146144 - RNA, 19 nt, Homo sapiens
  misc_RNA (1)...(19): siRNA sense strand
gauacaguucuugggauaa

SEQ ID NO: 1146145 - RNA, 19 nt, Homo sapiens
  misc_RNA (1)...(19): siRNA sense strand
gauuugaagccuagcaaca

SEQ ID NO: 1146146 - RNA, 19 nt, Homo sapiens
  misc_RNA (1)...(19): siRNA sense strand
ccgaagucauccuggguau

SEQ ID NO: 1146147 - RNA, 19 nt, Homo sapiens
  misc_RNA (1)...(19): siRNA sense strand
gcagaguucaugaagaaac

SEQ ID NO: 1146148 - RNA, 19 nt, Homo sapiens
  misc_RNA (1)...(19): siRNA sense strand
ggaaagagcuaauuuacaa

SEQ ID NO: 1146149 - RNA, 19 nt, Homo sapiens
  misc_RNA (1)...(19): siRNA sense strand
gcauucagcugguauaauu

SEQ ID NO: 1146150 - RNA, 19 nt, Homo sapiens
  misc_RNA (1)...(19): siRNA sense strand
gaaccaaacucaugcaaag

SEQ ID NO: 1146151 - RNA, 19 nt, Homo sapiens
  misc_RNA (1)...(19): siRNA sense strand
aaagagagcuuaucgugaa

SEQ ID NO: 1146152 - RNA, 19 nt, Homo sapiens
  misc_RNA (1)...(19): siRNA sense strand
caagauguguauuugguua

SEQ ID NO: 1146153 - RNA, 19 nt, Homo sapiens
  misc_RNA (1)...(19): siRNA sense strand
gaagaaagaagcaagaaug

SEQ ID NO: 1146154 - RNA, 19 nt, Homo sapiens
  misc_RNA (1)...(19): siRNA sense strand
cagcagaguucaugaagaa

SEQ ID NO: 1146155 - RNA, 19 nt, Homo sapiens
  misc_RNA (1)...(19): siRNA sense strand
acaaagaagucauggauug

SEQ ID NO: 1146156 - RNA, 19 nt, Homo sapiens
  misc_RNA (1)...(19): siRNA sense strand
ggagcuggaucaugaaaga

SEQ ID NO: 1146157 - RNA, 19 nt, Homo sapiens
  misc_RNA (1)...(19): siRNA sense strand
gguaugggcuacaaagaga

SEQ ID NO: 1146158 - RNA, 19 nt, Homo sapiens
  misc_RNA (1)...(19): siRNA sense strand
gcggaucucuguagacgaa

SEQ ID NO: 1146159 - RNA, 19 nt, Homo sapiens
  misc_RNA (1)...(19): siRNA sense strand
gaauggaaagagcuaauuu

SEQ ID NO: 1146160 - RNA, 19 nt, Homo sapiens
  misc_RNA (1)...(19): siRNA sense strand
gaucaguggaauaaaguua

SEQ ID NO: 1146161 - RNA, 19 nt, Homo sapiens
  misc_RNA (1)...(19): siRNA sense strand
gaagaaagagaacaugcaa

SEQ ID NO: 1146162 - RNA, 19 nt, Homo sapiens
  misc_RNA (1)...(19): siRNA sense strand
aaagagaacaugcaauuga

SEQ ID NO: 1146163 - RNA, 19 nt, Homo sapiens
  misc_RNA (1)...(19): siRNA sense strand
gcaagaaugguguuguaaa

SEQ ID NO: 1146164 - RNA, 19 nt, Homo sapiens
  misc_RNA (1)...(19): siRNA sense strand
cagaugcuuugugguauua

SEQ ID NO: 1146165 - RNA, 19 nt, Homo sapiens
  misc_RNA (1)...(19): siRNA sense strand
aaaguauccuggaaucaaa

SEQ ID NO: 1146166 - RNA, 19 nt, Homo sapiens
  misc_RNA (1)...(19): siRNA sense strand
agaaagagaacaugcaauu

SEQ ID NO: 1146167 - RNA, 19 nt, Homo sapiens
  misc_RNA (1)...(19): siRNA sense strand
aagcaagaaugguguugua

SEQ ID NO: 1146168 - RNA, 19 nt, Homo sapiens
  misc_RNA (1)...(19): siRNA sense strand
ugauacaguucuugggaua

SEQ ID NO: 1146169 - RNA, 19 nt, Homo sapiens
  misc_RNA (1)...(19): siRNA sense strand
gaaagagaacaugcaauug

SEQ ID NO: 1146170 - RNA, 19 nt, Homo sapiens
  misc_RNA (1)...(19): siRNA sense strand
cuagaagaauuucaagaug

SEQ ID NO: 1146171 - RNA, 19 nt, Homo sapiens
  misc_RNA (1)...(19): siRNA sense strand
acaaagagaacguugauau

SEQ ID NO: 1146172 - RNA, 19 nt, Homo sapiens
  misc_RNA (1)...(19): siRNA sense strand
caagaaugguguuguaaaa

SEQ ID NO: 1146173 - RNA, 19 nt, Homo sapiens
  misc_RNA (1)...(19): siRNA sense strand
gaacuuguccucuuaaaau

SEQ ID NO: 1146174 - RNA, 19 nt, Homo sapiens
  misc_RNA (1)...(19): siRNA sense strand
aagagaacaugcaauugaa

SEQ ID NO: 1146175 - RNA, 19 nt, Homo sapiens
  misc_RNA (1)...(19): siRNA sense strand
caaaguauccuggaaucaa

SEQ ID NO: 1146176 - RNA, 19 nt, Homo sapiens
  misc_RNA (1)...(19): siRNA sense strand
gagcuaauuuacaaagaag

SEQ ID NO: 1146177 - RNA, 19 nt, Homo sapiens
  misc_RNA (1)...(19): siRNA sense strand
gauuguuugugcugcauuu

SEQ ID NO: 1146178 - RNA, 19 nt, Homo sapiens
  misc_RNA (1)...(19): siRNA sense strand
gaacaugcaauugaagaau

SEQ ID NO: 1146179 - RNA, 19 nt, Homo sapiens
  misc_RNA (1)...(19): siRNA sense strand
ccagaugcuuugugguauu

SEQ ID NO: 1146180 - RNA, 19 nt, Homo sapiens
  misc_RNA (1)...(19): siRNA sense strand
gagcuuaucgugaacuugu

SEQ ID NO: 1146181 - RNA, 19 nt, Homo sapiens
  misc_RNA (1)...(19): siRNA sense strand
ggacagcgugcacuaacuu

SEQ ID NO: 1146182 - RNA, 19 nt, Homo sapiens
  misc_RNA (1)...(19): siRNA sense strand
gaauguccuaccuucuuua

SEQ ID NO: 1146183 - RNA, 19 nt, Homo sapiens
  misc_RNA (1)...(19): siRNA sense strand
gagaacaugcaauugaaga

SEQ ID NO: 1146184 - RNA, 19 nt, Homo sapiens
  misc_RNA (1)...(19): siRNA sense strand
ccaaacucaugcaaagaga

SEQ ID NO: 1146185 - RNA, 19 nt, Homo sapiens
  misc_RNA (1)...(19): siRNA sense strand
gaugcuuugugguauuaaa

SEQ ID NO: 1146186 - RNA, 19 nt, Homo sapiens
  misc_RNA (1)...(19): siRNA sense strand
agaagaauuucaagaugug

SEQ ID NO: 1146187 - RNA, 19 nt, Homo sapiens
  misc_RNA (1)...(19): siRNA sense strand
ggaagaaagaagcaagaau

SEQ ID NO: 1146188 - RNA, 19 nt, Homo sapiens
  misc_RNA (1)...(19): siRNA sense strand
uggaauuaauggaugcuaa

SEQ ID NO: 1146189 - RNA, 19 nt, Homo sapiens
  misc_RNA (1)...(19): siRNA sense strand
guauuaaacaucugcauuc

SEQ ID NO: 1146190 - RNA, 19 nt, Homo sapiens
  misc_RNA (1)...(19): siRNA sense strand
gguauuaaacaucugcauu

SEQ ID NO: 1146191 - RNA, 19 nt, Homo sapiens
  misc_RNA (1)...(19): siRNA sense strand
caacugugaggaauuaugu

SEQ ID NO: 1146192 - RNA, 19 nt, Homo sapiens
  misc_RNA (1)...(19): siRNA sense strand
aaacuucagccaacuguga

SEQ ID NO: 1146193 - RNA, 19 nt, Homo sapiens
  misc_RNA (1)...(19): siRNA sense strand
caaagagaacguugauauc

SEQ ID NO: 1146194 - RNA, 19 nt, Homo sapiens
  misc_RNA (1)...(19): siRNA sense strand
gaagucauccuggguaugg

SEQ ID NO: 1146195 - RNA, 19 nt, Homo sapiens
  misc_RNA (1)...(19): siRNA sense strand
agccaacugugaggaauua

SEQ ID NO: 1146196 - RNA, 19 nt, Homo sapiens
  misc_RNA (1)...(19): siRNA sense strand
gagagcuuaucgugaacuu

SEQ ID NO: 1146197 - RNA, 19 nt, Homo sapiens
  misc_RNA (1)...(19): siRNA sense strand
ggaagaaagagaacaugca

SEQ ID NO: 1146198 - RNA, 19 nt, Homo sapiens
  misc_RNA (1)...(19): siRNA sense strand
ugaagauccuugacuuugg

SEQ ID NO: 1146199 - RNA, 19 nt, Homo sapiens
  misc_RNA (1)...(19): siRNA sense strand
ucgugaacuuguccucuua

SEQ ID NO: 1146200 - RNA, 19 nt, Homo sapiens
  misc_RNA (1)...(19): siRNA sense strand
gugaacuuguccucuuaaa

SEQ ID NO: 1146201 - RNA, 19 nt, Homo sapiens
  misc_RNA (1)...(19): siRNA sense strand
ggaauuaugucgaaaacag

SEQ ID NO: 1146202 - RNA, 19 nt, Homo sapiens
  misc_RNA (1)...(19): siRNA sense strand
gaaacuaagccguccuuuu

SEQ ID NO: 1146203 - RNA, 19 nt, Homo sapiens
  misc_RNA (1)...(19): siRNA sense strand
gaaaacagaccaaaguauc

SEQ ID NO: 1146204 - RNA, 19 nt, Homo sapiens
  misc_RNA (1)...(19): siRNA sense strand
gaacaccaucagcagaguu

SEQ ID NO: 1146205 - RNA, 19 nt, Homo sapiens
  misc_RNA (1)...(19): siRNA sense strand
cagcugguauaauucauag

SEQ ID NO: 1146206 - RNA, 19 nt, Homo sapiens
  misc_RNA (1)...(19): siRNA sense strand
uaauggaugcuaacuuaug

SEQ ID NO: 1146207 - RNA, 19 nt, Homo sapiens
  misc_RNA (1)...(19): siRNA sense strand
agucauggauugggaagaa

SEQ ID NO: 1146208 - RNA, 19 nt, Homo sapiens
  misc_RNA (1)...(19): siRNA sense strand
gaagaauggaaagagcuaa

SEQ ID NO: 1146209 - RNA, 19 nt, Homo sapiens
  misc_RNA (1)...(19): siRNA sense strand
ugugaggaauuaugucgaa

SEQ ID NO: 1146210 - RNA, 19 nt, Homo sapiens
  misc_RNA (1)...(19): siRNA sense strand
agaccaaaguauccuggaa

SEQ ID NO: 1146211 - RNA, 19 nt, Homo sapiens
  misc_RNA (1)...(19): siRNA sense strand
gcuggaucaugaaagaaug

SEQ ID NO: 1146212 - RNA, 19 nt, Homo sapiens
  misc_RNA (1)...(19): siRNA sense strand
uuacaaagaagucauggau

SEQ ID NO: 1146213 - RNA, 19 nt, Homo sapiens
  misc_RNA (1)...(19): siRNA sense strand
acccauacaucacuguuug

SEQ ID NO: 1146214 - RNA, 19 nt, Homo sapiens
  misc_RNA (1)...(19): siRNA sense strand
acaagcggaucucuguaga

SEQ ID NO: 1146215 - RNA, 19 nt, Homo sapiens
  misc_RNA (1)...(19): siRNA sense strand
aaacaagucaagccagaga

SEQ ID NO: 1146216 - RNA, 19 nt, Homo sapiens
  misc_RNA (1)...(19): siRNA sense strand
aauggaugcuaacuuaugu

SEQ ID NO: 1146217 - RNA, 19 nt, Homo sapiens
  misc_RNA (1)...(19): siRNA sense strand
ucagcagaguucaugaaga

SEQ ID NO: 1146218 - RNA, 19 nt, Homo sapiens
  misc_RNA (1)...(19): siRNA sense strand
aagagaacguugauaucug

SEQ ID NO: 1146219 - RNA, 19 nt, Homo sapiens
  misc_RNA (1)...(19): siRNA sense strand
caucugcauucagcuggua

SEQ ID NO: 1146220 - RNA, 19 nt, Homo sapiens
  misc_RNA (1)...(19): siRNA sense strand
aaacuaagccguccuuuuc

SEQ ID NO: 1146221 - RNA, 19 nt, Homo sapiens
  misc_RNA (1)...(19): siRNA sense strand
cccaccaccucaaauuuau

SEQ ID NO: 1146222 - RNA, 19 nt, Homo sapiens
  misc_RNA (1)...(19): siRNA sense strand
gacaagcggaucucuguag

SEQ ID NO: 1146223 - RNA, 19 nt, Homo sapiens
  misc_RNA (1)...(19): siRNA sense strand
gaccaaaguauccuggaau

SEQ ID NO: 1146224 - RNA, 19 nt, Homo sapiens
  misc_RNA (1)...(19): siRNA sense strand
ggaacaccaucagcagagu

SEQ ID NO: 1146225 - RNA, 19 nt, Homo sapiens
  misc_RNA (1)...(19): siRNA sense strand
aaagagaacguugauaucu

SEQ ID NO: 1146226 - RNA, 19 nt, Homo sapiens
  misc_RNA (1)...(19): siRNA sense strand
uuugaagccuagcaacauu

SEQ ID NO: 1146227 - RNA, 19 nt, Homo sapiens
  misc_RNA (1)...(19): siRNA sense strand
ccaguuggaagaaagagaa

SEQ ID NO: 1146228 - RNA, 19 nt, Homo sapiens
  misc_RNA (1)...(19): siRNA sense strand
gauuggauauucccaucag

SEQ ID NO: 1146229 - RNA, 19 nt, Homo sapiens
  misc_RNA (1)...(19): siRNA sense strand
ugaagaauggaaagagcua

SEQ ID NO: 1146230 - RNA, 19 nt, Homo sapiens
  misc_RNA (1)...(19): siRNA sense strand
aacaugcaauugaagaaug

SEQ ID NO: 1146231 - RNA, 19 nt, Homo sapiens
  misc_RNA (1)...(19): siRNA sense strand
ucacuguccuaaaacguua

SEQ ID NO: 1146232 - RNA, 19 nt, Homo sapiens
  misc_RNA (1)...(19): siRNA sense strand
gaagcaagaaugguguugu

SEQ ID NO: 1146233 - RNA, 19 nt, Homo sapiens
  misc_RNA (1)...(19): siRNA sense strand
ugaaagaauguccuaccuu

SEQ ID NO: 1146234 - RNA, 19 nt, Homo sapiens
  misc_RNA (1)...(19): siRNA sense strand
gggaagaaagaagcaagaa

SEQ ID NO: 1146235 - RNA, 19 nt, Homo sapiens
  misc_RNA (1)...(19): siRNA sense strand
gcaauugaagaauggaaag

SEQ ID NO: 1146236 - RNA, 19 nt, Homo sapiens
  misc_RNA (1)...(19): siRNA sense strand
cuacaaagagaacguugau

SEQ ID NO: 1146237 - RNA, 19 nt, Homo sapiens
  misc_RNA (1)...(19): siRNA sense strand
uguccuaccuucuuuacca

SEQ ID NO: 1146238 - RNA, 19 nt, Homo sapiens
  misc_RNA (1)...(19): siRNA sense strand
gauacaguucuugggauaa

SEQ ID NO: 1146239 - RNA, 19 nt, Homo sapiens
  misc_RNA (1)...(19): siRNA sense strand
agaaugguguuguaaaaga

SEQ ID NO: 1146240 - RNA, 19 nt, Homo sapiens
  misc_RNA (1)...(19): siRNA sense strand
caucagcagaguucaugaa

SEQ ID NO: 1146241 - RNA, 19 nt, Homo sapiens
  misc_RNA (1)...(19): siRNA sense strand
gcuacaaagagaacguuga

SEQ ID NO: 1146242 - RNA, 19 nt, Homo sapiens
  misc_RNA (1)...(19): siRNA sense strand
gauuugaagccuagcaaca

SEQ ID NO: 1146243 - RNA, 19 nt, Homo sapiens
  misc_RNA (1)...(19): siRNA sense strand
ucagcugguauaauucaua

SEQ ID NO: 1146244 - RNA, 19 nt, Homo sapiens
  misc_RNA (1)...(19): siRNA sense strand
ccgaagucauccuggguau

SEQ ID NO: 1146245 - RNA, 19 nt, Homo sapiens
  misc_RNA (1)...(19): siRNA sense strand
gcagaguucaugaagaaac

SEQ ID NO: 1146246 - RNA, 19 nt, Homo sapiens
  misc_RNA (1)...(19): siRNA sense strand
gacagucaguuuuauagug

SEQ ID NO: 1146247 - RNA, 19 nt, Homo sapiens
  misc_RNA (1)...(19): siRNA sense strand
caccaccucaaauuuauga

SEQ ID NO: 1146248 - RNA, 19 nt, Homo sapiens
  misc_RNA (1)...(19): siRNA sense strand
ggaaagagcuaauuuacaa

SEQ ID NO: 1146249 - RNA, 19 nt, Homo sapiens
  misc_RNA (1)...(19): siRNA sense strand
gcauucagcugguauaauu

SEQ ID NO: 1146250 - RNA, 19 nt, Homo sapiens
  misc_RNA (1)...(19): siRNA sense strand
gaaccaaacucaugcaaag

SEQ ID NO: 1146251 - RNA, 19 nt, Homo sapiens
  misc_RNA (1)...(19): siRNA sense strand
aaagagagcuuaucgugaa

SEQ ID NO: 1146252 - RNA, 19 nt, Homo sapiens
  misc_RNA (1)...(19): siRNA sense strand
caagauguguauuugguua

SEQ ID NO: 1146253 - RNA, 19 nt, Homo sapiens
  misc_RNA (1)...(19): siRNA sense strand
gaagaaagaagcaagaaug

SEQ ID NO: 1146254 - RNA, 19 nt, Homo sapiens
  misc_RNA (1)...(19): siRNA sense strand
cagcagaguucaugaagaa

SEQ ID NO: 1146255 - RNA, 19 nt, Homo sapiens
  misc_RNA (1)...(19): siRNA sense strand
acaaagaagucauggauug

SEQ ID NO: 1146256 - RNA, 19 nt, Homo sapiens
  misc_RNA (1)...(19): siRNA sense strand
ggagcuggaucaugaaaga

SEQ ID NO: 1146257 - RNA, 19 nt, Homo sapiens
  misc_RNA (1)...(19): siRNA sense strand
gguaugggcuacaaagaga

SEQ ID NO: 1146258 - RNA, 19 nt, Homo sapiens
  misc_RNA (1)...(19): siRNA sense strand
gcggaucucuguagacgaa

SEQ ID NO: 1146259 - RNA, 19 nt, Homo sapiens
  misc_RNA (1)...(19): siRNA sense strand
gaauggaaagagcuaauuu

SEQ ID NO: 1146260 - RNA, 19 nt, Homo sapiens
  misc_RNA (1)...(19): siRNA sense strand
gaucaguggaauaaaguua

SEQ ID NO: 1146261 - RNA, 19 nt, Homo sapiens
  misc_RNA (1)...(19): siRNA sense strand
gaagaaagagaacaugcaa

SEQ ID NO: 1146262 - RNA, 19 nt, Homo sapiens
  misc_RNA (1)...(19): siRNA sense strand
aaagagaacaugcaauuga

SEQ ID NO: 1146263 - RNA, 19 nt, Homo sapiens
  misc_RNA (1)...(19): siRNA sense strand
gcaagaaugguguuguaaa

SEQ ID NO: 1146264 - RNA, 19 nt, Homo sapiens
  misc_RNA (1)...(19): siRNA sense strand
cagaugcuuugugguauua

SEQ ID NO: 1146265 - RNA, 19 nt, Homo sapiens
  misc_RNA (1)...(19): siRNA sense strand
aaaguauccuggaaucaaa

SEQ ID NO: 1146266 - RNA, 19 nt, Homo sapiens
  misc_RNA (1)...(19): siRNA sense strand
agaaagagaacaugcaauu

SEQ ID NO: 1146267 - RNA, 19 nt, Homo sapiens
  misc_RNA (1)...(19): siRNA sense strand
aagcaagaaugguguugua

SEQ ID NO: 1146268 - RNA, 19 nt, Homo sapiens
  misc_RNA (1)...(19): siRNA sense strand
ugauacaguucuugggaua

SEQ ID NO: 1146269 - RNA, 19 nt, Homo sapiens
  misc_RNA (1)...(19): siRNA sense strand
gaaagagaacaugcaauug

SEQ ID NO: 1146270 - RNA, 19 nt, Homo sapiens
  misc_RNA (1)...(19): siRNA sense strand
cuagaagaauuucaagaug

SEQ ID NO: 1146271 - RNA, 19 nt, Homo sapiens
  misc_RNA (1)...(19): siRNA sense strand
acaaagagaacguugauau

SEQ ID NO: 1146272 - RNA, 19 nt, Homo sapiens
  misc_RNA (1)...(19): siRNA sense strand
caagaaugguguuguaaaa

SEQ ID NO: 1146273 - RNA, 19 nt, Homo sapiens
  misc_RNA (1)...(19): siRNA sense strand
gaacuuguccucuuaaaau

SEQ ID NO: 1146274 - RNA, 19 nt, Homo sapiens
  misc_RNA (1)...(19): siRNA sense strand
aagagaacaugcaauugaa

SEQ ID NO: 1146275 - RNA, 19 nt, Homo sapiens
  misc_RNA (1)...(19): siRNA sense strand
caaaguauccuggaaucaa

SEQ ID NO: 1146276 - RNA, 19 nt, Homo sapiens
  misc_RNA (1)...(19): siRNA sense strand
gagcuaauuuacaaagaag

SEQ ID NO: 1146277 - RNA, 19 nt, Homo sapiens
  misc_RNA (1)...(19): siRNA sense strand
gauuguuugugcugcauuu

SEQ ID NO: 1146278 - RNA, 19 nt, Homo sapiens
  misc_RNA (1)...(19): siRNA sense strand
gaacaugcaauugaagaau

SEQ ID NO: 1146279 - RNA, 19 nt, Homo sapiens
  misc_RNA (1)...(19): siRNA sense strand
ccagaugcuuugugguauu

SEQ ID NO: 1146280 - RNA, 19 nt, Homo sapiens
  misc_RNA (1)...(19): siRNA sense strand
gagcuuaucgugaacuugu

SEQ ID NO: 1146281 - RNA, 19 nt, Homo sapiens
  misc_RNA (1)...(19): siRNA sense strand
ggacagcgugcacuaacuu

SEQ ID NO: 1146282 - RNA, 19 nt, Homo sapiens
  misc_RNA (1)...(19): siRNA sense strand
gaauguccuaccuucuuua

SEQ ID NO: 1146283 - RNA, 19 nt, Homo sapiens
  misc_RNA (1)...(19): siRNA sense strand
gagaacaugcaauugaaga

SEQ ID NO: 1146284 - RNA, 19 nt, Homo sapiens
  misc_RNA (1)...(19): siRNA sense strand
ccaaacucaugcaaagaga

SEQ ID NO: 1146285 - RNA, 19 nt, Homo sapiens
  misc_RNA (1)...(19): siRNA sense strand
gaugcuuugugguauuaaa

SEQ ID NO: 1146286 - RNA, 19 nt, Homo sapiens
  misc_RNA (1)...(19): siRNA sense strand
agaagaauuucaagaugug

SEQ ID NO: 1146287 - RNA, 19 nt, Homo sapiens
  misc_RNA (1)...(19): siRNA sense strand
ggaagaaagaagcaagaau

SEQ ID NO: 1146288 - RNA, 19 nt, Homo sapiens
  misc_RNA (1)...(19): siRNA sense strand
uggaauuaauggaugcuaa

SEQ ID NO: 1146289 - RNA, 19 nt, Homo sapiens
  misc_RNA (1)...(19): siRNA sense strand
guauuaaacaucugcauuc

SEQ ID NO: 1146290 - RNA, 19 nt, Homo sapiens
  misc_RNA (1)...(19): siRNA sense strand
gguauuaaacaucugcauu

SEQ ID NO: 1146291 - RNA, 19 nt, Homo sapiens
  misc_RNA (1)...(19): siRNA sense strand
caacugugaggaauuaugu

SEQ ID NO: 1146292 - RNA, 19 nt, Homo sapiens
  misc_RNA (1)...(19): siRNA sense strand
aaacuucagccaacuguga

SEQ ID NO: 1146293 - RNA, 19 nt, Homo sapiens
  misc_RNA (1)...(19): siRNA sense strand
caaagagaacguugauauc

SEQ ID NO: 1146294 - RNA, 19 nt, Homo sapiens
  misc_RNA (1)...(19): siRNA sense strand
gaagucauccuggguaugg

SEQ ID NO: 1146295 - RNA, 19 nt, Homo sapiens
  misc_RNA (1)...(19): siRNA sense strand
agccaacugugaggaauua

SEQ ID NO: 1146296 - RNA, 19 nt, Homo sapiens
  misc_RNA (1)...(19): siRNA sense strand
gagagcuuaucgugaacuu

SEQ ID NO: 1146297 - RNA, 19 nt, Homo sapiens
  misc_RNA (1)...(19): siRNA sense strand
ggaagaaagagaacaugca

SEQ ID NO: 1146298 - RNA, 19 nt, Homo sapiens
  misc_RNA (1)...(19): siRNA sense strand
ugaagauccuugacuuugg

SEQ ID NO: 1146299 - RNA, 19 nt, Homo sapiens
  misc_RNA (1)...(19): siRNA sense strand
ucgugaacuuguccucuua

SEQ ID NO: 1146300 - RNA, 19 nt, Homo sapiens
  misc_RNA (1)...(19): siRNA sense strand
gugaacuuguccucuuaaa

SEQ ID NO: 1146301 - RNA, 19 nt, Homo sapiens
  misc_RNA (1)...(19): siRNA sense strand
ggaauuaugucgaaaacag

SEQ ID NO: 1146302 - RNA, 19 nt, Homo sapiens
  misc_RNA (1)...(19): siRNA sense strand
gaaacuaagccguccuuuu

SEQ ID NO: 1146303 - RNA, 19 nt, Homo sapiens
  misc_RNA (1)...(19): siRNA sense strand
gaaaacagaccaaaguauc

SEQ ID NO: 1146304 - RNA, 19 nt, Homo sapiens
  misc_RNA (1)...(19): siRNA sense strand
gaacaccaucagcagaguu

SEQ ID NO: 1146305 - RNA, 19 nt, Homo sapiens
  misc_RNA (1)...(19): siRNA sense strand
cagcugguauaauucauag

SEQ ID NO: 1146306 - RNA, 19 nt, Homo sapiens
  misc_RNA (1)...(19): siRNA sense strand
uaauggaugcuaacuuaug

SEQ ID NO: 1146307 - RNA, 19 nt, Homo sapiens
  misc_RNA (1)...(19): siRNA sense strand
agucauggauugggaagaa

SEQ ID NO: 1146308 - RNA, 19 nt, Homo sapiens
  misc_RNA (1)...(19): siRNA sense strand
gaagaauggaaagagcuaa

SEQ ID NO: 1146309 - RNA, 19 nt, Homo sapiens
  misc_RNA (1)...(19): siRNA sense strand
ugugaggaauuaugucgaa

SEQ ID NO: 1146310 - RNA, 19 nt, Homo sapiens
  misc_RNA (1)...(19): siRNA sense strand
agaccaaaguauccuggaa

SEQ ID NO: 1146311 - RNA, 19 nt, Homo sapiens
  misc_RNA (1)...(19): siRNA sense strand
gcuggaucaugaaagaaug

SEQ ID NO: 1146312 - RNA, 19 nt, Homo sapiens
  misc_RNA (1)...(19): siRNA sense strand
uuacaaagaagucauggau

SEQ ID NO: 1146313 - RNA, 19 nt, Homo sapiens
  misc_RNA (1)...(19): siRNA sense strand
acccauacaucacuguuug

SEQ ID NO: 1146314 - RNA, 19 nt, Homo sapiens
  misc_RNA (1)...(19): siRNA sense strand
acaagcggaucucuguaga

SEQ ID NO: 1146315 - RNA, 19 nt, Homo sapiens
  misc_RNA (1)...(19): siRNA sense strand
aaacaagucaagccagaga

SEQ ID NO: 1146316 - RNA, 19 nt, Homo sapiens
  misc_RNA (1)...(19): siRNA sense strand
aauggaugcuaacuuaugu

SEQ ID NO: 1146317 - RNA, 19 nt, Homo sapiens
  misc_RNA (1)...(19): siRNA sense strand
ucagcagaguucaugaaga

SEQ ID NO: 1146318 - RNA, 19 nt, Homo sapiens
  misc_RNA (1)...(19): siRNA sense strand
aagagaacguugauaucug

SEQ ID NO: 1146319 - RNA, 19 nt, Homo sapiens
  misc_RNA (1)...(19): siRNA sense strand
caucugcauucagcuggua

SEQ ID NO: 1146320 - RNA, 19 nt, Homo sapiens
  misc_RNA (1)...(19): siRNA sense strand
aaacuaagccguccuuuuc

SEQ ID NO: 1146321 - RNA, 19 nt, Homo sapiens
  misc_RNA (1)...(19): siRNA sense strand
cccaccaccucaaauuuau

SEQ ID NO: 1146322 - RNA, 19 nt, Homo sapiens
  misc_RNA (1)...(19): siRNA sense strand
gacaagcggaucucuguag

SEQ ID NO: 1146323 - RNA, 19 nt, Homo sapiens
  misc_RNA (1)...(19): siRNA sense strand
gaccaaaguauccuggaau

SEQ ID NO: 1146324 - RNA, 19 nt, Homo sapiens
  misc_RNA (1)...(19): siRNA sense strand
ggaacaccaucagcagagu

SEQ ID NO: 1146325 - RNA, 19 nt, Homo sapiens
  misc_RNA (1)...(19): siRNA sense strand
aaagagaacguugauaucu

SEQ ID NO: 1146326 - RNA, 19 nt, Homo sapiens
  misc_RNA (1)...(19): siRNA sense strand
uuugaagccuagcaacauu

SEQ ID NO: 1146327 - RNA, 19 nt, Homo sapiens
  misc_RNA (1)...(19): siRNA sense strand
ccaguuggaagaaagagaa

SEQ ID NO: 1146328 - RNA, 19 nt, Homo sapiens
  misc_RNA (1)...(19): siRNA sense strand
gauuggauauucccaucag

SEQ ID NO: 1146329 - RNA, 19 nt, Homo sapiens
  misc_RNA (1)...(19): siRNA sense strand
ugaagaauggaaagagcua

SEQ ID NO: 1146330 - RNA, 19 nt, Homo sapiens
  misc_RNA (1)...(19): siRNA sense strand
aacaugcaauugaagaaug

SEQ ID NO: 1146331 - RNA, 19 nt, Homo sapiens
  misc_RNA (1)...(19): siRNA sense strand
ucacuguccuaaaacguua

SEQ ID NO: 1146332 - RNA, 19 nt, Homo sapiens
  misc_RNA (1)...(19): siRNA sense strand
gaagcaagaaugguguugu

SEQ ID NO: 1146333 - RNA, 19 nt, Homo sapiens
  misc_RNA (1)...(19): siRNA sense strand
ugaaagaauguccuaccuu

SEQ ID NO: 1146334 - RNA, 19 nt, Homo sapiens
  misc_RNA (1)...(19): siRNA sense strand
gggaagaaagaagcaagaa

SEQ ID NO: 1146335 - RNA, 19 nt, Homo sapiens
  misc_RNA (1)...(19): siRNA sense strand
gcaauugaagaauggaaag

SEQ ID NO: 1146336 - RNA, 19 nt, Homo sapiens
  misc_RNA (1)...(19): siRNA sense strand
cuacaaagagaacguugau

SEQ ID NO: 1146337 - RNA, 19 nt, Homo sapiens
  misc_RNA (1)...(19): siRNA sense strand
uguccuaccuucuuuacca

SEQ ID NO: 1146338 - RNA, 19 nt, Homo sapiens
  misc_RNA (1)...(19): siRNA sense strand
gauacaguucuugggauaa

SEQ ID NO: 1146339 - RNA, 19 nt, Homo sapiens
  misc_RNA (1)...(19): siRNA sense strand
agaaugguguuguaaaaga

SEQ ID NO: 1146340 - RNA, 19 nt, Homo sapiens
  misc_RNA (1)...(19): siRNA sense strand
caucagcagaguucaugaa

SEQ ID NO: 1146341 - RNA, 19 nt, Homo sapiens
  misc_RNA (1)...(19): siRNA sense strand
gcuacaaagagaacguuga

SEQ ID NO: 1146342 - RNA, 19 nt, Homo sapiens
  misc_RNA (1)...(19): siRNA sense strand
gauuugaagccuagcaaca

SEQ ID NO: 1146343 - RNA, 19 nt, Homo sapiens
  misc_RNA (1)...(19): siRNA sense strand
ucagcugguauaauucaua

SEQ ID NO: 1146344 - RNA, 19 nt, Homo sapiens
  misc_RNA (1)...(19): siRNA sense strand
ccgaagucauccuggguau

SEQ ID NO: 1146345 - RNA, 19 nt, Homo sapiens
  misc_RNA (1)...(19): siRNA sense strand
gcagaguucaugaagaaac

SEQ ID NO: 1146346 - RNA, 19 nt, Homo sapiens
  misc_RNA (1)...(19): siRNA sense strand
gacagucaguuuuauagug

SEQ ID NO: 1146347 - RNA, 19 nt, Homo sapiens
  misc_RNA (1)...(19): siRNA sense strand
caccaccucaaauuuauga

SEQ ID NO: 1146348 - RNA, 19 nt, Homo sapiens
  misc_RNA (1)...(19): siRNA sense strand
ggaaagagcuaauuuacaa

SEQ ID NO: 1146349 - RNA, 19 nt, Homo sapiens
  misc_RNA (1)...(19): siRNA sense strand
gcauucagcugguauaauu

SEQ ID NO: 1146350 - RNA, 19 nt, Homo sapiens
  misc_RNA (1)...(19): siRNA sense strand
gaaccaaacucaugcaaag

SEQ ID NO: 1146351 - RNA, 19 nt, Homo sapiens
  misc_RNA (1)...(19): siRNA sense strand
aaagagagcuuaucgugaa

SEQ ID NO: 1146352 - RNA, 19 nt, Homo sapiens
  misc_RNA (1)...(19): siRNA sense strand
caagauguguauuugguua

SEQ ID NO: 1146353 - RNA, 19 nt, Homo sapiens
  misc_RNA (1)...(19): siRNA sense strand
gaagaaagaagcaagaaug

SEQ ID NO: 1146354 - RNA, 19 nt, Homo sapiens
  misc_RNA (1)...(19): siRNA sense strand
cagcagaguucaugaagaa

SEQ ID NO: 1146355 - RNA, 19 nt, Homo sapiens
  misc_RNA (1)...(19): siRNA sense strand
acaaagaagucauggauug

SEQ ID NO: 1146356 - RNA, 19 nt, Homo sapiens
  misc_RNA (1)...(19): siRNA sense strand
ggagcuggaucaugaaaga

SEQ ID NO: 1146357 - RNA, 19 nt, Homo sapiens
  misc_RNA (1)...(19): siRNA sense strand
gguaugggcuacaaagaga

SEQ ID NO: 1146358 - RNA, 19 nt, Homo sapiens
  misc_RNA (1)...(19): siRNA sense strand
gcggaucucuguagacgaa

SEQ ID NO: 1146359 - RNA, 19 nt, Homo sapiens
  misc_RNA (1)...(19): siRNA sense strand
gaauggaaagagcuaauuu

SEQ ID NO: 1146360 - RNA, 19 nt, Homo sapiens
  misc_RNA (1)...(19): siRNA sense strand
gaucaguggaauaaaguua

SEQ ID NO: 1146361 - RNA, 19 nt, Homo sapiens
  misc_RNA (1)...(19): siRNA sense strand
gaagaaagagaacaugcaa

SEQ ID NO: 1146362 - RNA, 19 nt, Homo sapiens
  misc_RNA (1)...(19): siRNA sense strand
aaagagaacaugcaauuga

SEQ ID NO: 1146363 - RNA, 19 nt, Homo sapiens
  misc_RNA (1)...(19): siRNA sense strand
gcaagaaugguguuguaaa

SEQ ID NO: 1146364 - RNA, 19 nt, Homo sapiens
  misc_RNA (1)...(19): siRNA sense strand
cagaugcuuugugguauua

SEQ ID NO: 1146365 - RNA, 19 nt, Homo sapiens
  misc_RNA (1)...(19): siRNA sense strand
aaaguauccuggaaucaaa

SEQ ID NO: 1146366 - RNA, 19 nt, Homo sapiens
  misc_RNA (1)...(19): siRNA sense strand
agaaagagaacaugcaauu

SEQ ID NO: 1146367 - RNA, 19 nt, Homo sapiens
  misc_RNA (1)...(19): siRNA sense strand
aagcaagaaugguguugua

SEQ ID NO: 1146368 - RNA, 19 nt, Homo sapiens
  misc_RNA (1)...(19): siRNA sense strand
ugauacaguucuugggaua

SEQ ID NO: 1146369 - RNA, 19 nt, Homo sapiens
  misc_RNA (1)...(19): siRNA sense strand
gaaagagaacaugcaauug

SEQ ID NO: 1146370 - RNA, 19 nt, Homo sapiens
  misc_RNA (1)...(19): siRNA sense strand
cuagaagaauuucaagaug

SEQ ID NO: 1146371 - RNA, 19 nt, Homo sapiens
  misc_RNA (1)...(19): siRNA sense strand
acaaagagaacguugauau

SEQ ID NO: 1146372 - RNA, 19 nt, Homo sapiens
  misc_RNA (1)...(19): siRNA sense strand
caagaaugguguuguaaaa

SEQ ID NO: 1146373 - RNA, 19 nt, Homo sapiens
  misc_RNA (1)...(19): siRNA sense strand
gaacuuguccucuuaaaau

SEQ ID NO: 1146374 - RNA, 19 nt, Homo sapiens
  misc_RNA (1)...(19): siRNA sense strand
aagagaacaugcaauugaa

SEQ ID NO: 1146375 - RNA, 19 nt, Homo sapiens
  misc_RNA (1)...(19): siRNA sense strand
caaaguauccuggaaucaa

SEQ ID NO: 1146376 - RNA, 19 nt, Homo sapiens
  misc_RNA (1)...(19): siRNA sense strand
gagcuaauuuacaaagaag

SEQ ID NO: 1146377 - RNA, 19 nt, Homo sapiens
  misc_RNA (1)...(19): siRNA sense strand
gauuguuugugcugcauuu

SEQ ID NO: 1146378 - RNA, 19 nt, Homo sapiens
  misc_RNA (1)...(19): siRNA sense strand
gaacaugcaauugaagaau

SEQ ID NO: 1146379 - RNA, 19 nt, Homo sapiens
  misc_RNA (1)...(19): siRNA sense strand
ccagaugcuuugugguauu

SEQ ID NO: 1146380 - RNA, 19 nt, Homo sapiens
  misc_RNA (1)...(19): siRNA sense strand
gagcuuaucgugaacuugu

SEQ ID NO: 1146381 - RNA, 19 nt, Homo sapiens
  misc_RNA (1)...(19): siRNA sense strand
ggacagcgugcacuaacuu

SEQ ID NO: 1146382 - RNA, 19 nt, Homo sapiens
  misc_RNA (1)...(19): siRNA sense strand
gaauguccuaccuucuuua

SEQ ID NO: 1146383 - RNA, 19 nt, Homo sapiens
  misc_RNA (1)...(19): siRNA sense strand
gagaacaugcaauugaaga

SEQ ID NO: 1146384 - RNA, 19 nt, Homo sapiens
  misc_RNA (1)...(19): siRNA sense strand
ccaaacucaugcaaagaga

SEQ ID NO: 1146385 - RNA, 19 nt, Homo sapiens
  misc_RNA (1)...(19): siRNA sense strand
gaugcuuugugguauuaaa

SEQ ID NO: 1146386 - RNA, 19 nt, Homo sapiens
  misc_RNA (1)...(19): siRNA sense strand
agaagaauuucaagaugug

SEQ ID NO: 1146387 - RNA, 19 nt, Homo sapiens
  misc_RNA (1)...(19): siRNA sense strand
ggaagaaagaagcaagaau

SEQ ID NO: 1146388 - RNA, 19 nt, Homo sapiens
  misc_RNA (1)...(19): siRNA sense strand
uggaauuaauggaugcuaa

SEQ ID NO: 1146389 - RNA, 19 nt, Homo sapiens
  misc_RNA (1)...(19): siRNA sense strand
guauuaaacaucugcauuc

SEQ ID NO: 1146390 - RNA, 19 nt, Homo sapiens
  misc_RNA (1)...(19): siRNA sense strand
gguauuaaacaucugcauu

SEQ ID NO: 1146391 - RNA, 19 nt, Homo sapiens
  misc_RNA (1)...(19): siRNA sense strand
caacugugaggaauuaugu

SEQ ID NO: 1146392 - RNA, 19 nt, Homo sapiens
  misc_RNA (1)...(19): siRNA sense strand
aaacuucagccaacuguga

SEQ ID NO: 1146393 - RNA, 19 nt, Homo sapiens
  misc_RNA (1)...(19): siRNA sense strand
caaagagaacguugauauc

SEQ ID NO: 1146394 - RNA, 19 nt, Homo sapiens
  misc_RNA (1)...(19): siRNA sense strand
gaagucauccuggguaugg

SEQ ID NO: 1146395 - RNA, 19 nt, Homo sapiens
  misc_RNA (1)...(19): siRNA sense strand
agccaacugugaggaauua

SEQ ID NO: 1146396 - RNA, 19 nt, Homo sapiens
  misc_RNA (1)...(19): siRNA sense strand
gagagcuuaucgugaacuu

SEQ ID NO: 1146397 - RNA, 19 nt, Homo sapiens
  misc_RNA (1)...(19): siRNA sense strand
ggaagaaagagaacaugca

SEQ ID NO: 1146398 - RNA, 19 nt, Homo sapiens
  misc_RNA (1)...(19): siRNA sense strand
ugaagauccuugacuuugg

SEQ ID NO: 1146399 - RNA, 19 nt, Homo sapiens
  misc_RNA (1)...(19): siRNA sense strand
ucgugaacuuguccucuua

SEQ ID NO: 1146400 - RNA, 19 nt, Homo sapiens
  misc_RNA (1)...(19): siRNA sense strand
gugaacuuguccucuuaaa

SEQ ID NO: 1146401 - RNA, 19 nt, Homo sapiens
  misc_RNA (1)...(19): siRNA sense strand
ggaauuaugucgaaaacag

SEQ ID NO: 1146402 - RNA, 19 nt, Homo sapiens
  misc_RNA (1)...(19): siRNA sense strand
gaaacuaagccguccuuuu

SEQ ID NO: 1146403 - RNA, 19 nt, Homo sapiens
  misc_RNA (1)...(19): siRNA sense strand
uuucauccauguccacuga

SEQ ID NO: 1146404 - RNA, 19 nt, Homo sapiens
  misc_RNA (1)...(19): siRNA sense strand
gaaaacagaccaaaguauc

SEQ ID NO: 1146405 - RNA, 19 nt, Homo sapiens
  misc_RNA (1)...(19): siRNA sense strand
gaacaccaucagcagaguu

SEQ ID NO: 1146406 - RNA, 19 nt, Homo sapiens
  misc_RNA (1)...(19): siRNA sense strand
cagcugguauaauucauag

SEQ ID NO: 1146407 - RNA, 19 nt, Homo sapiens
  misc_RNA (1)...(19): siRNA sense strand
uaauggaugcuaacuuaug

SEQ ID NO: 1146408 - RNA, 19 nt, Homo sapiens
  misc_RNA (1)...(19): siRNA sense strand
agucauggauugggaagaa

SEQ ID NO: 1146409 - RNA, 19 nt, Homo sapiens
  misc_RNA (1)...(19): siRNA sense strand
gaagaauggaaagagcuaa

SEQ ID NO: 1146410 - RNA, 19 nt, Homo sapiens
  misc_RNA (1)...(19): siRNA sense strand
ugugaggaauuaugucgaa

SEQ ID NO: 1146411 - RNA, 19 nt, Homo sapiens
  misc_RNA (1)...(19): siRNA sense strand
agaccaaaguauccuggaa

SEQ ID NO: 1146412 - RNA, 19 nt, Homo sapiens
  misc_RNA (1)...(19): siRNA sense strand
gcuggaucaugaaagaaug

SEQ ID NO: 1146413 - RNA, 19 nt, Homo sapiens
  misc_RNA (1)...(19): siRNA sense strand
uuacaaagaagucauggau

SEQ ID NO: 1146414 - RNA, 19 nt, Homo sapiens
  misc_RNA (1)...(19): siRNA sense strand
acccauacaucacuguuug

SEQ ID NO: 1146415 - RNA, 19 nt, Homo sapiens
  misc_RNA (1)...(19): siRNA sense strand
acaagcggaucucuguaga

SEQ ID NO: 1146416 - RNA, 19 nt, Homo sapiens
  misc_RNA (1)...(19): siRNA sense strand
aaacaagucaagccagaga

SEQ ID NO: 1146417 - RNA, 19 nt, Homo sapiens
  misc_RNA (1)...(19): siRNA sense strand
aauggaugcuaacuuaugu

SEQ ID NO: 1146418 - RNA, 19 nt, Homo sapiens
  misc_RNA (1)...(19): siRNA sense strand
gcaacgccacuccuucuca

SEQ ID NO: 1146419 - RNA, 19 nt, Homo sapiens
  misc_RNA (1)...(19): siRNA sense strand
ucagcagaguucaugaaga

SEQ ID NO: 1146420 - RNA, 19 nt, Homo sapiens
  misc_RNA (1)...(19): siRNA sense strand
aagagaacguugauaucug

SEQ ID NO: 1146421 - RNA, 19 nt, Homo sapiens
  misc_RNA (1)...(19): siRNA sense strand
caucugcauucagcuggua

SEQ ID NO: 1146422 - RNA, 19 nt, Homo sapiens
  misc_RNA (1)...(19): siRNA sense strand
cccaccaccucaaauuuau

SEQ ID NO: 1146423 - RNA, 19 nt, Homo sapiens
  misc_RNA (1)...(19): siRNA sense strand
gacaagcggaucucuguag

SEQ ID NO: 1146424 - RNA, 19 nt, Homo sapiens
  misc_RNA (1)...(19): siRNA sense strand
gaccaaaguauccuggaau

SEQ ID NO: 1146425 - RNA, 19 nt, Homo sapiens
  misc_RNA (1)...(19): siRNA sense strand
ggaacaccaucagcagagu

SEQ ID NO: 1146426 - RNA, 19 nt, Homo sapiens
  misc_RNA (1)...(19): siRNA sense strand
aaagagaacguugauaucu

SEQ ID NO: 1146427 - RNA, 19 nt, Homo sapiens
  misc_RNA (1)...(19): siRNA sense strand
aaacuaagccguccuuuuc

SEQ ID NO: 1146428 - RNA, 19 nt, Homo sapiens
  misc_RNA (1)...(19): siRNA sense strand
uuugaagccuagcaacauu

SEQ ID NO: 1146429 - RNA, 19 nt, Homo sapiens
  misc_RNA (1)...(19): siRNA sense strand
ccaguuggaagaaagagaa

SEQ ID NO: 1146430 - RNA, 19 nt, Homo sapiens
  misc_RNA (1)...(19): siRNA sense strand
gauuggauauucccaucag

SEQ ID NO: 1146431 - RNA, 19 nt, Homo sapiens
  misc_RNA (1)...(19): siRNA sense strand
ugaagaauggaaagagcua

SEQ ID NO: 1146432 - RNA, 19 nt, Homo sapiens
  misc_RNA (1)...(19): siRNA sense strand
aacaugcaauugaagaaug

SEQ ID NO: 1146433 - RNA, 19 nt, Homo sapiens
  misc_RNA (1)...(19): siRNA sense strand
ucacuguccuaaaacguua

SEQ ID NO: 1146434 - RNA, 19 nt, Homo sapiens
  misc_RNA (1)...(19): siRNA sense strand
gaagcaagaaugguguugu

SEQ ID NO: 1146435 - RNA, 19 nt, Homo sapiens
  misc_RNA (1)...(19): siRNA sense strand
ugaaagaauguccuaccuu

SEQ ID NO: 1146436 - RNA, 19 nt, Homo sapiens
  misc_RNA (1)...(19): siRNA sense strand
gggaagaaagaagcaagaa

SEQ ID NO: 1146437 - RNA, 19 nt, Homo sapiens
  misc_RNA (1)...(19): siRNA sense strand
gcaauugaagaauggaaag

SEQ ID NO: 1146438 - RNA, 19 nt, Homo sapiens
  misc_RNA (1)...(19): siRNA sense strand
cuacaaagagaacguugau

SEQ ID NO: 1146439 - RNA, 19 nt, Homo sapiens
  misc_RNA (1)...(19): siRNA sense strand
uguccuaccuucuuuacca

SEQ ID NO: 1146440 - RNA, 19 nt, Homo sapiens
  misc_RNA (1)...(19): siRNA sense strand
ucagcugguauaauucaua

SEQ ID NO: 1146441 - RNA, 19 nt, Homo sapiens
  misc_RNA (1)...(19): siRNA sense strand
agaaugguguuguaaaaga

SEQ ID NO: 1146442 - RNA, 19 nt, Homo sapiens
  misc_RNA (1)...(19): siRNA sense strand
caucagcagaguucaugaa

SEQ ID NO: 1146443 - RNA, 19 nt, Homo sapiens
  misc_RNA (1)...(19): siRNA sense strand
gcuacaaagagaacguuga

SEQ ID NO: 1146444 - RNA, 19 nt, Homo sapiens
  misc_RNA (1)...(19): siRNA sense strand
gauacaguucuugggauaa

SEQ ID NO: 1146445 - RNA, 19 nt, Homo sapiens
  misc_RNA (1)...(19): siRNA sense strand
gauuugaagccuagcaaca

SEQ ID NO: 1146446 - RNA, 19 nt, Homo sapiens
  misc_RNA (1)...(19): siRNA sense strand
ccgaagucauccuggguau

SEQ ID NO: 1146447 - RNA, 19 nt, Homo sapiens
  misc_RNA (1)...(19): siRNA sense strand
gcagaguucaugaagaaac

SEQ ID NO: 1146448 - RNA, 19 nt, Homo sapiens
  misc_RNA (1)...(19): siRNA sense strand
ccaacuacaucgacauuua

SEQ ID NO: 1146449 - RNA, 19 nt, Homo sapiens
  misc_RNA (1)...(19): siRNA sense strand
uuggaaaccuggaagauua

SEQ ID NO: 1146450 - RNA, 19 nt, Homo sapiens
  misc_RNA (1)...(19): siRNA sense strand
ugaaauggcuccagcaaca

SEQ ID NO: 1146451 - RNA, 19 nt, Homo sapiens
  misc_RNA (1)...(19): siRNA sense strand
ggacggcgaugucacagau

SEQ ID NO: 1146452 - RNA, 19 nt, Homo sapiens
  misc_RNA (1)...(19): siRNA sense strand
gaagcaaacagccaguuaa

SEQ ID NO: 1146453 - RNA, 19 nt, Homo sapiens
  misc_RNA (1)...(19): siRNA sense strand
gaacggcaaugauuaugac

SEQ ID NO: 1146454 - RNA, 19 nt, Homo sapiens
  misc_RNA (1)...(19): siRNA sense strand
gcgagcgacuggaaaguga

SEQ ID NO: 1146455 - RNA, 19 nt, Homo sapiens
  misc_RNA (1)...(19): siRNA sense strand
ccucacaccuuccucagaa

SEQ ID NO: 1146456 - RNA, 19 nt, Homo sapiens
  misc_RNA (1)...(19): siRNA sense strand
gauaugaugccagcaauga

SEQ ID NO: 1146457 - RNA, 19 nt, Homo sapiens
  misc_RNA (1)...(19): siRNA sense strand
ugacccaucuccacgauau

SEQ ID NO: 1146458 - RNA, 19 nt, Homo sapiens
  misc_RNA (1)...(19): siRNA sense strand
caacaggaagugaaacgaa

SEQ ID NO: 1146459 - RNA, 19 nt, Homo sapiens
  misc_RNA (1)...(19): siRNA sense strand
gaaagcgagcgacuggaaa

SEQ ID NO: 1146460 - RNA, 19 nt, Homo sapiens
  misc_RNA (1)...(19): siRNA sense strand
gcaaacagccaguuaaccu

SEQ ID NO: 1146461 - RNA, 19 nt, Homo sapiens
  misc_RNA (1)...(19): siRNA sense strand
agagacaggugcgaaguga

SEQ ID NO: 1146462 - RNA, 19 nt, Homo sapiens
  misc_RNA (1)...(19): siRNA sense strand
gacgugaacggcaaugauu

SEQ ID NO: 1146463 - RNA, 19 nt, Homo sapiens
  misc_RNA (1)...(19): siRNA sense strand
gaugauggcauagagagaa

SEQ ID NO: 1146464 - RNA, 19 nt, Homo sapiens
  misc_RNA (1)...(19): siRNA sense strand
cagauguggucgaggcaaa

SEQ ID NO: 1146465 - RNA, 19 nt, Homo sapiens
  misc_RNA (1)...(19): siRNA sense strand
agaagcaaacagccaguua

SEQ ID NO: 1146466 - RNA, 19 nt, Homo sapiens
  misc_RNA (1)...(19): siRNA sense strand
caaagucgcugggcaucag

SEQ ID NO: 1146467 - RNA, 19 nt, Homo sapiens
  misc_RNA (1)...(19): siRNA sense strand
gaaacgaagggugaagaga

SEQ ID NO: 1146468 - RNA, 19 nt, Homo sapiens
  misc_RNA (1)...(19): siRNA sense strand
caucagacccaacuacauc

SEQ ID NO: 1146469 - RNA, 19 nt, Homo sapiens
  misc_RNA (1)...(19): siRNA sense strand
ugaaagcgagcgacuggaa

SEQ ID NO: 1146470 - RNA, 19 nt, Homo sapiens
  misc_RNA (1)...(19): siRNA sense strand
gaagagacaggugcgaagu

SEQ ID NO: 1146471 - RNA, 19 nt, Homo sapiens
  misc_RNA (1)...(19): siRNA sense strand
caucaucgccuuggcucua

SEQ ID NO: 1146472 - RNA, 19 nt, Homo sapiens
  misc_RNA (1)...(19): siRNA sense strand
ccuggaagauuacuaccau

SEQ ID NO: 1146473 - RNA, 19 nt, Homo sapiens
  misc_RNA (1)...(19): siRNA sense strand
uuucgaguauggcauuaaa

SEQ ID NO: 1146474 - RNA, 19 nt, Homo sapiens
  misc_RNA (1)...(19): siRNA sense strand
uaugaugccagcaaugaaa

SEQ ID NO: 1146475 - RNA, 19 nt, Homo sapiens
  misc_RNA (1)...(19): siRNA sense strand
gaaaccuggaagauuacua

SEQ ID NO: 1146476 - RNA, 19 nt, Homo sapiens
  misc_RNA (1)...(19): siRNA sense strand
cgccuuggcucuagaagca

SEQ ID NO: 1146477 - RNA, 19 nt, Homo sapiens
  misc_RNA (1)...(19): siRNA sense strand
gcaguggggccuuuuauga

SEQ ID NO: 1146478 - RNA, 19 nt, Homo sapiens
  misc_RNA (1)...(19): siRNA sense strand
uggaagauuacuaccauuu

SEQ ID NO: 1146479 - RNA, 19 nt, Homo sapiens
  misc_RNA (1)...(19): siRNA sense strand
cagcaaacaauuccuacug

SEQ ID NO: 1146480 - RNA, 19 nt, Homo sapiens
  misc_RNA (1)...(19): siRNA sense strand
cagcagcgccaccgagaau

SEQ ID NO: 1146481 - RNA, 19 nt, Homo sapiens
  misc_RNA (1)...(19): siRNA sense strand
ugaacggcaaugauuauga

SEQ ID NO: 1146482 - RNA, 19 nt, Homo sapiens
  misc_RNA (1)...(19): siRNA sense strand
caacuacaucgacauuuac

SEQ ID NO: 1146483 - RNA, 19 nt, Homo sapiens
  misc_RNA (1)...(19): siRNA sense strand
aaacacggcacucguugug

SEQ ID NO: 1146484 - RNA, 19 nt, Homo sapiens
  misc_RNA (1)...(19): siRNA sense strand
ggaagauuacuaccauuuu

SEQ ID NO: 1146485 - RNA, 19 nt, Homo sapiens
  misc_RNA (1)...(19): siRNA sense strand
caacuugggccagauugga

SEQ ID NO: 1146486 - RNA, 19 nt, Homo sapiens
  misc_RNA (1)...(19): siRNA sense strand
gaucugcgucagcgcugua

SEQ ID NO: 1146487 - RNA, 19 nt, Homo sapiens
  misc_RNA (1)...(19): siRNA sense strand
cgcaggcccuuuacuucaa

SEQ ID NO: 1146488 - RNA, 19 nt, Homo sapiens
  misc_RNA (1)...(19): siRNA sense strand
ccaacagcaucuacaccau

SEQ ID NO: 1146489 - RNA, 19 nt, Homo sapiens
  misc_RNA (1)...(19): siRNA sense strand
cuacaucgacauuuacagu

SEQ ID NO: 1146490 - RNA, 19 nt, Homo sapiens
  misc_RNA (1)...(19): siRNA sense strand
ccagcaacaggaagugaaa

SEQ ID NO: 1146491 - RNA, 19 nt, Homo sapiens
  misc_RNA (1)...(19): siRNA sense strand
gcuuucgaguauggcauua

SEQ ID NO: 1146492 - RNA, 19 nt, Homo sapiens
  misc_RNA (1)...(19): siRNA sense strand
aauaaacacggcacucguu

SEQ ID NO: 1146493 - RNA, 19 nt, Homo sapiens
  misc_RNA (1)...(19): siRNA sense strand
caaugauuaugacccaucu

SEQ ID NO: 1146494 - RNA, 19 nt, Homo sapiens
  misc_RNA (1)...(19): siRNA sense strand
caacaugugguaccugcau

SEQ ID NO: 1146495 - RNA, 19 nt, Homo sapiens
  misc_RNA (1)...(19): siRNA sense strand
gcaaagucgcugggcauca

SEQ ID NO: 1146496 - RNA, 19 nt, Homo sapiens
  misc_RNA (1)...(19): siRNA sense strand
ggugaaauggcuccagcaa

SEQ ID NO: 1146497 - RNA, 19 nt, Homo sapiens
  misc_RNA (1)...(19): siRNA sense strand
caaacaauuccuacugcau

SEQ ID NO: 1146498 - RNA, 19 nt, Homo sapiens
  misc_RNA (1)...(19): siRNA sense strand
uaucacagcaaaaccuuua

SEQ ID NO: 1146499 - RNA, 19 nt, Homo sapiens
  misc_RNA (1)...(19): siRNA sense strand
aacgaagggugaagagaca

SEQ ID NO: 1146500 - RNA, 19 nt, Homo sapiens
  misc_RNA (1)...(19): siRNA sense strand
gcaucagacccaacuacau

SEQ ID NO: 1146501 - RNA, 19 nt, Homo sapiens
  misc_RNA (1)...(19): siRNA sense strand
guacaaugccaaaauagga

SEQ ID NO: 1146502 - RNA, 19 nt, Homo sapiens
  misc_RNA (1)...(19): siRNA sense strand
gcaggcccuuuacuucaac

SEQ ID NO: 1146503 - RNA, 19 nt, Homo sapiens
  misc_RNA (1)...(19): siRNA sense strand
ccgcaggcccuuuacuuca

SEQ ID NO: 1146504 - RNA, 19 nt, Homo sapiens
  misc_RNA (1)...(19): siRNA sense strand
cgacgugaacggcaaugau

SEQ ID NO: 1146505 - RNA, 19 nt, Homo sapiens
  misc_RNA (1)...(19): siRNA sense strand
caccgagaauggcuacaag

SEQ ID NO: 1146506 - RNA, 19 nt, Homo sapiens
  misc_RNA (1)...(19): siRNA sense strand
cgugaacggcaaugauuau

SEQ ID NO: 1146507 - RNA, 19 nt, Homo sapiens
  misc_RNA (1)...(19): siRNA sense strand
gugacccgcaggcccuuua

SEQ ID NO: 1146508 - RNA, 19 nt, Homo sapiens
  misc_RNA (1)...(19): siRNA sense strand
ccuuggcucuagaagcaaa

SEQ ID NO: 1146509 - RNA, 19 nt, Homo sapiens
  misc_RNA (1)...(19): siRNA sense strand
gcaacaggaagugaaacga

SEQ ID NO: 1146510 - RNA, 19 nt, Homo sapiens
  misc_RNA (1)...(19): siRNA sense strand
ugcgauggcuacaccaaca

SEQ ID NO: 1146511 - RNA, 19 nt, Homo sapiens
  misc_RNA (1)...(19): siRNA sense strand
ccaccgagaauggcuacaa

SEQ ID NO: 1146512 - RNA, 19 nt, Homo sapiens
  misc_RNA (1)...(19): siRNA sense strand
ccaacuacaucgacauuua

SEQ ID NO: 1146513 - RNA, 19 nt, Homo sapiens
  misc_RNA (1)...(19): siRNA sense strand
uuggaaaccuggaagauua

SEQ ID NO: 1146514 - RNA, 19 nt, Homo sapiens
  misc_RNA (1)...(19): siRNA sense strand
ugaaauggcuccagcaaca

SEQ ID NO: 1146515 - RNA, 19 nt, Homo sapiens
  misc_RNA (1)...(19): siRNA sense strand
ggacggcgaugucacagau

SEQ ID NO: 1146516 - RNA, 19 nt, Homo sapiens
  misc_RNA (1)...(19): siRNA sense strand
gaagcaaacagccaguuaa

SEQ ID NO: 1146517 - RNA, 19 nt, Homo sapiens
  misc_RNA (1)...(19): siRNA sense strand
gaacggcaaugauuaugac

SEQ ID NO: 1146518 - RNA, 19 nt, Homo sapiens
  misc_RNA (1)...(19): siRNA sense strand
gcgagcgacuggaaaguga

SEQ ID NO: 1146519 - RNA, 19 nt, Homo sapiens
  misc_RNA (1)...(19): siRNA sense strand
ccucacaccuuccucagaa

SEQ ID NO: 1146520 - RNA, 19 nt, Homo sapiens
  misc_RNA (1)...(19): siRNA sense strand
gauaugaugccagcaauga

SEQ ID NO: 1146521 - RNA, 19 nt, Homo sapiens
  misc_RNA (1)...(19): siRNA sense strand
ugacccaucuccacgauau

SEQ ID NO: 1146522 - RNA, 19 nt, Homo sapiens
  misc_RNA (1)...(19): siRNA sense strand
caacaggaagugaaacgaa

SEQ ID NO: 1146523 - RNA, 19 nt, Homo sapiens
  misc_RNA (1)...(19): siRNA sense strand
gaaagcgagcgacuggaaa

SEQ ID NO: 1146524 - RNA, 19 nt, Homo sapiens
  misc_RNA (1)...(19): siRNA sense strand
gcaaacagccaguuaaccu

SEQ ID NO: 1146525 - RNA, 19 nt, Homo sapiens
  misc_RNA (1)...(19): siRNA sense strand
agagacaggugcgaaguga

SEQ ID NO: 1146526 - RNA, 19 nt, Homo sapiens
  misc_RNA (1)...(19): siRNA sense strand
gacgugaacggcaaugauu

SEQ ID NO: 1146527 - RNA, 19 nt, Homo sapiens
  misc_RNA (1)...(19): siRNA sense strand
gaugauggcauagagagaa

SEQ ID NO: 1146528 - RNA, 19 nt, Homo sapiens
  misc_RNA (1)...(19): siRNA sense strand
cagauguggucgaggcaaa

SEQ ID NO: 1146529 - RNA, 19 nt, Homo sapiens
  misc_RNA (1)...(19): siRNA sense strand
agaagcaaacagccaguua

SEQ ID NO: 1146530 - RNA, 19 nt, Homo sapiens
  misc_RNA (1)...(19): siRNA sense strand
caaagucgcugggcaucag

SEQ ID NO: 1146531 - RNA, 19 nt, Homo sapiens
  misc_RNA (1)...(19): siRNA sense strand
gaaacgaagggugaagaga

SEQ ID NO: 1146532 - RNA, 19 nt, Homo sapiens
  misc_RNA (1)...(19): siRNA sense strand
caucagacccaacuacauc

SEQ ID NO: 1146533 - RNA, 19 nt, Homo sapiens
  misc_RNA (1)...(19): siRNA sense strand
ugaaagcgagcgacuggaa

SEQ ID NO: 1146534 - RNA, 19 nt, Homo sapiens
  misc_RNA (1)...(19): siRNA sense strand
gaagagacaggugcgaagu

SEQ ID NO: 1146535 - RNA, 19 nt, Homo sapiens
  misc_RNA (1)...(19): siRNA sense strand
caucaucgccuuggcucua

SEQ ID NO: 1146536 - RNA, 19 nt, Homo sapiens
  misc_RNA (1)...(19): siRNA sense strand
ccuggaagauuacuaccau

SEQ ID NO: 1146537 - RNA, 19 nt, Homo sapiens
  misc_RNA (1)...(19): siRNA sense strand
uuucgaguauggcauuaaa

SEQ ID NO: 1146538 - RNA, 19 nt, Homo sapiens
  misc_RNA (1)...(19): siRNA sense strand
uaugaugccagcaaugaaa

SEQ ID NO: 1146539 - RNA, 19 nt, Homo sapiens
  misc_RNA (1)...(19): siRNA sense strand
gaaaccuggaagauuacua

SEQ ID NO: 1146540 - RNA, 19 nt, Homo sapiens
  misc_RNA (1)...(19): siRNA sense strand
cgccuuggcucuagaagca

SEQ ID NO: 1146541 - RNA, 19 nt, Homo sapiens
  misc_RNA (1)...(19): siRNA sense strand
gcaguggggccuuuuauga

SEQ ID NO: 1146542 - RNA, 19 nt, Homo sapiens
  misc_RNA (1)...(19): siRNA sense strand
uggaagauuacuaccauuu

SEQ ID NO: 1146543 - RNA, 19 nt, Homo sapiens
  misc_RNA (1)...(19): siRNA sense strand
cagcaaacaauuccuacug

SEQ ID NO: 1146544 - RNA, 19 nt, Homo sapiens
  misc_RNA (1)...(19): siRNA sense strand
cagcagcgccaccgagaau

SEQ ID NO: 1146545 - RNA, 19 nt, Homo sapiens
  misc_RNA (1)...(19): siRNA sense strand
ugaacggcaaugauuauga

SEQ ID NO: 1146546 - RNA, 19 nt, Homo sapiens
  misc_RNA (1)...(19): siRNA sense strand
caacuacaucgacauuuac

SEQ ID NO: 1146547 - RNA, 19 nt, Homo sapiens
  misc_RNA (1)...(19): siRNA sense strand
aaacacggcacucguugug

SEQ ID NO: 1146548 - RNA, 19 nt, Homo sapiens
  misc_RNA (1)...(19): siRNA sense strand
ggaagauuacuaccauuuu

SEQ ID NO: 1146549 - RNA, 19 nt, Homo sapiens
  misc_RNA (1)...(19): siRNA sense strand
caacuugggccagauugga

SEQ ID NO: 1146550 - RNA, 19 nt, Homo sapiens
  misc_RNA (1)...(19): siRNA sense strand
gaucugcgucagcgcugua

SEQ ID NO: 1146551 - RNA, 19 nt, Homo sapiens
  misc_RNA (1)...(19): siRNA sense strand
cgcaggcccuuuacuucaa

SEQ ID NO: 1146552 - RNA, 19 nt, Homo sapiens
  misc_RNA (1)...(19): siRNA sense strand
ccaacagcaucuacaccau

SEQ ID NO: 1146553 - RNA, 19 nt, Homo sapiens
  misc_RNA (1)...(19): siRNA sense strand
cuacaucgacauuuacagu

SEQ ID NO: 1146554 - RNA, 19 nt, Homo sapiens
  misc_RNA (1)...(19): siRNA sense strand
ccagcaacaggaagugaaa

SEQ ID NO: 1146555 - RNA, 19 nt, Homo sapiens
  misc_RNA (1)...(19): siRNA sense strand
gcuuucgaguauggcauua

SEQ ID NO: 1146556 - RNA, 19 nt, Homo sapiens
  misc_RNA (1)...(19): siRNA sense strand
aauaaacacggcacucguu

SEQ ID NO: 1146557 - RNA, 19 nt, Homo sapiens
  misc_RNA (1)...(19): siRNA sense strand
caaugauuaugacccaucu

SEQ ID NO: 1146558 - RNA, 19 nt, Homo sapiens
  misc_RNA (1)...(19): siRNA sense strand
caacaugugguaccugcau

SEQ ID NO: 1146559 - RNA, 19 nt, Homo sapiens
  misc_RNA (1)...(19): siRNA sense strand
gcaaagucgcugggcauca

SEQ ID NO: 1146560 - RNA, 19 nt, Homo sapiens
  misc_RNA (1)...(19): siRNA sense strand
ggugaaauggcuccagcaa

SEQ ID NO: 1146561 - RNA, 19 nt, Homo sapiens
  misc_RNA (1)...(19): siRNA sense strand
caaacaauuccuacugcau

SEQ ID NO: 1146562 - RNA, 19 nt, Homo sapiens
  misc_RNA (1)...(19): siRNA sense strand
uaucacagcaaaaccuuua

SEQ ID NO: 1146563 - RNA, 19 nt, Homo sapiens
  misc_RNA (1)...(19): siRNA sense strand
aacgaagggugaagagaca

SEQ ID NO: 1146564 - RNA, 19 nt, Homo sapiens
  misc_RNA (1)...(19): siRNA sense strand
gcaucagacccaacuacau

SEQ ID NO: 1146565 - RNA, 19 nt, Homo sapiens
  misc_RNA (1)...(19): siRNA sense strand
guacaaugccaaaauagga

SEQ ID NO: 1146566 - RNA, 19 nt, Homo sapiens
  misc_RNA (1)...(19): siRNA sense strand
gcaggcccuuuacuucaac

SEQ ID NO: 1146567 - RNA, 19 nt, Homo sapiens
  misc_RNA (1)...(19): siRNA sense strand
ccgcaggcccuuuacuuca

SEQ ID NO: 1146568 - RNA, 19 nt, Homo sapiens
  misc_RNA (1)...(19): siRNA sense strand
cgacgugaacggcaaugau

SEQ ID NO: 1146569 - RNA, 19 nt, Homo sapiens
  misc_RNA (1)...(19): siRNA sense strand
caccgagaauggcuacaag

SEQ ID NO: 1146570 - RNA, 19 nt, Homo sapiens
  misc_RNA (1)...(19): siRNA sense strand
cgugaacggcaaugauuau

SEQ ID NO: 1146571 - RNA, 19 nt, Homo sapiens
  misc_RNA (1)...(19): siRNA sense strand
gugacccgcaggcccuuua

SEQ ID NO: 1146572 - RNA, 19 nt, Homo sapiens
  misc_RNA (1)...(19): siRNA sense strand
ccuuggcucuagaagcaaa

SEQ ID NO: 1146573 - RNA, 19 nt, Homo sapiens
  misc_RNA (1)...(19): siRNA sense strand
gcaacaggaagugaaacga

SEQ ID NO: 1146574 - RNA, 19 nt, Homo sapiens
  misc_RNA (1)...(19): siRNA sense strand
ugcgauggcuacaccaaca

SEQ ID NO: 1146575 - RNA, 19 nt, Homo sapiens
  misc_RNA (1)...(19): siRNA sense strand
ccaccgagaauggcuacaa

SEQ ID NO: 1146576 - RNA, 19 nt, Homo sapiens
  misc_RNA (1)...(19): siRNA sense strand
ccaacuacaucgacauuua

SEQ ID NO: 1146577 - RNA, 19 nt, Homo sapiens
  misc_RNA (1)...(19): siRNA sense strand
uuggaaaccuggaagauua

SEQ ID NO: 1146578 - RNA, 19 nt, Homo sapiens
  misc_RNA (1)...(19): siRNA sense strand
ugaaauggcuccagcaaca

SEQ ID NO: 1146579 - RNA, 19 nt, Homo sapiens
  misc_RNA (1)...(19): siRNA sense strand
ggacggcgaugucacagau

SEQ ID NO: 1146580 - RNA, 19 nt, Homo sapiens
  misc_RNA (1)...(19): siRNA sense strand
gaagcaaacagccaguuaa

SEQ ID NO: 1146581 - RNA, 19 nt, Homo sapiens
  misc_RNA (1)...(19): siRNA sense strand
gaacggcaaugauuaugac

SEQ ID NO: 1146582 - RNA, 19 nt, Homo sapiens
  misc_RNA (1)...(19): siRNA sense strand
gcgagcgacuggaaaguga

SEQ ID NO: 1146583 - RNA, 19 nt, Homo sapiens
  misc_RNA (1)...(19): siRNA sense strand
ccucacaccuuccucagaa

SEQ ID NO: 1146584 - RNA, 19 nt, Homo sapiens
  misc_RNA (1)...(19): siRNA sense strand
gauaugaugccagcaauga

SEQ ID NO: 1146585 - RNA, 19 nt, Homo sapiens
  misc_RNA (1)...(19): siRNA sense strand
ugacccaucuccacgauau

SEQ ID NO: 1146586 - RNA, 19 nt, Homo sapiens
  misc_RNA (1)...(19): siRNA sense strand
caacaggaagugaaacgaa

SEQ ID NO: 1146587 - RNA, 19 nt, Homo sapiens
  misc_RNA (1)...(19): siRNA sense strand
gaaagcgagcgacuggaaa

SEQ ID NO: 1146588 - RNA, 19 nt, Homo sapiens
  misc_RNA (1)...(19): siRNA sense strand
gcaaacagccaguuaaccu

SEQ ID NO: 1146589 - RNA, 19 nt, Homo sapiens
  misc_RNA (1)...(19): siRNA sense strand
agagacaggugcgaaguga

SEQ ID NO: 1146590 - RNA, 19 nt, Homo sapiens
  misc_RNA (1)...(19): siRNA sense strand
gacgugaacggcaaugauu

SEQ ID NO: 1146591 - RNA, 19 nt, Homo sapiens
  misc_RNA (1)...(19): siRNA sense strand
gaugauggcauagagagaa

SEQ ID NO: 1146592 - RNA, 19 nt, Homo sapiens
  misc_RNA (1)...(19): siRNA sense strand
cagauguggucgaggcaaa

SEQ ID NO: 1146593 - RNA, 19 nt, Homo sapiens
  misc_RNA (1)...(19): siRNA sense strand
agaagcaaacagccaguua

SEQ ID NO: 1146594 - RNA, 19 nt, Homo sapiens
  misc_RNA (1)...(19): siRNA sense strand
caaagucgcugggcaucag

SEQ ID NO: 1146595 - RNA, 19 nt, Homo sapiens
  misc_RNA (1)...(19): siRNA sense strand
gaaacgaagggugaagaga

SEQ ID NO: 1146596 - RNA, 19 nt, Homo sapiens
  misc_RNA (1)...(19): siRNA sense strand
caucagacccaacuacauc

SEQ ID NO: 1146597 - RNA, 19 nt, Homo sapiens
  misc_RNA (1)...(19): siRNA sense strand
ugaaagcgagcgacuggaa

SEQ ID NO: 1146598 - RNA, 19 nt, Homo sapiens
  misc_RNA (1)...(19): siRNA sense strand
gaagagacaggugcgaagu

SEQ ID NO: 1146599 - RNA, 19 nt, Homo sapiens
  misc_RNA (1)...(19): siRNA sense strand
caucaucgccuuggcucua

SEQ ID NO: 1146600 - RNA, 19 nt, Homo sapiens
  misc_RNA (1)...(19): siRNA sense strand
ccuggaagauuacuaccau

SEQ ID NO: 1146601 - RNA, 19 nt, Homo sapiens
  misc_RNA (1)...(19): siRNA sense strand
uuucgaguauggcauuaaa

SEQ ID NO: 1146602 - RNA, 19 nt, Homo sapiens
  misc_RNA (1)...(19): siRNA sense strand
uaugaugccagcaaugaaa

SEQ ID NO: 1146603 - RNA, 19 nt, Homo sapiens
  misc_RNA (1)...(19): siRNA sense strand
gaaaccuggaagauuacua

SEQ ID NO: 1146604 - RNA, 19 nt, Homo sapiens
  misc_RNA (1)...(19): siRNA sense strand
cgccuuggcucuagaagca

SEQ ID NO: 1146605 - RNA, 19 nt, Homo sapiens
  misc_RNA (1)...(19): siRNA sense strand
gcaguggggccuuuuauga

SEQ ID NO: 1146606 - RNA, 19 nt, Homo sapiens
  misc_RNA (1)...(19): siRNA sense strand
uggaagauuacuaccauuu

SEQ ID NO: 1146607 - RNA, 19 nt, Homo sapiens
  misc_RNA (1)...(19): siRNA sense strand
cagcaaacaauuccuacug

SEQ ID NO: 1146608 - RNA, 19 nt, Homo sapiens
  misc_RNA (1)...(19): siRNA sense strand
cagcagcgccaccgagaau

SEQ ID NO: 1146609 - RNA, 19 nt, Homo sapiens
  misc_RNA (1)...(19): siRNA sense strand
ugaacggcaaugauuauga

SEQ ID NO: 1146610 - RNA, 19 nt, Homo sapiens
  misc_RNA (1)...(19): siRNA sense strand
caacuacaucgacauuuac

SEQ ID NO: 1146611 - RNA, 19 nt, Homo sapiens
  misc_RNA (1)...(19): siRNA sense strand
aaacacggcacucguugug

SEQ ID NO: 1146612 - RNA, 19 nt, Homo sapiens
  misc_RNA (1)...(19): siRNA sense strand
ggaagauuacuaccauuuu

SEQ ID NO: 1146613 - RNA, 19 nt, Homo sapiens
  misc_RNA (1)...(19): siRNA sense strand
caacuugggccagauugga

SEQ ID NO: 1146614 - RNA, 19 nt, Homo sapiens
  misc_RNA (1)...(19): siRNA sense strand
gaucugcgucagcgcugua

SEQ ID NO: 1146615 - RNA, 19 nt, Homo sapiens
  misc_RNA (1)...(19): siRNA sense strand
cgcaggcccuuuacuucaa

SEQ ID NO: 1146616 - RNA, 19 nt, Homo sapiens
  misc_RNA (1)...(19): siRNA sense strand
ccaacagcaucuacaccau

SEQ ID NO: 1146617 - RNA, 19 nt, Homo sapiens
  misc_RNA (1)...(19): siRNA sense strand
cuacaucgacauuuacagu

SEQ ID NO: 1146618 - RNA, 19 nt, Homo sapiens
  misc_RNA (1)...(19): siRNA sense strand
ccagcaacaggaagugaaa

SEQ ID NO: 1146619 - RNA, 19 nt, Homo sapiens
  misc_RNA (1)...(19): siRNA sense strand
gcuuucgaguauggcauua

SEQ ID NO: 1146620 - RNA, 19 nt, Homo sapiens
  misc_RNA (1)...(19): siRNA sense strand
aauaaacacggcacucguu

SEQ ID NO: 1146621 - RNA, 19 nt, Homo sapiens
  misc_RNA (1)...(19): siRNA sense strand
caaugauuaugacccaucu

SEQ ID NO: 1146622 - RNA, 19 nt, Homo sapiens
  misc_RNA (1)...(19): siRNA sense strand
caacaugugguaccugcau

SEQ ID NO: 1146623 - RNA, 19 nt, Homo sapiens
  misc_RNA (1)...(19): siRNA sense strand
gcaaagucgcugggcauca

SEQ ID NO: 1146624 - RNA, 19 nt, Homo sapiens
  misc_RNA (1)...(19): siRNA sense strand
ggugaaauggcuccagcaa

SEQ ID NO: 1146625 - RNA, 19 nt, Homo sapiens
  misc_RNA (1)...(19): siRNA sense strand
caaacaauuccuacugcau

SEQ ID NO: 1146626 - RNA, 19 nt, Homo sapiens
  misc_RNA (1)...(19): siRNA sense strand
uaucacagcaaaaccuuua

SEQ ID NO: 1146627 - RNA, 19 nt, Homo sapiens
  misc_RNA (1)...(19): siRNA sense strand
aacgaagggugaagagaca

SEQ ID NO: 1146628 - RNA, 19 nt, Homo sapiens
  misc_RNA (1)...(19): siRNA sense strand
gcaucagacccaacuacau

SEQ ID NO: 1146629 - RNA, 19 nt, Homo sapiens
  misc_RNA (1)...(19): siRNA sense strand
guacaaugccaaaauagga

SEQ ID NO: 1146630 - RNA, 19 nt, Homo sapiens
  misc_RNA (1)...(19): siRNA sense strand
gcaggcccuuuacuucaac

SEQ ID NO: 1146631 - RNA, 19 nt, Homo sapiens
  misc_RNA (1)...(19): siRNA sense strand
ccgcaggcccuuuacuuca

SEQ ID NO: 1146632 - RNA, 19 nt, Homo sapiens
  misc_RNA (1)...(19): siRNA sense strand
cgacgugaacggcaaugau

SEQ ID NO: 1146633 - RNA, 19 nt, Homo sapiens
  misc_RNA (1)...(19): siRNA sense strand
caccgagaauggcuacaag

SEQ ID NO: 1146634 - RNA, 19 nt, Homo sapiens
  misc_RNA (1)...(19): siRNA sense strand
cgugaacggcaaugauuau

SEQ ID NO: 1146635 - RNA, 19 nt, Homo sapiens
  misc_RNA (1)...(19): siRNA sense strand
gugacccgcaggcccuuua

SEQ ID NO: 1146636 - RNA, 19 nt, Homo sapiens
  misc_RNA (1)...(19): siRNA sense strand
ccuuggcucuagaagcaaa

SEQ ID NO: 1146637 - RNA, 19 nt, Homo sapiens
  misc_RNA (1)...(19): siRNA sense strand
gcaacaggaagugaaacga

SEQ ID NO: 1146638 - RNA, 19 nt, Homo sapiens
  misc_RNA (1)...(19): siRNA sense strand
ugcgauggcuacaccaaca

SEQ ID NO: 1146639 - RNA, 19 nt, Homo sapiens
  misc_RNA (1)...(19): siRNA sense strand
ccaccgagaauggcuacaa

SEQ ID NO: 1146640 - RNA, 19 nt, Homo sapiens
  misc_RNA (1)...(19): siRNA sense strand
ccaacuacaucgacauuua

SEQ ID NO: 1146641 - RNA, 19 nt, Homo sapiens
  misc_RNA (1)...(19): siRNA sense strand
uuggaaaccuggaagauua

SEQ ID NO: 1146642 - RNA, 19 nt, Homo sapiens
  misc_RNA (1)...(19): siRNA sense strand
ugaaauggcuccagcaaca

SEQ ID NO: 1146643 - RNA, 19 nt, Homo sapiens
  misc_RNA (1)...(19): siRNA sense strand
ggacggcgaugucacagau

SEQ ID NO: 1146644 - RNA, 19 nt, Homo sapiens
  misc_RNA (1)...(19): siRNA sense strand
gaagcaaacagccaguuaa

SEQ ID NO: 1146645 - RNA, 19 nt, Homo sapiens
  misc_RNA (1)...(19): siRNA sense strand
gaacggcaaugauuaugac

SEQ ID NO: 1146646 - RNA, 19 nt, Homo sapiens
  misc_RNA (1)...(19): siRNA sense strand
gcgagcgacuggaaaguga

SEQ ID NO: 1146647 - RNA, 19 nt, Homo sapiens
  misc_RNA (1)...(19): siRNA sense strand
ccucacaccuuccucagaa

SEQ ID NO: 1146648 - RNA, 19 nt, Homo sapiens
  misc_RNA (1)...(19): siRNA sense strand
gauaugaugccagcaauga

SEQ ID NO: 1146649 - RNA, 19 nt, Homo sapiens
  misc_RNA (1)...(19): siRNA sense strand
ugacccaucuccacgauau

SEQ ID NO: 1146650 - RNA, 19 nt, Homo sapiens
  misc_RNA (1)...(19): siRNA sense strand
caacaggaagugaaacgaa

SEQ ID NO: 1146651 - RNA, 19 nt, Homo sapiens
  misc_RNA (1)...(19): siRNA sense strand
gaaagcgagcgacuggaaa

SEQ ID NO: 1146652 - RNA, 19 nt, Homo sapiens
  misc_RNA (1)...(19): siRNA sense strand
gcaaacagccaguuaaccu

SEQ ID NO: 1146653 - RNA, 19 nt, Homo sapiens
  misc_RNA (1)...(19): siRNA sense strand
agagacaggugcgaaguga

SEQ ID NO: 1146654 - RNA, 19 nt, Homo sapiens
  misc_RNA (1)...(19): siRNA sense strand
gacgugaacggcaaugauu

SEQ ID NO: 1146655 - RNA, 19 nt, Homo sapiens
  misc_RNA (1)...(19): siRNA sense strand
gaugauggcauagagagaa

SEQ ID NO: 1146656 - RNA, 19 nt, Homo sapiens
  misc_RNA (1)...(19): siRNA sense strand
cagauguggucgaggcaaa

SEQ ID NO: 1146657 - RNA, 19 nt, Homo sapiens
  misc_RNA (1)...(19): siRNA sense strand
agaagcaaacagccaguua

SEQ ID NO: 1146658 - RNA, 19 nt, Homo sapiens
  misc_RNA (1)...(19): siRNA sense strand
caaagucgcugggcaucag

SEQ ID NO: 1146659 - RNA, 19 nt, Homo sapiens
  misc_RNA (1)...(19): siRNA sense strand
gaaacgaagggugaagaga

SEQ ID NO: 1146660 - RNA, 19 nt, Homo sapiens
  misc_RNA (1)...(19): siRNA sense strand
caucagacccaacuacauc

SEQ ID NO: 1146661 - RNA, 19 nt, Homo sapiens
  misc_RNA (1)...(19): siRNA sense strand
ugaaagcgagcgacuggaa

SEQ ID NO: 1146662 - RNA, 19 nt, Homo sapiens
  misc_RNA (1)...(19): siRNA sense strand
gaagagacaggugcgaagu

SEQ ID NO: 1146663 - RNA, 19 nt, Homo sapiens
  misc_RNA (1)...(19): siRNA sense strand
caucaucgccuuggcucua

SEQ ID NO: 1146664 - RNA, 19 nt, Homo sapiens
  misc_RNA (1)...(19): siRNA sense strand
ccuggaagauuacuaccau

SEQ ID NO: 1146665 - RNA, 19 nt, Homo sapiens
  misc_RNA (1)...(19): siRNA sense strand
uuucgaguauggcauuaaa

SEQ ID NO: 1146666 - RNA, 19 nt, Homo sapiens
  misc_RNA (1)...(19): siRNA sense strand
uaugaugccagcaaugaaa

SEQ ID NO: 1146667 - RNA, 19 nt, Homo sapiens
  misc_RNA (1)...(19): siRNA sense strand
gaaaccuggaagauuacua

SEQ ID NO: 1146668 - RNA, 19 nt, Homo sapiens
  misc_RNA (1)...(19): siRNA sense strand
cgccuuggcucuagaagca

SEQ ID NO: 1146669 - RNA, 19 nt, Homo sapiens
  misc_RNA (1)...(19): siRNA sense strand
gcaguggggccuuuuauga

SEQ ID NO: 1146670 - RNA, 19 nt, Homo sapiens
  misc_RNA (1)...(19): siRNA sense strand
uggaagauuacuaccauuu

SEQ ID NO: 1146671 - RNA, 19 nt, Homo sapiens
  misc_RNA (1)...(19): siRNA sense strand
cagcaaacaauuccuacug

SEQ ID NO: 1146672 - RNA, 19 nt, Homo sapiens
  misc_RNA (1)...(19): siRNA sense strand
cagcagcgccaccgagaau

SEQ ID NO: 1146673 - RNA, 19 nt, Homo sapiens
  misc_RNA (1)...(19): siRNA sense strand
ugaacggcaaugauuauga

SEQ ID NO: 1146674 - RNA, 19 nt, Homo sapiens
  misc_RNA (1)...(19): siRNA sense strand
caacuacaucgacauuuac

SEQ ID NO: 1146675 - RNA, 19 nt, Homo sapiens
  misc_RNA (1)...(19): siRNA sense strand
aaacacggcacucguugug

SEQ ID NO: 1146676 - RNA, 19 nt, Homo sapiens
  misc_RNA (1)...(19): siRNA sense strand
ggaagauuacuaccauuuu

SEQ ID NO: 1146677 - RNA, 19 nt, Homo sapiens
  misc_RNA (1)...(19): siRNA sense strand
caacuugggccagauugga

SEQ ID NO: 1146678 - RNA, 19 nt, Homo sapiens
  misc_RNA (1)...(19): siRNA sense strand
gaucugcgucagcgcugua

SEQ ID NO: 1146679 - RNA, 19 nt, Homo sapiens
  misc_RNA (1)...(19): siRNA sense strand
cgcaggcccuuuacuucaa

SEQ ID NO: 1146680 - RNA, 19 nt, Homo sapiens
  misc_RNA (1)...(19): siRNA sense strand
ccaacagcaucuacaccau

SEQ ID NO: 1146681 - RNA, 19 nt, Homo sapiens
  misc_RNA (1)...(19): siRNA sense strand
cuacaucgacauuuacagu

SEQ ID NO: 1146682 - RNA, 19 nt, Homo sapiens
  misc_RNA (1)...(19): siRNA sense strand
ccagcaacaggaagugaaa

SEQ ID NO: 1146683 - RNA, 19 nt, Homo sapiens
  misc_RNA (1)...(19): siRNA sense strand
gcuuucgaguauggcauua

SEQ ID NO: 1146684 - RNA, 19 nt, Homo sapiens
  misc_RNA (1)...(19): siRNA sense strand
aauaaacacggcacucguu

SEQ ID NO: 1146685 - RNA, 19 nt, Homo sapiens
  misc_RNA (1)...(19): siRNA sense strand
caaugauuaugacccaucu

SEQ ID NO: 1146686 - RNA, 19 nt, Homo sapiens
  misc_RNA (1)...(19): siRNA sense strand
caacaugugguaccugcau

SEQ ID NO: 1146687 - RNA, 19 nt, Homo sapiens
  misc_RNA (1)...(19): siRNA sense strand
gcaaagucgcugggcauca

SEQ ID NO: 1146688 - RNA, 19 nt, Homo sapiens
  misc_RNA (1)...(19): siRNA sense strand
ggugaaauggcuccagcaa

SEQ ID NO: 1146689 - RNA, 19 nt, Homo sapiens
  misc_RNA (1)...(19): siRNA sense strand
caaacaauuccuacugcau

SEQ ID NO: 1146690 - RNA, 19 nt, Homo sapiens
  misc_RNA (1)...(19): siRNA sense strand
uaucacagcaaaaccuuua

SEQ ID NO: 1146691 - RNA, 19 nt, Homo sapiens
  misc_RNA (1)...(19): siRNA sense strand
aacgaagggugaagagaca

SEQ ID NO: 1146692 - RNA, 19 nt, Homo sapiens
  misc_RNA (1)...(19): siRNA sense strand
gcaucagacccaacuacau

SEQ ID NO: 1146693 - RNA, 19 nt, Homo sapiens
  misc_RNA (1)...(19): siRNA sense strand
guacaaugccaaaauagga

SEQ ID NO: 1146694 - RNA, 19 nt, Homo sapiens
  misc_RNA (1)...(19): siRNA sense strand
gcaggcccuuuacuucaac

SEQ ID NO: 1146695 - RNA, 19 nt, Homo sapiens
  misc_RNA (1)...(19): siRNA sense strand
ccgcaggcccuuuacuuca

SEQ ID NO: 1146696 - RNA, 19 nt, Homo sapiens
  misc_RNA (1)...(19): siRNA sense strand
cgacgugaacggcaaugau

SEQ ID NO: 1146697 - RNA, 19 nt, Homo sapiens
  misc_RNA (1)...(19): siRNA sense strand
caccgagaauggcuacaag

SEQ ID NO: 1146698 - RNA, 19 nt, Homo sapiens
  misc_RNA (1)...(19): siRNA sense strand
cgugaacggcaaugauuau

SEQ ID NO: 1146699 - RNA, 19 nt, Homo sapiens
  misc_RNA (1)...(19): siRNA sense strand
gugacccgcaggcccuuua

SEQ ID NO: 1146700 - RNA, 19 nt, Homo sapiens
  misc_RNA (1)...(19): siRNA sense strand
ccuuggcucuagaagcaaa

SEQ ID NO: 1146701 - RNA, 19 nt, Homo sapiens
  misc_RNA (1)...(19): siRNA sense strand
gcaacaggaagugaaacga

SEQ ID NO: 1146702 - RNA, 19 nt, Homo sapiens
  misc_RNA (1)...(19): siRNA sense strand
ugcgauggcuacaccaaca

SEQ ID NO: 1146703 - RNA, 19 nt, Homo sapiens
  misc_RNA (1)...(19): siRNA sense strand
ccaccgagaauggcuacaa

SEQ ID NO: 1146704 - RNA, 19 nt, Homo sapiens
  misc_RNA (1)...(19): siRNA sense strand
ccaacuacaucgacauuua

SEQ ID NO: 1146705 - RNA, 19 nt, Homo sapiens
  misc_RNA (1)...(19): siRNA sense strand
uuggaaaccuggaagauua

SEQ ID NO: 1146706 - RNA, 19 nt, Homo sapiens
  misc_RNA (1)...(19): siRNA sense strand
ugaaauggcuccagcaaca

SEQ ID NO: 1146707 - RNA, 19 nt, Homo sapiens
  misc_RNA (1)...(19): siRNA sense strand
ggacggcgaugucacagau

SEQ ID NO: 1146708 - RNA, 19 nt, Homo sapiens
  misc_RNA (1)...(19): siRNA sense strand
gaagcaaacagccaguuaa

SEQ ID NO: 1146709 - RNA, 19 nt, Homo sapiens
  misc_RNA (1)...(19): siRNA sense strand
gaacggcaaugauuaugac

SEQ ID NO: 1146710 - RNA, 19 nt, Homo sapiens
  misc_RNA (1)...(19): siRNA sense strand
gcgagcgacuggaaaguga

SEQ ID NO: 1146711 - RNA, 19 nt, Homo sapiens
  misc_RNA (1)...(19): siRNA sense strand
ccucacaccuuccucagaa

SEQ ID NO: 1146712 - RNA, 19 nt, Homo sapiens
  misc_RNA (1)...(19): siRNA sense strand
gauaugaugccagcaauga

SEQ ID NO: 1146713 - RNA, 19 nt, Homo sapiens
  misc_RNA (1)...(19): siRNA sense strand
ugacccaucuccacgauau

SEQ ID NO: 1146714 - RNA, 19 nt, Homo sapiens
  misc_RNA (1)...(19): siRNA sense strand
caacaggaagugaaacgaa

SEQ ID NO: 1146715 - RNA, 19 nt, Homo sapiens
  misc_RNA (1)...(19): siRNA sense strand
gaaagcgagcgacuggaaa

SEQ ID NO: 1146716 - RNA, 19 nt, Homo sapiens
  misc_RNA (1)...(19): siRNA sense strand
gcaaacagccaguuaaccu

SEQ ID NO: 1146717 - RNA, 19 nt, Homo sapiens
  misc_RNA (1)...(19): siRNA sense strand
agagacaggugcgaaguga

SEQ ID NO: 1146718 - RNA, 19 nt, Homo sapiens
  misc_RNA (1)...(19): siRNA sense strand
gacgugaacggcaaugauu

SEQ ID NO: 1146719 - RNA, 19 nt, Homo sapiens
  misc_RNA (1)...(19): siRNA sense strand
gaugauggcauagagagaa

SEQ ID NO: 1146720 - RNA, 19 nt, Homo sapiens
  misc_RNA (1)...(19): siRNA sense strand
cagauguggucgaggcaaa

SEQ ID NO: 1146721 - RNA, 19 nt, Homo sapiens
  misc_RNA (1)...(19): siRNA sense strand
agaagcaaacagccaguua

SEQ ID NO: 1146722 - RNA, 19 nt, Homo sapiens
  misc_RNA (1)...(19): siRNA sense strand
caaagucgcugggcaucag

SEQ ID NO: 1146723 - RNA, 19 nt, Homo sapiens
  misc_RNA (1)...(19): siRNA sense strand
gaaacgaagggugaagaga

SEQ ID NO: 1146724 - RNA, 19 nt, Homo sapiens
  misc_RNA (1)...(19): siRNA sense strand
caucagacccaacuacauc

SEQ ID NO: 1146725 - RNA, 19 nt, Homo sapiens
  misc_RNA (1)...(19): siRNA sense strand
ugaaagcgagcgacuggaa

SEQ ID NO: 1146726 - RNA, 19 nt, Homo sapiens
  misc_RNA (1)...(19): siRNA sense strand
gaagagacaggugcgaagu

SEQ ID NO: 1146727 - RNA, 19 nt, Homo sapiens
  misc_RNA (1)...(19): siRNA sense strand
caucaucgccuuggcucua

SEQ ID NO: 1146728 - RNA, 19 nt, Homo sapiens
  misc_RNA (1)...(19): siRNA sense strand
ccuggaagauuacuaccau

SEQ ID NO: 1146729 - RNA, 19 nt, Homo sapiens
  misc_RNA (1)...(19): siRNA sense strand
uuucgaguauggcauuaaa

SEQ ID NO: 1146730 - RNA, 19 nt, Homo sapiens
  misc_RNA (1)...(19): siRNA sense strand
uaugaugccagcaaugaaa

SEQ ID NO: 1146731 - RNA, 19 nt, Homo sapiens
  misc_RNA (1)...(19): siRNA sense strand
gaaaccuggaagauuacua

SEQ ID NO: 1146732 - RNA, 19 nt, Homo sapiens
  misc_RNA (1)...(19): siRNA sense strand
cgccuuggcucuagaagca

SEQ ID NO: 1146733 - RNA, 19 nt, Homo sapiens
  misc_RNA (1)...(19): siRNA sense strand
gcaguggggccuuuuauga

SEQ ID NO: 1146734 - RNA, 19 nt, Homo sapiens
  misc_RNA (1)...(19): siRNA sense strand
uggaagauuacuaccauuu

SEQ ID NO: 1146735 - RNA, 19 nt, Homo sapiens
  misc_RNA (1)...(19): siRNA sense strand
cagcaaacaauuccuacug

SEQ ID NO: 1146736 - RNA, 19 nt, Homo sapiens
  misc_RNA (1)...(19): siRNA sense strand
cagcagcgccaccgagaau

SEQ ID NO: 1146737 - RNA, 19 nt, Homo sapiens
  misc_RNA (1)...(19): siRNA sense strand
ugaacggcaaugauuauga

SEQ ID NO: 1146738 - RNA, 19 nt, Homo sapiens
  misc_RNA (1)...(19): siRNA sense strand
caacuacaucgacauuuac

SEQ ID NO: 1146739 - RNA, 19 nt, Homo sapiens
  misc_RNA (1)...(19): siRNA sense strand
aaacacggcacucguugug

SEQ ID NO: 1146740 - RNA, 19 nt, Homo sapiens
  misc_RNA (1)...(19): siRNA sense strand
ggaagauuacuaccauuuu

SEQ ID NO: 1146741 - RNA, 19 nt, Homo sapiens
  misc_RNA (1)...(19): siRNA sense strand
caacuugggccagauugga

SEQ ID NO: 1146742 - RNA, 19 nt, Homo sapiens
  misc_RNA (1)...(19): siRNA sense strand
gaucugcgucagcgcugua

SEQ ID NO: 1146743 - RNA, 19 nt, Homo sapiens
  misc_RNA (1)...(19): siRNA sense strand
cgcaggcccuuuacuucaa

SEQ ID NO: 1146744 - RNA, 19 nt, Homo sapiens
  misc_RNA (1)...(19): siRNA sense strand
ccaacagcaucuacaccau

SEQ ID NO: 1146745 - RNA, 19 nt, Homo sapiens
  misc_RNA (1)...(19): siRNA sense strand
cuacaucgacauuuacagu

SEQ ID NO: 1146746 - RNA, 19 nt, Homo sapiens
  misc_RNA (1)...(19): siRNA sense strand
ccagcaacaggaagugaaa

SEQ ID NO: 1146747 - RNA, 19 nt, Homo sapiens
  misc_RNA (1)...(19): siRNA sense strand
gcuuucgaguauggcauua

SEQ ID NO: 1146748 - RNA, 19 nt, Homo sapiens
  misc_RNA (1)...(19): siRNA sense strand
aauaaacacggcacucguu

SEQ ID NO: 1146749 - RNA, 19 nt, Homo sapiens
  misc_RNA (1)...(19): siRNA sense strand
caaugauuaugacccaucu

SEQ ID NO: 1146750 - RNA, 19 nt, Homo sapiens
  misc_RNA (1)...(19): siRNA sense strand
caacaugugguaccugcau

SEQ ID NO: 1146751 - RNA, 19 nt, Homo sapiens
  misc_RNA (1)...(19): siRNA sense strand
gcaaagucgcugggcauca
